United States Patent Application Publication US 2007/0061916 A1 - sequence listing, part 12

SEQ ID NO: 57340 - DNA, 480 bp, Gossypium hirsutum
  unsure (1)..(480): unsure at all n locations
  Clone ID: uC-gsronu33B145f08b1
ctttgtatgaaaatgttggtgctgaagattactttgggaggttctaatataaggccggcagcggtggtttcactccggaccgggtgcagtgtattgcaaatgtgagatgccatataacccggatgaaccttatggtgcaatgcgaaggatgcaaggattggtttcatccatcctgcatggagatgaccatcgaagaagcaaaaggattggatcactttttatgttctgattgtacttcagaggatgatgccaaaagatctatgaatacgttcccagtatcagcatcccttgagccaaaggtggaaccgaagcgtagaaagagataaccccatcatggtaatgcggaatgaggaggtaccgattttctagcacattagctcagatattgttcttgcttgtgctgtggaatngtacagtgcagagaagatactctgcttgcacaccaaggaaaaaaaaaggggaggctatctttcataattt

SEQ ID NO: 57341 - DNA, 528 bp, Gossypium hirsutum
  Clone ID: uC-gsronu33B146b08b1
ccctacaccacgaaaaagttggaaatttgggagagccaaatcctaaacccatcgccaagggttccttcggttgttgacgtaaagcaagagggtactcaaaatagcaacatattcggtcatggcaatgatgaatttcaagcatcagcagctgcttggccccaaatcatgccagtttcccctcctagaccttgtattactagcttaagttgtaacatgatagatttgtcttcctacaaagcggcagaccatgaaacatccgtttattaacctgttttagatcaatcttctcaaggaatatccatatatgactaaatccgtataagaaagtatttaattataacatctactcattaaatcataactattcattaagtgaataattttaatcctttattataattacactttttttaacccccttttttttcttacattataaatacctatctcctgttttatttcaacttctaattactatcatatttatttattataatcattttcaatttaatataactcttataatta

SEQ ID NO: 57342 - DNA, 394 bp, Gossypium hirsutum
  unsure (1)..(394): unsure at all n locations
  Clone ID: uC-gsronu33B148b06b1
tgggtggacccacgcgtgcggcctcattttcattatgaaagttggaatcgcttgttcggttgaatgacctacaaaccagatggacattttggatgcagccaaggaactgcattttatgagggacaaatttggtgggacgagtatccgaacagacagagaaagagcaaatcatctctagaatatggagttcggatgtctacgatgattgtgcagtacttgtatctaaatctaaaccttgtttaatatattttgttttaaatttccagtcgctactttatttttcttcttctagccaaaaacattaatattacttggttttttgtcagtataactatgtaactccacatttaataacggttgacttctttcttttaaaggggnccccaaataaaaa

SEQ ID NO: 57343 - DNA, 460 bp, Gossypium hirsutum
  Clone ID: uC-gsronu33B148c04b1
cccacgcgtccgtttcacgcgtccgcggacgcgtgggcggtggggagaaaatcatttgagttttggctgatacggcggccggatgggcgcttgaaggggcggagaaaatgggaatcaaacgagcggcggtgcttctctctggaccggcatctatggcactggcactgcatgttccaaagcttggtgaagctggaattttagatagtgatggaacactaaaaacagatgaaccgatcacactttcagaagatatcccatcatggagtagcggtgagctgtcatggagttgcagtgacgacccagtgatgcagaaacttatatctgcatatgtttcaaccgctgccaaaactttcaaatttgcagaacagattctttgcaactcatttcatgagctcgatccatctgccatgaaattgatccccaaagccttacccattggccctttttccacaaccaatca

SEQ ID NO: 57344 - DNA, 444 bp, Gossypium hirsutum
  Clone ID: uC-gsronu33B148c06b1
cccacgcgttcttttacagttgcttctattatagtgctagtttcagtagttcatctattcctgtttcctgtcgtcccatctcttgattacttcagtgctcggcaagtccagtacaaatgtgttccaattaattcatcacttgaacagagtactgatcatgtttgggaaaataaaccacaaggtcttaatttagatcacaggtttcctaccgacttgcataatggagttgtttatcgtaatgcaccgtggaaggcagagataggccgctggctttctggttgtgatgctattgctacagaagtcaacattgttgagacactaggtgggaggcgctgcaaatctgactgcagtggtcaagggtgtctgcaatcatgagttgggccaatgttgatgctttcacggatttagtggagaagcatgctcccagaggctaaatttgagttg

SEQ ID NO: 57345 - DNA, 403 bp, Gossypium hirsutum
  Clone ID: uC-gsronu33B148g06b1
cccacgcgttcgttaggacttggggttagttgttggagggctatcgtgctttcgtccggagtttgcacgcactcacgcgcccccttcttggcctccacgtacggtggttggaaactggaaagtttcctttttccgacacgaatcaaaatggtacgcttcccttttccttttcattatttgcaatatatacatgtacatatatttaaagcatccacctttatgtatttcgatcgactgctggtttctttagtataagaacgattttgtttttattgaatctctctggtcttgccaaaaaaacctttattacagattaaaagaaatgggtttttataaccctcaattacattctagggaaagaatctgtggagttctttccatgaagatatccttagctgttgtg

SEQ ID NO: 57346 - DNA, 452 bp, Gossypium hirsutum
  Clone ID: uC-gsronu33B149a03b1
agctgcaagatgcaaatgacatgactgacttcgtgggtccatttcttgattttgtgcccgataaacggcctagtgctgctcagtgccttgttcatccatggatcgatgctggtccccgacttttagagccatcagggtcttcatcgaaaacccaagtagcggtttctgagaaaaaaacgaaggagatggatgatatggaggcgatggaggttgcaatggggaatattgccataagtgcagattctaaacatgccaaagatcactagcctccttcgaaaccctccaacgcagccatttcttcttccaggtaggagcttgcctctttattttatatatgcgtaggctagttttgtgtctgtatctgtgcacggaacatgtaattctttagaaaatatatattcttttataaaatataacctgaaatgaaattacattcataatgcactggaaaa

SEQ ID NO: 57347 - DNA, 403 bp, Gossypium hirsutum
  unsure (1)..(403): unsure at all n locations
  Clone ID: uC-gsronu33B149a09b1
tctacgcgtccgcccacgcgtccgcaaaaatatccctaaaaatcacgaccaaatagggattcccttttctctcattttcctttcatccaaacaatgcctctccttcactcttctgcttgaaacccagaagaaaataaaattatgaataattcttggtttgacaaagggtttgatggggcgaatgatgatttctttgatgatgtaataaagtatttggatttcccattggaagatgttgaaggcactgatggtggcgatggtagagtgggagaaggngtcatanattttcatttgcctcttgatgatgacgtaaaacacaacaactccggtggcggggaatagagggattgttacttcaaaacttggaaccgccgcctgctaatgttctcgccggcatgttttc

SEQ ID NO: 57348 - DNA, 526 bp, Gossypium hirsutum
  unsure (1)..(526): unsure at all n locations
  Clone ID: uC-gsronu33B149a11b1
ctctttataaaaagtagcccaaggggaaaaattcgctaggggatattaaatgacgtgtagggtttctcaatggatcattttcataattgtatgtttcttaagtgaaacagctttcatctcaccatcacaggctactgtcaatgatctcaagcaatcgatgaaggaaaaacacctcacagattttttggatagacatgaacaaacaatcaagggttggcatgaagcacttcatttgaagatggttcaaagagaaaagaaagtaattattgagcagaagaagaaaggagggaaaggaggcggaagctatggcggtggaagtcttcttcgacctcgtgccaaaaagagtgcagcaaactttctccatccaacaacattccttagatttctatntacctggttaatccccactatgttctttntataacttggatataagcccctattatatatatatgtacccctcaaatatgttgtaagtgttggtcacttttttatttttatttttttaaaatatcatttggaattt

SEQ ID NO: 57349 - DNA, 377 bp, Gossypium hirsutum
  Clone ID: uC-gsronu33B149d09b1
ttcctaaaggaaaaaaaaactcaagaagtttaggtgtaaatctcacctttttctatttttgtttgatttctttcaatatgcgtgtgtatttctggaaaaaagaagatccaatttacatcgtttcattcggtttttatagccgaagaatcaataaaaataaaagggaaaaaataaataaaaaatccttgttgtaatctgttattatttgctgtcaattattgtttactattttctgttattctcttctcgtacgtgtggaggtcgtggtgctgctgacatggccaggccgttcgtaggcgtgtcgatgcggagcgtgaagcaacgtcgcgcgtggaagctggcctgaaggcagtagcggtgtacggggaaagggaccc

SEQ ID NO: 57350 - DNA, 486 bp, Gossypium hirsutum
  unsure (1)..(486): unsure at all n locations
  Clone ID: uC-gsronu33B149g08b1
ttttattctcccattcacttaggggtttcaaagagccacctcctccacaaaccattttcgaccatgataaaattatttggttaggagatctgaactaccggcttgctgccggttgcgccgatacgtacgaattactgaagaagaatgactggcaaactcttctagagaaggatcagctaagattggaacaaagggctggtcgggtgtttaaaggatgggaagagggcaggatatacttcgccccgacttacaaatacctaactgattccgacgactatgtcgtccaaacatcgaaatccaaagaaaaacggcgtaatcctgcctggtgcgataggatattgtggaaaggcgagggacttaagcaaatgtggtactcaaggggtgagtctaggttctcagatcacanggccggttattccctcttctcagtacaggttaatttagccaagaatcccaactacaacgctagatcctgcccaccgacat

SEQ ID NO: 57351 - DNA, 502 bp, Gossypium hirsutum
  unsure (1)..(502): unsure at all n locations
  Clone ID: uC-gsronu33B150b11b1
ccctcgcgtccgattccctctgtttcatcaacaatacaaaaagaaactcatctctcttttcttacctcctcctcctctttcccaagcaaaaccaaaagcatgaagaaatcttgggcgctaatcgatgcagcctcgtggggtatcggcgcagccttattggtcttaatattgataggttccatcagcgcaaactctgtatcggagaaagcagatgtgaaagggatgagccaactgttgaaccgaccttgtgatgaaatctatgtggtaggagaaggggagacccttcacacaatcagcgacaagtgtggcgaccctttcatccttgagcgcaaccctcacatcaatgaccctgatgatgttttccctggccttgttattaaaataatttcttcacctgctagaaaactatagactggttttggtcgnncttcttttttcttcttctttatcatgtgaaataggagataaacgcctttgtgataagttcaaggctcaatcaaac

SEQ ID NO: 57352 - DNA, 522 bp, Gossypium hirsutum
  Clone ID: uC-gsronu33B150d10b1
ttttcgcgtccgcccacgcgtccgattccgaagggggtttataaactatgccatgaagtggatataaaatgtattgatctttggactgcaatccagcaaagagacgactggaagacagtttgctttacggatggcatccatctatcctccgaggggagcaagttagtgggtgaagaaatattgaaagccctggcagaggaaccaagtttatgctggagatcattgccgactgaatttgatgaagattcagtctttgatcctgtcgatgaagaagggaagaacattaacatttcaaacctgtagttttccaccatgtgccaaatgggaataattccctcaagcccttatcaagtttggttgcctttttcgttttcctttaatgtttgacttctcctatagagaaacatatgattgcagagaggtcttcctagtatctattccatgcaatattaaactggaattgtaagtgggccacgggatggaaataaaatgaaattcctagcaaaaaaaaaaaaaaaataa

SEQ ID NO: 57353 - DNA, 502 bp, Gossypium hirsutum
  Clone ID: uC-gsronu33B150d12b1
tctatcgcgtccggggatgtaatgtcaaatgaagaggccggtcaggtagctcgccgcctactaatacggcgacggcggagggcattgatgggcgaagttgatgatagagtttcaccggcacaagcggtagctgataatctcacggcaatagccataggaagaagcagttgtgataatatttcggtcatcgttgtggatttaaaacccaagaggaaatcgccatccaatgcggtgaaaaaaagataaaattaaaaaagttggttctgcaaaccatattaatccacacattcaagtggttccataaattgagctgatttaaaataaaacaaaaaaaaatcatcaaaacggtacacatctatttcttttgtttttccaaatattatttctttttcccgatttctccttggtaaatttagtgggagatgggagatgttaggaagccttgtgtgtctttttatcaccactctttttttttttttcttgtttgcttgataataaaaca

SEQ ID NO: 57354 - DNA, 432 bp, Gossypium hirsutum
  Clone ID: uC-gsronu33B150h03b1
ccctcgtttccgatgaaaataaaacgttattgcgctaatgcttctataattgcaagatcatgaacctagattaccagggtagaaattctctgtttcacgtgaaaaaggaaaaagcttatttgtatagcatagaagtagggaaggcaaaaggtatttagtttcccatttcatattatttgtatttatcatttcttaaccctccaaagagatctatatcagtagttgatattgtagaaaaaaaaaaaaaaaaaaaaaaaaaaataggagacatttgactttaccgaacagacaaaaaactgaaaccgactgtccaacctgcacagaggatgaacggactccctattcaacttatgcaccttgtaccccgtggccctcgtctatcgctccggggggtgggccttcttgggagttagatcaaccctcaacacgacc

SEQ ID NO: 57355 - DNA, 472 bp, Gossypium hirsutum
  Clone ID: uC-gsronu33B150h07b1
ttgttattataatcacgattgtggcgtcgtcagggggtcatcataacaacggtttgaatgaaaagacggaggagctgatgcagcagcagccgagatcgaagatcttggtggaaaagcggcctgatttggagtacgagatgaagagcagcttggatttcgatgcggtggaaacggtggtgtacgagcaaaaggagatagtacaagaggtgaaaacgacggtttttgaggcggagaccaatgtagcggttgtagatgatggagatggaggtgacgtgtttgctatctccaaatcggagtggaatcctcctaggagaatggatttgtcggagattccgttggatgttctgtttccggttgaaaaaccaccggcttcttctagattcggtcaccgtaaacctgttaaagccaatcctgaaggtggccgagcatcgaaagtggcgaaacccaaacgccatgagacactggagaacac

SEQ ID NO: 57356 - DNA, 481 bp, Gossypium hirsutum
  Clone ID: uC-gsronu33B153c05b2
gttttgttcatcgaagctgtctcggattatgaagttaaggagttcgaacgagctccacggttcgtaactcagtggaggaacttcttgtcggtccacgtggcggatgtcttaaaaggggccccaccacttgtcgtccagctgacttggcttaaagacggcaatgctgttgtcggtgtcggcattaatcattgcctttgtgatggtatcggcagtgctgagtttcttaactcgtttgctgagttagcttccatgagtcaaaccaagttttctgagttcaagtttaaacctaaacctgtttgggatcgccaccttctaaaccctccgccaccattcaggccatcaagaaataaataataactcgcccagtcaccccgaggttcgaccgagtcccagacaatttcgggttcatggctcgtttctccaacaaaaacttgtcccacttcattcattttaaaaaaacaaatccttgcctagttaaaaa

SEQ ID NO: 57357 - DNA, 494 bp, Gossypium hirsutum
  Clone ID: uC-gsronu33B153d02b2
agcttattctgtttcttctctcagtgaaaaccccatcagttgattttttttttatttccatggcttctcttgttcttttattgtctgaacttgttcgtcaccatgaaccaaactttggtcttgtagcaccatctaccccttcttcttcatgtggtgcttcaatgtcttgtactgccattgatgccagcaagtacgaaccagagattgtagaagaagatccacaagagctaaaggtttctgttgacctcgtctggccatagtgttccattactatgatttgatgcatgcatgcatgcaagccagatttctatggtttctgagctcatttttggcgtgtcatcattttattacatgtacaaaactaggaagaataatgtctttatgtaacacaactgaacccaacttgggtttcaattaatgtatttaatctttttcattctctttgtagaatgattggtaatcgtttcttgaatttgaattgtccattcttatgc

SEQ ID NO: 57358 - DNA, 355 bp, Gossypium hirsutum
  Clone ID: uC-gsronu33B153e08b2
cccacgcgtccgaccgggacccgcaaattgtagcttcttaaacattttgaaactcgactataacagcttgacgggttcgattcctccagtactcagtttgctgaataggataaaaacatttagcgtgtctaataatctcttgtcggggcaaattccatattttaatgttacattaacggcagaggattttgcgcataatcctggattgtgtgggaagcctttggatccttgtcagttgacttcaaaaggccctaaaactggaattattgctggggctgctgtcgctgggttgacggttgctgcaataggtgtggctattggtatgttcttctattaccgtagagtatttgttatg

SEQ ID NO: 57359 - DNA, 488 bp, Gossypium hirsutum
  Clone ID: uC-gsronu33B154e08b2
cgtttacagttaaatccttttttcccttatattttcggaaaagatgcggaggttcattccggcgacggcagtattgtcggaaaaaactaaacactctcttccattgcggcgatggcgatggcggtgcttctctcaggtggctcaaaaggagtttgataacaaaggtggcgttgtggttcccaaaatgccttcctttgattatgctccgccgccttacaccggtccctccgccgctgagatcctctcaaaaaggaaggagtatcttagccccgccatgttctacttgtacaataaacccctgaatgtagtggatggaaagatgcagtatttgttcgatgaaaaggggagaagatacttggatgcatttggagggatagctacggtgtgttgtggccattgccatcctcatgtggtggacgccattgttaaccaaaccaagcgcttgcaacactcaactatcctttaccttatccatgccattgctgatc

SEQ ID NO: 57360 - DNA, 398 bp, Gossypium hirsutum
  Clone ID: uC-gsronu33B154g02b2
cttgtttgttactcacttgtcggctccacttgcatctctctttgtttatcaatctctccctctctccctctgtctctcacttactttatgcagggaattcaggtggtttagtgagacaagaggcatagaattgggctttgaagatgtgaagcatttgatttctttttgctcgatgccatcgatattccttatactagttgagtttctttaggagctgctggactaaccttgataacttatattgttgggagaagattcaacttttctttttttcctttctttttcccacttatgggaaccctatattcttgatttttaagtcttggcccgcagcttatacgtttggggttatatttttttggttttttcatattcatttgtggattggggaaagatat

SEQ ID NO: 57361 - DNA, 552 bp, Gossypium hirsutum
  Clone ID: uC-gsronu33B155b05b2
ccttattcaaccaggtcaccatgagtggggctccgaccataacataatcgacaaatccaagatgtactcctacaagtaaagggagttcgaatagatattggttgtgttcgaaaggctctgaatcgatcgacaagcccaagcccaatatcttgatttcgaatggcaatgcaccgcggacccatatatatatcgtccgctaatacacgaccaattaatgtttggataaaaattctttccggaagcgtcctcttttgaggactcacagaaatccctcgggtggtgccacaatctgttctacgtacaacactgtgttgaactacttcaacaagtctgcgcgtaagatatccagcatctgatgttcgtacggcggtatccacaaccccttttcgggctccgtagcaagaaatgatatattctgttaaagacagagcttcgcgtaaattgctttgaatgggtaaatcgatcatttgttcttggggatccgacattaatcctctcatacctactaattggtgcacttgagatgcattttctctagcttctgaaaaagac

SEQ ID NO: 57362 - DNA, 483 bp, Gossypium hirsutum
  Clone ID: uC-gsronu33B155f05b2
cccactcgtccgcccacgcgtccgcccacgcgtccgattgccctggttttgcccaaagaaacaaactttgagtgggtttgagcttcatggcttacttccacagaaacccttgttccagtctatgaatctttgggaatggataaatggtactcgtgcatcaccagcagaggggtaagaacccagaaaaaaaccatgctgcttatctccataatccattgtacagaaagcctttttgtccgctgatagcttattagttttgttaggtactacatgacagaacgaacgttatagttttaaacttagattgatgaaaaaaaagtcatcactagttttgttggtactgtttgatttcaaatcctgtacataaagcaatatttcttttgtttttgtggcaaaaaaaaaaaaaaaaaataataaaaatataattataaaaaatataaaataattataatttaaaataaaatatttattttttatttttta

SEQ ID NO: 57363 - DNA, 551 bp, Gossypium hirsutum
  Clone ID: uC-gsronu33B155f07b2
tctatcgcgtccgcccacgcgtccgccattacagctccattaattcgtaaccaccagctagacacgttttattatattggtttaaccgggatcagtgtgggtggcgagttgctcccgattcctgagtcagcattccaaatggacgaatcaggtaatggtgggattatcgtcgactcgggaaccgccgtgacacggttgcagagcgacacctataatgttctccgtgatgcgttcgctaaagggacaaagaacttaccgtcagctgatagcgtggcgttgtttgacacgtgttacaatttgtctacgaagagtagcgtggatgtgccaacgttgtcattgcacttcccagagggtaaagttttaccgttaccggctaagaattacatgataccggttgattccgttgggaccttctggttcgcgtttgcgccaacgtcctcgtctttgtcaatcattgggaacgtgcaacaacaggggacgcgtgtcggtttcgatctgggcaacttcgcgtaggattcgtgcccaacaatgttaaagtaattaggttatag

SEQ ID NO: 57364 - DNA, 365 bp, Gossypium hirsutum
  Clone ID: uC-gsronu33B155h08b2
tgtacgcgtgggcggacgcgtgggtgctatcttgcgtgtactgttcacagaggaagtaacttggagatggatttttaacccaaaaaaaggaccaggttgaaccttttgtgcaactaaaacagtgaatctactagtgaaggtaaggttgctatggcaacttgaaaggagttgtttcaaagtggatctgattaccttgacttgctaaactcaaaaagaaggggctcagtctttgattagcaagctgtattaatgtcagatgtgagatcaattacgtattttccttttgttgaacctgttggtatttaatagggtatggtacccccctttttgcttatattttaactcgccttggatgttattatacc

SEQ ID NO: 57365 - DNA, 309 bp, Gossypium hirsutum
  Clone ID: uC-gsronu33B156a05b1
cctttgtgatcgaaacatgaagcaggtggattatatcagatttcatggctggaagaaagaggaactttgagggctaacatttggaatcaagcaaatgaggtgtttgaagagggaaaaaggaggctgtcgaatttttattacaaccatgcttttgagatcttttgaatctgaattatctttctctaatatttcgatgcattggtgttggtacttgttgtttcatacttttgcgtgttccattgtttgaaactttcattttcccaatgcaattcattcaagtgtggtttttaaaaaaaaaatatcctcctt

SEQ ID NO: 57366 - DNA, 522 bp, Gossypium hirsutum
  Clone ID: uC-gsronu33B156e01b1
cccatgcttccgatttgatgggcaggccaaataccctctgaaccttggtactacaaactcgggagctttaatttctgcaaaaggtgtacaatacttggagaggaaagtgtgtgtgatgaagccttcagtcagacttgatgatccacaagtggaaccaagtgtgagcttcgcatgtggtcttgccgactgcacttgccttggttacgggacatcttgcggaaatctcgatgcttgggggaacatatcttatgcctttaacagttactttcagaagaataaccagcgcgaagatgcctgcaaatttccaaatgtttcgatgatcacaaaagcagatccctccccaagagatggaaattgcaaatttaatataatgatccagccctattatggatctgcaggatggtacgcgcggaagccattgggattgacctttgttcttctcattttctcgttggttctgtgaattctaatgattctacttgagggtattcttgtgagagactgaaaagtgtatgaattaga

SEQ ID NO: 57367 - DNA, 305 bp, Gossypium hirsutum
  Clone ID: uC-gsronu33B157a07b1
caattttgccatggactggttttcttggctctcaaaaactggcctggacccatcccttgtctacgagtacgcccttgctttctcccacaacgagcttgaagaagaagatatagtttatttcaaccatgagtttcttcaaagcatgggcatctcaatagctaaacacaggcttgaaattctcaagcttgctaggaaagagagagggctgaccccaagaccagttttcaggcttctattggcattccagagaaccaaatggagcttaggcaagtacattaggacatgggttcgtcgttaagaacact

SEQ ID NO: 57368 - DNA, 525 bp, Gossypium hirsutum
  Clone ID: uC-gsronu33B157d03b1
cccacgcgtccggaaaagatagtggagtaaagtgcaaaattacgatattttgcaccgaggtaagtaaacacgtgacttaatgtattattttgatattatttgatatatgttgagatttatttggaattaaaataaatgtttggcaatatcctaaaaatgttgttaaatcgggaaaggtgataaagggttgcaatatatgggttatgggttgaacactcggaataagccgaagtatgttgtatataaaagggtttgctgtgtgttttatttccctaattaatgactgttactattttctacttatttttctttattttattttagaattatccatttatcttttatttgaatatattttatttgtcctttttttattttctctttctattgttttcttttttgaatgatttgatatatattactttttttttttcatttctttaattttaaatcttttttttattctactaaaatttatcatattcttattattattttttatattttttaatacatcttccttat

SEQ ID NO: 57369 - DNA, 279 bp, Gossypium hirsutum
  Clone ID: uC-gsronu33B157e11b1
cccatgcgtccgcggacgcgtggggaacattttcatccgtaaaatattttgtgataaaaaaattaaaagcattaataactggattaagtaacgacaaataaattattaaaaaagtggtggcgtacaacacatagttagaaggggtatcaaataaaaaaaaacggccagaaacgtggggcctaaaattttggaaaccgatagagaaactttaataaagtggatcatccattaccattttttatagactaatttaagataggtgaaaaataaataaattaa

SEQ ID NO: 57370 - DNA, 567 bp, Gossypium hirsutum
  unsure (1)..(567): unsure at all n locations
  Clone ID: uC-gsronu33B157f02b1
gactgttttaactcatcaaggttcaaaagttgtcactgatgtcctacaacaacgacttggtgtcaacagggcggttatagaatatatgagcacctagaagtctttgagtgctctcggataatgtttatcagggaagtggcatgtttctctattcgcaatgatcctttatgagatgcttgaaggagaaccaccattctcgaattatgaaccttatgaagcagctaggtatgcagcagcaggacacacgaccttcttttcgttcaaaatgatacctctctgaactcagagacttaacagacaattgatgggctgtcgatatgaatcaaagaccttcttttttgtatattcttaagaggcttgaaaagatgtatgaaaaaaaatgtctgctcagatcattgtgtgaggatatacaatacatcgtattcaagatttgatgtagctgatgataaaccttgcgtttccaccaatcacctccaagctcccccatttgtgccgatggatggtactgtaaatagactcagtaagttgcttgttatagattntaccataactggttttcctcaaaaa

SEQ ID NO: 57371 - DNA, 666 bp, Gossypium hirsutum
  unsure (1)..(666): unsure at all n locations
  Clone ID: uC-gsronu33B157f11b1
ggattttctaatgcggcctaaatacagtggaaagtatctgaggaagacgatttgcatggtccttggggatcgaagacttcatgagactttaacctccgttgttataccgaccttcgacatcaagttgcttcaacctaccgttttcacaacctttgaggcaaagatggatccttcaaaagatgctttgctatctgatatttgtattgctacagcttcagctccaacttattttccagcttatgcatttcatacaaaatattctgaaggaactgatagggaatttcacctggttgatggagggatagctgcaaataacccagcactgctagcattgaagccaacaggggtagcctttccaagtgagcaagaacatgaagtttcgcagggacaagcccttaactacgagaatcatttgataatctcactaggcacaggaacctccaagatgggaaagaaatacgatgcgaaaacggcagagaagtggggaattcttggatggctttacagtgaaggaagctctccattagtggatgctttcacttatgctggagcagacatggttgaccttcacatgtcattgattttcaagggcattaaatccgagcatanactatctcggattcaggatgacaaattaagcgaggatgattcatcaactgataaagc

SEQ ID NO: 57372 - DNA, 536 bp, Gossypium hirsutum
  unsure (1)..(536): unsure at all n locations
  Clone ID: uC-gsronu33B158a02b2
ctttttctgggactgggacccaaggtactacttactaggtgttggcctcagagcagggttacggggaggtcgaagagctttgtgttcgtattacacaattggaagcccctcagcaagaaagaggacagtaagaaagtcaagagcagacttagccggaccgatataaaaggattctcctcccttaacatatgttggagggactgccgatccaatttcaagagacccggcctcactttcattaccatgcctttgcccaagtgacttcgtatctcacctgacccggtctcacatcctttagtcgctcagaacacgaaggacggtcaagcatgctctcgtgaaatcccaactttcatccgagacttcaaggataggaataaagcagctatcaagatcaaagcctttttcgcacagcacaggagggaagtacgaccagagcccagggaaagacttaagccaagactgattccttcaagaaaagctgttaaagcattaaacttttnctccttgttcatatgatagacacgtgcctcgagggg

SEQ ID NO: 57373 - DNA, 299 bp, Gossypium hirsutum
  Clone ID: uC-gsronu33B158g08b2
tgatagtaagaacaggaggaaggtttaaaacccaagttaaaggcattacattgggataaagtacgagctagctctggtcgtgaaatggtgtgggatcaccttagatcaagctcattcaagttgaatgaagagatgatcgaaacactattcgtcgtaaatccgaactcgaaaccaaatcaaacgacaccgcggaccgttcttacatcaccaaaccaagagaatagagtattggatcctaaaaaggcacagaccattgtatcttttttgaaagcactcaatgtgacagtggtggaattttt

SEQ ID NO: 57374 - DNA, 514 bp, Gossypium hirsutum
  Clone ID: uC-gsronu33B158h12b2
ttcttgcgtccgcccacgcgtccgggagaagtactgggacatccagagcttggaatacttgggtctaaacgccattggtttgaagggtcaaagtcctgcatttttagctcgtctaaagaatctgaaactcttgtatcttggatattacaactcctacgacggaggaattcctcacgagtttggatcattgagtcaactccaactcctcgacatggcagcctgcaacctcaccggcgagattcctgtgagcttgagcaatttgaaacacttgcacacgttgttccttcagcagaacaatctgacgggccgtattcctcctcaactctccggtttgatcagcttgaaatcgcttgatctttccataaacgagctgacaggggagatacccttgagtttctctgccttgcaaaacattacactcatcaacttgtttaaaaaataatctctacggtccaatcccatcattctgtggtgatttttcccaccttgaagtgcttcaacctggggggaacca

SEQ ID NO: 57375 - DNA, 547 bp, Gossypium hirsutum
  unsure (1)..(547): unsure at all n locations
  Clone ID: uC-gsronu33B159f02b1
ccttcttttccgcccacgcgtccgaagaataaaaatgaaattaaagaaaaaaagatgcaacccatagaaatgaaatccagatcataatgagagactcctttcttttgttttccattcataaagacagaagctaagacgaaaaaaagaatcgacccttcgagtattccaccaaattgcctgagaaaactgagagtaagagggacatatatatgttatgaaatacccatctatattgaattgcgaatacagaaatgataaaatatttttggaccaaataaaaattaatatgggtctccgatagagacgaaagacggataaacaaacaagaaaataggtaaagacccttcgatttaagaatctgtatctatatctactaaattcaacggtttcgcataaaaagaaagcatataaataaacgaaagaaaataaacaaatgaaagaagggggaaaggagggagaaagggggaaggaggggcatcctatgagatcctaatctcagacacataagggatatgcgaaatgtagacgctcngacttattgattgag

SEQ ID NO: 57376 - DNA, 421 bp, Gossypium hirsutum
  unsure (1)..(421): unsure at all n locations
  Clone ID: uC-gsronu33B160f10b1
ctttgttaactcttctatgtctactacaacacgaaattttcaatttcagtttggagattgggaagccaaggcttcacaacaaaatggaggatgattttctttcaacttacttggtggcatacattgaaaaagagagagctgaagaattttcaattctttttttgcnnaaaaaaaaaaaaaaaaaaaaaaaaaaaaaaaaaaaaaaaaaaaaaataaaaaaaaggggagggtgtttagaagaatcaaaagcttactttcccttccctagggaagaaaaaacaatgcttttgggtaacgtaaattaaattcaatggccgtggcttaccaacccaatgactggaaaaacattggcgtttacctaaataaatttcttggcagcgcatcccattttctttaggtgccttattatcaaaaaggcccc

SEQ ID NO: 57377 - DNA, 401 bp, Gossypium hirsutum
  Clone ID: uC-gsronu33B162a03b2
cctactcgtccgccaaaacttagctgttagagttggagaatcaagccaaaaaccaaagtatttggcaattaaattgctgtaccagggaggccaaacagagattgtagccattgatgtagctcaggttggttcttcaaattggaatttcatgaaaagaaaccatggggcagtgtgggatacaagtagggctccaaatggtgcattgcagtttagatttgtggtaacatctggatatgatgggaagtggatttgttctaaaattttctttcctgttttcatgtaaaaatattagtcttttcaatttttcatttcttctttaatttcttcttttcattttttttttactttttttattcattattttccttctctcatttttatattttgtttttttttctttt

SEQ ID NO: 57378 - DNA, 349 bp, Gossypium hirsutum
  Clone ID: uC-gsronu33B162a09b2
tctacttcttcttgttcccttgattttacctcactgtctagccaaccaaataccacaggaatgggtgtggaattcgaaaacagtaattgtacgaacctcgtgttcacatatggcaccttgaaacggggctttgccaatcacgtgctccttcaagatttgatgcgaacgggagacgccgaatttaaaggcacttaccggtccatggggaggtaccccgctggttgggggccaataccccgggtccttttcttcttaaaaatggttggtttgggactccgagtaacggaagagctgtacgccgtgtcagctcgggggctggaccggttggacaaattggaaggcacgagtc

SEQ ID NO: 57379 - DNA, 367 bp, Gossypium hirsutum
  unsure (1)..(367): unsure at all n locations
  Clone ID: uC-gsronu33B162d08b2
tattaaatgtaggattttggatcctgggtttgatttacttcatagttttcatgtgattttaagcagagtactaataaaaaaaggggggggggcataatgaatgattttagcacgaaatatcaattgccttttttttatcttccattgtatgatgacattttttcccactgtaatcatgtttcttgtcttgattgaagttaaaataggttgcatatcatgaaatattcatgaaaatattttcacctttattatgtacgaagcactggtactggtaggtagaccctgaaattagcgtattacataatgaattaattgtcgtttccttttactacttcatannnnaaaaaaaannnaanaaaaaanannn

SEQ ID NO: 57380 - DNA, 469 bp, Gossypium hirsutum
  Clone ID: uC-gsronu33B162d11b2
cccacgcgtccgcccacgcgtccgcccacgcgtccgcccacgcgtccgaaaaaattaaactcgaattgacatgatctaaaatcaaatttatgcatccaatcgacaagtctagtttaaagacatttgtagagagatcgatgattaggagtgttcaaatagttaaccgaaccgaactaatattaacaaaattaaccaactttttaatcctttaatcattaaccgaacccaaatttttttccaaaaaattagctaaactaaaatttatatgtttttgttttttgattaaaacaagtataaaacatatataaaaatgaattaattacccggtttcgaactgaattaaccgataattaaacttttaaaaatcattagttgacctccgaccgaattaaatcagttaaccacccgattaatcaaattggatcgattcaatcggttaatttagttttaaccgaaatttgaacacttc

SEQ ID NO: 57381 - DNA, 356 bp, Gossypium hirsutum
  Clone ID: uC-gsronu33B162h03b2
aaatcatctaagaagtcgcgcgtcaaatttgtttgctggtctcattgagctcctccattgttatatcttacgcccaaactcaagtcttgtccaacattataattaatgtctcgagaattttcctatatacaatcaccaattgcgatgcctttcaatgaaatactgtatctcatgaaaaaaaaaaaaaaaaaaaaaaaaaaaaaaaaaaaaaaaaaaaaaaaaaaaaaaaaaaaaaaaaaaaaaaaaaaaaaaaaaaaaaggggcggcccatttaaaggggccgggtttattaaggggcccatgttacataaaagcttttttatagtgtcccctaatttaaattcactgcccccgtt

SEQ ID NO: 57382 - DNA, 517 bp, Gossypium hirsutum
  unsure (1)..(517): unsure at all n locations
  Clone ID: uC-gsronu33B163f06b2
cccacttcgtccggcagactaaattccgtcttaacaattatggattgcctgaacccaatatcgtcaaagtactgtttcaacatctaaaacattcttgaaaagaccgaccgatttcgagaagacggtggagaaagtgaaggaaatgggctttaatcctccaagcatgtcattcgtattagccgtcactgtcttgaatttcatgcctaaatcttcgtgggatagaaaactagatgtgtataaaaagtggggttggtctgaaaaagaggtaatagaagcttttcgaaagaatccttcgtatatgatagtgtctgaggagaaaacagtgaggagaatggattttcttgtgaagggaatgggattccacctctgttattgccaggcgcccccgtgttttaacacanagcttagagaagaggattgttccgaggggtttgtttggtagagatttgttgtcaaagggtttggttaagaaggaatgagcgtgcaggcactgttcgaggcttcagaaaagtcgttc

SEQ ID NO: 57383 - DNA, 494 bp, Gossypium hirsutum
  Clone ID: uC-gsronu33B163g06b2
gcttaacgaactttagatactaatatctcgatctatgctcaacttttttatctaaaatcagtttcgttcatctaattattcatatacgcctaattcacaaccttcaaactagacaaatctactcaattaatcgtattgacatttttcgatattttttaggcgattttcacaaaattcatttaaacatgaaaaatccataacgaaacttaaagataagtttaaaaaccttctaatcacgctaaaacaagttgaaaaacactttggaaccaagttttgactcaaaatcccaaaatccaccattaatggcttgattttcgatttttatttaaaacgtgcaatttgagggctaataatttagatttagagtctaaataacattaaaaaaatagatacatgaataattaccttttttgaaagaatggatgagttttgacgtaaattcgagaaacccatgtttggagatgatgaaatctatagaggtttgggtcctttta

SEQ ID NO: 57384 - DNA, 167 bp, Gossypium hirsutum
  Clone ID: uC-gsronu33B164b12b2
tacatgtcaagtcaatattccgatggtggcgatccaaatgggtggtggtttgctgataatggcggtggcgacagcgcttccacaaccattgtttggatcgtggtggggatattaatagctgttttagttcttgtggtggcttattatgtggcaaagaaaggcatatg

SEQ ID NO: 57385 - DNA, 456 bp, Gossypium hirsutum
  Clone ID: uC-gsronu33B164c11b2
ttctctcgtccgcccacgcgtccgcccacgcgtccggttttcaccatggattccatccaaggccttccttcaggtggtgccgcaactgtagctacctccgttatgccagcttctctccatgattttcttgaagtcgtctttcaggacaacgaaaacaccctgcaatcctggcatcttgatggttatgatttttgggttgttggtttcggctccggacggtggaatccacataaacgaaaaacttacaatctagtcgatgctcttacgagacacactacccaggtttatccaaattcttggacagccgtattgatctccatggacaaccaaggtatgtggaacctgaggtctgcagcatggggaagacaatatcttgggcaacaattttacttgagagtctttgatcctgttcgaagtctcaccaacgaatacgggattccctctaatgtcttactt

SEQ ID NO: 57386 - DNA, 519 bp, Gossypium hirsutum
  Clone ID: uC-gsronu33B166a07b2
gtttattctacgtttgatacgccttgcaatggaagccgttatccactaagaaagagaaagtggttaatgagcatgatttatactaggaaggaattttcctttttatggtttatccttggtgacgaagtccttgaggagaaaagaaatggaatggtcagtttctgctgcaatgcataacaattatattgagaagctgaccagtgcctgctttgtaacacacattttacacgtaaaccaccatagtacctgtcatggtatgcacatatgattaatcaagatgagttgtaacaatatatgaaaaagattggtgccaaattctatggtagaggtccaaatgagtttactggaataaaatctctttttcttttttccctctagagtcagatatttatgtaccgtaaacatgttttgctaatggttctaaaattcagaatgtggcaggtgctgatgtttgagggagacatcattctattatcttcaagttggccactttgatgcttgatagttgattaatatggg

SEQ ID NO: 57387 - DNA, 490 bp, Gossypium hirsutum
  Clone ID: uC-gsronu33B166g05b2
ctcagcttcaattggttatcaaccgatctgccttacctcacaataggaccgatggtttcttatgattagcttgtcctttcattaccatcaatattatctgcaataagcttctgtagcaaacattgtatgaaatactacccctttcttctgaattctgaataatcacgacagaaagccaatatatcaggttagcctgttactgtaccttcaacttgatgttttctgtactcatcaatttgcagtgaagacttgatataggattctgtcagttccctgtactgctgttaatttcccttcctcccatcccttttttagtcgcttcagtttttctattacaatgtttatcttttgatattgggagtaaaaggatgctgtttttgcctcatatcaaaaaaaaaatttttcttatttcattatttactactaattaacttttctatataatttcttttctcttatatccattactctttatttctaactggggggg

SEQ ID NO: 57388 - DNA, 354 bp, Gossypium hirsutum
  Clone ID: uC-gsronu33B167a09b1
tcccatgcgtccgcccacgcgtccggtttaatcgaaggagctggccacttcgaaatggaaggccctgcttttgatgctgagatggtgaaatgtatccttgaatttattgcctctttgtaggacaagcaaccagttcttgtactagttgcttgatgaattttgcattgctttttcattaaaaaaaaaaaaaaaaaaaaaaaaaaaaaaaaaaaaaaaaaaaaaaaaaaaaaaaaaaaaaaaaaataaaaaaaaaaaaaaaaaaaaaaaaaaaaaaataaaactaattttaaattaaattctcacatttactttttttatatcatcattaattctctatcctttcttaactactat

SEQ ID NO: 57389 - DNA, 471 bp, Gossypium hirsutum
  Clone ID: uC-gsronu33B167c08b1
ctctggcaggttgaagttccacaaaatcgaggaaacaaaagaatgcaacgatggcatttcgtgtcaacatctgtaatgatagtccggttatggtcttcttggcttgttcgtgaaaccactgaaaaaatcgactttgctcccgagggtgttaccaagcttcatcttgatgctcctgatgataaattaatggagttcatcccaaaatttgatgtgattgttatttcttccggccactggtttgccaaacaatctgtctatgtcttgaacaacgagattgtgggaggacaattatggtggccaaatggatctcctcccatgaaagtcaacaatgtcgacgcatttggaatatctgtagggacaattttcttcgcaatttttacacaccctaattacaccggtctgactatcgtacgttccttttctcctgatcattacgagggcggtgcttggaatacgggtggatcatgtact

SEQ ID NO: 57390 - DNA, 533 bp, Gossypium hirsutum
  unsure (1)..(533): unsure at all n locations
  Clone ID: uC-gsronu33B167c12b1
tctgtctcaattggcttcaatctcattgagcatgttctttgccacatagtgaggaaagagaggcctggtgctgttttggttttcatgactggttgggatgacataaattctctaaaaggtcagcttcaggctcatcctctcctaggtgaccctagcaaggtgttgttgcttgcatgccatggttccatgcctagctctgagcagaggttaatatttgaaaagccagaagatggagtgaggaaaatagttctagctactaatatggctgagactagcatcaccatcaatgatgtggtttttgtggttgattgtggaaaggcaaaagaaacatcctatgatgcattaaataatactccttgtttgcttccatcttggatatcaaaggctgctgcccggcaaagaaggggaagagctggtcgtgttcaaacctgcgagtgttaccatctttantcccaaatgttttacgatacttttgctgattatcaacttccagagcttttaaggacaccattgcagtctttatgtttgcaaat

SEQ ID NO: 57391 - DNA, 516 bp, Gossypium hirsutum
  Clone ID: uC-gsronu33B167g08b1
tttccattcgtccggttatttttgcctaagttgtttacattgattatgtatgcaaagaagaggctcgatttttgataaattgtagaacaaaatttaatgtttgaaagaacaaacatgcttgagggcaagcatgagctaagtagggggagttgataaacacattaatttacataattcttgtatctaatttggtttatttctgaattaatccctgcttaattggtgtttttatgatttaatcttgtcagggatgcaattggtcaaaaacgagcaaaaaggggccaaattgaaagacaaatcattgagttggggccaaatcataaagatgggaaggccaaagatttaacatcaattttgactttataaaaagttaaaaatagaatatattattctattttgttttattattttattaattttattttaatttattaatttaggattaaagctattttagtaactctatctatataataggggctttagttcttaaaaatcatctcttgtctttgattc

SEQ ID NO: 57392 - DNA, 515 bp, Gossypium hirsutum
  Clone ID: uC-gsronu33B167h04b1
atttttcactatgtcatctatctgaccaggtcttgggcctcactcctcactcagatgctactctcataaccattttgcttcagctcaatgatgtccatggtcttcaagtaaggaaagatgggaattgggttcccgttaaaccactcccaaatgccttcattctcaacgttggagacatcttagagattttaacgaacgggacgtaccgtagcattgaacatcgtgcgacagtgaacccaaaaaaaggaaaggctctcgtttgcgacattcatcggagtgggggctgggggagaaatagggcctgcacccagcttggtgtcaaaacaaaagtctgccatgtttaggagggtgaaagttgaagaatactacaaagggatgttctctcgtaagcttcaggggaaatcttatcttgattacatgaaaatagaacaggattaaggacgatgtgttgtggtagttatatataataagggaagtgcccccaacatgttataaagatttgcatgtgtgcatgt

SEQ ID NO: 57393 - DNA, 418 bp, Gossypium hirsutum
  Clone ID: uC-gsronu33B167h06b1
ccctttcgtttgcgatggcatccactcccagtccagacattcttgtgtaagctctgaacttctttatatctaaagaggttcgagatcaagatatcgcttatggacttcctggaataagcttacaagggcatgaaatagcatggtggcggatgaaggagaactggaactctatcataaacaagcatattggagggctcctcacacattctattcctgacattatatcaccgttttgcatcaatgagaaagctgatgaggttgaagaatttttccaaagccgtgtgactacttcatttgcactgaattcgaaccaaagctttgagcatgttcggatcaaagcaaggctgttggaagcttatagcagagcggcaacccttttaagacctactctagcaattagtttgtatggtatgctaac

SEQ ID NO: 57394 - DNA, 506 bp, Gossypium hirsutum
  Clone ID: uC-gsronu33B168a05b1
cccattcttccggtggattcttataagtggagcactggggggtatctgcatttttggtccctttatttcttttcaagcatatggctactacaatatgtgtctaggacgttcttccgatgaaatgaggccttggtgtaaagcacgaataccattgctatacaattacattcaaagtcattattggggagtgggattcttgagatacttcagatttaaacaactgccaaactttctattggcatctccaatactgtctttggcagtttgttcaatcatctattatgcgaagtcaagacctgaaatagttcgatcattgggttttcaagcttcagttgaggagaaacgtatcatggcagtaattttttcttctcagaaaccacaaagatcaaacgacacccaattgtcagagaaatattcttctaggaagcaacgaaatcataatcttaaatcgaggaagaaaataagccaaggagaggatcttgccgagggcacatacgatcatggat

SEQ ID NO: 57395 - DNA, 509 bp, Gossypium hirsutum
  Clone ID: uC-gsronu33B168d05b1
gagtttttatgtacaaatgtgatggctgcaatgactacggtaaggttatggaagcgccttaccatacgatgggctcctaacattcttacaattgccttgaaaagatttcagagcggccgatttggaaaactcaacaaaagagtcagctttcctgagacgttagatcttagcccgtacatgagtgagagtgaagatggggatgattccaatatttacaaactttatgcggttgttgtccatgtggatatgttgaatgcatccttttttggtcattacatctgctataccaaagatttctctggaaactggtacagaattgatgactgtaaggttgcgagggctgaattggaagaggtactttctcagggagcatatatgcttttatatagcagggtctctgcacgcccatcgtgtcttagaacctctggaatcaactctgaagcagatcattgcttaaaggaacagattgaatgtgtacctggaaaagagttcattagctctcccagtcg

SEQ ID NO: 57396 - DNA, 437 bp, Gossypium hirsutum
  Clone ID: uC-gsronu33B168g07b1
tttcccatctgcatcaatggttaagtattcccaggagcccatttacccagccaagtcggccaaggctaggggaaacaacttgcgtgttcacttcaagaacacccatgagactgcctccgccatcaggggcatgaagctcaagagggccaaggtgttcctcgagcacgtccttgcgcacactgaggctgttcccttccgtcgcttcaatggcggagttggtcgcactgctcaggccaaggcctacaacacttgcacccaagcccgctggcccaagaagtccgtggagttcctccagagactcatccagaacgctgaggccaacgctgagagcaagaacttggatgtcaacacgttgtacatttcccaccttcaagtcaacagagcccccaagcaaaagaggaggacataccgtgcccaccgtcgcattaacccttaca

SEQ ID NO: 57397 - DNA, 557 bp, Gossypium hirsutum
  Clone ID: uC-gsronu33B168h06b1
gaacattattcaaggccaaccaggatggaaacctctcaccgtattactgctactacgaggaagcctctgatcaagctagtctagtctagtttagtgtagctttaagcagttcaaatcttcaagtgaatcacactaaatttaaactttcaatttcgtcaagctggtgggtttcatggggtagtgggaatggtgcagtaacaagagaggtgcccgctttgacaagtgtaccaagtagttaggcctaccttagagcagccttgtgtaggacaattgtacaaatagtgtgtgaaaattttgaaaatgatccaaaaggagcgaagcatgagtaagagtggctttcattttgaatcattcctcttccccttgttttaatatgcttggcagccgtgatttcaaggacagctctgctggttgagtgaaaggataggttagctgtaagcaaatagaagatagcagtgtggtcaaaccgcagttgccgcccttcataagtgaattgggccctttggtattctccttcatggctgtggttgtcacaagaaaatgataggatgcctttt

SEQ ID NO: 57398 - DNA, 519 bp, Gossypium hirsutum
  Clone ID: uC-gsronu33B169b03b1
aaataattcaatgttatatgaacgaaagtggagcatctgaagaagaagctcgtgaccacataaggaaactaattgatgcagcatggaagaagatgaataaagatcaaatggctaaatctcctttctcttatacgtttattgaggttgctatgaaccttgcaagaatatctttattgatgtaccaaaatggtgatggtcatgctattgaagataaagaaaccaaggatagagtgttatcattattcggtaacccaatttctttacccaaataattaagaacattggaattattttccaaactgggcgaataaaatgttagtttttggtttagtgtgccaaatcattttatgatattttaatatggtgtacaataaacttatggtagagtaaggactaccctaatacatgttttcttttggttcggaagaacttgccctttggtctgagcaaaatgtgcgatcacagacatggatgagtgttaaggaagtcaggatgtttgccatcattggtggatcaatc

SEQ ID NO: 57399 - DNA, 384 bp, Gossypium hirsutum
  Clone ID: uC-gsronu33B169c04b1
ctttcttgtccgcccacgcgtccgaactgtgtctacttccaatactgttaatagcagtatggaaacccttccatttgtcttcagcttagctgctgcaatatttgcttatgcactttggttccatatcatagccaggaggttaaccggtccgagagtgtggcctctagtcggtagcctaccgtctcttttcgagaaccggaggcggatccatgattggatggctagtaaccttcgagcaactggtggcttagccacgtatcaaacatgtactattgctcttcctttcttggcttggaagcaagggctctatactgtcacttgtcaccctaaaaacattgagcatatcctcaagaataggttcgataacttacccaaagggcccaa

SEQ ID NO: 57400 - DNA, 554 bp, Gossypium hirsutum
  Clone ID: uC-gsronu33B169c11b1
gtaaccggtttctttaggtccgatcccggcgttgcatagtttgatgatgagtgttgtttcggctatcatattcgccggaatcctcctttccaccgccgcagaaataaaagaaaccagatggttttggcggagaacaaaaaccccatttcaatggcttctttgtttcccactcggaacccgtccctctggccgtgtatttttctggtcatatatcttttacctttctcggttcctccatatgttccgtacaatcttctccatttttaaaaccaggaaactcaccttcttccaccttttcaacaactccattttaaccattatgtctttcatttggcttgaattctcacaatcgtttcaagtattggctattttattcaccaccctcgtttactccgccgtgtacggctaccggttctggacggcgatcgggctgagaagtgcttgtttcccttttgtccttaattgtcaaattgtgttattaagctgcaatttggtgtgtcatattggagttttaacgttacattttatgaaaggtgggtgtaatggaattggag

SEQ ID NO: 57401 - DNA, 551 bp, Gossypium hirsutum
  unsure (1)..(551): unsure at all n locations
  Clone ID: uC-gsronu33B169d10b1
aatatatattactactctttttctacaaattcacttccacattttctgaaacttaaaaaagaaagatgggattacaaagccagctgaacgacgtgtcctcagattcgatcccgcttcttctcgtagcaataatcgctaactgcgtcggttatctccgaagactcctctttgcttccctccatttgattggccttctcccttgcccagaccagcccactaccatcgacgatgttggagtccttggctccggtctcgccagtctcatcgtactcgccgagcagctcaacttaaacaaggctttctcctacaaatactgtggcggcggggtaggaaagggctctgattgtgttgtgtgcttgtgcagcctaagagatggggagcaggtgaggaaactcgattgctgccatgtatttcataaggattgctttgatggttggcttgatcaactaaaatttaactgcccggtttgtcgatcccttctcaaaatcgatcagcgcgtgggtttcacgctgagacgcgtcngtcaagattgcttgcctggttttttttgg

SEQ ID NO: 57402 - DNA, 360 bp, Gossypium hirsutum
  Clone ID: uC-gsronu33B169e04b1
ctttttcgtttgccgcagcctcccttgcaccatttcaaaccctttttcgaccggccacaacgacgacgacggcgccacgacggtgcgctaccaccggtgtactgaattagagttcctggactgtgcgagggcgacgttcgcgagatacggggctggtgagagttcgtgcacaaagacagttgctgcggcgccaaggctgggaaggaggctgctgctgctgcactgaggcgaaagggcttagatgggtatattgggctaggatagattcagggctaggcttatgggaccgggtattaatactggcgagccatgtgaacgtgcagcaggtcggaattgggctgtttatcttgacgacaagag

SEQ ID NO: 57403 - DNA, 525 bp, Gossypium hirsutum
  Clone ID: uC-gsronu33B170b08b1
atttttgctacttcaataactatagcctgacacagccacgtcacttttgcaagacttgtcggcggtattggactagaggaggagctcttaggaatgtcccagtaggcggaggatgccgaagaaacaagaagaagaaaagcagtagtagctcaaaaccctcgggttctgctgagaggcaaagtggttcaaattcaatcaatactgttattccttctgaaatcactgctcacctgccacatcaaacacctcatttaccttttatggcttctttgcaaaatttttctcagtatggtataggaaatattggcttaaactttggtggaattcatggtcagataggagcaacaagtggcggtagtgagcgatctgatatggggtttcagataggaacaaactcagacatgagcaatgccattttatcagtaaggtcaggctctcatcagcagttcccattcattgagccaactaatggtttatatccattacaaagtgagtatataggggcatcaccttcaatggtggaag

SEQ ID NO: 57404 - DNA, 568 bp, Gossypium hirsutum
  unsure (1)..(568): unsure at all n locations
  Clone ID: uC-gsronu33B170c03b1
cccattcgtccgctttcatctcttcttctcttgttttcaagctttagaaatggagacgaaacacccaaaacttgaaaaaccagaccaaatagtttggtccttagaagaagaagatgtctcagttcattcaaagtcttacacatgttctttctgcaaaaaagggttctcgaatgctcaagctcttggtggtcatatgaacatccataggaaagatagggctaaacttagggaatctttcgaagaaaacgtactttcttcagatataacactcgatcgagttcaagttcaagttcaagatcgttatctaatttcggaaatcatattagaatctagtggagagaaaaaagtttctagggatgacaatggttctggtgccagccctaaaggaaaagatggggtcggagagaattcgggatcgagtcatggttcgtcgtctcaggtagaattggatcttgagctacggttaggacccgactctcgagcctcatgagggtctttatctatgaaatggatagtatcttatcgcgggcgtactccaacaatccttgcatcaatngaaaagctgatc

SEQ ID NO: 57405 - DNA, 575 bp, Gossypium hirsutum
  unsure (1)..(575): unsure at all n locations
  Clone ID: uC-gsronu33B170e04b1
ctcatttcttcccaaacccttgaccgataacttatctttttacgacaaaggggttatcacttccaaaactgcctaagaaaaacaaactatctctgccgattgaagaaatcaagaaagatggcttgattcagctattttcagctgaaaatctggtgggagatgcttcatagcccttccctgtgcaagatcgtattcaatccaccaaaattttttaaaaagccagaataataggattcctatcatctttcttttatctttgtccatcgaaactcagttggtttgtttgtatatgtttgctgtttgttgattaggtttgaactttgaagggaagaaaagaaatggacccagtcacagctcatggccgccctgttcctcctcctttcctcacaagagagcttcatctaaatccgcaccatcaattcttgaatcaccgccaacaatataactcagaagacgagcccaaccgtggcaagaaacgagatcgacangaagcagcagcaaccaccacaaacgacacgagtgaaagcaaagaagtagccatatatgaaggtgaaatcacaagaaaaccacgaggc

SEQ ID NO: 57406 - DNA, 491 bp, Gossypium hirsutum
  unsure (1)..(491): unsure at all n locations
  Clone ID: uC-gsronu33B170f08b1
tttctacaccgtaccctcgccggaaacaagggggaaaagggtttttctttgaaattttgctgcttccacaccatgttggaatacgaatggggaaacccctcttcaatcatgttatcgggtgaagagaccgcccaagaacccgaccccaatcgtcagcttttccatcactatgccaccaccaccaccaccaccaccacccaccaccaaccttacaacgaaaccctcctttctcatcacaaccccactgttttttctcaccaaaacctcttccataaccctaaccaagctcaacccccacaacaccctgctactcttcattccttgtacgacccgcactcctactctgccacctncgcttactccactacccacgcttccttgctctcactggacccagtttttgccgtccgagggagcggaggcggttactttctcgttcccaagaccgaggaagtttctagacctgttgactttactgccaagattggtct

SEQ ID NO: 57407 - DNA, 501 bp, Gossypium hirsutum
  Clone ID: uC-gsronu33B171e05b1
cccatgcgtacggaagacatgaagcttgttatgcagcggtccgactgaccggacgtcatggatcctctcttgcccagcgacagcgagggcaactcaccagctgtgtatctcgaggcccgctctccgacatggcagcgcgaagccgacccgtctccgcggtctccagacgagtgggagcacgtggcggcgcactactgccccgtgccggagcgcgagcaaccagccgcctcaggcacgcgcgaacccgatgaaggcgacgagccgcaccccgctgcgtacgacagcgcgtcggaaggcagtcaggtcgagcaggaggcttgctgcgatgacgacgcggacggcgtgcctgacaagccgcttgcgcgcgccgcgcctgtgtctgccgtccccgcctcggtggcggcggattcctcggaacaaccggtgcgcctgaacgtggagggtcaggtgttttacaccagcgcctccaccctgctcaagtttccggggagctggctggcg

SEQ ID NO: 57408 - DNA, 518 bp, Gossypium hirsutum
  Clone ID: uC-gsronu33B178c06b1
gtttttctttaatctactttcgctatggctaatagacgttcccaaactcacaagtttgggctttgaaaattactttgaatttcactgtttggcatatttagaactaagagattgtccattgctaaaaacattcatctctaaatgtgtacccggagatgaacctcaaattggccaacatgtacaagcaagtaacttggaggttcataactcatctctcctcaatgaaaaggttgttttccctagtttgaagaacttgtggattcagaattgtggttcgttagaagaaattattgagctacaaggactcattccagatgaatcacagtcaacatcagctgctcaatctattgtggctgaaacagtgacaaccaagtttgtatttcccaaactaataaaccttggattggataaggtgccaagattgaaaagtttctgctctaggatgcataccaccctgtggccttcattgaaacatatgagcgttattgaatgccccaaagtacagatatttactcgac

SEQ ID NO: 57409 - DNA, 406 bp, Gossypium hirsutum
  unsure (1)..(406): unsure at all n locations
  Clone ID: uC-gsronu33B178d07b1
tttgtatgtatatttagttgcatgcatcttccgccattaagggaagagtgtaaaataactttttaaaaaaataaaaaaaatacaaaatacaaaggtttcatagctgttcaaacaagagttccaaataacaaaatgaaacaaaacaattatgcgaggagaataaagcaagaataaatatcatcatataatattcgttaacctagttttttattaccaattttatctttatgaagcctcactcaaaaattgattttactcaataattaacccagtaaaattattggcctaaacttaatttacctattatattgtatagctccgaaattgaacctaaattattagaatcactttataaaaataacttcacttgccctcaatagaaactccctaattaaagcctaangng

SEQ ID NO: 57410 - DNA, 412 bp, Gossypium hirsutum
  Clone ID: uC-gsflmaxxa002e06b1
aatgagtgcttagactaaaggttagagaggcagcgaaaaggcagagaggacaagggagagaaccgggagcctgggcaattgcagggcatggtggtgctggcctcgaccctaatctccctaaagaaagacaagaggaggctaagggactcctcactcgttgccttgatattggaatctctgctatccgctctaacctacacgacattgacgttgatgagcttgtcacgagagaattggaaaccggtcctctgtataactccggccgtggctctgccctgacagagagtggaacggtggaaatggaagccagcattatggatggtccggagaggcagagcggcgccgtttccgggttaaccaccgatgagaaatccgtttcccttgcccggcttggaatgggaaaaggaccaca

SEQ ID NO: 57411 - DNA, 521 bp, Gossypium hirsutum
  Clone ID: uC-gsflmaxxa002f03b1
ctgttttttctttttaaaagaaaaactcagcgaccggggggaatcaaatctcgccggagggtcgcttattctgatcgtcagaatttgtgagttgttccttttttttcaaagctgccgagagaattgaatttcattttttttcaaattgatgttaaatggttatgtaattatggttttgtagaagaaaacaaaaaaccaacaaaaaaaaaaaaggggaaagtgttctctctctctcttgtggcgagtaatggcttgcaatgcagggaaaaagatgatgagatcccttgctttgtcttcttcctctatgccttgattttttttacccttttatctctctcggaattgctctttaaaaaaaaaaaattgaatgagtgttgctttcgacctgggtatcaattcatgaaacggcttgcagaaatttgaacaaattttgttttggcttcaaaaggtccatcaagtcaggtggagttgcaaccggcaaatgttggacttttagctttcagtttttcagattgtctggg

SEQ ID NO: 57412 - DNA, 530 bp, Gossypium hirsutum
  unsure (1)..(530): unsure at all n locations
  Clone ID: uC-gsflmaxxa004f12b1
cttgttccaaatgttgtttcttacaacaatttgattaatacccattgcgataggggtgaagttgatattgctatccaagtttaccacgagattttggagaaggcaccttttaacccctctccggtgacgtataggcacttgaccaagggcttgatcgatgctgggaggataggggaagcagtggatctgctgagggagatgttgaataaagggcacggtgccgactctttggttttcaacaaccttatatcagggtttttgaatttggggaatttggacaaagccaatgagttgtttgatgagttgaaagagcgttgtttggtttatgacggggttgtcaatgctacgtttatggaatggtggtttaatcagggaaaagataaggaggccatggagtcgtataagtctttgttggataggaaatttaagatgcctcctcccacttgtaatacccttttggaggttttgcttaaacatgggaagaccaaagaagcttgnaccttgttcgaagatatgtnggataatcatac

SEQ ID NO: 57413 - DNA, 344 bp, Gossypium hirsutum
  Clone ID: uC-gsflmaxxa010a09b1
ataggaggtaaaatggcatatggtaatctggaattgagcccgaatcagggagagaaagaggaatctgataaaagtagaggtggaatggacatgcttctatctgctgccagtactctacactttgtggagaagttgaatgcgaatggcaagaagagttagaaagaccttgcacttgggaggacataacatgatatgatttgtttttcacggtataatgcctttaccttttctattatggatagctcagattgacaacttattttcacttcattttttgggctgggaagcagattggtgtaggataaggttatttacttcattagatcttacttgcatttggatga

SEQ ID NO: 57414 - DNA, 433 bp, Gossypium hirsutum
  Clone ID: uC-gsflmaxxa014a06b1
ccaggaactctccattaatttgtaccaaatgtggagtaaactcaataatttacataggccagatattttactaacaaaatagtgattcaaacgtgtgagcagggtcaaactactagcttctattaatggaagctaatcattattccttatgaaaaagacaattgtgggtgagattgtgcggccttgacatggtttcggtcacattttgggtggtggggttatctctcatctcttaaggtttacttggggtactcaggttggaaccaggattctagcttttgatagatcttttttacttgctgaaaagatctataaggggttgagtgtaatacccattcgggtcagtctaaacccgcgtttaatattacttacattggcaatggtagttcttgttgactttcttactgattcatgttgaccataacacaattta

SEQ ID NO: 57415 - DNA, 410 bp, Gossypium hirsutum
  Clone ID: uC-gsflmaxxa014b03b1
ttcactcgtccgcttccttttaattattttcttcgtcatttgccagataatttttttttttaataaaattattggctgaattttcgttgtttggcacgttttcatacagagatttctctgtttattgcgctgcgttttgttgagaaattcgaaaagcattaaggctgcgccagtgctggtcttttgtttggagtgaagagaagagaagagaagagaagagtgagtgtttttgctttcttttagatgcggaaaggtggatttggtttaaggaaagaagcgatgggagattttggttaatgaattctaagtaggttttgtttgggcagcgctcaaagttcaaattgggtgtggttaattgcactgaaagaggatgaagatgttttccctgcttaaatccttgttctaaagat

SEQ ID NO: 57416 - DNA, 472 bp, Gossypium hirsutum
  Clone ID: uC-gsflmaxxa026f02b1
tttatatttaattttctttcttaatcatcctccccattcatctgtcgctataaccccaaaaagcctgcaaaccctagtctcaatttgtagaactgagcccaggcttgctgatttttctttttctttttcctactttttttggttgctttacatttttattcggatttatttcgttttatttttaaggtggctaataaacttgattaattttattctgaacactgttagttccatactgttaataatctcaaaatgttcttatttggttcttttaaattgcaatgttgtcattatatagcagcctttaatgcagttccttgaaaaattatgctgttactgatttttggaatgatgattttctttttaacatttttgattttttttttttggatcctccttttgcagctatttatcctttgcattgtacgagaagaaataaagacagtggatcgtaaagagagcgcttgtcgtc

SEQ ID NO: 57417 - DNA, 511 bp, Gossypium hirsutum
  Clone ID: uC-gsflmaxxa026g08b1
taaggaaagctggtcgccttggtcctttttatttgttgtctacccacgctttttttacgctaccgtggacgcgtgggccgatttttccggcagattctttttttttctttttatttaccgataaaaacctgaaccctaactatttaaagtgtcttgattttcagtgttttctgcatgttcgcttggggctagacatcctgtcggttagtttctaagtagataagttcatattatagagtctgtgcagtttgttttgtttgaaaggtacggattaggagttgtaaggtatggaagttcctagtgcgaaacatgaaacaatgcatcgtaggttgaccccgcttagggtgttaaggggtctgatttgtttgcttgtgttgcttttaacaagctttatgatgatagtgtattgtggcttttttagtacttgtgtatagaggcttttacgcttttattacagccgaaaagaaccgtcttcttttttagttcttggattttattatgcccttttttt

SEQ ID NO: 57418 - DNA, 486 bp, Gossypium hirsutum
  Clone ID: uC-gsflmaxxa027f10b1
ccgaatcagaaatcaacagcttcgatgatttccatgccgccattcttgatatcttgaatgttattagcacagcattacctgtaaacattatgatgccccatctcgccgtgaagtcgagaaatgttttaaagcatgggaaaacgaaaaagaccctgagaaaaagaagaagatatttatgaaatttatccaggaaataaaacttagccagctcgataacacaaccataataacgggaatagtgacgccgccagcagccatggcagcgaagaaagcgggagaatttttgcctcatttgagcgtgataaagacgattccggatgtagttttcgtaccatcggtgacaatggcgaccttagtcatttccaagctttctagaaggcttttacgggcgaagcgccacccctgtgccaacaaaatcagcgtcctttaatgtggataagcctgaaagacttgaacctgccgccgccaagaaatcccacgtcacct

SEQ ID NO: 57419 - DNA, 383 bp, Gossypium hirsutum
  Clone ID: uC-gsflmaxxa029e06b1
ctttttacatattttaaatgctaatgtgatctaccgtgatttaaaggcttccaacattcttctcgattcggactacaatgcaaagctttcagatttcggcttggcaagagatggtccaactggcgataacactcatgtctcaaccagagttgtaggcactcaaggatatgcagcccctgaatatgtagcatcaggtcgtttgaccccaaagagtgacgtggtctgcttggtagttgtactattaaaattactttcatgtcaatcagttaatttttgaatgacccatgcggataaggtcctattagaaaaaacttagttggtttttgtgtttttcggtaagtgttccttttggctgtataactggtgttgatccatttcctatg

SEQ ID NO: 57420 - DNA, 211 bp, Gossypium hirsutum
  Clone ID: uC-gsflmaxxa029e12b1
tctgacccactgcgtcacgacttatgtttcgtttttaacaaaaaaaaaatccgtttcattgggaaaaagtgagcttttgggactctgtttttcatcgccaaatccattattgaaaccgtagcttgcgatcttccattgatttttcgaaagcgttttcgtgctttacagattctttcattgccatagtctcctgcatctaaccagatttgag

SEQ ID NO: 57421 - DNA, 386 bp, Gossypium hirsutum
  Clone ID: uC-gsflmaxxa029f07b1
aatttaattagagagatggaaagaaagagagataaaggggtggtttttatttgtaaatggcgtggtttatacttttgaagaatgtacgagctctgatatctgctgcaatttatacaggttgatgggaaggagattagaggccaaacagtgagttgtttgtgttttggcaggaggaaagaggaagagtgacagtgactagagatagaaagtggtcagagagagagagagataacaattgttcgcctgatgcattattcaagaagattggtgttgaaattgacactgatatatgctcgttttggtggttgtgattagagtctcagggaatttgggggttttactaaaaccaagattggggattgagtttaatttccagttagggttta

SEQ ID NO: 57422 - DNA, 463 bp, Gossypium hirsutum
  Clone ID: uC-gsflmaxxa029f08b1
gggctgctttcacggcggcccaagccaaaaccttctaggaaggctgactttgacttgaaagaaacagaatagacccatgttaaaagacccagtgtcgggatttgtagtcagatagagaaattggcttcttgtaattggtatagggaagcgctagaattgtttgatattttggaacttgaaggtggttttgatgtgggtttaagcacgtatgacgcattagtgagcgcttgaattgggttgggatctgtaccagcagttaatagagtctttagttacatgataagtaatgggtttgagccggatcatatatgagtaacagggtgctgattatgcatgtgaaatgtcgaatgattggttatgcacgtacgtttattttgatgaaatgcccgaaggaaatatggttcatggaataccatctaagctggactggtcgatgttgggaatacttttaggcctttaggtt

SEQ ID NO: 57423 - DNA, 377 bp, Gossypium hirsutum
  Clone ID: uC-gsflmaxxa029g01b1
cggacgcttgggttgctttcttccttcaatctggttcttttagcctcggagttactgctaggatggctgccgcttcagggactcgtccgaccagataggctcctctactactcttcagcgcttcacttgctaatatatgcgcaagataatcaagaatctattgtcaacaaggaggaaaatttaatggatgaatcaccatttcttaaactgaagcggtggcaatggtggcttttggtggcaatcaacatattcttcctcattgctggccaagctgcagcagttcttctggggagattttattatgataaaggtggaaacagtaaatggatggccactcttgtgcaaactgctggcttcccagtcctttgtatcccttg

SEQ ID NO: 57424 - DNA, 187 bp, Gossypium hirsutum
  Clone ID: uC-gsflmaxxa029h03b1
cccacccgtgcgacctcctttaccgatctcttaaccctgattactacctggacgatgatctcaaaacctttttaggccttaacatcaaatccaaaacaagggactggtatttcttcttccactacatccaaacccgtacaaatcttaaggcctgaataaggctaatttgtgtcgatatatcttctac

SEQ ID NO: 57425 - DNA, 455 bp, Gossypium hirsutum
  Clone ID: uC-gsflmaxxa029h07b1
cccacgcgtccgcccacgcgtccggtcattcttcaggacttcgggtggtatgacttcattctaaaactgcacaagctctacaacggcacacatttgtcactgaataatgtgacctcaagaaatgtatatacgattgaagtagatgagatttcagggggtggaaacattttcattcagtctgatggggaacatctaggatttcttcctaggaagttgtctattctacctggtgctatcgagatgatatgctaacgtgaaccctggaagaaattgatcctatacaaccggcgtatcagcttactccgaaactatgcatctccatggatagagtccagtaagacaagcaattgacgtcatcaaacttagaagtaggaagatatgggacagaagaaagatagtgatggagatgagtcattagtgttaccccttatttaatattttagttacttgtgctt

SEQ ID NO: 57426 - DNA, 482 bp, Gossypium hirsutum
  Clone ID: uC-gsflmaxxa039b02b1
attaatagaaaaacaatcacacattgaaaaaaccctaatcttaaccctagattttctgcaattaattcccaatggctagcgacaccacagattctcatcgaaggaagcaccatcgttctccatccgacgaagaggaaaccgataagtcctccaaacgccacaagcatcgccaccacaaacatcgtcaccaccgccaccgcagcaaaaagcacgaggacgaagccagagatggtggtgaagatccgcttcctcctccttcgattcctcgacctgatgatgacgtcgaggaaggagagattcttgatgaggaaccgaccgccgaaatcaaggctgatcaatctcgcgatggccgggatgtttcggatccgggagctggcgaaaatagtaattctgtggatgagcaagtaagagggattggtgacaagagtgaagataggaagcataatcatgctaggctctctggaaattaagtgttgagtctc

SEQ ID NO: 57427 - DNA, 262 bp, Gossypium hirsutum
  Clone ID: uC-gsflmaxxa039c08b1
cccacgcgtccgcccacgcgtccggcaaatggcaaaaggaagcaaaggacgacgtagaactgctttcaggcaattccggccaaccccatactcattgtcctcacggcgccaagggatctctggggacttgtaccacaaaaactgttccaaacctttggataagaaagactgggaagatgtcacatgttctgtttgcatggtgtgccttaacattgctgttcctttctcatggctagctcatgtctagccctttcttactcta

SEQ ID NO: 57428 - DNA, 244 bp, Gossypium hirsutum
  Clone ID: uC-gsflmaxxa045d01b1
gtctttcacgcgtccgccacgcgtccgaaaaataggttaactgtgccctattctgacggccagatgtgacatgaaaggcgagcacctgaaagtgctaatgagcattcggccaactatggggaatggcctctttacaatggatgatcactggcatttcagggctcatacggttgcaaatatcatgatatataatttgtcttaaaactctaactaaattgtctaagctgtatttttggtgaagggt

SEQ ID NO: 57429 - DNA, 476 bp, Gossypium hirsutum
  Clone ID: uC-gsflmaxxa046a03b1
gattgttccacgcccaccctcatacaataagtccatctcaaatactttgggctttaattgtaagaaccagaaactgtaaggcggatattgtaacagtgtttacaaacaacaaggtttcatttcatatcttaatattacccaaaacaagacaattccatccttaacctaaaaaccctcgtaaactcgtgaacaaaacagcccatttttgcagacagaaacaaagccgagaaagtaaagcaaaataaatggaggatttgaagaagagaaagatggaagagatgggaaacaacgaccagttatcaactcaagaagagctacgttctttgcttgaccctcttgctaaatcccagctcgtcgatcttctttctagactagggtcccaatatccttcgattgctgaagaaattaaaagtattgccagttcagatcctgtacatcgaaagctttttgttcgtggcttagcctggaataccact

SEQ ID NO: 57430 - DNA, 540 bp, Gossypium hirsutum
  Clone ID: uC-gsflmaxxa046d03b1
gccaattcaaactccattattgaatcccaaatgccgctcctctccgataattccacttcctcggcacggttatcggccgagaacgccgaggctgagcggcgccttcgtgaggcggaggagcgtttaagggaagccatggaagagcttcatagacgtcaaaggaaggccgcttgtggcgattccccgccgtgtgaccatgctgatgactcttgtgtggccaatgccattggcaatctttgtcaaagctttctcctttcttatggtgttagagtaggtatcgggattcttcttcgtggtttcaaactcgctagaggaaagtcttattcttcgctgcttgatctcaagcaacttgtctcagagaaagatttgattgtgagagaggaagcatgccgcattggtttactttttggtggctttactggttcataccatgcgctccgatgtttactgagaaaacggagaaagaaagagacaccattgaatgcaattttagcaggttgcattgcaggattgtcgatttagctctagatgatcccaatc

SEQ ID NO: 57431 - DNA, 552 bp, Gossypium hirsutum
  Clone ID: uC-gsflmaxxa046f05b1
cccactcgtccgcggacgcgtgggggaaaatccaaaatgagtgaggtgttcgaaggttatgaacgccaatactgcgagctctccgacaatttgacccgcagctgcacctccgccagcgttcttcatggagagctgaagaagcagaaactttctgaaataaaagagggactggatgaagctgatgctttgattcggaaaatggaccttgaagcaaggagtttgcagccaagcataaaggccacacttcttgctaaattaagggaatataaacattatctgaacaacttgaagactgatgttaaaagaattacttcaaccgatacaaatcaggccgcccgagacgagttgttggagtcaggaatcgatggaacaatgacggtctctgctgatcaaaaaggcagattattgatgtcaacagagagattaaaccagtctactgatagaattaaggaaagcagaagaacaatgctgggaactgaagaagctggtgtttcatcctacaggatttgcataacaacgccaattcttcttcatgcgcatacacgctccatg

SEQ ID NO: 57432 - DNA, 505 bp, Gossypium hirsutum
  Clone ID: uC-gsflmaxxa046f11b1
cggacgcgtgggctttaccctttttataaccaaacagctgtttcagtttcagttccaccacctccattaactcctcctgcaataactccaggaaaaagcaagaagacattgccaataattattgcaattattgctccaattgctgtctctgttcttctcttgttattgggttgttgtttactaaaaaggagagcaaggaggaagtacaaagctgtagaagaagaaaatgcaaaagatgatatatccacaattgagtccttgcaatatgattttagcactatagaagttgccacaaacaacttctcaaatagcaacaagctaggtgaaggtggtttcggagaagtatacaagggtacacttcctaatggacaagaaatagctgttaaaaggctatcaagaagttcagggcagggtattgaagaatttaaaaatgaagctctattagttgccaagcttcaacatagaaatctagtgcgactattgggattttgcttggcaagagaag

SEQ ID NO: 57433 - DNA, 484 bp, Gossypium hirsutum
  Clone ID: uC-gsflmaxxa047c03b1
gtatgaatagcattctttgcctcaccctctgaattgccattcagagcacggtaggaatgctgagagattaccttttttttttttcatttttaccctcatttttcatcgtcatcctttctgcagtttcaactacagcctctacgttcattaccttctccatttataaagccctaaacaccattgccccttgccaattttttcaatcttttcttcgtaggaatcagatcgtagaaatttctcaattaagggcaaagtcttcagcaaggaaaaaaatccagattcaattgaaaaacacattagcttctggttttgatttcaaagcgattcaagacaaggtttctcttcatttaagaccttggcatcgttcatttcaattctgggttcgagctgttgatatttatacgcgctataagttcccttctttatcttcttcttcttggtggtaatttgatagttttgactgttgggtaattgttgaaatgat

SEQ ID NO: 57434 - DNA, 341 bp, Gossypium hirsutum
  Clone ID: uC-gsflmaxxa049a04b1
tatgtctacaatggaatcatccggaaacaacggtcaggaatgcatctgttgaagattttttagcattattaaaggaatgggtacggctgggtgcttcattttcatagtctagagaggagaatttggagaggcagtcattcaattcaagtgtaaatgaagattttgtaaatgatggacaggaagtggaagatgaaaatgaagatggtgatggtgaagtgtttgaagatagagaaattctttgcttgatgtgacggtgatcctaatgagaaaggtgaacgtgtgttgtacttaagggttcgatggttgcaaggtggtccagaagaagatacatgggaaccttt

SEQ ID NO: 57435 - DNA, 315 bp, Gossypium hirsutum
  Clone ID: uC-gsflmaxxa052h08b1
tgtaaatatcgaaccaaacccttcctcgaatgcaagccaatggcctaaatttaaaaaaattctcgccatttcatttattgcacatcgttatcatcgtctcgctttcacttgtctttgcgttctgcaatggccgctctctcgggcctctgctcttcttccccttctttgaagcctaagcatgaccgagtcgtcattccattggttcgcaagtactcgcttgcattccctactcggtccaattcttgctccaagctctccgtttctggtgaagtgtccgcccatttgtccaaaacgaacagcgtgggcgttttgaag

SEQ ID NO: 57436 - DNA, 487 bp, Gossypium hirsutum
  Clone ID: uC-gsflmaxxa067h11b1
gaatttagccatccatttctttcagttgctgctggggttctttctctcctttttgttttttatttttgggttctaagaattgtaaataattcaagaaaaatccaaatttgacaatcattttcgaaccccccccttgcatttcgccttaatctttccttcttaatacccacattttctctgattctctcactctattttgggttttcttttttctttttgtttctttcgtttcctattacgaggggtttttgttttttccttttgaatttgagaagctataataataataataaacagaaaaaagaagcagaggaaaatggcgtctaatataggaatgatgcatagtgcttacttcgttggaaggaatgagattttaacatggatcaataacaggcttcagcttaatctctctcgtattgaagaagctgcatctggtgctgtacaatgtcagatgatagatatgacctatcgggagcagtgccaatgc

SEQ ID NO: 57437 - DNA, 493 bp, Gossypium hirsutum
  Clone ID: uC-gsflmaxxa067h12b1
ctctgccacagccagtccggtctttgcaaagcataccgctctctacatctttggtagatggattgttaaaaagcacaagcccagttagcatttatttttctattttgccttttaattttctactttcctactcttattaaacattcccaccgattccttgcttttttcaaccattcattcaatcccctctctctttctctccgtgtgtgtctcagttctattgctgataaaccctgtggaaattaatagagaattgcattttctgaatatcaggcggttttatattttcatttactaaatccggaagatcccaaaaattttgttatactgttttagtttctcagtttaaacccacagggagcattagggtttcttagcggaattctgatgatcagcttttggctctttggttttggaggattaaagatagagttgtgatgggagtaaaaggtcgcccccctgcaatttattgtctttagtgcttcttttgcag

SEQ ID NO: 57438 - DNA, 149 bp, Gossypium hirsutum
  Clone ID: uC-gsflmaxxa069b08b1
gactggagcatagtgtgccacttccaatgtcagcacgggcactttgcagaacaggcatgcattgcaccatcgcccttacctgtgactgttattcagaagttgcaagcaatccttggtaggctgattgctaataatagacttgagaagtg

SEQ ID NO: 57439 - DNA, 181 bp, Gossypium hirsutum
  Clone ID: uC-gsflmaxxa069b12b1
ccttttcgtccggtcccatctttttttcagctttaggcatcttttaagctttctggcgggttctatatactccaagcttcatggatttagcacataagctcctattcacagctttgcctcatcttcgctccatccattgttgggacaccttcttttcccctcttcttccttctcctttctc

SEQ ID NO: 57440 - DNA, 132 bp, Gossypium hirsutum
  Clone ID: uC-gsflmaxxa069c10b1
atttttgcctctccaatggatgatacccataggagcagtgacgaataccatcaacctttactaacagaaccaagttcaaatgatgaagcaactatattgagagatgaagatggtgaagaaggaaaggactta

SEQ ID NO: 57441 - DNA, 571 bp, Gossypium hirsutum
  unsure (1)..(571): unsure at all n locations
  Clone ID: uC-gsflmaxxa069f07b1
gtgtttagcagcgaaagggacttttgtggagttgnagaatgcctataagagtgaggcgctcttagaaacctatgcagaatggtgagattcatccacttacacgttatgtgatgaattatgtcaaactgcttgtcgattatagcacgactttgaatttgttattggagagtgatgaggatgtttatcttccctttctgtttgctcatatcactctcttttctctatatgtatcttttatttttctctcttctcttttcttcttttttactttttcttctattttttttatttatattttttctcttttctttattcttttcctctctttctctcttcttctttattatattattttctatcctttatacttttttcttcctattttttctcattttttctcttttatttccttcatctattttacttttcttccttttttctttaatttcctttcattactttttcttttttccctttattcctcctaattctttcttctcttatttttcttcactcctttttttccttttttttctcctttttccttttatcgttttttctcttttttctt

SEQ ID NO: 57442 - DNA, 157 bp, Gossypium hirsutum
  Clone ID: uC-gsflmaxxa069f12b1
gcctttttcgatcctttgcccccccccccaaaaaagtgggtgccgaagttgaagttagaagatgaagaatcaatcaccaaattgtccacaaaatcaagattcagatacaattccccacttgttcaaagtctcccttataggcctagtatgttttttg

SEQ ID NO: 57443 - DNA, 138 bp, Gossypium hirsutum
  unsure (1)..(138): unsure at all n locations
  Clone ID: uC-gsflmaxxa069g01b1
ccctcttttccgcagagttgttgtggcttcaacctntgtngctcttagattggtgggcccgttttaagactaatgtttttgcagataatgaaagcttcaatttaatgggtaaggaacacgcccttcttttacccaatc

SEQ ID NO: 57444 - DNA, 165 bp, Gossypium hirsutum
  Clone ID: uC-gsflmaxxa069h04b1
ggctctctcaaattttgctggaggatcgttttactgggggttgttttatagaggaatgcgcggattgggcttactacagcaattgtaaatctgatgttggctgctcaaatgtcgaggatttttgctcatcagagttctagcctttttatcttcttatttttctac

SEQ ID NO: 57445 - DNA, 329 bp, Gossypium hirsutum
  Clone ID: uC-gsflmaxxa070b07b1
cggaggattaggttcatttcaaatgcctggtgaaaacagcttagggagtatagagttggtttctgaagattaaacggagttaacattttccttgtggtggtttgtttaaccttttagttatggatctcttttttttatttgctcttgttttaggttgaactctctgtattttcagaggtttgacttttcaaagacaaagctatgtactacttattttttgagttgaagaaggattttactgttccaatcttggactgtccttattgtttggtaccagtattggctaatctgatttacagggaagcatctagatgattgttgatggtgat

SEQ ID NO: 57446 - DNA, 124 bp, Gossypium hirsutum
  Clone ID: uC-gsflmaxxa070b11b1
tgctttaccggcaccaccgtcatctaaaaacatagtagacacttttaaatgatccgttcgcttcgtctctgacggaggagccgccttcgtatgtgcaaatgtcagacatagagaagaagcacaa

SEQ ID NO: 57447 - DNA, 489 bp, Gossypium hirsutum
  Clone ID: uC-gsflmaxxa070c05b1
ttaacgctttcttcatctcactgcatttgcttctctgcaaacgcttaaaaaaaagtcatctgattaacgctttatctgatgattgatttgctatggattttcattcctgctgctagctttgatacggatctgctgtgctctcagtttcacgagatctcctcactgttaaactcgctttgattgccaatggcgttgaagcgggggctatccagtgttggcgtccacaggaacagaagttctgaatctcgattccctatcgtgattctcgttctcttctcagttctcgctccgcttgttttctttgtcggtcgtggactgtatatatctgatcaaaataatgttcaaagtggctataccaagcagaatgttgactgcagggaaaggctggcattgcaatctatcaaaaaccttttcactaaagaggttattgatgttgtaactacaagcacaggtgatctggggccgctaaggctagattctttcagaaaa

SEQ ID NO: 57448 - DNA, 382 bp, Gossypium hirsutum
  Clone ID: uC-gsflmaxxa070c06b1
aagcctttattgacatagcttacaggatgccagaagacggggggtactttttgttttatagggaatctttcatggccaacctcagataggggcctaaaggatgcatttgagaagtttggaaatcttatcgaggctaaggttgctgtcgacaagatttctggacgttctcgtggatttggatttatctcttttgatgagaaagcggccatggaagaagctattgaagcaatgaatggaatggacttggatgggcggaatataacagttgatagagctaaccctcaacatgggtctgggagagattatgatggtgaccgtaaccggggacgtgatcgtgaccatgaccgtaaccggggctatgatggcgggcgtggatctaatg

SEQ ID NO: 57449 - DNA, 347 bp, Gossypium hirsutum
  Clone ID: uC-gsflmaxxa070d07b1
atttaattttcatttagtctttaatttcaaccttttggtctattttcattttctttctcttccttggttcccgatcctcatcctggatcgccagtctttgatccctcgaagaatcgattaattggcggcggcggcggtggttacacttgtggtggcggatttgaagttggtctttgttggtggaaaacaaaagagagacacattaataaaattcgctcacttttattcatattatttcattttggggaggttaaggtttttgactaataactggaccaatacaaccttttgtcctttgaattatcttctagatagttaccaaagcgttgctggtctcttaggctcgc

SEQ ID NO: 57450 - DNA, 424 bp, Gossypium hirsutum
  Clone ID: uC-gsflmaxxa070e03b1
agagatcattagcaaatgatgtcttttcttgctaaggccatgcaaagtccaggtttcttaagccagcttgtacagcaacagaatgaaagcaacagacaccttactggtggaaacaaaaagaggagactctcagactggatgaagaaaatttaaccggtgaacatggtaccatatttcctaatagacggattgtaaaatttcagccttcattgaatgaggcagcgaaagcaatgttgcaccagatattgaagatgaacacatcacctaggttggaaccttcgatagataaccccgatactttcatgattgatggtattcctccttccaatgcattagacagcaggagctgcttcagtcgaatttctggagtgacacttgtagaagttccaccagtttctggacagtcttatttgcaagcagaatc

SEQ ID NO: 57451 - DNA, 453 bp, Gossypium hirsutum
  Clone ID: uC-gsflmaxxa070e08b1
cttttcctcgtcgtgctttccaacagatttttcccttggtttttactcttttttttttttttttttttgcctttattcctgcaacacgcgtacgacaaattataactataagtcccaccgccatgaaatcacgccgcttgctaagcttcctccttaaccatctcatttcccccgattaaactaatctattaagctggtttttttttctttgctttgtaagaaaaactgaaggcgcttcttgtttcacacacactcccttcttcattgctttaacaacaaagtcaatgctcctcactgctttggttttctctttggatctgagtttctgcacttttactttcagttttctacaagagctgaacaagtggttgctgttggctgtttcggccaatctttgaatctgattaaaatatcaaaagcctaatatgccttaagacaggctaagaacaattg

SEQ ID NO: 57452 - DNA, 226 bp, Gossypium hirsutum
  Clone ID: uC-gsflmaxxa070h02b1
gcaaatccttacaattccattttgaagactttggagaagccgcaggtttttgaattcggcaaaccactattctccacctgctctcaatgatccaaggatcgataaacttccttactctattaaaatactttttgaattcccaatccgtaactgcgatgagtttcaagttaagagtgaggatgttgagaacatcattctattgggagaacacatctccctaaacaag

SEQ ID NO: 57453 - DNA, 500 bp, Gossypium hirsutum
  Clone ID: uC-gsflmaxxa076b05b1
cggacgcgtgggagaaaaacaaagttagctactgaaatgcctgcaggttaaacttttacctctccaccattagttttaaactatgcacagttaaaacacagtttaaacacataaagttgtaaattctgaatctgataggtgctgtgtggagctgggaaaaggctaataatttttgcatttactaggacaaaggtacatcatgttgatagttttcatgcatgcaaactgatacaatgatgttttgtaatctgtctcctctctatatatacacccaaagagcataaccaaaaaggtaaaaaagaccttccttactattggaagaacgatctttgcttacagtacatggggttttcatttgttacttttttcagtctggatcttccactgtaagtgtatagtactgagaaccgtaaacgagtttgagaggtccaaaattttggttcctgcttggttccgtttgaaggcacaatttgagagttccatcttcggatgatgccttg

SEQ ID NO: 57454 - DNA, 523 bp, Gossypium hirsutum
  Clone ID: uC-gsflmaxxa076b06b1
ctatcttctctgttggcttggtctcacttgtaaggtgttgtttgtttccatattgcagagaagaacttgaagaagaaaaagtatggcctttactacccttagactccctccttatccaaagcttgttaccaacaacaggtttagcggcatctttgcttctcaatttcattcttccgctttaccatcaagattggtgcttggtagttcctcttcctgtgtgggaactcttagcttaagcatcaatcatcatagctcacgatggtcctctactactttcacatgcttttctcagacatcagagctctccgtttcagttgatacatatggcaataacattattggtggaggcggaagagaacacgctctttgctatgcattgcagcggtcgccgtcttgcgatgctgtcttctgtgcaccaggcaacgcggggatttccacctcggggaatgcaacctgtattcctgaccttgacatctttgatagcttagctgtgatttcttttgcagcaatggggtgttgttgg

SEQ ID NO: 57455 - DNA, 558 bp, Gossypium hirsutum
  Clone ID: uC-gsflmaxxa076d05b1
ttcacgcgtccgcccacgcgtccgcccacgcgtccgatcgaatcgaaacccctcaagttttgttccaatttgtctaaatcggtgaaaaagattaacaatgcctgcaattgccgatcgcagttcgtctcctttcaaggcaatgttggcagccaagagctgcgagctggctggatccggcggctgctgcactcctcagaaacggaggttaaggtccgatacggcattggcggccaaagagagtccggtttcaacgcctatgaaactcaaatcgccacgacgtcgtctagattcaagtccaagcagccctgcaaataggattaagaaagatccgagtgaaaaaacattgaagaaatgttggaatccgagagatgttgagcaaatgagggatgtgaaggaggctgtacatgtttcaacagctccatcaactgttgtgtgccgagaagatgagcaaaaagggttttggatttttgcaaggcatgtgtccaacagagaagctggagctgttgtatgggatgcctggactgggaatcatatcatggagtgtaaacagagtatgat

SEQ ID NO: 57456 - DNA, 586 bp, Gossypium hirsutum
  Clone ID: uC-gsflmaxxa076e05b1
ttttccttgaaaagcttttcattgtgcttatatagtaaaaggttccaattggggtttgtttcacttatcaaaaacgtggctagccaaatgtctgcctaagatctctcttgcaaagttgaaacccatgtggaatttttgttttggataagccaagacctacaattgagtggaaaatagcagtgaatatctgtcattggcttagttaactatacatgaggaaataattcactgccataacagttttttgtttagactgctaagtgaatccgtagagctctcggcagagcagaaacatttcggatcattacatgtcatgcaagtaaccaccagctttagatacatcaactcattgattcctttttgtttgcgtatatatatatgtgtgtacaaactcattggtgtctcatccaaatctattctcttctgaaaatatcctattcctttggaactctctctctctctcccacatttttctcctcctttcttccctcttctctcattcatttctctacttctctccgccatggtttcgcaccttgtcaccactatccgaatgtagttggaatcacaaggaatgaatctccct

SEQ ID NO: 57457 - DNA, 626 bp, Gossypium hirsutum
  unsure (1)..(626): unsure at all n locations
  Clone ID: uC-gsflmaxxa076e11b1
tgttatagttcgcacaattccaactggtggcagaattcgaatcagctcaacgttgccaaataggctggggaagatgctttcaccattgcactggcatgattacaagaaaaagtacggaaaactggatgactttgtagctagccaccctacgttatttgtaattgagggtgactatatttggcttcaagagggagcacaggagatgatagcagcaactgcagctattgctaaagttgctgcagctgctgaagctccatcttcatactcctttttgccttctgtttctgttacaccgattgcacagcgtaatcggctaaagaaggcgcttcgatcaattgattcctatcatgtgagagagaatgcccttttcaaggagcatgcaggcatcactaaaaatgcttctaatggacagcagttagtaatgcaaaatcaacatcccaatggatttgtgtcgatgtgccagaggtttctccaatgtaaaaatattgagccaattaaagatccngtgtgactagtgttgaagcatggcatctggactggaagtctattaaatgtgtcggacagcgagcaggacaacgagctgatatctcagagataggaggcttacctactgttatgccactgat

SEQ ID NO: 57458 - DNA, 495 bp, Gossypium hirsutum
  Clone ID: uC-gsflmaxxa076g02b1
tatttctgcttcatcaaggtcaaattcccattaacgtccttctccctgttaaccgcctctgataacggccttccacttccttcctccgccgccaccccatcatccctcctcttctccccttccaattccttaagtacccattcttcctcccaccccaacccagagcttgaatcccactccgaacccgacttcgccaccatttttgcctcgcagcgcttctttttcacttctccgggcagctccaactccatcattgaatcaacaccgacgtcaaccgccgcgaatcaaacatcaaacaaagggcaccaccacacaaggtcgaccgttaaagacggtgtagcggtcccaactttgtcttcgaacccatatatggatttcaggcaatccatgcaggaaatggcggaggcacgtggcttaatggacgtcaaggccaactgggacaacttgcatgaactccttttgtgctaccttgctttgaaccccaaaagcactcac

SEQ ID NO: 57459 - DNA, 415 bp, Gossypium hirsutum
  Clone ID: uC-gsflmaxxa088a01b1
ctttttcgtgcgcttgaacccctatatattgtagggggggatcttataatggaatattttgttgaccctatattatttatcttctccatgttctacgttgcaatgcctaataacctgactatgatcccagagcaaataacattgccacatccactttgcaggtcccaaatcgcgctggtgaactttgcatgtgcgatggtgcctgcacttccgatgccacaaccccctcctacgccggctgatgggaatgggcatagacaccggcgccggcgtggacacaggcacaggcatagacatgggagtcatgagacacctgaacagctgtactgctgagaatggttgaggcaaatggacacgtgatgtgtgtgcgagatactatatcacttaccgcctttcctttggaagcctaattata

SEQ ID NO: 57460 - DNA, 521 bp, Gossypium hirsutum
  Clone ID: uC-gsflmaxxa088a07b1
ggattgacccgctatgagtatgtttcttggattgttatgttttagtcacaatattactcatagtgataactatgtatatgatcctcaaactttagatcatcattgtcccaacatcatgagtcatattttgatacagtcaaaacatctaccgtagcaggttgcactataaagactaatgttggatatacgacaatccatgtagtcggatatagttgatcaatataggatttatctatgacaccccaaacccgactgagacggattagcctgaatctgaaacgacacaatagccaccaaagtgactctccaactcaagaccacccaaaatacgccccaaccttataacacctcaattctaactaattaactatctaatattaatgtggaagcgattttgtgaacccatttaaactaattctaattatttaaccctaaagttattttggttattttaccatctaaggttaaacaatcatgtttttagttctaaatgattaccaaccttctttagtcaatttata

SEQ ID NO: 57461 - DNA, 430 bp, Gossypium hirsutum
  Clone ID: uC-gsflmaxxa088c02b1
cccactcgtccgcccacgcgtccgtaaaaggtttattggatatgttgtaattgcagcagaaagaattaagaaaatggggttccgagaaaggtggaaattgatcgtatagcaaatgtcatttttagttactaaagtcggacagtcatcctttgtttaatctgcaaaattacattagcttgcatttgcattttcatgctttggagttttaactagttggatttatagctcttagctcagagaggatttttactacttaaccagaagtcaacattgaataaataaaatggggctacatgaccgagggaggacctgaaaaggctaaaggactctagcttttagcttcatttttattcgtttggttgcagctgacagtttttccagattcctctgttgaaaaatagaagacaatcaagctagttcgttgtctgtc

SEQ ID NO: 57462 - DNA, 474 bp, Gossypium hirsutum
  unsure (1)..(474): unsure at all n locations
  Clone ID: uC-gsflmaxxa088f09b1
ctttttctgaatcttctcttttcaccaacaaataattaaaaagttattgggtgtttcgaaaatctccctaaaaaatatatgtttttgtcccttcacttttcattttagcaggattttagcaatgggtgttctcttactgaattcgctcccattagggttccggttccgaccgactgacgaggaactgatccatttttatttacggtctaagataaacggaaatagaaacgatgagattgaaattattcgtgaaattgatgtttgcaaatgcgagccctgggatttgcctgacttgtctgctataaaaacccaagatccgtagtggttcttcttttgcccactcgaccggaagtacccaaccggcaacaggctgaatagggctaccgaggctggttactggaaagctacgggtaaggaccgcatgatcaagtctggctccaccttngatcgcatgaagaaaactctggtgtttta

SEQ ID NO: 57463 - DNA, 539 bp, Gossypium hirsutum
  Clone ID: uC-gsflmaxxa089g02b1
taacattggtggtagcaaaggagaagatgatgtgctacgaggaaatccgtcagaaacgtgtggaagaaaacaagaaaagaatggaagccctcaatcttccacagctttctacacttcttcataccccatctttcaaaccctctccgagaaaacagatgaagcctcggacagtcgaaaaacaattggttgtggttagaagatcgagtcgtgtcgccaacaaacccgccccggtttaccaagaagtgagtgaaatcctcgattctctttcatgggtttagttaaaaatgggggcatttatcttaccttccgccccggtttaccaagaagtgagtgaaatcctcgattctctttcatgggtttagttaaaaatgggggcatttatcttaccttgatctctgtgagtaggttcttgttgataaagtgatgatacctagaaggtaatgcttgtttggatttttttatatttgtttgaatttgaggggttaatgactttttgggtgcaaaattaaggtatctaagcatagggatctgtcaaaccg

SEQ ID NO: 57464 - DNA, 414 bp, Gossypium hirsutum
  Clone ID: uC-gsflmaxxa089h01b1
ataccaagtcggcgttctcggtctcctctcacctgctccaacacccccctttcttttcttttcttttctttcttttctccctgtttcttgggagggacttgcctgaaactttgggtcgcttatcgttcccacaatccaaaaacaatttcaacgcatcaatcttcttcttctttttttttttttaagttaatttttttttgtttccttgttttcctacttgggaatctcatatattttatatgtcctaaaatttaatagagcctactgaattgatcaggtgagttattttacttttattttctcatttgacgtccgaataatccatactctctttttttccctcataaattcttttcttaattttgtttctaaactggaaatttgaagcattaggatcgaacgcccgttagattt

SEQ ID NO: 57465 - DNA, 520 bp, Gossypium hirsutum
  Clone ID: uC-gsflmaxxa090b05b1
ttcgtgttcacggactcttggctatacacaaagggtagggcatttttctctcaaccctgtggatcctcaaccccgagtccagccaaatctagcaagccaccaccgtaactccgccgtgggtggtggccggaagtgccaaaatcaggccttttcgaccccttttcaaccccctttttatttataaaaaaatttgaactgctacgtctgtttttaaacaaaataaagagcgagattcgtaaaaacaaatggggatagaacaccgttcgatccctcgaacgaacctccccgtttttgaggtattcgagttctcatcggcgactactcaggtgcaaagatcgtggcactcagcgtacggaggctgagctggcgtacggaggtgcgctggaggccgtatgtgggggagcggcacgaggcacatgggggctagggttttggctgaatttgatttagtttctgggccagttgggccttagggatagttctgtttcaggcttgtatttgggtttaagtttttgaattt

SEQ ID NO: 57466 - DNA, 528 bp, Gossypium hirsutum
  Clone ID: uC-gsflmaxxa090c06b1
ggagttatcaacggttagtgggaaaacttatctatctttgtcacactcgttcagacatagcttttggagtaagtgttataagtcaatttatgcatactcctagggagaaacatttggaagctgcctacaggatattgagatacttaaaagggactcctggtaaggggttgcattccaagaaagatgtaaatcgaagcatagaagtctacattgatgcagactgggcaggggcaattaatgacaggcgctccacaagcggttactgcagctatgtttggggtaatcttgtgacatggaggagtaaaaagcaatctgttgtggcacgcagcagtgctgaatctgaatatcgagcattgtcccacggtatatgtgaaggaatgtggttacaacagctaatgagagactaaaattatcctatacaaaacctataacattatattgtgacaaccaggcagcagttagcatagctcataaccctgtacaccatgaccgtaccaagcatgtggaaattgatcgccactttattac

SEQ ID NO: 57467 - DNA, 495 bp, Gossypium hirsutum
  Clone ID: uC-gsflmaxxa090c11b1
cgtccggtaccagatgccaacctcatgcggggtttgttaacatcagatgttattgatctgatgaacctaggacaaaggaatcgtgcagttggtgcaacagccctaaatgaccgtagtagccggtctcatagttgcttgaccgtccatgttcaaggaagagatttaacatctggaactactctccgaggctgcatgcatcttgtggatcttgcaggcagtgagagagtagacaagtctgaggtaacaggagatcgactaaaagaggcacagcacataaacaaatctatatcagctctaggagatgtgattgcttaccttgcccaaaagaatccacatgttccttacagaaacagcaagctcactcagctatttcaagattcacttggaggacaggccaagacactaatgtttgttacataagccctgaacctgatgccttggtgaacaataagtacttcaaattcgagagcgtgtacttccgatgacttggggctg

SEQ ID NO: 57468 - DNA, 519 bp, Gossypium hirsutum
  Clone ID: uC-gsflmaxxa090d04b1
aaattagtgaagcgtttttcgggtcatcacgtaggatccagagatcgtgtttgatggagaaattatgagcatcacatcacttttgaagtatatttgaatctttttgctcggttgatgatacatatgcctgcattgtgttgtttgctaatggggatgaatgtgggggaattagaggccagtggtttgttatgtattaactgagtgcaactgactacatgtaggatgttaggcactgaatttacttaaaatggttggttttatggttgtgccatgactgcttccagcattcttgaaaaacaaaagaaaaagggtttaagcttctcatattgtaatgaaaagaggacacttgctggttgggggtcttttattaggaagaaaagggaggtgagaactaatttcagataatgagggaaatgaggaggcagttcagtgtaggttattgaacttggaattgggtttaatggtttgtcgcctggtattatacaggactaagaaaagtcatgaatcctttgaaagctt

SEQ ID NO: 57469 - DNA, 511 bp, Gossypium hirsutum
  Clone ID: uC-gsflmaxxa090d11b1
cacttcatgtattggtttccagcattggtgcttaaatggaatcattgacagcaattgaagaaaaagtaagagaaattagcaatttgcgggaaacaaacaccaaagaaagtaatattcatctattattatttgcgaaacagagcaattggcaatggtttgcaggtttcaactctctcaagctctaaaacacaaaaaatgcagtaaaaagaaacaagctttgtcactttgtcttatcctctgatatacctagtcatcttcattgtcctaatggtttaatcaccgttgttttttaagttaaacctctacttgtaaacacaaagtaccctccattatcagatatgattatctgctacatttcctagaacacctttctggcataaccaaaaacctaagctttttgaacccaatttcaagtttaacaacaacaaaaaagtttggggttttcgaatgggttgtgctacttcaaagaaagaggaagaagatggtgttgtgtcactgtgtaaagagagga

SEQ ID NO: 57470 - DNA, 581 bp, Gossypium hirsutum
  Clone ID: uC-gsflmaxxa091b03b1
gttattttctacaattttcatcatttttaccctggagtgtggggctattgagacatatattttttcctatattttggaattatttttatgaacaatgtactgagaccttataaaccatttattgtgtgaagaagatatagtttgaataccatgggagcaaaatttccaagccctattaatagtctccataacttggaaaaccaagttcaagctctctttacgaaatcaataagtttcaaagatgtgaatgtgaagacagtgatgcaatcattcagttacaacaggcttgtttcaaattcaaaaggattagaaccaaatggttgtgggactgggagcatgcaacttgaagaacctttaagttatgacaaaaaggaaatactctcacatattaaggaaaataatacagtgttttgttaaaccagaaagctgttacaattatttaccaaagatcaaacactgaagaaaagtccggttctggctttgacgagcccggggtcgacaatatcaagctgcattgaagttcaaaaggtgttcaagagttttcgaacaaggagacaagttgctgattggcgcttgttgct

SEQ ID NO: 57471 - DNA, 462 bp, Gossypium hirsutum
  Clone ID: uC-gsflmaxxa091f03b1
aaaacaaactgacttaactattactatttgggttaggattaaaatttcaaaattcaaaaagtataaggattacaaatgaccaaataaaagtacaaggactaaatccacaacttttgcaaaatacagggactaatagcagaatttaacttctaaaaaaatatagctaaattttacctcactgaatagagatgtccgaagaaattcggagctgagcgtccaccccaccgctcaccacgcagtcacccttccaccagtctgcacataataccttgtctttgtgcgtatcgatgatagaaacaggccacgctgttcttagatcccacaacattactttcccatcataagatgaagaaagtaaatgaagaggagacgtattgtgccacttgcaagccgaaatccaagaactatgtgaagagaactgaaacacgggtgccgatgttccttgtttacgaggatcccata

SEQ ID NO: 57472 - DNA, 492 bp, Gossypium hirsutum
  Clone ID: uC-gsflmaxxa091g12b1
cccttgcgtccggtgaaacacaagattagtggtttgagtcgccttttacactcggtttggcgcgtgcgagattcttacctcctcgaccttcgccctataaatccagcagcccaaatttgaaaatcctcgtcaaaagaaaagtaacttaggctacactttagatttttctttctttttgaaaaatttggtaaagggaaaatgggaagtgaagctgggattgtgaggaaacccagatttcttggcctccatggatttagaacaagtggagcgattctcaagacacagatagagaccaaatggcctaaatcggtattggaaaagatcgatatcgtttacccagatgcgccgttttcagctcaggggaaatccgatgtcgaagggatcttcgatcctccttattacgagtggtttcaattcaataaggaatttacgacttacacaaattttgacgaatgtcttgcttatatcgaagatattaataataaacaagga

SEQ ID NO: 57473 - DNA, 488 bp, Gossypium hirsutum
  unsure (1)..(488): unsure at all n locations
  Clone ID: uC-gsflmaxxa092a06b1
gagtgagtgagagatagagagatgggaggtccaccgtacgattgcttggcgaatcccctaggagccgtccgattagcattcgagaaggcaatagggtcagaattggagactccttcgacccatccctccgcctttaacggcaaagattggggtgcccttgaactcttccgccacttcctcttccaagaatcagggctttcccaggttcccatccttaatcccaaaacattaagatgggttcaacccaacagtcttgtccgttaccgtggtatgatccaagacatgttgngaaatgaattctatgccggcgctcacaaggatggaaatttatggcggaccaacanattcatggatgtttctcaatacccaatggggtcctctcctgatatgtgtattttgggaacgccgcttgctctactgtgttcctgtcccaggacagaantcatggactgaaacctctagtgaaatggaacctaattggtcatctc

SEQ ID NO: 57474 - DNA, 435 bp, Gossypium hirsutum
  Clone ID: uC-gsflmaxxa092b10b1
gatgaaatagaaaaacccaataaggaaacatcgtaggagaattggtgtttttggattcttgtttttacccaatatatatttacatgctttttctcctttgatttaactctttttcctgatatgtataatttctgggattttttattttctaaaccgcctttggattaatcccacatcggaagtgattggttttgagtaattgagggttaaagtggtggctttggcctttgggtgctttaaaggcgactttttcataaatctaggttgagggtattgaagctttttatcgtatggatctcatgggagaagtattttatagctgatttttttttttttatctttggatgtatcttgcttctattgaaggaaaggatcggcttgtgaacctgtctggctttgatttggatgttctcaggccattgaaactcctactac

SEQ ID NO: 57475 - DNA, 273 bp, Gossypium hirsutum
  Clone ID: uC-gsflmaxxa092g01b1
ctcctgtaagagggacttcaatgctctgaatcattgggtttggagtattgggaagtgtataaatctcagtgtcagtgaaaaaacaactgtcactgcgataaccggacgttgataccttacgtgaacgacccatcacctttgatttatttatagaggaagctcacaaggctatagttgaaggagttcttttcatcatttcgtttatcagacaagaagacgcaagctcaatttctgtggcgtgtcttttttttccttttctttaaccgaagatgg

SEQ ID NO: 57476 - DNA, 181 bp, Gossypium hirsutum
  Clone ID: uC-gsflmaxxa093d04b1
gccaaatcctccgtgtagacttattgagtcaactcgactccatttttagtaggataatccatccctactcctagtgaagagaggtgaaacgcatcatagtatttcgttacccatttccgtagatccgagacccttaacttattcctgttccctatgttgatccagctgataactattctat

SEQ ID NO: 57477 - DNA, 376 bp, Gossypium hirsutum
  Clone ID: uC-gsflmaxxa093f11b1
caaatcataaatgaaaaaggtcgaaattccaatattgtttctcagctccatgttcttgatggtagtagcgttgcctattaggctgcctataataccgcgggtgcgagcaaatccgcctcgacttgtcccgctttgcacttcccaactaatgttagtgaactatgcatgtggaacagtgccattagtcccatccctatttctatcttctaacacaccagatgtaggaaatgagaatggcaatggaacaaggagtagtcaaggagatggaaatgggatagagaatggagcaggagaaggggaaatcaagcattgccttatgcatattcataagcataagcataggcataaggagattactcctgtacataattactgt

SEQ ID NO: 57478 - DNA, 321 bp, Gossypium hirsutum
  Clone ID: uC-gsflmaxxa093g04b1
tgcagtctgttcaagcctagctcagcagactgaaaaagatgggccctggtttacccattatcttcattaacgcctgagctcctgttctggaccctcaccatcatcatttgctccccccgtcacaacggcatttaaagctgtgaacaactcatgcatcaaccagtcaggactcaaacagcacaaaatcgccaaatcatcaagatcatctttcagcgcttctcatgttccgctttcgctgctttctgtgtccctagcgcgctctcttcatcctcagtatgcccaattcccctccttgctccggatctttcatccgcccagtat

SEQ ID NO: 57479 - DNA, 358 bp, Gossypium hirsutum
  Clone ID: uC-gsflmaxxa094b03b1
cagtactaccattcgccgccgcaacaacaatgtcatgagtagagtctctcatcctccaactccacgaaatctccgccgttaaattcggcaacttcaagctaaaatccggcatctctttccctatctacatagaccttcgcctaatcgtctcctacccttccctcctctgccaaatctcccaatccctcctctcttctctccctccccaaatacctctcaacctcatctgcggcgttccttacaccgtcctctcgatcgtcaccttcatttccctcttcacctccatcttcactctcatgcgccgcatagaagttaatgacttctgcacctcccaattttattttaatgcctttcttct

SEQ ID NO: 57480 - DNA, 130 bp, Gossypium hirsutum
  Clone ID: uC-gsflmaxxa094c11b1
ctcacgcgtccgaataaagattaatcgattctagttgttttatctgacccagggtttttgttcccctaaaaccctaataagctcaatagctaatccgtctcactgttcttttcttaacctttgtctttgc

SEQ ID NO: 57481 - DNA, 215 bp, Gossypium hirsutum
  Clone ID: uC-gsflmaxxa094d12b1
ataaaacccacttccatgtccaatatcccctggattctttatcaagcctttcattatcaattctgccttttgcctttacaaggaccttcatttctggtgcaagatagctccattccagcttagattcatgtccacatttccccacaaaaccaattatcttcttttacttatttaagctcctttttttttcttcttctttctgagtttattggaca

SEQ ID NO: 57482 - DNA, 561 bp, Gossypium hirsutum
  Clone ID: uC-gsflmaxxa094f12b1
gctcactactctttcgagctcaaattactggggaagtccctacaagccgactctgcagagcagttttggttttccttggttgttttacttttcatttagcttactttgttttgctttgggttactgttttctaattttaacaccgtcaaggactttgttgttggtttttagggtggtcggagaatgagatgatgaactgaatgtttccctattggtttgattgccgtgatgatggcatctacaatgtattagctctatctgatcattctctttaccttttgcaaattgatggcaatgtttttcttttttttttgctattgtttttgacaaattttgaaactttgctatttctctccttgttaagtaattgtgtgctttgcttttgggccccgaaaatcaaaacaaacaaaaaaaaaaaagagggaaccccatttgtactcagtttacaacttctgaaagcaaccttaggtcttgggagaatgaaatgaggactgcgatattgtttccctattggttggatagccatgatgatggcatctttagtattagttttttttatca

SEQ ID NO: 57483 - DNA, 376 bp, Gossypium hirsutum
  Clone ID: uC-gsflmaxxa094g03b1
ttttggtaggactaaaatgtattctattgttttgcattttagatcctattgggagcaaacttgtttcctacagtcctacacatctacacaaggcttcactttacagaacgacctcagggaaagttttctacatcaacccagtttttctttttatcaaatctctgaatgaaagatatgatgggagtatgaagtagattttacctggcattagcgttatgcctgtgagtctgattctcatgatgatctatccaaaaaatctggggctgaacagtagtaaatatattcctgctcctgctaatctgggagatcatgactataagcagcgcatgtcaagggagaagaacaatggagcatgaaccagaacactggcctctcc

SEQ ID NO: 57484 - DNA, 202 bp, Gossypium hirsutum
  Clone ID: uC-gsflmaxxa094g07b1
tgataaatatctaacctccttaaatctgagaaaaggcttgtttagcgtgcttttgaactccgagcagagcttgaaaacgctgcatcagatgtctcagatttgcctgccaagattgaaaggaaggataaaattgaagatggaaacaaatcacttatccaaaagttccagccccagttgaccgcacacttatgacttcttgcac

SEQ ID NO: 57485 - DNA, 291 bp, Gossypium hirsutum
  Clone ID: uC-gsflmaxxa094g12b1
atgtcgcgtgggttggtagagacgaaaccaggggacatttttaaaaagtttagtcattacgtcgccagctttggcgtcgccgacagcatgtttgaaggctgacgctgaagcagattgcggctgccattgccattgctccttgtcacaagaggcctatgttctaccacaagacgataaaccttgcgcatgctttggcctggaccgccccccccagcctaggctaaacccaggctcaccgccttacaaccaacccccaatccccccccattgctgggctccaccgcatttttt

SEQ ID NO: 57486 - DNA, 184 bp, Gossypium hirsutum
  Clone ID: uC-gsflmaxxa095a03b1
ctaatattccattaaagcccttctgctctcatctgggcctgttttcatggccaagcgggtcccagcctctcctccaactcaattccctcccctccatcaagcaacaacctcttccatcgccgctgtccctaccaccggcggaaccccctcttaaaacttaagcgggtctcaataccgatcccgg

SEQ ID NO: 57487 - DNA, 137 bp, Gossypium hirsutum
  Clone ID: uC-gsflmaxxa095c01b1
ttctttgctacctctcattgctaacagagagacttttcattttttcaatccggggggctttgccaaagtctgtccgctccaaggcccctctcctccagcgcattccggaccatttctgagatcagccctctccagag

SEQ ID NO: 57488 - DNA, 144 bp, Gossypium hirsutum
  Clone ID: uC-gsflmaxxa095g12b1
ctaatataatgggagattcccaggcttgtccgacctggctactttgaacaggcttgacgggtttgcatgcggccatgaacaaccttgaaggtgaattgcctgcatcctctagcggcccttatgatccaacctccccctccctac

SEQ ID NO: 57489 - DNA, 480 bp, Gossypium hirsutum
  Clone ID: uC-gsflmaxxa096a08b1
aggcttgtttttcacacacacaaaaaaaagtacttggttttttctctctttggacaagacaaaatggcgaacgcggcatctggaatggctgttgatgatgaatgtaagctaaaatttttggagctaaaggcaaagaggaactaccgctacataatattcaagattcaggaccagcaagtggtggtggagaaagttgggaacccaggatctacctatgaggagttcactgcttctttacctgctgacgagtgtcgctattctgtcttcgattttgatttcaccactgatgagaattgccaaaaaagcaaaatcttcttcattgcatggtcacccgatacatcaagggtgaggagtaagatggtgtacgctagctcaaaagacagattcaaaagagaattggatgggattcaagtcgagttacatgcaacggatcctagtgaaatgagcttcgatattataaaagcccgggcaattaaacgc

SEQ ID NO: 57490 - DNA, 446 bp, Gossypium hirsutum
  Clone ID: uC-gsflmaxxa096a12b1
gttcctgggccacagaattcctttcttggtagccgggggatttgttgcagacagttgttcatggccgcacaccaagaagcagaaccgtcatggcaggaactgcttggtagcaaaaactgggactcgctgctggatcctcttcacttctgacttcgcaaactcatcctccgctgcggtgacttctgccaggccacatatgacgccttcaacaacgaccaaaattccaagttctgcggttcaagccgctatggcaagtcctctttcttcgacaaagtaatgctggaatctgcctccgattacaaagtagaatcgtttctctatgccactgctcacgtcactctccctcaagcctttatgctccactccaggtcaagggagtcctgtgaccgcgaaacatactggattggctacatcgccacgacgttcgatgaaacatcgaaagctct

SEQ ID NO: 57491 - DNA, 551 bp, Gossypium hirsutum
  Clone ID: uC-gsflmaxxa096c09b1
cccacgcgtccgacaccgtgaaacatcgacggagacgctccgccattaaatccatgtttggcaaacatcgagcttcgataattttcaaatcaaggttgccatgtaaaaatacaacaggatccgaagcatcttcccccattgaatcaaatcgagaaataaagaaaaattattcaaagacggtcaatgagaaaaatgaagatgataaatagcaatgtaaaaggtaggcaagggacgttgttttcgaaacatcagaatcccagtttgttttctccgactaaagccaacgtccataaccaaaggctgtaacagggagcgaaattccagaagtttacggttttgtttctttttggctaatgtggttctgtttatcattctttgcctttgccggctactctctcaattcttctttatcattcttgttttgggttttcattttttttttctaaatgactgacagcttcgatgcgccatttttttgaactattctttttgcagcgattgggtttaatgtagaggctctacaatacaacaacatcaagttcaagtttcaa

SEQ ID NO: 57492 - DNA, 551 bp, Gossypium hirsutum
  unsure (1)..(551): unsure at all n locations
  Clone ID: uC-gsflmaxxa096g10b1
gttggatcatctaggaagagaaagtatctgatggttatcggaattaatacggctttcagcagcaggaaaagaagagactcagttcgtgctacatggatgccacaaggtgaaaagaggaagaaattggaggatgaaaaaggcattatcgttcgctttgttattggccatagtgctacatcgggtggtattttggaccgagcaattgaagcagaggataagaagcatggagacttcttgaggctggaccatgttgaaggttaccttgaattgtctgcaaagaccaagatatattttgctactgctgttgctttgtgggatgcagatttttatgttaaagtcgatgacgatgtccatgtaaatatagcaacacttggagaaactctagttagacaccgaaagaagcctcgtgtatatatcggatgcatgaaatctggtcccgtcctctctcaaaaaggagttagataccatgaacccgagcactggaaattcggcgagacaggaaacatatatntccggcatgctactggacagttgtatgccatttcaaaaga

SEQ ID NO: 57493 - DNA, 494 bp, Gossypium hirsutum
  Clone ID: uC-gsflmaxxa096h08b1
gtcataatctgctgtgaataaggaattgggcgaacgggagtttttggagcagaaaaatggattgaaaagcatgatttcaaggactggttctgtgtcggggtttgaggacaatattttggagcaagtagagatgcctttggactgtgttgacctacaaagtagaacccatatccgtcatggttcactgtgtactggtgtcaatggcaggttgtacagtaatggaattggattagagaaatcagttgaagaccgtcctgatgataggttactgtctggggtgccgaaaggggatgataaagttgcacagatttcatcatccaaggatatgttatccgatcaaaacacagtggcatttgtgaagcagaaaagccttacaaatcaggcaaagaggacagtagaaacggaggcatcgggcaggaaagatgtgagtatgaggaggacctcatcttataatgaggctgtagtgtctgaagcatcattcatggagattctta

SEQ ID NO: 57494 - DNA, 344 bp, Gossypium hirsutum
  Clone ID: uC-gsflmaxxa097b03b1
gcgtttattttcaggccactctctcttgctaatggggggggatttataaaaaatctggcgggacaaaaatggagtctctgtgaacgatctgtgacagagagttttcgatccaacagcagaagatagattctttgacggcatcgattccttcgtctcttaattccatcaagtccctagcgcttgatactgctcaaaatcatgccaaacttgcaaagttgaaagccaatttaagagaagccgaaaatgagtttgtcaaggttttagttgcgaggacccgttaagaggctaatcaaatggcaacgagggattcaatttctgctgtaaagctagagtagaagaactta

SEQ ID NO: 57495 - DNA, 459 bp, Gossypium hirsutum
  Clone ID: uC-gsflmaxxa097c02b1
gcgttctttttttgctcttcacctgaccctatcaaggggacccagatttacatctgggtgccatacggcgccccttttctttctcagtctctttgttgctggaaaaccctaaaatttcgtcctttgttcttctattttagctactccttacattgaataaaatatcagtcttttctcagtcttaatcgacattgtgttttttttttaaactgtctcattgggtgtttatttttgtgcttttctttaattttgagatctgctggaatttattttctctgttcttctgaattctaggttacgttgggttggtggttagaaaattgggggtttcattgatgttttcaggtcttctggaaattcttaatttttttaattgataccttaagcaatcttaagtttggaaaaaaacccaataatatatgctaatccactctaagcttcttcttttttctttaaatt

SEQ ID NO: 57496 - DNA, 438 bp, Gossypium hirsutum
  Clone ID: uC-gsflmaxxa097e02b1
catggtggtatattcggaccatttgtgatatggggactgtgtggatttctttgggttttagtatggctatctgcaacctcaagtacccccgatcgaagtccccagatctcaaaatatgagttggattacataatgaacaagagacagaaatcccatgcagtggaaagcaagcctaagaccaaaatgatccctccattcagaagattgctttctaaaatgccaacatggtccctaattgttgcaaatgccatgcatagctggggcttctttgttattctctcatggatgcctatctactttaactcggtccatcatgttgatctcagacaagcagcatggtttagtgctgttccatggtgcatgatggcgctaacaggatacttagctggtttatggtcagacattgataaggaatggtaccagtatcactttgactcg

SEQ ID NO: 57497 - DNA, 404 bp, Gossypium hirsutum
  Clone ID: uC-gsflmaxxa097e10b1
tctgttcacgcgtccgatcaaaaacaccgcaggggggaaaacaacagcggcgtttcgcacaagtaaagcaatagcggtgttcgccaaaggtaaaacaatagtggctttacagaaaaatgccctctctttgccatcagccgccgcatccggcgacctcctaccaccaccccttgctcgtcattgcaaaacctcactcacttacgttggctcgtccgtaccctcgggcactatctacctccactttaacgtcgttctctgttctgcactttgtttacttctctctttccctcttccttccgtcatcttcgttgctcgttcttccgtctttgctgctttttactccgttcaccggactctctctatttttattttctctttggttatcttttatctttggctggatc

SEQ ID NO: 57498 - DNA, 413 bp, Gossypium hirsutum
  Clone ID: uC-gsflmaxxa097e12b1
ttggttccacgaaaaataaagaaaaaagacgggagggacggattgtaagcaggcggagctcatggaaatgggttcgggctctttgacagactcaggtgggtcttcctccaactcctccactgagtcactcaacggcttgaaatttggtcaaaaaatctattttgaggatacatcagctgctggcaccggtggtggtacgaccatggggactccactcaagtcaggtatcgggtcttcaagctcatccgggtcgggtaagaaggccatgggtggagtggtgcaaggtggtcagcctccaagatgtcaagtagaagggtgtaaagtggatctgactgatgcaaaagcttactattcaaggcataaggtttgtggtatgcactctaaggcaactaaagtcattgctgctggtcttg

SEQ ID NO: 57499 - DNA, 469 bp, Gossypium hirsutum
  Clone ID: uC-gsflmaxxa097f01b1
gcctcttttgctttgggcctcttttgctttaccgggtggggaagctatgcaaaggaggagttcttgcttctaaaactgcagcagaggcattggaggaggccaccactgccgagtctcttgttaggaatctaagcgtgttttcagaactttcctctaactccaagcctgggaaccctttgccaaccattgaccgatttttatccatttacgacgatgtcgtaaagtacactggaattgctgaaactgttgcagctggttacagatcctgcattgaagaacactcgaaatcatcttctctatgggttgaagctgcagtgacaaccgatcttgaaatagtctcccttctaacccctcaaaacaatgaatctctatcagctttacaaataaacctgtctcaacatgctttacccaaaaaccaactcaaaaccagttcaatgccacagctgcagcaaaataacaatgctgcaat

SEQ ID NO: 57500 - DNA, 466 bp, Gossypium hirsutum
  Clone ID: uC-gsflmaxxa097f05b1
gcgcccactcgtgcggtttttcagacccggcaacggggggggaagataagcaccaatggagctcctcctgctgaggacagtgcagataatgcagggatggagtcaagagaacctttttcatttccggagatcagtacggttcgttatggtatgaatccagctgatattgatgacggaattcctcgtttgtcgagggtgctatcaaataaatctagatcaaccaagtctaagcaggctgctgttgcaaaggtagagctggtactgctgggtttggaaaggcagtggatgttctggacacccttggtagtagcatgacaaatttgaatcttggcagtggctttacctcaggggtaacaacaaaagggaataaaatatcaattctatcttttgaagttgcaaatacaattgttaaaggtgccaatctgatgcaatcgctttctaaggagaatattagacatttaaaaga

SEQ ID NO: 57501 - DNA, 505 bp, Gossypium hirsutum
  Clone ID: uC-gsflmaxxa097h11b1
tgctgggatcaagagctcttcgacgacatcggggggtaagttcgatgacgtatgggggatctcggggtctccgcctcgtcccaagaataagtcgccaaacaactctccgtttgatgacctgcttgggaatctcggggggaaagaaccggagatgaaggttaagagtgagagagtgaaatcggagaaagatgcgcctctgtttgatgatttgctttctggttttggccggagtagctctcctacacccgcgagatcaacttcagatgctggtcagtcccagaatccaccttcaaattcaagtaagactgggtccaatttgatggaagacccttttgttgtcttaggatcaacatcagaccctgcagatgcatcctcagggttgtttatggacccctcagaagtaataagtaaacctaacgggtctgggaagtcaggagtggagagttcatctggtagtgggggagtgtttgatgatatagatccttttgatggtattgaaaaatat

SEQ ID NO: 57502 - DNA, 523 bp, Gossypium hirsutum
  Clone ID: uC-gsflmaxxa098b02b1
cccactcgtccgcagacaacggggaaggaaaatgcaaggggcgtggaaaccagattgttggtcttcttttttctcaatttgcttttacttttgcttccaacgttcttcttgggacaccaacttccgtacgccatggcccctcctatgaaaattgttttcggattgttaacatttgtcactgttggaatgataatcggggctttgtttcagctagcattcatacgcgggttagaagattcatacggtgatgactttccaactacaaaattacatagacgtcagagtgatggatatcttaagttgccaagaggtatgagtcactggcacggtgacaaagaagcagaaattttgcgtcttggagttgtcaaacttgaaataataagctggtcacctcgaataattgtacttcataatttccttagcaatgaggaatgtgactaccttagagccattgcccgccctcgacttcaagtttccactgtggtagatgtaaaaactgggaagggaattaagagtaatgtca

SEQ ID NO: 57503 - DNA, 527 bp, Gossypium hirsutum
  Clone ID: uC-gsflmaxxa098b04b1
tatattatttcaggtgatgtggtacaatattagaggggaacatacaatgtcctaataactagactagtggttgaactagtcagaccattggttcctggttcaattgattggatcgggtttacaactataccaataataattaaataaatattcataattcataaaattttaaaaaataaaaaatttattaaatcggattaaccttttcaactattggtttttgtctttattttttatcgatttcaagcagttttcaattcaatcagctcaacccctttgtttggactagtgtatggttgatcttcaatccaatcagtctgaccaatcaatctagtcatgttccaaaaacactgatcatatcatcaaatcttaacgaaatccaagttcagggaccaaaatgattctagttgcaaatttaggtatcaaagtgaaccaaaaataaaaatatcaaagtgtatgtaattgccaagttccaaaaattatattattcaaatttaaaagtgtaaaaatgtaataatgaattatat

SEQ ID NO: 57504 - DNA, 526 bp, Gossypium hirsutum
  Clone ID: uC-gsflmaxxa098b11b1
ttttcttttcttttttcttttccttaggttaatgcgcttaaatataaatcaatatacattctagctatcttactaattcctctttctctctctctctctctctttaatttttcaaaaaaatggataacaaaccatgcaaatcccaagatgttgaagtgagaaacgggccatggacaatggaagaagatttgattctcatcaactatattgctactcatggtgaaggtgtttggaataatcttgctaaagctgctgggttgaaacgtaccggaaaaagttgccggctccgttggctgaattatcttcgtccggacgttcgtcgaggcaatatcactcccgaagaacaactcttgatcatggaactgcatgctaagtgggggaataggtggtcaaaaatagcaaagcatctgcctgggaggacagataatgaaataaagaactattggaggactagaatccagaaacacatcaacaaacaagcagaaatgttttcttttaatatcagtaccccagaattacttgatca

SEQ ID NO: 57505 - DNA, 524 bp, Gossypium hirsutum
  Clone ID: uC-gsflmaxxa098d07b1
tattgtcaagagctatcagacaattatacggggagtcttttaaatattttttagtttttctcaaacaatcatttcgaagttcgtgttaatctgcaattttttacggaaatcgacccgggatccgccgtaattagacctccagaaggttcctaactgaagcttacaacaatccgctatattcaagaacaggattttgcatggaaattagtctcagtaccaacaaattggtttcaacaccaacataattagggttccgacggaagagtcaagtcatatcatgtacggttgataatttcgccgccacggaaagggggaaaaccaatttttataaagtactttctcttgattccgagaacgtcagtttagctgaaataaagaaggcttatagaagaatggttcttcaatatcatcccgacgtttgttctccttcagcaagggaagaatcgacccatagatttctcgagcttcaaatggcttacgaaactctgtcggatccgatttctcgtcaaacgtttgattatgaa

SEQ ID NO: 57506 - DNA, 527 bp, Gossypium hirsutum
  Clone ID: uC-gsflmaxxa098d11b1
cctacgcgtccgcggacgcgtgggcttttccgacgcaaattgaacgagtttttggatcgttttcctttgcaatcaatctgaaatttttaaaattttcactcttttggtccatcaatttcagattcgaaaaaaaaaaaattatgagcgcgtataaacgcgtggttcaattagggtttgatgcgtattccagttccctcgttaacaaatttggatcccggcagatttctcaacttgttaattccaacggaaagcgtgcatttctcgtcgatacattggctctggttcgaagtttggaagcggaaggcgtgccatcaaaacaagcagaggcaataacagcagcaatcaccgaagtgttaaacgacagcttggagaatgtttctcattcttttgtttctaaagcagaaatgcagaagactgagatgctccaagaagccaatttgtcaaagtttaaatctgaagtaaaaagttctcaggattatcatttttctatgttgcaacgtgaaactgaaaaacttcgaggtgacata

SEQ ID NO: 57507 - DNA, 523 bp, Gossypium hirsutum
  Clone ID: uC-gsflmaxxa098g12b1
ttttcgcgtccgcccacgcgtccgcctggccgtgaaaatggtgagcagtatggggctccatttaaagaagaagcgtgggatgatgaggaatattctagtaaccctttagatacaattactcctgtgaagccacctaatgaggtcattcctgttgataatgtaaaagctaatgttcaatctgagtctccattgaatgatattgaggagtttatgagacagtttgctgatgagcctgtgcctccacagccgcaagcttatcatagccatgtattgcatcaggttgtcagtgcagaagagacacaaagtactttgctggatccatctccaaggggtgttctctttcccgagcaacttacagttctccatggtcaagcaagatttgaattttcagagtcgcctatttctcaattgctgttgcaggaggcacctgaggtcacaactgtcgccgaccaccttggtcaggtacctcaattatgtgaggaggatttcttggagattgatgatctccttggtcctgaacctt

SEQ ID NO: 57508 - DNA, 514 bp, Gossypium hirsutum
  Clone ID: uC-gsflmaxxa098h12b1
tttctaagcagctagaagtgcagcacgagccaaggctttcttcggtgaatcgtttgaggagcaatgagtaaaaaaaaaaaccctatggtattcttcgatgtttcaattggtggagatctggtggaaagaattattatcgagctttttgcagatgttgttcctaagacagctgagaatttccgggcactctgtacaggtgaaaagggcattggcaaatctaccgggaaacccttgcactataaaggaactttttttcatcgaataatcaaaggattcatggcccaaggtggtgacttttcaaagggaaatggcactggcggagaaagtatttatggagggaagtttgcagatgagaattttaaactgactcatgacggacctggtgttctctctatggcaaacagtggtccaaacacaaacggatctcaattctttataaccttcaagcgccaacctcatcttgatggcaaacatgttgttttcggaaagggtatcaagggagtagaagttttga

SEQ ID NO: 57509 - DNA, 266 bp, Gossypium hirsutum
  Clone ID: uC-gsflmaxxa106a10b1
gcgatttgattctttggaaacttttctggttaataggacgtggggaccaattgaagtttggaagttggtttgctaagccaaattaccttttagggtaatcattttccttctggaaaattgcagaaattcagaagaagtctggataaggatctgtagagaccgagtgcagcttcaccatctgtacttgcagtgaattcaatcaaggatcggataagcattgctgtggaatggaggtgatggtacttttatggagtaggaagggaatg

SEQ ID NO: 57510 - DNA, 302 bp, Gossypium hirsutum
  Clone ID: uC-gsflmaxxa106c02b1
aacagttacatgaaggaaaagagggaaaaaagagaggaaggaaacataaagggatttggactttggacggaaaaaaaatagagaaagaaaacggggaaaggaggggacaagagaatggaagagaaagatgaaggattagcaatggcgaatgatttcttttggtcatatacagatgaacctcatgcttcaaggagacgtcagatcctctctaaataccctcaaattaaagagctttttggtccggatccctttgctttccttaagattggtgtggttgtttcgattcaactatggactgtcac

SEQ ID NO: 57511 - DNA, 145 bp, Gossypium hirsutum
  Clone ID: uC-gsflmaxxa106f03b1
aagagtccgatgtaaaagcttcgtcttcttcgcaagagaatcagaaggagaaccataaacttgctttccaagctaagcgtgctaagacctccaagcctcaaccccagcttgagtactttgaagataagcgtaacttggaggattt

SEQ ID NO: 57512 - DNA, 449 bp, Gossypium hirsutum
  Clone ID: uC-gsflmaxxa107a12b1
gtttaatggtaccaatttaccacttattttttggctctactagtgaagggttgtgacttagtccttggcattcaatgattgttatcattagggccgattgtggggaattttagctcattcactatgcaattttagtgcctggggcaggcgtgcattctcagaggtattttacgaggaggcctacaacttttatctagtgaccaactatctaatgtttcaacatggtagcacatgggcattgactaatgttgtttactttttgcgatcaagtagctctatcacttccaaagtctacactgtcccaaaactcgtagagagctctcagaggaagttcgtgatgtgttgaaaccattactagcctccctcagtgcagggtataggaccataagatgcctttgcaggatgaaacatcgatggcgtgagtgagaccatataggttttttgctgtg

SEQ ID NO: 57513 - DNA, 383 bp, Gossypium hirsutum
  Clone ID: uC-gsflmaxxa107b12b1
gcgtgtttttgattcatcaaacaacaatgtcgtggcgaacttacgttgatgatcacttgatgtgtgaaatcgagaacggccatcatttatcctccggtgctattctcggactcgatggaagtgtttgggcccagagctccgcttttcctacgtttaagcctgaagagattactgccatcatgaaagattttgatgaacctgggtcccttgcaccaactgggctgcaccttggtggcgccaagtacatggtcatccagggagagcctggagctgtggttcgtgggaagaagggcacgggtggcgtaacagtgaagaaaacagggcaagcattgatttttcgggatatatgatgaaccctgtgacttcaggacagcgtaacatgg

SEQ ID NO: 57514 - DNA, 521 bp, Gossypium hirsutum
  Clone ID: uC-gsflmaxxa107c08b1
gagaaagaaacaagatagtgaagtatcaaaggagaatgcagtgcccgtaccaaatattgatgtagtggcagaaaaaggatctactccaataagtttgagtgctcctgctgttaacacaggtggtcgtgatgccatgcctttaagaacattagtggtgccaggttcttcatctgcattggatttaattaagaagaagttgcatgaccctggagttccttcttcctcacctgttccggttatgccagtaacagcaacgcatgaattaaatggctcaagagcagttgatgttaaaggcctgtatagtgagagcaacaaagataaactaaaagatgcaaatggggatggtagcatatttgattccttttcagattttgaggatgcagacagtgggccttttaaggaagagcgttttatgcaatttaaggaaatgcttaaagtactgggagttgcaccattctaaaatgggaaaaggaactgccaaagatagggttctgaccacgtttaaggtttttcaagtcatt

SEQ ID NO: 57515 - DNA, 391 bp, Gossypium hirsutum
  Clone ID: uC-gsflmaxxa107c11b1
ttttaattgaaataatataatttagaataatattttcaatttcactatatatatttcaattccttaatctcggttcacagttcatccagcacgtaatttcattgagaaagatcaagaaatggagaagaacagtagctgttgcttttcaaatttatcttcaaatcttccgatcacttgtttgatcactttcatcaccattttcctacaccgagttcttaacgtcatttaccgaaccggcaagccactaggcaaaagagtttctccgcagcggcctcttagcactctcattgttttaggttcaggaggtcacacagcgcagatgattaatctcttgttagtttcgggaaaggaaaggtttacacccgaggtttatatccgcgctgcgactgat

SEQ ID NO: 57516 - DNA, 307 bp, Gossypium hirsutum
  Clone ID: uC-gsflmaxxa119c02b1
cattggtgcaccagagcagatcataactctttgcaactgcatagcagatgtaaggaacaaagttcatgcagttattgataaatttgccgaacgcgggcttcgttctttagctgtcgcaagacagtaagttctctgtgtatcaatttagtgtaccttttgttccttcattttttttttttttttttcttctttctctttctttttttctttttcttttttattttctttctttctttatctctatttttcttttttctttatttttattttttctttttattttcttctcttttctgctttttctttt

SEQ ID NO: 57517 - DNA, 332 bp, Gossypium hirsutum
  Clone ID: uC-gsflnu33B008f08b1
tattcatcctctccccttgtctccggtcgaaagggccactgaccatccgttcacccaccatagacggtggccgacgttgcgtaaaatgtggtttttcagctccttttcaaatgggtctgaagacgaaaccctcgaagcctgcaaaaaccaaaagaaaaaggcccactttcaccccctttttcgtgttcgattccgaccgtggagagaaacctccgatgacgggaccacatggtgacgatgcagtcgtgaggtaactccggtgagccatttcctcttttttttaatgtaaaaataacagataaataaactttaaagcaatatttgaaataaaa

SEQ ID NO: 57518 - DNA, 426 bp, Gossypium hirsutum
  Clone ID: uC-gsflnu33B011c05b1
tcccacgcgtccggaaaaattaaaaaaaagaaaaagaaaaagaaaatctcttttattcattttatttttctctctctttctttcttgcttcttggtattattagatttcgattcagctaacagttttccacttatagttgttaaagattcttcagatctatgtaaattttatggatttttttgggtatttgccttttttttcttctcctttttaaactgtaatgtaattatagttctctgattcctgaagatgaccgtgggaaagaatctattttcccttcattttcactacagaaaaaaaacctcttttattctttctcgagagaatccgagctccttttcactctctttcacttcggctctcgaacgaaccgcgagttcttcaaagcaaaagctctctgtctccccccccccctctcccctatg

SEQ ID NO: 57519 - DNA, 392 bp, Gossypium hirsutum
  Clone ID: uC-gsflnu33B012f04b1
ttcgcccttgacctaaagtcagtgcaatgtggcatgctggcgcaaagatgggtcttactgtctgtagaactagtgcctttaatgatggaggttataatgctctccaaatgtgccctggccaattcgatgagcgagttttcaaggccttggattatgctattgcagaaacaaggcaacaaggaattaggctgcttctcaccttggtgaataactagcatccatatggcggaaagacgcagtatgacaactgggcatggcaagacggcgttggtttgagctctcctaatgattccttcttcgttgatccatgtatccgcaaatatgtcaagaattatgttctgactgttctcacatgaggaacactatcactggaataaaatatcgcaatgatc

SEQ ID NO: 57520 - DNA, 480 bp, Gossypium hirsutum
  Clone ID: uC-gsflnu33B016f05b1
ttaaacactgctcagtaaaccctaatcttttggcaatggctttcttttcaaccagtttcttcacttgtttcttctctggttctaataagctagcttcccaaggagaagacactcaaccatcatcatcgaccattattaaagcaggtagtgatgctaaactgaaggaaggcaaggctaagaacaaccctcctattccctatcggatcaaaactttccctgttatgaaagctgttggttgaagtagtataagttggaatccctactttaaacgctcatgtcccgagacagattggtctcaagtccgatgttggagttgaaacatatgctaacatgcatgtcagcttctttaagagcacgttttctctgtatttaatcaactctttgttttttattttgagaattgtattaatttgttttcatcttcgacaaggttaataatgtttgttcaggaaatctactgttagaagttagtgagttagt

SEQ ID NO: 57521 - DNA, 477 bp, Gossypium hirsutum
  Clone ID: uC-gsflnu33B018d06b1
tccacgcgtccgaggaagtgcaccagcacgacttccattaccacttgatcttgcagaagatggccctgtttatgtcaatgcaaaacaatatcatgggattcttaggagaaggcgttatcgtgcaaagcttgaagcacaaaacaaacttgtcaaatctcgaacgccctaccttcatgaatctcgacatcttcatgcagtgaatagagctaggggatccggcggacgttttcttagcaaaaagaagctccaacagcctcatgattcaacttctaacccgagttcccattccatctctgatgccagctgcttagaccgaaagaacagatgatcagaacttgagagccatttgcatgtgagaggctgcagcagttcaagtacaagctgatcggacatctcaagtgcgaggaacatcaatgatagctgcagctacggaaacatggaatcatggacatctctcctggtgttagcagcatgtgc

SEQ ID NO: 57522 - DNA, 431 bp, Gossypium hirsutum
  Clone ID: uC-gsflnu33B019h06b1
ttcatcaagtctgcaaaaatacaaggctggttattggtgcatgatatggctctactaggcggaacaaagcactgataaaagtcgtttttccactgccggtccgaccaacaatcccaatcttacttcctccttcaaatatgcagctgatgccatgaaggaccagcggagcattaggccaataacgaacctgcttgatgagtttgacgttttattatgcattccctgtaaagttcatgactcaacaaatggagaaaatagttagtaaaaccttttgattataccttcaaattacaaatctcgacttttccaagacaaggccagccgtgtgtaggccggttagtttcaattacttcgggagcttcactaggaatatgcatgtattgctctaccctttctactgaaacaactgaacttgatagaaaaaaataaaa

SEQ ID NO: 57523 - DNA, 571 bp, Gossypium hirsutum
  unsure (1)..(571): unsure at all n locations
  Clone ID: uC-gsflnu33B026a10b1
gttttgtgttaggtacaaatccatagaatttgatttgttggaatcgcaaatccttagtggcgattgggatgattgtattgataccttgaataaaattaaggatgtgaaggatgatacacgatcttcagttttgtttcttgtgttcaagcagcgttttttggagtatttgaatcgaggtgatgattctttggctttgtcagttttgcaaaaacgggttcccactttacatatgagcaacgaaacagttcataaattagcttatagtatacttgcattgaaagagatggagttgggtaagctagatgaagatgttattagtgaactgcgaaaaaggttagtgatggagctaggcaaacagcttcctccgccaattgtattgcctgagagacgtttggaacatctagttgaaactagtgtaacagctcaaattgattcatgtatatatcataattcccaggatgcagtcttgctttatgaagatcattgctgcggcagagatcagatacctacagatacagntcagattttgactgaacattagcattgaagttgggtcattcaattttcaaat

SEQ ID NO: 57524 - DNA, 546 bp, Gossypium hirsutum
  Clone ID: uC-gsflnu33B026b10b1
ctttcgcgtgggtggctacgcatccgacaaagctgctcagctattcggcatgagaggccggctatgggtcctatggatcctccaaacattcggaggtgccttttgtatctggctaggccgtgctaatacactccccattgctatcttggcaatgatcctcttctccatcggagcccaagccgcatgcggtgccacattcggcatcatccccttcgtctcacgacggtccctggggatcatctccggcctaaccggcgcaggtggcaacttcgggtccggtttgacgcagttgattttcttctcaacgtcgaggttctcgaccgccgcaggtctcacgtggatgggcgtcatgatcgtggcttgcaccttgcccgtcagcttggtccatttcccgcaatggggaagcatgttccttccgccgtcgatagacgtagcgagatcaaccgaggaacattattactcgtcggagtggaacgaggacgaaaagaaaaaaggcatgcactcagcgagccttgagttcgccgagaatagcctgtcggagcgcgg

SEQ ID NO: 57525 - DNA, 498 bp, Gossypium hirsutum
  Clone ID: uC-gsflnu33B026e10b1
gtgatcacagctctacacagcagctgagtattttgaactttcctacaccaatgatgaccaaaaacagatagtggtagaaacattgaaagattataccatcaaagcacttgtgaatactatagaccatttgggttctgtgacatacaaggttaacgatcttttagacgaaaaagtcgaagaggtttcaggaactgagctccgagtctcttgtattgaacagagactacgaacatgccacgagtatattgatcacgaagggatttcacaacagtcatcggtgattaatacgccaaagtacaataaacgatacatcttgccagtcggggagaccatgcatggtgcaaaccttacaatgtcgaaatacgtaggatgtagtctagatgacgaagatgactggcatcagttcaagaatgccgttcgagctacgattcgagaaacaccaacatgttcagtccgggaaactccgacatcatcggccagtttcagaaaagggcgatc

SEQ ID NO: 57526 - DNA, 542 bp, Gossypium hirsutum
  Clone ID: uC-gsflnu33B026f08b1
cccacgcgtccggtggctctatgatttttctgtttttatgtgcatttcttgataattcattatagatgctcattatgtatttgaatctgtgtgatatcaaattaatgaagtttacaaataattaataggatttcccaagctggttggcttcctttcacacgacattggtgcttagatagtattttaaaagacttgtctggtttttcaaagtagagcttgacctgctgagcaattcctgattctcatagtcatatgagaaacagatggattggcatctagttatttatgaattattaaactacagagtaagaatgtctaggcttttctattaggggcaagttctgctaatgtttttgagagaaatggtatcttgtgcaagtaatctttaatcttcatgcacgtggaaagtcagcttctcctggcctatctatctcatggtttgtttctcttatttaggctcgtgtcgaacaaaactagtccggcttgttatagggttatacataaactatagtgctattattttccactggcaaaaggatata

SEQ ID NO: 57527 - DNA, 492 bp, Gossypium hirsutum
  unsure (1)..(492): unsure at all n locations
  Clone ID: uC-gsflnu33B026g11b1
tttctcgtccgcccacgcgtccgatttttttccttttctttttggggtgcggctccattaactcggtcatttgtttttcttgtaaactttttcttcaacatttgatctgataggggatgggaacatcaaaaaaaaagttttttttggggggggggggtgccattgttgatgattttaatgggggactgaggtgggagcccaagaatgccaaaattttcgtttacttagcaaacacatggcctaattgccaatgaacaaaatttgtataatgcatatgttggaaacttccaaaaaaaagaaaaaggaaataaaggtttatatcaaatatgaattaaaaaaaaaaaaaaaaaaaaaaaaaaaaaaaaaaaaaactaaaccccccccaacaaaaaaaaaacaaaaataaaaaaaaaaaaccnnccccccccccaaaaataaatacaccaccaaaaaaaaaaaaaaacaaaaccctaaccaccgggggggggccct

SEQ ID NO: 57528 - DNA, 236 bp, Gossypium hirsutum
  Clone ID: uC-gsflnu33B028a09b1
tccatagatacgcccacgcgtccgcccacgcgtcctttcgaaataccgtctctgtgtgcctcttgagcttcagagacttcagtatcgacactccggctaagctcttcagctgttctttcacaagcacttaccgttacatcagttgttgccccaaaatccacttgctacgcgtttgataattctagtcatctccttgatttgactgagtggagcggaagtactttagtgtacgaggg

SEQ ID NO: 57529 - DNA, 529 bp, Gossypium hirsutum
  Clone ID: uC-gsflnu33B028g12b1
tattcatactttggaattattacaattattatttttttaataattataatttatagaattttatatgatcttaaaaaatatggagaatataaatatattttaaaagatgataaaaaagcaaaagattattatttttattcatttattggatgtattatttatggtcatggaaatttattaaatgtaaatcaattaattgtaacaattatttcattattatcagattctttatttttaggaatttgtgaaaaatttattgcagtattatcttgtcattatgatgataataacaataataatgataaatgttggcatcatgaacattttgaatatgtttgttgtaatttaatattattatcattttatattccattatgtattatgattgcaccaatgtttaatgatacaagttcaaatgatgaaaaaaataaaaaaaatgaaataaaagaaaaaaaagaaaataatttttgttcatttgataatacaatagaatttattaatccatattaagtttattaactttaacaaa

SEQ ID NO: 57530 - DNA, 533 bp, Gossypium hirsutum
  Clone ID: uC-gsflnu33B028h11b1
cacgcgtctgtttatattctccaaggcacaagtataggcgtgtcacatcaaacacagtatctaacatccctgctttgcctgcattctctggcagtgacagttctcccttgtctaatgcacaagggtttcacaccgtcaatgaaactcaggagcagactccttccaagcatcatataccaacaatgtcacatcagcctcaatttcatcctattcatcagaaccatcatcaaccagttcacccaaaccaacatggagctcattttccccagaatcatcaatgtgggccaccatcccacttacctgaaattagtcatgctcaccagtcaccaaccatgtctcaacacatagcttgcttacaacccttaacaggaggtcacgttggtgcacgcttgcatgttatgcctacaaatccagcgaaatactgcgatgaatgtggtgcaccttacctgagggaaacatccaagttctgttcagaatgtggcataaagaggttagggatatgatgcagttcaacatgatttattctgaatacc

SEQ ID NO: 57531 - DNA, 535 bp, Gossypium hirsutum
  unsure (1)..(535): unsure at all n locations
  Clone ID: uC-gsflnu33B036a03b1
aatttttgcctgccggtgcgacggttgctcctgtaaaaacacttggggttcatatgagtgcaagtgtaaggggaatcttctgtatataaaagagcaagatgcttgcattgagagaaacggatcgcgctttgggtggttcctcaccctcttggtactggcagctgtggttgctgctggcttagctgggtatatattctacaaatataggctcaggtcttacatggactcggagatcatggctatcatgtcgcagtacatgccgctagacaatcagcataacaatgaagttgctagtgaggcgcagcctttgcgacaaagctcaacagcataaacgagggtaaggagaaagcatggattatggtattatgttggccctcccatgaaattcgagccgtccatatatacgtgtatatatttacagctcttatgaaattacaaaaagacacatgtttaactggtatacaggcacacccacgatgagtcatggttgtattcaaatnttccttcacatataagtgagaagagaagagaatcc

SEQ ID NO: 57532 - DNA, 496 bp, Gossypium hirsutum
  unsure (1)..(496): unsure at all n locations
  Clone ID: uC-gsflnu33B036h04b1
cctatgtgtccgcccacgcgtccgaaaaacgacatcgctgcggctattacgaggaccgacattttcgatttcttggtagatattgtgcctagggatgagatcaaggatgaaactggtttgactccgatggttggggctaccgccagtggggtaccttacttttatccccctatgggtcaacctgctgctggtggtcctggtgggatgatgattggccggcctgccgtcgatcccaccggaggtatttacggtcagccaccttctcaggcttggcagagtgtttggcagacggcggtaaatgatgatggctcggtggaagtggagttaccggtggtcaagagaatcttgacggtcaaggctaacctaaaatcatgggtccgatatcgtacggtggatggtgcggaaaacgcgtggaactcaggtgatctactgnggaatttatgcttgtgtgcttactgatttatgaatgcagttgtgttggtattgtttatgggaa

SEQ ID NO: 57533 - DNA, 466 bp, Gossypium hirsutum
  Clone ID: uC-gsflnu33B037a08b1
ctttctcgtgggtgagctttgcaattcggatgccaataacttcgtcaatacaaaagaagcatcagcaagatatgagaagacagaacagtggtgcacaagttggtggtatcagttcaaggtgctgcttcaaaggggggttagagaaaggagatatgaagccttcaacaggctaagaattttccaagtgatcagtgtggcagtacttggtggactactatggtggcacaccccagcttctcacatcttcgaccgcattgcactgctgtttttcttctcggtcttctggggattctatccactctacaatgcggtattcacattccctcaagaacgaacaatgctaatcaaggaacgctctttcggaatgtatcgcctttcatcgtacttcctcgccagaacctttcgtgaccttccacttgagcttgccctcccctcagctttcgtctttataatctattggatgggt

SEQ ID NO: 57534 - DNA, 468 bp, Gossypium hirsutum
  Clone ID: uC-gsflnu33B037d06b1
ctgttttcgtgtcacggaaaaagaagcaatcccaggagatttattgaaatggggttcgctcggtttttgcaggacttcgagatttgcatctgggttcaagcctttagaacccaagccattggattccatcatggatttgaacagatcaaagaaccgttcacctgaggaccttgcttctatttgggatgattatcacttgggaagaggtcatattgggttgaccatgaaggcaaaactttaccgtttattggaacaaagaggctcagattgccggtattttgtcgttcctttgtggagaggaagtggttatacaacagtgtttggtcaagtgcaattgccatacatgcttttcactggtctcgaagattataaagcaagaggaactcaagcatgtccttacttcactgcatccttttacacagaatttgcggaaagcaaggacttggtacttatccgtggagatattgt

SEQ ID NO: 57535 - DNA, 605 bp, Gossypium hirsutum
  Clone ID: uC-gsflnu33B037f09b1
ttccgtatttccgggttggccccacgcgtcctttttttcctccttcgggttggcatgagaccaagggctgtaccatgctctgttccttttcatgttccagcaagaacatcaaatccagttatcaaacatgccaacgacatctttatgcttaaacacaatcatgtccctggaaagaaatcttccacatttcagatgagatcactctccaacaacacggttttcgaggatcaatcccagggtgtaatctgctatagagatgaaaatggagaaatagtttgtgaagggtacgacgaaggccctcgttttcctcgacgattccgggtaagtcctatcatctgagagatgctgagatccttgatcttatccgacatagatggctccaaattgttaatggtgacggcctcggcactgctattaaaggtgttatcatcgtgaacaatgactcctagtggaacgaatttaataggttcactaggtagaaagctgtggctcctactagagtccacagatttcattaaataattggttctacaagcaagacacttcaagtatgagagactgaatatagatagctacaagatctctctcttgtaatcacttttgtt

SEQ ID NO: 57536 - DNA, 263 bp, Gossypium hirsutum
  Clone ID: uC-gsflnu33B050b07b1
tctccgaaatacagcttcaactggtatttcaattggatcctgggttggttgggtgttgccttcagcctggccttctctattggtggcatatgcagcatagtgaacaatgaactcaagatgaagttcttcaagcccaattaagaagaaaagaaaaagacacttccttatatatataaaacctatatatcatactttagagatgcaaagatcaaatcaaatgatatatacgattccctctgatctctttttcaccacaaatacaa

SEQ ID NO: 57537 - DNA, 443 bp, Gossypium hirsutum
  Clone ID: uC-gsflnu33B057f08b1
tatcctctagtagatgccctcctaatgccattaaaatctttatcccctatcaacgccatgaatcttgatcctaatggctgttgcctttgtttgtccttaacctccgccaaaaagtcccttctcccctgccttgaatgtctcttttccaccagcatccatagcccaaattcaggttctttctccttgcttcttgaaccgatggagtcaccgtctgatttgccttcatttgacacatcaacctcggtcgacagcttaccactagccaccgtcgaatttggatctgtttcaaccattgaacacatacgtttgatgtggccatacttgccacaagtgaagcaaacggtcggaagggctttcgattcgacgcattggatggctctaccaactaatacctatgaaattaaggcttttccaggtttatataaacagcccagcgagcgaat

SEQ ID NO: 57538 - DNA, 537 bp, Gossypium hirsutum
  unsure (1)..(537): unsure at all n locations
  Clone ID: uC-gsflnu33B059d10b1
tttatcgcgtccgaagatgaacaagcaagaattgaagccgcaggtggcaaaatcatacaatggaatggccctcgagtttcgggtgttctcgcaatgtcaaggtcaatcggtgacaagtacttgaaaccatggattattccagacccggaagtgacattcgttagtcgagcaaacgacgacgaatgtcttgttttagcaagtgatggattgtgggacgtgcttagcaatgacgaagcctgtgaagttgcgcggaagcggatcggtttgtggcgtaaaaagtacagagataaatctaatggtgaagggattgatggtgcagctcaatctgcagcagagtacctatcaaggcttgctcttagtaaaggaagcaaagataatattagtgtcattgtggtggacctgaaagcccatacaaaatttaagaacaaaacctgacactgggatctcttgctggtgaatatttcacacggatcggntctatactgntttgggtttggngtggnggtaatttgatttaaaagctcctgttttttaagt

SEQ ID NO: 57539 - DNA, 416 bp, Gossypium hirsutum
  Clone ID: uC-gsflnu33B059e01b1
ctttttgatatgactgcaggaatcactgaaagccagacatggctcccaacactgttgcatacactgctgtatttgttaccttgaacttgacgttgtacactttggttagcactacctacaggcctagctaaccaccacgaaagagacacacgcctacccacaaaagtacaccctagagacctgaacaggcaggcactcggccaagagatgcactgaaactaggactgagagctgatttgtgggcctcagtgcgcgtcgcagtgggaccggctaggaccacatgctggactataagctggggtttgactgatctcgaggctgatgtctgcctttgcactggtattaaagctaatgtgaaggctgatgacctaaacgttaatgtaaaattggctgtgctactgaattcctgcgaaaag

SEQ ID NO: 57540 - DNA, 535 bp, Gossypium hirsutum
  unsure (1)..(535): unsure at all n locations
  Clone ID: uC-gsflnu33B059e09b1
cctatcgcgtccgaaattattagagcagcatacaatttatctttcttggatacaaacagattgttcataaaagctcaaacactgaggtagattagtggcatcatcgggttttaatattccaattcatcttgaattgaatgcctttcccacctttgccttaatctaattcaaaaacagacagacgattgctttgtttttctacttcaaatggttgggtttttctttcgtcgtattttgcagcatcgctctcaaatcctattggtcagtttctcctcttttcacttttactgttactggcttcttcttctaccataacaatgatgagcaaatttataataaataaaaaattgctggtggaattgaacttatggatactttattgtggaaacagggacaacgactaagagctatgagatttagattgggaagggagagaaggcgtaatatgcgtgcgacggaattatggnaagattnggaagtgaagctgcagagatggaggaccaaattaggaggattaggggagagatgagagaca

SEQ ID NO: 57541 - DNA, 225 bp, Gossypium hirsutum
  Clone ID: uC-gsflnu33B060d02b1
gtggagacgccgcggtcttataattctacggatttgagcggtgataacaacaggaaaagcaacggcgaagtatcagctgctcagaaattgcttttcacttcgacgagaagcttgtccgtttcgtttcagggagagtcgtttacttattagattagcaaagttaaaccatgtccatttccatctacaaccgctactagatatggaacgccagagaggccgatgcct

SEQ ID NO: 57542 - DNA, 120 bp, Gossypium hirsutum
  Clone ID: uC-gsflnu33B068g05b1
ctagatatgtattttactatagctttgcgcgatgcaaataactcattaatctgtgcattaattcccattctgatggcaagacattctacattatttactgacatgaactatatgtatgag

SEQ ID NO: 57543 - DNA, 134 bp, Gossypium hirsutum
  Clone ID: uC-gsflnu33B070a08b1
cctccaacggtttgctcgcacacatttcccgtctgtaaagtacatggaatatgccgtccaagttgaaacatatacgctttccaaggctaacaaccttgtcctcaacgttgatggtgccattgggtctcttttct

SEQ ID NO: 57544 - DNA, 362 bp, Gossypium hirsutum
  Clone ID: uC-gsflnu33B070g07b1
gcgtccgcaaaaaggaaaacattttcaaaggtaacaacaaattactgaggaggcaatagtatccaaaacaccccatcattttcaaaggacaaatggataaaaattaagaagaaagcaaagggagaaatcagatcatgacatgtctactgcaataaatatttatataaaagataaaaatatattagaaaacttgagaggaatcgaaaatcactaaaaaacagagcatatttacggaaaactaatataaattcttacctaaacaaatatggccattgctataaatatgtggatggagaggtgtctgtcgaagaaatatttccttttttccatatgttcctcctaatgaatctatctctttaatg

SEQ ID NO: 57545 - DNA, 459 bp, Gossypium hirsutum
  Clone ID: uC-gsflnu33B072a01b1
gttttaaagccatggatggagcttggctatgtgtcgcttcaagacataagggagcaggagagattcgatgggtactaccacaaccagttcttggtggtgaacgattgcttgcacaggtacaagtttatggcaaaatggatattcttcttcgatgtggatgagtacatctttgtgcctcccaagaccacccttggttctgtgctcgattccctctccgactattctcagatcactattgagcagatgcctatgagcaacaagctttgccactctgttgatgctgctaaacgtcacaggagatgggggttcgagaagctggtatatagagatgtgaaaagaggaataaggagggaccggaagtacgcaattcaaccacgcaacgtgtatgcaacaggggttcacatgtcacagaacctaagggcaggggccaagaccacccacaagacggagggcaggatc

SEQ ID NO: 57546 - DNA, 258 bp, Gossypium hirsutum
  Clone ID: uC-gsflnu33B073c06b1
tttattatctcaaagtgctttaagaagatatatgggatttatgtcctcaagtcttataaatacaaaaatgccgggtatagtttcttcaccctctgatatctaaggcaataatgaggttggttcagaaacacagctgcaaaatctcagttgagacatttattaggggatttgatccactgaatatgttgtatgatttgtgtaatgcttcttgtggtaatattaacaaaaaaacaaaactagtcttagttggaattttaa

SEQ ID NO: 57547 - DNA, 317 bp, Gossypium hirsutum
  Clone ID: uC-gsflnu33B074b08b1
ggcttatggcgacgtaatgacttgtaccgtttgttaactaaaaaataagaagaagatttgctagttggatacaattagaagatgatatgtagtgagaattctttagctccacatggatgttgggtggttctaaggcgatttaggatactgttttttcttgacctgaaagtttatgttttatcattttttttgagggttcatgtcacatgaatcaatcactttctttgaatttgccttaacacattcttggaaaagactctgggatttgtaagacccaaatgaaagtgttttattctcttttttggtgccctaaaaat

SEQ ID NO: 57548 - DNA, 381 bp, Gossypium hirsutum
  Clone ID: uC-gsflnu33B075a09b1
tataaatttggcaaactaaataataaaagtatcatgaaaagactggtttcgctaggctgccaagttatgtacatatgtttgatggtatgattttcaggatataattgtaatttcagagttaggcgagctttgcataaaacaaaataaaaaaaaaaaacacaataataaaaaaaaataaaaaagggctgcctttattagagagaaccatcttttctatctcctaagcatgcaactaccattttctttctttatgttattcctaaatttaatttccatttccttcttttctatatattattcttcttgcaaatccttttcatttattctcatcttatttgatattccttctattcctcttttttcctcttttaattaatcaat

SEQ ID NO: 57549 - DNA, 207 bp, Gossypium hirsutum
  Clone ID: uC-gsflnu33B078c02b1
atgtttatcactcgcaatgtgaaacagtttgtgaccattgtacagtgataaaagattctggaaacttgaataaggtttaaacttgtagtaagtgagaatcttgttggtgataatgacaatagcattggtttctaaaaaaaaaaaaaaaaaaaaaaccccgacttctggaagggatgcaatttattagataaaaggaaaacacaaact

SEQ ID NO: 57550 - DNA, 475 bp, Gossypium hirsutum
  unsure (1)..(475): unsure at all n locations
  Clone ID: uC-gsflnu33B080g03b1
cctacgnctatttcccacgcgaccgcccacgcgtgcgcccattcgtacgtttttttgtaccccaaatctctccttctcttggcagcaacttacaaccaaaaatctactagctaaacttatgctacatcttaaaacttaagctttcataacatgtagaacccttaaaccaattcttgaagctccatagcttcatttcttaacttttacgcacatagaaaggttaagaaccttatttgcttgctggcttccctaatttttcatcttaatccttatgaaatctgatctatatagaaccttccacaacattctcttctctaaagcaaccaaagatgatgaagaaaaagagggaatgagaccaagtggggaagaaaatcaaccctgaaagccatcttccagctatttataagcattccctcactattacccaaccttagggaattcgcccatggctattatcatgtctcccacttagaac

SEQ ID NO: 57551 - DNA, 517 bp, Gossypium hirsutum
  unsure (1)..(517): unsure at all n locations
  Clone ID: uC-gsflnu33B081c10b1
tcgattgccgactgaactcccccgccgtcatattgaagtgccgccgagtccatgtaaaatagaccaatggccacgggaacgccaaagaaatctgggcctcctaaaatagttactctgaataacgcattgaaactggccgaacaatggataaataaaatgaatggatctgcagaatatgaagtagtggaagcagaaccagaagctcggccagaaaggcttggactcggagcaaaagttccacgtcaatcaaaagttggactctctaacgacccagttgagagaaaactatctgctaagttgggtgttggaaaaagaaaagttttaaaaaaccaggattctaccatcccttctagtaaagacagggtcgatgaagatgatggtgatgaggatttagatagtagaagtagtgcattttctaagaagagagcagttcctctgacttcccaatacaggtaaaagaaaaaccgaaataacttgtagctttgaaatccttgaatgtagcanaaatccatgtact

SEQ ID NO: 57552 - DNA, 452 bp, Gossypium hirsutum
  Clone ID: uC-gsflnu33B082a05b1
ctgcccgccgggcgaccggccggattccggccgcccatgcgttagttttcggggtacagatatacttgatcatggtgaggagttacttttggcataaaacctgatcttgatacttataccatattgattgataatgtttgtacttcaaagaatttacgtgaggcaatgagattgggtggagtgcttaatgattcaagggttaaaccagattgtgttggttataatactattatgaaagggtattgtatgttgagtaaagggagtgaagcaatagaggtttattagaaaatgaaagaagaaggccttgaacccgatcttgtgacatataacactttgatttttgggttatcgaaatccgggagagtaaaagaaggttagaagtatttaaatattttagtcgaatcgggtcatttcccggatgccggtacatacacttcactgatgaatggaat

SEQ ID NO: 57553 - DNA, 415 bp, Gossypium hirsutum
  unsure (1)..(415): unsure at all n locations
  Clone ID: uC-gsflnu33B082d08b1
tggacgcgtgggtggagacagaggcggtttaagcctgtgttcgatctggtttagtttcacgcctcagatgaacggttatcactctgttaaagttcagacaattataaacccagtttttactttctaacaaactcctattcactatatcttttattgtttgtaggactttgtaatgaattaatggtgggaatggtctaacatttatgagccatactaggtttgtgcatataggaagctaatccctagcatctattctgaattttggcattatcatgtatgacattcattgtgggtgtttgatgtttatggatggctggtttagtggtttgaatattctaactttggtactaaagctgtttaatcatgtcaggatgtattgattatatggaanagcatttggtgttggcaatgtgag

SEQ ID NO: 57554 - DNA, 535 bp, Gossypium hirsutum
  Clone ID: uC-gsflnu33B082f11b1
ttcacgcgtccgcccacgcgtccgcccacgcggccgcccacgcgtccgggaggagttccgctatgattcttctgtttcagctgaggttgggggtaggcaaacacccagcctccaattccctcgaaccaaggaagttatggttaatggggttcatgtacgggtgaagtattgtgacacgtgcatgctttatcgtcctccccgttgctcccactgttccatttgcaacaattgtgtggagcgttttgatcaccattgtccttgggtgggccaatgtattggattgcgaaattaccggtatttctttatgttcgtttcttcggcaactcttctctgcatctatgtattctccatgtcagcattgtacatcaaggttctgatggatgatcaccaaggaacagtttggaaagcaatgaaggaatctcctccatctgtcatactaatggcatattgtttcatctcactgtggcttgttggcgggcttactgggtttcacttgtacctcatctcaacaaaccagacgacatatgaaaattcc

SEQ ID NO: 57555 - DNA, 541 bp, Gossypium hirsutum
  Clone ID: uC-gsflnu33B082g10b1
ttgctataataggtgacaaaacatcgttgaagagttccatcttcctcccctactctatttagaagctgtggtgaaagagacgttacgaattcacccaccggctcctttgctaatgccacacatgctgagcgagaccactgtcgtagccggttacactatctcaaaaattctaatattttcttcaacgtgtgggcaatacaaagagatgctgaatttttggaaaaccctcttcaattcgagccggaaaggttcttgaatgtcattgagaaaaggaattataagggaaatagtttcgattttttcccgtttggatcagggaggaggatttgtgttgggatttcaatggcagagaaaattattatgctgatgttggcgacgttgcattgttttgaatggaaattaccgaacaggcgagaacctgatgtgaaagagcagctacatttgttgttgcaaaggtggagccgcttgttgtcgtgcccatttcacgttcatctaagtggggatattgtggttaaatatgctttacgtcactatattttta

SEQ ID NO: 57556 - DNA, 336 bp, Gossypium hirsutum
  unsure (1)..(336): unsure at all n locations
  Clone ID: uC-gsflnu33B083d11b1
acccaacccacccgtattatctcccttgctgcacgtttgtgagcaagtaaggtgattttgattcttcctcctttgttctctatcttgaactagacctttttgctggtgccattgttccaacatgttgcagaaatggataacgcaatcatgccacagcttcagtccttggaccttcagagttgcgggaagttaaaggctttgccgcactaccttgttggattgacaagcctaaaggaacagagccctgattggggccctggtcttgcagaatactgccaaatagagcggtccaacatatctcgcattccgaacatcaaaatctaaggagtnttatgt

SEQ ID NO: 57557 - DNA, 557 bp, Gossypium hirsutum
  unsure (1)..(557): unsure at all n locations
  Clone ID: uC-gsflnu33B083e12b1
cccactcgtccggtgaatcctctcacacacacacaaaaaaaaaaaatggcttctttcaattacatgttcttgagctttgtcctggctctgtcatttgcaagctttgatgttgggtttggagcccgtcatcttctgcaactgcctcagttacctccaatgccaatgatcccaactctgccaatgccaacgataccaacattgccaacgactcaaccgtctttgccgaggccaggcgcgatgcctccactccccgccatgcctaacatgcccactttgccgaatgtaccaagggccactttgccaccattaccaagctttccctcaatcccaactacgatcccttccatcccattcctctccccgccacctgcaccgtctactccatgaatcttctgccttaattctggatgcctatggattggattttatgttttatggtcctatcatttatacccacttnnatagctgtttgtgttgatgttatagattaagnctgctttttctttttctttttcttttttttactcttcactacccatatatgtttgtctggaaaa

SEQ ID NO: 57558 - DNA, 428 bp, Gossypium hirsutum
  Clone ID: uC-gsflnu33B083f08b1
acgcgttcggctatcgcgtccggtgttctgctatccatggcaggaccggttagaactgagtacgggggaccccaacctcgcaagactttgtatttcccaagggaaccaaaggacccttctatgcctgaccaggcacacatatcattggctggcgaaaatcacatgcgaatctcatggatcactgatgataactccgttccttgaattgatgaatacggaagcttgcctggacaatacacctttttatcatgaggagaggccacctcttataattactgattatatagcttctgaaagatacaccatactgtcattgggcctttggaacatgataccgcttatttctatcgttgtggaagacaaggtcccgaatttcaactcaagaccccacctggacaatttactgctacttgtgccgtggctggaga

SEQ ID NO: 57559 - DNA, 570 bp, Gossypium hirsutum
  Clone ID: uC-gsflnu33B084b09b1
tcgttcgaaccttcaggccatccatatagagagaatcgaacatgttttgcgcaatttcgggaaaagtacctgaacatccagttgtttcagtcaaatctggaaatgtgtatgaaaagagactcattgaacaatggctcgaatctaatgataatgttgaaccaacaactaaacaacaaatctcaaaagatgatctcgtcgaagtaaaaggatcgaaaaccgtcattcctagaccaactaccgccactagcattccttcaatgcttcaactcttgcaaaatgaatgggatgccgtcatgctcgaatccttctcattaaaacaacaactcgaaaacgttcgtcaagaactcgctcacgctctctatcaacacgacgccgcttgccgagtcattgctcgtctcatcaaggaacgtgacgaagccagagcactctctgccaatatccgagctcaattgcccgccgaacaaacatcgagcgactcgatggaagttgaagccggattacccgaagaagttaaatttaaaattcaagctttttcacaagatttggccaaagagagaaagaagagacaag

SEQ ID NO: 57560 - DNA, 450 bp, Gossypium hirsutum
  Clone ID: uC-gsflnu33B084b11b1
tgacgcgtgggcggacgcgtgggcggacgcgtgttcatacgcgtgtgtgttgtttcatgtcattagcggtctatatggggaagacatggcaagtattactaaagtagttatctcagtgacctacatcttctcaaatgcctgaatttcaagtgattttcaacgaccaattcacaaacgatttcaataccctcttcacgtatctcccacaagacaagcaataccttgtagcttccgatcctggttctttccataaccaagtattgcccaaatcatcactccatttagcccattgctcgaattcgttgcattggttttctcggctgccgaaggagctgcgagacgagcgttttccggcgtggaacaaaggcacgatttactacaccagtgcttcccctgaagttacaatggcgtatgcgacgcacttcgcttgagatctagacaattttttga

SEQ ID NO: 57561 - DNA, 558 bp, Gossypium hirsutum
  Clone ID: uC-gsflnu33B084d03b1
tttttaacgaaggaatcactcctgggcacagcagggtgttcggttcttttgaaagttctgattacagctcagctcaatacaaggaagatatgaagaagttcaggaagatagcactggaaagccaagagcttcctagcagtgaatacagtgtagtcaccagtgattatggtgttaacccatctagctccagcactgaagggcaacaaagcacgcaaattgaaacatcaaaaggggagaaagaaaccaaagatgtaagtggaagctcgtaacaaaatctaccacgaaatttgcttggacaacagtaaaaattctttttccacccagttttatattcaccattgtattgcctcgtttgcaactagagggcatcacttctaaagcaaatttgagatttctgctatccgaaatatggcagcaaacaatggaattgggtggattttgtcaattccatcgatttcaaagtattatttgattggttgagttgtaaaaacctctattgcatgtatatttaatgtagctcacggctagtaagttgagtgctgtatcaaactcaaaaat

SEQ ID NO: 57562 - DNA, 453 bp, Gossypium hirsutum
  Clone ID: uC-gsflnu33B084d09b1
tactcttggctgagcctagttgttatatttgtttgccggtggctaatttaccaaaactaatttcttacttctaccttttaggcctgttatgcgttgaaagacatggtggggatttgtctagcgaaagacagagcgtcaacacagaggagacagtggtgaccaacaaagatgaacagacctgtttggggaggacggagcatgagtcaaggtttattcacaagacccaaggctatgggctacacgggcatgagactggatagttgcctcctaggaccaccaggaccaaagaaacctatgaaccgtatggcacacctgcataataccaccctgatggaccctgcattcgcataccatggtgcaggaccaactgcaaagactcttacttttgtcgcatgcacaatgcgtactggaacgctgagcagtagagtgaagcccagttcaatgagaaaggat

SEQ ID NO: 57563 - DNA, 297 bp, Gossypium hirsutum
  Clone ID: uC-gsflnu33B084g08b1
tttttagtctgtaaactcgataaattaagatgacctctttcatctcctcgattggtggtcgtctgggcgccgcgaccggtatgggctctctgttccgtcgcatggccaacaaaccgacgaaagtccgtcaccaccaggagctgtcgctcgccgatccggacggtgcctccttcgaacgcgctcacaacaaagccgttgcgaaggcccggcttctggctccgttcgcattgttgcttacctccattccgccgggtttggccgttttggtgggtgtcatgaacaaccgccagaaaacca

SEQ ID NO: 57564 - DNA, 381 bp, Gossypium hirsutum
  Clone ID: uC-gsflnu33B088a03b1
tttataggctcggtttcttccaaaattggtgggagaaatcaactaacagatgcagagcctgtggctttaatcgggaatgatgatgcccctctggtccaagaggatgttccggtggaaaaacaatctaggaggaagagaccccgtttaagatcaagccgtggcggtcgataacctagaccatctcagtatgaataataggttacaggcacacccttttctcctatcaatatgaataacaatttggtgcatcatttaggtttgttcatttataaatgattaaataatttaccgatttaggatttaaggtttaagtcgaatgtgaagacatttcgttaatactagtctttgcaagaacttatgacatttaatgtgtcaatttat

SEQ ID NO: 57565 - DNA, 341 bp, Gossypium hirsutum
  Clone ID: uC-gsflnu33B092a11b1
ctcatttttccgcccacgcgtccgtaccaacgagatacctgacgtgaatgaaaacgagaatctgacaaatgatgttcatatttcaagtgatgttcacatttctaatgatgttcacatcgatgggaacggtcaaaaaagaaaaaaccctgagaaaaatacacaaagtaatgcatatgcactctgacagtatgagtcaagccacatctagtttgactcttgttatggatccatatggtattccacaagcagtcaatgtgcttgacagcatgtctaacgaagatccagaagctagtctgctatactttttcgcacttaaattattgctcaataaggacatgaga

SEQ ID NO: 57566 - DNA, 512 bp, Gossypium hirsutum
  Clone ID: uC-gsflnu33B093c12b1
ttttatcgcgtccgaaggaaggccgtgaaccctggcgtttggaatagtttagatttcaacatttgcgcaaagatgggagtgaaaaattgagcagtgaggcagcaaaacaagtttatgatgaagcatgcaagatggttaaagactctatgccaacacctgagagctctttcacacctcaagataatattgcattagaaaacaaggtctatacacaagtgttcggctctgaaaaggatggaaaaatgttgggatatggacgtgggatgaccaaatccaagttgtttggctatgggtcagtcacccgaggaagccaatctacatcggctattagtacattgattgaaaagatgagtgctaaacatgtcgagcaaatacaaacaattcaagccgaacaagcaattcgagagaaaactttactcgaggaagcataatctcgattttgtacggaggccgcggagtgagaagctcgtttgatagctaaggtagaagaaagatttatgaaattaactgga

SEQ ID NO: 57567 - DNA, 543 bp, Gossypium hirsutum
  unsure (1)..(543): unsure at all n locations
  Clone ID: uC-gsflnu33B093e01b1
ctttattttaacaacgatgaggatgatgggttcgatcaagctatatgtccggttgattcccaagaagcagggatgatagtggataatgatcttaataccctcatcgttcggccactcacccctggcgttacgcttcatgccattgttgacgcttgccatagcggaaccattttagatcttcccaaagtttatatgagtgaagagaaaaactgggtaaacaacagtcctccgtcgggagcagagaaacgtacaagtggtggattagctatttctattagtgcttgtcttgatcaccaagccgccgccgattcctctgcctttacccccggcgagatgaacggtgcactgacctacatattggcggagattctgaagaaattaccaggcccgacgtatggagacttattcgatttaattaatgaaacccttaataacgttaaccaatctagttgccttgctaatacangattcttgaggagactcttcaactccaatttctcacagacaccacttctttcgtcttcggcaggcgtcgacgtttac

SEQ ID NO: 57568 - DNA, 517 bp, Gossypium hirsutum
  Clone ID: uC-gsflnu33B093e10b1
ttcatcgcgtccgcccacgcgtccgggttgataccggaaaccgacctgtgacaggaatacgtttatacttggaaggtaggaagaacgaccatctagcaatccatcttcagcatctttcaactcttcctacaatccttcagctctcggatgaccacaattacgagcctaacgacgagccacttggacgcgggtacttcgagccagtcaagtggagcatattctcgcatgtatacactgcacctatacaatacaatggaagccactttgatgataccgctgccatcgtaaccaagggtgggtttgaggtaaagtctgtcgggatgaggaaagttctattcctgaggctcggattctccatggtcagtttcactaagatccgtcgatccgaatgggacggaccctcgacattgtcacggaaatcaggagttttctcgatgttgatcagcactaggtttagttccggactgactcaaccggagaaaccaaccaaagtggatttaaattcggctgttttccc

SEQ ID NO: 57569 - DNA, 483 bp, Gossypium hirsutum
  Clone ID: uC-gsflnu33B093g02b1
acgggtcgaatcttctaaactatccaaatacctctaacggatactctttaatatttaagcttcatattccggctttggatcctagggttttcttttttgttttctttttctccagcttcgtctgtaatggctcaaccaacagggaggggaagagtggtaggggactatttagtgggccggcaaatcgggtcgggttccttctcgattgtctggcatgcgaggcatcgagttcatggaacggaagtggcgataaaggagatcgtaacgagtcgattgaatagaagttgcaggatagtttgatgtcagagatctttatcttgaagagaattaatcatcctaatattattcgactgcatgatattttggaggctcctggacagatacatcttgtattggagtactgcaagggggtggatctttctatgtatgttacacgcttggaaagtgtccctgaggcaactgcaaagcattttatgcaacagc

SEQ ID NO: 57570 - DNA, 207 bp, Gossypium hirsutum
  Clone ID: uC-gsflnu33B094a05b1
caacatatgagtgatggaaaatattccgagactgtcgggagtgatcttgctcccccattggctcgggtggtttcaacttctgttcctactaataagccgaagttggttatgtcacaaaccggtcttcaagctcctaacactcacactatgcggaaacaagaagcttccacccaagaaccttatcaagccaagttggtaaccgatagt

SEQ ID NO: 57571 - DNA, 210 bp, Gossypium hirsutum
  Clone ID: uC-gsflnu33B094b11b1
cctcacaagcctcgactggatcagatccgggggcgggtttttataacaccgttctgtggtcctcccttacgcggcttacgctcggaaattgaagcttgaaaactcgaagctcgttagggatatcgccgaactatccgggaaatactcggatttgataaacaaaccatattatcgggcctctgtttgacaagaaactactattgatggatt

SEQ ID NO: 57572 - DNA, 264 bp, Gossypium hirsutum
  Clone ID: uC-gsflnu33B094h11b1
tgaaatttcttctcttttttccccattttatgggggcccataccatttccccgctaccccgattccctttattttttcccccaatttccccaaatcggcagccctctgcatctctgtcagtagcccgcttctgtatctccgtcgagatatgctgtcaagtatactgaaagaggacccaaggatcttcaaaatctgagagaagaaattcaatcccaaaaaaagaaaaagaaccctaaaagatgaggattaatgggagtcgggagt

SEQ ID NO: 57573 - DNA, 191 bp, Gossypium hirsutum
  Clone ID: uC-gsflnu33B098b08b1
tactcttcttcttaatcatcctgaagccatgcataaagcttggactgaaataactgctgaagtgggacatgacaagtttttagatgaaacagacctgccaaagttgaattatctacaatccataatttcagaaactatgaggttattttcaccagcaccattgctattaccacatgaattatcagatgatt

SEQ ID NO: 57574 - DNA, 296 bp, Gossypium hirsutum
  Clone ID: uC-gsflnu33B098d11b1
gcctcattttcacacttgtcattctgtttgcttggctaatattagctgatggaatcagatttaccgaggaaggtaggctttccaagttagacaaagatgagtactactcgggagaactggttacaaagaccctgattggcagccgtaataagatcaaagatagccggggcacacatggagcagatgctgctgctgttaccaccattttcgcatccaataccaaggatttgcacgccacaacccctggccacagtcccggcaccggtcattaaatttcacctaatggccataattag

SEQ ID NO: 57575 - DNA, 481 bp, Gossypium hirsutum
  unsure (1)..(481): unsure at all n locations
  Clone ID: uC-gsflnu33B100d03b1
atcatatcttgctacacccttttggctctgctatttctattcattaaagcaaagctatggctaaattactggccacccttttcatcctaaccctctttgtttccactttatcctttgcagctcgcactgctccacctttccctgcaaatacccaacaacaacaagctcagggtgttgttgaagttgaagatagctgtgaaggagttgcggaagaagagtgtttgatgagaagaactcttgctgctcatactgactatatctatactcaaaaccacaatccatgagcttcaaatttcttgtttttctttagccatcaacccactacatatatatatgtactgtatgtatatgcttgnttgntgntgattatgatataatttaataacataatcaatcagaggctttttttttcccctacttttgtgttggtgttttgtttcttccatttgtgattntaagttttggattgttttgaaaattt

SEQ ID NO: 57576 - DNA, 481 bp, Gossypium hirsutum
  Clone ID: uC-gsflnu33B100e09b1
gttccttagagggttatgcagctggaaatgcaattccgagtccacttaagaatgtcgaaagaggattcttgaagaagtattgggcaaagtggaaggccagccataccgggcgctgtcgtgcaatgccgcatatcaagacatatacacgctacaagggacaaaatctggcttggttcttactaacttcagcaaaccttagcaaagctgcctggggcacccttcagaagaacaattctcagttgatgatccgttcttacgagctgggtgtgctatttttaccatctcgtatcaaagtagatggtcccagtcgtgaattttcctgcactgataaggcaggttcatcaaagggtaccggtaaatcaaagtcatccggaaatcccataccagcaatgacgaagctagttacacttgcttggcaaggaagcaagacatccgaagtaattcaatgcctgtaccatacgaactccctcctgaaccatat

SEQ ID NO: 57577 - DNA, 426 bp, Gossypium hirsutum
  Clone ID: uC-gsflnu33B100f12b1
aagcctaagagcttgccagatgccgatgcctggatatagacgcttgattatatcaaggccaaatctacaaagcttgtgcttcaccctaggtcccaaaatttgaactcttctataggcctcaactagtttcgcgaatccaatcgtctgctaaaatcttcacagcatacctcaggacagagctcctcagctgccccaaaagaaggcgagggcctccgctgcaaaagccgagccaacattctcgtgtatagttgatctagaggaaaccaaccttcctcttccatttctggcaacaaaccctgaccctgattaaatagagccctgtcaaatgccgcgtcaaagttgatcttgacccactccctagaaggaggcttccatcttgtaacgtcgaccaccttatccacagagcccaaagggtacaagaaaata

SEQ ID NO: 57578 - DNA, 529 bp, Gossypium hirsutum
  Clone ID: uC-gsflnu33B101e02b1
aataatcttgttacccctgatcagcccaaagacaatgcagtagttaacagtggctttgaatttggcccttggatgttccaaaatgtatctcttggtgtcttgcttccgaccaaccttgacgaagagacatccccattaccaggatggatggtcgaatcaaccagggcggttcgatacattgattccaaccattatgctgtcccagaaggcaaacgtgccgtggagttggtttccggcaaggaaggcatcatttctcaaatggtggaaaccaaaccagataagctatatagcttgaccttctctttggggcacgctggggacaaatgcaaggaaccactggctgcaatggcgtttgcaggggaccaggcacaaaattttcactacacgcctgactctaactccaccttccaagttgctagtgtgaacttcacagccaaggcggagaggacacgtatcgcgttctacagtgtgtattacaatacaagaaccgatgacatgagctcactatgtggtccggtggtggacgatg

SEQ ID NO: 57579 - DNA, 468 bp, Gossypium hirsutum
  Clone ID: uC-gsflnu33B113g03b1
gggaaattaagttgaattagaaagtttgaaacattgacacttatgcttgagaaaatgaggaaatgaatttaacttttagattgaaacaagaaagaatctttcgaagtgttaaaaaaaggccatacacattgcttcgcggtttgcactgaaaacttctttgatgaatataaccttcatgaattagattttagacataagtatgctttttcttttaccctatttgatctaagtaagcaatgggtttcaaagagggattgatttacatgctctaggtcaagaaagcagtcaatggctgaagatgatgtgtaagctgatccttggacaccaatttcgaggaatctaatgtttaccgtatgggtggtttcctgcatttccattagggatataatcatatgctagaacctgcaagcattgcactcagacaaacataatcttgacatctgccattgaaaatagtttcttagatgc

SEQ ID NO: 57580 - DNA, 502 bp, Gossypium hirsutum
  Clone ID: uC-gsflnu33B114a06b1
gcttcatctacatatctcgtaagtgatagaccctttattgattggttatcagagtctgatcctactgtctcagcattcgttccttctcagccttcaaaacctaagctgcatgtaagctccgacaacaacaacaattctcctgctttaaagtcttcttcatccgctcggtctcgcgaccaggtggtggttttgagggtggcaatccattgcaaaggatgtgaaggaaaattaagaaaacatatctccaaaatggaaggagtgaaatcatttagtatagatttaccgacaaagaatgtgacagtcattggtgacgtgactccctcaagcgtgttagcaagcgtgtcgagggtgaagagtgctcaactatggccatctgcagcaccatctcaatcttctccaatggtcaaaatgaattactgatggaaaaaaaaaaactccagggttttcttcttttttgaatgaagggtttcaccttgcttagatagtaatcaacatttgaact

SEQ ID NO: 57581 - DNA, 485 bp, Gossypium hirsutum
  Clone ID: uC-gsflnu33B115g09b1
tttcgttccacgcgtccgcccacgcgtccgcagaaaccaatgtggagctacctgttcttgaagcaagatcggttgaagatattgatttggcttttaagcaacttcatgaaggagtggatgttgaggaagtaattcttccaagtatgattgagaatctgccagatcatacagataccacttcagaatttcctgttgtcgaggcaagatctctggatgatatacataatgctttcataaaaggaccggaacctaatccagctgagctgccgcattcagcagacttgaggcatggatcatcagaagtagagctgcatgatgtggtttcttctaatgaggttgaagttgggcaagcagtctctggctttgaagaacatcttgagaatgttgctgctggtgaaccgaaaaaagaatatgaaaaaaaggaagaaaagaaagaggaaaagaaagaggagaagaaagaagagaagaaggacgagaaaaataaa

SEQ ID NO: 57582 - DNA, 517 bp, Gossypium hirsutum
  Clone ID: uC-gsflnu33B126a12b1
tattttgtgaagaagttattggtgaaggatccccatgccagactgacagctgctcaggccctatcacacccgtgggttagagaaggaggaaatgcgtctgatatccctgtggatatttctgtccttaacaacctgcgacaatttgtgaagtatagtcgattgaagcaatttgctctgagggcattagctagcacacttaatgaagaagagatagctgatcttcgggatcagtttgatgcaattgatgtggataagaatggttctattagtcttgaagagatgagacaggccctcgctaaagatcttgcttggaaaagaaggaaccacgtgtccttgagattcttcaagcgattgatagcaacacagatgggcttgttgaattcaaggagtttgttgcagcagctctacatgtgaatcaaatgggagaacatgattctgataaatggcagatgctttcgcaagctgcttttgagaaattcgatgtaaatagagatgggtttataactccagaggaact

SEQ ID NO: 57583 - DNA, 332 bp, Gossypium hirsutum
  Clone ID: uC-gsflnu33B128b02b1
ttctacgcgtccgcccacgcgtccgcccacgcgtccgggaaaaaaaaataaaaataccatggcaattacatctcatctgccaaacctcatcaatgttcctctagaccgtcctgcctctttctcacaccttccttgcaacgaatttcttcgtattcaaagcaacagagcttcaacatcgaccagcttcagtttgggcatcaatgtctccaggaagcaatgtaaacccatgttggtgcgaagcatgggttcttcatttgggtcaaggcttgaggagagtgttaagaagacccgggctaggaacccaagtggtggatactctaagtcttggtgct

SEQ ID NO: 57584 - DNA, 493 bp, Gossypium hirsutum
  Clone ID: uC-gsflnu33B128h07b1
taaaaaacccagttcacttttcagttcttggtaccttggctgaccatttttgtgtaagtttattagtttctttccataaacaaagctcaaatctttctgctgttttggagggtttttaaagggggaaaagatggtctttttttttttttccttttttccaataatgaaagttattaactttacggggtttatttttttatgttatggatgatgaatatgtttagatctcattcaccatgttctagatcttggttgtttagcattttgattagacagttttgaatgttgttcaatttcatccctatttgggttcttttttgcttgcttttgtaaatgtttcatctttctagtccttttgagctttttttactttatggaatataagtggtgtataacttttttttctttttttaagaagcctatcttatttttttggccataaactattaacaagatgccatttaaaaaagaaaaaaaaaccatctttatcaat

SEQ ID NO: 57585 - DNA, 321 bp, Gossypium hirsutum
  Clone ID: uC-gsflnu33B130c01b1
cagtcaggcaaccatctatagaatgaacaacggattaagtgcataccatccaatcagctttgttgcaaaagggggaagtaggaattaccttatggtaccatcgcagagcgtcagatatgaatcttacagcgtatatttcaatatgcaaccataggtgtaatcaggttcaggagcagatgcggcaatgttgattataattataggcttttaacctggtactggtcttaccagacagagtatgctgttggctgggattgtatctgtattgatttacgaggcgattgtcttacaaataaattcaaacataaaaaattaaaaaca

SEQ ID NO: 57586 - DNA, 471 bp, Gossypium hirsutum
  Clone ID: uC-gsflnu33B131a01b1
taaaaaaattagagagtcttccttcgatggttgccggagtttggtccagtaacggctcagcgcagctagaagcgactactcagttccggaaattgctttcaattgagcgaagccccccgatcgacgaagtgatacaatctggcgtcgttcctcgctttgttgagtttcttatgagggaagattacccacagcttcagtttgaggctgcttgggcgcttacaaatattgcttctggaacctctgagcatactaaggtagttattgatcatggggccgttcctatatttgtaaagcttcttggttccccaagtgatgatgttcgcgagcaggctgtgtgggcactggggaatgttgctggcgattctcctagatgtcgtgatcttggtctcagtcatggagctttgatgccactcttagcacagttgaatgaacacttcaaagctgtcaatgctgagaaatgcaacctggaca

SEQ ID NO: 57587 - DNA, 461 bp, Gossypium hirsutum
  Clone ID: uC-gsflnu33B133a12b1
tgctatctctagctttgtcaaaaactgaagaggatgcagaacatgaaatagaggaaaatggaggaattcaagaagctatttcatggtataatcgggttcttagttttcagattgaaggtggtcatggggtgaagtttactttcaatgatattaacataaaaaatccaaaggaagaatattcttttaccattcgtcatgcaaatgatgcctactccttattggattgcaacccaaacttgaatggcattaaagacttgattaatgagttgaacagaacaaatgacttatttggctttgctagaaccatcagagaaaagtttcaagaagcagcagcacttggattgcagccccagtccacaacttttcatcaggactgttccacaatctttttgtcgggtccagctttatctgtttcgagcaatagcagtcgtattttttgcccagaaaaatgagcatcacat

SEQ ID NO: 57588 - DNA, 378 bp, Gossypium hirsutum
  Clone ID: uC-gsflnu33B134c10b1
tccttcgcgtccgctcgcgaagaatgccgaagcaattgtatcactcaaccatgttcctgatatgctgcggcacaagcttagtcgatcggtgtccaattctaggaaaatggatgcccattttttacaacttcttgctagcggatcaccaacagagattcgagtcaatgactgctcccgagtcactgaagacgaattcaccaagatatttggctgctgtgatactagaaacttgattggaattgactgatgtatctctcaaatttgtggggaaaaattgttccaaattatgcgccattgacctatcttacttgcggaagttgacggatttatcaatgagatatcttgctatgggtgtcgatcaattaacaggcttaaact

SEQ ID NO: 57589 - DNA, 510 bp, Gossypium hirsutum
  Clone ID: uC-gsflnu33B136e06b1
tttgaaaatcaagacaatgatgccagagaaaatcaagacaatatgaagctgtcacatgagaacatctctactgtccaagggcatgcagattttcagaccatccttacaagctctctagctgaagctgaccataaaatagaaagtaacccagagatgctcgagctagaaaacatcataaatatggaggtaatggtggaaaacatgaggaataacttggcgaaggctcgtgaactgaagaaattagaagaagagataaagaagaacaaaactaatattaggaaagacgaactgaaggtggagaagggagaagctgatttaaaagaaaacaaactgaaggtggagaagggcgaagctgagttaaaagaaaaccaagtgaagctggagaaggacaaagctgagttagaagaaaacctactgaagctgaaaacgatgcagaagaaaccacggcttgcctaatttgcttttctgaaatacattctcaatggtttattgaggatgctgctgaactga

SEQ ID NO: 57590 - DNA, 412 bp, Gossypium hirsutum
  Clone ID: uC-gsflnu33B137d12b1
ccacgcgtacggagagaatgaagctatgggtgatgatggattgccttggcacatgttcaatactcatatacggagacacaatggcaaaaccagcgacgatctgcattcacattatgaacaaaaagtgggcctcaatggggactataagagaccataggatctgactatttttttttaatatatctttagctatgaaattttgctttgcggcttgacctaattttttttgggggttaatctgtgttattcctaataactcacagaagctccagagattcactttaattagattgtgatatcatgaaagcaaatttcgagcaaatatgatgactagtttgcttatactaatgcaaaatgaccttaattactttcattagcagaaagaaaaacaaaactgagttctattattgta

SEQ ID NO: 57591 - DNA, 166 bp, Gossypium hirsutum
  Clone ID: uC-gsflnu33B142e02b1
tggcaccgctgtgtctggggagaataaatggaagattcttccgttaggtaatttagaagctgtcaggaagtatagggagaaggttaaggcacgagctgcctctttggaggacgaggttgtgagactgtcgtcattcaaccatcattttgtgaaaagtttcctgggt

SEQ ID NO: 57592 - DNA, 429 bp, Gossypium hirsutum
  Clone ID: uC-gsflnu33B146a01b1
ccctctcgtccgcccacgcgtccggcgaagaacagtgtgagttgcggtagcggctgctttatcccaattgaatgtggagaaggctgtgaatgctctgctcaaatggagagattctcagtcccaagcccaaaaaccccaacttcttgaacaggatgaattcctatatctcatcgtcagcctgaagaaaatccctcaaaaggctcgcgttaaccccatcaaagtccctctccctcaccccatcatcgatgatcccgccgagctttgcttgttcatcgatgaccgctcgaagtctggtatcaccaaagacgctgcgtctaagaaaatcaagtcggaaaacatacccatcaacaaggtcattaagctgtccaagctcaagactgattataagcccttcgaggcctaaaggaagctttgggattcatatgatat

SEQ ID NO: 57593 - DNA, 424 bp, Gossypium hirsutum
  Clone ID: uC-gsflnu33B146c04b1
tgttattgttgtagcttaatctagttaatctaggtactaatttgtgattctgtaaaagctttgaaaattttccattgttatttttgaatctttttagttgttaatggtttggcttgaagcttgataatgagtttgaattaatttataaagtgattttaagtaatttcaaattaaaggactaaattgatagaatagtaaatttagtatagaattcttatgaaattttagtagttatggactgaaaatgaataggaataaatttagtacaagggtttcggggctaaattgtgataattttgaaagttttgggtttaaggactaaattaaataaaaggttaaaagtttagtgttaaagtgtaaaattttttattaagggtcaaatatgtgaatttaagtgttttaagatatttgaattggttaattg

SEQ ID NO: 57594 - DNA, 338 bp, Gossypium hirsutum
  Clone ID: uC-gsronu33B154a10b2
ccctctcgttcggccacgcgttcggtgcctttggggggggatttgggttacacaaagagatatgtacgatgtcttcagatatccgaagtcgttaatagtatgaaggacttgattgattacagtagagagacgaagactggacctatggagagtttggccaagttccctcgaagaacaagtacttcatttggtattcaagcacaacagcctgaggaacaactactacagcagcagctgacaccacaacagcgaacaggggcccagaacaccagttgtcaaagttctacccaggtttctgggatggcatctggtggtaaccatggtggagctaacataaa

SEQ ID NO: 57595 - DNA, 432 bp, Gossypium hirsutum
  unsure (1)..(432): unsure at all n locations
  Clone ID: uC-gsronu33B156b08b1
ggttgtctcagtttcaggcgccgtttgctccatcaataatctctctagcgatgaccaccatcgttgcaacgatctcaacctcaactctgcttcttttcttcttcagaatgtgttgggaaaatcaagctcaaccctttatgccattgcacttcttgcctcagggcaaagctctaccattacaggcacttatgcaggacaatttatcatgcangggttttttgaatcttaaaatgaagaaatgggtgaggaatttgatgactaggtgtattgccattacacctagtcttattgtgtccatcatcggtggatctcaaggggccggtcgactaatcatcatttgcatccatgatcctttcatttgagctaccaattgctttaattccactacttaaattcatgtgcagcttaaccaagatgggaccatataagaac

SEQ ID NO: 57596 - DNA, 205 bp, Gossypium hirsutum
  unsure (1)..(205): unsure at all n locations
  Clone ID: uC-gsronu33B157a04b1
cctgagtcnctttcaacaggatgcaaaactagtcctgtccctttgaaagatgagattgtggaagaactttcttcccagttttcagcagatcatgttgaaaatggtcatggttgcaataaaaaagagtctacaattgaacagtacaatttgtttgcagcgagtaacggtttatggatttcgtactttctgtcattcattctatgta

SEQ ID NO: 57597 - DNA, 435 bp, Gossypium hirsutum
  Clone ID: uC-gsronu33B158h07b2
ttaattgggagctcctcctttgtggctgagttgtgggaggcactattgcaaattcttgaaactcagaccaccaccaaagccatgaggtatcgatctcttctccatcaccttaagaaaaataatatttctatgtcaatgtatctagcagagattaagcatctatgtgattccttaggtgggtgtggccattatgtatctttagaagaacaaaaatcagaacttctcaatggtcttcttctagaatttgatcacgttgtgtcaattattgcgaaaagtcgtgttccatttgatttgtacgatattactacaacttttcttgatgctgaagctagatagtaagcccatctgtcatatggcttattctcagccaatctagctgaagcccaatagggttcttcaccagctttcctatcatattctgaacaaccgtcacct

SEQ ID NO: 57598 - DNA, 239 bp, Gossypium hirsutum
  Clone ID: uC-gsronu33B159d05b1
tttttcacgagaatgaaaacttggcggtacgccgtgtacaataaatggcggttgccttcaatgagaggcaaatatatacacatcccaaattgcatacaccctctgcatttgatacctataggcagttgatcacgttactcgttatcatgtattcatggcgctaaaccatgtagtttgcaccatatatttctgttcaaaaaagacccacccaatcagcattttaagcagttgcgcatcac

SEQ ID NO: 57599 - DNA, 465 bp, Gossypium hirsutum
  unsure (1)..(465): unsure at all n locations
  Clone ID: uC-gsronu33B160f07b1
ctctcaagaatatggactctgttttttatcctatcctctgtttttctgttaacaggatttgagacagtgacctacatgttacagggggcagttaagcatgaagactttgatgggcatagagggaccattggagctggtgatctacaatggatgactgctgggagaggcattgtgcactcagagatgcctgcagcacaaggaacccaaaagggtctacagttatggatcaatctctcgtccaaatataagatgattgagccaaggtatcaagaaatatcaagtaaggacattgcagaagctacaaaagatgggatcaaagttagagttatagctggtgaggctttaggaactaagtcagcagtttataccagaaccccaacaatgtacttggacttcactctcgaaccgggagctcacctttcacagccgataccggaatcgtggaacgccttntgttatgtcttg

SEQ ID NO: 57600 - DNA, 394 bp, Gossypium hirsutum
  Clone ID: uC-gsronu33B167g03b1
gaacttacatattataggaactaaattgaaatagggatttatcttttggtggaatactaatctgaaataggtgaagatttgtttagatgtaaaaacaaacccagttgttgcgcccattttgcctttagattttatgttgcttttttctttcaaaaaaaaaaaataaaaaaaataaaaaaaaccaaaaaaaaataaaaaaaaaataaaaaaaaaataaaaaaaaaaaaaataaaaaaaaaatatataaaataataaaaaaataaattaataactcaacaaatataataaattataaaattcaattattatatttttttattaaaatattaagggggcggcgttttttaataacaaatttaattcccctttattattagtgttttatttttttttt

SEQ ID NO: 57601 - DNA, 399 bp, Gossypium hirsutum
  Clone ID: uC-gsronu33B168c05b1
gcgtttttcaccattgccgttgaatagaagaaactaaggcccatatctcccccatgccttcagattctttctttggatttctgagggatttatgatcaattgtctgggatttttcagtaaagggtattcttacttgctgcaattctgtactgtcagcttccaattttcacggtttggtagattattgtgaattttttctccagatgttgttcgaaaagcataaattgaattaggcgttgcggctgtgagaagggctgggttttgtattgtgtagtgaaagatgaaacgcggttcggcggtctttttggtacttttagtccttggattcttttttgcaacatataatttggtgactttgatcattcacctttagacatttacttcaaagcaatgggattt

SEQ ID NO: 57602 - DNA, 526 bp, Gossypium hirsutum
  Clone ID: uC-gsronu33B169h11b1
actacgcgtccgcccacgcgtccgcccacgcgtgcgatcgatgtgatgattttgaggaactagtttatctccgatggataaatgcttgtttgcggtatgagctgaggaattatcaatccccggccggtgaaacagttgctagagatttaagtagaagcttaagtccgaaatcggaggcaaaagctaaaaaactgatactcgaatatgcacataccgaaggaatgggtagcattgattttgattgcgatcaatggtcttcttcccaagcttccgaaactcaagaacttgatgatcctttgatcgagaattcatctgctacaaaaccgaccaattcgggtaaaaataagttcttcaagaatttacggagactaatacggagaaaagacggtcatcacgcggaccatgcttcatcaatgggcagacctgatcatgttgacgatcctccaacttggagttcaagcacaaagagcgattctgtaaccatggtaagtagcccgagtgatagggttacaacttcatctaagag

SEQ ID NO: 57603 - DNA, 490 bp, Gossypium hirsutum
  Clone ID: uC-gsflmaxxa010b12b1
tctttccattcattttctctctccccaaacaccattgtctctcccactttctcctcctccgcaacacttccatttctttcttgtgttggactctaaaaaaggattcattaaagctttgccttccatggtggatatcgcaaagtgcttgccattcaatggaacagctatcaaaacagagtttaagaacctgtgttcgatcgttaaaacgagtacaacactggctctcttcattctttccttcgaagcccacactctattcttagctttgggcccttcttctccttggtttaccacttcctctgactcttatagatcacaattcccttccctttttggttacttatttcccaacacttcatctccttcatcatctaatcacactctgcaaccattacccaacgacaaaaacaaaggcacccaacctttcaacaacagtgaacaacttcccagttcgaataacacgaatatgaactaatcccagagttcattt

SEQ ID NO: 57604 - DNA, 337 bp, Gossypium hirsutum
  Clone ID: uC-gsflmaxxa015d05b1
tttgttttctcattttcgagaaaagggagaccccttcacttgttatacccccacacaaacaggaatcataagcattaagttttggttttcattttcttcatcagttttaggaggatcaaagctataaagctagtatttgaatcttttgtttcgttcatacacacatacatatatttaatcggttttacctagtttgttgtcgtcaaatttctattatttgttgtttctatgtttcttattttatcatttttccttttcttttcttcacctttttctgtttaggctttattttctgtcctttttatcttctttatacctctcgcatttatatttattt

SEQ ID NO: 57605 - DNA, 483 bp, Gossypium hirsutum
  Clone ID: uC-gsflmaxxa028f09b1
ttcacgcgtccggccagcagccgaaccaccataatatttggtgatcaacagtacgcaaacagtacccgatcctaccattgaaggtgctcgaccatgcctaaaaggatttggtaagtatatttttcctccttttcttctttattaaaaaaaaaacttcaaatctcatgttgtttttttaaaaaaaccgtagaaaaattcataaaataaagaagatttcatcactattcgacttctcgcccttacctccgcatttctgaggtatttaggctctcattggtgtcgattcacatgctaaaaatccaagccaatagaaagaaaataaatcagaatagaggaaataaaacttgaaatcacctttgctaaaagaattgctttttctttcttctctatgcgtgcgtttacgttcgtaagtcctttttgcaaatacaatcatcggcttttatagccggatttacagagtaaaataaaaaataaaaatacaca

SEQ ID NO: 57606 - DNA, 470 bp, Gossypium hirsutum
  Clone ID: uC-gsflmaxxa041g02b1
cctcactcgtccgggttggttgggaagaggaaggttggctaggatgagccttatgggaattcccatggatagaagtttactagtatgtctaatctctgtgtatgtgtgtttcataacacgcgaatgcatgaacaaagttgcatcttttctcatgtccatcatatatcaatgtacctgtactcttacgtacaatggaatccgatgtacttgtcctcatatcttttctgttctgtgtttatttaaattctatgaaatattgcagctcctaaatgatactgcaccttcaccaattgaaattgcaaaagcatacatggcaaaccggacatcagaatcaaacctaagttctaagagtattatatcaaaagatgaaagaccaacaatgcttgctaatgattttgcatcaaaaccatttgttccatttgcttcaccgaaggcattcacatgttggccaggttccatggtacatgatc

SEQ ID NO: 57607 - DNA, 304 bp, Gossypium hirsutum
  Clone ID: uC-gsflmaxxa061b07b1
tattcgaacagcactatgatcgattgttggaatcatattactccttggaaaaaaaatacataaaggccatacctgatagctggagttgcattagccaaatggaggaacttaaatagactgcatgacaggaatgaaacactatactacagagtgcttattgacaacatcaaagattgcgtacactataatggatactccaactgtggagctcgtactgaaaaactactctggattgtttagacgcccacatgacttacatgcaagtgcgactgataacgtagagatgatactctatgatatatga

SEQ ID NO: 57608 - DNA, 499 bp, Gossypium hirsutum
  Clone ID: uC-gsflmaxxa076g11b1
tttctctctaaaagcacgattagacctactctcacactaaaatttcaacatttatgaaatttcgctctcaaaaatttttttgttcctattttttcacacggaaatatctgctaatttaagatcgtggagatcaattgagcacgatttggaaataatcatttttggaatttgcatcggtgatcaattgagcacgatttggaaataatcatcggagatcaatcgaggacgatttcaacataatcatttttagaatttcaattcatggcccttcgttacaaggtgtgattactcaaacactaggcttacatcagtgggaaaaaaatagtatatagttgaggggcagcttagaatacaaggaaaagaataagggtgaaaaaaaaaagtatgggaaaagagtctccggccgattgggaatcgaaaacagcaagaaagaaaagcgataaggagctcgagcgtaagtatctgaaaccaggtgctcttggtcacttcgatcaataag

SEQ ID NO: 57609 - DNA, 511 bp, Gossypium hirsutum
  Clone ID: uC-gsflmaxxa091g05b1
agccttctcaagtaccggacatcaatcaatgtcttctgtggtggagttgacagcatctcaagaaagccatgatgagggtaaaaatgaacggttagataattttcttaacatggatccaacgctttctaatagtttgtcactctctgctgatactttccttaaagctgccatgactctcaagaaccaggtagtggaggttacatggaaaggaaggggaagtggcggcggcggcggcggcgggttaggtacgggaatagacccgactgtttatacgggtctgctggggacagctttcacttgcttgagatcttacgaggctactggtaatcggcaggacttggtattgtccgctgagatcgttgacacgtgcctctcagtcgcacgtgcctcccctagacatgtgacatttttatgtggtagaggaggggtgtattcgcttggagcagtggtggctaattacatgggggatcatcaaagacttgaattctttctgaatctcttcatcgaggta

SEQ ID NO: 57610 - DNA, 158 bp, Gossypium hirsutum
  Clone ID: uC-gsflmaxxa095b01b1
tgagagttttctaagcaaggagaagtggtctgcctaagcggtgcctgaagcagcattggggcttggatagccaaactcctccttgctcgcggctacaccgtccacggtaccgtcagaaatctcaaggacctgattgaatctcaacatctcagaatctc

SEQ ID NO: 57611 - DNA, 478 bp, Gossypium hirsutum
  Clone ID: uC-gsflmaxxa119e11b1
attgtgggagcctccacttctacctatgaaaaatgtgatattaagcgggtgtccaataggaagagaagatccacagagctcccaagtgatgttaggagcctgagaatttttaggtgccacaatatcagatgcttgagtgatttgcccttctttcacaaaccattgagtttgtttttttgttacttctcttctttttattttctctattttttcttcctttttttttttttctcttttttttttttcttttttttatatttttctctttttcttttttttttttctttttcttttttttcctttttctttatactcctttttttttttctttttatctttctttatatctttcacttacatatatttttatctctttctttcatttaatctctctttttcttcttcttctctcttttttaattttcttttctttcttctcttcctcctctcttttcatctctttattttttcctttttt

SEQ ID NO: 57612 - DNA, 562 bp, Gossypium hirsutum
  Clone ID: uC-gsronu33B016d09b1
cccacgcgtccgcttgagtttctgctacctactctaatattatagatcatctccctgtagggaaaacaacctgcaattaaactagggtttgagctttttcttattgacagtaaagttttaagacttgtaaaggtaatcctacaatatacagagagagagagagagagagggagtagtggtggtactggataagaatgaaggagagtggaggaaggaagcagggagcagcgtcgccatgtgcagcatgcaaacttctaaggagaaggtgtgcccatgactgtgtttttgctccttatttcccagccgatgagccccacaagtttgctaatgtccacaaggtcttcggtgctagcaatgtcaacaagatgctccaggaactgccggtgcaccaacggggagacgcggtgagtagcatggtgtatgaggccaacgcccgggtacgtgaccccgtatacggttgcgtgggagccatatcatcactgcagcagcagatagacacccttcaaacccaattggcactggcccaggcagaggtggtgcaccttcgggtgaagcagactgc

SEQ ID NO: 57613 - DNA, 385 bp, Gossypium hirsutum
  Clone ID: uC-gsronu33B047d08b1
acccattctaccccccttggacaacaaacagggaaaaaattccgtttcacagaataagccttgagaaaacatgacagaatgaacaagcagagcgcttactcgctgggccagggtagataggggaggagacaatcaaacatatgataagaaaccccagagcacacgactttatagcccttaggggaaaaacgaaaggaaggattcgtactacctctttaacaattaattaacaaaaacatgcatgttttattgaacagcccatcttaatttgctttactggaaagggcaaagcaagccctaaacagggtaaacccattcttaataaaacccggtcctagacctcccccaattaaagacaactgtaattctctggtaatgccggaaa

SEQ ID NO: 57614 - DNA, 339 bp, Gossypium hirsutum
  Clone ID: uC-gsronu33B082a11b1
aataataaaagctcaagttcaagttatcagggagaaagcagaccggccttttcgttgccttgattgtcagtatagaagagaacttgttagggtatatttggcaaatgtagagcaaatttgtcgtcgttttttggatgatagacgaagcaatctagggaagttcatagaagacaaagctaagtggtcaagtttttggactttctggtcggggattgaccaaaattccaggcgcccaatgtccagggagaaaaaagatatgactttgacagcagctgtgttgcacttttctattgagaaagaagttccatcttcttttggatatggattcactttattagt

SEQ ID NO: 57615 - DNA, 487 bp, Gossypium hirsutum
  Clone ID: uC-gsronu33B146e06b1
gcattatttatgtgaatagagcttgtggcagtgatgggggtactgcccttcattgcgctgtggctggtggtgcagattcttcggttgagattgtcaagctgttgcttgatgcatctgccgatgtgaattgtgtagatgctaatgggaacaaacctgttgatctgattgtgccgggtttaaaatcttcgagcaattacagaagaaaggtgattgaattgttactgaatggcgatgatgttctttacggggaagaagaatctgataagacaacgatgcctcagttgccaaaagaggggtctgagaagagagaatatcctatggatgtatcactgcctgatatcaacaacaggatatatggaaccgatgacttccggatgtatacgtttaaggtgaagccttgctcgagggcatactcccatgattggactgagtgcccttctgttcattctggtgagaatgcgaggagaaaggacccaagaagtaccct

SEQ ID NO: 57616 - DNA, 343 bp, Gossypium hirsutum
  Clone ID: uC-gsronu33B147h11b1
ccctcgcgtccgatcaccgttggctctttaatcctgcgcgatacacccaatttcatgatcgaacgtggccaaaccgaggaagccaaggccaagctcaagaggatccgtggtgttgacgatgtccacgaagaatccagggaccttgtagcccacagcgatgccaccgatctagactaacacccgccggggagctcgaagctacgatatgatacacctcgttcattgacagatatgctctttgctttataccatgcgaccgctgtagcacaagggcctgtggcttttcaggaatactatattcggctcaatgaatggctgccctattagttccaaaacccagcaa

SEQ ID NO: 57617 - DNA, 490 bp, Gossypium hirsutum
  Clone ID: uC-gsronu33B163f04b2
ccttgttgtatttcactctgggattgaagtatatggagcggagtatggctttggagcacacgagtaccctacaactggggtgttcgaagtagaaccaagaagttgtcctggtttcatattcagacgatcggtattgttgggcagcaccgacatgtctcgttcagaatttcggttatttatggaagaactttcgcaaaaataccgtggggacacgtatcatttggttgctaggaattgcaaccatttcaccgatgacgtgtgcatgcagctcactggaaaacatattcctgggtgggtaaataggttggctcgattaggttcgttttgcaattgtttacttccagaaagcattcagattccagcagtttggcatgttcctgatcgtccagcattttccgacgatgagagatcgaattcggctggaacttttttaacgggggagagcgaggaagaggaagcagatcatcatctactgacacacccgatatga

SEQ ID NO: 57618 - DNA, 483 bp, Gossypium hirsutum
  Clone ID: uC-gsronu33B168h10b1
tttgttgtctccttgacaaccttcttctacctggggggtttatgtttcggatatgcggccttcgggaacaacacgccaggaaacctcttgacaggattcggattttacgagccatattggctggttgatttagccaatgcttgcattgttcttcaccttgtgggaggatatcagatttttggtcaaccagtgtttgcatttgcggagagatggtttatcaacaggttcccaaacagttggtttgtgaataactattatacgaacaaacaccgatggtttccttcgtttcagattaatcccctcaagatatgctttcggacagcctatgtcgcaacaacaacagccattgcaatgatgttcccatactttaaccaggttttgggagtgctgggggctttgaacttttggcctttggctatttatttttcagtggaaatgtgcattgtgcagaagaagattcaatcctggactagaaaatgggtt

SEQ ID NO: 57619 - DNA, 409 bp, Gossypium hirsutum
  Clone ID: uC-gsronu33B169a06b1
ctattatttttggaggacccccatgaaatacgtcgaatatgtattatgggaagaaactgtactttgaaaaggggaactgatgacgtggaatgttctctacccttagaaaagttgattgctgaagaagaggaggaagagatcgagatgcttttggagaactatcttcaaagatgtgaatcttgccatggtcaggctgaaaggcttcttgattctgcaaaagaaatggaagattctatttctgtcaacttgagctctcgaaggcttgaggtaagcaaagtggaactacttcttcaggttgggacattttgcgtggcagttggggctctagtagcaagtatattcggcatgaacttgaagtcctacctggaatatcatatgttcgccttttgggtaaccacagcggggatta

SEQ ID NO: 57620 - DNA, 388 bp, Gossypium hirsutum
  Clone ID: uC-gsflnu33B003a02b1
ttctttgatttttattgtctttgatgctatagccctcttcatatcattggctgttgtggtagtgcaaacctcgattgtagttatacacagaaaagcaaagaagcagatgatggcagttattaataagctcatgtggttggcttgtgtactgattacagttgcatttctagccctttcatatattgtagttggagatgagtggtggttagctaatctagttactggtatagggactgttatcattgcatcaacattggggacattgtgtcattgggtgattgtgaaccgtattgaggctttaaaactacgcagcatccggagatcttcaatgaatagtggatctcgatcattttcaatgtcatatgtgtctgacacggagattctgaac

SEQ ID NO: 57621 - DNA, 363 bp, Gossypium hirsutum
  Clone ID: uC-gsflnu33B004c08b1
taagaatacaaggtgatccagatagtgtttcgaagaaaattgagaagagtcgactccagtactacatcaaccacttcgagtgaatcggaggttcagattttgactatcggcagcccttcttggagggatctaggaacgataccataccgttttattcattcgaaaaccaaggctttggtcaatgggagactccattggctttccaagcctaacaggtacaccactgctagcttgctcgtatccttcgatctcgaaacagagcaattccaggaggtgccgaaacctgattgttgcggctcatagaggtgtttgcggcatcttatggttgtacgaggttgtctctcggttgggtgcgttcatgag

SEQ ID NO: 57622 - DNA, 457 bp, Gossypium hirsutum
  Clone ID: uC-gsflnu33B013f04b1
ttcttcgcgtacgagttttgggttttttattgctttttaggctttgcttggtatggatgattgatagagttcaaggatcaaaaaccttgtcaacctaattgttagggttcatattagttttttacgttgtagcttaacaagtttcccaatccttgctaccaaaccaaatcttatagaacaagttgttagagacttggtagagtgttaggtgaaatcaaatgagtttagcttgtaatgttgcatttcaaaatacacgcttcacttagttgattaagcaaaaattctggtaataaacatagtatgtgagtgagataactatgcgtatatgtatatagacagtgaaagcagccttgaaacactgactgcataatgttcatatttagcctacaaattcacttcattgggtgtcacaacagcgacaaaactaagcctttcttggaccttaccacgctgatcg

SEQ ID NO: 57623 - DNA, 551 bp, Gossypium hirsutum
  Clone ID: uC-gsflnu33B058d09b1
tgtgtgatcgaagcgtgaccggaatggccggctaaaaaagaacagccaaaaatcgaccggagttgaaacagttaaagagaaaacgacgggcaaaagaagcggtttattttcaagttttcgtgctattttcaggtccagtgggaaagcaagtgaatcagacgcgcttccagtagcccagtggccgccagggaatagggacattaggtctcgtttgccaccagatgatcgtgacgcaatatcgatggagcctgaaattatggagagtgaaccggtcagtctaggtggaatgaagcggttcgcatccggtaggagatcggagccgttaatctgaggtgcgtgatggcagttgtggggcacagcttaagcgcgggttggtctgcggtcgtagttgggtaacttgcgggtcccgcctatttttaaaattttttttcgtggtgacgtcacacgatgattgactgttttgacaaggttagaaaaattgaaagcacattgttttttcttatccccccccctttataaattttgatttggtttacttggtacaggttctt

SEQ ID NO: 57624 - DNA, 425 bp, Gossypium hirsutum
  Clone ID: uC-gsflnu33B063g02b1
tttttagcgcagaagtgaataacataaaatatgtgattttatttaaggttttgtttgggggaaattgagagaccattttgaaaaaaaaaaatccaagatgaagatcacatcgtttgtcttgctgaagtgcaccccggatggctccgatccgataatactagctaacgctaccgatttgagccattttggctacttccataggtcaagcgtcacggagttcatcgttttctttcttggaactgtcgctaaacgcactccttctggtgagctcctatccggtcatcacgaatagtataaggtacatgcttacaacagatatggaccttgtgccttggtatttatggatgatcatcatccagctcgaagtgctttttcgcttctcaaccagattctagatgaatatcagaaaaatcctggggagtctt

SEQ ID NO: 57625 - DNA, 371 bp, Gossypium hirsutum
  Clone ID: uC-gsflnu33B084c02b1
ttttatgcgtacgtggagaatgcaagagagttagcagctaaacttctcaatcaatgcctgttggacaataatgacaatcaatatctttggatgcttgtggaacatgccttggagcttcctctacattggaggatcccaaggtttgaagctggatggttcatagatgtgtatgagaaaaacaaggaaaaaaattccattcttttagagcttgctatattggattacaacatattgcaatctatacaccaggatgatcttagatatgtttttgcatggcggaaggaacatggctttgacaagaggatgagctttgcctagagataggctaatggaaaactttttatggagtgtgggaatgataattagtcctc

SEQ ID NO: 57626 - DNA, 437 bp, Gossypium hirsutum
  Clone ID: uC-gsflnu33B130c10b1
ttccacgcgtccggaagtcatcatgtgtttatcgtactgtatgcatagatgttaaaattttttaagaggaaggaaaccttctgattttgggttgtgctttaccaattcttgcatgcatgataggttttgagagattgatgatttgatatgtatagttatctttcttttagctcaagaagctaacgagggtcccaacgataaaggcaaatgatttgctatgtagatttgtactagagtttctagtgagtttattattacttccatgtgttgtaaagtccatttttatataaattatgtaaggtaagtaatcttcctcagtaatgtatgaatggtgtatgtgtgggtaatggtcgtccagtgtaatcagcctgagttctgtctttttgtgttcaatctgtccgtgtgggtaatggtgtatgtgtaagatatgatctata

SEQ ID NO: 57627 - DNA, 616 bp, Gossypium hirsutum
  Clone ID: AW561931.1
gagaactagtctcgagtttttttttttttttttttttaaaaaaaaacattttgaatttattaaacaattgtttcaaccaatataacatacatgaggtattatttgggtaaatagtatttggtaatggacttagctagcagaattagattccaacgaaatgtttggagtctcggtcggtccaccccacgttcttaatcgctcttccgcttccaccgcctcatttcgccaagtggctcggagcattacaaagagtaggatggtggtttgaaggacggtcccgatcagcataccgaaccaaatcccttgcaccctcagcttaaatttgaaacctagcaaagctcctgccggaattccaagtagataatagcaagtaatgttgattaacccaacatatgcttgccatcctgcccctactgccactccatgcagaacaggtaaaatgctattgaggaagattgttgctgcaagaaaatacccaagcttcgacgccgcctttataaccagctgtttgtcggtgaacaacttcggaaaatcgtgttggttgctagaataatcgccatgaaaataattccgctgccaaagatgttacacgaccaccacgatcgaaaatttccgg

SEQ ID NO: 57628 - DNA, 700 bp, Gossypium hirsutum
  Clone ID: AW561916.1
agagtactcactggagaaacatcatcacggcgatactgataaaagtaatgctgtgcaacataaccaaatcgtgagcagatttaacactggagatggggtcgaaaacccctaccctgacctcgtgaaaccacgcgactatcgcgaacagatccgtctatggccaacgacgatgaatcttcaacgaggttcgcagtaaagatgatctcttagactactttcgcctgtcgagtttcacaatcaagaagagcaccaaaaaggcgttaaaacggaactagagtcggagacaaagaggcgacagaaacaacagcatcaaattctgatgagagtcttgtaagtaaaacccccatttgctcggccgcagagataggagaatcagacgcgtccagaatcgcgcataatcctttcagtttagcaatatactaatgaatgtacaaactctccttcttgagagaaagcagatcgtgacgcaacccgagattgcttcacctccgtatcgccataaagagcgcacccgccaccatccacacatcaaatgctgactgaacatctgtgaaaaatgacaaagtcagaggcacttgatagcggagagaaccacgatgtcaacaaattatctttgttgttgaaacaccgtaacagtcgtgttaaccacaagagcctatcattgtgcttgtacaaacatcggtggagccacaccaaagct

SEQ ID NO: 57629 - DNA, 664 bp, Gossypium hirsutum
  Clone ID: AW561914.1
gaactctgctttcatttttctcttctttgcccgcacctttcttcttactccgccgtgtcgccgctacatactccgccaacgccgccacttccttttccgacatgggagcttccgtagatgccgtcgagaggatactcaactataggtttcgagacaaacgcctcctcgaagacgccctgactcactcatcgtactccgacgcgacgtcgtatgagcgtcttgagttcgtcggcgacgccgctcttggccttgcgtttaccaaccatgttttcttggcttaccccatgcttgaccccggtcaactgtccttgatccgagctgcaaatattagtaccgagaaacttgctcgggttgccgttaaacatggcctttttcagtttgtaagacacaatgctgtgggtcttgcgcaaaaggttaaagtatttgctgaggctgttactcaagaggatgaattcgtggctcatggtggatcgatgaaagcacccaaggttttagctgatattgtcgaagctctggctgcagctgtttacgttgacatcagatttgatctaacaacactctgggtgatctttagaggttattagagccgatagttacccagaagctttacaacaacaaccttaactgtagcttattgttcgagaaatgtcaaaagcaagggaag

SEQ ID NO: 57630 - DNA, 754 bp, Gossypium hirsutum
  Clone ID: AW587511.1
cacaactagaagaagaagatccaaggaagagaggaaatcattaaactattgatttcgtttgaggcctaatgttggaatctgagtactcttcagctgagttgcaatggacgttgttgatgtcggactccgacatggcagcagccgcgcaacaactgatgcaactcagcgatgaagataacagcagcagcagcagcagcaatggcaacaacaataacaagaaaatcatagcgaagatgatgaaagacgggagatacttggaacaaagtcaaaatgagataacttcagcaaagattgaagaaatttttgggaaagaagagatttcaagaccaactaagaagcggaggtatcggttccttgagagtatttacaaggagacaaaacctatgaaggttagctatgggaaagggaatgggaatagtttgtgctattgaaataaaccctaatgggaaaattttgtgtaaagatggattctatttgtctaatgaagacttggtttattttgggttgctcgtttggtgatagaactaagcttgttgatcattgttttcttctgggtttgggtcattaatcatgatcatgaagctttgatcaaccgacttcttactttttaataaaattttggatagatttaatttgatggacgttaagaattattaagactgggattgggaaaagctctatagttttaacttgtttctgggtaaaaagggttcttttagatagaaagttgagcacaatttggccatggttgctg

SEQ ID NO: 57631 - DNA, 664 bp, Gossypium hirsutum
  Clone ID: AW587506.1
cgagaatatgcatctacattttaaataactttttttatgaaaatactttcattttcctaaggtcttatgctgacacgttgttatttctctttttccattatttctggggatttgcttggtccttggtgataatggaagtatttatatcgtccattgtacataaaaaataatagtgaataaagataaggtaaagatatgtctgaaggtacgccactggttcggaaaaggtcctgaagcttgcatgaagaacttaccattgtagagagtagttttcttttacttttactttttgatctttttgtgtatatgttttctgccagaatcttatataaaattaagttctctattttctgcttgcagggacaatttacaacttttaaggcaacgctattattatgccacttggaaagcagatggaacacgatatatgatgttgataactgttgatggatgttacttgattgataggagctttaattttcgaagggttcagatgaggtttccatgcagacacccaactgaaggtataggggatggaactcatcatttcacattgcttgatggcgaaatggtaattgataccttgccagactctcagaagcaagagagaagatatctcatttatgatatgatggcacttaccatacgcctatcatcgaaccgg

SEQ ID NO: 57632 - DNA, 631 bp, Gossypium hirsutum
  Clone ID: AW587491.1
gggcacatactgagacaagaaatatagattattaagtgaaatataaagaaagaaagaaaaaacagaagctgagaagagaataagaagaatatttgattgaagagaagaggagaggaaagaaagtttttcttttcccttgttttttgtgtagtgagggatataaagatattttattggtccggtttattgaagcaaaaaactagaagaattaaagagaaagagagttaagaaatttggggtttttcgggttcttgttttgattgaaatcaaagctttgtagatttgagtaactctctttttcttttgtttctcctttgactctgtacctgttgggattttcttaaaactctgggattcatgcgaaagccattccattgctgctttgaagagattgcaaatctaaactccttgcttggcttcggttttcagagctatatgttcaggaacagaacttactctttcttatttgggtacaatgaggagcatgaagctaaaagcaagcagccaagttggggataaactgctgattgccttgagctatacagctgaatatttgtgcttttctttgtaactgtagtttacttaatatcatgttgtttaagtagtgctgcagttttatgaagtgagtatt

SEQ ID NO: 57633 - DNA, 584 bp, Gossypium hirsutum
  Clone ID: AW587478.1
cagaaaaaccctagttattggggatttggggaatcctattcctcactattcaaggtcatggctacaaagaagataatagcaatttgtcaatctggaggtgaatttcagactgaaaatgatggctcattgtcgtatagaggtggagatgctcatgcaatagacattgatgatcagatgaagttcagtgacttcaagatggaagtagcagaaatgtttaattgtagctttggtgctatgtctatcaaatacttcctccctggtaatagaaagactctcattactgtctccaatgacaaggatttagaacggatgataaaatttcatggggattctataactgctgatgtgtatatcgtaatggaagaaaatggagctgatgatgtttctaacatgtcagatagtaggtcaagtagaacaactttgtctgaagcagtgcctccacttgagttacctctagatgttgtggatgatccactcaacccaatattcctcttggtgcccctcttgatattgatggccccaaccatattgatgcacactttaatttgccacctgagggtttgtctgttcgcctctttctgttg

SEQ ID NO: 57634 - DNA, 641 bp, Gossypium hirsutum
  Clone ID: AW587477.1
cttagatacaaatatggattgtttaaacagtatattacaaaagatggtcaggaggaagttgcagaaaattggcttgagatgggaaatccatgggaaattgtgagaaatgatgtgtcataccctgtaaaattttatggtgaagtcatttcaggccctgaaggaatcaaagaatgggttggaggagaagatataactgctgttgcttatgatgtccctataccaggatataaaactaaaactacaattaacctccgactatggtctactaaagttgcaccagaaaagtttgatttaagtgctttcaacgctggagatcatgccaaagcttattcagcaatgaataatgcagaaaagatttgctacatattataccctggtgatgagtcacttgaggggaagactcttcgactgaagcagcaatatacattatgctcagcttctctccaggacattattgcacgctacgaaagaagatcgggagagtttttgaattgggaaattttccctgaaaaggttgcagttcaaatgaatgatactcacccaacactctgcattccagagctgatacgaatattgattgatgtcaagggttttgagctgggaacaagcctggaatatcacccaaagaactgttgcataca

SEQ ID NO: 57635 - DNA, 644 bp, Gossypium hirsutum
  Clone ID: AW587465.1
ctcttttgttcctttctctctctagctttttccctctctacaattcatgctttgtttcgctgtctaaagcttccattccaattctattttttttcctttcaatctactttttttgagggttcttcttagcctttatttttttaactctcaaaacactctcatatatatatatatatttttcttttttctttttttggatctaggttctgcttgctttctgataatcatcttcaacaaccaggttaagtctattacttgcttcaagcttgggacctagaagatcaaaacattaaatttaaagctgtgtaataagtatggcggtttccatgagagatttagatccagcttttcagggagctgggcaaaaagctggaattgaaatctggcgcattgaaaacttccgccctgttccagttccaaagtcatcttatggcaaaattttcacaggggattcctatgttattttgaagacaactgccttaaaaagtggtgccttgcgtcatgatatacactattggcttggtaaagacacatcccaggatgaagcaggtgctgctgcagtcaagactgttgaacttgatgctgccttggagggcgtgctgtcaatatcgtgaaggcaaggccatgaaactgagaagttcctt

SEQ ID NO: 57636 - DNA, 688 bp, Gossypium hirsutum
  Clone ID: AW587463.1
agctcgcgcgcctgcaggtcgacactagtggatccaaagttcaaatgctcatactgcttttgctgatagagaacctggcaaagcaatgagccgcccatgtctggagcttgcaaagctgttttcaattgcagttgactttccgaaaacgggtgtaccagctgaaataccacaggagttgagggtcaaagaatttccggatttcatggagaaaccggacaagccaagttatcaatcatacaatgttattggaaagcttttccgagaggtgaagaaccttgcacccaatgaatgctcgattaagctcttaactcgggaaaagatgaagaggttttatgatcccgacatggaagttgaaggctttgtggattatatggacgatgctttcttctacaaaagtaaatacgattacaaattggggaatttgatggactattacggggtcaaaacggaggctgaaatactcagtgggggtatcatgaaaatgtcgagatcttttacgaagaaaagagatgcagaatcgatcagtatggcagtgagatcattgaggaaggaagctaggtcatggttcaatgaaaaaggaagtgagctggatgaagaaatagatgatgcatatgcaaaagcctcagcttggtactatgtcacatatcatcatagttattggggtcagtataatgagggaatgaatagg

SEQ ID NO: 57637 - DNA, 640 bp, Gossypium hirsutum
  Clone ID: AW587460.1
gtcgaatcctctcaatttcttaactgaattcaactcatttccaagaaaaagaaaatggtgttttcgttgttgtctttcgagtgatagaaagagaaaaacacataaagtaattaattaagtaaaagaaagaaaagaatgagtgccatgaagcgaaaaccggttcagcaaaaatcacagattagatggaagaggaaagttttggcggcgcttttagtgttgctttgtttcgcgagtttagtgttaatggagacacagtaccctcaagttgtttctttgtcttctttacgacatcgtttcatcgttaaaccgaagattgccttccttttcatcgctaggaatcggcttcctcttgatatggtttgggatgctttcttcaagggagaagagaacaggttttcagtttatgttcattctaggcctggttttttattaaacaagggaacaacgagatccgcttgttttttgaatcggcaagttaatgatagtattcaggtagattggggagaagcgactatgattgaggctgagcgtatattgcttagacatgcgcttcagatccttataatgaacgctttgtttttgtctcggatagctgtataccaatttataacttcagttacacatatgactatatcatgtc

SEQ ID NO: 57638 - DNA, 641 bp, Gossypium hirsutum
  Clone ID: AW587454.1
gagagaactagtctcgagttttttttttttttttttattaaaattttcacatttttcttctttcttttttttttagaaactcaagaaatgttcaacaaaatgtccatggaggaatcacttttcactccaaaaccaacaagtacaatggagtattatacctagtacaaaccaaaaaaaccttcctttttcgtcatcccgaatgccaaatgaccgactcttcgatgacacttacagcattgcccctggcggataccagactctacagccgtgactctacagcagtcaaacacctcttccgaaattcaaagaattgaacgacagtccactaggcacttgagagttcttaggaccataaattaaagaataaaccgaaaaatcaaattcggaatgtgtcacagcattctaccgttaaccggaccggacgaagatggtgttttgagtttaacaaccctctcggtctgttcagaaaagagaatgttgttccagtttgttggtctatgaacaattcttgatggaactcgatcactatcttccccaccggatgcttcataaccatcactagcggatctcgacaatggaaatcctttgaccagccatattgaaaggaggtaaacctgtcgatgtcttgatcttcggctcct

SEQ ID NO: 57639 - DNA, 690 bp, Gossypium hirsutum
  Clone ID: AW587451.1
gttccctggcctgcaaggtctcgagtttcggaggtttctcacagtggaaacaagcattctggatcatctgaggttgccatgaagaattcagtcacacaggtttctgcctctaaaactggttctgttaagcttgctcaaggagagagtgctaccaagtctacttctgcatcactgggatctatgaaggccgcaatatcacctgcttctgccattgcaaatttaaaagatgtgcaagcacgaaatgctgctgttgttggcacctctgatcctcaaacaacagcaaaggatgagaaaagcagcagttcgagtcagtcccacaacaatagtcagtcttgttctagtgaccatgcaaaggctggtggactttctataaaggaggatgcaagaagttctgcagctggttctggatcagtctctaagatctcgggtaattcttcccgacaccggaaatccaataatggtttcccagggtcatctggagttcaaagggaaactggatcaggcaaaaattcttcctttaacagaaatcttgcatcaagaaaaaatatcacaagtctggtttagcatgtgaaagggcttgtggaagctcctatggctgtgtctaatagtcataagttcattgttaagatcccaaatcgaggtagaaagtccagtacaaagtgccagtggaggatcttttgaagtcactct

SEQ ID NO: 57640 - DNA, 673 bp, Gossypium hirsutum
  Clone ID: AW587446.1
ggaagaccaattttgcttgcgcttgaagatattgacgggaccccatcattcctagagaaagctctgcgatttcttgagaagtttggaactaaagttgagggaattctgcgtcagtctgcagatgttgaggaggttgatcgcagagttcaagaatatgaacagggcaagactgaatttggttctgatgaggatgctcatgttgtgggagactgtgtaaagcatgttctaagggagctaccctcatccccagttcctgcatcctgctgtactgcattgttggaggcttacaaaattgatcggaaggaagctcggataagtgcaatgtgctctgcgatatttgagacatttcctgaaccaaaccgtcgcctgttacaaaggattctgaagatgatgcatacaatctcatcccattctaatgagaatcgaatgactccatctgctgtagctgcttgcatggcccccttgcttttacgccctttattagctggtgaatgtgagttggaggatgactttgatgctactggtgataattctgcgcagcttcttgctgctgcaaatgctgctaataatgctcaagccatcattgcaacccttttggaggagtatgagaatatttttgatgatgaaaatctacaaagatgttctatatcaacttgattctcgggttggacaa

SEQ ID NO: 57641 - DNA, 585 bp, Gossypium hirsutum
  Clone ID: AW587444.1
gtcaaaccaagaagcagtggacgccataaaaaacatcaaggatgctcaatcagcagcaaagcacttgattgaggcagcagtttctaagaagagcaaagatgacatatcttgcatcgttgtaaggttccggtgatatatttcttccgatgagtaccgaattaatgagaaaatgaatagctaaatatgtgtataccatgccacgttttttatcctctttatagctatagtgattgttgcagcctaccataaaactgtttgtatgtaaaaagttgacccagctttataaaaatgactacttgaattgtctgcaacgtcatcgttgatgatatgttgttgattttcaatgttatcaaggataggaccgtccatgccttcaaggcttccatacataactgaagcatcatcatgacatgtgaagggtgacgattttgaatggtttcttcctttaataaagattgtacaaataaaaggaaaagggaaaagggaaaaaagaaaaaagtacactcttatggtgatggtgatggtgatgatgatgcatgttgatgttgtttggtgggtgtgaatgccaatgtgaatgtgtgtaag

SEQ ID NO: 57642 - DNA, 616 bp, Gossypium hirsutum
  Clone ID: AW587439.1
ctttaacattttctcagcgaattttcccaaacttttcccaaacttttctgttttaatggaaacccaaagcgttaaattaggcactccctcgaaacaagccaccgtttcaaaggtgagggtggtggtcagagtccgtccgtttctacctcaagagattaccgcaaggaatggcaactcgaagtcgtgcatttttcttcttgatcatcaagataatgattcttctgatgaagtttctgttcatcttaaagatcctaacaccagccgaaatgaaagctacagattggactctttctttgaccaagaagatgataatgtcagaaagatattctacagagaagttaattctttaattccaggaatctttcatggcttcaacgctactgtatttgcttatggggctactggtagtggaaaaacttacaccatgcagggtatggaagagcatcctggtctaatgcctttggccatgtctacaattttgtcaatatgccaaaccacagggtgcatagcagagatttcatactatgaggtctacatggataggtgctatgatctttagaagtcaaaaacaaagaaatttcaatttttgatgacaaaaatgggcagattcatctaa

SEQ ID NO: 57643 - DNA, 665 bp, Gossypium hirsutum
  unsure (1)..(665): unsure at all n locations
  Clone ID: AW187676.1
gcctggacaagaaatgactccactacttctctgtgttctagaattatcttttcagttcctctatcgattcattttccaagcgcagatctcctgatgagagttcaacatttctgcactcctaaccgattcaatcatcgatgaccatcactcaatctagttctcttgctcgatgcgtacctagtccgaaatatcttctagcaaactccggtattgctcttaccagtaaaatctccaacctccgttttaacgattccgatgctatcacatgagccggctgattatctgttctggaaatgtgcctgaaataaatttctttgaagtagcgttcatgttgatggatatttctaataatactgccaatttcagatctgtcattttctttagattgacattttttaatgaccactaatgaatctccttcgatctcgaccgtgtcgatttccaaacgtcgacccactgctattgcttccgcacatgctaaagcctccgccgcaaaaggggactcaacgccttcatgcaatgatgacttgcgttcaagttaatacggatgaaaggatctttatggggagtccatgttgacaaaatatntcttctgatatntttcttctgatagtcgattcagcatccagcaacgattccaatctcaaatatggtgatgtgtaccg

SEQ ID NO: 57644 - DNA, 697 bp, Gossypium hirsutum
  unsure (1)..(697): unsure at all n locations
  Clone ID: AW187665.1
gatgacaggcagaaactgtgcttgctgtgtttctcaattttccctgaaaatgcggagataaagaagaggtttttgagattttggtgggtcggagaaaacttaatcgcccgaaatggaaaggatgagatgggagatttaaacgacactctcaccacattcgtggagaagaggctaatcgagcctgttctgaagaaaaacagattacaacccagaagctacaaggtgaccccaattgttcgttcgtgcttgatccattttgccaagaaagaaggtttctttgattatgaccaggatggaaaacccatcatggatttttcatcttgcaacaaggcttgtatggtgaagtctgaaagagctactgcttcctggttcgctgattatcttaaaggcaatgacaaggatggcaatgaaagagctactgcttgctggttcgctgattatcttaaaggcaatgacaaggatggcaattcaaaaaagcctaaagagcaggagcaacatcaggagcaaggaaagctattgcaaggaaagctatctgcagatctagtaaagctgcagatgttgttcaattttccacatgagaacacattgataagagctagtcagcaaattgataaattgcagacgttgttcaacttgagtaagcaatttccagatntacctacggagtggttttctaaaatgacgggcattanagtcc

SEQ ID NO: 57645 - DNA, 600 bp, Gossypium hirsutum
  unsure (1)..(600): unsure at all n locations
  Clone ID: AW187657.1
ggggggagataaacagaacaaggagcgctgattgaaacaacaacgccatgccatcctctcttctctctctgtctcttcagaacccagtctcttaacttctgattcactacttttcgtttctctcctcttggggggattagggtccaacaaaccccatgaatttaatcccctcccaacaatcttaggggctgtaattctcctataacatgcataatttttgtggaaaaaagagacccgccatcaatctcaacctcttcacctctttatcgcactcttttttctgtctaaaccccactaaacccccaagcaactttcaatatggtgtanttgggctaggcatantancagctatgactgattcaacccatacacaccaatctatttgttttgctccatccccaagatccacccccatacctatagtctcatctgttaaagcagctcccagtttcggaggtggctttaactccgaaaagtttgatgaattatctgacaacgacacttttgtaatttctcattttggcgataatttgatcaaaaatcagttcggttttggagatgacaacnaaaattgcagtgggtttactgctgctccttcgg

SEQ ID NO: 57646 - DNA, 664 bp, Gossypium hirsutum
  unsure (1)..(664): unsure at all n locations
  Clone ID: AW187623.1
gttaaaagtcatctgcagaaatatagaactgccagatatatgccagaaacatcagaaggaacatcagaagaaaagaatcacttcaatcgaggagatgaggtcgatagacttgaagacgaatataggaattactgaagcactgcgattgcaggtggaagttcanaagcagctccatgaacaacttgagattcagagaaatttgcagctacgaatcgaaaaacaagggaggtatctgcaaatgatgtttgagaaacaaaaaaaggtggaggacgaaaaaggtggggctccctcttctgcctcggatgaccttcttgcaccattaccangctcaaagcatccaccttgcaacaacggtgaatcagattcagaagctttggagcaagatcactcaagaaccgggattggtccacgaaatgctggcactaacgaagaacaaagctcctcacgtgtgtgcacgaagcagaagatgccngaaacagaatcgactgtccatgatgagtccggtttctcagtctcaaaacgtgcnagaacagagaaatagcaggatacttaagactttttaacatctgataaataatcttttgttgacaacatatctctgctcctggagatgatgttgtaatatagataaatctgctgatagaaagcaggagttgttgatact

SEQ ID NO: 57647 - DNA, 617 bp, Gossypium hirsutum
  Clone ID: AW187621.1
cacaggcgtgtctttggctgtgtgaaccttgggacttaatttttccaaaaaatcgacagagacacggcctaacaaagctcggccgcatgaaacctaaagctaatttttttcaaagtcagagggttacacgggcaagacacatgaccgtgtgagagacacggtcgagccgcacgggcgtgtgggatctcacatgggtgtgggagaagcaaatgaaaacacacatggtttggcacataaccgtgtgacccacacggccaggacacacgggtgtgtctatagccatgtgaaaactgggttaatcaccctatttttattttattttatttattttttattttactaatttattttatttattattcttatacttatattttaaattaattttaatttttttttgctatttctagttttttattactattattattacaattggtatcattgagtttattattattatttttgtgttatttttttatctttctctttaatttcgtcttagttgctctatttttctattattttcttcaacttattttcattattatctcttaaaatatgtatggttatctctaatccagttataaccccttaatattctttattatttgtgt

SEQ ID NO: 57648 - DNA, 601 bp, Gossypium hirsutum
  Clone ID: AW187617.1
gcttctactccggacttagctgctagtgtgaatgcttccgagaatccactatccagaactctatcagaggacccactggatgaaatgttttcaacactggatattgctggacagaacttatcacggtctgctgatcttacatctccaaaagaacttcctaggaccacagttgatagatctatctttggtgttgatttgaagcttaagctgcaactttacaaggtccgatttctgcttctaactcgaaatataaagctagcaaagcgtgaagtcaagcatgctacgaatattgctcgagggagagagtcatctacggccctcctcttgaaagcccagcttgagtatgctcgtggaaaccacagaaaagccatcaagttgttgatggcatcaactaaccggacagatacagcaatttcgagcatgtttaacaataatcttggctgcatttactataaactcgggaagtattatacgtctgcagtgttcttttccaaggcgcttagtaattgttcatctcttcagaaggagaaacctctaaagctatttacattctcgcaggataaatctctccacataacatataattgcggattgcaatatc

SEQ ID NO: 57649 - DNA, 601 bp, Gossypium hirsutum
  unsure (1)..(601): unsure at all n locations
  Clone ID: AW187611.1
cggcacgagggattgatcgattggtagatcatcatcaatcgaacggtttaaaaagtagctttcgagtttcgagctccgcgatgaaatttgcaagatctattactgaattggggagtaattatgacgtccaaaaacaagaattggggagtaattattgcaatttatagtgattagtattttaattggactgtttattaatggaaggaattaaaggttatccattagtgaataatgggaataaatttcaggtatttcctttttataattaagaaaaaaaaagattacatggaaaatgtgaattcttttagtctctctctctctctctctctatatatatatatatatatgtatatatatataaattttggttgctatcttactaatgagatgacaacgatttgcatggggtgcttgaagtgagaaggttgatggggaatttatggttgctttacttaaaattaaccaattgacaatcttttaaagtanccgaggtccttcttcttcaacccaagattgaaacttgaaaggtctgctttatctatttcanttgtcattgttggtaccatgggtgtctcangaaaatggatcaaagcattggttc

SEQ ID NO: 57650 - DNA, 619 bp, Gossypium hirsutum
  unsure (1)..(619): unsure at all n locations
  Clone ID: AW187608.1
cccagactgaacgagatgaggtttttaatcctagatcacagagtttctttgatgccaaaaaacgggctttcctcaaacgattggaacaagaataggctgcacgaataggttcttgtctctttgaatcgtatcatccatggcgaatcggtattttctgtgatcattttacggcattctttaagcaagctttcttggtcaccagacagagtgagaactgctcagcttgctttcttttctggagataggttgaaatcctggctaactaaaagatagagataaagagatagagtcgtcctttctcttcctgacctttgtggattcgccccgaaaacacacttaaaaatttcatgtgttaagcatagtgctaagatcgatcggcgaggctaattcgtaaaattagatccgcttcagtctttttcggcaggatctaaacacnggggttcgganagtancgcgtgccancattcactattggaaagactggcagcagcgagaccatcatagttgacatggtcggagctagagtcncaatatccgtctctactctttctataattgactccttcccgctcccaaccaaccttttcctttgaaaggtcttccactattggctgaggtt

SEQ ID NO: 57651 - DNA, 628 bp, Gossypium hirsutum
  unsure (1)..(628): unsure at all n locations
  Clone ID: AW187599.1
gtactccaagtccaaaggaacaccatctgttgaacccaaagctaatgccaagataggagaaactccaagctctgacaccaaggagaactttaaggccacatttgagccgacatctgatgataaagtgctcttgaaatcaccatcaaaatctgtctccaaaacaaattctaacgctgcagaaacatctagttccagcccaaaagttccagattcaatctcagatgatctgctaaaaaacaaaaaggtcactgacaagcaacagaaaaatgctagacagagcagcgagttggagaacccttcattgaccttgcaggaaactggtattgacaaagcaggaggattacgagaacccttccaatcaaaacaggaagatgagaagctgccagtctctcagccaccaatgacaagatctgccttggaggaaaatatagttctcggtgttacattagaaggctcgaagagaacactacctatcgatgaaaggttgacctcatctgctgtaaatgcaaaagaagttgcatcttcaagccggaatggaaacggatccactgctggggataagaaagatggtcagattctatcgacttcnnagacncctaacaatcagtgatgtatttgagaggtaacc

SEQ ID NO: 57652 - DNA, 603 bp, Gossypium hirsutum
  unsure (1)..(603): unsure at all n locations
  Clone ID: AW187591.1
gcaattgaaacaaacagcagcggagatatagcagcaatggctgaagctgaagcagcaatttcgaaacaagaggaaggagggcaaagagacaatcatcccatgacgaaaggcagaaaggagaagaggaaagaaattaagaagatgaagaggaagcagttgaggaaggaggcagcggagaaggaganggaggcggaagaggcctggctcaacgaccccgaggagcaaaaaaggattgctagagaggaggaggatgagcgatcgaggagagatttagctttgagggagttcgaagagagggagagagcgtggatcgaggctatggatattaacacacaccctcgtgaagatgacgacgattatgagaagataagggatgattccgaggatgctcgcggagatccaccgcgccgcgaacattcgggtgatgattgggaatacgtttaagaacggcctgctcatattttctggccccgatatgagatctttgtttgggagaatgattgttttggctccctgttgagatgccgtcccggcgtgttccctacatgacgctgattggcctacttctgttcctcttcccccctgatctggtgcgttttccgc

SEQ ID NO: 57653 - DNA, 625 bp, Gossypium hirsutum
  unsure (1)..(625): unsure at all n locations
  Clone ID: AW187583.1
cttcgctccagattcttcaaaaaaaaaaaaaggccccaaaagatactttcttgtacttcattgtattcaagaattagaacagagagatgaaatgaacttgtagaaggcaaattttatatatatatatactttaatttacttagtttttttttttctaactatttaaaatgcagagattggttatccatcatagacccccagtgatttcaagaaggaaacttcctttattggttgttgtggattcatttccatcttttgacagtgtttcaagactacccatttctccttcattacaatgtagaaaaatatcaaggttgagttcaacgtgcagcacgtttagaacacgagcatccaatgtaggtattggatccgggggctatgaaaataaggatgaaagagaagaccanagtattgtgaagggcccgcgcagtgacagttcatcagaagctttgaagcctctgagtcaaattccttaccctctttccgttgctggtgtgctattgggatgtactttagtattgtcactaattgcctttgcaaaaggtggacctgcatcactcttancagcaatancaaaatcaggcttcacggctgctttcacattgatctttgtttctganatcgg

SEQ ID NO: 57654 - DNA, 542 bp, Gossypium hirsutum
  Clone ID: AW187580.1
aaattccactaaaaaaaaacacacgcacacacagaagtttaagaagtgagaaaaatggcgggatgtttagcagtcgtagaaactgatcgccctgagaacgagaagccagtgtacaccattaaaggccaatggcaagttcatttcgctcgtttcatagtctatccatctttactttccacctgtccctccctcgtacctaagagccgacgcggtcgcgcgtctagtggcaactggatcgccacttcttctccagccgcttctctgcagatcatcagtgatctttccagctccgaaaccatcctctccatttgtctgggcgggaagatccttgaagagcactacatttccaagttgcacgtctcttggcctcagatccaatgcatccctgaaattcctgctaggggcagcagagctgtatttgtaagctacaaagactgtgctgatcagatccagaagtttgctttgcgattttctacacatcatgaatcagaatcattcatgaatgctgtgaaggaggagttccagggtgacgctgaaactgt

SEQ ID NO: 57655 - DNA, 629 bp, Gossypium hirsutum
  Clone ID: AW187572.1
caaaatccatagacccccctaaaccccaattcccaatttaatttccattgttccaaatcaaatctcttgaatttttttttcaattttcaatcatcattcctcgtcaaatgtcctcttcaatcttcaacaacaacagcatttcaatctcggtttcagatgacgatcccgatgaactgggtcgaatgcgggttcgggtccgacggaaacgaaagaaacacggtgaccaacgtggccggacagagtgcactcaactactcattcgttggttcgtcaaatattggatactcctcgttttcctgccggccgccgcccttctgattttcgaggccaccaggatcggtaaaaagcccggtttggctgtcaactcgggagttaatgaagtgaagaaacccggttcgttgggtaacataaaacccataagtaaacttaaggaactaagcaatttgaaccggttagatccaaccactcatgttgtcggtggtgttagagaacgtcgcttgaagctcctaccagctgaggaaattgagcatttggagcttcctttgaatgaagaatcaagtagtaatcttgttaagagattagtgtacatatcggaataagaaactccatacggtgctggggagtctacc

SEQ ID NO: 57656 - DNA, 615 bp, Gossypium hirsutum
  unsure (1)..(615): unsure at all n locations
  Clone ID: AW187569.1
gtttcggcatcattcaacagccctaaaggctctatcccctccgcttctgccatttcaaccaccatttcaccatcataatcgatgaatgatgcgaagaccctcattatctccatcaaatcagatattaaaggcttattttcactcgaaaatcctcgtctcaaactccgatttcgacggcggagacaatgacctcgacggtgcatcctcaaaagtaaatatctcattcctctttatttcactctacaaaaaaaaaactatatgcaggaacaaatcgaaaatactaaaaacgaaaaaaaaagtttcaaatcacattctaataattttggcggctttttcttctattcagtatttcgtcatccattttacagcatacaatcggctttatatagacaaaataaaatataaaatatatagatttccctttttttttctttattcgattgttgttattctattatatttgttgtcatttgctgttgtgatttcgtttgttgcaagtacgaacggagccaactggaggtggtgacgcacgtgggatgaggcgttgaaacgtatgtagggtggcacggagacancancggtgctaaaggctactganagttgctgtggtgcaat

SEQ ID NO: 57657 - DNA, 652 bp, Gossypium hirsutum
  Clone ID: AW187565.1
gtttcactgaatcttcttcccaacttctctggattgtccctcttctctcccttcacattgggtaaaatttgctcacctcttgttatgtgatttgcttttctgttttgaactgattttgttttgtttttatttggatttcagatttctaattccatgctgtaatttaatttcagttttcctttgactgcaaaatatctttttaattttcattgaatgctgatatatatttaaatatatctgggtgttcttgttgttttgtatcgattttctctttttctttttgatgttttgaattttatttttttatacatcctagcaataactaggaagcaaaagagaattaaatgaacatgagtatcaagtgtaacgataaagggtatcagaatcttattaagtcctgtctttgatttgtgatgttggtttttggattttctttatattactcgttggtatcctctgaatgttgaggagaacttgagtgtttatcttataattagggttgtgttatggctaattaattatccttccatcgcagtatctagcgaacaaaagggactttgcattaaatgtgtattaatactaacaaaacataggattcacgggcttaataatttctgtctttggtcttctgatgttgggtttttgaatttac

SEQ ID NO: 57658 - DNA, 388 bp, Gossypium hirsutum
  unsure (1)..(388): unsure at all n locations
  Clone ID: AW187562.1
tgtacttgctggcattaaannggcgccaattaaatcacttacttcaatctctgcacttccctttttgggacacactcttgggtggacattacatattaaaaagacggtgaactacttcccctaagggcggagtgatcagataataggttaataactttacccagcctgttatctattacccaaggatccgcccctttcattgtgccagtatcgaaggtaggagagggtgcagcacggcgcaaaatgccccccgagacaatgagagatgggcgaaaaatgtctgagaatgccacgaaatagaactttactcccaaaatcgcgaacattacccttcgggttaaaccagccctcgtctactcactattctacctatcactccgtgaagtcc

SEQ ID NO: 57659 - DNA, 613 bp, Gossypium hirsutum
  unsure (1)..(613): unsure at all n locations
  Clone ID: AW187561.1
gggactgtaaggagaagaaggtggtatttttgggtttcggaagatggaagtagtagatcatgaaaccccaagcttggaaaatgggaaaactgacaaagaagtagaagagaatgcaaatgttttacaatttatggactccatggacgcttatttgaccctcattcattctttatcttcgacacttcgccggggatggttggaactggcaagtgctcgacattccatgggtgcttcacgggtgaatactgtcttgttggaccatacgtctcatcctgctgctacatcattgcttgtaacccaagatgagggaaaagttgactcgggcaaaccacactttacattatgcaaatgggcatcttctagcaatgagaactccttgttgggggagaaacaatctanccaagacaaattacatccacagctgcgacacaggggcagtaccgagctttatgaagagaagacctcatctgagaataaagcttcacgtgaagttgatgacccagttcaaaaggagagatctaaatcactgtcaatgtttggaactcttgtttctccaaagcttcgaaccgcccagctatcctttgaggcagcactagagacacttgtagagatg

SEQ ID NO: 57660 - DNA, 634 bp, Gossypium hirsutum
  unsure (1)..(634): unsure at all n locations
  Clone ID: AW187557.1
agcttcttaggtttccaagtgaaagagaaacatcttgaggcagctagtaggcaagagtataatgtttccgatcctcttgtgggcaagcactatgtcagacgcaagaaacggacaacagacgaggggatttaattctaattttgttgcctagaatttctttgttggtttaaatagaactttcctaatatcaggataccttgatgtcatattttgttttccttgtcagaacttgaagttaggattttggcatcttattccccaatttataaactatagatgaaaattatttatgaataaaacaagttgaaatttccagtaaattaaagctaggcagttcctttaaaattccaagaggcatggctcctttgaacaaagttactcgtcaattgactcgatcctagactccagccaaaagaatttggcattagatcctggcaccatggacaagaaaacttttgatgagaaaattcggaacttgcttcgtaggaagtgacgtgttgatgcgaagccggagctaatgtaggcctttgcttcacgagttctcacatggaaaacaggcaaaaacttttaaccaaggcatttcaaactgcacaagcgaccangttgcaaactctggtgttgggttcaatggtat

SEQ ID NO: 57661 - DNA, 639 bp, Gossypium hirsutum
  Clone ID: AW187555.1
aaacagcttagttaaagtgctctcttttgtctcatggttgagtagaggaagagaaaaaaaagacatggggaattgtgttacagtttacaagaacaaagatcctgcagacatggatcttagtgcccgaattcaatcacccattaaggagaacaatgttagaagggagccctcaattgttggatacgattctaggcttcagccttcatcaatggaacaagaaactaatttacaagagatgggtaaaacagaggagagcttttttgattcacagccctcgttagaatctgactttgaagatttcttcactgccaatggtgattccgcctcttcttcggggaacagtccaaaccaccagaaaagcaaccattcgatggagggtgcagtggatgcacatggagagtctccaactgatacaaagaagcaactaatcgagttatttcgtgagagcttggataatgatgatgatggaaactcacctgctggaagtagtaaagcgacaccgtacaggggacacctcccaaggaaagacgtgaaagcagcggagtctgcgcagtgctgccttccaagtttggtgcggaacttgagctttggtgaaagaaagaaacggctaccaagccctgctgcccaatattgatggat

SEQ ID NO: 57662 - DNA, 635 bp, Gossypium hirsutum
  unsure (1)..(635): unsure at all n locations
  Clone ID: AW187550.1
ttcgacacccgcccatcatcagaatattattacgatatatgatcaacaatttctaattgataatctggttgagcatgagagagatgactgtaaaggaaaaaaggagagcgaatgtattgagaaaaagaaaaacaggttcaagattagaaattcactgaaatgcagtgcagccagattatcttggatgcttccacctaaaaagtctaaagacctccaagatcagttctttctttcttcagatgtgaatccactgaatgttttgtgcgagattgttcaaagaagctaagggtccgtttgtttagtggaaaatatttttcggaaaatattttccaccttttccggtgtttggttggtgtaaaatgaaatcctaagggaaaatgttttacaaacatgggtaaaaaaggccccaatttatgtaaaacgtcttaccgatttgaaatcagtaagacattttctgatttttccagcgttctcccttctctacactctcgttctcccttctcctctctacaccgatctggtttcgttctcacgttcgttctcccttctccctttcgttctccctttcgttctcncttgattttatttcgggctccttttccccccttgatttcttcttctttttataaattgac

SEQ ID NO: 57663 - DNA, 591 bp, Gossypium hirsutum
  unsure (1)..(591): unsure at all n locations
  Clone ID: AW187541.1
ccggaagaatcgatggccgcttctcttttaaacaaagcattaaaacccattaaacatcccaacttcctctcgggcctccgttctctaaatttcagttctatcgccaccgcccatggcaacccctccgacggtccatcttcttcttccttcacattcgacaacgccaataacaacaaagagaaagacgataatagtatatacataaagccaccgacttcaaatgcgagcaccgaaaagacgacgtcggtgacgatgccgatgtcgttcatgactggatcgatagttgggaagagattttatgagaaagttactacgagagagtctgatgatggagttggatggactgttatgcttgattataggactcttaaaaccccttctaaaaggcctctcaagttgcccactttggctcttgctaaggccattgctgctgaatgggaatatcancaaacagatggaatcagaccctttacaatgccattgatgaaacttgcttgcacggcgctggaaagagttcctctcacacgcacgaagatcattgaacatctgatgaagaaatttgatcaagaattagtgttctgtcgtgcacct

SEQ ID NO: 57664 - DNA, 646 bp, Gossypium hirsutum
  unsure (1)..(646): unsure at all n locations
  Clone ID: AW187536.1
gtagaattaatccttcaagtatgcaagagcctattgctccaatttttcctacaggtgatacagccaggcagtctgttgttttgtcctctcagcagtcatcaagacttattccaaccgatcattctcttgagttaaggtcagcaccggtggcagataatgcaagctcacagaacttaaatgttgtaaatcatgttccaactttgccgagaaatatgcaaccatttaggtggaatggaggttctggttcaagagccggcagttcaagttccaatttatcggtggctagagattttgtaccatgtgaagggcctcaatcaagaagcattgctagaaacctattagatcatcctatgtttgttcctgcaccggaattgagacctatggtgaggaatccagtaaatcgaggtttangaactgaaatgcaagtgttcctggaaatgttgcttctacatatcgaggtggctcaagttctggtgccaatgaatcatctgcttccacatgggttcctcatcccaacccttcgccgcaatacccgcggagattgtcagaacttgttcgtcgatcattgatgtcttccactggtgccgaatctggaaggcatgtcaatcattctccactttcttcaggacttcctacttcgccagat

SEQ ID NO: 57665 - DNA, 650 bp, Gossypium hirsutum
  unsure (1)..(650): unsure at all n locations
  Clone ID: AW187535.1
ggaagtaataaaaaatccccacgcaatttctctgtgactgaaactatctctatcaatctctaagttctctttttgtgatcacttcagcttcaatcaccgtccacctccacttatagatgggctaataaattgcggaacaataatagtgttcctggatatgttaacttaatgggagaatgcccctcctgtgaagataatatgtgtcgatctactcacagaattcaaggataaaatagaaacccctatcagacgacaagtcccatctgtgctcttggacatacacacgtatggagtggctctttgctagatatcctgtaagagttgcccatgaactcccgtacttccttaggctctgatattcgatgtctcattgtatcggagggtggtgtccaatgtgattgtctactctgatattcccgcatattgccatacccgatgcctgtcgtcctggtgactggaacggctggtttcgtcggtaaattctgtctcctccgacctcaacacaaacccagattcactcatttgggtctaaagtctcttttcaaatccnaaactctccttgatcacagcgagggttacgcggcctctcaactattgcatacccggtggtttaacggtgagatcaaaaattccatactttcggggttttt

SEQ ID NO: 57666 - DNA, 656 bp, Gossypium hirsutum
  unsure (1)..(656): unsure at all n locations
  Clone ID: AW187534.1
gttgtattctcatcctcactctgtgacattctggctagtactggtggatagactctacatgataacatcctctcttttgcccgacattgtgacatttccagatattcccataaataaatcatacatagatcctcgttgaataacgtgaaaaccaccatccggcttatggcacttaacgtgagaccaaaaaaacagagatgtctcccttcttcgtctcacttgtcactctaacttcactatgggacctcgtcctatactgatgagacgcttcactggaactcatggtcgctcgattgtaaacaccccctctggcgacgatccttatcatcattgctatgccgacatagtctgtgccggtggtgaatactctctgttgattgaacaaccgcattcttcgtttccgtaacgggtcccctagatccattatcctggtgcatgcatagacatcgtaatcgttcttatttggtctggaaaagatataccctttggggctgagtntgttgggtccatttctgcctctcttgtgacctatgcatctatgtgaccattgcatcgcgaactactcttaaattctggaactgcccgcggttttatagacgtacgagctgctatgggtgacgtgttctcttatctcgtgtggcttccatcaaatagtt

SEQ ID NO: 57667 - DNA, 668 bp, Gossypium hirsutum
  unsure (1)..(668): unsure at all n locations
  Clone ID: AW187533.1
gatatctccgggtccttgcagctcgggcactcatatccttagctcttgtcaagaatcttcgaaccacccttccttcgaccactgttgtcgacttctttctaagtatagatgattagagtaccgatacttgatctgggcgactgaactatcgactccattataacacttcagctgtcattcacatgatttaggacaatgcactggacttcactggtttgactgctggggaagtcttaaacattctgagatcggtctccccactatatccccagagcacattatcccagtgagtgagcgttacctgttccgtccttttgactagtgatctgaagctgcccccggcaattgtgtcgactccttcatgtgttgtctgcctgacgactgagtgtcgctgtgggtggtgtaccctcatgaccatacaacaatttgttcggttgctaattattgacatacnactcgcacccctgatgaggcaccagtcacaagctttgtgttaattgtatcaagctctaattagtcagtctctaatgagtttctcttggatccanccctatgtagtgctttatgcaacttctctacagagaattttgtgtctgtatcaccatcctttgggacaagtccggtatttcgtccttgtgccgtcggactttactacgtctgaccctgct

SEQ ID NO: 57668 - DNA, 656 bp, Gossypium hirsutum
  unsure (1)..(656): unsure at all n locations
  Clone ID: AW187532.1
atataaagatcgacaatgtggctcctcataaatggttcgtgtatggtttgagcagctcgagactcggctgtaactcagaatctgtgtctgttatagtccacagatctcccaaaatgtggttgctagatgcggatgcatccgtcggtatgttacgctggtatcttcgccacctctaccggatttctcggcgatcctcactccctggtttcgtcggtccacgaggtaggcccaagcacttgtatagaagctattggattgcatggctccatccatacaccaaccgagagcttctgttgagaaatgtgaaaaccctcacctataagtcgtgagtcctctcggtgcagcctgcatatactcactcttctgactagagccaccatccctaagtccctccggggaagaaaagtaccttacccattttccctacgtgatcacttccggttccgatgcgactacccccacnatttaatcggccatgcttgatttggctatgattcctcatgtcctcggagaagcatgcccaagtaacttgtggattctgtcggctnccatggtgatatcccccaccaaaatctggatcctcttccttatctcatagtcctccctggtgaaactccccgtcaaggccgccgcgccatactctcctactcgtcccc

SEQ ID NO: 57669 - DNA, 650 bp, Gossypium hirsutum
  unsure (1)..(650): unsure at all n locations
  Clone ID: AW187531.1
ggctgttctagctcctgttatcctacttcattagcccgtgtataacattgcaccggtacatgattggatccttatctgaaatacggtgctcccaaatccatgtcgccctgtgcccttctaattctcatcatgcttgccataccctcaaatgcttttgttacatccctcgatggcacctagtcgatctctgtcgtgactgatgtcacctactcgacctgattccactacagcgcactatcctgaagtattatggttgctggtctgacacttagtgctctcttgcgcgctgttaatatcggggatgcgatcggcgcattcctgtacccagcattgttactacgtttcggttctttccttctgatctatgagtctcggttctgggaaattctgggtattgacatcatgatgctttcgcttaggatactgccaagaagtctttgcctgctgcgattgtctttcacgtgtctgtctccgcagtcaccaatcttttgcgtcctaccaatgtgtatacttttaaattgtttatatccttgacaccccattgtgtggccttagctgatacaacctttaggagactaccgtgcccttcaaaattaacatttatttccctgttgatcattctggggtgtgctgtcnggtatgttgccacc

SEQ ID NO: 57670 - DNA, 580 bp, Gossypium hirsutum
  unsure (1)..(580): unsure at all n locations
  Clone ID: AW187527.1
agataagccatgaaagagggaaagcagtggaagtgtacaacaacattgatattttccatgattataatagaacttcatcgaatgttccatgtaaggaacatccgcaactatcttcagctggtgtatgtgcttattgtctcagagatcgtttgatcaatttggtttgctcagattgtggtgttcagcgtttctcgtcttgttcatgcgctggtcgcggcggtgaagcagccggcattgggcgtgtctcgttcttgattgagaatgaaaacaaggagcaagttccgaatgccaagcctagaaggagtactagtgctggaaacaaatcagaagagatcttcttaatcaagagaagcaatagtggctgcgctgagatcaagaaaaaaaaagggttttgggggtttggaaaattgttcgggaaaaaaagagacaaagattgttatgattgtggtaagagtgaaggtggagtcgatgagaaaagcgatttgttggtcgttgattgtacaggcgtatcaaggtcaaggtctctttgtantttcaggggtggtgggttttttggatcngaagataaaagcgatttgac

SEQ ID NO: 57671 - DNA, 587 bp, Gossypium hirsutum
  Clone ID: AW187526.1
ggataagcatcctgtttcatcaaacctcacccaatttttggttcaaccaaaacccacattgtttttacacaccacaaacccgaagcgtcctctttttctttaagaagaagaagaggaaaaaaaaaaaaaaaccttttttgattcatttgaagctaaacccagggagcaaaaccgaaccatttcatttaggtaccttccaagttccaatttctgtttctttttaaatttttttgaagctatacccatataccatttggtgtcagagaaactaacccaacagtggaaactattcttttttattcaatttgcttattcaagtctgcatgagtttggaagatttcgaaagtgattatcggtgcttaaaatttgggcacttgaagaataagaataaattaaataaccaacagcaaacattaggatggcaatggccgcaattacaaaccctcagctctctttcaatctgtttaactgctctgttactggaagagaagcctctatatcgagacaaactgcttctagaattcgctatcgcttctcttctagccgatggttgagtctcaactcctcttctgctactaaccgtaggt

SEQ ID NO: 57672 - DNA, 657 bp, Gossypium hirsutum
  unsure (1)..(657): unsure at all n locations
  Clone ID: AW187523.1
tttccaatccggtacccgtccgcctccaagtcnacngtatccataacctttatatcnaattcggtactaagttttttttttttttcttttctttttttcttttttttttttttttctcttttttttttttttttttttggggtaggtgggggggaggccccatattatttccttttataaaaaaataaaaaaattgaaaacctcccctttcttccttacaaattccaataacaatttcatttttcctcccataccaattcacttcataaaaaacaaaaaagttctaaaataaaaactccccccattctatatccccacgcaatccctttgaagcaatttatttaataatcataccctaaaaaaataaccccttttaattataataatactcttcctcctcttcccaaaagcaactcaaaattaatctacgttatccacatcccccaatcccgttaaaactcttttaaattaatcaacccccttaactaaactcttctattctactccccccccaactgtaccctttaccatccctcaaacctgtcttttccattcatttatcttcacatcctccctccccccaacccataattctcttccttttaactcaactataacccttttctcctcctcttctcaattctcctctttcacatc

SEQ ID NO: 57673 - DNA, 604 bp, Gossypium hirsutum
  unsure (1)..(604): unsure at all n locations
  Clone ID: AW187522.1
tctttattttttattttattttcattttttaatttcccaataaccgattattattaatcttattgttctcttcaccctgtatacattttcagtctgcgggcatactggattgatgtgctatgcagatatcacgtacagctcttctgagaagaagagctttggatggagttatgtctgtaaggagtcgcttctacaaggtttctctgtctttggtttttgttttgtgggggcttctctttctctttagcttgtggctttgtcatggtgatggttacacaggtggatctgtagcatttggcttatcaacaggggatgaagctagggtgggagacaatgaacattctgattctcctggccaatgtttggcggatgaatctggttctttttcttctcatgatggtttttgtacaaatggtgctgagatcacggctcttcatgttgattcacctgcaagtgaagaaacttgcaaaaatgatgtctctactcatgagcaacttgatgctgataactcggttgttgatataaaatctgaaaacggctctccaaagtctgatagactgtcncattctgtgcctgttggtcttgacgaattcaagagccgatt

SEQ ID NO: 57674 - DNA, 606 bp, Gossypium hirsutum
  unsure (1)..(606): unsure at all n locations
  Clone ID: AW187520.1
gttcgcagttctaggagtattcaaacacaaaattcctagatctgaaaatatgctgttgaatatcttgaatgtatgcccctatctgtgacttatcttgtctttttgccttacacttcttgattactgttaatgagtctccttctactatgatctttggccattgcatgtctattccgatctaatctactttgcggcaagcgagtgccttagccgcaaaagctgaggaaatgccttgatgtatcttggaacttgatcgtagaacatccccttcactgttcctcgccacaacccctaaagctgattgacaaagtcgcgcatcataagccccatcaaaatttattttaactgattgttcaggtgggtgcttccacttcctggctatttgtaagattttaggggttttttgttcaaccccatctaattccgcaatgtancttctaacaaagtgtgctgtctctattcctgttctactagttttctcatgcaatctcgcatttctttctccccaagttgcccatatcgcacaacagaataatctacaatggaaataagcattttgagcaaaaaaaaaaaaatgtgagcaaaggaaattaaatttctttaatt

SEQ ID NO: 57675 - DNA, 613 bp, Gossypium hirsutum
  unsure (1)..(613): unsure at all n locations
  Clone ID: AW187516.1
cggcacgaggcttctcttttttattttcaatttgccacttcccttttcctttgtctctcccagctttccttcactttccccactgccaaatctcaacaaaattttagcttcttctcatgagtgatgggcatgagctgccgttgttccaacacttctcatttcgcacaaatcatcatcaccagcttctttcgccacaagccttgagaaaccccaaataccatggtggccatttttcttttgtttttagattgtataatggttttgaggattaagatgattccctaaaaaccaaccaacaacaacaacgtttgatcccttttagcctcaaattctcatggcgggtgggagggtctatcctantaataatgataccactgatggcgttcctaacaatctctctgttttgcttcaaaatcaaaggcttcatccccttttcattccangctcttctccttctccttcttttcttgggacaagatcgatggtaagctttgaagattcncttaaaacaaacaggcccaaaagatcaattttcaagatgtttgatgaacaagagaatggatatgatgagtatntagaagagtgttttcatcaacctgagaagaaaagacng

SEQ ID NO: 57676 - DNA, 526 bp, Gossypium hirsutum
  unsure (1)..(526): unsure at all n locations
  Clone ID: AW187513.1
cacattcgtcgcactagtggagccgtcataaccgtgcaagaaagtgggggcctatctgatgaaataacggttgaaattaaaggcacctcatctcaggttcagttggctcaacaacttattcaagaatttatgagcaatcacaaggatccggttatgagcagcggttacagagacacgagttataggtcctcgttttcgcagttaggcagctcatctgcactttcatcccaaccctatggtggatatgggggatcttcaagtgtaagtggctactctacttttaggctttaagaaaattatcattttaccttaaattcactttggagtatgaacttgaatgggtgtttttctctgatgggattgacaacggggcgggacggggcgagtgaggagtgcaaactcgggttaagtttcagaatatatctataaacttaatataaattatatacatatatatatttatatatatgtatgtaaaattattagttcatattaatgctttctggaaaacatttgatgtaatang

SEQ ID NO: 57677 - DNA, 562 bp, Gossypium hirsutum
  Clone ID: AW187511.1
ctaccaccctagggacatataaaaagatcgcgtcggtggttgtttgacatcttactgacgtaccatctaccttagggacctcattcttcatcaccatccctccatctacatatgaagatctatctcgaaaccgaaatctgagatgttataggaaaaccgcataatgtgactggtgacctgatatataggacacaaccgcacttaatctttggtgctagatatcatgcgtgcgggacacattattccatttcggataataccgctcctgatgtcgagtgactttcctacgatagactggtctcttagtcatttgacgacacattggtctctgaatcatctgcggtttctttgacttcacattcacaaccatcagttcagaaaatgcgatattctgaagttggtgaattgaatgatgactaggcgaataataacgtttcgtcatctttagagtcacaccccacaaaagctggagaaacatatgaattctcttctgctaatactacttttgtgtccgatctctcaacaaatatctaatcgcttgagactcgacatgatgatactt

SEQ ID NO: 57678 - DNA, 539 bp, Gossypium hirsutum
  Clone ID: AW187505.1
tttttttaaacaagaatccaaaatttaattcaattgttatctcatgttctcccaaaaagaaaaaatcgaatgcaaaattgaaaattacatgcaaaccccaaaaaaaatgagattcaaatctcacatcaattcacatttgaaagtaaacatcgggccgcattacccaaacctaaaactattgtttttgacccgcaaaagaacaggtttctcatcccattgttctttctaaaactataaacaacccaagtataaccctatattatgacagctaactagactgagcaatcaaatgaatataatgccctcccgcttagatgaaaggaacttgaactgaaatgcacccttgtctgttccattcgtcttaataatcaactgtaggatagagacctggcatgtaactacgtccacttccatttgaatctgtattattagcatacgagtgtgtcgacagttcaccagagtgagatgacttgcgagattttgggtttttaggagaagctgtataggcatcgtctgaaccacccgaagagtatattgac

SEQ ID NO: 57679 - DNA, 540 bp, Gossypium hirsutum
  Clone ID: AW187504.1
tccctgaaaatcattgggatttgttaaatttcgtgggaaaatcgaaaaaagcaaaaccctaggaattgaaattgggagaaaaagaaaacagctttgataaaaataatgatgggcggcggtggaagtgtgtattggggaagaaatcaagaagagagtaaacaagtgaaaggaatcgttgtaattttcgcttgggtttcgattcacgagaaacaccttaaaaattacctggatttttattcgtctattggctggaattcccttgtttcccgtgctgattttctcaacgtatattatcctgagagggctatgtccttagcatttgttcttcttaacgaacttctcgagaaactaaagattagaacttgtccagtggtctttgtcgctttctcaggcagccctaaagcttgtatgtacaaggtttttcagattattcaagaaactggtgaaggtcggcttaatccggaaatccagttgattcggaattgtgtttgcggacaaatctatgattctggtccggtagattttgcaagtgatttgaat

SEQ ID NO: 57680 - DNA, 582 bp, Gossypium hirsutum
  Clone ID: AW187503.1
gttctaagcatgtctgccaccacacaccttcttgcaccctcttcccttcaggttcacctttccaccctctatcccctgagcactgttcctgtctcctggacacggatccctctttctctcccacctctcaccttacaccactgctccactgcttcccttctgccactcccctccctttcttcccccaccacgccccttctccccctcccctgaatctcctggcttcctcaccgcgacaccgtccccgttcccgcttcctctcctgattccctccctctctcctcttctctctccccgcctccccggtccctctccctcccgcctcgctccgctctctcccttcccctctgggtctgccccccgcttctctctccttccttctctcgccccccgtcctcttcctctccctctcgcccccgctccctcccccctctcccctcggcgacctcatctgtcttggtcgtgctctcccgcctcctctccttcgtttcccgcccctctccctcctccccccccctccttcgtcggtctctcctccccctccctcccctctgttgccctcccgtccgctttcgctcctcc

SEQ ID NO: 57681 - DNA, 542 bp, Gossypium hirsutum
  Clone ID: AW187501.1
tcctttttggagttggcacttctttcagttcttgaagtagataactcatacaactcttgaacttaactccttcgagttattttctccaacacttcttcgcaatttcagttgagttacaaattacacttcttctttcttttcattttttccctatttcatcaaactctgagagaaagaatttcttgtttttagaaagaaaaagaaaaagaaatggagtcgagagcagtgcagggagcggcagcggggggaatgggattacacgcacaacaagcgcagcaaatggtaataggacccacgtcttcatcgtatccgtccaactccaccttgatcacctctaatcagacgggtaatatccctccttcttcagctcatcgtttctctttcaaccccttaacttcgccgcctcagcaccatttacgacagtttcatcaacagcatcatcatcatcaacaacatcatcgaaaccaacaacaactcaagccgcttcattctttgaactccgtcgcctttgatggatcggcgcaatttcagtagaatacagt

SEQ ID NO: 57682 - DNA, 534 bp, Gossypium hirsutum
  unsure (1)..(534): unsure at all n locations
  Clone ID: AW187497.1
gcggcattgagcttgccctcgatgagtgtgttgcaattcttaaccacatgcgtaggcttaaacggagtgctgacagagctgctgctgcttcatctcatggtcttcttgccaacacaacaaccaaattcaatgcttcgaagagaatcccgtcttggaattgcattgcaagagaaaactcatcaggctccctcgaagaagaccttctcacagatgttacttcgtctttgcatcacggagtaggtagttctttgggaataccaccacctgctaggaatttacgagcccatcgcagtgcctacgatggaagtgatagtgaatcagaaggtgtagacatacattcttggacaagatctggtggtccgttgatgaggacgaattctgcaaatctgttcatcgactttgtccaaaatctagacgctgaagctgaagtgaacaaaggtctaatggctcatcctggttctcctggatttcagatatgcggtggggattcttttantcacagtccgaggatgatgaaatcagatagaggttcac

SEQ ID NO: 57683 - DNA, 540 bp, Gossypium hirsutum
  unsure (1)..(540): unsure at all n locations
  Clone ID: AW187496.1
cagtcaccttcaaaacacagggagggacaatctcaaaagaaatggaagatttgataacaaatttgagtaaaagcctcggctcattctgcaatcaccttcaaagcagctgcgacgctcttaagcaatccatcgaccgccgccccatccctcttgattcggcttcatcgacgttcgtccaatgcctaaaccgccgcgtttcaaccgccactgccgacctcaaccttctcgattccatgtccttcggcaccgtttccttcgaggaactcttaggtcactgttatcagatcttcaacaataaccaaactcatcttctccatctcgaagatcacctcaagcctctcggttatctcccccaagttgaaattgaaaatgaggaagaagaaaaagaggttttggattcaaatgacagatgtttctccgtcacaaattcagcaattaagagcttggatgaggatcctttacttcttgatgaatcaatgagtctaaagaatttcgggctctctgatgtttgtcttgctactttancatctcaagctaatc

SEQ ID NO: 57684 - DNA, 562 bp, Gossypium hirsutum
  unsure (1)..(562): unsure at all n locations
  Clone ID: AW187492.1
gcttggttgacaagcttgttagtgatccttccgagggcaatgcatggcatgcggaccacattgtccctgtttataaaggcggaggtgaatgcaggctaaaaaatatgaggaccctttgtgtggcctgtcatgctgttgttactgcagcacaatgcattgaacgtcgttcaattcgggccaaagcaaagaaaaagcttaaagtcatcatggctgacctcaaaaaagccgagaatatggaaaataattcttcttgtggaaaggatcanggaccctcaaagatagttgaggacataccaaaggatgaacttctagtcaatgtacctggtagtgcttattctggaggagtaaactacaacattcaatctgagttgaagaatcccccaaacccttaatggtcatcaaactgaaaagtgaaaaagcatcctccatgtcatcctataatgtcttgcattggctaacttgaactcatcccttttgatatgttgtgtacaacatcgacacaatcttccaacagaagtatgtatctganacgtttgctcatatacttttataggtttttgcc

SEQ ID NO: 57685 - DNA, 572 bp, Gossypium hirsutum
  Clone ID: AW187489.1
ctcagattcaatcgtctgtatcagctatgttcactttttgcacaaggctttctatgtattaggaatacttttgaaggattgtacatcatacctgtttttgaatacgtatcaaacatgggacttagattttcattacgattagactagaaaccctaatatgatcagaccatatctctcgtgcctctccgttttctgcagtgcatcagatctcaatgtgtcgagtgtttcttcaacttgcccatgtttaaatctctccatcttgatgatttgtttatccttctctttaatttcaggagttcagcgtggagactctgaaaacaaagtttttttcagcatttccatggttaagagaaagtactgaaattaatagtcatgttattcctgttgatcaagaccacagaaatttaccgactagggagacgttactgtctaattttagtactgaaaccaatggtcttgttagtcctgttgatcaagccaacggaggttttgtgagtttcgaggtgttgcggtctaatttatgcaacttgataagtcaactttatgatgaaaacaacaaagaaatgggtatt

SEQ ID NO: 57686 - DNA, 733 bp, Gossypium hirsutum
  unsure (1)..(733): unsure at all n locations
  Clone ID: AW187482.1
cgccattgagacaccaccgaagggacgatgcaccgtccaagaccaccgaataagatcagaccaccgcatccaccaagcgagaccaaaacaccataagccaacgaccaccatccaagctcgccaaatgtttcatcaagcgatccgtgaccagcacttctaaacggcgccatggccggagcagatgcgcttccataatcgcaattaaaatagtaataacaccgttgggctaaatttccaaatcggccacaaatctgacattggatgcgggactgaaaacctctgccacgatcgacaaatgaaaaacgaccaccccgaccaggatccaccatagatgaggacgaaacggactccacaagattggcatgaatcgacagttcttgaatcgcacggatttgtcacgtctcatattccaacaatatgtcaacaagacgttgaaacaacagagntcagtggagaatgacgcaaaggtaaggacggcgtcnaactccggaggtaggcctacaaaaataatctcaactttttctgcctccgagatttcagagcaagaggcctcgatcaatgcacatgtattctgaatttttactacatanttattttgaattgaagaggttacctttattaagggagtgtanatcgtgatgaatacaatataattttgcacctgtgattgctgcaaagagacgagtagccgtgttccanacatcacacaccgttcgcgcgccccgccgcggcg

SEQ ID NO: 57687 - DNA, 544 bp, Gossypium hirsutum
  Clone ID: AW187479.1
gagagagcaaaagctttgaacacaacgttggagattcatcgaaccttctccaatttcaaagccaccgagaggaaccctagagactctggaaccaagacaatctgtctgccgttaccatcttcttcaccaattcaggcacaccattaccctatccaccgcaaacctgtcttctccggccttccaatgcaagagtatgggctgctcggttaacgattctgggcacaaacagacaccgaaagcccatctcagtcgcatagattagtgctctttcacaagcccgcgcttctgctacaaatgcgtcaacgacatcttcaaacagataagtttctgctcctaaaattggtcctgtagaatctctggctaatactactgttgtagcgattttggcttctttttggaaagacgcatcaaagtttagcttgataactccctcatctgggggtctccacagatctttcgtcatcactttaagaggagaatggagactctcttaagttagactgatctcttgttcataacctcgaatgaaccctaagaattctta

SEQ ID NO: 57688 - DNA, 596 bp, Gossypium hirsutum
  unsure (1)..(596): unsure at all n locations
  Clone ID: AW187473.1
gttcttttggaggccttgacttgcaaggatcaatgagagttcataatcatgcacaaaaccctcatagtatacatcaacaccaccaccctaaccctcgccaaggtgcttctcttcatgcttctattcatgaggattttccactcaagatggggaacatacagaactctgaccaaatcatttccttgatggattacaacaagggggagagggggaaaagttcggtgagtgatgaagatgaacctanttttacggaagagggtattgatggtcacaatgatggaagtaaaggcaaaaagggatcaccgtggcagcgtgtgaagtggactgataaaatggtgaggcttctaattactgcggtgtcttatatangaaaagatgctgcanggggctgtggtggtgggatgaagaagaaatttgctgttatacagaaaaaaggtaagtgganatcagtgtcgaaagtcatggcagaaaggaattatcatgtttcacctcagcagtgtgaggataagttcaatgacctgaataagaagtataagaaactaaatgatatgcttggtangggaacttcttgtcaggttgtcnanaaccancacttc

SEQ ID NO: 57689 - DNA, 595 bp, Gossypium hirsutum
  Clone ID: AW187472.1
ctcgtttctcgtgccgattttctcaacgtgtattatcctgatagggcaatgtccttagcatttgttcttctaaatgagcttattgaggagctaaagattagaacttgtcctgtagtatgtgttgctttctctggcagtccaaaggcttgtatgtacaaggtttttcagattattcaaggaatgggtgaagctcagcttaatctggatgggagccacttggttagaaattgtatttctggacaaatctatgattctagccccatagattttgcaagtgatctgaatgcacgatttgctttacatcctgccatacgtaaaatgcctggaccttcaaagctcgtttcttggattgctaaaggcatttcttctggtttggatggtctctatcttactggcttcgagtctcaacgtgccgagtattggcagaccctttactcatcagttgacttggatgctccataccttattttatgctcggagaatgatgaccttgcatcatatccggttatcaacaattttactgaatgcttacaagatcgtggagcggatattatggttgtaaagtgggatggctctcctcacctaaaacactatt

SEQ ID NO: 57690 - DNA, 579 bp, Gossypium hirsutum
  unsure (1)..(579): unsure at all n locations
  Clone ID: AW187469.1
ttttctttttattactgaaaataaaataaataaaaatgcaaagcaaatggtagtgcncctgngctnnccncctgagctgggaccttgtttnnngccagatctttgaagcacacggtctcttcggtcacccctggtcccaaaccatccatgacgccccacgccatccctccacccgtggtcccccccctccccccgcccgctcccgggcctcatcgtcccccttccgctgccctcgccgccccgccccctccttctcgctcccctcgtccgtcctgccccccccccctccgccgtcctcgcccccccgtcctcgtcctgccttcccccccccgtctccctccccggcgggctcccccctctcccctcccctcctcctcgttttccgccgtctcctgcctcgtggtgctccccctccgtccggacgtcgccgtccccctcctttcgttgtagccctccccctcctctcgtagtagcattccccctcctcccgtggtggccctccccctcctatcgatgtggctctccccctctacccccttgttcccacttttcttccttccccccctccctcccttcccc

SEQ ID NO: 57691 - DNA, 505 bp, Gossypium hirsutum
  Clone ID: AW187464.1
gaaattttctgttattaaattgcgaaattcagcaagaagccaaaatctcccgtttctcccacaatcgaaaaccaaatctatttcccggcaaccggcgatgaacgtctctctgttccagttttccccgaattgcctcccacaggttgggaagttccgaaaccatccttccatctccaacaatagacccaatactaagattccatgcaccaaaaacaagctcagcgattcagccctggctttagatttggcaatcaatgtgcaaaagattaacacccatttggagcaaaaagagaaagccatgaagaaaagcaaagagtttctgttcacagagttgtgccagtatttgtcattgaaagaagaggaaatgaacaagaaatggagaaagatgagagaagaggagaaatgggttttgattaacaagttcgttgatgaatggagtgttcatttttatcctttatctgctagatcagttaaggaaatggtggatgaatatttgcaagatgat

SEQ ID NO: 57692 - DNA, 554 bp, Gossypium hirsutum
  unsure (1)..(554): unsure at all n locations
  Clone ID: AW187454.1
gcttcaagttaaagttgttggaattgaaggaggaggtagagaaaaaggctgccgagggtatcaatgggaaatcaagagagattgttgagactgctgagagtaaagagaaagggctaaatgtgccgccgcttgtggcagcaggatcggctgcagctatctttgttgcggttgctgcggtgtatctttgctgtaggaagcggtcgtaattgatgattactggtgcatgatcatcgggcttaggattttattatacgaataatgaatctgggttcaatttttgataggtactgggattttcaattttctgcccatgaatctcactttcttctactactatatacttatgttgtttgctanttggcaattataattttgaaaaccagtgtggcacttccatttagtttttgaaggaatttctgcagtttgacttgatgccttaagggcactgttatgttttctttgttttattttgttattgtgaatttgaagtantcctaatcacccttccttgccaaaaaaaaaaaaaaaaaaaaaaattctgcggccgccaccgt

SEQ ID NO: 57693 - DNA, 636 bp, Gossypium hirsutum
  unsure (1)..(636): unsure at all n locations
  Clone ID: AW187452.1
gggaaatggcagccaatcaatctgagaggcaaagcgaagaacgtggaaacactgcaattacagtaaccacaactccaccgacattaacaccattggttgaaacaaagctgaaaagcgcatgctttaagtgcaaaaagcaaggtcactgggcgaaagattgcccttccaacgacaacccaacggcgaaaccttcctctccgccgctcgacacccacctaattccggtgctgtgctgccattgcggtgtggcttgcaccattcatgtttcccgtagtgacgctaactacggcagaccatattattctcgtaactgtacttgcgataaagccacccgaggcagaaatttctacaaatggtgcgatgatgttaatgcaccgatgtgtatttgcggcgccggtgcttgtaccgttaataaccggcgagatgaaaatgggaaggagaccaagtactttacttgtcgtattaaaacgggacatggagcttgtggtttcttgcagttcgagagtcctacgagttcacggccaaggtctacngagataaacgaaagaccatcnncnatgagactccggcgtggtggcctatcagatattaccactcacgagatatctgttactgggaattcccaaatggatatgc

SEQ ID NO: 57694 - DNA, 250 bp, Gossypium hirsutum
  Clone ID: AW187451.1
attttttttttttttttttttttttttttttttttttttttttttttatatcaacagaccatttacgatttagtattttatgaaaggattggcatgtagtgaagtgattaatgagaaggcaggattatcgttcatagaactcaaatatgagagactccaacatctatgcatcaagtctactgtaccttttttttcaatatatacatttacatacatagacatgtatgaatgttaaaaaaaaaaaaaaaaa

SEQ ID NO: 57695 - DNA, 714 bp, Gossypium hirsutum
  unsure (1)..(714): unsure at all n locations
  Clone ID: AW187439.1
ttgccgcgtcgacatcacagttaattcggttcaccccccatnnattaaaatgcttctgtcctcttctttcggttctcgggcgtttcactttattttccctttctctccattctcgtccttctctcctcttccctcccatgttcctccttctctttttttcttctttcttgtgagctttctctcctctcttctttctgttgttatcacacttcactccccttatgctttggcaactctcgattcctcttgccttctcctgtccctctttagatccttgctacctttttttttttttcctctccgcttctccctcgctcttgaatttccttccctccgccttttttcatctttccttcttcttctccctctcactacatttctatcccttgctcttcattcactcttcctctgtgtattaattatcgtttctctttactctctctcgtcacttgtttctgtccttcgcccttcgcccctcggtgttcccctccacccttgtgtttttattttctctgcccgcttccgcgtttccgctcttccctctcaactcttcttctctacttttcttctcctcctctctccttgcctttctttctcctcctttttcgtctttctttttatctcattacgagcctctgccctctcgccctccttgttgtacctcccactgtgcttatctcacgcctcctctgtcttcggtcctctcgtccatag

SEQ ID NO: 57696 - DNA, 669 bp, Gossypium hirsutum
  Clone ID: AW187423.1
caaaagaacttaaaacttaacagaaatgaaaaacctaggtctgaaatactattttccttaacgctgtaaacaaaatcccattgtgcatcagctgctgtagagacctttcacccatgaaacaaacagcttctgacttttcaatctctagtctctgttattttctgcgagttcatcggaccgatccgtcgttaccaagtccggactcgtcaatatcagttatattccatcactgtagcggtttaccaattctttcaccgagcgtggtacctcttccatccaatatggtggtccatcatacttccatccttccaacaccaatctatgtgccgctttattggcttctcttgagattagtttcctaataacagcaacagcctgtaagcacgccctcgcctcagccattgttggatctgaaatattctcccatgggaattaatccagtgtgggccctcctagacgtcaccaatttgcaacttaccaatacaggacaaaccttaaatcagatccacatgcaaaagtttgtaaccaatcaaagtgcctgacccatttaccaaccaaatcaacaaacacataatgaaaatatattttattttattctaaaacttttaagttgtaataaattcacgtttactggtctattcacactcaaaaacaaataatttttactat

SEQ ID NO: 57697 - DNA, 1499 bp, Gossypium hirsutum
  unsure (1)..(1499): unsure at all n locations
  Clone ID: AW187420.1
ctattttagctggggctgacttgctccggttccactcnannngagtcatnacnnngtnatctntatnntgtntcccgtatgtgtctntanaaatanantccttctcattttacattatataacactgaactatactctctaacatatatcttcgtacctctatctatanattcggctgtgtcctgctctccatcttcnctatancatactacatactacgtacttcgtgtctctacttcatatctctcagctatacaactattgtggagctcacatgtaggaactaacagacattgtactatgtctgctcgtcatcatttacattgtgtacgtgtatctcattttaagatacgaaagaagtattatcactatcgaatgacaatatctatcagactctagctctacagtatgattactcacttcagactatacgatatatctgtgtaagctctcactgtatatctcgtcgatattgtatgtcagtacttcacgactactaattatcattctgatcacatcgttcatcattacgctgcgnagcgagtactcactatgtcatacagatacgaagacgtgagagacnctcggaagtgcgcgcgacgcgtcgagtcactactgctgcatgaccagtcacatagagcactaacatctatatcacgcggcgaccgcgatatagactatcatacgtacagctatttgtggcaccgctatcttcagaagcagattatagctagaatgtgtcgacctatcatgtagcctctcatgagatacatctgcatactcgttctgtctatcacatatagagttatactgtcatactatgtacgcgaagtctatagtctagagctcgatgtacactactgtagttaacactcaatgtatctattcgcactatctacgtctatacgctcactctctagtacacacgatcaacactacatcattcagtgagtgcatctctatagatatcttgtctgcgtagctcatctgtgctgtgtatgttaccgtcacttctgctacgtcatcacgatgttagctgcctagactgtagtagtgcgctatactgagagaccgcattatagatcaatgccgactctctcgtgtctgccatatctcacgagtatcgatacgttgatgtgagtacacgttatgtgatatatgtatcatcatataatatcataantataatcacatatgtataatttacgctaacgattgcgagcacatgtgtagatcagatcttcatgagtacttatatgacatgtgcacccaatctatgagttatgtatcgatcgtcgcttcctangtgcgctcactcacaggnactcacacttatcatcacatactgctactgtctgtatatcttctacatatctcacacttcgctacagttatgctgatcatttagacagatgatactatagangtctgcgacatcaaagtccatctacgcgccttatttattatctcactactcactatctcccactacagatctc

SEQ ID NO: 57698 - DNA, 638 bp, Gossypium hirsutum
  unsure (1)..(638): unsure at all n locations
  Clone ID: AW187416.1
gtcgaacagaagaagagcttttacttattaattctattatattagtaaagcgttagcacctctatagagcaagggtctgcgtagacggctatggccggaagagagagggaatccccaactcgttggaaggcttagtggatcccttgttactatgtgggggaagtcttacaaaacagcctaaagcgatcaggatgtatagtggactcgttagggaaagagcatcttcgaagcagcatcgaattccattgattatggatcaccttcttaaactgaaagctctcaagcgacgggaaagagtgccctccggctaaggaggaatgaacgaaaaagatgccccactacaaatgtccacgggacaaaaaggggaacgcaagacggagttcctccgacgccagagcaacggaatcgatttcttccctctctactaaagccaagtctgacttccgtcccgtacgtgtcttcncgttccttcttacttttgtcctactcgggcttctcgcaatcgtcataatangaatangagcgggtgtcaaangagcangcaattgcagaaccttctctcttctcttgttanaaataaaaatccgcataaggaaagctttancatttttataatggtaggggctgctggtactctt

SEQ ID NO: 57699 - DNA, 650 bp, Gossypium hirsutum
  unsure (1)..(650): unsure at all n locations
  Clone ID: AW187413.1
actctttcactttctctctctacaaaccctctcgtcaaacagttaataataaaattttcaaatcattaataaaatcacactcaactctctgatttgacaactgagggttttcttttcctctgcaattatttcggaactgaatatttactactagttatgggggaaaaatagtgatatttcaataaatcccgggaggaaacagaggtttgctccgtgcccaatactaaactctctccatttgacttggacgataatctgggtcccgactccgactctccccaggctactcgtgtaaaacctgatcctcattattgacaatattacttgcccgaaagtcggctttctctctatgaattgatgatcatcctctaccattcacatccggttaatggaccatattccgcgattcacggactccattcggtcatcatgagtatctaacaagatatcttatttccagatcaggtggctttacctcatactacattgaattcagaagagtataagcctgacttagggtttctatttgacgcttccgataatgaactgggtttgacactcgactataccttcagttgaggtggagctgagatctcacaccgcctattacgtanatnaacgtcgaaggtcatgcagcatttgatttatgt

SEQ ID NO: 57700 - DNA, 183 bp, Gossypium hirsutum
  unsure (1)..(183): unsure at all n locations
  Clone ID: AW187406.1
tatacgctacattttagtggccctttcgggaatttgccggnccctattgtttattttctaatacttcaatattatcccccctgagacataccctgataatgcctcatatttggagaaggagaatatgatatcgcctttcgtgtcccttatcctttttggcgatttgcttcctttttgccaccc

SEQ ID NO: 57701 - DNA, 865 bp, Gossypium hirsutum
  unsure (1)..(865): unsure at all n locations
  Clone ID: AW187405.1
agggtaccctgtcatcatttctgatgaaattttagatcccggtaaacacactgcaataaccttcaagggattcatctcacaaaaaagaaaaaaagtaactctgccaaatcttcccgtggaaattttggcgaaggcactctcatttccagatagaggcttggcggtaaagatttaattggtcgtggtggtcgaaaagcgtccaatgctctgggaggtanggggagtcngtttaaagcttctggcaattctaaagtacccctggctgaatctgtggaggaaatggctaaattcacctctaatttgaatctttgtaaggatccgatttctggattggaaggtggaaccttgattaaggatggagatattgtctctcgacagtaactggattcgtcgatggctttggcgagtggagttagttgggcttgcctttttggaattctggcttggcggatttggaaaaaccgcaacctttttatttttcaaggtcatccatgcagcccaagagaggttgtcaacaactctgtttgttgggcctctcattgtttctcaattcctaaaaatatntcaagtggcgttcttggtccttccttggatgagcaagaatatngttctaccattttccttaataatgatggggttattcaattggattcgggaactttctttcctcggtgtgttgcaaaaaacataaatgaacattgctgtttggtttcataaatatcttaaaaatgttcatttttgacccaagctttgggcttttggaagggctaanctcatccanaaaaaagtcataatctttatatctctcgaacactagacttctcgggctattaagaataattatcattcgattctctctatcagt

SEQ ID NO: 57702 - DNA, 627 bp, Gossypium hirsutum
  unsure (1)..(627): unsure at all n locations
  Clone ID: AW187404.1
attttttttctttccttcaatattttggtatcacttgaggcatggacccttcattaccccaaaacttggaggaatattccgcttcttcgacgactataaaattcgaccgccccctcccattactccgtggtccaatcccggccggaacttccgacgacccatcatccggtccatacatccttgccttcaaagtccttccttcctgggccgccgcttacaaatcctgcgaatccaaaatcatatctcaatgcgaggaaggtgcacgaattgggtgcgccatcactgcttccaacaagtgcaaacccccttggtggcagtccctgattggttggaaatcaatggacttaaaggaaagagagcgctgcgaagatattgaaatggaagcttgtttggttgccgctaaggaaaaatgcatcgacttcgccaaggaaaagtgtacgacgccgtttctcactgcaagaatcgcagtgggggagaaggagataatgaataaatgggttgagaggatggtacacgcancgtcgttgccggaggaaagcaaatgggtctattttatcgggtcggataatttgggaggatccgaaccaagggtgactaattacagagctagtcagtatttgggcacct

SEQ ID NO: 57703 - DNA, 620 bp, Gossypium hirsutum
  unsure (1)..(620): unsure at all n locations
  Clone ID: AW187401.1
gtacagtgcgacattagcgaatatcatcagtgacctttcccaccgcattttacactcctgtccgttctttgtcatttcgccatttctgatttctctcttttacctcctcatttgtcaaacctcttatctttaatgaattctgattccgccactttccatcttctcattttaaagctctaattatacacctatatctatatatatatatgtatatatatacgctcatttcttccttattcgacgtgtcgtttatttttttttcttttttcttttaatctgtttatttctttctattggtgaacccgaaaatgttgatttccgaaagttctgtatttagtcccggggaggagggtgtttatantaacgtggcaatgcggggacgacacgccgatgcttattccatgtataagcgtggcaccagagattatatcaatgcctatgacaaagagcaagtacgttcactgaatggagtgagtaaagagattggaaacccttcttggaagcgatcattcttgtatatactcctggcatccttagcttccttcttatacggttaccatcttggagtaattaatgaaacactagaaagtatttcaaatgatcttcattttaatgggaat

SEQ ID NO: 57704 - DNA, 397 bp, Gossypium hirsutum
  unsure (1)..(397): unsure at all n locations
  Clone ID: AW187395.1
ctcgaaagccctttgataaatctaaacatgctcatgttcaacatatacggatgcagctgagtacggagtaacattcacggattacttgtatttgttgttgtggtatgctgcgtgtatcatatgggtgctgttcaactttgagatcgtaaattgtaatgcttggatgggttaagcaatggttggatgtaatataaatttataaaatgggtgtggtgtgatgttatcaatttattttgtcattaaacctatgtaattgcgttgcatgcacgtatctatgcatgggacaaggattgtgttaaggccgaaactcttggcttaggtccttgcaacgcccctcccctctggaatantgcgaacatttcctgttttattcccaaaaaaaaaaaaaaaaaaaaaa

SEQ ID NO: 57705 - DNA, 753 bp, Gossypium hirsutum
  unsure (1)..(753): unsure at all n locations
  Clone ID: AW187385.1
attcaaaaaaaaaaaaaacttaaaaatccttcgtttttccgtacttggccgactcaaggagaacacccccccaatctgtcgttcggttagggattcaaccccaaaagactcgccatcgtcggaccaccactataatcggtggtcgttaacgcgtgatagatctccgaattttaataggaggctcgatcgacagaggctaaacacgaaggtaagtattctctttatttctttccatacattaaaacagaacaaaaaccgaaataaagaagacttttgaatactcaaatcggaaaccacctctcgattttgatagtctttttctgtatttcaatatgcgaagtgtgcccctcttttacattttgattatctttggctttatagccgagaaatgaaaagaaaaaaattaaaataaagaatacaaatttccttgctgtctttttgttgttattcgctgctttctctttttgtttattantctattgcaggtgtgcgtggcgcgtggaggtgtacggcgtacggaggctgctggtggcgcanctactacggcgttaaagtttcagaaaccctacggtttctgatttgggtttaagtttttgggcctgttaggcttgttcttttggttgggccaaggtctttggactgtgaaattggactatttattgggtgtttatttttcgtttttggtctgtttgtcgtttantgggcctgcgcggatttggccctttacaaccggtatgaaaagattttaatttt

SEQ ID NO: 57706 - DNA, 762 bp, Gossypium hirsutum
  unsure (1)..(762): unsure at all n locations
  Clone ID: AW187384.1
atttttcttgtttctccatttatcctggccacggggaaacatgcatcgtcgccgccagagctccgatcaacccccttctaacaccgaaacgaatctctcttcatcctctctttcgttcaacggtttagatttccccagaaaatgtccaaaacaatagaaaacttgaacaaaagtttgaagcaaaaaacttcgatttgtcgccgttcactgttagatcaccctaagattggaatatgttactctcctcaacctcctatgcactctcatcgttcggatcttgcagcggatgctccaagcccgtaaaaatagataacccgaaatgaatctttgcttcttctttttttagtttatgctttgtgtgagtttattgttatttttgtatggtttcagtttgggtatggtttanagagagtttgatgtttatggaggttgtgaaaatantgatgaattgagtgggtantgggcantggctggaggtttgacaatggtgaagatcanatggagggagcaaagaaggatatatatgatggtggggatgacggtgtaaagtggcgggtaaacaatgtttcaaacgttgaatattcaccaaaatggagagaatcattcgaaaattaagggccaagatactcgtactgtcatgatgatgctgatgttcctcaggtgcaacactatctgaaagaaaatgttgtttttaacgaggctattccaattaaaaatccccttgccctgtcaaagaatacccggacatgcggagttggtgtt

SEQ ID NO: 57707 - DNA, 659 bp, Gossypium hirsutum
  unsure (1)..(659): unsure at all n locations
  Clone ID: AW187382.1
ctcaaaacaaatataatttcctttctgccattagtacttattttttttctcaatttatttatcatttattaattcttttatattttttccttattttttttaattttttagtgaattttagtgatttttaatctatctactgatgaacgggtgatttgatcaattcgaacatctatctagttttaacaataaggaggaaagaagcgaaaacatgggaaggagaggaanangcggcggcagaaacggcggaggcgtgaaaagtgcancaaatacgccatcaaagttccaaaagaaggtgtcactcagagaagaagcgagcggcaagaagcaaacaaggggaggaggttccacaaacgtcnaanctgtgttgaaacaccagcacttgcaaaacctanccgtctgggctancggcgaatcttcaatcccttctttggcttccttctttgggcacagattggctgctgatggagaagcttctgcaatcccccaggaaccttctttctttcgctgccagagatgtgagacaattcttcagcctgggttttattgcactgttcgtatcgaagggaatcgacgccggcaagggatcgacgtaggaaacctcgtgtttcgacccggaaatgtgtagtctacagctgccacttctggtttggctcggc

SEQ ID NO: 57708 - DNA, 774 bp, Gossypium hirsutum
  unsure (1)..(774): unsure at all n locations
  Clone ID: AW187378.1
cctaactaaaagaaacactggtaagggggaaagggaaaggcaaaaatggcattcagagggaaggagataatgaanaaactgttgaagaaggtgagagagaaaaacctggcacatggagttaaggaacaacttcaaaaatccatcccagacagcaaggtcgtcataaacctcgccaaacacggcctttacactggccatcacatctagttcggtaatcgtaccagcgaaaacggtggaaacaaatatcctcactttatcttcgctacttctttaaacttcttttgtttgatttatttgtttatttttggtgatttggatctttgttctaaaaccctaaaattaattcaaatgtgaacatgctctctataggtattttgattttctgctattattggttttctctacttttaaaaggtttcgatgaaaattcgtcctcattgagatcactaataatatgttatatcgagatgtgatatatcttcgtaagcatgtaatttgttctaattcctggttgccaaattgggtttgttgccctcctacccctaatatctatgtctaaattggtgcaaaaaagtaaccaaaatggtggctctgtgttttcatgtttgcttgcacttaaaaatttattctaagacaatatcggccatgatctgggaagagcagagaagattattcgagtagctaattcttagtagtgggattgaggctttaattcaataaatgagctttttctctactgcaataatagtgaatgagatttttttgctatcttcc

SEQ ID NO: 57709 - DNA, 783 bp, Gossypium hirsutum
  unsure (1)..(783): unsure at all n locations
  Clone ID: AW187377.1
catatccataacatgtgtctaggaagaagtttacttggttcgtattttcaactatgtacaacaacagcagcaataaaatgcacttaaagaattacagaattgaagtgaaaacacagcatctgatttgttcttttcagaaatacatgtggggagtggtgaaaggagatatgaatggttaattaagaagccaacacttacaatttacgacatcaatgtgaataaaccaggcaataaaagcttacccaggaacagtaattcatgaaacagctctgccatttattggagtgcgtttaattgcaattgatccggccgccaaccttcatatgttaaaggaaaaaaaaaaatgatcattcatgaactaactccgtcgacagtcctcaatcatcatccctttcatactcttggccaaccatatggctgtctcccttggggacaccttgtctttcccaaatggcttcaaaacaactgacagctcttccagtctgttattttgtagtaactctgcagacnattccaaaagttctttcaagtggctctggccctttgcctatcacacttgacatccaaggtttctttttctgcggtctcctcttccttcaccacctctgttgaaacaaattctgcaaatgaagaattggagttcctancatcttcttccttaacaccgccataacctgaaacaattgattttgaacttggtgacttaagggtcctggactantcatgtttctcatgttcaattcatctntcactacatttatgaaaattccaacatccacatcc

SEQ ID NO: 57710 - DNA, 478 bp, Gossypium hirsutum
  Clone ID: AW187376.1
cttctccaaatcataaacctgttggaatcttcacccccatacccgatcaatttctgcctctgtgactccctcatcacctggtccgtgagtaagtttgagctttttttatcactgtcaaagaatccccttcaatattcacaaactttaatcccagatcccttcctaagataaccgcctgtaaacatgcaacggcctcagctgcaaaccccgtaggtccactgctgcatcgaagttgattttgtagaaacgttgaatcgggggcctccattctacacttatcgggctaaagccgaccagatagcccagatggtgcaaagaaagtatcgacagatatcagtactgctgttttgcacgaaccaggtaaaccattccataaattccatatttgctactctttcaggccattcatattgtaagctattccatgcaaaggaaacattctttgataactttataatttaattttttattgttcccc

SEQ ID NO: 57711 - DNA, 688 bp, Gossypium hirsutum
  unsure (1)..(688): unsure at all n locations
  Clone ID: AW187373.1
gaaaataaattaaaataacaaaagtttctctgttgctctgctagggtttaggaacctancgtcctcgcgccgcctctcaggcgattcggacggtccgaattccggcaccggttcccaactcaggtaagttttctttttctttttctttgttattttaaatgaaacaaaatgaaaagtgaaagaaaatgaaaaacatatgtagaacgatagtcactgtcgacaaaaaaaagaaatcacctcttaaaaaaacgagttttcgctgctttattattgttgattctctctatccaaagatccctcctcttttacatataaaaagtggtctcttgtaggcctgaaagtaaaaagaaaataagtacatctgttattctttgctattttgttttcctcggactccttaggtccgtttttgcagataatcgtgaaaaaacggcgcgcgtggagagggccatctcccagtcttgcggcgactgggcactccctggaagtgtggaaggtggaagaagnttgcgggctcccctgttgttactaggggttttttctttttttaattttgggggttgggttanttttgggcctgttaaggccgttgggcttgtaactggactgtttttaatttgttggggcctgggtcaatgnggcccaattacaaaaattaaaacaaataatttgttgaatttccaaaagt

SEQ ID NO: 57712 - DNA, 675 bp, Gossypium hirsutum
  unsure (1)..(675): unsure at all n locations
  Clone ID: AW187372.1
ttttttaaacataaatgaagaacaaggaggtctcgaccaaaaaaaaaaaaagacaagaagaataagaaggaggacggttatctctctacttcttttagaagtagaatctaaacgaaatatgtacaagacaaagaagctatgcgctcctctctccaccatttttcgcggagttcttccaacaagacgccgtttgtctccttacttatcaaattcacaaattccatctttatcctctcacctccaatcttcttctagggttcctccaagctacgctctccattttctcctgaattcaaacttttcctttcaaaatttatgctctcaatccgccgcaaagctcgattcttcaacaaaaaggtgttggaactgcgtcgccgacaaaactggaacgacgccgttcctctattgtgattcctgcaggagcattcancccgttgatttatccatcgattactttcagatttttgggctagaaaagaagtttgaaattgagggtgaacgtttaaaagggaagttccaaggttgggcaaaaaaattggctcctgaacttgttcatccaaattccgaaaagaaaaaagatatgcggctgaacatctggtcgtttatcgatgcttatcgcaggctaacaagcggtggtctggggcaatttactcttggaggctggagggaatatat

SEQ ID NO: 57713 - DNA, 598 bp, Gossypium hirsutum
  unsure (1)..(598): unsure at all n locations
  Clone ID: AW187364.1
cccacagcggctcaatgcctcacccatcaatggctcagtgcatgccctcaagtactaaagccttcatcaactgctcttgagcaacgcactggtgatggtatgtctgaaaaaaaaatgaaagataaggatgacagagaggccatggaggctggaatggggaatatancaattgatggaggagcttcaaagccatcgaaagaaacgccttcaaagttgaaataacccttttcctcagtatttttaaccggatgatttctcatcaaattctttcttcctcactttaatacttttgccaaaggctatttgcattgtccactggtgatcctttacgagttatattgcttttcctcgtctgcatgacacctatacttttaccatttcaaagggatccancttgggtccagggtangagtttcangtgttancttcanttttgaaagaaccttttgagaatgtatttggatttctgggtacatgttgaaagcaaaggcttacaatggttgatggggctaatgtcccccccccggtgtactatttaattgtgtccctaaaggactcattaggatccngnggcgggggggggggnggggggggggaa

SEQ ID NO: 57714 - DNA, 661 bp, Gossypium hirsutum
  unsure (1)..(661): unsure at all n locations
  Clone ID: AW187359.1
ccctgagcatggcagggagtcagaccangattttggcctgcagactgagattgtatgtgagtttatagttaaaattatgtttgtgtttcttatgccatctattgaatgatttaataatacctctccagggctgactttttaaacttgaactgctatcttaagacatgatgcatgtttgctatgtgatatttttcaactgaaactatcaaaataacaaaattatgacttactaggcagtttattattggtgggctttcattgcagttaataaatgcggggaacaaccctattttgacaaacagttggtgccttatctatcttaatttacaggatctctcatgcataggtaccaaatatgtgtggtcttacatttctttctctgcaggtatacgccattttgttgtaaaattatggtaggttgcctgttttctataatgcagttatgcttcaattatgttgagacttttggaaaggcattttggttcatcnaaggtgtccatatctaatggttttcctgcatggaaaccatttcaaatgtgatgctttcttatgtaattgtgttaaattggttaattatccattatcgataccatgccttatgtatatgtgtccaataagttaattgcagtgaaaagaaatactgcttgctttgattaaagtt

SEQ ID NO: 57715 - DNA, 670 bp, Gossypium hirsutum
  unsure (1)..(670): unsure at all n locations
  Clone ID: AW187346.1
caggcattgccagtgagagccttgtgactggatctgcaaacgcaatggaagatgcctctacaaaccaattaacagctgttggtatgtttaactacctatttatatgagggctccgattaccatggcggctatacttgtttccttagacttgtttgccttcaaatgaaaaagttatttcattcaatattctctggaatgatatcggtatctctaatctacattcattacttgatatttctagacttattagggttgtgtagccatgtttttgacaatccaatcatatttggtagccattatagttgcaatttttagtgaagagaaagttatgatacattttaaatgaaaatcatgcattacagtggcttttccctgaaatagttatggatttttgcaattgaatttctcagcattagtgatttaacaaatattttcaatgtaaattgctcagtgattgagcttctagaatgcctgtttaactatgaatgctttgtttgcagtcaagaaagaaaaacttgagataaagtaaggatttcatggggtagttgtanttgtgttttataccanaattttcatatcctttatgtctantttgtatacctgtttgcaagtgtgttaatttagctgtcttantaaatgcgggtgcttaccattctcatacaagaaagac

SEQ ID NO: 57716 - DNA, 665 bp, Gossypium hirsutum
  unsure (1)..(665): unsure at all n locations
  Clone ID: AW187345.1
ctggtttagatatctacatatttcaactgtgttaattgggctataaatttgttctcactatcaatgagcttctacaatttcaggctacatcaattacatttctttccacgaatttggttttaatcacaagagatccttactacaagggaggcaaagaaactttcatttacagatgacctattccttgatcttgaattatcttgacaaacgatgaatttcatatttaaagatctatgttgctctatacctagatatgtatgtacacatgcaaggctacattgtatataaatgtacatttcccgtttatatgtatcttgttctgtctatgtgctctgctttgatggaaatggacctgtancatggaatgttgcaatgtgcctttcccgttcatatttctctactgtgttttacttgtacgtgtacttttaggatgatgaggatgtgatttaagatatttaaaaagataagtacatcatggttttctgttttagatcattttaaacaagatttagtgttagagtatatgacaccaaaaaggtangatttatttattgcaaatattcatatattgtagaatgattaaaattgactaaattcatacaggtatgagccactatcctatctactaggctcaaagtacttccttcatgcctacggtcctttcc

SEQ ID NO: 57717 - DNA, 696 bp, Gossypium hirsutum
  unsure (1)..(696): unsure at all n locations
  Clone ID: AW187337.1
agccctataatattttctgctccctcacttccccttattctccaaccgaagggctaagcctcaaaagctatcaaaatccgactgcgatgaatggagttgagcctccaacggcgtgagtgcgatgcgactccggtagcgaagacgtggaggagaaacaggcatgggacgtgctacactcgagctggggtggacgtgcgtgggagttgcaggtggccatanctgtggcgcgaagcagatggaaaccctagggtttccgaaaactctaacaacttgggcttatcgggcttgatttatttcattcgggccatggtaaagtttttgggcttttggatttattcttgtttttgggcctgaactggatttggactgttttaatttttgtgttttattttggattttggtttccatattgcccgcacaaaatctgggtcttacaatttatttatgtaatgtaatgaggaaagtttgtaaatagtatgggcacgtttggttcgctgtattggattaaaggcgtattggattagaggcgtattggattacacgtgtattgggattacacgtgtattggattacaggtgtaatacctaatccactgtttggttgaatgtacgggaataaacgcgtaatacctaaaaaaaaaaaaaaaaattctgcgggcgccaccgcggggggagctccatttcccccttatattgg

SEQ ID NO: 57718 - DNA, 557 bp, Gossypium hirsutum
  Clone ID: AW187331.1
ctgagcttgaaagatattcgtgaaaatcctccatctttgagtgtttctgcagcttctgagacccttgatttagaaaatactcataatgacataaaccttgggaggggagatatagatgtcaatgcagatgctattgattgggatatctctgttgacaatgctcaaatagattgggatattggtactttggaagaaacagatgatggtggtggtggtttagggccatatgaaatatttaatgccagtgacatcttgcagaattcttcaccaaatgaagttgctgaatccgataaaaccccattagataaaacagaaagccctcctgaaatttctgtgtcagatatatcctgggacataagtgctgaaacaccacaaatttatgtgattgatgaagtaagcttaccaaatatacaattggaaaatcagacatatgctcctgattctttacctcttacccgaggaaccagggaggaaaggatccaacttttggagacagaatacagaaataagattttggatgatttttacgagatgaaggcatttttgaatcagcgatt

SEQ ID NO: 57719 - DNA, 635 bp, Gossypium hirsutum
  unsure (1)..(635): unsure at all n locations
  Clone ID: AW187323.1
tttttttttgccaataatacagatcgatttgagattcaactgacaccactacacccactgttcccatcagcccatggtctttcaaaagcttcaacaatggcctctaaaagcccatcagcccatggtctttaagccccatccaaagttcaatgggtctacaacttttttgaaaaatacttccagaagccgttggaagttgaaagcaacgcaaactataaatcaactctacccatctcagcaaagcaaggctgagaacagagattgagaatcaatgtccattgataacaaagagaaaccaaagataatccagcttttctgcccttcggtatccaagctaatctggttcgtggcatgggatagccacaaactggacattgggtccatatctcgaatgttctggctagacccatcaacggttaatctcaatggccactttataagccgaggggttgatcttgtttcttcttctgttacgtggaggtcnctgctttctttcttctcttctaaaggcttgtctactgggactgatgatcataagggtgctctcatattcaatggccaactttgcataatttggagcaacattatccccactattgtctttttatggggtttctcggatgaatacaatcctt

SEQ ID NO: 57720 - DNA, 618 bp, Gossypium hirsutum
  unsure (1)..(618): unsure at all n locations
  Clone ID: AW187319.1
ggaagggagaagcttattggaaaggtgtgataagttgcttcacagcatancaaagatgaacgcagctcaaactgagttgcagccgagtcctgtttcggtactcgacgcgtccttttacaaagatgattcgtctacttcccctgtgatgaaacgaagaatggatttcaaagaccaagttgttgaatcagaagatgaactttggagtcccgctagtgccatgtcaaccgctaaatcaaaatcatcagataaatcagacgattgtgatttcaactacatttccgatatcctcaaagcatccaattacttgcctgatgatactgacgtctttctgttgcttgagaagcaacagaaccttaaagggaaagacacctccaaagtgtataaactccaaaggaagcttatattcgacaccataaatgaaattctcaatggaaagggagaattaccgccatggaagcttaaatatccatggtcaggagagacatcgctgcaacaaatttggtccgaatttgaaaagattcgaaggagggactcagcagatgacttgtttgaggtgatctgtggtgtgttaagacaggaccttgctagggtatgtcactaccggttgggcgtattacc

SEQ ID NO: 57721 - DNA, 550 bp, Gossypium hirsutum
  Clone ID: AW187318.1
tgtttttttttttttggctttcttaatttcagtgaatgattatttttgttgactttctcttttgaagaaaatttggagaactcaatcatctcttgttagccgtaagtaacttctttttattattattacttcttgtatctttcttttccttttaatcaaaattacccatgaagaaaaacttacttttcaccagttctatggttttctctctgttttctaattatttttccttctggaatgatttctattctgacttttcaactgggcaactttttcctttcaaactaatcctaattacctaaaaggatggaaaattttctttcgacttttgccttttgatgcagcaccaatttttcagattttttttattctgcttgttccttgtaaagttgaccaaactttcttttctgtcagaaagtctgttcaattaacttgttcaaagatttacaactcatctcttttaaagttaatcatattcaatgtatgaacaacaaacctgtttaccctttgaagcagaaaagaatatatcttgatataataacaagaagaa

SEQ ID NO: 57722 - DNA, 571 bp, Gossypium hirsutum
  Clone ID: AW187313.1
attaatctccaattctcgttttctttttccacctcaatataagcttgaaaaaccttatgatctttcccctcaattcttaaacccctttttaggactgcgcttggtatataactcccttcgcccatttgattgtatctcatataacactcttgaaggacgttttcttcctatggttttcttcgggaattccattcttttgcccttctataacatatgggcccacccctccctattgttatatgggatatccccaaaaatgcctccaccaatgttcccggtccatactttccgtccggacttgtgaattcgaacacctcttttacacaccctttttgcggatcggatttcatgatatccacctacctaacccttcccttttccgtgcctctatatcactgatcactgtgctctctacggttgtttctttcaaaaattgaatggatatataattccatcttctttgtgagggcatttttatgttactaattttttcatttccgccttccatatctctttgtccttttttgccgtctttctctcccctttatcgggctctttctctcttacagac

SEQ ID NO: 57723 - DNA, 592 bp, Gossypium hirsutum
  Clone ID: AW187305.1
ctaagcagtgggacttcctggtggatcagtttaaacaagaattctgcaggttatatggcatgactctggagccattgctgaatatttatctacaagcgggcttgtccgctttgaaaactccgtatccttgctgtaactgcaattacataactacctattgtttaacttatattatctgccaacttagcagcctccgtgtcagcagagtactcattaaatcaatttacggagaagatacaggaattttactttttatgtgaaatgctttttcgaaccaagttatcctctttaagttttcagcatctttgtactgaggcaaacatgattttgaaaactccgtatccttgctgtaactgcaattacataactacctattgtttaacttatattatctgccaacttagcagcctccgtgtcagcagagtactcattaaatcaatttacggagaagatacaggaattttacttttcatgtgaaatgctttttccaaccaagttatactctttaagatttcagcatctttgtactcaggcaaacatgatttttcgattgacatatgattagatactgttatgaagatgactgcaccaa

SEQ ID NO: 57724 - DNA, 560 bp, Gossypium hirsutum
  unsure (1)..(560): unsure at all n locations
  Clone ID: AW187298.1
gttaactaatgggtttagggtgtgtgtgacttttggttgggtggtcgattgtaaacatgggaaattggtcaatgattgttcccactaacatttagatattgtcatataattttaattaaaatggattttcttgggaaaaagggatgggacggtgagaaagataaaagagcgaggaaactgaagttgtgaatggttgtggctggacgaaagatanaaacagaaaaagacttaaacattttgattttctttgcttatgctcagctttgctaactgtttgaagaaagagaagtgggtggttaaactgtttcatggtcaaactgggctcattangagctgattttaggaagaaaaataagtaaattcctcaactcgtctttgcctctagaccactggtgggaactgggaatgggactttggagaggttggttttaancttgaccgaaggtccctcttgcagctgatttcttgcatgtccaaaactaataaattcatgaagtgttctattaaaaatacagggctgcggaatgtgttttcttttgttttaacaaggaaatggttgt

SEQ ID NO: 57725 - DNA, 536 bp, Gossypium hirsutum
  Clone ID: AW187292.1
ggcacctctgctcccccaaatggtcatggagtctggattaattctgatgctgcaaattatgactcgtgtgagtttggtgtcccttacaatgaagatttccttctcagtgatttttgccttttcatcgatgaccttgatggaaatgatcatgagaatgatggtggtcctttccccccgtttccttgatgcagctttgtgaaaatccatcttcggagtcactttggcaatggcccccagatcctttatttatatcttattatcgccatagtctttcctccattgttttgcaactgcgtttttgattgatcagtttgaatatgttaatagagatgcttgattattcagttggtacttttaagacatctttctcttgatgactgagtcacctttgacacgcatggtttccaatttcctttaaagttaaatatcagtttttgtagattaatgtgaacaatgatgtatcatgttgtatgctacggtttcaaatttgaatatggtacagcatttatttgccttagaaaaaaaaaaaaaaaaaa

SEQ ID NO: 57726 - DNA, 630 bp, Gossypium hirsutum
  unsure (1)..(630): unsure at all n locations
  Clone ID: AW187291.1
atggataacatatttcttagaagtcgttccgcaaaagcaaagagtggcacatcagatattccagctccttcttcaccaccaaagcttcctgaggctgttgaacctgaagccaaagatgaggaggaaagtccactgatgactactgttaggggcaagtgcatcactcagttaatacttcttggtgctattgatggcattcanaaaaagtattgggagaatttgaatgaacctcagaaaattgccataatggacattttgttatccttggtagaatttgctgcatcatataattcatactctaacctcaaaacacgtatgcaacacattcctgcagaaaggccccctctaaatcttcttcgccaggaactggcaggaacttgcatttatctggatgtcttgcacaaagcaacttcaggatttaatgacaataatgggcaacttctagaacctaaaagttctcaagatactgatgtatcttcagacaacaatggtttggaattggctgaacattcttatgaagaaacaaaattggaaggaatagcataagagaagctggtctctttctgtgcacaggtactcagggacacatctgatttccaatctancataggggagaagttccgtggatag

SEQ ID NO: 57727 - DNA, 589 bp, Gossypium hirsutum
  Clone ID: AW187287.1
gcaaaagatgcagaaaatggtgcaagctcgagtgaaaaagatgacggagtgggcaagggaagaaagtgccgttcttgaaccaagagataccagtaccacggatggcagtaacattagggaggctgctagtttacagcatgggttaaagcagattttcatggcaatggaaaagcttgctatccatttcaggcaagcttatggggagctccaccaatgcactgaaaagtgcaaggccactcaagataacccctaatgtccttatcaatccaattccatggttaggtacagggacggcttctaatttacttagctctacagctttaattattattagttgaaagaattattcatttcatttgtggttttgctaggggggatatttatccaataaacccccatatgataacatctcatatgtctaattaaaaatggtttgtttgaaacctgttttgcacagttgagttctgattgttggctgattgattgccttcccattactgaaagtcaacaaactggattgtaaagtcatggtcagtaggcatcctcccctcattttgtctttgtcgttttggttaaaatactgaaattt

SEQ ID NO: 57728 - DNA, 633 bp, Gossypium hirsutum
  Clone ID: AW187285.1
gcatcgaaaggaaaaaataaaatttgttttataataagtgggaaattttcttattttctatcgttgtctgtcttatctgaattttcttcttctcacagccacagccacagccacagcctcttcttttctctgtttcttcccctccttgtgtttacaggaatttataatattaataataaaaaaacccttcgattccaattttttttaaagcttaaattaaattaaattaaatcaaatcaaataagcctgacaccaccgttctcagagatgcaccagccaattcgaatccgatgtgaattttgttgcttagaatccaattctagctgagcgttttcttcttcttcttcattgaaattatcagggagattgaatttgggaaggatgaaaggtattcgagactgggttttcactcaagtactatccaattcattggcatcctctaaaccactgtccggcagcggcggcggtttctttccggaggctccttcgtctcaagagtttgaatcagaagatcaaggtggtcagaaacttgcttattgatggctgtcattgatactgacatatttgtcgtaaacaaaaaactagtaaattaactgaagaatcatagtcaagcaaattaaaccttgagaaagg

SEQ ID NO: 57729 - DNA, 676 bp, Gossypium hirsutum
  unsure (1)..(676): unsure at all n locations
  Clone ID: AW187272.1
catccgtcctttaagcgaaatccgacggtttaaattcgttaggttttgcaacaggaaaggaagaatctaatccgtctaaatccagccagctgcccgtcgatagccgtctctactccggcggccaccccgtctcccggttcctctgtcgccggcgcctattaccgttgtgtcgccccgttcgttcttccatcaagacactgtcgtcgttccggtgaagctgctgcttcctctgtcgctggcgttcaccactgccttcgcctcctccgcttcagccttcagtcgtcgccgtcccgctgtgccgccggtcaatctcgtccaattcctgaaaaaatgggaaaattaggtaaaaaggcaaggaagtttgcgaagaaaaatcttcaatctgtgttgaaaagaaagcggcagttgaaatccatgtgcaaaaaaaaggcttctaaaaaaaaacaacaggatgaancccaaaacctggaagaagatccgattgaaaagttcagttgaagaagactggaatgcgaaaattttgaagaatttgagccttgatgccgttatttactgattaacattgatgtggttgaaacgatgattccggatatttaatggatttttatctgaagggcccaagctgttcccttttcccaattaacattggaactgaagagtggatcaagatgaattc

SEQ ID NO: 57730 - DNA, 105 bp, Gossypium hirsutum
  Clone ID: AW187255.1
aaacaaaacccattgattgattaagaaagaagcgatctttcttcggaaatggcggacgtggttgatgcggcgggtgaaccgatcccgacatcgtcggttctaatg

SEQ ID NO: 57731 - DNA, 549 bp, Gossypium hirsutum
  Clone ID: AW187250.1
gcaaaaatggagtgtttgattctagcagttccaagctgggtgatatcaaaggagattattttgtcaataatgagatagattttactagtgccgtaattatgaacaatgaatatttagattttactagtgccgtaattatgaacaatgaatataccacttctaagaatcccggtagtcttagacagagtcaaagaacgaagccgtgtagtatgaaagatgtgattaatgagatggactttactagtgaaataatcatgaatgatgaatatactgtttccaggacacccccggggtcaagacagggttcttctggttcgaaattgaaaaaaacagaagggaaaggagtttgtaaagacttcgaagaaaaatgtatgagatcagaatcctcctctgctttgacgaaagaggattctggcattgtaaaaatgccttcaactaaatgtgtcgatcagagtggtttggatacaattaatgctgaagcagagaaagaaacccattctgacaaggccgtggcatcaattgaggttgtgcttaaatcctctcttaaat

SEQ ID NO: 57732 - DNA, 593 bp, Gossypium hirsutum
  Clone ID: AW187243.1
aaataaagcatgatcaagccatagcccataagcttataatttgctgtaaagggcaaatggacagactagctactagctactagctacttgaatcatgcctatgttcttcaccatggtgtaatacttgatgtgatccggtggccggagactccgaaacattggtgctgtgagtcggcctatatgcgtttagtgcttggagcatgcctagatgactgtcgctaaatgaaccaccagcaccaatgcccgtaccccattgttgtccgggcaggagactcatcggagaagcgaaattcataaaatgcaccccactagacgtggtacttgtatacatattagtattattagctgaaggaaaggtccacataggatcagcagcgccactcccgctgatgccttggttgctgggatttgtgatcgtccaaaacgttgccggaaccgaacccatagtcgattgtatcaagtagttcccgacttgattttgtgataattcatgatgctcaggtcttctcttcttccccttgttagtatcctccgccgccgaggcatggacaggagtgctgtcccgcatctcttgtttagtttgcaaaaaagtg

SEQ ID NO: 57733 - DNA, 227 bp, Gossypium hirsutum
  Clone ID: AW187242.1
ctccggtgaggtaaaattgtattgaatcaaactgaagagaatcacagtgcaaatacagcgtatactcactcagaattttcatgaattatattgtaagaattataaacctaccttgctttacaatgtatattagtactttctttaaaagaactggtcattttgggactgcgtcgtttaagatggcatggaaatgagattaaattataaccaaaaaaaaaaaaaaaaaa

SEQ ID NO: 57734 - DNA, 496 bp, Gossypium hirsutum
  Clone ID: AW187239.1
cactttccaattcaacagatattccatcaaatgtctctcctctcaaaatgggcgcttttgaagggtttggtttgagccaggggcatgtcaatcccaatctcagcggcgttcaaaacatggtatcatcatcagatggatcattgccaagaaatgaaaatagtgctaatcctccatgctggggagaaacagcagggtcccgtgaacatgatcaaagtctcctaaggtccatcaatggcaggtacaacaacagtaacacaccaggacttacgaatgggaaagcaaacaatttatcggtgtcttcatcggattttcatgtcgataaagggccagaaaatgtatctacaagaagtgacggtatggtggaatcatggatatgttcatctgattaggatttatctaaaatattatcaacaaaatgataaactttccacaaagaatatcaaggaaatgatggtgaatatatcacatgatgcatgaaaaaaaaaaaaaaaaaaaa

SEQ ID NO: 57735 - DNA, 513 bp, Gossypium hirsutum
  Clone ID: AW187235.1
aaaatctgtcacactctttaaacggcttttcccattagctttctttgacttgcaaaggtgttttttttttctcttcttcaatcaatcaaccaaatacccaaacaggatttctgtgttttagctttcaccgtttttgcgccttctcgatttctctctcaaaagttttgcttgtatgacatgctttcataagaaacatacaagatttagatatagtttctggaatttgtatataggatgggttgttttgctgttttgaaaagtaagaagaaaaagtccgagcagtcagtttttgtgaaacctactgctcgcaaggagcagatgcccaccacactgcctgagccccaagttcagacccgatcactgcaatctgcgcccccgagttttaaaaccagagtaaaacctattcaacctaataacaaggcaaccagcaataggacgcgcacattatctgctccatcaagtctcaacaccgcagagcaagatgcgcttgtgtcagttgaatttgaagaacat

SEQ ID NO: 57736 - DNA, 369 bp, Gossypium hirsutum
  unsure (1)..(369): unsure at all n locations
  Clone ID: AW187234.1
gaaaacccttagtctatttctccaaaaaccccctcccctttggtcattggtgtcgacagttcaccttcgcaccggccaccataggcggtggtcgaaggtgcaaaaatcgagctttttagcctctgtttggccggatctaaaggcctagcctctcgttcgcgacaaaaatcgaataaaaagacacttcggtccctttgcttagccgatgtagccgacaaagccacggccaaaccttaagaggttttggggtcctctgcacaggtgaaacaccctcggtgatggaggaatgcggggttgctcgggtgtcaaaaaagcgtgggacncgtggaatggtggcgtgcggccgatgggaggccaaaggtgggagcg

SEQ ID NO: 57737 - DNA, 633 bp, Gossypium hirsutum
  unsure (1)..(633): unsure at all n locations
  Clone ID: AW187225.1
caaccagaaacaggaaacaatcctcacaacaagctcaaaagagcagcagagggcgaaatcgcctaatcaaggggacaagtccttaaacgggtcttaccagctacccaatcagcagcggcatctgcacccctattcaaaaaacgaaaaccaacaccagaaaaatgggcagaaaggagaaggatatcatacactcgatcactttagcttgtatttgagtgattaaatctctttagcttgtatttgagtgattaaatctttattgttgatccaaaactctaaggaaagtgacaataacgtttcaaaagccatactttcaggagatggaaatttgtcaattatcaggacattttttctcaggcattccccttcaatttaactatcgtttacgaaaatcaggtagaaccccaaggtttttaacttatgcgaatggggttagctgttaccaaacggagaacacgggccaagattctcagaatcggatgtttattcttggcatgggttttgtcggacaattctttgctgaagagctccggaatgaaggctggattgtctctgggacttgcacnancatgaaaaagagaaatgaacttcangaaagaagactcgatgttctactttttgatgcaaatcact

SEQ ID NO: 57738 - DNA, 583 bp, Gossypium hirsutum
  Clone ID: AW187210.1
aatccatgttccgaatcgctctaaatcgaaggttgtttcgaatttcccgaaaaaaggatccgccctatttctcgtgttcagttgcttcatatgttcttgttcgcaatttaaaggcttatataatgagttcatcttgtaaagagaaggggactttggaggcccttgagtccatgcttattgaggttgcaagagtacgtctacatggattttcggaacgggaaatatccgttgttcgagatctactaatgtcgagtattgaatccgcatatttggaacgtgatcaaattgaatcaactagcttgcgatatgaatattcacagcacttcactcacaataaacccattattgggattgaatatgaagctcagctccaaaaatctattctccctgatatattagcatcagaggtatccaagtttgctgagaaattatggacatcatgtagctgtgtcatacagatagttgaaccacaagcttttgcttctgttgatgacatgaaaaatattgtcatgaagatcaacaagcttgagaatgaaaggagcatttctccttgggatgatgaacaaattcccgaagaaattgt

SEQ ID NO: 57739 - DNA, 675 bp, Gossypium hirsutum
  unsure (1)..(675): unsure at all n locations
  Clone ID: AW187205.1
agatctcccaaccttttgttaaatttcaaatcctgatccttccgttcgtgattctgccattcaatgtctcacaacgcatctaaatacccgcccatccataaactcttgctcctctccacctccagacatggaaaactctctacggtcatcaaactctaaagtcccccgatgtccaacttactccgactcagctttcctcctccattggcctccatcccactcgtccttacctctgtcatcttaccacttctttttctattgatctctccagtctgactctcctcgacgactaatccgacatcccccctatatcagcctatcccacccatgattagcttcccgctgtctgccaaaaaacccccccgccgtgggtctacgtctgtttcaggtcggagctccggatgtatctggactccaacgtgctgttctgtgggggctgcggcaccttatggtacctgctctgattttccagtcgcgatcaggaccgactcgattggggaactgtttagcacttgtggggattcgtctcgggtctcagatgttatcgaagcccgtgntatcaggacgtgatatagtggaggtgggaaattatataangagactgtctcnccggttttccgcggttgtcgacgctccaaggaattaaccggtcttggaggaattaaaccccggttt

SEQ ID NO: 57740 - DNA, 670 bp, Gossypium hirsutum
  Clone ID: AW187204.1
attcaaaccctgtaacaccaaccgcttattttcctgttgtcattcaaccagatggaattccaaacaattctacagaatttttgcttgatactcgtgcatcaatcgctagtagacctgatggaaggggagttagacataaccttgcttcagcatctgcagccttttctaggaactcttcaaagtctgctccaaatcagacagattccttgactagggtatcggatggacaaagtaaacattctgcaaaccgtgggaattttactgatagttccagtccagctgcagcacgcactcaacagggtagagttgcttctgggtccattcagtcaattggcaacattcctggtgggaaacttccatctcaccataatcaattaaaaatggatcttcctgctggtaataccttttctgactacggatcaagtgctcctggacgcggtgcactggataagcttcgaccaaatatctctgttggaagggttttgaatgatacgcatggttacccaaatacattgggagaacagaatcgaggccccaaaaccaacagattgaaaaatcaattcatggttaaagcctacacaactaaagcaggaaattctgatgccgaaaggaacatcgttatctataccgaccaatataacaaggatgattttccaattgactatgttga

SEQ ID NO: 57741 - DNA, 676 bp, Gossypium hirsutum
  unsure (1)..(676): unsure at all n locations
  Clone ID: AW187202.1
agggtttcgaaagaaccttcttgacccgccgtcacctatccgacaccatacgcggtggccggcgttcaaaaaactgtccctttcggccgatccaacctctccaatctcgacctaagggtaacgtaccccaaactacccacaaaaatttgaaaacaaaagcgaaaatgaagagagaatgaaggggcctttcggctccctaagaacgccagcgggattttcattcgagtcccctgactcggcgacctccgaggccggagaaagctccaagcacggcgctaaaggtagcggattttgcccctctcacttttatttaatattattatttatttcaaactaaaaaatagaaatcgaagaaccttaatcttctttgaattcgttttttgtatttgatctcttttgtatttgattgatattctccgtttttgaatattgaaaatcccccctaaaatacaatcagttcctcttcccttttacatcatgctcatcttttctcttattaccgaaaaagaaaatanncaaatacaatattttttgctttgctgttgtctgtcttttcttgcttgttgctttggttttgcaggtgtcaaaagagtgctangcggtggcatgtgggcaaccttcggcggtaggcatgctggcctaggtacgggtcctggcttaagtagctttaagtttt

SEQ ID NO: 57742 - DNA, 635 bp, Gossypium hirsutum
  unsure (1)..(635): unsure at all n locations
  Clone ID: AW187193.1
caaatttcccaaaaaatcatgaaccagagatcttcgaacctactggatgaagccttagggctagaccaggtcatcgagccatggcctctaaggggtcgagtagtggcagtagaagaccaagtcgataccagtgggtcgttcgttcttcaccatctacttaaacgctctctttctccaaattcctctaatgttgccatcttcatcgctttctctcagcctttctctcattacgatcgtatccttcggaaactgggatgcaacttggtatcacaaagggataacagtagattctttttctttgacatgcttaagttgcagtgtccaaatggagatgaaggaataactccagaaggtggactcattgcattgtatgggaaaatacataaaaccatttcagctttgcctgagattagttggaaaaacgtttccattatcattgatgatttatctcttatggaggtggctgcaaatggctcttcagattatgtcttggatttcttgcantattgccgcactttaacatctgagtttgactgttcattaatcacactcaaccatgaagatatttattcgaatgaagataggcctacattttttatacaaatggagtaccttgcagacattttgataaaggc

SEQ ID NO: 57743 - DNA, 565 bp, Gossypium hirsutum
  Clone ID: AW187186.1
aatttggaaccctaaatttttctctgcagaatttttcttaatccacaagctttagctgcgctatgcgattccatcacggatccgaagaacttttcaaatgtacagctccatttttcaaaaagacagtggcggattcgaatgctccggtgcaggagaaggcgttggatgctttgattacgttcttaaaagcggctgacgttgatgccggaaggtgatgccgtcttttaatttcactgcgccccctcttcctgatcctggtaccatcttttaatttaagaataagccaaacccatatttcatgttcttcagtttctgttaacaactgttcatgctagtgttttcaggaacttttttatttttttaagagggaaatgcaatttgtaggaagccaatctgttttatctatttccccccgttttattgttattttcagttgttttatgttaattttctttctttttatttgggtttcagttgatatttattttgatatttcattgtcgtttagagtaaatgcagagtacagctatcgatgaaatggatttcgccatttccgtttaatggc

SEQ ID NO: 57744 - DNA, 646 bp, Gossypium hirsutum
  unsure (1)..(646): unsure at all n locations
  Clone ID: AW187176.1
atttgccgacaagtaatactgccggagttgaaggcagatgaaataaatagcaacttgttgaactttacagtagataatcccaattttgctcaagataagcaacataagttatggatggacttactttcaagaagtgaaaaagaactgcgagagagacttgtgggttttagtttttctgcttatagaagtttcgcatccaactcagccaccacttcttctgagcctggatattggtatccttttggtatggcacaaatggagcagtgggttgcaaataataatcatcaagtacacgaccaactaaaagttgtggcaacagagattaaaacctgcaaaaggtctcgctgcatcgaacttgcagaagaagataaagagcaatgtagctattgctcagcaccagttccttttgaatccccaaaatttggggtgtgcangggaatggaaaacaatggtancantgggcagaancataagttagcaaggtgtgctgttacaatgcaggtttgcccaatcacacctttatggctgtgcaagtgttgtcaaaaatggatttccaaacttgcaccggagtcactatttaagatgccccagcaacattgtctagattataaattttcacctgagccgtcttctataaaagtagccc

SEQ ID NO: 57745 - DNA, 573 bp, Gossypium hirsutum
  Clone ID: AW187159.1
gattcttttccttcatataatctcctaaaccaattgatcactgaaaccccaaaaacagcaccaccaccacaagtttcatcccaagatgtttaccacaagtcctgatcatcttccccataataagagtctcgaaattaagcaagatgacaagttcttttccaggcttttatctaaggaaaactctgtcgccaatccttctttcagggtctactatggcggactccccggtgctgtccctttcatgtgggagtctcagcctgggacacccaaatacacattctctgatacatccattcctcctctcactcctcctccatcatactactccaactccaactccaactccaaacccatcaagaataagcactcaagatctggtcttttccaggcattgttcccaaagattatcagtttgaagaaaaccagcagtctagtgcctacatcacctcctccttcttcttcttcaccaatgtttcttgcaataagacccggaaaataccagaagaggagtcgatttttgaccccagatgatgaagttgatactgcagccattggatcaccaacttccactcc

SEQ ID NO: 57746 - DNA, 612 bp, Gossypium hirsutum
  Clone ID: AW187149.1
caaatattaaagatccagtgcttttctcagagtctgcaaagcaagatgtgccgttgtatgaagatgacaaccgcctaccatctcgaagaactgatgtaaattacactctgtattctgctgtcacagggaaggatttaatctgtcgaagtgattctagatttgaagtgtggggaactaaaggatacaatttacacgttaggggaagaaacaaaataatgccaggtcatcatgttattgacttggggagaggcttaaattccactttcggttcttccagatcaaggcgtcccaagttcacaaagaaaaggaaaggtgattctcttggaaacaggtactttagtctcctgtacagagatgagctggatgtgcctgaactagttgcaagtcattgggttgtaccagcgatagtagcagttacaggctttgtacttattttgagcatttggcggattcatcataaacggcggaggcgaaggcgatctgcctcgggtcggttggccaacctatattgttaatgaggatggaatttttgaagcaattttttttttttaacttttcacaatttttactgctgtactgttataaatttgaaagttttgacagcggcagaac

SEQ ID NO: 57747 - DNA, 563 bp, Gossypium hirsutum
  unsure (1)..(563): unsure at all n locations
  Clone ID: AW187147.1
ggaagacgaaaatcaacaatggaaagatctacgggctctaatttgcagattcaaggacaaagaactcaatccacagccattgttaaggtacaacaagaaccaagcatcaagatagaaccaactgtgggggggcagctcctcaggaagctctttcaaataattttcttcgttcaattgttcctcgtctccatcttagttatcgtcttaactatccgcggcctcatctatgccggcagtaccgatcgtttccaccccaagaaatggtaccctccacttcttgtttcaacggcttctgctggcatcgtttcttttatatggcaatccatcactttccactgtccatcaaaggccatcaaanctgtcttctggtttacgcccctgctaacatgtgctgtcggtgtgctccatatactgattggatctcctctaagtttggcagcaggtacaattgcaatcatttcaggcgtcatccaatccctctatgcctgttgggtgaattccaaatttgactatgcatccaagatcctcacagtttccacatctgctccaccttataacaccaa

SEQ ID NO: 57748 - DNA, 561 bp, Gossypium hirsutum
  unsure (1)..(561): unsure at all n locations
  Clone ID: AW187140.1
cgagaacgagagcggaaagaaagaaaaatgattaatccaattttttaggttaaattcttgattatttttcaaatttcaaggttttgttagccattttgatcacacgtctttaaaactccttggcatttaaaaatgatggagaaatcgtagcatggaaaaacagaaggagttgaatgtgttagatttgaattctaaacttgttagatgtcacatcttaatgtgattgtatgaaccaacgagacaaacacaggttcatatctttgttttttgtggtagaagctcgatggatatgttttctcattgctcataggcttaatgattttaagtctactactctttttggttgtcagggtantttttatcaaaccaggaatctccatttacggatcttcctcaaaatgatgtggaacttacaccagataaagtcnaggatgaaaaggaaggaggtcctacatttcactgtgacctttgtgatgcaaaactagtttacacgattgctcaagcattcctcccagggttatctacagcttgtgttgacaatacaactggtgatgttttcat

SEQ ID NO: 57749 - DNA, 551 bp, Gossypium hirsutum
  unsure (1)..(551): unsure at all n locations
  Clone ID: AW187129.1
atgacatgatattcttaattaaccctgaacgtccccattggaagtgttgtggaaaagatcagtcctctgttcagaaagataagtctagttcgaatgaggttggttccacaaacagtgatagtacagccgtaacccaagtttcagatgtttctgactcatccaaatcttttaatgtatctaataatgatgctgactctgagattcctcaaatggatattgtatttgtacatgggctacgtggtggaccttataaaacttggcgcatagctgaggacaaatcctcaactaagtctggcctggtagagaaaattgatgaagaagcagggaagcttgggaccttttggccaggtgaatggctttcggctgattttcctcaagctcgcttgttttcccttaagtacaaggtttgtttaagtttggtggtantttccaaaagttcaaattaatagtttttttttttttgcaagcaattcacttctagtaatgttgaggtcttcancaactgtttctcatacttcaagatctatcttattttatacagacgaacctac

SEQ ID NO: 57750 - DNA, 366 bp, Gossypium hirsutum
  Clone ID: AW187124.1
taggaaatgacttaacttaaaaggcaggtgccgccgctgcgaggcgagggagtaacttgtctggtcttgcggtgcactcactcccgttacgagaatgaaatgacgccccagctcgactcgagaccaagactccttacaactcgcaccaatagcggcgctgagcggccggagattgattgaaaaggcagccctgccgccccccctagccacctacctactcgtgctcgtagctcgatcgggggtcaagagtgcggtccggcggaaaaacagaagtcgtccgtatcaagtaatacgtgaattgctcagtagtgcttcgccactaccgtagctgaaaaaaaaaaaaaaaaaaaaaaagaaaaaaaaaaa

SEQ ID NO: 57751 - DNA, 539 bp, Gossypium hirsutum
  unsure (1)..(539): unsure at all n locations
  Clone ID: AW187123.1
aataacatatccgtagtcattcgacgacagtcaaggtaagtctttgagtaatgaaacttagcttatgatttgataaaatcatggtatataagcataataaataaattgtgacctattggttctacttgaattacgtagtgggataaataatttgtgcatatgacttgtagccgaatggttatagaaatcatgttggatagcgaaacgaaatcgtgttctttgtatgtggctattgagccgaaagtggaatggttgataagcatgttgtgcttgtgttcaaataatgtaaatgaaatgctaatgtgttatgatatatatatatgtgtgcatgataatggagaattatatccgggctaagtctcgaaggcattcgtgctggtgttatatccgggctaagtcccgaaggcattcgtgctggtattatatccgggcttaaagtcccgcatgctttgtagtggtgatttgattttggttttaaatctancaaacttaatgccgatgattggagtaagattatgatttcgaatgttcgtagtaat

SEQ ID NO: 57752 - DNA, 578 bp, Gossypium hirsutum
  Clone ID: AW187109.1
atgtaatcgaagctctgcagaatctcttcgccatcaccatctgcatctgcatctcaatctccattgtcttcgatatttttcagatctataatcactctagaaactaccaaacccttctcatttccgatctaagtattcatggctgggggcgccgagatcaaggcaccgtcgcctaacgtgaacggaaaggcagagattttgaagggtaactttgaacctaccgctattgaagtggagccgttgcctccggttgtaccggagaatggcgtggacaagccgtcggagaaaagtaggaacattgtgttggggaggaacgtgcactccacgtgcctgaccataactgaacctgaagttaatgatgaagtcactggtgacaaggaagctcagatggctggcgtcttggctcgatatcgcaaaaaccttatggagcggactaagttacagttaggttatccttatgatctggacttcgattacggtgcgttagcacagttggcggatttctcaatcaaggatcttggagatccattgcttgagagcaattatgggagttcatgcggggggtgggaaattggtcc

SEQ ID NO: 57753 - DNA, 582 bp, Gossypium hirsutum
  unsure (1)..(582): unsure at all n locations
  Clone ID: AW187104.1
gaaaagagaaggcatcctcctcctcatcctctaaatgcaactcctccagccctttttccatgactcccttcaaaacagcaaagaaaccaagacaaatcccagaaatcggtagaccgaattgaaaaaataaagaaaagacactgaaaaaccttaggaaaaactcctaagaaacgtgccaaaacaacagactttgcatttttaattggaagattgaaataaatttatgctaatccttttgagtaaaatctcaaacacatataacaagtaatacaattacaattataaatataaatcttaaaaaatatatattcggttaattagaaccaggataaacaaagttaattgaaaactagaatacatttgaacttagaccatgataaatctaaacaaagctctcacatgatatttatgcatgatgaaagttgcaccataattatgaagatcctaatacctcaacttacaaacataactaggggtggcaaaaaaacaaaagaccttaaacaagatgggtgtcnaattgtggtgggtcgggatcaaatttaggaaaaacccaccttgggataatttttanaatatcttttt

SEQ ID NO: 57754 - DNA, 583 bp, Gossypium hirsutum
  unsure (1)..(583): unsure at all n locations
  Clone ID: AW187103.1
ctttaaaaaaaaacaaaaagaaggctcttaacctcccctttccttattgcgatttccgaccaaactctggctgatcaccaccgcgtgcgccgctgtcaacaccaccgtatacggcggtcggatgaccaaaaacctctgttttcaggcgaaatgaaaggttctaagatggtcgtacgaaggaagttcgtggtgacgtggatgaggcagttggaggttgcagcgcaaggatgacctagggtttcctaggttggctgattgcttaggttttgggccatgggtattgggcttgacagtcgcgcttggaatttaggttaaggttattaggctcgtaacatggacattggactaataagtttggacttttattgatttttattttaatttatttttggtttgttttctataatgggctcgggcagattgggccttctacactcactaagtgcgtgactaggttctttangaaagtacggatccaagggatgttaccaattgctcgatctattctttcaaatatccctcatctttgccatgtgaaaaaaggtcttcggaatcttaaatcctgtaactcatttttttcact

SEQ ID NO: 57755 - DNA, 576 bp, Gossypium hirsutum
  unsure (1)..(576): unsure at all n locations
  Clone ID: AW187102.1
ggcaaaaccaattagggattctagaaaagttgtcctccacaaggtaattttgcctcctaccctcttcactcctctcctctcctttccttttgtttattgttttttggtgttgtttttcaacctcgggttcttttttgttttagttcgaattgatggctctcttttttttttctaaattcaatatcggggttgaatttcagagattatatgacatttttgttactgtttttggtattgttctccttatgcaactgtaagtttttgagcagctgaaatgaatacattttttttttgatatgcgagcatgagataatgaggtggaagtaaggaagttttttttatatttgaatttcgtctgagtttatgggtaaagtggattttgagtgaaatcggctgagaaagaaagaacaaaaaatgaaaacagaatcgaacactgggttttattatcatgaaaatggtttangttctatcttgaatcggcacggtatatctttccaaccagctggtattgatagtagttcagaaattattccgatgagtggttactatgcatcactgccgacgatcttgcctggc

SEQ ID NO: 57756 - DNA, 625 bp, Gossypium hirsutum
  Clone ID: AW187092.1
cttatttttattatccaaacgccattaaagaaagaaaaaaaaaagtgagacagatatatccaagcctaaacaaagtaaaaggcacacactctgccgattaaaagatcgattaagcaaaaaagtaaaacaagtttcgattgaaatctagggtttgatccatccaattttcttcgatctctttttttttctcttttagtttcttctgggtttccctctttaaacaattatcatgaactgcgaagtctgccaactcaaagaactggaagtggagcattttgaaattcgcgaagttttgcgctgcattttacatacaatagtgtttcatagagcattaggtctagttcggcccaaagatgtggatttggagctttttgaaattacttatgtgcaatgtggggatgtggaacttgagaagaaaatagatgagaagattgatcatttcataagttgggtggaaaaacatcccaataagaaaagtcagatatgcttatcgttttatgaggtgaaaagcaagcagccatcttggttcactaataaaaccgagcgcttatattgggagcaatggtatatcaatttgaatgttactcaacacccaaaacaccattcaagcaaatctcatcatacc

SEQ ID NO: 57757 - DNA, 627 bp, Gossypium hirsutum
  unsure (1)..(627): unsure at all n locations
  Clone ID: AW187086.1
cttctttacaattttcaaaagcacagaaataaaaaaagaaaagaaagaaaattacatcttatttgaaaccgccgacttctaaacttttctctgttttattcgtttaagtgatgagattcagatccaagactttgttatttccggtgaattggccggggtttacaagagctttcggttagggtttccaagagcaatttggggttttctgtttttgttccttttttgtctgataatgatgacgggggaggataactataatggtagctctggtttcttgccaactggttaccccgcggccgattttgagttcgatggtttaagcatcgatctcgacgacttcaatcgcattcttgaagagactcctggttcgtttcagagcaatccagaagatccatcatttagaaatatatctcaagggaagtcggctcctgaaaccaaccaatttcagagtgagttgctttcatcggagtttgcttttggagatcttttaaaatatccttctgaggcttcanatgccnaggcagggtctctaggtggcttatttgattatcatagggaattggaaccgcctgcacatgattctctggtccagacatcctctgcaagttttcgagacttcttttcgaa

SEQ ID NO: 57758 - DNA, 612 bp, Gossypium hirsutum
  unsure (1)..(612): unsure at all n locations
  Clone ID: AW187082.1
aagcttcattatcacgcttgtaaagcttcagttgcagttctgtctttatatttgattttgacattatttatttggtttttgaactttttttatgaaaaggtttcatgattaattgagaggcttctggttaaagcaaagcggctctttcatagaaactgatgattgattgagagagtgtgagcgaattcttttagcaaaatcatggcggaagtgagaggagcaaacacgtggcgggaggaactggcgagtttagtggaagacacggggatactatacaccggggaagcggccactttctcgtcgttaccgccatttaatccggaaaaatcgacggcgatggcggcggcggtttctgagactgatcatgagacggagccgcctgagactttgaaggaacaagtgacggaatttttgaaatcgtggggcgagatggttcttgaacttggaagaggatgtaaagatattttgcagcaaacggtagttacggaagattcgtttgtagtacagaagcttggtggacctgtcgctagggtctccantcgattgaggttcttgaatgagttcttgcctgaggatcgtgatccagttcatgcttggcctgttatcttcttt

SEQ ID NO: 57759 - DNA, 559 bp, Gossypium hirsutum
  Clone ID: AW187072.1
aagccgcaaaggttacatatgaaaaagtgatcccacacgttgtggactttttacaaacacatggtgagcaagctaggtttcaattcaccggtcattcgctaggcggaagcattgctgtactcgttagcttgatgctgttaatcaggaatgtggtgagatgttcgatggttgagcccgttgtgacctttgggtcaccatttgtgttatgtggaggccgaaagttacttgatgaattgaagttggatgatgcccagatttacaatgtcataatgcatcgagacattgtccctagaggcttctccagcaatattcctggttttcatatctcagttctcaagcttttcaagcgttccttacattcacacacttgtctaaatgaaaataaatttatgtactctccgctaggaaatctgttgattctccaaccaaatgcaaaatcatcacctgggcatccattgcttcctcctgggactgctttttatgctttagacaccaccggatataaagacacttccaatgctgccatcaatggcttccttaattctcctcacccacttct

SEQ ID NO: 57760 - DNA, 503 bp, Gossypium hirsutum
  unsure (1)..(503): unsure at all n locations
  Clone ID: AW187065.1
gggagtaggtgagtgagtgagtcctcactgacctgagcgatttcgatcacctagcaggccttttatttggtaggtaacatcgccgaagcgtatcatcagaattaactacgaaggaagaaactcgaagtgagacggcaccatctcatcttgtgcaacgcaacgatagttggccctctatcatcttctatccggtaaacttggtaaaagggccccgacttatttccagaattagagttcgaccgctgctgccccttttttgggggggatcaagttccttgccaactatcgaccccgatctcttttcatttgttttgggtattaccaaacctagcctagccttcgtcaatcacactaaagcagagcaccaactatggcaaggcccccttaagggttaggttagtcaatccancccgagacgcgttcgttgaaaaaaccgccgtaggaatggagacctttcaataaagcggaggcgaactgatcaacgagaaagaggccctactcac

SEQ ID NO: 57761 - DNA, 502 bp, Gossypium hirsutum
  Clone ID: AW187060.1
cggcacgaggaactctctcactttcctccttccattcttgtttcacaaacagccacagcaatgcctccaacacatcaaagttccagcaccaccaaagtgtccactttcttctcagcaactctgcttctctgggtgatctctgttttcttccaaatcctcttcaacaagcggagggacctcctttacatctttgctgggggttgcttttaccaatttgccaattgggtcattaggttttccgtctctcgtgaccctctctttgttaacacctctgtttctctccttcactctgccgttacttccatttcagtggttttcattctgcttaatcaatggtccttaaccagtttcaagaggaggtttgagcataaggaacttgttgagggtacctggccatgggcataccaggctctttgcttttcatgtggttacttcgcgtatgatcagcaagatatgctgcagtaccgactatatagtggctttatcccttccatcttaatct

SEQ ID NO: 57762 - DNA, 505 bp, Gossypium hirsutum
  unsure (1)..(505): unsure at all n locations
  Clone ID: AW187056.1
gccactgctgcagtactcgacatttccgggaacaagttttatggaagtctcacgactgtactcagacggttcagttctatgaatttgtcggaaaactattttgagggcagtgttccagatttcgtgcttggcaatacatcactcggtactaattgtctccaaaacgtgtcaaaccagaggactttgacagattgtgtatcattctatggcgagaggggcctgagtttcgataatttcgggcctccagctcccgaaagtgggaagagtaacagcaacagaaatagaattatattggctgcagttttaggcggagccggatttatcatgctactaacgctgtttgtattgctggtcctacttgtccgtacacgaaagagagtaagtcatanagggattgatgtangaccagtctgtgctgaaacaacacctccttcacctggattagctattaacttttcgagcctaggtgatctatttacatatcagcaacttcttcaagccaccc

SEQ ID NO: 57763 - DNA, 508 bp, Gossypium hirsutum
  unsure (1)..(508): unsure at all n locations
  Clone ID: AW187053.1
atcagtactggacgatgcctgagtacaaatgctactggagggtactgaaccctgagacaaaggtttctcttattttcgggccacttgctgctaggaaatatgggtctgatatgaccctgtgggaaagccttcaagggagaggagacccctataaaactctgctgagggaagccacaacggctcttctcaactcatataacacccttcaattcccatacaactcaattggtgctgtcacacgtaccaactgggccttgatgggttcaaccagaggtgtcctcatcactgctttacgcttcataagggctaattccggttctggtcgagtcacctgcaaattaaccccttgcaaatgataatccataatttccgattacattcctgattttatttacaggctttttaaatttgtttctataatttctatatcattcatcatgcttacctatattctgagaataaaattggagtcccccaatttcatacnnnaaaaaaaaaaaaaaaaaaa

SEQ ID NO: 57764 - DNA, 737 bp, Gossypium hirsutum
  unsure (1)..(737): unsure at all n locations
  Clone ID: AW187052.1
cccccccgccccttcattcncggtacccgcgctccttcaagtctacggttaccagtcccttgatatccaattcggaacttacgcataaacgtctcataacatctgaacccaaccatagttcacattaggatttacggttttttgttttcttttctgtgggtgaggggcggaatggatctggatatgaacctcaacgcccctcactcaatgggcacaacaatcatcgtgagtctcctttactatggtgcgtgtctgtctctcggtcgccgaactcttcctaccactcactcggtgatcttattgtgtgcgtgaatccgcgctatctctatctaatatctatcacagtctcacctgtataatgttcttatctcttgtccagtttctggcactcccgcctgactgtattcctcactatctgtcctctcgaactactcttccgttcatcctcccttcattcatacactacccatacacaccttggggctagccttccatcctcgtctaaatgtcttcttgcttaaccctctatctatgcctatttatcctcacctatatactatcaacattcgctccaaacctcggtctctacttgctcggcacggtgtcgactccctactcaatgtgcgggttttttctcgcactccctcttgccgcaacgttccttaactttccgaccgtctccatcccatctggctccatttacctatttcggtcttcccatcctgctcttacgcatt

SEQ ID NO: 57765 - DNA, 543 bp, Gossypium hirsutum
  Clone ID: AW187050.1
ctgatttcatgcaaaagattaggctaaaatctgggtcatcagcatcatcagctgttattagaacagctttgcctttaccaggtccacctttagggaacactgcttttcctcaagaagcttattttgaaatcaagattttgtattgccatggtgatgatgatagtgggaagctcaaggaattaggtgagaaaacaaaattgatccatgaacatgaagattcccaccatgttattaacaaggttgatgaattaaaatctgcaactaaagatgatggaaaaggtgaagaacaagtgatgttatcaatgggattaacagcaggtggttctcttccttcgaagcttcctggtacttatccaggttccattggtttcaattcagatggttcggtctttcttgacggaattaagcttattttcgaatccgagaaagaagactgggggaaaccagggaaagtgataggttgcggtttcaatccgaagcaaaagaaagtgtttttcacattaaactcggagttaatacatgtaataaactgtaagtctgagc

SEQ ID NO: 57766 - DNA, 594 bp, Gossypium hirsutum
  unsure (1)..(594): unsure at all n locations
  Clone ID: AW187046.1
agaaaaaaacgaagtcaccaactgggcggatctccaatccaacctataatgatccatgggtaaccccctcacctgaattcaatgtgggtctggattccggataaacatcgaaatagaaatcacttaatcaccatcttccacatccccctctctccagaacccgtaataccaaaaagggactgtcctaactccaatcctttctacttctcatccatatccgcaaacccgaatctcccttcaacaacgttttctgggttgctggtgtgttcgatatcctccccttgaatttgctgcatgtctcacatctttactgggtcctgacgcttactacccatcgcggctcgatcagatccacgctttgacactacaagctccagactcgtgctcccactttggtctcaaatttacagaaaaaggcatcctaattcaactggcttagatttctgctatgacacaaataatgtccctccgtcccaaaatacgggatgtcacggatagacttgggagcccgtctacgcgaaatnttgacgttaggtccatggggcatcataagggaccactccctcgttcgttactctatatgcacaatgaacc

SEQ ID NO: 57767 - DNA, 646 bp, Gossypium hirsutum
  unsure (1)..(646): unsure at all n locations
  Clone ID: AW187037.1
cgcagcgccacatgggtggccagatgcagcaaagcaatgctgcagcggcggcgctttacgatcacgccggcggaggtggcggtgggtccttgcacaatgcgggtcctgccggcggcgatgctggtgatgccgttatggcgcggtggttgcagtctgctggattgcaacatctggcctctccgttggcatctagcggcatcgaccaacgcctccttcccaatctcctcatgcagggttacggagctcaatctgcagaagagaagcagaggctttttaaattaatgaggaacctcaattttagtggagaacctgggtcagagccgtatacaccaactgcccaaagtttgggagggccgggtacatctgatggtttttattctccaaagtttangggtgattttggagctgggcttcttgatctccacgctatggatgatacagagcttctttccgagcatgttatctcagaaccttttgagccatcaccattcatgcctagtttgaataaagaatttgaagatgaacttaatgtaacaactaatcggcagcaaaaggagataagtgatgcagatgcctcagcttcattaatttctgccaatgaaaaagagatgagtgcaagggannnatatgttgctaagattaaagt

SEQ ID NO: 57768 - DNA, 654 bp, Gossypium hirsutum
  unsure (1)..(654): unsure at all n locations
  Clone ID: AW187033.1
ccttctccttctccttctccttcctcttcccttcattgtgtccccgacccaagattcctctttgtataaaaaacaaccagcagtagcttagttgacgaaaagaaaaaagccctatccattgtcttttgagaaatgaaactctcatctaaaaagcccctgccctgatgtattcccaattcttcctgaaagacgggcattctcaagcagcggagtcaatagcaattggcatccttacaaagaaagatgctcaagaaagaccagtagcagcctagcccttttcttgcgaagaggggattatgctcggcgaatcgacatcatatcacacacagaggtaaggaatgcggaaagatgcatanccttgctaaaggaatgcctcagggcatancaaaaaaggtaggactagttcttcttcaattgcgaaaactgctgattcgagaacaaggacaacttcttccttggcacagctaccagccaaagcaaaacaatttggtgattttttctcttcaattttttcgtctatttcccttcagcgatttgctttcatgggattagctgggatcctgatgaggttcaatttgtgataaagttaatatnttgtgtttgaattaggccttttgatgcgtttgattttataggtatntgattttgaacccc

SEQ ID NO: 57769 - DNA, 619 bp, Gossypium hirsutum
  unsure (1)..(619): unsure at all n locations
  Clone ID: AW187029.1
cagaatttttcttcacctgaaccccacattaatggcaagaaagggtttagtgactattatgatgattatctttggctaggttctaaaggaaatggtggttcaagcaatctctatcctggtgatataattccttttacccgaagacctcttttcttggtcattgatagtgacagcagccatgcattcaaggcaggtcttacatggtgcagaaagaggagagaaagctgccttactgctttcgccatttagaccaatgtttaaggacccttttagtgctgatattacgcagaatggaagtcagtttacctttttcttgactgctcctttacaagcattttgccaaatgactggcttcgccttatctgatagtgatataaaagttctaaaaaatgctgaaaacatcttgtctactgctttttccaagtgggaagtaattctctgcaagtcactaancctggatcttgttttgggcccaattttgttctaatccttttttaaggcggcttattattaaattcatattctgtcgaactgtgctctctgctttctgtcctccaaaaaagagtgaacaatatgttactgtttgcctaccacaacttcctaattctctgtctccaat

SEQ ID NO: 57770 - DNA, 668 bp, Gossypium hirsutum
  unsure (1)..(668): unsure at all n locations
  Clone ID: AW187015.1
ctcattcttcttcttcttcttcttcttcttcttcttcttcttcttcttttttacttctttctggtcttgtagagacttgaaaacaaaaatctgattttgttcaatttgtaaaaagagggaagagttcaaattatggacactatgttttaaccaaaattgtatttttcaagggctattcgtaatcttagggctgatacgcagatccgcttttatctctttgttttgtaagaagtaagaaccaattataaacattttacattgttctaaagaaggtacttttttccaagtaaaaacctctgttttcagaatttcatttaacttccccaaaatattttttggctagggttatttgtatctttttatcatacatttacttcaattttatgtctctatcaaatttagacaattacatattacagaaaggtattttttttcattgttggattggtttagtttatatgcattttgttttaattgtttttgggtcncgaaatttggttcatataattcacatattgatccgtttctcggttcgtttgagttattttcttcaatttggggatctgggttcttgttgattgtactttaagctttttgggatctctcgaattagcaatctctttgggatatccttttgatttgggatctgggtctttctgattcactgt

SEQ ID NO: 57771 - DNA, 583 bp, Gossypium hirsutum
  Clone ID: AW187004.1
aggaactactgaaatccctgccggaagaacaatcttttaaacaaaggggaaacgtgaaaaattctctttaagtcaatcaggcatctgcccaacgcgatgaaccccagtctatctcactacatagggaatcggggattaatgggagaataaaacgacgtctataccgacaatcccccaagatgtggatccgactatttatgcatctttttgcagatccgctagttccttctctcacctttagactccggctcttaaactgcaataactctcctcccgctctggcatccgccatcgccttcaacttctctctccctccatctggagacgtccttatggagtatgcaaaatatcagaactggattccctcgcttaccgccataatgaagtctacgatgctccatacccctcaacgtgacctatagctccatgccaactaccgccttcccatcccgcgatacacttcatcactagcgatttcatagtctctacaggctcatcaggctgttcagcctggctcggaactcgacctgaccatcgtgatcccccgtccaacatctcagtgattctcgttccttctaccaac

SEQ ID NO: 57772 - DNA, 631 bp, Gossypium hirsutum
  unsure (1)..(631): unsure at all n locations
  Clone ID: AW186974.1
tttaaacagaaggaccaatttactctttgatctaatgtacagttaatttgcccattttttgagtaaaagggcaaaatgtaatctaactcttaatacaataaactttatgatacttttatctcattatatctctatacaatgaaaggaagtatctttttagccattttacatgtacattacattgttattcatattgaaatcactgcatatatcatccccagataaggaaccaacgaactcgttcccagaaatttgggtttcgaaatcgaacagtgagctagacatttcgtttgccgacccgttgcttagtccatcgtgaagatcactgccaccgaatgttccttcgtttaacaagaacgcgtccataaanaggtcttggaagtttgaacttgaattgtgattaaatccataagaggtagccgcggccggaccgcattcttgatcgagcgatagccattctgcgaataaaacctttggcagggggcttctttgtggctctttggagaaatcgataacatgctgcggaacggctcgatcagtgcttaccgagagtttatcaatgtgattgaacgattcataggttggcatttggtccgagaaaattcgaagagaaggtgtggattgtntgtta

SEQ ID NO: 57773 - DNA, 373 bp, Gossypium hirsutum
  unsure (1)..(373): unsure at all n locations
  Clone ID: AW186965.1
tttttttttaaaaggaaaaaaaaaacagaattgattaatacattaaaacgcttacattctgacaaactcgtaagtactttgatgaaaaccgctgtaatacccaattttagcccgggcttaaataaacaaaggtccccagtccatttaaaatcttaatttacgtggcccaattacaaatgttacaagcccaaattgctaaccctattctgctagtccaaaatacaaaacagaggcagaaagaaaccctagcagctagcagcaaaatcagcagccacaccccacacacgtcgcaataaccgtcgcacgttctccttccacgccgcgcacaatgcctgtacctgcaacnnaaaaaaaaaaaaaaaaaaaaaaaaaa

SEQ ID NO: 57774 - DNA, 597 bp, Gossypium hirsutum
  unsure (1)..(597): unsure at all n locations
  Clone ID: AW186964.1
ctcgttcttccagaattggtaggacctgatatcggatctcgacatctatgaattcgnaacaattcacggacaaaatctgggacctacactacaatctcatctacacctctccctctccatgcgtgtagcacacttccgtgcctgtgtcaaaacctcagttccacccgatcagaagaaactctactccgacttcatcatcagagtcgcactatctaggactggcttcattctcgtcgaagaatttaaaatctaccatcgtgacttctccattcctcacgcctccagtcttattcctatctcatctgctcactagaatctctacgatccctctaattttccccaccatatacttccaccacctctctcacacatatgctgtcatcgcccgaccaaaatattgcacgcttcttcgtgcattcatatctgctgttcgtcttggtgccaaatactgcgttcttcatgcttctctcgatttcctgtgaaatgttcacnatgtcagtcgttacctctcacctacccttcttgtctgttcacctatcattcaatctggatacatacttcatcactccaacggagttcccttgaatgctactaatt

SEQ ID NO: 57775 - DNA, 562 bp, Gossypium hirsutum
  unsure (1)..(562): unsure at all n locations
  Clone ID: AW186960.1
ctcccaactcgactgacccatctgatccaattgcacccctaaggatggagtctccaattgggcaatttttgtctcaaatcttgataagtcatccacatcttgtgctggcagcagttgagcaacaacttaaacagcttcaaaccgagtgggacactgagcaaaagaaggaagaactctctgcatcaggcacggatttggtgttgtatangaaaattgctgaagttaaggggaacgaacgaaaaaaaactttggaaaaaaatctctatgcattggttgttctgaaatttaatgaatcccaagtttccttggtgcctgcaataaatccctcttccaaaaattcctccagttcaattaaaacttgggcgaacccagaaaaaaaattccagcagcttccctcccctgaaacctatgaaatgattcaaaaccccctaactctcattctgggaaatccaataaatgatatccaatccgttgcacagaataataaaattaaggtctggcaagtctatactgcatccgtaatgtttgggtatttcccaaaacgggttgacgaacgaattcc

SEQ ID NO: 57776 - DNA, 627 bp, Gossypium hirsutum
  Clone ID: AW186951.1
aaaaacagaaaagaaaaatccacattcatggttgccgccggaactgaacttaattgactcgcttttaattgatactccagatgctgaaggagaatccaccgtgcggtctctctaaatctctttctttctttctgtttttatttttggacattttgatgcgtggtgatggcggcttcaaaggataccattaccgacgacgggaatcatacggttgaactgaccgtgcttgacaacgaggaatcggcagctaatggtggctctgcagcagcgtcttcggaggagataacacctctcttgacgcagatcgagaggcccaagatcaacatcttttctgtctctcgttcccgaagaaaacctagggagttagtgataaaagctccagaaacagagatatctccggtttcacagtttatgttgtgggcatggagtggatccaaatattctggtctactatgcatggccttgtcatctgttatctactttgtcatggaaattctttccgaaaactttactgctcagtcaattcctttatttgagacggcatttgtgagatgtacagttaccttgatattatcatatatatggttgcgaagaattggcctgccaatatttggagcaactcatccc

SEQ ID NO: 57777 - DNA, 629 bp, Gossypium hirsutum
  Clone ID: AW186949.1
attttttgtgctttaatttgcttcattgtggcttatttgctaaaatgtagtataaaaaaatggatatttttgttaagaaatggagtcccatgatgccttcttttgatcaattaccaactttttagttaccaaaattatgttactcggtctcggtagttgagtgttggatacgtgtatgtgtttaacatggcaatactcaattttcttttatttggaggattatactcttgtattcatgtccgaaaatgtgggtattttttgggaaaatggagagttcgcgtggtataggttataaacatttgaatgttgatcgatggttgagactctaaacaaggatatcagggtcctaggcgcgataagtattttaggggaaatgaaaagttcgtgtgatataggttacaactttcaaatctttgccctaaataccaaaattcaagatcctaaagaacaatgttttaaggaaaaccaaaagtgtgttgtatataagtcacaaacatttgaacattgatcgatggttcagaattcaaaaaccaaaaacaaggtcctggtgataaataattttaggaaaaccaaaaatttgtattatataggttaccaacatttgaatgtcgatccatgttcaaagcctt

SEQ ID NO: 57778 - DNA, 636 bp, Gossypium hirsutum
  unsure (1)..(636): unsure at all n locations
  Clone ID: AW186948.1
gtggctgttgcttcttcttcgtcttcatccttggctgcttcctctgcccctaactcaaagcatcaaaggccggtacccgctaattcttgggctgcattgccattgcctgttactcatcgacccttcaatgctcctgcttctataccataattccaatggttttgggagcatataactatcaaaatatcaattatcgtggttaggacggagttaactctgatcagattcctgttgttttccagagctctgttaaagcgtttcccaacaaaggatancatangatgaaggaaaaatctactaaattgaaatcataatatgatttgttcatgtcatctaatctcttggatagtttctagaaaagagatgccatctaatcgaatagtctctaggaaaaagaaacattacaatgatgaaagcaatgactagctctctgtcagcttctcatggatcacatatgggacgatctccggttgggaaatcctctctatacaagtatttggaaaataacgtaacaatcatgaccttgttagtcatttgcaatgtcaaatccacaagtacggagcatattcgatttggtcattctagaaaaaaactcacgtaatgattagtcnacagaaagagaagctactcattaac

SEQ ID NO: 57779 - DNA, 605 bp, Gossypium hirsutum
  unsure (1)..(605): unsure at all n locations
  Clone ID: AW186938.1
gagagaaatgaaaagggaagaaaaaagtgaagaagggttagcagaaaaggaggaaaatttgtgtgaaaagttgaatcggaggatattattggtagggaatancaaaacagaggggccctgtactccatgcccttcttggaaactttacgaccctcagcctcagcctcaggctctctcacatcatagctacatctttcctcatcctcctgccgctgtttctgccagaaagttagcggcttccttgtgggagtttcatcaataccttcatcatcatcatcatcatcatcatcatagtcaacccaaaatgcatagaggtggtcttaacaacactaatggtcgctaccaccaacgccaccaccgcaacagtcttctcaagaacaaagccatcgatttttctcanttcttggatgatccttgtcncagttctgaccctgatcagccagaaagtgcaagcggtttgaggagacatattgctcaaacactgatgaaacaccatcgatcgtntgaaaaaaataaccaggccctacagcctgtatcgccgtcaagctatggcagttcaatggaggtggcaccttataatcctgcagtcacacctagcagttcct

SEQ ID NO: 57780 - DNA, 557 bp, Gossypium hirsutum
  Clone ID: AW186931.1
agcaaggagtcatgattgttaactgcgttacactacttaacttctgctttaggagtctgggtattgggaaagtttgggtttgtacatcatgatgcgtatcacattggatactgccaaaaaatttttgcctgctgccaatgtcttctacctcgcgatcttcacaaacgacaatcttttgcgtcatgccaatgttgatacttttatagtgtttatatccttgacaccccttttggttgcattaactgatacaacctctatgagacaaccgtgcccttcatagttaacatctatttccctgttgatcattctgggtggttctgttgggtatgttgccactgattcatcatttaccttgactgcatattcatgggcgttcgcatatctggtgacaattactactgatatggtgtatatcaagcatatggtgattaatcttgggtcgaacacctggggtttatgttgtacaacaacttcttgtccttaatgatggctcccatattttgggttttgacaggagaatactaaaatgttcttgctgctttgggaaccaatggtgg

SEQ ID NO: 57781 - DNA, 554 bp, Gossypium hirsutum
  unsure (1)..(554): unsure at all n locations
  Clone ID: AW186930.1
tgttatgtttgattagggatgcaaaatctacaatccatttgttctgaatggaggttttttctttaaatctgtcgcgctatcttccatcagtagttgtttgatctctctcgttttaagcacacaaatgactctttgcctccccttttttgccagacagcgcggatctctggttggagatcccgagtgactgtttaaggttttagttgcagtcatggtggtcgactttttggccgttgaatagtcagccaccatcccctacactgtccctgactgtgtctcaatgtcaaactccagacaatttttccagtaggatgaggacaagccatcgaaataagaaattccacggggcctaagggtcgagtcgtgctttantgctcgagtccaatgatggttcgcattctctaagccctagtgacttttcgtctattgagtttctacaagaacttaattttgtcagggattccattgcatatgatgatttaagttggagatatttccactatcatggaagcaatgaattgtatagagacacaccatatcataattgatggcaa

SEQ ID NO: 57782 - DNA, 586 bp, Gossypium hirsutum
  Clone ID: AW186924.1
attaaatgcaaagagggtatcagcaagggttcgaaagattccaaaccaacaatcgttgttcgaaatgaggtggggaaggtgttgctaaatgcattgctatatcctgggatcaaaacaagtgcacaaaagaattcccttgttgcaatatttcatacctcggatgaaggtggcgataaccaagagatagtggcacgtaccttcttaattagaacaaaaacagaggatgaccgaaacaaactggtaacagcaatccaagagtatgcaccagcctcgtaactgtatgtgaaatccattattttgagccccagaaaatataatgtaaacttgaatgagtgtaattttcctggaatattactcctttacattttgccagggtcggcttcttagggactagaccagctgtgttctggtggccccaaaaaaagcaatggggcctatttcatagtccggactaaaagagattattatatattctcacagcagttgcaccataaacagagattacagtgttcatttatctgcaaaaaaaaaaaaaaaaaattctgcggaacaaggcaccattggcatcgccctctccaaaaatctc

SEQ ID NO: 57783 - DNA, 711 bp, Gossypium hirsutum
  unsure (1)..(711): unsure at all n locations
  Clone ID: AW186916.1
ccgtgtcanccgtcncgcactatgtttgtgggtcttttcagatnaaagnacnaggactcgacccaaattcagtttatgtgattcttctacaagtgcangaatccatcaataaccctcctcataattaatacggagtctcgtcgtggttattttatggcactggtcgggagggattttcatcaaaaatatatcctaacacggtgtaaattgtatgttgtcactccctaaacgacaagggatcccctgaatccggcatctacgcaaaaccatctctccatctcctcattctcttatacgcttttgttgacagtccaggatcccacacgttcttcttcgccgtcctagtatctacaatcatacccaccgtctctctacggggattagaacttcaccattatcgtcagattattccctgtttttcactctccttgtcatttataaatcctccttctacctacgactcctatcgtcatcagacgtctttcacctaccgatctattcacagtctactctactctcaccccctcccaccccctttaattaaagctcccctcacgttgattcatcatttacatctctcgtattccctatattatacttattccattttctcctctcccactttctctccactattcctacaaatctccccttttccctccccttttatcctcaattctacgtcactctccctatttacatcctctatcc

SEQ ID NO: 57784 - DNA, 613 bp, Gossypium hirsutum
  unsure (1)..(613): unsure at all n locations
  Clone ID: AW186910.1
gcaatttcctgcaggttttgagggtaatataaaaaaggctttgattgtctatgaagacatttcaatcatggaatgcactggtcaagaaaaaaaatgctttagctgaagcgggaaattgtggatttaaaatgaggcagcttccatttatgggagttatttgtacagttatgttgttcattgtgtatagaactacggattatcaataccacaagacagagatggaaacaagatttcacccttttgcaacagttaaggattatcatttgcatcttgggaaattaagaggtttgcctcgtggcattatgcaagctcgttcggatttggaactaaggcctctatggtcaagcaattcacagtcaaaagctagtgttacgacaaataagaacttgctggcaatgcctgttggtatcaagcaaaaggattatgttgacgatgttgtgaaaaagtttcttgcagcgaattttaccattattttgtttcattatgatggtaatgtcgatggatggtgggatcttggttggggcgagaaagccattcacatattanctcataaccaaacaaaatggtggtttgcaaagcgctttctgcatcccgatattgtgtctgtttacat

SEQ ID NO: 57785 - DNA, 619 bp, Gossypium hirsutum
  Clone ID: AW186909.1
caacagtttcttcattcgctgtttctcagtaatggctgattatacgatggaatctgattcgcacgtttgttctaagcgtagaacaacttctggctctgaacaacaagaaacttctcttccccctcacctttccccttctctctatgaatccaccgccgaccaccgggattcgggccttcaagattgccaagaagtaacagctatggatcatagcagtccaaagaagaaacccaagtgcttttcccttctttctcaggaaaaccaagaaatgggtcttcattctttcgctccaaaggatgtctctctttctgggtttttcgagaaagaaaaggtggatgatgtggaaaacaaagagggttcttttggagttcaagaagttgataaccaagtcaacaccattgaagctaataacaaggaacatctcgggatcggtttggaatttgaggagaaaagggtggccaaaggaaaagctttggaatctgaaaatgtcttggaagctgaaaagaaacgacttttgactgagcttgaagttggaaacatctttggttttgcaacgaactcgtccaaaattgatgatggatacggcgttgggtggtacaaaggtcttgacttgcctgtt

SEQ ID NO: 57786 - DNA, 544 bp, Gossypium hirsutum
  unsure (1)..(544): unsure at all n locations
  Clone ID: AW186908.1
atagatgctgccaagcaatgggacagtgagcttgtanaaggcagatatattaaagatcttgaagataacttgagcatcattcgtcttaggtttggagacaactcaaagcctttgtttagaaaaagagaattcatagtgtacgagcgacgtgagaccatggaagatggcactctggttgtagcagtggcctcactgcccaaggaaattgctgcaggtttgcttccacagcaaaataatgcaattagaggctttttgctgcaatcaggatgggtcgtcgaaaagcttgaagatataaactcctgtattgttacttacgttgttcagttggatcctgcaggatggcttcccaagtggtttgtgaatcggcttaacaccaagctagttatgatcattgaagaccttaggaaattggttcaaaccactgcaccacattgatcctatagctagtggtggaaagaaagaacagagtgctattattatatatgatgccgattatataattccaacttgctactctgttattaaaaaaaaaaaaaaaaaaaaa

SEQ ID NO: 57787 - DNA, 613 bp, Gossypium hirsutum
  Clone ID: AW186904.1
cataatcttcatttcttgctttctctttttttatgtagagttgcctctttcgcttgtattttgagaacccatttttgtgtttccttccttctttttgaatgtcgatgcttggggatatctggaaaattaagtgcaagatactatatgattatttgattttagaatttgggttgaatgtcgtggataaaaacttcatttgggttatctcaagctttaaactttgaactccaatttctcctttaatggtatcttaaaaatatctgatgaggctctattgagtttgtacatttttggattaatgaacgatgatatgttcattgccatgaccttatatatgagtttaatcttatttaagtaggattaatctactatttttatgctttatttgtttaacaaaatattgagtgttttttatttagccaaagagagacattatcattcttttctcaatatgtaagggaaaaacctcatgggggaaggtgaactatttgagcttaacaaaagcgtgatacaaacctttagctggtcaatccttgaaagattggtcatataagttgcttcttgcactcgtcttccctctgttgccagcaagctctggctggcaggtaaagtt

SEQ ID NO: 57788 - DNA, 663 bp, Gossypium hirsutum
  unsure (1)..(663): unsure at all n locations
  Clone ID: AW186899.1
cgaaagtgaaaacactggagaaagtgaaagaaaaaaagggaggaaaaaatatctctttccgaaaaccccccaaattcctccatttttgtctgctatgtcggaatccctaactccagttccgatttacttctaatttgttacccctttttttccctacttttgactccacagtttctctacaaagattatattttggattttgtgatatcttgtgttcttcgtcattttgagtaattgaaaacatggggattcctcaaaaaatcgatgattacatgaaaagaaccatagatgattccttaggtcttccaatctccactgaatctttgcaattgaagctccgttcctccgaagaaacccagcgccgcctccgtgttcagtatctgttacttctctcaaaattgaaagagaaagaccaaatcatcgagcggtcaaaggccgaagcgaatatgaacgcagtggcgttgaaaagattcgtgcaagagaatcagaagctcgcggcagagtgtgcaaatttgttaagtcagtgtaacaaatgggagaaagagtgtttactttatgatcgtgaataggaggcgttgatggattttggaaatgaaactgatgaaaaggcnnagaaagctgaaattanggttcatgacttggaaaaagagtcanggaagtaat

SEQ ID NO: 57789 - DNA, 650 bp, Gossypium hirsutum
  Clone ID: AW186896.1
aaacgatacctgaatcagatgaatgatcttgcaaaagttgaaattcctgctaatgaagttctagttgaagtccgatccatggctcttagtcctcggggtcgggggaaaaacagctcttttgaatttgttgtggagtttttatctgtatttagaagctctgtttatcgagatggatctgactacgaaatgtataatcagttcgagcatcagaaaaggagaaaatctccggacttttctactgtgtcattgggaagcaaccgatctatggctggtcatgttccctctggatataaatcccataagaaaaaagttggaaagaatgaagaaacaaagatgggtgaatccaaacccagacaagcaaccagggcgtcactgaagaaaactgagaaaccgaaggcatatactcctaaaaggaagcaaactgccattgctgcagctggaaatgatttacctgctgccctctttgtgacattcggccctggatcctcattgcctacaaaggacgatcttatccgaatatacagcagatatggagctttagacatggaggacactgatatgttcttcagtaatttctgtgctcgtgttgtcttcttaagaacctccgacgccgaacaagccttcagcagttcacaaaatgatagtccttt

SEQ ID NO: 57790 - DNA, 301 bp, Gossypium hirsutum
  unsure (1)..(301): unsure at all n locations
  Clone ID: AW186895.1
agaattttagcatagcaactggtaacaacatttttaacgaacacaaaaaaatggagaaaggtactaacttgatgggaagggagtcctctanggaggccggggaggcgggcctccacttgttccaaatgaaaccacgccgtcttcctcttcatcctcgctgtctcccggtgacccaatcgaggatgaactctccgagaatacatccggtgaccccagattcgaccccccaacatcttcctccttgagaaaaaagcaagacgacccaaccttctcctccgaccgctctctaacatacacggcg

SEQ ID NO: 57791 - DNA, 509 bp, Gossypium hirsutum
  Clone ID: AW186882.1
gaaaaattttagcatgggtctttctatgtgtgtgtaaactgtgtatatatacttttatattgaggattctccgctatttttgcatttgtttatttagatataggtcaaagttaagataatctgaagggtgtttagctttgaaattgttttttgttcatgtgagagtccattcaaatgatagttgtggtttcttttgtctgttattgttgtcgttctcgtttggatatttagtcttggggaacctaacaaatgtggtaggtaaagagagagtgagagagagagagaagaggaataatattaataagaagaagaataagagagagaggaagatgttcacgagcgagatagttaacagtgtctcaataagtaaatctcaatgatcaaaaagcaaaaagggctgcactgatcagtgaaagaaaggaagccattattgccttttgcttttgcttctcaaagcttttcatgttttatagggcataaagaaaagtcttctcccttttaatcaccat

SEQ ID NO: 57792 - DNA, 505 bp, Gossypium hirsutum
  Clone ID: AW186880.1
attattctttaattttcatataaaagtagttcttttcccaaacatatgcgacaataaagtacagcaaaataccctaaaaagcttatattatatgaataggcatgattaatatttaatcacgtgttaattatcctcaaaaatggataaaaaatttggttaatctcttcaaggagccacccacgtgctcttctactttaccacttttgtcctctccgttatggcggcggtggtgatggtggcggcggtgttgatggtgatagtggtggtggtggtgctgatgctgatgctgatcgtcaccaagataatgtacgtggacgtggtgatgagtcttcatgaaatctactggcaccttggactcggcaacgccaccgggaaactcggaccaactcggctggacctggcgaacggagcggcgtaactccggttcaaaacgtgttctctcgtcggacagtatcatatcatcgccgtatgaaatatagcgcttcttgtggaaccgtgagttcac

SEQ ID NO: 57793 - DNA, 573 bp, Gossypium hirsutum
  Clone ID: AW186871.1
cctcgtgccctttactatcccatttcaaccttttttttccatttccactgttcttgagcagaccgatggttccagaaaacctatgctcgaggcatctctgataatctccttgcccacatcaccctttagttccatttccccatcaatacagtcagagagccttcaccctttgtattccatttctctattttatagaccttctgatgcaacttctacttcttataaacaccgatggtcccttgaatggatctggattttgcttcttattttgatcaccggaaaatcacccttaccacagtattctacccgattcctgttcttactcgacaatcatccgttgcagcccatagcactgctgcagataacccgttacacatataagtgctcgttcattcatttaagccctctgtcgcaaggtttcttgatcactaagagcgcatcacgttcttcatttctagtcactattccagaacacaattccttatgttgtaggctataaaagcagcatcaaagttcaccttgacatgcgaggtctccggtggtctccaacgctcagtttcaatcttttggatt

SEQ ID NO: 57794 - DNA, 607 bp, Gossypium hirsutum
  unsure (1)..(607): unsure at all n locations
  Clone ID: AW186869.1
agctcatagtcgtcgaaccaccttcatgcttggtggctgacggcgcacgaatagcgaccggatcttgtcgctggaggccacaactatagagatctantaagttttctctttctctttttcttattttagaaaaaaaggcttcaaatcctacactattctttaaaaaaaacaagcaaaattcaaagaatgaaaaagaacttaacatcgttcgaccctcgtccacatctccctgcttttgagatatttggactctcatcgacgtccattcaggtattattttctcatttttttattctaaaatcgcaaaacaaatcaaaggaaacaaaaataaatagataaacagattttgaaatcaccttttaatttcttgttcccttttttttagtatttcaatctctgtgtgtaaaaaaacattgtcttggtttcgggtttttatatccgaaaaataatacatcttaatttttcattttctttgcgcgttccttctgttctgtcttcattttccttttgttctgctggctttcttctttttgtgtgtttgcaggtctatggangaggtcaacggggcaaaagcttcctttttggtgcaaaggaacggtaaagccgt

SEQ ID NO: 57795 - DNA, 610 bp, Gossypium hirsutum
  unsure (1)..(610): unsure at all n locations
  Clone ID: AW186868.1
agataatccatttctcttgcttcctcactcgcccatgctcccttccatctccactcttccgcagaacccaatttcctgtaggaaactttggacaatcctttgaagatgttaatggagcagttgagattcatcatctgttgcgagaaaggggtaaacagtccttgctacgctgccaaatgccagagggaaagagggtcttggaccggatttcgtcacattatgaccagttaaatgcacttgagggaggattttggttaaaagtcccgatgacagcatttcttgccgccaacattttgatatttactgctcctatgaaagccctggcagaaacttgtgaagctgataactcctttttcaacatgcctttactgctatttgtagcccttattggtgccacagttggaggattgcttgcacggcagaggaaaggggagctgcancgagtgaatgagcanctgcgccagatcaatgctgctctaagaaggcaggctaaaataaagtcatatgctcccaccctgagttatgctcccatcggtggtagaatatccgaaaaggaaataattgttgatccccgaaaggaagagttgatttctcgactgaagagcgggat

SEQ ID NO: 57796 - DNA, 619 bp, Gossypium hirsutum
  unsure (1)..(619): unsure at all n locations
  Clone ID: AW186865.1
aatataccctcaaaagagggctgctcatcccgtaaaccctaaaccaaaaagaaaatcccagctttgaattgaattcaatggccgaaaccaagaatcttcacgaacctgcattgacctccaaacgcaagcctgaccttacctcccacgatcatgaccaacaaaccctcccccataaatcccctaagctccaaactcccgatgaaaccatccaaacaaatgaacaaaagcaggctctcgacccttctgcagacaacgattcctccgtccctgaatcccgaccccaggatgaagatcctggaatgcactccgaagaagaagacgaggacgatgactatgaagacgatgatgacgacgacgacgatgatgctgagcaggaggaaaatggaagtacaacagtcgaccggaaaggaaaagggattttgatanaggaggaaaatgacngtgacgacgaagacgacgacgaagatgactcccgtgatggtgagaacgaatcggaaggtgagagtgatttatcagatgatccgttggcggaggttgacttggataatattttaccatccaggacacggcggaggtcngtgcatcctgggcttcatattgccaaaaatgtcagaaacat

SEQ ID NO: 57797 - DNA, 625 bp, Gossypium hirsutum
  unsure (1)..(625): unsure at all n locations
  Clone ID: AW186863.1
ctttccttttcctctggtgttcagcaaccaaagaaactgaaacaacgctccctgtatctctgattccaacagatcgtttcccacaactttgttgatggtgactcccaagcgtcaagtcccttcctgttgctgatgtcatgaaacccaacagtcgatcctcatccctaacccttaagactccaaaacccttgagcttcctcccaccttttttatccccactgtttcaaattagtcatctgcgacaactcttgcaaaccccctttctccgtccaccaatagagcccaacgatccctttccactgccatcaaagcaaaatttggcacacctccgctcaggacatcaccttccaaaaccacctcttgtaatccaagatccaaccccaaatgactatgcagagacatgcaagagcctccgtagcaaacgccaaagatatatgctcatttaacattgcttgagaaccaattacatggcactgtcgatctctgacaactatctatgtgcatgacttcttagcttgttcatgaaaagcagccacaaaattaatcttcaaacaatgctgatccggaggcttccatctctcatccctgatctgttgataagtgataaaagtaacatatnttaatc

SEQ ID NO: 57798 - DNA, 593 bp, Gossypium hirsutum
  unsure (1)..(593): unsure at all n locations
  Clone ID: AW186861.1
acccaacattacttgccgcttcttggtcgtctcttatttaactcttttgctatacaagaaatgtgactactttccttcttgtgttttacttgctacttctagtactactttgttttgttttattggggagtgaaaaagggggtgggtgatattgtgaaaaaaaaaaaaaaaaaacaaagccgacattttctttgttctccggctgtgaccggagaatctgagtttgcaccaggaaattaatggctgcaaggtcaggtggttcttcctttgttcagcctctccacccaccatctccgaaatcacctccaaagtatccggatttgtatgggaagcgaagggaaagggctaaagttcaaatgcttgaaagagagattagttttcttgaggaggagttaaaatctattgaaggtttccaacctgcttcaaaatactgcaaagaggttacagattttgtaatggcaaactcggatcctcttatacagctgaagaatcaaaaatcatgtggcttttggaaatggctttgtggattaccctgctttaacatggcctgcaccanctgttgccgtaattctgggtgctgttgctatctgaat

SEQ ID NO: 57799 - DNA, 548 bp, Gossypium hirsutum
  unsure (1)..(548): unsure at all n locations
  Clone ID: AW186858.1
gacaaaagaacgagagttgggaacgtacgaactttgaactgtgagcaacacgatgaagcgattcttcaaacccatcaaaaaggaaggctctgccaagaanccctcgctttctccttccaaaaatggcgctgaaaacggcgatgcgctacctgaagtggacgtcaagaaagagccattgaagttcctcacatggaacgctaacagtttgcttcttcgagtcaagtccaattggcccgaattctccaatttcgtttccaatctcgaccctgatgtcatcgctatacaggaagtaaggatgccagctgctggttcaaaaggtgcacctaaaaagccaggagagttaaaagatgatactagctcctccagagaagaaaagcagatattgatgcgcgctctttctagtccaccatttggaaattatcatgtttggtggtctctggctgacacaaaatatgcaggcactgcattgttagtananaaatgtcttcgaccattaaaagtttctttttctcttgatggaacagtttcgaagcatgaaccagatggcc

SEQ ID NO: 57800 - DNA, 517 bp, Gossypium hirsutum
  Clone ID: AW186852.1
ttcaatggcgaacttcgatgctccttcgttctctcttgggcttgatttcgacgccgatttggagccccagttaccggccgaggaccatctcgaacctatctttgctccgaatccttctgcaagcttcaacattatcgaagaaaatgctgatgagttcgagtctgaacaagttatggattcggattcggatccggatactcgacccgacccacctcgcgtcttaaagcggttgcgtcgggccgccgatgaatcttcggcaacgaagaaagaatcagaaaagacgttggtttgggataacggggacgatgacattgaagagttctcttcatcccaggaaaaaaatgcagatgttgattcatcaacacagtatcattctgtatgtagcagttccaagatcccattgaagagactcgggcttttaaccactcaatcttccagccaatcgagttcaaggaaagcgggacaagcatcagttgcctctgcttctgcaagtttaaaggccagccatgatgggtta

SEQ ID NO: 57801 - DNA, 456 bp, Gossypium hirsutum
  Clone ID: AW186835.1
cacacggaacacaagaatcttgtttctccttcttctttgttatgctgtgtctttgatattttgcacaaattcgtggcatttcatgcgaaatgcaatctttgtctaactcacaactctaacccattttttccatccatccatttccctttgcttaatggttttttcatctctaactctatgggggctcagaagagcatccatgcaggcaaagccaagattgatgttaatgttgatttcacccacaagatatgtgcttctatgatgcttccttctttaaggaacactggcagtcctctatccctagtaattggcagtctttgcattaaacacccaaatttatttggtggaagtgagaagcttgatgtatcatgggataaggggttatatgattcaaatatcttggtagcttacaggaggcctcgaccacaatgggttgctcaacaatgttttgttatc

SEQ ID NO: 57802 - DNA, 458 bp, Gossypium hirsutum
  unsure (1)..(458): unsure at all n locations
  Clone ID: AW186834.1
aaaaaccttgagacacacaggctatttgccggcgtttggagttttttcacaagcaaaacccanggggatcacccccccccccccatcgcagcaatgtccatcgccacctgcttttcctccccttccttctctcctctccataagtctatctccatccccaaaatttccaccactttccctctccacctccgcatttcctccttctccaccaccaacaccaccaccactctccgctaccgccaaccttctccgtttttaaccttctccgcccttcctggtggcaatggtggagatatcaacaactcagatggtggcggtggaaacgatgacaatggaaaaggcaatggtggtggtggtggtggtantggtggtgaggatgcgggtgataaaaacaggaaagaagctatggttgtgctggcggaaacaggtaaatcaatggagagtttacccaaggactt

SEQ ID NO: 57803 - DNA, 459 bp, Gossypium hirsutum
  unsure (1)..(459): unsure at all n locations
  Clone ID: AW186833.1
ctttttaaacattgatatctaccgtatcgcccttgttaccctttctttctgaattgcctctgtgaagttcaattgtcttgtgagtgtggtantgagggttaaatttcaatcatgtggcgatttggaggtttcagaaatggtgtatttgatgaatttagttagaagtatataagcacgattgtactttctagtttctctttaacattcaccggttttcttggtagccgtagttgattccgtgttgttctgcccccatctggtataaggcaattgaaaaaacttttttcaatttcattgtttgtgcgtatgaatcaaattttttacataaccattatttttacctttgtacgagtgtatgcgaagtttgagtctatggtttctcgggtttggttttgcttcaaaatgagcaatgtattaattttctaagtttttgatatttcctgagccgtatacagtgac

SEQ ID NO: 57804 - DNA, 711 bp, Gossypium hirsutum
  unsure (1)..(711): unsure at all n locations
  Clone ID: AW186830.1
agaccatcgcgttaaaattgcacatggagattctctctcatccaccaccttcttactcaactctgactccccacgatccaattgtatgtatccgtaanacgtcaccgcgacaggtccgatagatcttctgctnngatgatctgcgtgcgtctcgtcgtccaatccatccctcgtgtaatcgcactactctctgagcttctctgaacgttcccgcgatacccctcaccacgactccgatcttcttttccccaaccatgttcaggccgtctttgactatctctaccaccttttcgtcgaccctacccgtgattggaaagaacaagatactccgaatgaattattacccgttggagcgtccgaatggcagatggggcgagttgtgagtgagtcatcttagtgtctcgagaaagcgcctactatcgtgaatgtgaaactggatccgaagaatattgcccanactcggtagatccagtcctgctcatttcatatgggaggtctccttatagccgagaaccgtcgcctttaggtgatatctgctgctaccgagatctgagtcttctttatcaccagccacgggaagatgtcacattattgtctgtncaattgggcgtctgtagacgttgtccttgtatcagtcttactacaacttccgcccctatgcctctcattggtttaacatttgtgatgagttcggctgctcccccgcagtta

SEQ ID NO: 57805 - DNA, 549 bp, Gossypium hirsutum
  unsure (1)..(549): unsure at all n locations
  Clone ID: AW186828.1
gacaaccttcaatttaagatatctttgatggccaatatgctttcagttagcttgcactctgacgatccaatgtacatccctgtatcccttgccgtatatttatctttcacaggggttgtattcagctgcagcggtacccattgtaaaaacttcgcggacacctgcctccgccgagtcggtggcatgcttcactaacccaaagggtcgttaaanaaagacgagtgttagtggttgctgcaacgttgtctatctgggtccactgaccctcgtacacaaccctgaatggtacatatgatttgtgaaaggcctggcaaactgtcatgttgaaaacgtgtgtgacagtacattctacgaactgattctattttagttcctacagtctgtacagaagtccacctgatgttatgtaaatatttatttggtatttcggaactcaagataggatatgtgttggcgtttctctctcctcaatccgaattaccataatgtctctacaactatttaatattcatccatgtgtgtccttgantgtccaaaattgctcctaaa

SEQ ID NO: 57806 - DNA, 694 bp, Gossypium hirsutum
  unsure (1)..(694): unsure at all n locations
  Clone ID: AW186827.1
ctacaatacaggttttccttttctattcaaatctgaggacactatttttccctccttttgaaactggcaagaaggcagtattattgttctatgtaatgtttctcatattgttccttgtgatggtaagcttaaaattgattgtgtttggtctgtgcttgttttaactgaagcagtttaattatcttgagtagtttttgttcccaatgctaatttatttgtcatttccaggtaaaagaaactttcgagatggtgacctgagggataagcttgacagaaggctatctcctaagcgaagatattctcctgcaagatatgtgagggaccaacagatatctcaaagatatagccctttgaggtccattgacaaaaagagaaatcgaaagaagaaagaatgtttggatggacaaagtgattttcctgaaactttgaaaattccaaatgtgatggaagatctagttatagaggggagaagaacatcttctacttccaaaagcattcttgaggatcagttganagaagtacgcgtggatattgacatgcttattaaccgcaaacatgaattagagacatntgtggaagagaaagttcangaagcggagactcttacctctcaaattgaagagcttgattctcaattagaacgagagaaagaaacatgtttanagatcacttcaagaatcaagaagtttgtcaa

SEQ ID NO: 57807 - DNA, 347 bp, Gossypium hirsutum
  unsure (1)..(347): unsure at all n locations
  Clone ID: AW186823.1
gctgcattaaacttgcttcagttttacttaatatatgctgtatgatgcatgatactaatgtagtttcaagtatatgagttgaagatgatgcaacattgtgtaagcatgccaggttatattttgttttagaatgtgataatattctcatgctgtgctcaaatgggttgctgcatgctaagtgagctacaaatacatcccttagggaagtgagatatggaagatatttcctgcaaggtcccaatggtcaaatgctgtaatcttgaaagtcaccacacccatgttcctatataataaaaaataaatgtctcgtgttgtgaatgctnnnnaaaaaaaaaaaaaaaaaaaaa

SEQ ID NO: 57808 - DNA, 401 bp, Gossypium hirsutum
  unsure (1)..(401): unsure at all n locations
  Clone ID: AW186821.1
tatggtttttttttttttttttttttttttttttttttttcttttccgtttcttgtttttgtgatttttttgaattttctgcttcatcggtgactgatttcagatataattatttatcctcgaagcaaagcaaaagggaaagtaggtgggttttgaggatacttaaaaatggttggtcctggttcattggtgattgattttagggttttcggttttcatattcaaaaaatcactgttttgttccgttgaaattatgtatctgtgcggtatttttgtttttttatcttgtactatatgtttattgtttttgaattgtctatttcgctctgcgcgtattgtatatatcttgctttattgttattantaaaaatncaaaaactctatacaataaaataatataa

SEQ ID NO: 57809 - DNA, 640 bp, Gossypium hirsutum
  unsure (1)..(640): unsure at all n locations
  Clone ID: AW186820.1
cacttcttttgtgtaaaatcagatcagataaattagaagactgttttgcatttcgatttccagttccgatctcaatttccaacaaaagagaaaataataggaagaagaaaatatgacctcgaatccaacacttttgcccgagatcggacccgatggactcgctagggaaccttctgtcattgcctacactgagaagataatcgaggaggagcggcttcaactcacgaaatatatagccgaaaattattctaaaattcatgatattgaaagagaactagcaaatcttacagtggagatgaaactcactgctgggccgaaaaaagcagccctcgaacatatgagaaagaaaattganatgtcnactgagagaatacgcattgccaaggagaaagaagaacaagcacggaaagcttgggaatcagcatcaaaggctctgcatgatgaggaagcaattaagcagaggctatgtgaggacttgaacaatctggttcatgaaagcagtaactctcaatttgctcggcttgaggagttganaaggcgattggaagctctgaacccaagtaaanaatccactttntctgatcatgacatgaaagccattggattgacacaacatgctgcaaccataggcgtgttctcg

SEQ ID NO: 57810 - DNA, 959 bp, Gossypium hirsutum
  unsure (1)..(959): unsure at all n locations
  Clone ID: AW186804.1
ttgggggtcctattcgggtgancccggcatcactactaaagtaatacgcgcgtttgantcaacccccaaaancaaaactctcatttgttgtnatcaaacccggcacccattcccatcacatcaggggcgtccccacaaacnataaagcgtcgttctgttcaacgtccatacgtcaaatctagcgtgcagtctgatatatcactctattcactttcttcacaccacacgagcgaccgtcgtggcgtctagtgctctaccccgaaccacactacataaacaatatgtttatatattacagtaaatagagcgtagtatacaacacatatatacatatcatatgtcaaaagcaccccatttgactttttattaaatacacattgagggatatttatatgtaatcttcaatatctggtggcggtttgtgctattaaaaaatattattttttttattaatatatattaattatataatgagtatttaataatgtataagaactattgccagtgttattatgaattctatagagtaatatattctcaccgctcggccaaggcatttcctatccccaccttaagtggtgtatgtgccccaacttgtatggaccctatgatagaggccgcggctgctccgtatcgtcactccgcaccatctatacaatgactcgcacttatcattatttcaagtcaaaatatctataatattagttagacatttatcaagacccatttataattcacttactcaagttactctatatgtcgtgagtgcatataacacataccacgcgtgtacacatgataagagatattagtatgatatcgatgatacatcaaactatagatgatatcagaggactactacccgtgactgtcgcgtaatcttagactactcggcgccgcgcgtacggtctctccttctctctactacactctcatgcttccattatcatcactgttcc

SEQ ID NO: 57811 - DNA, 705 bp, Gossypium hirsutum
  unsure (1)..(705): unsure at all n locations
  Clone ID: AW186770.1
gttctttgcacccctgttactattcaaactcttatacagaaaaaagaaatccccacaactcaaccctacaacatggctaggataaggggatatacgtcggcattggatggttcgcttctgattacttcagtgtgtcttgtatcctcgctttcggtgtttgtgaactagctaaactgtgtgtgagagaatctgcgttcctagagaaacgcaatttcccgcaacattgtcgacttagaccatcatattttctggggtgcccaacaccccgacatgaatttctccgtgaattcacttccgggtaattcgtttcacgacttgagagggatatctcgggaccattatgagttcgangcacccgaagacgaattctacccctgatgttctctcaatccccactcctccccataaactgtctctttctcaaaccaccttggccatcttcctcctgatcttgatctatccaaagtctaacatttggaccctatttgtgttaaacttgcctaactctcagattccttggattcagcctcgccgtaactaacatgtctaaaatcacgtgataatcggcctcgtcattctaatgacatctgctgtaaccagttataggtttcacagagtgagactcctttttgctccctctagtcttatgcacttcaaatgatctagattccccaactcttcttgcattcagttgcctacacccgt

SEQ ID NO: 57812 - DNA, 675 bp, Gossypium hirsutum
  unsure (1)..(675): unsure at all n locations
  Clone ID: AW186767.1
gttcatgtgaagactattggtagcgaatttattcctttttgtgcctatagacaatgtggagcaggttggtcaggattgagggttctgctggaatgtggttttcctagcgcattcgctcggtctacctcaataggaccaatgattgggtgtcttgcttaaaattcatggaattagtcatgtaaacaggggactattctctgttcattgctattaaaaccgtacctgatctttcaccttccaccaatgctgaagaaagaaacaagtatatgatgccaatggattgtaacattgcttggaagaggatcaacacttanggtgagtttggatgaacggtgcgtttgcctgcggttagtgtaaaaacagcggtggcggtgagattagatactatagcgtaagacaaaaagtaagctaaacgcaccgcacccaatcgcccatcaaaacccacccttagtcggatatctggaatcatgcttgtcatcatacttaacaatttggagctttttgggtaatcagctcaactttcactaggtttttatcattattcattgatggtatagataaactatttcgggctatatgacttccgactcttcattttttcttaccgtgcttctgtcttatgtttacctgattatanggacgaagatcgatctggaaaaactttacaaagtctat

SEQ ID NO: 57813 - DNA, 671 bp, Gossypium hirsutum
  unsure (1)..(671): unsure at all n locations
  Clone ID: AW186766.1
cttcttttcaaatattttccttctctcctgttttctatctcccggcctcctttcttgtcctttctttcttcagacactcccttacttctaacgttcctttctcctttcttaactactgttttttcctttcttttcaaatattttccttctctcctgttttctttcttccagcctccgttcttgtcctttctttcttcacacacacaaatacggtacactagggtttccggttttctgattcaaagaggcgctgttacgttccattggggtttggggttttctgattcaaacaactgattcaaagaactgaaacagcgatgaaaaacatttgattatgccttgccttggacatttttatcgtcatcaacaagttgaaaaaatataaatagagttggagattgggtaacaggggattctaggttttctggttttctctaatcgatacacttttaagtancaaaaaatggtggcgactctttcttctnttttttttttttttgttaactgcctaaaattgaactaagctcttttgcaattgctattgctaatcccagcaactactccatctgtcaatgtgtaatgtttcatttctctgataatgatggcctgatcctgtggaaaggcggttgccttgccccacctggagctaatccaaccttgggaaagatttc

SEQ ID NO: 57814 - DNA, 675 bp, Gossypium hirsutum
  unsure (1)..(675): unsure at all n locations
  Clone ID: AW186765.1
gttgagaggagttctggcggcagtcagctggatgggggatgttccggaacaaagcatgttttcgagaaggtgattgtcggtcactctcctaggcgaacaagacattcgagaaggttttcgatcgatagttacaattccttcttggctaaagagacggcttcagagtttaccatcgattctcccaggtttcacattggttctcccaggtttaatgctagccacaagaagatggagttcatttcaaggatggatgagatttccagctccaaaagaatggataatgcttctgaagttgaagacgatacaagtgacagagtttatacgattgatcctgtccataatggggccgtatataatgaaactcttgactctaaacctggtgttggaattaccgatgagtatgcatccactccaagggagcaaattaacctgcctgatgcctgtgatcctgatatcaagaagctctacaccaggcttcaggcccttgaggctgacagggaatcaatgaaacaagcattgttatcaatgcgaactgacaaagcacagttagttttattgaaagaaatagctcaacatttgtccaagganatgccatcaaataaacnaaatgttgtggcaaagccatctattcttggtaacttgccattcatgacagtcttcaagtggattttatcc

SEQ ID NO: 57815 - DNA, 540 bp, Gossypium hirsutum
  unsure (1)..(540): unsure at all n locations
  Clone ID: AW186758.1
agctgcttcgaaagcaggcaacaaatccaagaatgaggatggtggtgacacgcccaagtctaccaaatccaaacatgatggaagtgttacaccaaaagtttccacaaagtcaaagcaagacacttcaaagacgtccaagtccagcaggaaaccccaggtttccccattctaaggtaacctgtaaatggtgcaatctatactatggtacggtaatcaatcggtcaccagtgagaatgaacataagaacccctatcacaactgtgaatacnacgaatccaatcatcaggactgagtatcgttcganaacgcacatactaatcctcatgctgtatgcagttgtcttcagtgataagtgagcatataccacgtaatcgtgcctcccacaccacactgaatacatctgacatacatagttgtgtagatttgtcctagtagaatcgttagtccagaatgtactttcatctcaaataatcactgaacacctcaattctcacactcgcgtaatcaaaaaaaaaaaaaaatctcgccccggatcatcca

SEQ ID NO: 57816 - DNA, 255 bp, Gossypium hirsutum
  Clone ID: AW186757.1
aggtggcactctttccggggaaattttgcgcggaaacccccacagtgtttaattttttcctcaaagacatttcccaattttgtttttcgcctccattaaagaaaaattaaacccctgaattaaaagtgccttcaattcactatttggaaaaaaggggaagaaaattttaagttttttccccccatttttctccgttgttttgcccctttatttccccctttttttgtgcgcggggaattttttggcccttctccc

SEQ ID NO: 57817 - DNA, 224 bp, Gossypium hirsutum
  Clone ID: AW186753.1
caaaagatagagtcgaaatttgggattcttttatcccaatcaatccctatttatataattaaaacccttttctctttaaaccttgttttcatggtgatcgttcttcttcgagtttaatattatcgaagatttcttttggaggaaagcaggttttttttttcttaaaaacttttcagtgttttattgacacgtctctcccagtttctttaaaaaaaaaaaaaaaa

SEQ ID NO: 57818 - DNA, 643 bp, Gossypium hirsutum
  Clone ID: AW186747.1
atcatttacagtttagaacataagatgttgaatcgaggggttcaggttttctctgccaaaggtcaagaagctatagatactgctctaaaggctgatttggtagttttgaacactgcggttgctggaaagtggctggatgctgttcttaaagaacatgttgctgatgttcttccaaaggttctctggtggattcatgaaatgcgaggacattacttcaagctagaatatgttaagcacctccctttagttggaggtgccatgattgattcacacaccacagcaaattactggaaaaaccggactcgggaacgattagggatcaaaatgcctgaaacatacgttgtgcacttaggaaacagcaaggagctaatggaagtggctgaaaatagagttgccaaaagggttctctgtgagcatgttcgtgaatctcttggcgtgaaaaatgaagatctagtctttgctcttataaatagtgtttcccgagggaagggtcaggacctatttctccgttcatttcatgaaagtttgaagttgatccaggagagaaaactaaaggtgccaccaattcatgcggtgatagtgggaagtgacatgaatgctcaaacaaagtttgaaacagagctgcgtaactttgtatcacacc

SEQ ID NO: 57819 - DNA, 380 bp, Gossypium hirsutum
  Clone ID: AW186746.1
ccttgctgcagtgtctgcaatacaaggcgaccttgagcgagctcaccatttcgtgacgcaagcattgtccctggtacccaacagtagcgaagccactatgaccgcaatatatgtcgatctcatacttggtaagtcacaagaagctgtgtccaagttaaaacattgtagtcatgtcaggttcctacccagcaatcaataattcaacaaatcctcctaacagattgtgtggggggtttctaattcaatcctgtgtggcccacacaattgagttggtagttagcaggtagatcagcaatccttttaaaggatttgtatcatataaatatagttcaattcagataatcaagttttctttaatttttaaaaaaaaaaaaaaaaaa

SEQ ID NO: 57820 - DNA, 525 bp, Gossypium hirsutum
  Clone ID: AW186740.1
aagaggtcaagtcgctatgcgtggagtccaataaaggtgatgaacaaaaagaagaattcatgagaaggggatccgaggccaataaagtaagtgatcctcctaaagtgatcagtgctgataatggatttgagcatgctgccaaagcagtggtgaatgattccccgagagtgagaggtgaatggggtagtaaaaatggagacaattataactaccaaataatgggatcaaatcttggcaactttgggtcaatgaggaaacaaaaggagtggaagaggacattggcatgcaaacttttcgaagagagacactcacacaacgttgctgagggtactgaagggatggatttgctttgggaggcatatgaaactgactcccattcccataataaagtaaaaatgaaaagcagctcaaagaaaggaaagaaaagtggcaacaacaaagattactgctacgataatgataattatgatgaggagtatgaggaagagtccaatgggcaattgtgctgcttacaggctctcaagt

SEQ ID NO: 57821 - DNA, 689 bp, Gossypium hirsutum
  unsure (1)..(689): unsure at all n locations
  Clone ID: AW186738.1
gagaaaggttattttttaagaaaggcagaggctttttgaagttttgaacttgattttttctttaatggtgtcttatcaagaaagagatagaatcagagaataacgatggtgaaaaaagataaagaagaactaagcgaagaagaaaggaaagcacttcgagggagcaaatttgctcctctccctcctccctccctttccaaacccagattggctcatccaggaggacctttaacaactaataaagctgcttttggctaagttcctcgaaaggaaactccaagatcccaacggcttgtcttccattaatcctcaactccttgaattggctgtcaataacgctaaagctaccgtctttcaaagtggggcttcgagttctggaactagggttcgacacgtaaattcattcggtgactctgaggactccttggaaaaatcttacttcggaatttcccgaccctacaaatgatcaatcgggatcgtcagcgggagcttcaggatttcccccgagagaccaccttgacgaaggtggtggaagatcatgattgtactttgacaacacctaaaaagatagtccaactatgatcacatctttgctttaatactacgtttaatttcacaaatcctctgcctcgatcaagatcaccgatngttggacttacaccctgggggaatcatcctagacacatacc

SEQ ID NO: 57822 - DNA, 564 bp, Gossypium hirsutum
  unsure (1)..(564): unsure at all n locations
  Clone ID: AW186737.1
gtattcttcttctactctcttttttaaattttaaaaaaaaaatgtctgcagatcatggattattacaagatttgtcgcaaaccaaattacccaaactaaagattcaatcttcaaatcaaacaggcaacgaaaacacgaatccagatgacagcagcagtagcagtaaagagtgttgtgtaacgccaacatcgaaagaacacaagatcccagcagttttgtcatgtccaggagcaccaaagaaacctaggaaaacacatgtgtcttgtaaaaggaagctgtcgtctaaattccagttcttcgacatcattaacagagaagaagttgatgcgtttttcaatactggttttgatcattctatctccaaaagaaggtgccctcctacataaacaataatattataagtatatttttatttttttatgtaattttttaattccttgttagttagttatgaaatggaaattacacgcaaatctattactagaattcaaaaaactttatataagtctgtaatattcagacttttttttnggggccgccgcgtgcggccgctctttgntttaa

SEQ ID NO: 57823 - DNA, 687 bp, Gossypium hirsutum
  unsure (1)..(687): unsure at all n locations
  Clone ID: AW186736.1
gtccttttaataattgcctttgctgcaataatccggattgaacagaagaatcctagtaattcgttagtattcgctcgggtgtatatagattttcttgccacgttggtgcttctaatgggtgtagctttcggttgctatggtttccttctattttctaaattgaggagagttcggtccgagaaagcttcatctgaaatgcgaaaggtggttggtttagcagttgtctcggtcttgtgtttcacatcgagttctttaatagctcttttcacggatgttcttctttttcatcattggaatccggagaagattaatggcgtaaaagcaccgattcttcttattttgcaccatgttttaggatcatcggtccccttcgcttttggactatggttcatgagagagctaccagccccgtctacaagtaataggcaagtgcagccaaaaacaaatacctttaattagttatggatccgcaggaaggcatcatcatcagtactgcccgaccgcaacaagttcggaaaagcaagtgtcaagaacaagtccgaattaagcacatatttattcaaatcaactaaaaaacaccatgtgtctctgctggcctagctccaaggatgaaaanagggatgggagtttttgcaatgtacagcagtcgccattaactgaactaatcagtggattacagaatttaac

SEQ ID NO: 57824 - DNA, 803 bp, Gossypium hirsutum
  unsure (1)..(803): unsure at all n locations
  Clone ID: AW186733.1
cctcgtgcccttgaagttgggcagagcttacaaggcaatgcagaatttagggaacctatgagttctaaacctggagaaagaacatttagcaattactctagtggttttccaagtgtgcctggtccatccgcttgggcatttggatcttctgagttcagttttgatgccaaaagttccacaagtcacatgccactgcagtcagtcacaaatgatactagttctaggaaatcttgtccgtctttccttgattctcttaatgtatccaaagcttcttttgggtctctttttcaacataatcaacctacaaaagatgcatttccctcccatagctcgcagtttaatagcatgaatgctattcgatcatcacctttagataaaccatcaatggagagtgaaactatgggaactttctccaaacaaaggtcccttgtttttcctattgccagtgagtttcctantcattttgcagttcctgctaaaagtaatggtgacctcctaaggctgaatgagaatatctcaaagaaaaagcatgagttctactcggccnaacagaatgaggaatttgctgctttgggagcaccttattgaagatttgacccaagaaaaattctctctgcaacgagctcttgagggctcacgtatgttacaaaatctttagctgctgaaaattcatccttgactgatagctataatcaacagagaagtgttgtcaatcagctaaaatatgacatggagaaattacaggaagagatcagggcnccactggcggaactcgattctttgaaaaatggatatacaaagct

SEQ ID NO: 57825 - DNA, 700 bp, Gossypium hirsutum
  Clone ID: AW186700.1
gtaggattcaattgaaacacaagtttacatcaggtaaaactctaagaatgtttggttttcagctaccactaagcagcttcataatttaaacactccaaccctcaattttatagttttggttgtgattaaacagatggaattttccgactacacacagatcttattcaatagaatcaagaaaattgatcctgaaaatgtttcaaaaatcatacggtatctactgttgcaacactatggtgatcaagatattgttcagttagctacttgtcctgatatacttatgcacgaagttatttataaatcaaagcttgaactgcaacaactactatttaaatccgcttcgccccccatatctccttcgatgaactcggtgtctacacttgaattgccttcagagttctcattccttttcaccacatgtttgcccatctgtctcctctaagctttttctgtctcctaaaaatgtccaggttacatacccttaatgggaccaacacccttttgctaaccattccccggattttactaacttcggttacttggaatcccattctgaatagcacgcccataatcagttattgagtttcgaagatcccacacaatttgttgaaaatggaagaatttcatcgcttatcctgacttttacattagaccttcgtatccgaaattccctacccttcccgtttacaacttttcttca

SEQ ID NO: 57826 - DNA, 529 bp, Gossypium hirsutum
  Clone ID: AW186692.1
cttaaatttgagttccactctatgcaactatcatgtgtgagtctctagacgaacagtatacagttgccgtgagtgaatttttgttcagttgcatttaagtttttccatctgttcgttgtattaatttgattctagtttgttattgctcaaaaatattcttttatagttataattgcattgcatcgggaaatttaattgggttttagcttaggtggtatttaagcatgcattttcttctgatttaaggggttcaaggattataggttgaaaataaaaagagatgggggtaaatttgaaaatacagaagagtatagggagtgagggaaagttaaagcattttatttttaattgttgtgggggcaaacatatggaaatgaggaaaagaagaacagctttcgaagaaaacaaagagtaaacgaggaaaagtcgtttactcgtttccgtttccagagtttttaaagagaaacaacaaaaaattggaattaaaaaaagaacaagccttgtacgaaaaattcagatttgccggtta

SEQ ID NO: 57827 - DNA, 578 bp, Gossypium hirsutum
  Clone ID: AW186690.1
cagaggccgaggctgaaggtgacaaggatggagagattcggaatctgggcatggctgaggactttgatgcgcaagttgatcttcccgaatatgattatccccaactcaagtgcaatatgaatgagaatcctggtgatgatgctgaagatgttgagaaatatgcattcggagagaccccccatgctcgagatcagttgaggaatttggaacaaaggatcttccaagttgagaggagttctggcggtagtcagctggatggaggatgttccggaacaaagcatgttttcgagaaggtgattgtcggtcactctcctaggcgaacaagacattcgagaaggttttcgatcgatagttacaattccttgttggcaaaagagacggcttcagagtttacaatcgattctcccaggtttcacattggttctcccaggtttaatgctagccacaagaagatggagttcatttcaaggatggatgaaatttccagctccaaaagaatggataatgcttctgaagttggagacgatacaagtgacagagtttatgcgattgatcctgtccataatggggccgtatac

SEQ ID NO: 57828 - DNA, 581 bp, Gossypium hirsutum
  Clone ID: AW186689.1
acaggaaaggagaagctcatcatctggaggatggtccgttccttaaaccctcctctgcttccaaccctccctgggagcttccctggaagtttagaagcataactaatggatttaatgatgagatagcagatataatgtctgctgtagaagccaaagatggtggacctgatcaagcaaatgagaaactggtccgaagacggcagaaatctgaggcagacttgactgctcgtacccctgaaaggctgttgaaggaggacagtaccaatggtggaggatattcaacaataatagcaaaaggcttggcactgagaaccaaagctgttaaccgtactaaatcaggagctggtgctgagtttgccggtttcaatcccatgccaacaggtcttggagatggttttgtggttgctggattctcccaagtgaggaagtcattgagtacatctagctggcaagatcaagaccatagcagcagcagtttgtcatcagtgtggccagctgcatccaaatggagtcttaagcctgatttgcaaggagtttcaacggtaggcgatacaatagctatttttgatggattgccaaat

SEQ ID NO: 57829 - DNA, 569 bp, Gossypium hirsutum
  unsure (1)..(569): unsure at all n locations
  Clone ID: AW186688.1
accgttcacagtacaaatcaatatccatcaagtgaactctgcttctgaaggannatattggactcccngaggcgcgcaggacatcacgaccattgatccccctttcaaacgggaccttgacacctccgcgcgctcggccgcccccctcactccccgcccccccccccacgcctcccactcccccgcccgccccttcgccacccttttgtcccgcgccccctcgctccccgcccctccgcccctgctgccgcctgccctccttcccccccctcgccttccgcgcccccccaccccccccccccgtctcggtggcaccccccccccccgtcgcctcctcctgccccccgcgcccgggtcccccgccttccggccccttcctccgctccgggttcatcccgccgccgccacatcccctgccccccttttccgctctttccctatctgtctattcccaaattcctaaggctacaaaatgctactttacttgagggactcccaaacgcccaactaggacatacacaggagaacatttcgaacaataacgaagacaaacagggtgaaatgtatgc

SEQ ID NO: 57830 - DNA, 585 bp, Gossypium hirsutum
  unsure (1)..(585): unsure at all n locations
  Clone ID: AW186686.1
gtgctgcatctccgccgccaaccaacaaacaagtctaacaccactatcgtcgcagcctggtgtttgtcttcctcttcctccagtctctgacccacgccctccctttccttcaagtttccgatagaccaggaaactattaagcaatttctgtatttataatgggcagcgatgattggggaagttgttcagacaatgaggtttatcttcaagacagaaatgaggacgatgatgaagaggattgttactcatctgggttcttatccaaattacagtttaggaaagatatctcaaaggctcgatgggttgatgatttggctatggctgaggttgttgaaaagaagggtaagatgtgggtgactatggggatagttcgcaatggcaacacatattgcttcattgaggaaactctgtttttgattgaaataggggcgttgcacgttttagatggaaatgacatacatctttctctaaaagaactatatgaaaagctttcaaatgggaagagtggatgctattgggagctttttgaggtgtataagccactaaaatctcttggctatgtanttggggcgcatggtatccctt

SEQ ID NO: 57831 - DNA, 562 bp, Gossypium hirsutum
  Clone ID: AW186681.1
tgaaaaataaaacttactcattcttcacaacttccaactacattagtatatttataattgataaccatatatatatatatattaactaagtatattatttttaacaaaaacatctggtttggcttcgtctccccaaaattttaaaaaaaaaaaaactctcaattttatgtatactttttcatttttcttaatccgtttttcatataatatatatataactagggagtatatatttttacttataatttcacttggataatttccatgtcagcatctccagtccaagcggacttcaccgggacccacaacatgctgactcggcttccgaaatgataccatgtggctgctaaccatgaaggcagttacacgctccgaaaccctaatgtcttccatcttcaattcttgcaaccggcgcacgttatccgggaagttgaagaaggtcccacaaaacccccattccaccggggcttcaacaccctcaccatctcccccaacaccctcatcctctccgccgttgcttccaccgtccggtggccgtattctttccccacggtgtgcacat

SEQ ID NO: 57832 - DNA, 319 bp, Gossypium hirsutum
  Clone ID: AW186665.1
ctgctactgaccgatctagtgtcaccatcttctttggttttttcacggcattgtggttgttatctccgaactttggtgcatgtatcatttcattctttttagtattgctttttggctaaaatgttcaagggttagcatctttttggctgaatatgatggtgtaggtgcagctgctgaatttaccaaaatttgttggtgagtttggtggcgtgctgcgtgaatccacaaatctccaagttttgttgtggttgttcttattgcttaattagagtatcataaattatcatttgtttctttcagaaaaaaaaaaaaaaaaaaa

SEQ ID NO: 57833 - DNA, 658 bp, Gossypium hirsutum
  unsure (1)..(658): unsure at all n locations
  Clone ID: AW186664.1
aaagcttgatagaaagaatgacggtgaatggcatagcataatctgcacagagggatcgaaagacggaaagagtgtgaagcttgttgttgttgtttgcggttgattaggccttttggtttggggtttcatgatggatggtgacagatacagtgttgaattgattgcgatggaatgtttttttgtgcccttcctgccttcactccctcagcgtttcctgccttatggcttatgaaccctaattactanccaagggttgctgttgcggtctacgcatgagctggaggattacttgctaaaattgttggctgctgagtggtgacataataatattagcagctaattgttaaatatacatgctttgattttactttgttgagtaatatcatattaataaagaaagaaaaaaggaaaatgtatgggagaggtggtcttgataaattcaaaaaagctcaatccttggaacccttctcggtttccctgaattcttcttcccccaaaaccgcacccaaagctggtcaagttgaacaacattcacatattcaaaatgcagttgctcagcctcagcaagaggatgatgttcaatccaagccanccactcaggtgggggccggtcaatccacttggccacctcctgattgggctatcgagcctccccctt

SEQ ID NO: 57834 - DNA, 720 bp, Gossypium hirsutum
  unsure (1)..(720): unsure at all n locations
  Clone ID: AW186660.1
atttctctagcatatctttctgttttttgtacctgttgtgtgtttgggtggaacatggagaggctcggtttcgggaacatgtatgtacatattgctacttttctcctgttttgtatggctccgttctggattttcaatttggctgctgtgaatatcgataatgagactgtcagagaggctcttggttttaccggaattgttctttgtctgtttggtttattgtatggtggcttctggaggattcaaatgaggaagagatttaatttgccagcttacgagttttgtttcggacatccagcagtaggtgattgcacgctatggctatgctgttgttggtgtgcccttgctcaggaagcacgcaccgggaattcttatgatattgtagaagataagttcttaagaaagcaaacaaacaatggtaacgaggtgcgaatgtcacctttgcctcgtgaacaagggattgtacgatttagttctgaccctatttctttgctcgggtatggttgtancccaaccacaaaatttacaaccaattctccaagtcncaaaatgatttcaaaggaatattatanccctgaccgacagctttctacagtgaaagaaaatgttccatagcagttaaagatgaaactatgattccacctagtccatcatcgatgacnccgagagaagagacataatcgtggaaattgaccaatgaattgagatacattatatggt

SEQ ID NO: 57835 - DNA, 298 bp, Gossypium hirsutum
  Clone ID: AW186652.1
caagcagtataaggagggatccctgctagggtaaatagcgcgcctaagcgagcaagcatacgcatagcagcacatagcgcgccaaaaggctacgtacgcgaggctagagcgcgagagcggtgcgtgaaggaatgactattccaccggggaatttttgtagaaagatagggaggcgagagatagtatgaggccggtactcaaaggaagcggcccttggaagagagtccggagacgccaagaagggcgttagaatcaaacagaaggcagagcgccagaaggtaaaaaaaaaaaaaaaaaa

SEQ ID NO: 57836 - DNA, 636 bp, Gossypium hirsutum
  unsure (1)..(636): unsure at all n locations
  Clone ID: AW186651.1
ggggaaaccaggagctgaatgatgagttaaatgaacttgaaaaactttttgcagagcacaaacttcgagttccccctgatcatttcagttctgctaggagaagcaagcctgctgatgtccagattgaaccagaaccaagcccagcatgcaaaaaaccagcagcagtagatgtatctcccgtacatatgcctgacaaaaacttgatttctgaaccaatggggagtttgagtaatatggctgtcttttgtactccttcgacaaagatggtagataaccaagatttttctggtagtttgaggcggagtttctctggtaacagcttttccgatgattctagaggaaaattttatgagaagtacatgcaaaagagagatgcaaagctgatggaagaatggggttctaaacgggctgagaaggaagccaaattgaaagctatgcaggatatccttgagcgaagtaaagctgagatgaaggccaaattttctggttctgctgagagacaggattctttgtccaatgctcgtcgacgagcagagaaagtgaggtcattcaattttcggtcacagagggggcaggtatctcctatancatttaggttttcaggaaataaatgccaaaattcataactggtagaaa

SEQ ID NO: 57837 - DNA, 641 bp, Gossypium hirsutum
  unsure (1)..(641): unsure at all n locations
  Clone ID: AW186647.1
ggaagaaatatatgttcataaagatgattccacttcaagctggacaattagcaggcatgatgcttcattaattcagacaagttatatcaacgatgctcctttaagcggagtaaatagacgggatggtctccttataagcgacacaagtagtagggataacacctcaataaggaggccgagtagcggtgatgatccccctgtaagcatattaagcagctgggatgataccccgataagcaggtcaagtagcagagatacccctgtaagggggccaactattgaagaagatttccccattatcaggtcaagtattaaggacgaaactgtgtcaaacggacctagtancagacttgatatgatgcaccgttcaaatctttcctctgcatccagcagcgatgacaagttcactgtgatggaacttgtctcatcagttgcaggaaatatgccttgcagttcccaaccaatttcttctacccaaaagaacacacagccagagaaaagaacaaatgagcacaacccaacaattgaaaaaccagcagtgacctctcctccggttttcgatgatgttatacatgttataaggcatantancttccgtgttggcagtgagcaacaggggatgganaaagcggaaccggatt

SEQ ID NO: 57838 - DNA, 668 bp, Gossypium hirsutum
  Clone ID: AW186646.1
gtcaattcattagcatcgccgacgagggatcaatcgtcgtcgtcggcggcggcgcagcctcaatttgcaatttctggtttccgagattactcctgttcaatcctctttctcaaagccacacaagagaagaaactaattgcagctaaaagaaaaaatggcaataaagtttcttgattggtatttgaagattgcaattgggtcagctataattggaggttccatggagttattcatgatcaagactggcttctgaagctggataaggtatctaactaggtcgaggaaacataagggctcgactatggccagcaaatggttgtacaaaccacttgatgacaaagtgactgttctagagtcggagaagcgagcttgggagaattcccctgaagctcaggcaatgagagaagctcttaatccttggagaaatcatgatgcacaagaaagaaaaagttcctaatggaggccacctctagggacagattcttgatgctgtttgatttgttttgaataataaatgtacctggcaagaagtttgacgcacaactaaatatgttcactggcattgataacgaactgatccttccgagttttgatcccttgtctgaaattatttctgttagaaattttcttactacctgtcttgtaggttagttttatttattgatatt

SEQ ID NO: 57839 - DNA, 692 bp, Gossypium hirsutum
  Clone ID: AW186645.1
gagcttagtttgtctcccgccgatcacttctcgaagagaaagattatgcctatcgagccaatctccaagccacaatcgcccattgctctgctaaaatcagctcagagatttcgagtctttactcccaagaaatccaaatcaatggcgaataccggtaacaatacacgcctgccggagaaaaccaagctcgtaggtgtttcaatggagaccccaaagcatggaaaccataatagcagagagcatttcactagagaaaacagtttccgaagaacaaaaggcaaaatagaagatgatccttcgaagagattatcaaaagatttggtacataagtacttgaatgtaatcaaaccattgtacacaaaaatctccaaaaagcacagtcaaacccacaagttcgaagtgtccggcgacttatcaacgttatctccggcaacttctccggcgacggtatattctgtaaaggagaaacagggaaatactaatattaaagcgggttacaagcatctgggaaaaagccgatcagcctcggctgcagcgtcgccgattagccggagagatgattcactgctgcttcaacatgatgggatccaaagcgccattttacattgcaagagatctttcaattcatccagagaatcttcatggttatcgagatgcacaagcgattgttcttcacaagagaaattaagcac

SEQ ID NO: 57840 - DNA, 595 bp, Gossypium hirsutum
  unsure (1)..(595): unsure at all n locations
  Clone ID: AW186637.1
gagtggtgaaatggctaaaatgtgattttgtctgaactgggttttgtgcattgttgctcgaaacgcttctgctgctataaccgacggcgccagggcctgcgctgtccctctgtgcatacttaccgcagatctctcctacaccggtggctggatctccctactcctcgccctatttctcaccggtgttggatgcttcgccaccggcactcatgggggcatctccatgctcatctggcgccatgaaactcgcccgagatttctcccgctcctctctccggtcgatgccagcgataacaacctcgggtacatcgtcgcaaaaggaagcgaaaagaatatcggccgtgatggaggaatgaccggctgaaaagatgagggaatcttgtatggcgtactggccgcatcgtgtgtggtcggcttcagtggatcggtatacattaagagatcgaataatctcgtgagatctctgtcacggtacgccgctcggagcgaatttctgtgancattataaccagatcgaaggtctatcttgctaatgatcttaataacgtatcattttgattggatatctatgatgcatgctttataaagatatatc

SEQ ID NO: 57841 - DNA, 579 bp, Gossypium hirsutum
  Clone ID: AW186720.1
caaaaatctccgccgttgctgtctccatgtcacttatatcaggttcctactaacgtttcatttggggcttcaaaatgaaacccctaactcatagaccccctttctcaagctctacaatattacccaaatcttctcttatccatcacagatagacccacataaccatcgtaaccgtcgctggtccatcctctgcttccggctcttcaaataacacaatccacatctactatatctcatccacctcttccctcggtcctctttaccacttcacctcctccatcacttccatctctttcaaataacgtccaaagatctccttcccacttaatctcctatccacctcttcttatgacaacatatccatcttagacacagacacctttgttcttctcaaatcatttaggtcccaaaaaaagtgtatcctttatttggatgttcttccttctgggaaaattacatttagtttttctccttaacggttttttggctctattctatttcaatgaaaagtaaaaatgacctttcttattacgctgggaataacaaccgaccattgttcctttatgatgggatttgaac

SEQ ID NO: 57842 - DNA, 540 bp, Gossypium hirsutum
  Clone ID: AW186715.1
atttgattggtgtggcatagcaaaaagccagtgctttgcattacggtgttttttgtgaacgtatgactggttacgattgtttgtagcaatcggcttaggatgattgataatatgcaaaaaccgagaaataaaggaagcaacttgggttttctgtacaatgattctgcttcttaatgaatgtctgtactctgtaatgggattgcaatgtgccttatttttttatcttatgtttgtttgttgaacttgtaatatgtaaaatcaaaggtgggctatcttttatggggattggtaataagggggaaaaacattacttccttttgaagattgtatgaatgggatagggattgttgtatctgtgaatgtttcttgcttcttggaaaagaaatgaaatggactgagactcaattcaatcaagccagagtctagcatatctgttggatacttggatttagcttctatcttatttctaatctcatgaatttgttttcttacttgtaagttttatttgtaggtcaagcatatggattctaaatcagttga

SEQ ID NO: 57843 - DNA, 546 bp, Gossypium hirsutum
  Clone ID: AW186713.1
gttgtatttaccgcgaaaccgatgagagaagaagccattgccatggcttcaacatagccgtcgtctatctcctctccggaggtccccatggttctccacgtttccaaccgtctaaatctcctcaactctcttcgccggcacctctccgacttttctcggcccctccgtggcttcgccttccttcagggactgccgattcactcatttctaattggttctcatccatacatgctttcttcgatgttaaatttcttggattaatcgatcgatcagggaggatgagagcgaacgcgctattgcaccgatcacattgagcttttcaggtacttcggccgtgccttgctctttataaactttcaattaagttataattcagtacaatgcaataattaaaatttaattataatctattcaattttaggcaagaaagttgcttctcttacgttaattttcatgttatacgctttttctttgctaaggtcatgtttttttagatgctagagcttattgaatctagaaacttttgaagttgataaacttccattc

SEQ ID NO: 57844 - DNA, 256 bp, Gossypium hirsutum
  Clone ID: AW186712.1
gttgctgggatcgaaatcgagcaaaaaagaaaagggtgacagttgtggcgctgttgctctagctgttttagggtttctgctgtattttttaggctaggtttgggttaaatatgatatttgggcttagcaaaattgggcccatttattggtttgggcccgggcatatttgggcatgtacacccattattgaggattgacgacttttttaaccagtttcgaggagtatctgtcttttctaaaaaaaaaaaaaaaaaaa

SEQ ID NO: 57845 - DNA, 280 bp, Gossypium hirsutum
  Clone ID: AF056964.1
gagcttgaacaggcatataattatttattattattaataaatattgaattatttttttgtcaaattaactttgttgattaaaatcttcttcatttatatttatatctggkttactattagtattttgttctacacaatcataaaaattttgagcatttaattcttttaatgaacatggagaaacacgagctaactgagcaaaatgtaagccattatgtacaacagaaagtttttcagcattatctatattatcatcattttcaatatttggttcaagcac

SEQ ID NO: 57846 - DNA, 259 bp, Gossypium hirsutum
  Clone ID: AF056963.1
grgcttgaactgcagaagvggcaatggaccaagcaaagcgmgagtaaaaagragtaaatmaaagtymggcatcatcttggggtggccaagattcacatccacccccatctagccaggttgcasgaacagaaatyggaattgsgmaasacaaactaatgattatgctgtcacgaactcgtgttcgagctcttcgaccgtggttcagaattcggaaagcacaactaatgataatgtcttcacccaatcgtgttcaagctca

SEQ ID NO: 57847 - DNA, 277 bp, Gossypium hirsutum
  Clone ID: AF056962.1
gagcttgaacgtgaaatagaaagagatttggragaagagattaaagatggratataccawctggsatttagattgcaccggctttatcagcacaaaagagaaaggratgctgatgacatatcagaatctgggcataaacmaaaagacmaaacactttctgaggtgaatatttgtataaaaatggagggtgggaaccaagatagagataaaagagacaaagaaagaagctcctaatgatggaaaaggtcagcctattcgaccccgtagttcaagctca

SEQ ID NO: 57848 - DNA, 147 bp, Gossypium hirsutum
  Clone ID: AF056961.1
gagcttgaacatgatgaaattttttgtaagaagaataaggagaagaaaatccagataatgagttcctgagattttcatttcggatgtatgatgattactgccatcaaaatctgtatagcaaaagagctgttatggggcgaaaaaaaa

SEQ ID NO: 57849 - DNA, 376 bp, Gossypium hirsutum
  unsure (1)..(376): unsure at all n locations
  Clone ID: AF056960.1
gaatttccccggtgagaaacagaatgctaatttggtacctattttttgggtkgtatcgatwctgatttttggagwwttakgkgatasattttkagtgtktaattatttggbyktwattgkntgcaaatggcatggktkgacwatttgtgtgawattatggctcbgttatkcdttkgtcttttatttatggytggtaaatattgttatttggytgaayctgtgttttvagawataatcgsgtgtbgtggaattgttgctratacgcatrgtcgctwgatktgyactctctgtagtatwttktgttgctctatytgtttgtttatgtgttttytctgtstatmgccadatgtrtgttttggtgtytrtatggytyttt

SEQ ID NO: 57850 - DNA, 214 bp, Gossypium hirsutum
  unsure (1)..(214): unsure at all n locations
  Clone ID: AF056959.1
aagcttgaaccttgtgagcttgaacctgagcttgaacctgagcttgaacaagaagaccaagtatgaggtggcagaagtcaggaccccgttaaggcgggtatggaaggagacggccaagagaggattgattgtgttggactcgagggaagaatccaaagaagagagaaactactgtgagtttcacgacaaggtggngcaaaaaaaaaaaaaaaaa

SEQ ID NO: 57851 - DNA, 290 bp, Gossypium hirsutum
  Clone ID: AF056956.1
ctgatccatggagcgaacaagggaaagtccagagtctctgattctgtcaagagcaggaaaggaaatggttctaagcggaggggagatgagtcgaagtcagtaagcaagagcaaagtaaaggagaaatgctctaatgaggagattgtagccagaggaggaaagagcccagtaacagttggtgctgcaggaaatcagatttcagatgataatgagcacttaaatactggaaacatattgaatctgcaacatggttaatgttggcttggtmccagatggkgtcatggatmaga

SEQ ID NO: 57852 - DNA, 528 bp, Gossypium hirsutum
  unsure (1)..(528): unsure at all n locations
  Clone ID: AF056955.1
tttaggtatcggtaacatctatccggaaggggagtcggggagggccggcgggaacaaaggttaacaaagaacataaaacagaaaaggaattcgctcgtggcaatcgcatgaaggacattggcaatcgcaagaaggacattggcaatcgcaagaaggacattggcaatcgcaagcacgatgtcttmctccgtcattgctaccagagtttatatcgcccaactctggttagtcagatcggtatgaggcgagatgtgcaccgaaagatcggttctgaagcagttgcagatcgtgggccgtgtgtaaaggtggagcctcgcacaaggccacacwgacagactatccttaatcagaaatgtgaaatccgttttgtccgaagtatgtatcgaacgcacaggaaggtctgdtctcgcacgtccctcgggccatgvnhtaaaccgtgctgtccatcgtcaggaagtaagcttccaactytcttttawattcttgggtctgaggttwhhcgcggccycggccgctcbbacgtacgcn

SEQ ID NO: 57853 - DNA, 214 bp, Gossypium hirsutum
  Clone ID: AF056952.1
gagcttgaacaagcaagagaacagggtctttatattggtggagggttagaagctkgtcatyttggattttccggagcagtaagcccaggttcggggttggaactcggggaggatgattggcagtgctaggatgatcgacaacctatattattttgatgattattgttctacgaataaaacagctcaatgctttagtggtattagttcaagcaca

SEQ ID NO: 57854 - DNA, 196 bp, Gossypium hirsutum
  Clone ID: AF056949.1
tttttttttgcccactgaattgattttgagagagatatattgtcttcaaggaaggagcagtatacaaccatgacggaagtgctccattgagtaaattgtcagataagcctaaatatawtagattaggaaabcggttacctcatctggaatggaaccttctaaagaatttacagatattcccaaskgttcaagctca

SEQ ID NO: 57855 - DNA, 316 bp, Gossypium hirsutum
  Clone ID: AF056948.1
aagctgcgagatagtaacggtaaaagaactcgaacgtcctgagaaaattaaccaccgattcaagagacgctacggtgattatggatcccctcataagttgtaattacataactcggatcctctttatctctttcgactcttttcttcacggggcatccgtcaatagaacatctgtagtagttccttggatttgggctattcttcacccatttcttcccatatttcctccatctgtatccatcatccagtatctcaacctcagacttggtcttgaatgcaaatctttctctgacgtccctcctttccctcgcagctt

SEQ ID NO: 57856 - DNA, 323 bp, Gossypium hirsutum
  Clone ID: AF056946.1
tttttttttcctaagctgcgagcccaatatgccacatcatgagtgctgacataccggtagtgtttctcatgtcgcaattgcttctctgactcaggtatggtaatagctgtatttaaagcctcagccacagcatcaatatcccatggatttaccctaatcgctccacttaaagatggtgagcaaccgatgaactcagaaacaacaagcatgcttgttcgtggatattctggctttacacccagtgcctcatccatgccaggagttccctgccgacaaacaatatacttgtaaggaaccaggttcatmccatccctcgcagctta

SEQ ID NO: 57857 - DNA, 324 bp, Gossypium hirsutum
  unsure (1)..(324): unsure at all n locations
  Clone ID: AF056944.1
gtgcgtcctcacagccaagggagcagctgagaccctgaagtttaacatggctcttattctcatgccagtgtgcagaaacaccattacttggctcaggtccacaaagctgggtctcttcgtaccttttgacgataatatcaactttcacaagcaacaagatggtttmngcggaacctgattaagctacccaagccttttgatagaatcactggcttcaatdccttctggtahnhncatcacctgtttgtcattgtctacgtcttnmtcatcatccatggtagaattcctttatctcbtgcacatatggtatcggaggacgccaca

SEQ ID NO: 57858 - DNA, 390 bp, Gossypium hirsutum
  Clone ID: AA660000.1
tatgcagcgatttctagagaaaacagtcgtagtgtacctactctctgccggaacttcacgtaagtgtataaaattagtttagttctgagaggggttactgaacggtaatacaaggtcctgcctggacaaaatccatttgaaaaaggacatgctccagtaaacttcaagtttcttggttgaatagacgaacgttgggatgttaaggaccgctaggtgtgcgacacgcattcccgttcctgattcggtctatgttggactaacaaaggtaggtagtttctatcgcccaacgtaccgtcatcgtaggttacctcctccttttatggaggatgtgaacctcatcggtaacgacgaccccttaaggctaaataacaactacaaataatcaaaagg

SEQ ID NO: 57859 - DNA, 324 bp, Gossypium hirsutum
  Clone ID: AA659997.1
ttgacaccaaaactggatgcggaaaagcaagagtcattcaagaaaaacattgagggagcaaccaagtttttaatttcaaaattgaaggaccttcaatttttcagagagagcatgcatgatgatggatgcttcctgtttgcttactacaaggatggtcctgttgacccaacatttttgtactttgcatatgcattgaaggaggtcaagtgctgaggtttgaagcaaagaaaaaaaaagtggttgctgaacaatttagtaattttttataattgcttttgtctctttgttttcagtactctgctaaagcataattatttgtggttt

SEQ ID NO: 57860 - DNA, 413 bp, Gossypium hirsutum
  Clone ID: AA659996.1
gagaatctatatataacactcacaagatgaatccacatcagcataggaagaaggtagtacgataattcatataaatggggatcatttatacacactaaacaacaatcaaaatacaaattttgactactataaaaacagtgtccaaagtgtaacggcacagcgacttaggtgagtcgcacagagagcgattcctgcaccccggaatgtaaatctaattaagcggcagtttataacttagcacaaaaagcccactagtttgtgatgtcaagggatcgaatcgaatgtctggatcctcccactttacagggccactctctgctcgttattcctgtagccagaaggtttcctcagaacgccacatgtccgcagcacgtcaactgcaggcgaccgcacccccgactcgcgcaaacatc

SEQ ID NO: 57861 - DNA, 467 bp, Gossypium hirsutum
  Clone ID: AA659992.1
gccgctgcagggctgacgaagagcttgagcgtgagttgggtgagcatgaaaagagcttaactgcattcgcctcacgcaattttgaccccatgttccaaaaatcaattgggaatatgataagaagaagggagaggagatgcttgcggtttcagcagtgtaaggccccgtactggaggctgaagaattttgccaatgcggcactgtatttggcaagtgatgacgctaaatttattagtggtgttaacttaccagtcgacggaggggatagtcttagcaatcagtcatggaaaatgggattcgcagcactttggaataaatcaaggaagtcctcaactttactctttcaacaccttttcttaaataaggaaagaaatggggaaattaaaccttgtaataaattggatcattggaatttgatcaatccttacttgttagttgttcaaatgagcaaattaatttcttttttt

SEQ ID NO: 57862 - DNA, 292 bp, Gossypium hirsutum
  unsure (1)..(292): unsure at all n locations
  Clone ID: AA659990.1
accgggctagtagaaaacgtccacgacgacggcaacggcactgggcatgctgcgtcgtatacttattgggaaagaataacgacggcggacgctacaccgttccctgatcctactgaaactcactgcacaaaacatccttgcaactcagtctcagcctaaatctcttggatctgtttggaataaggctggaacttgggtnaagaataaccttaataagtgagctactcaagattataggaattgcataaatccctgggttcattggatttaacttggggaaaagctgaacatt

SEQ ID NO: 57863 - DNA, 556 bp, Gossypium hirsutum
  unsure (1)..(556): unsure at all n locations
  Clone ID: AA659984.1
taggaaacgcgaaaggagctgtagctgtggtggtttcgattttaatttttagaaacccagtctctgttaccggaatgcttggttatgcactcacagtctttggggttatactctacagccaagccaagaaacgaagcaaatgaggcatcatcctgggaacgcaatacatatactttgtttcctttatcgcgaggacagcaacaatgttgaaagaggcaggtatttggggccgtatggtatagcatatgatgccatggattttgcgccccggattcaatcttttgtttaccctccaagcctgggaagctggcttttctttcgaattggctccagctgcaggattttagtaaaaaaaattataaactccaataaatgactgattggtctctaccattcccagcgtgggggttgtagtagaggaatatcgtttttatgtttttttaatctttcatggaaagcaaaagctttaaaattggtggtttgtacacaaatcgatctgntgttacaatttctattggattaattaatgaaaagaaatctcataagcttacaattt

SEQ ID NO: 57864 - DNA, 315 bp, Gossypium hirsutum
  Clone ID: AA659969.1
acagccaggattgggaagagaccggatccctgaaaccatgtgagggaagccaggtttggatgctgtttcccatggtgaaagtacggaaaggggaaagtgttttgttttgatacccgagggcaacgactatttgcatgcacttagtaagttagctcattggttgcccttgcattccggatttgtagggaagaaaaggtgttgtttccattactgctgttattgcattacggttgaaacttgtggttatagaaatgggaatgcttatttataatttgattataataaataatgagagggctaggaattttgaggttt

SEQ ID NO: 57865 - DNA, 371 bp, Gossypium hirsutum
  Clone ID: AA659967.1
gtcgacgacgcgagcagcataggtgctctatgacgctctagctcgcgaggggtaggagtacttaagagcacagtagcagcatacctaccgggaacaaggccgggacccacggcggtcgactggggaacccgggccggagtcgcgcgattccaaatggttgccctgaggggaggaaaaggggcgggttagggagggttgggaaatatataaaccgggaacccaattgggcagggttgggatttcccggtttggaatcctttaacctttgtgggtttgggtgaaggatgattttaaaaggcctttgggataacccttggggacctgaaaaagggtggttttcaccatggaataaaagggaatttccttgttaa

SEQ ID NO: 57866 - DNA, 489 bp, Gossypium hirsutum
  Clone ID: AA659966.1
cacagctcactcctcggggacttaggttggggtagggggagtgaggatggagtcgggagtgtctcacatacacttactttctacacttggacagcctccctgtgtgaagtttttggttggtattggtgacttggttgatttgcttacgacctcagctcctgtattctctcttttgcctgtgtgattcagtcacacttacattactgtcacttatgctctcatgtgagcatctgcctgctgatgcttgccttgattgctgctactatgctctgctagatgcaaagcctttaggtcactatttgaagtatcctctgaattgggctcatgaaaatttggttttccacttttgattcactttcaatcttgattctgcttttttgcttgttattcaaatgatgtcaccacttgtatcgtacatatctatacttgccgtagtatagcatcaagatgattctgtattttgtgtgtcatattaaggctgtgtccaat

SEQ ID NO: 57867 - DNA, 336 bp, Gossypium hirsutum
  Clone ID: AA659965.1
ggatgccttccatcgttttcgtttgtagtttctctctttttcggttttaggatggcttgatcgtgtgggtttgatttgaggaggtatagatgcgtcactcgggagcttcgtccttgatttgcttcgtcctttgattgccttaattggacctgggacttgaaatgaaaccggaaaggctgcgggttggcgggggggtgtctgggctccggtggacgatgcgtgggtttctttttcttgggattccgttgctcggttttgccgtttttttgtttattttttttcatttatttgctgtattttatttattagtttgggcctatttggtccatttcgtta

SEQ ID NO: 57868 - DNA, 325 bp, Gossypium hirsutum
  Clone ID: AA659964.1
aggggttaaaggcgggaaatccactcaggcaaaatgttaaaggtgaaccggcagcaaaaggttgcagcacctgacccttttgggaccgaatgggttgaattaggcggaacgtcgggtagggggaaaagcggtcgagcctttaactcgtttctccgggcttggcaagcgggaaccctttgtcaacgcggcactttaaccgttaaccgtttaaacatttcgcaattataaaacaattttaaagcgcaatttaaaaagaatttaagtcgagtaaaaattggttatccggctttaaggctttagggaaattagtttctatctggcacaa

SEQ ID NO: 57869 - DNA, 475 bp, Gossypium hirsutum
  Clone ID: AA659961.1
aattccaaaccaaaaggcagcaatcgattatatatttttttaagattttaacaacaacggttaaaaccataaccaaggtcaccattgaattgagcagcaaaattcctttggacaaaagggaaaatttgctcccaaccaaattggcttacattattttcaccacaaagcttctattacccaagacagagagagacataatatattggacctttgcaggatccattccttgaaaaattaaattcattacggaggcctgttattttttgctgctttctttttcattaattcatttggctttcatcaaggctttttcaacagggtgcattggattacattttgcagcttgattccagcggctgcattccattgtcctgcctgcagcccggggatccacatggttctgagcggcgcaccgtgagctccagcttttgttcctttagtagggttaatttcagcttggctaactatggtatgc

SEQ ID NO: 57870 - DNA, 599 bp, Gossypium hirsutum
  Clone ID: AW187953.2
gtaaaactataaagacagctaagggcaaatgtggacattagaaccaaaaacaacaaaataaaggcactaatataataacttaaacttttaggttcaatgattttttgacatcaacaaaattaataatacaatttttacatgttaagaaacattcaggctgaaggttaaatgaagaggcttaaaattaagaagcagcttacctatgttcggcaccttttgaattatttacctgaaacgaaaagctttttttaaataaatcatgtacaaatcaaatcaagatgaagaaaaatagaaaatattagtccaatgttataaatgaaaattgcatatccttgtacagcttaatgtgcttgttagcatgagaattttttaaaaaaaaagaagttttttataattgaagggacaatggaaattagaacagaataaaactaaacaggcaagaaataaaacggatatcaatggacacctcatcccgagatcatttccattggggcacctaaggaaaaagaacatgagaaaccatagcttagttttgatgaaaaaaaaaaaaaaaaaaaaaaaaaaaaaaaaaaaaaaaaaaaaaaaaaaaaaaaaaaaaa

SEQ ID NO: 57871 - DNA, 239 bp, Gossypium hirsutum
  Clone ID: AW187884.2
cttggttgcagcttttgcactcactacttggtcaacaatcttcatgtggatcttgacctgatcaacactctttcatttcatgtttcgacatagcatatatatataataagtataattaaatgttattggttactattataaaatattagtcttaaaagtgatctaatttggttaaagtttattaaaatttaattaataaataaaagtataggtcgaaaaaaaaaataaaaaaagtcgac

SEQ ID NO: 57872 - DNA, 596 bp, Gossypium hirsutum
  Clone ID: AW187545.2
gaggggaaaaagggcccaatttctggagttttaaggggggaaaaagttttttttggttaacccggggaagggaaaaagagatttggggtttaaaaaattttttttggaaaggggggaatgggggtttagggggaaaataaggttggatgggaatcaaaggggaaagaagggcccaaaaattaaattccggaatttgttaccattcaaccttcccagggggggggaggtttttagggggggagaacctttccggacggggattaaaatttccccggggggttaaacccaaggaaaaaggtttggaagttttttttttggaaattgggggaaggtaaaggttttagaattttgaagttttaaaggtgggaaccaaaaaggaaaaaaggggggggggtttttttggaattttcctttggggtttttaaaatttggttaaaataaaaaataaaaaatgggaaattttttttaggggtttttttttcctttttaaaaaaaaaaaaaaaaaaaaaaaaaaaaaaaaaaaaaaaaaaaaaaaaaaaaaaaaaaaaaaaaaaaaaaaaaaaaaaaaaaaaaaaaaaaaaaaaaaaaaaaaaaaa

SEQ ID NO: 57873 - DNA, 574 bp, Gossypium hirsutum
  unsure (1)..(574): unsure at all n locations
  Clone ID: AW187486.2
gaaagtttggatccgatgttatgtatgatttgatatatgctagtgctgttnttcttcatatgccggataagcttgtgtgggttggacttgagaggttagtgagtaggttgaagccttacgatgggcgcatatttgtttcgcataacataaaattttgttcgcgattgggaggggatgaatgcacaaaaaggcttgggagtttagggattgagtatcttgggaagcatacacatgacagtttactctttaatcactatgagatttggtttgagtttaggcggtctaaagcttagatggtccgatattatttctgggatttgttatttgtaattcaagaagccagaagtgaagatacagatgatgcatacgggctcattgatcaattccacgattctcttggaaggttaaggctgttgtaccattgatcaatggatatgaaagtgaagggggctttaatcactaagagatttttgtttgaatagatgatctgtttgtgcagtaacattaatgtagttattcaagctgaatagaacagttcgaaaactaaaaaaaaaaaaaaaaaaaaaaaaaaaaa

SEQ ID NO: 57874 - DNA, 597 bp, Gossypium hirsutum
  unsure (1)..(597): unsure at all n locations
  Clone ID: AW187444.2
gtccatcacaatggaatcacgtgaactacgttttccgactgcaatctcttcggtggctgcggttctcaccctctcggaatagctatcaatccttattctgtctaacaaatcaattctccctatatactattaatctcctctccctcttctaatctcacttgatccattcgtcaacacggtttcctctaataactctactacacactcccttatcaacgttcccgtctccgactctccaatcccatctatatccggtacaattatccttacttcatctcatcatatccgttcgattaacacctacatctcttctttccattcccttcatccatgtatatctcatcgtctgcttctatgtagtctcattcacctagcctatattcgtcttaacctcttcgtctatgatatgcatactcattctatcagtttacctttatctcaaatcatcttcagaatctgcgttcaagaccggggactgatggagttcttcattcataaggtccctcccatcttgctttcngcttcagggtaacatcaagtattaattctctgaatccttcttgagctatatattcagcatcttggcaataaatatct

SEQ ID NO: 57875 - DNA, 400 bp, Gossypium hirsutum
  Clone ID: AW187441.2
caatttgacaaccgaaaaccggcagacataaccaaagcggtgatatgagaaaagggtttgactgctaaggtgtggctcttctttgaatcatgtgtatgatggggacacatttgtttttggctttggcagggtgtttgaaaagtgtgggtttgcccctttgtgctttgaggaagaattggtgtgttgtatcttgtacgagagtgagtatgttttttttttcattaaaaattttagtgaccttgtggattcattttagtgtcttataattagaagctggattcaaatttgcccttgggtttctttttgtttcacttgtgtaattgaatactctactagtaattacatacttgtcagttgatgtttgctaaaaaaaaaaaaaaaaaaaaaaaaaaaaaaaaaa

SEQ ID NO: 57876 - DNA, 411 bp, Gossypium hirsutum
  unsure (1)..(411): unsure at all n locations
  Clone ID: AW187438.2
cgtaaattgagtaatgcttcatctcagcatgaatcccatgacaggattgtcatacttgctttggctgttttcaacgctggaggtgtcaccgcttcgcgcttagaccttagccgtttcgttacgatcaaggtaaagctttcactgtgagtttgctgctcgcctctcctcttcctcgatggtatgatgaccataagctttgatgcttataaactctgcctgtgccactcgcttggattggataagagagcttttcgctcggttcgccgatacaaagtctcactgcgctagggactttcattgaatcaatctcggtatgtcaatcagaagctcaagaggagagagttcttgccacgcagctataagacaccttgagaggaanaaaaaacnnnnnaaaaaaaaaaaaaaaaaaaa

SEQ ID NO: 57877 - DNA, 454 bp, Gossypium hirsutum
  Clone ID: AW187437.2
gagactcgccggtgcaaccaagtccatgccacgacccgcttgctcgccctttcggatctctaagcaaaactcgtttcctgctcgcattttcaggtcaccggtggagatgagctgctgtgtggaaacgctgctaccttatcacacagccactgcttcggctttgttgacttccatgctttctgtttctcgccggagatccaattggaccgctgaagatggatgattgtggttgggatgcggagctattcatctccgtgaaaaattccgatcaacctcgtaggacttgatgcattgtattcttcttggacgaatctgaaatatctgatgttattacccaacatttgttctgtgagcatctggaagtaggtatcagataaaaacatacattcaattttcctgttcttataagttcaaaaaatatatcatcaccaggtttaaaaaaaaaaaaaaaaaa

SEQ ID NO: 57878 - DNA, 441 bp, Gossypium hirsutum
  Clone ID: AW187434.2
cacctaaatgccaagtgctctttaaaattggattaacacaaaaggctagcatccttgccagtattccaaatcaaaattaaaacaatagtcttgaaatctcttttaattgggaatttgaatatttcttcagctaagagtactactttgccaagtaaaactaaagaatgtgtacaaaagtaatgttcatattacaaaaacttgacttacatggcacatatcaattaccaacttctagttctacaacccccaaataatgctctaatgataataagaaactaacaaaaaaacctggcaatttcgcagccatcatgtcaatatgttctcctccatgtttgttatttttattctcttttttttttcctctatattctggtcgaattctatctccagtcacttacctatatgccgatttttgtcatcaaggagtttcatttcttccac

SEQ ID NO: 57879 - DNA, 453 bp, Gossypium hirsutum
  unsure (1)..(453): unsure at all n locations
  Clone ID: AW187433.2
aacgaggacttgaaactagagctagtaaaaatgaaaatgagattgaaagaaatagaaagaccatcatccgntgttccgtcagcagcaagcagtcctatgggaattattgtgccatcatttgataaccctcctttgccaagaaaatcattcatgaattcagtttttaagaaacttggacgcctttatcctttcggagttcccccttccggtgccaaagctcgaacaagacctagcaaagataggaggcactccatttcttgacacattgtttggtttgccactatctgtacttttccaaagtgttcctatgtctggtgttttccctctcttttttttttttgttcttttttcttctggggtgctatctatcatattcatgtttgataaatacattattaaaagaaaaaaaaaaaaaaaaaaaaaaaaaaaaaaaaaaaaaaaaaaaaaaaaaaa

SEQ ID NO: 57880 - DNA, 435 bp, Gossypium hirsutum
  Clone ID: AW187431.2
gagaaaggctataccgcaatttctgctgcatagcatacaatactctctgtcaatattatctgtttgattctagtcaaaactcactttagctccgttcttcagcctctagtccacattgttttactttgttaattggaaaggaattgatgctcaaaaatctctgaagttaatcgatcatggttccaccattaaaggagcataaagccttggccctaaggtgcttggctgctagcaatggtgcctaaaaggttattgtttcttgtttaacctcttgccttggcatgtaaatttgaggtcccccttttttttctcaaaaaaaaaaaaaaaaaaaaaaaaaaaaaaaaaaaaaaaaaaaaaaaaaaaaaaaaaaaaaaaaaaaaaaaaaaaaaaaaaaaaaaaaaaaaaaaaaaaaaaaaaaaaaaaaaaaaaaaaaac

SEQ ID NO: 57881 - DNA, 318 bp, Gossypium hirsutum
  Clone ID: AW187430.2
gattcaccgggtcggaacatttacggcagaggaggatttggtagtatgttattggtaatcaaagttatggtgtggagcttaatattgttggagggtggtggaatgtttcagcaatttgaattgagaaaattttgagagtagggaaagtggagggggtgaatggattttggaaatgggtgaaagtggtctattcgattttgtacaaaaggtaagatggagtcgaagtctttgctaagaacttcatttaaaatccttattcttttaaaaaaaaaaaaaaaaaaaaaaaaaaaaaaaaaaaaaaaaaaaaaaaaaaaaaat

SEQ ID NO: 57882 - DNA, 668 bp, Gossypium hirsutum
  Clone ID: AW187355.2
atatatgcatggagatgtagttacttatttggtgtattcatccgcagatttttttcttcactggaagttttgatgaagaagagaagcaaaacggattccagtacttgttgcaagtttatcagtaatttttgggctggctgtggtttttatttctggttttttcatttggaggaggagaaacagtcgagacaaagaaaatagccaagaagttcaattacttgacttggagaaaaataagaacaaaccttggttattggaggatgaaacaggtcaggctcaatatcaaggtcaacttgaaggttcacagtcggcaaattattacctgcttatgatgcaaggaaaggaatttgtagctattactgctggtttttggtatgagtgacatttataatgtttgtgttttggtgtctatttatttgttatcattcaaattaactattgtgagagataagggtgacacagaaggtccctagcccgttttttttttttgtagcttattaagttttgggtaataaggatattactttagtttttgtttgtagcttattaagttttgttgagataaaaatcatttccatacatcttcaagaaaatatacacaggatatttaataagcaaaaaaaaaaaaaaaaaaaaaaaaaaaaaaaaaaaaaaaaaaaaaaaaaaaa

SEQ ID NO: 57883 - DNA, 566 bp, Gossypium hirsutum
  Clone ID: AW187189.2
gcaaagtaaattctttgtttttcactgctacggactacagaggagctgaattatatacttctttagacaccaaactaatcagcatccagtgacgagaaagaactagctttagttacagaatctagttttagtgtttctggatataatataagaagtgtttctgaagatgatcgagagcaactaagaaaatttgtgatagtggtgctgaagcacgatttgaagctggatcacataagggtcggtgatcattttgtgtttgagggagatctaaataaactatgggtggcttgaagaacgatggtatgctgctttctggtactgtttatctgattttatatcggcatagttgctctatattactaagactcaagtgtgagatatgaatatgtgtctaacacgggtatatctcaatcttttctttcaagtttttccatattatatcctcataccccatactcaatatagttggacatagatattttaagaaaaatgaagagttggagtttgatttgttttttcatttatttaatacaattgtttggttgagttttgcaaaaaaaaaaaaa

SEQ ID NO: 57884 - DNA, 623 bp, Gossypium hirsutum
  unsure (1)..(623): unsure at all n locations
  Clone ID: AW187099.2
gacaaacatactaattaccatagccgaaacaataatagtgtttgttgttttgagaattgggagaaattgaacatctaaaatattagctagcaaagaattatggtaactatcaaatctccattgcctctcatcctttgntgntacctcnnggtatctttcgtcttcttcccacatggagcatttctcgtcaactactgggggaaggtggtggcaataatcgaagcaaagcggatgtaagaaaaagtacatcaaaatcagcatcatcttggggtggccaggattcacatccaccaccgtttagccagttttcaaatacaggtccatctacggtcgtgtcgtattctcgtcaggtttccaacagccccacaggcacgggatggaattgcaaaaccacacctactagtaatggttacgtgaaatcgtgttcgaagaccacttatcaatcctacaccagaccataaagtttatgtttcgttctgagataatgcttggtgtgtattctgttgttgtttggtatgtttcgcccataccagccaaaatgatattcatggctggtatattaactgtgcactacgaatgaaataaatgataaaagaaggatatataataaaaaaaaaaaaaaa

SEQ ID NO: 57885 - DNA, 491 bp, Gossypium hirsutum
  Clone ID: AW187058.2
tttttttttttttttttttttttttttttgtttttttttttttttttttttttttttgaaaattttggtttactaatttttaaatgggaacaaatttaataaaaaaaaattacaatacaatgttttcttcatttctttcttttaaaatataaaaacattaaactacataatttcaacacttttttcatacaattaattcatccaagaaatttttccaaaaaccatgaaacaaacatatgccaattttccaatcattcttccccccatgcgccaccgccaaaaccaattggtccaggtcatcatcccgaaccacacaagcctcctccatgatccttataccgtgtatacaatattatgttaccttaggctgggtaccgtacttatgttataaattaaaaaaacctatttctactataataataataaaaatgttatttctacctttaaaaaaaaaaaaaaaaaaaaaaaaaaaaaaaaaaaaaaacaaaaat

SEQ ID NO: 57886 - DNA, 519 bp, Gossypium hirsutum
  Clone ID: AW186851.2
gggcagggggaggagatcggtcgcggggatgcacacggggggagataagaacccccatcaatttcggcccgtgaaagtaatggaacattaggaaacagattgtggaataatacacctgccccagtcctaatgaggggggtgttagaggagagcccttgtgaacatcgaaagtagtaatttgtaagaattcagaaagttttaataagtgggggaatgagagttgtgtttttcgtagattgggaagttcttcagtcacccaagattctttcctgggggcattcaactcaatttttttggagcaaggatgggggaatagaagtatgatcgtaggattggattaatggggcatttcaaaccaggtgctcccatttctattgtctgttaaagtattgtttaaagttgtattgtgggggaattttttcaaaaattgtgtttttgttaaaaaaaaaaaaaaaaaaaaaaaaaaaaaaaaaaaaaaaaaaaaaaaaaaaaaaaaaaaaaaaaaaaaaaaaaaaaaaa

SEQ ID NO: 57887 - DNA, 446 bp, Gossypium hirsutum
  Clone ID: AW186841.2
atttggggggactatcttgatcgcctcattctttaaccatgggttaaaatgtggctaaagtctctccgatggtacgctgaggttagcgtaaattacgatgtgtcgctcgaggtctgtctctcgagcctcctgttgtaccaatgtctatattccgttttaggaagaaggtaatgatcttccggtatggagttttgttttgttttgttgtttcgacaggctgagagcagtgcccgctcccttgtgtttgagggagttgatgcggcattcgaagtaggtgcgggtgaggcattcgagttcgagtggctttggtaccggacagaagaaagaaagagaataataacattgaaatagcttactttataggggcttggaggtttttcctattattatttctcagtttaagctagcgatggaaataagaaaggctaaaaaaaaaaaaaaaaaaa

SEQ ID NO: 57888 - DNA, 641 bp, Gossypium hirsutum
  unsure (1)..(641): unsure at all n locations
  Clone ID: AW186818.2
aaactcaaccactcacaagggccttgaaggatactaccatcttgttcttgtccttntaataggactctgcatcttgaccacgcttgntggagctctcttcccaaacagcttcccggttgatttgtgtagtggaattgctataactctccaaggcctctggttctaccagactgctttcaccctttatggcctcatgatgccggacggttgtcgactcaaggataatgcaatacattgccttccggataatgaagttcgaggccaattgattgccaacttccagctcttttctctggtacttggtgtcctcatcgccgttgtgggattatacaatttcgcagcttcaagatacgggaattccgattttagaagcatgcaatcagttcaaaattgatgagggctgaagccgcatgaaggacttatgctaaggagttcactgtttttttttttgagttttcattgttggtgaaatagaatttaggtggttactgtattattagttcatcaaaatcaacagcacagggaacacaaaaaaaataatgggtgatgtacaaacaaccacagaagaaaaaaaaaattattccacaattccattattcattattgatttgttgaaaaaaaaaaaaaaaaaaaaaaaaaaa

SEQ ID NO: 57889 - DNA, 517 bp, Gossypium hirsutum
  unsure (1)..(517): unsure at all n locations
  Clone ID: AW186813.2
gaaaaatatgaacatcacatatataataagggtaattacatgttattatttactatcataataagtgttatggcccaaaattgcccggcccaaaccattttaaaactaaacatacaaacaaaaataaatacactcacacccaattacaataggcctaaacctgaaacccaatccaaacacctaaccctaatccacaattccagcccaaaactttaacatttttgaaaaaccctaatcacctaaaagtctcaaccgccgcacgcctccctcgtgcacaaaacgccacctccgtgttgtatgctcctccactatgccacctcagaaacgtgcttaatcacgaacctgcaaacaagcgccaaaggagcagcaaagaagtttttgtttttccattcggtggggtcgagctcgtgtcctcngcgaactgggcgcgccgaatctctgattaaggcngcgccggccgaaatanggaaagaaggaaaanattttngggttttaattttttanaaaaaaaaaaaaa

SEQ ID NO: 57890 - DNA, 592 bp, Gossypium hirsutum
  Clone ID: AW186806.2
ggtggttcttggtttctcaaactactacttctttcaatgcttttcattctctccttctctcaagatattactttgtttttatttcatgtttgctgctgctgctttgttttcttgctcttcttatctatatttacgctttgttttgtttttcgatgcttaggattgagtgggaaatggatggagaatcatgttgagtttcgagaatacaatgttcaattggaggaatttgcagagagaggaaaggagatgattgaaatcatggattataaagagccagggcccaatacgaaccccagaagtagttacatattcggccctcctccccaaccacaaccttagcctttattatgtatgtttgaatgtattgcagaagcaaactattgagatggttttacaacttaggattagacaatgtatgtattgtaaaatctatggatttccacttcctatgttacatgaaaatgacaccttggtcttttattacagtaaatgttatgtatgttgagtgcttgattgcaagaacccaataatctattgacttgtaattgcaattaaaaaaaaaaaaaaaaaaaaaaaaagtcgacgcggccct

SEQ ID NO: 57891 - DNA, 650 bp, Gossypium hirsutum
  unsure (1)..(650): unsure at all n locations
  Clone ID: AW186788.2
gaaaaattcagaaaccccctttttcctatagttttgaaacccatcatcgccgccatcgtcgcggcaccattgtgggcagtggttggagtcacgtgaaaatggggggttttaacctccatttaaagcgcccgaaggccatgccttctcagcccgaaagctcgagagaagaaagcctcccctctctctttggactcgatttcgacgacggagaggggctccaacgcacgtccccagggcgattcaggttaaaggggaaggtcaacaaacggggcttccgttttggtgcaaggggacaagaagagccaagcctcaggcgttggacgtgccgacgaggcacgtggggggtgcggcgctaagggaaactangatttcctgctancttgaatgttggaccatgtgggccattaggcttttcttgttattttgggcttgtaacaattggacttgaacttgaacttgtttaataatttatttggtttagttatctaatttgggtctgggccangcaaaataggcccattacaagtataatagtantattatgtctggttgaatggaataaagttgtaatagtatataagacaaaaattgaaatgaccagagtaccctanacaaaaatatttttaggtgaaaaaaaaaaaaacaaaaac

SEQ ID NO: 57892 - DNA, 246 bp, Gossypium hirsutum
  Clone ID: AW186781.2
gtaaatgacaaaaaaaagctaagcatattatggaatctgatctacataatatatgatgtatccgggtttcaactataagaacaaaacatctatggttcattaagtgtcttgcttctagtatccatgcgttgcttggtatgtgtatgtgtgtgtatatatagtgaaatgaaatcattttcacaacctttgttgtgttccaaaaagacaagatcacaccaccccgcaactacaaaatatacatcaatc

SEQ ID NO: 57893 - DNA, 645 bp, Gossypium hirsutum
  unsure (1)..(645): unsure at all n locations
  Clone ID: AW186774.2
ctaaaaacaacctccacttcctctaataaaatcttatgttttcttgtcccttccttcctcctccactttctcttttctagggttttattttatttatcttctttcggttatatatatttttttacctttctttgtgttaaattgaaacctcaaagcaaatagtattacacataaagcgaaaaaaagaactgtaaacaagattaaaaaaaaaaactttctgttaaattaaatgccgtgaaatccatgtgaatcgagttgatggagctgaatttcttgctctggaagccgactgttgtcaagtcacctcgtctttactttttgggagggtttgaatcagagtgaaggggagatctcaggggtttagtcttattctacgaaggatcgagcattgatgtaatgttaattaagattttatcgtgaagagaagaaagaatcttggcctccacaatgcatttcgctaagctcgatgactctcccatgtttcgcaagcagatacaatgcatggaggaaagcgccgagttgttacgtgagagaagcttaaggtgtttcanaggatgccgaaaatacactgaaggaattggggaaggatatgatggggacatancttttgcaagtgcccttgaaatgtttggtggaagacataat

SEQ ID NO: 57894 - DNA, 287 bp, Gossypium hirsutum
  Clone ID: AW187976.1
actaaattaaccactaatttcatcctaccagtgatcaactttctgaactagatgattgatatatttcttacttcaccaagtcctacttaaggactatagtgagataaacacttccttatgtgaactttttgcctggccaatattgtcactagtcactatgctctaggactatgagcaaatgcattgtaaagttctcgttacaggcttcatatatgtatgggtccttcaagtggtgctaatttaaaacttgtaaatgatctttttcaaaaaaaaaaaaaaaaaaaaaa

SEQ ID NO: 57895 - DNA, 636 bp, Gossypium hirsutum
  unsure (1)..(636): unsure at all n locations
  Clone ID: AW187941.1
cagacaggaagaattgttccgtgtggcccttcgccttcgcctttggctttgggtcctccacatccacaaattgacattgaccacttgatgttctccttttgggttaaggtcaatgtcccaaaacttggtttcttattttattttatttttcagtttgatagattcaattatacttgagctttattattaattctcaagcaatcatataaaattatgagtttgagtatacttaaatatttaatatctttaaatttaaaaattttagaaagagtttataaataatttaatatttatattttaaaaatttacaccattaatttatttcatcaattcaaaattttaatttttaatattcaaaaatatattttaggtataataatttatttggacttctaactttaaaagaaaagtcattttagccctccatttaatttttcgtctcttttantcattgtcttgcattgtttgtcaattcaccccaaaataaatgaaaaattaacctttgttaccgttactaatgtgacatatatgttgattgtcatgtgatgccacataaacaatcaattcattttttaaaaaattttaaaaaatatactttaaagaattaaaaattatgggattctttgcaagaacttc

SEQ ID NO: 57896 - DNA, 593 bp, Gossypium hirsutum
  Clone ID: AW187923.1
caaagactgcgaagacttcaaccgaaaaaaaaaatgccgacgaatttaaatttcgaaatggctagaagtctacttggatttacggttcttttgctttttttatcgatctgcgaatccgcttcgttttttcagccgatctccgattctcatcgatctgccgctgttgagctcttcagtccagaccatggatccttaaagagtttggaagagacgtacgaagcactaagaacatttgacgttcttggaattgaaaagaagcctgatgtaaccgcaacagcttgccgtttagtttcggaaactgttgggtcatcatcttcaaccctaaagaatgttttctatgctttaaaagcaaataccattgtgaaatgcaagataaatgactaagcttatcagggcattattacaagacttaatgctgctgtcgatggtgcaagttcattgcctgacttctactattcagtaggaggtctggtgcttgtcaagggctccaaaggtgatgttcatcttgctgatgctgatggaattttccgctcattccaggctttccgccacagtgatggcaggtggcgctctacttctactaatcctgaatc

SEQ ID NO: 57897 - DNA, 538 bp, Gossypium hirsutum
  unsure (1)..(538): unsure at all n locations
  Clone ID: AW187921.1
gcagttttatttaggaagtcccatagctgtgaggcttaacagacaaagaaaacggtggatacttccactagttgggtagaaggtgacgaccctaatgaatcgactatgaaggtggctgttagctacatcagcgctcaaattccttcatcgttattgccctggcttcgatgatcaacccctggcacatttaggtttttatttttgatcttcggccatcctggtcctcaggacccaacacaatattattatttttagatatttcctttaaaattaaaagatgcaaaaggtgttgatacgtcctatccacatagaaagcttaccctcttccacacattaccggtggatgctacagccgctatcactttggctgcaggaggggaatggttaattgaaactctcgacgtcttgtttggtaaacgggatgtttacccangcgccgtagtcttgcctaaccgttcggccggagatgcctttgtatggtatancaagctgtttagctacttgtatcgatttgccacagtgtggttagatacaatgt

SEQ ID NO: 57898 - DNA, 622 bp, Gossypium hirsutum
  unsure (1)..(622): unsure at all n locations
  Clone ID: AW187894.1
gttgaggtattttcagtttatgtttcaaaaatcaactcatattgcgagaagtgagttgagcctcagaacacgctgaggtatttttaatttctattttttaaatttttgttctcagaaattaactcatattgcgagaagtgagttgagcctcagaacacgctgaggtattttcaatttctgtttttcaaatttcagtttttaaaaatcaacttatattgcgagaagtgagttgagcctcaagacacgttgaggtattttcagtttatgtttcaaaaatcaactcatattgcgagaggtgagttgagcctcaggacacgctaaggtaatttcaatttctgtttttcaatttttgcttttcaaaaaatcaactcatgttgcgagaggtgagttgagcctcggggcgcgctgaggtattttcagttactgtttgtcnaaaatcaactcaaattgcgagaagtgagttgagcctcggctcacatgctgaggagttttcaatttctattttttcaaattttatttttcaaaaattaactcatattgcgagaggtgagttgagcctcggggcacgttgagatatttttaaactttattttccaaaatcaacttatattacgagaggtgc

SEQ ID NO: 57899 - DNA, 456 bp, Gossypium hirsutum
  Clone ID: AW187887.1
ctaacaaatgactcaaacttgaaagttactgcagcttctgttcttaacattagctgtcttaaaagttgcatttgaatgaatctgaaaatgatataatcctaaatttagtgttcctgaacacaattataacatcttttcttagcatataaacttagcatgagtcaatgatcagtttaatcttttcagctttggagccatcaaacactggtggtattctcttctttatgggttatgttcttagtttagctgtatagtctacacaaagcatggatgtacagaagtgatgcatgatgaatttgatgcagaattgttaaaagggaaaaaagaagaagatacaaggcagtatttaacactcttgttggagaccttctttacttattttctatttaaaaatgacctctaactgaatagctatctgttagattagaactcattcttgcagccaaaactaatgct

SEQ ID NO: 57900 - DNA, 463 bp, Gossypium hirsutum
  unsure (1)..(463): unsure at all n locations
  Clone ID: AW187858.1
ctaattttccttattacagtcgcctgagcccaacaaatcatgaagaagaggaagaaacatgacgacgaggtcaccgcgcttgctttgaaagggacccgtagtatcatcataatgccatcttcaaaagcaataataattttctggaaataatgcttacaacgacgtattggtcatcgtttcaaggccaacaatttattgcaaaaagaaaaagaagctttttttggcggcgtacatgggaaagccaggcactttcttcttccttctttcatgttcttgtttactggggatttttttaaattcaatttttacgtgattattttcgtgataatgataatttagaaatatataatatatatgtaactttgttcttaatatttagctattatttatagctttttagttcagcaacaaatgaaaattttttttctttatttttannnnnnnnaannaaaaaaaaaaaaaa

SEQ ID NO: 57901 - DNA, 558 bp, Gossypium hirsutum
  Clone ID: AW187852.1
gaggggttaaaatctcgtcttggtcctcgaatcgatgatcaacaacgctccccacgagaacaaatcagggtccagacctctaggtcgaagagtaatgcgtcttcacattccagatctcccgatatctcgccatcaagaaatcgcaacagaaaatcgcagtctccaaacacgtcaaaatcaagctcaccctctggacaaagaggattggtgtcttatgcagattgaatccatgccttccatgacatcatttacatttaatcgaagcatagctatttgtcttggttgtgtttcagagggcatgccttttttatacacgcagttattgatcatcatatgctatttagattgtcgattcagagttggcaaatagttctagtttttgtttgcatggtgacttaatacttctagagcttatttgaaatagcaagaggcatgctcggtgttacctaaattaagtaaactctgtttctttcttatggaatgttctatgtgctttgtttcaaatttgactcaacatttgttatatgctttaatcggatgaatctctctttttgtgat

SEQ ID NO: 57902 - DNA, 639 bp, Gossypium hirsutum
  unsure (1)..(639): unsure at all n locations
  Clone ID: AW187841.1
gactctcaaactttgcagaagcgtcgggcctccccatcagttggcataaaagtcaactcttcctttccaggaaaggaattgacaggcactttatttcgggcattcttgatctgtctaggggataacaaacgtcaaggggcttggcttggttcaccctctctggtacatcctaggacattaaagtgagatgtcggccgttccactcgcgagtaaagaatctttaccactactacctactaacttctcgcctaatccctcaggaaagttgaccgactaaggcctcttcaaanccggacggaggatcactttttctttgaacgaatcttgctctcttatctgcttcttcttttgttgacaattcttctgttgtcgtaaagggaagaactggtctttcanggccccgacgggtcaatgctttggattcagcccttcttatggacttcccctgtctcagttcatgtctaactggcacctagggggaacccggcctttcatcatttcattccttaccatctttcggtagcagcatccggagcaagaactggtattctcccatgggtccagggccttcgttccctcttaagtaaataggctggtctatttcgccttcgctacaaccaggaagctttgaccgaagtt

SEQ ID NO: 57903 - DNA, 903 bp, Gossypium hirsutum
  unsure (1)..(903): unsure at all n locations
  Clone ID: AW187840.1
agggcgaaaacaaagtttcgcctttcataacccacttcagtttcagtttggnnnnnnnngntannncccnntatcnnctctcttgnatctcttctccatgcctcatggtcacggatgcgccgctttctgctttatcgtttatgagacttgacatcgatctgtgctgactattcgcactcgggttcttctttcttttccaaaggcgaccccttctgtgctcgttccgtgcttagcgggtttgggttgctgccatccgccctgcccgtggtttctgaggccgactctccagttgtctgacgtctttcttctttcggccttctctcccctctctgtctcttttctttctctgtcacttgctttgctgtcgggttccaccgcgtttggtccctgtctcagcctcactcctctcctttcattctgcctcgcttcgctgttgtcgcacctgcctgtcgatcatcctctgccctgtccgttctcccgcgctctccaccttctaccctgtatcactccgcgttccgctgctctctctctggctcgacgcgtcgcactcgccgtggtcctgatgactgtatcggacgctatcgcgctccgttctcaccgatccccgagattaccctcgcctcttctctgccctgtccataggctcagtgtcgtggcttgtccgaccgacatattctacctcgtggcttctgcgtgcgtgtgcgctcttcgttctctcactagctcttgtcactattcggctccgtgttatttccttacatagcgtacccgcagtattcgtgttatatatttctttctgttgtgttgggctccggtgttgcaccgctcgacttcttgattgtagactgtagatacgttacttgagtgcatcttcatcttgtctcctctctgctcctagtcttc

SEQ ID NO: 57904 - DNA, 223 bp, Gossypium hirsutum
  Clone ID: AW187837.1
cacgctaccaaatagccaccgcttgaatagaacagaaccaccaaaacctgaagttcacgtctggctctacggcccctttacactagtcaccaacatatgaaaaatgtacggttatcatatttgccaagaatgcagttttaatgaaaaataacaattacaaaaccaatgttgttggcaatttcttcagtcagtagctctatataaatgaaaatggcgggttggg

SEQ ID NO: 57905 - DNA, 217 bp, Gossypium hirsutum
  Clone ID: AW187833.1
agcaaagtcccagtatctaagattaagggcaaagcatggcttctgcatcagagattgcagccaagttgaatctggtgcccaaccctgaaggtggtctctataccgaaactttcagagatatctccatcttcctctccaaatctcaacttcctcctcactacaaagttgatcgtcctgttagcacatgtatttacttcatgctacaatccgggaatgt

SEQ ID NO: 57906 - DNA, 166 bp, Gossypium hirsutum
  Clone ID: AW187832.1
taactatctgctcttctggttctctaccactcatacttgatttagggtgatggtccctcttcctgggcatccgcccccatagatagattgtcttccctccttcttacgtttcaatccacttgctttatttatgcatgctcttacttggatcgaccatcactccttc

SEQ ID NO: 57907 - DNA, 156 bp, Gossypium hirsutum
  unsure (1)..(156): unsure at all n locations
  Clone ID: AW187830.1
aattaaagtgtgtaatttaatcaacataagcaaatgacattcaaagcnnnnctctactcccgaataaatttctgaatttggaagtgacttggataggtggcattttccacttanttagttatatttactgcacaaaaaaaaaaaaaaaaaaaaaaa

SEQ ID NO: 57908 - DNA, 595 bp, Gossypium hirsutum
  unsure (1)..(595): unsure at all n locations
  Clone ID: AW187820.1
gttgaagcaaaaccctttttttctctcacattctttttgttataatcaaccctttttgcttccagaaatctacctaaaaccaatattttttttttggattttttttcttatcaaaaaaaggctgaatattgtattggaggcattggttatccatgggagaaaccccggtgttttatgttgagaatctaaaagatagagtttcaaatggatttaatttaagattcaaaggctttgagacatccattgatgttggtgacaaaacatttgtgattggttccaataacaatgattctatatcatcaattgaggttcaaatttatgacaaatccacagggaaatgggtgattcctaccgtgtttggaacagaaccgaagcgatatgaaggccattcagctattcttttgaatgaagataggataatggttatcacctggggttccaccccaaatgactgcatttggtttcttgagatggataccgagtacgtttagcaacaaaaaaaagctttggggactgaagtcattgcgtggagtaagggtgtgatgggtgatgcccaaaaaccanttgttatcattggtccttccngagttngtaa

SEQ ID NO: 57909 - DNA, 654 bp, Gossypium hirsutum
  Clone ID: AW187806.1
gagggagagaaggaaaaggggaggaagaaaagaatcgctgttttcatggctttcggcaccaaaggcgacgtctatgctattgctgccattgctgcagctttcgctacggaccagaatggttacgacgttgcttttatcactcattcggcacatcagaatctaagtccacatttggcaaaaaaagaaaataatttttgttccaatttcttcgccacctgttctttcaagtaatgggactgatgataagacaggttcaccgggattagaattttcagagcacaaaaagattattgcaaaagaacaaagaaaagagtgctgtttggcagttgaaaggctattcggaaggctggagccttgcaaaacttttccatgtccgttgtattgttcttgctccttatgttgttccttatagtgcaccttcattctttgagcattacttcagtaaagaacttcctcttttgtacaaatatctccaggacgctcccgctgataaggtctgctggaaagatgtaattcattggatgtggccactttttattgataattgggaatcttggagaagtgaggatttgaatctgagtccttatccttttacagaaccggtaacaggtcttcctacttggcacgatagaacaccatctcccctactatttt

SEQ ID NO: 57910 - DNA, 555 bp, Gossypium hirsutum
  Clone ID: AW187801.1
ctgacattgtaacccatggaattaactcctgccaagttctcaaacttgtgtatagattgtcttgcatgttattttattgttaagctttctgaagatacttgtggtcttagcactgaggcgttaaaccttttctattttctttagactgctttttttttttttgagagaaatcttgctgaaatctagtgaacatcttaatactgagagtggctagtagcttttgattcttctcttttaatgctgcatgtgccttctcttgcattcatactgaccaatgtcaaatgtcaatctgattttttttaataaggggtagggctgtccccggattgaacccgggatgggtgtcaattgaagacttgagcgcaagttcttccccactccaactgtggttcaatcaaccaatctgaataaattttgatgctgttgaaatagtggtattatattatctgggaacttaaattcaatatgctcagttgagttgatgatatgctgataatccatgtttgcttaataaccttgtaaggagtttgaacttattgttaatcccctctttat

SEQ ID NO: 57911 - DNA, 272 bp, Gossypium hirsutum
  Clone ID: AW187790.1
caagtaaccgtagaaagtgttttaagagctgactaaagctttagttaacccttgtctctttgtaagtaatgttggccaaaggtgcgctagcccacggtggttattgatgcattgtcattcaaactgccaccgtgagcggcggatatattacataaataaataaagatattaatggggtatgtgtaataatgtgcataagtatgttatttcaatttaatcaaaacattaataaaacttaattaattttggggttcaaaaaaaaaaaaaaaaaa

SEQ ID NO: 57912 - DNA, 646 bp, Gossypium hirsutum
  Clone ID: AW187784.1
attaaagtgtgtaatttaatcaacataagcaaatgacattcaaagcccacctcctcccgaaaataaataggcagagcgcgggtctcacctccttctgtggctcctccccttccggaggaggtgggctttgactgtcatttgcttatgttcattactctgtctgccgccaccgcggaggtattccacggcattatactattattcactcccgactcgatctctggccttggaactgactcttcttcgtggggatccccccgccgttccccacctcttccgctcgcagtacatccccctttctcctttcctgcgtcttccccaccagggccaccccccattcccctctcccctcattccctccccctcgtttctccacgcgcgaccctccccgctcctcccgccaccgcgaccccccgggtgtttctcgctactccccccccttacctgctccttcctcccttccccctctctcgccctctccccctaccatggccctctctccacttgccctccccccgttctccgcgctttccctcctccacccatcgtcgatccccggcgtcccccttctgcggtcccctactcctgctggttgtccggggtccccgcaccactcctgaacccctcatttctcggtcctccgctt

SEQ ID NO: 57913 - DNA, 621 bp, Gossypium hirsutum
  unsure (1)..(621): unsure at all n locations
  Clone ID: AW187781.1
cccactctggctcagccgcaccacccggggtgcgacccacccgagaagcaagctattacagcgagcggctggagctgtagggagccaaggagcaaggcagtaaataagatagaagaaggggccgggctcccggtggagcaaaggagacggttaggataacgaacttgaaacgcggagcccgagcggctggcgagcgagtggttagtggccaatagcgccctagttgatggcattcctctctgcggctggcactcgaagaaccacggggcactccatacagagcaagcaagtcttagggatggatgagacgcccgcgcaaggacctcaattctcattaggaggtcgaaccaaggacctatggaagtcggggctaccctgtccccatgggcaacgcaacagtgtcctgagggaggagtttagaggccttatattancacggacttctttttctttctaggtcatgcgaagggggccagtccaagatcgtactgttcctctacaaagacaacagacgctctcaacggctaggcgtcactctctttctgagttattccagcttcttcattctttcgtgccgcggtgaaaaataaaaaagaaggccgtctcancggaaagagaagc

SEQ ID NO: 57914 - DNA, 635 bp, Gossypium hirsutum
  unsure (1)..(635): unsure at all n locations
  Clone ID: AW187779.1
gtgctgtgaaaacttggcaagcaacaataggtgcccgtgaagatggaataatgacggcagaacttcttcaaaggttgttcgaagaacaggaagtcaaaagttctagctcaagcaatattgcaactatttgggagaaggaggggaccaatggaactgcaataacgtctttgacagaaatctcagagatgcaacagaaagttgtgaaagaggaaggtttcacagaagctgaggtatctcaacaccgagtttttctgcttggagaaaaccggtgggaagaaccttctaggcttactggtaaggataaacaanctacggggagtgaaaacataaatgccaaaacaagctgccatgcttgtcggggagaaggccggttaatgtgcgcaaagtgtgatggaacaggtgaacctaatgttgaaccacagttcttaaaatgggtggacgaaggagcaaattgtccatactgtgacggccttgggtatacaacttgtgaagtatgccaaggaagagcagtggtttaggttgtaatgttcattanatacnaaaacattaaaagaaagaactccaattatacnaaaaaaaaaacccataattcatgatgtttcaaagaatccattacgcatgagattctttctttc

SEQ ID NO: 57915 - DNA, 179 bp, Gossypium hirsutum
  Clone ID: AW187775.1
caccgcttaacactcgttgacttcgtcctcctcgtgctatattggtgcactcggattccattctcgaacccctctctacccttgctcagcctcctcataagattgaggtgggagtggacctatttagtcctattggttctaaaatgacagtatttacgtacatcttgcactgaatttcc

SEQ ID NO: 57916 - DNA, 671 bp, Gossypium hirsutum
  unsure (1)..(671): unsure at all n locations
  Clone ID: AW187758.1
aggtagatgagtaggttttattttccaaccaatcaaacactgggcaaagaagggggtcacactaccaaagcagctgtttcatattctccaaaacctttattctcaagatctatttctctttatcttcctctctatactatattatgcagctaaagaaactgtgaccctttcaagtttttatcttcttctttcttttctttttttcttttttgtactttggaaagatgacccttcgagttctttgagatctgggcattattataatctcagatgcaatcagaagaggctattcttttttccatttaaagaattacattgaggataagataagatggggaagaaaggaaaatggttgtcttctctaaagaaagccttcaccccagaatccaaggaaaagaaaacccagaaatccaaagaacaggttttgggaaagcaagtggatttgggttccaatgattctgatgcagccactttagaaactctcaacttgtcccctcctccccagccacagaaggtgaaattaatcgaaaccgaagctgaaccgagcgagcaaacttaccctgtggaagttgctattgctgctgctgctgctgtggctttggccgctccanctgaggcagttgcggatgtcgttcgtcgtcaatccaacacaggtcctcggtttgctggaa

SEQ ID NO: 57917 - DNA, 594 bp, Gossypium hirsutum
  Clone ID: AW187752.1
gttcactgtcacttaaccaaagctacaacaatggcagcaaatcctcaataacaaaaaagaaaaagagagtaatggccattactacaacaagattgacggaaatgcccctcagaaccccactccctttctcatccaattcctattcttcttctctcaaccttttcttctcacttccaaagccttcatttcgtttcctcactgcttcctcttctctccgctccggaattaatccgggttccatttcgaaccgctattctcacccgtggtatcatcgcctatccaccggcgcctcttgttcttgttcttcttcccttcaagcttggtcttctccttctgaaaaagtcatccaatcggacggtaacggtaaggtggactctgaaactcggtatctcaataaagggcaaagcgctataaacagaattgttctcaggttacggaacttagggttaggatccgatgacgaagacgaacaagatgacggaactgacgattataattcgacgccggtgactggagaaaaaaggttaggtgatttgttgaagagagaatgggttcggcctgataccaggctgattcagaaagataaacaagatc

SEQ ID NO: 57918 - DNA, 602 bp, Gossypium hirsutum
  unsure (1)..(602): unsure at all n locations
  Clone ID: AW187751.1
ccttgatctccatcttggatgagttgcgaaacctagaagtgcttaacatttctcactgccttttgattgaaataccgcctcctcctgccccaagaagaattatgagggagcttgatcagtgtgttcttgacaaggcatctcggttacgtgaatttctaacatgcatgaaagattcatgcatcatgtgtcaacggactaaaaacgatgaagggcttatgaggtggtataagtatgaagaaggggtatggaaagctgatgaggtgagctcactttccctttgatttgagccgttttgagtttgtattgacgaggatgagatatgtacaattcgataaaagctcgttctcattttcgtgatggatagctctcgtgcgcttatgtggttgggtaggaagcatancttactttccgtctttggttaatgtatttccttgtatgctgtaaacaaaataagttgttgaatgcagatagttgagaagtgtcatttaccatgcataatgtttcgtttggaaggttgtaggtctanctcgcggattaggcatctatatctcattactgtatatatggtccgctttttttcgatttacatatgataggatctt

SEQ ID NO: 57919 - DNA, 608 bp, Gossypium hirsutum
  unsure (1)..(608): unsure at all n locations
  Clone ID: AW187748.1
ccatttcatatcccgatcagtggctattccgaatcctcttgcgcgactccgattacgacggagcgagcagaaggccggtcaccaggtaagttttctttctcaaaacttattttctcttttatttctacgctagtaatgaacgaaagaaccccctttcgttatatctatatgtatgcaacaaaaaaacaacaggatcacttgctgagaagcaaataccaagagaaaaacgaaaaaaggaaccaccttttgagaaaaaaaggatcaatcgatctttaatctttgttttttttttgtgtttcaatatgtcttttctgtgtatttttacaatctggaagtcctctttgctctattacaatcattttatatatcgaaaaacaaaaaaaaatagaaaaaggaaaaaacaaaatctgtcattttcgctattttctttttttctttttttgttatttgctgctgttttttttgttctttctattanctggcatctttgttttctgctttgttgttcctttgttgcaggtacacgctcggatggggcgtacgtgcgaagaaaaaaacctgatggctgcgggtgctggaggcttgctattgctgctagggtttctgtg

SEQ ID NO: 57920 - DNA, 579 bp, Gossypium hirsutum
  unsure (1)..(579): unsure at all n locations
  Clone ID: AW187744.1
aaacaagggaaaggccggtaatgttgatggcccaaatgatgcgaagccatctaacgagggtcagaataccgaaatccagcagaaagacacaaatgacaaggaaacaaacggcaaggacacaaatgagaaggaactgaacggcagggacacagatgacaagggaacaaacgacattgaagaacaacataaggagtgagagaattgccggtttgtcatgttaatactcagcattcatatccatcttttgctgccttcaattcttctattcattggcctcagtagatattttattagcattggggtaattcaggagaccagtagtttgcatctttataattttttactagaaaccaaggtgatatccataatcatcaattgtttgctccattattagatggtaattactaataatactttgtagaagtaaagagaatgtaagaacaagtgtaatcatcctttaaggagtgatttcctgcaaatccgggtctcgagtttcgggcctttgtatcgaanaaggaaaagaaacgagagatacnaagggaatcaactataaagtatatggtgaagttttgtaatgga

SEQ ID NO: 57921 - DNA, 567 bp, Gossypium hirsutum
  Clone ID: AW187772.1
gccatagaaacacctagagtaactcagaaaccaattcaacaaagcattcatcggtctctccctcggttcatgtcctctaccgtggctagtcgagaaaggcaaagcgcagccgaaaaagatatcggtacaagggcaagaacctttagaccaagagccaggagttcaacgcagctctcaggtttccagtccctcagcttttcagacaaccgctttggatcacttttgcgacactcggtgaagaattcccggttcaaagacacaaatggtccagccacagagagcccaaagtgcaatgactcatcttccttgaagacaacttccttgtcaagaagcaaggtggtcacgtcatctgatccaaacttgagagttaaacttggtcatcataaaagaaggatgtctgattttgtctaacaattaagagttaaaactgaagtgtgttggatcctattttttcatttttgcttagtgttttcctatgttacttggactcgggtaagtgtccatgtttggatatatgtcgggcacgagtactataagaaaaatgaagaatctgagtaacatataagc

SEQ ID NO: 57922 - DNA, 560 bp, Gossypium hirsutum
  Clone ID: AW187771.1
ctaaaacttgagataaatggggattttagatgacagtttaacgcgattcccatatttcttttatggatataatgcctaaagttcaactaagaccacatacttcatttctagtgaaattgtttaagcaattgtgccgttgtataaattgttaaaattctgttaaatgtacattcaaggttaaacatggttctgcttatcagggaattcgtttgacaatagggttatgctgataatgctttctgcagaatatggtgactagtctagcagcctgtggaattgaccaaaccgaataaagcaaattaaaaactatcatcctgtgttgctttaattttcatttttcttaaagtatccatgttcaacacattcccggacgtgggtatagcatatgaccctccaaatacatgaaaggttatgttacttggacttcggtgtaagtattggacataggcatctgacctgagtattttcagttttttctaggatcgcatgtatttggaggacttttggaggattatatctcgatgcccatgtctgagcatgtgttggagatgaattcagac

SEQ ID NO: 57923 - DNA, 552 bp, Gossypium hirsutum
  Clone ID: AW187743.1
gcagaggtacaacttcgttattcctctgcacttgttcagggtgcaacaaatgttttctggatggatatacaatcaaatacaaggtgtttccagtctctctttcagtacctccttgacgaagtcacattggagtcgacacggttaaaaaaaattccaatacaggcccagcgagatctttatcttctactttcaaggttcatattcttttacaactcagttgaaaaaattgaaagcttcctaaagcaatgccccgtgtttccaaattctttcctgattggtggaccagcagatatacttgttattgaactagccgaccagcttcaaaaattaaaggttgagccggtcttactgcattatctttcgcaggttaagattctccgaggcatggaactgagaatggcgacaagtacaaggctgaagacctgtctgtatagctttacctcacctggtggtccaatgtatcctacaagggctgtccgtcatgcagcttgggatgccttaaatttcctttttcctgtagggcgtttaccacgacatctaataagtttgttc

SEQ ID NO: 57924 - DNA, 552 bp, Gossypium hirsutum
  unsure (1)..(552): unsure at all n locations
  Clone ID: AW187742.1
ctttaaacccgccggccctttatttttcattgcaggaaagggaaacaaaaaattcctctaaaattgccgtttcttcacttaatagaaaaaattttgtaatctaacaaacaaaatttttgttagcctttggtttgattttttattttaatggccaagggagatgatgcagtgagaagaaagaaaaacaaagcacaaagaaagaagctaaataggaaaagtgattcttcaactgtatcagctcgagttgcttccattatcgccgccaaaaagcgccgaaaagccggtaaacgtcgcatttgtcaggggatgtgttttanccttccgactcctgatgatcccttcaatgagagactcgataagaaggatatcagtagaagggaaccccaaaaacccaaaccttcgaaactggatcgtaaagtttcagccaagaggaaggacagtgtggcaacaaaaggatctgttcttgggcataatgtggctttgaaggatgaacagaaaaaatcagttacattaattaataatatggggaagtctaaacatatagactcaggt

SEQ ID NO: 57925 - DNA, 574 bp, Gossypium hirsutum
  unsure (1)..(574): unsure at all n locations
  Clone ID: AW187734.1
atgaaagggaagaagcagcagtaggggttggtggggcagtgttatcacttgggagcctagtaagaaagaatttatacaatttggggcttcttattaaatcatattcttgacgtggaaactccaactctcgtggcagcaatttggtggcaaagagctttgagctgtggccttggtgtacatatgaaggtggaatgtggtaataaatgttatagtcggattttgtaggtacaaaagataccaaccgaagagattacaaatgtttaagattcatttatcggacttactgtcagctaaaggggatagttgagattcgattgtcttttttagcctattggaaaccacctttaaagggtagtgaatttgttggttttggcttcaactttgattggtccaccatggttttttttttctttttttttaggaagtgaagaattttaaatgacaaaaagtgggggatgttggtggggtctgtgaatttgtgggtataaatttggttggtangaaaaaaaattgggtagaanaaaatcatggtttctccttgtatactacatttgtacataatttttattgtcta

SEQ ID NO: 57926 - DNA, 579 bp, Gossypium hirsutum
  unsure (1)..(579): unsure at all n locations
  Clone ID: AW187731.1
ctcggcagttctaaatttctctcgttaaaccaactattagtcattacattgactgcatacttagtaatttgacttggccagatttggttttggagctgtaatactggaatgccttcttcatttagggccagaaacctggcatccacttcaagaatgacctttccttctgttctctctctctctttatgttctttataactgaagtatcaaaatcttaaggtaaattgggaccttttggccaaggagtttatacattctggtctaaacgagttattcttactagtcttcgctatatctgctccaaaataagacctaaacacatgatttattgactcaacttaacatacaccctttgacttcaaatggaggaatcccaattgaagttgtcagactctggtttaaagtatacaatttcatcttctagttgcagtcttgcaacatgcatcatctttctaaattgcaacattcatggagatggttaacattttgattagatgttaaagaggccaacaagtcattcattctaatcattattattattttgctggaatanggtctgctgattttaaacttctcttt

SEQ ID NO: 57927 - DNA, 544 bp, Gossypium hirsutum
  unsure (1)..(544): unsure at all n locations
  Clone ID: AW187729.1
cctatactcctactacctgtcaagactcaagagaacactggtagctagaaacggtgcattggttttggctaggggtaaaggaaaataaaaatgaaaaaataaagaaaaaaggaaatcaaacggcagaaaacttagaaaaaaaaactgaagaggcctaaagtcctaaactctatcatcctctcaaaaccctatcaaattcttggaatatgctggttgtgccttctcccttcatcttcatccctaacctaaagtctatttgcattgcaaaaacaaacaagaatcaagacaaaatttcagtgaaccaaatttatgacatgctttatatgatggaccgtgatgatatacttgttggattaggaggagaagctggatcatggaatacgataccatacaaccaaatattgatggatatcttttgcgggaaaagtgtaccactttttttcaatggtggtttatatttttcattttttcaaggttttctanttttcaactctcctctctctttcaacatgatgatgacaatggcagaaggtaaaggaagaat

SEQ ID NO: 57928 - DNA, 541 bp, Gossypium hirsutum
  unsure (1)..(541): unsure at all n locations
  Clone ID: AW187728.1
atgaatgtgaactttttttttcgtgaatttatgttttgattttctggtaaccaaaaatcggtttctgggttttagttcctttatgttcttggtttcttgctcatatatttggtggttgggaatagtaactgaaagattttggcccctggttatgctgaatgtcaccgctgtcgcggtaatagtaacttgctgtttactaatgatagaataatctaaatttgaaagcttttcataattcatactattttctttggaaacgtaaaggtgttatcatggccttttcctcttcctgattcacgggtttctaaagagaacctaattaagaatcatgaaacgtccaatggttggccacttggactacagataatgaatataaggcttgggttacaacaaaggttacaggctgcggctccagctgtggaactatactttttgcacattccctctancagtttttcctcattctcctcttccaaccttgacaccgagtcctcagcatcatttttccaagataacagcgtatccctggggaagctaattc

SEQ ID NO: 57929 - DNA, 547 bp, Gossypium hirsutum
  Clone ID: AW187727.1
attatgactatcctctctaaatcttaggtatgaaccacaaatcctccaatccaattatctactactggctcacatttaaaaacaacttggggtgccactcccagaaactcctcattcaatcctccatgcgattagtgtaaaactgacgtcccctacttctaaaatgccaatcttaaacactcgagcttctcccaatgacggttaaataactatcattgcaatcatcttcgtctgaagtcctatggcggaagtacaatctctgtctgcactggtacttctaccttcaccccttattcaccctgcggaaggtggatcgtaacaaaatgatcaaatgaagatattaggcctatccttaccttatgatcacaatccttcgtaaactacaccataaatcccgatccacactatcgctcaattaaactttgataatcataatctatctgctcatccactatgtgaacatactacaacttgtatccctctgagaacttcatagatttagcccgtcgtatcaataggctacctctttctaattcctatcctctcc

SEQ ID NO: 57930 - DNA, 661 bp, Gossypium hirsutum
  Clone ID: AW187725.1
atcattcagacaaggttaaagagcaagacaacaacaattggctccgcatacaagctctgtctcacttcccatttttcattttccaccgttaatgagttctctctgttttgttacttaaaaaagccatgcagaaaaagggaaaggatttgcagagagttgggatttgccagggaatcttcaatttcatcatcagcagccttgttggttttagcctgaaacgcatcacgttggggcaccctatgccccgtggttcaaccaatgaagctcaagaaccactcataagccaagccaagctcgatgaaaacccaaggatagatgattccggttctgcagttcggattcacttcaagcaaacagaagaagaagagctggaggattggaattggactcatgttgacaagcttggctcatcagttcatgtagcagataaagatgacggtgatgatgaagcaatggagaaaaggaataaggacattccacggctaaatggcgtttcgcttgatactgatgaacctcaacaagtccatgggaaaacaggccgaagggtcatcattcctataacagatagtgaaggtacaaaatcagcaaaagcattacaatctgatgccaaaaaaccgatgcttacaggtctggggttcaacattaatgaaatctctgaaag

SEQ ID NO: 57931 - DNA, 663 bp, Gossypium hirsutum
  unsure (1)..(663): unsure at all n locations
  Clone ID: AW187724.1
aaaggttctgtgaagaagtctcagaaaacacatatgaatcgtctgtattgtgtttgtcacgtgaagatcgtccangtatccatcagtataatggtcatgaaccagtgagtaggtctatagtcgaccatgacagtgatagttctgattcagagatatttagggttaaacggcgttcttttttgaaggttgagaaaagaaatggcaaccacaccatggcatcaaatagctctgaacaccaggggctcaagcgattaaagaaactccaacatgaaaaaagaagtgggcaatcaatgccatctgattgctctagaaacgatgaaccaaatcgtaacaccaatcgtgcttctaattacaaagaatccccagagaacactttgaaggacagatatggaagaagcaaccttcccatctccataaagtacaagaaattgggaaatgaggaagcaatgattaggcaacgagagcaccataaaaacgacaggttgaagcatgaggtgggaaagtacacgagggaacctcctcccttaaagaacggtctaaaacggattaaagtgagggggccaacttatgtaggttcanaaagcantctggattgaaagtttatacttacataaatgtgcanaanaactgattggagttccgactttgctaacttcattcccg

SEQ ID NO: 57932 - DNA, 629 bp, Gossypium hirsutum
  Clone ID: AW187717.1
gtactatctgcagcatcaaaacggaaatgtccgattacacaaccctttgctccagtatggtacagttgctggtacaattggacatgtactcgccctatgcaagaataggctacctaagttctccaactcttccaattctcatgggaaactcggttatcaccaccctcctctctgctctacctccccccccctgtcctgtcttacatctctttcaccttctttctctccctcctctctcacccatctctctcatctctcctcctctctcctttatcatccgtccacatcatccttctccttacgattctctctcatcatggacctggagctccctcgtttccatcttctcccatctgtcataacttcacctccctcgctgagcttccccttgtggttgccccctcctcgccctctcttgggcagggattccatacttcggatctctcagattgtggattccgtgggacccccttgtatcatctccgccgaattcttgtccaggctctccagtcttcacgtttctcgaccctctcctgttgactgcatttgtgctctttacctaaactttactggatcttccccttccccggtactgatgtgcatctgcgtgattgttctcatcccatgtc

SEQ ID NO: 57933 - DNA, 581 bp, Gossypium hirsutum
  unsure (1)..(581): unsure at all n locations
  Clone ID: AW187712.1
caaaaatgcaaacaggcagctcttatttcttcaccagacgttcaagcagaggggtggtgtcttgtgaagattaccatgagggagcaacggtggcaattccattcaattgggagtcagaacctggcacgcctaaagtcaagtcttgtgaaatcccccgcctccctcctctaacgcccccaccttcctacttttatgccactcccaaaagaacatctgttaaacagcactcgaagcctaaacttcttaataccatcttccctaagcgtctcaggagaaaacctcgtgtgcaactttctcctgctgcttcttcttcatcatcatcctcgtcggcttcttcatcgcgttcatcgtcaccgtggccaagagcgtattccttgccatcatctccaataagtgcatctaacttatatgcaggtaatgagttaccaaggggagaactattctccggttcaagggcggctgacaaggaaaaccatgaatacgaatactccgtttcaactccatgttttggttgtggtggtggaacaggtcctatgtctcaaggtttttgttcaacaatgctcaaggcattgcttangaaa

SEQ ID NO: 57934 - DNA, 508 bp, Gossypium hirsutum
  unsure (1)..(508): unsure at all n locations
  Clone ID: AW187706.1
ttttttttttaaataaacacgtagtaatatcatctatatatgtatccgaatctatttttacaagctttttttcctttttcttttacatgaatgaacgagctattcataaagaaatgtagagctatatatggtaatgaatgaatgaaacaacaaattaatttcctatagatgcctttcaaatctgaaaattactaggtagaatataaatgcaggtaatatctatactctcataatactgtgtaaatattcttttattgccgccttagagctgcaaggcgagttgccaaatcatcataatccggtagcttaggatgcacatgcccagcaaacccatctgaggcagctcgggtgtgtcttcctgctctctcagtaaaacttgttgtttctttggaaaaagatgcaactctgcctggaagtgaaatggggttggatttagtgcttcgtaagcctggagctttacttgtgccttcggattcttgttttccaggaggaggtgttcgatnnnnng

SEQ ID NO: 57935 - DNA, 516 bp, Gossypium hirsutum
  unsure (1)..(516): unsure at all n locations
  Clone ID: AW187702.1
aggaagaaaccatagcccttttatttttctttgctgggatttgatgaccaagaatcaagccactgctggaccaccaccattgccggtcaccgcatacagtgaccgaagtttaaaaagataagttctttttgtcttttttatcctctttaatagatgaacgaacaacaaaatggttagtttcgaaaacacaaaggaaaaaaatgaaaaaagaagaaacaaacaacaaccttggtggttttcggtttgccagatctgttttgctttcaatcgatggtgtaggctttctgtttgtctgactggtggttatttccctatattcaaatgcttgtattttggtaaaattcttgctctttgatttttagatgccactatttgtatcaaatctgcgtttttattgaataatccaaaaaaaaaacattgttacactctcatggctttatagcctaaattctaactgtttttgcctctttttgctgcaggtgaaggcgaaacgtgggaatggaggctctcnnnntc

SEQ ID NO: 57936 - DNA, 582 bp, Gossypium hirsutum
  Clone ID: AW187695.1
gttctcccaacaaattaacttctgattccaccaagacagatccagagagcggcgacggacccgacgcaccacgactatgactgtccaccagattggacattcggtcaccagatgaagagccaacaaactcacgattaaaatggaagtagtatcgctgggcaaaattatcaaagtgcctacaaatctggcattaaagacgagtgcgaaaccctcgaccgcgatctccagacgagaaccgaccgccacgaacagagcccacctgtgacggagtagcttccaaaaggttcgcacaaagaggtacatcctgtaccacacacgcggactgactctcatattcaagcagcacattgactaaacgctgaagcggtagaggctccgacaaaaacgacgtgagggtgatgaccgaatcaaactcttgagtcgagagatttttgtacctataacggctgtgaagagatgagtggcattgttccacacatcacacgccattcgtgcctctgtaaaggatgagagaagtgaggaactaatcgtggacagtagccaagaaatgagtaaccgatcttgctaaataaacgccgaggt

SEQ ID NO: 57937 - DNA, 530 bp, Gossypium hirsutum
  Clone ID: AW187687.1
cacttttttgataatgctaaatgagtccccttcaaccactattctccgaaaacctagttcttcgttataaacatgttcgtgcttatgcaattgtcgcatctctcacatgcaaatttgggacttgttcggtaaaacgacactcacggaagatgtgctttgtactccaatatttctttgctgtaaattcgataaaatgagcatgtaatttttaataattttccagcatgtaatttttattttacttgctagacttaggctctatatttttgtatatttttgtaaagagggattttgtaactcatctaaattatcattggtggttgtatttgctgcttcgagccatctttacccgctcttgatcgagtagatttcgaaattgtcgcccctccagaccaaatcacagcttgataaaggctctaacaaccaattgccattcatatattaatgcttgcaccattttccacatgccaaccacaaccctgttccaatcgccttctagatgcccatatgctacgccaggtatatgatgt

SEQ ID NO: 57938 - DNA, 506 bp, Gossypium hirsutum
  unsure (1)..(506): unsure at all n locations
  Clone ID: AW187683.1
catcatgctgtcatgtgtgtggttcggccatccacttagttgggaacagtggattggggcggtaattgtgtttggctccttgtattcgaaaaacttcctgaaaaaagcatcaacaaatccccctcctctgctactaacgcaggacggagctcctagtcccgtgaaggggatcccttaatatcttccggtgaaatttcacgccagttgctgcatctaattctatagaggtaagaatttgcctaagttaaagctgcattctgaagcttccctccaagactggggtttgaacaatattatgaaatccaagctgcagatacattattctgcagggatatgaggttatgaaaactacacacttcaagtgaagcagaagaatggtgtttgtttagcaaaaggaattaaatgtatatgcaactactcaggcatatgattgtatgtcttttattaacatatgaaagaggaaaagaaggagttgaacncnnnnnanaaaaaaaaaaaaaaaaaaa

SEQ ID NO: 57939 - DNA, 381 bp, Gossypium hirsutum
  unsure (1)..(381): unsure at all n locations
  Clone ID: AW187680.1
gccagcacttccggatgctgtttcaccaaggacaagtgcctctcaaaccgcagttgtgcagctggctaaactgttccatgccaccaaacggtttgttttcacagaagcaattccacttcctgatcatataaacagtggtacacggtcttgaattttctttctcaggaattggatactccataaatataggtgagttttacgactgttagatttgaaaaccgagtgtttgatgattgaaatgggcagtgcatggttcattcttatggtcactgtttcacgtgtatgtctgtaaaattagaattggatatgaagtttgtttgtttttgtaatgcaatgatgaaaaggttaatttccannaaaaaaaaaaaaaaaaaaaaaaaa

SEQ ID NO: 57940 - DNA, 511 bp, Gossypium hirsutum
  Clone ID: AF150724.1
gttatacggagttattggaggaactgtggcctcttcggaaaataatagcagtgaaagctcccgttcttcttcttcttcaattgagagtgcaaagcctagtattataataatcattttgatcctttctataaccttgcttgtttctgtttctctttgtctcctcttgcgtcatgtcaaccgccgttgcttgcgtcacctctctcgttcctctacctccactattatcgcctccactgccagccaccgtgtcagtcccgaacaatcgccgacggctttgttgcttgattctcttcctctttttactttctcttccattactcgccgccgctccaacggtgattcaacggttctcggagattgtgccgtttgtttgtcgaaatttgaacagcaggatcagctcaggcttctccctctctgttgtcacgcatttcacgcccagtgcattgatacttggcttacttcaaatcagacttgtcctctatgccgctctcctctcttcgcttccgagccc

SEQ ID NO: 57941 - DNA, 712 bp, Gossypium hirsutum
  Clone ID: AI055740.1
ctcgtttcgtttcattggcggtcatggcggggttcttggtgtgggatatagtcgaatgggatgcttccatctttgtttactacaccgagtaagttccttcatttccatacacccacatagtaaaatacatctaatgtgattaaactattattaggtttacattttagttactaaacttcaaaaagttataaaatagttattgaactatatgaaagtttttatttaaatcactggattgttaaaatcgttgttgcctgatgttctctgtttacaccgtcaatactaatcaaaagctctcattctccttttttaatagttaagttatttttttcataaaacaattttaactgttgagaatttggaaacccaggcctcacacaattttccaaatttggcacttgtgtgcaaaaccctgggtttcaagaattggtttcccatttaaagggatcctgatccaccgttttaccgaaatttggcctttaaactcattgttaaacttataaaaaccttaagagttagcgcctaacttaaaattttgaatatgaaaaatctaaatatttaaaacctattgggaccttttagaaatggattttcacccctacctttaatatagctaactcccctgagtattggtcactcctatttattttttttcaccttacttcgagggggcacttatattgcgggcgacttattttggaatggctcctcc

SEQ ID NO: 57942 - DNA, 695 bp, Gossypium hirsutum
  Clone ID: AI055733.1
aacgagtctcgagttttttttttttttttttaacatgaattaagaacttccagatttttttattgtttttttcttttcaagaggaaaaaaaaaacttgaatttagattatcttacataaagcaaatactttttttttcaaagctataaagacaaatactgaaatacataacaaagggtcatttgagttcaagaagaataaagcctaagcctggtagttggagaaaaagaattaacaggaaagtaaatacatgaattcaccataatgtcgtcacaattcgatttacatttgagggacttgcaaaaccaaagctttcacccagaattctggtttctttttgtaattccctttacactccgataaaccccgattttttgcaattttgtccaaaccttctttactctcttttgtgataaatttttatccccgggcctttcctttattataaattaggcgccccttttttaaatttcctcgttttttgtataagaacccttctaatattaaaattgcctattctcttttatcaacatcttttcccttcttcatatatatatcttactctttgtgtagcacaacctttgtctctttctttcaactttgttctaacatcctttatatattttataaacctttattattgtctcattcacatcttttttttaaatctctctttatttctttctcccttatcct

SEQ ID NO: 57943 - DNA, 688 bp, Gossypium hirsutum
  Clone ID: AI055732.1
gttgtctgcctctttacctggttgtattaaatcaataggtgtcagttgaaaattttgattgtatgtattatccaagacacttgacaataatgcagtttaattgaaatcatatgttgctgaaagttcaccaggccagtacagagagttcaacagaatttcctggaaaatttaaataaaccgtagaaaatatgattgctgggatcatagatttacgtaatgagtgaaatggtcatgttcactgctttctgttcaatgtgtaaaataatcgctagaagttaaatatcattttcctcacttaataaccctgaacgcaaatcacttttggaacatttttcaaatattacaaatttataccacttttatcctctaaggtctacaattctttttggtatccaattttacaggaaatggttattattcttattcctattaatataattttttcccttcattattgaatttatatcttatcttttattatttcctttatatattcattaatatttcctaacattcttactatatatatttattctttactactctataaactattctccatgatcttttatgtcttatttatgattatgctctccattattaattactcctattctcactcttaacacattcttaatctatactacattcattatctcttgatatattacttattctcttattttcg

SEQ ID NO: 57944 - DNA, 675 bp, Gossypium hirsutum
  Clone ID: AI055731.1
ggagagtggagaaggaaacgaaaaaagccgaaaggcgcgattccaatacgcttcactctctctttcgttaatttacgcgtctactaatttctctattttctttcactttttttttcattcactaaaacctcggaaatgagagaattctctgctctcttcttcatttgtgatctcattgtattcatcacttccgtcgccgtcattgacgcccggtcggcggtggagatcaatgtcaccgccgttctggccaatgtctcggacccgagatccagagaggatagttttgtcggcatgaacgatcgtgcttcttgataaggaattcaatggctccggaccaatctggagccttctgaacctggtaaggttatacaaaattgtgccggggaaacacgcttactttgaaaatgttgctcagattaaaacccgataaattgtatccgtgggataaagtttattaatttcttaaagttaccttttggatgtgatacccatcttgttatcctcaatttgatcactcgaatgctgttttttttaattccacccaagtacagatcctgttaccactaccttaaaaaatagggctatatatgtatttttgctctcgtggggaatgttcttgggattcaccggtttcgtgttttcttggaactttgtgtccggttctattttgagaaa

SEQ ID NO: 57945 - DNA, 663 bp, Gossypium hirsutum
  Clone ID: AI055729.1
caacaaagaaagccagaaataaaaaacaaactgagcccgatattgatttcacaaaagccttggatgatgaattgctagacatatttgctcctcccaaaaatctgaaatcattactgctaccttctaacagagcaccttgtaatacaaagcttcctgaagattgccactatcaacctgaggatcttgtgaaattggttcttttacccaatgtgatgtgccttggcaagaagaggcaatgaaagtgtcagatattctctcaatgatacttctcaaaaagggaatggtttcttgaatgttaacagccaagcatctataatgcctactcgaaaatttttcctgggttttaaaaaggtatggtatggggacatttggttgggtttaaaaaaatttaccatttgctttggggtttgggccaaaaaaaaaaggggttctttaaaatggaaaattttttgggaaccctgtggggattttaatttttaacctttctgggtttaaaaaaaacgggggaaaccccgataatttgcccaaaccctttgggaaaacaaggttttgggggtttaaaaaaagtatatataggagtgataacccgcatcttgtttaccccagaggtaaaaaaaggtcattttaaaacttataaagggtggttactctaaaaaattttag

SEQ ID NO: 57946 - DNA, 633 bp, Gossypium hirsutum
  unsure (1)..(633): unsure at all n locations
  Clone ID: AI055713.1
actacgcatacatacatgcacgcaaatgtagaatcacagatatggccaatttgtcccccgaagtgaacccaccaacccctcaaatccccgactctacgctcgatcttgtgcagttgccaaatcacagcaacctaccttccatcccgacgccaaaccctgttcaatatagctggcctggttccggaaggcattctagttatcggggaatacgaagcaggagcggcaaatgggtatctgaaatacgcgagccgcgtaaaaccacgcgtatatggctcggaacgtaccccactcctgaaatggcagccaccgcgtatgatgtggctgctattgctctaaaaggtcccgacacggatttgaactttccggatatgattctttcgtatccaaaatggcttctacatncgaagccgaattccagcggctgctgtagtgctgccgcttccagctacccatgcagatacggggtatcaaacaggatcaaggcaacctcaaatgaggtaccgntcgacgttaacactgcatggagctggtcaggtcagatatattgcaggaagagctttaactttccatntgatgtggcatggaggaggatgctgtaccctccagatcactaactgtttaatgattaccgaa

SEQ ID NO: 57947 - DNA, 663 bp, Gossypium hirsutum
  unsure (1)..(663): unsure at all n locations
  Clone ID: AI055712.1
gtagaccctaactctccactctatgatgaaaagcgcaacgtgaaccaccaaccacccaatatgctcgatcttgattatgctggcactgaggaagaattatcaaagagagatcaaataaaaagtaacctcagcgtgatgtacaggcaaatggtaacctacaagaccgcttctcttttccttggagcggcgtaccgtgccggcgatgatcccagtccaggaatgggttcaattgagaacaatcctcacacagccgttcaccggtgggttggtgataagcgacagccattttctgaagacatggggaacttctactctgcgggtagagacccattgttctacgctcatcactccaatgtcgaccgattgtggagcatttggaggacattaccaagggaagaggcgacctgattcactgataccagatgggctcaattcctcgttnttttctacgatgagaacgcaaatctggttcgagtaaaagttcgtgatagccttaacatgaagactttcgggtatgattaccananagttaatattccatggctcaaaaacaagccaattccacgaaagtcaggtcggggtaaaagtggtggtcaagcagtggctgcggaaacaaagacaccaccctatagtattgctttcctatagcttagacaactatgg

SEQ ID NO: 57948 - DNA, 654 bp, Gossypium hirsutum
  Clone ID: AI055708.1
gcgggagctttggaaagtgttgttagctctactttttatggttcgaatgagtctgcggggggtatttcagaagttcacgttgctttatgtggaatatttgaaggtttacttcgggaacttctttcattgaattggactgagcccgcccttgtggaagtacttgggcactatctagatgcaatgggtcccttcctgaagtatttctcatatgcagttggtattgtcatcaataatgctatttgagctcctaaattcacttccttttgttgttaaggatcctttaaccagctattcaccgcatgcactgatgccatatttgtacattattaattctgtctgtctatacaccttacctatatatttcttcctacttgaaggtattgtctatacactgcacttttctcctatccattctcttttctttccggtcattataatcatctcgttcaaccactttatgtctatcgactctttaactatgtccacctccatcttcatccttctttatcctccttcgactatctatctataatcagtatcaaattatgctcttctatttcttacctaatctctctactctcttctctcacctctatccccatgtcttcctcacttatccctctttactcttctctattattaactcctactacc

SEQ ID NO: 57949 - DNA, 981 bp, Gossypium hirsutum
  unsure (1)..(981): unsure at all n locations
  Clone ID: AI055697.1
cgagggctagcgttaaccatnnttcccaaatcnntcctcccttcctacttactttagccgtccctnntttcatttctcgcttcaatgccagctgcngccctttgaatatcctgcaaatggaagtgccttcctaccacncgnntctgggccagcaagcccttctccctggnntggttngctccgtcngcccttagtaccccctcgtgccaaaagtttgggacccaattcgattgtngcccttggcttggccacttggctattgggcttcgtgatatttggtgggtccgaaacccacattgtgcatttgttccattgcgcacattggttaaaggtggtccaattgcgcccaaacccgcgttgatatcgtggtgtgtgtacactctccttcacattggcacaaaagtgtgtggagttgtgacccttttcaatacacaaccttggtctgtaatatatggcacctcttaactcacaattttgtgagaaaccactgntggatttttcttaacccacaatctttccctctaaaaattgatagaggggtttataacaattctccccatagtgttgttattgggtctccacacatacaataggctcgcgtgtgttcgaccaacacattatctggttggcaccttgctatgactattcatactcggagcaaatgtctcccccaatagatgttgttataagactctcctgcgtagtgagtgtgccatataacctccatgtctctcggctgtttctattacacaacttgaagttattggttggctactcctaatgggttccagggacccctgctgtgtccctcacccctctattcataggagttttttaaagacaccgctggcgcggatatattccaataatctcctcaaagaaatcccctcgtcacctttattttgcccgctggtgccaattcaatgaggtcggttatttccccacggatactcctcatttaatagggctgagataaaaccg

SEQ ID NO: 57950 - DNA, 671 bp, Gossypium hirsutum
  unsure (1)..(671): unsure at all n locations
  Clone ID: AI055694.1
gtttatccatttatagtaatctgtttggtgtgtatattatgaaaatccatttgaaatatggtgtgctactatttcanagttagatttccttgtgtacattactactntcagcaatagtgtagcccttttgtaatgttggagttgctatcgaagaggaaatatatgtataatcactctttgggatgaactaagttattaaattcaagtagttggactatcaaggtgaattaatgggacccaacaacccaacgttttaaccgggatcatgtgaaccatattgcgaactttactttgggctattaaacctttttatattaatttcccaactgaatttttcaagcttgtgcatcgtattggggggttgaaaattttgtaaatggggtattaatatgccttcggattttacgagggtaatcgggtttttataatagatttatgtttcaaggggcatgttcttcaaatgataacttttgggttgggatcactatgcttttctggctattcaaaatgtgggtcattgtggtatacacaaatgattatttccccttacaatatttattacaaattttagtaccaccaattggtctctatcaaggtttacaatataccagtttttacaggtatttgcataaaatttttcaaatttgctttttgaaaagataaaacttttt

SEQ ID NO: 57951 - DNA, 690 bp, Gossypium hirsutum
  Clone ID: AI055692.1
aggaatactaggtggggaagaaaggattaacagcagcattaaggtgttccctaatcttaccgtgttggtactcaccgatcttcctaatctcaaaagattttgttgtggaattaacccagttgaatttccctttttagggaaattagaaatacggaaatgtcgtgttttgagtgcattcaatttggatactgcaggtttggaaaccaccatttaactggacccaagattccttagccaccatatcttttcaatggcaaggttaccgtttccaatctacattaacctaccttgagatagaatgtttgagtgaaaaagatatggcgtgtagatccctactcgacatattttcagaaattagaggctttggaagtataaagataccctggaatcataaaaattattacccattctacatcttgaaaaaatgaggatatagatttccccgagatataagaaataatatgtggtggagatgatgatgatgattaaatcaatttttcccaactcaggattttgaacttaaatctctgccaaagctagaaagctttggtcatcaacgcttatacctttgacttccatccttagaatgggatatttggaccatgttcaatatgaagacgtcctcttgagaataaaacgcattcttgacggtagataaaagatgtccttggaagcactatatgcctccca

SEQ ID NO: 57952 - DNA, 686 bp, Gossypium hirsutum
  unsure (1)..(686): unsure at all n locations
  Clone ID: AI055688.1
ctcgcgttctttcttctcattcttaccgccactttcatcttaaaagatgcttcatatctgaagaaagtgagccaattgttgagcctggctgtcagtccaagagtaattgcgtctcactaagtgagccaattgttgagcctggctgtcagtccaagagtaattgcgttntacctgaaacttgagcatccttaactggcctgacttgaactggatggcagaatcttaagggggcttgaaatccaattggccaataaaccttcccttctattgggttaaaagaaattgggttttggtgaaaccaattgggagcctattcttttggaataaaaggctatgccatcccttacttcatattcatctttaaacccttctctgctgctgtgttgcctaaacagggcacatttcccaatttacattggcttccattttaaagagagttttccgtctattagggctggtaaagaaagggtttgtctggggttcatttaagaggaatgttgaaggtgtgcgatcatactcaatatataagtggtaaacgttgttataaaaaaaaggggatttaaggatctccgaggggcgcaaactattccgggaatacttcctggaaatctctttgctaattcttgaacaacttgcatcttcttaatatcccaccgtcttcctcccttatgcgtgcttgtctaccc

SEQ ID NO: 57953 - DNA, 652 bp, Gossypium hirsutum
  unsure (1)..(652): unsure at all n locations
  Clone ID: AI055687.1
ctctgttttcttcttttaatcccctttccagattaaaaaagtttgggtgtttgttttttttgtctgggtttagagttttttattattattatagaaaaacaaacccttgaggaatcgctgtgtttgaagctaactctttggatttcatcaaaggggggttgttctaaaggatggttttggtgtcggtttttttggagattttaaggaaacccacaattggggatgttttgaaggagctaatgattttcatagctcctttatggattgctgtaattgttggtgttttagtcggatgggcttggaagccaaagtgggcaaatataggcagagaaatgatgattgattgctctgtctctaaagattcaacacctgcatcttcagattcttcatctacaagttttaatctcatttcaagcttgaattcgatcaaatttctattgcctagttgcatctcttggatnacagatgatgaagctcaaagcgatcctttttttttgccacccaccgttgattctaattgcagttcattacagattcccaaagggaaaactagtttngtgacaaatgatgatttatagcattttgttaatttagttgaagaaaagatggagacctgcttggatcatatgaggatggtctacctcgctatgtt

SEQ ID NO: 57954 - DNA, 637 bp, Gossypium hirsutum
  Clone ID: AI055681.1
tgctgattggcctgctgaccttgatgagagccccaacgagctctcttggtggatgactgctgtagagtctattaaggcttttggaaatgaacattataagaagcaagactataagatggctctcagaaagtacaggaaggctctacgatatctagatatctgctgggagaaagaccgcatcgacgaagagaagacttcgagtttgagaaaaatgaaatcccagatattcacaaatagctctgcctgtaaactaaaactaggggatctgaaaggagcactattggacacagaatttgctatgcgtgatggagataacaacgtgaaagccctgtttcggcaaagtcaggcacaaatggcactttatgatgttgatgctgctgtggaagcttcaagaaagctttgcaattggagcccaatgatggtggattaaagatggagcttgctgttgctatgaaaagatcaatgatcgacgcaacgaggagaagaagtggtaccgtagatgttccaccaaactcaaccgtgcaggttcaaatggaacatttcaagcaaaattgaactgtgatatttgaagcttgaccaattgttgtagattaaagattgatgaaaggttactggaaaacctttgcctttctaaaca

SEQ ID NO: 57955 - DNA, 640 bp, Gossypium hirsutum
  unsure (1)..(640): unsure at all n locations
  Clone ID: AI055673.1
ggtatatctatcaatgaatagaaatgccgtacgtttaagttcttttgcttgcttatgatggactaattatgtcttgaaacttcactaacgggtaaatacggaacaagagtttttatgctgttgagtgtagaactaattattcctagaatgttctagaaacatttgagtttccattaaatattagggaagacctgtttcattatttatttgctttgcttgacgatactgattataagagacaaagagtttcttctggtatgagactaacacatttcggttaatgcactatattatattcctttctaaaagaaatttcagaaatgccaatatgctagagttacgttgtttaaaacagaaggtcgtggttggggtctgcttgctgctgaatatattaagactgggcattttattgttgaatactgtggagaaataatatcttggaaagaacaaacctaagatctcaggcttatgaaaatcaaggtcttaaggatgcattnattatttctctgaaggctttgaatcattgatgccccaaaaagggaaacttgctagatcattaccacttatgcaaccgactgtgagctaggaatggactgtttgggagaattccattggaatattgcaagagatttccattgag

SEQ ID NO: 57956 - DNA, 642 bp, Gossypium hirsutum
  Clone ID: AI055670.1
ctgagttttaatcaccatgcattccacccaccaccacgtagctgtctccccatataaaagttcagcttctcgtctaacaatatttgctcacgtctttgggattttggctttcgccctcatgctcgtttggttgctgcattatcgtggaggtatcgaatatgattcttacaatgctgttcgtgttttcaatgttcacccgtttcttatgttttgcggattcatatttctgtctggtgaagcaatgatggtgtacaagacagtacaagcgacgcacatggtgcagaaggtagtccatatgatacttcagcttctggcatttgtgcttgcagtggtgggactttgtgctgttttcaagtaccacgatatgaccaacattgaagacgtttacaggttgcattcatgggatcggattcgccgccgtttcttttgtttgcgttgcagtggttaacagggttgaatacatttaggttccgtcaaccagagttaacaagacaaagccctgcttccatggcacatatgcggtggccggacatggtatcatgtcggtagtgcgggtctcactgggtgttggagaagctcctttatcgactggcaataccgtgaacttgttggtaattttgggatgctatcttttgtcggaat

SEQ ID NO: 57957 - DNA, 649 bp, Gossypium hirsutum
  unsure (1)..(649): unsure at all n locations
  Clone ID: AI055669.1
gagatatggttatggataaagaggacaaggatgctattggacatgaagaaaatggaacttctattggacaagaacctatggatattgctactgcgtcaacccaagcatcacaggaggcttgtgaaattcctggctctgatgttacaattttggaagggcacacttctgaggtttgtgcgtgtgcatggagtccaactggttcacttcttgcttcagggtctggagattcaacggctcgtatttggacaatagctgatgggctttgcaaatctggtgcacaaaacagtccattaaatgttctagtgctgaagcatgtaaaaggaagaaccaatgagaagagcaaagatgtgacgacacttgattggaatggtgagggatcattgcttgctacaggttcatatgatgggcaggcttgaatttggactacaaatggggaactaaggtctactttgagtaaacacaaagggcctataatttctctgaagtggaaccagaagggtgattatcttcttacggtgagtttgataaaacggcaattgtgtgggatgaaaggcctaggaatggaaacagcatgttgagtttccacaggtccaaccctgatgtgattgggcaaaatggttatttcgacagcttcattgcctataatttn

SEQ ID NO: 57958 - DNA, 641 bp, Gossypium hirsutum
  Clone ID: AI055667.1
ggcgaaccctgcaagtgaaaagcgcagacatcttttggaggatgttgatggtgaacttgagatggaggatgttgctcctgagattgaaatgagttcaactagtggcgctgctgcaatcaatactgcacaaactttgcaagagcattgtgatcagcattttccgctgccatttgccccacctttacctcaggatgtgcgtccatcatcaccaccaccgccatcatcaccacctccacctccaccttcaccccccccttcaccgtctcctcttccttcacccattcctcgtcctatttctggtccctacacaaacaatgttgattcaattgttcatacaagtatacaaaacaggcaagatgatttgagatctatggttccccattaattgcacccagaataatttcaacgtgggcaacaatacagtcccatataatgggcctgatcctaaaaatcctcctgttatgcaggttcagattgaataatggtttaacagttgcccaatgcttccagttattaatttcaacacctgatggcctaactttcaccattcttaccttcgaacctttttttcttggccacaattaggtgcatatgtaattcgggcccattgatttgagagggtgcccttctccttactgcag

SEQ ID NO: 57959 - DNA, 653 bp, Gossypium hirsutum
  Clone ID: AI055664.1
gagagagagagagagagagagagagagagagagagagagagagagagagagagagagcggcacgaagtgaattggatatctctagacccatagctcacattcgaaatctgggtctctctttttttccagaaatttttatttacctgcgactatcattgcggagtttttgacgatctgggtatttttgagaatcgactaacgcaagggaaattgcaagaatgttggagcacgaattgtgttcatctcgcgtactgtcaccggtcagggaagagagcggcgacgaagagctatcggttttaccgagacacgccaaagttattgtcactggacacaatcgaacaaagtcagtattggctggtttacaaggcgtattctagatatctgtgggccttggcggttgcatttgctgggtttgaagaatggcgttcaaatcaggttgcaaacaacgcattgaccgtgttggaactttctaccgcatctgaattcacgatgatcatgatttgtatactctatcagtggttcctacattggtagaaccttcaattccatagctcgcgaaacccaagtttggcttccaaaccttgggttcctctgcttcatgacatcacgattcgtaacggtcctagacgtcgatccttttctgcccccaaccg

SEQ ID NO: 57960 - DNA, 653 bp, Gossypium hirsutum
  unsure (1)..(653): unsure at all n locations
  Clone ID: AI055663.1
cgacgaatggctattcctctcctattcatctgatttgccgaatcatcattcggtgaagggggctaagaatagcctcttcaacaacggacgtaatagcaaaatttcccctttcccctagataattttatcatgtatttgttcaaccatccttcgtcaatttcgtcgttgctgtaaaagtggtgcttccgtcgattttgtcattgagaaccgtcgattcatctccgactcgttccctgcctccgcaaagctgcctcctttcccttgtgagaacctctagaatttggaccaatttgaatgtgatgggtttatagtggatgatgaagaggaggaagaagacaaaaacgatcaagttttgaaaagccagaagatgaaaaagaaaaagaaggaaaaggagaccattgaaggatctggtcctgatgatgatgagggtgaattggttcaagaaaacagaatttcaggcatttgtcaatttccaaaagaaactgaaatgtttaagcggctttaaagagctggaaaacgtactaaggtggttgagcaatctggttcttctgatgattagagcccactatttgatgatatccttcgagaagagaaagctttattctgtgggcaaaactatgagatgagtgatntattgtggggtgaggaaaaan

SEQ ID NO: 57961 - DNA, 639 bp, Gossypium hirsutum
  Clone ID: AI055662.1
gtttgctccaaatctacttctaactgttcccaggaagaaaactggaattctcgatgatgttcgtgccagcagctggctggatgctatgaaatcctcatcccctcgtcatacaagcacgagggattacaaccatgagattgtatcagctgatacagatgttgcgtatcgcacatggatggctaagtatccctctgcactatcatcttttgagcaaattacaaattttgccaaaggcaagagaatagcattgtttttggattatgatgggactctttcaccaattgtggacaacccagattttgcctttatgtctattgatatgcgagctgctgtagcaaaagtggcaaaatacttcccaacagcaataattaatggaaagagccctgaccaggtatttggatttggtaggactaccggatctctattatccgggaagtcatggaatggacatcatgggtcctgttagggatcggctgatgatcctcctaactgcattagaactactgataagcatggcaaaggagtaaagttattccaacctgctagtgaatccctcctatgattgacgaggttttaactacttggtaacagccccaagaattaaggagcaaagttgaaacaatagtcttgggtttggcc

SEQ ID NO: 57962 - DNA, 639 bp, Gossypium hirsutum
  Clone ID: AI055656.1
tatggattttaaatgtattttttaatgattttaatgcataaatcaataaaggtagagaggatttggagattgttttgaggttccaaaaataatatgttttatttaagaaactagaatagtaatacaaatttgacccaaaccattttccttaaccaatttctaaagaataaagagaaaacaagttatgcattgaatattgttatccaataggattaagaagggagtggtggaagttgatgcggtggagcactgaggttaaggttgggaaggaagctttctcagagaagagtttttgggttaaggaaaatggagtgacacatgtagtgtgtatcagctggttgcatgggtgggtttttataacaagaaggtaaacttaacttttaaatccttgagttgattaatggcaaaaccttgatttgatgctttagggcgaaaacaataatgcttcatcttttgataagacgttttaggttgactgaaattcaattactttgggccttcacttggtttttaaatagttttatccaagaatgttaatccaaaagtttctttggaatagggttataacttatttaaaattgttagttgtcagttaccttcatttgccgttgttccttgacctttaaaaaatttgtaaat

SEQ ID NO: 57963 - DNA, 631 bp, Gossypium hirsutum
  Clone ID: AI055646.1
cttcctcctttttcttcttcatcactggacaatttttttttcgcttagatctgatttttatttcaacagttttctttcactaacgtttcagccacgctgctttcccttaacttttgctctcaaaatctctctttcttcgctacttcacacattccaaactatccacaactcagtagtggcacagctatggatgaagaattcttgttcgacgatccaactcagttgctcgacttagcttctgatttcgctcaccacccggttctcttaacgatgttgatgtcaaagattttatcgaccatttccctctccctgtcatcatcaggaaaaagagctgatcacggtactgctctttcccatggatgatccaacttggaccaatggccgtcacaaccattttcatttggtggcctttgctatagggttgaaatcaaggattcacatattccaccttggattatcagcaaaatatgtgctctaatggcctctaaaggacaaagatttgaagcaaggtataatatacatattttttcttgatcaaatatttgattctattagtatcttaattagtgtatcggcatatgattcactaatgttggatggattgaatgactacttttctccccctaaatgg

SEQ ID NO: 57964 - DNA, 618 bp, Gossypium hirsutum
  Clone ID: AI055645.1
cccaggccaaaagatcgccagatgatccaagatcgagtgaaagagttgagggaaattgtaccaaatggagcaaaatgtagcatagatgctctgctagaaaaaaccatcaagcatatgcttttcctgcaaagtgtaacaaagcatgcagacaagttaaaacaaacaggagagtctaagataaaggaaaactttgagggaggtgcgacatgggcgtttgaggtcggctcacaatctatgttatgccctattgtggttgaggacctgaatcgaccttgtcagatgcttgtagagatgctttgtgaagaacggggtttcttccttgaaatagccgacttaattatggggttgggaatgaccattttgaaaggagttattggaaacttggatggcaagatttgggcccgtttaattgagggaggttaacagggatgttcctaggttgaaggttttaagtttcttgtcgtatttttgacatatgtaatgtgctatatagattatttgccatgtttttgtagctacacatgttgctcatatattttattaatttgattatcccgtacttgtcgctgcgattttagtgtaagttgtgccttatttcaatctgacatgtagtagtcc

SEQ ID NO: 57965 - DNA, 631 bp, Gossypium hirsutum
  unsure (1)..(631): unsure at all n locations
  Clone ID: AI055644.1
ggatgaggcaaaaaaggtggtagcaaatagtaatgtctttaaagatgggctgacacagctttctatgactggagaccataataagacacctgggaatgcagcaagtgtgcctgtcgctggaaaagaccttgaaaaaggcttccatgctgttagccttgatgaatagggatccgctttctccatgttgaatagagatttaccaatatacctgaagtgtccgcactgcaggtcttccaggaacaaaaaggaaccacctaaggttaagtttgctggcacgatatcacagcttcaaagaatttttgtggtcacacctncctttcctgttgttctggcaactttgtccagttatacaatttaaggcatcttgcttggccgcaaccggttcagaaccgtgagcaaaagtttcagttcagcccttgatgtaaagtgctttttaccacccgagaagtttctaatactgagactgccttttatgtatggtgtagaactggttgataaaagtgtgcattctctgaatcccttggaagataacccgaattactggttggtggtatggcacaacattgaactatgtnccaaggatgggctcatgagggtttataaatgtcgagtcaaaattaaaggctaaatg

SEQ ID NO: 57966 - DNA, 635 bp, Gossypium hirsutum
  Clone ID: AI055641.1
cccagttccactcatcattcaaacgaaaattttcttgggttttccataaaatgcatagaagactctctgtttttggattttgggtgtggcagatttgtgtgtggtggaaaatatgaagaaattaatgtcgaaagcagagctttccaaagaaatgtgcacgtctcccacagtatagcccagcgattgtgggaacggcgaggctccgatcaattgtcagtgattgttgttagtcttcttcccttcgccatcatctctgggtttttttaattaaaaaaatctttgaaatattggatctgaatttctatcctgccaagctttcaatgagtttaccttttctacctctgccttaaaattcatttctactttcctatgctccaaccagaaattgacctttggggaccaggatattccttttcccagtagttaaggttttggctttgtggaattgattaccaaagtcatgatctttagtcgatatatctgtgaattgcctgtttgggtatactttggttaccttaaatctggtgaataccctttggatccttctcttgattaggggctttattttggtaagttaaatttattttttggttattgtccgttgtaatatttgtggttgaatgaaaaggggttat

SEQ ID NO: 57967 - DNA, 631 bp, Gossypium hirsutum
  unsure (1)..(631): unsure at all n locations
  Clone ID: AI055638.1
ggatcatacaatttcagatccactgtctcaatggcagagtggagtaattgaagtttatgttctaaacacctcaaaatgtatttgacaagtcaaacttccataagaaccaaagtaaagccaaatcattttagcagctgacaattttaaagattttcaaattaaatagttcaaagaaaaggctaacaacagtttaggtggttcggctttccacggacagaccaagaaaaaaaaccaaccatgttcctcgacagtttggatgtagtgaatctctgacgatagtaactgatatcccccctcatcacctgccgaaaacaaatcatgaacatttgagcactaaaggtgttaatcattatgggtttcttcaatttgaattggccaattggacaccttggttacctttaagataattggattaattgttttgaaggaacctacattggacccactgttaagagttcaacctctaatctttttctctatcaacggatgcgggtcaagtgagaaaatgggtcttggtgtactttgggacaggtttaacccttttgggaccccaaaacttttcaaaatctatggcttatcccctgcgctgaagcactgggcatcattcggctttgatcatgtgaaaatctan

SEQ ID NO: 57968 - DNA, 643 bp, Gossypium hirsutum
  Clone ID: AI055637.1
actgttcgcagggatgagcgtaggggatttcttccccgagtgggaatgggttcactcagtgagtgggtataaacgaaggttgatgaagaatttgaacgagctaaggcgagtttgcgatgaggtaatacaggagcatttacaaaggggtgaaactgggattaaagaggattttgtggatgttctattgagagtacaaaagcaagataacttggaagtacccattactgatgataatctcaaggctcttgttctggacatgtttgttgcaggaacagatacatcagctgcaaccttggaatggacaatgacagagttagccaaacaccctgaaataatgaagcaagctctagaaagaggtttgtagcctatttcatttttatcccgtaaatgtttttggtcgattcccatctttaaacaccttcacttgcatcaaattcctttattaaagtaggctttgagactacatttcaacggtgccccttttggttccaatagaacccatggttgaatgcattattgttggttccaaataccatcccataatcgccttcttttaacacttacgctttaggaggagatcccattcatgggatattcccttcatttagtccatagaattcagattaaccttgttcttatattc

SEQ ID NO: 57969 - DNA, 638 bp, Gossypium hirsutum
  unsure (1)..(638): unsure at all n locations
  Clone ID: AI055630.1
gccggccgaaccggcaccatcgggttactgaagacactgaaccgcgacgagcttcttgaagttttatctcagggtttttgtcaacactgcgaggctcttttagaggaacgaattcatcagctcttgaacaaaagaggtagcgaatcaggtagcgaatcaactgtgacctcaaataataccctatcaaatccggtgaccggaaaacaactagctcgtacatcgccgccgccaccggcggcgaattccgatatattgcttaatgatggacttggtggaagtggaagtacatcctcagacaatggattgtctgaagaacaaaaggaacatattagattctcccaagttgtaagaaaaaaaggattcgttcacttgggggaaaatcaacggtaaatcgatgaatgttcttaaaggactcgagctccatacgaaggtcttcaatgccgaagaacagaaaaagatcgtcgaatgcgtatataatcttcaacgtatgggccaaaaagggcaacttagagatcgtacatattcagaaccgaggaaatggatgcgtggtnaaagtcgtgttacgatacaatntggttgtggtattactatgccatggattataaggggaacccacccggatccctagagaagaaaaa

SEQ ID NO: 57970 - DNA, 647 bp, Gossypium hirsutum
  Clone ID: AI055625.1
gaacaaaatcccaatggcgagcctggtttgaaagcttcaaattcaaggaaaagaaaggcggttcccaaagcaaaaacaaaggacacttcatcatccccatccgcaaatgcttcaaaggtgactgaacccaacgaagcatcaaatgaaaagcgatgcaagttatcagacagcaatggaaatgaaaatggctctgctaaagcagaggaagatgccaaaggagataaggctaacaatacaaaggctcctgaacctcccaaggactatattcatgttagagcaagaaggggtcaagccactgacagccatagtttagctgaaagagtccgtatagagaaaatcaatgagagaatgaaacttttgccaaaaacttggtcccggttgcaccaaggtcactgaaaaagccttaatgctggacgagattataaactatgttcaatcattgcaacgacaggttgaattcctctcaatgaagttagcttcagtgaaaaccaagctggactttaacgtggaaagtttaattgtcaaggatatattttaaccaaacaacacattgcagcagccaatatttccaataaattcctaacattaaactttttctggcaccaaccttaacatataccagctatgcatagcattatgttaatggg

SEQ ID NO: 57971 - DNA, 691 bp, Gossypium hirsutum
  Clone ID: AI055618.1
aagagataaggtatgcagaggcattttataattgattgtgtactaacttaatgttcatacttgagagcatatcattatttgtttttgaaatttgcatgagggttatggctcatccttggttccgttgataatggtgatctggatattttattttgaactttttagtccatatccaagattgctagcactctatttgatgaattcaaaaatgttgagtcaagtaaccttctagatgatgcattcttctctgccaaagtaatatcttgattctcccatcaccattttgtttgctaatccatttccctttgtctaatccattttccttttactggttaggtgcattgtctattaaatgttttgaaagcatctgttcttttatcttggatacaggtctatgggaacaacgtggagattcaagcgttatctgatatgtataacagacctatccatatctattcctacagcatataacctatcaacatatttcatggaagctataatttcgacacaccttccataagactgagctaccatcatgggaatcattacaactccctgttgatcctcgtcgtttgacagtggtgctggcttggattatctgtcttcgaaggtgcgtgtaaatacatgacatgttgcttttctgcttctaggtcattgtttacggtagaacatgctatgggttcggtatgcg

SEQ ID NO: 57972 - DNA, 699 bp, Gossypium hirsutum
  unsure (1)..(699): unsure at all n locations
  Clone ID: AI055616.1
aggacaggttagacacaatggtccagcctcgtctcacggatgcattatccaatcgcaaggttgatgttgctcaagatttgcgaggaatacttatccgaattgggagattcaagtctctggagctgcactataccaaagttcacctcaagcccataaagcaactgtgggatgattttgactctaagaagagagttggtaagcttgctaatgaaaagagtgaagttgaaaggttatcaaataataatgaacagtcgagttctctggctgtatctttctcaagctggttgccaactttctacgatgagttgctactctaccttgaacaagatgngaagtnggtgtatggtttgcttttcctgaggattataaaactcttgtcccaaagcttctcatggagactatggcagcttgtggtttccaagttttgtctcccgcatcaaccttgctatggagaagtttgttcctgaaacaaaagcatttgctaagggtatattanaaattttatctggagatatgcanaagggtaataagatcatactaagctctagaagccttgatggattacataaatgtcgtgatctttgcaagaatatcagacttatttcaaatctgatcgggagtttaatgcacactaaagcagggctatctttgatctttaccgagtatgaccatgaacggctatccttcttgaaacgtggg

SEQ ID NO: 57973 - DNA, 692 bp, Gossypium hirsutum
  unsure (1)..(692): unsure at all n locations
  Clone ID: AI055611.1
ccgatatccatcgtccctcatttccccttatattttccatttgatttcatcttcttttccttcaaccaattccctttctttccttatcttcttttcctttagtatgtaaaagcttgaaccaaagtgaatcaaataagttccttttcttggcttctacagctttttctcactatatccttgaaacccagtattctttgtgctgttggagagcaaattttaagctaacatgaaagaaagaaaaagaaaaacacgaggcactacacgcatgcacggattttgcctgatatggtttaggcatccattggaaacttgaattacaaccctgaatcaactttagcaatagcaaaagtctagcccctggattgtttgaaatgctcattaaaatgccttttgaaagaaagaanagaattgacgagtcaagatttcttaggattctatgcttaaagtatatgcctcaacccctanaaaaggcagttggaacaaaactcagcaataagggttttcggcactgtatcaacttaggcatccattgggaacttgatacaaccctgaataacttagcaatacannaagctagcatctgattgtngaaagctcataaaatgcctttgaagaaganagatntgagagtcagattctaggatcatgctaagattgcctaccctaagaagcattgacaagctancnttcag

SEQ ID NO: 57974 - DNA, 654 bp, Gossypium hirsutum
  unsure (1)..(654): unsure at all n locations
  Clone ID: AI055608.1
ccaatccccagatctcaaatttgattacatttccctctttcgattcatttttgccattaaagttgagttctttttttgcttcattgttaggcttcctgtctttagttcatcttaaatttacctacagattccccaaattttgagggaatttatctcattctcccttccattgattctctatcttggattcttcaaatcatgggaatccaaaacgacatagtaaagttcaacgtaggcggcagaatctttcaaacgacggctactacacttgcaaacgccgaccggattcgtntntcgtgccattgttcacgacaattgggacttaaaacacncgatcaacggcggggaattcttatccgatcgaaaccanactgttcgncgggccctctcgaccttctncgacggccgaactctacatccttncaaatgtcccgacggctttttacaagaagccatggtanacggttaataggcatnttcggtcgctaaacgtgacccttgatggtataggtaaagctatcaaatcgtgacagtcgagccccaggatgaaccgcatcaaccggccaatgtgctgtggtgctcatgacatgtcctgnttgatggtgtgagacaccccatgatcgttcccaaagtacncttgttgcacccctaagt

SEQ ID NO: 57975 - DNA, 683 bp, Gossypium hirsutum
  unsure (1)..(683): unsure at all n locations
  Clone ID: AI055605.1
ttttctccgatgacaacagggaagaggcgaaacagtatttgtcttccgttaagggtctgcaaaaagctatgcagtacttggtttcacaccaagcaagttccgaaatgcttgtccgagctcaagcacttatgcaaaccgccatgaaacggctcgaaaggagttttaccagattttaagtcttccggttttatcttgacccagaatccttttctgctcactcgtcatcctctagaccatcggcttccaggtccagtttttcagactttggaagaagatgagtctgagaacgagtcaaggggacgagaatganctcaatcccaggagccnaaaaaagtggtcgtagcttgcaatggaggaatttaagagccatttgcagaggcccatgatnaaagcttgggtacgccaaaggaatgcatcannaattatnaaaatattcggaaatcgntcgtcgatgaagctctcaacgtttcggagttacgngacgttgaactacgnnaagtcanaagatgatggaaagnttgagaggttaaatcggaattggtactgctgtaaagtgctgttaacgtgtttccgagaagaatctaggacaaggtttcattccctgtatggggatctgtcgtaaaattcaagaagacattacttgtgatccggaatttacagtcagaacacgngaaattcgtttg

SEQ ID NO: 57976 - DNA, 701 bp, Gossypium hirsutum
  unsure (1)..(701): unsure at all n locations
  Clone ID: AI055603.1
attcgcacgagctctatttctgattctctcttcaaaacattgctattggcattcaattttaaacaccagagtcttgaaaacacctttntcatccatggcttatgttgatatcaagaccaagcttggaattggttataaacagcagcaacagcaccttcttcattctctttgttatagtagaaactgggtgntggtgtttttgggttaccggatatgaccatggttcctgctgaaaatcttcctaaacagcatcatcttcctcacggtggcggcggcggcttttatggttattgtggtagcagttacacagagagttttgggcttatgagccgtgtttacgggtatgattttcacgctgaagcttatgtaggatctgatctagctgctaatcgcatggctgaagatgaatcaacaactaatagtcttaatgaagcgggctccaactctaaggataataatcaagaactcgagttatagagagattaatgttggctccaactcggtttaggggtcagtcaacacgatatgatgacaacaagcattaccaaggcgatcaacggcaagaataagaggatggttatcttatcaataaccgtggtttccctaccagcaaggccttttaggcctattttcatatcctacttttacttcgttcgcacctcacggtatggctatttactatcttatcttaaccacaaggg

SEQ ID NO: 57977 - DNA, 714 bp, Gossypium hirsutum
  unsure (1)..(714): unsure at all n locations
  Clone ID: AI055601.1
agtagagatattctctttatcctcttccactgtattagagctgaagaagatcatagacttattaaaatttacacattgaccggagcaaatctcatactccttcaaaatatcttttaagatccttgttctgctttttgtagcttcgccaaacaaaatgtagtcatctgcaaataataagtgtgaaattgtcgggcctcttttgctagccttcactccttttatcaaaccctctcttgttacaatccttagtaaggacgaaagtccttcgctacaaataagaaaaagaaaagggataaggtagttcaccttgtcagagtctctggtaggtttagaaacactgcctctcttccattggtgtttactacataagagactgtagaaatacatctcataattaatgacacccattcctgtgtgaagccatacnggatcataacttccttcaagaatgcccattcaactctatcgtaagctntactcatgtncgactntatcgncatgaatcctnnttccccgttcgcttttgcgaaatgtatgtagaaattcataggctatcaatacattggctgatatgagcctccctggaacgaatgcattttgagcattatcttatcacgttcccatgaatncctgagacaatgggcatagtttggctataattnatatatatgtgcatagctctatggttaaataanncagatttgtggggggtgg

SEQ ID NO: 57978 - DNA, 648 bp, Gossypium hirsutum
  unsure (1)..(648): unsure at all n locations
  Clone ID: AI055600.1
gttggtatgattaatcagatcaagcgagagatttcagtgatgagaattgctaggcatcctaatatcgtgcagctttatgaggtaatggccaccaaaagtaagattttctttattatggaatactgcaaaggtggagagctctttaacaaagttgctaatggaagactaaaggttgatgttgcaagaaagtattttattcagctgatcaatgcagtggatttttgccatagtaggggtgtttttcaccgcgatataaagcccgagaacattctgttggatgagaatgagaatctaaaggtctctgctttgggttaagtgcgctagcagaatcaaagcgccaagatggcctgcttcacactatttgcggtacttccgcatatgtggctcctgaagtgatcaccganaaggttcaatggagtaacactgaggtttgggcttgggatggtgtataccgtgtatggcagttatctccatttatgatcaactgatggagtgatagaaaattgcaagcgggtcagattctactggttccttagagccgcagctggtgtagaagtgatcaatccactctagattatgctagatcggantctgttaaaaggttgtgtaacaaaatggaagaatacactttcggatgtcttgtctggg

SEQ ID NO: 57979 - DNA, 629 bp, Gossypium hirsutum
  unsure (1)..(629): unsure at all n locations
  Clone ID: AI055599.1
gttacctcaacagcacaagagttatctttaggcgtcgattttgctgaaatctacaaaaagtcagacctatacaggagaaacaaagctcttattgaagatttaagtaaaccagctcctggtgcaaaggaactctatttcgcaacacagtactctcaatcattcttgactcagtgtacagcttgtttatggaagcaacactggtcatactggcgcaaccccccatatctgctgtgagatttctctttcaaccgtatacttggatgttgggacaatgttctggaccttggttctaaaacgaaaagattcanggatctgtccaatgattgggttcaaggtggctgctggcctttccctgggatccaaaacgctcttttgcgaccttgtngcgcgggcaaagggacgtctttttagagaaagactgtggaatgcactctgaggccatagcctgcagggggtaatagagatccttttntttgtcaactcggggtaggctatagcatgcatgacggatccatgacggtgtaaatctcggaactcttttaggtctcactatttattactttacggtgaagtggtgtcacccaatttattggcctatttcggtttcacgggagatttttagataaccc

SEQ ID NO: 57980 - DNA, 667 bp, Gossypium hirsutum
  Clone ID: AI055597.1
gcttattcgattgttctagcaatttaggtgtttttgaattgatgtaccgacctccggcaagttcttgatgagttgatggctagttttttttttaaagaaaaataatttgtaaaagaaaaatgaaggtacccactgccagtgcataagaagctacttgatgagttgatgactagttctttttttaaagaaaaacattgagaaaaaaataatacaagacataaaaatatcttttcttgcatatttttaattttttattactattttgtttgaacttttaagtaatttagtgttacttagactcttaacacaaattcagtaagttctaagaatgatatagatatacaaacttgtttagaaagagacaagagaagcatacggtgcaaaatgcaaacaaattttttttgggtatagaatatacacacttttctttaagctccagctactgcctaaaagcctgtacaagagtagaaatgtcaatattggttgttgtggctactcagtagtactgatactttaatgttgtcataaggattaagatggctgctaagcttatgatgacactttcagcagctaaccttcgacatcgtggatgaatttcaagattagaacaggctttttcgtactcagtgcaagtgattactgaccatgattaatcatattagtatgt

SEQ ID NO: 57981 - DNA, 666 bp, Gossypium hirsutum
  unsure (1)..(666): unsure at all n locations
  Clone ID: AI055595.1
ctcgagattaaggacatctattttaaccttaactctaatatattcaatgtagccaccatccctatccctccaatcaattgccatcacctcgccaattgcttctcctacttccaacattgtttgtctgtccatttggtcgaaaggtatattatatattttcacccaaaagggtgataggtttaaggtggtatttttctatctcttgatcctttacatacgaagttagagagaaaatactttgatcaaaaagccatagagcaaggttcaatattcttattctatcttcaacctccccaaatttgacaagatgactntttctcttaattcccanaagtcacctcttcttttgtgaccacaaagattgtgaaaccctatacaatgccattaataaatntttttcatccgacattacttgcccgatctnccaagcctcataaccctaaaaattgatgagagcccagtgaagctaaccatctatttgattcctctttaagaaggtcaacttctcaagagttcgttaggttctcaccattctcgaccgaggaggcccacgcctgatctgactaacacacctgatcaaacttaccgtcaacacacacctttagcttctactgctcaaaaacccgaataccaagctaccaggaacctcattaaaattggatcata

SEQ ID NO: 57982 - DNA, 694 bp, Gossypium hirsutum
  unsure (1)..(694): unsure at all n locations
  Clone ID: AI055592.1
acaaggtgtctggttttttgtttctttagtgtgatacatgatagcggggtttatggttagcttttgctttattttattatttcgtttaatactaataaatgagaatgatatatttaatatagcaaaatctaaatgaaaaatgtacaacactagctttgaattagaaatgagaatttatttgcagaagattgtttataattaatgctttggtatcctagaaagggacaccatcccttttattattaaaaaaatatatcatctttattaaaaaaattaattaattaaaaactattattaataaaaaaaattaatatttaaacgaaaatttttttcattcacaaaatacgaaatatgctgtcaatcataacaaatataactcaaaataaatttaagaggtaattagaaaccatctagggggagccttntattgcttatgtattctcaataatttatcttcaacatgccatgcaatgnttcttttgtataccttatggcccctaccctttaaacggcccctatcccattttccccatgaacttaaaggggaaagattanaaatgatccatgatgttgnggaaaatgattttttattgaagaatctttaaacattatttagttcaaattaagaccgaagtctacgggtatgtactgagattgtttccacgtataagggatctaggtccacttcaatgat

SEQ ID NO: 57983 - DNA, 683 bp, Gossypium hirsutum
  unsure (1)..(683): unsure at all n locations
  Clone ID: AI055588.1
tgcaaagataccaaaacttctacttgaccttgatgcccctcaccaccaccaccaccactcacaacagcaacagcaacacgcatcctctgaaccatctgctctccccttgtttgtatctgaatccaacagcaaaatcagcggcagcctgtcagcaccacttcctgattccaacagcactccttgatgttgtgagtttcctttttagtaggaatgggaagctatttcagcttggctcagtggcaagaactggagttacaagcattgatctatagatacatgttggcaagcgctgctgttcctcccgaactcctccacccaatcaagaaaagccttctttactcttcctcctatttcctccaccattaccagccagctntgttgcaatcagggtactggggaagagcagcaatggatccggagcctggccgttgccggagaactgacggcaagaaaggaggtgctcncaggacgtgtgcctggacagagtattggagcggcacgtcaccgtggccgaaccgttcaagaagcctgtggaatgccacattagcagcacgncgttgagctataatacaatgcagtgtactgtcgtttcgcggtgggtaatgatgtgcgccgaaagcagatcccatgacgtttannctacacgtggtaacgtccaacattgcctttaggctncctccggn

SEQ ID NO: 57984 - DNA, 657 bp, Gossypium hirsutum
  Clone ID: AI055584.1
cttctccggcgcctgtctcagggccaactcgttctccgactacttacactgttggagataacttgggttggactgttcctacaagtggtgcttcaatgtaccaaacatgggctaatggcaaaaacttcatgattggggacattttaggtaaggattttagagttactattgggtttcggatttgattttttgtgtagagatagaatagaacttgttgtcttttaagtcctacttgactcgatgttgaatttagtcaaggtttctcaattagattatatcaatcaattggtatattggattgttgaaatgaattttatccctcatatattatgtatcaattatccgattatttatctggacctattggtagttatatatgtctccactgttccggtttttgaatcattgtattttctttgaatctggccagacttttgtacttgtactaaatatctgatattgcatgtcctttatgagatattagaccattttattttattttgcatatttaattatgttactgtacatactcgttgtcatgtcttagacatcttatatcctttatatcgcttcttctttctatatttactagtgctattgataatactgtctgcagtagatatttaatttcctttaggactttgtgttatgaaaatt

SEQ ID NO: 57985 - DNA, 696 bp, Gossypium hirsutum
  unsure (1)..(696): unsure at all n locations
  Clone ID: AI055583.1
gcagcatccagttctgtcattttgtacattgacaaactcttcctttcaagagaattgggtatagattggtaaaagaaggaacaactgttttaacagatatctgtttattgtgataatgtcaataaagcaaaataaactggttgttaaggcgtgtcaattattccattttttgctctcttttgcctttttccctctttcgcagaacagtctagtattgttgtacaaatcttattaaacttatctatgtgaaactgaaaacagaaacatgatgttagttgttagtctcatatgaactgatcttttatagcacctgttatattcagattggaacatggcgctctgtggatagcaggcctctttttctttatcttctgatagcggaacaagcatccaaaaaactgcctagaactgaaaaaagggaaaaaaacagataacagacactacatgattatggttccttgagctgcttgtcttgcctatntcttgactccgtccagttgctggtgtcatcgctggtgttatgttggaagatcacattgctgcataatttgctaatgctcgacaagagaagatcatacttccaatgcattcttcccttgtctacctgcaaaaccatttgaacaatttattacttgcttgcattgcagattaatggcgttcagcttttttgcttatagagaaacctagagtagtaat

SEQ ID NO: 57986 - DNA, 653 bp, Gossypium hirsutum
  unsure (1)..(653): unsure at all n locations
  Clone ID: AI055581.1
tctgagagttgggtctcactggattcttcgattggctcggtttgggagcttttttggttgtttctgttgtgaggggtcttctcttcagtgagctcctttttcagcttttctgtcaggttcaagtcttcccttggatccacttttattgttgctctttctttttctatgatttgattttggtttggttatttcacttcttcattgaaagatgactcagggttgatggattgttgctttatgattggttttctttgcattattgtttgcttattatgaatattggggctggaacctgttaagtgttaggccaacaacactctgttagggctttaagggatgtttatcaaaaacataatcccgacattatatntcttagtgagactaatcagaggggctcaaaactggaaaaactcatgaacagattgngctatgtttactcanagtatgttgatccaacggtgactgcatgaggtctctctttgggtggcgataaatgtgaatctgctgtctatgtagctctaagatttcttgatcaatgttgaactgaaaggtccttgtgtacgcatcctatgtacggtaatggagttgggagcttaaaaactaatactgtgcataactgggctttagagatttacgctctttaacttaagccg

SEQ ID NO: 57987 - DNA, 685 bp, Gossypium hirsutum
  unsure (1)..(685): unsure at all n locations
  Clone ID: AI055576.1
gaaaaagaaaaaaagacagaagggggaaaattatcagttattgatcaaagccaaaaggtaggccatctgcttttcttttccctgctttgctcttactcttttgaaatacttgtcggtataaataagcttaggcaggcagtttaaaccatgaaaatggacttcttttatgctttaaatcttcttagctttaagattgtgaatcctgtactttttcgattttaaaatcttcatctttccattcaaatttaccttagtgtntgttgacctgacaaatataaaaagatcaaataaattttttagccttatntagatcttcacttttaaaattcacataaaattacaatttaaaagcaactattttcagtaaaaatccattaaaaaaattgtggaaaacactctttaaagttcgtagaaaaaagggataagaaggggtgactattaggaatgctgcgtaagcacttttgtttgtgatctatcgacaacttgtggcttccacatacctgcatatcgttattaagaggttgagtactgctttatcttgtagaagaatgatttgtagtagatctgatcgtggttgggtcaatgtaaaaatttagatnatatttcggtctggactcgactaactaaaaaatggccctaatttttactaagttaaccaagatgaaaatctaaattgacttgttgg

SEQ ID NO: 57988 - DNA, 660 bp, Gossypium hirsutum
  unsure (1)..(660): unsure at all n locations
  Clone ID: AI055573.1
gtccaatgcactatccatttgttctcctccccttcgctcatcgatacttattccacttttgaccatgttcctaggttcttcccgtcaccatttgctctcaaactgtattgtccttctaagtagtgcccttaaaggaaaaacctatcccagattcgtctcttgtatccctgtcgttaacggtaaatggaaaaaaaattctccatgccctaacattccacataaaaaagaaaataatgataacttttcatattggaagggtgcgtaggtagaatttgtcctatctataaattatgcgcttcttccttttcaaaggacttcacacatccaagcatacctatatgcacatatatcttttcacccttgttttaatggtgccgtcgtattctaggaagcgtccaatgaaatttcccaattttcttacatcccttttgacatcgagcctaaggcaaatatgaatttgtccaaaaattcgagtagatcaaggaacatgaactggattctctnctctccagcgatggaagatattagatgtcttgtaaaaaaccacgaataccattggtaccttctaaatccactgtggaaaatcaaagagatttttatctccattctgtttaaactcttcatgaagccatatntgcggatgtctaagnntggatgtgg

SEQ ID NO: 57989 - DNA, 659 bp, Gossypium hirsutum
  unsure (1)..(659): unsure at all n locations
  Clone ID: AI055567.1
aatttttgccctccaaattacgctcttccaaatgacaatggcggatggtgtaaccctcctcgttctcattttgatctcgccatgccaatgttccttaagattgctgagtaccgtgctggcattgtccctgtctcttatcgcagggttccatgccgtaagcgaggtggaatcaggttcacaatcaacggcttccgttacttcaacttggttctgattactaacgtggcaggctctggtgatatcgtgaaggcaagcgttanaggatcgaaaacagggtggatgagtttgacccgaacctggggccaaattggcaatccaatgccggatttgggttggccaatctttgtcttttagggtcaccggcagtgaccgtaggacttctacttcatggaacattgctccttccattggcgnnntcggtcaaaccttcactggcaaaaatttcaaggtctaaaacataaagggatggggcactggttgggttactttcctgggaaagggatgtgtgtgttaagaatatttgcagtggggaaaatgggtttactcgttatctaatgggtattactttaagtttgctttttatcttgggtgaaagggaaaagggataaggttaaaaaatggatgaaaggggctgaagggtttgaagattgtcccgcctn

SEQ ID NO: 57990 - DNA, 615 bp, Gossypium hirsutum
  Clone ID: AI055565.1
atcatcttcatccttggctatctccaccaaaatttgaagagaaaaacatgattaggatagggttgagaattcgatcaagtttctacttgtatgtaagtgaattcaagctccgtttttaataatttgtgtttttagttcattttagtttaatctagctagcccggggattaatttgcaaaactattaatgattgaaagacttttcatggatatttttgaatatgttttgacgttttttgatggattatttatctttgttgtaaaataaacatgttaagtgatttttattgaattttagaaatagggtttaattgttaaaggtatatactcatgcgtttatgtgtaaatttgggtaaaatgggttgttaaaggtctcttggacattgtttagttggaattagttatatgattagggttagctatgactttagactatttgtaaaagtaatatttatgtaaatttgtaattttatgatattattttgttaaggtaatcataagtttatttcttattttttttttacattatacctcttctctctttgataatatctatcttgtttatttgataacttttgtttcttgtgtacttgtgatttatttgtagtgttagtga

SEQ ID NO: 57991 - DNA, 686 bp, Gossypium hirsutum
  unsure (1)..(686): unsure at all n locations
  Clone ID: AI055563.1
cttgctctttctctcactttctctcctcactttctcactgtccaaacaggaaacgattgctttctactactgcgagttccggtttcttcatggaccctgaagtaatcgagatccctcctccggttccttactcttttaagtccaataagaaaaaacaggttgttattcatgaagtaattgatgtagataatgatggagattcaagtgatatagtgatcctcgatgagagggttgatgtaaggaacaaagggaaggcagtaaaaggtagctctggtatctataatgctattcaagctgaggactttcttggccagactcccggttcattaaacacgattgagccttctaagcattctacccccggatgacatcatatatataaccactgatggtgatttgctatgatgatgatttctttgataactattacggtaatgacttcatggatgttgatgagtatgccatattgcaagcacattttgataatgttgatattcctgctggagtagaagcatccatcccttggtttgctgactnttctgagaggaaaaaagatacttctcctgtaaacactccatcaagtgttaatacttctcactcaaagactcaatgagtgctattggaatgaccagcactttcatcatggtgcanaacccgctctattgagaaggcnactttattagtag

SEQ ID NO: 57992 - DNA, 688 bp, Gossypium hirsutum
  Clone ID: AI055561.1
cccgttttttttttttttttttgttacttctttctcttttcaacactgatagaaaatttcatagatttgatagatgatactagtacaatatctgatatatcggatacaaatgtcaaacacgaaaattaaaaataaataatagaatgaataaacaataacatatggcgaccagtttcttgcaatccaatcaacagaaattgaaaatctatatggggagaatgtgtgaagttcacatacaagacacaatgatgggcacaagatatgaacatgactgagttacccatagcgattcattgaaacagaaatcagttgagctccaaagctatgtcctccacaattctgggaaaaaaaagagcaaaaattttcaagattatcgtttaggtgaaagaacgggatcagtatcagaggtcatcaacttatattatactggtaatttctaagtttctcgcttatataacgactaatctagttgagagtcatggtagcatgtgaaaatggttacacacttagttgctcggattgcaataaaaaccattcatgtgataaagttcttgatacatactgtcatagctttctatgtgttattcgtaaggtcaaggcgatagtagataggtagaagattactgtattcttatagtaagtggaatatattagcaatattctctagttgtatggaaattatgggagg

SEQ ID NO: 57993 - DNA, 623 bp, Gossypium hirsutum
  unsure (1)..(623): unsure at all n locations
  Clone ID: AI055560.1
aaaggaaaggagaccttgtcggtaggtctttatgtctctcaaaggactgacaatgcgtagtcaaaggcaagccgcgtatggattgatccctgattctgtttttttttttggtcttctttccatctcacaacttccacttcttgagccgaccttgcctgctggaggtatgattccgatctttgaatcgaatttgatctttcgtcttcaagtgaaggcgacgggtgggggaagatgccaaaagcagaatgtagtttttacagcgagaaggtagtctccagtcactcgactagaagaagggttcccccgagaaggaatcactcctaggcaaaagtggtgtacctgcagtactcgaggttttatatccatacacttgctaactataccatcgcttattctaaatcactatnctggtttttccaacccactgctcccttttttctaaaactggctccaatcagtgctttgacatattcttaaanagatgattgttgagagccaaattgagacaactattctgaacaatgagcacatttagttgcgtctcttcttctggcgcctacctataaataagatcactctttctttcttgtgactgctgtgtaccaagctctttgcgctatgat

SEQ ID NO: 57994 - DNA, 694 bp, Gossypium hirsutum
  unsure (1)..(694): unsure at all n locations
  Clone ID: AI055558.1
ggaaccccaggttatatggctcctgaatggttaagctcaatcataactgaaaaagtagatgtttatagctttggtattgtggtcctagaaattctgtgtgggcgacgaatcattgatgaatctcaacaggatgaaaggcatttactggagctacttaggagaaagcaagaggaagggcaactcctggatttagtcgataagtgcaatgatgatatgcaatcaaatgtagctgaagtggtggagatgataaaggttgctgcatggtgcttacaaactgaatatgccaacaggccttccatgtccacgcttgtgaagcattttgaggacttggttgatgctgtgattaacgtaaatgaagattttcaaaatgaattaacatcacaagcgcctgtatagagttttgcttcatcaattacgccccctgtggtatctgggccaaggtgaatgtgatgatcatcgacgtggaatatatgatggatgaactattcatgaaggattgatgcatgctatgatatggtcccattataacttattcaattattatttacattagacaattttgattcaagcctacctgcattgttatatatttatttcacgtctttctgaatgttcaaataaagttgagtcacgcattgatatatatcaaccatttggtcatataatcttattactcactggtatctaatatgan

SEQ ID NO: 57995 - DNA, 679 bp, Gossypium hirsutum
  unsure (1)..(679): unsure at all n locations
  Clone ID: AI055554.1
gagttggattcagaccaacactacagcgttggaaggcatggccctaatcttcttaacgaggatgcaaggacatctattaaaagatcaatgtctgatggcaacatcctttgtggaactgactctcccatgagtgcttcaaatgttagacaggagtctgaaaatagaggcgaagctatttcagagtccactcatgaaatgccagcttatggcatttcttattccaggtttactccaagaatgtcttgtaggcaactttttggagagattgaggaccagtttctgggaagtaatcgcatatgttacgaaaacgagatgaatgtaattgtaccaattttgatatggactggctttcttcataggaaattcatgtgatgatgatgcngtatgacagctgcaggtctggcgcgggcctatcctctgaaatatatggtgctgaactaaaaactggcatgaccacatctnncagtgagtnctggttcanactanagggtagtactttggttgtgaaacaaattattgacctttccagtatgtgtaaaagttcatcatctatatatatatattcccacttcatnctcccttttgacaccaaagatcatcattcctgaattgcgcaacgtccggcagcagtaatacaatgttaactggggtagttgcaattttgatctttatccttatt

SEQ ID NO: 57996 - DNA, 660 bp, Gossypium hirsutum
  Clone ID: AI055553.1
gcagggcttgaaacatctaggcaacatgcaaaaaacatgaattttttgtccaatatgccgaattgttctgagagttcaagaccaaatcttgtggcatctacctcaaatttgaaatcttcagatttctttccagagattggcagttttggtgcctccagttccaaggaagatacctttaacaagacagatttcatgtatgtgttattgtttctcatttatatacccccctccgccgtttgatctttaattggaatcaattagtctattttagttgaaattgttagatcctgaccttgttagaaacatctatggtgtttggactcacaatcttgttttatttggttttggaaatcagcagctgtggtaacctaagattgcttagttgactataatttatgtggccaattgattgtatattattatattccaattgacaaattgaagtatatatgttcgtatcttacctggtttggaatcctctgtattgaatttgttgcaaatcttttaatgtaaactgtaatttaatttgtatgtattgctaattatcttaattgtcttcatatcattttatgtactgtaatttcatttaaatctttgttattatctatattgtcttatatttaataattctctatatatatttgattgatacgtatttat

SEQ ID NO: 57997 - DNA, 691 bp, Gossypium hirsutum
  unsure (1)..(691): unsure at all n locations
  Clone ID: AI055549.1
cacttctctctcttaatctccattgttgaataaattattaaccctagcttagcttaaccctagcttagctttcatagattaagaagctcacaatccctttcttaaatggctatttgttcttgtgctcaaaagtagttttttttcacttcacacttctccccatttcaaacttttttttctcctttttcacagcttatctgaaactatcattgcagaacgtgcccagcttctgctagatttctctcaggtaccccttcacccttttacttacctctttatatatggtaagcaaaatactaattcaaagtgcttcattctttttaagaaattagatgtaactctatactttatgctaataaaacgggggggttgttttaggangaagtttttaggtctctttattacttatctactaaatttattntaataaaattaacatntgttactgtttgagatatacgtggggttgaaccttanacaatattaaaaaatataaataaaaatagccgtgatataaaaaatantttattatantttntaaaatctatatatcaaatttataanaattaaataatgtatttaatagtaaaccaagtggttccttctgccgtgcaatgataacttatgtagggtgaaaaagaccttatggctcccccccccccgccctttagtaatcacggggtagatattc

SEQ ID NO: 57998 - DNA, 679 bp, Gossypium hirsutum
  unsure (1)..(679): unsure at all n locations
  Clone ID: AI055546.1
gggatgttgtccctgttataattttctttcatggtgggagctttgcacattcctcggcgaatagtgctatttacgatactctatgtcgacgattggtaggtatctgtaaggctgttgtggtttcggtgaactatcgacgtgcacctgagaataggtatccatgtgcttatgatgatggttggactgcttttaagtgggttaactctagatcatggcttcaaagtcggaaagattcgaaggttcatatatatttggctggggatagctctggtggtaacatcgcacaccatgttgcggcacgagctgtggaatccggaattgatgtgttgggaaatatactgctcatccaatgtttggtggacaagaaagaactganatctgaaagcgtttagatgggaaatactttgttactctacgagatcgagactggtactggagagcttttcttccggaggtgaaaaccgtgaccatccggcatgtaacccatttggacctaacggtggaagtcttgaaggaaatcaaattccgaagagtctagttgtgggtgccggtttggaccttattcaggactgggcattgggctatgtgaaggctcanaaggcttgcnagaggtaaactttatatatgaacagcgacatcgttntactgtgccgatacatcacttcatcgtatggcgaan

SEQ ID NO: 57999 - DNA, 693 bp, Gossypium hirsutum
  unsure (1)..(693): unsure at all n locations
  Clone ID: AI055543.1
gaggaatcaaggtaaccgggaacggtggagcatggaggcggaggtggaagcggcgaagaagagatgccgagagttgatagaaaaaatagattgtttggacgtcgccaccatcaaatcaaattgcaagcacacactcttgaagttggcccattccgagttctcgttcctctcccgctttcccattcatctagcttcttctcaacctctcagcgtcaaccttgggcacctggaagccattgtctacattcttcaacaaccttttataactgcagtttcttcgtgtttgcaagccacttcctctctcattttcaagtaaacataaaaccctttctgctgctgcttctttgaattccatccacgtcatattgtatgtaatctcaacaaaacccagtttggtttattgtnttctgatagaaacccgaattacattacttggcattcaaataacaaaacaagggtgttgaagtctaagaattaacaagttcttgatgcagcaaagtcaatcaacaccttaagaccttactctattatncttttcttttcaaatggactcaccatttttaaccatcagaaacttaaggatgaatnttgtgcctcatgctagctctggaatctctgactctgaattgattttgcgagggaactgaagtgatgggtcagtatttcccagatgataaggaggatgtgactaan

SEQ ID NO: 58000 - DNA, 661 bp, Gossypium hirsutum
  unsure (1)..(661): unsure at all n locations
  Clone ID: AI055540.1
aaactcatcaaggattacattgatgaggtctccactcagttgagaatggtttgcgactctgattcagaggagctttccttggaagagaagcttgcttttatgcatgaaacaaggcatgcatttggtagaacggcgttgcttttaagtgggggtgcttctcttggagcatttcatattggtgtagttaaaacactagtagagcataagcttttaccgaggataatcgctggttcgagtgtaggatccattatgtgtgctattgttggtacaaggtcatggcccgagctgcaaagcttcttcgaagactttggcggtcgntgcagttttatgatcaactgggtggaaatttgcagttgttagagagtcatgagacaggggctgtcatgagatcagacacatgcatggatgttaagacatttacagtaatcttactttcagaggcttatgatatgactggtcgagtctangataacagtttgctcaccaagaacatgagcccctcgatgcctaattacttgacttacctatgttgtatatggagcgccgtagcgcttctgtgctntnctggccttttgagctcaggactaatggcaaagatagatggggaactgtccttaccatctccttaatggatccaagaggtctatgcaacgtcgtcagn

SEQ ID NO: 58001 - DNA, 702 bp, Gossypium hirsutum
  unsure (1)..(702): unsure at all n locations
  Clone ID: AI055539.1
acagcagagcaggacaaccggagctgcattatcttcaagaagatagtgaagtgcatttacctcaattgtgagctactgtttaaccattgtgctatacctgcattccctattctacgactggtcttcctccttatgttgctctgactcttatttttattcaaatactggtgtttgatgctgttatccaatgcattcaagatacgagtatagacatatgatcctccaaatacatggaggaacttagaaggaattgaacatgcctctatccaactttcacacttgagtccaagtaatttagcatttacgaacaattctaattttgcaacaagctaagtttgaagcattaatatgttgaagtgctcagattctgcactattgcattagataatatgtttctccttttctcctgagattgggtgaatatgggagatttagcatactctgtctgagatattagataattttatgccatgagccattatagaaattgtatgggggctaatcaggaattnaccgtcagtacatcatgttaacatttaacttaactctaacgaattgagatagtttctagtaaacttacttggaattcacatatatggaggatattatataacttgatattttgtagattaccatttctaatatggtctgtctagattagctcgactgtaaattaattgtgatatgcttttgactatgcat

SEQ ID NO: 58002 - DNA, 680 bp, Gossypium hirsutum
  unsure (1)..(680): unsure at all n locations
  Clone ID: AI055532.1
actttcagtttcagccttcagcggcatggacctcgatttcttttttttttctgttcatattaatcgaaggctaaaagatattgttagatgacatgacagacgatagattttctcagatgccaaacaacagatattcacagatgtaccagtttgttgatggacgagaaactttgaaatcaatagttgtccaagattcaagctctcaaaagatttatagcccttaaacgtaggtgagaagaaggagagaatctgtggcatacctcaaacagaatgtcaaagcttgaggattgtcattgagggaaagagttggactggcatcttgtaatgactggatttntgtgagtagctacagaggacatggatcaccttgttccggtccaagatcaggcaaccaccacatgcaagctcttcaatggtcatgctgtcactcaatctttcccttctacgatactctctttcaccgagaaagcatctcaaacttctcatgttcacgtgtaattgattcagaccaacagtcatccaatgaactggaagcttctagggtgcttcagaatgtncatatatcaacacgacttattggagattttctgaactanctaaggaaacaccaaaaagacttggaaaaccttgtgtctggngcttttgaaaagaacttcttgtacccccgatatactaacaga

SEQ ID NO: 58003 - DNA, 662 bp, Gossypium hirsutum
  unsure (1)..(662): unsure at all n locations
  Clone ID: AI055531.1
gaaaacaaatgttctgacgcagataccatgttccaaatattcctttgtgagatcttccattctaaaaatgacttccttcccacaaatgatgaattcagacgccagtctcaaatttctgaagacttgctagccccttctgcctgtgcattttgtgtattattctaagctaaaatgttgaagaggagaagctgtagtttttgaatagaggaaaacctggcaacatggaaattaaggatgtgagcagttgccatcaataagacatgggacttggttgattttttttgaatatcaatagcagatttgttcatgcagaacctcatggcttaaaaattntgaaggatgatcttaagcttggaagagaatgaataacttcatcacatagncacgttctcttttaaatgcttacctgaccgtaatactatattggtgggactcccgtgtgaatacaggaatgcttctgaccannatgttggacacagatacttttaagaanatgatgaatgaagnatgtagattgagatatccccatgaaaattcaccggtattcactggctcancagaggttgatgtgttgtaacagttgttgaattttgatggaaagcacctgggagatgactactcttttacgtcatgaatgacatcaattcgtcgtgacaatagag

SEQ ID NO: 58004 - DNA, 623 bp, Gossypium hirsutum
  unsure (1)..(623): unsure at all n locations
  Clone ID: AI055529.1
gtctcagaggctcctccatgaactattgaagaaattggatgcagagctaaagcatgaggtttgccattgggctgcatattatgtaagttgaataatctgtcctatcttgtatgcctctggaatgtttggctatgctgagttggcaatgtgttttaactttcggacctacattagatatctgttttcttttggttaattatgactgattatcctgtgcttcatggaaaataattgtaagcatgttaatctcaattctcagctctgttcttgggacttaaaacaatgcaatcttctacatgtggttgtttcagtgaaaccccaaatgaggggagaaaatgatgaatgcatgnatngttcanatagtcatacctataattaataccctnttatttaacanaaaattgggagagacatttaaaaaagcatgcaattttgcttgcacaagggcatatccgccaagatttctgattcccacttgtttgattgggtacgcatttgacgtaggaaatcttaaatctttgcaagaggggttcagcataaaaagctctttgattaatttaagactgatgctatcaaagttgatcacatcagcctgagtgatgtagaaatcantaaggtgatan

SEQ ID NO: 58005 - DNA, 642 bp, Gossypium hirsutum
  unsure (1)..(642): unsure at all n locations
  Clone ID: AI055514.1
attaactagaaaatgaaggaggcttgtcattcatgtaatacctgcaaaaaattactttggaaaaaatgaattggattaagttgttggcaatattctgttgcacatttggcttttccattttcaagtgcgagctttaagttgagcattgtttgagataggatgatccaactttgtgcctgataaaatgtgtatcctaaactctgagaaacatgatgatgtacttaatagatttaaggtttttttacaaatacaataatttttactgatgcccaaatgtatagcatagtaagacataaatgatgacttgctagaaagagtttttaatgaggtagaggagactaggttttgcaagagtaaaaactagatacatcattctatcaatttttttatattgtggagaaacgagttatgtatcaagctctgtatatgacaatgatttccacatggaagtgaanaatttctttaattgctgtgatgtcatagaaaatgggctgctctttgaaggtgcttcacctagatctagattagagatttagcaaagaaactcatacagaattatggttgactggaccaagaaattttaggagaaggcattgagatcattacaaagcattgaaacagaagtatatctttagttgatgg

SEQ ID NO: 58006 - DNA, 642 bp, Gossypium hirsutum
  unsure (1)..(642): unsure at all n locations
  Clone ID: AI055513.1
aagaaagatagggagaaaactatatagttccatgatagttggtctttgtaaagctgatcaggcggactatgcactgagtttcatgaaggaaatgaagagtaataatgtatatccaagcatggaaagctatgagcttcttataaagctgctgtgttcgaagaaaagctactggttggccgtaaaattggttaacgagttggagaattcaaggggctatattacaccttttatcggtaatgtacttttgttacattctttaaagacaaaacagttgtacgaggcttgggttcaattcaaggaaggggaagatgaaacatcagatgtttcgatgcttgggcgagtaattggaatattttctggttgtatcaaagcaggcatagatattgagagggcagaggaaattattgcaaaatgcttcccactcgatatctacacatacaatacattgttgaagaaagtaagtaaaagcacagtggaggaagctttgaggtgtatgattggatatgcgaaaaggttatgagccanatagatggacttatgacatncatatacatggtcttctgaagaaagtatgannagtgaagctcaaagatggttgaaagaaaatgttgagaaaggtttgtttaacagaccgaccaaaan

SEQ ID NO: 58007 - DNA, 618 bp, Gossypium hirsutum
  Clone ID: AI055510.1
cttaattcaaacattttctcttctttattccaaaacccacctcgtccttgtaatgttttgccgattgccgccgtcaccctgatatccatcattattcactcgataattgatggaggctatgataaagaaatatcatcagaaattcaagaaagcaaaagatgaaatgagtaaatgggacgaccttcaatctcgcttaatttcccactttcgaaatgcttcttccattatttccagattacagtttaaattgtgttggaggaatggaagctgcagtgatgctaaagcagatggattctttgcaaaccattttactttccatgaaaaatacaatattttcagggaggactttctcggtgttgttctttcccttgagaagcttatcatgatggttaacagctttcaaatgtaccactaatttatgtacatgaatcacttcatatataattggtgtatttcgacttttccatatcttaatggtcttgtcttcttcagatatctatacactaggtctttctatatatatatggttatgtctcttaagtcttagttgtatctattcttgtaaatggttctctcattacatatgtgtttatcctatattatacatatatctttttg

SEQ ID NO: 58008 - DNA, 649 bp, Gossypium hirsutum
  unsure (1)..(649): unsure at all n locations
  Clone ID: AI055506.1
ctccgaaggagagccttttgctgtgccgggactgcccgatcaaatcgaattcactatagggcagttacctggaaacctcaatccaagatcaaacatgaaagagcttagtaagaagataatagcagctgaagaaggagcttacggatcaatagtaaacagcttcgaggagttggaagccgaatatgcgaaatcatatcaaaagatcaaagaacataaagtgtggtgcgtaggtcctgcgtcattatgcaacaaggataacattgataaagctaaaagaggtaacgaggctctaacagatgaaaaccaatgcttgaaatggcttgattcctggcctgcaagctcagtaatctatgtttgctttggaagcctcaaccgtttaacacctnctcagttaatggaactgggtttagccttggaagcatcanataaacccttcatttgggttatagaggaggatataanagagaagaaatggaaaaatggttagccgaagatggattcgaagaaagggtaaaaggaagaggccttttgataaaaggatgggcaaccgcactgttaatttatcacaccccttcgttggaggattttgacacactgtgggtggaattcccacttgaaggatcanttgtgggtgccatgattacatggc

SEQ ID NO: 58009 - DNA, 638 bp, Gossypium hirsutum
  unsure (1)..(638): unsure at all n locations
  Clone ID: AI055502.1
agataaaccctctccacagaacagaaataagtaagggctttaaggatccccttgacgtagccctcttaatggattgaaactaaaaccttcctcacaattaagtaaaattgattaagtaaaattgaataatggaccgaataatacagtgaagtataaaataaataaatggatcgacaaagcccaattttgacatcatacttttaagaaaatgctagtccacttgatcctaagccttgctcatacccagctttagagccataaataattttttccctgatcttttattcttgaaagagtngaagtacctcatacgccaacaacacattgtcagttataagcttaccagcacanaagcactttgaaagtcattaatataaatatctagtaccttttgtaaacggttagaaactgacttgggaaatatcttatagataaccgtacagaggctaataggacgaaanatnttcanattgagaggatnntcaatnnttggaatnanaccactgagttctcttatttctttaaagattgccatattcaaaatatcaacagaaactctgtattttaccaatatngcatactatggtaatactgtcgaaactattgacctaacttgtagcccatccttaagttaacaa

SEQ ID NO: 58010 - DNA, 668 bp, Gossypium hirsutum
  unsure (1)..(668): unsure at all n locations
  Clone ID: AI055499.1
gaatattgaagattctgttggtggaggtattcttaaacaagatgatcaatcaactgagtatcacatggttaaatatgaggaatctagagacattccagcctctgtttctgaaacaaacttggtagaagacatgaaggaagggcctaatctcgtcactaatgaaaattgtcaagaagcagcagtagagtctcaccacctatcaactgttaatgcagtgtcagtaggggatactgataaactgaattcaagtggtcatgcttctcagaaaatacttatttctttcaaaaaacctgttgaccagaaatctctctccagatctttagatccagtgagccaaaatgttgattgcctgcctcaacaatcagatacgaaacagcggcaggctgcatcttccatgtctcattcttctggggaaagctttccttcttacatgttacctgaccaacagtcctactttgctctacagccacaatcctctttggcttccttgcctcaccaccaccaccactgaaaccacttgattcaactataactcctgggtgttcttcacatnnttcgcagagtcacttgcctttgaggaatgatnntggtcagaaattatcccaaggcttatncaactgaattgcttgacattctcagtctgattggttcaacagcgagctatattn

SEQ ID NO: 58011 - DNA, 673 bp, Gossypium hirsutum
  unsure (1)..(673): unsure at all n locations
  Clone ID: AI055498.1
gtaccctcaacaatgttgactgagaaataatttgaagaaacttgtaagaagggtatagcaagaaacttgtaggaagggtataggaagagggctggagggttgacgccaaaagtgaagaaacttgtaggaaggatactccataatggtctgcttttctcctctgggatgacttaattttccagattgaattttccacaacaaatttatcccatatatagaaatatatgtagaaaagagaaacccgcaaattggggttatatacctagtatagtaataataattctgtggttaccctaattagtgagaaaaaatcaatgcaatggcgcccaacttttggagtaagacaggatttcaagttgtgtataaagtccaaggctttggttgattcaaatgcacaaaggtatcaagtgtgtggtttgttgatttagataagatggaggctaaatcgttttcggtactagtcactacacttgtgttcatcatacgagggtggcgacagactgangggtgctngnagcangagagaactgctctcgtncaactcaaatctttnctcaattaccccttatatttgaatgactgggtanatgtgaagggtccgaatngttgtcaatggaggggattgaatgcaacatcatagttgacgagtaatagtctcaatctaaatacgccc

SEQ ID NO: 58012 - DNA, 642 bp, Gossypium hirsutum
  unsure (1)..(642): unsure at all n locations
  Clone ID: AI055497.1
gggaggagaaattgggatggaactggtggtaacaaccatgcgattgagtactacaaggagactggctatccgctagctgtaaagcttgggacaattacttctgatctggatgctgcagatgttttctcttacccagaggatgatagtgttatagaccctcttctagctcaacatttggcatattttggtattgatttctcatcattgcaaaagactgaaatgacaactgctgaaagggagcttgaccagaataccaactttgattgggatagaattcaggaaagtgggcaggatgtggaaccaattttcggaccaggttatacaggtcttgtgaatcttggaaacagctgctacatggctgcaaccatgcaagttgtgttttcaacacagtcattttgtagacgatattttatgaaccanagcttanaaatggcttttgagacagccccagctgatccaactgtagacctcaatatgcagctaacgaaactgcacatggtttgctctccggtaaatatttctttcagcagtagagaaagtgaaacgactgcacctcagtanagatgctaacaggaaggatcctnctgcatgtccaagcgtattgtgcagcatcgagtnttacggagcacagatcccgaattt

SEQ ID NO: 58013 - DNA, 663 bp, Gossypium hirsutum
  unsure (1)..(663): unsure at all n locations
  Clone ID: AI055495.1
gcttgcaccgaggaggtttgcctttctgtaattgtttgagaggtttccatcaaaagtcgcaatccgcttggaatctgagcgatttttctgatgggtgtgaaaggacaaccaagctgcagtgtaaggagaatcgcacccttactaatggaaagcctgataaatttctaacaagccccaacgtgaaattgcctcaaaatgctcagcctgtgaccgctacgagcatatcggaatgtgaatcaacctgccttcagaattgctcttgcactgcttatgcttatgacagtgatgggtgtagaatttggataggccaactcttggatctgcaacaacttgcggatgatgctagcgatggcaaaactctatatctccgattagcggcatctgaattttccagttccagcaacaataatggaatcattattggagcagctgcaggggtcgtgagtntagtcctggtcccttgtatatttggaatctggagattgangcngcngnnacacgataacccgaaagctgttgacggctcgcttctagcttttcgatatagggatntacagagtgcaaccaagaatttctctgnaaactntggnggaagaagctttngtcttgtttccaaagaacgttgccggatcnatgtcatcctttgaaccacttgagacataa

SEQ ID NO: 58014 - DNA, 672 bp, Gossypium hirsutum
  unsure (1)..(672): unsure at all n locations
  Clone ID: AI055487.1
ggcatgtgatactcacttggtagctctacatcaaattgattcagctacacttcgcagcacagctgctgcatggcatgatgagtttgcacctctgccaaagcccttactagtggttaacattggctggcctacaagccactgtcgatatggtgcagatcttgcaaagcagatgcttttgtcgtcacagcagactcggttagtctgataagcgaggcttgcagtactgggaaacctgtctatgttatggggcctgagcgttgtaaatggaaactatcagacttccataaatctttaagggaacgaaggtgtggttcggccatttacaggttctgaagatattgcagaaagctggagctatcctcccctcaacgacatggcagaagcagcaagtcaggtgcgtgaagcacttgctgagcgtggatggagggttcggccataactgaangtgtcgatagtttgttgttgtaagcacactgttgatttccttatttttgaaacttgaagccttaagaattgggntttgntgaatagcatataanaataccaccttcaaattcattcttccccattcaggggattttcaaaatattngtacatgtagaaacaaggcctagctattagagcggcttgtaagcatgaanagggggacaagncataattatnnattttggn

SEQ ID NO: 58015 - DNA, 667 bp, Gossypium hirsutum
  unsure (1)..(667): unsure at all n locations
  Clone ID: AI055483.1
acagtttcatgacagtagtcctaaggaagataatattgctttgtacttctttgccaaggaccttgaaagttatcagaacaactacaaggtgcttttggataccatggtcaaggatgatcttgccctcaaaggaaattttgaaggtgttgagcttttgatattcccatccaaccaccttccagaacattgccagcggtggaataacttattattcctctggggtgttttcaaggcaagaaaggcaaactgttcaaattcctcaaagagcgtgtgcaatcctgatgcaagtatggtatgtttggagaaacagagatctagtgatattgctcagccagtagataatgaatcagccgcatgtgatagttcgtgcaatgtagttccagtaaccacttctgttgaaaagacatgtatctcaacggatagagttggtgataataaggttgcttcttttgagcagacatttgggggaataaaagaaaaattggaggagcaagatgtcaaagttgacaccaaattcttgtctagaatttgcacaagcagcacacaggtggaaccaaaaagcaagaggaagacgatgtatctgccttccttttcctttcctttctttccttttncagagatggagcgnatgtaaaccccgtncctaaacagacagcagttgctgaag

SEQ ID NO: 58016 - DNA, 673 bp, Gossypium hirsutum
  unsure (1)..(673): unsure at all n locations
  Clone ID: AI055481.1
gagggcaagttaagtttcctttatacgaacttactaagcattggttgcttacgtagttgcttttccttgtattgtagattgttagaaagctcagacggttggaatcaagtcagagtacattcacactatccatcatttacctcgatagaaaatttggatatattgatgtcaagttataaatggcatgaattcagagtccttaagttattttgtttatgattatgttgtttattagttagtttgagtaagctttgtgggttataaatgtttagtatctttggtgtatgtttaaaacttgatgtgcttttggtcattagctaaatacctttagtgattagcttgatatatggtaaacatatgtgatgaaatggtgactttgataatgtcttgtaaatattgagcatagatntgtttggacgtttaaattgtggtactaatgaaggtacattggataagcaattagatcanatgagatgtgtgttatggtcactttattcatgcctcttaaaagcanatggcttatgggttaatgttatgaaaaaaaatggttatttggtatgctagaaatgtgctaaatgatttgatttgaaaacttgaaatgaaaacatgttgatttttattgtggtacctattgtngtacaatggctagaacttatggattgaatgatntggn

SEQ ID NO: 58017 - DNA, 664 bp, Gossypium hirsutum
  unsure (1)..(664): unsure at all n locations
  Clone ID: AI055475.1
ctttcttgagctcgattttgcttgttctacagatttgctcttcttacttcttatacgcttatattttcatgtattttcgtttttatcagattatcgagcgtatcaagaagtattttgatattttaggaggacctgcaacttttatccaggtatctatttatggtactggcttgttactaactaatgaaatgtgagcatcctattgttgttcataagtataggtaccaactggtccttgaaaaagacttggatttgaaagtttccatttctgattcaagtctttatgccattaccaaaggtattgagtcaattgttttcatggctttccggtgggtgtcataggcagcagttccccatataatagagcaaactgacaacgttttcttcaagaaaactatcaacacgctgaagcagacatcggatatttgttgggatatgataaaggaaatcccttgccttacttgtccccaaaagcctcaggggtcaatggctgtcatggntatggaccaatataattcgcaatgtctgtttgaaactcggatgggattcataacatgtnccagttaatnnntgtcatgtatttcacagatttaactaaatattccagtctggaagantcagcgacgacatcgacttctgttcaggctagccaaagaagaatccn

SEQ ID NO: 58018 - DNA, 655 bp, Gossypium hirsutum
  unsure (1)..(655): unsure at all n locations
  Clone ID: AI055470.1
caagactttgccttagccttcctagtggttctctctttgtgcatttgacctagttcatagttggattgttgggaagtagagtcacctcatagtcttcctctacagcttcccaataatcacgacccttgcttgataattctctccatcaaacacaggtggggctaagatggacaggttactcgatttcgattctattttcctcgaaaaccttataagtgtacctctcaaattttctcttagaagtctcacaaaacttttctcacaagtccctcaaaaaaatggctctgataccatntgttggtttagcaaagacttaattgaagtatagaacaatagatgaaatgaatggataatttaattcattatcaatgcagcctttaatataagtctcaagtaacaacctcaacanaaattcaaattgctactcttactaacaagctaacaactnctactcctactaacaagctaacaaatctcctaggactttagtctatnnnttttaaaaatagtgcaaccttgagatactaccacatgtgatgtggtttaggaggaaaacagtanattagaagaattaggaccagaaatgagtcgaagaagttggactctagaaacattgattatagaaactctagcttttttttaagtcaaaaaaaat

SEQ ID NO: 58019 - DNA, 627 bp, Gossypium hirsutum
  unsure (1)..(627): unsure at all n locations
  Clone ID: AI055465.1
aaacttttacatctgtcaagttcgaagactaaagtgagcaaataaaaaaccatggtaccaaagtggacccattattgtttggtcaaattctgctatcagactatgtactttgctaagttgtgaatttaatacatgtactttaatttagtcatttatagttcatgtacttttagaattcgaaaattttagtcctaactaaatgacaactattaaattcattaagttctgttattttttaaatttaatgtgtcaaatatatcatcatatgtgtaatgctatgttggtctgatatttttcacatattattcacaaaaaaattagttaatagatgtaatgattgacgtttgcattaagaataaaatttggaaattaaaaaatatagccactaataatgatccaattggtgaattgtactaaatctataactataggcataatacagggctaatgacatnaattaaccagacataattaattgttaccattgngtcacgattaagatttaaatattgaaagtacggngactaaataatcanataaagtacagtactaagtcacaatattgtaaagacagggtctatagcggaattgacgtattgtttctaggttaagatgaaatggaagtca

SEQ ID NO: 58020 - DNA, 633 bp, Gossypium hirsutum
  unsure (1)..(633): unsure at all n locations
  Clone ID: AI055464.1
gtgggatggaagtgtaatatatgggaacaatgaggaagggatgagaagagtaagagcattcaaagaaggaaagctaagaataggaggagatgggctgcttgagcatgatgagaaatggattcctatttcaggtgatgtaaggaactgctgggctggcttttccctcctacaatccttattcgtccgagagcacaatgctgtctgtgatatgctcaaagaacattaccctgatcttgatgatgagaagctctatcgatatgccaggctggtgacctcagctgttattgctaaaatccacacaatcgattggacggtagagctcctcaagaccgacactcttcttgctgggatgagggtcaactggtatggtttacttgggaagagatttaaggatttgtttgggcatatttgtggaccggtactaagtggattggttggtcttaggaggcctaatgatcatggagttccatactcactcacagaagagttntctagtggttacaaaatgcattcacttctacctgacaaagtaatcctagggacatcaccactctattaatcaaactatgattcctnttgtttacaagaagtgctatgacagaatgactgaaaagacgcgaaagagaatgcaat

SEQ ID NO: 58021 - DNA, 635 bp, Gossypium hirsutum
  unsure (1)..(635): unsure at all n locations
  Clone ID: AI055462.1
ggaacatcttacaaaagatgatgcaagacaacaatttcttcgaatattgaggacacttccttatgggagttcaattttcttcagtgttcgcaaaattgatgatccaattggacttttgcctggacggatagttttgggtatcaacaagcgtggggttcactttttccgtcctgttcccaaggagtatttacattcagctgaattaagagacataatgcagtttggcagcagcaatactgctgtatttttcaagatgcgagttgctggtgttcttcacatatttcagtttgaaactaaacagggggaagaaatctgtgttgctcttcaaacacacataaatgatgtcatgttacgtcgttactcaaaagctcgatctgttgctaatggctctgtaaatggagatgtttctaacaattttaagcctcctagtctagaagtgtatgagaagcgtgttcaggatttatcaaaagctgttgaagaatctcanaagaacactaatcaattgttgggagaattgcatgagaagcanaagcaggagttgaaacacaagaagaatggagtgtcttaaaaatgccttgagaaagagaggaagacttatggaggtatgttgacctgatagaatagtcatatgtgan

SEQ ID NO: 58022 - DNA, 633 bp, Gossypium hirsutum
  unsure (1)..(633): unsure at all n locations
  Clone ID: AI055458.1
caaacccctcctttcaaattaaataaagaaaaaaaaagaccaaccaagaacacccaaatcttcattggcacaaatgcattcttcctatttttcatctttaatttatttcgcttaaagtcaaccccttttatttttgtttcttcgattcttcatttgttttttttaacacaaaaagaagatttttttttttcggtttcatctctacattcatacgaagacggagaagacgaagaaaaagaacattcccattctgttttttggtcaagcttcaatcagtgtttaatgggagaagatggaacacccacctttactgtggatgatgcccttttgcacatggggtttggaaagttccaaattctcgtgcttgcttacgccggaatggggtngggtttcggaagctatggaaatgatgttactctcatttataggaccagcagttcaatctttatggggtcttacttctcatcaagagagtttaataaccagtgtggttntttttggaatgcttgttggtgcctattctggggtgtagtctcagataatatggaagaagaaagggttctcacactgcatagtacttcggactgcttttgatgcttgctncattatattcatgatatctcgtgttggtgg

SEQ ID NO: 58023 - DNA, 623 bp, Gossypium hirsutum
  unsure (1)..(623): unsure at all n locations
  Clone ID: AI055454.1
aataaaaataaaacagtaaattatatatcaaacacgaatatatataaaatgattacaatgaattatttatttatcaattgggcataacatcgttaccatcactgaccctaacattcaatcttcttagccaaatggagtgaaggatcatatggaacacatcgaatcgcttcggtggcgaatgaaactcgaaatgtctccgaacttgcaacactcgtctctgcattcgtatgtattgcctcgatgatatcttcattagtatttccttcaatctcgggatatcctcgaccgaaaccaccaccgagaacgacttccacctcagcacatcactgaatggtggcacgtagcttttcgatattagcaccgggacgcatccgttgtagagtgcctcgacgattctcgggctcgcaacttcgtaaccactagggcaaagacagtatttactacttctcatcatttcgtagtaattaatacctttcggaagtatntatgtactntgatctcatcatccttaccttcccatgctcaagtngatgggtcgtattcgtccatgaaaccctctgcaaagaagcaagatggtctcgagatccatgccgccgataaccggtaattgcagtcgaagtcat

SEQ ID NO: 58024 - DNA, 644 bp, Gossypium hirsutum
  unsure (1)..(644): unsure at all n locations
  Clone ID: AI055450.1
caggagacacaaagcttttccatccaagttgaagaatgcacgccaggagattcaaaagaaaagttgttgcggcttcctcggctatctccatttttcgtgagtgggtatgtttattttgcccagaataatttcagtatagattctgtcggagagaataaagggttttatgaagtagaacttcggtggaaaccaccgccagagccaatttgtaggtcatttaaagactgcaatgattggccaaactcatcttgcaaagtagcacacgatggaaaaaagagatgcacctgcaatccaccctttctatggaattcatcaaaagtcagttgcagtgcagaagcaaccttgcaacaacgtccaggacctttagagaaaaagacgccagcgtatttgatcatcctagggatcacaacggctatgctggttatcttgtgcgtcgcttttgcttggaaccataagaggagaagaatgcccaatagacgaggaaatctggaaattagcttgcacggtagcgcgagacgtgtcctagatttcatannattagatgatttcaaagaggattatanngaggatatagatgtaccatattttcatctggagagcatatttagtgcacagataactttgccgagcannacagcttggan

SEQ ID NO: 58025 - DNA, 616 bp, Gossypium hirsutum
  unsure (1)..(616): unsure at all n locations
  Clone ID: AI055445.1
attttttctgcgtatttagaaatctttgctgggtcatttttagttaacttttgggggcaatctgttgccccatgagttggtgtgtttatgctaattattctggtagcccaatcgccttgtcttgggtttgatttaccaattttacgctcaagaaacttggaataagttatgattcttttggagtatgactactgtagtttatctcaaaggatgtatgcaactgtaccaactattcgaaatgagtattaattcattgcacctgtcatcatgcttattttggttaggtttctagttaactgggattttatcctgttttgcaatatcagtacactgttatatgcttctgcttttttgggggaaattttttttcctgtatggatatgctaattntcgtatcagattttagtattccatttattttagtgccatagttcatactcctaaatgattggattatcattntgattgtgaagatagtagtgatgaanaatttaggaggttttgtattcaccttatgagatctgtcgttttaggttttgtttgattattcatatctttcagatgcatcttttcagatcatctccaagctctgctcactgattgcatacaagcactg

SEQ ID NO: 58026 - DNA, 635 bp, Gossypium hirsutum
  unsure (1)..(635): unsure at all n locations
  Clone ID: AI055443.1
cagacttaagattccccccccccactctcatttggtctgccgtccaaccaccattccaccaccgtgtcggtgggtgacggcgtgcaagggcgtctcatcgtcttccgtttggaaccaagccttaaaggccagcgatttcagcccctaaaatcccctctacaactccgatctcgacggaggaaaaagggacttcgacggcgcgttcgcaaaggtaagcccttcactttccccttttatttgtttcaaaatatttttgcgaaaaataaaataaaataaagatatatatatatatatatatataaacagaaaaataaaaaggaagagaagaataaacacctctttaaacttcagtttttttttttgattntgtatttctcttttttgaatccggaagaagaaaagttacaagatgttcgttaaggttttataggcatattacaactgtctattttctattattttctttcattgtctgtttttgcgttgntctcttctatctctattgcgtgtntcttttgtttgcaggtgtcanggggttagtggtacgggcgacgatcggcggttgcatgctgcccctagagaggcgtgtggcatgcntgtacgcgccgaactaggggtttttcttttcatttgtg

SEQ ID NO: 58027 - DNA, 642 bp, Gossypium hirsutum
  unsure (1)..(642): unsure at all n locations
  Clone ID: AI055440.1
ctctggttttccttcacctttcaagtcaaacctttttgtcttcttctacattcttaaccatttctcgttgttaaaacactgaattactatttccttttagttttgatgtttcatatgcttcagcaaggacaaaggaaatattattaggaaaatgatgttggccctcggcaatatttttaggtgccaaagactgatacaaaacccggtgcggtttttggttaggaactgtcacaaagaatctattccggtgtcatggggaaaaccgaaaatcggatggactaagttgaacttcgatggatcttgtaaaggtagaaaaggaaacggtagcattggaggggtcatcaggaaccacaaggctgaatttttacttggatatgctgaatccatagggagaaccactagcacgatcgcggaactatctgcattacgaagagggctcgagttggtattggaaaatggttggaccgatgtatggctcgaaggtgatgacaagacattgattgatatcattgtctgcangaggcangtcaagtgtgccgaactacaaagacatgttagacacataaacttgatcataccgnagcttttacatngnatngtgactcatatctatagggaagggcatagagctgctgataagtn

SEQ ID NO: 58028 - DNA, 622 bp, Gossypium hirsutum
  unsure (1)..(622): unsure at all n locations
  Clone ID: AI055438.1
acaagtagtgttatataggctgcagacagaagggaaaggaatgggtggttgttgctgctgttgctcttctggaggagttgaaatgagtagtgcaccagcatattattattacccacaagcctcagatgagcatgttcctttatcatatcacaatgttgctgcctctgccctctcaaccgggctcctggttaacacaaatctggaggtatctgttactgatgcttatagacctccgcctgctccaatgccatttgatgcagttgtagaacctcctcagactccttcagttatccaaggaattcataacagtaatagcaatgaaacattgcaaacgacaaatgtaaattgcagtcaaggaacagttgctgtaaatactctagagacttctataaaatccgagaacacaaaggaagactgcaaagcacaatccaatacagatattgaatccttaaggggctagaagttgatatttcaaaacagtaaatcattgtgtccacaatgaggaggagatgtttgtcccactgtttggagagtttatgcataaattcctaattttctaaatgcgagcatattttaccttgatgtattttgaatggatgaagaatgcacatgtctgtctttn

SEQ ID NO: 58029 - DNA, 631 bp, Gossypium hirsutum
  unsure (1)..(631): unsure at all n locations
  Clone ID: AI055431.1
acttgaattgtgtcttattactcattatattatgcggcttttcttataattgttcattaatttatgcttccataggaatcattcagtgttattagtcacatttggtatagtagcaagtatcttcctcaagtggcatgagcaacttgccatttttctgtaggaagtgtgtcaggttcatgcatcaggaagaagatcactttacactgcttggatcacctagttccactcaataaaacctaacggccttgtacttgtttcctatcaaaacctaatggacttgtatagaagcattagaatatggatggactgtcaaataatcatttccatccatgcctggtctatatagtggttctctcttatattcccctttgtgtattcaaactaattgcctctgcttcttgtttcatttcctaatttaaatttgaacagttgggcaccagggttcttgtaaacagtgaagaagcttgtcaccatggacgcaagtangacatggaagttagatggtctttagcactaaactggatctctgccaaattacttgatacagcttaatctactctcacctcatcagttgacttactctgcattcatggtcacatagatgcnactctctcacggatcagggctngta

SEQ ID NO: 58030 - DNA, 640 bp, Gossypium hirsutum
  unsure (1)..(640): unsure at all n locations
  Clone ID: AI055427.1
gccgagcagaaacaagtttctcgaagcctctctggcacaattgcagaagtaacaaatgaagaaaactcagctatcagagttgagattccagatattgtatttgtatcatcatgtgctgatctgactctaccaccaggtgcaggcctctacattgatactacccatggtccaattttctggttgctgactcatgggaatctttagacggatggcttgatgctatccgcttagtttacacaatttatgcaggaggtaagaccgatgttctcgccagtatcattacaagctattatntgtgttgagcttacatttgcccaagtccttatatctggcttcatnnntgatcttggatatcatcaaatattttggataatgtaaggttgagctacttttatgtcaaattattcattggcatttagatgatatatagttcttctgctgcatataggcatttccattctatcttcctaagactggggagtttatttttctaanaagtanatatatctaggcatctaccatgttgtattgctgcgagcttgngtcctcgaactggcattcgactctntaaatctctgccttgacatttgtcccgagcgtgagaatcacacatcatctgaatatgtctagagcacggttn

SEQ ID NO: 58031 - DNA, 654 bp, Gossypium hirsutum
  unsure (1)..(654): unsure at all n locations
  Clone ID: AI055426.1
aaaaaaccaccagatctagcgaaaaataaaaaaaaatagagaaaaaccaaggtcttattttagaaatgtactacaaaggagcagatagatgaagaataattaaaaataataattttaggtaaataataaagtaaaacaatatgaaataatcatcattttcatcctttctttcaccctagaacggaaaaaccatagccaagggaggagcaagcttcgaccaaagaaatttcaattgcatggtatgaagtttcagtctatttttaatgatttttatgttntctgttactgtattagcttaatctagctaaccgnaggttaatttgtaaaattgttnaacgttttttgccattgataaaattaaagtgtttttgaacttggttgatagatattaaggnttggtagctaaaagaagtatntgttaagtgatttttaatgattntaatatttagggattaaattgttaaaatattaaaatccaatgaaattagggtgaattaatgaaagataggnngctgtattgacccctaggaaaaccaactactaggtttttcttttaaatcgcaatttaccaagtttaggttagagactnatcatacanagtttaaatataaggtaatttttaaatatgatggaggggtactgataattacttat

SEQ ID NO: 58032 - DNA, 620 bp, Gossypium hirsutum
  unsure (1)..(620): unsure at all n locations
  Clone ID: AI055423.1
tggacaaaaatcagagaatggctgaagaccaatctgttgtggggaggagacgtatatactatgaccaacatggcagtgaagctttaatctgtagtgacagcgaggaagatattgcggagcctgaggaagaaaaacatgaattttctgaggttgaagaccgcattttgtggaacgtctgtcaggagtatggtctaggtgaggaaacattggctgctgtcagccaatttattggagtcaccggctctgaaatccaggaacggcatggcatgctcagagaaaaatacagtgaccagaacattaaagattctgaggaattgtagatctgagaagggcatatctttggacaagagcctcagtgctgccttagattcttttgataacctctttgccgncgtgctngntatttgatgccgtctttgggctggtctanactctaataatcctagtgaaagcagcctattggtctgatatgaagagacagaagcttgcgtgatcagtgttactccggttagagctgtcaanatgtgcaaaggtctggtgtcatgcatgcatggatgaaacacttagagaaagacaggtgatctctgtgccaaagcaaagactagtgatcgatttatcan

SEQ ID NO: 58033 - DNA, 638 bp, Gossypium hirsutum
  Clone ID: AI055422.1
atcaagatcttcttagctctatttgctctaaactccctctctctttatgtttacttctcctccagccaccccaaccatcatcaccatcatctggcggttaaccaccgtaacacgacagcggcggagggttttcccaaaaaaatcccacaccgtaaaccccatttgtcaaaccccgcgcgaccaatcatcccatcaaagccctggccaaccatcccatcatatctaccttggtctttctccccaaccgtagctttaaattcatgtgaagcttatttcgggaatgggttcacaaagatatccaacattttgcccgtaaaggccgccttgagatccgggtctagttggtttagggtgtcgttactcagagactttgaggacttcaatttgtgaaggtgggaagataaggatggatcccgggaagattaagatgtcaggtggtggtgaaaagcttgaagatgttattgggagaagtgaaggaaaagaatgcctgagtttgaagatgagcttttgtggttgatcagggtaaagagaaagaagcctgtggtataaagtcttgctaaaattacctgaaatgtacaagaacccttagggaatattagtctatgtattgggtcaatgattgatgcaaagggtaagag

SEQ ID NO: 58034 - DNA, 639 bp, Gossypium hirsutum
  unsure (1)..(639): unsure at all n locations
  Clone ID: AI055419.1
gttggatgtaatggaaaatttaggctgactgttattgttttgttataggaagctcccgttttgatatttttgtatgtttttggtctaattgtggacagcaaaggctgttcctcaacctcaagactctgaagtgagcttagttgctgatgcatttactcatttcaagcatctgcttctgccaataacagacagaaatccgtatctttccgaaggaacaagacaggtttccttctcaaaaccccaaattctacaacatttgctttaaatccttcaataggggaaaacatggtgtttttctaaggatgctttgtcgtgatttgcattttgggtcctccgtntttcggtttaagaaacatcttaaacttttgagcatgcagctgcaactactgctgctttggccaagaactatggcgctgacattactgtcgtggttatagatgatatacagaaagaggagttgccagaacatggaactcaactgtccatcatacgctggcatttctctcatgtgggtttaaggaattcagttgtttgaaccacttgttgaagaagcaaggttctgcgatcttgccaatttgcgacacctattctgatctatggtgatatcatgaaccatcgttcatcactgacctctatttt

SEQ ID NO: 58035 - DNA, 642 bp, Gossypium hirsutum
  unsure (1)..(642): unsure at all n locations
  Clone ID: AI055415.1
gttgtaaccaaaggcgaccaatatgatgtaagagagcaaacaaaagagaatgaggtgagaaaccttggcaagccagtagagctttctggacagtattacaaagatggggctgatgaggttagttttttgagcattactggcttccgagacttcccattaggcgatttaccaatgttgcaggtattaagacacgcttcacaaaatgtttttgtcccactaacagttggtggtggtatacgagattttacagattcaaatggcaggtactatntctagttggaagttgcttcagagtattttaggtctggggctgataaaatttccattggaagcgatgcagtttatgcagcagaagaatatttaaaaaccaaagttggcagcttcaccttcttagacttgtagctatcggagttaagatgttacacatgcataaatatctntaccacaatagtcctgtaaatgtttctttaggtaaagacgggaaagagcagcttagaacaaattctagagtttatggggatcaggtgatcgttatctttgttttgtgtgttgatgcctgtactatatgcatcgtgtatatttgtggtnctattgtgagcgtgaatttnccagaaagtaaagaaacagtgagctgaaagaatn

SEQ ID NO: 58036 - DNA, 653 bp, Gossypium hirsutum
  unsure (1)..(653): unsure at all n locations
  Clone ID: AI055413.1
aagaaaggagaacccctgctctgctagggtttggctcattgcgcagccactaaacctccattaacttgatggccaatggcgcgaacgacggccagatctggtacacgcccatggaggtaagctctttccttttctttttcttcttaagaaaactcaagtcatgcattattccttttaaaaacaaagcataaattcaaaagcatcaaaacattcgaccctcgcccgaatctctgtattttcgagaagtttttggcctttcatcagtgtcgattcacatgttaaaaaagaaatcaagccaatgaaaagaaaaaataaatcgaaagaaaaagggacaaagaagcttgaaatcacctttactattttgatttctttttctctgttctatatgcgtgtgttgcgtaaaaaaaaaggaagacccttacaatcgctgtattcttggctttatagtcgaaacagtaaaagaattaaacaaaatgcaattgtatctctatcctttttttgctgctgatgtgttcgtccctttacaagtacagtgtatgctggcgcttggcatggggcgtacaggggttttgcgctgggggctgctatgccttcanagtattttgtgcgttctacggtccaaggcctgggcttgcttcggaccaaggaaaggc

SEQ ID NO: 58037 - DNA, 661 bp, Gossypium hirsutum
  Clone ID: AI055411.1
gttacacactaacaggcatattgccaactttgttgcactacgtacactatgggctttgccatacttgagaagtcatttctttgcaggaatgactacaactggccactcaaaggccatcaattctttcattcaaaggtttttaagtgcacagactcgacttgcgcaatttgtggaacaagtatgttctctctatctgtaatttccttcaaacccaattgtgagttccttattgaatctcttgactcatgattcctgaagcacatgcatctggaattttcattttctgatcctcattcaaggtataagaaagaaattgattgttttaggatttcagaataagaagattctatgatagtaagtgcataatttaggcttgtacaaacttttgtttgtcgagttgcctggcattgcttctttcatcaacgtaagaagttggattttaatgcccctccactgaatatcctgaatcctgtacactgaattgttgaactgttgttctttgaacatggataagtcatcattcaatgttggcatatacctgaagcttggatatccattttatgggtattcagcttaaccatagataataatggagtaaaggattttaagatgttagaaggcacgatatttaagaccttggagttaacttctattgtcagcg

SEQ ID NO: 58038 - DNA, 656 bp, Gossypium hirsutum
  unsure (1)..(656): unsure at all n locations
  Clone ID: AI055407.1
ccgacgcccgtgggaaatggttgtgtgcatatatggttttccaaccaatgtatctgctcttcagtttgagtgggcctggcagcatcctcaagaatcagtggccgtgaggcaagcagctgcaacttttaaatccttctctggtgtcaccaataagataaaacttgcatatacgatgctcaccctccctgcctggaagagcttgaacatcacggtaaactacttctcaaccaaatacacaaatcattctgctagttgcccaagcttgccggagcagatgaaagttaaagtttcaccaatggatgagctcccctgctatactgaaccaaatgagtntgaatacaaagattattgtgataacttggatgaatatgacaagtcagtgatgcatgtaaaacttgttccgaaacatttccaatggaagtggttaatgttttcagcagattatttgcatagcattcatcatgaagcttngtcattgaacaatctgaacacatttgagaaatatggacannganacagnngnagtcatccaatttggagtagatttgagcatgctggaaggaatctttgagggcatgcgttaagatgctgtggagctgttgagatcccaccatggtaaagagaacctaactctgacaggattgaaagctgggcct

SEQ ID NO: 58039 - DNA, 657 bp, Gossypium hirsutum
  Clone ID: AI055382.1
taggattcgaggatggccccattctgtgggcacccagtgtttgaaaatattggtgattttgatggttctaccacgtttcttcttcacggtcgggagaaaggatgtgactttttatatcctggtttggtggaatccgtggagcagaactgcaatgttctattgcttgaggttgagcctagagaaaaaaggaatggatgtaaattgttgcctagtaagagctttactcatcattctactgaggagatttcaagaaaggtttgtagatcaaatagtggtttatcgagatcacaacaggtcgcaggacggatcgaggtcgtggatccttttaatcggttagcttttggtgatacaataacgttgcttgagactgtcaccgtgcaattttcgtttattggtttcctgatattttacgcttagccactatttccttatatataaggatgactcctattaatatcaaaaaagattagattcatttgtatcgtttaaaatattgcttactttatatgtaaaattttgttatatgatcgtattacaatttgatattaataacttttatttcgtctgcctattaattgtaactatggtactttaaaatcattatactttattttaatttacatttttatggaatgaagttgtcatctgcatcaatta

SEQ ID NO: 58040 - DNA, 630 bp, Gossypium hirsutum
  unsure (1)..(630): unsure at all n locations
  Clone ID: AI055381.1
gaaactaatggctcgtcattctcatgttccaagttaatttctctcctcgagttgccactgacagttccaaggcgactaacaattcctttagttgagcaggaatcatggtcaaaaccatatgctgtagctagtgcttcattggctcctgttctaatggcttttctgtggaatagccagggtgatgtgggctctcacactcgagttgttgatggtgtattggtgttgcagttggttgcattcttggtatccttgcacgtaagcatacattatctgatcatccacctagaggtttttaattccttgggtactgggtggctttttatgacattgngtggttntatattatcgctaatgagcctgttgctctatttggaacttttggtggaaattttggaatttaatcattcattcttgggataactattcttgcatggngcattcaatgggtgatttggttcaaatgttgcacttacatggatggtgataatggcgttcagattgcttttctgctgctatgcagcccattgtcaacacactgtggctgggtatctcatgctgctcgacttgtcaagagtcttctcatactgattcagagatacacttgtcttacataggttctatgtagactaa

SEQ ID NO: 58041 - DNA, 634 bp, Gossypium hirsutum
  Clone ID: AI055373.1
gtaaccttaagaatgttggggataaaatcgtgttttataatgacttgtagatgttgctaatgactttaggacatagtcccgatcccatattgatggtctagtaaggattaagtttccagtttgaaggtttggttattatttcgcagcttaattcggaagaaacaaaacttgaattgctttgattccatgtgaaagggttgttgaccgaaagatgatcaggattgagatatcgtctttttcggttgttgctcaatctttatatgggttttatggcttgtgtaagaaacgaaactaaacttacagttattggatggaactcaacttccaagttttggccaacttgaacaggaatcggagatattatttcaagcgcggtaaactctggggagtttcccgcatcttgacacgggatttctgatcaggaaagatttagtatgatattgcgctagggtttaggagtacccgctttgctattttcggaattttagacttatttaatctttggttttacccgggttttacccggagaatttctggttttgtaaaagttttcctttttccattttggtaagataaaattaaccaaatgtttattcgaacttttttgcttgatggttggtaacttggctttatg

SEQ ID NO: 58042 - DNA, 646 bp, Gossypium hirsutum
  unsure (1)..(646): unsure at all n locations
  Clone ID: AI055372.1
cattccttcaccaatcaccaccattgtttcagcaaaaatcttgtattttcttcgacccataaagtaatcaatggggggtggccgagaatttgcaatatcactagacggagtgagggacaagaatgtgatgcagctgaagaagctcaacactgttctcttccctgttcgttataacgacaagtactacgccgatgctctcgcttctggcgatttcaccaagcttgcatattacagtgacatatgtgttnggatcaattgcttgtcggcttggagaaaaggnaagggtgggccattccgtgtatattatatgaattnagggtggtttagcaccatattcggggctaggcattggtaccagggtctgaaccatgttcntgaacctctgtttgaagccaaacatccangaattacttggattggtcagacaacaatggatgatgcattnacttcattaaatnctncgggtttgaaatcacgagacaatcaagactattacacaacattgaccttctgatgcttnngtcttaccagctcatactacatctcagcgaacatacnagtanaggtaactggtntcagagtcatcgnccatgtngctatgaaattatgatcttatctggtgggattattgtgatagatctgaatc

SEQ ID NO: 58043 - DNA, 616 bp, Gossypium hirsutum
  unsure (1)..(616): unsure at all n locations
  Clone ID: AI055370.1
tgagagtccaatttctctcaaggtgggaaagaatgaaatttcactgttaagcatgacagtgggcctacagaatgcaggagggttatatgaatgggtaggagcaggactaacaagtgtcaagatcgaggggctcaaaaatggaacaatggatttatctatgtctagatggacctacaagattggattgcaaggagaacacttgagtatatacaaactagacnggtttgaatagcataatnngggttgtcaacctcagaaccaccaaaaaatcagccttggactgcacaggggngttggggggattctccattagggatgaaccanttggctctgaatatgatccattgggaaaaggctctactgggtatatgnaaaaaatatggaaataatctgccataaaaggttttaatataaatgtttagaggaattgagttcccgggaaattttttccaacaaaggctacggtttggggaaaccccccagatggtgccattgccccgttttgggtagccttttgaacatttgttatttttgaggaaagtgagatccaccaaatacgtttcaaccaaatataggctatgttctatgtgagaattcttggaacagcccctcttaa

SEQ ID NO: 58044 - DNA, 634 bp, Gossypium hirsutum
  unsure (1)..(634): unsure at all n locations
  Clone ID: AI055365.1
caatgatgtcttagtatcgtttcttaagacatttactaaagatgatgatttggaacttttctctagagttttgcaaattcatttaaataggaacagagttgaacaatttagcaaacaatctcgggacaatgaaacccctgagcagagtcttgttcgtttaactctggaacacccacaatatctggttgattatgcattccctgtagttgatgagggatggattggtatcaagccccctaaaaaatcccgggcgctgaagtccaatgcgatgattgctgntgnatgtgaaaatggttctctgtngatgatggaactgaagattaatgaagnttgtgcgtannatcgtgatttacaggtcaanaatcatgaacttataaaaccgaccaggcagtggctgattatcngactggagatcttggaatagctgcagggactganngggggtnactggntcantagctgacatacggaaatcctgaagaaactgtatctatggaactattttatgggcatgggttgccattgattgcagggtaaagattaccatgcagatggatgcacatncatatttcaaaatggatgcactatctatgaaacattttggataactggcaatcgaccggtaattattcaa

SEQ ID NO: 58045 - DNA, 655 bp, Gossypium hirsutum
  unsure (1)..(655): unsure at all n locations
  Clone ID: AI055361.1
cagaagctatggaagtggccccgtaacgagcaaaatccatctggaaaggccactgccaatgttgttccgcagcattggcaaccaaacagtggtcttcttatgactaatgatgtcacaggtgtcaacctggaagaagcggtaccatgcatagcactctcaaagaatgattcgtatgttatgtcagcaactggcggaaaagtttctttgtttaacatgatgactttcaaggtaatgacaacattcatgtctcctcctccagcttcaaccttcctagcattccatcctcaggataataatatcatagcaatcggaatggaggattcaactatccatatatacaatgttcgagtagatgaggtgaaatcaatattgaaaggtcaccaaaaacgaataactggtttggctttttcaaccagcctcaatatcttggtttatcaggtgccgatgctatctgtgtttgtggagcatgatacgtgggagataagatatcagttgcaatccaattccagctgaatggcacctacaggtgatacaagatacaatttcacttcgatcaaatcgcatgtnggtagttcatgaaacttagttagcaatatttgatgcttncagaatggacgcggtcgacagtgattctacagaagtatgcatgccccat

SEQ ID NO: 58046 - DNA, 616 bp, Gossypium hirsutum
  unsure (1)..(616): unsure at all n locations
  Clone ID: AI055358.1
ggcggcctcgtcgtcctcagccacctcgtactcttcctcggattccttgttgacacgtcatcctcacacggcaaaagacgtcgtcatcgctctaaccgccgcgacagagacagagattctctcaagatccgaaagaagagtcgttcgctcggtaaacgacgtcggaagaagcatagccgtcattcttccgattcttactcttcttccgattctgattcctccaggagtaacagttcttcggatagtgataatgagtccagccattcaaagaggcacaagaagagtgaaaggcaaaagaagtcaaaggaaaaagaacggacaangagttatcgacatagacgtcagaagaccaactanggaggtaggccactatcactattgttgcatcatgcatctttcctcacaagtgtgaatatggatgtatatctaagtgtgatctcggactgtgctttctgggattgggttggttntcttgctatatctgtgggactggtgaaagttttatatttggtcaatagtnatctatgatttgattgaaattcgtttaattacttgagatgctatactgacattcgagtgctatatcgttgctgtcatgatgctcttgaatgaaacg

SEQ ID NO: 58047 - DNA, 663 bp, Gossypium hirsutum
  unsure (1)..(663): unsure at all n locations
  Clone ID: AI055354.1
aaaatactcgccggatctatcacccctccaaacaatcatgtcttcgtcaaccgagcgggatagagggacttaatggcctcagcttcctccaaaagtaaacgcactggtaatgacttcctctttctagctttttgagttgtgatctattaagtttactaccatagaaactatattattaaccactgtgttacgaattccccccacccatattgaaagccaactatctctccatatcgagatatttatacccaagcccactctccaacccgcaccatcttccaaaaaccttctaagtgcgaaaataccacgccatacatatgatggggttgttcccaaatggaccgacccgaagcctatatggcggaaattgttaactttaaagaatccggccgcttacgaatctgggttaactattaatacgcaaccctgctttaacaaaaaagtgatattaaacttacctatgtcacgaaaacccattccctcttgatccttaggttacttaattcagaccaactaaaccaatgcatagcctttcgagtagcgcttttctaccactaaacctattcataaatctggcctaattgtgaccaagagtttgggaagtgaaaagcaggacatagatagatagcaaagcttgtatacttgcctatatagacctcttcn

SEQ ID NO: 58048 - DNA, 671 bp, Gossypium hirsutum
  unsure (1)..(671): unsure at all n locations
  Clone ID: AI055351.1
aattagataacatggctcaccgcctcactcaccgccgcagcttaccggcaccggaacccaacccatcttcccatcccttagatcctaccctaaaaaagtcgcccaaaccgaccataaccactcatccaacaacccgaagctcagatccgttaatggcttccaagaagccctttttcatcaccaatcgcttctccagattgagcctcaatcacaaaacccaaaagcctaccaacacccaacacagtagagacatccatttacaagccaaagctttgacagtttcagctgatgctgattcctccattttttcacttatcaaagcaaatcatctgctggcccatgaaaaggctaaagagtcattaaaagaatcggtcaggaaagcgtcaaaggatttgggtagaaagaaacagcaacaacaacaacaacaacatcaccaaagttcagtacttcatagcaagaaattagctntgacggtgaaggagaaacagttgaagaaacgagatgaagggcatgataatgatgatatgaagaaaggctcaagctcattaggcagaaggagatccctagcggttcacaagtagagttgggtgatattcttgcaaatngtggtgtcaaaattggttcatttgatttgccaccgnttatggcagtccatgcggttgattgtgcag

SEQ ID NO: 58049 - DNA, 653 bp, Gossypium hirsutum
  unsure (1)..(653): unsure at all n locations
  Clone ID: AI055350.1
gaatcgctgccgttggttcaaccgggcgatgagaatccgatgtcggcgatcaagaaccagaggggtaaaatatgtattttgagtatcgacagcggcggcatgcggggaattctgagcggtaaagctttggcttatctcgaacacgcgttgaaatccaagtcgggtaatccaaatgctcgaatcgccgattttttcgacgtggccgccggttctggcgtcggtggtatcttcaccgccatgcttttcgccaccaaagataacagccgcccgatttttaccgccgaggagacgtggcggttccttgctgagaatgggaagcggatgtacaggtccgggaaaggtaaaaacggcggtattttaaacaagttttttaaaaacggttcgaccgggccaagttcgaccggtttggaaaaggcgggtgaagagacgttcacggcggacggaaggagtttgacgttgaatgatacactgaaaccggttttgatcccgtgtnacgatctttccagtacggcgccgttcctgttcttcgaggcggacgccttgnanacggacagtttcgatttccattatggggaggttgtcgtgccacgtcggcagaacccggatttttcgaccggtcagatgcgtctgtnnatgtcaactagttgctgcgg

SEQ ID NO: 58050 - DNA, 654 bp, Gossypium hirsutum
  unsure (1)..(654): unsure at all n locations
  Clone ID: AI055336.1
aagctgcagagtttgcagcccagaaattggagaagaacattttagatcaagttattacaagaagagacaatactgctgtaatggatgctgttaaacaaggttatttgaaaactgatgctgagttttttaaggaagacaatgctggtgggacatgctgcctgaccgctttgatccaaaacggagaccttgtcgtatcgaatgctggcgattgtcgtgctgttttgagcagaggtggtagggcggaacctctcacctccgatcaccggccttcgagggaggatgaaaggagcagaattcaaaacctgggtggctatgtggatttatgccgtggtgtttggagaattcaaagtagtctggctgtctccagagggatcggagatcgtcaccttaaacagtgggtgatcgctgagccggagacaaagatcgttagtatcgaacccgattgcgagttcttaatattagcctncgatggcttatgggacaaggttagtgatcaagaagctgttgacattgctcgcccttcattcataggcactgataaaccgaatctggtgtttgcttgtaagaaaactcgtgatctttcggtctcgcgaggctcgttcgatgatattagtgtgatgcttggtcaatctgggtactatatttgattctctt

SEQ ID NO: 58051 - DNA, 670 bp, Gossypium hirsutum
  unsure (1)..(670): unsure at all n locations
  Clone ID: AI055327.1
gaatatattaccctccaatatttttgggctgctgtgaaaaacatcgggttccataatattaaaatccaattcaaaattttcatccaatttagcatttctttgcttcgtttgtgctacgttttttctgagtattattatttttcattaagtaataaattaatttaaattagtaatatttagctactctcatgatttacttttggtaaaaaggaagcaaactttttgcttaaagtggtcttattttttataaaattttttactcatccttctaatttcaaatttaaatttattataattattttttaatttaagtctatctactttaatacatgtgtattaaataagcgttttccttatgttattatactaataaccaaatgaaccttaatatttatcttctatgcaataataagatcattagaaatgattgtatagaactattacattacgtatattattttcactcaaatcacattaaataatcaaaactgtatgaaaagttagccgaatcataaatgctntggctgaatactntntaattacgaatgtgatttattaatgattncagtgactnttcatataattntaattacatgaattaagtgggaatatatatgctgacgcatatcactgttttgacggcnctttctcagatgactantatnatttn

SEQ ID NO: 58052 - DNA, 670 bp, Gossypium hirsutum
  unsure (1)..(670): unsure at all n locations
  Clone ID: AI055325.1
gaaaagtaaaaagctctgaacccatcgatggagattctttgaaccttcttcctattcaaagcgattctaaaaagaagcttggcgattctgaatccaagccatctgatccttatccgccgtcgtcctcaccgattttggagctctatctatccagacgcaagggatttgtcgtctcctttcttccaaagccaaggtatgaccattctattaaccgttcgaggaacaaaaaggtaagaggctntctcgaagttattttcaattgtacgaatatggtgcataatcagtctgagaatcaatttatcttccccttttgtcttgagttttttgattaccgacagagagtccccttccaagagaagacgcagaaaacccatttcagacgcaaaaatcatagccctttcgcatacccttgcttcaaccacaaaggcatcgacaacatcttcaaaaagataagtacacacccctataatttcaccttaagaatttctagctaatactgctgcatagaggttctaaagtcactttgaaagacacgtcaaaagcttaataatacgatgtntgggggaaactcatagctcttcatagtgatctagaanaaaacttggagttttcatggcttgaactatctcttgatggagcattgaatgaatcgaacaggtccttgcaagaa

SEQ ID NO: 58053 - DNA, 648 bp, Gossypium hirsutum
  unsure (1)..(648): unsure at all n locations
  Clone ID: AI055319.1
atttactttctgcatcttatatggttgaaatttgtgatattatcattttcagatgttgcggcaaaaaaggtgggatcttcgtaccgcggacgttatcctccaaaacaaagagggtgacaagcagatggaagcaacatctgctattgaggacttgaaaaatatggaccctgttgtcaatggaaagtatagcatatggagaagagattttgaaaatcctaactctgattctaccttgaagcttatgcgtgaccagattattatggcaaaagcctatgcaaatattgccaagtctaggaaccaaattgatctttacagttctcttttgagacatgttggtgacagtctacgtgttattggagatgctaattctgattctgagcttcatcctagttcacttgatcaggcaaaagcaatgggccatgctctatcttttgcaaggatcggctctatgattgccatatagttgcaaggaagcttcgagccatgcttcagtcagcagaggataatgtaaattctctgaagaaaagagtgccttcttgattcagctagctgcaaaactgntccaaaccatgcattgctactttgcactagcacgacatacttcatgattcnagaaaaggactttattgaaactgagatctcttgtta

SEQ ID NO: 58054 - DNA, 653 bp, Gossypium hirsutum
  unsure (1)..(653): unsure at all n locations
  Clone ID: AI055317.1
gaaacaaaggatacattggctactccagaagagcttgctccattcaagggccactcatctaggttggcagcactagactacaccgtttgccttcatagtgaagtatttgtcacaacacaaggtggaaatttcccccacttcttaatgggtcatcgtcgctatttatttggaggacatgcaaaaacaattaagcctgacaaaaggaaattagcgctgctatttgatagccctcatatcaggtgggaaaccttcagacggcagatgaaagatatgctgcggcatagtgatgtngaagggaggtgaactgaaaaaacccagcggttcagtctacacatttcccatgccagattgcatgtgtaaacaaacagaggcagcagcaaatgaaagcagtttgagtttntgagtacagactctccctgtaatttatggggtatcgtcatgcgatgaaatganggtttaattcttagttnttattagatatagtttcttcaggtttcgaatctttcaaattgaatngttcataatgattaatttacacgctgtaaactattggtgatatgatataaatatgatccatctantaatgtnggttttgtaaaaaaaaaaaaaaaaanaananannanaaaaaaaaaaaaaaaactcaagggggccc

SEQ ID NO: 58055 - DNA, 661 bp, Gossypium hirsutum
  unsure (1)..(661): unsure at all n locations
  Clone ID: AI055314.1
caatactgaaataatattttgatgatgaagagagtagtctggcatgcttccttgcttctcctggttgttacgttgcatgcttgtttatctcatgcttagtctaattctactgcagaatcacttgcactcctcgattggaaagtcaaccttcaatccctcacaaaccgctctgttttgccttcctggactatctcgcctcgaaatgcagaagcaagtccatgcagttggtttggggtccattgcaaaggcgacagcgtttacagaatcaatcttacgagctatggcgtaaaaggtacattgcatggatttccattctcatctttgcctaaccttgaagaattggaccttagcatcaatggacttttcggcacgatcccacctcaaatcaatcagctctctaatctcacttaccttgatttgtcatataatcagttgtctggtaaaatcccacctcaaattggtcagcttattcatctcaggacccttaccttgttcagaacctattgaatagctccattcctgaggaaataggtcagctaaagtccctcgaagagcttgccttgcagaacaactatttaaatgttccatcccttctctttggtaacttggcaacctgacctactgattgttaatattcctttctgtacatccttcagaatgn

SEQ ID NO: 58056 - DNA, 640 bp, Gossypium hirsutum
  unsure (1)..(640): unsure at all n locations
  Clone ID: AI055288.1
ctttttccgaaggggttttgttcttcgattctgcaactcaaatcggtcgtcttctgattccatggcagataaactaaggtttaatgtaacttgaaccaatttcttgccacagaagttggaaatagtttagccactccagaatcggcgttctggtccaaaagaaaatgaatagaagggctcaatatgttttcatggttcttatgaatcggatctatagcatcattccaggaagttgtaggcgatgcaagagctcaagtactgaacatgacatgtagctctgaaaaggagaacaatagaaccctttttgttcccaatttcatttctttaatggaaaccatcagtgaccttatgcgtcaatttggtttcggaaccgcggtttctggttcagggcctgatgctaactatggtctagctcagtgcttngtgatctatctttgcttgactgtccattgtgctacgccgaggcacgtacgggttcttcctcaatgctatccgtataatggtgggtcgagttttccttgacagcttgctcatgagatctggcgaatatagcttctatgccgagtactttggacctactgacatggttttgtgcggaattgcaagccgcagagggattgaactttaggcattaacagga

SEQ ID NO: 58057 - DNA, 613 bp, Gossypium hirsutum
  Clone ID: AI055287.1
gccatatctaattcagaaagctgtgcccaatttgggtgtgccgatgctggtgacttgacaggccctgcccaatccaatgtgtgggactcaatggtaccgtctaagaaaagaacctgcgtaaatcgtccaaagccatcttcagtcgagaaacttacaaaagatttatatactattttacatgaacaacagtcttcatatttctctggatcttctgggaaggatttgcttcttgagagtgagacacccatggtttctgttgagattggatgggaaagtgttttaattagacatccaagctcaatagctcgggaagaggaatcagaagctagttccctctcagttgaaaacagacaatactcaaggaatgaggcttattcatattcttcaagcttccctgcatgcaatgatagcaaggccatcaagtttttaggcctggaatggaaaggcctaaaacttttttgaacaaggttgcagcccgccaccttattgggccaaatttagcttggaaaatcctcctgatggaaggcatattctcactgggcacattgatttaatgatttctcactttgagaattgtgaatgtttacaatgagagcagcacattgctgagttt

SEQ ID NO: 58058 - DNA, 593 bp, Gossypium hirsutum
  unsure (1)..(593): unsure at all n locations
  Clone ID: AI055280.1
acaagtagcaaaattcctcaaaagcaaaacaaacatcgaccggattaagatattcgacacgaatcccgacatccttaaagccttcgccggaacggggatttccgttaccgttacggtcggaaacggcgacataccgtctctggctaagcttcccggagctaaagcttggatcgagaagaacatcttgccctatcatccgaaaacaatcatcagatacatnggccgtcgggaatgaaatcctgncacgtcggataaaactctcatagcttaccttttgcctgccatgaaagcacttcagatcggctctagactcggctacgtacanaggttnaaagtctcgacgccgattactcgggatattgtctacatcggaccgncgaggggnnnnaattccgaanaggttacgatagctcatttcggcccattttggagttccataagcaacaaatctcttcatggtgaacctcccgatntcgggttcaagcacaaacgttgatacgctttggttaaccaacgcggggttttcagccggtcgtgataactcaccactgtcgacgtaactgggcgnttatcagtttaaacgtcgggtttag

SEQ ID NO: 58059 - DNA, 615 bp, Gossypium hirsutum
  Clone ID: AI055273.1
agcatatcgaaatttgtgtcaagtcgagttcaacaactgaatcaatggttaactatctttgccaacaatgcgaggcttcattacagttccttcagttgttgtgccaacaaaaaccgttccgggagcgcttactgaagaataaggaactctgtggcaaaggtggtattctttttctggctcaatccatcctgaagttacatgcgccagattttgcagaatcctctgcaattgtggctgcattatctaagctgaaagctaaagtcctgtcaattttattgcatttgtgtgaagcagaaagcatttcttaccttgatgaggttgccagctctccagcaagcctggatttggcaaagtctgttgcatttgaagtccttgagttgttgaagacaggacttagtaaaaatcccaagcatttcagtgctagttctgatagaacctattctatggggcttttttcaacttaatgcaatgcgtctagctggaatcttctcgatgattcaaatttcgatcatacatactgggtacttactgaatttatgacgcaaattttcactctctaaggaaatttctgacatgtgggttctctgatctcctgtagggagataaactccctgt

SEQ ID NO: 58060 - DNA, 609 bp, Gossypium hirsutum
  unsure (1)..(609): unsure at all n locations
  Clone ID: AI055271.1
tctgcgtctacatggaaatcagaatgatgagagtttggtagtttcccactaaaccaaccccagaactgagtggggaaattttcttcaagaggggtcaaagaaatgacacttacacagcacgccgatgtagaccgacatgaaaagaaatccattgaaccacatcagctgtgacatggaaaccatttaggcttagggacccgccatgccctagttggcatcaatntcagtggaatagcggtggtaataaaataacctgtgctttaaagacacttgcagttcctgttctattgaccataagtcatcaantgaagttcaggtctaaaagttctttgatgatccaatattntatattctaatctcttcctttcattaagaagaaagaaactcctgnnccgtttgtttccttgcattgacccagtactcttatttttggtacgattccagggttgatttttgatgtncttgtggggattcttggtgggttctaaaatgggaatacttttaggtgaatgcaagggccnacaagagaattttctaatggtcctggtgaatctccacgttccgtttatgctaaattgccgaagcttcatcagttaacgaagcacaacc

SEQ ID NO: 58061 - DNA, 627 bp, Gossypium hirsutum
  Clone ID: AI055267.1
tgcaaatcaaaagccttcttctctcgcaatggtacaaccaagcacagtccaggtgacccaaaacaaagcagcaattacagaaagtgatgattctggtggtcggattcttagcaaaagaagcatccatgatatagttaaccagattgatccatctgagaaattggatcctgaagttgaagatattcttgtggatattgctgaagactttgtggattctatcacaacatttggttgctcactggccaagcatagaaagtcagatacattggaagcaaaagacattctcctacatcttgagagaaattggaatatgactcttcgggatttagtggtgaatgagattatagacttacaaaaaaccgcttacaatggaggttcacatagagcagcttgcagtgataaagaaatcaatcttagcgagcgatgcaaccaatgctaagcacatcattggacaaactgctgggaacacaaaggttaacgttggaaaaatggctgcttatatctggggcttcccaatggctaaatccgacaagtttcttgaggcttcttttatgtttttgcatcctttaagctaaaaatctctttaaaggatcggtggcctagaaccttatgtctatggaaaacaag

SEQ ID NO: 58062 - DNA, 612 bp, Gossypium hirsutum
  unsure (1)..(612): unsure at all n locations
  Clone ID: AI055262.1
gaaacattgacactttttgataactgtttttgagtcgcccattatctccattttgttgattcccaacctaatacctagattgattgcttgtaatcctgcatgagcctctgctgtgaatggatcttcgatgttggagtgaagaactgctagtgacgcaaggattttcccttcctcgttccaggctaatagccccgatgccgatgtggacgtctggctatcaaacgctgcatcaaactgaactgttgcttttccccttttgaagatctgctgataactgtcagaagtgtgaatgatgtaccatagtccgcagcagaagagtcgcaactgctcttcgtttccttggccaaagattccgggtactgttggaaaatatggcgactgctttcttcttcacactcgcatctgggacatttggtattcaccagaactcgctntatttgaggttgangaagaggggatatagttccatgaaatcctncatanagcattttgatcttagatggaatttggtatgaccaaagttttctgtaaaagtaatagnttcggtatgtaaaaacacttattaggatccaagtagtctcctgaatagttattagacttttacttggaatt

SEQ ID NO: 58063 - DNA, 619 bp, Gossypium hirsutum
  unsure (1)..(619): unsure at all n locations
  Clone ID: AI055258.1
gcaggttttgaggatgctggcatttcatttggtcctgttgaaggtatgttgtaattcgagtttgctttctttgggtttatcttgctttttccacttctttaatctcgttgtaatatttttgtcaagttaatttgggaaaatcatggaatttgttggatgccatggccttaatctcatcaaccttatataccccatcaatttctcacctggatttaggagcttttatggcataattagagatatcctgttatctatcatattcatttggccatctttaggtactctcacctgctaatcatattattagttaaaatggatgcattgttttaaacttaagactctactttttcctccaaagtgtcctctcttttatgcccttatctttccatttaaggattttgtcatgtcagcacataaatatgtgatatntgtgtcacctttattaacctttagctgcatctaatatacatgtctttctctgtggcttaaatgctnaaaatgtgtttatggacttcgtgtggttgtacaatcttatgcctttcatagttttcacntcagtggagtttttatttactgagaatatatagatcgggtgctatacatgaagctgttgatttca

SEQ ID NO: 58064 - DNA, 624 bp, Gossypium hirsutum
  unsure (1)..(624): unsure at all n locations
  Clone ID: AI055257.1
tgattgtggatgtttgtcaaggtcaatataagtcaacgctggtttgtccagtttgcaacaaaatttcaattacttttgaccccttcatgtatttatcattgccactaccttcaactatcactaggacaatgacagtgacagtgttttatggtgatggaagtggtctcccgatgccatatactgtctctgtgctgaaaaatggtttctgcaaagatctccttctggctttgcgtactgcatgttgcttgaagactgacgagaaccttctgcttgcagaggtctatgagaacaagatttaccggtatttggagatgcccttggagccattggcttcgataaaggatgatgaacatattgtggccttccgaattcagaagaaggggatggagaaaactaagctagtaattnttcatcgatggcaggaaaaatccacaacagattatcttaaaagtggaaaagagctttttggaactccattgataacttatttgggagaagaccaaccaagtggagctgatattgaactgctgtttctaaagtattgtcacctttcanaagaatgcttcttcagctaaggctcatatttgcnaagggagtgacttnctctaaaaggtcttgatgact

SEQ ID NO: 58065 - DNA, 627 bp, Gossypium hirsutum
  unsure (1)..(627): unsure at all n locations
  Clone ID: AI055256.1
cttagtttgtgctgtgcatgatcatctccactccaatccatctcctgcatttcattagttgcagttgcagattgtgatcgggttccaataaactgatcagcattccattagtggtcttttccctcccaaggtgatgcagtgatatggtaagacaaggaaactgactgatgcaatgaaggcaactcgtgcatggcagcgacgcataaaagatattcttctcatgtctggttcaaggcagcgctcgcgtctaaagaggccagtttggattattgtattgggagttaagtgatgaagagacaagatctcatgttgtatttagggaaatcctcaacacacctcccatccaatccaagaatccaaaaattgctttcctgtttttgacttcagggacgctacattttgagccactttgggataagttctttcgtggccatgaggatagattctctgtttatgtacatgcttccagagaaaagccagtacacacaagtcattattntattggtcgagatattcacagagaaacggttctcaagcgcanagaagggaanaagaaaaagaaacttttcaaggatnnggcgncacgtgncatnntggntttgatgatccccccttttgtccccaatn

SEQ ID NO: 58066 - DNA, 626 bp, Gossypium hirsutum
  unsure (1)..(626): unsure at all n locations
  Clone ID: AI055255.1
gaacccagaatatttacattaacaactgtgtcatcgggacaggcgatgattgcatctcaatagtgagcggctccaagaatgtacatgccaccggtataacttgcggaccaggccatggaatcagcattgggagcttgggagccgaaaacactgcggcatatgtgtctaatgtaatagttagtaaagcaacactttccggaaccggcaacggagttcgaataaaaacatggcagggaggatcaggatatgccaaaaacataaaatttcaaaacatcttgatgtacaacgtcagtaaccctataatcattgatcaaaattattgtgatcaagaaaaaccatgtcgcaaacagacatcagcggtacaagtgagcaatgtactttaccaaaacatcagaggaacaagtgcctcgaacgtggccatgaaattcgactgcagccagagttttccttgccggcagatctatttgcanaatgtagctttaaaggctgaagaaactaacaagcttcatcttcatgtgctaatggtatattatcttatcgaggagatgtttcaccaccctgctcatctcaatccctaatagggagaaatatctattgtctactattataacaggtatatggtaaaa

SEQ ID NO: 58067 - DNA, 615 bp, Gossypium hirsutum
  unsure (1)..(615): unsure at all n locations
  Clone ID: AI055252.1
cttgcaccaaaaaaaacagagttgaaaaaataaaaacagagcagatcaatggattctttcctgcttgagtccccaaattccatttcctcatcggaatcatcattcgggtcgccggaattttctccgttcaaccacaactctcttcctttcaacgaaaacgactccgaggagatgcttttatatggcctactcaccgaggtcaaaacggaaacatcaagctcaacggaaaagggtagtccgacgaaagaaaagtcttaccgaggagtaagaaggcggccgtgggngaaagttcgcggcggagataagggactcaaccaggcatgggacaagggtatggcttggaacatttgagagtgcanaggcagcagctctggcttatgatcaagccgcttttgctatgagaggcagcgccgncatactcaactttcctgtggaaagagtganggagtcactggagggaatgaagtgtnaccaagaagaagggttgtcgcggtggtggcttaaaagagacacatttatgagaaggaaaagaccagtagaagtagaaggaaagagatgcnaagataaacatgtgatggtgatgaagattaagtgcnnatacttggacactttgac

SEQ ID NO: 58068 - DNA, 599 bp, Gossypium hirsutum
  unsure (1)..(599): unsure at all n locations
  Clone ID: AI055250.1
gttcctagtgatactgctgtaagtttagcagtaaacgtccttcagcttagatttctcgaatcatactcattggatatccagggcacgcctttagttcagtttattggaaataatcttttccttaaagtctctcacagaactcttggtggtgctatggctgtttcatctactttgtgttgggagattgttcaggtggactgcttagagacagagggaaacgttgtccacaataatggaacgctggtagactcagttgaaaatggttctcttgtaactgggaatggattttctccgttaagagctgttttttgggtacacaacaagcagaagtgcctatcaagtggaaaagcttcagtaattccatttcttgacataagcattgtgcatgtcattccttttgatgagagggacanagagtgtcatagtntaagtgtgtcagctggtatatcaggtgtgcgcttangtggaggaatgaatatactgaagctngctacatcgatttggaatatgggcctgatggtgtccagcatgagcttctaagggctaagactttcatttggcactgcaaactttaaacttcactntgtgatatgatctgt

SEQ ID NO: 58069 - DNA, 622 bp, Gossypium hirsutum
  unsure (1)..(622): unsure at all n locations
  Clone ID: AI055249.1
ggtatctacaccagtgtatatacctcagagctccgataggatagagccaaattctgttcaatcagacattccttttggcatggtagataggaatatcatgctgaatgcatcccagtggatggacaaatctcaaagggatggcactagaagtatgcacttggatcattcttcatctcttagtgagatccaaaatcttaacttgtataagtctctgtataatggatcccgagaacacttttcaaatgagtttccatcctgtacatctggacgtcagagccaatgtgtcttggcagacgagtttccacatcttgatatcatcaatgacttgcttgatgaggaacacaacgttgggagcatatgtaggaccggaggcttccatgttcttagcaatgggtcacatttattaagcagccatttttcttttccatccaatttgggcatgtcaggtgagatgggatcgtcatgtggctcatgcaagtttgaacaagcacggagctaccatgatgatgggcttcagctcaagtttaagagctcatcatgcaacccatatgattcaccgtgggaattacttcccaacaaacgttcaaccttcactatcggccaaattatggctggttcaacn

SEQ ID NO: 58070 - DNA, 604 bp, Gossypium hirsutum
  unsure (1)..(604): unsure at all n locations
  Clone ID: AI055246.1
ccaaaatgcaaaagcagagtaatcttatttctatggttattagggattatagctttgttaaatggttcggccgttgaagctcggattcgtcggtataaatgggaagtgaagtacgaatacaagtcccctgattgtttaaagaaactggtaataaccttcaatggccgaacacctggtcctacaatcaccgcacagcaaaatgatactatcatcgttgagctcaccaacagtttgttaacagagaatgttgcaattcactggcatggaattcgacagatcggaacaccctggttcgatggaacttgaagagtgactcaatgtccgatnttacccggaaccactttcaagtttcagttgttgtcgacagagtaagtttgtgtttcaagtttcaaggcttttttntctttcttctaatttgagatttataaactgaaattccaaaaaatttgaattgaatttaggctggaacatactngtatcatgcacatatgggatgcaaagagagctggttatttgatcatcattgttgacttctgatggaaaatcgaacctttactacgatatgatcggatatatactcatgatggtaccataagcctatgac

SEQ ID NO: 58071 - DNA, 637 bp, Gossypium hirsutum
  Clone ID: AI055243.1
ctaaattgaaccatggcagaagaatttcaagcagctatttgtggaggaggaggaggaacatggtggaatattccgacgaaaaccatgttttcaggctgtaattctccgttgtattcgacgacaattgctgatatgggtagcttcgggtggggcaatgatatggtagccaccgatgatatcatcatcaagccaaggtcttgctacaattcagacaatagtggtaccaacaacaacagctggattttgatcgattccactttgggtcttggccttttgtcattggtatatttggaaccaatatcttgctacggagtaattaatctatagtttcctatggatttaacttattaatggtcttcttcactttctcttatactgacccttttttctattcgtttttacagtcactgttattctatttactataagtttttgttcttttattcgattttatctttgaggtctatattgctttttcatatctattcatgtctttattatctattaccctgttgtaactgtggacctattagttttcctcttaatattcatttcgtatacttattaaattggttcattattctgtctcgtgttaaaatgacacttatttgtttactatgttttcttgcaatgtttt

SEQ ID NO: 58072 - DNA, 633 bp, Gossypium hirsutum
  unsure (1)..(633): unsure at all n locations
  Clone ID: AI055239.1
caaaatcaaagaaagaaaggcatagtacatcatttggcacaggcttctttgccggctgcacagcggccctcatactagctctggttttgattatacatgcccgcaatatcctcgataaggaaggaagagttcaatacatggaaagcatgtttccagtatatagtttgtttgggttcatggttctacatatgctcatgcatgctgggaatatatacttttggaggcgatacagagttaattattccttcatatttgggttcaagcaaggaacagagctgggctttcgagaagctcttttcttgagttttggccttgcaacgctagcactgatcagntgtggtctccaaccttgacatggaaatggaccctaaaactggagattataaagcattaactgagctacttcctttaagcttgctnttgcttgtgataattgtattgctttgtcctttcaacatcctttatcgctcaagtcgcttcttcctgctcagaacttcngttncggtgatctgtgcgcccctctacaaggtaaaatttcaagtttttacttgcagatcagtttactagtgaggtacagcattanaagtgtgggatatacattgccatatggtggggagacttcaactcgacaaa

SEQ ID NO: 58073 - DNA, 609 bp, Gossypium hirsutum
  unsure (1)..(609): unsure at all n locations
  Clone ID: AI055238.1
cagaattgggatatcccgacaatgacttcaacaaaagtggccccaaaccaacaaccttctcgggtcaacgagctttggattttgtgctaaggaaccaagggcttatagataagactctactgtttgatattgaactcctcaaaatcattccgaattgattttggctcaaagatcataatggtctgaacatttagagactgaaattatgttttgagggaagttttctcatattgttaaaagtactgggaattgaagtcggccatggagtgaaaatattggataacattgagcaaagaatgtgnagggatctgttcaaagaaagcagtgtggccatgtctcattcattaaattctagctattcttgaaataaagaatctctgcaattntntgggttcggttttatatcttcccagctgaaacatgatgtgtggaaaagatngggntgggccactctgtccaaggtcgtnntggatcaaatnctatttcatgtaaaaaagtttgtaccatcgtgtattgaacatggattgnattgttccttgctggtattaaaagtcttgggttctctaaaaaaaaaaaaaanaaaaaaanaaaaaaaaaaaaaaaaaactc

SEQ ID NO: 58074 - DNA, 694 bp, Gossypium hirsutum
  unsure (1)..(694): unsure at all n locations
  Clone ID: AI055232.1
cgaggctccatatgctgccggaagggaagtctggtggccatgcaacaccaactaagaaatctggaagtgttatgcgacctacttctcccaagtcccctgttgctagtgcaagtgcgtttgagagcatggaaggatcagaggatgaagataatatgactgacaattctaagattgaccttacatatcttcatactaatggaaatgctggcccaaatttgccggaccacattaatgctaatggagaggcgattcagatagctgcttcaagcattattcgatctcatagtgtatcagttgacctccatggtgttccacctgatcctattgcagctgatatcctaaggaaagagccagagcacgagacctttgcacgacttaatatttcccctactgaggtaccatcaccggatgaagttgatgtctatgtagttctgcaagaatgcctataaatgcggataagatatgtattcaaggaggcagttgctccttgtgagatagaagttatatcagacccaagcacaccataacctaatccagcacccttcttttatgctcctgaggtaanatctgatcattattttgagatgcaagatggagtaatacatgtttatgcaattaagattcatagaagagctctttcttgatgcgatgctacaaccttttacttgcttgcttacatactcgagtataacan

SEQ ID NO: 58075 - DNA, 685 bp, Gossypium hirsutum
  unsure (1)..(685): unsure at all n locations
  Clone ID: AI055230.1
gaaagtcccatggttgatgattctgagaatagctctaaggttaaggaaactgctggaaacaactgcaatgaagacagtgaggatttaagtcaagttgttgattcttcaggcttagaggatgtggttagtggtagaaggtcaactgtgggagaaagtcccatggttgatgattctgagaatagctctaaggttaaggaaactgctggaaacaactgcaatgaagacagtgaggatttaagtcaagttgttgattcttcaggcttagaggatgtggttagtgatagaaggtcaactgagggagaaagtcccatggttgattattctgatcgcccttcgcgtgaccaaaatcatcagacccttgtatcttctgactcagattcggagggagatattgatnagagtgaaattaattgtgaagacgattctcctggtgagacagaatcctctgattccaataattctgatgaagatgannatatacccctctttgcctcagaaataacagaggannataatattgataaagatgattattcctctgccttccgtataaanaaaagtcaaaatcctatgcggatgaagattttgccacatgcagagaatcatcgtgtngatgctgtaaggcattgatgattgattgctactctcaactcaggctcgatctgaatgaagcatacaatnactn

SEQ ID NO: 58076 - DNA, 658 bp, Gossypium hirsutum
  unsure (1)..(658): unsure at all n locations
  Clone ID: AI055227.1
aataattcaatttagatctttttaacataaaatttccagctttagcacctaatagtttatattttcatctatcgagacccatatgatcctttattaaagtaaaatttatgagatgagaaagtgtattgtttcctttcacaatttgtaaaaaaaaaaaaaacagagtgaaagcgaaaattgttacaaagtgataaagggatcgtggaaaaagatcgaagacactggcaaacaatctgggggacttgagctactccgaaaatcatttcgaatttgcaaacgctttggcgagttggcttgaaacagcatttgcttacactgccatgacagattatccaactccctcaaactttntaaatccaatgcccgcttatccagttaaacagatgtgtanagcgatcgatgatccgaagtcagggaatgatacgtntgcgaaagtgtacggttgcagctagttctactataactactctggaactgccagtgtttcaatctggcttattctctgatcctcacgggctcgtatgtgagctggcaggatgtaccgaatgatatgccacaagggaagcataggaaagatattttcgaaatcattgactatttcgagagcgctgctgaagcttttcatggtaccagaccactgatnncacgnntcgggagn

SEQ ID NO: 58077 - DNA, 646 bp, Gossypium hirsutum
  unsure (1)..(646): unsure at all n locations
  Clone ID: AI055226.1
cccgagcaaagtttatactaccgcaggatttccttgaatagacttgtgcccctacttgttgcctacccgaatagaatacaatcatcagcaaacaaaaggtgtgaaacctgtggcccattactaaccctaacaccctaaaaaaaaacttctattcattgcgagtagcaataaactcgatagaccctccacatataaaagaatagaaaatgggctgaacggatcaacttgtctaagacctctggttgggaaaaatttatccccattatgcccatttataaccactgaataagagacagtcgagatacatttcataagagctgctacccaattcgtatcaaacctcatctttagcataatctcctttataaaagtccattcaactcaatcgtagccctgctcatgtncagttntacggcatatgntctttcttcncgtttcttcgtgataacttatgtagaattcgtatgctacatcacatatctgatataatcttncgcacanagcactctggcgtgnctatacatttccatgatcgtaacggttgctatacctggncaaatttgagagacatgaacaagctattgtagaacagtcatattgtgactgcaccttnggatagtcctattggatcacgacttactcattn

SEQ ID NO: 58078 - DNA, 683 bp, Gossypium hirsutum
  unsure (1)..(683): unsure at all n locations
  Clone ID: AI055225.1
gtttttgcagtaatggaggaaaccgaagctcttgatctcttggaagagtcttggtttttcgagaacttactcgacaggagaaggaggatgtcaagatgttattcagatccttgtacatcatcgaatttcagacaagatgttttgtcaaatgattcatgtaataataatcagagctctaatggtttggtccgtgcaccctcgttgcctccatgtatagggaggggagaacaggttgaagcaaaaaagaaccatgngtgggaagatcaaattgaacaggcaattatcattgcaagcatcgaagacgaacgtcgtcgacgacgacaacaacatgttctgatcataagacaaagacgcctgatagagaatcatcattatcgagacatagtttgcaaagaacaccttctttgccttcttcaatggaggccaaagtcagtgatataagaatgagcaaattaatccgacaagcattggctgactcaccagatatattgccaccaaggcacaatcattacagggtactcatctgatcctatatacatantatctcgaattgatatataaatgatcatttgcttttgcagcaacaaacttgccaggtgtacattagaccaccgagaacccagagtgaagcatttaacacaccacgaggctcggccgagtaccgcactgaactcagaatagct

SEQ ID NO: 58079 - DNA, 770 bp, Gossypium hirsutum
  unsure (1)..(770): unsure at all n locations
  Clone ID: AI055223.1
cttattttcatctgtaattcatggaaaactatcatcaacactttatgggttctttggtggatttgcagtataagcattaagtttttagactgcaaaacttttgatctgcatttgctgtttagacatatttgaattgccattagatctacaatatgtataagtccattcattttcacctccaaattttgtaaggaacatcaaccatctgttgcattgttattgttgttcgtgtaccgtgtttcgattgaatgttaattcangtgatcggatattgaaaatctgcttgtattntggnttatgttgtatggtatatggtaaggtatagagttttggttattggaagtcttggttatgcattgtatgtntgattntggggacctttcatctttccgatggctcgtgctattcggagtctcggtttgcttttactagcaagatttaattttagtagttcttttggctttctcgttagctcagcttggatgtcgtgaacttgagttcgaagtgttgcattctgttgntgcttgttgcaatgtcttgttctgtttgatgaatacaaatattgtntgctaataaggaatctctgtgtttttgcttcaggacagttgatgaaataanatggtggttggttcccaaattttcgaaaaaacatttgccaaaacttttgcgtccctataccattttttgtgantgccacccgggggtgtaacgacacaattgagacctttccccaaattacttagaggaaccgttacattattaaaaaatac

SEQ ID NO: 58080 - DNA, 742 bp, Gossypium hirsutum
  unsure (1)..(742): unsure at all n locations
  Clone ID: AI055222.1
gtttaacaaaatatattcatagattcaccaaaaccccacgaaaaacccaccatataaatatacatacacatatacgtacacatatatttctttttgaaactggcaatggattttcaagtagtggttttagccggtggcaattcaaagaatctaactccccttgtttccaaggaattgcctaaaccgctgcttccggtggctaactgccctgttcttaactacgttttgcaccaattggaacaaagcaaccttaaagatctaattgttgtggttgaaggagaagatgcagctcttctcgttggtgcttggatttctgggactttcattgatcgtacatgttgagattgctgcagtccctgaggatattggaactgctggggcacttcgggcaatctcacatcacctcacagcaaaagacattttngtcgtgagtggtgatcttgtttctgatgttcctcctggtgctcttgctgccacccataggcgacatgatgagcagtgactacaatgctntgctctattcctgtagtggacctttagagcaggatcctcgggagaaaagataagccagaaactagacgttcacatcattgactgaccctacaacaatttataccatgctcggagcgaattgaaagagctgaattaaggcatctctgcgaggcnatgaaagcacgactatgagctatgttccttaaagctgccgaagttnacttaggcgtaagctgaagagtctnctttg

SEQ ID NO: 58081 - DNA, 690 bp, Gossypium hirsutum
  unsure (1)..(690): unsure at all n locations
  Clone ID: AI055220.1
ccacaatccccaatgcatactaaaagcttagctacattgaaacaccagttgcttcgaaaccgaatagtagaaacagcccgcaaatgtatgcataataatgcaagcttaggacaagtgtatgatagcatgcaagaagcctatcaacaaatgcagagtccactggtttaccaagaaccttcttctcggggattaaaggaactgaaagaatcaacaattcaaatggcttcaaccatgggaagtattgatgccccagttgatgagacagtatntgatgttgagaagggaattgatgatctgctgcctacgaggtaaagaacagcggttaagtacctggtttaaggttcattggtagagggaatggcttggagcaatgcttttcataaaaagatcccacctttgtgctttgggctactttgattcatgccattgaagcttgcaggaacagttctggagcgatattgtgctctcacgcaccagagacatcaaatgctgggagtccatgcacttgtgaactgaccttagacatgtgattacaatttcaacgctacctgtatngttggatgatgatccactggcggcctttccatatgtatgcttgtctggaacattaattgcaatttcagggcacctaaataaaccgggataaatccctgtattactgtatagggtttaacgcttttttgagaatat

SEQ ID NO: 58082 - DNA, 703 bp, Gossypium hirsutum
  unsure (1)..(703): unsure at all n locations
  Clone ID: AI055217.1
aaaaaacttaaaaaaacaacatttcttcttctcaaacttcccccccaaatccggccacgttcgccgccgtagcgccaccgtgttcggtggccggcgtcgcgcgaagatgcctcctcgaccagcgctttgaagcacgttcaaaagccgagtccttagagcctgaaatcggagaaagaggggtcctttgccccttcccgcgttcggatcccacgatggcgaagagaccaacggcggggtaccggttcggttcaagtgatttctttcccctttattattattnntatttaaactgattntaaagatttggacaaataaataaaataacaaataagagaaatgganaacagagaaaaacatgaaattgttcaaccttttcgaatcttttttttgttttcgataactgggncgcgtaaaanaatacaagtcatcgataatggctcttatagcccagtacaaactcttaatgatatttcgtcatttgcatttgnncgtgnttgctgctcgacttngttnttttccttctgtgggtctcttttgctgcgtctgtaactgtttgcgtgcnaggacgtgccacgatgcaatgaacgcggactaactgcaaagctcgccttaggtagaacctggtgctaaatatggcctagttaaaggttggcattatttggcttaatttggaaggcctgattttgttccccaattgctcact

SEQ ID NO: 58083 - DNA, 775 bp, Gossypium hirsutum
  unsure (1)..(775): unsure at all n locations
  Clone ID: AI055215.1
gtcgtatccaacactcttgcaattatctttgttgcatttcaaatctttcatgtgaggaagcaccgtggcattggtcctatggtttcacttctcatgcttgttattctagccctgggacacttcatccctttggttctaaacctcgaaatgaacgaggtgatcattagagtcgtcacaatggtggcttttctgctgcaagtccgtcttctgatgctctcatggactgctagatgctccactgaaaagaaaaagaccttgtggattgcagagaaaagggggctgntatgtgtgtgttccagtgtacgtaatcggagctattatcgccttttcggttaagtcaaggcagaatttacacagaacagtaagggcaacgcattcttggtactacatagatgaaatcattntggggaattcaagagcttatgctggtttgatactggatgcctntcttttccctcaaatcatcttcaacatgttccacaactcgagagaactggctctntctcgactcttttacatcggaatcacccttgttcgcctcgtaccccatggatatgatctgtacagggcanacagctatgttgatatagatgacacatacatttatgcagatcttgtgcagatactactcaactgtttggacctcattatatggngtggatatcctttgtggacatcactaccacangccctggcgcgatttccttcagagtatccaaaccgggagatgaggacctcatgttcnnaaacatgcttgaattncctacccttcttn

SEQ ID NO: 58084 - DNA, 769 bp, Gossypium hirsutum
  Clone ID: AI055209.1
ctcaattcatgcaatttcgtgcccaaacacaaccctactttccctccattctctaatccccaattttaatcctagatcttagatgggataaagcctaaaaaaattcccatgcggataagacttggtatctcgaaaagacccattacatcgatctagacttcaactcttttttttcccaagtttgcaaatggcaaaaggtagcaaaggacgacgtggaattgctttccggcaagtccggccaaccccgtactcatttacctcacgtaatgaaaacatttcaggggatttgtacccaaaaaaatgttccaaagctttgggtaagaatgattgggaagacgcgacttgttctgtttgtatggagtgccctcacaatgccgtgcttcttctctgctcatcccatgacaatggttgccgttcttacatgtgtggaactagcttccgatactcgaactgtctcgatcaatacataaagttctacactaaagtagtctcatccaatgaggaagaacctgtgttaagttcattggatctccggtctggcaccaggttctgggctgtcagtcaagaatgtgaagtaccgaactcgcgtgtcacttgtgagggtaagtgaaaggttggacgtttggaacctgagggaatttctaatcttaagtaaactggtgcagatgatgactgtatgggctctaagaacatgaacccatgaatgacatcggtgctactcaagagtgaccttcttaacaaatgagagtgtcggactgaaggtatttgt

SEQ ID NO: 58085 - DNA, 710 bp, Gossypium hirsutum
  Clone ID: AI055207.1
agaatataaaggccaataacaaaacgtggtgctcatgtgcagtgaccaaagcagatccttcctaaaccaagccaatgacaagaccacctatggggctttcttggatgtggaccctcttcatcaaagcttgtcattgaggagtttgaatgatcattcaatagtggagagctttggtgggggtggcaaagcatgtatgtcagctagagtatatcccacattggcaattaataacgcagcccacctgtatgttttcaacaatggaagtgaatccgtggagatttcaaagttgaacgctaggaacatgtataaagccataatctatagtaattcttggttccaaaacttataaagaggagaattcaatctatactacccatttatatttttatatggatttataattctataatttatatgccaaaactattaatttaaacaaatcattttacttcataataaatgctttactatttttataacattgtttatctttttatgaaataacatctttaaatataattataattttcattactattaattataaattaatttataaatttgggtgtccatacatatgcatatataggtatctaattaccgctgattataattatatagagaactgtttaaccatatatattgaactctattcgtaagatatctatatcatgatgtattaataacatcatatatgtattatctatcag

SEQ ID NO: 58086 - DNA, 758 bp, Gossypium hirsutum
  unsure (1)..(758): unsure at all n locations
  Clone ID: AI055206.1
cttgattccattgttatttttttccaggggaaattccaaagaaaattttagttaatttcattaaccgaacaatccccaaagtttcattaacataaaaattaatcgaagtctccttagttacccatatttttggtaaaaaaaatccgaattttataccacattcaaatgtatttgtaaaagaccaaaccccctagaacgtttttctcaaaaaaaatttggttaattatggctagtaggaaactggttcgtgattttctcattgcaagacagcccctttttcatcggcttacgactcaacagggttcgaatgtaagattaagattgctatctggaaaaggttattcgagaaatcgacagttcagtgtcttcaatgaattctccaagaaaattaaaggcgaagctaacagaaatcaggattttaagcaatcagttgaggagctaanagggaaagcggaagagctganagttagaacgaagcngacgtncgagcagctttacaaacaggtcgatggtgtgtggacaggggccgaagctcagctaaaaaggttctgcaatgtgaaaggaagattcagctgccaaagagaggtaagggaaacttcgatgnaaagagagtntacagtcgacgtacttagctnnacggtgctgtgcanagatgaagccacatattcaagaacaatgacagcactctgacaggatacccggacctgtttggaattagctccgtgtntcacaggtttatttaaggtaagaacagggtc

SEQ ID NO: 58087 - DNA, 737 bp, Gossypium hirsutum
  unsure (1)..(737): unsure at all n locations
  Clone ID: AI055204.1
gctaaatctaaaagaagcctaaattttggaatgagattacgtattgcactgggttcggccaagggaattctttacctccatactgaagcacatcctccggtattccaccgggatatcaaagctagcaacattcttcttgactccaaacttaatgcaaaagttgctgattttggtctctcacgtttagctccagccctggaagacgagggagctgtgccagatcatgtgtccacagttgtgcggggaacaccagtaagcttgctatgactaaaaggcattccattatgttttatatacttcaagactcgtagtatgaaacgcgaaatttgtcagattaatcaggtatgagaaaattattgaatatatgatgtgataaactgngaagtggaatttacattnttcttcttgaaaaggtttcaccatttcagttgcatgcctcanatggatangatccgcttcttttagatataaactcgtagatgttagtgaacacagtgctattgattgctctctgtgtgcanggctaccttgatcagaatacttttgaccatanattgactgatgaagtgtgttatagncctnggatgttnnnntgaatgttacggttgccgcatatacatgcagaaacatgcccgagtaaatgnctatatncggntgatgagatantgatgtnnnaatgggtaccctgagttaagattcggctnctttgattccaaaccaaaaggcttattggtggg

SEQ ID NO: 58088 - DNA, 771 bp, Gossypium hirsutum
  Clone ID: AI055199.1
gccaaacacctccatttccacctcattgacgaagatgatatcatccctacttctcaacactctttgccttcctcctccgccgccgccgttgctgaatccaaaactctcaactcgttcttcgaacttgtcattcaaattgcgaaaacgatcaggttgaatcaggggcttatcatcagcacaaagctctctcatagctccctcatcgatgacctaaagcagctggcaggcactgctgatgaacgtctggtaattgttcaatgcatcgaagcccaagatgcgagctacagataccaatttgaaggagttcatgtgttcactgttgaccccaaacgcttcgatgccaacaaccttttagccgaaatgtcgagtaaggttgcaaaaaggaattccactcatctgcatgctctgtctttgtataacaattatcagccattcactgaatttgggaaaggccttaatgcaaaaggtgccttgaactcatttcaggccctatgtatcaatgcattgagtgcaatgaatacattttccacaaatcttgcgctgaaaattcctgtgatttaaagctcggtcggcaaagtgccctataaatctcgagcattaaagatcccgcaggtatgaataccttcggagaaacctaaagagttagacatgtaatgatcacaaggtatctccgtatactccgaatgattttaaaccacatgaggtaattctcctccctaaatatacgagttctcttacctcacttatgtgctcctatgattaaataagact

SEQ ID NO: 58089 - DNA, 775 bp, Gossypium hirsutum
  Clone ID: AI055196.1
caggaacctaaaatgtgttcttatgcatctacacttccaaggggcaatgttttgttcaatgcttcctcaattaagccgggggttagtgtggacgacatcaggaaaccaaaccctccgaatgaccataagccaatggagaatatccctagccccggttttggaaaaaaattgaggaatcaacaggatgagtgctacaaaggaaatgtgtctggatgtaaactctttggattctccttgactgcggaatcacctactctgaactcacaaaattctggtaagcggagttgtacaaaggtaagtatgttacagccgaagttgaattgtaactgcatttcctacttctgtcctactgatactgtaacatgactgactacaggttcacaagcaaggcagcttggtgggaagagccattgatctctcaagactctatggatataaagacttgataactgaactagaacatcttttcggtatggaaggtcttttagtgctcctgataaagggtggctggttttgtacactgacatggacaatgatgttatggtagttggagactacccgtggcatgaattttgtgagtggtatcctagatccacatttcacaggatacaaattgataaatgaccatgtaatggtacagtgaatataagctgttggatgatcatattataatgtactataatgatacttgttgcaatctattctttccttgttgtagtatgataaagttatttcatgtcgtactagacttataatctttgctatattgttttcg

SEQ ID NO: 58090 - DNA, 708 bp, Gossypium hirsutum
  unsure (1)..(708): unsure at all n locations
  Clone ID: AI055192.1
ctagctactagctctctaaccgttcctcgccaatcaatgtgcaccactaaacccctcactgcaaaagaaacaactatcgtgaaaaattaaattttttgcctctttaattttcaaattgttctctttaatttaatcttggaacggatcttgattggtttattaattgcattttattttaatcaaaattttaggcaatattttatctcagatgattatcgttactaaatttaaaaaagtttgctgaaagcttgcagctgatgagaataaattgattattatttttgggcgtgtttactgattttatcttgttgtctgtggtttntgtttacttgagaagttgaaattacgattataagattgctttttttttcatttttgtactgtttatttcagggatgccgatatgtgaagcatttgctcaaatagagcaacagcttaacatttgcgatgttgtatgtgaagtattatgatgagtacaaggtgaatctcttcacgtggaattcagattacaaattcgcagtccgaatgttccaatgattactgtataatgaatgctggacctctaagctgatatctatagcttcgaacagttnnaacggttgacttngcctaggacaactgtctgttcaggacatcatcagtattngacgacttttggccacttcgactagatagctcatgttcttcattaggctcgattgtgaggaa

SEQ ID NO: 58091 - DNA, 801 bp, Gossypium hirsutum
  unsure (1)..(801): unsure at all n locations
  Clone ID: AI055191.1
aaaatatcttaagaaaaagacataccaggcatctttaattagcaaaggagagtcacagctgagttttgaagggaatcaggatattcaatctcaaggatatagtgcgagtgagtacaggatcgatgaagttgcaatccagagagatgaaggacaaaatattacttctcctggtactgaaacgtgttctactaatcagccagggattttgaaaaacaagctggtagatgaggtgatggttagtgatgaagatagaaaatctcgtgtacttaaaattaaaagtaacaagccacttgatttagatagtggagatgataaacatgatagcaagtcaaatactttaaaagcanagaagttagtcataaatctaggttcacgaaaaataaatgttaccaactccccaaagcctgatgcttcaaactgtcaaagagaacgggatgtgatttcttacatggtgttcaagatgcaaatcaacagagttcaaagtttatgctggatacgcatgacaatactgctaaatctggtgatggatacaaggtttatcagtccaagtcaagaaggtgannatgcggganaagaanggatgtngataagtntggaaatattaagccagaatctcctgaattggngcccanagcgtgcnnncagcagtctgatggatataaattggcccctctgacaanccgagtgcatctggaaaagaanncatgtgtacttagcttgagcttgaacgtaaggtagcgccttctcaaagggggacaaggtgttataagagtgagacacggctgttcacattgaggaaaa

SEQ ID NO: 58092 - DNA, 779 bp, Gossypium hirsutum
  unsure (1)..(779): unsure at all n locations
  Clone ID: AI055188.1
gtctcttacaacaatggatgtcaatttgtttcagccaaaatgtccttttagttaccctattgcttgccatagctgtcagcttggtggaaagccagggcaccagggttgggttctactcaacttcatgtcctcgagttgagtccatcgtgaggtcgacggttcaatcccatttcgggtctgatcccactattgctcctggtttgctccgtatgcatttccatgactgctttgtccatggatgcgatgcttccatccttattgatggacctggcactgagaaaaccgccccaccgaacctcttgttgagaggttnccnaagtcattgatgatgccaagactcagcttgaagctgcatgcctgnnagttgtttcgtgtgctgatatcctagccctcgctgctcgagattctgtagttctgaaccagtggacccagttgggcaattgccgacaggccgccgagatggaacggtttcacaggcttttgattgcggcaattgccaggcttcctgactaatcgatgtgcagaacaaaaattgcagcaaagggtctaatactaagatcttgcacccttgtggaggccacacgatcgtactacagcctgccaatcttcagatcagctttacaactcacacgaacggtaacgggcggacttttattaccgccctatttctccatttaatactttgtccaaaacgttggtgtagtgaatttttccaaccctgttaaaattaaattttttccctttaagagggatacgtattaagttgctatttccaacct

SEQ ID NO: 58093 - DNA, 740 bp, Gossypium hirsutum
  unsure (1)..(740): unsure at all n locations
  Clone ID: AI055182.1
atcatgccnaggggtgcatttgtctgccaagagacttggttgcaatgctgtaattgctatgcctgttaccacaccagaaattaagtggcaatctgtagagaggttgggtgcaactgttgttctcattggagattcttatgatgaggcacaagcatatgctaaaaaacgggctaaagaggaaggtcgcacctttatacccccgtttgatcacccagacgttatcatcgggcaaggcactgttgggatggangattgtgcgccaaatgcagagcccattgcatgcaatctttgtaccttgttggtggtggtgggcttatagctggcattgctgcatatgtaagnnagggtttcccggaggtgaaaattattggagtggagccttttgatgcaaatgcaatggcattgtcactgcatcatggtgaaagagggatgttgagaaaggtgggaggtntgctgaggagtannctgtaagaggtnngcgaaaaacctcagcatatgtagagactggtggaggtgtcgtctgntagcgtgatgcattgtgccttataaggattgttgagagagagaacatctgaaccacagtgcctacccttgagacctaactatgcaatttacgcttaagggaaatgtcgcatanctactcaacataatgatnncttagtgtctacggttattggtaccaaaaggagtacaattttaagaaacatgagtactttgaagggcctaatccggaatatttt

SEQ ID NO: 58094 - DNA, 791 bp, Gossypium hirsutum
  unsure (1)..(791): unsure at all n locations
  Clone ID: AI055177.1
aggaggtcaagaaacttctgaaaaaagattcaacgatgtttatgccaatattatgtcggaggcatccacatgcaactattgtttcagcttcacttctacacaagttttatgggaacaagttgaaaccttttgttgatagtgctgaacatttgactgaggatgttgtatctgtatttcctgctgctgataaccttgagcagtatatactggacctcataaagtctgcttgtgaaggtgagaatgtggagatccatttcaggaagctaaacccataccagattgaatctgtttctggaacagtggtgatgcgatggattaattcacagttaggacgaattgttggttgggtggagcgaacccttcaacaagagcgatgggaccccatatcacctcaacagcggctggggagttcgattggggaagtttatagaattgttgaggagacagggattcagttttttggcattaaagttccaatgaggcttacagaactgaatgctttgtttcgtggcattgataatgcatntcnagtatatgcaaatcatattgtggataatttagctagcanagatgatctaatccacctntactgtctcacccgtatagagagagctgaattaaagcgtgtaagaangactattgctctcgnntgcgatcaagaggtcatcantatattgctgcacgccnacccttgggtantacactatatagcttaatcactgacagttgagactctggacctgcaggaatgcatgaaaactttcggaacccgtaanataagacccaagccc

SEQ ID NO: 58095 - DNA, 813 bp, Gossypium hirsutum
  unsure (1)..(813): unsure at all n locations
  Clone ID: AI055170.1
aaataacttattttacaatacaattgcccggggaaatattggtttcagaacctattgagggctaacctcattcacaacactgatttactcaccagaatgaatccctactgtacctttgttacaggctccaagagattcaacagtggtatctgcaaaaagggaggcaagcatcctgtctggaacgaagctattattgttcccattcaagaagaaagaattctccttgaagttatggacaaggtacaagatctcccatgatgaccaaattggtacttgcatgattaatcttcacgaaattcaatctcaaaagagaatcaacagatggttccctttgacctacaagaacagacctgctggtgaaatcttattggaagctgaattccaaggcataacagtatgatgaatcaagaacctactcatatgatgcatcaagaacccgttatggtgatccanagagaacaagaaattatcatcaaccaacaagctcctatttgttgagaagattcccaccaagacctttattgaacaaaagcacacgttgaacctcatacttttatgaaagaaanatgatgtgtggaaaccagacctgtctttcacaagtcgaaacaactgggacctagaaagtcgtgnaagaagcgatnttcnncccgagtgtcttgccaagcanatcgaactatcgaaacttacgtgcagaaggnnaatcagtctgaaaccctcgtgccaaccaataccagtgtcaaacgtcatcntttagagcgactttcagtgtcaggccagagtgcttgacaaactttctannatcagtttgcaccg

SEQ ID NO: 58096 - DNA, 781 bp, Gossypium hirsutum
  Clone ID: AI055169.1
gtaagatttgaatttgagattatttagtttctcaaaatcaaattaattgtggaagctttgatctttacatgaatccgtcaatttttaaggattttttaatttatttttttcttacattgaattaaaaaatttcggtgaaattgatgtttatagcaagtgagcttggggaatcaactagccagttgcccccaaattaaattaattatagaggctttgatctttacataaattcagccaatatttaggaaagaatatgtagttctttttaattcttacattgaattaaagtttttctgttgaaatttatatttagtggatatgtttattttaattctggtttgaattttataggaacctgggttttggaaagtcttatagtatggcaagtgaattttggggaatcagctagccattctccccaaatccatcttgctctaatacaatgtaatggtgatgctggtatctatgagtgcaatttctgcttataattagcttaagatccccatcgttctttatgcgtgcttcatttatgatgtgcttgttagatctaatggttacatattcattcccgtgtttttaatgtccatatgcaagctctttttaggataacattggttctttgattgtagtgggatctttactgtcccttgcatatatttcggtttaaattctatatgttatgtattgactaattgtatttcatatttttactttctacagtttttctctctatgattgtgatgttatattttaatatcttccattagtaattttatctttg

SEQ ID NO: 58097 - DNA, 828 bp, Gossypium hirsutum
  unsure (1)..(828): unsure at all n locations
  Clone ID: AI055168.1
tgtgaatcagccatggatatctccatgaaaaagcttaacattagtttcttcattctcttacagatattgttcttcttcttactcaacttcatttcatgtgagctgctagttattagagaaagcttgaagaagaacaacctgtccgcagttccttcaaattttctctttggaacagcctcttctgcttaccagtatgaaggtggcttcttagctgatggtaaaggattgaacaattgggatgtttattcccataaaccaggaaatttgattgttgatggaagcaatgcagacatagctgtggaccattatcataggtatttggaagacattgatctcatgcattccctnggtgttaatagctataggttctccatttcttgggccagaattttacctaaagggagatttggagaaatcaatgaagctggtatcaagttctacaacaaccttattgatggtctcctccttaaagggattgaaccatntgtaacattgacccacgtncgatttcctcaagaactcgaagacagatacggaagttggctaagtccggagtcgcaggaggattntgcatactttgcagatatctgggttaagtcctttggagacagggtgaagtattgngtacccgtcacgagcccgattttcaagtcnagttgggtacccgtaagtatattccaccgttgcatgttctaggccgtccgaaatgnacctatgtgatccganaaagacccgtatgcanccccatatatatctacccatattcagctgtatgtatagaccattcccgatatacagagtncttnggatcgttcatgcatgttgacg

SEQ ID NO: 58098 - DNA, 748 bp, Gossypium hirsutum
  unsure (1)..(748): unsure at all n locations
  Clone ID: AI055167.1
caatcttcttctgactcagaaggatctcaaccttcaacctcagttgttgcacttactaaatttctcaccgacatcatggatgaatttggggaaaagagaaagagctcttgtggtattggtccagtagcttttatagcttctgtgcaatctctggagagtatcccccagtctttgagctcatcaggaaggtttgatttccatgtacaactgcctgcacctgctgcctctgaacgtggggccatactgaagcatgaaattcaaaggcgttcctacagtgtcatgatgatatcatatgngatgtagcttcaaatgtgatggatatgatgctaatgatctggaatattggttgatnaaactgntcatgctgctgtggccggnttttgcctctgatcttggtctgaagacacatgaacccatgctagtagggatgaattctctcatgctatgctggagtcctcccagttgcctgcgtgacatactatatcagctcctgagtggtcgctctgttgngacaatgtggtgcctcatgacattcggatgctatcaagagatgatgaactgccctcaagtncccaatatattgcaaagcgcccttangggtggactaaggctgtgatgcccccccggtggcagactaaaatgtggccgtgggtggttcactaaaatttttgggaggcccgactctaacaacatgtgtttaacaacgcgaatttttaaagggggctgcccccttttatattattccaaa

SEQ ID NO: 58099 - DNA, 764 bp, Gossypium hirsutum
  Clone ID: AI055165.1
gcaacgctcctctaactttaaatcaaagtcaactcggccagcattgccacagcggttacagaatgctaagacccttgatagtgacatcaaaactgtagatcaagcacaggtagcaagcttattatattttgtgtgtgttttatgttgaatatttgtagaggtaaatctttgcttttcccctttatcgaagctttgtttttatggtgttgtgttatatataggctaaggatcaagaatcaagagatgatctggatgcagaagacccaagagttgcagaagaaatggaactgtcatgggtcacaatttaaaatcgatgactattgcacaaaatacgtcctaaagaggcttctcagttagatgaggttcatttgacccacaagagctgattcaatttaaagagctattagtgaaacttgagtggattaatgatgccgatatgaaaagtagctactttgtaaatagagatctaatttagaagatgaatagataacatctggtaaagatatatgattgaatatgtacatttgtaatcccttaatgtaggatagcaaatcttttcgcgatgtacttgattagaccaccttttgagatgtcaactatattagatgcctctattaactgaatcatcatcatcatgtacctggtacttaggtaatcctaatacaaaaaaccttatgggccgtaccaatgcctaagagggatcatcctggctcttcaatcttctgtaaactggtctaatatagctggaaaccttgtatgctaat

SEQ ID NO: 58100 - DNA, 816 bp, Gossypium hirsutum
  Clone ID: AI055162.1
ccagcttcatcatcatctccggcatccgtattctctgaaaaggtcgggacatcatcttccccgtttggtgccagcagtggttcaactttattttcatcttcacctgcagctacttcaagctcttttggtttctccttcctgggtggttcatcttttggaaagagcactgaaagttcgactacaacagcaacctttactacagcaccttcgttaacagctgcttcttcttcttcttcaagttcttcaggcttctctttttccctcccttcttcagcctctcaacctacatttggtattggcaatgcagcttcatcttcgtcgtcatcatcagcatccacagtccctgggacatttgggacatcttcatccccatttggagccagtagtggttcccctctattttcatcttcacaagcaccggctaccactactaccactactgctgctatgagctcttttggatctatatcttcaccttctactgctacagctactactccatcttttccagcttatcatcatcgagctcagcttcttatacggaattctctattgagggtagttcaccattttgaagagcactgctagtcaacaacagcatcctactatactacagcacctcatatgcacttcttcttcgtcaagctctcaagcttcttattcgcttgccttaaccatttaaccatattagtgtttgcaatgcacttctgatcacacctgcaccacattgttgctctgttgtcaaccgcttctgtctttgacattatatgcttgtattacgtcaaccaatgtgtacctgatcgctttatgtaatcg

SEQ ID NO: 58101 - DNA, 719 bp, Gossypium hirsutum
  unsure (1)..(719): unsure at all n locations
  Clone ID: AI055158.1
gttgcagaggctttttcaaaagctggtcaaaatcttccaagttgaaaatggcttaactgaaggggtggtccagggtccactaattaatgaagctgcagtgcaaaaggttgagacattcattcaagatgcgaattcaaaggaaccaaaagtccttcttggtggtaaaagacatagccttggaatgactttctatgagcccacaattgttactgatgtcaagagtgagatgctattggctagcgaggaagtatttggaccagtggcacctatnttgcgattcanaactgaggaagaagctatccacatggcanacaacaccanagcanggttagctgcttacatatttaccaacaatgttcaacgaacattgccgtgtctcaaaagctctcgaatacggactgtgnngtgtaatgaaggaatcatttcactgangtggcaccatttgtgggtgtaaacagtctggtcttggacgaaagggtccaagtaccggatagatgatattctgcctggaatattatgcctgggagatntnaacagaattgaaaagggaaacatgcacagcacagctctatttaaacctgtatgggtntctatgtcgcnggcacctggaatcggtaacttgntnaaggatttattgcgctagggattgtcaattctaataagcagctgtcagagttgaaaaaaaaaaaaaaaaaaaaaaaaaaaaatttgggccgcca

SEQ ID NO: 58102 - DNA, 734 bp, Gossypium hirsutum
  unsure (1)..(734): unsure at all n locations
  Clone ID: AI055157.1
aagttttacccctcaagcagaaaaggctcttgagtggaaagattatctaagcttgttttacgtctctgaagaagaagcttctgcactatggccttctatctgcagggagcaagtgttagattacatgaagaagtccgaagttgtcattaaacaactattgcaggtgctaatgaagggtctaattgtcaatgagattgatgaggcaaaagaatcattattggtgggttcaatgaggactaaccttaactactatcctaaatgtccaaaccctgaactcactgtcggagtaggtcgtcactctgatgtctcaactcttacaattcttcttcaagatgaaattgggggactattcgtcagaggaaacgagggagatgattggattcatgttcctgcaattaaaggttctcttgtgatccatgttggagatgcactacagataatgagcaatggaaggtatagagtgttgaacatcgtgtggtcgcttattggagttagaacagaattccagtccctattttgtgaatgcatgactgctgatttataggacaatgccgaactgtcgcaatgggagaaccatttacaacatgtctttttacattcttcaacattgttataagccccatgggagaaacgttgattggtgatatgcctgactttcccagtggtttttcatttggtgaccttgtgtgtactaataggtactaaataatgttgaactgccttttctaagggtn

SEQ ID NO: 58103 - DNA, 716 bp, Gossypium hirsutum
  unsure (1)..(716): unsure at all n locations
  Clone ID: AI055150.1
agggagctgaggggagttctggttcagttttggggggaaaacaggatatagacttttcaagtggagtctcaagtgatactggttctgaggaagagaaggaggttgttctgcatcgaagctcggaatcttgtgaagatgttaatgccatggttgaagcagatgtgattgctgggagtgaagcagctcatcctgagatgccagaacaaaatggaactaaaactgaaaatcaagaggaaatagttagtcaatgtctcagtgctccggttgcggaaaatggagttggaagtgaattgattgatgaagtcaattgttcttctatcctaaaaccagaagttcacaaagacgcattagtttcaaatgttaatgctacagaaccagaaaatccattgaactttgatgattnttattcttctgcagagatggaggtatggctgctcactggagttcttttcctatttcctacgcttagctngatttgagtgcctggntatttncctttntttatcatttaaagttggagaattagaaatttaatgggtgaaagacatgttataacttgctacaaataattcgactatttggctgtttgccttatacctgattctacccttattagatgtccttgtgctnttagaggggaaggtccaactcgcttttccctttactaataggtgattattaggttcttactaactaaccgcaaccgtagttnaagg

SEQ ID NO: 58104 - DNA, 685 bp, Gossypium hirsutum
  unsure (1)..(685): unsure at all n locations
  Clone ID: AI055148.1
ttttttttttccaaaagacctgaacatcaaatttgaccagaataaaatgataacagttaaggccatgcatcatttccaatgggtcagttcattccattttctcatatggagcatactctgggttacattgtgatgaggaaatagcagatttagtccagacaacatcaactgcttctcttctattaatcattgtggccctaaacttaaccattaatatcttttgttgaattactgttggtgtaatttaccctttaaaataaaactaaatatactttgtaagtatccaatcttaatttgcaaagatttaaaaggacctcataggtatcaattgtataactgtgaatttggatgaaatttcacatggcacagcatccttaggaagatgaagaaacaccatggggcctaaaagaatggaagaaagaagtgatcttgtcnaaaagcttttgaactataaagtaagcttcacatattccagaactctcatcatctcagcaggacggatgcccattgccgttggtaaccctnactatttgctgtgcagaaaataattatggaccatgtctctcctgagggccgggtacatttttgattatcatgatgaaccggcctgaaaatggtttcccttatgcaacttttnngacctttgtaagcttaagcttgaaaaaatcactggcccctgttaaac

SEQ ID NO: 58105 - DNA, 717 bp, Gossypium hirsutum
  unsure (1)..(717): unsure at all n locations
  Clone ID: AI055139.1
gtgaaatcttggcgccctaattacatcattgatttcagcgatctttctataggcgatcccctatatgacgtgataccaatacatttagatgtttttagaggcaattcttccctccttaagaagtttctacaaagctataaacttcctttgatgcaaaaaacaccagagaacagatcaatcactgctaatgacaagttcggacgactttcataccaagctatgtgctactgtattttgcataatgagaatgtcttgggtgctatatttagtctatggactgaacttcaaacagcagaaacatgggaagaaagttgagcanatggtttggggagaattaaataactatcagggcgttgcctgtcatgttactcccactccaaatttatacgggatcatgcacatacttgngtttgacatttaacatcgatacatagatttgatggacatgatgtgcatantaaaccatgatcagtanaaatataataggaatcagatttaggaatcagattggatttttctctataannaaataagcanattaattctgtcgtagantaagaagatgaccattggtaaaattnattattttatgtagaaactgatatccccttccagcngtaggtcctttaggcatagtttccactggaggttattggtaaattattaaagattaatgttaaaaaaaaaaaaacttgggggggcgtccaatttcttttt

SEQ ID NO: 58106 - DNA, 709 bp, Gossypium hirsutum
  unsure (1)..(709): unsure at all n locations
  Clone ID: AI055138.1
atttaattgaagttcatatttttgcaagttaaatttagtagagtctgtcgtcattcattgtgtggttatttgtgtttttcggccactttatgtaatgaacattataggacacctttatccaatactggtttttcctgtctttaactgctgtttttacattttaaacgccaaagggtaatgactaatgaccctatatatatgtatgtataacatatattgagctcctcctcagtttcacagaattttccttttcaccaatttctgctatctcaaaggtatattcattgattctttatgctaaactttgaatttttctttctttctcttttctgcgctggnggttgaatttttggagaatcgactnttccggtctgtgggaattgacggaatgatgtttgttttactaaatgttgattaaatttgaggacttctttntatgnggttctgtagttttgaggtgggaaaaatgaactttgttgatcagatatttatctgtttactgaaatcaagatgattgcatggtcantgttatttatattcctggaaattgatcttaatatgagtttctttgctggctgatattggacagaatgacccgttattgatctttatgttttcaatgaagatactgttcaacctagatttttcctggaaatgatccatagtgaccgggatgctatatctttgtgcagccaacttggattagaan

SEQ ID NO: 58107 - DNA, 755 bp, Gossypium hirsutum
  unsure (1)..(755): unsure at all n locations
  Clone ID: AI055137.1
ccatcctccatcctcaaaacaccaaaccaccacacctactaccataaatgacgccgctccttcaatccacaccaccaaacttaaaatgttgttacgccgcttcaaaacaccaaacatcggcacttttcaaacaccaataatcgatgatccccaaaatcctaaactatcgtcgtgcctagcacaaccaccgtgcgttgccaccactcctaatccaaacatcggcaccgttatagccatggtcgaacaagaaattaagtagtcaatagtttctcgacttctcttaatcgaggtcgcaactgaatgtcagcccacccgtcacggatattgatgacaaagattaagaagtgtttctaccgccaccgacacaagctgttggctcgagtcgacgccatcgttgaagaagcttaacaccagatgaggatgttcaaacggaactagcaccttcggttaccatggtgtaacctcatctacgtcgaaagagagcagccaccggacgtgctcgacaacaaccatcacaccaagtgaacaaccaatatcaactctagaatgcagtnactgaanntgtagtattacgagttcgccaaatattcgctngaagaaaagtatcaccacctaagataatgacgagtacaacgaaactgacatggccaaatctagtaaatttctgacgaacaaattaactctaggaacanaaagaccacgnttcgctggaggaggttaacccgtaagctacttacacatgggctaaactcaac

SEQ ID NO: 58108 - DNA, 756 bp, Gossypium hirsutum
  unsure (1)..(756): unsure at all n locations
  Clone ID: AI055127.1
gtcgtgttgcctaactccctttttatctttctcacaatcaattggttggagatctttaatccttttgatttttatctgttcctatgactagaagtggtgatggacgattctgtctctccaaaattggcttcagatgattccgaactcaacccaactgatactcagtcatccaaaagaaggaaggtggttgagaagattgttgttacactgaaggtaggagaaaatggtggaaagctaaagagcgaggggcctctttctgatttatggtcctggagaaaatatgggcaaaaacctatcanaggatctccttatcccagaggctattacagatgtagcacatcanaaggttgttcagccaaaaagcaagtggaaagatgcanaacagatgcctcgatgcttatcatcacttacacttntagtcataccatccaggtcctgatcttcactgcgccgacctanaacagtcccctaaagaaccccaaanacccatagtgatgatgataagcccncaactactacgctgaagcagcttccggaggggttcagaaaagagccagagaagtaaaaaggagcanaacaaaccagcagtacagatgaagatgcagtgagagcgaatttactattacatccccataagtttccagaatacatattgcccagagatcctcaacggattttnagaaaccatgaccnctgggtctgngatgaaagcatgctgcttattacacatttatccaatcnnagaatgatctgtgn

SEQ ID NO: 58109 - DNA, 734 bp, Gossypium hirsutum
  unsure (1)..(734): unsure at all n locations
  Clone ID: AI055122.1
gaagattttaagctcatcaattacattgccatccatggcgaaggtcgttggaattcccttgctcgttgtgcaggtctgaagcgaactgggaaaagttgcaggctgcgatggttgaattatctacgcccagatattagacgtgggaacatcactcttgaagaacagcttttgattctcgaacttcactctcgttggggaaatcgatggtcgaaaattgctcaacatttgcctggaagaaccgacaatgagatcaagaactattggagaactcgtgtccagaaacatgcgaaacagcttaaatgtgatgtcaacagcaagcaattcaaggacaccatgcgttatttatggatgcctaaggttagtcgaaagatttccagcttgcgtcggtttgacccccacaaccacttctaccaccgcgggtcgtcccctccgcctctggtatgggcaagacttttcgacacaggtaaccccgagttatacttcggagattcgagcacggccaccgcgcttcgtcggagtcattcgaggccaagtttcgccgtttcggattgactaaatgtacanatatggttccaggtactaataacataaccctaatctgatataattccagcctgtcagcagttgtacttgacacagcttattgctatttatacatgcatgcggtgttgacttgacacatttccatgtaagtctgttttgcatatggagcctggttgtttcacactcattca

SEQ ID NO: 58110 - DNA, 759 bp, Gossypium hirsutum
  unsure (1)..(759): unsure at all n locations
  Clone ID: AI055121.1
acctccccaaaagccaaaacaccaccttttaggtcttacccattgaaaaaaaaagatgttgggttttgagctctgagttgtttctggtttaggcaaaaactgtcattatagttagataaaaacccatctatgttttgctgtttttggggttaaaaagaatcatcatcttcagctatatagcaaatgtttctgttcatatatgtatgtataaatatatatnagtttttaaacatagataaaccttcaaatggctactactggggttcaaaatcaagagaaggtcccaatgaacttgaagcaacaacttgctcttgctgttagaaacattcaatggagctatgggaatttctggtccatttcagctaaacaaccaggggtcttggaatgggtgatggtttattacaatggagatataaagacaaggaaaacagttcaatcttttgaacctaaagctgatgaccaactaggtttacanagaagtgagcaattaagagaactatgtgaatcactttcagctggtgaaactagtnctcatactaaaagaacttcagttgcattatcccctgaagatctactgctactgattggcatatctgactgatgtattngttncaacatggacaaggtaaaaatctttttccattttttccatgttagttgctttaatcaattattgtggttgatgtgaatatatcttgacaacatatattggcatctattggttgaatgtaaagctatattagggtaactcacgtgctc

SEQ ID NO: 58111 - DNA, 732 bp, Gossypium hirsutum
  unsure (1)..(732): unsure at all n locations
  Clone ID: AI055110.1
ctttgtccttagcttaaatgttaacaaacggccctagtatgctaatttttgtggtgctgagagtgtctactagtgttgttgcttttatcgttcccatttttgttttccttcctttcaaaggttaaagtctgatagaaatataagtgcatataaatacctcataatttttgcctttccgtgtttgacatgttgcgttatataatagtttttttccctttttttctggagcggatttttatttcataaactagaaggcttttttcgtattcatctttaaaattggctatcagcatagagcatgtttatcatcaaatttagtgaactctaggacctnggattttaaaatctggatttggattcctaaaataatgcaagtcgagttttaatccatagatttgttagatgcttattatttagtaatgaatttgaaaaattaaaatgtttttagatttgacaaataaatggttttgtatttttctaaaatatatcatattgaatctcaactactttgtccattatatttgaatntattattaccaagtgaaatcaaaatttgaatcatttctcaaatgagcacgattgatgtagacanaagaaatattctttggnatatgtgtatattccagttaaagaaatgagtttttttgtaggaggggtatagnctgactaacggaactttgtatatcgaaaatgtttatttacttcccctttagacttggcacagatctaaag

SEQ ID NO: 58112 - DNA, 749 bp, Gossypium hirsutum
  unsure (1)..(749): unsure at all n locations
  Clone ID: AI055109.1
agaaaatgaaagtcaagaattgttatttccctctttttgtatttccgggtgttttgcaaaaggagaaggatcacatagagggttttgctcccgaggttgcttgggtgacaaaatctggtgagtctgatttggaggtgccaattgctctacgcccaactagtgagacagttatgtatccctactattctaagtggataagaggacaccgtgacttgcctttgaagcttaatcggtggtgcaatggttgttcgaatgggagtttagcaatcccacaccatttataggaagtcgtgaatttctatggcaggaagggcatactgccttcgcaccaaggaggaggcagacctgaggttcttanatattggagctataccgacgtatatatgaagaattctggcaattcctgttacgaaggcangaaaagtgaactgaanaagttgctggtggactttcacaacaacgttaggcatttattccnacactggcgtggtattaaagtgcaacctncattgtttgggccaaactttgcaaaatgttgagataactttgaaatgaaaggggggaaagtctatgtcttgcagaattcctggcatatagcactcaccnaattgggtaatgggatgttaccggataccaaaagtantgttgcctcaagttacacnttgaagtttgggaacttgcctaaaaatacgatcctcaggaattttatcctgcctcctgtgcgatcttttgagctggttggcctaacc

SEQ ID NO: 58113 - DNA, 724 bp, Gossypium hirsutum
  unsure (1)..(724): unsure at all n locations
  Clone ID: AI055105.1
gtattcactgtgtttattgattgtactatcaacagtattaatctgagttatgcttgcgtttgtaactattggtattactcttggaagaaaaagaaatctattattattgcatagggtgtaacttgatttttctttttacatcatcacaatgtcctgttcctaagaagattggcatcatcctaatcggtaaactttccttttcagtttaacacggaaggggtatcttctaaggcttcctcttcagaatgttgggtggtaagaaaaagtactgtgcttgtttcgcaccatctattatttgattagntgagcccaaggtacctgcattattacgtcccttgataatccttttcctgatgcctcaaaaaaatacctgagtacgnggggtccttttttggttatgaaccgaagtcttatgggttaatgcattaaggcgtgaatttatggcattaccgatcatgaaactgaaaagtatgaaattatgctggtgtattttgcacataatgcccttttttctaaggataagttgtaaattcatttgtggataaatagggattttatgatcattcttgaatattattgaggtggaccaattggcttgaacatcctgtaataccggctggggggtttttttcaaaaaactgtgtattatactttaaccggaggtttttttgttttatagttttatttgaaccactggggaaattttttttgggaggttaaacac

SEQ ID NO: 58114 - DNA, 714 bp, Gossypium hirsutum
  unsure (1)..(714): unsure at all n locations
  Clone ID: AI055102.1
gtttggtaaaattggaatgatggataaaacatttgaactaatagcttatgtgtttgtttctgttttgcaagctcatcacttggtggatgaattgttgaaatctgggacaaattaggatcattttgttgcatttgtataatttgatataaatagttttgaacaatttgctagtcaagaatcttcaaaaagatgccggggcatatgacagggaccaagggatggagaagggttgtctcatctgatattatgtgattttgggattaagtctaaatggttctgtattcattgcttattaatagatgacgggtagacttatatatcttcagaactggaatggatgganggacgtctcatctaatattatgtaatttagggatcgagtctaactgattctgtattcattgcttattattaaataacgagaagatttgtatatcttcagaatgggaattattctgtcagaaataggatgaaactttagagtagattgtgaaagtaacaattgaactgatattctactatcctgacaccatcatggtcggaaagcagactcacatgtgagatctctttgatatgactcttaaactgctgctaataataatagctgtttgaatgtcctattaatatctttcatggantatatgttaattatttggccaaccaatcattgtgatggttagagacttaaggttcatccaaaaaaaacttctcttc

SEQ ID NO: 58115 - DNA, 736 bp, Gossypium hirsutum
  unsure (1)..(736): unsure at all n locations
  Clone ID: AI055101.1
aaagagctgatagatttgctggcaaagcacaagaatgatctcaatggtttcaagttggatgtctacgggaacggtgaggatgcacatgaagttcagagtaccgctaagaggttggatttgaatcttaattttcaaaagggaagggaccatgcagatgattctcttcaggggtacaaagtcttcataaaccctagtgtcagtgacgtgctctgcacagctactgcggaggcacttgcaatgggaaaattcgtagtatgtgcagaccatccatcgaacgagttcttcagctcatttcccaactgtctaacttacaagacacctgaagactttgttgctaaagtgaaagaagcactagcaaatgagcctcaaccgctgacaccggaacaaagatacaacctatcatgggaggctgcaaccaaaagatttatagaatattcagagctcgacagaatcttgaaaacgaatatagcgctacaacatatatgaaatcaaaccgaaaagcaatttgcagatcggnnttcatgccaccctctcagagatgtcgatggatgattagcatttctcactattgcttacaggaatgaatccttcgatttgcactgagccatacaggactcggattacgagaccacttgtagacttatctttactccaagtcaagtcaatttggtgtaatgagtgaactttgcatggctctatcagcggtgtataggttttgctcgtaaaagcttcgccn

SEQ ID NO: 58116 - DNA, 713 bp, Gossypium hirsutum
  unsure (1)..(713): unsure at all n locations
  Clone ID: AI055098.1
aaaagattatagactatgaaactgactgaggtgactgctagtgataagttggagggatttcgtgcaacaaaagaggtaacagtacttttgataaagttatgttgtgataataaggaaaattattcaaactgtcatttttggtataacaataaaaataaaatgtgagagtggcattcttgaattactagcgataagctgtgttgttttagtgtccatcatctacccgcaataactgtgttttgtaaacttgagcatatagtgtntgaagttaagaattttctaatagtcagaacttatgagcatttcaaaagaaaaagaaaaattgaactcataagctgttaagtgtgaaatgagcatcttcgctccagttggtgctaacattgctgtgcatgcattattaagtagtttcatgttacaaaatgtttgtttgggcttagtacttaggtcttttggtaaaatggatgcttattaggatttggtcatgccacataaataattcattactaattggcgcctttagaggcaaanttcctacttttctaaggtggtcaaatgcgacgtattattatgacgaagctgaacatgtctgactgtccaatggttatgattgataaggacgcagtttatacagctaaattgctttctgaccgatttaggaagccactacattttagacgtgtggtgattagactaaattggggagatgagtatgg

SEQ ID NO: 58117 - DNA, 720 bp, Gossypium hirsutum
  unsure (1)..(720): unsure at all n locations
  Clone ID: AI055097.1
gtcgagttcatactgattactcatttggttttcctgttgaccttggtgcttcatggttgcatggagtttcgaaagaaaatcccttggcaccattgatcagtagacttggactaccactttatcggactagtggtgataactctgtgctgtatgaccatgacttggagagttatgcactttttgatatggatggtcatcaagttccacaggaattggtcactaaggttggaaaacatnttggagtgcattttggaagagacgaataaagtgagacaagagcacagtgaagacatgtccataagtagtgctttctcaattgttttcgaaagaagaccagcatttaggttgcaagggcttgcacattaaagtctttcaatggtatgtatgcagatggaaggttggtttgcttcgaatgctgataccaatctccttaaaagctgggaccaggaagagctatanctggtgggcacggactcatggtcaggggctatctttctggcatagacactctggctaaaggtattgacatgcgctagagccacgggttacaaacattgggagccgttcactgaatgaaggtcctgtggagacgtactcatttgcgcatatcgtgtatcgtgctgtccttagtgctaaagcacaaaatcatcgaccaagttcttattgaggacacttgtgtacttggggatggataattttgctttgcaagtggcctaatgg

SEQ ID NO: 58118 - DNA, 708 bp, Gossypium hirsutum
  unsure (1)..(708): unsure at all n locations
  Clone ID: AI055093.1
gaatcactgaagctttgcggttacagatggaagtccagaagcggttgcatgaacagcttgaggtatgaatttgaacagaaaaacttcttttctcccttttaaaggaaactattctttcgaatgcttttcagttggatagtatgcattatacctatcagttatgggcattttagacaagggtgttgctattactgagttatcatattatatgtaaatcacttattattcataggatgggacctgctatctataatttattttgtaagatactggcttttgctattatagtcagttaaagagatgttagctaaatggtgactgatttgagaatgatccatatgccttgggaaagtgtgcaccaattacatgtcaaagttgtcaatgaacccttccctatcaatgtttcaaattcttttatggggtctttagggggaatgtttatggattatntttgatttctattgttcttctgcagattcaagaaattgcaggtgcgaataaagacaaagaaggtcctncaaatgatgttgagaacataatcaggttgataagcgaaagatcatttctacccgagaatcacagctcttagatctccaagagctcatcaaaggaactgaatctccccgagacataaatctgaccggccgtataatgcatcttcgtgggaatccggaaaggggggagtggactggaantggacagaccaag

SEQ ID NO: 58119 - DNA, 722 bp, Gossypium hirsutum
  unsure (1)..(722): unsure at all n locations
  Clone ID: AI055091.1
gttggatgcaagagggaaacttggctctgcaatgtttgtgcttgcagatttcgggagatacccttctgaaatagcaaacattgagaaggatataattgctccttataggcatgtcgtgaggacgattccgagtgctgattcagctccatttgataaacgcccaatattagtctttttccaaggagctatatacaggaaagatgtaagtttccttccctttatgaattgaattatctacatgtttgttgcttttagtcgtgttgacttatgatggaaactgctactatgtacatggacacatgaaagtagtcttgaagcacatttaacttcttaagtgaattgttgaccaatgtaaaattcaaagccaataagttaatttaggtatgtgtattatgcttttatcactttaaagtaacgtgaagttctcagtatgctaattttcttttaagttctatgaattgttcggagatagatgattattnttcctttntttttctcagtaaccttcanaaccatcttggattgtagccatagcccattntaaagtgactatgctgtaagctagatgactaaatgaggtcctaggtaagatntnctcgtntcagcactttttgtggaacagaganataattatgaaaggcaanaagatgaatggtttgggaagaatccatagtgtcacctacgtcatatcttgaaaatagtatgaggaagtctaaccataa

SEQ ID NO: 58120 - DNA, 755 bp, Gossypium hirsutum
  Clone ID: AI055084.1
ggtcttagttgattccttttaaaaagtataatgattaaaattatccatttaatcgtttagggactgacttgatccagtctctataataaaagtacctgccaaattctccatttattatcattctgatttatgctttactcgtattaacattaattgttgcggaagctatggcttctataaaaatggggtattgcattgcaatatatctttatgtgttattggatttcttcctcatccgggtacgttctatcaccattaattgttgtggaaggcattgcagtattgttttcttttgtcatgtatttgcttcactttttctctgttctcactgctggagagtgtcaaacttgttatatgccttaaaaccaaccaaagcatacgatataggttccattttcaaataaaagatctttctaatgatcttacaattgtgaagtcattactggatttgcattcaaatatgtttctgtaatgcgttgttagtgacagttgatgatgataatgtcctcgtacttgcataagaaacacattaagttatagccctaaccatgatggatgtggctaattttcgatccaaagttcaagcgattgttaacacaatgacaaatcacctgggatttattgaccgtctatgaataaatccatgatgcttttctttaactctatgattgatcggaaaaacctaaacgtgtttatgaaactggattattctagataacaaatatgttattcctagtatgtaatgtgtatacaag

SEQ ID NO: 58121 - DNA, 781 bp, Gossypium hirsutum
  unsure (1)..(781): unsure at all n locations
  Clone ID: AI055078.1
ccattgaatcaagagctcgtgaagaaagtaatggacatgatccaatctagttatcatagggactttgttgtggatgtcgatggccattggatgttacagggatggaaagggagaattatttatgcactttcatgttggaaacctgtcaagaactaactaggatctaacagatactcatttcctcgaaatacaagtgttctaataaaaagttcaaatatcgtaactattacgaccccactctacatgttacaaaagagtggtgaaacacaccaaatatagatttataacataagagctaaagctaagctataactggttgtctcgacaggtacctccctggaatgcagaatgttgtcaaccttctcatctgctgcttcccaaagctctggcaatgcttgcctgatattgtgaatgctctctaatgcataagccgcactgtcanngtttgtgagaagttcccacctatatcggtaccattggaaaccagtgagtaaaacctataatgctnggacttgngtgcgagtgtangattaggacatagttagatattcagtggcttacccatacggtatgaaaggccatacttntaccagtccgaatatttcggatgctgtcatcaaagaacaactgcatacaagacattgtaacaatttnatgagttttcanagcaatcacctcaaaggtatagtaaaaaaaaaaaaatatcttaggtggctgtgccattancctcttatggcattcaattaatggcggttttcacttgatggaaaactggtccccg

SEQ ID NO: 58122 - DNA, 758 bp, Gossypium hirsutum
  unsure (1)..(758): unsure at all n locations
  Clone ID: AI055076.1
gtattatatattgatatagatgtacatcatggtcatggtattaaagaagccttttatttcactgacagatagtttgcttttgttattggattgtgaatttagcataggagctggattaaacatcatttcaaaagtttgaagctcagaaaaggagccaaaaatgctgctttttgggtgatttattgttagaagaattatccacttgggggttatgttcgtataaccatttgtaaagtttaaaattagatcagctttgcttattttatgataccagtaagaggcttggcatcttgatgtatctctgaaatgctatttcaattgttgaacatttaataattaaggttgataagtgcagtctctaatcaacttgttgaaattctattatggcagggttggttatctgaaggtatgcatgttaaaaactttatttatgagtctcactttcgtctttaatcatttagtcttgcttcgaatgtttctttagaattgtattttggcagggtattanatgangccacagctgccagtctcaatntataatcattcanacatgctatnngtattctatattgaggatgatagcaccttctttcaggattgtntactaggtgagacacccacacatttgctgatcaaagaaaattggaacctgtgactggtctaaggttaatattatttncattaatagaaaaaatggggtaagtctttcatggttgaattggtacctgtgatggcctcaaatcttattttttttaaag

SEQ ID NO: 58123 - DNA, 723 bp, Gossypium hirsutum
  unsure (1)..(723): unsure at all n locations
  Clone ID: AI055075.1
agaaagcaaaataaaaaattgtcaaaagtaattaagtctaagctgtactctttttacaacaaaaatctacacaaaaaattgttcaattgggatagagaaaaatacatgaaaagttgtcatagtaagtagttctcagtggtatatttattgaactcttatcggtagcatttttcttttaagctgctaaactttcagctgcatttctaaacactgggatatatatataggctaaaccaagttttgtgtaatggttatggtggattcaaaccatnaatgtatttctgggggtcttccttgggcattggaataaaaagatcccagattggccttgcatatttgctgataatttatactctttgtcggcttcaaatcatttgctaattgtaatttccagtctcttctctcacaaggtacactagattcaaatcattgaacatgacttattgggaagagcttatgaaatctatagnctctttaaaatctgttgagacctctagaaagaaaaagtgggattcaaatgctagcctttgaaaaggtaanaatgaattggagaaaatctatatacttgcgcagaactcaggctaactccaaagaaaattagtgatcaatcncttagtagagattttcccttagagtatatcgccatgatgcctnaaagattcttatgatanctactgtaataatgtgcttgtaagtcaacttattttattgaaaaggcgcaaa

SEQ ID NO: 58124 - DNA, 793 bp, Gossypium hirsutum
  unsure (1)..(793): unsure at all n locations
  Clone ID: AI055071.1
atttgaaaggaaccgattcaagcaaatcccagcacatcaacgtttctctctatttctaccacttttctctctgtttctagcagtctttcggtgttattgcttttctgcattacagatcttcgggtcaaaaaaaattcagtttagtttctgtttcagatgttcagaaaaaggtgaaataatcgttccaaatcaattaattcacgaaaaaaaacaattgaatacttgtatagttgaatttaagatttttgcagttaattgggagtaaaatgaagaattcagtgtcggatcatagtttttacatcgagagcgatgaagaagatgaaganaagggtttttatcccagatgaaaatggagaanaaagttgatggggaaatgaatctgatgactcagaattcttccgccgaaaatcaacagcaaaataaacccggttcctacaacacttcatggcctcaaagttacaggcaatccattgatttattagcagtgtaccatcgccgagcatgggttcttaggcactccaacactttcaagactagcagttcatatctntcatcgtccttaaccagacgacacacttccagaacgttatcttnctgcgacgaagccattatntgncaacccgtcatgatcaaatagaacctcataggcgagctnntacgccttgcttactccatcccgtcagagacatccgaagatagtgataacatcatcaagctncatgaaatcactcctgactgctctacgngcactgtcnaatggatanggactttggnnnatgactaccattcgcan

SEQ ID NO: 58125 - DNA, 726 bp, Gossypium hirsutum
  unsure (1)..(726): unsure at all n locations
  Clone ID: AI055070.1
cactctttaacttccttttttgcggttgtatatatagatttctgtttttttcctaggttttagaatttgtttgttttttggggagtttagggccgtgctatgaataatagagggaggtatccatcggtgctcggccgtggccgcggagcgaacgcgaaccctagctttcaatcgaggccggagcaaccgcagtatgcgcaaagaaatttggtgcagaatcatcaccattttcaacaacagcaacatcatcatcatcatctgcaacagcaacaacatcaacagcagtggcttagacgaaaccaattgcccggcggaaatgactccactgtcgccgatgagggtcgagaagaccgtacaatctgaagccgtcgactcaagttcacaagaatggaaggcaaggataaagatgccaccatcagatacacgctacanaacgagggatgtgacagctaccnagggaatgaatttgagactactntctgaacgtgaacttctatgggatatatgagaaggctttgaaagacatctnctatcaggaagaagtatcccattgcttaactgaatgaatcttgtanagcaaaatgaactggaaattgccatttgcttctgcttgaaaatgccaattacatgtattcagtgnttctgtcacccagactgtttaaaatncagtgagactgggagcttccaataattgcccacgagcactcagtgattttcatgtacccc

SEQ ID NO: 58126 - DNA, 744 bp, Gossypium hirsutum
  unsure (1)..(744): unsure at all n locations
  Clone ID: AI055066.1
aaaagttctctgtgtgggcttatgaagaatttgagaagggtaatatagagggaattgttgataaaaagcttcgtagtctagatgtggacatggagcaaataactagggcaattcaggttagtttctggtgcatccaggaacagccttctcatcggccaatgatgggaaaagtggttcagatgctggaaggaatcacagatattgagagaccgccagcaccaaaatctgccaccgaaggttctataagcggaaccagcataaacgtgagcagtaatatcagcgctttctcaacttctgctgtttccgccccagctccctcatcatcatcttcattgcatacagttgggatttctcccttagcttcaggaatgatttcttcagaaaagcagtcatcatccctgatacagcctgacatgaaatgctaaaggtgcatattaaatgactntggcanggcgacctctgatccagatttaacgttaaacctgttgtatataaaatacgagaggtgatgttcataccatatgttgtaaaacatgtttannatgtacttagcaatattctagaagactgagcattgctgcagagtgttgctctcaatatggcctagtcattanaactgttctatatgttagtgtgagggcacatatttacttatggtgtaccatattgtgtgaatgcaagcaagttgtgctaaaaaaaaaaaataaaaggtgccgtccattacttttgggttacatatgcgtn

SEQ ID NO: 58127 - DNA, 714 bp, Gossypium hirsutum
  unsure (1)..(714): unsure at all n locations
  Clone ID: AI055064.1
ggaatatgtttgataaatgtgttcatttttaattatggaattatgtacctcatgtgtgcaatttgcataaagatgatatttcaaatattttggtgagtaaagcttaaatatgaaatagtttgaaatcgagacaagttgttatgaaaatatgtttaaattatctgtaagtgttttgtacttctcggtaatgcctcatactctattccggcgacggatacgtaggggngtgttacagaagatatcaacttctggcctggtaataatgacattgggctgatatggcttatagtataccatttaaggaataagaaagatcaatgtatgtccctggtggaataaaatttntaagttaccttattttaagaaaaaatctngtggaaggttacctttgctttacatgtgtaagagttntggggaggttcatgtgtaattcatagaagtgtttcgtgagaaatgttcagattttttgagcatcacgttctattagcaattgtctttgtcaatcttaatgatttctgattgcgagagaagaccannacttttgattaaagctgcctagaaatcaaagctttgttcgaaatgacctgagcaaaactgccccaatgttagtgcttctgcaaatccggaattgtcatctactttaaaggagtaagattgggtgaaaatccccgtacaagattgttctgggcaggtgccgncctataaaaataaaag

SEQ ID NO: 58128 - DNA, 701 bp, Gossypium hirsutum
  unsure (1)..(701): unsure at all n locations
  Clone ID: AI055057.1
ggaaaaaaaaaatagcagcaggcagagagaaagagcgggtaacgacgtaacgctttaaacgatgtcgtatctgctaccacacttgcgttcagggtgggctgtagatcaggcgagcgtctcgtcgtcatccgattcggtcacgattgggatgaaacatgtgtgcagatggatgaagtgcttgcttctgttgctgaaaccataaagaaacttgccgtgatatatctggtgtaagtgcccgacttcaacacaatgtatgagttttatgatccatcactgtcatgtttttcttcagaaacaagcacattatgattgatcttggcactggaaacaacaacaaaatcaattgggctctcaaggacaacaangagttcatcgacattgntgagactgtgtaccgtggggctaaaagggtccntgtctggtaattgctcctaaagatactccaccaataccgtactgagtatcattgtatgaatgtaccattgaagatatgagatttcagtagtgattgaagttcactgcctanatatacctntnccttaatggaatggtctatagaccttaacttnatggaatgtaacatgggatgtggggctgagtcatctaaaacctttgcctttttgcgtaaaccatgtaactatgagccttaaaaaggtggtagcctcaagcaatcnctgcgttcaagagtacaatgttaactn

SEQ ID NO: 58129 - DNA, 705 bp, Gossypium hirsutum
  unsure (1)..(705): unsure at all n locations
  Clone ID: AI055039.1
atggaatcctattgtattattttgatagtatctatccttaatcttccgttaatccccacaatgttgagtttggttcgttattatcttcacgtgatcaattttgaaatgagatgcatacccaaataagatagcttttcaagtagcacaaaatttttaaaagataatacgcttcttgatttcaaggttttccataaatatatgaatttcttatttcatggttttccttatgagttgcatggctttaataaaaattgacttaattcttctataagcagtaaccagatctgttggatgttgcattgctgaaccaggtagcttgatcgctcttttctgtgattttccatcttcgcgtgaaagttggatattctgacctttctttcnagaaaggttagtgatattggnttttatgcatcaattttctactctctctntattatnnnnttgtttcatcatagatccgaatgtataaaactcttcttcaagtcttgcttcctagaattacatgattntaccacatgtatcagctntgntaccaggattagtggtcagtggtgaatttgagacatctgcacctattactcaaattttaaaatttcttattttggggaccacttgatattctgtccaaattgtggaccaaatgaatgtcagcaccantttatccaggggtggcttttatgacctaactccctgacaatggttggt

SEQ ID NO: 58130 - DNA, 689 bp, Gossypium hirsutum
  unsure (1)..(689): unsure at all n locations
  Clone ID: AI055031.1
tggagattacactgaagaagatattattgactttgcatcctggttgggtggatcatatgttgctgatgctgcaaaaccttttcatggaataatgactattcctttggcagatgttgacaatgtggatcttcgtatgtcagagaaagcacacaacgaatttgtttcaaaactgcttgctctgtactgcattataaggaaagcaatggagaagcatggacatttgtcaaagactttgcgtagacctgcagagataataatgggttcttttgatggtattaaggtacataactacaaacttgttttgctaactagtacattntgttttataatngatgtttcttggaaatgtatntgaagactatcaattntaagggaaggtttcttatttccttcagtccactttccctgataagaaccacttgttaattacattattgaggaagaaagagtttatttgcttggcggtacttttagntaaaactgatatgagaatgtcattactctgtgctgacaaatgcatttcttacntgcatgctggctggcgtnngtaatgggcctgattcttaatcaatgtgatgaggacccttgtgtgatctccagatgattttgatgctttatatggcccaaggcaaaatagtatctttcagatcttttaaactttaaattgccgcttttgtagccccccttcc

SEQ ID NO: 58131 - DNA, 682 bp, Gossypium hirsutum
  unsure (1)..(682): unsure at all n locations
  Clone ID: AI055026.1
aaaccaaatctcttcaccaaaaacaatggctccatcactttccgaaccattcagcgattcctcagttctcattgatttcgttattaaccaagggaatggagtgaagggtttatccgaaatgggtctgaaagctcttccaaaacaatacatccagcctttggaagaaaggatgtgcatgaccaacgttcaagctcaagaatcaatccccgtcatcgacatgtcaaatccggatgaccccgaagtgaagaaagtcgatctgcgaagcggcttcgaatgggggttctttcagattgttaaccangatgtaccgattgaagttctggaaaatgttaaagatgctacttacaaattctntgggttagcactgtagttaagaataagtattccaaggacattccttgtcaacaagtttangttcggacgagttttacacctcaagctgaaaggcacttgatggaaagattacttagcttgtttatgtctctgaagagaagctttgcactatggccttctttgcanggacaagtgctgatattttaggaatcgagtcntattnacagttttaaaggctatgaggtctaatgtgatgaatgtgaaccaagaatcttntatggtcatagactacttacttatnccatgctacccgaattactttgatgtgaaccttgttcaccttacatcc

SEQ ID NO: 58132 - DNA, 703 bp, Gossypium hirsutum
  unsure (1)..(703): unsure at all n locations
  Clone ID: AI055025.1
gtcattttctgcaactggcttcaagcttccatttttacatatgggtttttctctcttttgatacctagtggttgataagtagacgggaatttagattgaaggcttctataatatgtcttttagaagcaaaggagacacgttttgtatcaaaggaatggacttttcttcttggcttgggctgcttctgtgctggaatgctcttcaccgataggatggggactgttcctgaacctaaaggtatcaagaggacaactgcagtggaagctgaaaaacttaaactaatttcagagggttgtaatccaaaagctaatgaagaaaagcatgtatccaaacacatcattggagaggtttttaagactcaccatgctatacagtcagtattttttttttttttttgaatgcaagtcagtattgggttatccataatagggttgatttgattttagagtggctgaccaatgaacttattgtgttgtttccgatggagaacactggataagactattttgaacttagagatggaataactgctgcaaggctgacaagaattttactgatggtcaccttatcacagagcgattgaaccaattattagagagaagtttctggggtattggaatatacggtttttcactgaaagaagaacttctgtgctatgtatgccaggttgggatgactttttatacccaatactattatactn

SEQ ID NO: 58133 - DNA, 703 bp, Gossypium hirsutum
  unsure (1)..(703): unsure at all n locations
  Clone ID: AI055024.1
gtcaagctgaagccgcagagctgaaaaataagaaggtctcatctcaccggcaccagttgctgcgtttcacatccatttctctctctttatctgctccggtattgctttttcttttcttttctagctattattttttgtgtaatatataatccctagtttcttttatttgaattccatgccagattaatgctttcttcgctttgatatctctttcctttgcctattcactaagctacttttggtagtggccggggaggctgtgggatctggnttctgtcttctttatatggggttttttttttttggtgcttatggttcttaaagttttctctctctttttcttaacgatgattcttgcttagagattgttctttcagcttggagatcgaatctaattataaaaaaacccttattcacaatgggtcttcgacctgctcacttaattgcctncaaatgcttattggcaccttcaacttgtgtttctgctctctttgatggacactatgaatattagtttcgaatgggtacttggactggtatggggtccacttaattcctaatatgttccaatggcttcttttttaaaaaaattttaccttcttttcaactactgcagaattgcaattagggctttcattcaatatttggccaaatcctcatggcgctagttaataaacaattcctattgttaacaaagtgccgt

SEQ ID NO: 58134 - DNA, 698 bp, Gossypium hirsutum
  unsure (1)..(698): unsure at all n locations
  Clone ID: AI055019.1
gagagaactagtctcgacttttttttttttttttttgccaatttgtcttttcaccatgacactgtgtcaggaatatgacccccaaacatcacagtgcacaagatcaaaatggtgagcagccaatttattaatacataaaaatacatagactttgaattctcaaatatggaaacatttcctgaaaacaaagattacccagagatgatgattcagtggaatatttgagttcgaaacttgaattcaaattacactttatttgcttcattgctatattaaaagaccaccaagattttagaaaaccatacatagctggtcttgaacagacactggaactcacttaagatgggggttttcaatggccggttcacaggtcattgacatggtgaataatcctgatgcaaagctttcctttgttgcaggagaacttccttcttacaatgatggatttcacctgaagttgcagtaggttattctctatactactttccacctttgtcctgagctatcttggagaacccatagtcaagaacctggcctgaatagtgaaaaatggcgaaccagnnngagggattatcctaagacttcagagatttcaaggtttctttgnactaggtgatcaagattcaatcaccccatttttgtatttttaaaaattggccctaggatatattccccttagttaaaaaccggcccccttt

SEQ ID NO: 58135 - DNA, 643 bp, Gossypium hirsutum
  unsure (1)..(643): unsure at all n locations
  Clone ID: AI055018.1
gtctcgagtttttttttttttttttcaaaaggaactcaaataggcaaagtggaagacaaagagcagtgaacaatgaaacaaagaagaataagacaggccatatagtttttgtctttacaaatctgctcctttatcaatgcgtgcttactgcctcaagtgttttgctgtattttactgactttccttaaatattttcccagggtgaataaaactggcttggtcagtaaaatcggtaagggctttttaagtggggtaccatttttaattaaaagggtaattggcactcatattatattttaaattgtgtcctctaaaatctgagatgtttgatgaacaagtttcaactttctaggaattcatgatttaactggactgttagggggtgctataagggccagggttggcaaaatttttggtaatattggccntgagggttttcaaggtaactgcattgaagatcaactcatcatgtgatgatcttgatcctgaagattagaacattantcaaataagttaagattgattatgaagagatgagtatgnagacctgaagattgcagcnttaggtacctaatttatagtagctgtgataaaaattcttggatgacctttttagataaattaatttaccacccgttttaac

SEQ ID NO: 58136 - DNA, 744 bp, Gossypium hirsutum
  unsure (1)..(744): unsure at all n locations
  Clone ID: AI055016.1
agtagncttcgaagttttttttttttttttttgaaattaatattaattttttttatgtaaaaccccccaaattgttgaaactgacaatattacagaatcaaaccattagcaatggctcgattagtatcgagatgggttgtttcatacacaggcaattcttcactgtacctttcattactgccaatggccgacagattatccaattcaaacagatccgagcttgcatcactagctatatccgtcgtcatcggtcgtcggctatggcggcggcgcngnaaagtttcatcatcgcttaacacttcattgccattgtagataatacctctcatatataactcttcctttatcttcttcttctgggaannctgttgtaaaagctcctttgcaagcttcagcaacccttacgattttcttccatgatnngcggtactctangctctttgttaacttgggtttctagnngaaggttcgaagctcattttctggaaggaattttagtttccccacatggcctggaatncttttcaagacanaacctgaccgatctctttgtcccgacatttcctctcgaaaatggagttttgcgtcgacaaacagattttgaaacgatgaacttgatacnatgtgcgttgcctgtcgctttgacaagaaatttgctctcgcttccgagtgacacgattggaattcagccaccactggggatatgtgtgactttaggccgtatctaggcctgggatcttaaag

SEQ ID NO: 58137 - DNA, 733 bp, Gossypium hirsutum
  unsure (1)..(733): unsure at all n locations
  Clone ID: AI055011.1
agctganttgggaggagaaaacctgtgaaaatgacccaataagttgatggaagatatattgaaaaaaaagccatgtccagcattcgagtgcaaaactgaaacactggaacatattgatacagatggcttggtctattttgaaggtttactggaggaacaatcttttttatccaatttgagcattttagaaaataattacaataatgcaactcgtaatagaggtgatctggacgagaagctgttcataaatgaagaagatagtttacttgtttttgggagcttgtctggaagggatgtgaatatttctggcattaagaagaagtttgattcaatagcttcaccatcaaagacaatcacaagcccactgtctcctcattgtcatcgtgcatctcacgtaaatggtgtccttgggccacttaacggaaaggtggcctctactcctgtcagcactgcaatgacaactgcaaagtggcttcgtacttatatatgtccgcttccttcaagacctttaagcaagttacagctatttttaacatactgtgataaaatgtacccatgatgtgatcctagtgttatttaatatggatgcaatattcctgtancatgatgagtctaactggaaccttcaagtcaaactatggagatctggaggacaccaaatggaaccctaatgttcataggtcggaacattgtcacaaggctatatactgcctattgacctggactagaaatt

SEQ ID NO: 58138 - DNA, 719 bp, Gossypium hirsutum
  unsure (1)..(719): unsure at all n locations
  Clone ID: AI055010.1
atgtcatttcatgtgttcgacctatgatgaaaatccaaaataaaggacttaacccaaaaatctacccctgcagcatagaagctaccttttatagggcactttcactttttaattttctctcttccccatcaccgcttgacagaattagccaaaagacatggttccttgatgcacctaaacttggtgaattatcacatattgttctttcttctccagaagctgctagagaagtgaagaaaacacatgacatcaattttgctaacaggccctttctctaaatgctgaaatcataatgtaccatttttcagatattgcttttgcatcatatggaggctatggaaggcaacttcaaaaggtttcacactggaacctgttaagtccaaattgtgtccaatcattccgttcaaaggaaagcaggtttcaggtttatttagatccatctatnctaatactgacttgaaattcacaatggagaattgttttgcagcttatcatatagcatcactataggacgggtttttccggagatgcaagcaacacgaagcattctttcaattctgaggaacttgggaagctgcactggtttagaatgctgatccgttccttctcaaatgctcattgacattggaatgagctaatttgaagttaccttgtattactatgttgaacttcttgatactaggattaagccatcaaaattggaatatttttatttgctt

SEQ ID NO: 58139 - DNA, 760 bp, Gossypium hirsutum
  unsure (1)..(760): unsure at all n locations
  Clone ID: AI055009.1
tatcaatatctgcccatgccatgtctttgacatggacttacatgaattattcctgtctccaatgccatatataatatggacttacatggctcaatcctgtctccaaagccatatttctaatatggacttacatggctcatttctgttctgtcctgtcaactctaatatcctaacattcctagggttcaaccggggctttctaacacttttcctctgtcactccaccttaaattcgactttacatattttcataacataagtatataaatgctggaaattgacaataataatgtaaaataaaagaatattgcatttatttactgtaacttaccttgatacaaaatgtgactaaactttacaatttagtcatttactttttcttttccccgatctactcccgattttcgttcttcttgatctataatagcatatntaacttatttaatattcaaatgtaataaaacagtccttgacccaaactattgcaaaaatatatatttacccctaaactttcacatatttgcactattgccccaaggctcgtaaatataacttcatcctatgttcttatgtttcatgacatgctgatcaatttttccttctatggcattatcaaaatcacactctaacatatactnatgactaaggcgattnnttccaatntaagccctttacatgacttacttataacgagtagctaagttgttaccatattaaaaccttttcatcatataaccaatccgaatttatcctggttttt

SEQ ID NO: 58140 - DNA, 750 bp, Gossypium hirsutum
  unsure (1)..(750): unsure at all n locations
  Clone ID: AI055006.1
gtttttttttttttttttttttttaattctaaaggaatatttactttataattctatttttgcaattaccaaatacaataaaaaatttacccgtttgaaaattctaatggtgatatgcttccaattccaaaacatgtcatatttttttcgagtggtaatcttgcacatttcttggctaccttaattgctgtagatcgcagctcctcattgtaatgcccaattatttcccgggcccagttgaataaaattcaatgtttaaagtccaaatatacaggcccaaatcagaaattacaagcccaaattagcctaaacattgggaaatcagaaaccctaggcagcaaactaagccgccgcaacatccttgcaacacgtcccttcgctttccccccgcgcgcgcctagcttctgcgtgcgtacgccttcagctggcctccgtacacctgtagcaaacgcaacaaacgctaaataaacaaccagctacgacatataatacagataacaaaatatcaaggaaagaaaagaaatatcagaagagattttgggattnntttattattntctcgagggggtgcccgtaccaattcgcctatagtgagtcgatacaattaattgccgtcgtttacacgtcgtgatggtaaaacctgtcgtaccctacttatcgccttgagacattcnccttctccaactgcgtatactgataagccgcaccattgtcttcaaaantgtcacctgatgcactgcaattgacctg

SEQ ID NO: 58141 - DNA, 662 bp, Gossypium hirsutum
  unsure (1)..(662): unsure at all n locations
  Clone ID: AI055003.1
ggccgctgcaagaaagagatcaagaaggcacctggctgagacagatgaatntattacaaccaacaatgaacccaattttttggacccagttgctatgtctactgcttaccagaagatgacaagtctttgtatgaacattaagaacgagatattcactgatatcgagattcacaagcaagatatacttcccagctttatagacctaccaaatctctcggcatctatatacagcacagaactttgcagcaatntacgtgcattccttcttggatggccaccatctgggccttcacacctgtggcgaacattgtcattgcacagcagatttcagcgagaactttccagctgatataagtcatggaaaggggngaatttgagagagaaanttgttcacttatcatcatgattggattcaagatagcggcatcttatanagnatgtanattagataagtaatgggcagaagtagacgcatatctacaactctttgtgagaaaggtgaccctgaggaacctagcgatttgagctaatttgcgtgccgaaatttattgcgtgaaagctattcgattgaaaaccatatgacttggtaacttttccccatggaccttaggaacttgccagaaatggctcagctgcaatttttcgacttgcccactcttaag

SEQ ID NO: 58142 - DNA, 709 bp, Gossypium hirsutum
  unsure (1)..(709): unsure at all n locations
  Clone ID: AI055002.1
gcagatctttagtttactaattcggttccaaaatctagatgtatggaaagcgttccatttcgcctacttctaaactgctacaatatatgtattttgccaataaaaaagtactgttcctttttattggtatgggaattttctgtgattatgtctatacatgtaattatgtgtatcatattcgtatttttttattaattggaggaatntancttccatatctatatatatatatatactactcataacttttcatctaaattccatcatttcttattgtatgccctacatctgggcctatatctcctggtggagaacttggtattgtcactatatacttccagcgagatctttccatcctggtatattttcctgttgaaaggtgtgtgtgtagccatggatgttgttcctctgttgcgttatggaatggagtcatgatatcgggcatgttttctactaggttttatagtaggagttgatatggatggagttatcgttagatttagccgacgttatgatgatatctgtctatctaggtacatctggcgtgtaagtatatatatgttggcggataatttttgattagattatattcgttttgattagtagaggtctctttatgtatgtattgtgtgtgtattacgaatattatcctatatgtctgctgtagagctaatgagatagaagtatttctcttctggcgagtgttggg

SEQ ID NO: 58143 - DNA, 696 bp, Gossypium hirsutum
  unsure (1)..(696): unsure at all n locations
  Clone ID: AI055001.1
gaacaaaccaactggcttttaaccaaattggtttaataaaatttttgcagaagtttatataggggaaagatgtagataattgatagtataagaagcgacgaaccaagatccacaatctcttttataatctgttttaatttgtttctatatatatatattacagagtttatataggggaaggatgtagatggtggagggtggnttgacgcgatgaatcacccccaagacctgcaattcatgatgcagttcagtattccagtatcttgatttgaactgggtttgttggctgctgatttgctttgttgaagcagatatcaaatctagttaatataaacacttttcaggagcctacttatacagtttcaaccaggactgggctgagatatactagtcccttactgactctgttcaactgatatatatatatatatatttaaggtcgtagtatgtggtattttaatctagtgaagttatttttttgattatctattatggatgtatgttatggcttagattcaatatctacttttttcttcgataattgtaattaggatttatgctagacttgtggaaatacgttcatgtttagtagcctgatagtgtagtatcaatttatcttaatgattagtgatttgttgttcataagatgtgttattaagtttatatttttgaatatctgtctatatatattggagt

SEQ ID NO: 58144 - DNA, 723 bp, Gossypium hirsutum
  unsure (1)..(723): unsure at all n locations
  Clone ID: AI055000.1
gctgctttggcnaccaagggggtcccaaattggtgctggttccatgatgatcacttcttttaaacaagaaaggatataatgcatataccatctccattccgtccctcgatgaccttcaaacaatttccggacttgctgccccggtgttcataatgatgatggcaaaggtttggatgcattttattttaaagctttatatactcgaatttgattttttatttatttatttttttaggtagctttctacgcactcattatctatttcgcgacaaatatgggcacacacacggcggccgctcatcaggtcatgatccaaacctattgtatgtgcaccgtaaggggtgaagccgttatcccaaaccgcacagtcatttatgccggaattgctttacagtatcaaccaaaatttaccgaatgctcgaacgctgctaaaatcacttgtcatcatcggagctagcctcggactgatattgggtataatttggaccatcagttccttggggtgtttcccaatatcttcacattcgatcggaatgtcatacactagatgccatagtgttgcaccgtatattggccgctagccggacaccggtactatagcctgtaggaacatgttgcgagacaaccttaatttgaagctatatataccgagcattgatggagccggctacggaaatttctaccttgtctcatatggaataaggtcttggtatatggactaat

SEQ ID NO: 58145 - DNA, 713 bp, Gossypium hirsutum
  unsure (1)..(713): unsure at all n locations
  Clone ID: AI054998.1
gaaggcttggtggagcaatctgtttgaaggttcagaaatggatcgaccttgttagttgcaanagaccattgaaagaaagaaaacttctaaagnctgaaagaacgtgctctgcaggaggcnnccaacgagctgccaagggctgctgcaaaagctgaaggaactaaggcatcaagtgctgcatctaaggttgtgacctcagcaaatacaaaaccaagtaaagccgcaaaatcttcttcccaaaagaatgatggttctcaagttgcagcttctgagaagagggaagggtgaccgtgcacctgagaaagataggaagaaagatgctcctcatcctcgaatgcaatatgatgataaaagccgagtagagaaagccaaaagcgtgctgttgtaaaacaaactgaagctaggaatagagtggaaactgttcaggcatntgcnctcagtacgaacatggaacacagcttcctgatttaagactaaagttttggaactcgatccatgcacctgctgtgtcaaggttggttggcagattggctgggatatcgtggtggcatgacgttgattggatgttcagcgtcaagagcttcaagatactactcactggaaactctatgaactactgcagatatagtcgtttttgatgatgagcccttatagttgcaagcatagtcaagaatatgcaatccatgctgtgacaacaaattccctttggttgn

SEQ ID NO: 58146 - DNA, 639 bp, Gossypium hirsutum
  unsure (1)..(639): unsure at all n locations
  Clone ID: AI054994.1
gactgcagatcaaaggcaccgagactcccgtaaaggtattggaacaatctacaaaactaaagaaagctcgagtttccgaagatgtttgtgatgaaattgattctaaagaaactattgaactttacgggaagtggcaggctcgagccacttcttctccctcgtgctgttaatggaattgtgccaaagaacgagcgtggacaagttgatgtatggtccgagaagtgccttccaccagggactgttcacataaggttgccaaggtatntgttgttgccaagaggctggaaattgattatgcaccggtatggttggtttcgagtttaaaatggtcgtgctgtttccgtctatgatggattgtggtctgaccagagttcaaggatgcaatattataggcctatgccgaagaagaaganagaagagcggcccgagagaagaaaccaccgaacacaactatctcagaatgtatcaacttcctcatcagtctaaccaacanaagttgacagctataccgagcagttcgtcatacaaccttcagaactncaagataaatatgagacaaactcagtcaagcacaggacatagcacctacgccatcgaagcaataccagattcagctacactcatggacactgagagccn

SEQ ID NO: 58147 - DNA, 655 bp, Gossypium hirsutum
  unsure (1)..(655): unsure at all n locations
  Clone ID: AI054984.1
atgcccctagcccttacctacagatcaaaggggtcaataaagaggctgtggcagctgcgggttcagcattgaaactggatgggtcatacacgacaaagagttatctccaaataattttggaaagattacctcttgtggaaagaagttacagtggaattcacactcatcaagctgcaaggttgcaggaacttgtggagtctatacaatcccangtgtttattgttaaacaaaattaagctatcatcacatgtcgatattctagatagcctctaacgtaagcttcttatctaatgtttatgctggataagaatcagagttaccatggcaatctactatncatggttatttagaatctgcctctcacaaagatttgatttctacgaaatagcatcggaggatatgatttgaaaatcagatacagacatgtaaattntatttgcatattctgataattgngagtcccatgttactaanaatcttattntttgncgtaggatntgctccaataagatgtgtaccaattctctttatattaaggtttagtggaccaacagggtgcantacaccatcagatcgtcacgagtttaggagttctnncatggatggcatatagagaaatgcaatgccgattcaagcttgacgatggctacattan

SEQ ID NO: 58148 - DNA, 664 bp, Gossypium hirsutum
  unsure (1)..(664): unsure at all n locations
  Clone ID: AI054980.1
ggaggaaaccttcttatgtatcaccgtctttagcaccaacaaatctccatttggtcccaccctaccagccatgttgctgacttgaagcttcacttgtcaaaagctgcatcaaactggatcgctgcttttgtcttggaacacatggatactttcttcaggctaggatcgacattgggggcattcctcattagcaataacttttctgcatctgagattaacaaaattagggatataatcccaagatattctccaaatagtcattgtaatttttggggaaagcctgtaatccccataatttcctgtaaaagttcttagattcggtctgtaacaagtaatcagtaagattaagagtagcctatggaatagtttatgagcgctacgaacagaanattcaccggataattctccctttcaagtgggatgtcatcgtgctcagtctcgactaacggcattgtaaaattttctgggctgattcaacttgaaagctctatcaattcccggatccaactatnctctcaatgnagttttgggctccctgcctactctcagcacagtccttgttgagtaaacctttgctgccaaatgctccgccagtgagtgaagtcgcttactgactacacagacaccctgtacaaactaccgaagcgcataaccgagaaataan

SEQ ID NO: 58149 - DNA, 648 bp, Gossypium hirsutum
  unsure (1)..(648): unsure at all n locations
  Clone ID: AI054972.1
cccatttgcattttttttctagggtttatagccctctttgagccgccgttagaccatcgtgaacccgccgtggattccaccgtagacggtggtccaaagcctcatggaatcgggtttgtgaccctcttgaagggcgattcgatggtgaggctccctagaccgaagaaaacaaaagagaaagaaccccctgcctcctccttgggtcgattccgacgacgggaaagaagactccagcgacgcaaacccggggttttgggtcggggaaggtcaacaaaggggggctttcgttttggtgcaacgggacaaaggggagtcgagcctcaggcgttggacgtgccgacgaggcacatgggacgtgcggcgttaagggagactaggatttcctgctagctgagattggtttaggcattgggcctatcgggccggtggaagtgggttaagaatctagttatttgggtttttgggcttggtttatatttgggtcctttaatgtgtaaatggactgctgaatcttntactatcttgatttattgtttgggctcgtgccggcataatggactattcaatgcccaaaaagacttttttaatggacctgtgatgactttatctttaaaaaaaaaaaaatactcagggggcccggtccaattt

SEQ ID NO: 58150 - DNA, 618 bp, Gossypium hirsutum
  unsure (1)..(618): unsure at all n locations
  Clone ID: AI054971.1
caaacaatcacctccatatccgagcatcctaaaccatgggtcaaggcataccgggcggtcttaatcggcaaggtcttccaggggacaagaaacccaatggctttgacaagaaggacaaaaaattttagccggcggcacccccagccagagtgggtcgcaagcaacgtaaacagaaaggatcagaagtcgtagctcggctccctaccgtaacatcgctgtctaagtgcaagcttcagctgttaaagctggagcagatcaaggactatttgctgatggaagaagaaatttgttgttaaccaggaacggctcaagcccaggaagagaaagccagnagattcgactaaagtcgatgattgagagngtcgtcatgaagtgtgggtaatttagaggagctcatcggtgagaaccatgcgaatgttcctattggttagcccgagtttatggggggnntgnccntngtggattagaccaatggactaaatgtctatttgatccaataagttttcagtgttgactctgcagagacgtgacccatgttcntgataagttgaaagctcatggatctatgcattaaagctgatctanatcagaatttagagtggactccttgctacccgn

SEQ ID NO: 58151 - DNA, 655 bp, Gossypium hirsutum
  unsure (1)..(655): unsure at all n locations
  Clone ID: AI054970.1
ggagcaccgcctgaactggcctcactgcttgaagaaattggccgagagagccatactataagtggttgcggtgagataggagctgatccagaacttgatgagttcatggaatcatattgtgaggttcttcatagatacaaagaggaactgtccaagccgttcgatgaagcagcgacgttcttgaccaacattgaatcacagttaagtggatctctgcaaaggagcactgaccatggattatcgcactgatgaaggtgctgagtcttcggcgaaagttaagtggcggggagctggtggaagcttgtgaaagtcaagaatggcacggggggcgtcgaagccaggacatcaaaggaatggctgatgcgcaatatagtggctactcaagcagtttaagaaaagaaattcttgagaaaaganagaatggcaagctaccannagatgcgaggctcacactgctgnattggtggaacaaccattataggtgccatatcctacggagggagagagctgaaattatacagatgacaggactagaccagagcanataacactgggtcatcaccagaggaagcgcactggaaaccgtcgagattgaaatcgctctatgggagagttcccggagttcagagaagaactcgtctttgatacgagctgn

SEQ ID NO: 58152 - DNA, 633 bp, Gossypium hirsutum
  unsure (1)..(633): unsure at all n locations
  Clone ID: AI054969.1
ctttatctctcttttatttctatcgaaatctgttaaataaaaatcccctcccccttctttcgtcgaagaaatccagagatctttcaatctcttaatttcacagatcgggggttcaatctcggggaattcaccatgtttaaccggcttttaggaaaacccaaacaggaaccaaatgctctaacctcattagataaattacacgagaccctttaaatgctagagaaaaaggaaaaagtacttctgaagaaggcttctgcagaggttgaaaaggccaaggaattcaccaaagcgaaaaacaagagagcggctatacaatgcttgaagagaaaaagactatatgagcagcaaattgaacagcttggaaacttccagcttcgattcatgatcagatgataatgtannaaggtgctaaagccacaatgagactgtagatgctgaagaagtggagcatctgcaatgaagcaatgcagaaagcacgaattgaggatgttgacaaacatggcggagatcatgaacaaccgaaactgaaccgatcaggagcctgtcactccatggagctgtgtgattgagagatgactgaagcgactgaaaaaatttggcgatgaaaacagtttcagccgacaatgtctgtcc

SEQ ID NO: 58153 - DNA, 657 bp, Gossypium hirsutum
  unsure (1)..(657): unsure at all n locations
  Clone ID: AI054967.1
ataaaactgtcaaatgttttggattatgccattgatgaaattgagttattctttaagttttatggtagaatattaagcttgattgttagataagactattttgtaaagtaatttttggtaattttaatatttaaggactaaatcgttaaagtgataaaattacagggacttgttatataataatagaaattatggactgtagagaggccttacatagttagctaaacttgatcttatttgaaattggttaaattgcatgttttgggtttagggactaaattgtatgaaagtaaaatattgggggcaatntttgtaaaaatgtcaaaaagaacttaattacataaaatgaattaatttttctattaggattactgaattggatgaaattattattttagatcctatacgagtggaaaattgaggaaaatagaaaattaccaaatagcgcctatacttttgtcattgctgcagtttagtctgntaggttcgtacgatttattttagtacattttnaatgtattataggaacttannttgatatattggatnatattatgtgtgtaattggaatgggaatatgaattaaatgacatgttcactgttagatactatgagtatactgtaatcatcctgtagtcatgcaatttatgctctaan

SEQ ID NO: 58154 - DNA, 671 bp, Gossypium hirsutum
  unsure (1)..(671): unsure at all n locations
  Clone ID: AI054966.1
gaagattcttacttctaaagaatcgaaaactgagaatacccaatattacatccaaagttggccagataagaaattatgtcagatcacaaacttccgtcatccatatccacagttggcatcattgcagaaagagatgattagatatgagaggaaggatggggttcgacttactgcaacattgtacttgccgccaggctatgatccattaaaagacggccctcttccatgtttggtttggtcttacccaggggaatttaaaagcaaagatgcagctgggcaggttccgtggttctcctaatgagtttgcaggcataggtccaacatcagctctgctttggcttgctagaagatttgctatcttatccgggccgacgatcccaataattggcgaaggggatgaagaagccntgatgggtatgtagagcaactggttgcaagtgcagagcagctgtganngaagtatccgacgtggagtagcgcattctaacnaatcgctgtaggaggacattcctatggagcatttatgactgcaaaccttctcgcacatgcntctcnactttctggtgtggcaatgctcggtctgtagcttacaatagaacccctacaaccttcggtttcacgatgaaggatggacactttgggagcaactaatactatggtgagagagtccn

SEQ ID NO: 58155 - DNA, 623 bp, Gossypium hirsutum
  unsure (1)..(623): unsure at all n locations
  Clone ID: AI054961.1
aaagcttccaagcacaaagcactatgaacatcgagagaggcactgtcctagtgaaccgcctacatgtcttgtcccactacctgaaggatataagcgctcaataaagtggcctaaaagcagggataaaatatggtactacaatgtcccccacaccaagctagcagaggttaaggggcatcagaattgggttaaagtaaccggtgaataccttacctttctggtggtggaactcagtttaagaatggggcacttcattatattgattttcttcaacaatctgttcctgatattgcatggggaaaaagaacncgtgtgaactntgatgtggtgtgnnnggtggctagctttggtggctatctctttgaagaagatgttcttgcaatggtcatttgctccaaaggacgagcatgaagcccaagtgcagttngcacttgacgngggaatcctgcatataaatgtgatgggcccaaaggctaccttctantctgcntgatgntggcactggcacgttgcaggttcctgcacgtgaagtggcaactttgtatagtaccgagtctcgactgtggactcattgtcggtctcattacaaacttctgaagtggcttgcaaagctgctacaaatg

SEQ ID NO: 58156 - DNA, 640 bp, Gossypium hirsutum
  Clone ID: AI054955.1
gtttcttcagttctgtccattttttctttgtttcacagagaccggtgttgggtggagaagaaagaaaatcttggtgtttattattgctgagaacgatgatgaacggtggtaatttagtggataacgattcagctgttgctggtggtgttgaggatatgtatggtgaggatattgccaccatgggtcagcctgttaccccttggaccgtctctgttgctagtggatataccttattgctagacccacgttacattaaaggtcttgcctttacctatagagatagagatgctcactacctactctgtcttcttccggcatattgttttttattctagatctttatttatattaggattatgcatatgcctttcctatatttaatttctttacatcgtttcattgcttttatggaatctattgatattgattgattatctattatactatttcttattgataatgtgtattatctgtcttcgttgtatttcttttatgtttattacgttttcttataatttgtttattttgatggttctttatttctttcttctttttttccatttgttatctttcaattttcattattttgtcttgttactttattttttatatttttttgctctttatatttttgaatttt

SEQ ID NO: 58157 - DNA, 648 bp, Gossypium hirsutum
  unsure (1)..(648): unsure at all n locations
  Clone ID: AI054954.1
gttctttactatattggcccttacttttccccccgccaaagagtcgcgcatagtcttttgctcctgcgagagtttgagagaataagaaagagctagggttttgaaatttgaatagaaactgaaaaattaagaagaaaaccaaatggaaaagagggaaaccatcaataattgtggcaatctaaaaggacgaatgaaccgaggttgcatagaagctaacactttggccatcatcgactcagctgaaattcacaaagattctcaagatgccaaagatgacccgttcgtacacttcncgtgnggggattttctggaagccgntgcgtatcgcttctattgttccagaaaacggaacacctncaactaagaaaatgggttgaagccggtgtttcaaatcctaagggcaggcaaatctctagaacttataatggctagttatgagcttctgaacgagattggaaggcgttttcctcganttatgtatctgaatatctgtaatggttacctagnntggtgtgatgaagagggtaatagtcatctgactatgttaacaggttttgnattgngggttttacgtttaatttatttccccttttattaatttgacttgggcttgtagcctgttgccttatggttctaaagtatgctagn

SEQ ID NO: 58158 - DNA, 651 bp, Gossypium hirsutum
  unsure (1)..(651): unsure at all n locations
  Clone ID: AI054951.1
agcaacccttgttttgcgggtaaccaagggccccttttccccctggttttagaggaaacttaacactggaagacgaatgatatnggtgaagggggatatgtgatgtgacaanctctcattacagtgtttccaaaaccttaagcatcttaacctccaattctttcccgagacatccacttcttttccgtattccttcatttgggctattcccatccctttataagcttggtatagacaatgcttccatttgtcaaatagtccaatcttgaatggactagcgaccaggaaaggcattcattaccattttatcatctaaaggatttaagtttggtctaacctttcagaggttgcgtttaaggacttttgaaccatttttgctgtctttcaaagtttttacaccctggaagttataggagtcctgggtttgtcattattgtgcttgcttaatttctaattgcttgtgtttctgtaagattgtctattagaattgtgctatgttttagtattctattgggtgatttttggaattcaggttgtcttgatttatatgtttgatttctgtgtaatttgtgtctcttttggtgtatttttggtcatttggttgattttcctcttatttgttaagaattcgggtttttatttgatatttac

SEQ ID NO: 58159 - DNA, 655 bp, Gossypium hirsutum
  Clone ID: AI054949.1
cttcaatggggtttgctcttttttttttgggagagtatgccaatatgatcttaatgagtggtctatgcacattgctcctcctccagtcttaccttgaatcgtctcacgcgccggtgaagaacggtctcgaggtgttcgacttgaaggaggacgactggattttggaattggcagctgataagtacttgatcgaagtgaaaaccctaatttggaaaaccctgcaactctgagatacaaaattctcgaatacgttggccatggtgctgctgttctaagaaaggaaatggacaacattccctgtttatatgttgatgcagttgacggtgattgtagatgtgatgttactacccctggtgcctttctgggtaatgatgaaaatgattgcattttaaaggatggaaatcccatattgaatgttatcccatagttaaattctacgctatctgtacaacaggcagacttatctaaagatatccatgatcctttatgtaccttttctgatttagattccagagattactgttctgataatccttccctgttatagactattatctggcgctttttaatgctcattaattttagttcgtgttttgcttcatatgcattaatcttggttgtaaatctcctctaatcttctaatatgtattaagta

SEQ ID NO: 58160 - DNA, 642 bp, Gossypium hirsutum
  Clone ID: AI054948.1
atttttcttcacttgtaatcttgttttcccgttgacactttgctcccaaaatcaagctttccctttatttatattgcttggggaaggagaaatggaggagtctaacaattatgaccaccaacatcccctgcttcttatcttgaaccaagagcagctgatcgactatcaaagtggtgtaactgattgctccaggtgtggggagaatggtgtctactccatgtttttgctgtgcggagcactgtggggttttaccttcacaaggtatgtgccgaggcacctttggagcttaatcatccttttcatcctcatcatcctcttcttcttatgcaaaatgcaccttattcaaatggagagtacgcttgagattttggtgataatgaggtataggagtttggtaatcagtgttttggcggatgggactttcatttaaaaggcgctggcatacattaattggttgtaaaaattggatagactggccctgttgcctttcaaatcctttgattccttgaaagggtatgagtactgaaaatgtatccaggctttgattttgggagcccttatatatttaaccactttttccggatgggatttattacttaaaatgtcttagtcttttaaatgaattattgggtcaaagccctt

SEQ ID NO: 58161 - DNA, 673 bp, Gossypium hirsutum
  unsure (1)..(673): unsure at all n locations
  Clone ID: AI054947.1
aaaaaaaattattaatcaatataaatttattattaaacaaatttatgattttaaaataaaaatatttaataattgagtttatataataaaaattaaagtttaacaaatttgtgatcatattttatatatatataatnnttgtgttttttaaacaaaatatatatattctttttatatatattagaccatataaatcatggttctcgattcaatcgcttcaaccaatggtcaacagtttcttccatggcttcctcttccacgtcaacaaataccaaccctttactccttcctttctctttcatttctctttccaactccttcaacattctcatcccctcggtccctctcttgaacgagatgtttcccgcgtaaaaacgtaagttcgagtccttataatcgatccaactgcgcncgggttctttgcaactccggnntgnnttcattttctccgcaagatcgttagcattctcccactcaccggccaaactnaaagccgtcgacaatgtaacgtcgncgccgtctctnngttgatcggattctattagccttttgctaacttcaacggcaatatctagccccaatgaggtctactagccgatagaagcgntccnccacacgaagcgccttcattaggttcaccttatccatttgctaccgatatgctcgtcaaacn

SEQ ID NO: 58162 - DNA, 667 bp, Gossypium hirsutum
  Clone ID: AI054942.1
attttgtggagtttttgatggtcatgggaaagaaacggtcacttagtgagcaatatggtgagaaataggttgccatcacttttgttaaaccaaaagaatgctctggaaaagattagaacagcagcagatgataagagttttcaacatcaagtcgcaaaaacagacgtcaaatcgataccaaacaaggattttcttaattggcaagaagcttgtatcggtgctttcaaggtgctggacaaggagataatgcttcaagagaatttggattgttccaccagtggaacaccgtagttgttgttgtcagacagagtgaagatcttgttattgcaaacgttggcgattcaagaacagtgctaggaacaataaccgagaacgggatcaaggctgttcaattaactcactgatttgaagccaggtttaccaaatgaagcagatagaattagaaattgcatcggaagggtccttgctttaaagggagaaccacatatcctgccttgatggctgccccatgatgaattttccagcttagccatgtttctagctttttgtaatttcctacttatgaaccacggaataatgtagtccttgacatctaccgcaataattatcccatattccagttcattgtttcctacagttgaagttggatctgcctaatatatctcgt

SEQ ID NO: 58163 - DNA, 634 bp, Gossypium hirsutum
  unsure (1)..(634): unsure at all n locations
  Clone ID: AI054941.1
ggaatgtagagtgagagaccaaagcaatgcagaaacacgaaatataagcatccctgatgagagacagtcgggagacgatggaccgaataaagtttcggaggaccttataagatgtttatccagcattttcttaagaatgaactcaataaagaaaacttttccttcattatcaatgttggggtctcaagaaaccggatttcgtgatccttacggtatttgttcggattatggagaaagagatattggaccatataagcatttagtttcgatcagtgatgactcgatcaatctaaatcgagcatcgaattcttannttctgttgcatagattgaaactcctccttgcaagattggcctcattggacttgcaaaaccttaaccatcaagaaaagctggcattttggataaatatttataattcttgcatgatgaatgcattcttagacaaggagtacannaaagtcagattggttgtggaactgatgagaaaggcacataaagttgggggacactgttgaatgcatactatggactttcatcttagattgcttaccatcaaatttgctttcaaggtaccaaatgataatgacaccaggcatgtcgatggattattgacctgtgaattgcctgatggg

SEQ ID NO: 58164 - DNA, 578 bp, Gossypium hirsutum
  unsure (1)..(578): unsure at all n locations
  Clone ID: AI054939.1
tagaaactaaaacaatgtgagaacgaatgcatcattgtcgaatttactgtcatagtgagttataatgtcgggattagaagagttaaggaagaagctagcgcctctgtttgattccgagaagggattctcggctggatcaacacttgatccttatgattcttacatgctgtcggatagtggaactgtcaacttgttgagtagatcttatggagtgtataacattaatgagcttggattgcaaaaatgcacatcttcacctgtggacaaacggatcaaggtgaaagacgattcnggtgtgcatctatgagagcggatattcgggcatggnantggtgaagcgnngttgttaaagagctatgcatattcatctatagaatcttgattgaagaaaattattattgagaagagaaagacacaactttgcagaaatcggccttgtgaaccctgtttagtctgtggaatcatgggcnttattccgactggcaatacgtacttagaactgtgnaggtactgcgattctagatgagaaattacgaccgtcttattatgttaactctgggactactctgtgatagctt

SEQ ID NO: 58165 - DNA, 584 bp, Gossypium hirsutum
  unsure (1)..(584): unsure at all n locations
  Clone ID: AI054927.1
aaaccatgttcctttgaatcctgatacacttcttgaagtaaatggtgttagaactggcatctattctgatggcccatcaacccttcttagaagggataggctagacaaaaaatcggaagaagccacttttgtgagcacggatagcataaagctgacaggaagctggaangtcgaaggtttttaataaggatactcttcttctattgngggtttagaagtttgtgtgatagaaattggttgcacctnagagtcgaagggaagtgcccngatgtggagctgaactgtgaattcagttataactacgcgacttggttntctcaagacccaacatttcacagnccaggttcacttacccacagttgaagcctatggtgcaggtccattntaaggcatccattatataactagaacttacancctagttacggaagaaccaatgaaggatactaatcgataccgagcagatgcactgagatcgaaagaagcaccctttcagagctgatactgaatacagtcgaaggaagaccagtattgattcaggtgacatttgaaggaaatnngagttcggtcatgcgttttaggga

SEQ ID NO: 58166 - DNA, 598 bp, Gossypium hirsutum
  unsure (1)..(598): unsure at all n locations
  Clone ID: AI054923.1
ctataaaattcacaataaaatacttcatcaacctctttactttctcatctcatcttgatttcccttttagcttttaacaaactcctttctttctctagatctctcgtccttccatgtctggttttctttttatctcacattaatataatcaatatctcatagttcttttcttgttgtttctctatttgtgtgtttttgaatgctcatcaacatcttgttcctgatgtttgaggacttcatgtctcccgtcntcagtgaaatcctccttctgggtttaatgatcaactctactctgnagcgcaggacccatctttttcaatctttctctggtggtttccttactggttctacgtttnttatgaactctctctctctctcccctggatggtaccccatagccngccttatnttcttcagctttncttcaccatntttatatagaatccatactgagtntctntgcatataaaattctgggntctgagccagttngtgtttctttgtntggttatataatggtgtgttacttatgctacttcagcatgagcatctcaggtcagcagctgagaactcagtcatcgagatntcagcgatttga

SEQ ID NO: 58167 - DNA, 599 bp, Gossypium hirsutum
  unsure (1)..(599): unsure at all n locations
  Clone ID: AI054913.1
atgtcatcctgataccgtggaggcaatactggagaaggagggtgatggaggctttgcaacctgggcatctgcaatggcttttgcctgcactcactcttctgaagtcggtctgtctgcaaagtctgagataaagttgatggtgatgacactgctaaagatgactgaaaggttgttgggagtaggtaatccaagtggtggcttgttacgagattgctttacttcactgattaagacatcaatacaattgaaagaactggatgaagaaatggaagaagaagaaaatgatgaagaatctgaagatgatgataatgatgatgaggatgaagatgatgatgaaatcgaaattgatgatgaggaattgnaaagtgagcatgaagaaaactgagaacagtttctgaaaaggtacgcgcaagcggcttctgactgagaatggtactgttgaagaggggatgcgnaaataagaggttgagatcagtanngtaggttggaagagctgatgacaanaatggnatatcatgatgagagaacacatgttctataaagccagcgtatctctggcttgttaagttcattatgcctnccgattacncttctcacaa

SEQ ID NO: 58168 - DNA, 586 bp, Gossypium hirsutum
  unsure (1)..(586): unsure at all n locations
  Clone ID: AI054907.1
gtttttacgaaagttttttctaagatacatgtaaattttatagttattattgcagttaaaaaattactactttcacaagaatagtccgctaccctagcacgtctctgcctgcctctctgcaaggtttttggttttttcttgagtctctcgttttcagcagcacctaccctgatttagagattttgaacagaatttttttttcctctttccactattttaacctgcgtctatgtgagtcagattttgctggtctatcccttgatgaagaagaaaagaagatccttcatttacttggaagagcatttgggctgcgagagggactcttgagannacgttgatgagtggaaaanngngnnnnnnnnnttttncatctggacttcaactggtcattgcggagaaaattttgtagatcccactggcgggacagtacagaggactttcagctgganaggagaaccagggggagtcttcgtaggagtgctataactatccagagactacctgatctatgattatgtacatacgaggaaaaaatctatactaattggaatactattcctaaaatcaatgacgatgagactttgan

SEQ ID NO: 58169 - DNA, 553 bp, Gossypium hirsutum
  unsure (1)..(553): unsure at all n locations
  Clone ID: AI054899.1
gttgtccacagtatcagattagtgagcagctcttagtgcaatatttttatgaagggttgacaccacaagatcgaggaatgatcgatgcagcgagtggaggtgctttggttgataaaactcctgagcaagcccaaaatttgatcgctaatatggcgcagaatagacagcatntcggttttaggaggtctgacttgggtaaacgaatggatgaaggccagtcgagcatgatggaggctcaattagctaatttacggtttgggaaggtaagttgatatgngaggtacagcgaaagctttactatatgatttnggtgtttaaaagacatcccagttatgtgtctgacttccagagcgcagctacgctgtttttcaataaagaggtatgatcatattcgtacttatatgagtgannagatcaccctatttaatatcaaattactacgctcagatttgaccgaaattccgactatattggacaacaccataaaccgatgctaacagacattctctgacaatgtanatatgttgcanaaagaacgtgagatacttgatcg

SEQ ID NO: 58170 - DNA, 582 bp, Gossypium hirsutum
  unsure (1)..(582): unsure at all n locations
  Clone ID: AI054894.1
atccaattgagaccagaagcattgagataaagaaagaacgaagaaaaatgatggcaacaacagcagctgcagcaaatcttccttgtttacctcaaacttggaaggccaataatcccaaaggccgtcacaaagtaattacatgggaaaggagatccaaatctccatcacttactgcatgctattgctctctttctgagacttcccctcttttccgagcagccaagcacactctagattgatacatatatcaaaagtgggaatggttattggattcgggtctggtcaagcttcagccatggccattaagtatntgggtcaccaaattcggncaggtgctttcancacatctgggtatcctacgtctgtagtagtncgagtgaagcagcanagctggaaattcattaggagagcttgaaacagttctcaattgatnttgattgatgatgttgacatatagaggaaggacattatttctgtatcggtgccanaacgccaggtgagagtcataatcagagagggagttagtttgtatctgtctattcatgctcttagcgagccactggaactaacgagactcaattn

SEQ ID NO: 58171 - DNA, 616 bp, Gossypium hirsutum
  unsure (1)..(616): unsure at all n locations
  Clone ID: AI054892.1
gccaaccaagccatgtttctgcaaatcctcctctttgtagctctttattccatcactgtccacttataccacaagttccaaaaccatcctcccaccccttttccctctttaccattcattggccacttctatttacttctcaagaagcctctccaccgttccctcgccaagatctccgccaagcatggccgtgtccttctcctccattttgggtcacgccccgttgcggttatctcatcggcatcggctgctgaggaatgctttaccaaaaacgacatcatctttgccaatcgccctttacttttatacgggaagcatttangttataattacactagccttatctgggattcctacggcgataactggcggaactgaaggcgtttatcngtcgattcaacttctttcggngcacttgcttncaattgctttacgccacacgcctgattanaatccgtttgctcttccgaaagctgtcaagggatcatgatcnaactgtggacttgaaatccagacttttcgagctgatgctgaactgatgatgcngatgatagccggaaaagatatacngcnacngtgtgctgtcgtcnaagaaagcacccgtttcgtgaaatat

SEQ ID NO: 58172 - DNA, 605 bp, Gossypium hirsutum
  unsure (1)..(605): unsure at all n locations
  Clone ID: AI054889.1
ctaaagtctaaccagcgcaaaatgaaggctcctccgccctacaatctctgcaaccccaacaaaaaatccgccattatcaaccgctcttacgccctcctccattccatagccataacttccctgattttctacagactgtcttctttcttccattcaacaccttccctccctctccttctagccttcacctccgagctaattctctctgtactttggctgctcagccaagcttttctatggcgacccttcactcgccnaacgttccccgaaaggttactgcaagacaaaaacgatgatgaactaccggcatcgaatgtgttcatatgcaccgcagacccggagacggagcgcattggaaggtgaaacaccggnttttgtcggcatggcgatggattacccggcggaaaattatcggtttaggtttcggagggaggngnngnngggttaactttgtatgcaatgaaagaggttgggaaataataaggttttggtttcattttacccaagtttgggataaaaccagatgccccagctttatttcgaggttgatgatgatttttggacaggttccnaagcnanaggagaaatcagctaaatccaatgtg

SEQ ID NO: 58173 - DNA, 588 bp, Gossypium hirsutum
  unsure (1)..(588): unsure at all n locations
  Clone ID: AI054885.1
ctgcccctctgtgtttggtttgagagctcttaaacgctttatcctttccatttactgtgctcttatttttcttcttttactaacattgtaggggggaattttcgtttaaaccatgaggcaccctcattcaagtttgcctccagggtttagattccaccccactgatgaagaactcatcctccattatctaatgaagaaactgagttcctcacctttccctgtttccatcatcgctgacgtcgatatctataagttcgatccctgggacttaccagataaagctgtatttggtgagaaagaatggtactttttcagcccgagagacagaaagtaccctaatggtgcaaggccaaacagggcagctggatctgggtattggaaagcaactgggactgatnagattatagttgcatcttcgatggcagctgggagggttggagtgtattccatattggtgtaaagaaactttggtgttttataaaggaaggcctctaaaggataagacttttggatatgctgaatatgctttacacaccctaccccacttaatatgacatcagtctaaatgctctgaggtgatatggtttt

SEQ ID NO: 58174 - DNA, 600 bp, Gossypium hirsutum
  unsure (1)..(600): unsure at all n locations
  Clone ID: AI054884.1
gaacaaggtagagagtataaaaaggacaaaactgctacagagaagttgcttcaggaaacaattgaaaaacaccaagcagaacttgcagctcagaaagacttttatacaaatgctctaaatgctgcaaaggaggctgaagcactagctgaggcacgtgccaacaatgaagccagaactgaactggagagtcgattaagagaagctgaagaacgtgaagccatgctagtacagacgcttgaagagttaagacaaaccttaagcagaaaggagcagcaggcagtatttatagaagacatgctttcgagggctcgtaaagatcttaaaaaacgttataagcagtgactnnnnggtgaggnagnttgattcacaagtgcctgagtctacaagacctcttttaaggcagatcgaagccatgcaggaaacaacttncagaagagcagaagcttggctgagggnnnnaggatctctaaactctcgtctcaggaagcagagcaaagctgctgtgctgagaagaanacggctttgatgaaacgtatctaaacctttctcaattaaggtcttgaagctaattatgtttaaacaaacaacccgatacagtcc

SEQ ID NO: 58175 - DNA, 585 bp, Gossypium hirsutum
  unsure (1)..(585): unsure at all n locations
  Clone ID: AI054882.1
gtcggagaaagagagcaactgcccacgctgttcttacaaagtatacaaattcaattcgttctgcttctcatttggaaatgaaaacccattctccttcggaaaccgttaatccttgggtattgtcaacatctccgaaactaaaaagaaatgggatcattgcatcttcagtatagaacaggtagcccgagctacccgtaatttctcaccggacttcggatcggtaaggagnggtttggaaccgttacagggncgtgttaattctgtcagggtggttgctattaaaagagcanagaagaacattttgagaatctgaacctggtncagtatggaagttgaactttacccagaattgatcatagacnctcgtgagcacntggntatgtggatacaagggataacggcttatattacgantatgtaccaaaggcacganagagatctttggatggncaacgtggcaaatctggatttatncancgtcttgaatcgcaccnatgtgctcaggcctactatctcatcttatgcgggagcanatatcacggacggaatcatcacatactttacagaagctgcnactaagtgcta

SEQ ID NO: 58176 - DNA, 606 bp, Gossypium hirsutum
  unsure (1)..(606): unsure at all n locations
  Clone ID: AI054881.1
taattttacaaaactaacctttataatttaatataaaaaaagcatatattttaaacccaaaaccgtccactcaaataaccaagggacagataaacacttaaggacttcataattaattaatcatagcaaataaacacttattagtatgccactgttgcattttacacaattaagtcctgttatcaaattaactatccaatcgataaaattaaatcacgaaatttttacacatctcaattaacatgctataaacactaaaaataatattaaaatattnttatgactttagatttggtggtcccaaaattattgttctactagggtctaaattgggctgtacaagcggaatgtccccaagaatacaacaacacaacaggtgaatcaaagtagcaacatctctacaacaattgaacaacaaagcctttttcttcaacgaaatgtttgaaatacgaaaggaatgnaagatttttgagacacaatntttngttctatctaacatgaagatgttgaaatttggaaaaaaattcacaaatttgcataatcaattgataaagatttatcaatcattgaatcaatatagatagtttctattagcgagagaaatan

SEQ ID NO: 58177 - DNA, 605 bp, Gossypium hirsutum
  unsure (1)..(605): unsure at all n locations
  Clone ID: AI054879.1
tggagatggatcttttcggtctggattgaagccacggcaaaagcttcggccttctgttgagattttatgcaataatcaggcaagtcaattgcttgttgaatgctaaaatgccattggctaagagcatatctgtcaaagttgtgtgactttttcctcattttctcttaccaatatttcaatctgtggaatttgaaataaacatagaaaaataattttagaccaacttgttagttcaagttcaatcacagtatgctggccccttttttttatctgtttactatctgttccaggtattatctcctgatatgagcttagctactgtacgggcttacatatggaagaacccgaggatttgggacttaattttagagttattcaggcacggtgaattggtgattttgagagtcagttgcgactattctggtaagtttagtgacccatattactctttacagaatacatcctnggatgtatattcttcaggaacactatntgtcatatgantaaagcgggaaactgtatactntgtntnatgtntattcattttgggtttgaaagaaaaggggagggtatcgatttttgagagaagcctgtgatatcattct

SEQ ID NO: 58178 - DNA, 607 bp, Gossypium hirsutum
  unsure (1)..(607): unsure at all n locations
  Clone ID: AI054870.1
cctggatcgtaatttattacgttctattaggatgttaagtttaatgggaatgaaaagatgatgaatttggttatacttctatgtgtgtgtttgtgcgcgctcgcgcgtttctgatgctatttttctctatttcaagaatgccttgtatctgtttccaaaggaagaaaatggggatccatatgaatctcaattnttttttctctttttcgattaggctacattcttagggaatgggggtttggtttcttaaggataaacgagatttngtatttgtagtattctaatgcaaatgtgtaatctaaagatttatgcttaaatgtgtaatgtaaagtgacatagtggacaaattaggcattttatatcctttatggaaatgatccaaacttcttgctttcagcattattagattttccacttttagactggnatattgcatctaggattgtatattgatttatgaatcaantcgatggtagaagatagganaattgtgattctgagaatgttttattgtagtggttgtaattgtgacacttataccagcagcagctttgaagtttgtgcttttcangtgctaataagaatntatatctagattgcgcagttt

SEQ ID NO: 58179 - DNA, 604 bp, Gossypium hirsutum
  unsure (1)..(604): unsure at all n locations
  Clone ID: AI054868.1
tcaggcatttcagaatgaaatatgtcgaatgagattggatgatgccatgcttgatgaacttgttcgtgagtattgtgtttacaggggaattgtggaacctggaatgcaaacctcatctgaacctttgaaagttaatccaccagagtctgggtgttgttcatcactagactcttccattgatgtggatcatagcactgctaagcattcaaatagtgaaacttctgctctcactgatctgagtagcatgcaaggaattgatgttgaattacgctttgcttctgagcccaccaacaatctcgaagatttgtagtcccaacgggtcacatcagtctgaaatttcaagtctcttgagaaacagaagcaaggggnctggtgaaagaatnnaagcgtagcgatggaggggaaaaacatgaatgatctaagatttatttctgggtgttcatttttatcgagacgganacaagaggttagcgctactatatcaaaggtacaacagtatatnttgaacttctgttatattttatgatgatgatngatatagcatatatttatatgcnggagtggaatgtccantgcgagataattgaattgtctgaatgaagaa

SEQ ID NO: 58180 - DNA, 596 bp, Gossypium hirsutum
  Clone ID: AI054867.1
gttcagtggggattctaatggttacgtgattggtagtgaagatgaagttggaagcatgtcaggaactggggattcagtaaccatggttttgattccagggctgcctgatgagtccaatggtgaatgtggtgctccaatcagtagttgcttctgggagtgtaaacctaaatttaatgtgcattatgagatatccggttctcaaaatgtgaattctccgccgttactctttcttcctggttttggtgttggttcttttcattatgaaaagcagctcatggatttgggtcgtgattatcgggtatgggcaattgattttcttgggcaaagcttgtcattgcctactgagaatcccacatcctccttcatggatgaaggatcttgtgtgatgatttggggataaatctgaacctttggctatggatctgggtttcattatgtactttggtgggttcaagttctctttttgtataaatgtaattgttgaccctatacctcgtgggtcttactatgtgattgaagcttaaatatgcgctattattcttttatttaggtgttttttactatatatttcttttggtgtattccattcattttaa

SEQ ID NO: 58181 - DNA, 574 bp, Gossypium hirsutum
  unsure (1)..(574): unsure at all n locations
  Clone ID: AI054863.1
gtgttagacaatgttgatgcaatctttggactgcatgttctacatagtgcaccaatcggtaccgtggcctccaagccgggtcctttattggctggaagtggcttattcgatgctgtaataagcggaaaaggaggccatgcagccattcctcaacattcaatagacccgattttggcagccttaacgttgtagtcagcctacaacatcttgtttcacgagaagctgatccattggattccaaggtggtcacatgncnnaaagtttcaagggaggcggcgcctttaatgtcattccaatttcagttacaattggagggacttttcgggcattttcaagncgagtttaatacaacttaaagncgaccnngggaggttatcaaagggcagcttgtgcaaaaggttcatgcgaccgtggaatttctcatacaagaagcgatgctnctttcctccgatgtaacgaaaggactgacgacattctggaagtgtgggaatgctggaatgcaagtaagactgaacaggatgggctgagattcatttaccaagcgttcctggattctctcatggatcaaagaaac

SEQ ID NO: 58182 - DNA, 612 bp, Gossypium hirsutum
  Clone ID: AI054856.1
atgagattgagagcatctgtagccgtccatcttggaaaggaatcctgtgtcacctatggcccagggccaaatacatcgaggctgtagttactggctccatggcacagtatataccacctctcgagtattacagtgcaggaaagttgcctttggtttgtactatgtatgcttcatccgagtgttactttggtgtcaacttgaaaccaatatgtgaccctgcagaagtagcatttactctcttgcctaacatgggttactttgaatttttacctttgggagaaaatggagcacttgccatggacatggatgaagaggaggcagtgccaaatgacaggcttgttgatttggtgaatgttaaagttggctgctattatgaattggtggttactactttctctggtctctatagatatcgaatcggagatgtgctccaggtgactggatttcacaaccaagccccacaatttcgattcatatgcaggaggaaatgttgtgctaatcgttgacaatgacttaaccaacgaggaaagatcttcacagaagcatcatcacaacaaagacattgttagaaacctacacgccttgctgtagagtcaccactttgccaatcat

SEQ ID NO: 58183 - DNA, 560 bp, Gossypium hirsutum
  unsure (1)..(560): unsure at all n locations
  Clone ID: AI054854.1
tagagagggtaatgacttgtatagggaaatgattgagagtggtgttattaagctaggtgaaaagcaggctgatagcaagtgtgctcttgtttatggtcaaatgaatgagccccctggtgctcgtgctcgtgttggccttactggtctgactgttgctgaacatttccgtgatgcagaagggcaggatgtgcttctcttcattgacaacattttccgttttactcaagcaaacttctgaagtgttcactggtgcccctgcaagtatgggnagttgaaggagagcatcaccagttcangggtgtgttggatggaaagtatgatgacctgccgagcagtcgtttacatgggtggaggatcngggaatgattgcgaagcagatnaaatgncaaggatccgcacctaatcaaatccatacttaattctgcgaagtattccaaatattagtngggggttgcaatgcagcacagactgtcattattgnggtnttnnnatgntaagatgattcagaggtaaagacacttggccgctttttttgntaatagggaatgaagcgtggtctt

SEQ ID NO: 58184 - DNA, 616 bp, Gossypium hirsutum
  unsure (1)..(616): unsure at all n locations
  Clone ID: AI054848.1
atggaagtggggtttttccatttctacaattgcagtatctttgtcaatcgcaatcttccttgctggttcggctgtttacaggaacaaaataccctttggcagccctcttacaaccattggcaaggttctggttgctgctatgctgaacagttgcatgagcaaaaatccaaaaaatgccattgcgaacctgacaacgagcccttcttatcgaactgaaaccagcaaggaaggagaccaccaaatcccaactgaaagcctcaaagtcctaaacagagcagcggtgaacaagccagcttacccagcacttgaatgctcagtgcagcaagtaaaggaagtcaagaatcgtgcttaaaatctttcccatatttgcttgcccattgttctcaattgctgcctagctcagctctccacttnttcagttgagcaggcagctaccatgaacactaagcttggttcattgaaaattcctncagcttccctaccagtcttcnccgtgggtctcatcatgaatctagccccgctttacgatcacttcatatcccatttgctcggagagtaactaaaactgagatgggcatcactcatttgcaacgaatngggattggttaatttcttn

SEQ ID NO: 58185 - DNA, 609 bp, Gossypium hirsutum
  unsure (1)..(609): unsure at all n locations
  Clone ID: AI054845.1
gaatgatgtcaatgacatgccacaatcttgattttggaacaagagtgcttgatttggttgctattggctcctcttctaattcttcaattgaaaggtacgcagtgaagaatcatggaaaaacatttgccactaaagtctatggagctagaagaatggtttgttgcaggcaaaacattagtagaactcgtgtgttctccacaaatacttcagaggctctgcttatggagttggtcaacgtactgcgcctgtgttggatttgaagaaagaggctaaaagtcccatttcactggcaaacttgttcgaagttgtagctgatgacctccagactctaaatcaaaatctccagntcaattgttggtgcagagaaccctgttctaatgtctgcagctgagcagatctttggtgctggtggtaagagaatgagaccggccttggtgttcttagtttcaagagctacgttagagttagtcggattgaaggaccttactacaaagcatcggcgtttagcggagatcattgagatgattcatactgccagcttgatacatgatgatgtattagatgaaagtgatctgcgaagaagaagatagacggttcaccaactgtact

SEQ ID NO: 58186 - DNA, 564 bp, Gossypium hirsutum
  Clone ID: AI054844.1
aatctgctaagcaaaggctagctggagaagagagtgagaatgactactacagagattcgagtagtgacggaagtagtgattatgagatagggaaaggcattaaattttctagagaacagtgtagtcaattcagtttgacaaatgagatcccttttcgagtgcgcagcttgtctataagtgatgaaaacagtatgctgtaagaaggcttttccagcgatgattgtgaaaccaggaactcacgagatcacctactgtttgagttttttgagcacaagacaccttatagtcgtgaagccttatcagactagatatttgacctatcttgcaagtatcctggcctgaatctttaagaagtgcgacttactacccatcagtggatgtcggtgcatggtatccatatccgaatccttcaggtctacattagagatatgatgctgctttttactacatttctttgtcacccatggagtaagtaaaggtcatcactattttatatttctgagtgttatgcatccaatattgtaccggtttgatggggtttaggtgtaggatcttggccttcag

SEQ ID NO: 58187 - DNA, 627 bp, Gossypium hirsutum
  Clone ID: AI054843.1
aagaaatccgatgatgggcttcgcaaagttaagtcccagggacggttcaagcggtcagcttcaaaaccgaagccgaagctggaggaggttgtttttgaaccggtgagtaagggaggagatagttgggaaggtgagtgcttatcgttggagacggtggagtgttctttggtctaaggttattatttaggcattgtggagtgatttgtagttgtagttgacattataggtggattcctctttattattatagaggtgattttatttacggttgtgatctattatcttatgcggatgactatttcatagtttattgtttatttttaccatttttatgtatattttatttttatatatttctatcttatcttatattaattgattactttttttgttttatttatgtttatattttttatcgatctgttatttgtttgtaattttatatttatgaatatttttaattattttattgattgttctttatttctatctcttaattctatcgttatttctagttggttatatgtatttgataatattcttactctattattatatttatatgatatactttattttaatttattttattgtatatcattatagtctatattatatattctatag

SEQ ID NO: 58188 - DNA, 597 bp, Gossypium hirsutum
  Clone ID: AI054841.1
caatttaagtctaaatgaggaatcatgggtttcgccaataatgctatgattatgcgaaattaagctgtggattctaacctataaacttgaaagtctaaataatatttttagtgattaaattgatttttaagcttgctaggtgggcttagttaaatggctatgtaagtgattttaaggtggccgaatcaggtacgttttgttccttaactaatggcatgcttgcaaagttgcatggttgactgattatttgtatgactagtattgctatgaaataacatgaatggttagaatatataatgtgtgttggatgtatgtatagcacgtattaaaatgaaaattaagattgactgcatgaaatgtatgcatgaatgaaatgctattaaatgtactgaatgaaagttcgctacttatgcactggagaaattgcttataaaatgataatgaaagtatggtctgttggaactttattctaagactgtgaaattgtattcattcaagtattactaaaattgaatgttcttatattatgagggctgtttatcatgcactaaatgtgatgtgatgtgaacttgatttgttcgtatttttgacttatag

SEQ ID NO: 58189 - DNA, 571 bp, Gossypium hirsutum
  Clone ID: AI054839.1
gctgccggagcagaagcggcggagacgatatctcattcgtcgtcggaagaaaggacacgttctgggacacctccaagtaacgtggagaagagggtgaatagagaagaaagcccggaatctgagagttggggaccaaattgtaaagttcataatctgagttctgggaaacctgttgatcaatccactgaagcaaccatgaggaaagctcgtgtttcagtatgtgcttgaccgtaagcttcttgattactgatggatgtcaatgtgcaattttatctgttaatcatctgttattggctgtcctatgtgctcgagccctttcctgtgcttctggttcttagttgtgctgtttatctctatatgccttttggttatcttttatcatgtttatttcttatatcagtttgtctttctctttgtttcttttctttgttttatctgttatttcatctttttttttcattttgtattttttttatatgtctttttgtctttcttatattctttctgtctttctctcttattgtgatctcttcttgtgtattatttatcttttctattttctatactgtgg

SEQ ID NO: 58190 - DNA, 584 bp, Gossypium hirsutum
  Clone ID: AI054829.1
tgatgatttaagattgtctgctttccaatggccagcttatgcatgccatagtagttcaaagagttcagtccattgaaacttaattgccctagtttggacaaaatagacaatggaagagagttttgtaccatttcgtggaatcaagaatgaccttgaagggagactcaagtgctacaagcaagactggaccagtggtctcagggcaggtttcaggattttggctcccaccacgtatatattttttgcatctgcaattccagttatttcatttggagaacagttggaaagagaaaccgatgggattctcacagctgttcaaacattggcctccactgcactatgtggaataatacactctatataggaggtcagccattgctgatccttggagttgcagagccaactgtaattatgtacacattatatgttcaattttgccatgaatatgctcgattttggtatcagagcttttttttgctggactgatgggttagtgtgtggactgtgtgttgcagttctacttgttatcttagaagctgttccttttatacaaattactcgtcttgcggtgaattgtatagcat

SEQ ID NO: 58191 - DNA, 583 bp, Gossypium hirsutum
  Clone ID: AI054828.1
ctttgatacccaaccttcgaacccaagccctgtgtttaaacggaggaaaacggaaggagacccagtttctgtccatcgaatccaatccaaccaaacaatgaagcgatggacaacaaaacgagagcatcagatctactcctccaagctcttccaagctctctgtcgttctcgtcggacctcttcatccacttccgcgaaggaactccatcaaacggccgacagagttcttgccataacagccaagggaaccacgcgttggagcagagcgattctcgccgctccactcactgctggtaccaatatgaagaaacataagaaagccaatgtggtccatacaatgttgaggaagcccggtggttaacacatagaagagaaaactgccggtcgttgagaggaagttgaggacttttatacgttttggtccatgttgttggatacaatcttgcaatatactttttaatagtaagtaatgacataaatttttttaatttctgttatagccattattgtattttaatactttttattatgttagtatatttatatatcggtattatttttatattgttaatatcatgagtat

SEQ ID NO: 58192 - DNA, 587 bp, Gossypium hirsutum
  Clone ID: AI054823.1
acaatgctgaaagatgtgattctggagcagttgctgatagctgtttcgacttccaaagaggaaatggtaatacgagcatcagttactgtcttaacgactatcgtttcaacaaatatatcggtagtagacgatatataaaaaaagggtttaaggctaaccgatctatcacgcgctctaaaatataacgtgcacgaggcagctactcttatatacttaataaaaccatctgctgctgaaataaagactttagagctcttaccgacactcgtggaagtcatttgtacctctaacagttcgagatgtatgccatctaaatcgtgttctgtatcaccacctgcggcatcgtcgatgattatcgaagtattggtaactgcattcgataatgctactaataacatgcacttagcagcaattaattcgtctcgtgttttaatcggactttttgtagtcgcatataatcattgcttggaatagcatattgttttgtcaccaatatttagtaattgttgctatttgtggactatgttaatgttttttcttaagttatcataagtttcattaatctttgtttactaggtaatcaaata

SEQ ID NO: 58193 - DNA, 565 bp, Gossypium hirsutum
  Clone ID: AI054822.1
aagaaagtcccttccttttaaagtgtggatatggagatcgataaagcaatcagagaaagtgatgataagaggcttaagaccaagtacaacaacgccatctatgttattaaaagagctcttgctctttactctattgaagaggttgctttcagcttcaatggaggaaaggattctactgttttgctgcaccttcttagggctggctattttttgcatagactggaacaaagttgttctaatggggttcagatagattttccaattcgaacaatatattttgagagcacttatgtgttccccgaaatatatacatttacctatgatacatccaaggacttatggcttgcaaatggatattatacgtacggatttcaagtacgggtatataggctttgctaaagtctaaatctttcatagcgatttttttggcgttcaattggtgttctactgtagttgctatagcagttttactctattcatatgatggaccattttttgaagtatatcttttggactgtatacaagaatttgggttttttaaaatgtatgtatttctttacttatg

SEQ ID NO: 58194 - DNA, 587 bp, Gossypium hirsutum
  Clone ID: AI054818.1
gcttgataaaaggaaatatgcggtcttatctgattttgccagtgtacaagatggggagtcctcccaatcctgtattcctgaaagtgccatggaattgcagcatgatgagaatggactagaagactcaaatgatgttcttctgggtgaagatgaacagatgattgagattgaatctgagagctccgatgaagaattggagccggaaactagtgtcctgggatctgctgcaataatggtgggggatgtgactaatgttttagttggacttataggttctcgactaagatacaaggatctacaacgagcatttggtccctccgaaaggagttatttggaaacacaattgcacagttaccagagagggtggggtgtaaaagctgtccgagcgaaaggtttattcacttggctagacttaattcgatttggattgcttgaaaaggttggtcttgaatcaatgtcccttaagtcttttagctttacttggagtagggccacttcagtggtaatccattcattaagcagtataatatctaattggacatttcttatttatttatatgggagggtctatttcatccattatgctt

SEQ ID NO: 58195 - DNA, 580 bp, Gossypium hirsutum
  unsure (1)..(580): unsure at all n locations
  Clone ID: AI054809.1
aaccaagagaaggagccttctcttttgttttgaaaccctagccgccgtgagctttcatcgccatcaaaatgtcgtcaagggttgtctccaactgtcaacccttttaagtcgcccctctatttctcctttttcaaaaccttcgattcgatttgattttggattcaaggccctttctgttaagttctttttctccagttcgtttttttcaggtcaccaagtgctcgacgatattactcaacgaacaaaactagaagctgatcattttactctcttgatcggatcaccaactttcttcgcaaagaaggtttctctttgagngatgtcgacagtgtttngaaggggggcttcaatctgtcctttgattgacttggccattcatatcgacgcaaggtttaagcaggctttttcaagtcgagaatcacagatcgttggttcggccatcttgggggtcgtgggggttttcctcaacctccagaaaattgtgcgtcggtactgttcgaaaggttacctgccttattcccaattggatctgtgnttatgctttcaagattttctttcatagagcacaatatcagccaat

SEQ ID NO: 58196 - DNA, 576 bp, Gossypium hirsutum
  Clone ID: AI054803.1
aaattcatctctttcagttgttgaacagaaaaaagagttttcttttgccaatggcatggacatcgacgttgcctgcaacgagttagatattcacattccagctgaatgggaaatcttcgtgagaactctaagccagaagaagaaggatgtttccagccgcttgaataaatggtatactatctagtttgggaatgaagtttgttgatcaactttgacacctttagtgattctattgaaaatatgttggaaagagatttttcttctatttctttgctcctaaatgccgttaatgatctcatgtttattgcattgtgtctggaccctgtatctgttgtcaatttgatacatatcatgattttatttttttatagatgtaccaaattggctgaccttgactcttagtttcatcctgttattataacaatagcattaatttatgaattgtataatatttgttatattggaaatattgctgtattttgttaaaagggtaatctttgttaccacttattctagatatattaaaacagtttatttaaatttatttattatatatgtaatgaattgtatattcag

SEQ ID NO: 58197 - DNA, 597 bp, Gossypium hirsutum
  unsure (1)..(597): unsure at all n locations
  Clone ID: AI054793.1
ataaactactgtctgaactacaaccatctcttctttactacttttcgactgtttaatgattatgatcatggtttgtctttatttctctaccgaaattcgaattttttattgaaataattggtatattgattcattttttgtgttattttagggaattgaaaagcctgcatggttagaaggcatctacacccagaaattcttcgtggggtgttcgtaccacgaaactgcaaaaaagaatgaaaagaacgtatattgttggatttgttgtattaagcatttgccctcattgcatatcctcacatagtttccataggcttcttcaagttcgtcgctatgtttacatgnatgttgttaaatggnnaagatcttcaaaagcttatagattgctccatgttcangtttgtaaatagacaaagcagttggttttttttttattttttttttgttaaaattcagttcataattcatggcctttgattggattacgcttatgctataaacaggcaaaagtggttgtcatcataaatagacctcatacggaccatttaagtggctgaactactgacttttttgacaaagcttaagacccatcttctt

SEQ ID NO: 58198 - DNA, 569 bp, Gossypium hirsutum
  unsure (1)..(569): unsure at all n locations
  Clone ID: AI054791.1
ctcgattgtaagttcgttctagcgttgtttttaatgatttttacgtttttggagtcccagtagcttgatttagcttatgctagcaataatttaatctagggtttatatttgaaaaaatacccataggtaaaatttgtatattttggtgttttatgatagaatatgaggttttaaataatgttaaataacttgtgctactcggttttaagtaaaaacgagcaaaagggcttaatcggtaaaaatatttaatagccataagtacatgttaaagtgagaatttggatgttgtcatagaagggaaaaatgatcagcatgtcataaaacataagaaaataggttgaagtttaattatgagttttgggtaaaagtgtaatatgtaaaagttangggtaaaattttaatttttaaatatgattttagcncatttgnttatgtgagtactattgactatatntaaatgatgagtagggaaatgaaattcggttaaaataggaaatttgagttgtgacaaatgtnaaagtgtcatttcgatccaggtaagtatggtatttagtacatatgtatttagc

SEQ ID NO: 58199 - DNA, 600 bp, Gossypium hirsutum
  unsure (1)..(600): unsure at all n locations
  Clone ID: AI054790.1
atttgtcttgggataataggtgagttttgctttggaattgcatatatgaaatatatacaaaatttctcataatcttttgggggcaataatagcattaaatctaaagacatttactaatgcatttcaatttctttttctttaaaaggaggaatagccttatcaagaacgtttctggggatatctatattgattggtcttgttacgtataaattgagaaggaggcatttatgtgcagatgataaaattgaagagtttcttcgtaatcaaaataatttaatccctattagatattcttacaatgaaataaaaagaatgacaagaggctttagtgataagttaggtgctgggggttntggctcagtatttaaaggaaagcttcgaagcgatcatgatgtagcagtaaaattattggacaagtctaaagctaatgggcaagatttcattgctgaaagtgctacaattgggaaggatcatcatgttaatgtggcaaatctagagatnctgtgtgtatggatcaaaacagctcttgatatgatntatgcgaatgggtcttagataagatatatttgaaaagaaatagactagttaaagtggacaaag

SEQ ID NO: 58200 - DNA, 846 bp, Gossypium hirsutum
  unsure (1)..(846): unsure at all n locations
  Clone ID: AI054768.1
gggtggtcatgtagaacatgcattaaccaatgcaaattcaacccatggaactgggtttcaactttcccattctcttccagagccaaagttgagccaataccatggaaccatacctacttttggtccgtcaaatggttccaggaatggaacaatgtcttgggccacaatttctttgggggaatccaaattcatatgcagatcgcacaaactcttcagtctggccgacatcatctatggaacatccattttcatccaatggaaatggccatggctttccatacacaggccggcaaggatctttctcaggctcatcccaccatcaccatcacatgggatctgctccatctggtgttcctctggaaaggcactttggtttcttcccagaatcatcagaaaattcattcattagtcctgctacatttggaggcatgagtgtaggccacaatgaaggttttatggttaacatgggttctcgtgcacnncccaaagtagntattggtattccacggaatgtgtctggaaacggttcaagtatgagaatgatgtcttcacctaggtgagtnctgtattttaggcaatgcctatacccggactactgccnacagtnatttgagggtgctancgtggccgacctacggttgaaatatcggaccgctggtaacaaagagttanctggcttgataatttttacggagactcaaacttgtgtaaaattccaaagtccctaaagtcgtgcagtgaaatttggagttcattttagcaaattaaaatataggtttctaaagtatttcattattatatttattattattatattagtattgtattattataatgtcaatagaa

SEQ ID NO: 58201 - DNA, 833 bp, Gossypium hirsutum
  Clone ID: AI054765.1
cttcagaataaaccctttttttttttcctttttttcaactaaatatctttatgtttcctgattctgcaaaaacaaattctctactgttaaagttcgagctgttctacttcagttacactcaaaagaatcattcacagtttttcttaaaaaaataattttttttcctttacctgaaatactttattagatttataaattctccataattggatatgtatctgtggttacagtttctgattgctttaatctccgcatattcagtcagtgttagaagagaaagatcttaactatttttgctgaatttgagttttctcctttaaatagtttaaattgaattagagtttgtgatgtggagatcttgtttaaaggttttttgatcatatatccatttcatcttgaaatataactgctcaaagtaattttgaatctttcattattcttttttttatatacttcattatttgttcaaatgaattctatccttctataaacttttatgactgtatgaaaggttcctcttatctttatatatatgttcttatattcatttttttttgatatttattttttgatttatctgtttgtttaatatatatttattagtcttatttatattaatttttcatctctttgtatatataattatatattattatttatgtattcattctttattttatatctattttacttatcattattatttctctattatatatttatactactttaatctaaatttattatatttatctataaatattatatttctctattattttatttattatatattatatatcatttatatatatactctctcatatcataag

SEQ ID NO: 58202 - DNA, 837 bp, Gossypium hirsutum
  Clone ID: AI054761.1
cttcgaacctgcaaaggttactgtttttaaagggtttttcttttctctctcctaactccaaaggaacgcactttttttaatctccatgtatccacccacaaataaagcaagcagctttattaatatctctttaattcaatttttctctatctctctttgaagccttcaattgattgcccagatttttcttcttcttcttcttcttcttcttctttctcttcaattcacgatctgcattcgctattttatcatgcttttcttaaaacttttccttctcttttctttgttttccttcactttctctcacgatgccgcctttgaccctcatcttctccccagaccattaatcatacaaccagaagatatcgagaccctgtttgaaaaattcgatgatgaactcaacttacactgtaccagttggagattttccgtcgaagccaacaatttgagtccctggaagacgattcccgaggaatgtctgtgctatgttacagaatatatgaccggtcgtggttatatactgtatctcgaaaggttttgagtgaggcttgggttacgcctaaacctcaagttagttgaattgataaatgctggatttcaattgatatacttgttctatattattacaaatgtctctatactgattaacatcttttttatttccttctgtctatgatatatctcttatttatactcattaaatttactcacgaattttcttttccttttatctcttcctattttcttcttatctatcactatctcttataattacttactttatttctatctatcttattattattaatacttattcataatttctaatatatccct

SEQ ID NO: 58203 - DNA, 830 bp, Gossypium hirsutum
  Clone ID: AI054760.1
ccgaatagaagcctggccctttgtcgagggttctcttttgggttaaacaatagtttcaattctttataactcttcgatttcactcttttattcttttacttattcaaatttattctttgattgcgatgggtatcgaatctggatccatgaattttaaatttgggaacttgcacgttaaggaccaatccatattgaattatatatgaatatatagctacttttctcattattatcttattgcatgttgtcatgtttctttcttttactcccgttaaatggccacggcttttatcatacgtcaattataaatatattatggaggccgttcttctttcatgggtttatatcgttgtcttatgtctctcttaatatcgtaccatctacttcattgtttacattgcgttcggttattcaccactttttatcttttttctttatttcctatgttgtatgctttttaatatttgtattcatctctatatatatattaatacttattcttaccttatatcgagtacaatctcccgcatttattcttacgtctttcttatcctctccattcttactttttcatatgcactgatatattgacttttatgcttacttcttcctataatgcttttatatattatatatttttaattatatctcctcttctatcctattacattttcatcacgctttataaatcttgctatcctttctctcttctacttatctgttatttctatatctataattctatgttttattcttctgaaatacttactctagatttgatctacttctgttattatgattaacgtttcataataattcaaatcattctc

SEQ ID NO: 58204 - DNA, 786 bp, Gossypium hirsutum
  Clone ID: AI054755.1
ctgcgttcatgaaggtggaactctgtgctttccagctggttcaaatggtaatcatgtttctgctgccaaatttttgaaagcgaacattgtaagcatccctacaaattctgaagaaggatttaagctgacagagaaaacacttcaacaataccactggaaaactgtggaaaaacccatgggtatatatctctggtccaacaatcaacccaaccggtttgatttatagcaacaaagagatggagaacattttaactgcatgtgcaaaattcggggcaagagtggtaatagatacttcattctcaggactggaatttgactttgatggttggggtggatggaatttctatttcttctccatttcatctattttttattttctcattattaatctatctataatatattatttttataatctgtaattattctttatttcttccttattttatcatatgattatttttttttataacatttatatatttttaaattattaatctttcttctctctgactatttttcaatcctcaatatatgtatattctatcttatattttaatagatttagttattttatactatatattatttatattatttttatataatatttttatctatcttcatttctctatcttttattatattttattatttatatcctcttatttattctatgtcttatatattgcttctattcatatttataaattttaattatgttctatatgattttcatatatttactattatattatgatttacatattcatttattttattacg

SEQ ID NO: 58205 - DNA, 691 bp, Gossypium hirsutum
  unsure (1)..(691): unsure at all n locations
  Clone ID: AI054747.1
aattggaacncccgtcgcgaaaattcaactacctctctatatgtgtnaacaatatgtctgtttattctaccactctcggttggtcggtccgtctctattaactattggtatacccccggtgctgcaggtaattcggcacgagaccaattgacagtattgcttctgattttgaaagattggagtatattacggtgaacccagaagtgactagtggaggaattgcattaaagttcttttcctcagttcgtcttgaaatacgtcctactgggaagataaagtctgtaagcacattatcacagtagctacttgattttccactacatttttttccattttttcacttaatatattatcattactagtacataattcatattattgtaggttaaaggtgatgaggtacatgggcttcgtnttcgtgtaagagtgcagaagagtaaggtaaataagaattatatcagcaaatttgatgacagtgggaaacataactttcacttaattcttcttgtgagccttaagcctaaaaccaatattgacgtgccaaagaaccattaaaagtgctttacggccttcttaggctggaccactgtgcctaaggttaccaactttaatgtcaatattcgatggaaatcttgaattctttcatacaaaatatgggaagaatgtaggnaatgttccccaaaaaaggtat

SEQ ID NO: 58206 - DNA, 536 bp, Gossypium hirsutum
  Clone ID: AI054745.1
gtagaaacccattgatatttttgtttccatgattgttgaaatatcattggttccttgtattgggaaatggtgacgccactggttttagttgttgcatgttcccttccaaatgatgaaggatgatacttgttttgtaatttcatttccattagagtttgagtgcattaattcattcaagaatagttgcttccatggttagtctactgctgtttatgcaattatcaacattcttcgcctcatccatccaatgtaagtccagtatttgtggcacagtatatatagtttattcaacttcaaatggtcatgaattgttttacttgaacgtgatttagtgataaagttttgttctgcaaaaccctgcagttacactatgctactagggtgtgtttgaatgcttcacttcaacaatgactgtggttcgaacctttcatccggagaaaaatttgaagtaaacagaaaggtaatgatgagtcagaactatcctgatataagagcgtagcctaaaaaccctcaaaatattggacgtacatatatgt

SEQ ID NO: 58207 - DNA, 665 bp, Gossypium hirsutum
  unsure (1)..(665): unsure at all n locations
  Clone ID: AI054743.1
attgaatccgtcgcaaaatcaccctcactaagtgttaacacagtctggtatctccaccgtggtgtgcggcctctctataactagtggtatacccccgggtctgcaggtaattcggcacagagcgaactcggatattgtgtgctttgtgcaattcatatatcttttacttagtaatgggttgttacgttgttgttgatccagggtttatattgtattgggtatgcagagacatatatttgcaaaaagcaaattcttgcttgaaacttgtatgtgtatctacatcgaagtgcctgaaataagactttatcttgctgctcttattgacccttgggacaaagattatgtccttaaatgggtttcccatcgattaaacctatctctattgctgcaaatttcaatcgaattttgtttttcagttgataccaaatttttattcataccgattaactttataggtttagataaataaattcttgtttagtattggttctcaatctcgtagacgcactttattcttgattgttgtgtaactggataacaagcttattttttattcctttcattttcactttaagatcaccctntgctttgtttgtctactcgatacagattttgctgtacagaatgttggttaacttcatgtttcttatgaccaacttgctttt

SEQ ID NO: 58208 - DNA, 538 bp, Gossypium hirsutum
  unsure (1)..(538): unsure at all n locations
  Clone ID: AI054741.1
agcaatttgatattggtatctaagaatctgaaaaccatataacagcggcggagggggttttgtctgtctctccttctctctctctccatctctcattccatctcgattctaattactcatcttcccctatcttaatttctccattttggtatctaataactacataccatacaacatcggcgggagggtttttgtctctctctctctctcctcctcctctcattcaatctccattctcttactcagttgactgggcactagaaaattattgttaagcatacaaaatttcagtttattttgctgcaagagacattcatactgggtttttgatgacacattttctcttcgactttttgtacatttggtgccctttgaggatggatcccttcttttggagggtggaaataaaatggtaacctatttggaacctggntttgttgtctgaaaattgctcaagaaatatgtaaactatgtaaaaaggaaacgatttgtgtgggaatgaaaacatgcacttnaggagcttggttacggaaagtat

SEQ ID NO: 58209 - DNA, 570 bp, Gossypium hirsutum
  Clone ID: AI054738.1
taggacaaaggctacaactccttccctacaaacatccctggaactccttacagaaaggcattgcaggcaaggaagaggttaagtaagatattgagtgatatcataaggtgaaaggtaagggataaggaagttgtctggtaaaaggtatcttttgggttgcctattgaattccaaggtatgaaaaaggccaagtcctaaccgacgataaaatcgccgataacatcattggaactcttttacgctgctcaggtacacgacggtccagtgttcatgtacatggtatcgtcaagtaccttcatgtacaacccgaaacttctagagtcagttaatgctgaacaaaagtcaattaaaatattaactgaagaaatcaatcatccgctgagttggtcacatactcgtaatattccaattacttacaagtggaaagcattttgacttggtcaagttatattagagaacttaagaatggcagcatcatatccttcacttttaaagaacaatgtctgagtgtgatacaaaggttacctcattcgaaagttggaaagtatgccttgttcaaaacatcatcaa

SEQ ID NO: 58210 - DNA, 531 bp, Gossypium hirsutum
  Clone ID: AI054737.1
cttgatcttaataagttgccagccgaaatgaagtaattttttcctgcttttttcttttaataattaaaagctgagacataatgtatataaaaaattataaaactttcttcttctttttttgaaataaactagctggtaacaaatttgagtcaacattataaccaataaacaaaattgacgtaaaatgtatcaaaacaaattaaaagggtgaatttttcaccaaaaataaaaattaaaagggttaattaatttttttcctattttatatcaattaaattttaataacacaaataaataattttgttattattttttattgatataaagtagacttatttatggctgagttattatctaattcgttctaaattgaaagatttaaataaaaaactaaacttgataaatactggtcagctcaactgaatatttaacatgagctcgctcatctgattatttatatgtttacattttaacccattagataaattatgtataaaattattgactttataaattgatagtaaaactaaa

SEQ ID NO: 58211 - DNA, 537 bp, Gossypium hirsutum
  unsure (1)..(537): unsure at all n locations
  Clone ID: AI054735.1
attccatttttgagggtaaaggagtttgttcgagcccatggtggtaacttcgcggcaaagtttgcgcacctaaccgagatggaagttaaacatagatgtagccaaatactcgaactggggtttcgtatggggggacattgccaagaatatttgctcaagattgggagggtgatattaccgttgttatgccagccacagtttctcagtacttgaaaattctacaaaacccaactcttgtggagcttcaaaaggcagccaaccaaggggagaagatgcacttgggagaaagctgtcggctatgaaagcaaattgcggcatcgagcttgcctcgatgaagtgtgttgcaattcttaaccacatgcgtaggcttaaccggagtgccgacagagctgctgccgctttatctcatggtcttgccaacacaaccaatttcagtgtttcgaagaccttctacagatgttacttcgtctttgcatacgatangcagttcttcgggataccccacctgctagatttacagccattcgaggcctatag

SEQ ID NO: 58212 - DNA, 531 bp, Gossypium hirsutum
  unsure (1)..(531): unsure at all n locations
  Clone ID: AI054729.1
caaagacaaaaaaggtctcaaaaatcagatctttaagcaaaagcaaaagcaaaagctgaaaccacatcttctcttctgggtcatctttactcaattctggatcatatgtttctatcaagtccttccttcactctacttgatctaanccagatacccttaattatagtcgatcggggtttctcgtatttcatcttttgtgggttcattctaccaacaatgtggaggttcaagccatttttgcaaaaagagcctgcagggctcgagggccgaacccttgacgttgccaatcttaaacttcatgttcggaatgttattgcgnagggtggcttctcttgtgtctacttagctaaggatgctctacatgcttaaaagcagtatgctttgaagcacatcatatgcaatgatcaagagtattggagttgggttgtcaggagatcaatgtgttgaaatcacttcaagacaccggacgtcatcacacttatgccatacgatcttggaatgggaagaccaagaagcnnctctgtatggaat

SEQ ID NO: 58213 - DNA, 535 bp, Gossypium hirsutum
  unsure (1)..(535): unsure at all n locations
  Clone ID: AI054727.1
cttttgagatttgcatatcgatgcctttctccctctcgtttgtctgtaagttgtcttttcaattttgtacctgaccgtgaatgttgacatgcaactttttaagcttgagagtaaaacattaattcaccacacagaagtacatgggtcagaaatcaaccctagatgttgtggctaattttcctaatcaactctgtgtgtgcttatgggcaaaaagaaaaaaaaagtgtgctggcgaatactaattttttcatgaacattgagggaacctacccttcagctagaaatttataaagaacatcaatatttgncgtgttaagggaatagacttccaatatacctaaatcttggaggcccctgaaactcatgataccaggcatgtctcatgaaaaatgatgctgttctatttcagaaaaccaccagtgatgaactaagtgcatgcanatcanttnctgtgtgtaacatttgatctgaaaacgatgtcctgttgaaaattgttcatgccttcacaattcgactttagctggaatgatatctn

SEQ ID NO: 58214 - DNA, 532 bp, Gossypium hirsutum
  unsure (1)..(532): unsure at all n locations
  Clone ID: AI054721.1
ataagagagaaaaaaaagaaaaagaaaaaaataactttgatttgcaaagatgagagagaagagatagacatggtagaatgatgacgatgatagaagaggaaaaaaaccgtttcaaataaatgaaaaaaaaagggtataataaatgctataccctatattttaagtttacacacatagtctgtctttttaggagagagaataatatatatcaataaatgccatgcacagtttacggggaaagtggggaagtctgatttattggacacctgtgtccgaacccgtgtcccgagtccaggtacataggtgagaaatgatttatcggaaaaaaataatttcaattttttgttaaagtcaatggtatatctgattaaattgatctttaatnttgttttacacttttatcttgcacttgcaaaagtttttaatcttgaattttttgtcanaagagtggattcttacatnttgagtctatgaccacttcagacatgctaatgcttcttacatatcttaataaatgactgccatnggagaa

SEQ ID NO: 58215 - DNA, 544 bp, Gossypium hirsutum
  Clone ID: AI054719.1
gaaaaatgattgcatcaacaatcataatttgtaaaattttaagataatgtagtcattaagttaattattttgaaataaaaatattaaattttaagacgttataggaccatgtcaatactatcgttaggatagacatcgtagtgtcagtgttgatccttccttatatgtaaccatattataaaaccaatatttggttaagtagatccaaatttgatcttttagatttccttagttataactaaaatagattcaataagttactaacggcaactaaaaaaatatcaatggaaacttaaattttactttttttatatatcatatttggggtggaagattaaatttacaaaatttgaattcgtggttaacgatgtccgatacacttcatacaaattaaaaactcgtataaaatattggtttcaatttgatccaattgttctaatcccattttatgattagtatattgtttattgatttttgaaaattatatgtgtatattctcattttttatttattatttgtgtactgtttaacctttaaaataaaa

SEQ ID NO: 58216 - DNA, 540 bp, Gossypium hirsutum
  unsure (1)..(540): unsure at all n locations
  Clone ID: AI054717.1
tggagatccaaatggaatttcattggttcgcagagaaactgacagtgtttgtgctgatatctatgagtggcaaccaaccctaatgaattacgagatgcaagcctctggtaaagtcaacaaacccttaaggccaaaagtccatttaaagtgtgtatgcaggggcaaaaaatctcggctgtaaagtttgctagctttggaactcctgaaggggtctgtggaagcccgtgaaagaaactgtcatgctcaccacttatatgatgcttttaataagctttgcttatgacagaacttttgtacagagaccgtagctcctgtaatgttttgaggagacacgtgtctactggtgtgaagaaaatctcttagggggggtttttggctgtgggggctcttataagagacttcatgaaataatggtggttcttgatgttttttatcatccaagttgttattcagcttttttggggtttttggtgaataaatccgccctctttcgttagatcaccacaccatcttttttggtttgccttccaggagatatan

SEQ ID NO: 58217 - DNA, 531 bp, Gossypium hirsutum
  unsure (1)..(531): unsure at all n locations
  Clone ID: AI054711.1
gtcttgtccgggagagatgtcatatgcaaagtgaaggcatccggctttcgagttgcaacgagtcagatatctgcaacttttagccaagatgggaaacagatcatctcagccagcgaggattccaatatctacatctggaattacgctaaccaggagaagaacagttccaagctgaaaagcatttcgtcttgcgagagtttcctctcccacaatgcatcggttgctataccttggcgtggaattgagaccattccagcaacacttacatccctagactggtggnnnnggnatgtgaagagaaacagccacccaagcgggcagaacatcaaagtcaaaggtggagccggaacacctatgcctatcttaccagattgtttctcttaacgcgtgttctattggagtcattacaaaggggtctccaacttggcctgaagagacactcccaacgcgagtcccgtgacagttgcatctgacctgtgcaagttcgagtaaaggttttgaaaatgcctatcaaacatgttgagttccacn

SEQ ID NO: 58218 - DNA, 541 bp, Gossypium hirsutum
  unsure (1)..(541): unsure at all n locations
  Clone ID: AI054710.1
attggaggaaaatgatgtgaagaagcttaacttgctaaacacgttaccattagtttcgccttattctgacgggtggaagttggactcgtggagtttggaagcggaaaaatatagggttggaattatacatgagtttttgagcttgactttgtgagaaaagagctttgatacatcatattgtggagttcaaggaggagtttagtttgactaggcaaacttatgagatgctcaagagacaaccttggacgttttatttggctgggacggagatgaatgngcngntgtttttgaagatgggtatgatgagaaatgggtaacttaattgaaaaggatccactgnntggttttcaatgaaaagctaattaatttggttaaatgcaagaagaagaagagaagaagaaaaaattctggatttatggagaaattccaggggattgacattttttaatggctacccttgtgacgcttgtggatattaaaacgaatcttaaccttgtcggttagcaaaactgcaaaacccttattatgtatgtagattaaa

SEQ ID NO: 58219 - DNA, 594 bp, Gossypium hirsutum
  unsure (1)..(594): unsure at all n locations
  Clone ID: AI054705.1
tataagctgtgtgcattttatgtagaaacgtatgaaacataaactagtaatctattttctacaaatttgcaaagataattaatgatttaatttgttgggaaaaaaaaaacatataaaacgttaattaagtgagaggtgaagaatttgtgaagatcgctgcggaccatgtacgtatgatatggactgttgtgggttaggtattgtccctaaacctgtatgactatgttcttgccttttgtacataggaagatatttggctataaacaaatatgcaatacaactagcttagggtcgctaaacctnaagtttttcgatcaccaggaaggncaagtntgattaagtggatggacaaccgaccatgatgcctttcatgttgggaactgaactgatgaaagcataggnnttaagtctcattgctaagcttnggtagaatatattcacaggtcananaccttaatagaagcnaaggtctggaagtncctggtgtgngagttaagtacacgccagagctgctacactttctacttgtaacaaatgtctgggtaagagtgaaacttatatacagtgtgccagataaaagggctatgaagaacc

SEQ ID NO: 58220 - DNA, 632 bp, Gossypium hirsutum
  unsure (1)..(632): unsure at all n locations
  Clone ID: AI054702.1
cacgaattattccagcttctatttatcaaggaagtacagtttcacttgccctgcagctttcctgtagtgttctggttgttgcatgtccatgtgccctgggtttagccacccctacagctatgctggtcggaacttcattaggggcaacaagaggattgcttttgcgtggtggaaatattttagagaaattttctatggtgaatgtaattatatttgacaaaacgggaacccttactattggcagacctgttgtgacaaaggttgtaactccaagtggcatggatcatagtgattccagacaacatttcatggtaagttggtctgaagaatgatgttcttaagttagctgccgctgtagaatcaaataccattcacccagttggtaaagcaatccgtggaagctgcccaagctgtgaaaaagtccaaacataagagtaagtggatggaacattttgttgaagaaacctgaactgngcgctttaacttgtcattaaatgataaacattgtcaattgtgacattagagttggtttagaggcatggtgttggcaatagtttgctttggaaacgatgaagacttaggataatctgtgttaatgttgatgaatatagctcgctggctaattatttagg

SEQ ID NO: 58221 - DNA, 616 bp, Gossypium hirsutum
  Clone ID: AI054699.1
ctcgtgccgaattcggcacgagcatctcttataataacaatatcatcaaaatatactacaaggagaataactccaacttcagatcatttataaaacattgagtgatcacaaccacttttctttagtccaaatcgtggaagacctcattgcacttctcaaaccaggcataagggcttagtgtcagttcataaagggattacttcagacaacagacctgcccacgcttccctatgagcaacaatcctatatatagacttttctcttgagactcttgatatctaatcggtgtaaaggccaattatgagaagctactaatgaaattaatagacaaacagacgtaagtttgattacgcgagagaaagtgtctagaggagccaccataagtagaacatgtccttttgccaataatctagttttaagtctatcaccaagacatctggataactctatggtgattacccattgcagtcacagcgtgtttcccatatgagatataatctatagaatttggacccgttagttaatcatatattatttcacatatatcactctaccaaaaggctataaccttctgatggactagggataaatggatctagatagctgttatacagga

SEQ ID NO: 58222 - DNA, 611 bp, Gossypium hirsutum
  unsure (1)..(611): unsure at all n locations
  Clone ID: AI054698.1
attcattccctctgttattttacttgttatagctcatcttccctttgccaattatgtatttttcttctaaattgaagccttctagttgaacagtggactaaatatggaatcaagtaattatccctttgcatctcttactaatattccttatttctttgtagtttttccctttgcttctgaagctgattgcatggaacggagaaaatcttggttgtcgcattggaaaaggtagaacgaagctcagggtcactaatggaaagcagtatagcttctttccaaagagtgcggctcctgagatgctacttgcactcatggatgaagcctatacnggttctaccttgnagatggangnangagatcctgagtccgaggaaggcagtacatnngatgtgctgatcnctgggtttctggaacttcttaagatgaaatgatggtcttgctgaacgccttggacttcctggnggntcttgcagtctacaagctgcaacaataccctcagtctgatgataaagcagatctcatatccacttcgcttctgattgtatntacatactttgcgcgagcaatactcataatcggcatatnccatctgtgcagaatctactattccg

SEQ ID NO: 58223 - DNA, 604 bp, Gossypium hirsutum
  unsure (1)..(604): unsure at all n locations
  Clone ID: AI054696.1
tttccttctcgtcctttcacatcaccgtcttctctatgcttgtcgatagctgatccatataccattttcagctatctgtttcatttcattaaccctaaacaaatctcaatctgggttgttcttccatctttcctccggttgcgaatggtgttgagtcagatccggccatctttgcattttttgatnaacggttcgagagtctcccataaccgttactaggggaagttttacngagatccctaactgaacagcctgtaaccctgcgtacgcctctgcaacaacagnagatgtaacgtcccgnttgatcattgtctttaatacaanggagtcccccgtctgactccanccactaatcccgagctgatatatggggnctgtatncgatgcagcgtcaactgattcgtgccctggtgtttacattatagggtgcttctacccccttggagggagctatttcgtgaactccatatatcacaagcctagtaagcaaggatacggntactagcagtttctaaagatccagcaatcagaagactgctactgcttctcttatcccgatcaggctaagcctatgtactgctatgttaaatgcaaatcggattat

SEQ ID NO: 58224 - DNA, 622 bp, Gossypium hirsutum
  Clone ID: AI054695.1
ggtagacgtcgttgtccatggcttttgcatagatcaaaacggcgaaggaaaatgggtcttgatttgggttggaaactcagtgagtacccaggccaatgcctgacaaatccatacggacattggctatttccggggctcacaccaatgcagcatcggctcccaaagtaatgtatgcacaaggtagtaagtacttaatagcagccctgttggactttgttccacccttgtgtgaaggggatttcaggttggttataatataccttaagatctgagctctttacaaatttttctaattaatgaatttatattatttttattcgtatattaacactattttattaatattcaatagttctgtatatttcaaatagttattatgtttgatataatctttgttaataattttatttatttagatatattaaatcgttgttcttggatttaatattctatttttctatttaaaatattttaaagatattataattgtataatctatttttaaatattatagttttatattaatgatatatatatataattagtatattatataatctggatgtattattgtctttacttttgatatttttgaatatatattatattttgtcgatttaag

SEQ ID NO: 58225 - DNA, 622 bp, Gossypium hirsutum
  unsure (1)..(622): unsure at all n locations
  Clone ID: AI054694.1
agtatctagaccccaagactgcccaagttgccatagtcgaccatgtcaaacaggcttgtacaaaggtgagacctgctactgatgaggagcttccttctgcatatgttgaggaataccgctgtgctctagaagcagaaatactgaagtatgttgctgaagcttatccaaaaggttcttgttcagtctactgtactaatggaaaaggtgtgngaggaacctggatctgattttgaccttgtgtagtgattgccgccgctcgacttagcccccaaaatttttgcaatggaagttggcggacaatatggacattagagttcaaagatgatattcaaaggctggaattaaatggcaaatgctggnttggtgcgcactattttgaggagggaaaatgtgcaattagatacaaacatgaatgtagagattcacaggttttcagtctcccgatgatctgcaatttctgtagctaatctattcgccgcctgagacagcatcatggcatctctgaggatctatnttaagtngcagatacacctcaggatcttcgaggaacttcgatactcgacctatttcgtgcgtacactagcaattacctgaaagagaaatcgaagactcgaattgaagt

SEQ ID NO: 58226 - DNA, 600 bp, Gossypium hirsutum
  unsure (1)..(600): unsure at all n locations
  Clone ID: AI054690.1
taaccagtgagtgggaagcaaaggccgctgcatatcgtgtattcaagaacgttgcaaagcctggtagcaagtacatcgaagaggacgatctattacgattcatgaaaagagaagaagtggacaatgtgcttccattgtttgaaggagctttagaaactggaaagatcaagagatcaactttcaagaattgggtggtgaatgtttacttagaacgcaagtcattggcacattccttgaatgacaccaagacagcaattgaagagcttaacaagctcgtctagcggtggtgattgttgtaacctcattgtgtggttacttctgagggattcttaacacccnatactcgttttcattcatctactcttactgtggattcatgtttggaacactgcaagaccgtattgaagcatctattcgattcgtgagcaccctttgtgtcggtatcgctgtgtaatcatggatcagatgatcttgaaaaatgacattcgctaccgngttctgaattgacacgagaaatattcatctattcagtctagcaacaaacgatcatactttatagagtcagaatgatgattcgtnagtcacatgatgttccatcan

SEQ ID NO: 58227 - DNA, 653 bp, Gossypium hirsutum
  Clone ID: AI054685.1
gttctctctcagaagaatttagcccatctagaggtgtgcatcaaggggatccgctatctccctatttatttgttcttggcatggagcgcctgggtcattttattgagaattaggctgaaaaaagggtttgggaaccaattaagctttcatgacgagggaccgaacatctctcatctctttttttccggcaatcttttacgttttggtagagctacgagtcaaggaacagactaccttaggaaggtgttggagagtttctgttggttctttggccataaagttaatagacaaaagatacaggttttttttttttcaagcaatgtgtcagatggtggttgctaatgaaataagcaccaatttggggtttaactagagtagaagatttggggaattttatccttgggatggccgcttttttcatcatagggttgtgtagaaatacttactcttttgttctggataaagtttctgaattggtttaatgtgtagggaagcttcaaaactatccttctctggaagctaacgatgtgtaaatccgtcttatttgacaatcctaatcatttatagactatttttaaattccatttctatgtgtatgaaattgaaatgtaatactgatttctattgaatctaaaatatatgtaatgtactct

SEQ ID NO: 58228 - DNA, 620 bp, Gossypium hirsutum
  unsure (1)..(620): unsure at all n locations
  Clone ID: AI054684.1
ggaactgcttgtctcccttagaaaagcacaactgaaatacaaactttctgatgagcttgccaaggatctgttgatggagcacaaaagaaagctagttgaggaaaatatttctgtggcactcaacatactgaagtctagggcgagaactgttgggggagtcaagcaagccgtcgaagagcttgacaagatattgtcattcaatgatttgcttatctctttgagtaaacacccagatgctgatcattttgcccctggacttggtcctgtctctcttgttggtggtgagtatgatagtgacagaaagatggatgacttgaagcttctttatagggcttatgtatctgattctttatctggtggccgcatggaaaaggataagcttactgcattgaaccaactgaggaacatacttggcttgngcaataaagaagcagaagctatcatacttgatgttacttcgaaagtgtatcagaaacggctttagaggcttttaggntggtgaccttggatggcagatagcaggctgcctttctcagatctttggaagatgcctntgatcacaaaggctatcagatcacaagagactaccgaaaagctcacatgtgatctatgtgactgaa

SEQ ID NO: 58229 - DNA, 620 bp, Gossypium hirsutum
  Clone ID: AI054683.1
aatcctttaattcagaaagcagctcccagagccctgatactggaaggcaagagcatttgaaaacccctgatattcaaagagaatcactcattcaaagtcctgtgcgggaccgattgcagatatttttacagtcttcagatttgtatgatccacaagaggtccttgcatggatactagacttatagttatggttagaaaatgctatactatacagaaaattgggacaagagtcattggtcctccaaatcttagcccagatactggacgattgcgaagcatcagaacagctattgtgctgaaattgggcgatcatatgcatatatgcacatactcgatacgtatatggattcacatcatgtggactagccaatgttaatagcgagtgtaatcccttttttacaattcgtgaaacaaattaccctgaagggttttgaatagactgaaactgattagtttgtctaatagcatactattaccttgcagattttgaaatataaatgcatttccactgctatgacatttgtggtatccttatatattacatataaggtctcatgacataagattattatagtaacgattaactagaattatatccatgccattttcttcattcctaa

SEQ ID NO: 58230 - DNA, 619 bp, Gossypium hirsutum
  Clone ID: AI054680.1
aacaaaactgatccttgatgatcaaaagttaggatttatcaaatgttcgaagatcttataaaattcctttgtgttacatttataaatctttgtaagagtgatatttttatcatttatggagtttaaaaaacaaatggttttaaattgaccatgaagagttgacctaaacaaaatccctttcatctttgatcttcaatcttatccattgattgtctcaccaaccatgctcagctcactgataggaggtacttcaatgctcattctaaagaacaaacgtcagctctgaaattttctagtaaattcagtattggccaaatgccaaccatgacttagaggaaattttccttgtaagtcccatgaattatcactatttttatttattgaaagatctctatatttataaattcccatcttaataaatatgtttaattactatttataatgtacattcatttgctttataggaagatagttgtactaaaaatggatccatatatctaactgtgtatttaatgaaattagtttggttatattatatgtctattctgtggattcctgtgcatattatttgtatttcattaacatgtcatcattttcttatatttttgaggtatataag

SEQ ID NO: 58231 - DNA, 628 bp, Gossypium hirsutum
  unsure (1)..(628): unsure at all n locations
  Clone ID: AI054679.1
aaggtcacacaaagaaaaacgatcttcgtatgctcccgagaaaggggtgagatatgatggggtctataggattgaaaaatgttggcgaaaggttggaatacaggggtttaaagtttgccggtatttgtttgtaatatgtgacaatgatctctgtccccattgattattgattgttcatggggatcgtcctaagccattaccggctattccttatctgattaaagcttctcgatgttttttatataatggttttgttcatcttgggactttgttgattgattatattcttcttaatttactttaatttttctctactttcattaattcctatattcatttttatcttttaatatgattatgtcattaattatttaatgtattcttttatatatattttattaaattactttttttaatatatttttctttatctgtctcattatattaatatgatttactatagttttttgcaacttactcgtttatatattttctttatttttgtctgtataacttcattattatttaattattctttatttggcntttatttcacttaatattgaatctaatttctattatattacaattacttttcttcaattttatttaacttatattatatttt

SEQ ID NO: 58232 - DNA, 597 bp, Gossypium hirsutum
  unsure (1)..(597): unsure at all n locations
  Clone ID: AI054671.1
gacacagagtttttgaaatggagatggaaacctcatcagtgtcagcttcccaggtttgatcctaagactttcctggaatttgttcaagggaagaaacttgggttcataggtgactcagttgccaggaaccacatggactccctcctttgtctcctctcaatggttagtacattcatgttgtacacatattcttctccaacatgtactcaaaaccgaataatattggcttttcatcataacagggcattgttcttttacctgggcatggtgngaagtaatttatctttagataaataaatatatttactggtttgagttgcttgaattgcaaatcttttacagatagaactccgntggatcattacanagattccgaagaccgcaacgggtatgggtcttttcccggtcatgatttcactctcatgattcttggacgaaatnctaganacggtgaaaacgaatgatcaatggttcatatctggttttttggattgcacctcataaattgatagaaatgacacagatctnctgtctagactattatatctcgacgccatggtttccgacgattactaccaacgacctgtgggcgatggg

SEQ ID NO: 58233 - DNA, 625 bp, Gossypium hirsutum
  unsure (1)..(625): unsure at all n locations
  Clone ID: AI054666.1
agaaaggagaggagaaagctcttgagtatttggtcattaggaggaggaaaattgaagattaacgtgttagtaatccaattgtagacggttcgtgtgtggatctcgtcagcatatcgtcgcaaacaggtgtgtaactgacaccctctcatagactagattggcaaaagccgaaaagccgaaatgccgaaaagtcagtattttgggaattntgcgagtgtgcgaatgctcgtaagatagttgggttgtatatnttggtaaccttaaagtaataaactgcagtacgcgcgatttcgtacattntgataatttgggcttatggccaaaatccggtttcatgggccaacgggcccatttagtaagatgcctggtanagtgtcctgatgntacgtaaatagttaggatatgcatganaacctnaaaagtagctaaattactataataccnctatgtatggaaaattactggtataccnctaggtgcaaaattaccgttatacccctaaggttaattntgactgaaaagctgacgatctgattctgatgatgtatgcatgattattatctggtgcatggggacatggttatattatggagagcctnctgatgctatgcacaattattgactg

SEQ ID NO: 58234 - DNA, 600 bp, Gossypium hirsutum
  Clone ID: AI054663.1
aaggagtagcagaatctttccccatagaattgccatgcaaaatttcttttcctttataacgcctagtatccggcaaaaatccctcaatcctctttgtacatatctttattattaagggctctaaatcgggatccttcttttccaatctattggttatttaaggaattttgcatattttctctaatttttcgccttgatttcttttcaatgattatccatggtccgaaattcccgtattccttctccacgccaaccttgaccgtgttttaaatctccgatgacattttcgacggggcattctccttttcactagggatttcagaattcttaaaagaacaagagttttccacatgcccatatctcccacagtgaaaatagattgtagataaagattcatattcaacattcttctacgactgttgatcagaatatgggacaccaacggcttttccaatcaacataacagccaattaacaattgtcctatcctgtatccgtgttcattccatttaccactttccaacatttcctatctaatgagatttatgatgataatcttctcgaaggtccccttacaatgttttgatgtccatcaaattcg

SEQ ID NO: 58235 - DNA, 612 bp, Gossypium hirsutum
  unsure (1)..(612): unsure at all n locations
  Clone ID: AI054662.1
attcgaacgaaatcagtaacaacaacagcaccacgtgctgtatcgtccccgccgctgcgacaaccacctccgaaacacttgtttcgtcggaaccgttgaacactccggacgtcgccgctcttcaactcctctccaagaacctcgagtccctttacgaatcgacggattccgattacttttactccgacgcaaaaatcgcgctatcttccggtcgggaggtggccgttcaccggtgcattttgtcagcgaggagttcggtgtttaaaccgtgttctccgggctgaaagatagtggagctaagtttgagctcaaagagttggctagagactatgagatcggctatgattcgcttgttgccgttctggcttacttgtataccggaaaagttaaatcgttgccttaaggcgtttgcctttgcgtagagatgggttgtcncacgttggatgtagacggccgttgatttcatgctggaagtttatatgcagcgttcgttttcaggtccctgaattaatgctctttatagagaatctactgacatctcgactggtcggcgtaaatgatatctgtgttcttacattgcaaaatgtgcggcatgttgtgaaaaatggtgcn

SEQ ID NO: 58236 - DNA, 609 bp, Gossypium hirsutum
  unsure (1)..(609): unsure at all n locations
  Clone ID: AI054656.1
ctgcatcttgccgatggaaccatcctcaaaaccaaggtcttgatagggtgcgatggagtgaactcagcggtggcaaaatggcttggtttacaaaaccctgttttctcaggtcgatcagcaattcgaggcaatgcgcatttcaaaggcggccatggatttgaacccaaatacagacagttcgttggcaaaggtgttcgatcaggattccttccttgtgatgatgagaatgtttattggttttttacttggactccagccacaaaagaagaagaaatggaagacaaaccacttaagctaaagcaattggtaacaagcaagctcaaagatacatccgatgaaatgaaatctgtcatcgaaaaaacactgctagacgacatcatattcatcgccataaagattcagaaaaccatgggaacttgttttggggaaactttagcaaggncacgttttgtgtncccggtgatgctcttcatcccatgaccccagatatcggccagtngngttgttaaccatggagacgcgttcgtctcgctagatgcttggtgagcctgtgaaacagngntgagatgagaattganagatgaatgtgttaagaattgtcagaaaaaa

SEQ ID NO: 58237 - DNA, 626 bp, Gossypium hirsutum
  Clone ID: AI054655.1
gtatccttgtcttcaatgcaaagtgtctcaagcaaaattgtttttgttaatcttttatgagtaaatggtttattccacgtcttggattttgtgtatgtgtccaacatgtgcatattcagtcctttttgcaagtatttcatgtatttggcgggtatttgaaaagtcatattcccatacttatatttggaaatatcggacatgagaacttaaagagaaatgaagagtcggaagaagatttatttcacaataatagcaccttttgtggttttctgtttttcttgagtatatatctttgatttatggcaaaaagcatttttcttgttcttcctcaaccttttaaattcttgagtgtatcatatgtatgttaaatattactaagctatgctacttggacacgggtataagttttcagatacttgtatgagtctgacatggctattcgctctattgttatcttggtatttccagctttcggaaattcttgtactctcactcccatgtgcatattatctatctacatgactattctatcctaattgaattttgatactcttttgtctaaatgaactctctttttatcatatataatctctctactattacaattctttcctatttattatacg

SEQ ID NO: 58238 - DNA, 586 bp, Gossypium hirsutum
  unsure (1)..(586): unsure at all n locations
  Clone ID: AI054654.1
gcccatgctattttgttttgactaggtgcatgctaaaggctgatatatctatttccgaaaagttaatctgtctgttctggaatgagcattcaaatatttgaagttgtgatatgtcagtgtaccaattttttgttccatgctggctattggatgccgttgtggttaatttgacagtgtagtctgattatgccatttacaatttagcttgtaatttgatccatttatgctagcttaatgctgtactttggagtttggattttagaatggtgctnttgtggtgtgaattatttttcctaggctccaaaatttgacctatagatgggtttngntgtattaagaatanaggtcaaaatctcaaaagaataaatactgcagaggcttttttatatgtggctaanagcttttgcaagggactgcaaggagacgaaccaactttgatttggtaggaacttcactggttaactatttanttgtgaaacttatgtctcttgctatgcatatatgacagtctttcattgcatatttgcaacattttcagtcacttaagtcacctgctaatgttcaacgctgtttcttcttccaggta

SEQ ID NO: 58239 - DNA, 598 bp, Gossypium hirsutum
  unsure (1)..(598): unsure at all n locations
  Clone ID: AI054643.1
ggattgcttcattctcaagctttgtactgatcctcagacactgaaggcaagaagtgagggccctgcagagattatcaggcatgttctatttggttactttagtcaaaagactgggcttcttgttcaaatggaagattcacatctgactcgcatccaatctaatggtggtgacgctgtttattgggaaacgacaatcaattcgtttcttgaagattaccggtctgttgaaggtataatgatagcacactctgggcgttctgttgttacacttttcaggtttggaggaagttgcaatgagccacacgaaaacaaagatggaagaagcatggacgattgaagaggttgcatttaacgtacaggcctttctgttgattgttttatcccccaggtgatttgagaccggatccatcagtgaaaccagtgaactctccaggatgaaagagaaaaagtgcgattgcattagcacacaccggccaaagntgctgcctacaaaggcacaagaggcaatgcagacgcatgatttgagatggaacctgatggatgctggaatngtcatatggtagctgtgcaactgttgactaactttaatgttccaggg

SEQ ID NO: 58240 - DNA, 631 bp, Gossypium hirsutum
  unsure (1)..(631): unsure at all n locations
  Clone ID: AI054640.1
agatctcgctccaatcatcttccgtacaattgccggtcccatttccggtcaaccactgccggaaggttttccttttttccgatcaccgatcgttgtgttcgtaaataaatcaatcgtctcattgcagataattactttagctattaaaggcttcaattctcacgaagtttcacagtctctgcttcagccaggagttatagaactttgctgtttagtnggtaaagttgtaaatttgatccttgtttaatgcaatatngatagagttttaactgttggactgttacagcaaagtggaagcgaggattcatccaaataaaactttgaaataaagctagaaaaatgtctttccagaatcaaggcatttggatgacgaaaggtgcttgggtgcttaaacgatggtgagantggtgtaatgatacttcatctagaatttgagcccaagcgttctcatcaatggttatgggatggntccgagacagatttattttctaaccagaagcagctgttggatgttacaactaccaacttattttctggaaatttgaattcaacctgtctccatggggaaatgcatctgggttcattcaatctggtgcagtttgctaactgtattcgaaactaatatactcag

SEQ ID NO: 58241 - DNA, 582 bp, Gossypium hirsutum
  unsure (1)..(582): unsure at all n locations
  Clone ID: AI054635.1
gtatgatgatattttaccttgtcctttgattggaaaacatgtgggaatattttgactgttttatgagttaggtaatgaggcctgttttagaatccttctctgatgataacttcaattttagtgctgtcgtttctcgttccagttcaaaattttgaatttgacaaattctaatgcacatttaatttgcacagaactaaagcttccttggttccttttaggactggcagtaggactcataggcatcgtgtattttttcatatttgttttagagtgaaatttgtgcgcagatctgttttcttatcatagtttgtgttactggacttgatgggnagtgtcagaatgggtatgatcaacttttttcaagatttcattgtattgnagggtccttnaggatcatgtcctatccaagtccagatagcatcaatgcgggtacctcaagaaataaagagttgagcacatatttatagtattatgatcttgccagctcatgatgcatctcatcaatggaggagttatcgctccttgtcactgctgatatgactgatctgattgcagttgtcagatttccatctttcatagatt

SEQ ID NO: 58242 - DNA, 729 bp, Gossypium hirsutum
  unsure (1)..(729): unsure at all n locations
  Clone ID: AI054632.1
agaaggaccaaaattatgaagcaactagacttcattttgaaaatcttgttgagagatacggcaatcctataattattttgaatttgattaagacacaagaaaagaagcctcgagagtcaatacttcgtcaagaatttgcgcatgtgattgattttatcaataaagatatgtcagaagagacttgtttgaggttccttcattgggatctacacaaacattttcggagccaagcgacaaatgttttgctacttttgggtaaggtggctgcatatgcattaacactaacaggtttcttttattgccgggtggacgtcgaccttgagacctgacgagtgtacggcttggccttcctctgagaatattgatgatggtgacatgtcacccccaaaatactgtgacaatgttaacgaggggtgctgacagattggagggggaatcattctggtgataataatactgctaatggaaatcattctgtcaagcctcccactttccaaagaggtgtgcttatgaccaactgcatanattgcctggatcggactaatgttgcgcaatatgcatatgggatggctggtcttggatatcagcttaatacttagggggttaaagatcccccgatgatggacttgacgatcccttggcagatgaattattgactttttatgagagattgggtgacactcttgcacaccaatacagtgggtgttgtatctcacattaggtgttttg

SEQ ID NO: 58243 - DNA, 690 bp, Gossypium hirsutum
  Clone ID: AI054628.1
cgctaattaagctaaaaagaaagttgcgtttctattgtttggtaaaggtgacgaaatgaagaaagattcaaatccctccctgaaataaaaaaggaaaaaagaaaaaaaatgtacttttattatgagaaaagtaactgggaatattccgattttggattcaaattgtatgaacaaaataatatttatttagttagatatcaaaagttttcgtattcggaaaaggttaaataaggtgcctcttcagaaattggaagagttagagcacgcgtaattcacgtttgttgatataaagacttaaaaactactgatgaaagatgtctgattttcagatttggttgcatggagtttaatgctgttgtcctgtatatcatccaaaatacctgttggaatattacagttaaaatagtttatcagctaatctttaagatttctattatataaatatctctattatgtaattatatttaaaaatatattatgactgttattattactgtatatagttagactatttatagataatttatatcgattacatgtagatgtgtataattatattttattttaaatattaatgtattattcatcataataacgttatttatacttttcaaagtaatttattttaattaagatattttgacattattttatattatttagatatatattattatattatattgtatt

SEQ ID NO: 58244 - DNA, 693 bp, Gossypium hirsutum
  unsure (1)..(693): unsure at all n locations
  Clone ID: AI054618.1
ttatgaaccaaattatgagaagtaacaccgtttccttggtgggtaaggctgcggcaccgccatggccatggccattaaaaggatttcaactctactgctgcagtaacaccaataacaacaacagtaatacttaacattaaaagacgaagagcttatgcgacagtgcgaattgaataccttcaaagcctcagggccgggcggtcagcaccgtaataagcgagagtctgccgttcgtctcaagcaccttccgaccggtatcattgctcaggccgttgaagaccgttcccaacacatgaatcgtgcttctgccttagctcgtcttcgtactctcattgctctcaaagaaatccggtctctcttggaatcgtattcaccgcctcccgagcttcttcaaattcttccccgaaactaacgatanggagatctgattnctggtccccaaattgggcctaacaatcccaagtttatattggggtatgcagggctctgcttgatctaatttntgcagntgattgggtctatatctgatgctgcaagctctggggatgagtacagggcactgngncggtaatactatcgatgaatcttttggaggcagtaataagtgagggcgtccngggatgaagcatgaagtacatatcaatgtgatgctattattcttgcgataggtacacattctttatttttaagaag

SEQ ID NO: 58245 - DNA, 709 bp, Gossypium hirsutum
  unsure (1)..(709): unsure at all n locations
  Clone ID: AI054610.1
ctttggtactctttattggagtcaaccatcatattcaacccacattacttggttgcgctttgattgcagatgaaacagtttatacttttctttggctgatgcaaacatggtttatggcaatgggggaacgggctccgcaagtgatgctcactgatcagaacaatgccataaaagcagctgtggctgctgtgtttcctactacacgccattgtttctgtttatggcatgtgttggaaaaacttcccaggcatcttgaatatctaagcttgtggcatgatagtctaatgctaaaacttgataaatgtatttatcggtcttggactgaggatcaatttgaaaaaaggtggtggaagatggttgacaagtttcatcttagagagatgcaatggnttctgtctttgtacgaagatcgcaaacggtgggttcctgtctttatgagggatatatcttttgctggattatctaccgctctacgctcagacagttntgagttcttcatttgacaaatatgtgcatggagaaacatcgatgagggaatttatagagcattatagagtaatccttgaggacaggtatgaaaaagaaaccaaagctgattattatgcatggcattaaacctctgaactgaattcttcatcacctttgaatacatttttactttgatatctcatgaatatttaagaatttccagtatatgtttgggactgtg

SEQ ID NO: 58246 - DNA, 764 bp, Gossypium hirsutum
  unsure (1)..(764): unsure at all n locations
  Clone ID: AI054609.1
attgaagacgtttggatcccccgggctgcagggccgtggctgataaaatggagtccgatatttgatgctctgtcgcgtaatattagggaaggcagagctggtgcaacctggttcgaagcaatgtcatccgagttccgacgagtttgattccggcgtcgatgatttatcgtcgccgaagaagtacgtcgtgtggagtacgcatttgaacactcatatattgccggagttcatcgtgagtttcagggctacgtcgtcattgaaagggttttcttgggatgcaagataggctaaagatgccgacttcgccatggatatcgtttccagctcttatatcagcactttctaaatacctacctccaactgccatganacttgatctccaagtattataggagatcacaaggataagaaaatatcaaggcatgaactcatacaacttgtgagacaatttgctgggacaagttgttgattgctgtcatcaaatcctcaaggaccaagcaatacaggcacaagtgagaaagcagtggatggagtgtgggaaagctaaagcttcttttgtcttgtttaacttaagccaggctgctggtgtgtgatgttaaccgctctcatgaattatatcttggtnttagttgattccggaagtaaatatgtagacagcaaatttgcagttagcttttaaaaaaaaaaaaaaaaaaaaaaactcgagggggggcccggacccaattcgccctatgtgagcgtataccaattcactggccgtcgtt

SEQ ID NO: 58247 - DNA, 688 bp, Gossypium hirsutum
  unsure (1)..(688): unsure at all n locations
  Clone ID: AI054608.1
attacgctaaattcagggctgttgcggataaatgtggggctcttttgatgtgcgatatggctcacattagcggcctcattgctgctcaggtattttgttttttctttgatcttgcttgttgttaattggtggtgttcgatctgggtttttagttagtatttcaatgctttctttgatattaaaatttcatgaatttgatctcgggtttatgatatttagactggttttctataattcaagatctaaaagcttgttttaatttttatgagaacggtttttgcactgtaatcatagcttataagcatnttctggttnnggagatccaatattggaantggattttatgaatttannaagtgttttgattaaacatgaatcacctctgagaatccttattgcgggttagcttcatgcttggattctaagaaaatcttatggctgtagtaattggagatagggaagaaaacgtgagtggatctaaacatgaattcacatgcttttacacttttcacatgntaaatatgatctcttatatctntgttttacatgaagttattagattcatgaatacaaaacttatatcttaccgaccagttttcgcattttagttacttacgtgtattcttgattgcggctcttattttcctttacgttgtgaatctttgcttttgttgatagaggcgcaatc

SEQ ID NO: 58248 - DNA, 702 bp, Gossypium hirsutum
  Clone ID: AI054607.1
gtttaagacaaaccaggaagtaaccgtaagcacacttgggcgattggtaatggtggtatggcttttcctattgatggtgataacatctagttatacagcaaacttgacttcaatccttacagttcagcaactttcgtcccctattactggagttgaaagcttgattggtaacagttggccgatcggttaccaagttggttcatttgcacatggttacctatctgataaccttaacatccaacggtcacggcttgttaaactacactccccggaagagtacgaaactgctctacgactagggccagataatggaggggtagcagccattgtcgacgaactttcttatgttgaattatttctgtcaaagcgaaccgatttcgggattattggtcaaccatttacaaagagtggatggggattcgctttccagaaagattccccacttgctgttgacatgttgaccgtaatctttgaactatctgagactggatagcttatgatatccatgctaagtggttcttgaatatggtgtttcaggtatatatgtagggtaatacgaatctatccatcttttataacactcttatgagcttaaattcatatacgatatatctctattataatttatgaattatttatcgattgtaaccattatacctgatctagttatgctattaatttatatcatttatttaattaaat

SEQ ID NO: 58249 - DNA, 702 bp, Gossypium hirsutum
  unsure (1)..(702): unsure at all n locations
  Clone ID: AI054603.1
gaaagggagggataaggttcacaatcaacggccactcctacttcaacctagtcctcatcagcaacgtcggcggtgccggtgacgtacatgcggtggccatcaagggttccaggactggttggcaacccatgtccaggaactggggccagaactggcaaagcaacaactacctcaacgggcaaagcctgtcatttaaggtcacaactagtgatnnggccgtaccgtggtctccaacaatgttgccccagctggctggtcctttgggcagaccttcactggcggccaattccgctagagaaaagaacgaagaaaacacccatctttattatcttagccttatcaattaaatacaatatataccaattaactagcttgactttttagtatatctagctagtagattatactatattaatgtgaaggggntttattntgaaaatagcccctttatcagtttttcaaccaaagtatttgtagggcaaaaagtgggacttttacccacccgcacattgcattttgtttggctttgatttgcatttcttgtagatgctttgctganaatggtatntggtttcattggatgagagttaaatgtaaattgcaattccatagtnatgaaaactgatttcggattataaanaaaaaaaaaaactgagggggccggtcccaattgccctatggagtgtatacattnactggcgg

SEQ ID NO: 58250 - DNA, 663 bp, Gossypium hirsutum
  Clone ID: AI054597.1
aatcgcggagcttttttaagggggcgttggatttttattatttcattcattaatttgttcatttttgcttttaaacaaaaggggttgccattttttttctcttctttcatggcattggcaatgcacattaaataagtcacgtatcagttactaaaagccacattgaagtctcctgttctgtaaaggttgtaacctttttgttgttgtaaattgccaaagccttttttgctacacaccttctatatcttcacacattgtacttaaaaatcatatccaatttcatcacgaaatggtgcttaaaggatcaagcttatggcaaagatttgacgtcgttttatttctttctgactatgcttttgttcaaacttgatgatcctaacagattctttaaatggaatgttacttatggtgacaatttcccactctggtgtttatcagtaaggtaattttaattattggtcattttcacattcctggactttattctgtaaccatggacatctattctcatgttactacacttggaaaacctctatttatcatggattgtatgcataaatgagaactctcctatgtggaatttcgctaatatgccattcaccggtcaaacttgttaatttacatcaaatcatatgtacttttatacaacatctttcttctaag

SEQ ID NO: 58251 - DNA, 590 bp, Gossypium hirsutum
  unsure (1)..(590): unsure at all n locations
  Clone ID: AI054590.1
gagtttttttttttttttctgccctcatagatctctgcttcttcttccattagtattgcagatctgtcctctttaattttgagaccaaaatagcctgtcttcttttccccaaaaatttcccatcgatttcatatcctcaaatcaagccaaatcgattcgccttcacgttttcacattttcttctagccaaatcgattcgccttcatcttcttccagccaaaggtacgctgacagccaagggtttcaccattcttccgcttcttgcagcgactgagaaacagtagtgcataagtaaaagtttagagttataaagtagttccatttctttgcatatgtnaaagttggggggtttacttgatcttttagtcnagaagatatgcacagagagaatagtaagtttcatatctttttcgagttctctagattccaactataaactgcattgtatcttgcttttctgatactcaatcaagctgtagcattgacctgcatgaattggtatagagatctgagtgttatgttcagagaaatatgaatcgttacaatgctttctgggtactcgacctgtttatatggtaggaattgtttat

SEQ ID NO: 58252 - DNA, 633 bp, Gossypium hirsutum
  unsure (1)..(633): unsure at all n locations
  Clone ID: AI054587.1
cctaaaatcagtatcctcaaaacacccccaatctcacccctccgttgtccttttcaataaagaaactctccaacagcagcgtctccaagctcttattgaaggtgcccacgattactctggctccgttgtacttggatggggcgatgggtattacacgggtgaagaagataaagggaaaaggaagttgaaaactttgtctgtagttgtggagtaattccttgtgggaagaaggaatttcttccaaaacttcatccagtattctatgcacatatgncatgtaaatatttgaaagtagtgcatgatgaaggcaagtgggcgtgcagggaaagaaccagtgcagngctgtagcatcttctctctcaaggaggtgcagtatatacagtgnngggatttcatgacagggaaagannggattgcatgttgtaaagccaacacaactgttgatanacactggaagctcttgttgacacagatnntangtnntctgtatcatgatgatggaaatgacttcacgagtcagaagtactcacagacgatggctgtggtagtgattatgacaccactcatagtgacgtgaacactatctcagatgcgctgctataactactacttgcattcttggatcctactcta

SEQ ID NO: 58253 - DNA, 624 bp, Gossypium hirsutum
  unsure (1)..(624): unsure at all n locations
  Clone ID: AI054585.1
gatgagaagaagaaggatggacttggttcagccaatgatggattctatgagtctaaaagagaatggttaggaagacgtcattttgttctagcatttgagagttccgcttctggaatgtttaagatagtccgtccagctgttggagagtcagtaagggaaatgactttggcagaactgaagaacaaatacagaagaatctcattgctagagaaagctcgcgcgggtgggaagatgaatttggaagtttcatccaaacagtgcatgcatggccccaattgtaagcttggcaatttctgtacagtcggcagaagaccccggagttaatgttnntgggtggcctcatcttnncggtttggggcacaattgagaaagccctttctaacaggcccgtctcagcctagcgcttccgngttgtccggctagaaacactgcagatacggcgatnggttggtcttctgtnccgtggggcagtgnaactgtctccagaatgcgngggttcaagattgnaagataaagcagtacggcattctctctaagggagtntgagaagcnttgtgattgggcagttttgagcataaagaattatcaaggacaaagatctatgctactttttgagaccctttt

SEQ ID NO: 58254 - DNA, 650 bp, Gossypium hirsutum
  Clone ID: AI054578.1
gtttgtaacctttcccccccttctacgccggagcattctcctctgtacagatatgaaattagcttagattaaaatttctttggggggttttggggttttcgcctgtgcgatcagctctttcttttacttctaaatgttccagcggctttttcatatggatgtatttgtctcggatacaacgtctcatggatatcgtcctaggacatatctttacatctgctggtctactcatgctgcctctatgtattggtccatcatttggttctctgttccaggcatttcctcctttattatctcctttctttgattttatcattcacacacggttttattcatcatatgtttcctaattttttattaactctatcttcatgaatttactattcttgaatatgtttattttgtgctaatatcattacattgactttagtctatctatatttactttagttctagtattttctataattttgcatcattttgtatacttttctgttaatattctgtcttttcgtttatgattatatatattccgttatttatctttcgttctatattcatatggttactttatgatttatgtcattttatttcagttatttattatctattgccttgattatagttttcttcattttactctgtctacc

SEQ ID NO: 58255 - DNA, 655 bp, Gossypium hirsutum
  Clone ID: AI054574.1
cttaattgggaagcctaaataggttcaatattttctgttcttatagaaaaagagatttgtggaactggaggtcttcaaatttccatccagcagaagaatgattaaggtatcgattatggcggagctgttaggagaatgcaaggtgtgcgcttgcaaggtcaacagcttaattatgagacatcggtgtgggcagaatcctatattagttcctttgtattcaccttatcactacctctacgaataaaaacgacttacacttgtcaaattacattttatcccaggtaaattattcttatatattagattaaaaagtaaattattttttattaaaactttcatctatttctacagttaaatattgatctctatatgtcaacatgatgtatatatggcatgttacgtgtcattgtctagttattttggcaatcgcatcaatatttaacgatatcaatgaatgaattctttaatcaaaatgaacaacttgctctttgattaaattcatgtgctaacttgtctttttataatagatggagcataatgtattaacttccaataaatggtctctagatacttataatttagctaatgatgatataataattcttacaaatgtatgtattttattgatatatacttatatatgatctgcgctatt

SEQ ID NO: 58256 - DNA, 647 bp, Gossypium hirsutum
  Clone ID: AI054568.1
aaatttcgtacgccaataacacattgcctgaaatttgtcttcctggcacaaaagcactcgtgcattgtcaatgcatttctctaagactcctctaaagcgattagcaatagcctttgtcaatattttataaacgatattacataagctaatgggacaaaaatgggaaaggttggttgaatttacttttttaggaataagcacaatatgtggtattgattggactaacctctatgccgtcattcagatgtcgaagacaaaaagttgagacctcgccccaaaaaatgtgccagtatttttgaaaaaataaagtctgaaagccatcttcacctagtgcttttgtggttcccatacttgtcagtgcctccttaatctcatccattgtatattgcgctgtgagtctgctattatcctcttcaataatacaccgttcaatacctgttaaaagatgttcatacatgcttaggttccacagcctccaataactactggaaataggatttaacactctctaccatttcttgcgaatctttactatattcaattggattgtactttggatgtatttatatgcccttttgtcgcagactagtagaaactaattcttgttcaattcaccagatgtttggtttagactaatctaaacctaa

SEQ ID NO: 58257 - DNA, 632 bp, Gossypium hirsutum
  unsure (1)..(632): unsure at all n locations
  Clone ID: AI054564.1
atgttgtgttatcctaggccatttaagtatgatttttttccagattattttgaatatagcgttttaaattataatttttttaaaaaaattggtgaagaaatatgatgtgctataagcatgctttcattgctctaaaatatttatctcaactacttgcgtcatatttaatatccaagatttgtatgtataaagctaacaattaatacatttattattatattaatnattgtatgtatataattaatattattttaatttaatatataaaaatatatataggatgttgtaaatttcattgatagatgaatatcatgttgagactattaataagaaaatactaatatttatatatcataattataaaatgtgaaaaaatgtggtttggaaagactacttgcctttatnctggtnatactacacacaatactacaattgaggcacatattttaagaccacatattttagtattgactnatcgtttagcttctcgatctatatgatgcnaganaatcagaatcaattgaccccattaagaatagagattatgaatcatatatttatggagctgtctcaagaagtatttagactccaannaaagtgatgacctttgatnttaagtntcagggttgtgc

SEQ ID NO: 58258 - DNA, 659 bp, Gossypium hirsutum
  unsure (1)..(659): unsure at all n locations
  Clone ID: AI054559.1
gaagcttggtgtcctaaattctacttttgagatctccactccatctatgaaagtacatgtagtggctaatgatgtagcagcaattgctaatgcaaggatgtcaagcatagaaccgtctgatccatcgagtgccagttctttatgtgaagacatcagacctgattctagaacaagtaaaatcccaaggatggcagtgagggttccttgtaattcttacaatcatgaattaactaataatcagcaacaattgcacgccactngacagtgatcttaagcagcaaagtgagaaagtagaatntcagtgtactggatgacaagtacccttgaaagtgaatccttgangaagtgaatttgaatggtaggaagaagacctggttatccccagaagtctgtatcacattggcagtgaatttaaagatccccattttttctcttaccatggcctgcaggtaaaaagttgcttgaagggtgataatgctggcaccaactttcagggaatgacagatanttttgtgactgaggatttgatctncttcgncagtgcatccttggatgtgaatgtagtaacatacatgggtctcattattaacagtgaccgnattagcatcataacagcatgnacatttcagcaacaagctgacttgcanancttgcacttn

SEQ ID NO: 58259 - DNA, 627 bp, Gossypium hirsutum
  unsure (1)..(627): unsure at all n locations
  Clone ID: AI054558.1
atttattcttctggtacctgcaccagtttgaggaattgtagcttttattttctttttcgcacatctttgaaccgagtaacccgtttccgacagcaacttgcttactctgattctttagatcacatcaatcattcttttaggtgaattcagatatacttgtggcttcaatcctgcaaataattagtgtatgaatgaatgtaaggtcttgcatttcttctagagatctgtatggagtagatttcttttgcccattgaacaacttgcaacttcatcatatgctataattcaaacagacaggcttacataagtagagagagtctttagggaatgtttgcattaacaggngatgtcaatcattcacattgcagtatcatcagaaattggattggagacttttcacatacttttgtccaatttaaagcctttggaagacatcgngattatagntgatctgatcccaacatgcattgctattgaatacacaggatcttgctgtcaagcagcatagcacagcttactcttttggatgaatgaagtgacgagacaactggaacaccaccgtnccttgttagacttgcaatagacatnatctggtgtgnacaaacacnttacggcttcagacacagn

SEQ ID NO: 58260 - DNA, 664 bp, Gossypium hirsutum
  unsure (1)..(664): unsure at all n locations
  Clone ID: AI054555.1
cggcaatcggacaatgatgaagcagcacgttggggcggatgaattaggaggcaataccggtgaagttacggcgactcttaattcttctgtttcttcttcatcaagtgaggctggttgcgaagaagattcagacaagagtaagaaagatgggcagccaaaaggatcggacgatggcggtgaaagctcaaagaaagggtaaacgaactaagtttcttttcttttttttttttcttctttttcataatattattggtaacaaattatgaggttgtaactggttgtgtttattgtatctaatagaaacaaagcgaaaatgaaaggggagaagaagcaaagagaaccacgatttgctttcgtaactaaaagtgaagttgatcagttagaagacgggtatagatggagaaaatatggacaaaaagctgtgaaaaacagtccatacccgaggtttggttctttcgttttcttaatctacaaccaaacacatatgttgaaaataatcttatcttttagacaatcaactaaagaaactacttgcgaaattgtgtctgaaaccttgatcttgcattacatctttctcgccccttctttgacttgcactagatgatccgtcatatagaaactaatctgtcgtaatacctgagggttagccgtagtattgtcttan

SEQ ID NO: 58261 - DNA, 664 bp, Gossypium hirsutum
  unsure (1)..(664): unsure at all n locations
  Clone ID: AI054552.1
gataaagctacaaagctaatgcagttggctaaactaacaccagaagacatgaaagctattaacaatatgaaatatcttggaggaagtccacaaagtaagaagtcaagctctggtttctcactcaagtttgatggcggtcaaaagacaaaacatgcagcaaggaaagaccgaacaggagaggaagaagaaacttggcaactgtttcgattttatcctatgttagaggagcttcttgaaaaccttaacaaaggtcagctgccaaaggatgaatatgcatgtatgaatgaaccagcgaaggattcaaaatcccaaagatcgacaaattcaactgcacctaacggtagaaggcctgctcattcaatgagatcaagacgaacccaancgtgggcacgaagtcactgntcagatgatggatatttcagtgatttaagttctgaagaatgtggntcccgatttcagaaggatggngcaacgaaattttgnngtcatcatcggtggggcaactcgatccnagggtaaaatagctgcgngntncntcgtagcattattgcctttgcatcaagatttaatctcccctganagtnnctntgctactggcagcntagacatgtacaagctancaganagttgngnaggagtnatctagtncactanntcgcatccn

SEQ ID NO: 58262 - DNA, 638 bp, Gossypium hirsutum
  unsure (1)..(638): unsure at all n locations
  Clone ID: AI054548.1
gcgagaccctgtgaccctttgcactggtcaaacctacgagagatccaacattgttaaatggttctcattaggccattacacatgtcccaccacaatgcaagagctttgggatgattcggtgactccaaataaaacccttcagcagctaatttatagttggttttcacagaagtatttggctatgaagaagaggtcagaggatgtgcaaggaagggtcaaagaggttttggagaatttgaagaaagttaagggtcaagctagagttcaggcacttaaagagcttaggcaagtggttcaagctcatgggacagctttgaagactgtagtggaaaatggaggcattgctttcattntatctttgcttggtccttttacaacntcatgctgtggctcaaagtgattggtattcttgtgaacttgaatcttgatttaaattccaagtctgattttgtgcaacctgctaaaatatcttgatagttgatattttaatgaagggtcgactgagacaagataactgtactagtngatggaatgtgatggagggatgatttgcatccaaatgttgcagngagtctttagtgtntgtgagtagtgaagtaaaagcacaaactggtttatctgactgttactcaaaagnt

SEQ ID NO: 58263 - DNA, 639 bp, Gossypium hirsutum
  unsure (1)..(639): unsure at all n locations
  Clone ID: AI054543.1
gatttgtgctatttgctttgaagaacacctgaacatattttaatatattgaacttgattcatttctcaaaacacaaagttctcaaagaactaatcttttttcaaatgttttctaagttaaaagtcaatatttttcaaagataaaattgtttagaattttatatttgaggaaaaggattgaatccgtggtggaaatgataatcctttttcacacagaatggttcctttgattgtcaagcccaacgagatagaatcgatggattctcagatattttgaattttaaaattggcttgacaagcattagggatcaatttaacagaatatttctttttgcttgaggagcaaaaagattgatattctgttaagaagggatcgatcttttattcannatagaatctcctttttggctggnaaagcaaaaaaaacttgatacccttaagggaggggattgntccttcatcctttgacagcaatcaagggttgaaatttgagcanaacaacagtgagtcttaacataaacagcctttcagcctgtcacttgagagattcaattgggagtatagatcaatcttcacagtctaagcttaaacttatccttacttacgataaattatacttggacaatttacaaacaacttt

SEQ ID NO: 58264 - DNA, 664 bp, Gossypium hirsutum
  unsure (1)..(664): unsure at all n locations
  Clone ID: AI054536.1
agaaaagtggatgtttgctatgcaagaggagatggaatgtaacaccccttacccttatccgatgtcgggacaaggtacgaggcattttcagacctaaacatacacatacatgaaaaatcgggccataaaatttcttttaattcaaacttttcaaacacatgcatgtcgtcccttaattgggtctacgaagcccaaaacatacatcgggattaatttgagactaaactgagagctctgaaaagattcgggaaaacttaagaaaatttcccaagaaacaggatcacatgcccgtgtctccaagccgtgtccctcacacggttgagacacacgaccgtgtctcagcccgtgtggctaacacttaggttattttccaagcgatatttctcacctatttaatcatttattttcaccaacattntaatacatttatgaatcaatttaaggtattcaaccaaagacttataattatcaatggttgttcatttcgtagccatattcaatatgatnaaatcataataanttgaatctcaaacttactaaatacaagccatgtgatagccttaaagtgaccctagttgaaagcggtctcggacccgtagaccagtcaccaattatttgatgtgatattattgcctaatatgtgaattaatggtgaaagttaacn

SEQ ID NO: 58265 - DNA, 642 bp, Gossypium hirsutum
  unsure (1)..(642): unsure at all n locations
  Clone ID: AI054533.1
ctaaaccttcttcttgtttgttcaatgcttcaagtgtttccattgccattagctcaaacaatctgttcagaggctgatagggctgcacttctcggtttcaaagccaaaatattgaaagacagtacggatagtctttcttcatgggtcggaaaggattgttgtggaggagattgggaaggtgttggatgtaatccaacagggagagttaatacattagcacttcaaagaccagaaagggatagtaccctttacatgaagggtactttgtcttcttccttaggaagcttacagttcttagaagtgttggtcatcagtggtatgaagtttattacaggtccaatccctgagagtttgtccaatctgagtcggctcaagcaattggtgttggaagacaatagtcttcaagggaacatacctttagtttaggtcgtttatcttttcttcaacactntcatgggctggtaaccatttcatggggtagttcctctaagttatggaattgagaaccctgngatgtggaattaggggagaacttttgacagttcatccttctagtttaaaaacctggtcattacagtcttggactagttcaactgtgcctgtttgtcctgaatttaggacagttatacatnctttattgcg

SEQ ID NO: 58266 - DNA, 648 bp, Gossypium hirsutum
  unsure (1)..(648): unsure at all n locations
  Clone ID: AI054529.1
acttgtacaagtaagcaatatgtttatgtgtctgcatgtctgtccttgcatatttgtttaattgtatccaaatttgatttattccttttctcttttgctgctttttggtcttcataattgtattgtgttcttttttctgtgatgcggtatacacatttgcctttagctaattactcttgtaaaaggcttacatattagttgtaactgtttaacatagaatttcttgatggaatgtttaactgttttaattactcaatactattacactcccaccggtatttaaatcctaatggaagaagcatattaattgtaacttcataattcataaaatagctacctttaatgtaaccttactaccttagcatgcatgnctgtgatatgcttcattaaggattcaacanacttagaaagatgaattaggtggaaaataccagatgaaaggtacaagattcaaagctaaaaacacccttacctgngtcttcaacatttaggtgaacctnatttcaagtnaattaagggacactttanntttagaactaagacttcaacttggaggatttgatcagaccttgtaaggagcttgtataatgatgtgaagagccatcttttcttgatcagtcnctgcttctaactctgaagataaagtcn

SEQ ID NO: 58267 - DNA, 624 bp, Gossypium hirsutum
  unsure (1)..(624): unsure at all n locations
  Clone ID: AI054523.1
caggcatggaacgaacaattctcaccttccttctccaattatctcctggaattcagtaatattgactggagagtgtattggttgatcatctgtccctacagtagtcttgttgttactcttgacgttattgctgctatgatccgatgcattggatgtttgtgattcttccttcatgaaactgcgtgttatatccttatacgcccagtcagttatgtaacttggttttgttgtaactttgctcacttcgaaatctcctgcgagcataccaacaacacgggacatgggcggccgcattaatggcgatccctgagtgcataaaaatgccacccctatcactctgagagcttcgtcttcgttgaactccagtaatggttggatcaaccaagctcaagagttggttattttcatgcanggtccaggcctggggacattgtagaaacaaattgatgatcagagcaagtctttcagaattaataggttcttcaaccatagtactgcaaaggaaagattctttatggatacccatcaagagataatttgcatttctaaggtatancgttgcctacattaaatctcaagcacaccccaagcgaaacatagttcttgaagagcccccatgatacn

SEQ ID NO: 58268 - DNA, 630 bp, Gossypium hirsutum
  unsure (1)..(630): unsure at all n locations
  Clone ID: AI054520.1
ctttcttagcactcttaatggttcatttcaacaaaaccaaaagtccttgtttggagcagagcatcgttgcgagtgctaatcacctagcacggtgctttccctgaccagccactgagttttttatcttgtagggactaaattgaaggtaaaaggaaatttaggagcaaaaatcatgaatttgaagataaaatgagacagcatgtgaaataggaaagaagtggtgccgaaaatacaaatttgaaaggacttgggggcaacagtttcaaagaagaaattttataaacataagactctatttaaatnttaattatatgaggattgttgaaaaaattattattaagagatatatgctgttaacatctttaataatcaatatctattctttaatattttagggaggaaaataaaaagtttttggactactataaggggtgggggggtgatataaactccactcattttttgaaaaaaattctttctccaaaaagctttacctttgttctttcattattcataaaatctatttttaagttatttcttttctcaaagcagagtcactaattcattagcaaatttgtgagattctcaaggttgatgagcttaaatcgactaagctttcacagtatatgg

SEQ ID NO: 58269 - DNA, 642 bp, Gossypium hirsutum
  unsure (1)..(642): unsure at all n locations
  Clone ID: AI054519.1
gtcggtcgaagtgtcgataatcgaaagcgacgcgttgctggagttgcagtgcgggtacagagaagggttgttgcttgatataatgcagatgttaagggaaaagctacggatcgagataacggcggttcagtcttcattgaacaatgggttctttacagctgaattaagagccaaggtaaataactaattaatttaattaatcaattaattaaaatagagaaatttttggaatatcagtttctcgaatactcaaccagacacccaaccacgaaaggtaatgtcctcgttatctttcgtgctctgctaagagctgaacggccgcttgaagggcttgattcacaaagctagaagcaccttgattatacatgggcacacagccacccattacaaggaccgcgagtgtctcgcccttagcaggattcaaaccctgacctatgatatataggtcacttattggggaagactttttttgaaggaagtcagcctttttcaacaactaaaaatattgtctttgtgtctggtttttggctcttgtgctntgntgagacccacatggtagtaactattgcaaggctagttacaagntgaagtgtttgatgatatactaatcaaaagtccatttagacactttttagaagcatt

SEQ ID NO: 58270 - DNA, 605 bp, Gossypium hirsutum
  unsure (1)..(605): unsure at all n locations
  Clone ID: AI054510.1
tttgaagagagtgtttgtttaaattcttgagagagattcttcgattaaagctttgtatggtttcatgggaacttattgcttggttcctatgcgcgaattacgatttgagagtgtttttcgcttgtcaattgttcattgtcagtagacttttggtcattattttgttttgtcgagggagaccgaagtcttaaagtgatcttaagagtttgtcttcggaaagtcgagagcttgaggtgataggttcacacagctggagcgcttngttgtgatggacgtgcgtggtgtatgccattaaagaaaagttactcccgctctatgacccttgctaaacagttgactctcttagagttgggagacaaattccaccgaggcaatccgacctgtggggaatttgtcgactccacagatgacttgaaagacgtttaggagggaatggcctttctctaatcttcatgaagaaacctgagagaccaatcttgaattagctctctgctgagcttacagttcaatttgtgagaaattgatgatgctgacctctaaatctatatagtatatgatgcaactgctttatgtcgtgatggatggataagcatgaatccgattct

SEQ ID NO: 58271 - DNA, 628 bp, Gossypium hirsutum
  unsure (1)..(628): unsure at all n locations
  Clone ID: AI054509.1
aaaaaatgacagatacacgaacaaataatatatgaaaagaaaactttgtagttttaattattgtttcttttgtttttttaaataattattgatacatctatgggtcagcaaattctgttgattctgcattttaccggaagccaaacagtagacttaaatgctatttatttcgaaaattttctctcccgtacacattttntagttgtcctggctgtagttaataatggtttcttattctgctccggctttatccctgacatattccgactcagaatagctgaagttaaaatgggagtgctggactgaccctttttctatggcaccacaaaaggcagtggaaactatttggaaaaacttgagagataatatgaagatgtggcagcccaggtccagtaggggtgannntgatntatagtgattgaagtgagaancattgtatacattttgcagattgccaagtnnaagagtntatttcattgcatggctgggtgttccaagccactgcaatggtgaatctgcttgttataggatatgaaatcccgtctcactgatgtgattcagatgagttactctatttaatgtggtctgatgagaaatcgccgaattgttaaactgaaataacttgttt

SEQ ID NO: 58272 - DNA, 649 bp, Gossypium hirsutum
  unsure (1)..(649): unsure at all n locations
  Clone ID: AI054508.1
gtgaaagtgagttttgaagaccttgaattcattgctcaaaattgtcgtaatttggcctctgtgaaaattagcgattgtgaaattttggatcttgtcggtttctttcatgctgcttctgttttagaagaattttgtggtggttctttcaatgagcaaccagaaaggtatactgctgtatcatttcctccgaggttatgccgtttgggtttaacatacatggggaaaaatgaaatgcccattgtgtttccttttgcatcattgcttaaaaagttggatctcctttatgcattgttggacccagaagaccactgcttgttaatccaaagatgccccatttttnaaagttcttgagactggnaatgttataggagatagaggtttnannaagttctcgctcgaaagttgtaagagactatagaggcttaaaatcgnccgaggtgctgatgagcaagattgtatgatgaaaaggntgttgtttncaaagaggataatgggtttactcaggatgtcttgatnggaatcttggctgnttatgatctgacataccatgcttattccatatatgggacatctcgaaaatctggtgatttcgctgtttgctgatcatacaaagtatcgattgcctttgacatgaatcgtgtcttgtagt

SEQ ID NO: 58273 - DNA, 678 bp, Gossypium hirsutum
  unsure (1)..(678): unsure at all n locations
  Clone ID: AI054506.1
atattccgcttacttctgataatgttgtcatctttccttcgaggactgtggcaattgagaatgctcttcggctgttctccccccgtcttgccattgttgatgagcatctgacccgaaacttacccaggaaatggttaacatctttggctgttgagactgcagaaactggcttgtctgaggatgttcttaccgtcattgatgcaccgcgccagtcagatttgatggtagagctgataaaaaagctgaagccacaggttgtggttaccgggatagctcattttgantcggttactagttcagcttttgtgcaattattagatgccaccagagaaattgggtctcgtcttttcttagacatatctgaccactttgatttatcgagctttncagttaccaatggggtactcaaatatctatcaggaactcctctgccctcaatgcgncgatcctttgtgggctgggtaaaaatcaggtctattcagattaaaaagttgcctttgtgatatcaaaagatgaggctatcttnaaaagccttgtcaaanactgtcgaaggtacttgaaaggaattactncattgattagcccatactactatggacatcttgttcacgagcttctaagccttcaactgacaaacaggcattcactttntacgagatctgaaagttccaatcagtn

SEQ ID NO: 58274 - DNA, 617 bp, Gossypium hirsutum
  unsure (1)..(617): unsure at all n locations
  Clone ID: AI054504.1
attccttgatttcatctgagctcaatttgttagggttttaagttcaatttcctttttgccccatttttactcattgtgatttcaattcattttcccaatgttttcccatttacttcagaatatttcttgctgatcaatcattctttaccaattttctatcactaaacgtataatcttaaaatattccttcccatcttagtttattaatcgatggactaaagatctgtaacttaaagttagataagaaaagttgcaaatgcatagctgaatttgttaatgaattntggagtaatatgttattgaacttttctccagccattcccctagctcacttctggtcttaaggatggtagcttcaatccttgtacgaattgttcacggccaagattaacaatctagacctattttcgattccaattgttgaatgcttggtttatctcatgactgcttctggattcagaatatatgggtatatgatcatgtgtgtagaaagcttctgttaccccaaggcctgcctttattcaatgtacattcattatttatgcttagtgatatgaagattgcatctttcatattctgatgttgactgatatttactattttaagatgtgaagtta

SEQ ID NO: 58275 - DNA, 620 bp, Gossypium hirsutum
  unsure (1)..(620): unsure at all n locations
  Clone ID: AI054501.1
ggaagccaaaaaaaaacttgagagttcccacttcctccattcaacatttctctcagatgattgcatagccaccatggcgttgagatcgtcagatccaatcggactccaaagcggcgtcgctaagccgtcccgcaatagtcggaagaagaagaaacagaagaagaggaaggaggctatagctgattccccggtaatttcggaagatcctgtggcggaacagtgtgggaacgaatagcagtggtacccttagtggagtcgacttccgagaattatgggatcagagataacggnaacgttaacaggatcatntgcgttggcagccgagcgttgtggttgtggaggaaagcgtgtgtcaaaatgttntgtggttntggggaattgaggcacggatgtcatttggcggagagaggagatgancggtggcgtccaggcggagagggatcggcggaatgaatggttcgaaggaccgattaccccgcacacctaacccgtggttatgggacgtggcgaatagtgaccactgagtcttgattgaagcgctatgctgagatcctatatttatcatgacnaataccgaagacttttgatgaatgttggaatcatgcgagacacacctgtgg

SEQ ID NO: 58276 - DNA, 631 bp, Gossypium hirsutum
  unsure (1)..(631): unsure at all n locations
  Clone ID: AI054489.1
gaggtcctcaaagttcaggatgccatcttcgctaaccgtgacgttccagcagccggtatggccggtacatttggtggactcaacatcttatggagacccaacggtcctagatgcaaccagctgtgtaagcttgttatttgcgaaatcatgagcaaacaaagcttggatgcttgctacgtgcttcgtcaacgagaggttcgacgaatggtaaaggagattcacggaaaagttggttcctcagttaacatatataaacaactatcagcaaccgctctacgagtgatgatgagcacgctatggggtngatgatccatcgcaagatttgattgagttcaggaaacgattggatgaaattataatgacatttgcaacaccgaatgtttccgattttttcccaattctggccccatttgatttacaaggaattgaatccaagcgaagagcattgtcgtggtttatgggggttntgatcaatgataagaccgagaacattnagatgatggaaagaaagacaaatagcaagatntatgcacaattgtgactgactgcgagagatataaaactttatcctcacaatgaagcttgctctgattgatgtcgcgtcggatcataccactacgaagtgcatgac

SEQ ID NO: 58277 - DNA, 617 bp, Gossypium hirsutum
  unsure (1)..(617): unsure at all n locations
  Clone ID: AI054488.1
gccagcccaaattgaccctgagctggaaaatgctttcatttgtcatctgcatgaccattggttttgtatcaggaaagtgaatggagaatggtagaatttcaacagtctttatacagccccagagcacttctctaagttttatctctcagcctatctggactcattacaaggagctggctggagcgttttcctggtgaggggaaacttctcgaaagagttccacatttcttccactgaagcttttaatagttacgggccagtggctgtcccctgaggatgctgaaaggataactaaatcatctgacgtgaccacgccccgaggctcaacaagttctaaccctgatgcanttgagttacctaaaagacccatgactcgagcctgggcttagcgccttaaanagctgttcaactttggttgctcactttggaatgaaacgagctcatgccaagganaagatgggccgctcattaaggctctgcaatctttgaagtcacctcagtatatcagctcaaactgcgtcactctttctacttaatctggttatatgctgataaactatggcttagtaatagtattattagaattatgctaacgacattatnataggttattgcag

SEQ ID NO: 58278 - DNA, 689 bp, Gossypium hirsutum
  unsure (1)..(689): unsure at all n locations
  Clone ID: AI054486.1
gagacatccaaagtcttgaaagctgtccaattgaaaccggtccaaacaaaaccttttgttgagcaattttcacagaatgataaggttgggaaacagtcttcaaccccacgggtgaaattcaacatttctgaaaaacctgttcccaaaaagcttccaattacagttaatggaaaaattgacttccataagactcaaaacatcaccgtgaatggagtttcaaaggattcaattcatgtggacaagaataagaaagatatgttgccattgatgaacaggaatgttattgacaagagcagaaaagttgatactgctggtagtgaaaaaagccaaccatttgcattgacaaatggaaattctatgaaatcagatccttttgagttaatggtagcagtagatgggcagttaggtttntagggttaataatgctcattttgatgcctgtgataactcaaaagcaaagaatcagaagattcatctgatatcttagaagcaaagcanaaattagaagattcttgtgatatcttagggccacatagaaaatctgaagaatttctgtatggtttaggggtcaaaggagaaaatggaacggttcctttaaatttctcagggcttanagagaaaaaccgtaagcctcttgtgatattttggggccaatattaaaccaaaggattctttgtgtacacaagttn

SEQ ID NO: 58279 - DNA, 649 bp, Gossypium hirsutum
  unsure (1)..(649): unsure at all n locations
  Clone ID: AI054484.1
gtgttgttgtggtgtttctttattttcactgcaacttctgtcaacctcgtatgcagccgtagtccgcaaaaataccataccgccttgtttgtctttggggattcgctgtatgatcctggaaacaataactacatagatacacttattaaggcaaattattatccatatggtgaaactttcttcaaataccctacagggaggttttctgatggtcgtataattgctgacttcattgctcagtttgcaaatttaccactcattccaccatatctccaacctggtaatcatgaatttacttatggggtcaactttgcttcagctggagctggtgctttgtccgaaacttataagggatatgtgatagatttgaaactacattaggttatttaaganagtgatatagctgatgagaaaggaactaggtgatgcagaagccacggtcatattctcaaaagccgtatacttaattaacatttgaggcaatgattacatattaattttaaccctatactccatcgtctttcaagcctcctccatcaagaatatgttgcatggtgatggcatattactggatttatcaaaatttttagaaggatgaggaattggattctatctgggtattggtgttcatcctaaactctgacctgat

SEQ ID NO: 58280 - DNA, 641 bp, Gossypium hirsutum
  unsure (1)..(641): unsure at all n locations
  Clone ID: AI054481.1
ccgaaacaagtattatgttggtgctaagcttgaggatacgatattggtggggaagagagtgaagtttgttatgaatactgggctaatggagggttctggacaactggcatatggtgggagttttgaggcttgttttagagggagggactaccctgtgagaaatgataatctcagcctgactatgacagctctctcatttagaaaagagacagtccttggcggaggttttgagtccgagttcaggccattacgaggtatgaagctgtctattaatggcaatataaatagccagaaaatggggcagtncgtgtgaagatgagtggctctgatcatgtggagattgcattggttgctgtcttttcaattttaaggcccttttgcgtcgaaaggccactggaaatagagaccttgaagcatgnnagggtgtttgacgccagaattntcttgttaggacttgcagaagagtggtattaaagtggtctatatctcaataccagtttcttccaacacatgctatatatgctgggatttttgagccatctgatatagctcgtttattgacattttttcagattgtaggacaagacagggtttgatgttgccatgtatctcgtatcctgaaggggtgcatgatatcagan

SEQ ID NO: 58281 - DNA, 627 bp, Gossypium hirsutum
  Clone ID: AI054477.1
ggctgttggaactgaattgcttgtatttgggaaggaggtaactttccaggttatatataggtatagtattctgacgaactcatggactactgggaccagtatgaatgctccgaggtgcttgtttggatcggctagtcttggagaaattgcaattttagctggtggttgtgactctcagggtaatatcctgagctctgcagaaatgtacaattctgagactcaaaaatgggagactctccctagcatgaataagccaatgaagatgtgttgtggtgtatttatggataagaaattttacgtgattgtaggaatcggtggaacttttaaggatgccacggttctctcttgtggggaggaatatgatatatatatcatgtaatggattgaatttctcatatatttttgaatgaacgtatctgctcgttatattcctgtgttattgtatttttttttgtttttacaattctatttagttttgattctgattgttataatatttttttatagtctatatattgtacttattgtttatttttatattttgatataatcttcatttagattattttatgattatgtgctttatatgtcatatgatttctatattttttatatatttattcttaa

SEQ ID NO: 58282 - DNA, 655 bp, Gossypium hirsutum
  unsure (1)..(655): unsure at all n locations
  Clone ID: AI054475.1
accatgggctacggtctgcctgccgccatcggtgccaaggtcgcacgacctgattgcactgtcatcgacattgacggtgactcctccttcagcatgaccttgaccgagctctcaacggctgccgagttcaacattggcgtcaaggtcatcattctcaacaacgaggagcagggtatggtcactcaatggcaaactctcttctacaccgacagattcgcgcatactcaccaacgcaacgccgatttcgtcaagctcggtgacgccatgggtgtccaggccaagcgatgcatcaagcccgaggagcttgaggactcgctgaagtggctcctcgagagcgacggcccggccctgtggagggtcgtcactgaccagaaggtaacctgtgctgcccatggtgcccgatngaagtggtctgcacgagtttatgatttacgacgagaaaaccattaaggaccgaagaaagcaaaccaggagcgatccggtcgttaaagccatactggtgganatgttngattcacgtggtacttcattcgntgngtatattcttgggtcacaccggcgtttattccttctgttagcaatcattctagcgtcagtgctgtggatgttttctctctttgaagtcgtaaataaagcgaattatctttatttatan

SEQ ID NO: 58283 - DNA, 637 bp, Gossypium hirsutum
  unsure (1)..(637): unsure at all n locations
  Clone ID: AI054467.1
aaatggaaaagcgccatggatgaagaaatgcagtctctcctgaagaacaatacttgggaattggcgcaattaccgaaaggtaaaagggcaatcggatgcaagtgggtattcgcaaagaaagatggatctcctagcaagaaggatattcgctacaaggaaagattggtagctaaaggctacgctcagaaggagggaattgactataatgatgtattttcccctgttgtgaagcattcctccattagaattttgttgaccttggtagcacagttgaatttggaactagctcaacttgatgttaagacggctttcttgcatggtgagttagaagaggagatctatatgactcatcccgaaggatacacagatgctggtggtagaaattgggttgtaagctaaacanatcgctatatggattgaagcaatccccgatgcagtggtacaagcgatttgtagcttatgagaagttagaagtcacaagaggcaatttgacaatgtgtttatttgcagagctgctgacggatctttatttatctactttgttgtgatgatatgtaatcgcttcgaaagccaaagagatgataacttatgcttagttgatcaaaggtcagatgaatatctaggaagccagaaattt

SEQ ID NO: 58284 - DNA, 663 bp, Gossypium hirsutum
  unsure (1)..(663): unsure at all n locations
  Clone ID: AI054466.1
taaagatgtgattaatatgaattaaacatggacatgcacaaatcaatttatgtggatggcaagaccatgcaaactaggttatgaggttgataatttaacctagtaaaagatgtagtaaaagatggacatgtctgttaaattattggactgagaaactgtccaacaagggggaattaaaaaccagtttcggcacaagtagatggcttcccaaaagcaagctttgggtatttaattaaaggtccttacagttggaaaataatcagaaatcagtccaacaacttttctgttgaaaccatccaccctatggctactaatagccttggtttgaattcaaaatgaggagactaagtcatcctttttcatgaattgtggttggcatatgtgagagnaaaggaagaatttaaattctatttttagcgaaatctaccccttaccttcacctataaataccatgcatcaatncctcgtccatcatccctcatatctcatatctcttctctcattaggcatttctctacattctatttcccttttccttcccctgcatagccgcccatttccctttccatcctttatncaacataagctntttcaaaaacattgtttgacaagccaccttggaaatnnctagcannagaagcatcaagtagacggatgagcact

SEQ ID NO: 58285 - DNA, 614 bp, Gossypium hirsutum
  Clone ID: AI054463.1
ctgtggtccaataactggtcttgtggttcaaccttgtgtcggtatttggagtgataaatgcacttcaaaatatggaaggagacggccttttatccttgctggatcactcatgatctctctttctacattggatacattttaggtgatacgatggagcattgcagtacgtttaaaggtacacgaacgagggcggcttttgtctttgttattggattctggatgttggatcttgctaacatacagtgcaggtaagccatccatggtgaagtttttcttactttcaagtttgctgttgtataagtttgtgaatgatagaatttttattttcttagggaccagctcgtgcccttctggctgatctatcaggtcctgatcagcacaattcttcaaatgccatattttgcttatggatggctggtggaaacatttgaggtttttggctgggctatgggagatggattgtggtttctttcttgaagtaaacttgtgtgaacctgtccatctaatgcatatttttcctatgaggttaatctatttgactgtgatctaatttgttctaggagttctctttctctcttaagtatttcattatttttgttcttgtgaaattcata

SEQ ID NO: 58286 - DNA, 662 bp, Gossypium hirsutum
  Clone ID: AI054462.1
tcgaaggttgatagtatgcaaagactttgctcatctatggagcctatgttacgcagaattgtcagtgaggaagtggaacgggcattgacaagaatagggaatgctacattgactgccaggtttgcttctacagttactcccattatttggacattaaaacttgaattttctctttggatctctgtcaccatattcatgatgttcatataacggggtgatacttctcattttttcctggaaatatttgtgtatggtacatattaagaatggagaagtatgatctttcataatttaaggatatgcattaaatttcattatgtattatctttataagacatgctcgattttaatacttacctcattttctataaatgttctcttattccataatatatggtttttttctttatggtaataatgtaaaagcttttcttaatattatatggaactgattaacatgtattacaatttgctatgagtgtaactttacatctatttagtatatactcaatgtggtcttacatattctccgttaagaatattgttgtttaccatgggtcataatacatgttatttataattattagttatgtctgttggcaatttgttattatatatattgatattatgtagtgacttgagttcttaatataaattttaag

SEQ ID NO: 58287 - DNA, 650 bp, Gossypium hirsutum
  unsure (1)..(650): unsure at all n locations
  Clone ID: AI054453.1
cagataagcagccacttctagaaactcctggtgaggtgtttgaacttaagaagcttcttccagcatcaatgccttatgacttcaatatccatgttatggattttcaaccgggagaattccttaatgtgaaggaggtccattataatcaacatggtttgttgcttttagagggacagggtatttatcgcttgggtaatagctggtaagagtcataaatgactgttgaaaccttgttaaagcatactacaagttatctatatattgcctttatcatccgggagccactgtgtgaagattctctagaaagcaacctgatagttctggctatctcacatttatctgctatttgtgtttatcatggaatataaaattttcaaaaatatttttggcatgcggtatcaatagctacattgggaagacaagaatattttctcccttttatattttcagtgcatcagntgtgttttctggcatgtgtcatatgccatctttcatggaatgtgctagcatggaccatagatgacgtgctctaaccaagtaatagacattgaagttacatgctaaggccttctaagtcatatatctcatgtcccatctgatgttcacccatttttgccctaagcccttttctcacttgtctgttcattggg

SEQ ID NO: 58288 - DNA, 630 bp, Gossypium hirsutum
  unsure (1)..(630): unsure at all n locations
  Clone ID: AI054452.1
aaaagcctttctaactcaaatctatagagatgagaaccaagttttcatgtggtctactaggaggcttccttctcctttcttcgctcgtttcattatctttatcatactcagccgacgatgtttcttccagacggttgcttaaagcaacttctaataggggaattcaacagtatctgatacctcacaacaagttaagagcagagcgtgggctccctcctctcaaatggagcaaaaagctggcaaattatgcttcctggtgggcacataagagacaaggagattgtcgcctgattcattcgaatagcaattacggggagaacctcttctggggcagcggcaaggattggaaaccgagggattgcagtgacagcttgngcagcagagaaaaggaactacaaccgtaaaactaatagttgcagaanaatanagagtgcctgcattatactcaaatatatggagaaacagctgaggntgggttggccanagtcgtgtgcagaccggcgatcattatcntctgtactatgatcccctgggatgtgatgngcagaagccttctagctgaatggtnntgctggactcagcagccgaaactagataatatcggctgatgcaccgacacaacttgtggcg

SEQ ID NO: 58289 - DNA, 638 bp, Gossypium hirsutum
  unsure (1)..(638): unsure at all n locations
  Clone ID: AI054448.1
ttgacgcataacatgttggatttgatacacactcattggaaacgacgtcgtgtttgcaaaatcaagtgcaagggagttcccaccgtggacatggataatgtttgtcgtcatattgaagtaattgtcttttaacactcttttttgctttcaatcatttgaattgtacataaccctgcagagccatgtttcccatttctatttttgttaactgtgtagcattgcccttgggtgtttatatgatangtcgtctttattttgataacaatgatggaataagaaactcaatattctgctgcattactcacatgtcgattcangtggttnggaaattgaatttacatctctttctgtgattttagaggatgcactccgcacactttctcctttggaaatgtagattcagtatattttgattgaatttgtgctgcaaaaggagannacatgttctgtggccannttagtttcctatcganaagttgttatccactccaacaataaagttctttaaaagtaagttgcatccaatgttgntagatagtgtgatgatcataacttaagtgtatattaaaatgcctaacatngaatgcatgtactgtntacttagaaatgacaactctatttctnncttcagtatctan

SEQ ID NO: 58290 - DNA, 637 bp, Gossypium hirsutum
  Clone ID: AI054445.1
agtttttctgctatctttttctttttatattttgtttccgttttcatgatgttgcctactaagaggcctgctcctgatcatggtgatgatgaaagctatgaacttatggtccctgaaccaaaaagaagaactagccttaagaatattagaaacataatgggtgttggagggctttcctttaataaaattgtgctcaaccttgaaccaatgcttagaatatgggttcacgaggcagtggaagctgcaattaggtcctccattcatccatcttcaaggccttcgctcaatcggatcgaggcatcttgatgacgaatgctgcagttacttttcgtctataaaccgtcttcgattttatttacatgctgcaatgatgggactggtgaatgggtatccattttgattattcttattgagcacttactctggcattatttttctctggtttcttgtcttctataatggttatatcgttcctcttactgttatttggtacttatgatcatttaattggctcttactaattaatgccctgttttcttgatattatgtttatgccttcattactggtgtttttatttatactgctatttgtcttacattcttcttgtttttcacgctactttcttcatttatttat

SEQ ID NO: 58291 - DNA, 315 bp, Gossypium hirsutum
  Clone ID: AF064464.1
accaccctgatattcataacacccaagtaaccaatcacctctcccctccaaaatctggaccacttcccctgaagaataaacaccgttaaccaattccattctgagctgaagcactttctgcatcaattcctgtttggggcggcgttgggagtctgccagagaaagcttttcaatgaacaagctgataacattaacggggactttattgggcaggggagcatgcgtggcaggggcaacagtgtctccataaaatctgaaaagggaggatcttggagtagcacacgaaagtgagattaaagatttgggtttcgaagg

SEQ ID NO: 58292 - DNA, 511 bp, Gossypium hirsutum
  Clone ID: AI732047.1
gtccaaaacccttgtcaaaatttcccagagccagaaccctgttcttcctctgctcaaaaatgtcttcaaattccaattccctccaaaactacccaacaccgctatcccctcccttgccatcaatctcgaaagacatagagcttgccagagccatgtcagcttcttcaaaatcaagcctttttggactctcaagaagtgatattttatatgaagacgagtggctcattgctgtcaacaagcctcaggggatttattgtgacaccattctggcctcagttcctcgctttctatctgactcggccccgtcagatcggctctgtgaagggaaccaagccagcacattagagctccatctggccaatcgacttgatcgtgacacaagtggtgtcatggttataaccaagtcacacaaagtagcttctgtgcttgtcaaagcatttactaatcacaaggttcagaaaacatatgttgctttctgcattggttcagctccaaaatcagaaagaaagta

SEQ ID NO: 58293 - DNA, 506 bp, Gossypium hirsutum
  Clone ID: AI732044.1
ataggaacgttttatgagactcccatggtgaatcatgaacgtgaacaaacacgtcctgatgtgctgcaacctgcgaagccagtggcagctgctggttatggcatgtatggagctgcttgcacacttgtcttgagatcagggaagcgaatcaatggattcacccgagatccatccctgggctagttcacccgaactcgcccatacatcgagattccatagaaacggaggatcaatacggctgctgatgtagatacaactactcgggacagaccagcggctgtgtatgtcaaaaattgtctgttccctaaagatagtcccacctcgaaatctctgaaaattattggattcatagtatcagatgtccaccgctcatgtccctacggtgtgacccttctgttccccgctgatgctaagaccctcttgtgatatctcttgttctctaaataatctttcctatgtcctttttgatggaaaatgccggaggtcacgcgttcactggaacatct

SEQ ID NO: 58294 - DNA, 578 bp, Gossypium hirsutum
  Clone ID: AI732015.1
gctggttttatctggggagtttcaaacattcttatggctctatgctttcttgcaatgctggttctgtcatatgtggccaatcatttggattatattggtcatggtctacccccagttggcattgtcattggtgcactagtgattttttccttccttggtattccattggctattacttatagtgttccatatgccttgatatcctcacgtattgaatctttgggactcggccaaggattatcaatgggtgtcctaaatcttgctattgttattccacaggttgtggtgtctctgggaagtggaccatgggatcaactatttggtggtggaaactcaccagctttcgcagtagcaggtgttgcagccctcaccggtggactggtagcaatcttggctatccctcgaagtatttcacagaagcccagggtcgtcctcccatgaggtattttgttttaccttttttttttgtatgcaatcaacatgaatattatatttgttcacacagcaacaatttgtgtatagctattgctgctctattgattaataaaatcgttgtgatttgaagttgttggttggcc

SEQ ID NO: 58295 - DNA, 637 bp, Gossypium hirsutum
  unsure (1)..(637): unsure at all n locations
  Clone ID: AI732007.1
gccccgtcnccncaccttcccctcctgttttcccctcctttctcgcggcgggggtgtgggccccccctgcccctccgctcgttctttgcgtcgcgcggcttccgtgccttgttctgcgtcgggctcgcgggtcgcgctctctggttttgtgctccccttctttgcccgctgtgtccctctcgtcttctccgccttcgctggcgctgtccggctccctttccttcgcgtcgtttcgctgccgctgtcctggtggggtggtgcngcgtcttcccgtggccgtgtcggcgtttgtggcccgtcccccgttgtcgctctctcgcccttcctgtcctcgtgcctttcgtctcttcctcctctcttggcgggggcgtttctctcggccgtgttttgcgccgtgtggcggtccccttcctctcgcgtgcgggcgggtccgtgttttccgtctcttcctgctcggctctcggcttcgtccccgtgctttttctgctgtcgtcccgcggcgccgtttccccgctgctcctctcggctgctgcctcgtgcgtgtctgtttgccgccgtttgtctcctggcgtcttcgctctctgcgcttccgtgttcggggngctcgtcgctcgttgctttgcctgctctcgcgtct

SEQ ID NO: 58296 - DNA, 690 bp, Gossypium hirsutum
  unsure (1)..(690): unsure at all n locations
  Clone ID: AI732001.1
gcatcagaaatggtggtagcgttagagtaccttcatatgttagggattgtttatcgcgatctaaagcctgaaaatgtgcttgttcgatcagatggtcacattatgctcacggactttgacctctcattaaagtgcgatgaatctacgtcaacaccccagattatttctaataaaaaaccactgcttccagctccccaaaacgtctatcctatacatcaacttccttttatatcctcttcatgcattatacctaattgcatagtatctgcagtgtcatgtttccacccaaaacgcaaacgcaaaaagaagtctagccaccgtggtgggcctgagtttgtggctgaaccaatggatgtccgttccatgtcttttgttgggactcatgagtatttggcaccagaaattgtatccggggagggccatggtanccctgtggactggtggacactggggatttttatgtatgaactgttttatggggtaacaccatttaagggcgtctatcatgaactaaccctanctaatattgtggctcgagcccttgaatttccccaaaaaccaacaattccccacgcgggtaaggatctaattcaccacctactggtcaaggatcctgccaagcggttagggtccaccatgggtgcatcagccatcaanccacatcccgttcttccacggggtccattggct

SEQ ID NO: 58297 - DNA, 465 bp, Gossypium hirsutum
  unsure (1)..(465): unsure at all n locations
  Clone ID: AI731992.1
gaatgtgcctagcgatgctgctggtctcaatgaccaaaagaacctcctcacatacggtggcattggcggctactctggcatgggttcaaatggcatgccaatgggtggagttgggagtgttggtggtatgactggccttggtggtacaggtgggatgggcgccatggtaggtgttgggatgggcgctggtantggaaatgaaggtggtgttggcattggcaatgcgcctggtgtcgtccactttccttgaactttgctggatggttaaaattttaaagcagctagtttaacttatgttaaagagtaatattatagttgctctagagtgtgaaatgttgtcctgttttatgggttgtgttaggtccatctttattttttttatgtcgtgttttctttggttttgtaatccgtcatcgttgtggttttgtanccgacttaaggtaaataaattgatttggacaagtt

SEQ ID NO: 58298 - DNA, 526 bp, Gossypium hirsutum
  unsure (1)..(526): unsure at all n locations
  Clone ID: AI731986.1
aaggtttggttttctttttctttttctttttttttcttttgttgtttagatctttgaacggaggcaatgtggaactcggcggagaatgtgttctccaggtcggcttcgttcagggaggaagatgatgaggaggaggcactgaggtgggcggcgctggagaggttgccaacttacgctcgagttcgaaggggaatctttaggaacatggttggcgactccaaagaagtggatgtgagcgagctcgagttaaccgatcaaaggcttttactcgaacggctcgttaaatctgccgaggatgatcctgaacagttctttgatcgtatgaggaaacgaatcgaggcgtaatgctggatttacttactttttctttttctttttttttttttttttgtgtgtgtgtgtgtgtgtgtgtgtgtggtncactgttctgttaagtttannaaaaagaacccagagaaccactctttgctgttttttatattgacaagaatggcaaatcanacgttagtttgaccgtacggtttnt

SEQ ID NO: 58299 - DNA, 179 bp, Gossypium hirsutum
  Clone ID: AI731983.1
aattttaataataggagtgatcatgaccagggtaatgtggaaggactgggtggtggtggcggtggcagtgttgctggaggagaaagaggaaacctgacagcagtagtagaggagacggtgaagagttgtttaacacccgtgtttaaggagttgttaggtagtttaattggaggaggggg

SEQ ID NO: 58300 - DNA, 569 bp, Gossypium hirsutum
  unsure (1)..(569): unsure at all n locations
  Clone ID: AI731981.1
cctatttgtactttctccgccgaggagctgagcgaagcaacgaaaggttacgatgtcggtcaggaaatttcgaggtacgttcatttcgtgttatacaaaggctttctgcgtggtcgggagctatctgtgaaacggtacggaagctataacaaatgccttgaaacagctatcacagatatagtaattagctcacaaatgagtgtgcacaagaatgttctaaaactcattggatgctgcttagagactcaaaatccagtgcttgtttatgaatatggtggtgaaaagaatctccaaagattaatgtttgatgttagtgatgggcaacttgagccattaacatggaagtctagaataaagattgcaatggatattgctaatgcagtcgcatatctccatactgccttgtccaggcctgttattcatcgagggctttcgttgatatcgatagtaatagatacgaattatgttgctaagcttgctgatttctcgctctccgtggcaattccgaaaggaaaatcgcatgtcgtagaagatgccatctccggggtagttgggtatatancacctct

SEQ ID NO: 58301 - DNA, 562 bp, Gossypium hirsutum
  Clone ID: AI731979.1
gtgacaattcctcgtcgccaactccgcggagcgccattacgaccaacaattaatcgttgctaccacgctccctggccgcccaaggacactatctccaatggaaaccaacctccgtatcacgtctgatgcccatgtccatctctgtccctataactgtgaggtctaaatggatagaggcctcttccaacctccctacgacagaatttacctccccgaactgggaatgagcatgcgacaagtttcagctcgttactcgcgtagggtttgctagttacacccctcgtgatatcaacgtccgctctgccccaaccgacggtcccatggccgtcctgaacttcgctcctcaccccgttcgtcgggtctcccctggaagcgctactcctggtgcttccactaaggttctcatgacatctttcactgagcctcgactccttatcctcacatatcggtggacgtaccactagcctgtcatcgacccaacactaggatatactcccaccaatgtttgatttgacctacactcaccaatggaacatgttcacatcggtatccccgctcattc

SEQ ID NO: 58302 - DNA, 569 bp, Gossypium hirsutum
  unsure (1)..(569): unsure at all n locations
  Clone ID: AI731967.1
cacaataatagcctgaaactgcacttcaatctcgacatagataatggcgggaaagcagatcggcggcgagggcttgccagccaacatcgctggaatgtcgaaaaatcaactttacgaaatcatgtcccagatgaagacgcttatagaacaaaaccagcaacaagcgaaagagatccttattcaaaaccctctcttgactaaagccctatttcaggctcagattatgcttggaatggttaanccccctcaagtgattcctaccattcagccacctacatcgcagcaatctcagtgtcagcaatcagcacaacctcctccaatgccaaacatccagccagcaaaatcaatgccaggtcaacccgggttgcaggaccaagtggctccatctcagacccaacctcctttaaggaaacagcaccaaaacccagctgggggcacatatctcaactgctgctattcctccagccagcattcagtctcaacccacgccgtcacattcccttcagacaccacagcagatgaaggggcatctgaatcctccgatgtcccttccaccatcatctcaactc

SEQ ID NO: 58303 - DNA, 507 bp, Gossypium hirsutum
  unsure (1)..(507): unsure at all n locations
  Clone ID: AI731961.1
gagaattcctatatggtggagatggtattactgggcaaaccccatagcttggagtttgtatggcctcgtgatttcgcantatggcgatgacgacaagctcgtcgcgctatcgaatggagtagactcgatgcctacgcgagtgttgctcaaggaagtgtttgggtataggcatgatttcttgtgcgtaactgctgttatggtagggttttttgtcatctttttcgcantaatctttggttttgctataaaagccttcaatttccagaggagatgatgacaagggagagtatgcatgcgctgttgtctctcataaacacgattctgtataggaatgttatgttctgggtctacagtgaaattgtttattttgttttaacaattttttttccttataatataaaaagtcgcagtctagaataaggagaagtagattactcatgtaattagaattatatgaaccgaccagattaaattgagttttttttttttaaaaaaaaaaaaaaaaaa

SEQ ID NO: 58304 - DNA, 581 bp, Gossypium hirsutum
  unsure (1)..(581): unsure at all n locations
  Clone ID: AI731956.1
gcttcctagcttgacggtgatcgaaccgaggtatttcgatcttaaaggattgcctgcaaatgatgatcatccatcccatgatgttgctaatggccaaaagcttgttaaagaggtgtacgagatattgagggcaagccctcaatggaaccagacacttttggtgattacttacgatgaacacggtggattctatgaccatgtccacaccccatacatcaatgtcccaagcccagatgggaacaccggtccggctccttctttcttcaagttcgataggctcggtgttcgagtgccgacgatcatggtctctccttggatcaagaaaggcactgtgattagtggtccgaagggtcctttcccgaactctgaattcgagcactcatcgatccctgcaacgataaaaaaaatgtgcaatctatcttccaacttcttgactcatagagatgcttgggccggcactttcgaacgcgttgtctgaaaactatcctctcctanaactgaatggccccagaaatatccgaggccgccccctgaagaacacagcagccaaccaaaaaccctggtctctcctaatttcaaac

SEQ ID NO: 58305 - DNA, 579 bp, Gossypium hirsutum
  Clone ID: AI731954.1
gaaactggttcacctccattattctcctagtttccatcttcaacctctcaactccttaaaaactaaccaaaagagccgctcagctgcagctattcccagcaaacagctatcccttgcccccagtttctgttcctgttgtggaagaagacatttcattgaagctgccactgcagttttacttccaatttccccttccaaatccaatgcctccacttcagtacctgaatccaacttggatgagtccgtgagaaccaaccacatcccgaggcaaatgtcagatcaatcttggtatatgaacccgaaattctctattctgatcggaggagtacttccagttggagctgttttcatctatctgttcatcattctcggctcagtctggcggatacagttcaacgagatcggtagggtcctgttcttgatattcatgatgcgtcattatcacgtgtgcttaaatagacatggtgctttgtaattaccaataattatgtaaaaacattggtggtggtggaaaataaacccccaaaaaggtccctcggtaaaatccttgtccaaggctgtccattaattattccctgt

SEQ ID NO: 58306 - DNA, 629 bp, Gossypium hirsutum
  Clone ID: AI731939.1
ggcagaaaggaggggatggaaatagatttcaagcttctgtttctaaaggtgcaaaccatccatgtgcgaatttcacattccctcccccccctcctcctcatcttagacggattgggcctcggccatgtccagtatgttacctccccgtggatcaggccatagctagcatgccaagctccccatcagaatctccagtgcttcataatttgacatatgttcatgatgaaaatccaattaaaactgaaccacacgggggctccgactttggtggatatccatctctaaagcaaagaaatgattcgtttgatataaaagagtcaatggtagtccactgtggattcgtgaagggaagtaaacctggtcaccagactggatttgattttgacgagtctgaccttgcagggttgcagcagttccatgagatcattgttgcgtctgcgatatttgggaactatgacttaatacagcagccgaggaacatcagtgaagaagcaaagagaaatgttcctttctacatgtttatcgatgaataaacctgcgcatgtttcgtattggcttaaatcgacgttgggtgggcttgtcattgttattccttctcttcaggaagataaatacactgtgaatatcac

SEQ ID NO: 58307 - DNA, 617 bp, Gossypium hirsutum
  unsure (1)..(617): unsure at all n locations
  Clone ID: AI731936.1
actcggtgtgtcctttgtgcaaggcggagccggaggattcccatcatctattatggtattgtancacgttacggcagctctggttctatttgaaactccctatgagatttggtgatctctcatccgatggaacaacaaattttgtacaggcttttctancaatgaatatgaatgctaggcaactcagtgctatttctttgtgggcactttggtataaaagaaataagattgtttatgagggtttaaaatttgagctctttgaagtagtgggttttatccagggctactttcaagaatttactcgggccaaagctagagaattgactgccggtataaaaagggatgttgcttggagacctccgcagtctggaattataaagttgaattttgatgcttctttcatgagtatttcaaattgttctatttcagctgtgttagccagggattctgagggtttaattatgggtgcatgtacgtacccggtggtggacattgcagatgcgtttgtggctgaggcgagagctggtgaacgggctcttctttttgctctggatatgggttttcggaaagtgatattggagggcgattcactaactgttattaagaagttaatctcc

SEQ ID NO: 58308 - DNA, 731 bp, Gossypium hirsutum
  unsure (1)..(731): unsure at all n locations
  Clone ID: AI731935.1
acttgctaccgagcctttcgagtcgacgtatcgataacttgatatcgattcggcacgaagctcccgatcatgccattgaggatctccncnnncttctcaattgcgggtcggggtgcgacttctatcggcatcctggcgggggggtcgggggcaccgctcctcatttaaaatcacccagagaagacgcgtcgtgccactgggagcccttcccatactcgccacggaccacgccccttacgcgccgggcctccgcccctcctggccgcagccgtcgctttggcccggccgtaggccctcccggccttccctcgccgcccttgcccggcgagcccggcactccctcctctccacgcgtctcgggcttcttttcgcccgctgcctcccttgtcttccgctcgtcccccctcctctctccgtcccgtctccgtcctttgtctcaccacatgccccccggcccggttgttccgtcgcggtctcgcgcgccctccctgcctccgcttccccccactcccgtccctcctcgcctccccccccccctcccccgctgctccccccgcgccgcgctcgtacccgctgccgcttcccgcccgggcgtttcccctctcgctccgcgctcgggcccccggtctgctccctgtcccgctctccgtgtccggtggggcgcttctccccccatccccgtctcctacgtcgcgtccgggccccgcctcctcgctcctcccgtccgcccc

SEQ ID NO: 58309 - DNA, 567 bp, Gossypium hirsutum
  unsure (1)..(567): unsure at all n locations
  Clone ID: AI731927.1
gcaatatgaaccctgggaacggcccagtacgagggaccttgtcgctacacttgctccattgcaaaccaaacctgatgttccatcttatgtcatgctcggaatctcaaagtatgaggaagctccaccaacaccgcagcgtgcactttcaccaatgggtgaggcctgttcacgacatgacctcacagcgattcatcaaatattggtaatgaatcactacaaggatgatgaagggtcaaatgagttatctttccaagagtggacccagcagatgagagatatgcttgaggctaggaagcgaggggactatgcattccgtgataaagatttcaaaactgccattgactgctattcccagttcataaatgttggaaccatggtatcctccacggtttttgctcggcgcantctgtgctatctattttgtgaccaaccaaatgctgcccttgcagatgcaatgcaagcacaaattgtgaatcctgattggccaacagccttctacatgcagtcagttgcccttgccaaactagacatgcaaaaggatgccgcggacatgctgaatgaagctgc

SEQ ID NO: 58310 - DNA, 596 bp, Gossypium hirsutum
  unsure (1)..(596): unsure at all n locations
  Clone ID: AI731913.1
agcattttcgccgatgtatgcaatctgttggcgatggcgtttgttgttaaagaagacttacaacaggcgattgggggaaaattttcatttagagataggaaagccttcactgataacttgggagggttgccatttgcaggagggatggcagtgtactgtttcgaggggttcggaatgacactggcccttgagcaatccatgagagagaggagaacatttcctaaggttttggcgatgtcttttacatggatcacacttgtgtatattttgtttgggatttttggatacatggcttatggtgacgaaacaaaagatatcataacactgaatcttcccaaggattggacagccattgcagtccaaattggcttgtgcctggggttagcatttacattcccaatcatggtccatccagttagtgaaatattggaagggaagttgaagaaaaacatttggtttgagaagcttcgcaacaatgatgctgaagattcgataacgagattagagaagttgggaatatacatgggcagaacanttctggtaattgtgttggcagtgttggcgtcattcgttccgggatttggtgtttttgtgtt

SEQ ID NO: 58311 - DNA, 709 bp, Gossypium hirsutum
  unsure (1)..(709): unsure at all n locations
  Clone ID: AI731891.1
agacgcattttgtgccnnnccnncaccnccccaccccccgcgggtgggggctcgttgttgcctcctcttgtcgtgggggcgcggctgtccccctcctggggttccctctcccctgtctgtgctcctcgggcgcgttgccccgctcgtccggtttccgcgctgctctcgctgcgtctgtcgtcttgcccttgcgctcgctttgctctctcctctggcggctgccccgtgtgcttccggtttcttcttcggcccctcttcggctggtgcctcccgtgtctgcgtggggcgggttctgtccctgctcgtggctcgtctgttgtccttctgctggggttcctgccgcgtcggcgccgtccttccttcctggctgcccccgtccccggcgctccgggcggccctccggcgngcgcggggtggggctgctctcgcttgcggtgctggcccctctcctgtccccccctccgtctctgtggtcccgctcgctcccgcctccctctcgcgcgccccccgccccccccgcctcctccccccccctccccgcgcctcctccgtccgctggcctgccccggggccctcctctctgtccctcctccggttctcttcctntggtcctcctcgcgtttctctctccctcttctgctcccttgctccgcgccgccccccctgctgtgccccgcctctggctcctgttcgctcgcgccgctccccc

SEQ ID NO: 58312 - DNA, 672 bp, Gossypium hirsutum
  unsure (1)..(672): unsure at all n locations
  Clone ID: AI731885.1
agtttatataaattgtctctggatgaaactaggtttgctccaactctgaatttggtgtgggaaaattgtgataaaaatgttgctatggatgataagaaagatgggtcttttgtttcgtatcctgagagtgaagttttcgagttttggaagattgttaaagatgggcttgcattgccattgttaataaatctctgtgataagactggtttggcccttccggtttgtttgattcgtctcccagccgagttaaaggtgaagatcctggagtcgttacccggtgccgatattgcgaggatggaatgcgtttgcttggagatgcgatacctggcttccaacaatgatctgtggaagcagaaatttaaagaagagtttgggtgtacgtcaggaactgtancaacggggaactggaaaaagatgtttatttcatgctgggagagtaggaagaagcgaaatccggcgattacaaggtggcaagggtttgctcgtgttgataataaaccgctatacttcccaatttggagagatcccaatccattctttccttcattcggagttcctcacataattggaggtgagcacgatgcatcaccatttgttgctcctcatccttacatgccctgtgttcatcaacatccatttcgaaggcgacagaatttcagacatcactgcagg

SEQ ID NO: 58313 - DNA, 633 bp, Gossypium hirsutum
  Clone ID: AI731861.1
ggggcttcagcattggttaaatcagtacatcctaaatggacttcttccatgatcagatcggcactaatgacaaccgcaactgtgtatgataacatgaggaaaccagtgacgaacggttcggcttcttttgccaccccgcacgagatgggagttggagaaataattccagttaaagcccttaatccgggattagtcttcgaaacaacaaccgaggattacctaagattcctttgttataacggatccccagagaaaactatacgttccatgtcgaaaacgaagttcaaatgtccaacgaaatcctctgatgatctcatttccaacatcaattatccatcaatctccataagtaaactagaaaaaagcatagggttcttaactattaaaagaagtgttacaaatgttggacacccaaatgtgacatatacttccactgtgcaagctcccatgggaatgaaagtgaaggttatacccaaaaagatcacatttttagagaatgtaaagaaggtttctttcaaagtgttatttgatggcagtgaggcttcaagtggatataactttgggtctataacatggtctgctgctcaatattctgttcgtacggtgtttgcagtgaatgttgagtgataaaac

SEQ ID NO: 58314 - DNA, 649 bp, Gossypium hirsutum
  unsure (1)..(649): unsure at all n locations
  Clone ID: AI731846.1
gtgcgtgacacttgaccccacattggatacgtttctaacgatgtgtgtcttgattctgacaactgcaacgtcctgttcaacattcgaccaacaaacccccgacattgcccacagtgtctatggcccctttaccaatcgcccacaacatattggagctcgttacacatgccatatgtctggttatgccactgatgaaaccccataatacatgcctctcagacatgtcctttcaactaagcttggggcacgtctatactgaggttatgaaaaaatgtcctcgtctatctagagcctgagtgtaaaacacaggtgacagtataatagtacgactataaggttgccatggtaccggtgcgtgttcacactgtcctcatctccacccgccataatgagactgttacaaataatgacactgccgctgagctcaaagagcatgttatcttacctgtcatacctcaaaagtagtctcattcgaacaacaacttccacctcgacccatctaggcgctttgtcattgctggtactcacngatgagcacgtcttacccgtcgaaatatcgacatcnacacttacagtggttggggaacccatggtgccggcgccttctctggacaggatccaaccaatgtcgagtgtagtggatcttccc

SEQ ID NO: 58315 - DNA, 648 bp, Gossypium hirsutum
  unsure (1)..(648): unsure at all n locations
  Clone ID: AI731844.1
gtcaatccacttttaccgaaggttctctctttacttgtaagttttatcaagcgtcctcaccaaagcctagctggaatcgggattgctgcatttgtacgtttgatgaccaattctggtgatcttttcctcgaggagaagtggctggaagtagtttcttcaataagaaaagccgttaatgcaacacttcctgatttctcgtacttcgttagtggggatatcacgcttgaaggcgatggacatgtattgaatgaccaaagcaatgaggcttctcatggtattgacacgtctcgtggtgattcagagagcctaggaaagcaacgtctttatgcttctttatctgatacgaagtgccgagctgctattcagcttttgttgattcaggcgacgatggaaatttacaacatgcatcgaactcgcatatcagctaagaacatcttattccttgttgatgcaatgcatgatgtagcatcncatgctcacgggatcaacaacgatgccatattacgtaccaagcttctaaagtttggtcggatgacacaaatgcacgatcctccattattacgtttccagaacgaatcgtatcaattttgccttacattcttgcacaatctgatattagataggcctccaagtcttgaggaaccaaat

SEQ ID NO: 58316 - DNA, 647 bp, Gossypium hirsutum
  unsure (1)..(647): unsure at all n locations
  Clone ID: AI731842.1
atgtgagccaatttttctctggggagttgggccacatttttttcttcttcggctcgtttctgttctctttgttcctaatttgtttagggcacaaattctaaatttttttcctttctctttcgattcattatcatttctttttcttcgtgattctctgctctttttttactcatggtggatattgattttcatcatcctttgttccttcatccgtcggatacaccgggcaccattcttatttctcatcgtttgaccggtgttgagaactattctgtttggagtcgtttgcttcgaattgccttgctcgcaaagaacaagctcgggttcgttgatggtgattgccgccgttcgacgtatccggactctcttcgtgctcaatgggatcgctgcaatgcttttgtcctttcttggattctaaacacaatgagtccagatttatctacggggcttgtatttgcttctgattctgctgcggtttggacggatctcaangatcactttancaaggtggacggttcccgtattttctttcttcatcaatctattgcacatttcactcaaggtgatgctactgtttcttcttatttcacgcaattgaaattgctttgggatgaatatactgctctcgttccttttttcacttgtaa

SEQ ID NO: 58317 - DNA, 660 bp, Gossypium hirsutum
  unsure (1)..(660): unsure at all n locations
  Clone ID: AI731840.1
gctatggtcgcaaggggagacttgggtgctcagataccattggaacaggttccatcagctcagcaaaacattgtccagctctgcaggcagctaaataagccagtgattgttgcctcccagttacttgaatcaatgattgaataccctacacccacccgagctgaagttgctgatgtttctgaggcggtgaggcagcaagctgatgctttaatgctctctggtgagtctgctatgggacagtaccctgaaaaggcattggctgttctgagaagtgttactgtgaaaatagaaaagtggtggagggaggaaaaatgccatgaagctatggaattgccacatgtangaactttgtttgcagatagtatctcagaagagatttgtgattctgctgccaagattgccaacaatctagaggcggatgccctttttgtctacacaaagacaggccacatggcatctctcctgtcccaatgtcgaccaaattgccccatctttgcttttacaaccacaacttctgttcggaggcgtctgaaactacaatggggtctaataaccttccgtctaagcttctatgacaatatggatgccaaccttaacaaaaccttctcactactccaagcccagggaatgatcaaatcaggcgaacctgtaatccctgtt

SEQ ID NO: 58318 - DNA, 422 bp, Gossypium hirsutum
  Clone ID: AI731835.1
ccataagtggaatgcttggcgtgcagccttgaaacacagatacttcaacaatccttgggccatcgtctcattctttgccgcttgtatattgctggtgcttacttttgctcagaccttatatggcgtttatggatattacaggccaagttcttgaatgcagtaaggtcctcttataatccctctactattatgaagagattgcaattatatacatcaaagatttctattcatttcttcaatcattaggcgaagcaacctttttgtttaggcaaaatgtgatggctcacagtatgtctttgtattagcaaaatactcgacagaaaaggatgcagcaacaatgccattgtttgtttgattgtctagtatcagccattgaagtttatccatcttcaataatttgcatcaaaaaaaaaaaaaaaaaa

SEQ ID NO: 58319 - DNA, 561 bp, Gossypium hirsutum
  Clone ID: AI731817.1
ctcttttaccctactggctgaagaaactcccccattgcctttcttcacacctcttttctttttccttttttcctttcatttcccatactttccttcactttcccaccgcccaaacatggtgctctgcacaaaactccaccgtttagaccttcgttcaacattcttcacctctcttcgcccctcgtttactcccaatccctcctcttcagtctcccccaaaacctttaaatttagaccaactaaaataactgcccaagtttccactctcagcgttgaaacctccgttaaggaccctgaaagcgacattgaatcgctgttttcctccaatacagaagaaattgatcggaaacgttccaacaagcaatccaataccggtgcttcgggtatttcctccggtgtaaagcttgaaaacattagcaagagctataaaggagtaacggttttgaaagatgtgagttgggaagtgaaaaaaggcgagaaagttggactggttggagtaaatggagcagggaaaacgacccagatgagaattataacgggacaagaagaaaccgattcggc

SEQ ID NO: 58320 - DNA, 555 bp, Gossypium hirsutum
  unsure (1)..(555): unsure at all n locations
  Clone ID: AI731813.1
ggtcatgtatctgctgcatggaagcttcattactacnaatgggtaatgcagttatttgagcaatataacattagcgagggtgcttgccaatttgctcttgctgcactggagcaagttgatgatcttggccttggaggtgatggctttgaaagagattcatctaatgaatccactactaccatcaaaggacgtctttgggcaaatgttttcaagtttactttagatcttaatcttctgaatgatgcatactgtgcaataatttccaatccagatgaagagagcaagtacatctgcttaaggcgctttgttattgttctttatgaatgtggagcaataaagatactctgcaatggtcaattgcccttaattggtttggcagacaaggttgagcgagaacttgcatggaaggcggagcgtacggatatcttggcaaagccaaatccatacaaattgctttatgcatttgaaattcacaggcataattggcgaaaggcagctatttacatgtatctatattctgctcgattacgaactgatacagttcagaaagatcat

SEQ ID NO: 58321 - DNA, 563 bp, Gossypium hirsutum
  Clone ID: AI731812.1
atcagctcctcctccttctaccactccatcccctcctcctccttccacttcatcacctccgccttcatcctctgcctctccacctcctccggccactgaatccccacccccatcatcctcaaatccttcccctccgccgccttcctcatcaacaccatctccgccgccgccaccgaggagtcccggtactgcatctccaccaccgcctccgaggaattccgggactccatctcctcctccgcctccgtctgattccagtaatgagacgccgacggggctcatagtgggggtagcaatagggggagtggcgatattgttggttttgggtttgttgtttttatgttgtccgaagaagagaagaagaagagatgaggaaagttactacatgcctcctccacctactggacccaaagatgatccgtatggtggccagcagtaccggtggcaacaaaatcctcctccgcgtgtggagcaatttggtgctgtggctccaaagccgattcctccaccagttacagcatggcgacctccatctccaggacaatcttctacacctcctccat

SEQ ID NO: 58322 - DNA, 561 bp, Gossypium hirsutum
  Clone ID: AI731772.1
ccttctctacattttctctttctcaactccatggattagagctctgctaaaaacccattgtgcctttgctcatctctccttttaactgatctgggttttctttatttctcattcagatcatagttttccaagaaaaaaaaaacttctctctttctttctttctttgcttcactcaacctttgaaagaaataaaaaatccagcttttcttttttctgttatagtaacttcttggattggtaaacgagattctgaaaaatgggattttgtttcaaagatgcagaatattgataaaccttctttagttgtttgaaattgttgttttacgatgagaagaggaagaggaaaagcaaagaagcagaatgttgtttcatctctggaagatccgggtagtggtgaagatgaaaaaataccggcatataagagaagaggaaggccacaaaagcagatgaaggatgatatcgatgaagatgaagcggagaaagttgaagaagatggtgaagatataaaagtctcagttcttaccaaagagatgaaaaaccaggctgtcccggagaacggac

SEQ ID NO: 58323 - DNA, 587 bp, Gossypium hirsutum
  unsure (1)..(587): unsure at all n locations
  Clone ID: AI731763.1
caccaagaaagtcctcatccggatgaacnannacnntctccctcnaaggtgttttgagaggcctgtggttaggggcgggactgtcctgtgtctcgtctctttccccctcccttctgcctcctcctcttcctcttttactctctttgtgttctgccgcttccgtccttcgcgtctgtcgttcccttccgtttttcctctcctttcggctgcgcttctcttcttgccctctggtctggcgtccgcgcttcgcctttcttcccttttttcttttttgttccgcggttgccttcctggccgtcccattttctgtcctctctgttctttctttcgcttctccctttctcttcctctctgcgtccgcctctcccccgctcctcgggggttgttctccctctgtcgcccgcttccttctgcctccctgatccgctctgtctttgtgcgtctctctcgtctctcttgccgttttcccccccgcgtttccggctgtgccggtttcgcgctctccccccgtcctgtttttttccttccctttctctctctcttctgctctgggtccgtcttcgttgtccttttttcgctctcgtccc

SEQ ID NO: 58324 - DNA, 599 bp, Gossypium hirsutum
  unsure (1)..(599): unsure at all n locations
  Clone ID: AI731744.1
atgttgaagcacaaaagaaaatcgaagctgccatacgacagaaaggaattgatgagaactgggctgctgccttggaacataatcctgaaggttttgcaagggtggttatgttgtatgttgacatggaggttaatggtgtcccgttaaaggcatttgttgatagtggcgcacagtcgactataatttcgaaaagctgtgccgaacgatgcggattgctaaggcttttggatcaacgatataaaggtattgctcatggggtcggccaatcggagattctcggaagaatacatgttgctccaatcaagattggaaatatatttttcccttgctcctttgtggttttggactctcccaacatggagtttctctttggattggatatgctccgtaaacaccagtgtattatcgatttgaaggaaaatgttcttaaagtgggaggaggagaagtttctgtaccatttttgcaagaaaaggatatcccttataacttccttaacgaagaaaggcattccaancatggatcgagcttgggccctgctattacnacaggaacaacagaaaaaaatgctaatgtgcaatccggaggtcaaccttccggc

SEQ ID NO: 58325 - DNA, 609 bp, Gossypium hirsutum
  Clone ID: AI731733.1
gcagttgatagcatcatcagttgcaagtccttctgacttaagtttttattaaagcttttttgaagtgaaaataggtttaaccatgcataagcatgataaagatggctgcttgaaatccaaaatatttcagttaacttggcataataaaccaccatcaaggaagccttgggagttttcttcacaatggacatcaatccatgaatatcttcaacagaacgaaaagcttcctgccagagtccaagttcagtagcaatctttagctgctcaaatctcgtatcaagatacagttgcaaactttcaggtgctgaaagatcaggtctgtccctctggtctttatatttatttagatttgctaaatgattccttataatctcacacaaccttcggaactctgttgtccgtttatactgcttacaaaactggaatgcccgatgtgctgtcatcgcatagagtgcttctaacttggaattgttccgcaatatttcaagcactgttctataggtctcccaaagaaacttgaaccaaggagtaacaagttcacgatcagacctatcctttcctttctctccactgacatagcttaacattaaatcttgtggccttttatct

SEQ ID NO: 58326 - DNA, 625 bp, Gossypium hirsutum
  Clone ID: AI731729.1
atttttccgactcagtaagcttccattatttctccccctcccgattcagatctgtccgaacagtttgagatcaaggagttgtggtgcgagaataactacttaaacgacgatgtttggtgcaactagccaaaaagtgcatcctgataatgctttgttctgtgcccatttgcatcccagtctgtttttggggagaccaacaatgcaagtagcaatcagtttgcacctaaaccttcctttggtagtccaacccccttttgctttccaaacagggagttcaatatttgggggttcttctactgaagtgtttggtgcagcccagttttcttctccctttttgtcaaccacagccttcggtgcctcttcatctccggcttttggaagttatatgcctgcttttggatcttcttcttctcctgcttttggcagctcatcagcatcttttggtggatcttctgtttttggtcagaagccggcatttggctttgggtctactcccactcaatcaagtccttttggaatcacagcctgcatttggttccccgataccatttcccattctgcattcggttccagtacttctgccttcgctgctgcaagcactcctgccttcggtgtcacaagcacc

SEQ ID NO: 58327 - DNA, 621 bp, Gossypium hirsutum
  Clone ID: AI731715.1
cgaagtcttgttgcagtcttcctattacactcctgctattgatatgtgggctgttggtgcaatattagcagagcttttcacattgtctcctattttccctggtgaaagtgaaattgatcaactatacaagatatgctgtgttctgggagcaccagattggacttctttccctgaagcaacaaatatctctcgtctaatcaatataagctattctgagatatcacttaccaacctatcagatatcatgcccaatgccagctcagaggctgttgatttaatctcgcaactttgctcatgggacccattaaggaggccaacggcagaacaggcattgcagcatcctttttttaatgtggatgtgcatgttcctcatccgcttttgtgtgattcacttgagctgaggctaaacaacatggggacgaaaccaaatcttgagttgaatctatgggatttcggcactgaacctgatgattgttttctgggtttgacacttgctgtgaaaccaagtgcttcaaacttagaaatggttcatactgtctctcaaagtatggaggaggatatactattttgtcctaaactgaatgatcatccaaagcaatcagtgttttggtcattgctgac

SEQ ID NO: 58328 - DNA, 627 bp, Gossypium hirsutum
  unsure (1)..(627): unsure at all n locations
  Clone ID: AI731714.1
gggtaaagggaaggcagctatggaggtgtttgataaatttgcggattttgggtgtgtcccgaatgaaaatagtttttatttcactattgaagctctatgtcgacggtctttttatgattggggttggtctgtgtgtgaaaagatgctcggtgaaaaaagcttgccggatggtgaacgggttgggaagattatatcttggttttgtaaaggtggtaaggctaaggaggctcacacggtttatttgtcggccaaggggaaaaacaaggttcttcctcgttcttctgttaatttcttaatcggttcactctgtaaaaaggatgaaatggtgaagttagctttggagatgttagatggattctccggagatgaaaggaaatatgcaatcaagccgttctcggctgttgtacgtggtctgtgtangacgaaaaatgttgatgaagccaaaaacgtgattcttanaatgattgaacaagggccgcctcctggaaacgcggttttcaattcagttgtcaatggatattcaaaggcaggagatatggaaaaagcaaacgaagtgatggaactgatggagactanggggttganacctgatgtttacacatacactgtcgtaatgagtggttaccc

SEQ ID NO: 58329 - DNA, 623 bp, Gossypium hirsutum
  Clone ID: AI731712.1
cttgtaggccatttgcatgactgccgagaacattgccaaacccataatagaggagcaaattcctaagtacaaaattgatgccgtcaaattcgagaaacttacattaggatctttgccgccaacttttcaaggtatgaaggtttatgttacagatgaaaaggagttaatcatggaaccattaataaaatgggctggaaatcctgatgttactattgctgtaaaagcatttgggctgaaggcaactgtccaggttgtggatttgcaagtatttgctctaccacgtattaccttaaagcctttggttccaagctttccttgttttgcaaatatcttcgtgtccttgatggagaaggtttgagaaaatggatgaaattaaattctatttttcttatttagatatttcatgcatctgatattttcatttggcaaacaattttttactacaaattctgtggttatccacgtaaagtagatgtagatttgccctttattagacatgtaattagtcagtataagtaaattagtgtgatgaagtattttttaatttttttgatgaatagtgattagttctcttctctattaatgatttgcttctaatctgcagccctatgttgactttggac

SEQ ID NO: 58330 - DNA, 626 bp, Gossypium hirsutum
  unsure (1)..(626): unsure at all n locations
  Clone ID: AI731710.1
gttaataacaaaatgtaaaagtgccaaaaagccactggtggttgctgggtgtgttcctcaaggaagccgaaatctgaaagagctagaaggggttagtatanttggagtccagcaaattgaccgtgttgttgaagttgtagaggagaccctgaaagggcatgaggtgcggctcttgaaccgcaagactttgccagcgctggaccttcctaaggtcagaaagaacaagtttgttgagattcttccgattaatgttggttgtttaggtgcttgcacttattgcaagacaaagcatgctcgtggtcacttagggagctacactgttgacagtcttgttgagcgtgtcaaaaccgttatagctgatggggtcagggagatatggttgagcagtgaagatactggagcatatggtcgtgacattggggttaacctaccaattttgttgaatgccattgttgcggaacttcctcctgatggaagcacaatgctacgaattgggatgaccaatcctccttttatcttggagcatctganagagatagcagcagttttatgtcatccttgtgtatattccttccttcacgttccggttcaatctgggagtgatgctgtcttgactgctatgaatc

SEQ ID NO: 58331 - DNA, 632 bp, Gossypium hirsutum
  unsure (1)..(632): unsure at all n locations
  Clone ID: AI731708.1
ggcaacagctacatatccaccaccgccaccgttttacaggctctacaaagattacttacaaaaccctaaatcagcaccggagcctccgccgcctattgaaggcacttacgtttgctttggtggcaactataccaccgatgatgtgcttccgagtttggaagatcaaggggttcgccaactctaccccaaaggacctaatattgatttcaagaaggaattgaggtcgcttaacagagaattgcaactacatattttggagctcgcagatgttctcgtcgagagaccatcacaatacgctagacaagtggaggagatatctctcatattcaagaacttgcaccacttgctgaattcgttgcgcccccatcaggctagagcaacactaattcacattctagaacttcagatacaacggcgtaaaaaagctctggaggatattaagaggaggcgagaagaagcacgaagactactcnaggaatcgctcgggaacttaaatggacagtancatttcgagtttgagctgtnatttcaaatcacttccttataaagtccattcccttaaccgaactaacatttctcatgaatcctactaatttgaaaataatccaatgtttgttattaaaaagcttccc

SEQ ID NO: 58332 - DNA, 635 bp, Gossypium hirsutum
  unsure (1)..(635): unsure at all n locations
  Clone ID: AI731707.1
gccaacttttcagctgattaacgaagatgccgcggaaaccagctaggcatcatagattgttaccagttcggcctttaactttctcaccatttgctcgttctgttgctcgagttgctactgcttacctggttaaacattacatgcacaatgcggtgcagcaatctgctggtgatgaatttaaggagaagttaaaaatcattggcagacactccgagtcatctgaggatgaaaaatttgatggagttgtccaagcagattttgcattctttgacccaaaaccagatgattttcatggtgtgaaaacattgctgcaatcctaccttgataacaagcaatgggatttgagcggttttgtaaacttgatattgggacaaaccaccgttggaactgtcgttnaattaaaggatgatgaaaaccatggaattttttctataattactgcccttaacttggggaaatacaaggatctcaaatgtttttccaagctcaaagaattccttcttaacatatgccatgagaaaaaataaaatagaaacttgagatcacctttgggaaaataaacacanaaaatgggtctcttgggttcccaatgtgttattaatcttcctcccgaaatctctgcccctcctttttac

SEQ ID NO: 58333 - DNA, 671 bp, Gossypium hirsutum
  unsure (1)..(671): unsure at all n locations
  Clone ID: AI731696.1
ggaaaatttattattccacagatcagtaacattgcaagtatctggttcatatctctctttctttccatctttgccactggtatattggaaatgaggtggagtggggtagggatcgatgaatggtggaaaaatgaacagttttgggttattggaggtgtatccgcccacctgtttgctgtgttccagggtcttctaaaagtccttgctggcattgataccaattttactgtcacttcaaaagcatctgatgaagatggggatttcgcaaaactctatatgttcaagtggactaccctactcattcctccaactactctcctcataattaatctcgtcggagtggttgctggagtttcctatgctatcaacagcggttatcaatcttggggccctctctttggaaaactgttctttgcattttgggtgatcattcatttgtatccattccttaagggtctaatgggacggcaaaatcaaatgccaaccattgttgttgtgtgggctattctccttgcatccatcttctcacttttatgggttcggattgatccgtttactaccaaggtgactggaccggatgtcnaacagtgtggaataaactgctaaaaggaacatgtaaatcacagaattgtttccaggtatagtttanataccaagaggaagaaggtatc

SEQ ID NO: 58334 - DNA, 674 bp, Gossypium hirsutum
  unsure (1)..(674): unsure at all n locations
  Clone ID: AI731692.1
gaagatatccgctgtatattcatctgatttgaagcgagcccttgtgacagctgagacaattgcagctaagtgtggtgggttagaggttataacagatccagacctaagggagcggaatttaggggaactacaaggccttgtatttcgtgaagcagccaaacttagtcctaaagctcacaaggcctttttatcacacagaacagatcaagatataccaggtggtggagaaagcctaggccacctctttcagcgctgcacatcttcattgcagagaattggcaacaagcataaaggagagcgagttgttgtggtttcccatggtggtgtcattagatccctctacaagcgtgcttgcccaaatgggaagtctggaggaaaggtgcttaatacatctgtaaacatatttcacttgtgtgatgaggaatggaccataaaatcctggggtgatgttagtcatctccaacaaacaggatatctggagtccggtttcggangggacaaaacatctggttagtttgttatatttgatacttgatatgccatattattgttttaggcagcancatgggttatgtctcttcttaataagattttggagcagctcctgcataagcatttattagtgaggcaacttttattttaattaccatctgaaaggcgtgtgttttccaact

SEQ ID NO: 58335 - DNA, 594 bp, Gossypium hirsutum
  unsure (1)..(594): unsure at all n locations
  Clone ID: AI731669.1
agttcttgtaaagtaaaaagtctttcccttgttatgtaaaggaacattttgtggagacctcctaagtctggggttattaagctaaattttgacgcctcttttacgagtaacacaaatatttctatctcagcagtgttagctagagttttagaaaatcatattataggtgattgcacttatccgttgttagatgtagcagatgcttttgtggctgaggcgatagcatgtgagacggctttttccttcgctttggatatgggttttaggaaagtcatcctggaaggagattctcctacagttatcaagaaattaaactcaaacatagttgatagatctgtcctcagtcctatttctcagcacatttgttttttagctggattttttgaagaggttacttacctttttattcccaaagaggcaaataagtcagcccatgagttggcaatggatggccagaatcggtaattgccacgcttctgggttgaagaggcacattgttttgttgttgaagcgatggagtcggatcgatctaaatggtttcatcgttactaaaattgttgtgggctttgaagcttggagaaggttcttanaatt

SEQ ID NO: 58336 - DNA, 590 bp, Gossypium hirsutum
  unsure (1)..(590): unsure at all n locations
  Clone ID: AI731662.1
acggagtccgacccgtttatttcaagtttggagatgcttcttttgggggattcgctttataatactacaaattttgattcttatgctttgagtttagttgtgaggcacagttttggacataatcgatcccttattagttaccctgatgatctctttgatcgatattgggagccatatgcagaaaatgtttctgttatagcaagcaataacactccatctgtttctgggttctggaatatacccccttcaaaaatatttgaaagcgcactttcaacagatcagttggaacccctggagttgagatggccgcctttgtcacttccgaactcaacttactacattgctttgtattttgcggataatcgtgattcaatgctttcaagctcaagagtgcttcgcatacacataaatgaagtaaggtatattancaatttggaagtgacttcagcaggagctgcggtctttgcaaccagatggccacttgaaggtcaaacaaagattactttgagttccgctgccaattcgaatgctagtcctttaatcaatgccggggagatttttgatattcttcccctaggaggaagaactct

SEQ ID NO: 58337 - DNA, 594 bp, Gossypium hirsutum
  Clone ID: AI731660.1
ctccatatgtcttcgtaataaacccattttttttcttcaaccatatcgggaaattaaccaaaaaaaaaaacaattccccgccaaatttaagtatcgccgccgtctccgttcacctcatttttccgaaatgggaaactgttgcactcgcggagacggcagcgataagctagaaaaagccgccgcaggatacggcaatggcgacgcggatcccaccgttacttcacatcaaacttcttatagaaccgcaccgtcgtctcaaggagcttccaccgtcggcaaacaatcaaaacctgcaccgatgggaccggttttaggtcgaccaatggaggacgttaaagccacttacaccatcggaaaagaactaggtcgtggtcaatttgggattacccatttatgtacccataaaacgacaggcgagcagttcgcttgtaagacgatagcgaaacggaagctatcgagcaaagaggacgtggaggatgtacggcgggaggttcaaataatgcatcatttgacgggacaacctaatatcgtggaattgaaaggggcgtatgaggataaacacgccgttcatttggtgatggaattgtgcggcct

SEQ ID NO: 58338 - DNA, 577 bp, Gossypium hirsutum
  Clone ID: AI731619.1
atgaaaccccaattctaaaaatttggtgtcgggtgcgataggacagtggacagtttcatatagccgtcgccgtaacctagtatatagcaaaatacatccaatcagttccttttatttctaagtgacgattgcgaagccacaatggagaaggtagaggaccagaatccccagcaagaagaagaccaagttgtgaatccatgggaagtatcggccaaagacggcggtaagattgattacgataagctcattgacaaattcggctgccaaaggctggatcaatcctttgttgaccgcgtccaacgcctcacttctcgtccccctcacgtcttcctccgccgtggcgttttctttgcccatcgcgatttcaatgatattttggatgcctacgagcgagggcagaagttttatttgtatactggtcgaggaccttcttctgaagctttgcatttgggccatttgattcctttcatgtttaccaaatacctgcaagatgctttcaaggtccctcttgttatacaactgactgatgacgaaaagtgcatgtggaaaaatctttctgtggaggagagccaacgag

SEQ ID NO: 58339 - DNA, 585 bp, Gossypium hirsutum
  unsure (1)..(585): unsure at all n locations
  Clone ID: AI731611.1
gtttcaaatacagggacaagaaaaccagtaccggctttagcggccattgttttgctccttcaaattcaatctctgtaattctcagaaaagaaaaaagaaaaatggctgggaatttaactacaggtggtggcaaagatcttcccggtgatatgaacaggaagtccgcaaatacggattcactagttgtttgctttggtgaatttttgatcgactttgtaccaacagtcggaggggtttctttggccgaagcacctgctttccaaaaggctcccggtggcgctccggctaatgtggctgtttgtgtatctaaattangaggatcatcggctttcataggcaaggtaggggatgatgaatttgggcatatgttanctaacattttaaaaaaaaactacgtggacaatactggcatgcgatttgatcaaagtgcaagaacggcattggcatttgttactctcaaagctgatggtgaacgggaattcttgtttttccgtcatccaagtgctgatatgcgtctccatgaatcagagctcgatataaacctcattaacaaggcgaagatatttcattatggttcgattattg

SEQ ID NO: 58340 - DNA, 514 bp, Gossypium hirsutum
  unsure (1)..(514): unsure at all n locations
  Clone ID: AI731601.1
aacacggagaacaatttgtcatcacaatcacccgaagccaatcaaaccaagaccacaaacacttacaagaggtctttatccggtggtcttcaaagcccaagaactgaggtgcctgaaagagccatattgcaaaggatcaactccaagaaggcagctaaatcgtaccaattaggacatcaactgtcccgcaaatggtcaactggagctgggccgaggatcgggtgcgtanctgactaccccttagaattgagacagcaagcattagagttcgtcaacctatctccgaggactcctcccaccctttcaccgttcttgtctccgagaacaccacggacccctactacaccttcggcatgccggagtcccggtgggcttgcatcagctgcgtctcagccgacatcaaatttcacaaatgctgatggaatttcggggatctgattgtaatataccattagttattatattttgggtactaatataactaatctgctttaataaaaaaaaaaaaaaaaaa

SEQ ID NO: 58341 - DNA, 564 bp, Gossypium hirsutum
  unsure (1)..(564): unsure at all n locations
  Clone ID: AI731600.1
agaaagggcagctatggtgttttttgagtgtttgttttgtttttgcagcccttctagtcctctcccattttactgaaccccccaaaacccaaaaggaaagatagtgtaaaaggaaaagaaaaatgtttgatggagtgccagaccatcttcatcaattcataggagcgtcatcagcatcagctagaaccaccaccaccaccactctccttctccctctctctttcacttcttcaaatggtttcacttcctttgaccctttgttcacttcttcatcaaactcccatcatcagcaagtgccccctcagctgcatcatcatcatcatcagcagcagcagcagcagcagcagcagcagcagcagcctcagttgttgcagtcattgcaccagcagaagaataatgaagagagtaccaccagtttggtaggtatgaacatggagattaatggaagagatcagagatccattgctgaaccgattgataatcttcatcatcatcatcatccttggtctaatgatgaagtccttgcactgttgaaggtcaaatctancataaaaaattggttcc

SEQ ID NO: 58342 - DNA, 513 bp, Gossypium hirsutum
  Clone ID: AI731598.1
aaacgacattcgaaatcgatctttctaggaacatgttccaattcgatctatctaaagtgcagtttcccaagagtttggcaaggctggatctgaatcataacaagattacgggaagtattcctgcagggttgacggatctggagttgcagttcatgaatgtaagttacaataggttgtgcggacaaatcccggtgggagggcggttgcaaagtttcgattactccacgtattttcacaaccgctgcttgtgcggtgctccgctcgacacctgcaagtaaaggtgcgctgccgacattattaagttagggctttcatcatgcatcaaagtgcaggttggagagttgtaataaccacgcacatgtttttattttgactaagctattcagggaaaatatctttttatcagcaatttgagaataaacgacattgtatttcacccaagaattagtgaactttacaaacacctaaagaggaaataaatttccgagggaatacatacctttcataatttat

SEQ ID NO: 58343 - DNA, 563 bp, Gossypium hirsutum
  Clone ID: AI731595.1
ggaaaaatttcgaaagttgaatatatgttgcggtctctcttcttctcaccccggatacggcgtgtggcagtgctatccagccctctgggtccaacccttgccatggacaacaacaatcgaagccgcactactgacagcagtgttcaaaccaaccctcgcattcaaaaactccaacaaatcgttaaaaccgacgcatccgctggctgggaagagtcctggaagcagggagtcaccccttgggatttaggtcgccccacacctgttattttacatctgcatcactctggatctctccccatgggcagggttctcgtccctggatgtggcaccggctatgatgtggtggcaatggcatgccctggacgctatgttgttggtctggacatatcaaaggaggccataaagaaagcaaagcagatgtcttcctcattaccaaatgcagataattttactttcatagaggcagattttttctcctggcgccctacagacttgtttgatcttatttttgattacacgtttttttgtgccattctgccggagatgagatcagcatgggctcc

SEQ ID NO: 58344 - DNA, 560 bp, Gossypium hirsutum
  unsure (1)..(560): unsure at all n locations
  Clone ID: AI731591.1
ggaatttagagaatcttcaggaacttatcctcgatcgaaataagcttcaaggaactgttcctgctgctagcaattcagcattttcagccaagatgcatggaatgtatgcctctcattcaaacttaactggactttgtcgctcatctcggttaaaagtggtggatgtctcctacaattatttggttggaagcatacctaagtgtttgacaaaccttccaaacgcaagctttcaagggaactgtcttcgggacaaagatgttaaacagcgtcctagcacacaatgtggtgcttttccatccaaaagtcaccaagtgcccaaaagtaagcatcggcctactgaagacgttccaaagcatcagaaagaatcaaaacctacctggctcttagctcttgaaatcgcaacaggaatcacggtgggttctctctttcttgttgccctccgtactgctttccataaatgcaatancaagcctgcaatcataatcccttggaagaaatcagcgagtgagaaggaacagttggcagtatatgtaaattctgagttgttgaaagatgtgacc

SEQ ID NO: 58345 - DNA, 595 bp, Gossypium hirsutum
  unsure (1)..(595): unsure at all n locations
  Clone ID: AI731582.1
atgaagcagctcaatccggagatgctcaaaaagttctggaactcctggagcagggtttagatccctgtattaaagaccaaagagggcgaaccccatatatgctggctaatgagaaggaagtcaggaatacttttagacggttcatggcttcaaaccttgagaagtgggattggaatgctgctaaagttcctagcgccttaactaaagaaatggaggaatctcaagcagccaagcaggcagagaaagagtctaagaggaaagcgagagcaaaggaactaaagaaattgcgtaaagccagggaaaagaaagctgaggctgaggctgcccantcccaaaaaaccgtagcagtttcacaaaatcaggccactgtagcctcggtttcaaagggatggcaatcccaatcagttggtatatcacgaatctctaaagaggaagaactgaagagagctcaggctcttgagaggganaagagagccgccgctgctgaaaggaggattgctgaagcancanctgctgccacccacagccgtgatgctcaaggcagtancacgacagtaggatcaactactaatttacaatcgaaaagtggattatc

SEQ ID NO: 58346 - DNA, 600 bp, Gossypium hirsutum
  unsure (1)..(600): unsure at all n locations
  Clone ID: AI731577.1
cccaagttaaaggaaaccatttcagtagcgaacaatgcatgctgggctattggcgagctagcaattaaggtacggcaagaaatttctccaattgtcatgacagtgatctcatgtttggttccaatccttcagcatgctgaggggctgaacaagtcacttgttgaaaatagtgctattacactagggaggcttgcatgggtctgtccaaatcttgtatcgccacatatggagcatttcatgcaatcttggtgtattgctttgtctatgatacgtgatgatattgagaaagaagatgcgttccggggcctatgtgcaatggtcagggcaaatccatcaggggctctgagttcacttgttttcatgtgcaaagctattgcaagttggcatgaaataaggagtgaagaactacataatgaagtttgtcaggtcttgcacggttataaacagatgcttangaatggggcgtgggaccaatgtatgtctgccttggagccacctgtgaaggataaactttcaaagtatcaagtataagatgttcttggttatccatgcttgtcgttattctacattatatttgtggttcttcacaggtctttatct

SEQ ID NO: 58347 - DNA, 599 bp, Gossypium hirsutum
  Clone ID: AI731575.1
aactagcaacggttgaagaagagattgtttggctggagagaaaaatcgatgacctgaaaatgaaactgtatcaagagaaaaaactaacccagcaatggaaaatccggcaacaacagaatcaactcatatgcaaaccaccgagaaatgacgacgatgatctaaatcaacgaaccagaacccaaaattacgatatcctcagaaaaaggagaattaaaagccataggcgagcctccatgggttctgcttcagatatcctaaccttgtcttcctcacaatgctctactgaagttaatcaacgatcaaagaaattacaaacatggagaattcaaaagcaatgcccgatcattaatgagaaaccaaatgaactgtcggaagaacttgtgagatgtttaataggcatatttcttgaattgaaccagcagggatcacaagataaagaaggatccgccattgtagcaaagcttagcttctcttgcatggcttcgagaggatactcggcaaagaactcattgattaacttaaaatcacccatttttggcttcaatcaaaatgcatcaaacattgatccttatggtataatcccagactttgatggcctt

SEQ ID NO: 58348 - DNA, 603 bp, Gossypium hirsutum
  Clone ID: AI731574.1
aagactagtttgcctctcagaagcacattgcatgactcaacaaatgttgaagaggaggaagtaagaaagatggtacgggagtgcttggaattgcgagacaattatgtttacagggaggagattgctccatggaccaaggaacctgtgatggaacctagcgttccgaaggcgagctgtgatccatttcactttgaacctgttgaaaaaacagcgcatcactttaggatggaagatggagtcgtacatgtttatgcaagtgaaagtggcactgttgagctttttcctgttgcaagttcaacaacatttttcactgatatgcatcacctcctaaaagtcatgtcagctggaaatgttcgctctgcttgtcatcaccgactaaggtttctagaagagaagttccgccttcatctgttaataaatgcagatagggagtttttggctcaaaagagtgcacctcaccgagatttctacaatatccggaaggttgatacacatgtgcatcattctgcttgcatgaaccagaaacatctgcttagtttcatcaaatcaaaactacgaaaagaacctgatgaggttgttatatttagggacggaaagtatatc

SEQ ID NO: 58349 - DNA, 549 bp, Gossypium hirsutum
  unsure (1)..(549): unsure at all n locations
  Clone ID: AI731554.1
gtaatttaaaaccaaaatgtcattaaccaacaagaaaaagctcatcctcaacacagcttcaatcagcttaggttgccgcagctgtaagaaattgaagcttaccagtgttttcaacccaaaacccaaaccccaatctccttacaatctctcttcttccaattcctccaataaaacaaccccttataattccatgtctgaatttggaacccctacctctttttcttcacacactactaatcagtactgggaaatggacatcgaaacagacaaggaagccatgtgttcgccgcctgcgaccaccgtacgagggttggggcgtgtangaggagagagcctggcggtggagaaagattccgatgatccttacttggatttcaggtactccatgttgcaaatgatactggagaaacagatatattccanagatgaattaaaggagcttctcaactgtttccttcacttgaattcgtcttattaccatgggattattctttcggcttttactgatatctggaatggactcttctctatcaagcctggtggtggtgg

SEQ ID NO: 58350 - DNA, 552 bp, Gossypium hirsutum
  Clone ID: AI731547.1
gattcaattagctgcaaaaactgtcccgaaaccattgcattgcctatctctgcagctatcagcagactactactttcatggatattatcaaaccaagcaagaaccatacaacgaaaagctcgaagacccttcgttataccattacgccatcttttccgataacgtattagcgacatcagtggtcgtcaattcaacggtgttgcacgcaaacgagcctgagaaacatgttttccatatagtaactgataaactgaatttcgccgccatgaaaatgtggttcttggtgaattctcccaggaatgcgacgattcaagtcgacaacatcgatgatttcaagtggatgaattcgtcttactgttcggttcttcgacaactcgaatctgtgaggattaaagattattatttcaaggcgaatcatccttcgactctgtctgatggagctgatcacctcaagtataggaacccgaagtatttgtctattctgaatcatcttaggttttacctacctgaagtacatccaaagctggataaaatcttgtttttggatgatgt

SEQ ID NO: 58351 - DNA, 385 bp, Gossypium hirsutum
  Clone ID: AI731546.1
tttgtgtacgggcgcgccctaacgtccacggtatcgagaacctcgataacgaattcgcggccgcgtcgacggccggtgggtttggcggaggatatggaggaggatttggaggcggaagcggaataccgtgagtttaatacctgtgaagctaactaccgacagtgttgcttgggattgaagtaactctgtcctatcacgtcttcttcttatcacaaatccgtgtgtgcatcacctgtactactcggctcccaccatctgtgtcatcgtcacctgaaaagcctaaaagtgaatacctgggaacaatattacaaatgttgtccagttcactaatttatatcactcttttccctccccctcaccctcaacccctccttccactccactc

SEQ ID NO: 58352 - DNA, 570 bp, Gossypium hirsutum
  Clone ID: AI731538.1
agctatggcatccaatagaggtccgcatgcaggatcttcttgaatcccagggttatgaaatgtgacaatcacaattggagctattgccttgaaagccaaagcaatggtgtcgcctccatcagtgctatagagggtctgaatggagatgtcggtggtctgaccagggacagaaatccgcagcacctcatcttgagcacaagtccttgtggcaccaaaggtgagagagtagacgtaccctgctttcacttccaccttctgagagatggaagcctcgttgccaagcctcgcagcatgggctccacgagggatggcaaagtaaaatcctcgaggttgaggaccccctgacacaaactccacaagcccctttatttcccagcctggcagtgagtattttcccactatcactgtgttgtttagattctcttttttgggtgcttgttcaaagttaccattgtttaaaaatcctgaccatagtaaccaagagaataatatagttagttacacccgtggtacagaactacagtgagtaaaatagaaaaaaaaattaatgtgtcttaggtatactatttt

SEQ ID NO: 58353 - DNA, 578 bp, Gossypium hirsutum
  unsure (1)..(578): unsure at all n locations
  Clone ID: AI731528.1
ccaaactgaaactctcaattttcacattcctttccaagcttttccacctctcaaatggattggacccgtggtagaaccattggccgcggctccactgccaccgtttgtgtcgccactgttgaccaatcccgtgtatttgctgttaagtcctctgagctttcgctgtcagaatctctcagaaaggaacagaggattctgtcaacgttaagctgccctcatgtcgtaggatataaagggtgtgacatttcatccgagaatggtaaacttctgtacaatcttttcctggaatatgcccctagcggcaccgtcatggatgcaatccaaaagcacggtggttaccttgaggaggccacggttcgatcgtacactcgtgggattttacttggccttgaattcctgcactctcgagggatantgcattgtgacatcaagggccaaaatgttttggttacagatgatggggtgaaaatcgctgacttgggttgcgctangcgagctgatgaagcgtcgagtgccgcttggtccattgctggtacccctgtctacatggcgccagaagtggcacgcggcgagcaacc

SEQ ID NO: 58354 - DNA, 580 bp, Gossypium hirsutum
  Clone ID: AI731519.1
gatgactgttactttaaatgcatacaatgttgtggctgcatgttgtgctgccgaatacctaaagatgactgaggatgttgatcgaggtaacctaatttttaaaatcgaagtatttcttaattctagtatattccgtagctggaaagattccattattgttctacaaaccaccaagtctgttctaccatggtctgaaaacctgaagatcgttggaagatgcattgattctatagcatctaaaatctctttggatcctgcaaaaattacatggtcctacacgtataaccggaagttgtcagtatctgacaaaacggctggtgatggtatgaaatttcgagagaagatcgtatctgttccaaaagattggtgggttgaagatatatgtgagttagacattgatctctacaagcgagtcatgactgctgtgaaatcaaagggaagaatggatggtgtcgccatttgtgaggcactgaaaacgtacgctgttagatggttgcctgattctgttgataccttggattctgatgtacattcctggaggaacaaattacttgtggaaacaattgtatgtttattgctc

SEQ ID NO: 58355 - DNA, 540 bp, Gossypium hirsutum
  unsure (1)..(540): unsure at all n locations
  Clone ID: AI731511.1
attagattgtttttactttgcattgctgctattgatttgttagatttgtagttgaaaagggacattatcatacctcgttgccgtgcaaatcgacaagtgtcctcaactcagcacggtggaaaagagcctcgtgtccttctccaaggagaaggtctaatagctaatgaaacaaacacagagcagagataagaggttcagctgagatatagtgaaattgattcagttttcagttttcaccttgcttattggatatgcaactgggaaacaaatccaaatgaggactcgaacaaatggagcaacttttgcaccaatcgccaatccataccgtgtacaaaccgcttgcggagcgatctgaatcgtanagaaagagagcaagacgagcttaaaacatgtgaccaagagcatgaaatggagcttacagcttagtaacttacctcaccaaacataagtatgagggtgactgaaataaggattgcaccccaagctgacaccaagctgtctaaaaaaattggaagggcctataaaatcacgtaacctcac

SEQ ID NO: 58356 - DNA, 657 bp, Gossypium hirsutum
  unsure (1)..(657): unsure at all n locations
  Clone ID: AI731504.1
ctgataatttcagtgaggctaatattttaggaagagggggttttgggattgtgtataaaggtgaattacacaatggcacgcagattgctgtcaagaggatggagtgtgcanctaaaggtactaaaggtttgaacgagtttcaagctgaaattgcggtacttacgaaggttaggcacaggcatttggttgcacttttgggttactgcatcaatggcaatgagaggctcttggtttacgagtatatgcctcaaggtacccttggtcaacatctctttgaatggcgagaaaatgggtatgctccacttacttggaagcaacgggtcaccattgcactggatgtcgcgaggggggtcgagtatttgcactctttggcacaacaaagtttcattcaccgggatttgaagcctaacaatatactactcantgatgacatgagggcaaaggttgcggattttggccttgttaaaaacgcacctgaaggaaagtactctctggagacaagactggctggaacattcggatatcttgctcctgaatatgctgcaactggacgggtgacaacaaaggtggacgtgtatgcatttggagtggtcttgatggagataataaccggcagacaagctttagacgtaaccttacgcgatgagaaatcgcttt

SEQ ID NO: 58357 - DNA, 655 bp, Gossypium hirsutum
  Clone ID: AI731503.1
attcaaactcaatcaagtatttgagatttttgtttatatcattcaataaaagaaatggagaccgtcacacactcctcgccgttcgattcttttctcgaccgaatgcgaaaccctgcttctctcgatctcgttcgctccatcaagagcttcattgtatcgttttcatatactgcgtcaaaccctgaaactaatgggaaaagaatacaagagttcttccagacaatggaagatgctataagggatcatcctttatgggcatcctcgtccgatgatgaaactgataatgccttggagggtctagagaaatatgtgatgaccaaattacattcacggacctttgcttccactcctgaggatgtcaagattgatgcagagatctcagagaagatatctttattgcaaaccttcttgaggcctcaacatttggacataccatctgcacttcaaaatgaagctgcgtggctgcttgcagagaaagaattaaaaaagatcaatgctttcaaagcccctcgcgacaagcttctttgtatcataaattgttctagggtcatcaacaatttattgctcaatgcttcaatttcagaagatcatgttccaggaggagcagatgattttcttcccgttcttatatatgttacgatcaaggccaatcctg

SEQ ID NO: 58358 - DNA, 659 bp, Gossypium hirsutum
  unsure (1)..(659): unsure at all n locations
  Clone ID: AI731501.1
aaacgactgattatttcagtatggctaacaagattggtgaaggtggcttcggggctgtttactatgcaaatttgagaggcgaggaagctgcaatcaaaaaaatggatatgcaggcatccaaagaatttctggctgaattgaaggttttgacacgtgttcatcacctgaacctggtgcgtttaattggatactgtgttgaaggctctcttttcctagtttacgaatacatcgagaatggcaatctaagccagcatttgcgaggatcaagcagggagccacttccttggtctactcgcgtgcaaattgcccttgactcagccagaggtcttgaatatatccatgagcatacggtccctgtttacattcaccgtgacattaaatcagctaatatattgatagacaaaaagttccgtgcgaaggttgccgattttggattaacgaaactgacagaagtcggaagtgcatcactacccacacgtcttgttgggacatttggatacatgccaccagaatatgctcaatatggtgatgtttctcctanaatagatgtatatgccttcggggttgtgctctatgagcttatttccgctaaagaaactattgtcaaggcaaatggttctctcgctgaatcaaaaggtcttgttgccctgtttgacggg

SEQ ID NO: 58359 - DNA, 665 bp, Gossypium hirsutum
  unsure (1)..(665): unsure at all n locations
  Clone ID: AI731491.1
gcactggtactacaggtgcaaatgaggaatcttcccgttctcatgccatacttcaacttgctatcaancgatctgttgatggaaatgaatcgaancctccccgtgttgttggcaagctctcctttatagatctggccggaagtgaacgaggtgctgatactacggataatgataaacagacaagaatggaaggtgcagagatcaacaagagcttacttgcattgaaagagtgcataagagctcttgacaatgatcagggccacattcctttcagaggcagcaaactgacggaggttctaagggactcgtttatgggaaattcccgtactgttatgatatcttgcatttcaccgagctcagggtcatgtgaacacactctgaacaccttaagatatgctgatagggtgaagaacctttcaaaagggggaaatcctaaaaaggatgcattatcttcaagcttaaacctgaaagagtcaactgcgcggccattatcttctgttttaccaactgcattgacctcggaggattatattaatgatacatggcctgaccaaaatgaaagagatgattttgctgcgtcagaagattcctatgagccagagaaactgatgtggaagaaaaatggaaagccggaccaatacaatttctcaatttcagaagacagg

SEQ ID NO: 58360 - DNA, 622 bp, Gossypium hirsutum
  unsure (1)..(622): unsure at all n locations
  Clone ID: AI731475.1
gtggttcgaacccataaaggtgctgatgataaacattacaactgtgtttatcaaagagaagatgacaaaggaatcatcggtgtttcattagctcgtgaattaatggctgtcgccggtgaggctttgaaaacgaacatcactactttaggtcctcttgttttaccatttaaagaacagttcatgttctttgtcacccttgttagaaagaagattttgaaagccaaagtaattccttatatacccgattttaagcttgcttttgaccatttttgtatccatgccggtggaagagcactattagatgaattacagaagaatctacagttaacagattggcatatggaaccatcaaggatgactttatatagattcgggaacacatcgagtanttcgttatggtatgaattggcttacacagaagctaaaggtcgtgtctcggatggtgatcgggtatggcagatancattcgggtcgggttttaagtgtaacaatgctgtgtggagagctcttaggtcgactcccatggcggaatcaaggggcaatccatggaagaatgaaattgaaaagtatccggtcaaggtatcttttgcttgatattgttgtcgtctaactgttccaatgt

SEQ ID NO: 58361 - DNA, 578 bp, Gossypium hirsutum
  unsure (1)..(578): unsure at all n locations
  Clone ID: AI731448.1
agctcaaaggaaagaggatagacaagcacaattgcaacttcagtatgctcaacgtatgcctggattagcagggccttcaacagttgttctcccgggagggtaccctccgctttactacgcatctccaaccggcattgtttcacaagtacccctaaggcccgggatgatgcaccaacctttaggtttaaggccaggatggagagctaatggctttgcaccaccaaccagaccagtctttcaatactcatcacttcccctgttccctactgctccaagacaaaccaggccaaaccgtcgtcagatgaacggcaacactcttcgaggttctcattccgttacatacgcgctgcaattgcaaccaccgaatcaaacagtgacttcctcaaaagatcaaagtaatcaacagactggacaagctaaatctgtaccgaatggtcaaggtcgaaaagtgaacaaagggcccggtggtggtgctgctgccgcanctttgacacaagggactgagatgctgagtantatgcttgctgctgcttcacccgaacagcaaaaaacaatacttggtgaaagactttatcctg

SEQ ID NO: 58362 - DNA, 582 bp, Gossypium hirsutum
  Clone ID: AI731443.1
gttttgtccttgagcagattcaggatcttaagcgagagatcagcaaagctcgtataaggatgatggagccattgctgaagggacctgcaggtttggattaccttcggaatgcatttcagaaccgttatgggtctccttccgatgctgggtcttctttaccattgacaatgcggtggctttcgtctgtttggaactgtaaagatcaagaatggggagaacaccaaaattctgtgtcaactttgaagccccaggatagttcttctcgggatggtcagactcccatcacgcttaaaactggtggaagctacaattcagcaaatgcaagccaaatgaaatttgtcaacccttcaaaagttacagatcatgaacaaccagaatgcaatggagatcaagttgatatggtggtgaggcttggtttgctgaatttagtaagtggagtttctggtctaactttggattttctgccggaaacctttactcttaacctcgccagattgaggggtgttcaagctgagattcagaagataattgttatatccacaagcattcttatttgtcggcaaattttctcgagcgagcaac

SEQ ID NO: 58363 - DNA, 543 bp, Gossypium hirsutum
  unsure (1)..(543): unsure at all n locations
  Clone ID: AI731429.1
cgaattcggcacgagggatagctagagcatccttgacaccagaatcaagctatattgctaagccagctgcttcatggcttgatgactttcttgtatggttagctccagaagcatttggttgctgtcggaaatttactaatgggagttattgtccccctgatgatcagcctccttgttgctctcccaatgacactgcttgtgggttgagtgaagtgtgcaaagattgcactacgtgcttccgtcactcagatttacataatgatcgcccctctacagcccaatttagggagaaacttccatggttccttgatgctttgccttctgctgattgttcaaaaggcggacatggtgcttacactancactgtggaagtcacaggctatgaaagtggtatcattaaggcatcatcactccgcacctaccatacaccactcaataagcagattgactatgttaactcaatgagggctgctcgaaaatttgcatcaagggtttcacattctttaaagatggagatcttcccatattccgtgtcttatatgt

SEQ ID NO: 58364 - DNA, 525 bp, Gossypium hirsutum
  unsure (1)..(525): unsure at all n locations
  Clone ID: AI731424.1
ttttttttttttttttttttttttttttttatatttgaaactcaaccttgggtcgagtaacatgtaatgattatatctcccatcccacatttcccattcacattcttctgaatacaataatgggcaatttacctactctacataaaataaatgtacctcaacaaaacagtggggaaaaatgaatgaatttagatatgcaattcgcatatcttttagtatgaaaattatacgtacgaatgacggtagaggcatcctctgaaagcaaatgacagcacttttgtggttgctaagaatcatgatacaaagtgggttttcactttattaaggaaattgtggtccttaaccaaaatgaaaaccagacgacttgaaggaacttgacaaatcaggcagcctgaaagttgcgataacccctgcagccagagcgcataaggaacccaaaataaaggctggcacatttcctccaccaaataaagcatcccacggacccgcacccancgatacaaatatctgtggaacaacaattgt

SEQ ID NO: 58365 - DNA, 513 bp, Gossypium hirsutum
  unsure (1)..(513): unsure at all n locations
  Clone ID: AI731417.1
gaaaaccgaacaaaatgcaactgctaattcacgcggtaaacaagttgtgaaacaagctaaagacagttctcaaaccggagaagctcctaaagaaaattacatccatgttagagctcgaaggggccaggctacaaacagtcacagcttggcagaaagggtgagaagggaaaagataagtgagaggatgaaattgcttcaagaacttgtaccgggatgcaataagattactgggaaagctgtaatgcttgatgagataatcaactatgtccagtcactgcaacaacaggttgagtttttgtcaatgaaacttgccactgtcaacccggagctgaacatcgatttagagagaattctatcaaaagagattcttcattcgcgaggcggaaatgcagcagttgtcgggttcaatcccgggataaacttgtctcaccctttctcctccggtatctttcccggaacaatctcgggcatcccaaacacaaatccgcaattccctccgaaaggaacnnnnnc

SEQ ID NO: 58366 - DNA, 533 bp, Gossypium hirsutum
  unsure (1)..(533): unsure at all n locations
  Clone ID: AI731354.1
cagggttgtttttgtgatctaagtcaaataaaactctgggttttttttttgtgtgtgtgtgataaaccatgaagggatctttttccaggaggttaaagatcttaagctttgttttatcatggatgtttttgctancccttgttttcccagctacggcgcaagatgatttgaagtgcctggaaggtgtcaaaaattctctagaaaacccagatgggaggttgagttcatggactttcaacaacaattctgttggttttgtatgcaaatttgtcggcgttcaatgttggaatgaacaaaaaaaccgcctgttaggtctcgaacttcgagacatgaaactgtcgggagagttacctcaatctttaaagtactgtcggagtttgcagaccttaaatctgtcggctaacaagctttctggtacgatccctccacagatatgttcttggttgccttatttattaacccttgatttgtctancaatgatctgcatggttcggtcccaccggagttatcaaattgtgcttatctgaacaat

SEQ ID NO: 58367 - DNA, 536 bp, Gossypium hirsutum
  unsure (1)..(536): unsure at all n locations
  Clone ID: AI731342.1
gggcaaccctacgtatccattctattcgcttcgccctctcctcctctgcctcttatctcctctgtctttatccatatctttctatgttacgttttctgcatctggatttccaattaacattccgaatctgtggtggattttttctttttttggtcgaatcaaggtttgggtatttgtcattgcttttttcttttttattctttaattcccattgttgtttattgttgtgtggttttgtcaatgggctctttggatgagggccatttatgcgttgagattgagaatggaatgaagctggatgtaagtgagaaagatcctgaaactatacctattgaggatgctgtgaaagttctattgcaaggtttgggtgaggattttaacatagatggccttaacaaaactccccttcttgttgccaaggcacttccaaaaggaacaagaggttactancaaaaagtataggatattgttcagggagctttattccctgaagtgggtttacatgatggagttggtcatgctggaagagtatgtgc

SEQ ID NO: 58368 - DNA, 532 bp, Gossypium hirsutum
  unsure (1)..(532): unsure at all n locations
  Clone ID: AI731341.1
aaaaaaagaaactgaaaaaggcacaaagggtttttggaagcaaagcaaagcgaagaactctgtgaagccaaagctatcgagcatgtgcgagtcttancacatgaaatcggtggtcgtcaagtgagtcaggcttatctcttttaactttctttccatcatgtcctgtatttttttcttttttttttcctttcaattttactggatagctttaaatcattactatttttagtagtttattctccctgcttagattgaaggtaacctattggttttcttcctactggttttcttctaattcaaggtatcagtcgcattcacgttttcctgttaatgggttttctttattttattttctatgccatcgacttttttctttctttctttgaggtgctctttaaaatatgccgcaatgtgttgttccagccgtttcttgggtttctctatggattcaattgagattatagaattataggaatttttttttgtgttggattgcgtatggtaaaaaatctaaagtttactctccttatgc

SEQ ID NO: 58369 - DNA, 626 bp, Gossypium hirsutum
  Clone ID: AI731322.1
tttttttttttttggcatgcaacttgtatggtattccttactttctgaccgtttgttgaatatacattgttttacatactcattaaattacaagagaatggtacaaccatccacagctttgagacactccacagttgaaaattatggttgtataagacgtaataaatgaacacgtttattgttacaatgtcaaagaatcagcagacaacagagacaaccaacaaacctccctgcttgcgcacacctgctaaatttaaagacgaagcttacatatatccaaacatggcaccagtatgattgaatccgcatgatatctccaacgctttaacattttcaccaacatggaccattgtaggttttgtgtaatctacatcacttccatgacccagttgtccaccagaagaatgaccatctacagaaaatgttccatgagaacctccccaaccccatgtgaagaccttgccatctgaaattgctgctgtatgcttccaaccacaagaaaccttgctaacaggagattttagaaaaggatcttgaattctttccggagcatgaaaaacatcagtagaaccgataccaaggcaaccattctcatttgaaccccaagtataaagttccccactctc

SEQ ID NO: 58370 - DNA, 530 bp, Gossypium hirsutum
  unsure (1)..(530): unsure at all n locations
  Clone ID: AI731302.1
ccaggtttgaagaggtagcagagcttatcaatgtttgttggcttgaaatccgtgggaagatcgcaatctccatgctttctcccatgacgcgctacaaggcttgccttgtgttcaaagcaactgctagggcttacgggtatgatttccaacctgcagaggttagtgtcagcattgctggcaccgaaggttgtaagaaaacagtctatctggatgcagctagaggccttcgacaacgttaccagatcgaaccgaggcgaatcgggctatttagccgttcccgtttccttgggttgcaagcgccagtacctctggcccctgcaggtggtgatgatcanaacccanagactaaaggagatgggtggttggaaattgaattgggtgagtttttcaatgatggatccattgatggggaactanaaatgagtgttatggaggtagatggtggtcattggaagggtggtctcattgtccnagggattgaaattcggccttgtctttgaagtttgcccttgacttcaatcggcaacggg

SEQ ID NO: 58371 - DNA, 664 bp, Gossypium hirsutum
  unsure (1)..(664): unsure at all n locations
  Clone ID: AI731290.1
acttgtaccgangcgtcgagtctcgtatcatagctgatatcgatttcgcacgtgacatcagcaatttaacccagtagtgtnncggaggcagggtcgtntncnntggcggggcnnncnnaacggatctctgatcggtttcacttcgcctctccccctgccggtgccgtgggggtcgcccgttctctcgcttccgcttcttcccccccctcgctccctcttgttcgtgtcgcttccctcctcctccccttcttctcgcgttccctgcttttggttctctctttctccctccgttcccctcttttcttcttcttttctcgcgtcttttctctcctctctccctccctctccccctgttctgtcttcttcccctccgttgtgttcttctgcccgtgcctttgtctccgccctgtctgttcctgcttcgcctccccgttcctcctgtcctccctcgttttccgcggttttgtctcctttgccgcccttgtctttctcctcttctctctcgctctcgctttttgtctccttcctctccctttttctgtcctccgtctcctggtcccttctcttctctttttctcttcgtgctcttctctctttttgcgtcgccgcctcttcccttttgtcgtcctggtgctcttcgtcgcccgctcttcctttttcttat

SEQ ID NO: 58372 - DNA, 657 bp, Gossypium hirsutum
  unsure (1)..(657): unsure at all n locations
  Clone ID: AI731289.1
ctttggtcttctaaagttcaaactctcgaggcagtcaagtaaacatttttgtttttccgccaaacaatggcggcagcgacagctctcaatctatgccgtccgtggcaatcgccgccgactcataatcaattcatcaccaaaccacgaccgtccattcggcctcctatcacctgctacaccgctaacaagtcgaagagggagtacacaagcgtaatgatagtgccaacgggagtgggggccagcatcggaggatttgccggtgatgctctgcctgttgctcgggtcttatcctccgtcgtcgattgtcttatttcacatcctaatgttctgaatgcagcaatgttatactggcccatgcctaatgtaatgtacgttgaaggttatgctctggacagatttgcgcaaggcttatgggctctgcaacctgtacatcaaaacaaggtgggattggttcttgatgctggaataaaaatcatcttcgggtccgccatttgcaagtggctgatgccacaagggcttcncttggattgccggttgttgagtatgctgtcactgacacccctttaaaagtggaaaagtgggtcaatccaacaactgggcaatcaacaggcaggattaaacancctgattcattactgcgggctgttgaaaattttg

SEQ ID NO: 58373 - DNA, 667 bp, Gossypium hirsutum
  Clone ID: AI731278.1
aatttttttttttttttttttttttttttttttttttttttttttttttttttttttttttttggatcacaaggaataaccccgatatatttatttcagctcacctaaacattacagcaacaaaagccatttgatataccagcttcagctaaacaatttttttttttaatcttttaaattaaaaactcggaaatttcagctcatgaaaatgcaaaagctcaaaaaaatggaaacagataaaatacagcatcctcaaacaactatttttgaagtaaaaaagcaggcactgtaaccatccatgaagttaaaatcactgttcaaacaggataaaaacaaaaacttcgcatctctttaagtgaaccgttaaatacctgattcaaggtttaaaatggaaaagggtcagctccatcatgttttgcacagcaaaaagtggctttatgatgtccttgatatgtctttatctcttcaccacttgtcatggaccaaagcttagctgttgtatcaaaagaagctgttatgagatatgcaccatccacagagaaaacacagtcccatacccagcgctgatgtcctatcaatgttttctccaatgtgaagccatcgacattccatatcttgacagtgtggtcagaatatgcagtaccaatattatggggttcacaaaccg

SEQ ID NO: 58374 - DNA, 668 bp, Gossypium hirsutum
  unsure (1)..(668): unsure at all n locations
  Clone ID: AI731272.1
ttttttttttttttttttttgcaaatccatcccatattatattttaaaagatataaaggaaaataacagctattacattttgttgttctttttttttttctttttttataacagctactacattaaaaataaacaatacacgttaatccaatgtggtaagtaaaaacgaaaaaacaatgggaaaatgtgggcattaagttattaaccagaaacaaagcgacgccaataccagtgcttctcccaaacagaattcatggagtcgaggggaatgcctttggtttcgggcaaaaaaagggcaacgaaaatggtcatggacgcgatccaagcagcgtaaaacaagaaggtgccatatttgaagtggcaaagcatggtcaaaaaggtttgggaaagcacgaaggtggtggcgaagttgacagcaacgctgatgctttggcccgtggatcggattttaatggggaatatttcacttggaatgagccaactgagaggaccccaagaccaaccaaacccagctgcgtagatgcacattagaaacagtaccagtatggcgtagcctttgctgatttcctttgtgcctgaaacccctgttgtaactgctancaaaactgccacccctacctgacagacaaacatttgaattccaccttccacgaacaaaaactgcggct

SEQ ID NO: 58375 - DNA, 608 bp, Gossypium hirsutum
  unsure (1)..(608): unsure at all n locations
  Clone ID: AI731242.1
tccccccaaggtgagtcccacatttgaaaaagctgtcaatttccatggcgatgggatagggagattttgatcttcactgtataaatagatcctcactcactcccacatttcaacttcatatccaatttcatcatatacaaattccttgtaaactttaacaatgccggctacatttgaagaatcaacaactctcgagttcattcgacaacaccttctcggtgactttgccaccgtcgatgctttcataaacaccctcgattttggcctttctcaccttcaaccccaaagccatcaactccctgaaatcttcacccatggtgtagaaccagcgccgataacaaaggagccattctgtgaagagaaaaggcattataaaagtgtacgaagaaggccatggggaaagtttgcggcggagatccgtgacccgaaccggaaagggaattcggtatggttaaggaattatgataatgatgttcatgctgcctaagcctatgaatgttctgcctttaaaatgaagggttcgaaaaccatactgaattttccactttaaacccgaaaaggaagccaaccnacccgccggtacttcccggaagaaaaaggagaaaatt

SEQ ID NO: 58376 - DNA, 587 bp, Gossypium hirsutum
  unsure (1)..(587): unsure at all n locations
  Clone ID: AI731233.1
gaaagatataatgtgagaactatcaggaaaacactggctgaaattgatagcgaaggccaacttctgcctgatggcacatttcttgtaggtggccaagcagttgcagttgtctattttagagcagggtatgcacctactgactatccttcagaatcagagtggagagctcgactgctaatggagcaatcttcagctatcaagtgcccgtcaatatcatatcatttagcgggaactaagaagattcaacaagaacttgcaaaacctaatgtgcttgagaagttccttgagagcaaagaggatatcgccaaactgcggaaatgctttgctggactgtggagtttggttgactcaaacatcaccaagaaagcaatagaaaaacctgagttatttgtcatgaagcctcaaagagaaagaggagggaacnatntctatggtgatgatgtgaaagaaacccttctacgattgcaaaaggaagtgtctgaagaaaatgctgcttatatacttatgcaaaagattttcccanctgtttctcccacatttttgattcgtgatagcatttgtcataaagatcatgccatatcagagtt

SEQ ID NO: 58377 - DNA, 592 bp, Gossypium hirsutum
  unsure (1)..(592): unsure at all n locations
  Clone ID: AI731228.1
aagaaacttcaaaggaaaatatttcaacactctgctctcgaactgagatctgaaatctgagaagaaacaccaaaatgcaggatccgcgaaatctaaatccgaacccggatcctgcatttccctccttcacccaaaatatgccgtctttttccaacccagcccaatatcgcggttcttatcacaggcgagcccaatccgaagtccagtttcggattccagacgacttggatctcgtgtccgatcccttcgaaggggtaggatccgaagacgacatgctttgtagttacatggacattgagatgccaggggaatcagcgaagggagtcgaggcggctgctgggtcttggagtcagaacccgaaaggagaggaagtgagcggtgggtcggggataggggataaatataatggaggagggaaaggaaggcataggtatancaattcggttgatggatgctccataatggagtccattgaagctaagaaagccatggctcctgataaacttgctgaattgtggacaattgacccaaagagagctaaaaggatcattgcaaatcggcggtcggctacacgctcaaaagagaagaaacc

SEQ ID NO: 58378 - DNA, 600 bp, Gossypium hirsutum
  unsure (1)..(600): unsure at all n locations
  Clone ID: AI731217.1
attttttttttttttttttttactaaaagaattattcttaaagaattttctaatataattactgatacatgtataaattacaaataatacatgtaatgggccaatttagcccgggcccgtataaatacaaaaccaaaaaataataaacaaaaaatatattaacagtccaataaaagcccatcagtccaagttacataacccaattttaaacccaaaatattacaaacccaaattcacaaggcccaataggcctagaatgttaagccaagacaaaccctaaatcaccccctttctcctgcgccgcaacagcaatcggatagcagctccatgcctcctacgccccagcatcctggcgccacgcccacgctctcgtacacacacaaacaccaccccgtacctgcaaatacagaagagacaacagcagcagaaacaaacaaaaaattgtatttcttatttttatttcctttttattttcttttctttccggctataaagccaacaattcaatctttgtaatggttacggacaaaggcaacaaaaacaaatacaaaaaagagaatacnanaacnatacnaagcaaagaaagtgatttttgaatct

SEQ ID NO: 58379 - DNA, 707 bp, Gossypium hirsutum
  unsure (1)..(707): unsure at all n locations
  Clone ID: AI731194.1
gcgattcanaatcttaaaagcggaacaaaacaaaacaaaaacctaccctctttcaactgtggaatcttcttcgtcatattcttcagatgagtctgcaatgcgcaacactttgtggcgggtactctcttcgctgtctggacattttgcacacctgacacatgagaatcaaaatcgggtggtatctgttcaccgtgtctatcctcatccatggcacgtccccgacaccctatcttctcaaattcctggggcgatgacttctgggtcactttcttctgtggtgatctcttgtccaataatcttcctgaggccgattggtgtatctatggctccccatctacacggggcatttctctnacgtgggggtatgttgtaccgattcagttggtggtctttgtaaatctcatccactgacttcaacgactactcggataatctatcaccttgggtctctaggttctgcatttgacttcactccatccactgcgttcgttcttcttctcctcaccggcatgattattgttcccatgcgatacatctatagtgctgccatctttgataatgaacttgtatagggtagaaaccctgacggtgcaaagacctatcctggggagcgaccatgaatcccatcctaggtttaattcccgcgttctctccacttgcggatatatatttcttgaatcacactgacctccatacatgtttctgac

SEQ ID NO: 58380 - DNA, 591 bp, Gossypium hirsutum
  Clone ID: AI731178.1
tttttttttttttttttattacccaagtaattacatttaatccaatactttgcagcttgaacaggacaaaacatgagtattagatatcattcggaaaatcttagatacatagacacaggtttgaatacaaataacacagtattaaatattagaaaactagtgtccagctaaagatcatatgaaattgaagagtcattctatctaaatagtaagttacagaactgaagccatgaataaaatatcagacataaagagtgttgattacaacagcttaccagagacctgataattgaagttcaagacttccataatttcatggtgcaatcttccgcataggtagctaccagattcctgtgaggatgatgtgtgatgcctattacatccttttcatggactgtcattagatgctctagttttcctgtttggtagctgaagcagtaaatattcctgtcctcgcctacacagtatatccattcaccttttggtgagacacaggcagcaacaaaatctccaccctcctttttaccggatgagaaacttttcacaacctgtccttgaagtgtcatgatgtatattgacgacgtcttatgg

SEQ ID NO: 58381 - DNA, 606 bp, Gossypium hirsutum
  unsure (1)..(606): unsure at all n locations
  Clone ID: AI731162.1
gcaacttttgatcccttaattggaaggaaagtgtggacaagatggcctgaagacaaccatttctatgaggctgtaatcactgattacaatcgctctgagggtcgacatgctttggtttatgatattaatacagcaaatgagacttgggaatgggttgatctcaaagagatttctccagacgacataaggtgggatggtgaggacccangcatatcttatcgaggaggtcatggtttccatggagctaaaaaatccttcagtcatggtgctcctgctcctggtacgggaagaggcagaggttcantgaagggcctatatanaaaaaaatctttgccgcgacagaatggtattgtgaagaaactttctgatgatatcgagttattaaacacagaggctctattaaaggaggtggagaaggttttcgatgcaagtcatcctgatcctcacgagcttgagaaggcnaaaaaaacgctgaaagaacatgaacaagcgctcatcgatgctatcgcgaggcttgccgatgcatctgatggtgaaagtggtaaccaatatatgcctacatagtgatattttgcatttctgtatgctgtaaatagccagtgccgg

SEQ ID NO: 58382 - DNA, 574 bp, Gossypium hirsutum
  Clone ID: AI731150.1
gtcaggttgcctgtggatataatctcacagttgctctaacaacctctgggcgagtatatacaatggggagttctgcttatggtcaattggggagtgctacagctgacggcaaggttccaactcgggttgaaggtaaaatagcagataattttgtggaaaaaattgcttgtggatcatatcacattgctattttgacttccaaaacaaaggtttatacttggggaaagggcttaaatgggcaattaggtcatggagatatcaatgacagaaatacaccaaccctagttgaatttctgaaagacaagctagtcaagagtgtagtttgtggttcaaactttactgcaattataagtcttcataaattggtatccgctgctgatcattctatgtgctctggttgtcgaaatccatttggtttcagaagaaaacgtcacaattgttataattgtgggctaatcttctgtaaagcatgcagtactaaaaaatctctgaaaacttctatggctccgactacaaacaaaccatataaagtgtgtgatgaatgttttgttaaattgagaaaagctgcaaaatt

SEQ ID NO: 58383 - DNA, 574 bp, Gossypium hirsutum
  Clone ID: AI731149.1
ggaatacctattcctgggttgaatctcctctctaatggtccgtcgcttgccccaccaacttcagacaaccccgccacgtcctccgtgaccactacggccctctcatatgatccccatcctggtaactcctatctccctaccatggcctctacccccccggtcaatatggtcgtcactctgagctccttcttgagaaaggctatgtctactacaaactaaactcttgagtggctgtatggttccccacactatcttatgtggatgtggaacccggaaccactcgatgattgtgatcttctcctgtaccgaccttttaccaaccctattccttcgtgctccgacactcttgtgctgcatacgactgcgctccgggatgtctcatcgaacgagtggagctgctctatgccttactccacgtcgcttaaactgacccctacaattcccactgcttgcattggtgccaagtctgctgatcactgcgatgatgacctggttccgtaaggtgacccttgttgatctcgcatatacaagttgaatttccgtacccaattatgcattcgtggacgttgtgacc

SEQ ID NO: 58384 - DNA, 577 bp, Gossypium hirsutum
  unsure (1)..(577): unsure at all n locations
  Clone ID: AI731139.1
ctattatgagcagtcaaaatgtcggccttttcctccgtaaaagaactttgctcaaggctccaatccaatttgaatgactttcaaggcacctctttacatgctcgcacgactgcttttattcatgagttgttctcttctgtgtcacctaaactagtggagtctataagcacaataaaaatttctcaggtatataatctttgtttttctcgttttgcatccttacgagtactattctcctaaaaagttcatccaaggagcagcctcgtaggtttctcatcttttgtcaactttatgcaacttacgtaggtcctggctaatatcattgacgacatttttatgatgttgaataagttctccgtcaaaaggattctgttttgttaataaaatactcgattatttaattgttgaaaattttanatttgcttcttttacgaaaactgggaaaggaaagtgcctctcgaagccatattttctaatatggattcatattatttttcactttaatttgattgttttctnttgagaatgctcttggaatcatttccttcacaaaattacctgaattgatttgcatact

SEQ ID NO: 58385 - DNA, 584 bp, Gossypium hirsutum
  Clone ID: AI731103.1
aattttttttttttttttttttttttttttttttttttttttttttttttttttttttttttttttttttttttttccaatatcaatggcaaaaactgcttaaatactttttcatttaccattgaggctgaaactgctgatatcttccttctaacttcccccttatcgtccctcaaaacccaatattcttttaaacaaaaaaataatttttttaaacaacccttacctttggctcaataccattttttttcacaataacacttttaatatctggtaactcattgtaatgctgcaaaactcggacataaaaaccacctttctcacaaatttttgcaatgcaaggacggtcatattgactgaacatgccatttgctaaaatggcatcaccaacatttggaaaattaactaaattgatttccaaaaccttattttgtaaaaaaccatgctcaggcaaattaggcttcaaaacttccaataaaaatgctgtaccctcccgtatcaatttcctctgaaaaaaaaaatcagtaatggtgttgtaatcaactgggcaacctccctccatttgaaacatcatcaatgcaaat

SEQ ID NO: 58386 - DNA, 583 bp, Gossypium hirsutum
  Clone ID: AI731100.1
atcgggaagtgttgatgacaattcaaagctcaaggtggcgattgttggatttggaaactttggccagttccttgcaaagactctggctcgtcagggccgctctgttttagcctattctcgaactgattatcgagatgcagctcagaaattgggggtttctttcttctctgatgctaatgacctctgtgaagagcatcctgaagttattctcttgtgtacctcgattctttcgactgaaaaagttctcaagtcaatgccttttcagagattgaagagaagtactctgtttgttgatgtactatcagtgaaggagtttccaaggaatttgtttcttcaacatttaccgccagagtttgatattctatgcacacatcccatgtttggacctgaaagtggtaaaaatggatggaacgagcttccttttgtttttgataaggtgaggattggaaatgatgaaagacgggtagctcgatgtaatagtttccttgatatttttgcaagagaaggatgccgaatggtggagatgacatgtgcagaacatgattggcatgcggcaggttctcaatttattacccatacgatg

SEQ ID NO: 58387 - DNA, 582 bp, Gossypium hirsutum
  unsure (1)..(582): unsure at all n locations
  Clone ID: AI731097.1
gttttgcaacctgaccaccggcagcggtggcaactttaacgcgccttttctcttttctatcttacgatacgatttgctttgttcacccaaatttctctttcctttttatcccaaccttggattaatactccggtaattcaagacttctttgattaaaagtttggttttttggggccttaatttttagtaattaggaatgatagaaagggctcgaattaagctgagcccatggcagcaggcggcggttgcagtaggttcagcggtgggtgcgttgctcgatccacgaagggcagatttaatagctgctttaggagagacaactggaaagcctgcttttgaaagggttcttgagagaatgaggaggagccccgaaggcaaaacantgctccttgagcggccacgggttatatctgcgaatgttggtcatgcatgggatctaccaaagaacacttttggtgccgcatatgcaaggttcctgggatccangaatttttccccggatgacaggccacctgtgcgattcatggacacagatgaacttgcatatgtggctatgcgagctcgcgaggtgcatgacttctc

SEQ ID NO: 58388 - DNA, 595 bp, Gossypium hirsutum
  Clone ID: AI731082.1
ggttttcttctttgcaggtttgaggtgagaggaaagctatgatgctaaaattaagcattatctaataagaatgccgggcattcctttagtggctcgtgaaacctcctcctattcaagaagcacagatcaaatgtgccaagaagattctggcctgaatttatatgctgaagaggaaattgcagctgaagagagtctatcggtttattgcaagcctgtagaactctataacattcttcaaaggcgcgctataagaaatccattatttcttcaaagatgtttgcgttacaaacttcaggcaaaacacaaaaagaggatacaaatgacagtgtcagtaccagggattgtcaatgaaggtgtactgacacaaactgtttttcctttatacatcttgttggcaaggctagtttctgatgttgcggttgcagagtattctgcagtttatcgttttcgtcgggcttgtatcttgactagcttcactggcattgatgacagtaatcaagcccaagtaaattttattcttcctgagattaataagctagctatggaggccaaatctggctcgcttgccattttgcttgtcagctttgcaaatggc

SEQ ID NO: 58389 - DNA, 598 bp, Gossypium hirsutum
  Clone ID: AI731073.1
accgtttgaacgagccggaaacattttccgccgaggatgtcgccggcggcgatgatgaagatggagggagtgaagatctggacttgcagcaaaaccgtggttctgtggttgcctcgccgaggattgcttcgtcttccagtgattcactctcgcttggaattcgcgagcctgtttatgaggtgctagaagtgaagtcaaatggagtagtatctacaagtaagataaatcgacgtcaattactgaaatcaagtggtcttcgtcctagagatatccgaagcgttgatccatcattgtttttgacaaactcggcgccatctattctggtacgagagcatgcgattcttcttaatctgggatcattacgagcaatagcaatgcgagactgtgttcttatattcgaatataatcgtaaaggcggacaggcttttatggacacattgttgcctcgactgaataacataaatggagggccatgtatgcctttcgagcttgaggttgttgaagcagcattactttcaagaacacagcgtttggagcagagactgatggatttagaacctcgtgttcaagctctgcttgaagagttgcctaaaaattt

SEQ ID NO: 58390 - DNA, 522 bp, Gossypium hirsutum
  Clone ID: AI731069.1
attcaactgaaatccgatctctcacttccctaaattttgatttcagaagatctagggttttcagacatggagaaagtggttgctgtgatcatggttggtggacccaccaaagggactagatttagacctctttcattcaatactcccaaacccttattccctttagctggtcagccgatggttcatcacccaatttctgcttgtaaacggataccgaatttggctcaaatttttctaattggattttacgaggaaagagagttcacattatatgtctcttcgatctcgaacgagctgaaaataccagtgagatacttgaaagaggataaaccccatggttcagctggtggcctctattacttcagaaatattataatggaagacaatccgtcacatatcttcctgctaaactgtgatgtttgttgcagttttccattgacagacatgctcgaggctcacaaaagatacagtgggatgggaactgtgttagtaatcaaggtatctgctgagtccgctagtcac

SEQ ID NO: 58391 - DNA, 526 bp, Gossypium hirsutum
  unsure (1)..(526): unsure at all n locations
  Clone ID: AI731067.1
caagccatggcaatagtttagtccctaaggtatccattaaaggttttcactcggttactccgatgagaataaccgaaccacgacagacacgacgagtgctgtcacgggatcttgttggtccggagatgttccagaggtgtttcaacatggtccaatgctatacgaagggagaagattcaggttgggtanttgcagggtggattaaagagtcacttgggagagctttgttggaacaaccgatgatctccggacgtcttcagaaaagggaccgaaacgatggtgagttggagatcgtgtccaacgattcgggcattcgaataatcgaggcaacgattcagactactctttcggagtttctcgatttgaagcaaagggaagaggctgaagctcagcttgttttttggaacgatatcgatgaacataatccacagttctccccattattctatgttcaggtgaccaatttccaatgcggaggatactcgatcggaatcagctgcagcattcttctggtagactttttctc

SEQ ID NO: 58392 - DNA, 533 bp, Gossypium hirsutum
  Clone ID: AI731050.1
ctcaggttagcttctttttgtgttatagtttgttaggtttatatatatatatattccatttttaagtgcagtttgttctctcatggagaatcctgggaattttagattggtttttgggatttcatttctctattgtttacttaatctttcactaggattcaaccctgtagataactatttgatagattgtggatccttcaaaaatagatcaataggtgttcgagagtttgtagctgataatacaaatacttcatctcatagactttcaaccccagagcatatttttgccaattctagttcgaactccatctcactttacaatgattcaacactgtatcaaactgctagaatcttcaatggaccttcccattacagcttttcaatcaaagaacaagggaggcactggattcgccttcatttctttccatttctattccaaaagtatgatatgagcaatgctaaattctctgtttcagctcaaaactttagccttactagagatacccaatcagggaatgtttctgttgttaacc

SEQ ID NO: 58393 - DNA, 642 bp, Gossypium hirsutum
  Clone ID: AI731034.1
caagaaagcaactgtgcgtatcaatatttacaagcagcacagacaaacgattcagtatatacagccacatgaacatgaaaagctctcccaagtcgagcttcttgttgttgatgaagcagcagctataccattgcctgttgtgaagtccttgcttggtccatatttggtcttcctttcatctactgtaaatggctacgaaggtactggacggtctttatccctaaaacttctgcagcaattggaagagcaaagccaactgtctaagggtgtcgagggctctctctctggtcgtgtttttaaaaagatagaacttagtgagtcaattagatatgcatctgctgatcccatagaatgctggctgaatgctttgctttgcctaaatgttacaaactcggtagccagtattagcaggttacctccacccagtgaatgtgatctctactatgttgatcgggatacacttttttcttatcacaaagatagtgaactatttttacagcggatgatggccctatatgtttcttctcactataaaaattccccgaatgatctacaactaatggctgatgctccagctcaccatttgtttgtattactaggtcctgttgatgagtcaaaaaatcagcttcctgatattttgtt

SEQ ID NO: 58394 - DNA, 397 bp, Gossypium hirsutum
  Clone ID: AI731022.1
gtcccatggtggtggaagcatttgcaggcaaaaacactgtgaaggtgtcgtataactccaaaggcaaaggtggattcaaagcagctagacttgcattcagggcagagtcgacacgaactcggatcatgttctatagcacattttacgccatgaaaagtgataactcgggttctctttgtggaccagtgttggatgatgtgaagctgcttagtgtccgaaaattgcatcacctgtaaattaaaactgtttggaaaatgttagttgcattgcttatgcaactcatcccattaaggtaacaaaaacagtgagggtttaattcattccgccgatgtttatatagctttcttcattaatttaaattaaatggtatgttcggctaaaaaaaaaaaaaaaaaaa

SEQ ID NO: 58395 - DNA, 663 bp, Gossypium hirsutum
  unsure (1)..(663): unsure at all n locations
  Clone ID: AI731005.1
cacaccgccgaccaaatcagagaaatggaagcgctgtttaaggaatcaccccatccagatgagaagcaaaggcagcaattgagtaaacaattaggccttgctccaaggcaagtcaagttctggtttcaaaatcgtcgaacacaaatcaaagctatacaagagcgccatgaaaattcgttgttgaagcaagagctggataagctccgagatgaaaacaaagccatgagggagactataaataaagcgtgttgcctcaactgtggcatggctaccactgccaaagatggctccattacagctgaagaacaacaactacgaatcgagaatgccaaactcaaagccgaggtagaaaaactgagaacagtaataggaaaataccctccgggtgcatcaacgactggttcatgttcatctggaaatgaccaagaaaacaggagttcattggatttttacactgggattttcggacttgaaaagtcgagaatcatggagattgtaaaccaagccatggaagagttgcaaaagatggctacggctggtgaaccgctgtgggttcgaancgttgagacgggttcggagatacttaactacaatgagtacgttcaagagttctntgttgaaagttcaagcaatgggaggccaaaaagatccattgaagcttcc

SEQ ID NO: 58396 - DNA, 656 bp, Gossypium hirsutum
  unsure (1)..(656): unsure at all n locations
  Clone ID: AI731002.1
acccagcttgcatccaagcgctcgacaccagggcctcacttttggaaacaatacgctgtttacctgattgtttgcacgaccttgaacacttgaaactactttacaattccatcttgcgggataggaagcttccagggcctgtctggaagcgtcacaacgttaggtacagggagattccagggaagctttgcgcattgaccactaaaattcagcagttgaagcaaagggttgcttctggggagactgcaaatgtcgattactatgcattgatcggtttacgtcgtgggtgttcaaggtctgagcttgagagagctcatttgctgctttgtttgaggcacaagccggataaagctaccaactttatcgatagttgcgagttcgctgacgagcgtgatgttgactcggtcaaagacagagccaagatgtcggctctgcttctttacagattgcttcaaaaaggttattccancgtcatgtctacaattatggatgaagatacggctgagaagcgaaggaagaaagctacagttcaagtgccacagacccaaaattctagctctaaattggatcctgaatctactctcgcttattcagtaaaatcatcaaatgcctcggattgcgatgggaaggctaatcncattgaanacgaaacaact

SEQ ID NO: 58397 - DNA, 658 bp, Gossypium hirsutum
  unsure (1)..(658): unsure at all n locations
  Clone ID: AI730997.1
caaggatacaagtatctgacactcactctcgagtgcctgctagtaaaagcttttaactctatgccagtcaaaagcatgaactttcctagtgctatttcactcatatagccaaagttgtagaaatcccttggcttctaattttaaattataatttgccctacattgctgttatctacattcttggatattttattctaagggtccattaatttgcaaagaattaggctaatgttattcttggcaggttagtgtgccaaaaggttctctttgcaaccttaaggcaaaacttgatggtgggttgcccccagatgcagtgtatgatattttaactgatcctgatagtaagagaattttcaagaacattaaggtaagagcggtatattttgacccataatagtagattgaagttttctatttaggacaccattgccaatttgatgcaatggcattcccagcttcaatgcttcaagcagtctcaggaaattcatatatttatttcatgaactgatattctgcttcaggaagtgatatctaaaaaggttttagttgatgaaggtcaaanccangtggttgaagtggatcaagctgctttctggagattcctttggtggtcaggtaccatctcagttcgtgttctagtggatcaaaaccgggaaat

SEQ ID NO: 58398 - DNA, 628 bp, Gossypium hirsutum
  unsure (1)..(628): unsure at all n locations
  Clone ID: AI730961.1
gccgatatctcgattcgatatctctgtgacttagggaaaaatgctagttttcatgctaatgtagctggtaggactgaatgcaatgtgtttgatataactcgagctttaaaagatttgggggattcacatgggtttccangtgcttcagaggttgggaattgtcttgtaggctctggtacggttagggaaatagttcagtttgtggatacaaaagaggaaatcccatttgctcagccggtgcctaagtttccggttgttaggaaccggaaactgattccgagtttcgagcatatgaaagaaaccccttctgggaagcatatcccgagttggttgccggctttccctgatccccacacttataatcatacacctatgtggaatgagaggggatcggatccttgtgctgataagattgagcaagcaaggcagcggagaaaggctgagaaggctttgctgaggttgcaacaaaaactggtgtgtaatggttctaccgaaacttcatcttccacggttttggatgctaaaacggaaaatatacaagaacctagacgtaacccttttcttgctgtcncactgcaacctggggagaaagatgtttcaaaagttgtnttgccanctaagctttcca

SEQ ID NO: 58399 - DNA, 622 bp, Gossypium hirsutum
  unsure (1)..(622): unsure at all n locations
  Clone ID: AI730921.1
caaatcagtttctattattttttagtttaattattggggttttcgtgctttgcttagcgtctagggtttcctcttactatattttaaggctttctccatattcggtttcagtatctctcttcaatattcggggtttgggaagaatttggtgcaagatttaacctgtaattaatgaggtctggcaccggcattggtactgtgagaaggcggcttcatcacagcgatgttggcggtataaggaacgaaaattatgagacgtccggattggatggtttagatgaacctttgttagggaaacgtgattatgatgacaaacattctgaggggaaggtgatggaggaaatttgggatgatgagagaaagatagaacagttacattggacgcttttgttctcaaacttgatcgcgcaatgggcgcaatggatagcaaaccttgtctttggatctggatcatttattgtacgacatttacctctactttctaacaccanaaatagatcatacccgatatttatcgtgcctactcttagccctttacangaagataggttgagatatctacagcaaaaactgggagtcccgtttgatggatctcgggtggatcatcaagatgctctnantt

SEQ ID NO: 58400 - DNA, 624 bp, Gossypium hirsutum
  unsure (1)..(624): unsure at all n locations
  Clone ID: AI730845.1
agaactagagaaaatgtcggctcatctctccaagacagactcagaggtgagcagcctaagtcaatcttcaccggcaagatcggatcgtcgccaagtctactatgtgcagagcccatccagggactctcatgatggtgaaaagaccacaaactcattccactccacaccggtgctcagccccatgggctcacctcctcactctcactccaactcttcattaggccctcattcctcgcgtgagtcttcttcaacccgcttgtctggatccatgaaaccacagcgtaagcacgacggatctcgcaagggtcgcaagccatggaaagagttcgatgccattgaagaagaaggcttacttgatggtgatggcgcccaccangacttccatcgtcgtcgttgctatttcctcgcatttgtggtcggcttctttgtgcttttcactacgttttctttgatcctttggggtgctagtagacctcaaaaacctaaaatcaccatgaagagcatatcgttcaacgaattcagggttcacgcaggtacggattcctcgggagtgagcaccgaaatggtgacgatgaactgcacagtgaagctcacgttccgtaacacagccacattttttggggt

SEQ ID NO: 58401 - DNA, 627 bp, Gossypium hirsutum
  unsure (1)..(627): unsure at all n locations
  Clone ID: AI730831.1
gaaaaaagttgtaccacgggtctgcataattggaggaaaagctgctccaggatatgaaattgcaaagaagattataaaactctgtcatgttgtggctgaaagaatcaacaatgataatgatattggagatcttttaaagttggtctttatccctgattacaatgtttctgttgctgagatggtaataccaggggctgacctttctcaacatctaagcactgcaggacatgaggcatcaggaactggcagcatgaaattcttgatgaacggatgtttacttttagccacagcagacggttctacaattgaaatggttgaagaaataggtcaggataacatgttcctgtttggagcaaaagcgcatgaagttgttgcattgcgcaagaaaggacccactcttaaagttcctcttcagttttcgcgtgttgtaaggatgatccgagatggtcattttggatttgaagactatttcaaatctttgtgcgacaagatagagggcacgagtgactattttcttcttggtgccgattttatgagctatctaaaggcccaggcagccgccgataaagcgttcgttgatgaagagagatggacnaaaatgagtatacttagcgcagctggctctgt

SEQ ID NO: 58402 - DNA, 627 bp, Gossypium hirsutum
  Clone ID: AI730830.1
gaacgacttctctagaatcaagaattcgacaagctacaaaagaagcattgagggaaatagatgcagtgggagtgcaatgcacttgccggagaccggtggacggaggatgccggaactgtttgcaaagggaactatcgattcgtctccaaagcgtagattttgattgttacatatgcaagtctaagtggaggagctcccccgagattccgtcgggggagcacacgtatttagaagtggtagacaaatcaaaggccaaaaagcgggaggtgagggtggtgatcgagttgaatttcagggccgaattcgaaatggcgacggcaagcaaagattacaacaagctaatcgctgtgctaccggaactattggtgggcaaagcagagaggttcaaagcattgaccaagatattatgcttggcagccaaaaaatgcatgaaagagaaaaagatgcacttggctccatggaggaagtataagtacatgcaagccaagtggctgggaacatatgagagaagatcgccagcacccttggccgtcggatattcagaccggcagccaaagcccaaggcttccatgttaacttctgatctgcgtgagaatttgcctgccttgcattacactgctgttgaat

SEQ ID NO: 58403 - DNA, 545 bp, Gossypium hirsutum
  Clone ID: AI730760.1
gttgcttctaaactacggcaaggaaaactcatcggaacttttctccttttaactaatttccactttccaaaagaaaaaccaaatctcttttttgttaaactcttagttcgatctcttactttcaatggatgaatcgtcgtattggaatcttccttctagtcatttactcggctcagtccccgctgttgttaatgaagaaagtgaagcctcgtatggcagaagaggaggtggtgtccgaggttatcaaactcttggacctccgaccgaaggatttgaacaacaatcacaaaacaactggaagggagtgtttagtatctcatcatacacacagtattttgatgtagatacagatgttgtcgtaaacagattgataagttccttttatcctgccggtggagactttttcaacaagattggcgctaaccctgatctgtatgggcttatctggatcacaactacattggtctttatgcttgcggcctttggaaactgtgccacataccttattcaaaagcgcactgatcgaactactacttggagctttg

SEQ ID NO: 58404 - DNA, 633 bp, Gossypium hirsutum
  unsure (1)..(633): unsure at all n locations
  Clone ID: AI730749.1
gttctccaccgccaaacatggaatcgttttcgttcttttcctcctcctttttctctctccgcctccctccaccgctcaacctaccgacccgaacaacgaccgttacccttacgcccgtttcaccccttccatggccatcatcgtggttgtcttgatttccgctttgttctttatgggttttttctctatttatcttcggaactgctccgaagccaacgccaacggaagcgtcgtccgccctttcaatggcgaaactgggcgttctcgccgtgggatgcgtgggcttgaaccttctgtgatcgaaactttccccaccatggtttactccgaagtgaaagttcataaaatcgggaaaggagctttggagtgcgcagtttgcttgaacgagttcgaagatgaggaaacgctgcgtttaatccccaaatgcgaccacgttttccaccctgattgtatcgacgcttggttggcttctcatactacctgccccgtntgtagagctaatctcgctcctcaacccggtgaccctatgagccaacccgccgagttggataacaccaccaccgagttggacctcgaggctcaaaaccacaacaatgactcagaactggaggaagatnggaagatcnttccttt

SEQ ID NO: 58405 - DNA, 631 bp, Gossypium hirsutum
  unsure (1)..(631): unsure at all n locations
  Clone ID: AI730730.1
ctcatcgatccactaaaatactgattctccactcacattttattttcatttctctatactcaaaaaaacaaaatccctaatttctctccttttttgaaaaaattattctaataattttattcttagttgtagaagaagtagccactagccagagcttttcaccgttgctgttcgaacatttttgtgtttccttctccgatcgtctggtttctgtcggactctatcgcacttccacaaaaaaaattggctgatcggtttacgttgcaagctttgatccttgagcttcagttcggcttttagttgaattatgtctgctgataccatgatgaatgttcctaatggcaatggtaatggcaatgcacagcctgatccgcagcgaacttatcaagttgttgtggctgcgaccaaagatatgggtatcggtaaggatgggaagttaccttggaacttgccttctgatctcaaattcttcaaagatatcactctgactacatcagattctgggaaaaagaatgcagtcataatgggtatgaaaacatgggaaagtattcnccttaagaatcgacctcttccgggtcgtcttaatgttgttctgactcggtctggaagtttcgatattgcaactgctgat

SEQ ID NO: 58406 - DNA, 610 bp, Gossypium hirsutum
  unsure (1)..(610): unsure at all n locations
  Clone ID: AI730727.1
aaaatattcttaacatttctttttcatcatcttaacatggtgtcagagcctgaatcgttttttgctccgatcatcatcttcttttttcattctttgttcgatttattctttgttcgatttattctttgttctcagatcctagatggcgcctgtctctgaatctgaatctggtggatctgattccaccatcaccattgatttcagcaatcctccctatcttcatccttctgatactccctggatcgttcttgtctcccatcaactcaccggcacagataactattgtgtttggagccgttctatgagtattgctcttcttgcaaagaacaaactcggatttatcgatggatcttgtaaacgcgattctctttctccagatctaaaatcgcaatgggatcgttgcaacgcttttgttctctcttggatcatcaatactgtttccaaggaactctctgctggaatcgtttttgcctctagtgcagctttggtttggaaggacttacaggaaaggtatgataaggttgatggctctcgtgtttattatcttcatcgatctatttccactcacacacaaggtacttcatctgttgctacttatntcacaaagctg

SEQ ID NO: 58407 - DNA, 608 bp, Gossypium hirsutum
  unsure (1)..(608): unsure at all n locations
  Clone ID: AI730721.1
gctgaatcgcagcttcctcagcgcaatatttgcttccttccatattagcacaacacactacaccgtataacttggtcttgacagacgccgatacgacaaagggtgcttgagtgtaacgttgaccagcttcaagactccatagtgaatcatcttcaacttcttctgcttcagttaatgacgctggatgccggctttcaataaaaagctctggtttgctcctcatttgcacctccctgatggggttatgttcaaagtcccaccttggtttctaacaggcctagtaagctgtcctcttcgatggtgctggtgtcggatccttcttggatatcctctgcattgtacaagacatgattgacgacagctaaaatcctagttagaacaaggacttactgtcttgacatcaactcgagctgacgtcgtcgtcccgtactagtggagagatgctgtgcactagtcatgcacatanangtgatgccttgctatcggagatcctatcatcgaaacacgcatctgttacgtgatcgtcctgattctcatgaaccaatcgcttgatctctacacttgctatggattaactctgatggcgctccatgctcgtggataaatcc

SEQ ID NO: 58408 - DNA, 617 bp, Gossypium hirsutum
  Clone ID: AI730715.1
attttctccgtctctttaaaacccgtagaactctcttatatctccacaatttcttcacttcaatcctcaaacccatcaccaatctcatcgcaaaaatcatgcccaatcaatccgatgaccacaactccgatcccccaccaccacccttcgacccatcaaagccctccattcccatctcttaccccatcaactcccttgaagaccttgactccgcttcttactttacttcttttcactacccttttaataaatccactgttcctctccatccccccaattcagctttgcctccaaggcccaggcttttggtttgccatgacatgcaaggtggctacgtcgatgataagtggatccagggtggccataattccggcgcttacgccatctggcactggtatttgatcgatgtttttgtttatttttctcataatttggtcaccctgcctcctccttgttggaacaatactgctcataggcatggagttaaggtattggggacatttatcacaaaatgggatgaaagcgcagctatttgcaagaagctgctttccactaaagagtctgctcacaagtatgctgaacgcttggcagagctcgctgttgcttttaggcttgat

SEQ ID NO: 58409 - DNA, 611 bp, Gossypium hirsutum
  unsure (1)..(611): unsure at all n locations
  Clone ID: AI730712.1
gaaattgggggaaatggaatgggtagtaagggtacagattctttctcaaatgggcatttcataggttccgtcacaatacattcaacctcccaagagtcggcctggatctgtgacagaatatataactgatttgagctgctaacatattcctgccgttgatctatccatttaaaatgagtccgtcattccaggcattcgaaaggcttgtcaacattggggagctttgcatattatctaccatggggtacctaccaaactgttggattatttgaggatagcctgtttttcttctttccatgatttcacgatggaggataaaattcagtatgcttgcaatcctaattttgctgcctctgaaggataccgtaatcgtctgctattaagctctgaacatcaaactgttttggatcggatggactatcttgatcaccatacattacctctttcacgccgcaatccttcagctcggcctcattttccgccggatatacgggaattgattgggccttntagatgagatatcagancgtgggttcccacactatagtgactaatgtctgacaatttangactgaatgctttctgcattgaacaattcattaggtgagtcg

SEQ ID NO: 58410 - DNA, 470 bp, Gossypium hirsutum
  unsure (1)..(470): unsure at all n locations
  Clone ID: AI730668.1
ctaccccttattatgtttatattgtcgttggataccctcggggggggcattatttgcgtcataaaannggcgccaanaacnnatacncgggggagagaggacggccggcgggtgggggccgacgaaggggggggaggacagaaggcgaggggggggggtttagtgtaatttctgtgggcgtgggactttgggtaggtggaattttgtcgttgtttttggattactcttttgagtggggtgtttgttggtggcgggtgtgttggttgtgtttttttctggcgggagggattggatcgtgtgtggtttgtgttgttaggggttttggtttatttctattccgtctgtgggtgcggataattatgtatcgggatttaattggtttgtttttgtcgttgcttatttttttgtgtggtttcgttagatttggtggttgtataatatggtgtgctacttgttttgtcgggttcggt

SEQ ID NO: 58411 - DNA, 614 bp, Gossypium hirsutum
  Clone ID: AI730663.1
aaactagcaaacaaaggtaaaatggcaatgaatatggaactggcgatcccttcactacctcttctctccctctctacctttctgcttctacacccatctctcattccctcttcacctgtacaagaaaccgagattgttgtccacgatgttttgaggctatctgagcgtctctcatgaacctatggtatctctcctgtggaaccggaagatcgcttgatgaatgcgagagatagtgacccccactgggatactaattaccgaaaccgttgatattgtgtcataggattccgctctaaagctcttcgtgtaaaaaggtgttcgatggatgtcgtcactgattcctgtgatcatgaaatcgtgaacccgtgaaccgagtctctctcgcaagctgtggtgtcagaaaaaccgttgtggatcaattacgctcgtgagtggacctgacaacttgatccagagttgaggttgaaccccttcaagaacttaaaacgtctgggcgcccgcgtacatgttgcacggggtcgggagccttaccgttcactatgtgagcaactctatcgatcgtggactctccatacgtgattgacaccatgacggagtgctcttgtgagggactc

SEQ ID NO: 58412 - DNA, 612 bp, Gossypium hirsutum
  unsure (1)..(612): unsure at all n locations
  Clone ID: AI730650.1
gtttcacaaggtgttgagaaaggaaacatataatgtggttttggaaatgcaaatttatacatcacttgtggcgacatgtgtttcgactgcgggtatgtttgggagtggggaatggaaaggattgcaggatgagatgaagggtttcaaaagcggaagagtttcgtatgtgctgacgttggtttggacagcggtaagttggcaggtatgtactgttggggtggtanggttgattttcgcactgtcgtccctcttctccaacgtgatcagtactctatcattggctattacacctctagctgctctgctagtttttcatgacgagatgaatatggtgaaggtaattgctatgcttctggcgctctgtggtttttgctcttatatttatcaaaattatctaaatgatacaaaggcaaggaaatcggaatcacaatcacatactgatgatgttattcgggaaagccatcatgtatagttcttcctcttgctaacttggttccaatgcattcaatttactctcataaaanatggattggattgtcttttatccttttttctttttttatttggaataggaaatantaaacaaaatactgtaattgctatagtgaagtc

SEQ ID NO: 58413 - DNA, 585 bp, Gossypium hirsutum
  Clone ID: AI730628.1
aactccgttccaagtccgatccaaatccgggacaaattgatgcatgcgagcgctgttattgatggaaaagtttacgctatggctgatagaaacggggtttgctacgaagtgaaaagcgggaattgggaaacggtggacagtgatttggataatgggtggcgagggagagcttgcgtgatcgatggggttttgttttgctatgattatttggggaatataagggggtatgatgtgaaggaagggacttggaacgaattgaaagggttggaaaaagggttgccgaggtttctatgcggtgctacgatggcgaatttgggagggaagttgatggtggtctgggaatcaaagaatggaggtgggaaagaaacggaaattcgatgcgctgagattgaggtgaagacaaatgaagctggggagttatgggggaacattgagtggtctgatgttgttcttttggttcccagagaagcttccattgttcattgcttggcagttgctttgtgaaactcaatggaaacgcttggctggaggaatgtgccatgccagaagcagcaaagctttggattgagccatcccactaatgcc

SEQ ID NO: 58414 - DNA, 641 bp, Gossypium hirsutum
  unsure (1)..(641): unsure at all n locations
  Clone ID: AI730610.1
cactctatccaattcctaacacctctctctccgcaaaatgttcttagtatgtgccatctataacaaatctttttgttgtctcacgccacgaatatcaataaccatctcgggatctttggtaacacacccttggccaccatttacgttcggagggttaccttgtgatagtccctcataagccatcagagagaacgttgaaaaatatggtgacatctctgaacctgtgattatatctgataaaataactcgcccatcattaggttttggattctctacctctagtgacgctgacgatgctgttaaaacttgttatgatgctaatcctatcacactactgccgaccagacctgtgcaacctctcttcactcagatcgcttctcgccaagtactcctcctctgctcctccacaattatgatcgatgcttggatcganggccacctctgctgcacataccactcatgtccattcgttttatccaacattggtgacccctgcgttaccctatcgtctcggcatcatcaggacgctccattatttggatactctctcacctacattctcgtatatatgagttctctcctttgactgagctacagagaatgatccttcgtgattggacatctctctcagttgtttcccc

SEQ ID NO: 58415 - DNA, 602 bp, Gossypium hirsutum
  unsure (1)..(602): unsure at all n locations
  Clone ID: AI730476.1
gtatttgcttgttttgagagtgttcatggctgatattaatcaccataaacatggtactttaagtgagaactccgctgattctggtgacaagccggataagaactcagaagatgtggttgttcaagcaagacataaaagacgaggggctatgatttcttcatatgcatcggcccaagatttgagatctccggatgcggaaaacaagaaaaaagatggatcatctcctaaaggagttatagaagccagcttagaaggcttggaatccgatatagcttctcctgaagacagccccaaggcagaagttcgatgtacacatgcaggagctctttctaactggagaaagctcttcaaattatggaaaagaaaatcggaaaagcccttttctaccttcccacaacttgttgttccaaggctttcgagaaagaacaacagcagcaaacaggagaatcctatgctgagaaaattatacaacttcaagtcttctttagagaacttcagcctatcgcagctccgagctgcaacagacaactttaaccgagagaacattattggaaggggtggttatgctgaattctacaagggtcggttgaaggacgganatt

SEQ ID NO: 58416 - DNA, 610 bp, Gossypium hirsutum
  unsure (1)..(610): unsure at all n locations
  Clone ID: AI730444.1
gataatctcgacaattcctcggatgttgctctcaagagagtcaaagaactcgccggtgaattcggcaggaacctttccttttatcaggtggaccttcgtgatagagcagccattcaaaaagtatttgctcagacaaaatttgatgctgtgattcattttgctggactaaaggcagttggtgaaagtgtaagtaaaccattgctctatcatgacaacaatatcgttgggacaattaccctgttggaagtcatggctgcacatggatgtaaaaatcttgtcttttcatcatctgctactgtttatggctggccaaagaaggttccttgtacagaagagttccccctgtctgcagtgaatccatacggacgaaccaagcttttcattgaagagatttgccgcgatctccggaattctgattctcagtggaagatcatactactaagatattttaatccggttggtgctcatcccagtggccacataggtgaggatccccggggtactccaaacaatctcatgccctttgtacaacaagttgctgttggtatgcggcaagcattgacagtgtttgganaggattattcaaccaaggatggtatcggggttcgtt

SEQ ID NO: 58417 - DNA, 615 bp, Gossypium hirsutum
  unsure (1)..(615): unsure at all n locations
  Clone ID: AI730425.1
ctgcttttaaagatatatctggacagtatcgtcagggcttaataggcacagacagatatttggattatgtacatcagcatggcttgtcacatctagttcttgagctggctagactcttgcctgatgttcagaagcagaaagaactaattgacacctaccatgctagtttacaaagcaatggtctgcaggagaatggtggtggggcccacggcagtgtgttgtggaaggagaaggatgcctctaagaaaaggaaaggaaaagggaaatctgttgatactgctggcagtaattcaaaggatgttctggccgatagtattctcancactgtccgccaattgcagtcaagttataagcctactgaagaaattacggaagtgctatcaaaggatggttaccgtccttccacaggtaaagcaaaggtgatggtggaggagcancaggtgctactcaattctagcaatcagccatcaataaaaattgggggccaaaatgagtccttaccactgaaaactggatcatgggatgggggtttgctggtacancaacaaaaaaaaacctcaaaattccacccatttcngcttggtgatggttcaatggcatcactaatggatctct

SEQ ID NO: 58418 - DNA, 594 bp, Gossypium hirsutum
  unsure (1)..(594): unsure at all n locations
  Clone ID: AI730418.1
gtgaaacgctccaccaaggaccgacacaccaaagtcgatggtcgaggccgccgtatcagaatgccanctacttgtgcggctagggttttccaattgactacagaattatgtcataaatctgatggggaaaccatcgaatggcttttacaacaagctgaaccagcaataatagcagccactggaactggtactataccagccaatttttcgactcttaatatttctttaagaagtagtggatccacgctttctgctccgccttcaaaatctgctccacactcgttccatggtgctttaactttggcttcccatcatcatcaccatcacccttatgaagaagggtttgctcatagcgctttgttggggtttcagcagcagcatcttttaacggcagatcaaataactgaagctttacccggaggtggaagtggagatggtggggaattaattgagaattatntgaggacacgtttcacggaagatctgtntaangatgatgatcagcaacaaggtgaaactggtagtggtggcggatatggatcccctattcacgctttcangaatggtgaaactctattgtctaaaccacaactt

SEQ ID NO: 58419 - DNA, 590 bp, Gossypium hirsutum
  unsure (1)..(590): unsure at all n locations
  Clone ID: AI730557.1
ggaaagagccaacgtgcgttccttccttctaaaagagaggcgaattactctggcagtctcctttcccccctgtcccgtcttcttacctcattgccaaaagtttccagctttcataattccatcaactttctagtttctaatactaattctttgattactttatgtttctaatatcagcttattaattggactacaaagttaaaatgagaaattagatgggagcgttattgtttttcattttcttgaatgatctgtaatttccttcagcttctatcaatttaatcaattcacaatccattattcttggttgaaaaaggagttctccgatcgtgaggagaaaaggtactgtgttttggatacgttggtcgaagcgatctgcagaagaaatcagatggcgatactctacgctctggttgctcgtggatcggtggtgctggcggagttcacggcggcttcaacaaacgcgagcgccatcgccaggcaaattctagagaaaacatcaggagacaacgacattaacgtttcgtattcncaagatcgatacatcttccacgtcaaacgcaccgatggactcaccgttctttgtatgg

SEQ ID NO: 58420 - DNA, 665 bp, Gossypium hirsutum
  unsure (1)..(665): unsure at all n locations
  Clone ID: AI730554.1
cctgccggtgnacgcggtctccttccaatgtcaacggtatcgatcagcttcatatcgaattctgcacgaggctgcctttttttgttctgcagtttatgtgagccctcaacttcaaaaaaggcgtgaactgtggaaagctcttgatgagggggcgggatgatgtttttgaactatggattctagcaagtgattttaattccatattggatggttctgagagacaagggggcaagtatcgagggcctccattgtaagttgtttaacaaatttatctataagtttggtctcccaaatatgtgttttttaggtccaatgtttacttggaacagagaacaatggttccagatttgaagctctgggcgtgaatcaaggaggatatgacgagatcagcttatacatggtaagtgactctacagtggacaaataaaatttgaatgactctgttagagggaaaaccttaaattatctaccactcagatgataaataggttgaaaaccacatgccaaggagttgcaattggatctgggcctataaatactactaatattctatagactgtgaatacatgtagcgaacggacgtctgatagtcttaatgatgggtcattcatcggccgtcgagttgggtcggtgttgacaaaccttttgctttcaatcaatccact

SEQ ID NO: 58421 - DNA, 643 bp, Gossypium hirsutum
  unsure (1)..(643): unsure at all n locations
  Clone ID: AI730537.1
caactttggatctttcgggtaataatcttactggcacaataccaacagagctcactacattgccgaagcttgttcgattagatgtttcgaacaacaggctctatggaaaagtaccacctttcaggcaaaatgtggcggtgataactgctggtaaccctgatataggaaaagaaatggcttctccaccagctggcaagtcccctggtggatctcctgctggcggcggcggcagcagcggcagttcctctggaaatggtgaaaagaaatcgaatacggggactgttgtgggttctgcaattggtgcggttggtggcttgagtcttcttgttttgggtatccttttgtatgctaaaaaaggaaagcgtaccagtaaagtgcagagtccaactactgtagtcatacaccctcatcattccgatgaccaggatggagttaaaatcactgtcgctggatcaagtgtcactggtggaagtgaaactttcagccacacgagcagtggaccaagtgatgttcacttggttgaggctggcaacatggtgatctcgattcaagttttgaaggatgtgacaaataatttcagtgaagaaaatgtgttangaaggggtgtnttgggacantntacaaaggggaattacatgatggt

SEQ ID NO: 58422 - DNA, 647 bp, Gossypium hirsutum
  unsure (1)..(647): unsure at all n locations
  Clone ID: AI730535.1
cctcgtgccggttgctacaaataacttctcggttaagctcgggcatggaggatttggttcagtataccgaggaattcttgcggacggaactcaaattgctgtgaagaaactggaaagcatcgggcagggaaagaaagaatttcgagctgaagtcggtattattggcagtatccatcatgttcacctggtgagattgaaaggcttttgtgccgaaggaagctatcgacttcttgcttacgaatacatggccaatggttccttaaataaacggatcttcaaaagaaacagagaagaagaacccttgctggattggagaacaagattcaatattgcagtaggaacggcgaaagggctagcttatctccatgaagattgtgatgcaaagattgtgcattgcgacataaagccagaaaatgtattgcttgacgaccacttcctanccaaagtctcggattttggcttggcaaagctaatgactcgagagcaaagccatgttttcaccactctaaggggaaccanaaggtaccttgcacctgagtggatcacaaactacgcaatatcagagaaaagcgacgtttacagctacggtatgctactgctcgaaatcatcggcggaagaaaaaacttcgatccgggagaatcttcaa

SEQ ID NO: 58423 - DNA, 651 bp, Gossypium hirsutum
  unsure (1)..(651): unsure at all n locations
  Clone ID: AI730525.1
gaccagaaaagcatatgatgatactgctatctggcgcatcgggttatctaggtggaaggctgtgccacgctctggtgaaccgcggctacgccgtccgaaccttggtcaggcgcacgagcgacctctctggccttccttcatcttcacccaccgatggagcttctctggaactcgcgtaaggcgacatcaccgactacccatccctcctggacgcctgctccgactgcgacatcatcttccacaccgccgccctcgtcgaaccctggcttccagatcactctagattcttctccgtcaacgttggtggtctgaagaacctgttgcaagcagctaaggagacgaagacgattaataagatcatttacncgtcttcgttcttcgcttttggtcctaccgatggatatatcgccgatgagaatcatattcacctggagaaagctttctgcacggagtacgataaatcaaaggccgccgccgatcaggttgctttgcatcctatagctgacgggatgccaattgttccggtttatccacctgtaatttatggccctggccagcttaccacaagcaatgttgttgctgcattattaattgagcggtttaatttgcgaatacctggtttcataggccttggaaatgataattttcttt

SEQ ID NO: 58424 - DNA, 649 bp, Gossypium hirsutum
  Clone ID: AI730524.1
gtcatctgggtaaatctaaatatccatttgtcggtcactgcgtcaatacctacaaccattctccctctctcgggattttgtaaatcctattattatcaattgttagcgatacatcgtttccgtaaatgtagacactcgtttcatcccttcttgccttgttaatcaccctctccttcatggtttcgcagtcatatcctctgttcgtgatccggttgatcaaacagcgacacgtctcttgcgtgcacttgatggtgattatcaggggctcaagttgtttacatcagacacattgtataagggttcctttcagacgtgtgttgtaagtcgtgacagtgtttctctctcgacatctcccatgcctcatgattaatatatacctcgactgaaggttccatcctgtgtcatcggacgtcggatgttcacaatcatgtgctgcgagtcatctgttcggccaatagtctgtatgtcatctcacgctgcagactcctaccatgagaaacccctacctccacatgtatttcttgatgaaagtccgttaactatccagattactatcccaatttgaatcccttgtaggtattctcctagtccatcgctgaaaatgctgcctgcacatgtgcaagtcacaaaggtcttgaactggtggtct

SEQ ID NO: 58425 - DNA, 658 bp, Gossypium hirsutum
  unsure (1)..(658): unsure at all n locations
  Clone ID: AI730523.1
gccanactctagactcgggtaccaatagtactataatagcctcaactaacgttaaatctcttaacactcaatattttctctaagattgtagaagatagcagacggtgaggatattcatccccctgtctgcgatactggagctggaattgtgaaggctggatctgccggtgactatcctcctaaggcattgtgtccaatcactgtccgtcgtccacctcatactggggtgattgttcgtatgggtacgaaagattcttatgtgagccacaaaggtcagtcgaatcctcgtatggtagatctaaagtaccctctcgaacatgtcattgtccctacttaggatgacacggaaagcatgtagcctcatacgtcctcctatgaagtacttgttgctccggaaaagcatcctattctcctcactcgaagccctcttcccccgatgtgccgatcgtgttacaatgaggcagttctcctgttataccttcaacgcngctgctaagtatgttgccatgcatgctgttcttcccctttatgccattggtctaacacctggtattgtgcttcattccgcaaatcgtgtgnatcacgcattcgccctttgctaaggatatgctcttccacatgcgttctcacgttcttatcttgctggtcgattactccc

SEQ ID NO: 58426 - DNA, 660 bp, Gossypium hirsutum
  unsure (1)..(660): unsure at all n locations
  Clone ID: AI730522.1
agaagaccttgacgacgtgaagccacgtgactctgtactgtatggtttggcttgcattgataactgggctaacgaccgacatttttgtgcctcagagatacgacagaacattataattgtggttgctggacgggatcgaactgtcggttcggtactccgatgtcttggagaactctctcacaatggtctggagcccgtccctcccgttactctcactccactcggtagatgcaatgacttgtctacaaatctcggttgcggaggtacatctccttccccctcacactccgcttttaaaaaaaccaccaccggcgtctgctgtcgtgtccgctttccacatcggactctatgcctcttgtattgcgagtgacttgtcgtncaatttcccatactccccaggctgataatggatgcgaaggaatgttctcctcatgcgactctggggatgtaccgacaacttccccaccgagtgggactctctgacggagttttctattgtggctccgccttcggaatggatgcccgatttgcgtatgggtgcccgcggctgcgtcatgaggaacctcgccagggcgcggagtcctctgccggaataagatgatctagtccggttacgattgccgccccggtgggtatctctcgccttgcgctgctgatcct

SEQ ID NO: 58427 - DNA, 652 bp, Gossypium hirsutum
  unsure (1)..(652): unsure at all n locations
  Clone ID: AI730521.1
cttgactcacccccccatatctgatatcttccacaattcttttccctcctcttttcatatctgttctttctatccccagatttagacagttcatttcgtttcatttctttctagccgcgtatctgctcctacttcatgatgggaactttacggtctcaatcattgggttcaactcatgtatctatccctcctcatctaactgtctgttcatgacactatcctggttccctcttatgagattctcgtgcacgagaaacagtcccgactccacgcggcttcgatcttcatcctccttaatccatcaccttcggattgctacattcccctcctcgttccgacctaagcatctcaatcttgattccgattatgctatccactactctcttcatcgtccttttggcgattccgattacactctcgatgtctgcttctatcctctcctcaaactttctaatcactgtggtcagattcttagcttcttggtgtttcctacgattagtggctctgatgttgacagtganagttctctactctgcgcgcgtctctctattgcttatggatanaactccaatcttgtgttctcagtcttcctttgacggatngtatcttcttctactttaaagcctaatgtctncctgcagtacattcggat

SEQ ID NO: 58428 - DNA, 661 bp, Gossypium hirsutum
  unsure (1)..(661): unsure at all n locations
  Clone ID: AI730520.1
ggacgccctctcattgcatgtcgttgtaagcgtactgtccctaattttcgtgtgactctagaggttccgaatcctagaagtgaactaccatgtctctgcaggtgtaaatgcacagatctgttatttgcattaatgagagatttatatgctgcaaatgctactattaatctgaaacttgaatctcacaatctccctgatgcgtaagatgattatctgctggcgcgcaaagatggtcgcccattcaaatcaccctaaatctgatatacatcttggggagaatgctcatatgccttggggtctgaacctgaaacgtgctgagaatgaccatgtcccacctgcatttggagcagtgaatggataccgacctcgtcctgtgaatcctgatgcagatgacgttctggttggtcaagctgttantggtgttattgaggcagcattcgatgccggatatttgcttgctgttacggttggcgactctgataccactttaaggggcgtggtcttcaagcctgggcattatgttcccgtntcanctgaaaatgatgttgctcctaacctccaaatgattaaacgaaacnagattcccttcccccgggagaagantggagcanctcatccactcatcggaacagctctcgcctacctagtaccacgagcccct

SEQ ID NO: 58429 - DNA, 606 bp, Gossypium hirsutum
  unsure (1)..(606): unsure at all n locations
  Clone ID: AI730490.1
aaaagttcgcgttcccaacttatttgtttctctcttgaaaatcaggatggctacctccctttgtactcatgttcccgccctctttcttcttcttcttcttcttgtttcagctccatgcaatgcaggtattctcaggacatgcaagttcgatgccatatatcagctgggggattccatatccgacaccggaaatctaatccgggagcaccctttctctccttttgctaggcttccttacggtggaaccttcttcaagcatgcaaccggtagatgctccaatggcttactcatcatcgattttctagctttatctgctggaatccccttcctctagccttatttaaacagtaatggactattcagtcgtggccgaggggtgaatatcgcggttgctggctccactgcgttacctgtggagactctagctgataagggagttgttgcccctgttaccaattcttctcttancaggcagcttgactggatgttcacccattttaatggcatatgccacgatgatgatgattgtntggagaagcttanaacggctcttttcatcgttggggagattggaaggaatgattataactacgccttgtttcaagc

SEQ ID NO: 58430 - DNA, 617 bp, Gossypium hirsutum
  unsure (1)..(617): unsure at all n locations
  Clone ID: AI730398.1
gccttttgacagccaaactcggaattcccaaagccggcgcttacgttgtcaatcgccaattcccactttcgcctttcttagttttccatttttctttactcttaattcgccgaagcgatgagtctctcttcatcggcttttgctatctcggcaccctctttctccttcaaagctagacgtcctaaaacccctcttccttccagcttccaaaaccctttgcgttgcaactccaccccttccgttcctccgctatccaggaagttgcatccagtgaaagcaactatcctgcaggaagacgaagaagatgtcttcgtagaaaaatcatttcggacgacgagtttcccaggaaatggaattgaagaagtagaggaatctcgcgggaattcatcatctagtagtttggagaaatgggtcatcaaggttgaacaatctgtaaatatcttcctcacggattcagttataaagatacttgatacgttgtaccgtgatagagattatgccagattttttgtgttggaaacaattgccagagttccttatttcgcctttatatctgtcctgcacatgtatgaaagttttggttggtggaggagagctgactatctannagtgcattg

SEQ ID NO: 58431 - DNA, 602 bp, Gossypium hirsutum
  unsure (1)..(602): unsure at all n locations
  Clone ID: AI730388.1
atgataataatttctctgatgagtctaagctaacatggtggttgcaacgattagtaggccaaaaaaaaagtttgactgttaactggccctttccatttgctgagaacaaactttttgtccttacccttagtgctggcatggagggatatcatgttaatgtcgatgggaggcatattacttcctttccttatcgaactgggtataccctaaaggatgccactggactaactttgaatggggacattgatgtccatgctgtttttgcatcatctttgcctacatcacatcctattgatgctactcaaaagaatcttgagatgtctaatcaatggaaggctccaccccttcctgagcagcctgtggatctttttattggtatactttcggcaggcaatcattttgctgagcggatggctataaggaagtcttggatgcagcacaatcttgttaaatcttcaattgtgcatgttcgtttctttgtggcagtgcatccaagaaaggaagtgaatgtggaattganaaacgaaacagaattttttggagatattgttattgtgccttatatggacaattacgaacttgttgtcttaaaaactgtttcc

SEQ ID NO: 58432 - DNA, 611 bp, Gossypium hirsutum
  unsure (1)..(611): unsure at all n locations
  Clone ID: AI730380.1
gttctccgaaaatccctaatcctaatgaagacggtaaccggcaagatcctctcttcaactccggtttccgtttccaaggcggccaaaatcatcgccaacttctccgccacagacaacggcgcgtcgcaagcaatcagagcataccttcgacgcgcctccgcttcattcagtgagctcaaacaattgcacaaagagctccgaaaaccgtcgagatcagaccacaagcacaagaagtcaaagtccgagaccacagtggacggtgctcgtgagtcgagcctagaaccgagtgaattcaactcggctcgtgaagatgtggaggtgagtcaggaggcgggtcacgggtacagagacggtgagaggaaaaaacagaagagcaagaagaagaaagcgaagggcgagaatattgatgttggggggaaaattgtaattgaagacggagaaagcaagaaggggaaggaaaatantgagagtaactttggggaagatgaagacnanacggtnnagaaccataaaaaagagaaaagtggcagaaaggttgaaactttggaagaaaatggggttaaccttgaaaaaggtgacatgatggaataagaaaacagggaccgggagaa

SEQ ID NO: 58433 - DNA, 926 bp, Gossypium hirsutum
  unsure (1)..(926): unsure at all n locations
  Clone ID: AI730355.1
ngttttggtcccgcccatgatggtatcngggtccggtccgcctanggagnatagttantttatctggtccctatctcatngactncattgctctgtatgcatatgctntctccttcgtactctccgcctgtctcctcttgtcctgtgtcctccctccgttgtctgattccatgcaactcctccttcttatatctctcctctatctactccagttcggtttttctctcctcataggtgtatccctcgctcgtgttttcttcacatttcagttctttcatctcgtccctccgtgttattcattatagtttaatacttctctccatcctttggttatattagtggctttttttatatcatcttcttccattttttttacggatattattcttttttctcttcttcttaccgaaggagtctacgcctggatccttctggctttcgcctgcttcggtgcttcgtggcttctgcctctctttcttgcgatcatgtgtcttctttttcttattgtcgtattctcttcacttcttctccttctcggtcttttctctttttcctgctctctcgagctcatgtctttactggttgtgtgcgtccgttgtctgtctaatctttctttatcgcgcctgttgggctctcctctcctcctgctcgttgtcactggattctctctatgttcttctgtattcctctctttgtcctctcttctgccccgcgcgcttccttctgtctcttgtgtctgttctgtcaactgtctctctcgtcgttgcggtgtcggtcagagtacgatctgcttctctctccgctctgtgcgctaggtccttctctcgtttctatgcgagcctgtactgctctgtgtgtgcgccttgttccatcttcgtatcgagtatcttatctctgtctgtctagttgtcactcgctctcttttc

SEQ ID NO: 58434 - DNA, 536 bp, Gossypium hirsutum
  Clone ID: AI730337.1
ctttcagcgacgaaaaaaaacaccaaagatcactcaaacaactcatcaacaatggctatggctttcaagatggctacgaccgggatgtgggtggccgatgagtgcaagaactcattcatggagatgaaatggaagaaagtgcatcgatacatagtgttcaagatcgacgaaaaatcaaagctggtgaccgtcgacaaggtcggtggtgctggcgaaagctatgatgatttcacagcctcgttgcccaccgacgattgccgatatgcggtgtttgatttcgatttcgtcaccgttgataattgccggaaaagcaagatcttcttcattgcatggtccccaacagcatcaaggataagggcaaaaatgttgtatgcaacatcaaaagatgggctaaggagagtgcttgatggcatccactatgaagttcaagcaactgatccaactgagatgggaatggatgttattaagcataaagcttattagaacaataattataatacggttttacaattcatgaaaattaattttctggagat

SEQ ID NO: 58435 - DNA, 581 bp, Gossypium hirsutum
  unsure (1)..(581): unsure at all n locations
  Clone ID: AI730325.1
ctcggggcacgaagggcagtctttcgtactcctgacgagtatttcgtccggttgggagaatcaaccnantatactgcgatctactctgtctggcgctagactctctcgtccagggcttttaatatcccgtgctttcctgctgcgtaatgtgacttctgattttcgattcgtgcggtcgttgatgcaccccgtttgactagaaccttggtatttgctcaactatggacacattgtttgctcctgcccgtccatcggattaaaagtttatactgtggaatctacgatcatcggtatctctgtgtgggatgttggtggtcgtgtgtttattcttccgttgtggatgcctccctaccatacttctcaggtctcatcgtcgtgtttgacgacaacgtcttccaccgtctcgtcgacgccaaggatgacttgcgtctagagttcctcgaagatcaactgcgacatgcactatcgcttgtctttgttctgctcccagatctcccgttcccgatcaatgctgctcctgttaatgctcttcttcgtcatattgctcttctatatcgtcactattaggtccagtacaactg

SEQ ID NO: 58436 - DNA, 554 bp, Gossypium hirsutum
  Clone ID: AI730238.1
gaagaagaaaaatccttttttttagtccacaaaaagaattttttttttttgttcttggtaaatgtggggaggtcctgcagaacctgctgattcttattatgcagtcagacctgaatgcactgatgttcctagaaccagatttaagatcaagccgggtaaaactctaagtgcaagaaaatggcaagctgcattttctctcgatgggcatttggatattggaaaaactctacatcgaatccaacgtggggggattcatccatcaattagaggagaagtttgggagtttctacttgcctgttacgatcccgagagcacatttgatgaaagggatcaaataaggcaacataaaagggtgcaatatgctagatggaaaaatgaatgtcgtgaaatcttccccgttattggaagtggcagatatattacagcacctgttattactgaagatggtcagccgattcaagacccttttgtactttcagagataaatccaggtatgaatggtaataatacagaaatgatgaacgagctaacccctcgtggtcctttggataagg

SEQ ID NO: 58437 - DNA, 530 bp, Gossypium hirsutum
  unsure (1)..(530): unsure at all n locations
  Clone ID: AI730215.1
ttttttttttttttttttttttttttgctcccaaccagaggctancaacttaaaaatcaaggtagaaatgtcagctattcaacagtaaattttcattacttttattgctattcattttgaaacttcactttaaacaccattcaacaattttttgtaactttgggaagtatacaggtctactttttctcaggaagcttctctaacaactctggtatcacttcgaaaagatcacccacaagtccataatcagctacctggaaaatgggtgcatcagaatctttgttaacagcaacaataatcttagagtctttcatgccagctaagtgttgaatggctcctgaaacaccaaatgccatgtataactccggggccacaattttcccagtttggcccacctgaaggtcattgggaacaaatccagcatcaacagcagcacgggtagcaccaacagctgcaccgagcttttctgcaagcttctctatcattttgaagttctcagcacttttcaaagctctcccacctgtaaccac

SEQ ID NO: 58438 - DNA, 563 bp, Gossypium hirsutum
  Clone ID: AI730201.1
agaatttttttttttttttttttttgaatgaaaaatgagctgatatctttcattaaccaaatcaacaaggcattaagccattacatatatcagtcaacaagtaaaacaaacaagtaatcacctaataacatacctaacaccactaaattgcctagtaacttggtaaacttgattgaaaaacaaaaaacttctacctaaacttgtcattcagcacctaattacatcaaaatgcagctaccaaccaagtttgatcctaactaaatacaaaacattcaattaaggaaactaaatggatagcttcagcttgctgcaccaattttgctgttgaagcacgttccttgcatggccacctttgctgctacatgggagctgacttcaacaaataacatctggagaattttcacaaaggttaaaaatatacctcaagaatatctttcaaattactggctaccactttgaggtcaggggaagtgtcctgatgcattgctgacatgatagatgtccccaatataaatggctcttcaagttttggtggaacagtggcaccaaaaaatgcagcttca

SEQ ID NO: 58439 - DNA, 570 bp, Gossypium hirsutum
  Clone ID: AI730181.1
aaatggtccaaaaggaccaacaccaaactcagaatttgagcactcatcaatccctgcaacaataaagaaaatcttcaacctttcttccaatttcttaactcacagagatgcttgggccggcacttttgaagatgttgtttcccacttaacttccccaagaactgattgtccagaaacattgccagatgttgtacctttgagggcaactgaagcaaaagaagatgctgctctgtctgagtttcaaagtgaggttgttcaactagctgctgttcttaacggtgaccatttcttgagcagttttcccgacgagatgagcaagaaaatgacggtgaaagaagctcatgagtacaccaaaggggctatttcccggttcatacgagcaagtaaagaggccctcaagttgggagctgccgaatctgccattgtagatatgcgatcatcgcttacaacgagatcttcgaatccgtaactggttgacctcgaaaacctcggtcctcttctgtattttatctatcaaccctctaaattttcttacaggtttagaaaaaaatggatgttctcaattaaaag

SEQ ID NO: 58440 - DNA, 572 bp, Gossypium hirsutum
  Clone ID: AI730176.1
attttgctcatctccgtcagcttcctgtattggttccatatatgccaacagaaaaccccaggctgcgtgatactgcttatgaggttgctcttgtggctctggcaacaaatccatcatttcataaggatcttttgtcaactgttaaatcatggccacgtgtcatttattccgcattgcctgtcatttctgcaattgagccccagctaaatacttcgtcaatgactgatgcccttaaagaggcacttgcagagttgtatgttattaatgggcagtatgagaaagctttttcactgtatgctgatctcatgaagccagatatatttgacttcattgaaaagcacaacttgcatgattctattcgtgaaaaggttgtgcagttgatgatggttgattgtaagcaagcagttaatttgttgatccaaaatagggacttaattgcaccatctgaagttgtttcacagcttctgaatactagaaataagtgtgattcgagatatttcttgcatttatatctgcattccttgtttgaagtaaacccacatgctggcaaggattttcatgatatgcaggta

SEQ ID NO: 58441 - DNA, 572 bp, Gossypium hirsutum
  unsure (1)..(572): unsure at all n locations
  Clone ID: AI730171.1
aagatgatctcatcatcaaagcccacgctaagttcggcaacaagtgggccaccatagcgagactccttaacggtcgtacggacaacgcggttaaaaaccattggaactcgacgttgaaacgaagacgatcggctgaagatggcgattcggttcaggaatcggagagacggtccancaagtttccgagatccggaagtatcagcaacccgggaagtccttccggctccgacgtcagcgatttgggattgagcgtatccgaatcgacaccgcactctcgcgtttcgaccgcgcttacgctcggacgttcttggagcgacgagttggtcgagttgaacaacgataactcgtgttcggataaagagtcgggctcagtancggaaaagcacgataacgggacgaaaacggcgtcgttgggtacggaactattggccgccatgccggagatgattangaaagaagtgagaaattgcatggcggagtttggttttcataaccaatgctggggttaacgagtgattaattttaaattaggaaaaccattaaaacatcccatttaagaaaaaacaactacc

SEQ ID NO: 58442 - DNA, 567 bp, Gossypium hirsutum
  unsure (1)..(567): unsure at all n locations
  Clone ID: AI730155.1
gtggatacctaggcacccagagacgaggaagggcgtagtaagcgacgaaatgcttcggggagttgaaaataancgtaaatccggagattcccgaataggtcaacctttcgaactgctgctgaatccatgggcagacaagagacaacctggcgaactgaaacatcttagtagccggaggaaaagaaagcaaaagcgattcccgtagtancggcgagcgaaatgggagcagcctaaaccgtgaaaacggggttgtgggagagcaataaaagcgtcgtgctgctaggcgaagcggtgaagtgccgaaccctaaatggcgatagtccagtagccgaaagcatcactagcttacgctctgacccgagtagcatggggcacgtggaatcccgtgtgaatcagcaaggaccaccttgcaaggctaaatactcctgggtgaccgatancgaattattaccaaaagttcatggtgacatcaacaaggaaaaggcaggtggggacttaaaccataatacattatgggcaacactgtttgaggacatgaaacctacatgaatttactgtctatctntc

SEQ ID NO: 58443 - DNA, 593 bp, Gossypium hirsutum
  Clone ID: AI730126.1
agcaaagcgaagcgttagcaagcatagccatgggttcctcaccagaactcttctctatgtctatcctcttcctttgtgccctcttctccatgcgagtccgtgctagagagtagttcggcaaattcccgggagttaacaccaatgagaaagagacaaggaccagagagcaggagcacgagaccttcgttccccagaccacccgaaagccgagaagagcaagagccagggttcatccctgaaacccaggatggttgtgggctttaggggcacgaatcgagctcagggtcaagctcgagctcaagccgggccagtttcaccacgggagaaagctgtgaagcctatgtcacccctgttagatgccgcccggaggagacctatgggagcatccccgagtcctccgggagggagaagcggagctggtgcggggaggagtgccgagaggtcgactgggcggcgggagtggggcgaggccatgttcggcgagaagggatggagcggcgggggagacgaaagggagactggggacggaggggggggatagaggggggaaagaacgaggcagtaaggaaggcggggtacggaggaggaagggg

SEQ ID NO: 58444 - DNA, 544 bp, Gossypium hirsutum
  Clone ID: AI730057.1
gctatataaaatgtttcaaatctggttgtgctctagtttccatgatggtgcgtcatgggttttatccggaaacaaagacatacacggcactaatgaagatattggtggaatatgaaaattttgatgaagcattaagtcttatggatcaggcaagtttagaaggtcatcaattggatgtattaatgtataataccatccttaaaaaagcaagtgaaaaggtaaggattgacataattgaatttattattgagcggatgcaccaagacaaagtccagcctgaccctgtaacctgcaattatgtattctctgcatatgttgatggtggttttcataacactgccatgggagcattgcaggttttgagtatgtggatgatctcttatgaagacatgacactggaagaaaagaagatagaatttgagaaagattttgtgagttctgaggacttacaagctgagtcaaagatactccaagtctttaaggattatgatgagcatctagctgcggctcttttgaacttacgatggtgtgctattcttgggtc

SEQ ID NO: 58445 - DNA, 551 bp, Gossypium hirsutum
  Clone ID: AI730053.1
ataatgtcaagcaacaagaaaaagctggttctgaacacagtttcagtgagcttaggctgcagcagcagttgcaggaaacccaagctgacaagctttttcaatccaaaacccaaactgaaacttaaaatcaaaccaaaatctcattctctttgcaacaattactcttcttcaagttcatccaccaagaaaacaacccattgttccttctctgaaaatgaaactggtacctctttttctccaggtacagacactgctatgtactgggacatggatatcgacacagacggtccggacagtgctaacaagtgttcaatggcgacagtacgaggttttggtcatgtcggaggtgacagcttggcggtggagaaagattctgatgatccttatttggatttcaggcagtcaatgttacaaatgatattggagaaagagatatattctaaagatgatttaaaggagcttctcaattgtttcctgcagttgaattcgccttaccatcatgggatcattgttagagctttcaccgagatctggaatggggtattctccgt

SEQ ID NO: 58446 - DNA, 591 bp, Gossypium hirsutum
  Clone ID: AI730010.1
gtttataatacagttatatcgatttgtggaagatcgaataattgggttgaaaccgaggggttatggagaagaatccaggaaaatggttatataggaacacaagtcacatattccttgctaattagcattttcgttcgttgtaatcaatgcgaattggcaattgatgcttacactgagatgattcgaaacggagtcgaaccccgtgatgacattatgcatgctatgattaacgcatgtgtgaaagaagagaaacgggatttagcgttatctatatttcagaaaatgttggatgatggattgaaaccgaatctagtagcttgcaatgcattgattaattcacttggaaaaggcggagagatcaaattagcttttaaaatctatgatattatgatatctttaggtcataaaccagatgatttcacatggaattcattgcttggtgctttgtataaagcaaaccgacatgccgatgctcttcacctctttgaaagaataagacaacagaatgaactcataagccttcatctatacaacaccgccttaatgtcgtgccagaagcttggttcatgggataaggccttacagcttttt

SEQ ID NO: 58447 - DNA, 579 bp, Gossypium hirsutum
  Clone ID: AI729974.1
ggtatctaagtttccggcgaaggccacggctgctttttgcctaatcactgcgggctgcttcacatctcaagccaatcttctccccttctccgactctcccgtttcccaaggcattcttcgctcttctcgtgcaatctgcactgttgctatcaccgttgctgactacaagtattctttatatgggcttccgaacgactgcgatgagtatcgtcgtctattatctgaggttcatttgcgctcagctaaaagattgctgaaattatgtgaaataaacaaaggtttttatgtgaaagctggccagtttgtttcttcccttcgtcagattcctaaagaatactcgttgaccctttcctcgttgcaggatcaggtggttccttatgattttaaggtcataaaagaagtattagtcagcaatcttggccaggatccgtcagagctatttacttggtttaatgagcagccaatcgctgctgcatccattgcgcaagtgcatcatgcaatgttgaaagaccatcaagaagtagctattaaggtgcaataccctggaatagagaagaaaatgaagttagacaccagacc

SEQ ID NO: 58448 - DNA, 585 bp, Gossypium hirsutum
  Clone ID: AI729971.1
gcttcctccttactactctgttttcatgccctgcttttaagtttgaaaatggaacattcagcagaccatagtcaacatgctcctcctcctccttcaacagtcgcctctctcccttcttctgctagcacagaagtccgtgaagaagaaagtaatagtggccaacgcctgctccaccgccagcatcgccaagagcggcgaccacaatcttccggcgggtcatcttatcgtctcaatatatcaatatacgatgagtcaaggttcgacgtgagtgatgatgtttggtattgcgttattgttcttatcgcattttggctttttgcagcctcaataactctgatggtgggtttttatggatcggtgagtttacaaatcagtccacatagctcacaccttgtacgacccaactctttctttgttcagtctattgagtttgaagaatcggataaacaaaaaccagggttaatggtgtacggatttcacagaccacctcctttagatgttgagatctcctggactgaaacacatgacatatttataccacctaatttccataaggagtggctgttcttcttaaacgaaaggtca

SEQ ID NO: 58449 - DNA, 553 bp, Gossypium hirsutum
  unsure (1)..(553): unsure at all n locations
  Clone ID: AI729931.1
agaaatgtctgctaacattcctctaaccctcatgatcggcacgggtagaatagtgcttatgaggaaaacagctcccgtgtgtctataatagaatctcaggactctcttgtctccacacagccagtccacctagttgatttcatacatggtcgcactcttgtccccggaactggattttctcgaagatgtcgactcctccactcctccgtcgatcctccgtaaacactgagaacttctgcgtcagtgtgatgcacaggggcacaacctatcgctgcctcccataaagatcctgccactgctaagggtgtcggtgcgttcgaatcctcatcgctaaagaccgataactctatggcgagcgctcagaacaacataatgaagagcggcgtcggaaacgtgaggtttaacatcatagacaacgggtactactgtggggcaggtgactgaggttacacatgacagatgctggcccatcgttaaggtcgctggggatagaaccgtcgtcctcgatatgtaaactccatggtgtagtccctgcaaagtgatnactcacaac

SEQ ID NO: 58450 - DNA, 554 bp, Gossypium hirsutum
  Clone ID: AI729929.1
aacagaaaaaaaaaagtctcttcctctctctcaaagacagacgaacaagaagaagctctttggctatggctgccgacgttagctctttacatagagttttaagcgggtacaaggatgaactaacggtggggaatgaatctggtggaccaaaatcaacagctttgattactagagaccttcttggcttcggaggtggtggctccgccttcaccgataccaaaaatgatcaatcccaagaacttgaccttgaccttcatgtccctaacggatgggaaaagcgccttgacttgaagtctggtagagtgtacttgcaaagatgcaattcaacatattcatcatcatcatccgatgggactaagcaccaaaccaatccaacagtggcaaagcttcaagatttaaatatcccaacatccccattgccttgtaaacctttgctaaatctattcgatgagagcaacttagaattgaaattagtcccatcatcaagcaattaccagagcgtgtgcacccttgacaaagtaaaatccgcgctcgaaagggctgagaaagagcca

SEQ ID NO: 58451 - DNA, 505 bp, Gossypium hirsutum
  Clone ID: AI729912.1
gtggccggaaagttcgaggaagttgtcattgtaataagcattttcttaacaggattctgcgcatcctatttgaagctgtacccgacaatgaagccttacgaatatggatttcgagtattcgtattgacatattgtatccttatggtagctggtaaccggaccagggaatatagtcaggcagttttaactcggttggtgcttatagcagctggagctggtgttactttggtcgtaaatatatgtattttcccaatttgggctggtgaatctctgcataaattggtggtgaaaaattttaaggaccttgccacttctttggaaggttgcgtcaacgggtacttgaaatgtgtggaatacgagagaattccgtcgaaaattcttacataccaagctgccgatgatccactttataattgttaccgatcagtggtgcagtctacaagcgaagaagatacattgcttggttttgcgacttgggaacctcctcatggaccttataggcatc

SEQ ID NO: 58452 - DNA, 545 bp, Gossypium hirsutum
  Clone ID: AI729909.1
agaaaagaaaattccaggtataacctcaatatatggaaaagccacccatttggccgcctggtcgtaaaatcagaagctgcaggcatgccgaaaacgaagaaaatggttcaaatgaatgcagcctagccgaccaagacaacaacgagttaagttgaagatttatttattttatttttctatcattgtggtctttaattcactattccttaaagttgaaagttccagttttttatgattgaaaccatgttttattccttctccattagaggtgggattgcagggatttcaccagcatcccaatgtctcagctttattcaaaactatgcaaaaaattcattatcttctagattcatttcaaagattccaagctatgaaccctcctttacagtttcttatcttataaactcttgtgggttctctccagaatctgctttctcagtttctgaaacagtccactttgaatccccccaaaagcctgactctgtaattggcttcctcaagaaacatggcttttcacaatctcaaatcagaagcctcattaatat

SEQ ID NO: 58453 - DNA, 412 bp, Gossypium hirsutum
  Clone ID: AI729908.1
cgcagaattttttttttttttttttttttttttttttttttttttttttttttttttttttttttttttttttttttttttttttttttttttttttttttttttttttttggtaaaggttccttcaaaaaccttacaattttttttttctttttattaatcaaaatggctacctcaatttcccttaaccttgcattttttgcggtttttttcatggtggtgggttcacccctggctcaaggggccgtaaccttttgtcaattcacaaactccctcccaccctgcattggttacttaacagggaatggtgctggtggctttcccccaatttgctgcggcggcataaaatctctcaactcccccgcccaaacaacaccaaaccggcaagcagcttgcaaatgcatcaaaattt

SEQ ID NO: 58454 - DNA, 548 bp, Gossypium hirsutum
  Clone ID: AI729904.1
gtggaccgcaaccagctgctcagccttctggagggattggctttggtgtgtcagctgcacctgcaagtccttttggctcttcttcaacaattggtcaaacacctgcaaatccattttccggcacgagtgctaatccatttagtataaaacccccatcctttaatagtgcaagttttacaacctcaactactacatcaaatccttttcaatcaacatcatcaagcctttttggctcatcttcatcaacaacaccttcaatatttagttcttcagctcctgcatttggaactggttcatctctttttagttcatctgtatctccttcattttcatcatcgccatccatatttggtactggtgcagctccagcaacaacacccacatttgccactggtttaaattttggcagcagtcaggggtcttctctgttcaattctacccctgcaattgggcaggcaagctctacctttggacagaatactagtagctttggtccaactagcattttcaatacaccttccactgggtttagtgggaatatgttttct

SEQ ID NO: 58455 - DNA, 554 bp, Gossypium hirsutum
  Clone ID: AI729890.1
ccttctcagtggatttcaggttgagattggttccatcagttcagacataaaaattctccaagagaagtctatggatatgggtctaaagctaaagaatcgcaaggtggcagaatcaaagctggctaaatttgttgaagacattatagtccctccaaggatggttgacataattgttgatggagaggtaaatgatgaatatatgagaactctcgacattctaagcaagaagctaaagtttgttgatacagatcccatggttaaagattcaaaagcactgaaagatgttcagcctgagcttgaaaaattaaggcagaaagcagtatccaaggtgtttgattttattgttcaaaagcttcaagcactgaagaaaccaaagacaaacattcagattcttcaacaaaatgttcttttaaaatacaagtatatcatttccttcctcaaagaacatagcaaggaggtgcaccttgaagttcgtgcagcgtacattgatacaatgaataaggttctaagtgctcatttccgagcttatattcaagcattggagaaattacacc

SEQ ID NO: 58456 - DNA, 307 bp, Gossypium hirsutum
  Clone ID: AI729878.1
gtactactactccaagcaagtattttccttacacgtttgtttttctggtaataaatcaaaatggctacctcaatttcccttaaacttgcatttttggtggtgtgttgcatggtattgggtgcacccctgcctcaaggggccgtaaccgttggtcaattcacaaacccccccccacccgccataaataacttaaaaggaattgttcttgttcccttcccccacattgctgcaacgggataaaaactctcaaatctcccccccaaaaaaaaccacacacgcgaacacctttcacatacatctcaaatgt

SEQ ID NO: 58457 - DNA, 308 bp, Gossypium hirsutum
  Clone ID: AI729874.1
atagtactactaatccaagctagtatcttccttacacgtatgttttgctagtgataaatcaatatggctatctcaatgtccctaaaacttgcatgtgttgtggtgttgtgcatggaattgggtgcaccccttgctcaaagggccgtaacctgtggtcaaatcaccaactccctcgcaggttgaatgagatacttgagaagcactggtgctggtggaggacacccatgttgctgcagatggataaaatctctcaactccgccgcccaaacaactccataccgacaatcaccatgatgatgcatcggaag

SEQ ID NO: 58458 - DNA, 625 bp, Gossypium hirsutum
  Clone ID: AI729848.1
cggccgcgtcgacgggggaatggttagccttgaacagcttaatgtggcacataatatgttgtctgggaagattccagcaagtatttgtcggttgccgaagttggagaatttcacgttttcgtataatttcttcaccggagaaccgccggtttgtttggggttacgtgcttttgacgataggaggaactgtttgccggcgaggcctttacaacggagtgctgctcaatgtaggtctttcttgtctagaccggtggattgtaattcatttagatgtgctccttttgttccttctttgctgtctcctcctccgccttctccgcctccggttgttgtgctgtcaccgccacccccatcgcctgtttttattccaccatcaccacccccgccgccaccaccgccagtatactctccccgtcccccttcaccatctccaccagtatattcacctccacctccaccgccacctgtgtactctcctcctctgcctccaccatctccaccgccacctgtttattcacccccaccacccccctcacctccaccaccttcaccacccccaccagtatattctccaccaccaccaccatccccacctcctccatcacccccgccacctacttatccc

SEQ ID NO: 58459 - DNA, 612 bp, Gossypium hirsutum
  Clone ID: AI729846.1
cgggcgcgtcgacttttttttttttttagattccaataattattactaaataatcattttttcccctcaaaacatcaaatcacaagatttatcagatgcaacaaaattgttaaaattaagaagcttaatatgccatttcaccaaatagaaatgagcatatcttgtgataactcaatgaaggaagatcaagttgcacggccttgcattgcttctatgaagagagggcaaccctccaaagctttaaccagacctcaccattgcttcaatatcatttatagaggaagagcagcttcaattttgccccatgattctaaggcatcacctttaagcctctttttcatcttctcaacaacttgcttagcttcctctgatctcgacctttctaccaaccctttaaccagaccttccatcgcctcaaacggtggaacccatttcctctttatgatttccttgctcatttccaaagccatatccaactctccttcattcaccatactcctaatcaagctataataagcaaacgaacaaggcgaaacatacccatcactcagcatcttatccgaaaccttcttagccgattctaaatcccctatcctacaaaacccatcagtt

SEQ ID NO: 58460 - DNA, 615 bp, Gossypium hirsutum
  Clone ID: AI729840.1
cggccgcgtcgacattttttttttttttttttttattttcaaagattttttttatatatttagagaatttttgaagaactatatctctatactcagtatcaaaatatgcactccacacaaacatcggatatagacacttcaagaaaattgaaaagccgaaacaacggatatgataaatatacaaatcattagaccgggtatgaacatgttattcaacaacagttgtactatgaacacaaggacggcagcctaggaagcacatacactcccaccggggcaatgtccggtacttgctgggcagcagatgagaaccagcaagatgctattaagatcagaggctaacccacaaaactagcctctttcatcgccaacccaattattcttctccttaggaccagtagggccttcctctccataaagctcaaccggaagcttataaaaaaagttcttcaccgaagattgaagcatcaccggtaaaacatgaacaattttatccaattcagttctcgaatcatagacaatagttggaccccattttcgcataaactgcaaccaaccaggctcagctacgatcccatctccaagatactcagctgcaacaagttcgtaatgatt

SEQ ID NO: 58461 - DNA, 671 bp, Gossypium hirsutum
  unsure (1)..(671): unsure at all n locations
  Clone ID: AI729822.1
cggccgcgtcgactttttgaatcacaaaacaaaaagagcttttaaatttacaatatttcagctattaatcagctttaaataacaccaaaagtctgcaattttctaaatacacgttccactgatttaaaatctacatcaaaaccgtaactctggcctccatatttcacataaaggaactctttacaagacgtaaccggtggaagaatttcagagattcctggaaaatccaaggttggtggtgaaggcaagtctttcttcttcgaaggatagtaaacatcagctaaaagaagccatataagatcagggtcaatggatgcaagtccctttagtgcattcaccgacgcatcgtgaagcccggcaactccactgcatgctatccccacgacaagaccagtaaccttcttcataacaacttccaatgctgaagcacttcttttgttttgggataagttggcaatcatattgagcagtgctacctgtactttcaaactcgaagtttcagctatggtgtcctctgaagaaacatcagcactccggtaaggaagttgtaatggggttcgttctntcgagtttggcttcttttggaatggagacgaacttaanagtttccaaaaatggggggcatcggtgtggaagcgacnggannagaaaatctcacgcaaatttgcacc

SEQ ID NO: 58462 - DNA, 676 bp, Gossypium hirsutum
  unsure (1)..(676): unsure at all n locations
  Clone ID: AI729807.1
cggccgcgtcgacctggtgacacactggtttgggatttaaagatggttgctgcgaagtggaactgttttagttttcagttggtttttgcgattagctttatttctagtatagctgaagtttgcaatggaggaagaaccaacagtttcgtaaggaatagtgacttgtctcgtgatatgccactggacagcgatgtgttccgggtgcctcccggctacaatgctccccaacaggttcatattacacaaggggaccatctggggaatgctgtgatcgtctcttgggtaactccggatgaacctggttcaaattcagtcttttactgggctgaaaacagtgaactcaaaaacagtgcacaaggcattgttcttacttacaagtacttcaattacacttctggtttcattcaccattgcaccatcacggatttggagtttgataccaattattactataaggttgggatcgggaattcaccnaaacgattctggtttgttactccccctgcaattggccctgaacttacatacacttttggtctcataagtgatctcnnggcaactcatgattcaaacaacacgctcacccactatgaattaaaccctgcaaaaggacagacctattgttcctgnngagactctcctatgcggatgcctatcctttcatgacgagccagac

SEQ ID NO: 58463 - DNA, 466 bp, Gossypium hirsutum
  Clone ID: AI729794.1
cggccgcgtcgacgtgggatctccatgatcggtgctgcttcaccacaatttctctgcttaacattggtgactaatttgattataatctgtcacttccctctgtatctctccatgtccagtatctatctgttccatttaccttgaacataagcaaagccaaatttcttggtattttggccttaaaagttgaaaagtctttttttttgggttgcagaatggcagcaagtttgtttcaaaagccttcagcaattcttttcacaggaactcagtttccagtttccatttctaaggatattccaatagaaccctctccttgtatacatttcaattaccattttagaagcaaagcaaacaaccaaaagaaggggcttttacaagtcaaagctacagtgggagctggaacccagagtgtttccaaatcaagtgagacgaaagatttggatggaaaccagttggagaagaagat

SEQ ID NO: 58464 - DNA, 469 bp, Gossypium hirsutum
  Clone ID: AI729784.1
cggccgcgtcgacaacagatttcattagttttctttgccctttttcatttccttcactgattcttcttcttcgtcttcttcttacccattttttttagaaaaaaaccattgttgagttcttaaaactaggaatgaatggtgaaacaagctttgaacttgattgttctgattctgactttgttgaagttgatcctactggtagatatggaaggtataatgaaattcttggcaaagggtcttcaaagacagtctacaaggcttttgatgaatatgaaggaactgaagtagcatggaaccaagtgaaacttcatgatttattacaaagttcagatgatttagagagattgtactgtgaaatccatctccttaaaaccttaaaacatgaaaacataatgaaattctgcacttcctgggttgatacttccaacaggaacatcaactttgttactgagatgttcacttctggtat

SEQ ID NO: 58465 - DNA, 445 bp, Gossypium hirsutum
  Clone ID: AI729765.1
cggccgcgtcgactttttttttttttgaaggaattaaaagcgaaatttaattcaacctcacagctgtaggacatgtagtttaggagaaaaggacaacttacagaaactatagaggtcattttaaaccgccaataataataacatatagtcagtctttctccagctaaagtttcccacaatcaaagcacgtgattcgcccaagaacaaaaatgcatcactttggacccaaatcacaggatctgtgcagctgtgttcaacttctcagctaatccaagttgtgtcctagtgatgctcgataagtataataacagcaactgatcctgcagactatcattcacaagcttatcaaatacggatgtcgatagtttaggcaaggaggctactgtgtctgatataaatctgccgatgctattatcagcagcaacacgcccctccacaacatcac

SEQ ID NO: 58466 - DNA, 449 bp, Gossypium hirsutum
  Clone ID: AI729763.1
cggccgcgtcgaccacgcattgaaatctgaattttcctcttgattgttccaggagaagcctaacattaaccatgtttcttttgctatagggcaatccttgaagacatgctccctcacctccacaccattttgacatctacgacacaatgcagatcccataagacgtctgtaatgtaatttactgaaagtaggcaaataattattgaaaatccttcagtttgtaatttttaatttggaaggtaaatcaagacaccacaatattttgtagtaatggttgaaattttgttgtgtatgagtttgtccctcttgtaaaagtaacctatgaccacttcggaccgagtattctcctatgggctcccctctccagattatataatccgcttgctagttcattgaaagaggaatacataggatttgtttcgcatccctttctaaaaaagtcgacgcgc

SEQ ID NO: 58467 - DNA, 444 bp, Gossypium hirsutum
  Clone ID: AI729760.1
cggtcgcgtccacttttttttttttttttttttttttttttttttttttttttttcctttcttttttttttcttttttttttttctttttttttttttgtccttcaaatcttatcattcatcataagctttggaagcaaatgcaaaaacacaaaaaattattccatctaaaatacaaggaaaaacccactaacccacaacaaccataaatattatgttatgtcaatcttgatttgacaacataaatatcacccaacaaacttatattcatatcgtttttcactcaagtagcttcctcttcttcttcctctccttcctcattctccccgtcctcatcttttgcttcctggttttgctggttctctgctactaaatctttctttttgctctctacttcggtaaactccatctcttccattcccttaccaatttttctttttaatac

SEQ ID NO: 58468 - DNA, 450 bp, Gossypium hirsutum
  Clone ID: AI729753.1
cggccgcgtcgaccttgatttgtcgatgaatcaattgaatggtgaaatcccttcaagtttttccaatttgaatttcttaaatcacttcaatgtctcctacaacaacttgacaggacaaatcccaacaagcactcagcttcaaagctttggaaacttttcttacatgggcaatcatctttacggacctcctctcactaaaaaccgcagcacatatcgtactccaactaatgttgcaaataatggaagcagaagttaaggaagtaacgtgaattggctttatgtcagcatagttcttggctttgtaatgggattttcgagtgtagtggctcccttgttttatatcaggtcttggaggcatgaatactatcgaaagttagaccatattggtcgaaagctatatatgtctttgggctactatgggtaggtagattgatggaaaaacaacatata

SEQ ID NO: 58469 - DNA, 448 bp, Gossypium hirsutum
  Clone ID: AI729750.1
cggccgcgtcgacttcaagaataaatgcaatgtgggatatgcatttataaacatgatcgaaccgagccaagtcatttcgttttatcaggcattcaatgggaaaaattgggagaaattcaacagtgagaaggtggcttcgcttgcatatgctcgtatacaagggaaagcagcccttattgcacattttcagaactcgagcttgatgaacgaagacaagagatgccgacctatactctttaacaccgacggccataatgtcggtgatcaggtgccgtttccggtaggggttaatgttcgaactaaacccggaaaagcagctcgttccttcaacaataaggagaataatcaagaaagcccttcaaattcggaaaacgaagcgaattcatctaactgagaaactttcaaagtaagtcaggctaacaaaaccgattttcctttcgatcggcac

SEQ ID NO: 58470 - DNA, 662 bp, Gossypium hirsutum
  unsure (1)..(662): unsure at all n locations
  Clone ID: AI729743.1
caatatctcatctaccaactggctacatgtggagttctcatcttgtgccaaagccaaaagattggggtcccttggttgatgttgttggttactgttttttgaacttggggtcaaagtatcgtcctcgagaaaagtttgtgcggtggattcagaaaggaccacaacccatatatattggttttggaagcatgcctcttgatgataccaagaaaacgacagatgttattttggaggcattaaaagatacaggacaaagaggaataattgaccgaggttggggagatctggggcagtttacaaaagctactgagaatgttttcctcatagaagactgccctcatgattggttgtttcctcagtgctcagccgtggtgcatcatggtggtgctggaaccacagccacgggacttaaagctgggtgtccaacaaccatagtgccgtttttcggagatcagttcttttggggtgatagagtacatcaaaaagggcttgggcctgcaccaataccaatatcagagctcantattgagaagctttcaaatgctataacattcatgctccagccagaggtgaaatcccttgcaatggagttagcaaaattgatagaaaacgaagatggtgttgcagctgcagtcaacgcatttcaccggcatttacctcca

SEQ ID NO: 58471 - DNA, 539 bp, Gossypium hirsutum
  unsure (1)..(539): unsure at all n locations
  Clone ID: AI729741.1
cagatttcgaggtgtcgttcacgaatttgttgttcctgaggaccaatacatattacatacggctgaatctcaaaacattacgcttccatttgcatgcaggcacggttgttgtactanctgtgccgtccgtgtaaagtctggacaaataagacagcctgaagctcttgggatatctgctgaattgaaagcaaagggatatgcacttctttgtgtggggtttccatcgtctgatgttgaagtggaaacacaagatgaagatgaggtgtattggcttcaatttggaagatattttgctcgaggaccaattgaaagggatgactatgcgttggagctagccctgggtgatgaataagctgcttacattacattagtgaaagttgagcataaaccatgtaaagcctgctgcggattctgtatcttttcatttttatagtaccccagctgaagcaatgtgattatgactcagtgaatttgacattgttgacatctttaagttacatgtattaacttcttcaatgtaaaaaaaaaaaaaaaaaaaa

SEQ ID NO: 58472 - DNA, 671 bp, Gossypium hirsutum
  Clone ID: AI729725.1
gatcatcaggcaatggacagagcacatatattaggccaacggaaagttgttaatgtccaccgtctcatcatgcgtggtaccctggaagaaaaagttatgagcctccaacggttcaaactatcagttgccaatgctgttatcaatgccgagaatgccagtttgaaaaccatgaacactgaccagttgctcgatctatttgcctctgccgaaacatctaaaaagggagctactgcctcaaaacgttcagatagtggtatcgatggagtaccgaaattaatgggtacagggaagggattaaaagccattcttggtggcttggaggagctttgggatcaatcacaatatactgaggagtacaatttgagccagtttttatcaaaacttaatggctgaattccagctgtttaaagacatggttgcggtagtatgcctaaagattattttactgaagcaccacaccggtttttggatcaccgcgtgctaaactttgattccggccagttcatattgaagctaacctgattgaatccacctgcctgtctgttaaaaaaatttatttattatctcattaggactcctattttggcataatttatgtttagctttccattttccaatatatttcaccccgaattttgggattctttttccaataaaaaataaataatatt

SEQ ID NO: 58473 - DNA, 645 bp, Gossypium hirsutum
  unsure (1)..(645): unsure at all n locations
  Clone ID: AI729724.1
ccatcgtgccctccacactcttcctatcttaccatttccttggacaaagatttgttttagaaaatatgactgttgctgttgctgccgctgccgctgctgctgctgctgccttttgaaactggaagtacacctttttcttggacataagcgaacccaagattccagatattaaggtttgtaattcaaggggttcaccatgctaaagcaagcacctagtaaaaaccagaggtataaagggttcaaagtaaaacatgtgcttcaaatatgtgccttggttgcactttgcatttggttgttcaaccaagctaggaacagttacaataacaagggaagtgggattttccaaacggtgacaaccgagcacagccatgcaatcgtaaaacttgggaggaaagaccttgatcctcaaggggaaaggtcatcatctgcggatatcantgaaaaaatggaaaaaaaagtggagngaagtaaattcnangaaagtgaaaatgaatggannanggggtggggacnannanatcgacggacntgatcnnaaaannacggaaggggagaaaattgagangttcgagatttccttgatgannaaaatgnagatggngagttccggcttgaagatttgagtttattggaagatcaatcctt

SEQ ID NO: 58474 - DNA, 635 bp, Gossypium hirsutum
  unsure (1)..(635): unsure at all n locations
  Clone ID: AI729721.1
aggggtattaccaagggaacgcatactcaaaatgcagccacaactactacgttgaaaacattggcacttatactccttatgggttcattatctggagatccctcttccctggtgcagttggacataatcctgatcgttggtatgttgcgctgtcctgcttctacagtgatgcgaatacttgcggttcaatgcggggatcgcgtggatagagattcctgttgtggcaaaggtagataccgatctgagaaggtctgatctctgccccttctctcattcgtgtgagctcctctgccagctactatctccgatgcctcaacgagcctcttcggagctgctgactcctcgtatccgtgatatccgacaatttgggtcgcacctatatagcttcagctactgagattagcgggtggtggtctcccctctagaccacttggatccggacctatcagcgatgctgcanatccccgaacctcgtgctcggatcctcactgttatctacacattggtgtctcctgtgcaaacatgangcctcgagttgcccatcattggactcaccttgtgtatcatggggtagatatccttcgtctgacgggcttgggactcctattctatgtctctcaccggttccctgacat

SEQ ID NO: 58475 - DNA, 638 bp, Gossypium hirsutum
  unsure (1)..(638): unsure at all n locations
  Clone ID: AI729711.1
agcgatatgggttccttctgtggctaaccagaacaaggagactgaaatatctattacaaggaatttaggtagaggttattcttccctttatgctgctgaggaactttctgacataaaaaaggctgctaaccacgaagtaatagatgaagatctgcttctcgaagatttgagggtttccgaggccatgtcaaagaagtatttaaaggtatcaatggctgttactgtaaaagaagcaatgaaatgcatgcatgacagccaccagaattgtgtactcgtggttgataaagatgaccttctggaggggattctcacatatggtgatattagacagtatctgtccaagaagcaaagtgatgtctccatcgatgattcaacagctctggatgtgaatacatgtcttgtttcctctgtctgcactcgaaggataacctaccgagggcaaaaacgtgtacttttaacatgttatccaaaaaccaacttggccattgccaaggtgttgatggaggccaaggaaataaancaattgccattggtgaaatctagtggggaagcccgtaaaggaaggaaacgaaaaatcgttggtgttctttattacgaaacaatatggaactgccttagagaagagataaatcatangt

SEQ ID NO: 58476 - DNA, 650 bp, Gossypium hirsutum
  unsure (1)..(650): unsure at all n locations
  Clone ID: AI729700.1
gttcttgtattcttttcaccggatcatgtggaaccagccttaccggaaaaatgatacggaggccggaccgaggcctttgtatcctatgatgttagaacccgcggagatgaggtgggcgtttatccggaaaatttactccatcattgctgttcagttgtttgctacaatcgcggtggctgccacggtggttactgtccatccgatttctaatttcttcgtcagtactggcgccggcttggctctttatattgtcctaattatcacgcctttcattactttgtgtccattgtattactattaccaaaagcatccagtgaactatcttttgcttggagttttcacagtttctttagcttttgctgttggattgacgtgcgcttttaccagtgggaaggttattttggagtcggtgattttgacaaccgtcgtggtggtggctctaaccctttacaccttctgggctgcnaagagaagtcatgatttcaacttcctcggccctttcctgttcggtgctgtccttgttcttatggttttcgctctgatccaaatactgttcccactgggtagaatctcggtgatgatataccggtgtgntggctccatcatcttctgcggctatatcatatatgacaccgacnacttgatcaagt

SEQ ID NO: 58477 - DNA, 660 bp, Gossypium hirsutum
  unsure (1)..(660): unsure at all n locations
  Clone ID: AI729699.1
gcgctttcagctggatattatgatgcatattacaagcgtgctcaacaggtaaggaccataattcggaaaagcttcaaggcagcattggatgaaaatgacatcctgatttcacctgcagctccatccgctgcatataagattggtgagaagaagaatgacccattggcgatgtatgccggagatattatgactgtgaatgttaacttggcgggcttacctgcattggttttgccatgcggatttgttgaagggggagctgttggccttcctgttggccttcaaatcattggtgcggcatttgatgaggaaaagttggtaaaagtgggtcacatctttgagcagactcttgaaggttacaattttgtccctccgctcatcacggatgtgggtggtgcttcggcctgaactttttcaaggacattantaagtaggctatgaatgaatcttaaaattgaaaaccattttggtgagtggatccgctacatcaaacgttgtgctgttaatacataggactgacttttgaggcatgttgatggccaatgtgctttaaagaccccaatgattatccgcaacaacagcagcagcattgaactacaattttgttcctacaaataattgctaaaatgcccctcaagtttgtcaatctgtctaaaatatgtt

SEQ ID NO: 58478 - DNA, 654 bp, Gossypium hirsutum
  unsure (1)..(654): unsure at all n locations
  Clone ID: AI729696.1
gtttgtcatcaataaccacggaatagacactgaagaagactatccttatcaaggtcgggaacatacttgcaacaaagaaaaactgaaacgacatgtggtaacaattgatgattacactgatgtgcctatgaataatgagaagaaactgttgcaagcggtggcaactcaacctgtgagtgtaggtatatgtgggagcganagancatttcaattgtactccaaggggatattcactggtccatgctcaacttccttggatcatgcggtgctgatagtaggttatggttcaaaaaatggagtggattattggattgtgaagaactcatggggtacgaggtggggaatgaatggctatattcatatgatacgtaacactggcaaatctgaagggatttgtggcattaacatgttggcttcctatccgataaagactancccaaatccacctccttcacctcctccngggccaactaagtgtgatttcttcacttactgttcggctggggaaacctgttgttgtacccatcgcatattccgaatatgctttttgtggaagtgttgcgggtctgattcaaccgtgtgttncananacaatcnccattgctgccctcataattatccaatctgttatacaaagaacaatcaatgtctcgt

SEQ ID NO: 58479 - DNA, 657 bp, Gossypium hirsutum
  Clone ID: AI729679.1
cgaatgaggttgctatactggtgtggattactgacttggatgccaatatttctcctccctcgtttcggacaaccaaccccgaggcagattttatgagttgttggtcaaaagctgcatcaaagtagacctccacactcgtcctcctctcttcgaacttggggccactgtttgctgccaagttaagttttttctcctcaactcctcttaactctgaaatgaaatctaaaattttgaaagagatgtccctgcttgtgtatttttttttcatatatgaacttgtttctgcttgtctagattatccataacccgcagcagaaaagtcagcactgttcatttgtcccttggctaaaaacccaggttagccagttccaaacactatccagattactgttaagtatccaagagaattttaaaagcctccaaacttctgttgttgtaggacatccacggaagacatgattactatcctcctcctcctggtagcatcgaggaaaacgagcatcagcaattgcttgttttatctttagattaacaaaagttggaatgtaattccaagaaatccctcatattataatttttattttcggaggaatctgtaaattccacaattttttgtaaaaaactttattttccgtttgtaaattaataggatttaga

SEQ ID NO: 58480 - DNA, 659 bp, Gossypium hirsutum
  Clone ID: AI729675.1
ttacgatgaccgccatcaccatagaaactctcaaagagcagcagcagattatccaacaacaaagcgagtcagccgcggaatcaactcagccgttgcccagtctggatgaagtggagcaaattctgggctatgagtttaacaacaaacggttattagaagaagctttcacgcatgcttctttaggactgggtttctccaatgagcggttagagtacgtgggagattctgtccttaatttactcttcaccaaacagcagttttttgaataccctgatttgccaccgggggctttgactaggctacgagccgccaatgtcgataccgaaacgttggctcgtgccgccgtcaaacatggtttgcatcgctatttgcgccataagaaacctcttctcaaagaacaaattcgacaattttctgaagaaatacaacgatatccactacattctaatggactagttgacgtgccaaaagcgttggctgatcttgtggaatccaccatcggtgcggttttcattgacaccaattgctccattgatgttgtttggaaggtgtttaaggatttgttggaacccataattaaacgggagactttaaaaatacacccggtgacacaattatataaattgtgttcaaagagaaatttaaaagttaagttcgtt

SEQ ID NO: 58481 - DNA, 627 bp, Gossypium hirsutum
  unsure (1)..(627): unsure at all n locations
  Clone ID: AI729634.1
ctcggattttagaccgagccagttgcagtttgcaccacatgttagttccgagagtgaagatcatctaggtgttggcggtggacccagtcatgactgctgacgggagtaacccattgatctctgttcaacccaatgccctcaagttcgtttttgagcttgaaaaaccaagcttttgtgatcttaaagtggtgaacaacacagaacaccatgtggcctttaaggttaaaacgacttcgcctaagaagtactttgtgcgaccaaacactggtgttgtacagccttgggattcatctgttatcaaagtcactctgcaagctccacgggaatatcctccagatatgcaatgcaaagacaaatttctgctacagagtactgtattgcctccaaatactgatgtggatgacctgccagccgatacttttaataaggaaattactagggagatacaggagtgcaaccttaaattttcctatttaaccccttcccctcctgaaaatcctaaatataaagggatccggagcttctccaatcaaccccctgattccaaccctcctgtgcaccacttaaaggatgaaaaatatcctcanttcggcaaccactccgcttgctacaggactcggattttcc

SEQ ID NO: 58482 - DNA, 607 bp, Gossypium hirsutum
  Clone ID: AI729622.1
ctgattaatgacttccagcatcctatttaaattgccagccatataacttatttcattgctctaaaaatgtcaaaccgactaaccgaatttgaccggttcgaaaagttcttagcttcttaggaagaagttcttagcttcttctttattgctctaaaaagttcgtttttattgctctaaaaatgtaatatacttattagtttgaataggtgataaacagtgaacctgtctcgggtggctctgctgcatctgtatcaacctgggaatgtgttgtgtcacctgggagcgatacttgtggaagcgtgaggcagacattattttgcggccaagttggcttgaagcctgattgcgcatagaaactgtttgataaaatgcttaagaaaagcttgtgtctattgctgcctgacattgttccgctcagaaacttgacatattaagttggcaattttttataagaaaaatctttaggctttcattcttgctcacactttgatgactgcaaacccattcttaatatctaaactgtttataacaacatatctaggagttttgtttggattgaattgaggaaaatgtttttctaatgttttcctaacgttgaagaaattgg

SEQ ID NO: 58483 - DNA, 622 bp, Gossypium hirsutum
  Clone ID: AI729603.1
caatagtgctgattatgggaaccaaactgcaagtaatattggcaaaaatggcacacagagtggaagatcagaacactgtaatccatggagcccctttggtgcaacctaacgacaacttcttctggttcaataaccccaagtttgttttaacccttctgcattacactctctttatgaatgcatttgaggttgcctttttcgtctgggtcacgacacaatatggaataaagtcctgctaccatgaacacagagaagtaatcgccacaagggtggtgttagctgtgacggttcaagtcatatgcagttacgttactcttcccctctatgctcttgtgacacaaatgggatcaaatttcaagaaagctgtgttggaagagcaaacaaccaatgcaataaaacaatggcacgccggtgtgaagctgaaacggaaaaaacaacgcctatcttcgcaggctgctgccgatgattttccggaaaacagcaccaccatttccaccgtggattcatcgtctcatcagcctccaacacttgcttctttcgaaatctgtagctctccggagatacaagaagctggccctgctatgcataccgtggcagtggaaatacaaatggcttccgtggg

SEQ ID NO: 58484 - DNA, 332 bp, Gossypium hirsutum
  Clone ID: AI729592.1
cagcaaaggtcaatgccaaactggctatggctgaagaggaggaggccaaaagtggcaccgtcgtcaagaagactgctattgagacccaaagggaagttgcagctttctggaagaaatatgtcagtgagagaaaaactaacaagaacaaaatttgttagaatttgttttctaaccccccccccgggttcgttttttcctttttccttttaatttctagtttttgtttctcgccatgtttgttttccccatctttttcaagcttcagcatgttgaggaaactagcttaatgactaccaatgaatgcatttgaatcgaaaaaaaaaaaaaaaaaa

SEQ ID NO: 58485 - DNA, 608 bp, Gossypium hirsutum
  Clone ID: AI729590.1
atttatcagtgggctctccctgttgtttctagcaattctgttgctgttaagatcctttatcccatcttttggggcttaatgtctctcagcacctttgggaatgatcttgaaccaacaagtcactggttagaagtgatgttcagtatttgcattgtgcttgctggattgatgctcttcactttattgatcggaaacattcaggtattcttgcatgctgtcatggcgaagaagaggaaaatgcagctgagatgtcgagacatggaatggtggatgaaacgccggcaactaccgtctcgtttgagacaacgagtccgccattacgaacgccaaaaatgggcgaccttgggcggagaagacgaaatggaactgatcacagacttgcccgaaggcctccggagagacattaaacgcttcctttgccttgacctcatcaagaaggttcctttattccataacttgaatgatcttattctggataacatctgtgatagagttaagccgctcgtattctctaaagacgaaaagataattagagaaggtgatccagtacaacgaatggtgtttatcgttcgtggacgtataaaacgtatccaaagccttagcaaagg

SEQ ID NO: 58486 - DNA, 616 bp, Gossypium hirsutum
  unsure (1)..(616): unsure at all n locations
  Clone ID: AI729585.1
agaagatgatgatgatgaggatgatgaagaagaagaggaagaggaagaagaagaaggaaaagaagaagaaaatggggaaaggaaagaagatgaaagaactaagcttgatgatgggttctttgagattgaagctattcgtcgtaaaagggttcgaaagggtcagcttcaatatctcatcaaatggcgtggatggccggaaactgcaaatacatgggagccattggagaatctacagtcttgttctgacgtaattgatgcatttgaggaaagcttgcgttcagggaagcatattcgaaagcgaaaacgcaagtatggtggtcctcatacacagtccaagaagaaacagccttgttcttctggttctacatataatgtgactggtcttgaacttggtggtgttgataaaactcccttggttccctttgacaataccggtattgctgatctttctgcttcaagtacagttatagtgttggcacgagaaggagagcgtaatggaaatagcancaatgtcngaagagctaaaagaatttaggatgacagttctgcaaacggttcananaaaattgacgagactaaggatgaaaatgattatgatacncagcttagtgagcta

SEQ ID NO: 58487 - DNA, 619 bp, Gossypium hirsutum
  unsure (1)..(619): unsure at all n locations
  Clone ID: AI729579.1
ctttttttttttttttaatttccttcgtgcttgtcttaaacaccnaagaaaagcccctcaccgcaacggcgaaaccatgtcggactccgacgacgattccggcggagaagaataccttttcaaaattgtcataatcggagactctgcagtcggcaaatccaacctcttatcccgctacgctcgtaacgagttcaacccacattcaaaagccaccatcggcgtggagttccagacgcaaagcatgggaattgacggtaaagatatcaaagctcagatttgggacaccgccggccaaaaaaggttccgtgccgtcacttcagcttattacagaggtgctgtcggtgctcttattgtttatgatattagccgtagaactaccttcgatagtgtcggccgttggcttgatgaactcaaaatgcattccgatacaacggtagcaaggatgttggtangcaacaaatgcgaccttgaaactattcgagacgtgagtgttgaagaaggcaaanccctanccgaagaacatgatttgttcttcatggagacatctgctttagactcgacgaacgtcnagaaagcgttcgagcttgttatacgagagatttacnacaacgtccgccgg

SEQ ID NO: 58488 - DNA, 527 bp, Gossypium hirsutum
  Clone ID: AI729567.1
cttagattagatgaagagccacaacatgctcttcctcttgcgctttcaatatccatgtccatctccttctccgtttgcatttgggtgcacccgacctaaaccatatcgttccccacagctctccttctccactccgcgccgccctcgccgttcccgctcttcccgctccccttggaaccacagccacaacagccatagccttagccttaaacggaccatcgatttcgagtcctccgccgataaccccaatctcaaattgctcctccactttgacccaatctcacccctctcttccttcgaccgcttcgtctctttctcctctgatgctttccaagacctcctacattcggttcatatcgatacccagactcgcacctttcggttctcctgccgcaagtccacccttcagttccttgctggtttcctcgtttgcggcttcctcgttgcttttgctttcagggtttgtttcaggctcggtttggcctttaaggctcggttttcgcctaaacagaaggttattgtccgga

SEQ ID NO: 58489 - DNA, 527 bp, Gossypium hirsutum
  unsure (1)..(527): unsure at all n locations
  Clone ID: AI729551.1
cttaaacactatgtaaatgaagctaaaaatgaaaccagcagtgcaaatgccacacgtaaaagtcagaaaaaaaaaggtactccagttcctcctcaagtcgtgctgcaaccactcagcaaaagaaatattagtggagatggtggtaaagcagggatgaaaggtggtattaatgaaggtttgagattatgtgagttgcaatatgggagctactgcatttggcatgaaaaaaatagggaagacatgaaagattccatggtgaagaaattgaaggaccagcttttcgtagccagggcatattatcctagtgttgcaaaaatcccagcccagaacatgttgactcgtgatctgagacaaaatattcaagaactagagcgtgtccttagtgaaagtacaacagatgctgatcttcctccagagattcaaaagaagtcagaaaggatggaagctacaatanccaaatccaaatcagtcactatggattgtcataatgttgacaagaaattgagacaaatatttgacctaactga

SEQ ID NO: 58490 - DNA, 529 bp, Gossypium hirsutum
  Clone ID: AI729543.1
gaaaagctgcttcgtctgcttgacatgtatgagactttggcagatcttgttatagacatagatgcattgttctcagaagatggtggttcttttgttcgactcgagttccacaagcttcttgagggattggctgattccgtaaaagcagcattcaacgcgttcggagttgctgtttcttcaaatggatcattataccccttccctggaggtggagttcatcctctcagtaaatatgtcatgaattacatcagtatgttccctgaatattgcagcaccctcaatttgcttctcgaggatcaacattcagatgttgcaagtctagttagtgagccacagtgtggaccaactgcgtctctttccacatcttgtccgatggcttgtcaccttcgatcaatcacaagctctttggagtccaatcttcataagaaatctaaactatacaaggatgaagctttacaacatattttcttgatgaacaacctccattacatggttcaaaaggttaagggctcggaactcaggcctttct

SEQ ID NO: 58491 - DNA, 759 bp, Gossypium hirsutum
  unsure (1)..(759): unsure at all n locations
  Clone ID: AI729528.1
atggtaaagtcatggatgaaaaatgcatctggtatcaaggttcagcaacttgatattcagcagcaagcactaaagctcactgcaaatagtatgtatggatgccttggattttccaattcgaaattttacgcaaaacctcttgcagagcttataacacaacagggaagggagattctacaaagtactgttgatcttgttcagaataatttaaatttaaaggtcatctatggtgatacagattctattatggtttatagtggattggatgatattgcaaaagcaaaagcaattgcaggaaaagtcatccaggaggtgaacaaaaaatataggtgcctagaaattgaccttgatggtctgtacaagaggatgttgcttctgaagaagaaaaagtatgcagctgtgaaggtgcaattcaaggatgggatgacatatgaggttattgagcggaaaggtcttgatatggttcgtcgtgactggagcttactgtcaaaggaattgggcgacttctgtcttgctcaaatcttgtctggagggtcttgtgaaaatgtcgttgaatcaatacataactctctcatgaaagtgcaagaaaaaatgaggaacggacaagtagaacttcagaagtacattattacgaagacattgactaaaccaccagaagcctacccagatgccaaaaatcaacctcatgttcaggtggctctcaaaatgaaacanagtggttattctactggttgctcggctggtgatactattccatat

SEQ ID NO: 58492 - DNA, 772 bp, Gossypium hirsutum
  Clone ID: AI729515.1
ctcaaacccaatcctcttctgcttctctctttacctttccatcgtccatgccaagccggggttttgcagggaaatccctaccaccatgaatcacctccatcggtacgcgtccacccgcttcggacggctcccaaaaaccttctcaaagttgtcaaatctgaggcgggaagttccatggtggaatcaagtccttgatcctggaatccccactctaaccaaatggaactacattattctttgcacatgcctcgttgccttgtttttggaccctctctactttttccttcccgttataggtgccccacgttgcatgcaaatcgatctatgcttatgtatctttgtcaccttcttccgtatcgtcgcagacttgtgctttttcattctcatcatcatcgagttcatgactgcatttgtcccaccctctcctacggttttccgaaggggatacctcttattggatcgaaaagccaccgtccatccctcatctcaagtccagtttcatcatttgattttgctgctgcccctcctctccctcccattgtcctctggttcacttttcccgcatctaatattgtcagcggtgctcttgctatctatactcttttcttccttcgtcctccttcccattattccccccattctgtgccccctcccctataattccgacggcaccctccaccgtacgggattttgtctccctaatactgcttggtcctggggcactctctcgcctcgttctaccctacccttcctccctctttgttccctagcc

SEQ ID NO: 58493 - DNA, 493 bp, Gossypium hirsutum
  Clone ID: AI729510.1
cctttcgcttccgaaagcaaactcgccgacttagaaacacagtatggtggagaaatgtcaagcttacgggtgctctgataatcctcatcctaattattatttatgttgtgctggcttttgtttgccacggtatcacgctacctacttgcataaaatgatgtcaacaggtttgagatttgaacgcctttcgcactctcatgctcctttgccgttacttttgtttctatttccgtttgtatggtttttaatctctgcttgggggtagcatatctgggatctttctgtttcaacttcccctgcagtgagttgtatttacattttacttattcaatgtgaaagagctagaactttcgtgctgtcttcatgtaactttaaattggttctttcaaggacatggcttgatggcattaaaatttatgtaaaaattacatacattatatatatatatcttatttgtgaaaaaaaaaaaaaaaaaaaaaaaaaaaaaaaaaaa

SEQ ID NO: 58494 - DNA, 652 bp, Gossypium hirsutum
  Clone ID: AI729509.1
gaagaatcctttgaaccagttgctgaagttcttcaaaggataggtagtgacaaaatccgatcattgccgtttatatataatgacatctgtagaacaaagcttgcaattaaagccattcatggtgacgatgttcgtaaatatggacctttctggagtgtgattgaaagtaattggagtccattgttccatcatcctctttatgttgctgcatactttctcaatccatcctatcgttaccgcccagattttttgatgaatcctgaagtaattcgtggtctaaatgggtgtattgttcggttggaggcagacaatgggaaaaagattgctgcatccatgcagatacctgattttgtgtcggcaaaagctgattttggaactgatctggccataagtactagaagcgaacttgatccagcctcgtggtggcaacaacatgggataagttgcttagagctgcaacgaattgctatacgcatactgagccagacatgttcatcaatcgggtgtgagcataactggagtgcttttgatcaggttcacatcaaaagacacaactgtttgtctcggaagagattgaatgaccagacctatgttcactacaacttgagactgagagaacgccaactaggaaagaaaccggatgagttggttt

SEQ ID NO: 58495 - DNA, 688 bp, Gossypium hirsutum
  unsure (1)..(688): unsure at all n locations
  Clone ID: AI729431.1
taaagtctttaacgttccccagaaagagttcttcaacaaaaagacatggttggaaaatagcattggccttagacactggtggggtgcctggaaatggtgaagatagtctcaacagtgacagctctaatcttggtggtactcgactgggcagggtantaagtgcaggtgggaggcanctattaaagaagttgaactcggcaagaaagaacttccccatgaagatattcctcctccttttgggcttctatactgcaaatgctttggcaactattcttggacaaacaggtgattgggatgtattanttgctggggttgttgttgctgcaatcgaagggatcggtatgcttatgtacagaaagtccccttctttaaaaactggaagattgcagtcgattgtggtaatggttaactattggaaagccggagtgtgcttaggtctttttgttgatgcttttaaattaggtagttaacttgaacttctgctattgtgttggggcttccttttgaatgtattttacatctcttataatagccctggctctatcgatagattgtcaactaggtgaggaatgtatgacaaccattgcccatgtattttgcaaataaaaattctctgttgggtcaagaaactctgctgttcttccaacctcatcatccccctttcgccccctacccatttctgttgccc

SEQ ID NO: 58496 - DNA, 698 bp, Gossypium hirsutum
  unsure (1)..(698): unsure at all n locations
  Clone ID: AI729421.1
cgacatcgttcaatacctaaaattcaaaaagaattagccacaagaatggcctgcctgcacctagctttagcttgttcaagcctctcactcaaggtctcatctttcacagcagctttcaccatagccaaatccatttccatcaacttcaataccctaaacaactccgtcaccatcctatcttccacttccccttcatccctcaaaacctccgcttcttccctcgctctttccgccacgatttcccctgctttcgccatcagttccgtcgacccaaactctctccccatcaacccttccagcttctccaaaaaatccattatcacgtaccctttgggtttctccaagttaatctccttcgtcctcctccatcccacctcgaaattcggcggttccggttttgcgatgtcgggtctcgaccttctttctcggacgatttccgatcgtcttcgtttctcgatggggaaactttctggacttgtggtggtttcgtgggagattggagatgggaaatccgattgagatgattctgaggttggggaagtgcatttgatggggaagtgtaatgtttttgatgggttattggagattgatgagaggtntgatgtatggttatggagaacgtttgggggagacnagaaatgaancacactggaaaccatggcagaatttggtanaaccagactgcagtgaaaaaaatt

SEQ ID NO: 58497 - DNA, 709 bp, Gossypium hirsutum
  Clone ID: AI729408.1
gttgaagaacttccaatcaatcgaagaaccaatcaaaatgagcaaagacgatggtgaaagcagcgcagatatcaacataactgtgaagttcagcggaagatccataccaatttccatacctaaggattcaaccatcaaacaactcaaatcccatctccagcctctcaccaatgttcttcctcgcggccaaaagcttattttcaaagggaagcttttggtggatgcaatgacgttgaaggaatcagaggtcatgaatggagccaagctcatgcttatggcttcccagggtttacaccaagggggtggtcctattctaaaagaagctcaaactcggcctatttcaagggggaaagaaactgagtataaaagacctgatgcgaggactgaaattgtcatggaaaaagaccgtttgcaacgatggaaaactaccggagttattgcattagcagactgtaatttgaaggccatacccaatgaagtatgggattgcggatcttctgcaagagtcctagatgtcaataacaacagcatccaagatgtaccaaacaaaatcagctgtgtgaattccattcaaaaactgttcctcgatggtaatggcatttcggatgaagccattcgatgggaaggattggcatctttgaagtatttaacagttctatccttcactcggaaccagttgatgaatttaccttctgcacttggttctctg

SEQ ID NO: 58498 - DNA, 683 bp, Gossypium hirsutum
  unsure (1)..(683): unsure at all n locations
  Clone ID: AI729388.1
gttcaggatgcaggagtaactgttttaggcacagttccaagtttagtgaaaacttggaagaataccgactgtattaaaggcttaaactggacaaagataaaatcttttgctagcactggagaaacctctaatgttgatgatgacctttggctttcctcaaaatcttactacaagcctattatcgaatgttgtggaggcacanaattagcctcaagttacatccaagcaagtccgtttcagccacaagctttcggagcatttagtactgcatcaatgacaactggtttagttatcttggatgaacatggagttccctatccggatgataaagcttgtgttggtgaagttggtttattccctctctacctaggagcaactgataaattgcttaatgccgatcacaacgacgtctacttcaagggaatgcctacatttaagggaatgcgtcttangagacatggggatatcctcaagagaactgttggtggctatattgttgttcaaggaaaggctgatgacacaatgaatcttggtggaattaagacaagctctgttgaaattgaacgtgtttgtgaccgtgccgatgagagcatcttggagactgccgcagtcagtgtagcaccaccggatggtggtcccgaacttttggtgattttcgtggttctaaaaaaagggttcaatcg

SEQ ID NO: 58499 - DNA, 674 bp, Gossypium hirsutum
  unsure (1)..(674): unsure at all n locations
  Clone ID: AI729353.1
gaattattttggataacaatggtgagactgtgactgacctacgaacagcttccctcacctttctaatctctcaccccttttctccgattgaaattttgcaatggcgatatcaacaatctcttcaactctgtttccttctttaacaatcccaaacacttcttcacccaagccaaggttcactattttatctcattcttcaccactctctttcaaccccttgaagctccccaattcttccctcaaacattcacaatccaccacaaatatctttgctgctcctgaagctttggaagagacacctgaggttggaggctctgaggtgcctacttcatctgttagtgtagaagcagacaagacggcacctaancagaagatcagaattaaactcaggtcatactgggtccctttaatcgaggactcttgcaagcagattttggatgccgcacggactaccaatgccaaaacgatgggaccagtgccattaccgaccaaaaagaggatctattgcgtcctgaaatccccacacgtgcacaaagacgcaaggttccacttcgagattcgaacacaccancgcctaatcgatattctatacccgacggcgcaaacgatcgattcgttgatgcagcttgaacttcctgcccgggttgatgttggaatgaanctatgaaaaacct

SEQ ID NO: 58500 - DNA, 322 bp, Gossypium hirsutum
  Clone ID: AI729321.1
caacaatgtaagccgaaaagccctaaactctgattcatataaaggtgagttgtctgggaataaagtcaccctagtcaaggatggggcaaatgcttccaagacgggtttctcctgctgtgccaaatgatctctggtcctccatattgcagaaaagccacctgtttccactcttctaatcttggtgtgtcaattttggagctttctcaattttattttttttaaggtttgttatagttaaaaaataagactgcagttatgttcctatatatatactcttttacaagccaaaagatttccatgaagtataaaaaaaaaaaaaaaa

SEQ ID NO: 58501 - DNA, 688 bp, Gossypium hirsutum
  unsure (1)..(688): unsure at all n locations
  Clone ID: AI729289.1
aattacagtacagttattgcccatgctggtgatgggaactttcacacagtcattctctttgatcctaatgaagaagagcataggagagaagctgaaaggctaaatcaatttatggtttatacagctttgtcaatggaaggttcatactcttcttggcactatgtcagtttatttcagataatgaattattgaagctaattctgctcatgatatgctgatgctggtaattagaatacttttattagcttcagaattatctttcgcttacagagtagagagtatattactttagcacatgcatacagcatactatggtattgctgaatcaattctaatattaaacttaatttcaatgagcttataaatgggcaggaacatgcaccggcgaacacggtgttggcactgggaaaatgaattatctggaaaaggaacttggaatagacgccttgcacacgatgaaacgaatcanaacagctctagatcctaacaacatcatgaatccaggaaagctaattcctccccatgtttgtttctanaancagtggtcatcagttgctgttgctaaatgcatgcgtgctattcagtggctgttttgctaaaattttgctgaagctatttttcgtctttgcaccaaacaaaaaatcagttctgactggttggataccggtgaaccataatgttgctgtcc

SEQ ID NO: 58502 - DNA, 694 bp, Gossypium hirsutum
  unsure (1)..(694): unsure at all n locations
  Clone ID: AI729286.1
ggggagtacttctattaaggccggtgatattctanctgttcctttatcagcttgtgcttcaaattttcctagatatgcctcagattatggaatgattgttcctaatgggagctatgctattactgccagccactgtgtccagtgcagttgtgggcccgggagtcgcaatctgtactgtatgccgtcttcattggctgtttcttgttcaagtatgcaatgtaaaagcagcaatcttaagctggggaatgttacagtgcaacaaagtagtgctggatgcaatgttacttcttgtgcttatggtggttatgctaatggaaccattatcacttggttgtcatcatctcttcaaccccgatgtccaggaccgcagcaatttcctccccttctagccccacctactcatgtaacacgggattcggctttcgccccggcacctgcaccccagtcagatggtggttccacaacaactgtgcctaagacagtgccatctactgtgtcacttcctggacttgccccagcaggtgcccctatcggaagtacatctgatgcttcaactttggtgaattcggttgctgctgttcctactgcacttatgatttttttgcttatcaaattaatcccacccttctccttgtaaatttgctcctccttgtttcgaaagtttctttatttttgacctgtcccacttgtttat

SEQ ID NO: 58503 - DNA, 736 bp, Gossypium hirsutum
  unsure (1)..(736): unsure at all n locations
  Clone ID: AI729284.1
gcataactctccatttcttttttctctctcttctatcctctttctctttcccttggtttctagttagtgtagtaagtgtctttggcagccaaatttaggtgaaaggaaaatgccaagttcagggtcatttttgaggcagttaagtggaaaagaaggctggaaatcaacatcttggaggtggggagganggaacnncnnntntnncnncntnggtgggaacanttgtggtgggtttgagacaagtttgactcagatggaagggcttaacatgtatggcaatggggttgagaatgggttggtgttcaggaagagagtcatggtggttgtcgtatgaaagctcgggttcttggcgatgtggtgatgttgcgctggccttctgggtggcgcataagggtgatcggcgcaccgcgcggcgggtcggctcccctgcgtctagcagcggtgagtggcgcgcgcggcttctccttaccttggctggcgtcgctggggtcttctttgctcgggtggatggagggccagggtcattgtgaggggtgcggtgatccctggggggcggcgtgtgggggacagcggattcaccggggtggcgggatgcggggaccgctctgtgtctttggtttccgggtttgaaaaaacggataggtccattccgggctcgttgcgtttggtgcgatcagactttcgtgctatgagctctttctcaacatctccgtcgggctcgggcagagcgtgggtg

SEQ ID NO: 58504 - DNA, 749 bp, Gossypium hirsutum
  unsure (1)..(749): unsure at all n locations
  Clone ID: AI729263.1
gagaaaccaaagctccctttcttctccaagcacaacaacaatggcagacattcaaaaccttcatggcgatggccttcatgtcaccaacccaaaactcactctttccgaaccgacgaaacgcccgagtcatggttctcaaactcatccgagtcaccaagtttctcaacagcctcagatgagtcaagaaccggagctggtactggtggagtcgactcagttgaaacagtcattcaaggtgtaaggttaagatccgagaggttgttttacgagccaagtgaacctaagttaggggctgagtcagaaactgagtcaccatacaaagaaacaaccgttttatcaacggaatcaatggacccttttgttgattttagagattccatggaagcaatggtggaaagtcatggattaaaagactgggaaagccttgaagagcttttgggttggtatttaaaacctaatggtgaaagtagccatggatatatacttggtgctttcattgatttgcttttgaagaagaaatgtaacttgttgatgccggttcgtccttaacacctatttcaacattgtcgttttgtaattcttcatcgtcttctttatcgtcttcttcttgttatgaagatactttaatggtaactccatgtgagtcttcattaaaaggtaatgganataataattatgattataatagtaaccattgtttaacagagaacaatcttgtagatgatgatggcgtctcttcctggctaaat

SEQ ID NO: 58505 - DNA, 769 bp, Gossypium hirsutum
  Clone ID: AI729259.1
aagctcataactgaaaacaaagaaggggatgggggacttcttcttttcaccttcttcgtggggtgtggctcatcttatgctggctgttggtctgtccggtgcccgtgtccgatctcacccctctctcatgttccacttaggcgttttcgcaatgtactcggcttctggttgtggagtttgcttctcagttgtctcactggactgatgtgctgtctcctgcccgcgctcactgttccttcttggtacgtcttctaacttcgttatccgggggtccacggttcctcgcttcttcgttcccgcagtcagctctttcctgggcttcttcttatgattcgttcctccgattttcccctccgtgtgcctacagctctttcccgccgtgcccccaactcgtcgtccttcctcattttcggttcgtccctcctctccttctccctgttctcttcttcgttgcttctgcgtgagtcctctcttttcgttttcttctccgagctccttctcgtgttcgttgtcttccaccctcggctctcccgctccctgtccccccttattactcttccgttggttattatcttgtggttaactttcttattgatcttgtgtttttatcctctttttctctccgttgtttgtgtcgtttggctgctatccgcttggaggtggtcgaccttccctggacttgctcctctccgtccttccgcctctcgcctcgtcgtcttcgctccctcaccgtatccgtagcctgttcgtctggctcccgcctctcccc

SEQ ID NO: 58506 - DNA, 753 bp, Gossypium hirsutum
  unsure (1)..(753): unsure at all n locations
  Clone ID: AI729251.1
gggttatgggttttaatgcattccctctctgtgaggattgaggatggagagagccagactgcatttacatctatctgtgattttattcacaacttctttatttgtcaggagtgccgtcaacatttttatgagatgtgttcaagtgttaaaagtcctttcacaaaagcccgtgactttgccctttggttgtggagtgcacataatgaagttaatgaaagactaatgaaggaagaagcatctctaaaaaccggagatcccaagttcccaaagattatttggcctccaaaacagctttgtccttcatgtcatcattcccaaggtcccaaaaataaaggaggcagtcagatcaattggaagcgggatgaagtattcaagttcttaattagttattatgggaatacacttgtatctttgtacaaagaaaagggtcttctangaggtgatggaaccactgatattctggaagattcatcaacgaacgcagttgtggtgccagttggggctgcattggctattgctcttgctanctgtgcatttggagcacttgcttgctactggcgttcccancaaaagaatcggaagtattaccnacaactacactctttaaagaacatatgatagttctgaagatatgagttcttttcaataagattataagcatgccaaggaagaagctggagttaaaattactanaaacacnaanatatcgaacacaatcttttagatgcgccattggatgaactcaagctcccg

SEQ ID NO: 58507 - DNA, 596 bp, Gossypium hirsutum
  unsure (1)..(596): unsure at all n locations
  Clone ID: AI729244.1
ctccgatcctcattttaatgccgggtttgactggaggaaatgagaattcatatcctaaacatatgttaactaaggcaagaagtaaagggtggcgcgttgtggttttcaatagccgtggctgtggcaatagtccagtcaccactcctcaattctattcagcttcgtttgttggggacatgcgtgaagtantggaacatgttagtggtatatacccagaagctaatttgtatgctgctgcttggtctcttggtgcaaacattcttgttcggtatcttggtgatgaatctcatgcatgccctctttctggtgctgtctcattatgcaatccattcaatttggtctatgcttttgaggaattcaccaagggctttaaccgagtttatgacaaagcgcttgctaaatccatccgtaatatattcaagaggcatattctcctattcgaagatatcgggggtgaatataacattcccttggccttaaatgcacggcaagttagggacttcgatgaaggattaacacgagtttccttcggttttaagtcattggacgagtactattataaggcgagctgttttcattccataaaacatgttcac

SEQ ID NO: 58508 - DNA, 605 bp, Gossypium hirsutum
  Clone ID: AI729234.1
gacgaagagatacagaagagtggatgagacaccggcaattgccaccagatttgcaagatcgtgtgcgccggttcgttaactatcaatggactgccacaagaggtgttgatgaagaagctatattgaagtccttacccttggatctccggcgtcaaattcaaaggcatctctgtcttgcccttgttcgccgtgttccattttttgctcagatggatgaccagctactagatgccatatgtgaacgccttgtctcgtccctgaacaccaacgacatgttccttgtccgagaagatgatccagttcaggagatgcttttcatcattcgaggcaaagtcgaaagctcgacaaccaacgggggtcgaacagggttttacaattcgataacccttggacctggtgacttttgtggtgaagagttgctgacatgggccttgattccacattcagactccatcataaatcttccattgtcaacccgaacggtgaagtcaattacaaaagttgaggcctttgctctccgtgcctgggatctcagatatgtggctaaacaatttaagagactgcatagcgagaaactggcacatgcgttcagatactattctcac

SEQ ID NO: 58509 - DNA, 611 bp, Gossypium hirsutum
  unsure (1)..(611): unsure at all n locations
  Clone ID: AI729227.1
gaaaaaaaaatgtgggatcttaacgattctcctgatcgttcaagaggcgaggaatcggaagggtgttcatcgccggtggacggcgaaaaagggaagggtaaacgggttggatccgtttcgaattcgagttcttccgccgtggtgatcgaggatggatcagaggaagaagatgcagcagctttaaagaaacgaaacagtaacatgatttttgggttctcggtgcctgtcaagagcggtggaccanctccggtgactcgtcagttttttccacttgaccaagacccagaaatgagggcagttcccaccggaactgcacaagggttccctatggctcactgggtcggagtcaaattccggcaatcggaaccactcgccgttgctaaatccgttgaagctacaaatcccatgaaaaaaagcaaaagaggaccaaggtcaanaaactctcaatataaaagtgttactttctataaaaaaaccggcagatgggaatctcatatttgggattgtgganaacaagtttatttaggtggatttgacacagcacatgcagcagcaagagcatacgatagggcagcaatcaaattccgggggagttgaagctgatataaatt

SEQ ID NO: 58510 - DNA, 552 bp, Gossypium hirsutum
  Clone ID: AI729223.1
agaagttccgagtccagcttgaagattctggcagcttacgggaacgcatacgcgccgtcgttctggaaatcgagtcggcgactcggctcatgcaagctagcctcctcctcgttcaccaatctaaaccaattcccgaggttttgcagaaggcaaattctcagattaacgtactaaaggatctttacaataaacttgctgaagttgttagggaatgccctggacaatattacaggtatcatggggattggaggagtgaaactcaaatggtagtttctttgcttgcctttatgcattggttggaaactggaaatctgcttatgcatactgaagctgaggaaaaacttggattgaacaattcggattttgctttagacctggaggattatcttgttggtgtttgtttcatgtcaaatgaaatgccgagatatgtggtgaatcaagtgacagctggtgactatgattgtccaagaaatgtgttgaagttcttgacagatcttcatgctgcctttcacatgcttaatctccgtaatgatttcctgcgcaagaagtttg

SEQ ID NO: 58511 - DNA, 549 bp, Gossypium hirsutum
  Clone ID: AI729212.1
aaattctctgagactgtccaacataccttcctggattatctggctgggggttttgaactaaactttatggtggctattgatttcactggtatacttgtagcattgacgtatttcttatcaagtttaatgacaaaacatgcattgttttctatttgaacataaaatgtagattgtgaggaacttttggatatgaattaagcaaacaacttttttaagagtacacaaacccttctcgtttctctaggtcttcttttccccctagattaagaaattatttgggctgaatcagttaaaaaagaggtcttaggtttgaatgatgctgacttgattgtaactatctgaaattgttaaaggctgtataaataaatgtggaaggcatcttgcagtatgtgcagttctgcaaaagtaccataggttatatatatgcttacattttaattctgaattctggtctatcagcttcgaatggaaatccccgcctccctgattccttgcattacattgatccatcaggacggctgaatgcataccaaaaagtaaaaaattgat

SEQ ID NO: 58512 - DNA, 625 bp, Gossypium hirsutum
  unsure (1)..(625): unsure at all n locations
  Clone ID: AI729193.1
ctggttccgggggaatgtttctatcttattgtatggtttttgggatgtcattgatggactcaccaagttggaggttgatgcttggggttctatccatcccttctctcctctattttgcctttacggttttttatttgcctgaatctcctcggtggcttgtgagtaaaggaagaatgcttgaagctaaacaggttcttcacagattacgtggcagggaagatgtttcacgagagatggctttgctggttgagggccttggcattggaggtgaaacctctatacaaaagtacataatacgtccagctgatgaacttgatgaaagtcaggaacccggtgctgataaagacaaaatcacactatatggaccggaagagggcctgtcttgggttgccaancctgtccctggacaaagcattcttagtattgcctctcgccccggaagcatggtgaaccaaagtatgccccttatggaccctcttgtgacattatttggtattgttcatgaaaagcttcccgagacagggagcacgcctattatgctttttcctaattttggaaccatgtctactacatcacaacctcttgctacaaattaacttcgggatgaggagatctttcatacaaa

SEQ ID NO: 58513 - DNA, 631 bp, Gossypium hirsutum
  unsure (1)..(631): unsure at all n locations
  Clone ID: AI729186.1
caacaattgggctccatgaccttcgtanccgtcttagtatcataccccaggatcctactttatttgaaggaactattagaggcaatctagatcctcttgaagagcattcagatcatgatatctgggaggcacttgagaaatctcaacttggagacattgttcgtgataaagacctaaagcttgatacaccagttttagaaaatggagataactggagtgtggggcagcggcaacttgtttccttgggccgggctttgctcaaacaagcgaaaatacttgtgctggatgaggcaacagcatcagttgatactgccactgacaatctcatacagaagatcatccgaacggagttcatgaactgcacagtttgcactattgcacatcgtgtgccaactggtgattgacagtgatcttgttttggtgctaactgatgggcgagttgccgattttgatactccacaacgtctcctagaggataaatcatccatgtttctaaagttggtaaccgagtactcatcaatatcaagtgtgcatacggaattttgaaacagattgcctgcctcatatttcttctactcgggcgttggaagctgaatcactattccggactgaacaggctattgcttgttcc

SEQ ID NO: 58514 - DNA, 555 bp, Gossypium hirsutum
  unsure (1)..(555): unsure at all n locations
  Clone ID: AI729150.1
gtccttgtaactgctgctgcaggtgggactgggcaatttgcagtccagcttgcaaagcttgcaggaaataaggttgttgcgacgtgcggaggaaaagaaaaggcaaggcttttgaaagaattgggggttgatcgagtcatagactataaagctgaagatgtcaaaactgctctcaaggagtttcctaaaggagtcgacattgtttatgaatctgttggtggtaacatgtttgatttgtgccttgatgctttggctatccgtggacgacttattgtgataggattaatctctcagtataaaaggaaaattgggtggacgccattaaactacccaagacttgagaagcttttgtccaaaagccaaaatgtgtctggctttgtcctggtacantatggtcatttatggaaagaacacctacttagactgtttcatctttactcttcaggaaagcttaaggttgtaataaaccaaaaaagattttcaggtttgcattcngttgcggatgctgttgagtatctgcattcgggtaaaagtactggcaaggttgtcgtttgc

SEQ ID NO: 58515 - DNA, 557 bp, Gossypium hirsutum
  unsure (1)..(557): unsure at all n locations
  Clone ID: AI729143.1
aaattatcaagaaactgaaactggtgacaatcaatttattactacggaggaactccggaaggatcctgctctccaggataatttggagaaagaaaatcaggaagaggatattacagttcaagaagaagaacatggcaagctacaggttgatgatggagaatccaaggaacaactgtatgtgcctcgaagaccacatcagaaccaaagaggtggccgtaggggttattttgttggtcgtggaggtcgaagcagtggaaggggaggtgtaacctaccaaaatgggcacaaccaatattatgatcagcctgccaatcattattctaggaaccattataacaatagaggcagaggtggtacaggaggtggtggccatgcttacaacaatcatgacgggaacccctctgctgatgttggtgtggcctcatgaccacattacaccgtgtcctccangtccatttttccagatcagtgatagagatgtactttttttgttctttttgcatgagacatattctgaatgtgggttgatgttgatatctaattatccgaaacaccct

SEQ ID NO: 58516 - DNA, 430 bp, Gossypium hirsutum
  Clone ID: AI729140.1
gcagatcgccctccccctcttcttcgccgccgtctcggctggcttcctgggtagccccgcagtggcccctgtggcgtactccagccactccacctccaccgtccacggcgcccagctggcctactcctcccctgtggtccacgccgcccccgccgtggcctactcctcccccgtggtccaccacgcccctgccgtcgcctactcctctcccgtggtgcacgccgcccccgctgtggcctactcctcccctgtggtccacgccgcccccgctgtggcctactccgcccccgtggtccacgccgcccccgtggttaagaccatcgcccccgtcgccacctcctaccagaacacctacaaggtgtccccctccgctgtggctgttgcccccgttgccacttacgctgccgcccccgcctacaccacctatgcc

SEQ ID NO: 58517 - DNA, 589 bp, Gossypium hirsutum
  Clone ID: AI729133.1
ggggagggataaggttcacaatcaatggcttccgttacttcaacttggtgttgatctccaatgtcgcgggtgcaggggatatcgtgaaggtgagcgtgaaaggctcgaggaccggttggatgagcatgagccggaactggggtcagaactggcagtcaaatgcagttttggttggtcaatcattatcattcagggtgacaggcagtgacaggcgcacttctacctcttggaacatcgttcctgcccattggcagtttggtcaaacattcaccggcaaaaatttcagggtttgataaattttgcaacccctcccaaaaaaaaaaatagctaatattaagtttaaccccatagaactttaaacaaagtttagggttttattcgaaaaaaggaattgatgttttcccaccataatccatcacaccttttttacccttgatctacggtgaagttccattttaaccaattggacttggtgttgcttacacttctttttggatggatgtcaattgaaattttaagtacaagggtgttttttactgaacttttattttgctttgtattgttctgtggtgtgaattaagggtcttta

SEQ ID NO: 58518 - DNA, 590 bp, Gossypium hirsutum
  Clone ID: AI729113.1
ccagatttcttggaatttaaatttctgtttttaatttttatatatatatatatatatatatattcatttcaaaaatatttctcttttgaaatctgattttgaatgattaatatcagccatgatttcttcaagcaagttcaaagccgttgatttttacaggaaattccctaaagatttgacagaggcatcggtatcgggtgcatggttgtccattgcaactgcattggctatgatatttttatttggaatggaactgaataaatatttaacagtcagcacctcgacatctattattattgacaatagttctgatggggactttttacgcattgattttaacatcagttttccagctgtttcatgtgaatttgcatctgttgacgtgagtgatgccttgggaactaacaggttgaatataacaaaaacgattcgaaagttttctatagatccaaggcacaaggctattgagtttcattcagaacctgttccacacgtcagtcagcacggagatgaagttgatgatgaagctgttgagggttccgtatcattgaatagtgatagctttgccaaactttcacaggagcatccaa

SEQ ID NO: 58519 - DNA, 626 bp, Gossypium hirsutum
  unsure (1)..(626): unsure at all n locations
  Clone ID: AI729082.1
caccaccagaatcaaaaaataaagttgcctctccctttttatttttctctttcaagtaagggaactttgagaaagctctaggcacattgactgccggtggtgttctttggtantcatccatgatggttccgcggggtaacccggcgaggggccggttttggccccaaatgttaatggctatggctgttgctgtagttgttcttgcgagcaatgtaggttcagtgtctgctgatgcatatatttatgcatcaccccctccgccttatgagtataagtcaccaccaccgccttctccttctccaccaccgccttatgtgtataaatctccaccaccaccacctaaacatgatgagaagccttatgaatacgagtctccaccaccaccaccatcaaaggagaagccttatgagtataagtctccaccccctccatcaccatctcctccacctccctatgaatataaatctcaaccactcccatctccttttcccccacgctatgtttttaagtctccaccacctccaccccgccctgacgaataacccttatgattatacctctcccccatggcaaccggtggagagaacttatattcccacccccaattcttttagcctcccccacct

SEQ ID NO: 58520 - DNA, 624 bp, Gossypium hirsutum
  unsure (1)..(624): unsure at all n locations
  Clone ID: AI729081.1
cagtggtagcgccaatcagtggctgcagcgagtccaacagccttactgttgctcagcagcagtttaagaatttgcagccagtgacagctcctgttaataggttgcttgtgaacaaagaaactttgggtgaaagattacatgaaagtacactggatctaaaatccaaagaaaaccctttcttgatgccgatgcagcaactggtcacgtatgaagaaaacttgagaaatgagttcggagttgttttttccgactcactccttaacccttcccataaggactcttccttgattaactgcagaacttttggttcatctcaagaccttatttgtcaagcaactgtatcccaacattcccttcgagagttcatggatgattggcctaaaagccagtccgatcgatcaaccatttcctggcctgaagttgatgttcaatcagacatgactcaactttccatatcaataccaatgactgcctctgatttcatgtcctcaacttcttctcccagcaatgaaaaactgtcttcatcacctctcagattatctcgtgaatttgaccctatgcacatgggactaggtgtatgcagtgttattaatgaaccanaccataaccaggcaaattggatac

SEQ ID NO: 58521 - DNA, 591 bp, Gossypium hirsutum
  unsure (1)..(591): unsure at all n locations
  Clone ID: AI729054.1
aagaaatgaagatccacaaactacttcaaggccatgggacaaagagcgggatggctttgtaatgggtgaaggtgctggagtattggtgatggaaagcttggaacatgcaatgaaaagaggtgcaccaattatcgccgagtacttaggtggagctgttaattgtgatgcttatcatatgactgatccaagagccgacggtctcggggtgtcttcatgcatcgagagaanccttgaagatgctggtgtgtcccctgaggaggttaattatatcaatgcacacacgacttcaactcttgccggtgacctggccgagataaatgctattaagaaggtattcnagaatacatcaaagatcaaaatcaatgcaacgaattctatgatcggccattgtctgggtgcagcaggtagtttaaaagccattgccactgtgaaagccattacaacaggatgggttcatccaaccattaatcaatttaatccacagccttcanttgagttctatactgttgccaatgaaaagcagcaacatgaggttaacgttgcaatatcaaattctttcggatgtggtggacacaactctgtggtggcatt

SEQ ID NO: 58522 - DNA, 594 bp, Gossypium hirsutum
  Clone ID: AI729052.1
gataatatcaaaatttatcaagctataagtgatggtacagtcaatcttgtaaacaagttctttgagatgcaacgtcctgatgctttgaaggctttggacatataccggagatctgggcaacaggcagagaggctttcagaattttacgaagtatgtaaaagtctggatgtagggcgtggagaaaggtttattaagatagagcagcctccttcatcgtttctacaagccatggaagagtatgtaagagaagctgcacggtcttctgcagttcgcaaagatcaggctgacaaacccaaggaagtgttggccattgagtacaaaaaaaccccacaggagcaggagaaacgttcaccatcacctcctcctcctgaaccagaaaaagtggagaaagtggaagagcctactgttgaacctcctgatttgttgggtttaaatgatcctgtcccagttgcttcagaattagacgagaagaatgccttggcattggctattgttcctgttgccgagcaaacaactgctgctgccgctcctattccagcaaatggtaatacaagctgggaattagcacttgtcactgctccaagctcaaacgac

SEQ ID NO: 58523 - DNA, 634 bp, Gossypium hirsutum
  Clone ID: AI729040.1
ggaaattttcaaaaaaaaaaattcctttgatatttccttcgatttgatctcattttccctctctcaaaatccatagattcgtaaatcaaacataaaaaaatcctttcatttcgatcaataattcctgttataaaatggcggcaatcactcaaaacggttctttagacagtttttgcaccaccacagccaacggttccaccgccttcgcagccgatccattgaactggggcgttgtggccgaatcgttgaaaggaagccatttggacgaagtgaaacggatggtgatggagtatcggaagccattggtgaaactcggcggagagacattaacgatttctcaagtcgcggcgattgcagcgcacgattctggtgtcaaagttgaactctccgacgatgcgagggctgccgttaaagctagtgccgattgggtgcttgatgggatgaataaaggcactgatagctatggcgttactactggttttggctctacttctcatcggagaaccaaaaaaggcgctgcgcttcaaaaagagcttattaggttcttgaatgctgggatttttggcaatggaaacgattcatgcaacacgcttcctcactcagcaacgcgggcagccatgctcgttagaatcaa

SEQ ID NO: 58524 - DNA, 639 bp, Gossypium hirsutum
  unsure (1)..(639): unsure at all n locations
  Clone ID: AI729023.1
ataacactcaagagattgactgctctgaagtctgaaaagaagagagctatttaatcttattttcgcttccatttctcctccaaatggctgcttccgttcagctaaatctccgttccttcaaagccccctttaatcttaaacccattgccaagcagttctccaaacccggcaggatcaggtgcgccgccaccacaccaaccaaacgctacagcatcactcttcttcccggagatggtatcggccctgaagtcatctccgtcgccaaaaacgtcctcaaactcgctggctctctcgaagggattgaatttagcttccaagagatgcccatggggggagctgctttggatttgactggagtaccattgcctgaggaaaccctttctaccgcacaaagagctgatgccgttctccttggagcaattggagggtataagtgggataagaaagaaaaacatttgaagcctgagactggtctgcttcagcttagagaaggaattaaagtctttgcaaatttgaggccanctactgttttgccacagttagtggattcctcaactttgaaaaaagatgttgctgagggtgttgaccttatggttgtaagggagcttacgggatgtatttattttggaaaaccaaggg

SEQ ID NO: 58525 - DNA, 721 bp, Gossypium hirsutum
  unsure (1)..(721): unsure at all n locations
  Clone ID: AI729021.1
gcaagattgcttttgggtatgacccagaatgtcttttaccgtctttgccgcaaactgagttcgccgacgcgtttgaagatgctactcatctgagtagtgaacggttccgagctccgattacattgacttggagaatcaaacggtttttcaatgttgggtcggagatgaacctcaaaatcgccatctctcaggtacgtgatttcgctaagaagatcgtgagggaaaagaaacaagaattagctacaaaatcgtctttggactcggttgatattttatcgaggtttttaaattccggtcattccgatgagaatttcactacggatatagtcatcagctttatactcgccggtcgggatacaacatcggcggcattgacatggttcttttggttaatacataaacaccctgaagttgaaaaggaaatccttaaagaaattaaagagaaatcggatatgctggtttttgaagaagttaaagacatggcttacattcacgcttccttgtgtgagtctatgagattgtaccctccggtcccgacggacagcaaacgagcggtggcagacgatgttttgccggacgggacggtggtanannaaaggtcggtggtgacgtacgccccttacccaatggggaagatggagaatatatggggatccgattgggaggagttcaccccggagaaatggttgccaagggatnaggccggganctggancttctg

SEQ ID NO: 58526 - DNA, 724 bp, Gossypium hirsutum
  unsure (1)..(724): unsure at all n locations
  Clone ID: AI729012.1
ggaaaggccaaaagaaagaaattgctctcacctaaaggcatggatgttagaccaatgatggaagttgtaaaaggtgctgcctttgatagactgcaggcagctgatggctgtcctgcctctttacgcccgggtcgctggttagacctttacagtggtacaggctctgtcggtattgaagctatcagccgaggatgttctgaggcgcattttgttgagatggatccttgggttgtttcaaatgttctgcgaccaaacctggaatggactggatttcttgatgcctcagttatacatcctgttcgtgtcgaaactttcttagaacaggcagaccgatttgcaggtaatggaccatttgattacattattgtaacacctccatacacacaatttgattatggaatgctaatgtctcaaatttcgaagtcacctattgttggagaagacacctttatttggaatatcctttgaggacggacatgctggattcctgtggatgccttgtttagatcnaggatagaagatttggtcggacacatttanctatatatggacccaaatgggcgcacgaagaaaagaaaatctgagaagacccttcgnaatacaacatagaaagtgtacctaccagtttactagtcgaaagtggaatgtctttcaattatctccaatttttgccatcatccagatagatctgagtgttcaaggtgattttctgtataacccatgg

SEQ ID NO: 58527 - DNA, 732 bp, Gossypium hirsutum
  unsure (1)..(732): unsure at all n locations
  Clone ID: AI729003.1
ggattttatattttttctgctgccctgtaaccctaggcaaagataataatgcaaagaacacattgttgctacaacttctgctctgttccgtgaaattgttttctctctgggaaagaaagaacattttagtctgcgtgtgaatcttggaaattcatatccgatgattttatcaatgggcattttcttaattaatattatttttctatgaatcttgaactgacaagtcatgacttgggtgagttactttattggaaaaactctgactgaagtgctacaatggccatatatgatgtagtgcagcttgtccgggctgatgtttccacagttggaatcggcattgcagcatcaacagcttctatcatccttggtggtggcaccaaaggcaagcgctttgcaatgccaaacacacgaataatgattcatcaacctctaagaggtgctagtggccaacctataaatgtggaaatccaagcacgggaaattatgcataacaagaacaacgtgacaagaataatttctgcttctactgggcgtccatttgaacaagtgctgaaggatattgatagggatcggtatatgtctccaatanaaactgtggaatacggaataataaatggtgttatcgatagagatagcatcattccattggaaccagtgccggaaagaatgaaggcaancttaaactacaaagaaattagcaaagatcccaggaaattcttgaaccctgatatt

SEQ ID NO: 58528 - DNA, 661 bp, Gossypium hirsutum
  unsure (1)..(661): unsure at all n locations
  Clone ID: AI728997.1
gtccacctcctccggttttctcccgcaattttccttcggatgacgatcgcatgctgatcgaggtttatttgatcaaccatggagagagtgagctggatttgaggcctgatattgtgggtggaagatatgacgctgccgctatgacctctaatgggaaacgccaagccagggcattggctgtgttcctacattctcaagggatcaggtttgatgccatctattgctctcccttggatcgggctanatcgatggctctttatgtttgtcaggagatgaatgttgcagaagcaaagatacaatcctctgatgcacttatggatctgaatatggggcactgggaagggtgcatcacatcagaaatatatacacctgaagttttgagtctaagggaaagataccaacatgatttttctgcacctgctggagaatctctcagacaactggaatttcgaatgattcagttcttgaatgggaaagtccttggtcttcctgaaaagttcagaactgaattcttcttaccccaaaatgagagtcgacgatctaccagccaccgccacccgttctccaaactactcagttcatggaacacccaagaaaaaatctggttagatccggctaaaaactgtgtccgaattgatccaacctgatgctgaacatgatt

SEQ ID NO: 58529 - DNA, 597 bp, Gossypium hirsutum
  unsure (1)..(597): unsure at all n locations
  Clone ID: AI728973.1
aagggagtctttgtgaagttaaagaaatggatgcacagaaaggagattctgaaaatattggcagagcagaagatggtgatgctgatgataaaatgttacgatttgcatccgcagaagcttgtgctatggctttgagcaaggcagcggcagctgtggcatctggagattctgatgtcaatgatgctgtttctgaagctgggctgatcatattgccacatccacttgaggcggacaaggaggagaaagtggagaatattgatacccttgaagcagatcctgaaccagaagaaggccctgtaaagtggccaacaaaacctgggattccacgctctgatttttttgacccaaaggactcgtggtttgatgctccccctgagggtttcagtttaactctgtcaacttttgcaacaatgtggaatgcgctttttgaatggataacatcatcttctttggcttatatatatgggagagatgaaactttccatgaagagtacctgtcagttaatgggagggagtatccgcanaaaattgtcttaccagatggtcgttcttctgaaattaaagagactcttgctggttgtatttctcgtgctttac

SEQ ID NO: 58530 - DNA, 591 bp, Gossypium hirsutum
  Clone ID: AI728970.1
gggactttcgggcaggttactaagtgctgggttccagaaacaagcagttttgttgctgtgaagataattaaaaaccaacctgcttactatcagcaggcactggttgaagtttctgttttgacaacgttgaaaaaaaagtacgatccggaagacgagcatcacattgtccgtatttatgattactttgtatatcaacaccatttatgcatttgttttgaacttcttgacacaaatctgtatgagcttatcaagataaatcattttaggggtctgtcattgagcattattcagctgttttcaaaacagattttacgtggactgactttgttaaaagatgctggaataattcattgtgatcttaagccagaaaatattcttctctgtacaagtgtcaagccagcagaaattaaaataattgactttggatcagcttgcatggaagattggactgtttattcctacattcagagccggtattataggtctcctgaagttcttcttggatatcaatatacaacacctattgacatgtggtcctttggctgcatagttgctgaactctttcttgggctgccattattcccaggtgct

SEQ ID NO: 58531 - DNA, 620 bp, Gossypium hirsutum
  Clone ID: AI728953.1
atcaaacagtaaaacatcgtctatgaagcaaaaagcagccaaggttgtatcttcttcacttaaaaagtcaaataataagtcgaagaaagagttcaaaaattctaaatatattaagtcaacaaaagtgtcgcctatttctggtgatgggcataaaaagtggagtaccttggttcataatggtgtcatttttccacccccgtacaagcctcatgggattaaattgctgtatgatggacggcctattgatctaactcctgaacaagaggaggttgcaacaatgtttgctgtgatgaaagatacagatcacatgattaaagcccagttcatgaagaatttctgggaagattggactaaattattggggagaaaccataccatgaatgacttggacaactgttatctccctccaatatgacagtggcttttgcacgacaatgacaataagaatctgctgatttccgatgataaaaatgcctcgaaagaatacacttcgaatctcgacgaataatacatgtgggccattgtggatcccgtccaagacaatgtcggatatctcatagttgatccggccggtctcttccgaggctcgggtagacccaccctagatgggatctttgacc

SEQ ID NO: 58532 - DNA, 614 bp, Gossypium hirsutum
  Clone ID: AI728935.1
attttttttttttttttttttttttttttaacgcaaaacagctaaaacatcattggcctaatattgacaaaattgagggatgtgccttacaaagaaattaccagtgaatgagccttttaaggccactaaacaaggagacaaattgcccaggtaaccatgtttcaagtccccacaacacctacagcaaccaggcattcccattttcctcatctaatttactagaataagaatcaagaaaatggcatccagttcagctctaactatgttgtgggtccaaacttagctcacaaatattccctgtgactaacactgctaccttgtcttcaactgaaacagatagacctgggcctgtattacagttttatggatcctgaatcccggaacaaccgtgaaagccacccgtggttctgattccgacgaaaggaatgcttcctcagctacactttccatgtatacttcagaaaatctacaccctttgcttatttggaagatcgatgcctctggctcgaaagcaaaggccaagcaatgcagaagccacacccgcttcgccatttccgtgaataaggcgaaaaacatattgtctgggaattgataggagttcaccatgtccctat

SEQ ID NO: 58533 - DNA, 609 bp, Gossypium hirsutum
  Clone ID: AI728928.1
gctaattgctctcaggaaaacatgggattctggattcgcagatttgtttctgaccaagcattgaccatggctttctcaattcttcattcttttattttattagctcaggcaattactttatcgacttgcatcgtcgctcataataatgcactatttgctttgttggtatccaataactttgctgagataaagagcaatgtcttcaagcgctttagcagggataacatccacagtctggcatactcagactcggtagagagattccacatttcagcatgtctcttattcgttttagctcaaaatattttggaagcagaaggtccttggtttgaaagttttctatttaacgcgtttgtggtttttgtttgtgaaatgttaattgatatcataaagcattcattcctagccaaattcaatgatataaaacccattgcatactccgagtttctcgaagatttatgcaagcagaccttgaatatacaaactgaagattgcaagaaaaatctcacttttgtacctcttgcaccagcttgcgtggtaattcgagtgttgactccggtgtatgcagctcaccttccctgcagtcctctggcatggagattctttcgg

SEQ ID NO: 58534 - DNA, 619 bp, Gossypium hirsutum
  Clone ID: AI728923.1
caaagctttgcttctttcgttctctcaacttctgaaaactccggcaatccgagttacagagttccccaccaatggcgtccacctctactctccaagctccatattctctctccctcaaaccccaaaacgtgacccaccttcttcatggctcgagagccgccacgacgagagccaggagccgaaggagaacgtacagtggggcgggcgtttttgcagcaacaacgggtccaagcaaaccccaaagacctcctccaggagtcgataccagaatccactgggataatgaagatgaaggctggattggggagtcatccaattcccggcaaaccaaggagaaactgaatcctgaagaagaacaaaagagtctcctgggtgaaaagtttgctgatttgctcaatgactcctctgattctcattaccagttcttaggagtctcagcagaagccgatttggaggagataaaagcagcttacagaaggctgtcaaaagagtatcatccagacacaacttcgctcccattgaaagcagcttcggagaaattcatgaagttaagggaggtttacaacgttttgaccaacggaaagaaccgcagtttctatgactggacactcgcacaaga

SEQ ID NO: 58535 - DNA, 617 bp, Gossypium hirsutum
  Clone ID: AI728915.1
gctgcatgtttgtgagcaagtaaactttttcttgcttccttgttctgtgtcgtatatttcttcctctgctctgttttctttctttgttgctatcaaaaatcccaacatcttactattgcggcagggataaggactcattttggactgacttggatgttagttgggtaaaatttaacacgggctcgttttgcaatggcgaccttgcaagactcatctgaagcagcttctccgcttgatctggaacaaagttataaacagatatgagcctgctccacttcatgaggtttgattaaaagagaaaaaggacttcaacgaaagtttttgatggctagtgaatcacttacagatgagtgcagatccgagcaccgctgaattcttgccttgaattgtcatcaccaaaccagctttgccagcatcttgcaacttagttgtacctacggaatcaaatgtacctgcaaaaacaagaactatttcatgctttggtccttgcaagcatcacaagcatggtcattacaacagcaagcagttgatgtgtaacctggttttacactttgaagccctgatgttatacaagttatacagcaaccggcttgctccaatgtagtggcaacagcaat

SEQ ID NO: 58536 - DNA, 403 bp, Gossypium hirsutum
  Clone ID: AI728876.1
caaagaccagacatgggccacgctgtgaatgtattggctccacttgttgaaaaatggaaaccattggatgatgacagtgatgaatattgtggcatcgattacagtcttccacttaaccagatggtgaaaggttggcaagaagctgaaggaaaggagtttagttatatggatttagaagacagcaaaggtagtatccctgctaggcctactggttttgcggattcgttcacttcagctgatggtcgatgaaaaagaggtaaatccgttgcatatttccttttaatatttttgttcatttgggagttgtaaatagctgtttgtgttctatctatttgagaattcaatgttaatatataaatttttcttgtttgtggttggttttaaaaaaaaaaaaaaaaaaaaa

SEQ ID NO: 58537 - DNA, 630 bp, Gossypium hirsutum
  unsure (1)..(630): unsure at all n locations
  Clone ID: AI728870.1
aatttcagtggcatcttttgggatctgaatattgagtgttttgttcttcttatttatgttagaatttagagtgatttggcctttaatcgtctcatttagaacaactctgtggcttaaggtcgttcctaactggagttttgtttttgtttttttgtctgttttgtactctcattctgtcatccttctctttttcagttcaagttctacattgttactgaaatcccattttccaggatttccaaaagtttccatctttgaaaatccagaaatattacttcttgattggtttacagttttactaagccccatgttctagtattcaccaaagtttccttttttgaaaacccagtcctgtttttggatttctgattctgggttttgctcatttttctgatttattgattggttgattcatgggtgagtcaagatccattggttttttctttcttcttctgattttctccacttgttttggggatcaaactttggataaaatcactgagttacccggacagccaaagaatgttggattcaatcaatattcaggatacgtgacagtgaatcaacaagctggaaaggcattgttttactggttgattgagtcaccactgagtcgtannaccgagtcac

SEQ ID NO: 58538 - DNA, 553 bp, Gossypium hirsutum
  Clone ID: AI728852.1
cttcaattaacactcacggcctttatgtaatccttggaaacatgcataagctgaaaactatcaccatttctcatgctaatcttaccgggtctcttccaaggcaccttcatctgaatctcacccatattgatttatccaacaacaagctcaaaggaaagataccaacttcccttacgcttcttgaagaccttgaattcttgaatctttcttcaaatgggctaaatggggtgattcccaccgagtttggtgacttgatatccttgaaaaatatatctttggcttccaattcgttttccgggccaatcccagattccttgtcagctatcccaggcttggtccatgttgatctgagtaataaccagttaaatggaactgttccaaggtttttctcaaagttgaaagagctaaaagtcttgaatcttgagaacaataagcttcatggggttttacctttcaatgctagtttcataaagagattggatgttctcaaggttggtgggaatggcaatttgtgttacaatcattctgttttgtcatcaaaaataaaactcgc

SEQ ID NO: 58539 - DNA, 585 bp, Gossypium hirsutum
  Clone ID: AI728788.1
cggttatattagctaaattacccgccaacccatcaacaaattgaaaaggaatataagcctttccattatcttctcccccaccaaaaccccccaatgaaccgcactcacagtccaattccaacggttaaatcccctttccatttcgtgttgagccctaatttcaaatccctaatccacccaactgctacccggattttaaatttccctccaaagcatcccaaccgtttaccccttctttcatattgcagtaaatcccccaattttcgttttatttcaaagaaaaggaatttcgaagtcaaagcatcaaccggaagtaacaatggtgaagcagggaactgggtgcgctggttgcccactggaggtttagcagctgataaagttttgagattgatttcaactgctacttcgagtcccatttgccagttcatttcttcacctaccacttttttgcattcagtggaccctagaatcaaattggtatggctattggcgttagttgttttaccagcacgtgcccaaatagcagttcgttttggattggtagcgtacattgctcttttgtcaatgttgtttctcccaaaaaat

SEQ ID NO: 58540 - DNA, 588 bp, Gossypium hirsutum
  unsure (1)..(588): unsure at all n locations
  Clone ID: AI728777.1
gaagtttccgaaagtgcaggaaattaaataagaacctagctagggttttcgatttgttcgcgaatgggaaaaaatgatttcttaacccccaaagcaatcgcaaatagaatcaaagccaaaggtctccagaagttgagatggtactgtcaaatgtgccaaaagcaatgccgagacgaaaacggattcaaatgccattgcatgagcgaatctcaccaacgtcaaatgcagatctttgggcaaaaccctgaccgggtcgtatctgggtactctgaagagtttgaacggaacttcctcgaccttatgaaacggagccaccggttcagtcgggtcgctgccactgttgtttacaatgagtttattaatgaccgacatcatgttcatatgaattcgacccaatgggctacgttaactgagttcgttaagtatttgggaaggacanggaaatgtaaggttgatgaaacacccaaaggttggtttattacttatattgatagagattcaaagacgctttttaaggagaaaatgaagaataaaaggattaaattggatatggtagaggaagagaaacacgaaagggaaattcagaat

SEQ ID NO: 58541 - DNA, 452 bp, Gossypium hirsutum
  Clone ID: AI728757.1
cggccgcgtcgactgaaaaacctgtctacggtcgaagttggaaagcttctgaactgcgtgtaaagtcctgggatgatctccataaactatggtatgttctgttgaaagagaagaacatgctgatgactcaacggcagatgcttcatgctcagaatctccgctttcccaatccagaacgcatcccaaaggtaaggaagtcgatgtgccgaattaagcaagtacttacagaaagagaaattgaagaccctgatccgaggagatctgcagagatgaagaggatgataaatgctctgtgatattgtactaaactgcttatcccgttcactgaaggctttctattgtttttgttggtcgagattctattctgacttgctattccattgttgcatcagacatcttaggtgtttaggaacataactagtgtttgtgtttgttttggatggcacataatc

SEQ ID NO: 58542 - DNA, 534 bp, Gossypium hirsutum
  Clone ID: AI728747.1
ttttttttttaaaaaaagaagcaaacaaatacttatttcttaaccatacggaaagtgcagttaaaaagcctcaaatctaaaacctaatatatctcccatttacattaacatatgtatgtatgtatatatatacacacccccaccttatatctgttatttacagattaaactcgtcatgttttactatgaatcttcattccaacttggaaaatgttcttcttgctttaagaaattgtgttcttccatttgagtcatctgtccaccgttcaccgggtcaaactggcaccgacggaagcttccatccatgccaataatcatgatagtgttcttttgttgtccaaaagcaacaatgcaccgggaaccttcaggcagccggaattgagccaccgaccactctgagctgaaatattttggcaaaacacctttcaaaataaaaagggatgataaagctgattgattaaaaagaggtgattcccatgcactagttgacctatcatcccccaaaactactgaatcagccttgaggctaaagac

SEQ ID NO: 58543 - DNA, 532 bp, Gossypium hirsutum
  unsure (1)..(532): unsure at all n locations
  Clone ID: AI728744.1
gaactttttccttgtttgttttgagattaacatggaaggagttgggagcaacttgaaggtggtacacagttcaaggagaattagatactgtgatggattattgagggttctggggttactccttacgttggtaccagcgattttgacgggtgcccacaaggagaccaagacgattcctataagtatcaccaaaactttgcccactttgcacgtccctgtcactgctaagtggcactacatgtctgcctttgtatacttcttcgtatcaaatgccatagcattttcatacgcggcagcatcactggtagcatcaatggcagtccgaacatccaaagacaagacaggattagttgtcgtcattctagatatggcgataatggggttgctcttgtctgttaatggggctgcaatcgctgttggtatcttaggccaatatggtaactcgcatgtgcantggaggaaggtgtgcaattcgttcggtggcttctgtcaccaaatgactgctgctataaccttatctttggttggatct

SEQ ID NO: 58544 - DNA, 533 bp, Gossypium hirsutum
  unsure (1)..(533): unsure at all n locations
  Clone ID: AI728733.1
gctctttggagtcttggtattgttgaacaattagattatttaggtcttggaatagcttattatctacaatatacacttgttttagtcgtattatccggtttacttgtactaggaatttaccatatcttgattcaacggtttaagatcgagtatttccggcgagttaccgctgttgggtattcttgtgttgttttcggttggatgacgattttgtccgttaagcaaccttcgtcaaaattggatcttttcggactcatttcgcttcctattagtttcgcgccattcgagtcgttgattttcacttcgattatcgtcccgcaagcgagttttctcggtcatttatcgggaatcatagtggggtatgctatancttggggtttgattcatgggatgactaattattgggctgtttcgatgttgggatggattgtacttgtttttgtattcagtttgaaacggtctggtgcatatgatttcaacttcctcgaaattgaatccgttacggatccttctctgccttctgttcggtttaa

SEQ ID NO: 58545 - DNA, 639 bp, Gossypium hirsutum
  unsure (1)..(639): unsure at all n locations
  Clone ID: AI728722.1
aaataacgggggtgataaccaaggtgggaagcaacgtgaaaaacttcaaactaggggacagggtgggggttggttgcttggcancatcctgtttggaatgtgaattctgtaaaaactcgcaggagaactactgcgatcagatccagttcacctacaatggcattttctgggatggttccattacttatggcggatattccgaaatgctagttgcagatcacaggtacgtggtccacgtgccggataacctgccaatggatgcancagccccactgttgtgtgctgggataacagtttttagccccatgaaagattgccaactgctggagtcaccaaggaaaaaattgggaatanttggtcttgggggtctgggtcacgttgctgtgaagatggcaaaagcatttggtcatcaaattaaccgtcatccgcacttctccgtccaaaaaaaattaaggctaaacggcgtttgggcgctgattatttcccaatttagcacagatgccaaaccaattccgaaaagttagaggacnctacaagtttttttggacacagtctcagcttaaccctccctccggacccatctttgaaactgctccaaattaattgggaatttggtaattcttgggggccccccacaca

SEQ ID NO: 58546 - DNA, 115 bp, Gossypium hirsutum
  Clone ID: AI728711.1
ggagtacatagcccacagaatcaactcttggggttctcctgcgtcagctccaatgggaaagggaactgggagttttggtcaacgaaggaactagacccacactctttgcgtgaga

SEQ ID NO: 58547 - DNA, 637 bp, Gossypium hirsutum
  unsure (1)..(637): unsure at all n locations
  Clone ID: AI728704.1
gagatatgatggaatttacagattgaaaaatgttggagaaaagttggaatacagggatttaaagtttgccgatatttgtttgtgagatgcgacaatgagccacccccttggacaagtgatgatcatggagatctacctaggcccttaccagccattcccgagctgaagaaggcaactgatgtatttgagagaaaggaaagtccatcatgggactttgatgaagaggacaatcgctggagatggaaaaaaccaccgcctcctagcaaaaagccagtgaatgcggctgatctcgaagaaaggaaaagggcaaggaaagctataaggcaagcacatactacaactgtaagagaaagactactcaaagagtttagttgtctaatctgtcggcaagttatgaatcttccagttacaactccttgtgcccacaacttctgcaaatcttgttttgaagctgcattttctggtaagactgctattcgagagagaagcaaaggtggccggacacttaaatcacaaaaaaatgtgctccattgtccttcttgcccaaccgatatctctgattttcttcaaaaccttcaggtcaaccgagaactaatgggtgtgatanagtcactgaagcaaaagagtgaggagaatc

SEQ ID NO: 58548 - DNA, 568 bp, Gossypium hirsutum
  Clone ID: AI728681.1
aatcaacaaaaatgtcccatatcactgcgctgccgagtttcgaaatcgtatgttcagctcacaaggttgggcggaaaggaaagaagacagcacccaaaaccaagccgagcaaagacaccatgggctttagttcagggaggaaggagatatggcggtgtgtggaaaactgcggcgcatgctgtaagctggccaaaggccctgctttcgccacgcctgaagaaattttcagtgacccgtctgatatcgagctatacagaagcttaataggtcccgatggatggtgcatccactatgagaaaaacacacgcacttgctccatttaccctgatcgtccatatttctgccgagtggaacctgatatattcaagaagctatatggaattgagaatagaaagttcaacaaggaagcttgcagttgctgtcgggacaccatcaaggctatttatggacccaattccaaggaattgaagaacttcaacacctctattaatgattcttcctctgctctttccaccggcgtgtatcattgctgctgatgacttgaatttatactatttatacagtaccc

SEQ ID NO: 58549 - DNA, 572 bp, Gossypium hirsutum
  Clone ID: AI728675.1
caggactgagtcagtgactcgtcaaaacgacgcgatggcagggtgtcaactggtgggcaattcggtgttttacgggaccgagagacgaaattgccattgtcaattggttaaattttcgggggtgccactgttttatcctctgctcagtgttccactcacaaatatctcggcttccttatccaatgaaggtccacctgatgggtataggaaaaatgttggaatttgtcttgtaaatccttctaaaaagatatttacagcgtcgaggatatatattccagacacctggcaaatgcctcagggtggtgctaataaaggtgaagatctaagaaaagcagccatgagagaactgagggaagaaactggtgttacatccgctgaatttcttgcagaggcaccttattggttgacttatgattttcctattaaagtgaaagataaacttaaccgtacatgggggaccaattataaaggtctagcacacaaatggtttctttttaagttcactggaaatgaagaagaaatcaatcttttatgcgacggttcggaaaagccaaagttcataaagtggtccc

SEQ ID NO: 58550 - DNA, 567 bp, Gossypium hirsutum
  unsure (1)..(567): unsure at all n locations
  Clone ID: AI728672.1
catgaaacattttctttagtgacacatgcatctccttcttgtaattagcttcaatttttgaaagaaactcccatatgtgaccaggttaatttgatgcttcttgtagcatgattaatttcctatctatcctgattttttactgaattaagaaggcaacttgtgtgttttctgctctgctggttcagtcaggatttccggcatgaagtgaatttgcttgtaaagctccgccatcctaatatagttcaattccttggagctgtcactgacaagaagccccttatgctaattactgagtatttaaaagggggtgatcttcaccagtatctcaaggaaaagggttcgcttantgcatcaacagccgtcagctttgctttggacattgcgaggggtatggcttatcttcacaatgagccaaatgttataattcatcgagatctaaaaccaaggaatgtgcttttggtcaactccagtgctgatcatttgaaagttggagactttggactgagcaaactcatcaaggttcaaaattgtcatgatgtctacaaaatgactggggaaacagggagt

SEQ ID NO: 58551 - DNA, 626 bp, Gossypium hirsutum
  Clone ID: AI728666.1
caaactcaatcaatggcaacacgaaactctggtggcagtggtctaggtcttgccatttgtaagagattcgtaaatctaatggagggacatatttggatcgaaagtgacggtcttggtaagggatgtactgctatcttcatggtaaaactcggcatcccggaacggttgaacgaacctaaacttcctttcatgcctaaagtaccaacaaatcatggtccaacagcttttcccgggcttaaagttctggttatggatgagaatggggttagccggatggtgactaaggggcttcttgtgcatcttgggtgtgatgtaacgatggtaagctcgagtgaagagtgtttgcatgtagtttctcatgagcacaaggttgttttcatggatgtttgtgttcctggtatggatggttacgaagtcgcaatccgcataaacgagaaattcacaaaacgccatgaaaggccgataatagtagcgctcaccggaaatacggacaaggtgacgaaagagaactgcatgagactcggtatggatggtgttatattgaaacctgtttcacttgataaaatgagaagtgttttaacggatcttttggagcatcgagttcttttcgaggcaatataaccacc

SEQ ID NO: 58552 - DNA, 635 bp, Gossypium hirsutum
  Clone ID: AI728665.1
attattatacacctggtggtaaaagagggactgggactagacctgatcaagaaaggaagaaaggtgttccatggactgaagaagaacacaggcaatttctaatggggcttaaaaagtatggcaaaggtgattggagaaacatttcgcggaatttcgtgacgacgaaaacaccgactcaagtggcaagtcatgctcaaaaatacttcatcaggcaagtaaccggagggaaagataagagaaggtcaagtatccatgacatcacgacggttaacatccccgataccatctcttcttcaccggatcaaagcaagcctttgtctccaagtaattcttccacagtcatgcaaccacaacaacaaccgaaagcaaccagtgttactaaagaagtcctcgatttcgagtggaaccaacggaatgaaggagcagctatcattttcgaccagacgagcagcggcaatgcactcctctcaccttactgtgggatgatttcttcatatggacctcaattcggatcgtacaacgctcttttccagtctatgcaacatccatagatcttcatcgatgaatcaatcaaaagcccttgtatcagctagctttgatcaattccacatgtgtatatgttgaagatgcaattc

SEQ ID NO: 58553 - DNA, 623 bp, Gossypium hirsutum
  unsure (1)..(623): unsure at all n locations
  Clone ID: AI728664.1
ttctgcaacaaaattgaatttcgttttaaattttataccttttgtaattttttttcttttaaactgttacaataaaaaactataaattctcagagttttaattagttatccatttagtatcactggagatttctagggttttatttcatgtacggtgaagctttaatgtctagtaaatggagatttcctataacccctccatcggtctccaatcccatcagtcgttgatcatagccacaatcgttaccctccttcccctactcctcgccgtccgatcattattattcaggaggccacacaaacccaacgtctcccctcccgccccgtcagccgggaaagaagagactaaacaagccacaccctcgtgttcctgcaacggtacttctggttccgaggctttccttaacggcgataaggctgctccggcggaagaggatatggtgacggcggatgtttccaaggtancggcggaaaagcaaaatggggcgtcaatgatggaacagttggtgccggagattactacgcacgcgcttagttacttggattatccgagcctttgtcgtctttctatgactaattcactgatgagaaaggcagccaatgatgataatgcttggaaagca

SEQ ID NO: 58554 - DNA, 629 bp, Gossypium hirsutum
  unsure (1)..(629): unsure at all n locations
  Clone ID: AI728656.1
ctcccgtcctgttgaaaccatccctgacctgaaacatgtcgtccgacgggaacgtcaacggcggcgccggcgctaactccctcgttaccaataaacctttcttctgctaccaatgtaaccgtactgtcaccgtcactatagcgtcctccgatccctcttgtcccatatgccaaggtggcttcctcgaaaaatacgaaaaccctatccctaatcaagcttccaacttccgtaacccgaatccagtctcccactcctcctcgtcgttatcagatccgttctcttccatcctccccctccttacggctatgaattcttcaccatctcctgcttatgttgaccttgagagcacaggcttattcgagtcgaccgtgacaactcgagctgacccgttcgctttcgatccgtttaccttcattcggaatcatctcagcgatcttcgttcaagcggggcgcaaatcgagtttgtgatccagaacagcccatccgagtcaggctttcggcttccggcaaacctcggggattatttcatcggcccagggctcaaacaattgaatcaacagctaacccaaaattatccgaaacggtaacggaacccaccaacatccaaatcngtcatccattccctacta

SEQ ID NO: 58555 - DNA, 646 bp, Gossypium hirsutum
  unsure (1)..(646): unsure at all n locations
  Clone ID: AI728644.1
cgaaaaaaaaaagcacaagcaaaaattgagaaaaaatgggtgattgtatgaggaactgtaaacgaagtgcagaagcagctgaaatggaagcttcaagcacgagcttctcattatcaaagagaagaaaaactgttggttctcgagaattgcaagaattagagttaacttcaccggacattgagctcggaaccactcgcatcctttcgaattcgctgaacaagcctatttacttagctacttcctcgggttcttgtggagtgctttccggagatatgtgttccggtctcttctccggcaattcatcggcttctcgttgttcgagcaacgagtcgtgtgatattctcaaagatagcttgagattcgtagatctagaggcgaagagttttgaaactgaaatctcaacgtgcaccaacgtcaacaaattcagtagagaaacacctcccttaagcgagcattgtggagactcggacgaaatgcaatcgcctgagaaaaaacctccgccgtcaacgacgaaaccgccgaagattccgtcgcnagctgagatcgacgaattcttctccgtcgcggaaaagtacgagcaanaacgatttgcggagaagtacnattatgatatcgtcnaggatgtgcctctcgacggtcgatacct

SEQ ID NO: 58556 - DNA, 636 bp, Gossypium hirsutum
  Clone ID: AI728643.1
tttttttaaatctgcaacgcatctcagttagttttaatagatttggctctccagcagtcaacaaaagaagttgccggacctcaacaagattacagtctcccgcagtatagataaacaactaagaactgtttctctatcccaggtggtgaaaccgagtttacaagaggttttggtttataacaaaaatcgtatacattaaaaaaccagtggagacgtgaatttgagaagatatgcaagctggctgcatttagcttacttgcgtcttcggttattggccaactctgggttgccttttctcatcatggcaacaaactcatcatagttaattcttccatccctgtctgtgtcaacttctgcaatgatttcttttattgttttttcatcacccatattatacttcttaagggcctgctctagctcttccattgtaatgtacccgctattgtccttgtcaaagtattggaaagcggtgtacaagtggtcttctctttccattctattcatgtgcatggtagctgttataaactcaatgtaatcaatggctccatttccatcaacatcagccgcttccattaattgcctcacttcattctcagaaagcttagtaccgagtttaggaaagccagctttcaactc

SEQ ID NO: 58557 - DNA, 635 bp, Gossypium hirsutum
  Clone ID: AI728640.1
cccaaatcaaaatcccaacccatctctgcatcaccggacccgaccatctgctgcgtcgccgtcgcacacctctaccgcaaccaatcggtaagcaagacatagcaagattaacccaaaaccctcacttagctctttttgccatcttcttctcggttctcatttgcctcttttggcggaacatcctattgtttcgaggggttcctaatcctattttttaaaataaaaaaaatcttttccttctctttaatttactttgattgatataatcatctggaaaaagtgttcatataccctcatgctggaccatatgcatatgcatgagcttccaataatggaaaattctcttcctagaaattccttaattggtgctttgcatttgcaaaaattacaggctcgactacctgaagcacgggttatttattgctctgcaactggggcatctaaaccacacaatatagggtatatgatcaggcttggtctttagggagctgggtttccctgatttccaaagttttttaggtgtaatctttatgccctctagtgacagtttttttcgttccatattccatttttttataccttgtcatattccagtcaaatattttgtacaaccaataaaattagtacaattaatt

SEQ ID NO: 58558 - DNA, 631 bp, Gossypium hirsutum
  Clone ID: AI728637.1
tttttttttttttgcaaaactgtagtttaatttattcagatggactttcagaaaaagaacagatcataatctcaattatgccatcacaatgccatctctttttcttttgctatatctatataccctctttacttaaagataaaagctatagaaacaccaaaaaaaaccctctaagcttctcaacgaatgttcatcgtccaaaaagaagcacgacttcatggattaatctcacatttttatcctttacaagcctaatatatttacagttttatagacatgatgatagtttgatataccaggccagcatgatgtcgagtgcgatgcgtggtttcagcagcgaactaaagaccaaatggtgtctccttgtaccatcaggtaacgagcatcctagacttcaaagctttagctgctgctttagcgaaaatttttgctgcttcagcttcagcttccgcggcacctgcttctcttgctgccttttcggcctctgcaattgcgaattctgcctctgcaacagctcgtgcagcagctgcagcggcctcttcggcagtcatggtcttcattttggacaactcaacatcaacttgggttttagtaagaatgttgatggctttcttctccgatttcgaagatt

SEQ ID NO: 58559 - DNA, 637 bp, Gossypium hirsutum
  unsure (1)..(637): unsure at all n locations
  Clone ID: AI728636.1
gtaaattcagtaaaattccaatgttttacgatcatgcttgattacagagatttgtaagatatgattctcgcaacgaatctgtgtttcagaactatcccaacaacatgcacaaccgtaaagcaacaaaaggatcctcctcaccaactcaacccagtaattccaacaaaaacaaaggcgtgcgagtgttttgatttgcacaaggagcttattccatatgaaaaggcatggtcttggcagaaacagattgttaaacagaagaaatcattgctacaagaacatgaggattgcccagatacattaattgttcttcagcataaccctgtttatacaatgggcactggcagctcggaaaactatttgaattttgacgtaaaggaagctccttttgatgtttatcgaactgaacgcggcggggaagttacataccatgggcctggacagctggttatgtatcctattattaatctccggaatcacaagatggatcttcattggtatcttaggacacttgaagaggtggtgattcgtgttctntcatcgacattttctatcanagcttctaggattgaaggggtaacnggtgtttggattgganatcaaaaattggctgcaattggtgtaaggggtatccattggt

SEQ ID NO: 58560 - DNA, 635 bp, Gossypium hirsutum
  unsure (1)..(635): unsure at all n locations
  Clone ID: AI728630.1
gggaaaaaggccaattcaatggagttttgaaacttacgagctttctctctcaatttcgaaccaagctcgagagagaaagtggtttcacaatttcatttatttattttattttactttttgttggttacttgggaaagaaacaaatcaatacgctccgatttttaaaaggaaagagacggaaaaagaagtaaaatattatccaagatttggtaataacattattgccgaaacagagaaaaggaatatttgaattgtgattttaagcgccgcggatttgcagagaggattcttgtgaaaaggaaaaaaaaatggttgatgaaatcggtgaggaggagttttattccatcgaggaatcgattgagggtgaaagatgttttgatcttgattacgagtttgatgcaccgcgatgctttgatttcaatcacctagaaactgattgtgaggctaaagaagccgaactctggttcgantcagctgggaactatccgccttcgccttttgtaataaagttgaaatggagatatgatatgaatggagatggagaatttggggatgattccacagattgtgatgagcttatggagaaacatgttataccttttgccaaggttatcccaacggctaaaactaatcct

SEQ ID NO: 58561 - DNA, 635 bp, Gossypium hirsutum
  unsure (1)..(635): unsure at all n locations
  Clone ID: AI728625.1
atcaatagagaagaagacaacaagtggcaaaatggagagaatccaaaaatggaaatggcagcaacaacagttcaaccatgtccttcttctttcatcttcttcactcagcgacaaaaaacccgcctccataatatcatccatttcccatttctccttctccctccttctcatttacgccgtcgtttcagctcatctgcagccagagatatcaatagcaggaaaagaagaagaaagtgggactcaaatgccgagacaattcgtgccaaagatttcacttttaacacccaaaacaacgaagatgaagatgatgatgaagaagaagattatgatggtgaaacggcaagttctgggattttggaggaagctattgatagcatttggattttgaaggctttcaaatcctttggttgggggctacccgccattttactttcgctgttgtttgccaatggcccgaaagctttcctcatggcattagcacttacaattggacagtcagcactagcttttgccttcgaaaaatttcctgggaaagtcacaagcaagcaaaaacgttagggcgagggcaagaaanacaannaattatacttcaccgcgccccgttaaaaatttaanaaaagaagaaacaattactc

SEQ ID NO: 58562 - DNA, 669 bp, Gossypium hirsutum
  unsure (1)..(669): unsure at all n locations
  Clone ID: AI728600.1
caagcggttgaggcatccacggctctagctaggatccagagggttgcagatgagaggacaacaaaagctgcagagtttgagcagaagctggcacttcttgaggttgaatgtgcatctctaaatcaagaattgcaaaatttggaagctcgagctcgtcgtggacaaaagaagtccccagaagaggcaaatcaaatggttcagatgcaggcatggcaggaggaagtaaagcgtgcacgcagaggtcaaagagacgctgagagcaagctctctttgttagaggctgaactgcagaaaatgagggttgaaatggctgccatgaaaagggatgctgagcattattctcgacaggagcatatggagctagagaaacgctaccgtgaattaactgaccttttgtacaacaagcaaacgcagttagaaactatggctagtgaaaaagctgcagccgagttccagttggagaaggaaataaagcgtcttcaggaagcacaggttgaagtanaaagaaataaagttcctcgtcgggcatcaatgtcctgggaggaagacactgaaatcaaagcacttgagcctcttcccttgcatcaccgtcacatggctgttgcaagcatacagttacagaaggttgtgaaattactggattcantatctgttagggccacnaaattt

SEQ ID NO: 58563 - DNA, 677 bp, Gossypium hirsutum
  unsure (1)..(677): unsure at all n locations
  Clone ID: AI728585.1
attccagcagcagaagtacccaacagtgataatgcgcctggaagtagcaatgacaatgaggaagctgaaggacactccatatatgtacggaatttaccttacaacgcaacacctcaacaacttgaggaggcattcagaaaatttgggaccattaagtgtaacggcatccaagttagaagtaataagcaagggttcacttttggttttgttgaatttgagaatccaagttcagtgcagagtgcacttgaggcttcaccgatcacaattggggatcgtcaagtcgctgtggaagaaaaaaggacaaatacccgagtagttcgtagcagtgggagaccaaggtataattcttccggtaaaggtggtctccggggtgacagtttcagggcaagaaggaactttggcattggccgaggaggctatggcaggcatgaaatcaaacacccgggtgacttttcaggaacaaccgaaggttctggtggatggaatggaaataataatccgaaaggaataaacagaatggaaggggtagccatcaagggtgggcaaaancancatgattctacttgggaataactgggaaagtgaccaaatgacttttccctttggttttttgacagttctaatggactacaattgatgattctagtttacttttaattcaactgcttatggagaga

SEQ ID NO: 58564 - DNA, 666 bp, Gossypium hirsutum
  unsure (1)..(666): unsure at all n locations
  Clone ID: AI728582.1
ctctcctctccgcttaataatctttaacttgacaaaccgggaaaactctgctcatcgcattcacatatttgtccccagatccacacattgaaaataatcaaatatggatgtgggtacagatttcgtctgggggaaatacgatacaaaattttgactgccaaaaatccaaaatgaagatcagatcatcccttttgcagaaatggtccccggaacgatcatatcccactatactatcaacgctgcgattgagcccctggtgattcctacgtcaccggtgctgattccatcgattgcatgcctctaaccgttgctacacgtcctccatctggtctgcacctatccattcaccccgaagagtattccgttcatggctgacccacacatggactgtgtgcctatggattaagtgaagatcantatccattacgatgtgcctcttcgcttctcggcccaatacttgatggaggatcnaaaatgattttggggaattctaggagaatatctccagtcgagtacactcagccttggtcgtctctcaatgtatgctgagacccaatctcaggaaccagcagatgcggataagttagagaaaatgtcaacggactcggataaatactccatcatgcgtcatgttagggctcatagagtccccgccccatgtgaaat

SEQ ID NO: 58565 - DNA, 654 bp, Gossypium hirsutum
  Clone ID: AI728577.1
gggaggaaaattagggaagggatttatgaaaggagggaaaatagaggaaatagaaggaaagaaatatgatcatgggttttcttcagctgaagtaaacacactggccgccatagctgaagctttgttcccttctttgccaccttcttcttgttgttttgaaagacgagaaaaccatacaataagcaaagctgttcgatctttcatggaaacttctgcttctcaatccccattcccggacgaggcagcagagatgttgtggaaaagattattcattgaatgtgtggtggtagtgagagttgtatcgttgtcgtcatcagcaaaagtgggaactttgttgctttgcggaagccattgttggggtaaggaatggccgtacattaatggcttcacgagcatgccattagcccaaagggatcaagttttacaagcctggtttaagcatcgtttcttcactccctttagggtcgctttcctctacttcaaagtcgccattcttttcatcatcttctcacgggtggatgacaatggtgaaaacccagcatgggaagccattgggtataacatacacacacttgacgatgttccaaatgaaagacctcttcaactacgaatcgttgagacaatcccttgttacagactccattgatcttccct

SEQ ID NO: 58566 - DNA, 631 bp, Gossypium hirsutum
  unsure (1)..(631): unsure at all n locations
  Clone ID: AI728494.1
cgctgtctgcatcaaggtattggattttggagatattttgggaaagttatggtgttttttgattggtcgaatcggggaccgacgatgaaacaggtagggaaggttatattgaagtcagggtatggttggatatcatggatacatattgtgattgtctaattgggatgtttatcaagtgtttgtatcaagttttgtgagaatttttaggcctttgtatgaattcgaatatgtcagtgttattcgaaagatcttgttagtttgacatgagtatcggtaagacaatagtttggttcaggagggacctcaggattgaagacaatcctgctttancagctgctgcaagggacggtantgtatttccggtttatatatggtgtcctgaagaggaaaggcagttttacccgggtcgagtttcacgatggtggcttaagcaatctctttctcatttggagcagtcattgaagtctcttggggctgaacttgtgatgattaagacccaaagtaccctttcagctcttttagattgcatcaaagctactgaggcgacgagagttgtagtcaaccgtctttacgatcctgtttcgctggttcgttatcatagcatcgaagagaaactaacagatgttggctt

SEQ ID NO: 58567 - DNA, 642 bp, Gossypium hirsutum
  unsure (1)..(642): unsure at all n locations
  Clone ID: AI728491.1
gcaatgtttgctgctagttttagggctaactcaaaacaattgcaagcacaaaatcatgcgttgcctattggggatgcccctttggctgttgctgggagtgaagttccagctgagaaagctgaagaatcacaaaatttgaagagccaagatggggttaattcggtattgagtaaatttcttgatttgaatatcgatgagaattgggaacatgttggggaagataaaaaaggcgaaatgataatttctttgcttcatcagattaaggatctcgagaagcaagtgaaagagaggaaggaatgggctcaccanaaggcaatgcaagctgcaagaaagcttagtagtgatcttacagagcttaaaatgctgagaatggagagggaggagatgatgcnnaaaaagaaagggaaacacacnatagaggactcgaccatgaagagactgtcggagatggagaatgctttgaagaaagctagtggacaggtggaccgggcaaatgctgctgtgagacggcttgagacaaaaaatgcggaaatcagagctgagatggaagcttctaaattaagtgcatctgaatcagtcacaacctgtctcgaggttgcaaaaagggagaaaaaatgcctgaagaaacttttagcttgggat

SEQ ID NO: 58568 - DNA, 637 bp, Gossypium hirsutum
  unsure (1)..(637): unsure at all n locations
  Clone ID: AI728489.1
aaagaaggaacgtgttgctgtaaaagcatttggttcagatgggttgtactataagctttcagctataatgaatatgacctcagacagaacaaaggtcattcatcttcagccatacatgctgtttatcaacaggataggtttaagcctttgcctgcggcagtgtgattctcatacagtggaatggatccatcccactgatcctccaaaaccaattgggtggcagggttcttcaaaacttgaactgttgaagttgtatgtaaatggatatgactggagtacaccgttcagtgtttctaatgaaggtgtgatgcgtgtttctttgaaaaatggcaatggaagcgatcagttgttttttaaggttgaagttaggagtggaacaaaaagctcacgctacgaagttattttccgccctaattcctcatccagtccttacaggattgaaaatcgttccatctttttaccaattcgctgccggcaagttgatggtaccagtgattcatggcactttcttcttcccaacactgctgtttctttcttatgggaagatcttggtcggcagcatttgttggaaatccttgtagatgggactgaaccatcaaggtcanaaaagtatgacattgatgagattgctgatcat

SEQ ID NO: 58569 - DNA, 643 bp, Gossypium hirsutum
  unsure (1)..(643): unsure at all n locations
  Clone ID: AI728454.1
cttccttctctttcccactatactttttctaccgtgtttcgtcgtctctctgatagctttttctttcgattcaccttctaaaatggctgcttcagacgtcgttgtggttatggatttcgataaaacgattatcgattgtgatagcgataactgggtggtggatgagttgggtgctaccgagttgttcaaccagctcttacctactatgccttggaactctcttatggatcgaatgatgaaagaacttcattcacaaggaaccaaaatcgaagacattgtagctgttttgaaaagaactccaattcattcccgaatcatccaagccattaaatctgcttatgctttaggatgtgatatgaagattgttagcgacgcgaatgtgtttttcatcgacacaatcttaaagcatcatggtttgaaagaatgcttttcagaaattaatacaaacccaagctttgttgatgaagaaggcaggttaaggattttcccttaccatgatttctctgaacatccccatggatgtcctcatccctgccctccaaacatgtgcaagggtatcgtgattgaaaggatccaagcatctntatccgccatggaggagaaaataacaatcatctacatgggggatggactgggtgatttt

SEQ ID NO: 58570 - DNA, 572 bp, Gossypium hirsutum
  Clone ID: AI728402.1
tttttttttttttttttttttttttttttgatatacatatatttttatatattcatatatatatatgtatgaatgtatgtatgaggaccatggtgaccaaaaatgaagtgtttttggtaaccaagtatatgtaatcaaaagctatattcttccatttttgatacaaagtaatttagaaactttgacttacaaaggaatttcagaaataaattaggtagcctccattgataaaatctcaagttcagcccaccacaacggggaaagtcttggggtagcttgttccggggcgacttgaatcacttctctcaatttcgtgattatatctttcatcgttggtcttttccttggatccgttgcgatacattctttgataacctcacagattatctcgagctcttcaattttgaacgaatcgagcgtatgatcagtcatcgagccgaagttcgacttatcgctcaagtattggtccgcccatttctcgattggtccttgttcttcagaacaaggaagctttccggaaatgatttcgagtaacaataatccgaagttatagacattcgcttctaaatcat

SEQ ID NO: 58571 - DNA, 612 bp, Gossypium hirsutum
  unsure (1)..(612): unsure at all n locations
  Clone ID: AI728387.1
agataaatacacagacgcagttgaaggtgaaatacctttctttacaaggtggttttgttaaagatcatccacgaatcgtcagtcttacattccgaaacattggcaatcctcaaatggaaagccttccttcacagtcaaaaccactctgtttcgctttcctgcattacttccaacaagcccgataccataacaagtccttgtggttggtctggaatccattgcaaccagactcaccctgttatagagattaacctccctggggtttgtttgtaacgtacactccaattatttccattcttgtctttgcctaatcttgtccatttggaccctaccacccatgaactttatggcataatcccacctacaatcagtcacctctccggggtcacctacctcgatttatcctttatacagttctctgggcagatcccacctgaaataatccggttagtgttcttcttatccgccaccttgctgagaaacagtttaacggctctatacctcgaaatattggtcctctcanatttcacactgatcttgccttgtgtagcaacaagctacatggttggactcctgcttctctcggtgaaggaagtcgactagtttccttga

SEQ ID NO: 58572 - DNA, 609 bp, Gossypium hirsutum
  unsure (1)..(609): unsure at all n locations
  Clone ID: AI728383.1
gacagctgaagccatgggagccgagcgtgatcatttgacctccgtcatcagctccgccgtcaatgtccggtctgctggagatatcatgaccttaactgctggtgcagcaacagcattaagaggggcagccacattgaaggcaagggcattgaaagaggtatggaacatancagctgtaatccctgttgaaaataataaaaatggtggcaatggtagcaatagtagctccaatggcagctttagtggtgagcttcttcctgaagagaatttcttgggaatctgcagcagagaattgcttgccagaggctgtgagcttctcaagcgcacgagaaaaggtgatcttcactggaaagttgtctctgtttatatcaacagaatgaaccangttatgttaaagatgaagaatagacatgttgctgggaccatcacaaaaaagaaaaagaatgttgtcttggaggtgattaaagatatgccagcatggcccggccgccacttgctcgaaggcggggaaaaccggagatacttcgggttaaaaacggttatgcgcggggtcgtaaagttcgagtgcaagaaccaaaaagagtatgatttggactcaaggtgtatctt

SEQ ID NO: 58573 - DNA, 611 bp, Gossypium hirsutum
  Clone ID: AI728376.1
gttggcacagtagatccctgattcccagtgtttccataaaagatatcaggagccacctctccaatcaacccgtgattaccgcttagaatgttgaatctcgaaccttcgatcccgacaacagagttactgttaggttctgttgccgtcgttaatggtttccgccgtggcttgcgttccactaacatccatggcccaaactgatccccttcctcaacatcaggcgctaaactattcttcccagagcaatcaaacgtttcccctccttggttaaatacacccttgtcaagattcccagtcgcagctcctacagatgaaacatctcttacaaaattatgacagaaagaatctctagagtgtctgaatctcccacacttaaaacaaacctaggacatggattcatattccacacgttgtatcctcccatcaatctgtagctttgaaatcaatagtttccctagatcaatgtaaaccgcaatcctcgaaaattgccccctaaatttggaagtcttgttacggtctattttcacaacgggaccaatcgcgcctccaatgaacttgagtagacttctcgtgtacattccttccagcaatgcacgcaatctgatccagac

SEQ ID NO: 58574 - DNA, 443 bp, Gossypium hirsutum
  Clone ID: AI728355.1
caagatggctttgcctccagattctcagcatcgcttgccttattatcacaatagctgctgctgctggttctattgcaggggttattcttgatctcaagtcatatacgcccttctccaccgcctactagttcaagttgaattgagctcatatcagacaactcatgattgaacagtttaaaaagcaagggaaaataatctttataggttaaaaaagttctacttcatgttcatcaagccagatttgttgttgttacttaccactactgctaagcagtttcttctcttcttcttttttttccctgtattgttcaacaaaatggggtcaatgttttacaatttgaacttgtaactttccccatcagtcattgcaaaatgaacaactttgagcatagaatagaatagaatagcatgaacttttatcatacaaaaaaaaaaaaaaaaaa

SEQ ID NO: 58575 - DNA, 563 bp, Gossypium hirsutum
  Clone ID: AI728348.1
caacatgtgaatctctatacatgggagtaccatgcgttaccatggctggttcagtacatgctcacaatgtcggtgtcagtcttctcagcaaagttgggttacaacatctaatagctcgaaatgaagacgaatacgtccagttagcactaaaactagcttcggacatcactgctctccagaacctaagaacgagtcttcgagaccttatgtctaaatcacctgtctgtgacggacaaaactttatcagcggtttagaggcaacatatcggaacatatggcgaaggtactgcaagggtgatgtcccatctttacggtacatggaaacactacaaaaacaagatataccagacgagttaactactaaaacctctgacccggaaaagatcacagtctcaggcgacactttcccgagtacagtcaagtgtaatggatttaatcaagtcccattgccaatttcgaataacactacttcagaagagaacggtgatgaatcaaaccaaactacaaattcaagcaagccgagctgataccaaaatttccggtacttatatagcacttttcga

SEQ ID NO: 58576 - DNA, 563 bp, Gossypium hirsutum
  Clone ID: AI728339.1
gaaaaaaaaaacaggtagacatagagagaaagagaaaaagagagagtggccgtttcaagacagccaccctccagttctcaaaaaaaaaaaaaaaaacaacaacaacagcttcgggttgaccgctagctgattattttctcatttaaaaatctccttctttctttttttttttctctttttaaaaaaaaaaacccagggaaagaaaaaaactttctttgttaatacccaattgagcttgcgtttaccattgtgttgccaggtaaatttgatttcttgttcatatttttttgtacacccatttcgtttgtatttctaaatcttcgatttttgtgtcgttttctgggacctggttgaatttttgttgttgttgttgttgttataccattaaaaaattcttccttttgatcttgaaaaaaatgcagcgtaataaatttaccacaatgcgtagtttaaaggttttagataaatgtaaaggcgcacaattttatgctcttcacaccaccggtggcggtggtggagatgtcggtgataaactttatcatcaacttcaagaccatcttata

SEQ ID NO: 58577 - DNA, 567 bp, Gossypium hirsutum
  unsure (1)..(567): unsure at all n locations
  Clone ID: AI728338.1
gcttgcaaaaaaagactgttccccaacattaatcgatgtggtatttatgtgtgttttaccacaggctgctcgattaccggaaacccgaagtcgagtccctggctgaccttttcggagctttcgaagacaaacggcgccctggtaaccgagttctacaatggcggctacctcaacaccatcaccccgactcccctttctatttcgtcgacttgccttcctccttggcgtcctggattaaaggaggtgtttgatgcaataatttgtgatcctccatatggagttcgagctggtggacggaaatctggaggccggaaattgctgaagggggttattggcccttacactgttccaaatgacaaaagggcagaccatataccttcaactgcgccttacagcttanctgagtgtgtgcatgacttgcttgaccttgctgctaggatgcttgtaattggtggcaggctcgtattcttttatcccgtgtcgagagaagaagactcgtgcgaagatcatttccctgagcatccatgtttcgagttggttgccacttcaaaacagatactcagctct

SEQ ID NO: 58578 - DNA, 643 bp, Gossypium hirsutum
  unsure (1)..(643): unsure at all n locations
  Clone ID: AI728335.1
aacagattcaaagattgcaccaccgccgtcagatcaaattgaacttaaccaaattacaaatcagagtatataatggtaataataaagcgagggcagatgcgatgaaaggaggggangcggcnctccggtttttgcaattgctctctcccgaccaaccctgttgtttggctgtttattttcaataagtaaattaaactaaacacatccactgccccttcttttccactttcaatccctacgttattcactctccacttgatctcctctttgattactatttgctatttttagttattattcgtcgaaacaactagtttccgagatccgtcgagcgtgatggcggcttccttgcgattttctggtctgaaaacgcctccggcttattcatttccaaagcagacgacttctttacaatgccattcagcgtccccaactctgctcaatttttgccgcctttaaggctttcaaattcttctatcttgcgttatatcagcctaagacgctgttgtgaaagtagagtctttagagtctgttgtcaaggagggaatgtggatgtcatccanaggaatgagtctgacgcagccagttccggaggaaccgagaatcaattgacgtgtgtaactgaattcggtggatcctcccc

SEQ ID NO: 58579 - DNA, 649 bp, Gossypium hirsutum
  unsure (1)..(649): unsure at all n locations
  Clone ID: AI728318.1
gaaacctgtccataccatccgaagaaaccggcgatgctaagtggatttttgtcctcagtacatcgaaaatcttgtacgttggtgtgaaaaaaaagggtacatttcaacattcgagtttcttggcaggtggtgccactattgctgccggaagattagttgttggcaatggcatccttaaggcagtttggccacacagtggacattaccgtccattagaagagaactttaacgacttcatttcatttctaagggagaacaacgtaaatcttaacaatgtcaagatgactccggtggatgaggaaggaaacttggctgacaagcaaagaagcaataaccatcttagatgtaactcgtctgaagatgactttaacttcgaggctgatgagatcagtgtcnaagactcgatcgatcaaatacggtagttgattcatggggaatatgaaaccgagtcnaggaggtnccacagccttagctgaaaacaatgtanctattgtgcctagttgtaataatgacaattcgatggattcgtctttggtggatggttatgcgataaaggaagaaaccgttacttcggaactggattcatatganaatcatgcagataataaggtggaagaaccttcctgatgaattgcttcttgaaagggtc

SEQ ID NO: 58580 - DNA, 562 bp, Gossypium hirsutum
  unsure (1)..(562): unsure at all n locations
  Clone ID: AI728310.1
tataactaaagaataaaatttgatttctttccttctttgaatattttgttctcatggtactttagcagtctccgttgctccctatatacactcacactgtaccaacatacgctccaaccgtagccggccatggctctccctcttggaaagctaagtatcctcgtcggtgcaggcattgttggctcaattcttgcaaaagaaggacacatgccaaatctttctgattttgtttctggtgctttcaagtttgcttttcggcaacttaaacatgatgattctactccatcaggaaacaagccacgcaatgactatttgatggctcaggttaatancctaaggcaggaacttcaaatcttancgtcaaacggaccggttactattgtaactggacatggatcaggtagcancaaatacagaataataattgttgttgtagtanttggatatggctatgtttggtggaagggttggaaacttcctgatctgatgtttgcaacaagacgtantttatctgatgcgcgtgatgccatagcaaagcagcttgatagtgtttactcatcat

SEQ ID NO: 58581 - DNA, 565 bp, Gossypium hirsutum
  unsure (1)..(565): unsure at all n locations
  Clone ID: AI728308.1
gattcactctggagattgtgcatagccattactatttcagctttttttgcaacagtgttcttatcgtgtaagcaagaaacaaattccattaacaaacccattatcatcttcaatttcctgtaacacacacaaacacaaaaagaaatacccatcaccttgtttcagcttctctttcattcaatctatcaccgttcttcttcccttcaaggaaatggcgggtaacgattggataaatagttacttggaggcgattttggatgtgggtcctaacttaaacgatgctaaatcgtcgttgttgctccgggaacgaggtaggttcanccccacccgttatttcgtggaggaggtcattactggattcgatgaaactgatctacatcgttcttgggttaaggctcaancaacaaagagtcctcaagagagaaacactaaattggagaatatgtgttggaggatttggaatttggctcggcaaaaaaagcaggttctttggtttatttctttctttttggatggccttttgttcttattcaccatgtttggattgtgatttaagatgttcaat

SEQ ID NO: 58582 - DNA, 566 bp, Gossypium hirsutum
  Clone ID: AI728293.1
tttttttttgagtagaagagagtaggaaattttcaatttcagttaaggcatccaaaatccacagatttaaatcaaagtccaaacattttaaattgaatcataacaatgaatagcaactggaaaacgtatgtgaaagcaaacaaacttatgaacataagccaaaaggatcaacatgtagctacagtagcaatgtagtttcctcaaacaaccgtcttcacttggatggattgaaatgcggtggaatttatatgggttggcgttaaatctgagaccaccataaccacatctccaggtttcaacataccttttcttcttataagctcaatggtcgctgaaatgttcgcttccatgtcgtcatctgacagttcaacaaggaggggaattactccccattgaagattcagagccatacgggtgccgttgtcgcttgtgaatgcaaatatgggaaggtatggacggttacaaaaaaagagtgatgccatttgtccatgcttcgtgtacacaaagatggcatcgactccaagattattagccatttcaacagcacaattgcagatctgctcaga

SEQ ID NO: 58583 - DNA, 567 bp, Gossypium hirsutum
  Clone ID: AI728291.1
gccgcaacctcttggtgacatcctgaggatctcccgaggtcgtcttatagcttccgaggcaaattgcgtcgtcggacgacaatgatgatcccttaaacccccctccagtggtctcacgtcgattactccacctagatggattagctccctgttcccgacagatcttaccccggtgtctctaggcccacacatcctactaacactccaacagccgtcctggttgaaatggatgactcatttggggatttggaaggccaagctgattctggtcctgtaaatatgggttaatctcaaccgcgcaacccttctacctccttaccatgtagggagaaattgcgtaaggatatgctgcatgacccatctatggagatcggtgctactccggaacctgaatcgcctcccacaccctacaagtctgccattttggtggatcctgtccgagaggtgacccaccttccacatcataccccccttatgaaagattccccttccactctccgggataggatcaaagagttccgcgccgataacacttaccttcgttaggacaacctgaagctgaaatcc

SEQ ID NO: 58584 - DNA, 573 bp, Gossypium hirsutum
  Clone ID: AI728281.1
gttattgctcaagtacagccagaatttacaccaattcatccatcaaaagttgctgatccaagacctggtcctgcaaagtcttctcaagatggattgccagactctagttcatttcaacatttacatgttccagtacaaatgatggaggatttcttacgactggctctggccaatacagaaaagaacttggaaacatgtggtgtcttagctggatcattgaaaaaaagggttttccacatcactgcacttataattccaaagcaggagtcaacttcagattcgtgttcaacattaaatgaagaagagatttttgaagttcaagataaattatctctttttcctctgggatggattcatttctttggttttcagacgcacccaactcagacatgtttcatgtcatcagttgatcttcatacacattactcgtaccagattatgctaccggaagcaattgcaattgttatggccccaactgacacgtccagcccacatggtatctttcatctgtctgatcctggtggtgtgtctatcatccgtaactgccagcaacgagggttccatccccatgag

SEQ ID NO: 58585 - DNA, 576 bp, Gossypium hirsutum
  Clone ID: AI728279.1
ctcaatgaaaactcctcctttcccatcgaactctcttaaacatccttacattcgtaactcttacaatcaccttccttctcgaagactcgctctctttcaactcggctctgtttcggcgatccctcagtcggaattctttggttcgatcgtgagtggtaaatctgagaacaccgctactgctattaaggagcaagatgcattaaactgggttaaaaacgacaatagaagaatgcttcatgttgtttaccgtgttggcgatttggagaagacgatcaagttttacaccgaatgcttaggaatgaagctctcaaggaagcgtgacatacccgaggagcaatattcgaatgcttttcttggatatggacctgaagattctcattttgctgttgaacttacttataattatggagttgacaaatatgatattggaaatggatttggtcattttggtgttgcagtaaacgatgtttcgaaaacagtggatctagtaaaggcaaaggtggggaaggttacaagggaccctggacctgttaaaggagggactaaaataattgcttttatcgaagatccggatgg

SEQ ID NO: 58586 - DNA, 576 bp, Gossypium hirsutum
  unsure (1)..(576): unsure at all n locations
  Clone ID: AI728278.1
gattcagccctcagattccacttacacgacggcgatgaaaccgacggctatgaaagatccgacgacgaagaagatagctccgataataaattacagtggggggaatcggcttgttgttcaatgaaaaaggcgttttcatcgacggtatttataatccgtgaactccatagttacactttacaaatgcgtgaatcattgttatgcgaagatttacaaggaattttcattagagttcaaaacgagatccatgcttcgttcctctggttgtttcaacaagtgttttctcacacacccactttaatgatttacgtgatgatattgttagcgaatttctctgttcattctatgggaaacaacgcagctttggcggctgaaacggcggtgaatccgatgatggggtcttattcttatgtttcttccantgaagttcgaggcaaggagcaaacaaagtatgattctttgcagctacagaatgggaaaactggtcgtggtaaaggcggtgggggaaaancgaaaccggttgcttgtggtggtgatgaatggtttgatgaaacagagtgggaaccgagtgaagaa

SEQ ID NO: 58587 - DNA, 575 bp, Gossypium hirsutum
  Clone ID: AI728275.1
agcagggtccttcaaattgacatgtcaccatggactattattgatcagccaagattttcttatcgaggcctcttgattgatacgtctcgtcactatttacctgtgccagttattaagaaggttattgattctatgtcctatgcaaagttgaatgtaatgcattggcacattgttgatacacaatctttccccttggagataccatcatatcctaaactgtgggatggtgcttattcaccctcagagcgatatacagtggctgatgctgctgatattgtgagttatgctcaaaaaagaggaataaatgtattggctgaaattgatgttccaggacatgctctctcatgggggactggttatccttctttatggccctccaaggactgtcaacagccacttgatgtcagcaatgaatttacatttaaagtaatagacggaattctctcagatttcagcaagatctttaattttaaatttgttcacttgggaggtgatgaagttaatacaagttgttggacaacaactcctcgtataagaaattggttaaaaaagcgtggtatgaatgaatctcaagt

SEQ ID NO: 58588 - DNA, 549 bp, Gossypium hirsutum
  unsure (1)..(549): unsure at all n locations
  Clone ID: AI728256.1
caggaatcccaaggccaatagcccaactcacgtttgattgaatgtagacgatgagggttaaggataccatctgcgcaaaagtgaaggtaaagaagtaccaattgaagaagctgtcgattcctctctttccagcttctgtttttggattgaattggtccaccccaaatgccaagttacatggccgaacgcccccagctcccacaatcattaaccccaaacccattagtagaaatgccagttgccctgttgttggcccttcgcattccccactctcttttgctgcacaccggtgaggatgcaactctgggatggctgctgttagttgtattgctagcaatcccttcataaacaaaaaagtagagaaaaaaagccaaaagattatatcaaaatctgtactgtagcgcaaaattggaggtgatctatgttaactgttaattaccaagaaagaggcagctgtagcaaatcccaaggttttgtancggccaaagtaagtatcgcagaggaaagctccgaccagggttccaaaatttgtagtgccattgaagacac

SEQ ID NO: 58589 - DNA, 631 bp, Gossypium hirsutum
  unsure (1)..(631): unsure at all n locations
  Clone ID: AI728232.1
cgttcaggtttttttttcttttccagaactacccttagggtttttttctttgctcgctcttctttaacagcaaaccggaagaaacctccgattccgacgacttcctctcctaataatttctgatcggctcaatatggccggatccggagccggagaaggcccgaccctgataaagcaactcgcggcttgcgacaagtcgagccgtgacagagccgtacggtctctcctcgatgggtggcttccttcacagagtgaattctccgatgaagagatgaaaaggctgtggaaaggtctcttctactgcgtttggcacgccgacaagctgcccgctcagaccgacctcatcaacaagctttcctcggttctgccgaagctcgaacccggtctatctctccaatacttctccgtttttcttctcaccatgcgtcgtgagtggaccgggattgataagttaaggttanataagttttacctcttaattcgtaggtttttgaattgcttctttgttatgttgaaaaaatcgtcgtgggatttggattttatgcgtcgttcgattagggttttagttgatggtacatttatagctgatgataagtttcaaggtaatggcgttaattatcacattgcttct

SEQ ID NO: 58590 - DNA, 642 bp, Gossypium hirsutum
  unsure (1)..(642): unsure at all n locations
  Clone ID: AI728222.1
gtttccttaaagaaaactcgaaagatagatgagttatctgttccccctgccccctctctttatcaaatgaatgctgcaagccgaaactctttgttgatggatgaatactctgatgaggacgaagaacaaatgcttgaggcagaacaagagccatatcctactagaagtgactatcatgtcaaaagaacagccctggaagaagaaccaattgagaaaattgatttgtcatgcttttctggtaatctacgacgtgatgaccgtgataactctcgtgactgttggagaatatcagatggtaacaatttcagagttcgtagcaagcatttttgttacaacaaaacaaagattcctgcaggaaagcatttaatggatcttgttgctgttgattggttcaaagactcaaaaagaatggatcatgttgccaggcgtcaaggttgcttcagaaaaggggtttttctctttgatctttaattttcaagttcctggttcgacacactatagtatggtattctattttgtgacgaaggaattantacctggatctcttttgcancgatttgttgatggtgatgatgaattccgcaatancaggctgaagcttattccatcattgccaaagggatcatggattgtgcggcagat

SEQ ID NO: 58591 - DNA, 543 bp, Gossypium hirsutum
  Clone ID: AI728214.1
gtaaaaagagaggtaataaaaaaaaaaaccaatgggaggccgatttacttgggcacctccgttgtgtaggtccaacacgcccaaacctgactctgctatggcccccccgcagtccggatattcacggatttataaatgctccaacgtttgtgtgacccacggaatgcaccttttcatcctccccccttacccacatttgcttaccaccaatgacgcccgcccctatgcccctgttctcgataggacaatcctgactggcaatagccaccctctcttcctcaggactttaacccttggtggtctagagccaatgctcgacctaaactcttactatctggggatcaatccacacccttctattctcccctcttgtctccctgcttcctgctgtttcctccatctagcccatgatctgcgggtcccataaggtctccgttaaaatgcttaaaagtccctcaaccatcattggatcaactatggtgatcgttcgagtaatgggcattaccccatacaaaagtcccattcacccatttcatctggtca

SEQ ID NO: 58592 - DNA, 501 bp, Gossypium hirsutum
  unsure (1)..(501): unsure at all n locations
  Clone ID: AI728176.1
gtgggtaataaggctgatatggacgaaagcaaaagggccgtccctacctcaaagggccaagctcttgccgatgaatacggcatcaagttcttcgaaactagtgcaaaaacaaacttaaacgttgaggaggttttcttttcaatagccagggacattaaacaaagacttgccgatactgactcaaagtctgagccacagacgatcaaaattaaccaaggcgaccaagcagcaggaggtgcagcgcccgctcaaaaatcagcttgctgcggttgaacgaactatttcgaggatgagatgagatttgaagggtacattctctattactgtagtanctgttttggtcttaaaaaagaaaaactaatttcgttacaacttatatatattgtttgtgtttgtattcacttctttgcttatcattatttttacaatctgctaactcctttgtgtgaaatgtttgattatattagattatttttatcacctaaaaaaaaaaaaaaaaaa

SEQ ID NO: 58593 - DNA, 581 bp, Gossypium hirsutum
  Clone ID: AI728157.1
ctgcaattctgcaacgtcactcacctcatccaaatccttgaaaaccccaattcctttcatttgatcgtcgatcaacgatgcccgttttcaaaactccgttcaacggctactccgttaggttctcacccttttacgaatcccgtttagccgtagccaccgcccagaatttcggcatattagggaacggccgtgtccacgtcatcgacctctctccgaacgcccctgtcatcaacgaactcatcgcctacgacaccgccgatggtgtctacgatgtagcctggtccgaatcgcatgattccgtcctcgtcgctgccgtcgccgacggatctatcaaagtctacgacactgccctccctcctcactccaaccctctccgctccctcaaagaacacgcccgtgaagtccacggtctcgattacaacccaacgcggcgcgactcgttcctctccgcttcctgggacgattccgtcaagctctggacccttgaccgccctgcttcccttcgcactttccgtgaacacgcgtattgcgtgtattccgtcgcgtggaaccctaaacatgccgacgttttcgcctcggcc

SEQ ID NO: 58594 - DNA, 576 bp, Gossypium hirsutum
  Clone ID: AI728156.1
aggaagttatatatatatatttatatatgatgtttctaatgaagagaaaagccatgtgagagttcatttctctttgatactgtttttttttttgtgtgtaaatcacataagaaaacaacacatcaaaacttcaaaatatagggatgtatctaaattccagaattgactaaaaaatttggaaaatgtaaaagcagttcaaaaatgaggaaattaaattaaattttcagctactcaaattctgaataatcttggtgagtgctgagtatgttccaaaggctgatgaaactgctcccactgcaataattataatacagattgtagcctggatacagcctactttacccctcaatatgcttaaataacaagcaggaggaagtatcaaggtaacaagcattgtgagtaaagatcctatcaatgacaacaccaagccgaagaagggaacgctgagacctacaagcaaggttgagaccaccagtgctgttctaattaacatagggtacacgtgagacttgagatggcgtggtggtaataattcctcaagactcattgccactggagacaaagttaatgcatatc

SEQ ID NO: 58595 - DNA, 579 bp, Gossypium hirsutum
  unsure (1)..(579): unsure at all n locations
  Clone ID: AI728154.1
gtttcaacatataacagcttgagatgggggagaaggtgacgatggtgctgaaggtcgaccttcagtgtaaacgctgctacaagaaggtgaagcaagtactttgcaaattccctcaaatacaagaccagatatacgacgagaaggccaacacggtgacaatcaaggtagtttgctgcgatccaaagaagctgaggggaaagatacgttgcaagggtgggtattccatcaagtgcattgagatcaaaccgcctccaaagtctgacaaggataaccctgggaaaaccgagccgaagcctacagataccccagaaccagcaaagccaccggagaaacaggcttctcctacggttttggccttattcccgggtggattttgttgcaaggattgttatcatggtcatcatgggggcccttgctactttggcggaccacctccgcccccatactattggccttatggtaggcctgtttatgttaactggggcggcggcggcggcggaagcacctactgttattgttttgaagaaaacccacaatgctcagtcatgtaagttgtancatggcacatgtgggacgctc

SEQ ID NO: 58596 - DNA, 578 bp, Gossypium hirsutum
  Clone ID: AI728152.1
atgaaatcgtactgcaggaattcccgagaaaccaaatccctctttgacccattgctggggcagccgattcctcgactctccggtgtatctgcgtttctctctgccgactaagactgcagttaggaaaatttggcaatggaagaacaagtagattatgatcaccggtcgattatggtggaaggtggtatgcaaattgatccaagaagggagcgtttcccatactgcattgtttggacgcctcttcctattacttcatggctgattcctttcattggccacattggcatttgcagagaagatggagttattctaaactttgcaggtccgagttgtgtctctattgacgatttcgctttcggggcagtagctcgctatatccaaattaacaaagataaggaatgcagcatttcatatcattcatcagcactgaaaggagatcaagaataccaacatgacgatctgagagaggcattaacatgggatgatgcactaaaaaagggcattcaagagttccaacatcggccatacaaccttttcacttgcaactgccattcatttgtagtaaacaacctgaacac

SEQ ID NO: 58597 - DNA, 585 bp, Gossypium hirsutum
  Clone ID: AI728148.1
gaaatgttgagtgatgctgaaagtgttacagaagagcaagtggatgaagtcctaaaacagtttcttaaagttttaaagaggggtcactaaaagatcaaggttggcctatttatttctcagcatatacactctccaaagcagcaatgaatgcctacacaaggattgtagctaacaagtacccaagtttccttgtcaattccattggtccaggctttgtgaaaactgatataacttgcaacactggggtgttaactgccgctgaaggtgctgaaaatgttgcaaggctagcactgctgtcaaatgatggcccttcaggtcattttttccttaggaaggaagtctcatctttttgatcgaagattttatcaacgagtgtgtcataagattaattctcaatgttgagtgatcttagaatcaatgatttaaattccactggcaatgcaaatttcccacgatactattttcttcttgcggtgcaaagcaaggttgcacttgatatattcagtaagaagaatttccaagccgatgctggctcatatatttgttttatatgaatgattgtgaaagaaactaataatggttaga

SEQ ID NO: 58598 - DNA, 582 bp, Gossypium hirsutum
  unsure (1)..(582): unsure at all n locations
  Clone ID: AI728137.1
ccctaatattctttatcatctgagcctggaaaatgttgagcagagaaaattggaaggtgcactttattatgcaaagtcattgctaaaactagaaggcggttttaacattcaggggtggttgttattgggccgcgtattgtcagctcaaaaacgttttgtggatagtgaaaccattctcaatgcctccttggatcaaaccggaaaatgggaccaaagagaattgttgcacaccaaagttaagattcaacttgcacagggacagctcagaaacgcttttgacacgtatactgaacttcttggcattcttcacgtacagaataaaagctttggttccgggaagaaacttcataaggattgcggatgctattctaaaagttttgaacaggaaatatggcatgatctancttatctctacataagcttgtcaagatggaaagatgctgagatttgtctttcaaaatcgaatgccattagttctttctctgctgttagaaatcatgccactggtctactttatgaaagaaaangactgctgaaagaagctctcaaggcttttcaaaacgctttgggtatcgatctcgc

SEQ ID NO: 58599 - DNA, 541 bp, Gossypium hirsutum
  Clone ID: AI728115.1
tgcagtttcaagttcaaagctttctcacaagtaataatctttaaaacccatttttttttaaattattttttagctaatatatttgtattatttgtagcaggaaattgctgaatctgtcttgtgtgctgtttagtactgtttttgattattaagatgcagaagccaccacagtctatagatttcgctttgaaggagacttcaccgaaaatcggtgccggagctgtgacgggcgataagctatcgagcacgtatgatctggtggagcaaatgcaatacctttacgttcgtgtggtaaaggcgaaagatttaccggggaaagatgtaactggtggctgtgatccttatgttgaagttaagctagggaactataaaggagttactaagcatttcgagaagaagaacaatcccgaatggaatcaagtgtttgcgttctcgaaagaacggattcaagcttcggttttagaagtatatgtgaaagataaagatgtggtggccgatgatttaatcgggagggcattgttcgatcttaatgagattccga

SEQ ID NO: 58600 - DNA, 545 bp, Gossypium hirsutum
  unsure (1)..(545): unsure at all n locations
  Clone ID: AI728111.1
catgcaaccaaagaggaaattattggtaattatcgagagcgaccaaggatcatatactgcagaagagcgtgaagctgcgagaaaggagtgctttgaggctgctggaatgggtgaaaatggtaatggtaatgtgaatgaaatggaaaatggtggtgatgacgaggacaaagaggatcccctctctgatgagcagtatggttatccaaaggcagagtcgaacaagtgggtttcttgcattanaattcttgatccgaggactgctaccacaacttgccttctggagcttcaggatagtgaagctgctttcagtgtatgcaccgtgaatttccatgataaagagtatggagctctcttggctgttggaactgccaagggcctacagttttggcccaaaaacagcttatttgcgggatttattcatatttataggtttcttgaagatggcaggtcacttcaacttttgcacaagacacaagtggaaggtgttcctcttgctttatgccattttcagggaaggttacttgctggaataggatctgtgctct

SEQ ID NO: 58601 - DNA, 554 bp, Gossypium hirsutum
  Clone ID: AI728103.1
gttacttctgcatcaaggaattcaatggaggtagatgaagtaagtacttcatttccccaaactttgaagatggaaaatgcagaggcaaacccggtgaaaagccatggggatttccaggtctcaagtagggatcatagagtgagtagccattcagcccccatatttccagaaaggaagcttgatcctgctgaaagagtaaaacagatgcgtcagtcatctacaagaacgtccaacacatatgttcttccaacaccaaatgattcaacatgtgcagtttcttcaagaacaaacagctccatttcgcacacaaaacctacaaatgtggctgggcatccacacaatacatggcattcttccccgctagagcaaaagaatcgtgagaaagattctggcgatggtcaaccatcagagtttaccatcttgaattctgagtcaggtctcaaggagaacagcagtagtaatagtacctctacacaactaccccctcctttgtctgaaggacgagaatctacccagttggattccactgaagccaaaaaaataaaaagaaaacc

SEQ ID NO: 58602 - DNA, 634 bp, Gossypium hirsutum
  Clone ID: AI728092.1
gttgtctgtcctttgtgcaaagtagatccggaggattctagtcatttgatgtggtcttgtggcactcttcagtctgtgtgggcttcgcttcagatcaagattccgtcatttgatgaactgtcgtgttgtaagcatcgttttcttcatactttttccactgcagatgatcaacaaagacaagttatggcaatctctttatggagcctatggtttagaagaaataaacttattcatgaaggggtcaaactttcttttcaggaactgttgcgatttattcgtggttatgttcaagatcttaacctaaatcaagagagtcttcgcccttctcttagatctatggtaaaagagttttggcaaccccctgactgtggagtcatcaaactaaattttgatgcatcttttcaaaatgaatttcgaatcgctacaatagcagttttagcaagagactgggcaggagaattaataggaacgttccgcgctggaaggccggaggcaacaaacttgtggtgtctggtcagatggagttcctgattccgtgaaaacgatggcgatgatggattgattggcttggaatcataaataccaaggtttttcttgactcagctttgaaaatggtgaagactcaccgctcctc

SEQ ID NO: 58603 - DNA, 615 bp, Gossypium hirsutum
  unsure (1)..(615): unsure at all n locations
  Clone ID: AI728072.1
ggagaaagccagtttgcgtttacatctatatgtgattttattcacaacttctttatctgtgaggagtgccgtcaacatttttatgaaatgtgttcaagagttactagtcctttcaagaaatcacgtgattttgccctttggttgtggagtgctcataatgaaattaatgatagattaatgaaggaagaagcatctctaaaaaccggagatccaaagttccctaagataatttggcctccaaagcaactttgtccttcatgttatcacttgcaaggtcccaaagataaaggaaccaatcagattgattgggaccagaatgaagtgttcaagttcttaatgagttattatggaaatacacttatatctttgtacaaaggaaagggcgttcttgctgatgatagggcaaatgctaccctggatgatttggtgacctcaacgaacgcantcgtggtgcctattggggctgcattcgctattgccattgctanctgtatgttcggagcactcgcttgctactggcggtcacggcagaagagtataaaagccaggaggagctggaactaaaatttacttanaacacagaaaatatacaacctttaagatgcctggtctgat

SEQ ID NO: 58604 - DNA, 615 bp, Gossypium hirsutum
  Clone ID: AI727991.1
cttaagaaagcagatattggagttgccatgggatctggaacagctgttgcaaagagcgcttcagatatggttttagctgatgacaattttgctaccattgtggcggctgttgctgaaggaagggctatatacaacaacacaaagcagttcatcagatacatgatctcttcaaatattggagaagtagtttgtattttcgtggcagctgtgctaggaatacctgatacccttgctcctgtccagctgctatgggtcaacttggttactgatggattgcctgccactgccatcggattcaataagccggactctgatgtgatgaaggccaaacctcgcaaagtaagtgaagcagtggtctctggctggctgttctttcgatatttggtgattggagcttatgttggccttgcaactgttgcggggttcatatggtggttcatttattcagaaactggtcctaaactaccatatactgaattgatgaattttgatacatgcccgacaagggagacaacttatccatgcagtatctttgaggatcggcatccatcgactgtggccatgactgtgcttgttgttgttgagatgtttaatgcgttgaataacctcagtgat

SEQ ID NO: 58605 - DNA, 617 bp, Gossypium hirsutum
  Clone ID: AI727984.1
gcaaaaaattgaagtttatttttaccaagttgagaaacgcggtgatctttcatggcatcttcaagcaaagccaatctagctgagcaagatgaaggagaggaagcagaggaaattgaacacttcaatgatttcactctggcttcttcatgggaaaggttcatatctgaaatagaggctacctgtcggcagtggttagctgatggtccaaagcgtttgctggaaaagggagcagttcatctggactcatctgataacatatataaggtcaaatctgagttaaaaaatgctgcaaaaatctattccatggagtactactttgaaatcagcggcaaaattgctcactggaattgcactttgcatgatttgcagctttgctttggagtaaaagaattcttggtgatttcacctcaaagtgccagcggtgtggtacttgatgcgccagaggcaaccaagcttctaagtgcagtttcaattgctttagcaaattgttcaagtctgtggccagcttttgtccctgtccatgacccttcaagaaaagcctttattggaatacaaaacatgggaacaatttttatgagacggtttgaggcagatcgtattggtagccaggttcctat

SEQ ID NO: 58606 - DNA, 620 bp, Gossypium hirsutum
  Clone ID: AI727982.1
ggaaacaaaggaaaacagctttttagcgaatgatcgacatttttcattatattagaagcctctgaacttaactgctgaataaataatctataagatctgcgtcatcctactgatttgatcttacattttcttccacaattgttgttttttttttttttaaagttagacccgatatgaatttcatgaaggcattcgatcaaactgttcgcgaaataaagagagaggtgaatctgaaagtattaaaggttccagagatcgaacagaaggtactggatgcaacagacaatgaaccgtggggtcctcatggcgctgcattggcggaaatagcgcaggccacaaagaaattctctgattgtcaaatggttatgaatgttctttggtcaagacttggtgagactggaaaagattggcgttacgtttacaaggcattgtctgttattgagtatttgatttctaatggatctgagcgtgcagtcgatgacataataggacgtactttcagaatcgcttccctcatgagttttgagtatgttgagccaagtgggaaagatatgggaatcaatgtccggaagaaagcagaaactatagtgggtctcttgcataataaagaaagaatacaa

SEQ ID NO: 58607 - DNA, 622 bp, Gossypium hirsutum
  unsure (1)..(622): unsure at all n locations
  Clone ID: AI727961.1
gtttcatgctcacaagctggtattagctgctaggtctcctgtatttgaagctgaattttctgatcggatggaagatgataatgaaatagttgttacagatatggagcctaaggtttttaaggctttgctgcacttcatatacaaagacagtcttattgatgatgaggagttcgttgggactagttcatcttctatgccatctgtatcggatgcattggctgcaaagttgttggcagcagccgacaaatatgacttgcctagacttagactgatgtgcgaatctgtactctgcaaggatatatctgtgaactcagtcgcaaatattttagcgctggctgatcgtcatcatgccatggatctaaaaactgtttgcttaaaatttgctgctgaaaatcttgttgctgttatgcgttcggacggttttgagtatctcaaanaaaactgcccatcactgcagtcagagctactcaagaccgttgcgggatgtgatgaagaattcantggtggcggaaagaaccggagcgtgtgggcacatctttctgatggtggtgatacaattaaccggagtgtattgcaacaaacctgggaaaacggaagggaacaaaatcaaggcatgtgggtt

SEQ ID NO: 58608 - DNA, 538 bp, Gossypium hirsutum
  Clone ID: AI727940.1
gttgttactttcggtccttcgggattaaccactgaagttaaatccgttgaaatgcaccatgaggctctttccgaggctcttcctggtgacaatgtcggtttcaatgttaagaatgttgctgtcaaggatctcaagcgaggattcgttgcttctaactcaaaggatgatccagcgaaggaggcagccaacttcacctcccaagtcatcatcatgaaccatcctggccagattggaaacggatatgctcctgtccttgattgccacacctcccacattgctgtcaagttttcagaaatcttgaccaaaatcgatagacgatccggtaaggagcttgaaaaggagcccaagttcttgaagaacggcgatgctggattgattaagatggttcccaccaagcccatggttgtggaaaccttttccgagtatcccccactcggtcgtttcgctgtgagagacatgaggcagacagttgctgtcggtgtcatcaagaatgtggagaagaaggatccaactggagccaaggtaaccaattccgctg

SEQ ID NO: 58609 - DNA, 618 bp, Gossypium hirsutum
  Clone ID: AI728051.1
ccatattccaaacaagggcaacttaacatgtcctgcccaactgttggcgccaccacccacataacaaatggggttacctctgttgactgccaaaaacaagttaggtcatggcggcttcttcgttcccttatggaactcctcatcccaagttgctactgcgccttcatcgacaaacaccatgaaatcaaacaccaaaattaccttcacagatattatcaaccacctgtctctacctcttctggtgttattacaggtaccatctttggttaccgcaggggaaaagccagcttttgtatccagccaaacatcaagtccaacaatccaattctcctcttagaatttgcggtacctacagcagttttggcaagggaaatgcaaggtggtatcctccgaattgctctggactgcaccagcaaagggaatagtagtggaaatccagactcggttctgtcgatgccattgtggactatgtactgtaatggaaagaaagttgggtatgcagttaagcggaagccatcgaaagctgatatggatgctttaaggctaatgaattcagttgttgttggcactggattgatcagtggaaaggagcttgatcatcatgacgatgaactaatc

SEQ ID NO: 58610 - DNA, 612 bp, Gossypium hirsutum
  unsure (1)..(612): unsure at all n locations
  Clone ID: AI728050.1
cggcacgagggggaatcaagttccatatgagaaaagcttttggggagctctaaaaaacccaatgagatatctgattaccttcatggcattctctcaaattggcatgatggtggctccaagtactatcgcatcacaatatgttacacaggcatggaggggtgcagctatcctttcatgtgtctggtttttctatcgttggaaaacaaatctacttgctagggcacttgctactcataatttancagggactgatcgggaaaagttgttaactctggacagagtttcatccattggcctatttgttgttgggttaatggctttagcagaggcatgtggagtagccgttcaatctattcttacagtcggtggcataggaggggtggctactgcttttgctgccaaggacatccttggaaatgtgctcagtggattgtctatgcagttctcaaaacctttttcattgggtgatacaataaaggcaggatctataaaaggtcaggtantggaaatgggacttacaaacacgacattactaaactctgagaaatttccagttctggttcctaactcactcttttccagtcaggttattgtgaacaaatcacgtgccct

SEQ ID NO: 58611 - DNA, 622 bp, Gossypium hirsutum
  unsure (1)..(622): unsure at all n locations
  Clone ID: AI728046.1
atttccaataacaaggcaaataaagctaaagaaaacgatgtgaattttgtgaagctacgtcgtcactctgttttcctcacttcgaatcaatggatcaactcagaaaagacgctgcctttcttccatcaattccatcttcaaatccttctataatcgagtttcgtcaacccccagtcgacccgcttgttccctccacgacccgtacccaatccaaatctggccaaagggatggagaggaacctaaggattgcgttgcggcgaggaaacttcaaaaggctgaccgtgagaaatcgagaagagatcgacttaatgaacattttcttgaattaggaaatgcactcgatcctgataggcccaaaaatgacaaagcaaccatccttaccgataccattcaattgttgaaggatcttacatctcaggtcaccaagctgaaaggagagcatgccatgctcactgaagaatctcgtgagcagttgaccgtggagaagaatgatctanaagacgagaaagcatctctcaaatccgaaattgatgatcttaatattcagtatcagcagagagtcaggactatgttcccgtgggcgtctgtaaattacccggttgtcatggctcctccttctta

SEQ ID NO: 58612 - DNA, 560 bp, Gossypium hirsutum
  unsure (1)..(560): unsure at all n locations
  Clone ID: AI728031.1
atgttggcaaagtccagtccttttctttttcacgatttcagaattaatttgtacaacgtggtgaagaaaaagaaaaaatgattctttgaagaaagcctcggtaaatagtaaaacagggccgctggggtatacgatttgttgtgtttggagcggacacatatcataacctgcgaacattcatttaaaaatggctacaggtgcatcctcttcatcctccatggtgggtatcgccgttttgattcctcgtataccgtgcagcctccattggatctacccgctgcagtgccttgccgcctctccctcatctcgtttcgaccgctgctttgtctttttcctcttccgttaagctagtcccagaatccgtgaggtgttctctactgtcatacgtcagcctcaaaagagaccgctgttgatgcaggtataccttttcgctgagttgaaggactagtgggataaagttgaggatcataccaccgttgttctctacagtggtggggcattanttgctgtatggctgacatccattcttattggtgccattaactcggtccctttactta

SEQ ID NO: 58613 - DNA, 505 bp, Gossypium hirsutum
  Clone ID: AI728005.1
gatgaaagctggtccacttttgcaaacccttcttttagctggaccgttgcctcaatggagacacccaccaccaccacttgattcctttgacatcccacctgtgaccatcccttcaccaccaccaccaccaccacatcggctccaccaagactccttcaccaccctaaacgcctgtggtaaagttaacagaaaaaggattctattggaaggctctgattctcctacagagaccaagtaccaaagaatagttctccattgactgcaaacaaaagaatagtctacataatactagtttatggtgactgatgaagcatttttgtacaaaggattgctttggagaaacaactatccattttcctaattaccctttggagagctttcatttccttggctttttgccaatgtttcccggtaaagatatttgtccttatcttacccccccccccccaaaaaaaaccattttttcttcacattttcttcttcttcttttttgctccattgatgt

SEQ ID NO: 58614 - DNA, 502 bp, Gossypium hirsutum
  unsure (1)..(502): unsure at all n locations
  Clone ID: AI727994.1
aatcatctttgtcattggcagaaaaagttccttgtgaagtacctggttgtaatattgaggtaaaaaatttacatcccttggtgcaacgtgctattgcagctgcctctgcactgccagatcttcaagagttgtatcacaggattcctaagtctattgagtcaaagcttctaccgtttcagcgggagggtgttaggtttgtgttgcaacatggaggacgggcacttctanctgatgaaatgggactaggaaagactttacaggctattgctgttgctgcatgcattcgtgactcttggcctgttcttatacttgcgccatcttctttgcgtttgcattgggcttcaatgattgaacaatggctaaatattcctccatcagatattgttgttgttttctcccaaatgggtgggtcaaacagaagtggattcacaatattatcctcaaatagcaagggtgatattcatcttgatggccttttcaacatcatctcctatgatttacc

SEQ ID NO: 58615 - DNA, 502 bp, Gossypium hirsutum
  Clone ID: AI727925.1
tttaatcaaattctcccaactataagtaaacccaaaagatttgatgggcaaaagaataagtaattatacaaacaattcatcagattgatgaacaattttatgaatgataaagttctagccaatttccaagtgtggctaaacctaaaaaattggtttcccatgcttattgaatactgataaaattgaattcttaccaaaagaatgaacacaaatttagattaaaatcataccttccttcaaaatgggctttgttggcaatgaaggacagctttgtagcatttcccatatcatcaaagacagctaatattgtagttaaatatgaactatccgaaccactagattgcattcaatcctgcaagcttgcgcagtttctcacacagtataaaggtaatcgtagtttgtggacccaatctcgcaaaaatggcaaagccccctttatatagtcctctggggccttctgtacgaagaacctgatatgcacagtgaaatccatttttatagc

SEQ ID NO: 58616 - DNA, 497 bp, Gossypium hirsutum
  unsure (1)..(497): unsure at all n locations
  Clone ID: AI727922.1
cggttaataagggattttaaggatgatgttgatgctaaaatcattctggctggtttgtcaacaacctgtagtcagaaaatacataaccagctggttggggtggaaagaatgcataaagataccaagtatgtattatttttggatgatgatgttatgcttcaccctggatcaattggagccctcactgctgagatggaaaagaatcctgagatatttattcaaactggataccctcttgatttaccgtctggaagtttagggagttactgcatctatgaataccatatgccttgctctatgggatttgccaccggtgggaaaacattttttctttggggagggtgtatgatgatgcacgctgacgattttagacgtgacaattatggtgtggtctcaggacttcaaaatggtggatactctgatgatatgacactanctgctatatcgggaacccacaagatgcttattacgtcccccccctgtactgtttttcctct

SEQ ID NO: 58617 - DNA, 505 bp, Gossypium hirsutum
  Clone ID: AI727919.1
aaaactccaacttcctcaaagaagaggaagaaggcgaaagatgaatctgaaacagaggaagagaatagtgatgtcgagagtgacagcagtggaggacacatcaacggtgaggtttctggcaaaggccgaggtaagggtgccaaaaaaactgcttcagtgggaaaaggtaaagggcgtggacaaggtaatgttcgtgcaaacaaaagttcgcagtcctcccaaggaaaaacaagcaagagaggacggctgcggaaagtgtaagtgtttgtatattctcagtcccattgggaacttttgttctctccatgtagagaagtgtactatttttttaaaaatacattggtcactatatttgcattttcaactaaagttattttcattaagttagctcttcggcccccaaaactttgtgatcacctggtgaaatgaatgcgcctgaagtacaactttgtattgttttgtttgagatgattagtcattaagcagtgagaatttccttttaaac

SEQ ID NO: 58618 - DNA, 500 bp, Gossypium hirsutum
  Clone ID: AI727911.1
tttttttttttttttttttttttttttttttttttttttttttttttttttttttttttttttttgcttggtttttgttccatttttggcaaataaatcctctattttcctcttcttttttacctcattttccttgggtgctccaccctttttcccaacattcttcttcctgaactcagcaagcaaacccctcaaaggtttaacaaattccaaaaattcaatttcttcaatttctttaaacacatcctccccattcattgtttgcctcttcaattccttgcatatttcatttgccgtaccggaaaggttatggataaaaatccaaaccctttcggtgaaaccaaggtgggcttcttttttaactttaaattcctaatccggtgaacactcaaaaaacttctccttcaccacccttcgcaaaattgccttcgggagctcttccgcctccaaaaacactttctccatttcccattttaaaaaaaaaaaaactttactattat

SEQ ID NO: 58619 - DNA, 567 bp, Gossypium hirsutum
  Clone ID: AI727892.1
ctgagcagcttgattcatcggcttctcttactacagatgtggacaatcaaaataacttaactcctgaagctcctaatgctaatgcactgcaaaaacttgttaaatcatgggagaattgcttaactggtctggagcaacggttcaataatgctcacgattttcgagttgctctgaataagttctccatagctcatggattcgaatatacctttaaaactaataggtctaggtatataatcgcaaattgcaaagctgaaggttgtccttggacaattcaagctgcaaggttgtctactacaaagttgtttctgattaaaaggatgagtgaaactcatacatgtggagcaggaaatagttcatctcggcatcctaaggtctctagtaaattggtcaagtttcttgtaaaggaaaaattacgagattccccaaatgctaaaccgagagaaattattaatgaaatccttcacgattatggattcaaagcaagatacgcacatgtgtggcgtggagttgagtctgccaaagagaaacctcaagtttcttacgacgaaggttacaatcaaatac

SEQ ID NO: 58620 - DNA, 565 bp, Gossypium hirsutum
  unsure (1)..(565): unsure at all n locations
  Clone ID: AI727891.1
ctcaaattctttaatctttttcctctcacagaatttgagttttgttccgatccggaacaaaaaagaaaagagaaaatggtcgcaatgagacggttaagcgtcctccaatcacagccaggtaacaaaacgtgcgtcgattgtagccaaagaaatcccacatgggcttcggtttcctacggtgttttcatgtgcttggaatgctccggtaagcaccgtggcttaggtgtccacatctccttcgttcgatctgttaccatggattcatggtccgagatccagatcaagaaaatggagtcgggcggtaatgaaagactcaattcttttttagctcaatatgggattcctaaagaaaccgatattgttaccaaatacaattccaatgccgctggtgtgtatcgcgatcggatccaagcactanccgagggccgcccctggcaagatccagcccttgtgagagagactctcaatggggatggcagtcacaagaagtcgtcattgagcgatagcgatgactgtggcaaaggtantanttacgggaatgataatggagggtgggctanttggg

SEQ ID NO: 58621 - DNA, 725 bp, Gossypium hirsutum
  unsure (1)..(725): unsure at all n locations
  Clone ID: AI727872.1
cactgactcagttcactcgttatggcttcatttctcaagccatcaccgtccaactttcaccttacctttatccctatctctttttcttcctcctctgttatcttatcttctccgttgtaccaaacaacgtcgctccgcgttcgtttttgcgcgctgacgaccgaccccgacggcgggagaaccgcgagccaggaatcttccggcgctgatttgttaaggaagccgagtatagttccagatgaggaaagtggcggaatttcggaggaagaggatggtantaaggaaaaaggaaataaaggtgaatggattgattgggaagacaggattttacgggacactgttcctctcgttggtttcgttagaatgattcttcattctggaaagtatggaagtggagatagattgagtccagagcacgaaaagagtattctggagaggttgcttccttaccatccagagtctgagaagaaaatcggatgtggaattgattacattacttcatgcagtaaaactgaaggagtgaagggacaggcttttaaaaatgcgggtgagaattccctacctattaaaaaaagttgctgccttgtaggatttcaatttaggctggaaatatttggcaggtttggagtctgtactgatggcaatattcccattccacccccatcgccgtcctgttttcccttttgtcttgtttaactcatgctatagtggaagcaaaataagct

SEQ ID NO: 58622 - DNA, 536 bp, Gossypium hirsutum
  Clone ID: AI727860.1
aaggattcttccttctgggttcctctatccacgcttccttcatcaaaaaccctgaaaatatttacccaattgaagattttaaggattccaataatgctcttgttgtttggaattctctcctcggaatgtactcaagatgtggcactttaactgatttgaccaagctgtttgatgaaatgccaatgagagataccatttagtggaacacgatggtgtctgggtttttaaggaatgggaagtttgatgagggcttcgcatacttcaaacagatgagaaaatctggtatttgttggtttgatcaagcgactttgactactattttatcagcttgcgacagagtaaagttttatcatgtcgttaagatgatgcatggattagtattttcgaacggatatgaaaaagaaattagtgtagggaattctttgattacttcatattttaaatgtggatgtttgagttcggggaggcaggtttttgatgaaatgtttgaaaggaatgttattacttggacagctatgatctccagcttggtgcaa

SEQ ID NO: 58623 - DNA, 545 bp, Gossypium hirsutum
  unsure (1)..(545): unsure at all n locations
  Clone ID: AI727854.1
aaactctcctctccctccgccgtcaccaccgccgccgctccctctctcacctcctctgcatcttccccgaggatcctcacatctcttcgcctttcctcttcgacccccaacacctggcctggcgcccgctccctcccctgccttgcaatccccacgagtacggcctctgcaatttcacttccgtctctctcggcccccacatctacgtcctcggcggttccctcttcgacacccgctctttccctctagaccgtccttctccttcttcatccgcttttcgttataacttccttacttcctcttgggatcgcctcgctcccatgctttccccacgcgggagcttcgcctgtgctgcgattcccagcgctgaccaaatcatcgtagccgggggtggctcccgccacaccttgtttagggctgctgggagtangatatgttcggtggagaggtacgacgtggaaagagatgagtgggaagcattaaacggattgcctaggtttcnanctggttgcgtggggtttgcggttananaaagtggggaanac

SEQ ID NO: 58624 - DNA, 543 bp, Gossypium hirsutum
  Clone ID: AI727849.1
cttccttctccacccgtttttctttgaatgctggaagctgaggtagaggatgcagagaatttggcaatggcgcattggcctattcccgtcgatctgttcgtatccgagaagcacccttctctcccgcgtggcctcctagcattcgctgattcttccggcaacatccttttccgcctcaactctctatctcatcaccccaaaaagacgcttcgaatcctcgattccgccggaaaccctctcatctctatctaccgccaccatgatgggtcttggcaaggttttaagggtgatgatgggcagaaggatttgatattccaagtgcagagggtatccaataaattcgctagaactgagttggaggtatttcttgttgctgaaaaccaccggggagagttaacttgtgatttcaaggtcaaaggctgtcatttccaaagatcttgtaccatctacaacggcgattctattgtggctcagaccagtctcatgcacaagcttcggcagatttatgttagtagaaggaaaattcaactaaccatgtttcct

SEQ ID NO: 58625 - DNA, 596 bp, Gossypium hirsutum
  unsure (1)..(596): unsure at all n locations
  Clone ID: AI727829.1
gcttccttgctgcacgtttgtgagcaagtaaatttttcttgcttccttgttctgtgtcctgtatttctttctttgctctattttcttttttattgctgtcaaaaatcccaacaaaattcatggattcttattttctccaagcaaagacaatgtgtttcatagtctcattcaagctggctaataggagtaaacttcttttagcaatggtcgtctacaagcttgagggttttttggagtttgtaacttgttcttgtgtatttgatctcattttgctgctcaatggtggaagtgggtattcattgatgcgtgacccacggtataacaaagggcttgccttcactgagaaagagagacatgcacattacctgcgtggccttcttccccctattgttctcagtcaggaactccaggagaagaagatgatgaatctgattcgccaatacgaagttccgttgcatcgatacatggcaatgataggtcttcangagactaatgaacgactcttttacaagcttctcattgataacgtggaagaactggttccagttgtgtacactccaacagtgggtgaggcttgccaaaaatatggcagcatt

SEQ ID NO: 58626 - DNA, 596 bp, Gossypium hirsutum
  Clone ID: AI727827.1
caacgactcccctaaccaaaaagcaaaacatctctggcaaaatagtttgaatttcttctactcatggattactccagctgcagaaaacagcttcatatagcaatgttcccatggctagcttacggtcacatcgccccatatctccaagttgccaagttcttagctcaaaagaatcaccatctctactatgtctccacccctaaaaacattagccgcctccctcagcttcctccaactctctgctccaatattacctttatacctctttctttgcctcatgttgatggcctgccacctggagttgagtccacctccgagttgcccattcacaaagttccttacctcaaaaaatcatttgataaacttgaaacacagttgactgagttccttgaaaggtcgccgcaaattaaattgattattcacgattttgctccgcattggttaccgcctatggcgaatcaactcggcatcaacctagtttacttcagcatattaaatgcttcatcgaacgctttcttaggctctccatcagaaattctcggtggaagtagaaaatcacctgaagatttcacggtggtcccgacgtggatggattt

SEQ ID NO: 58627 - DNA, 598 bp, Gossypium hirsutum
  Clone ID: AI727824.1
ctttgtgtttaaatacatggaatacctttttatcccattaacctggtgttttaccaaactactcctcacatctcttcatatcctacagaaaaaccatatctccattctccaatagttttcatggctatattggcgtagaacagcagctatcaccaataatctccacaaaagcaatttccatcttgaaagtgatgaaacaccttggagtcccctactataatctctcttttagtaatctttgagatcttctttgcaacattgtggcaatcctcgcaaattctaatattttttctaacaagaacaggagatcccaactctgttgagatcaatccgaaagagatggcccatctcacactatgattctctggtaaattaggtcgttttcttgtcaaatctgttcttttcaacctggtactacgatgcgcataagcatcttccttgtctgctgtcattttcgatatgatattcatcacatcattgaccatgttcatctgagcatttgacctgtcttgatcaacaaacctgtgaattttatagtctgtctcaactgtactacatcccattgttttagctaggccttcttgaatcataagagttt

SEQ ID NO: 58628 - DNA, 599 bp, Gossypium hirsutum
  unsure (1)..(599): unsure at all n locations
  Clone ID: AI727822.1
gctgctcagcatgagttaaaacagatgtctcattatgcagattcgttgagggcggagaaggatgttcagatgagagagatgtatgagaagtcggttcggttggaggctgatcttcgtgaactggaggctatgcgagctgagcttgttaaggttaatggtgatattaagcagcttagtgctgtgaagcaggatctaacgggtcaggttcanattatgagtcaagatttgacaagacttactggggaattgcaacaggctcctgttctgaaggctgagattgaaaatttgaaacaggaattgcaacgtgcaagagctgccattgaatatgagaagaaaggatatgcggaaaattatgaacatggtcaggtgatggagaaaaaattgatctcaatggctcgggagttggaaaagcttcgtgcanaagttgctaatgcagaaaagagaactcgcgctggtggtggcactggtgctaatcctgctgtatctggttataatgcaaattatggaaaccctgaagctggatatactggaaatacttatcatgtcaactatggcatgaatcctgttcagggtggggtggatgtttatcgtcagtatgt

SEQ ID NO: 58629 - DNA, 596 bp, Gossypium hirsutum
  Clone ID: AI727816.1
gaaaattcatagtaacggaacatctaaatgtccttggatgactgatggagctggattgccttctaatgcttctgaactgcttccgaaactggtaaccctgactaaaaaggttactgaacaagtgagactacttgccaaggatgaagacgagactcttacagaggcaagcccatacgatgtgattcctccatatgatcaagcaaaagctcttggtaagacaaatattgacatcgatcgtattgctgctggattgccttgtggtagtgagggattcctgttgatgtatgctcggtggagaaaacttgaaagagatttgtataatgaacgtaagggacgctttgatataactcaaattcctgatgtttatgactcttgcaaatatgatcttctgcacaatgctcatcttaatctgaaaggtctggatgagctctttaaagttgcacagcttcttgcagatggtgtcattcctaatgaatatggcattaatccgaagcaaaaactaaaaattggttcaaagattgcacgccgtttgttgggtaaagttttgatcgatctgaggaatactcgtgaagaaacccttaatgttgctgagttat

SEQ ID NO: 58630 - DNA, 600 bp, Gossypium hirsutum
  Clone ID: AI727814.1
atcaagaaagtgtcattttccagagaaaattttgacttttatcgtttctttttcgcggaaaatctcagtttcgatccaaatcattcgacgttttcaatggcagcttcgaggagttgcacattgcgattcatgatattgttctcaatcgcttcattcttgtaccagtcttgctattccttcttgtctcctccaagctccattatcaatccttctaaagtcaaacaagtttcttggaaacctagagcttttgtctatgaaggcttcttgacggacctcgaatgcgatcacttgatatctctcgcgaaatctgagctaaagagatctgcggttgctgataatgttagtggaaaaagcaagcttagcgaagtccgtactagctcagggatgtttatttctaaagcaaaggatcctattgttgctggtattgaggacaagatttcaacatggacatttcttcccaaagaaaacggggaagacatacaagtattgagatatgagcatggacagaaatatgatccgcattatgattactttgttgacaaggtgaacattgccaggggtggacaccgcacggcaactgtactaatgtatcttacaaac

SEQ ID NO: 58631 - DNA, 539 bp, Gossypium hirsutum
  Clone ID: AI727810.1
ggaaagcaaaaggaaggaaaagaacttgtttggcggcaagagaaagtgggaaggaaaagaaagagctgagaaagagtagcggtgtgacacatttttaaccaaaattattatggccactacccctctttcctctcatttctctcctcttccttccttctcttcttcccaatcacgttccgttccaaaacctttactctttccttcctctttcccttcttccaactttaggaaattacgaaaaactcctctccttgttttatcttccaataatttcgatgcctttcctttacgtgatgcctccggttccaatcctatttcttctaagaagtcggtcctcaatgttctgatacaggacatagaaccattggatgttagccttatccataaagatgtcccccctacaactgtggatgccatgaaaaggactatttcagggatgtttggtttacttccatctgacaggtttcaagtctatattgaggcaatgtgggaacctttgtcgaagttgttggtttcttctatgatgactggttatacac

SEQ ID NO: 58632 - DNA, 535 bp, Gossypium hirsutum
  unsure (1)..(535): unsure at all n locations
  Clone ID: AI727805.1
gccatggataaagagttgagatcccatcctaatttggactgcttctgtagtggtagcactgctgtcactatagtgaaacagggcaacaaccttttcatgggatatatcggggattctcgagcggttatgggatcgaaggatancaatggttctatggtagcaatccaattgacagttgatctgaagcctgatttaccaagggaagctgaaaggatcaaaaagtgcaaaggtagggtcttcgcattgcaagatgaacccgaagtaccgagagtatggttgccatttgatgatgcccctgggctcgcaatggctcgagcttttggggatttttgtctgaaggaatatggcgttatctctatacctgaattttcccaccggcttcttacggagagagatcaattcattgttcttgcctcagatggggtttgggatgtattgagcaacgaaaaggtggttgagattgtatccttggctcctacccggtcatccgctgccaggattttggtggactcanctgcgcgcgaatggaaactac

SEQ ID NO: 58633 - DNA, 538 bp, Gossypium hirsutum
  Clone ID: AI727798.1
gaaggaacagaccgagtacaaacaagggtgcaacgatacaatgatttgtgcaaacatgcaattgaattgagtgaggaaggatcattgtctgaagagagttataacattgctttttgtgtattggtagaggctttgaaaaattgtgtcaatgttaacaactcttgtatcagtgcggtagaatctactggccatgctcaaggtcttcgtgaagcagaagaaaaaaatcaagggagtcttgcttcaaaatcaagtaaaaaaaagagcacaaacaggaaacggaaggggcaatcagagccagctctcatgtttgttgatacccaggacagcttgcagccaatggagaacctgagctcagatgggataactcttaatggctactatggtgcacaacagaatgtgcaaggactggtacagttaaacttgatggaaccacctcatgatggttattatgttaatcagcaaagcatgcagggtcttggacagttgaactctatggcacccggccatgacagtttttttggcactcaacaaagcatgc

SEQ ID NO: 58634 - DNA, 542 bp, Gossypium hirsutum
  unsure (1)..(542): unsure at all n locations
  Clone ID: AI727795.1
acgattgcagtgacgaaatcagaatatgctgttccaatgctttgcacttgctttgtgagcattacaagtggaagactgtagaggttactataccagagatagagtcgatgcggctggcccattatctgaccattggctccgaatgcacaacttcactgagttccgctctcgaaaagctggattttgcagaactaggatgggatgcaagagtagcacttagggtatacggtgctttcaacagcaaagagtacataaaagctcagaaaatgaggaaccgccagatgcagattcataagaacatatttgccaaggcagatgtcatagttgctccaacaacaggtgtgactgcatactcaatatttgatgatgctctanaaaccggtgagctcgattacataaatggagctgcccttgttcgatatcagatagcaggaaactttttaggactacctgctgtgaccgttcctgttggctatgataaaaaaggtgtgccaattggtcttcaatttatagggaagccatggtcaaaacccacattaatc

SEQ ID NO: 58635 - DNA, 542 bp, Gossypium hirsutum
  unsure (1)..(542): unsure at all n locations
  Clone ID: AI727790.1
atcctcgaggaaatccggatcattttttcgagaaaatcgaatactatgaaattaccaaaactctcgatcctgtttctgcttcttttgattactatacaaacaaaggcggcgttaggggttaaagctcaatcttcatcgaaagaagcttatgtgacgctgctgtacggagatgagttcctcttaggggttagggttttagggaaatcgataagggacactggatcaactaaagacatggtcgttttggtctctgatggcgtctctgattatgctaaaaagcttctaaaggctgatggatggatagtggagatgataagcttattggcaaatccgaatcaagttcggccgaagagattttggggtgtttacaccaaattgaaaatttttaatatgactaactacaagaaagttgtgtatcttgatgcggatactatagtagtcaagagcattgaagatctctttaaatgtcagaaattctgtgcaaatttgaagcattctgagaagttgaattcangagtcatggtagtggaaccatctgaacc

SEQ ID NO: 58636 - DNA, 617 bp, Gossypium hirsutum
  Clone ID: AI727763.1
ttttttaatttcttgatgacgcagctttcatgtacgtaaaaactaaaaaaaacaaagcagaaccctcatttcttttacgtaaaaatatctctttcagtgcttcgtgtttccacatttctttttgaaaaaaaaaccccatattttaggtaagttattgttttcaacttttcttagaaccattttttttctagagaaaatttgagttaggagcgagttgttttgttgtagttaagaggtatatggatatatcgactgcattgctccttttggcggctatcacagcttacctgctgtggttcacgttcatctcacggtcgttacaaggtccacttgtctggcctctattgggcagccttccgggcttaatcaaaaactgtgaccgcatgcataactggatctccaacaacctccgcgctggcggcggtagttaccaaaccggcatttgtgccatccccttcttgggtccaaaacaagggtcccgtgaagggtcatttgcaatccaagattttggagaccattcctcaatttctcgtcccgataatataccccaaaggtcacatgtggcaagcggtgtcccaaaatctcctcggtcagggcatctccaacctcaagggagt

SEQ ID NO: 58637 - DNA, 618 bp, Gossypium hirsutum
  unsure (1)..(618): unsure at all n locations
  Clone ID: AI727761.1
cattccactcctaccctcatcttcctctaacttttcccttccatcatttactaaccagacaattttgtcaaatatcctaaaatttggatcctagaaaaaaaggtcattgtccgagattggtagatttccatttcccatttttcttttataaacatcacatcttaatcactaacaaaatattcacaattttttctcttatttgaatttttttctatagaggtcgcaactcggaataaaaaaagggattaattccaacgtctaacctactagatgcgacctctttaataaaagctcgtttttaagtgcatgacacattagcttctacatcgatttctctttctttcttttttcctgtttggattgcgagaaaattggtaaaaagttgtaaagatggcgaaggaaatcaataggcttaatgatttaaagaaaccattgattactgaagagcaaaacattgttccccaaagttaataattataatagtaataaaagtattgatgaaaatggatcaattttcatggttttgctttctacattcgttgctgtttgtggtgcatttgaattcggaacatgtgtcngatattcagcacctacacaagctgctatcagggaagattt

SEQ ID NO: 58638 - DNA, 608 bp, Gossypium hirsutum
  unsure (1)..(608): unsure at all n locations
  Clone ID: AI727749.1
agagctcggccatgccatggaagccgtcaagtggggtactgactatcttatcaaagcccacccggaaccttatgtcctttatggagaggtgggagatggaaacactgaccattactgttggcaaagacccgaagacatgacaaccgaccgtcacgcttacaagattgacccgagcaaccccgggtcggatcttgccggtgaaactgcagctgccatggctgccgcttcaatcgtcttccgccgctccaaccctgcatattccagcgagcttcttcaccacgcttatcagctattcgattttgctgataagtacagaggcaaatacgacagcagcatcacagttgcccaaaaatactaccgatccgtcagcggctacaatgacgagttgttgtgggctgctgcatggctgtaccaagctagtaacaatcagtactacttgaactatcttggaaagaatggggactcaatgggcgaaccggctgggcatgactgatttggttgggacgtcagtagctggggttcaaaccttgtcgcaagttctaatgcaagcaaactggtatcatgcccggtattgaaagtacatcaaaagcaaacatntctgtgtcatt

SEQ ID NO: 58639 - DNA, 542 bp, Gossypium hirsutum
  unsure (1)..(542): unsure at all n locations
  Clone ID: AI727737.1
ccctgactcagagtcaaagaatgagacatggtcagattgtacaaagaccagcaatatccaaaaacctgtaaagggaaatgccgttctgttcttcacgactcacctcaatggatctcctgacagtagtagcccgcacgcaagatgccctgttcttgaaggagaaatgtggtttgctacgaaattcttctacctaagggctgtgacgggagaaacgatatcgtttgactccagcagaaatgaatgttcagatgaagatcccagttgtcctgaatgggctgctgttggggaatgccaaaggaaccctgtttttatggttggttctcctgattactatggtacatgtangaagagttgtaatgcttgctgaacaaggaataacactcccatatggtttgtttccattgttctaataatacccagtataaagtagtttcttctttgtaatttcatgtactctgtttccggggcattttcgattgtttcagaacagacagttgatcaattttaaggaaattatttaacaaaaaaaaaaaaaaaaaaaa

SEQ ID NO: 58640 - DNA, 327 bp, Gossypium hirsutum
  unsure (1)..(327): unsure at all n locations
  Clone ID: AI727726.1
gtaaatgcagttcgtgcgactgcagctcttgtaactgcggttcatgttttagctgctgcaaagttccaaaatggcagtgttgctgcagaaagatgtgctgttgcaattttcaaccccattcatgcacaaactggtgttcttgcaagtggaaatgctattgtcctaaatgtccaaagctatgcaattgcttcagttgtacaaaaacctgttgtaacccatgttgctaattgttctaaaatgtcattcaattttctgcaaggaattaattagtttttatcannnaaaaaaaaaaaaaaaaaaaaaaaaaaaaaaaaaaaaaaaaaaaat

SEQ ID NO: 58641 - DNA, 677 bp, Gossypium hirsutum
  unsure (1)..(677): unsure at all n locations
  Clone ID: AI727723.1
ctgcttccattcctctcaaattcgataccaccaccagcccaagccgaccactccgaaatcatatcaaggttccaacaatacctccaaatcaacacttcccaaccatccccagactaccaaaaatctacccacttcattctatcccaagccgattccctctctttgcaatcccaagtcatcgaattcgttcaaggtaagccaattgtgctccttcaatggccaggctcagacccttccttgccttccatcctccttaactctcacactgacgtcgtcccttctgagtattcgaagtgggttcatcctccttttggagctcacatcgacgaacaaggaaatatctttgctagaggctctcangaaatgaattgcgttggcatgcantacctggaagctattcgtaggttgaggtcttctgggttttgcccgaaacgatctctttacctgtcgtttgttcctgatgaagagattgatggccgtgatggtgctgaaatgcttgcttcctctgatgtcttcaagaatgtgaatgtcgatatagtgcttgatgaagggttggcttctcccaatgaaaactatanggtattctatggggaaagggctccatggtggttggttataaagtccaatggaactcctggacatggggccaagccttatgaaaatagtgcctgggagaa

SEQ ID NO: 58642 - DNA, 679 bp, Gossypium hirsutum
  unsure (1)..(679): unsure at all n locations
  Clone ID: AI727721.1
cttggatcagaacacgtagcatttaagcgctgctgagaacaaacagtgcgagactggctatttagattgaagctttttaacaatcaaatgatccttgaaagatgtcttggaagcatgctcctggctctaagcatgctctccaatgtgctaggtgcatttgttggggtaaacataggtactgatgtttccagcatgccgccagcttcagatgtggttgctattgtcaaagcccatcaaattactcatatacgactttatgatgctgaccctcacatgctgaaagcccttgctggaagtgggattgaagtaacagtcggagtgacaaatgaggaagtcctaggaattggagaatccgcctcagcagctgcagcatggatcaacaaaaatgttgccgcttacatgccttccaccaacattacagccattgctgttggcagtgaggttcttacctcantccctcatgctgccccagttttagttacagctatgaataacctgcacaaggctcttgtanctgctgatctcaattttcaggttaaagtttcaaccccgcaatccatggacatcatccccaagccttttcccccatctacttctacctttaattcctcttggaactctacaatataccancttcttcagtttttgaagagcacgagctcctattacatgttaaatt

SEQ ID NO: 58643 - DNA, 669 bp, Gossypium hirsutum
  unsure (1)..(669): unsure at all n locations
  Clone ID: AI727700.1
gtaatcctctctctttaatttttacagcaccgttttctaagtacggactctgtcgatctccacgaagttcacgaaaccgccgcctccaacggcggcgccaaccacaccgaccacggttggcaaaaggtttcgtatcctaaacgccaacgtaagaccaaatccaaggccgatccagaaaagcctaaccttacccgccttaacggaaccctaactaacggcggtcctaacgttttccattccctcgagcaacagtctgaggatcgccgccgccggatccttgaagctcaaagagcttacgctgctgatgtcgttgatgccgatgctaaggttaagaataacagatcggatctcgatgatgatgatgatagtgatctggaaggtgttaaacctaatggaaagccggctgaggtggaaaaaaaagtgaagcaaaagaagccgaaaaaacctaaggttacggttgctgaggcggctgcaaaaatcaatccancttttctctcggttcatctcgctgaattgaatggcgaacaacaggaaatccaaatgcaaaaatttgcgaatttttatggtaaggcatttcaggaagtggtatccgggcagtntccttggatgaagatttcanggagagtaccattaccaagcttgcagatatacctctttcacatatgtctt

SEQ ID NO: 58644 - DNA, 552 bp, Gossypium hirsutum
  unsure (1)..(552): unsure at all n locations
  Clone ID: AI727678.1
tactaaagtgtctgctgctccgctgccgtactgttctctaattccaaattctctttctttttgaatcactctcttttacttcgattccctctataggagcagaagctaggaagatagggcttgtttgtttagtttgtttgatttttttttaactataatgtgaagccctagctaagcatttttagttagggttttcttttggattttggttccacgagatccggacgaaggataaaggctgcgtttttggcagaatggggaattgttgtaaatctccancggcggttgctagggaagacgttaaatcnaacttctccggtcacgatcatggccgtaaagattccgtttccaagcagaagccaccgatcaccgtgctcaatggagtttccaaggagaacatcgaggagaagtacctcgtggatcgggagctcggccggggagagttcggcgttacttatctttgcatcnatcgaggcacgcgcgagttgctcgcgtgtaagtcgatctcgaagaggaaactcagaactgccgtggacatcgaaaatgtgaggt

SEQ ID NO: 58645 - DNA, 556 bp, Gossypium hirsutum
  Clone ID: AI727676.1
gagccgactaaccgagaagcttgtgaactcgatttctgtttggtttgaaggaaaaaaggtcaatagtaaaaatggttcaatataatttcaagaaaatcactgttgtaccgaatgggaaggacttcatagatattattctctcacgtacccaacggcaaactccaactgttgtccacaaagggtatgcgatttcccgtcttcgccagttctatatgcgtaaagttaaatacacccagcagaattttcatgagaaactttcgacaataatcgatgagttccctcgccttgatgatatccatccattttatggtgatcttcttcatgttctctataacaaggatcactacaagcttgctcttggccagataaatactgctaggaatctcattagcaagattgctaaagattatgtcaagctattaaagtatggtgactcgctatatcggtgcaagtcgctaaaggttgctgcacttggtcgtatgtgtactgtcataaagaggattggccctagtctagcataccttgagcagattaggcaacatatggcaaggttgcc

SEQ ID NO: 58646 - DNA, 562 bp, Gossypium hirsutum
  unsure (1)..(562): unsure at all n locations
  Clone ID: AI727672.1
agctcttgtgttttgccttgactttccaagaaagtggaaaccccaaactcttttttgtctctgctgtttgttggtaataagagtcgtccgtgaagacttgttgttggaagttagggacagggtcagttcgcaaatccaggtgtgggtagatcgagaaactcttttttgagctttgctgccaactgaaatagaagaaatgtctagtttgcaaaggggtttcgatcaaaagatagattacgtgttcaaagtggtgctaataggagactctgctgtggggaaatcgcagctcttatcccgcttcacaagaaacgaattcaatatcgattccaaggccaccatcggcgtcgaattccaaactaaaactttgcttatcgatcataaatccgtcaaggctcaaatttgggatactgctggtcaaaaaaggtaccgggcggtaacgagtgcatactacaaaagaacantgggggcaatgctggtgtatgacataactaagcgtcagtcatttgatcatgttgccaagtggttagaggaattgcgtggacatgctgataaaaacattgtg

SEQ ID NO: 58647 - DNA, 565 bp, Gossypium hirsutum
  Clone ID: AI727658.1
cacgtattgttatagttgaaaacacaaaaaaatagaaaaccgatttaaccaccgccaccgccagcgccaccgccactgccactgccactgccacctcaccttctccaccgtccctgccaccattttaaccatctcgtaaacagtcgaaggaaaaaacaaagaaaactcacaaaatataaacctttttctgttaaatcgttattgttgttttgatgtcagctaaagaagatgccaagggaaggcggcctgggaaagggaaggccaaatggatccggattcttctcggagttgggtattgggtccaaggtttcaggtgttttccatggatggctgttaacttttttctgaaagatagtgttaaagtagactcttcaactcttcaaattcttcagaattcggttaatctccctatggttgggaagcccatctatggtgtcgtttccgatgccgtttatatttctggccagcaccgtgttccttatatcgccattggtgctttcttacaggcaatgtcatggctaacaatagtgatactttcacaatcaaacatatcaattgtcacatt

SEQ ID NO: 58648 - DNA, 568 bp, Gossypium hirsutum
  Clone ID: AI727650.1
caaacttcaacgcttttttttttcaactaccaaactaagcttacttctatggtatttctttcttttttaaaataaaaaagaaacatggttggagttaaaggaagaatcatttagtggcggcttttccctttcatcgatccttatgccgaaggaaacaggacaaaaatggtgttcaagaacaagctcttcttttcctcttctaagaaatcgggttcttctagtcctgatggatcatccaatagcccacgttccacttctaattccccgatccgatccgataagaaaaaacccaaagcttctcttcccaactctgattcacaacagatccctaattcaccttcccttttcagtcccactgcttttaagccaacccaagtcaaagatggacccgctcgcaaggacctcaaacccagcgaaccccaaaccccagttgctaaaccttcttcctctacctccaagaaacccgatgctaaggaagggccttcctctgtctcgcctttactcgcctcttccttggggttgaatcggattaaaactcgctccggtcccttgccccaggagaattttc

SEQ ID NO: 58649 - DNA, 576 bp, Gossypium hirsutum
  Clone ID: AI727626.1
ttttttttttttttttttttttttttttttttttttttttttttttttttttttttttttttttttttttttttttaaaaaaaaatcccaactccaaggcttaaccttaaataatttttatcccaatcctggtccttttttaccggtgaaacccattttatttaccccaaatttaaaaataaacaaccccatttctttaaccaaaatttaaacaattctccaaaccatttcccctaataaactaacctaaaataaccctcaaaaacccctttcaatttggtaaaaggctaaaaaaaccaaaattgcataaaaaaaatttttcccttaaatttgctttccacccatttaccgaaactccggtctcctgcatctccaattcaaaaaattaaaaacccttccccattaacattagaatcaataatccccttttttccttaaaccccagggaattccccccccaccttttaaagggctgaaaaacctcccaaaacaaataaccctttaatttgctttttttcaaccccacttccctttataaggttaattgccaccacaattgtcccaccttgttccacc

SEQ ID NO: 58650 - DNA, 580 bp, Gossypium hirsutum
  unsure (1)..(580): unsure at all n locations
  Clone ID: AI727624.1
cagggattgctggtttatggtataaatggtcgagaaatttttaaaaggaatttagatccaaatgtttgcaaagaggctggccattactctttggaacataaggttcctctggttgcattttgccaggattgctgtttaaccttatttaatcaccctctcgttgacacgctacatactgtatatcatgaaccaaaggcagagatcatgccttcagttgagcatctggtgactgctgccgacatacagaagctgatcttttttgacactgctgagggaatagcaactaatttgcgtccatactggtcggaagcaacaaaagatcatgctagtgttgtccaagctgtatcagacatgcttgaaatcgttccctttgggacatcaaaggggagtggagtaaaattgctcttgatcacttgggtgtcagttcaaaggaggtacaggactcctatcttcttttctctttctgttcacgcaatttgcttcaataaacaaaaaccagcactcccatggttgattttgcatacacacagcaaatgcagcattcatgctttgatgattcgggcattttttanctcanata

SEQ ID NO: 58651 - DNA, 585 bp, Gossypium hirsutum
  unsure (1)..(585): unsure at all n locations
  Clone ID: AI727622.1
aacgaaccttgctgaaggtcattgttctcggtgatagcggagtgggaaagacgtcgttgatgaatcaatatgttcatatgaagtttactcaacaatataaagcaactattggtgctgattttgtcactacagaactccagattgacgaccgggatgtcactcttcaaatatgggacactgcagggcaggaaaggtttcaaagtcttggagttgccttctataaaggtgcagattgttgtgtgctagttcatgatgttaatgtgatgaaatcatttgacagccttgataattggcatgaggagttccttaaacaggcaaatcctactgaccccaggacgtttccttttatattgcttggaaacaagatagatgtagatggcggtaatactcgagtggtctctgagaagaaagcaaaagactggtgtgcttcgaaagaaaacataccttactttgaaacatcagcaaaagaagatatcaacgttgatgttgcattccattgtattgcgaaaactgctcttgtgaatgagcgcgagcaggacatatattttcagggcatcccaaatgctgtcnacgagactgagcanc

SEQ ID NO: 58652 - DNA, 585 bp, Gossypium hirsutum
  unsure (1)..(585): unsure at all n locations
  Clone ID: AI727619.1
cttttttctctttcgtttcgcttttttcttagctcttttccttcttttatttggctctggaattttattattattttttaagaagacaccccctcctcacccccagaaaatgaacagtgaagaagcgaagagaagcatcagcggagctctaacggtgaagccggcaaccgatgaacggaagccttctccggcgcttgccgccgaatcgactactttagctgccaagaaagtcgtcattaaaagcgctgacatgaaagacgacatgcaaaaagaagctgtcaatattgccatcgctgcatttgagaagaacaatgtagaaaaagatgtagccgagcatataaagaaggaattcgataagagacatggacccacttggcattgcatcgttggtcgcaattttggctcgtacgttactcacgagacgaaccactttgtttatttttacttagaccagaaagcagttttgctcttcaaatctggttaatcatgtttgttataacgatgaaaagtggtgattgataatgttgagattgagaggcttttacttgtgccanctatggtttgcagtggtccgaatgaaatgac

SEQ ID NO: 58653 - DNA, 583 bp, Gossypium hirsutum
  unsure (1)..(583): unsure at all n locations
  Clone ID: AI727603.1
aaacagcccaaaaaacccaatcttctaagattcaggcttattcagatattctgctctcctttctccaaactcctattcgttggtctcatccttaaacaattatgggattagctaattacataacagcgattctcaatttcgcagccttcctttgctccatccctatcattgcagccggcatctggttcgcccaaaagcctgacaacgtttgcatccacctttttcgatggcctgtcattgtccttggcttcctcatcctccttgtctcccttgctggttttgtcggcgcctgcttctacaaaaagactctcttggccttctatctttgctgtatggccattctcattgctctcctcctcatcttgttggtatttgctttcgtagttactaggcctgatggcagctacgatgtgcctggaaagggttacaaggagtatanggttgatggctactccanctggcttagaaaccgcatagttgactccaagagctggtataagatcagggcttgtctagctgacaccgatgtttgtcncaagttaaatcaacaatacatcaccgttgatcaattctttgccgctcc

SEQ ID NO: 58654 - DNA, 512 bp, Gossypium hirsutum
  Clone ID: AI727592.1
gcctctgactgggaagacttggactttggaagattttgaatcataccctgctttgttggttatgtttatatgcaaccactgcccatttgttaagcacctgaagaaggatattgcgaagctttccaatttctatatgaagaaagggctggctgttgttgcaatatcttcgaattctgtagccactcacccacaggatggaccccaattcatggccgaagatgctaagctatataattatcctttcccttatctatatgatgagacacaagatgttgcaagagactttggggcagtctgtacaccagagttttttctatttaaaaaggacggtaggaggccatttgagctggtatatcacggccaatttgatgattcccggccaagtaatagtgttcctgttaccggaagggacttaagccttgctatagacagtgttctaagtggccaaccagtgccatcagttcagaaaccaagtgttggatgcagcataaagtggcacccacagaagagtt

SEQ ID NO: 58655 - DNA, 510 bp, Gossypium hirsutum
  unsure (1)..(510): unsure at all n locations
  Clone ID: AI727589.1
ttcctgcatgctactttgaggctttccagtaaatttcggataaaaattacaatctgattatagttgcattcaacagcaattcacttcatacaaaagccatttctcaaccatgaagtgcctgtaaaaatatatgatgccgaaaggaactatttggttcttgatattttttattaaggtaaaaagctgaagaaacctagccttattttggtcacttttgagacgtctcggtgtctggccgttgtgctgtgttcatcttctcggctgctgcagtcgccgcggatgctgccttgttcagacccaatttctccaactcattaaagaaaccattcacatcatcaggattcattttgtatggggtgtgggaaggaccanggaatgaaccgttgtttacttcttccttgtattctgaaagagctttttttatgacatctccaacacaagcatactgcttacagaactttggagtaacctttgcatgatgtgggtgttgaagcattcctagtaaatcat

SEQ ID NO: 58656 - DNA, 365 bp, Gossypium hirsutum
  unsure (1)..(365): unsure at all n locations
  Clone ID: AI727562.1
cgatggtggtggaacgcattcttcgcatccagttccgtctcgctctatgtcttcctctactccatcaactaccttgtcttccacttacagagcttgagtggcccggtttcagctgttctttacctcggttactcaatgatcatggcggttgcgatcatgttggctactggtaccattggtttcatcacatcattctattttgttcattatcttttctcgtccgttaagattgattaattgatttaaaaaatttccctttgtttgatctttttcaaagacttttggcaatgtatgggaggatgatacattgattcattgttttgattttttgttgaagttttannaaaaaaaaaaaaaaaaaaaaa

SEQ ID NO: 58657 - DNA, 629 bp, Gossypium hirsutum
  unsure (1)..(629): unsure at all n locations
  Clone ID: AI727561.1
ctggccgaattgaatgtataagatgggtaactgaaagtgctgacgcaagggaaatggatgcaataaatggggatggaacatatgttcgtgtcattggacacttgcaaaactttcaaggcaaaaagcaactaaatgccttttctgtgaggcctgtcacaaattttgatgaaattacttgccactttattgagtgcatacattaccatctgcagaactccaaggtacagttggagggtggtgccccancccanccacagatgacaaattcatcattcagcacccctgttcgaggtgcatcaaatggataccagccagcttcggtgaatgatgtttccgtccaatatagtactgatggattcaagggttttgataaattggtcctgaactatctgcagcaaccttcaaacattgatcgagaaattggggtgcatgtaaatgaactttcacaacacttgaaagctcctgtaaagaagatcaaggatgctattgagtttcttgaacgagaaggtttggtgtactcctccattgacgattaccactacaaggcagtggaaggttgctaattttgcgagtgcagctttaatttaccttggaattgcgttttttgggtccgtaatgattgaatgaaa

SEQ ID NO: 58658 - DNA, 651 bp, Gossypium hirsutum
  Clone ID: AI727541.1
caacaagggaccaatggtgagcagttagtttgcaagctccggaaggccttgtatggtcttaaacaggcactggggcctggtttcataagttgagagagttcttggtgtccatgaaattcgaagtttccaaagcagataactctttattcattcttcggtcaaagtctcagttaatgtatgtgctggtctacgttgatgatattatcatcactagaaatgatgatcaggccataggagagtttgtccaccaacttcatgcaaagttctcattaaaggacctaggcaagctgaaatacttcattggtattgaagttcgttacacctcacaaggactttttctttcccaaaagaaatatattttggatcttctccaacggacgtccatggacaggtcgaatagcctgccaacaccaatggtcactacgtgtcatctctcttctacttctggcagcccagtggaggatgatcatcattatcggagtattgttggggccttgcagtatatattaatcacaagaccggatattgcttactctgttaataaggtctgtcagttcatgcacagacctttggatgttcattttaaggctgtaaaaagaattttaaggtatctacaagggacgttgaattatggactgaagttcattcggc

SEQ ID NO: 58659 - DNA, 649 bp, Gossypium hirsutum
  unsure (1)..(649): unsure at all n locations
  Clone ID: AI727533.1
gcctgctgatacggaaaaaaaacagtaagcaattctgcctgaaccaaaccgaaccaaacagattcctctttctttcttacttcattaatggcttcttctgcttcgattactccgtcttattttgcttccagcagccttcctccccgccccatttcttctcacttcccctttaacctcaactcttcaaccttcttctttcctttgaaaaatgggtccttcaagcttcgtaatgcccctcctctctctcctaaggtcctttctgctcgtgcacccaaagctgctgttgttactaaagacacatgggagaaatcagtgttgaacactgattcccctgttcttgtagaattttatgcaagctggtgtggcccctgtagaatggtccatcggattattgatgagattgcaggagagtatgccgggagactcagctgcttcattctgaataccgacgatgactttccaattgcagaggattatganataaaggcagtaccggtggtgttactgttcaaaaatggagagaagcgggaatctgttgttggcaccatgccgaaagaattctatatagctgccataaagaaggttctganatcataaacaatgacatcgaagaaaggtttcagctttttcttcttgcctatatatattt

SEQ ID NO: 58660 - DNA, 650 bp, Gossypium hirsutum
  unsure (1)..(650): unsure at all n locations
  Clone ID: AI727531.1
ctataactacctcgagaataatagcctttcccagactcttcttggtagtggtcacagtaatatccagtttaattggagaacacggtccaaaatatgtatcgggatcgcacgtgggcttgctttccttcacgaggaagtacggccttacattgttcatagagatatcaaagcaagcaatattcttcttgataaagacctaacacccaaaatatcagattttggcttggcaaaacttatcccggcaaacttgactcatgtcagtactcgtgtagctggaacaataggttatcttgcaccggagtatgcaataagggggcagttgactcggaaagcagatatctacggttttggcgttctcctcataaaaatagtcactggcagatgtaacacaaatacgcggttacctgtangagaacaatatctcctaaagcggacatgggacctttatgagaaaagggagctggtcgggttggtaaacaaattgctgaacggtgattttgatgcggaggaagcttgtangtacctcaagattggtcttctttgcacccaaaatgctcctaaactacgaccctctatgtcatcggtggtcaagatgctaacaggccaaaaaatggtcgacgagaggangataacnaaaccgggattaattt

SEQ ID NO: 58661 - DNA, 605 bp, Gossypium hirsutum
  Clone ID: AI727506.1
aaagatatacgcattattatttacccttttctttctatttttctcttttgctttcttttaagttttaagcccagcagaagtcaacaacaacactggttttttttttttttctcaaagtaattagcccatttaacacagtaaaagcaagcttttattacaggaacaaaaacatgtttgcaggagatcagaatggtttacaaggtgacccaaggttgaaggccatttctgaagccattagagttgtgcctcacttcccaaaaccaggaattatgttccaagacataacaacactgttacttgatcacacggctttcaaagatactgtcgacatctttgttgatcgttacagagatatgggtatatctgttgttgctggtgttgaagcaagaggatttatgtttggcccctcaattgcactggctattggtgccaagtttgttccgttacgtaaacctaaaaagttgccaggagaggtgatctccgaatcatacgtacttgaatacggcaaggattgtttaaagatgcacgtcggagctgttcaacctggggaacgtgccttagttatcgatgatttagtggctacagggggttacctttctgctgct

SEQ ID NO: 58662 - DNA, 604 bp, Gossypium hirsutum
  unsure (1)..(604): unsure at all n locations
  Clone ID: AI727501.1
ctttcccttttcccaccgtttctttctccaattgctcctcatacgtaacatatatgtatatatgcatgcttcgggagcaagaaagaaaagagagagggananagaggggttaatggttgataaattttatttcttcttcaacaaggaaaaagtgaattaaaaacaaccatggctgtttctccatgtttgagtgctaatgatcagaagaaacactggtgggttagcaatanaaagcttgtagaaaagtatgttaaggatgcaaggtgccttatggcgacgcaagaacaaagcgagatggcttccgctcttaatcttctaaatgcggcattggctctgtcgccccgtttcgagatagctctggaactgaaagccagatgtttgctgtatctgagacgtttcaaggacgttgctgacatgcttcaagactacattccaagtatcaagatctccagcgacgactccgcctccctttcctctgataactcctcccaacccctctccagggagcgtgtcaaccttctccgtcctcctaactcccaagatccttctttcaagtgtttctctgtctccgacttgaagaagaaagttatggctgggatgagtt

SEQ ID NO: 58663 - DNA, 629 bp, Gossypium hirsutum
  unsure (1)..(629): unsure at all n locations
  Clone ID: AI727467.1
ctggtaggcgtgaggagagaggagaagatgttactgatagtgaagatgatgaagattcgaatcaatcaagtgtaactagacgatgtgaatcagtgaataccctggcatcatttatctggtggatagtgggcttctattgggtaatttctggtggcaatatccttctacaacaggctccacgcttgtactggttggctgtggtttttctggcatttgatgtgttctttgcaatcttttgtgttgttttggcatgtttgattgggattgctttatgttgctgcttgccatgcatcattgcagttctttatgctgttgcaggccangaaggtgcatctgaancagatcttancattcttccaaaatacagatttcagtttataaacattggtgagaagcctagcgtgggggcaggaaaaatggttcccataaaaacaagcagtggatatttggcaaatgagcgcatactcctacctgaggatgcagaatgctgtatatgtctatgctcgtatgaagatggggtggacctccatgctctcccttgcaaccaccattttcattcaacatgcattgtgaaatggctgaagatgaatgcaacatgccccctttgcaagtacaatattttgaaagta

SEQ ID NO: 58664 - DNA, 631 bp, Gossypium hirsutum
  unsure (1)..(631): unsure at all n locations
  Clone ID: AI727466.1
gtctgtctctaacaggctgacgttttcaaacggtatttttaacggtagacgttgtctttgctttcctcttcaattcctctctctcgccctaagactcttttgcttgtcagagatgataattgcctaaggagatctctcttccgggattctaggccaacgcttggaaaggattcttctctagataaggcaagaaaaactgggtgatataagtttttttgatgatattcatcaatgaaagttcattagtttctaattcataagtcaaatattgtcgggtttctttgattttgttaattccttgaacttggggtttgatttgacgagattcggagctgttttttgggaataaaacaagaaaactctctagtggataaggaagaaaaacagcgaaaatttctaggatatttatggatgtgttgaagtgaaaggtanttgggttttttgagtttaaaacttgttctttaaacttaaaagggaatactcccagcttactcttatagtggataaggtcttaaataatgggagaagatttgctcacaagcttggctattgagaatcaccacccatcaacggttttatctatggattcaagttcagtctctcatgaggaactagacagagagatgaacat

SEQ ID NO: 58665 - DNA, 600 bp, Gossypium hirsutum
  unsure (1)..(600): unsure at all n locations
  Clone ID: AI727450.1
caatggaccattcttgttgaatcttgattgtgatcattacataaacaacagcaaggcattgagagaagctatgtgtttcttgatggatcccaatcttggaaagtcagtttgttacgttcagtttccccaaagatttgatggaatagataaaaatgatcgttatgccaaccgtaacactgttttcttcgatataaatttaagaggcttggatggaattcaaggccctgtctatgtgggtacggggtgtgtcttcaacagaacagctctgtatggttatgaacctcctctcaagcccaagcataaaaaaccagggctgttttcttcatgctttggtggatcgcaaaagaagagttccaagtcaagtaaaaaggactctancaataaaaaatcaggaaagcatgtgaatttaactgtgccaatatataatctaaaaaatatanaaggggtanaaggtgctggattcnatgatgaaaactcacatcttctgtcacagatgaccctaaaaaaaaggttcggtcaatcagcattttttgttgcttcaacacttatggaaaatggtggtgttccgcantctgcaactccagaatccctccttanaga

SEQ ID NO: 58666 - DNA, 596 bp, Gossypium hirsutum
  unsure (1)..(596): unsure at all n locations
  Clone ID: AI727447.1
cttatcaaaagacttggttaatgcagtattgacatgctatttctttgtgctaggaactgttgccctttcggcaacaatattgcctgccatgaaacgcttcttgccaaagcattggaatgaggaccttatcatttggcgttttccatacttccgatgtatgtcccttttttattattctttttgaagtatactttgagttttatttatgtgaggaatataacattctttctcaaattaatactgttttatgaagttgtttcaaccttacatcttaatgacatattctgctttattttggctttattgcatcttattttgaagcaagcatcaatgatatttgattggaaggctctggttatacttgtattcttgagttatgttacttatcgggtgtgagtgtcangtatgggtatgtttgtgatacnggcatggttagatttttcagtgttttttcatgtgtttggaggatccttggaagttatatccccatatccatgtgacgagtcctagcaacatagttctcgagtgttttggttcaattctcttatgttatccaccaccttttgtttatatatttttcccctcctaaaaatttc

SEQ ID NO: 58667 - DNA, 597 bp, Gossypium hirsutum
  unsure (1)..(597): unsure at all n locations
  Clone ID: AI727425.1
cacctattcaatcgaaaataacaaataaggtgtttttcgatgtaagtatcgggaacccagtgggtaaactanctgggaaaattgtgattggattgtacggtgatgatgtgcctcaaactactgagaatttccgtgccctttgcactggcgaaaagggtttcgggtataaaggttcggcttttcatcgtgtcattaaagatttcatgattcaaggaggagattttgataaaggaaatggaaccggaggcaaaagcatatatggtcgtaccttcaaagatgaaaacttcaagctatctcatgctggaccaggtgtcgttagtatggcaaatgctggccccaacaccaatggcagccaatttttcatttgcactgtcaagacaccatggctggatcaaaggcatgttgtatttgggcaggttttggaaggcatggataccgttaagctcattgaatcacaagagactgatagaggagaccgccctaggaagaaagtggttatcantgactgtggtgagcttccaatgtctgaaacctgatgctaggtgttcatgtttcaagtttttccctgaacttcggagtattnttcgcgatacaaac

SEQ ID NO: 58668 - DNA, 600 bp, Gossypium hirsutum
  unsure (1)..(600): unsure at all n locations
  Clone ID: AI727415.1
ctcccaagtcccaaccctttccctgaacaccacgtcgcaacccaaaatttacacttcttctgctactgccgctgccatttctgctttcaagatatgcttaggtgttgagcctgatgttgtcacgtataatacgtttgttgatgcgcattgcaaggaagggatggtctctgaagctgaggatattgttgacgcaatgataaagcgaggcattgagcctgatgttgttacctatagtgcattaatcaacggccattgcttgcagaatgaaatggataaagctagaagagttttcaacttgatgattgagaagggttgtgcacctgatatagttacttacagcaccatgatcaatggatattgcaaaggggaaaggttagacaaagcaatggaactctttcatgaaatatctcgaaagggaccattcccggatactgtctcatacaacattcttatgcagagtatgtgtcagttaggggaagtttcaactgcatgtaaactttttaaaaagaggcttgcctctggacaaattccaaatatancgacctgtttgattttgctggatggtttatgcaaaacaggtcatatcanaaaagcattgat

SEQ ID NO: 58669 - DNA, 607 bp, Gossypium hirsutum
  Clone ID: AI727406.1
aaaaagaaaaaaaaaaaaaaaaaaaaaaaaaaaaaaaaaaaaaaaaaaaaaaaaaaaaaaaaaaaaaaaaaaaaaaaaagaaagaagggggggaaaaaaaaaaaaaaaaaaaaaaaaaaaaaaaattccgggggccccccccggggggaacccccaatccccccaaaataaattcttttaccccccccccccgggcctccttttaaaaccttcttaaggggaaaaacccgggttttaccaaattaaaccccttggaaaaaatccccccttcccccactggggttataaccaaaaaggcccccccaattccccctcccaaaaatttgcccccccaaaagggaaaagggaacccccccttttcgggcctttaaaccggggggggtttggtgttaacccccagtttaaccctaaatttttcatgcccctaagacccggccctttgccttttctcccccccctctccccccggttcccggggtttccccctcaatccttaaaacggggggcccccttaggggtcccaaattaattttttggggccccccacccccaaaaatttaataaggggttagggtccctttttggggccccccccccaaaaaagggc

SEQ ID NO: 58670 - DNA, 617 bp, Gossypium hirsutum
  Clone ID: AI727393.1
aggatattagctggcatggcattgaccctgacatgctaacaagtaaatatgttagtgatattattatgctcatatcgtcttcaatggctacgagggatcgaagtgctgaaagtgcacgctttgatattttgaatgcacaatatagtgctgttattctcaacaatgaaaattccagtattcatattgatgcggttgttgatcctttaagtccatcaggacagaaactatcgtcacttcttcgtgttctggctaagtatgttcatccaagcatgcgcattgtactaaatcccatgagttccccggttgatcttcctctgaagaactactacagatatgtgatcccaaccatggaagattttagcagtactgattacacagtaaatggtccgaaagcattttttgcaaatatgccattgtcgaagacgctcaccatgaacctggatgtacctgagccatggcttgttgagcctgttattgctgttcatgacctggacaatattttgcttgagaacctgggtgacataaggacattgcaagcagtctttgaacttgaagctcttgttctgactggtcattgtgctgagaaggatcgtgaccctcccagaggtcttcagctt

SEQ ID NO: 58671 - DNA, 616 bp, Gossypium hirsutum
  unsure (1)..(616): unsure at all n locations
  Clone ID: AI727374.1
aattagagcctctatcttggaagagacggctaaatatcgccttggatgtagccagaggaatggagtatcttcacaccctgggtcatcaaagcttcatacataaagatcttaagtcttcaaatattttacttggtgatgatttcagagcaaaagtttcagactttggtttagtcaaacttgctcctaacggggagaaatctgttgtgaccaggcttgctgggacttttggttacttancaccagaatatgcagttacaggaaaaatcaccaccaaagccgatgtttttagttttggtgtcgtgctgatggaacttctgactggattgactgcacttgatgacgataggcctgaagagacccactacttacctgcatggttctggcatatcaaaccatacaaggagaaattaagggctgctatcgacccatctctcgatgtaaaggatgaaacatttgagagtgtctccatcattgctgaacttgctggacattgcactgcaagggaacccagccaacgggcatacatggggcatgctgtgaatgtattggctccacttgtcgaaaaatggaaaccactggatgatgataatgatgattattgtgccattgattacat

SEQ ID NO: 58672 - DNA, 617 bp, Gossypium hirsutum
  unsure (1)..(617): unsure at all n locations
  Clone ID: AI727370.1
catttctgtcttctcttcttcaaaaattggctgaatctaacgatgtaaaccgtcggtttaaggctcagaaagtttcagtgtttcacggtctgagtcgaccaactatctcaattcaaaactacttagaccgaatttacaagtatgcaaattgtagcccttgttgttttattgttgcatatgtttatcttgatcggtttgctcaaaggcaaccttcattgcccatcaattcattcaacgttcatcgcctgcttatcacaagcgtgatggtcgctgcaaagttcatggatgacatgtattacaacaatgcttactatgcaaaagtaggaggaatcagcacaacagaaatgaacttcctagaagtggattttctgtttggattgggtttccagttaaatgtaacccccaatacctttaatacatactactcctacctgaaaagagagaccatgttgcancaatgtcctccaagtattgtggaatcctctttaagccttggaagatcactaaacctccatttatgtttcaatgaagaagattccacccatcaaaatcaacaattaactgtttaaggtctttacctttattatgtcagctttgaatgtatttgcatacaaaaa

SEQ ID NO: 58673 - DNA, 621 bp, Gossypium hirsutum
  unsure (1)..(621): unsure at all n locations
  Clone ID: AI727368.1
aacatgtttaaaaataaaatcaaataatctttagtttattttaattttacgatcctagcatacctttgccaactgccaagcaacgacatccgacctgggattctgtcttctctccctgttcctctgttttgttattttggtttggtttctcgccttgctgtcaatggcgaacagatactgggtggtgtctcttccggttcagaaatcggcctccacattgtggaatagcttacaagaccaaatctccaagcattccttcgacactcctctttacagattcaatataccaaatctacgtgttggcactctcgattccctccttgctctcagtgatgatctcttcaaatcgaatacctttatcgaaggagtttctcagaaaatcaggaggcagatcgaggaactggagagagtatctggattggagagcaatgccctcaccgttgatggagtccccattgattcttatctaacaaggtttgtttgggatgaancaaagtacccgacaatgtcccccttgagggaaattgttgatggtattcacactctattggcaaagatcgaagatgatctcnaggttcgtgttgctgattataacaatgtgcgcanccaacttaatgcctt

SEQ ID NO: 58674 - DNA, 621 bp, Gossypium hirsutum
  unsure (1)..(621): unsure at all n locations
  Clone ID: AI727367.1
caaagctaagagtttctttctcatgattatcacaattacacctcaaaaaaagaaaagaaaatcaaaattaaaattaaaaaaatacgagaaaatcgcagccactgggtgatgtttcgtggcactgatcgtcactgttaaatccagtgctaacagcaatggatgaacctggtacaagcatgagcatttttgtaaatccaaaaaacatcaatccaatgaggcgtctgaataagaaagattgcctttgttgaagtttggggaatttgatatttttgaggattttcctcttcttcttttttttttgagttttttcataatattatgtccgatttagtggcccgtacaggtcggcttcagcaaaggtacgagaacggctatcggcttgtcgctgggtgtattccatttaggtatagatgtttagatgagtcacaccatgaaaattctgaaaatgtggttgaagtattgatgatcaactcaactagcggaccaggtcttttgtttcctaagggaggttgggagaatgatganactgtcgaaaaagctgcagtgagggaagcaattgaaaaagctggagtccgaggagatttattggtagatattttattttcttggttctatttatgc

SEQ ID NO: 58675 - DNA, 567 bp, Gossypium hirsutum
  unsure (1)..(567): unsure at all n locations
  Clone ID: AI727357.1
gagggatttacgcttatcgtcaaaagatgagagccgaaagagcaaacaaaaacagtaatccgttcgcgagctgggattctaagaagagctttggtgatagtcctcagttgaaaggagcaagatgtttccctttcgatgaacttaagaaatacacgaataatttttccgatgcctgcgatatcggatcaggcggttacggaaaggtttatanaggaactttaccgaccggggaactcgttgccatcaaacgaactcaacaaggttctatgccaggtggggtcgaattccaaacagaactccaacttctatcgaaaattcctcctaaaaacgttctccgcctactccgattttgcttccaaccaagttaaccaattccaatttatgaatttgttgcccatgggtctcttggtgataatctatccaggaagttcggaatcccactggactggggccggcgaataaaaattacactccgtgcagctccaagtcttgcatatcttcccgaactcgcgaatcctccgattattcctagagatgttcagtccacgaacatattatttgacgaac

SEQ ID NO: 58676 - DNA, 638 bp, Gossypium hirsutum
  unsure (1)..(638): unsure at all n locations
  Clone ID: AI727300.1
aaacaaaattcaccaaagattatatgtttttcgctttaattggtgatacttttgcagctgctacaaataatgttcaaagccaaaatatttgtttcctcaataagaaacccactttcacacccccaatttgagcatcaacaatggaggggcatagtgaaagtgaggttgaaatgggttaagaatcgtagccttgaccacgtgattgacaccgacaccgatctcaaaacggcttgcctcttgaaggatgctattaaacgctcgcccaccggttttctcactgccaagtctttcgccgattggcaaaagctcctcggcctcactgtccccgttcttcgcttcttgcgtaggtaccctactctctttgaagaattcccacatgcgcgttacgtgaatttgccttgctttcgattgacgggcactgcactcttgttagattcgcaagagcaaagcatacaccaagcgcatgagaatgataccatagagaggctttcaaaggtgcttatgatgatgagaaatangaatgcacctcttcagtcccttcattccttgatatgggatcttggtttgccaaataactttgagaaagtgttgatcccgagataccctgatcatttcagttttgttagaggcacaactga

SEQ ID NO: 58677 - DNA, 613 bp, Gossypium hirsutum
  unsure (1)..(613): unsure at all n locations
  Clone ID: AI727283.1
gcctccccgtatccccctacaactcatactctctactactgacacaagaatgcctaccaatccacttatcaccataactagggcgaggacactttcaccaacaaaagatggagcagtcatgaaatccacaacaaccactactccaacggcaacaatggttacaacaatggcgaaccgaggcatcaccgataataagtactatgaaaatggaagttactagtatgacctctagattgatatctactattatccacaccggtgcgacaactcaagaggaattgctactacgaacaagttcaacgataatccttactaacacgtggggaggtacctcccaaaccaacatgacttcgaagacagctatgatgaatgctaaccctcatcacctctcgtgaggtctnactgcatcttatgtgtgatatgtgacaaacctcatacaaaacaagcactcgcttcaatatgatgagcagtatcatggtagttaattaattcgcaaatacgtcactcaacctgtaatctgattaattgagccttgcggttagattcttatgataatctatatcttcatattcggtttatatatagtttcctttgctttgacatgctctacgtt

SEQ ID NO: 58678 - DNA, 612 bp, Gossypium hirsutum
  unsure (1)..(612): unsure at all n locations
  Clone ID: AI727281.1
caaatatgacagttgggacggtgagaatgtcaatggatgtgcttcaaagaaacatgatgctgttatgagaagagaacgagcccttgcttatgcctatagctatcaggaggaacaacggcaacatcatgaacaactccttatgcaaccacagcacaatggcaaggatgttggagtgtatctcaatgaacgtgagaaggcgcaatggggttggaattggctcgagtgttggatgtcgtcncaaccataccctgcccgtcaattgggattacaggagggtgcttacatggctctaccccgcgctactacaaccaccgataacatgtcggagaagactgtcgaaatggacgatgtgacaccaataaaatctggctcatacctaactcancagcagctgcaatcagactctagtagtgtccctagctatatggtcactacccaatctgccaaggccaaagtgcgaagtcaaggctcanccaancancaacgtggaccttatgtacccgaatggaattcatcgacgaagaaagcctcgggttgtgattcctcaagttcgggtgggggaccaacaatctaccangccccaaaaagccctggcccaaagagtaatggtgc

SEQ ID NO: 58679 - DNA, 617 bp, Gossypium hirsutum
  Clone ID: AI727263.1
gctcattcttcaatgcccttcttcctgtataaactaaacgtcttcacttcagtcccttctttctctttcaaaaattatggaaaaggtattaccataatggactacttccttcgtcagtcaccagaaaaaacctaacatgtggcctaaattccacgaggctgctggctctgtctcgatcattgcatactttctccctccccgatctgccttaagaatatggtgcacttgagcccgccattagtggagagatcattcgactccatcaccaaaaacaccatgcatacttacatcactaactataacaaggctttgaagtatctccatcatgctatataaaaagataattcttccaccggatttaagttgaagagcgctatcaagtgtatctgaggacgtcacttccaccactccattttttggatgatcctcgcccctattcgtgaacgacgacgtgatcctctcaaaacttccttgggtagggctattgacactacactttggtacattggaatcactgattcagaagatgaatactgacggtgctgctttgcatggctctggttgggtgtggattggattgaacaaggaactacttaaactcgtaatttaaacaagac

SEQ ID NO: 58680 - DNA, 612 bp, Gossypium hirsutum
  unsure (1)..(612): unsure at all n locations
  Clone ID: AI727259.1
ctcgatttgctccgctgagctcatctaatcggtgatcgaatacaattgatctttaattatgcgattctttagaagaatagcggggctgctgggccttgccaaaaacgatggccaggaagtgaaagaccaagaaaatgaccctcaaaacaattcccaaacacccaacaaccctcccgttttccaagaaactgggcttcctcgtaggggctttagcgtccctgttcaggtcgctgccgctcgtccccatcctgctcctctcctcctcccctgctcttcctctgacggcggcgtccanggtctgaaatggtatgcaaagcgtcttaggatanatgaagatggagacgtancggatgagttcttggatgaagttttgccacaaacatcagggtcagctaatgcagaaaatgagaaggcattccccaagttccaagtgaagtataatacgagagcagccaatgtgaagacccaagtcatgtcacatgatggtaaaatccagcagtgtgtanagtaccaaggaagattacagtggatatgattgttggtttatttttctttgtcaagtcttgcatcaaatgcgtgcgtagtaccaatcaacttcttttgattatattg

SEQ ID NO: 58681 - DNA, 611 bp, Gossypium hirsutum
  unsure (1)..(611): unsure at all n locations
  Clone ID: AI727207.1
atacattcaatggttgaaacacaggattcatcagtgctggctcagttgggatggccagatatgcgcttgccaatcctctacactatgtcatggccagaaagaatttattgctctgaaataacttggcctcgccttgatctttgcaagcttggttcactaacttttaaggctcctgacaacgtgaaatacccctccatgagtcttgcctatgctgctgggagggctggaggcacaatgacaggagttcttagtgcagctaatgagaaagctgtggaattgttcatagacgaaaagatcagctatttggatatttttaaggtggtggaattaacatgtgagaagcaccaggaagaatttgtggccactccttccctagaggagattatacattatgacctttgggctcgagactatgctgctagcatacaacaatcatctggtctgagtcccgttcttgcttaactgatggcttgcacatgttacaagaccaaaccaggctctatcttgaagactcggaagttctcagtttatgccgaaggctancattctttcaaaaatgcctagtatcatgtgtctcgatatgaaaatatcgatatcattcccccgtttat

SEQ ID NO: 58682 - DNA, 611 bp, Gossypium hirsutum
  Clone ID: AI727199.1
tcactccttttgtcccatgttatatagtatatctaccaaagtttacggactctctccctgcagcatcatacacatctcgggaatctcgagctttctggaccatagttctactgtaccatccgttgattgggctcccactaactggctaccttacatcgctctaagttcgcttcaccctcttgcatgctttgctgaggcccatcttgtggaggatgttgagacccactagccgtgcgactccgcatgctgggctctacttgagacctgtgatccgggcggtcgcacgtgcgatgacctccgttcactcccaggattagtcggctgatgcgcactcactgtccgtcgtatccctacttcttgactgagaaaacccgaacgtttcccttcattgggtcctcgcagcacttctccctatctcccactggcgtattaactcacatgcaccgacctatcgaccaacctcacaattgcgcgaccttaatggcaaatagggtgcaccctgtagttgcaccctaaacgctcgcggtgtggaagttccacccatcgagacgatccactcgcggacgactcttgtcgtctccttgcctaccgcacttccgatcgacaaagtt

SEQ ID NO: 58683 - DNA, 619 bp, Gossypium hirsutum
  unsure (1)..(619): unsure at all n locations
  Clone ID: AI727195.1
aaatggagaagcttaaatgtgtggttccagagaggctgaagcggagggtggaggagagccatattgatgatcttccttcactatcctcttctctgctccaattgttcctcagtttgccgcagatccatcagttgatttcagagttggcagcagagccatcgacccaggccggtctttgtggcaagaacgagggtgctgctttggacttgaaacaaaaaggcaaccaatgctattcctctggagatcattcccaggctctgcgttgctattctcaggcgcttcgccttgctcccattgacgcccaccacactggcaagaatcttgttgctactttgtatttaaaccgagcttcattgtttcacaaaatgggcctgccaatggagtctcttcgagattgcagcagggcactanaaatttctccttgctatccaaaggtgtggtatangagaggtaaggtgaatgctacactggggaactacnaaaattcggtccatgacttaagtgttgctaaggatatggagccatncaataggggaaagaaacagatanaaagggagctggacatgcttgcaccgcatcatgagaaaacaactgctaaaccagccagccagaattattt

SEQ ID NO: 58684 - DNA, 620 bp, Gossypium hirsutum
  unsure (1)..(620): unsure at all n locations
  Clone ID: AI727184.1
agctcactcaagcaacaaccaacaacaatggcaatggctttcaagatggctacaactgggatgtgggtcactgatgagtgcaagaactcattcatggagatgaaatggaagaaagtacatagatatatagttttcaagatcgatgagaaatcaaggctggttaccgtcgataaggtcggcggacctggcgaaagctatgatgatcttactgcttcattgcccatcgatgattgccgatatgctgtctttgattttgatttcgtcaccgttgataactgtcggaaaagcaagctcttcttcattgcatggtccccagcagcatcaagaataagggcaaaaatgctgtacgcaacatccaaagaacggctgaggaaggtgctanatggaattanctacgaagttcaagcaactgacccaactgagatggggattgatgtgattaaacacaaggccaattaggactaatcatgattaagttttaaatttataaaccatcttactcttttatttaataactccaacaacatgtgctgtctttttttcttcctctttttcttttccctgttgttggtgattttttggctagatttctancactaatgtgagtgaatcttaatgta

SEQ ID NO: 58685 - DNA, 696 bp, Gossypium hirsutum
  unsure (1)..(696): unsure at all n locations
  Clone ID: AI727084.1
cgcggccgcaccgtannaaacttggttcggtgtccctccagtcnaggtnacgagtccatgactcgattcggtacagggtaaggtactacgggctggttcgtctgttcgcggagcctccatcctccatgatcgaccctctaatgtttgatcgggaccagaacgtcgaggtgacctcataccccgcccactacgtactccgcccaaggatccactccgagctctccacatcttctcctgacggatccgcgcagagtgcattacctagaagctctcctcgtgctgactctcctctggagcctctgatccctcatgactaattgctaactcccatccatccgtttggggctacatgggatggtgtgccagctgacctcgtaaattagttcccagcgacattgagagatgtccctcccccattcagaaccgacacacagatgcctttgtagcggggcgtccgtatgaactcggatgcagttggctcctccgccacgtccatgcttccctacctctgatatcacgacagtggaaacatccgtatgcataaactctcccgccggtgttgtttttccggactgcacacgcatccaccaggtntcttatcataacttaccctctacttcccacactgtcacaatccgtggtttggtgtatagcagaacgaagatgctcccaagcgactaatgatccttgcccgtt

SEQ ID NO: 58686 - DNA, 603 bp, Gossypium hirsutum
  unsure (1)..(603): unsure at all n locations
  Clone ID: AI727075.1
aaagtatctaacatgtccgaaaataaacctgaatcgggtccaactgtaaatcctagagtaacctgggaaggttgcagcgtattgctcgacattaacgacggcgatcgtcttgttttcgctcgtctctctgccggctcgaccttgaaaattgggaataagacattctctttgcagccattgattggatgtccctttgggtctctgtttcaagttgaaagcggaaaggaaaagccttacctttcccgctttattccacccaccgaagagaataatgttcaagatgaaggaggttgtcaattacaagaagaatcccgtgacaaccgagcaataattgataataatcaagctcaaagcctcaccggtgatgatatagatgcaatgcggaganatggggcnacngggaatgaaattgttgaagccctcattgctaacagtgcaactttcgataagaaaacacagttctcacaaaaaaaatataggcttaagaagcaaaagaaatatgcgcccagagtgcttcttagacgaccattttctagaagtatatgtgaggcatactttaaaaaatatccagctcgaatcggatttttgcgagtggatgctttc

SEQ ID NO: 58687 - DNA, 615 bp, Gossypium hirsutum
  unsure (1)..(615): unsure at all n locations
  Clone ID: AI726978.1
cttcaattgattttccagaggggatgtggcaccgaagatagacgaccatctagggagttatctaaggaaacttgtaccagggatggagataatcattaccacttgaaaagaagtcttcttgtacttgatcaggatcttaattgcctccctaattcaggcgctaattctgagttattgaaatctcgacaaaccgaacaaaatgcaacaggtgttgcagtgaaaaagaaaaaaagagctgactctaaggatgtagccagaattgctcttgaagatcttgcaaaatacttcgatcttcctatagtggaagcttctagaaatttgaacgttggtctcactgtcctgaaaaggaaatgcagagaatttggtattcctcgctggcctcacaggaagatcaagtcccttgatggtctaattcgtgatctccaggaagaggcagagcagcggcagcaagacgaggctgcagcctatgctgtancaaagaggcgaatgatgttggagacagagaaagaaagtataaagaaggaacctttcattgaattaaagagcgagacgaancggtttaggcaggacattttcaaccgaagacataaagctagagctcttaaaaattagcac

SEQ ID NO: 58688 - DNA, 610 bp, Gossypium hirsutum
  unsure (1)..(610): unsure at all n locations
  Clone ID: AI726970.1
gagctcttgatggtcttatgggtcctgtctatgttggaaccggatgcctctttcgaaggattgcgctttatggctttgacccgcctcgatcaaaagaacaccatgctggttgctgcagttgctgctttggtcgtagcagaaagcattcttcaatggcacacaccccggaggagaatcgtgcgctgagaatgggtgattccgatgatgaagagatgaacctatcgttgcttccgaagcggttcggcaactcaacatttctcattgattcaattccagtggcggagtttcaaggtcgtccccttgcggatcatccagctgtgaagaatgggcgcccccctggtgctttaactattcctcgtgaacttctagatgcctcaactgttgctgaggcaatcagtgttatttcgtgctggtacgaagacaaaactgagtggggacagcgtgttgggtggatttatggttccgttaccgaagatgtggtcactggatatagaatgcacaacagaggatgganatcagtntattgtgtgaccaaacgtgatgctttccgtggaaacgctccgatcaatctcactgatcgacttcaccaagtcctgcgttgggcaactgt

SEQ ID NO: 58689 - DNA, 614 bp, Gossypium hirsutum
  unsure (1)..(614): unsure at all n locations
  Clone ID: AI726955.1
aagggtacatcattgtcatgttgtacctttgcttggctactgtttggaattcagcgggaaacatgctgagagactgctggtatttgagtacatgcataatggtaatttgagggaatgtttgaatgggatttggggggagaatctgacttgggaaactcgtgtttcgattgctatcgatgccgcaaagggcttggaatatctccacgaagcggctgctcccagaattttgcataaagatataaaatccacaaacattcttcttgacaagaactggagagcaaaaataactgatctcggtatggccaaacgtttaagagctgatggagttcccagctgttccagttctccagcaagaatgcagggaacctttggttattttgcacccgaatatgtaattgttggaaaagcctcacttatgtcggatgttttcagtttcggcgttgttcttctggaactcatcactggtcgacaacccatccataaatcaaacaataaagaagaaagtcttgttatatgggctacccctaggttacangattgtaagcaggtgaccccaaagttacctngaccacgtttganaggcaattttccanaaaaaaagatgcagatnatgt

SEQ ID NO: 58690 - DNA, 617 bp, Gossypium hirsutum
  Clone ID: AI726954.1
atgccaatgaaaatgaatctgttgatgttgacccaaaattggcggtattgggaagcagttttacttgtgaagtaaaaatatacgcaaagtgtcaagatttgattttggagtgtgcacccgatgttttgtataagaagcaaaatgatgctgtccagagtgcttccttaaaagttttatcatggttgaatgcatatttaaaggacacatatatgtctttggagaaagaaaaacaattagccaatgtctttgatattaagttttatcgacaaatctttttcaaggaagttgtaaaatgcctatctgtttgtaactgtcagcataatgaaactttgggagggaaagaacctgaattgaatggtgtggtggaaaatgatgcgagttatataaatatagaaggtacagattctggtctgtgtccatctaatggatcccttttgtgcgtatgttattctgtatctttagtgacaaaaggtgaacttcaaaaggagcttcttgaaagtattgaagagtttgagtttgagaatgggactggagcggtaattccctgtcttgaagctgttgtctcccaaatgtctgtcggccagtctgcttgtttctatacagagttgcctcctgat

SEQ ID NO: 58691 - DNA, 664 bp, Gossypium hirsutum
  Clone ID: AI726944.1
attttttttttttttttttttttttttttttttttttttttttttttttttttttttttttttttttttttttttttttgtgaaaagaaaggaagccgtgtttataaattttaataaaaaaatttttccctaatgaaaaccccaaatttcctgggccatcccccaccatccaatttccaaaattatggaaatccccccccaaattccaacctaatagtttgggtccccatacgaaatgtttttattataggggaatgggacttgctcccccatttcccccctaaagccagcgggggcccctttgctacctccggataaaacgctccttttccctaaaaaagttatatgtccacccccgcttccatatttgaccggccctatactatcgtctttaaactgggccccccccacagtttgtcctaattggcccccaccggggcccacatttttctttgtgaaaatccccccaagcctggggggctccttgaaaaaaaagcctttggcctccaggttatcgctgttctggcacttttgggccccattcctggatctcgggttccctcccccttttggaacccgtcgaagagcccgagccttcttcccttccccttccacattcgagcggtcggaagaatgacaccgtacattttcggctggtctcctt

SEQ ID NO: 58692 - DNA, 571 bp, Gossypium hirsutum
  Clone ID: AI726926.1
acatcccatcgcccatttctcgatccactcttttcccagagtccttcattaaactcttcttttccttcttctttatataattcaactattttttttacttaaaacagctcactttttccaccctaaaaaaaatacatctttttattttaatttctctttgtttatctcagtgtttgattcttgtttaaagggtcttttttttaaaaaaaatttcttgtatttctctgtatttttatatatgaaattttgttttgttgggagtttttgacttttgtaatgggtagttcttgatgggtctttttggatctgaaatccatgatttttgggatgaatctttgagtattagtactttaatgtaggcgaaagctatgaaaaagttttttttttaaataaaataaaatgtgggatttttgaaaaagggattctttttatttgatcaataaatggtagttctttagttattattattgttattttaacaatgggatctggaaatgggttttattcaactcaagagttcaatttagattctaaatggttaattgatcctcaacagcttcttgttggtcca

SEQ ID NO: 58693 - DNA, 572 bp, Gossypium hirsutum
  Clone ID: AI726923.1
attttatttcccgaaagaataggaatttgtatattgaaaccaggcggtgcgacgagcagagccgttgcgcggaggcttccgcaaccggttgcgctacttcacaccgccactgccaccaacgtctgcgacaagtcctcgcctaccaacatgaaaggcctcttcaaatcaaagccgcgaactcccgttgacatcgtccggcaaacgcgtgatctcctcatctatgctgatcgctcccccgatagtcgtgaatccaagcgcgaagagaagatggcagaattatgtaaaaacataagggaattgaagtctattctttatggaaatagtgaatctgagccagtttctgaagcttgtgcacaactaactcaggagttctttagagagaacacactgcggcttttgatcacttgtcttcctaaattgaatttaaaggcgaggaaagatgcaactcaagttgttgcaaatttgcaaaggcagcaagtgcattcacggttgattgcttctgattacttggaggcgaacttagatctaatggatattttaataccaggttatgagaacacagacatggcttc

SEQ ID NO: 58694 - DNA, 636 bp, Gossypium hirsutum
  Clone ID: AI726922.1
ttttttttttttttggaagacaaatagtaagtaaccgccctgttttaacatcaagacatttcccctaagttcaactgatgggtcccatcagcatgaagacaactatgtccgcccatatacccttaatacctctacggggtattacactcaccatccttcccccatccgtccacgccgccatgggtcgctaccatctcaccccgtgccgtaccccctgcgcgtctgcccccgtccgcccccctcccttccctccgccccccatcccgcgcccgcgccccgtccctcttctcccccgccgccccccctccctcccttcccgccctctccctccccccctccccctctccctttcgccttccccccctctcctcctctcgtcccgccttcccccccgtcccctcccgcccgccccctctattctccccccatcgccctcctccccgcctccttctcgcctcctcccccccgcgtgtccgcccctctacgtgcccgctccctgcccctcgccgccgtcgccgccccgcgtcatttaactcgcccggtcgtcttttcctcgttttttcctcctccctctgtcacctccggtcctgcctgtcctctccctccacctggccctctcctcgcgtccccctccct

SEQ ID NO: 58695 - DNA, 573 bp, Gossypium hirsutum
  unsure (1)..(573): unsure at all n locations
  Clone ID: AI726914.1
gagagaaatggcctggttgatccgctttaaagctcgatcgcttgtatcagcgacaaggtcactacgcgataccctcgattcttatcgctgctcactgtctcatttctctgggtttactaccgatgactctgttcgcagtttcccgaggaaatggctttgttcaaaagcgatgagattgaatgatgtggacgacatacaatcaaggtcatcgtcttcaccggatatcactaggaggccctcggtttctgcttctagcaattccctaggtgtaggactacaagaagttacaggctccaaattgaacttgtttgacgagttgaaactgaggtttctgagttttaaacatcacaaatatttggaagaattggagcattttgaaacacttaaagaagctcaaacacccaagtttatggtgattgcttgtgcagattccagggtgtgtccttctacaatccttgggtttcgaccangggaagccttcatgattcgaaatgtanctaatcttgttcctccactccaaaagggaccttcanaaactaacgctgcccttgaatttgcagtaaaaactcttca

SEQ ID NO: 58696 - DNA, 620 bp, Gossypium hirsutum
  unsure (1)..(620): unsure at all n locations
  Clone ID: AI726864.1
aaatctccatggcgaacgccaccttactctgctctccactgcccattttcaaacaaactcattcccttccaactcttcgttgccccgaatttcttaaaaagcccccgccattgactggaaacctgtccattcccaccttaaattggaagccgaaacccgtgattggtatagtcgggtcagctctgaccttggctcttgcgggttccgcttcggcctccgaattgccgttgttgctaggcacttctttgccgctcagtgaacccgctaatgccttgtctcttcccacttgggccatacacgtgtccagtgttgttgaatggattacagcaatggctttggtgtggcaatatggagagaaatctgggtttgaatcatggaagggtctctcttggggaatggtacctttactcggtggagcattttgtgcgtgtacctgncatntcttttacaattctgaatcccttgaggtattggtggctcttcaagctgcactgacggtaataggtaatgccactatgtgttatgctgcatttcgtatctgcaaagtaacggacaaaaattcccagaagctatgatatttccactcatataatccattgaatgtgccccaacgatcattt

SEQ ID NO: 58697 - DNA, 558 bp, Gossypium hirsutum
  Clone ID: AI726839.1
ggtttatgcacctccaaagaaagagaagcatggacccaaaccaccaatgtatgaacctccaaagaaaggaaaaacctgaaccaaagccaccaatttattcacctcccaaaaaaaaagaaccctaaccttaaccccccattttttaaccccccaaaaaaggaaaaccttaacccaaaccccccattttttcccctcccaaaaaagaaaaaccttaaccccaacccccccttttttaacctcccaaaaaaggaaaaccccaacccaaaccccccgttttttcccctcccaagaaagaaaaaccttaaccccaaccccccattttttaacctcccaaaaaacctcccatgttccaatcttagccacccaaaccacccgtgtttatccctctccagaataataaacctgaaccccaaccccccatgttttaacctctccaaaaacctcccctgtttgtaacctcaaccccccgaacccaccggtgtatacaccctctccagaaagaaataccccaaacccctgccccccttgtgtcttacctctcaacaaaccccccatttt

SEQ ID NO: 58698 - DNA, 547 bp, Gossypium hirsutum
  unsure (1)..(547): unsure at all n locations
  Clone ID: AI726827.1
caaaatggcagaaagaggcggaggagagcgtggagctttcaggcgtggctttggtggaagatccgaccgtggcccaagaggaaggcgtcgtggccgcagagaggaagaagagaaatgggtgcccgtaactaagcttgggcgtttggtcaaaaccggaaaaatcacgtcccttgagcaaatctacctccactccctccccatcaaagagtaccaaatcatcgaccaactcgttggcccttcattgaaagatgaggtcatgaagatcactccagtccagaaacaaacccgtgccgggcagcgtacccgtttcaaggccttcgtcgtcgttggcgacggaaatgggcacgtcggcttgggagttaagtgtancaaaaaagttgcaacggctataaaaagggccataatattggcgaaattatcggttataccggtgaggagagggtattgggggaataaaatcggaaaacctcacacagtgccctgcaaagttactgggaaatgtgggtctgtcactgttaggatggtgcccgcaccgagaggtgccggt

SEQ ID NO: 58699 - DNA, 687 bp, Gossypium hirsutum
  unsure (1)..(687): unsure at all n locations
  Clone ID: AI726792.1
ctcagttcagtgctctttgcaagagaccgatggttgaagcctggaggggcaatacttcctgatacagcaactatttttgttgctggatttggaaagggtggtaccagtcttccgttctgggagaatgtttatggcttcaatatgtcttatattggaaaggaagttgttgaagacgccgctaaatttcctattgttgacattattaatcatcatgatctagtaaccaatgctgctgtgcttcagagctttgaccttgcaaccatgaagcctgatgaagtagatttcactgcaactgctgagttggaagcaaagaatgatactttggatcataaggcaaccgcatgttatggggttgttttgtggttcgagacaggattcaccagccgattctgcaaagaaatgccaactgttctatctacatcgccatatacccctaaaacccactggtcacagacgatcctcacttttcgagaaccaatttcagtggcatcaagcaagttcactgcagatggatctgcagctgttggaacagatgcttgtccggcttcaaaaattcttttgcgaatcancattgcccgtgcaacacagcatcggtgcattgacatatccctccaaactgctggaattggctccgatngtcggaaacgcanttggccagtgcaaatgtttaatttaacataataagtt

SEQ ID NO: 58700 - DNA, 665 bp, Gossypium hirsutum
  Clone ID: AI726766.1
gttctttttaagtgatggagaaccaaccggcggtgaggtttacattacggaagcaatcgtcgatggcgccggacacagacggaggcgaagccgatgggacacagaacgacgatcgacaggacatacatgaaggacttacgttgatgttcttggccaaccaaggtgatttggacggcgttcgctagctcttggactccgggatccctcttgatttccgctacctcgatgatctgacggctctccctattgctgcttgtccccgaccgaccgatgtcgtttccttgctcctgtcgcgccgcgctgacgtcgactctaccgatcgatggggacgctctcctttgggcggatgctgtttcttctctgaatcgtgatgtgatttggcttctgcagatacatggatcctggcctcttttggctcctgtgcctgtcgttctcccacgtcgagttccccaatatgacattgatcccgcgcagcttgatgtcgctgccggcgtccaccttccgtccggaaccttctgttcttgcgtttgtgcgtggatctcgggttgccttgatacgggtcggatacgaggtctctcccgatcacggatccggtgagcgctgctccacactcagcttgccttccttctctacggttccgcgtccggtcgtggtcccatttctcc

SEQ ID NO: 58701 - DNA, 739 bp, Gossypium hirsutum
  unsure (1)..(739): unsure at all n locations
  Clone ID: AI726765.1
ctttcttctatacggctcattgaaaattgtattnattcgtccatccctaaatctgcccnacgacttatcccaattctatacaccctgcttgcaggtatgtcctcatccgataagccacaatcagtccaaatggattttaacgacaacgtgcgatgacttaccactaccacctctggatttatttcactctgtcaccggtttccttcatgacattggtgacaacatccatgaaacaatccgctttggcaaccctactgcacatgtacctgagattcacctcccttgtatcactctcgacaaagcatacattgtcgtctatgtcctcacccataacccccaccctgttcccttccccctcgtctaccttcgactacttccctgacactgatggtacaccactcctttctggctttattcctcatcccggaatcacccctgctcatggtgatgacacctccccataccagtcactttgatacttgatcatacctcccgttcctatcatgaccctattccccgcatccccttcccttcttgctgatcgtcgacctccttgttcatctccccctcttcgggacgtttactcctcctctcccactacccttgtgacattcctctctcctttccccccccgatttccttcttccacaccatactccccttcacacattcccttcggacgaatccttctcccctcctctccttcccttttgcccttttctccctccacttcttcccc

SEQ ID NO: 58702 - DNA, 667 bp, Gossypium hirsutum
  Clone ID: AI726760.1
agcgaaaccaaaacgaagcttagaacttggaaccacacaacaaatggagatggagacggagtttacccaaaaaccttttcaagtagacatgggaaatcttttggcttttaacccttttcataactttccttctctccccacttccagggatgagctagttaaggaatgtatacaggagggcaccaagttagttcaagcaattgcagatagtgtttttaacttaccttcaactgaagatgcggatggaccgcttgttaagctgcctaccccaacaacaaaacttcctagggagaagcatcttccgaagcctaaacctcccacaaaatgggaagagtttgccaaaaagaaaggtataactaaacgtataaaggacaaagttttatgggatgaacagactggtacatggaaacgccgttttggttatgatcgtgtcaatgatgataaagatatacccatcatcgaggccaaaatgactgatgagccaggagtggatccttttgcgtaaacgcaagatgaccagaagagacgagtttagaaacgagacaagaatcgcctccacaacttgaaacaagctgcaaaaattggtgccttgccaaaccctgtccaacttgctgctacagccctgcccataacgggatcccaagctccaccgaagaaaattacttcc

SEQ ID NO: 58703 - DNA, 669 bp, Gossypium hirsutum
  unsure (1)..(669): unsure at all n locations
  Clone ID: AI726759.1
ctgatgctgtagttgtcgcatgggttctaaatgcaaccttagtggtacctgagttagatcataattcgtattggaaggataatagtgactttgtcaacatttttgatgtcaactggttcatttcttacctagtaaaagatgttaccattgtaaaaaaagttcctgataaattcatgcgatcaatggagaaaaatccttacagtatgcgtgtcccaaggaaatcccctccagaatattatctagaccaagttctgccaatacttaaacgaagacgtgtccttcaactaacaaagtttgattacagactggccaacaacattgatgaagagctacaaaaattgcgttgccgggctaattttcatgctttaagatttacaaaacctattcaagaacttggacagaaacttgtattgagaatgcgtgaaatggcaatacgtcttatagcagtccatttgagatttgaacctgatatgctagcattttctggttgttactttggtggaagggacaacgagagatatnaacttgcggaaatacgacaacgatgggaaacattacctgatttagatgctgatggagagaggagtcgaaagtaatgtcccctcactcctcctgaagttagattgatgctgcgggcacttggtttttgcaaatgaaacataccttttg

SEQ ID NO: 58704 - DNA, 677 bp, Gossypium hirsutum
  Clone ID: AI726747.1
cccatcttcacggtcaacatcatcgcgggcctcaactccttcgaaagtccgtcaatctccaacaagctcttaccttgacaagagtaggccctcacaaagttcaagaccgtcgactccaacttctaggccacaagtccccgcaaacttgaactcaacagctgttcgttcgaattctcgcccatcaactcccacgcgttggaatccagcagcttctttgtcttcactagttaatccttcaccttcttctaatgggcacactgtttcaaatggtcgcactgcagctccagcatctcgaccaagctccccaggtccacgagtccgccccccgcaacagccagttgtaccccctgattttcctcttgacacaccaccaaaccttagaacaactttgcctgataggccaatctctgccggtaggtccaggcccagtgcttctgttaccacgaagacaaaccaagatactaccagctctataaatatgccaagaagaattcttcacctattgtcccgaggggagaactcccgaacctcctggaaggactcgggtccattccaatgggcatccatctgacatacaccagtccccgaagatctcacatgtctccggtttggctatgcggaaacctgtaaaatcttcaacaaccacttgcagatggcccccgatttgggatggattg

SEQ ID NO: 58705 - DNA, 506 bp, Gossypium hirsutum
  Clone ID: AI726740.1
caatttgggaaccgccgaattgggcttgttcaaaacgccgccagatttgataatcccgatctccagcgacggcgaaagagggcattggttcacagtggaaagcgaatcggacgttcacgtcaaaaaagtccgattcccggacaacactattcaagtcgttttggaattatacgcgtcgtttcatggcaatgacgagttttggtattcgaatccgccttattcctacatccgaatgaacaatctgacgacggcgcgtgggaacggcgcatacagggaagtttttgtgacgattgacgggaaattcgtgggatcggaggtggtttttccggttgttttcaccggcgggattaatccattattctgggaaccgatcgtggcgatcggggatttcaatttaccaagctacgatctagatttaaccccgtttttgggatggttattggacgggaaatatcacgatatagcaatctggtgtcgatgatgccatatcgttttggctggtgaat

SEQ ID NO: 58706 - DNA, 512 bp, Gossypium hirsutum
  unsure (1)..(512): unsure at all n locations
  Clone ID: AI726726.1
aaaaggcatggcgctttggttttgctcagcaaggtttcttgttttcctcttcatcgtatccgcacttccaatcgcttacataatctcccaagaacgcgccaagactgaccaccacgttttccactaccacagctcaggctttttccgcgagtgcgccaagtgggacgatcagggccgtcgattccttgtcagtttcttggaaggcggcgtcggagaaatccacgtcccccaaaattacacccctgacgtcgtattacaagaggtcacagtcgtcaaagactctgacttgaccgggaatgcttccaacggcatcgcccttgaccggcccaaaaaccggctgcttgtggccgtanccgacgtgctaggaaaccgatatagtggacttgcggcttatgacttgtccacgtggaaacggctctttctaaccaagctgagtggccctggagatgagaaatccatggcagatgatgttgcagtagatgcagatggtaatgcgtacgtgaccgatgtgc

SEQ ID NO: 58707 - DNA, 510 bp, Gossypium hirsutum
  unsure (1)..(510): unsure at all n locations
  Clone ID: AI726722.1
ctgaaattgagaaccctgaagatgttttgataaacaatagctggtttttaacgaatcagttcttgttggaagtcatctttcacaataagatgaaaaggtatgaatgtttaaccaatgactcgtcgattgcatcggctatttacgtacccttttatgctggtcttgatatgagcttgtatctatggggtttcaacactactgtgagagattctgcatctcttggccttgttaagtggctatcagagaagcctgaatggaaaagaatgtggggtagggatcatttcttanttgctgggaggattgcttgggatttccgaagacaaagcgataacgaaaccgattggggcagcaagcttcggttcttgcctgaatccaagaacatgtcgatgttgtctatcgaatcgagctcctggaacaatgattatgcaattccatatccaacatgtttccatccttcaaaggacagtgagattttccggtggcaggatcgaataaaaaggcaaaaccggt

SEQ ID NO: 58708 - DNA, 506 bp, Gossypium hirsutum
  unsure (1)..(506): unsure at all n locations
  Clone ID: AI726717.1
tttgaacaaaaatattcagcaggcaaggtgctggactaaattatgattattttgcaaatttacagtctgcaggtaatgcatccaactgctgggacccatttcctatgtcctcacctcataaatgtatcaacgtatggcatcatatttttcacactagtataggactgccatagtatttccaaggggtcaaacaaaaccaaaaggtaaaaagagaaaataaagtacttctcaacctaagaattaggccaaaaaagaaaagaatacccatcaaataaaagaatagtggggctgacacctgagtataaagagttgcatgaatcataaactttcccagcattggaccgccatggcatgtaccttggtaatatggtatcctttcggagagcaacttaaaccttgtattcttcaagatgcatccactttgtagaggaccatttgttccccgtaatcacagggcatccaccgtgcaaacttgaaggatctantgtancatcaggtctcatgct

SEQ ID NO: 58709 - DNA, 471 bp, Gossypium hirsutum
  Clone ID: AI726707.1
aagcacttaagtctggattggctccaaatgtctcggatgctcacacaataaatggacatccaggacccatctctagttgtccttcacagagaggtttcacattggcagttgaaaatggcaagacctatctgctacgcctcatcaatgctgcacttaatgaagagctgttcttcaagattgctgggcacaagctcactgtggtggaagttgacgccacatatgttaaaccgttcaaaattgacacggttgtaatagccccaggacaaaccaccaatgtccttctctcggctgatcaaagttctggcaagtatttagtagcggcttccccttttatggacgctcctgtcgcagtcgataacctgacagcaacagcaaccgtgcactactcaggcactcttgccaatacccccacaactctcactgccccaccaccaaaaaatgccacagcagttgccaacaaatttataaact

SEQ ID NO: 58710 - DNA, 475 bp, Gossypium hirsutum
  Clone ID: AI726683.1
ctataatcttcccaaaacactacaaacatttcctctttgcaacatcagaacttgtcacatctagaagagatcctaagatccctctcatgggctttgatcttttctctttcatattcataatattttcatgggcatcatttctctcaatgaaagctgaagctgaagctgaagctgaagggattaaatcagctcgccttcttgatcttctcattagggactacactgtgaagtctcttgacagggacttgagaacaggtattgtacacactgtaactttacctgcaaatttctctggcatcaaagtggatacagtaaggttcagatgtggaagtcttcacagatatggtgctcaggttaaggaatttcatctgggaagtggtgtgattgtgcagccttgtgcagagagagtgatggtagtaagacaaaacttgggttataattggtcatccatctattatgctaactatgatctatc

SEQ ID NO: 58711 - DNA, 577 bp, Gossypium hirsutum
  unsure (1)..(577): unsure at all n locations
  Clone ID: AI726676.1
gtttctccaaggtagactaaatgactctgaggtcgttattcaggattctatcagagtactagaggaaaatggtcagggggagtcaatggcatgcatcaggagattacgatatctggcgcagatatacataaaatccaatcgtatttcagaagctgaaaatatagagagaaaggtccttcatattatggaattatctaagggatggaactcattggacactgtanttgctgcagaagggttgggcttaacattacaatcatctgggagcttaaaagaagcacaagaacttcttgaaaggtgtcttgatgctcggaaaacattactccctgaagatcacatccagattggagccaacatgcttcacattgctagggttgtaatgcttaattacaatcaacttagggggatgcatgtttctgatgcaattgctgagcttgacaaggcaaaaggtcttttaaacaatgcaataaggataacaaggaaagttattantaaatcgaaaacacaaaacaagaaacaaggttatggagtttctggagaaactaggcgagatggttatgcancagtgatcatactg

SEQ ID NO: 58712 - DNA, 574 bp, Gossypium hirsutum
  Clone ID: AI726657.1
gttgctcattcagtaatggagaatatgtgaaagctggtttagctgaattagaacaatggtgcaacgaggcaaccgaggaatatgcaggtttggcatgggatgaactgaaacacataagacaggctataggattcctggttattcatcagaaaccgaaaaagaccttgaatgaaataactaaagagctttgcccggtactaagcatacagcaactatatcgaatcagcacaatgtactgggatgacaaatatggaacacatagtgtgtcatcagatgtcattgcaaatatgagagttatgatgactgaggacaccaacgatgccgttagtagttcgttcctattagaggatgactcaagcatcccgtttacggttgatgacatctctaagtccctacagcaaatagacatagccgacatcgatcctccggcactgatccgcgaaaattccgggttcggtttcttactcccacgttcagaatgataattacgatcacaatctcacatattatcgacacatcgagatcactgtactagtttgtgcatatacctacatcatgtctatactctatattt

SEQ ID NO: 58713 - DNA, 615 bp, Gossypium hirsutum
  unsure (1)..(615): unsure at all n locations
  Clone ID: AI726612.1
aaaaaaaatacacattcgaaaaagaaacgcctttttttttaatatatatttaaatttccatttacaattttaaatattttttgacgccaatcaaagacaacaatcggacgaacgaagaagaaaacccagaagaaaagaaaagaaagcaaaaaggaaaaaaattcacgtaacagaggaatgggagcttacagagcagatgatgactatgattacttgtttaaggttgtcctgattggcgactccggtgtcggaaaatccaaccttttgtctcgatttacaaagaacgagtttagccttgaatctaagtccaccattggggttgagtttgcaacccgtagcattcgtgttgatgataaggtcgttaaagctcagatttgggacactgttggccaagaaagatatcgtgcgataacaagtgcgtactaccgtggtgctgttggtgctttactagtctatgatgtcactcgtcatgttacatttgaaaacgtaaaaaggtggctganagaacttaaaggtcacaccgatgccaacatcgtgattatgttagttggaaacaaggcggacctgcgtcacttgcgagcagtctccaccgatgatgctaaagcttttgccgat

SEQ ID NO: 58714 - DNA, 759 bp, Gossypium hirsutum
  unsure (1)..(759): unsure at all n locations
  Clone ID: AI726558.1
ggtttttgtcatattcttctcctaaaaccatggcgaccagtttgattcgacgggcgatgaatatggcatcacgagtgtcatcaccaacggtggctccggcgtcgaggatggtggtggttaggccgtacgctagcgaaacagaagctcaaaaggtggaaccaaaagccgccgcctcccccaacatgaagaccttccaaatctaccgatggaatccagataatcctaccaaaccccagctccaagactacagaatcgacttaaaagaatgcgggcctatggtccttgacgccctcatcaagatcaagaacgagatcgacccgtcgctcaccttccgccgctcctgccgtgaaggaatctgcggctcttgtgcaatgaacatcaacggctgtaacggcttancttgtctgaccaaaatcgaatcaggatcgtcggagaccaccataacacctttgccgcatacgttcgtgataaaagatctggtggtggatatgaccaacttttataatcagtataagagtattgaaccgtggttgaagaggataaacccgccgccgacggcggganaagagattccgcaaagtanaaaggataaagctaagctagatgggatgtatgagtgtantttgtgtgcttgttgtancactagctgtcccanctattggtggaatcccgagtcttatctaggtcctgctgctttgctccatgcaaacagatggaatagcgacagccgtgattaatactcnnaggagagattggagc

SEQ ID NO: 58715 - DNA, 754 bp, Gossypium hirsutum
  Clone ID: AI726535.1
ggaaagaaacaaacatgaaagcagtggtgataacaacagcaggtggcccaaaggtgctgcaattgcaacaagtaaatgacccacagatcaaacaccatgaaatcctcatcaaggtagaagccaccgcattgaaccgggccgatactttccaaaggaacggttcctaccctcctccaaagggtgcaagtccttatcttggtcttgaatgttctggcacaatccaagctgttggcaaggatgtttctcgctggaaagttggacatcaggtctgtgctcttcttaatggacgtggatatgctgagaaagtggcggttcatggtggacatgtactaccaattccgcctggtgtttcactcaaagatgctgctggtttacccgaagttgcttgtaccgtttggtccactgttcttatgatgagtcgcttatctgctggggagactttcctggtccacgcgcgttctattggaattggcactttcgcaattcacatacctaacaccaaaggagcaaccctattggttacagcccgtagtgacaaacacttggctttctgcaagacacctggagctgatgtgtgcctccatttccacagagacgactttgtcgctcctcctcacgaacacccggcaggaacggtgttcatgtcattctggattgccttcggacctcctaccccccaccacacttgaacaccttattccgaatgaaggcctccactatcgcctccaccgtggaccatccctgaatcttaccc

SEQ ID NO: 58716 - DNA, 567 bp, Gossypium hirsutum
  unsure (1)..(567): unsure at all n locations
  Clone ID: AI726460.1
cagaattttttttttttttttttagatcggcaacagcaacagcagcnccattttggcaaacaattgcttgtgcggcgtggaggcggcttcttgatacgggcatctcacccatacaatgccttcttcctctaaaactccttcacttccaaccatcctacgtcccccaattccatccccccctttcattgtttaccttaaacacatccccattgccactcgagttcctatcacctctaccattgcctccatcccttcctctcctctcccctccctcccccttcaatgggggttttctctttattctttattcttatatatcttttttcttatatactgtttctcctatattttctatattcccttcttttctccctactttccttactcattctttcttctttttctctttccttatttctatccctcactctctctctcccctctcttctttctttttcccccctctcgctccttccctcccttccctcccctctctctcctttccccctttctccccctcccctcttctccttctccctttcttccccctctcctctccccccttct

SEQ ID NO: 58717 - DNA, 576 bp, Gossypium hirsutum
  unsure (1)..(576): unsure at all n locations
  Clone ID: AI726417.1
gaattttattggatgaaaaatggtgggcgtagagcgttgacgtcggcgacggctgagtggccacaacagaacctacatactccaatacacgattcaaaatacagatatcagagtgagtgagagatgaggcgacaggtttaatccaaattcgaaagggagattgaagcagcaaggaacaacaacaacaaaagtagagcaagactaagatcgagttgatgaattgtgcaaagaaattggaataggaattaggaaaaaagaaatggcttacaggaggaggcaacagcagcagcagcagcagcagggaatattaacatcatcttcatcatcatcagctgatgtagatgcagatgatttggtggatgtcgaagtaaatgcagccaaagccataagggcatcttctgcgcacaaagattcgtctttctcctccgcttatggctatggtccccttcattcttcttctgcttctcctctctccgcccccaaggattcccgctcccatcaatacgaatctatgaaatctctaaatgaatccaagcaaggattttggggttctctcgctanganagctaaatcctt

SEQ ID NO: 58718 - DNA, 568 bp, Gossypium hirsutum
  Clone ID: AI726414.1
atcaaacaagctgagagatgaagaaagtagagctcatattcgttccaacgccaggaattggccacttggtctcaactgttgaattcgcaaagctcctgatcgatcacaatgatcggattcgggttactattctttccatgaagtggtttccagatgctgctttagatgcgtacaccaaatccctcactgctttgccacctgatggaatccaactcattgacctccctcgagtggatcctccctccttagctccttggaagtcagccgaaagcatcatagattcgttcatcaagtgctacatccctcctgttagaaacgctgtcagagacattgtttcaatgaaatgtagctcggatgaaaccagagttgcgggattagttcttgatctcttttgttcacccatggttgatattgcaactgactttgatcttccttcttatatattcatcacctcaaatgcagccttcttgggtctcatgttttatctaccaactcgacatagcctgaacagctccgaattccaaagctcagatcctgaacatgtgatcccaggctttgtctgtcctgt

SEQ ID NO: 58719 - DNA, 569 bp, Gossypium hirsutum
  Clone ID: AI726412.1
ggaggatttcattgttagggcaaacactggtgaagaaggggagggtgatgagagtggtaagaagttgaattttgttgaagaatttgagtttattgatgccagtgttaagaatgctgatacaaaatccggcaatcaagagattgcaaatgaagtaaggaattaccaaggggaagaaaagccacgctcccggcgccttttggatgagcaattcgacattcttgaacttaaagaatatggctccgatgacgacgatgatgattgtgagggttacatggctgaagaaaaagagtttctggcagacaagctgaaaaatgttctaaatgaaaatgatatggatgatttggagcatgatgatgtatataaagctcctgctgatttattgcatggtagtaagagtcctaaaagcaaggagctaactgctgatatcatgcgtcgttgtgctgaatacgccgaaaattatgaaaatgaaagtgaagatgaaaaagtgatggttgtgcaagaaagcagcgatgaatcagaacaatttgattgtgagagcatcatctccacgtattcgacccttgataacc

SEQ ID NO: 58720 - DNA, 1046 bp, Gossypium hirsutum
  unsure (1)..(1046): unsure at all n locations
  Clone ID: AI726401.1
ccaccccacgcgctctgcgcgcgctcgtgtgtcgcactattaatgcatcactagatgcaatacattcagtactcacctaaccccgagagacaggagtaatggcgtgatgcnaganaattantngtcnagcantctggtgcgtacttctaancananannanannnnatccgtccccccaccacccaaaaancncgnnancattcggaccacnaacaccccacncacaccccacaccacccacccaggcccaccacaccacgggccaggacgcgtgcgacgcacaacacgcccacccaggcgcccacgcgcgcgcgagggcggcggggatccaaccgcacaacctcccactagtcgcacctcacgcacctcctcccatgtctcccagctaacacacacacacaccagagcggacgtgtgattgaccgctccagcccctcgatccccgcaccaccacccccgcccccggcgacctcctcgagcgcagccgcactaactccaacacctgacgggccctcgcatcagcggtgtgaatcccaatcggccggcaatcagacaacagcacccagcaacacgataaaccacgtgccaccctcgcaccgccctcccacgcagacccggttctcgctctcaccctcactccatacccaatccacagcacttctgcgccgcccctcctccctcgcccgtccgtcgcctgcgttgccacacccgcccccgccaccccaccatctacccgcgcaccatccatcacccacgcctcgtaacgccctttcgcatcccacctctcgactccctcccacgacttcaaccagcctcacctgctccgcgcacctcgcgccacgctccgcataactacgaccctacctacaccgtcatacctctatatctcctcgcgcaccacgtcacgacctcctcgctcacatccccgctccgtcacctcccatcgcttggcgcctagcctcttcacgctccctccatcagtgcctcctgctccctgactcgcccgtcgcctcacccgcgccgcaccgtcagacctcgatctccc

SEQ ID NO: 58721 - DNA, 827 bp, Gossypium hirsutum
  unsure (1)..(827): unsure at all n locations
  Clone ID: AI726400.1
tcagtttgtggctcccnccaaatantntgnttgcgtctcttcaaaataaannnnttngtcccccccccaaaaaacatattttttccacatctacacactctgtatctcttcctatccctgggctcccccccttctataaacttggtttactccttactattatccatactttgggggaatgggggaggtgtcactaaatatttttttttcttcctttaaaaaaaaaaaaatattgttatgttcatttatacattctgtctcctttcatcttatattttttttttattacctttaatttattctttatgattgctacctttttttttcttcttatttatcctattataccatctgtatacatacttgtctacttacgacttatcacgacttatctatctttaacctccattattcccttttatcctcttctatattaactcctttctctttatctctcctctactacttcctctacttttctatcaattcctatctccttaacaatccactcatttttattcttcgctccattttattctatcgtctcctccttaacctatttactctataaccttactctcctccatctatcagtcctatcataccctcaagtcacattttatacttatattaaatcttaaatattctaacctagctttttttacctacttatcatgatacattatcttattttccacttagcacttttattctaactttcattctctaatatacttatccctttatacttatactatcatcttcttacctacgcttcacaactcctccttattttatactaaccctactctttgctcttatctctt

SEQ ID NO: 58722 - DNA, 561 bp, Gossypium hirsutum
  unsure (1)..(561): unsure at all n locations
  Clone ID: AI726389.1
attgcgccaaaaaagaactcgagactctacaatctccattaacaaaatctagggttttcaaaagaagatgagctcaacagtatcaacaaagggaggcaganaggcaagcctaagtcctccaaatccgtctcccgatctcaaaaagccggcctacagtttcccgttggccgtatcgcccgtttccttaaagccgggaaatacgccgatcgtgtcggcgctggtgcccccgtttatctctccgccgtccttgaataccttgctgctgaggttcttgaacttgctggaaatgctgctagggataacaagaagaatcggatcgtgccgaggcatattcaattggctgttaggaacgatgaaaagttaagtaaacttttggggactgctaccattgctaatggaggtgttttgcctaatattcatcaaaatctgttgccgaaaaaaattggtaaagggaagggtgatattggatcggcttcacaaaaattttagacgattctggagcgtgaagaatcccttttgtttcggaaatttatccttatattcttttaattggaaactgtc

SEQ ID NO: 58723 - DNA, 460 bp, Gossypium hirsutum
  Clone ID: AI726364.1
gacggggactggtgcaggtactaggctatggctgggctgggctgctgaggaaatatgtggtggagccagctcacatgtggtggcctagcactttggtgcaggtctctcttttccggtaagttcctaatttccggcattggtgtaacttatctatacgctattaacagtaaatttggtatcgcagcatattattagattttgtcacattcattatgtgagtaaaaataaataatattaaaattatatttataaataaatttgctcagactcgagtttaatatttagatatctcctttatagttgttttatttaaacatttcataacaattagtacaaaacaaaaatgtcattatattaataattattattttattaaaaaatatattattttaattaaaactaatattcaattaaaaaaactatttctcttttgaaatatattatttttcacccagtgaat

SEQ ID NO: 58724 - DNA, 612 bp, Gossypium hirsutum
  unsure (1)..(612): unsure at all n locations
  Clone ID: AI726354.1
ggtgccgaatggaggcaattgaagcaagaaccatatggttgtaggattgggcaggtggtatgtacaggaagattttgatgaggatgaggatgaggatgatgaatgcaactcggaaggtggtantaggatgggcgaaagaatataaaagatatttatccaccaccaccacgaaccaaatattactgtctccacctcttgtctctgtcgaccttccagaaatttggggttccacttccaccctctatcatcaccatccctcccaaagtcctgtatctcacgcaaaaataattaatggaaagtctattgctgaggaaatcacatcaagagtagcctctaacgtaaaaaggatgaaagagtccattggcaaagttcctggtttggctgtaattttggtgggccaaagaaaggactcattgacttatgttcgtaacaagataaaagcttgtgaagaagctggaatcaaatctgtggtggcagaatttcctgactcttgtgctgaagaggatattatgacttccttgtcaaagtttaatgaggatccctcanttcatggtatccttgtgcagcttcctttgccagagcatttggatgaagagaagattttgactctgc

SEQ ID NO: 58725 - DNA, 615 bp, Gossypium hirsutum
  unsure (1)..(615): unsure at all n locations
  Clone ID: AI726346.1
cagagtaagggatccaatagcaaagtatcaaatatggtgtttcgaacacgaatctcttcgttgttgatctccatgttcgccatttttgcttctttttatgttgctggcagattatggcaggatgcacaaaacagggtttatttgataaaggaacttgatagagtaacagggctgggtcaatctgctatatcagtggatgatactttgaaaatcgttgcttgcagggaacaacacaagacattatctgcccttgaaatggatctagctatagctagacaagagggttttacttctaagcgttcatcggatactancggggctgtttcaaagagaaagccgctggtagtaatcggagttttaacgagatttggccgtaaaaacaacagagatgctatacgtaaggcttggatgggaagcggtgaaactttgaagaaaatggagaaagaaaaaggtgtagtttcacgatttgtcatcggaagaagtgccgatcgtgaggacaatttaaacangagcatcgatgatganaatangcaaacaaatgactttatcattctcgaccaagtcgaagcacccggagaacttccaagaaaattcaaatgttttttgctcttgctc

SEQ ID NO: 58726 - DNA, 687 bp, Gossypium hirsutum
  unsure (1)..(687): unsure at all n locations
  Clone ID: AI726319.1
gatcattcgtaataatgaaacgatgcacaaggctggtcagctggaggttcaaatattgaaaaaattagcaggtgcagatccagatgataagcgacattgtgttcgttttttgtcaagtttcaagtacaggaatcatctttgtttagtttttgagtctcttcatatgaatctgcgtgaagttctcaagaagtttggtcgcaatattggtcttaaactaactgctgtcagggcttatgctaagcaactttttattgcgcttaagcatctaaaaaactgtggtgttcttcattgtgatataaagcctgataacatgctggtaaatgaggcaaaaaatgtgctgaagctttgtgattttggtaatgccatgtttgctggtaaaaatgaaattacaccataccttgttagccgcttttatcgtgcaccagaaattattcttggtttgccttacgatcatccaatggatatctggtctgttggttgctgtttgtatgagctatatactggaaaagttcttttccctggtccaacaaacaatgacatgctacgtcttcatatggaactcanaggtccttttccaaaaaaaatgttgcgtaagggagcatttacagaacaacactttgatcaagatctgaattttcatgctacagaaaaagatcctgtnactannaagagtataaagaaggagaa

SEQ ID NO: 58727 - DNA, 685 bp, Gossypium hirsutum
  unsure (1)..(685): unsure at all n locations
  Clone ID: AI726315.1
aatgatgagaattgttggtttttggaagtaggagcgaaagttagggttagggtttcgactgaaatgcaattgaaaatgtttggggatcagaagagagtcgattttgtggataaagctgtttgggctttgaagtttttaagtgatgaagagtataggaatttcgttactcaatttcagaattgtttgtttgagaatgtttatggtatggaagctagtgaagagaacaaagttaaggtttgtggaaaggaatttattgggtggatgaaacccgaggtggccgatgattccatgtgggaagacgcggatgatctgagctcgggttcaattccggttaaagggaatcgagagttgatggaagagtttgaagaagctgctaatggaggtgttcaaagtttggctttaggtgcattggataatattttcttggttaatgatttgggtgttcaagtttatangaactttaaccgtgggattcatggganaggaatttgtgttaagttcgatgctggtggttcgagaatcggaggaagtccgtcgagttcgactcccaaaaaggctttgttaatgaaggccganaggaatatgatgcttatgaattcaaagaaatgaagganacaaatgcaacagggctcaancaagttgatatcnaaactgggaaaattgtcncngagttggagtttcgatt

SEQ ID NO: 58728 - DNA, 690 bp, Gossypium hirsutum
  unsure (1)..(690): unsure at all n locations
  Clone ID: AI726314.1
gaaatatcttagtaacatagcatttttgttgtatctctatgggtaaattttgggccatcatccactgcaagtgacaaaatgaagcattcaaattctaccaaatatgactgctagggaagtggtaacttcttttaattactgtgaagttaaatcataacatcatggaatgcaggttaatagaggtctattatcttcaggaattatggcttcttatgttgttttcctctgttggtctgccattagaagtgaaccagttgatgaaaaatgtaatgtacaaaagccagataaccggaaattcgattggaccaccgtacttgggtttctgattgcaataggtgctattgtcatggcaaccttttcaacagggattgactccaaatcatttcagtttaacaaaaataacgttaaactagaggatgatatacgttacaactatggatttttccacatgatattctctttgggggccatgtactttgcaatgttattcatcagttggaatttgaaagactcagcaaccgaatggagcattgatgttggttgggcaagtgcaggcgttaaaatcatcaacgagtgggtggcagccaccatatacacgtggaaattggtttanccccgttgtgaagcaatatagggtattgaacaatgagcaaaccatgcagccttgaatttgttctgctnacanagaag

SEQ ID NO: 58729 - DNA, 646 bp, Gossypium hirsutum
  unsure (1)..(646): unsure at all n locations
  Clone ID: AI726242.1
gcgtgcccaacaaaagatcgggaaacttttcaatttctttgtttcaagtccttcgtatggagtgcagatttgattctaccagacctaaagggggaagatggcgatcccgctgaacattggatttaagatgccgctccttggtttacgtgtttggcatatggatggaaaagacgttagatacctcatcatcaactccatcactcttggttatcgtcatttccattgtgctgctgactacgagaatgaagcagaagttggtgacgcattgtctgaaccattctaaacctggcttgtcttgcaaacacgacctctttattacnaccggactttggaattctgatcactggcatgttcttgacgcctgtatatacaatcttaataagctttcaattggattatctggatttgtatctagttcactgtcctgttgctctagtacacactggagtctgtctaactggctgtcctttggactatgatggagtcctggacatatacaccactatatcgttggatactacctggcacgcgatagaacacttggtttcctagggtttagttcgtancatcgggatctgcngctacgacatcttgtttactacagattgcctagcttactcctcggttgagcctgctgtataccacc

SEQ ID NO: 58730 - DNA, 643 bp, Gossypium hirsutum
  unsure (1)..(643): unsure at all n locations
  Clone ID: AI726239.1
gaaccgagtacttcgtattcaagaacaagccaagagagattgttaccgagttccgattcagcagcatcacttttccttgtctatcaagaaaaccctcttttcgtggatgataagaacgagttggataaccaacttaccgttcttgattcagttggagaaaagcttataaatctatcagcaaactcgacgtcctctgtgaaaaataacgacaagagtatattttggataccccaaaatcacaatgacgaaaagccttgcaaaacccgaagtggtcgaaatatagtcatccctcctagttcaagaaccttgctcgacaagttttctcaatatgatcaagatgcaaaggaaggtagacttgtcaatacagactacatggttaactcaaacattagagatgcggttgcattaggtcgagcatcctcggtacctccaccgttatgctcgttttgtcagcacaaagcaccagtctttggcaagccgccgagacggttttcttacgaagagctagaggaagctactgatggatttgcagaagtgaatttcttggcagaaggtggtttcggtgttgtttatanagggattttacgaaatggtcaagttgtancggtgaagttgttaanatntgttggttgtcaagcagata

SEQ ID NO: 58731 - DNA, 639 bp, Gossypium hirsutum
  unsure (1)..(639): unsure at all n locations
  Clone ID: AI726230.1
acgcggacgcctcgactgtggctgccaacatatgatgacaagaatacggtcttctctaagatcgaacaggaagtcgagatattctcggggtccagtgagaggtatggtacgatatacatgaaatctgctactatctgtttggagaaaggtgctgattatcccaacaatgaaatctaccggctgcagagcattcttgaccagtctataagcccagctaaagcagatgaattcactctcatgaacaatatcctatccacatctatgtgaacttacttcactgttttcaccaatctattacactggcatggggctctagttttcaattacgatttctaggattggttttgcctcccattgctgggatccactcacgtctcattttgatttgaatctctgagagcaatggctaggcctcttatactctattattacaatactttccttgagattatctatagcaaatgatctaatcatacagttccgtatttatgtgctattctccaagaattacaaatgtttactctccgtccaccctagcagaatttatttcatgctctctggactctgtgaactctnggaaacgatatctttctgcttttagctcccgagatntaccctctttatttgtcaangtgtccc

SEQ ID NO: 58732 - DNA, 558 bp, Gossypium hirsutum
  unsure (1)..(558): unsure at all n locations
  Clone ID: AI726225.1
cggccgcgtcgacatggcctccaaaatctttcaatggcacttcaccatcctcaaccacaccaacatgatccactcacacattagaggccttttcctcttgctgatctttttctctttactttttctcatcaccactctcttcctttgtgctcattgggtttatagccactgtctcctctcaacagctgatgcgatggctaatgcaacaccaccaggttcttccttagggctggaccctaatgccattaataacttgccaatcattttgcacacaaaaggagaagaaactgagtgttgtatctgtctangggtgtttgaagatgaaaagatggtgaaggtcttgccacaatgtaaccatgtctatcattctcaatgtgttgataagtggctcggttctcaatcaagctgccctctatgtaaagcttgtttgaatccattcacttctccattacttactcggacacggttgtgagtatcccataaaatattgtttgaatatttttatatatttagaggatctttanagatcatattcnaaaaaaaaaaaaaaaaaaaaaa

SEQ ID NO: 58733 - DNA, 1435 bp, Gossypium hirsutum
  unsure (1)..(1435): unsure at all n locations
  Clone ID: AI726212.1
acacaacaacacaaaagaacgagcgagagaagggggaagcgagaanggaagaggaagtgagacagagagaggacacagaaacggcgggagagcggaggagaagagagagaagagggagagagtagaagagaagatgaaggacgagaggtaggaacaagagagaagagagagagaagaggacacagagaggagagaagagagaagaagaggaggaagagcggagggaagagagaaagagggaggaagaggggaagaggggaggtggaaaaggagaggagagaggggagagaggatgaagaggagagagtaagggagaggagagagagagagagggaggagagagagagagagaggggagaaggaaggggaagaaggagaagaagagagcaaggagagaggacggtgcgggaagaagaagggagaaagcgaagagaggaagagaggaaggaggaggagaagagaagcgggaaagaaggagaggaagagagagggaagggaaggggagaggaagaagagaaggaaggaggaaagagagggaggagaagagagaaagaagggaggaggaggagaagggagaaggaggggaggagaggagaagaagagaagagagaagagagaggaagagagaggaaagaggagagcggaacagaagagcgacagagagggagggaaagagagagagggggaagaaaagaagcgaggagaaggaggagaagggacaacagagaggaagagagagaggaacggggagagaagagacgaagaacgagaagcggcggtagaganaagagagaagcacgacagaggcagagagagagtacgagggacgaagagggacgcaggaggagagaagagagagagcacgagagtagacggagaggagagaagagagtgaggagagagcacgagaggagtaagagacgaaggaagagtacaagagcgcacgcgaagaagcgacgaacgaggagagaagagtcgcaggagagcgagaagacgggagacaggagcagagacagaggagagaagaaagaagaaggagagagagggagaagggctagagacagagaagaagaagagcaggggagcaacgaagcgaagagcagaagaagagagcacagagagagcggagagagagacgacgaagaaatgagagcagcaagacggcagggagcagagagagcaacgcaggcgagagagcgagagacagagagcagcgagagcgcaganacgcggagagcagcagagaagagagcgagaggaggagacggagaacggagagcatagaggcaggacagagcaagagagaaggagagcaggaagaagacgagaagagggagagacaggagagagaagagacgaaacgagaggaagagacaggagggacgaacgaaacacagaggagagcggagaagaagaggcacgggagtaggagaac

SEQ ID NO: 58734 - DNA, 615 bp, Gossypium hirsutum
  Clone ID: AI726207.1
cggccgcgtcgacctctattatcttcgacattcccttccgagctatctcctctttaaaatacgaatcctccgctctgtctgccatctggttccttacggtctgtattatctcctgccacgtccctccgattttgaggaactggaatcataatctaagccgaatattgactcatcgttatatgtcgcgagcaagattctttaacggaggggagaactatatctggagtaatgcaaaatccttgagtatatcaagatgcctctctccaccacctagataggctcttatctctctgtcgagacctcacccttgcttgggactacaattgttaataactgcactctgtggattgttgatgattatcaccatgtgtgttgccaagctccagagccattgtccaactgcataaatcatctcagattccgtcacatgataaacaatgttgtcttgattcttactggaaccttgcatgagagagatgttcattacctcttggacaactgccatccattcggcatctccgacaatatcgctcccctggccgctgctcataacctgcgcgaactctactcattggttctagttcacactcctctcgctccttacttctctgagtc

SEQ ID NO: 58735 - DNA, 352 bp, Gossypium hirsutum
  Clone ID: AI726199.1
cggccgcgtcgacgcggaattcgccgtcaacgagtataacaggctgtcaagctcgagtttagttttgcagaaggtggtgaaaggcgaaacccaggtggtggctgggattaactatcggctggttttgaaggcaaagaatggaagcgtggctaagaaataccaggctgtggtgtgggagaagtcatggctgaatttcagaaatcttacctcctttaccctcgttaagggttagattttattatcatgctatagatgttcatgtatgtcatctcgtccttttatgttccgatgttacggagaataaagtctttttaatacatatttacatcgcttaaaaaaaaaaaaagtcgac

SEQ ID NO: 58736 - DNA, 478 bp, Gossypium hirsutum
  Clone ID: AI726179.1
cggccgcgtcgacctcaagcaataatatgcgatcgaaataaaacgatacgggacactaaaaactcaccagatccgcaagtcccacgatctaaattaatcacctctccattctacataacctcccctcaaatctcacatccccaaactacagatggagaaaaatcacaacatacatcacacaacatgactcacaataaactacaacaatgctacccatatggctcgcttacacacacacaaactcacaatatgaacatcgggtatactatatggtaatgggagctccactaaatgatgtaagaacgaaatccctccaatttgtaactggagatcctaagctttgtcattcccagagagccagttaactaacatgccagaaccagaggaggattagatcagcaacatatgatggcaactcctcgatcacaacattataacacctctggatgtcagatagcatcctctcatcatctgtggc

SEQ ID NO: 58737 - DNA, 482 bp, Gossypium hirsutum
  Clone ID: AI726173.1
cggccgcgtcgacgtaactatttgacacttaatccactcttttttttatcattgtctccttttaattaatacgagaaaggtcgataaacggtcgaacaaaaagagatttaagttagaggcatggtggttaatggaagagtcatttgaagaaaatgtcaaaatcagttggggtttatcttcaggaaatctgttgcaaaagctagatatgctaaaggatgagttacaaaaatgggctaaaaaaagacgattagaaagattatggcgaaaagattttctcacagtcagcttttagaattaacagaagctgaaagagatgatgaaaagatggttgaactgattgatatgaatattcaattgaattttgaaattgagaaggatgaacgttattgggaacaaagagctcgtgtttattagttgaaattcggtgacaaaaatacatcatactttcacaaccaagcaacacaacgctgaagaaaggacca

SEQ ID NO: 58738 - DNA, 672 bp, Gossypium hirsutum
  Clone ID: AI726141.1
cggtcgcgtcgacaatttttttttttttttttttttttttttttttttttttttttttttttttttttttttttttttttttttttttttttttttttttttttccccaaaaaagaaccccttttccttttcccatccccaaaacccaattttgaaaacccggtcccccctttttctaaaatcccaaaaaacccaaaaacaaaaaattccccccttttacccctccttccccccaatttttttaaaaaaaaaaaaaaaaaaaaaaaaaaaaaaaaaaaaaaaaaatttttccccgcccccccccccgggaaacccccattccccccatttttatttttttttacccccccccctggcccccctttttacaacttctaaacgggaaaaaccctgcttttccccaatttaacccccttgaaaaaatccccccttcccccagtgggttttataaaaaaaaggccccccccattccccccccccaaattttcccccccctaattggaaattggaacccccctttttccggccttttaaccccgggggttttgttgtttacccccactttatacccccattttctaaccgcccaacccccccccctttccccttttcccccccccttcccccccattttcccgggtttcccccttaaatctcttatatggggggccc

SEQ ID NO: 58739 - DNA, 683 bp, Gossypium hirsutum
  unsure (1)..(683): unsure at all n locations
  Clone ID: AI726130.1
cggccgcgtcgaccgaaaattcaccccctcacccccccttctctctctctctctccaactaaacatttcacactctctttctataattttatttacttgtgttctttaaagagactggaattataccatgtttttcctagattggatctatgggatccttgcttcccttggtttatggcaaaaagaggccaagattttgtttttggggcttgataatgccggcaaaacgaccttgcttcacatgctcaaagatgagaggttagttcagcatcagccaacacaacatcctacatcagaggagttgagcattgggaaaattaagtttaaggcttttgatttgggaggccatcacattgctcgaagggtttggaaagattactatgccaacgtggatgcagtggttttcctggtggattcttatgacaaggagaggtttgcggagtcaaaaagggagttggacgctctgctctctgatgaagcattggcaagtgtcncattcctcatcttgggcaacaagattgatattccatatgcagcctcagaagacgaattgcggtatcaccttgggctgaacaatttcaccacaggcaagggtaaagtcaacttgggagactccagtgttcgaccccttgaggtattcatgtgtagcattgttcgtaaaatgggttacggagatcgtttct

SEQ ID NO: 58740 - DNA, 698 bp, Gossypium hirsutum
  Clone ID: AI726079.1
gaattttttttttttttttttatgaaattctttcttttatttcttctttcttgatctgttctagataagtgcgcaagctcatatatataatgacgataaatttataataaaatcattaaactgcaaggcttatctgtgattatgcactgcacatggatacaacttgctttcccctttcattgtttgtttaccctcaatgacttgaaaatctccactttgctctattattgtaaatggattaacttcagtcgatgaaaattacagtaatatacactccatcatctttgatgaaagaattgatcttttagaaatatttgtctagaaatcgaaacaaaaatcggtgcttttcattcgatctgtgccaacaagcgacaacatgttgtcataaacgtctatatacccgaacgcattggtcccaggaggacactctaaagcagcatcaagcaccctgtgatgaactccacgagaatcaactgaatatcctccttgatgattgtgtccgctgaggcaaaccttcacacaatcgtactggtgaatcaggtccattacttggtcgtagttccataaaaatgttgttttgcttgttgcacctggatctaatggcacatgacaacatattatcactttctgtgtcatatttgtggcatccttaagtacattatccagccattccatttgcttatttccgactgctccat

SEQ ID NO: 58741 - DNA, 700 bp, Gossypium hirsutum
  Clone ID: AI726076.1
caagatgatcttctttacgcattttcggcgttaaaccgggaccttaatttcatcgaacacacaagcgaccttggctggaaactggacaaaagagcaatgcctttgattatagatccgggactctatctttcaaccaagactgaagtagtttgggcttcacagaaaagaaaattacctacagcatttaaattgtttactggttcagcatggacagttttgtcgcgtccatttatcgagttcattattatgggatgggataatctacccaaaactcttctcatgtactacacaaacttcatctcctcccctgaaggttactttcagacggttttatgcaatgttccggaattcgccaagactgttgtcaatcatgatatgcattttattaaatgggaaaatcctccaaaacagcatcctcatatcctttcgcttaacgaactgggcaagatgattatgagcaacgctgcattcgctcgcaagtgcaaccaagatgatcctgtgttggataagatcgatgccgatttgcttggccgtgttaacgttagcttcacaccaggtgcttggtgctctgggaaactgaaatgttcagaggttggggactttgacaatatcaccccagggccgggaactccaaaggctccctcatctctttaaatatgttagctatgtaaaacttatcttcgcccaagatttatgtatt

SEQ ID NO: 58742 - DNA, 946 bp, Gossypium hirsutum
  unsure (1)..(946): unsure at all n locations
  Clone ID: AI726070.1
ctggcgttcccccgtgancttggtcatggtgccccctctgatgccgtactggtatcgtataagcttgtatatcgtaattcgcgcacgtagaacacgttggnatncnncgtcnnntnntnncttcnnaccttgtttacgcgcttgcnccatcgggctaccttcgtctcccctttttcccctcctcctttccgggcgggcgctgtgcgcctttctttcctctgtgttttcgtttcgtcgtgcctgggtttttgntctcgggcgcggcttttgtttctgcttttcgtcgcgtcgtgtctcttgtgttttctgttggtcttcccgcgcgtctcncctgtcttttgttgcgcgcttgtgttctccttttctttgcgcctttctctctcttcctgtgtttctttntgccttcgtccttcgtgtggctctctctcttgcccctcttctcgtgcttcgcgtctcccgggtgtctgcggtctctctctttcttcgcgtcgttggcgtgtcctgcgcccgccgtgctctttgcctgcctctccggccttcttcttttcgcgtctgctctgccgctttcctcctctccgtctgccccgcgtcttggttgcccgcctgtcgcgcgccttcggtctggctcgtcttgctcgcccgtgggtgcgtcgctgcctgtctctcgttttcttttttcgtggggtgccccttctcgtccctggtgttcttctgctcctgcctctgttcgtctctgcctgcgctttttggtttctcctttgccgcggtggtgttcgtggtgctgcttcctctgcgtgttctctctcttcgtttcggcgcttccgtccgtctctgcggtccgctcccttgctctcgtccttgtgttggccgtctggcgggtgtgcttttgtgtcctctgtccgtgcgttgttccttcggtctgtttctcntttgtggtgcgcttccc

SEQ ID NO: 58743 - DNA, 636 bp, Gossypium hirsutum
  unsure (1)..(636): unsure at all n locations
  Clone ID: AI726058.1
cttattccgctgacgactcctcttatgaggctgttaatgacaagatcactgctagggacaatctggtatttttgcaaaattggttcctcaaattcccccagtacaagaatagaagcctcttcattacaggggaaagctatgctggccattatataccccagctggctgaacttatgcatcagtttaataagaaggaaaagctgttcaacttgaaaggaatcgctcttggcaatcctgttttggaatttgctactgattttaattcaagggctgaattcttctggtctcatggactaatatcggattccacatacaaactcttcaccacttcttgtaattactcgagatatgtcagcgagtattatagagggaacgtttctcctatttgttcaagggtgatgggccaagtaagtaccgaaactagtaaattcgtcgacaagtatgatgtgacccttgatgtctgtatatcatccgtgctctcacaatccaaaatccttactacccaacaagttggtgatacgatagatgtctgtgtagaagatganacagttaattatctgaataggcaagatgtgcagaaggctctccatgctcgtcttgtangagtccataaatgggctgtttgcancantgtcc

SEQ ID NO: 58744 - DNA, 643 bp, Gossypium hirsutum
  unsure (1)..(643): unsure at all n locations
  Clone ID: AI726056.1
ctggaattaaaaccaaagaaggattttgatgttataagagaaaaagaagtagaggagtttgaacgcaatcgttcaatcacaacttcaaacagctcgaatgctgaagaaaaatacccgaagggcttacttgttgcgtttaaattgaagagtgcttcagctggggactctgctgagcaaaatggttctgatgaaaagaagactgcagaaaatgaaaatgacaaagaaaaggttgatgataaacatggaagtcccattgacaaggttgtcgagaaggaaaataaatcaagtatatccatctacaaagatgatatgaatgttgttttacgtgaggatttgaaggatgtctttgagaaattcggcactgtgaagtatgttgacttcagaatcagagaggataagggttacattcgattcgaacaacctgaagcagcccaaaaagcccatgctgcttcagcctcggctaaaggtggtctggttgtcaaaaatttcattgctaatgtaaaaccggtaacgggtgttgctganagtgagtattggagtctactccgtgacaaccaaggaaagcagagggtaggcaatcacttcctntgganggggangaaaaatcnncnnangtggaaaacnaagccgggatgganaatta

SEQ ID NO: 58745 - DNA, 645 bp, Gossypium hirsutum
  Clone ID: AI726048.1
gactggcggagtttgttaagaagagggataagagggttatcgatatgagtgtgaaaaggaaggaggagatggaaaggaagaaagaggaggagagggagacaaagaggaagcttgagaaggagaggttggcaagagttaaggcttaccaagagcctgaatgggcgaaagtccaagaggaagaagtggacaattgggatgaaatggacgagaaagaaagagagaaggaagagttctattgtgtggcctgcgggaagaagttcaagagtgagaagcaatggaagaatcacgagcaatcaaaaaagcataaggagaaagtggcggaattgagggaatcatttattgaggaggaataacaggacggggatttacacgtggaagccgatctggacgaccagtttaggcacggtttaacgattacagacgaacgggacgaccatcgacacactggccttcgttatctcactcacggggatcacccgtctttcgactcccatcctcgggaccactatctccacgccgttcacgtcgaccctcccccctgatccccactaataacaccctttccttgacccctcggtttcctcgcttatccattccactctttcttcttcctcacccaccgatctcttcctccctccccgacta

SEQ ID NO: 58746 - DNA, 637 bp, Gossypium hirsutum
  unsure (1)..(637): unsure at all n locations
  Clone ID: AI726044.1
agtttttgaaatgtcatttcttcaacaccttcttttataagaaggtagtttcagttttctatttccttattttgctctttcattttaatctttataactattggtttatcagttacttttttcccctcggcattgagatatgcttagttagtgagctccgagggtggttgtaattataaagctgtcaaaagatggacttcacaaagaaagttggggtactgcttgtttgattgtgataaaatatttgtacctatacacaaagatatacattggtgtttggctgttatcaataagaaagatcgaaagttccagtatcttgattcactaagaggaagagacggtaaagtgctgaacgcattggcaaattactttgttgaagaagtgagggacaagagtggacangacatcgatatnagttcttgggaacaagaacatgttgaagaccttcccgcacaaaagaacgggtttgactgcggtatgtttatgttgaaatatatcgacttttacagcagaggcttaagtcttantttcggtcaggaacacatgcgctattttcgttcaaggacagccaaggaaattctgaagttgagaagcgattgattggtaacactaacacgccgtgacattgaagatgttt

SEQ ID NO: 58747 - DNA, 668 bp, Gossypium hirsutum
  unsure (1)..(668): unsure at all n locations
  Clone ID: AI726031.1
ggtttgaaatttcccttttctttttgactggtaatccgtggaatcccttattttgcattcttgcttcttcaacagtcagtcctcattaacaggagagtcatggccaactgaaaaaactgctgatgcgagagaagatagaagcactccgttgctagaattaaagaatatttgtttcatggtgggtatagttgctccaatattactcttttgttccttgtggtaataatccttccgcaattacagaacctaagagtcatgtaggaaaaatattataatcaggattatgtttttctcaagttatattgttaatgtatcatgcaattcctttagtcacttgcatatttgaatcttaagtatgggaacttcagtgtagctaatatccaactgttgtctattagtatgtgtttagtcatagactattactacataatacgctgaggtatataccgttacgattaatatttcaggggacaaatgtggtatcaggtactggaactggtttanttgtctccactggatccaagacctacataagtgccgtgtgttcaactattggaaagcacaaaccagccgatagttttgagaaaggtatccggcatatatcntaccttcttgttggtgtaatgcttctaataatcaccatccagatactggtagagtaatttacc

SEQ ID NO: 58748 - DNA, 677 bp, Gossypium hirsutum
  unsure (1)..(677): unsure at all n locations
  Clone ID: AI726028.1
aggaaaaatgtcaaactcgcagaaaaagcggctcagcctctctttcggctcgaaccatggaatgcaggaaactgcgttattctttctaatatatatgcatcgagggggcagtgggacggtgttgcaaagctaaggaagatgatgaaaggtggccaaattacaaaggcagctggatatagcttcattgaagagggaggtgaaatgcataagtttctcgtggaggataaatcgcatccgagatgtgatgaaatatacgaaaccttacatcggatctcgatagtgatgaagctacaaaacaaattaattgactttcggtccgagcttacagtttgaactatacagtaaaaggccacaaagggttattccattaatcgaacaataaagatgcgtccgcaattacaaagtcatgtaggctggctgggtaatataanccaaatcgaacctcgtttctgctatctaggttggccaatctatttgccgatctaggtacaaaagcaaagtccaaatattcaaagtatcgancaaaaaaacgagcctcggaaattaaatagcacccttgtcgctcgaccgcccatcaccatgccgtctgcatctctagccatgactcccaancctgccgcttgctcatccacatccatagcancaccggcatttaccataacttagcgctccgatgg

SEQ ID NO: 58749 - DNA, 872 bp, Gossypium hirsutum
  Clone ID: AI726006.1
aacattcttcctgcaaatgcggcttcaacaagccctttttcctttaatcttcagttatctcaattcttcaggttcaagaatcgagctcttacattgctttctaaagacaaggagcttcagaattatctccctgcggaagatgatttcaacaaggccctttacatatttgatatcggccagaacgatctcgacggcgtattctactttccggcatcggatgaacaagttgttgctttcatttcaaagcttatgtcagaactcaactatggaatgaagagattatatgatgcaggggcaaggaatttctgggttcataacacaggtcccctcggatgcttgccgagaatcatcgctacgttcgggaaaaaaccgtcaaacttggacgaacacggctgcgttgcttcacacaaccgagcggctaccgttttcaacaaaaaactccacgatatgtgcctacagttcttagcacattcgcctgaagctaacatcacttatgtcgacattttctcgataaagctgaacctcatctcaaactattctctatacggattccagcaaccattatcagcatgttgtggttacggtggggcgccattgaatttcgacactaagattgcttgtggtgttaccaaagatctgaaccggagcattgttgacagcaatccatgttataatacagctgagtatataaactgggaatggactccttacactgtaagctgccaattgaattgttgcccaattaattctaacgggaaattactctgaatcccctcacttgaagaattcccactttctaactgagacaatccattggttttaaattgttcccctttattgaataagatcccggtttccttttaacaaaaaat

SEQ ID NO: 58750 - DNA, 596 bp, Gossypium hirsutum
  Clone ID: AI726001.1
aggaaactcaaaaaatcaaacacccgcgcgcgccttgacggagaaaaaaaaagatgagagccaccgcacgcggccgtcccaccgagtccttccatcctccggtagcacaacagtcacgtgattccgatgccagtttcgccagcagtcggccctcttccgtcgctattggccgcgccgtatccgccgttgaaccctatgccgaacgctctttccaagtggcgaccacccgttctattaacgctttcttctccactcattcaattccacctatctccaccaaaccttctcaagcaccgtccgctaaagagctcttgaatatccttacctccctcctttctcttcttggtttcccttgctccaaagtcgaggacgaactaggttttcttttgaaatctctaaattgccctttcaagttcaataaatctacgctccgtgcccctaatacccatcacaattggccaaattggcttggtatcgttcactggctggttcaacttgcgatctacaatgaacatttatgtcagaactccatatcttcttttgctcaaaacaatagcatgactgagtatgcattggagtgttacaaacgatttaaa

SEQ ID NO: 58751 - DNA, 598 bp, Gossypium hirsutum
  Clone ID: AI725983.1
attttttttttttttttttttaatagataattcaacccttaaatagatgtatttcaaaatgatgatttaccatatttaagatgttgcccaaatatgttgtaaactcttaacaaagtccctctttctatgaaaaatgacagtcccatgatcaacgttttgaacaatgatgagtttcagttgagggaatttcatcttcaagttgttgctgcagtctaatggaacagtcagatcttgatcaccatggatgacccaaacctttactttggcattaatcaaaattcccacataatcatccataaactttgatcctccacatatcacattgtgcatgctatgccatgctgaatgatgggtgtgccttgttaaatctactaccatgaagttgagttcccttgtttgagtgaatagcttgaaaatcctctcccatgtggtatggttcttgcaaataaggaagcaaaaaaatcttcccacatgttcgtaccatgtcataactgatttgccaaatgctagtggtggccatagtgtttttctagcaactgtgttgagtgccattgaagaacttgtttcatcatttgaatcagaaaagtaaggaggtgcc

SEQ ID NO: 58752 - DNA, 640 bp, Gossypium hirsutum
  Clone ID: AI725967.1
cagtcacaatggatttacgggttcaattcgtgtaattaattctacaactttgaaggttctcaagctttcttctaatcagttgtctggtgatttgccttcttctctaagaagctgtgaaatggtcgatttgagtaacaacatgatctctggtgatgtatctgttatgtcgaattgggaagcctctttggtggatcttgatttgagttcaaacaagttgtcaggaagcctgtcaaacttgcctcacttcgaggatttgaacacatttaatcttaggaataattcccttgttggtgctttgccttctctactggatacctctccaatattgtctgttgttgaactcagtttgaatcaactcagtggacatattcctggcagtttctttacctctacaacattgaaaagcctgaatctttcaggaaatcatttaactggaccaattccacttcaaggctctcgtgttagtgaattacttgttatgtcaacttatccccaaatggagtcacttgatctgtccaataattccttgacaggtggtttgccttctgagattggtaacatacctaggctcaaactactgaatcttgcaggcaacgaattatcaggtcagctgcctattgaattaagcaaacttagtgaa

SEQ ID NO: 58753 - DNA, 798 bp, Gossypium hirsutum
  unsure (1)..(798): unsure at all n locations
  Clone ID: AI725900.1
gattagcaaattctgggttgaatcaaagaaattatggttaattgcaggaccctccatcttcagccgccttgccatgttctccatgactacgataacccaatcatttgctggccacctaggtgacctcaatctcgctgccatttccattgccaccactgttattatttgcatcacttttggattcttgttaggaatggctantgcactaaaaactttatgtggacaagcttacggagcaaaacagtatcaaatgttgggtttatacttgcaacgctcatggattgttctcttcatttgttccattcttttactaccattattcatttttgctgctccgctcttaaaattcatgggacagccaaccgacgtggctgatcaaacaggtttagttgcaatttggctgataccatttcacttaagcttaccatttcagttcacactgcaaagatttctgcagagccaactgaagactgcagtgattgcttgggtttgtggggttgcacttgcagttcacgcattaataagttggatttttgtttacnacttaanaatttgggattgttgggacacctcttcaccttgaattctcctggtggtggactgttttnaggatcccttgtttatgttgtttanggtggttgtccactctcttggaatggttttcctaccaggctttctctgaactttgggattcgtcaaatctcncttgcttctggtgtcatgattctcttggagaatatttatacagaacattatcatattttctggatattgcccaatacaaaaactgcgttgatc

SEQ ID NO: 58754 - DNA, 683 bp, Gossypium hirsutum
  Clone ID: AI725893.1
gggaaatgagtccaaaatgcttcctctatggagacaggcagaacctaaatttctttggaacagttatatgttggaagcacttatagacaagaagcttgatccctatttgcttccagttgtccaagggagtatcctgtatggaactatcaattccagcattttgtggcatgagaagttcttatctcattttttaattaattcattattgttgttgacttctcggtctttcaatttgaagcatatccttaactgctaatgaggctttcataatttccaagcaactattggaaaagaaattgtagatgttacactgattgctaggagatgtacaaggagaaatggtactcaaagctggaaatgacttttcaatatcttttagcattcttcatataccttctaaaactacatttttcttgagaaataaggtcatttgctataacttttaaatatcctttctggtaagaagggaacaattccactttttgaatgatatgcaaaataatgaaattctatggcagattctccttctcttacaaacatttcttctgtgtcattcttttattggttaactttcatcgtttatatgaagcattaactaccaggattgtccatgcactttgagcttggtggaaaaaggagatagataatttttaaatgaacccggatgtggagaagaagaccgg

SEQ ID NO: 58755 - DNA, 681 bp, Gossypium hirsutum
  Clone ID: AI725870.1
actatttgatgttcgatgtgccgtagatcttctcaatcgtatggctcatgatgccttggaaactctctgtgagattacccagaaaatacgggaaagcattcgctatgttaaaagttcaaaagcaacacaagctacgttcaatgagctggctgatgaagttcaggttgaaactaaaaaatgcctatgtattgataatccattgaaatggaactcgacatatttaatgctagaagctgcctcagaatacaggaaagttttctcttgtttacgagatcgtgaccctgtcaacatgaagtttctactatctgatcctgaatgggatagactgattactgttactagcttcttaaagctgtttgttgaagttactaatgtttttacaagaagcaagtatccaactgcaaatatatttttccccgagatttgtgatattcacttgcagttgattgaatggtgcaagaatcctgatgaatatattagttcgttggctctaaagatgagaaagaagtttgaagagtactggtataagtgcagttcgggtttgggcattgcagctatgttaaatcctcgattcaaaatgaaactctgggagtattactacccgcaactatatggtgatagtgccacagaccttattgaagaatgtgtccaatgttttaaatcacttttacataaacttct

SEQ ID NO: 58756 - DNA, 694 bp, Gossypium hirsutum
  Clone ID: AI725851.1
aatgccaattgcacgattatttaccaaaaaaaaaaaaaaaaaaaaaaaaaaaaaaaaaaaaaaaaaaaaaaaaaaaaaaaaaaaaaaaaaaaaaaaaaataaataataaataaaaaaggcctctcaaaaaaaaccataaaatccttagaaggctctcctccttgggtaaatttccaaaatccaaattaaaatttcctcaatttcttttcggaattatttttacttccttttttttttttaagggtttcccaatgaaaaacactaatttttcaacgggttcaattcaccgaaatctcccccggggaatctggttctccccctttaataagaaacatttggttcacttcttcaaaaaaaaactttcttcccctcttttgcgggttggatttttggcggaggtttaatttttccattttggatcctggggaattgcctccaaaggtatttttgggtaaacaaaaagggttatttttttttccgaaaaaaatgaattttttcgattggacctaagacgacgggggtggctctctctggttttggaaagggcttcggaacggattttccggtgtttaatttcgggagggaacctatgggttggtttcaaaaaggcccgttttcccccggagggatcctccttttagggattctacccctttgttattttgattatttatggggcttgtttatctaactt

SEQ ID NO: 58757 - DNA, 692 bp, Gossypium hirsutum
  unsure (1)..(692): unsure at all n locations
  Clone ID: AI725835.1
gccttcacatagtcactcctttgatatctttggagctgctgaaatacccaaaactttgtcatgattacttctcacttctgtcacatattgtggaggtgtaccctgaaacacttgcacaattaaacagtgaggcatttgctcatattataggaactctggattttggacttcaccatcaggacttaaaagtagttagcatgtgcttgggagctctgaaagctcttgctgcatacaactatcgggagatctgtgcgggtaaaactggattggtttctgcaggacatggaaattcacccgaaggaattttcagccagtttctacgttccttattgcaattgctcctttttgaagattacagtcctgatctggttagcgctgcagcagatgctctccttccgttgatcctttgtgagcaaggcctataccaaaaattaggcaatgagttaattgagaggcagacaaatccagcactcaaatcaagactggcaaatgcattgcactcactcacaagttcaaaccatcttgcttcaaggctagaccgtgtcnactaccagagatttangaagaatttaaacagctttctggtaaaaattcgggggtttctgcgaacaatataatgtgggatcttttacaatgttgccagataattttgccatatcattctttgtgtgatananaatggagaagaaaaa

SEQ ID NO: 58758 - DNA, 695 bp, Gossypium hirsutum
  unsure (1)..(695): unsure at all n locations
  Clone ID: AI725833.1
aaactcccaatcacaaagccgccaccaatcaactcacaaactaaataaactaaaaagaacaatgtattcctcattgaatactaacggcaacgctgcagcctttgaaacagggccggtttcgggacgtttcgccgccgtttacagtgaagtccagaacagtcgtatcgaccacgctcttcctctaccttccgttcttagaaatcctttcaaagtcgtcgaaggtcctcctagctccgccgccggcaaccctgatgagattgcgaagctgtttccgaatctattcggacaaccgtcggcaatgttggtgccgaacgaagcggattctctccgatccgacctgaagttgaagatcggcgtcgttttgtctggaggacaggcacctggaggtcacaatgtgatttctggaattttcgattacttgcaagatcgcgccaaaggtancattttgtatggatttaaaggaagccctgctgggatcatgaaatgcaaatacattgaattgaatgctgattatatttacccttacagaaatcagggtggctttgatatgatctgtantgggagagacaagatcgaaactcncgagcagtttaagcaagctgaagaaacagcagtgaaactcgacttggacgggcttgtggttattggtggggatgactcgaacacgaacgcttgcctccttgctgaaaacttcc

SEQ ID NO: 58759 - DNA, 688 bp, Gossypium hirsutum
  Clone ID: AI725812.1
ggaaaaactcacagccgccatggagatgtcacacatctggttggcctttggagtcttggccttgctactggcatccgctcctgcggatgacttcttagtgctaacggactatcacttccagaatgaattccgtcgcaatcgatgacctctcctccagttctattctccttggtgtggtccctgtcaaaagctcgcccctgagtacgacaagcttgggtcgcgttttagaaacgctctgtccctcttcattggacacgtggagtgtgatgatcactcaagtgtctgcagcaaatactgtgttcacggctacccacctactcattggttcctccactgctctttggaacctttcacatagttaacgacaccaactgctaaggccctggctcactttgtcgtccctaaatgatggaccactgtgactatacccccattaccatccattgtgttattgctcaattcttatgatttcgatcaggttgtccgtgatgagaccaaagatgtgtgagtcgactttcatgcaccttggtgtcggcttccgcaaaaccttgctcctccctccgaaaacgttccattcgctttcataatggaggaatacgtcctttttcctcatctggatgctgactagccctgagatctaccctattaatgtggaatttttgggtatcctcccccgaaattcctccct

SEQ ID NO: 58760 - DNA, 684 bp, Gossypium hirsutum
  unsure (1)..(684): unsure at all n locations
  Clone ID: AI725808.1
cgatgatcttaaaagactagcatctataggcgtctctcttgattctaaggattcacaaggccgaacagcacttcacatggctgcggctaatggacatcttgatattgtggagtatctcattggtagaggagtggtgagaaaactgtcttatgaatattttctgtggttatttaatacataacatcactttatttactgagttttctgaaagaccagtattatgactgaatacttgaataaaagaagaggcatgtactatgtttttgaggtttaaatataatttaaaataagagggaaaaaaggtatattattcaattaagttcagaaatataataaactattttgatgtttgtagcagaggcaatatccatgttgtaaataaatttggattaagtaagagtcatttagcttccaaacttgatgggtggttggatttggtgcatantgtaaatgaaagaaaaaataagttatcatcaactttgttctctttacaccaactgttaatggaccctactangtttaaaaaggaaaagatnaatacttgaaattattaatgagccaagtagaaatttacatttattttttaagttaaatacaaaaatagtacactatccataccaaggtattttgtccacaagttccctgcaatgccaactacattggttatgaagggacacgtatttt

SEQ ID NO: 58761 - DNA, 593 bp, Gossypium hirsutum
  unsure (1)..(593): unsure at all n locations
  Clone ID: AI725788.1
ctccgaccacaaagatcagctggaaatggaagaacaagtagattctgatcgtcagttaatgatggaaggtggttttacggccccacacagtatggatattgatccatcgagggaacggtttccatgctgcattgtttgggcgcctctacccgttctttcatggctggttcctttcattggacacgtcggaatttgcagagaagatggaattattctagattttgcagggcctaattttgtatgtgttgaccatttcaccttcggaccagtggctcgctatctccaaattaacaaagataaggaatgcggcatttctccccattcatctgcacttaaaggagatgaagaataccacgatgatgaacttagaagacagacattaacatgggatgaagcacttcgaaaaagcacgatggagttccaacaccggtcatacaacctattcacatgccattggtccttcatttgtagcaaacaacctaaacaagttacggttccgttatcgagggtggactgtantgaacgttgcacttctcctcttactcaaaggccactgggtgagccaattaacattttttcggtctttcatgccc

SEQ ID NO: 58762 - DNA, 529 bp, Gossypium hirsutum
  unsure (1)..(529): unsure at all n locations
  Clone ID: AI725768.1
ctttctacaaagctctcaaggcaaggaagatgttggttaagatcctacaaggagtgctggatgagaggagagtcaatgacccaaatggaaagaaaggaatgattgatctgcttatggaaattgaagacgagaatgggcagaaattaccggatgaggatataatcgatttactgctcatgttcttgttagctgggcatgaaagctcagctcatgtagctatgtgggcaatcctttatcttcataacaatccagaaatactaaaaaaagctaaggaagagcaggaagaaatcctaaagaacagacaaagtacagagaagggtttgactttaaaggatatcanagaaatgtattatcttcaaaaggttattgatgagacactgagaaaggcgagtgtctccttttgcaactttcgtgaggcaaaagttgatgttaacatccatggttatttgataccgaaaggttggaacgttctggtttggaataagggtgttcatatggaccctcaagtttattcaaacccccaagaatg

SEQ ID NO: 58763 - DNA, 529 bp, Gossypium hirsutum
  Clone ID: AI725765.1
caaaaacgaaaaagaaaaaaaaaaactgttcacctgggacttagagatttagatcttaacggctggtgttcgattcttcgtcttatggcataatcaacaccgtctgatctcttcccacatgcgcctccatcctccgatctcatattcctaatcagcttctcagatccaattctccgaaatcaacggttctaaactcatttccctttaattttgcacaattcagatgaacagctgtgttatgggagcagaagagattaaaaaggacatggatatcaccagctggccttcagatttggcatatgagcagtgggtatcactcccggtttctggcgcacgaccatcagctcgatacaagcatgctgccgctgtagctgatgagaatttatacatcactggaggcagtcgtaatggtcgatacctgtctgatattcaggcatttgatcttaaaaacttgacatggtctagtctgaaactggagattgatcctagtgctgataaatcagaagaaagtggctttaaggaagttctt

SEQ ID NO: 58764 - DNA, 578 bp, Gossypium hirsutum
  unsure (1)..(578): unsure at all n locations
  Clone ID: AI725752.1
gagtggatgtcaagttctcagacgttgcaggtcttggcaaaatccggcttgagcttgaggaaatagttaagtttttcacacatggggagatgtaccgaagaagaggagtaagaataccaggtggaatacttctttgtggccctcctggggttgggaaaactttactaccaaaagctgtggctggtgaagcaggtgtaaacttcttctccatatctgcttctcagtttgtggaaatatatgttggggttggtgcatcccgtgtccgancactttatcaggaagcaaaggaaaatgccccttcagttgtatttattgatgagttggatgctgttggaagagagcgtggtttaatcaaaggttctggtggacaaaaacgtgatgcaaccttaaatcancttctggtatgcttggatggttttgaaggaagaggaaatgttatcactattgcttccacaaacagaccagacattctagatcctgcacttgtgagacctgaacggtttgaccganaaatctttatccccaaacctggactcataggtcgcatggaaattcttcaggttcatgctcgtaagaac

SEQ ID NO: 58765 - DNA, 577 bp, Gossypium hirsutum
  Clone ID: AI725750.1
gggaaaacacgaggatgctgctttagtcgtttacagtattatatctcatggcatggagccgaatgccgtaacatacaatacccttatccattctctttgtaatcacggttattggaatgaagtcgatgagatacttgcaatcatgaaggaaactttgcatcctccaaccgtggttacttacaatatattgatcaatggtttgtgtaaatatggacttttggaccgtgccatcaaattcttcgatcaaatggtttctcaaaactgttccccggacattgttacttacaatacgctgcttggcgctctttctaaagaaggaatggcggaagaggctcttcaattacttcaatttttaagtgggagcagctgttccccaggtttgataacttataacactgtgatcgacggatttactaaaactggtgatatgaagaaagcaatggaattatataatcggatgtcagaggaagggatcagtcccgacgacataactcatcgttgcttattttggggattttgcaggtcaaatcaattaaaaagagctgtagggatactgaaggtgatggtggagcaaaac

SEQ ID NO: 58766 - DNA, 578 bp, Gossypium hirsutum
  Clone ID: AI725748.1
attctcttatcacaatgtatgccaagtgtggtgatctccaatcaagcgaatgcatctttgatggattgctcaataagaacacaatctcatggaatgcaattattgctgcaaatgctcatcatggtcttgaggaagaggtcctaaaatgtattgtaaagatgaaaaatgctggtatagatttagatcaatttagcttctctgaaggtcttgctgctgcagctaagttggctgttttggaggagggccaacaactccactgtttggcagtcaaacatggactggacttggatccttttgttacgaatgctgcaatggatatgtacggaaaatgtgcagaaatggatgacatgctaagaatacttccccaaccactcaatagatcacgattatcatggaacatactgatatcagcttttgccagacatggctatttccagaaggcgagagaaactttcaatgaaatgctagaaatggggctgaagcctgaccatgttacctttgtctctcttctttctgcttgcattcaccggggcctggtggaagaaagtcttacttattatgctgcaatgagcaaatac

SEQ ID NO: 58767 - DNA, 584 bp, Gossypium hirsutum
  Clone ID: AI725741.1
caaatgggtgttaaattttctaggtgctttagccagtaatcgtaaacgcagtggtagtaaacgttgcaatccccattttaatcacaaaaacaaaaccctacattcaaattccctagtttttcaacgttctaaaaaactcagattttcttcaatggatcaaagcccagaaaagctagttcgtcattgaacgacaccgtttcgagactctctcgttacccggattccaagcttcatgttcctaaagaagttcaagcccctgttaaacaccttaaatttgggttatcaattccaaatccaaatccaaatcatgattttttgagtaaaaaattaagtaatgcaaaaaagcaagcttttggttcttttaagtatattaataaggataaagaagtggttaccgtggaggaagatgatgaacatagtgggagctggttaatggcggatgcgttcgacaagttgtcattgaaccattctgataacgattcgaaagcttataataagttgctaaagagtgctgaaaggagaactatcaagctgaaagattcgggtcctcaagttaaggtggtaactcatgaactgtttgtccc

SEQ ID NO: 58768 - DNA, 588 bp, Gossypium hirsutum
  unsure (1)..(588): unsure at all n locations
  Clone ID: AI725739.1
ggagactgaaggttcaactgatggtagtgatggaaatacaactgggacggatcaaagtaggaggaaaagaagcagggagggaacaccaaccattgcaggtggagatggtaaaactgaggcaaagtctaatgcagttgccgtggcagaggtaactacaaccatttcccctaaaccaattggaactgtactttctcctggcatgaccaccgctttggagcttaggaacccttcctccatgaatgctaaatccagtcctacaaacgtaccttgtggagtaatgcctcctgaagtctggatgcagaatgaacgagagctgaaacgggaaaggaggaaacaatctaataaagaatctgctaaaaggtcaaggttgaggaagcaggctgagacggaagagcttgcccgtaaagttgaatccttgactgcagagaatgcaacactcagatctgaaataaatcaactaactgaaaaatcggagaaactaaggctaaaaaatgctacattagtggagggactcaaaaacgctcaactaggacatacacaggaaaacattacgaacaaaaacaaaaacnaagagggtgaaatgtatgc

SEQ ID NO: 58769 - DNA, 592 bp, Gossypium hirsutum
  unsure (1)..(592): unsure at all n locations
  Clone ID: AI725735.1
gacaccgtttaggaagctggtgataatgggtctggatcggcttaaacgtggacgaggtcctgtggtggttaaaacggtggccggaacggtgtttgtagtgatggtgtcgagcgtatacagcatgatggagatccagaaacgttgggtcggcgatgatggaccggttagttcaacggaccangttcttatggtccgacaccttcttgaagctactctcatgggggccacaatattcctagcactaatgatagatagattgcaccattatatcagagaactccggataagaaggaagaccatggatgctgtcaaaaaacaaggtcaaggttccaatgataaaaaacccgatggctttgacaaagttaaatccttggaagaagaagtaatgactctgcgtgagaaacttaagcagctggagtctgatatggaggcaaagactaaacagattaatgctgcagaagttaatacagttgctttaaggaaacaatccgaaggtttacttcttgagtatgatcggttacttgaggagaacgaaagccttcggggtcagttgcaatctttggaccgggaaattttcacgttcggatagtac

SEQ ID NO: 58770 - DNA, 584 bp, Gossypium hirsutum
  unsure (1)..(584): unsure at all n locations
  Clone ID: AI725721.1
aataataatgtcgtggttatctagatccattgtcaactcgctgaaactcgacgaagacgatgatgaccgtacagatgctgcaccgaatcccaaagtcgaacccgaccttgaccctgatcaatcctctccctcccattcctatccttcgccggatcccaacactcctcgtggcgttaaagaagacatctccgagcttaccaaaaccctaacccgccaattctggggcgttgcctctttccttgccccgcctcctctggggtcatcgaaccaacaactcgatcacactgagaatgaacaatccctccgaccaccgtccgatggttgggatgaggcgtccgatgaggcattgatatcgggaatacgtagcgatttatcggagattggcgggaagttcaagaccganatctccanactgtctaaaaatattgccgtctcggagttcactaagatggcttcgaattttcttcatttgggatctgacgaaaagattcttgataaatacgagagcggaaacgttgtcggtgtgacggaagatgttgttgccttcgctagggatatcgcgatgcacccaagaactgggctct

SEQ ID NO: 58771 - DNA, 581 bp, Gossypium hirsutum
  Clone ID: AI725713.1
caacggttcactctagtccatatttgcaaatggacaatccggcaataatgtctttgctccggcctactcctggagagaagcaccgcaagtccagtagtggtggtctcttgcgtatgttcaagcttttccccatgctaacctccggctgcaagatggttgcactattgggtaggcctaaaaagcctttgctcaaggatagtgctaccacaggtaccatttttgggtatcgtaaaggccgggtttgcttagccatacaagatgatccccattgcgtgccgatgttcgtcatcgagctaccgatgctcaccagcttgcttcaaaaggaaatggcatctgatatagtcagaatagctctcgaaagcgaaaccaagactcacaagaagatactattggaaaagtttgtgtgggcggtctattgcaatggaagaaaatgggttactctatcaggaagaaacagttgtctgacgatgaacttcatgttatgcagctcttgcgaggtgtgtcaatgggtgcgggggttcttccaagcccaaacgacaaagaaacagtgacgtctgatggggaactgacgtacatgagag

SEQ ID NO: 58772 - DNA, 579 bp, Gossypium hirsutum
  Clone ID: AI725705.1
gatagaatttttgaaggagtttgccgtccttttaaagtgagagttgagcaagttttacagtcacaacctagtcttataatctcttataaacttagtaacactctagagttctacagctacactatatcagatctactggggagagagacatctctctgcaatacgctttgggcactcaaagatgctgctcagaaaacattctttgaaattctgaaaagccgcggggaaaagcttttacgatatcctccccttgttgctgttgatctttcacctgcaccagctgtaagggaaggagtctctgtgctgctcgagataattggcacatataacagcatgatgggtcctggttcagggaaaaagccaacttttgaatcgggtaattcctgccttaactggatccatttattcacatgtgtgagcaagcagcagatgcacacaaatcaaagggagctgggcactcatcaagaagaattcgaatgattcccgactcgggccaccttagtaaatctgcagttgatgcaattttgtcaattaacaactcggctaccttctctcaggttaataaaaatacggaagctt

SEQ ID NO: 58773 - DNA, 565 bp, Gossypium hirsutum
  Clone ID: AI725701.1
gaaaataccttgaattatggtcttgacacattttgggcaattggatatatgaaaggttcacgaaggatcgtgatcgggtatgatgaaggaactattatggtgaaaatcggccgtgaagtacctgtaccaagtatggacaacactgggaaaatcatatgggctatccacaatgaacttccaactgtgaatatcaccagtgttggaccacatttcgacgtttctgatggacacagattgcccttggctgtcaacgaattgggcacctgtgatctatcccctcaaagcttaaaccatcccccacatgggaggtccgtcgtcgtctgtggacatcgtgactacaccatttacccggctttggcgtggaaaaatacgtcacccggttctgcatcgcaatctgtttcgtcctctcaaggacactacgccgctccagaaatcccctccccacatcacaatttcccccaccaatttccactaatagaaggattgtccctcctacatccccccccccagcgttatcttgggggcttctcctactcgcccacttcctccccctgatctctattcc

SEQ ID NO: 58774 - DNA, 562 bp, Gossypium hirsutum
  unsure (1)..(562): unsure at all n locations
  Clone ID: AI725700.1
gtatatttaaggcagatattggtgttaaaaatggctgtattgttggactcgggaaagcaggcaacccaaataccatggatggtgtatctgagaacatgaccatcggtattaacaccgaggttattgccggagaaggattgatcgtaactgcaggggctattgactgtcatgtgcatttcatatgtcctcagttggttcatgaagctatatcaagtggcatcacaacattacttggaggtgggaccggaccanctgacggaacacgtgcaactacttgtacgccagctccgtcgcaaatgaaaatgatgctgcagtccactgatgacttccctctaaattttggcttcacagggaagggaaatggttctaaacctgaaaaaatacatgaaataatcaaagccggagcaatgggactgaaactgcatgaggattggggaactacacctgctgcaataaacagttgtttggctgtggcaaaactatatgatatccaagttaatattcatactgacaccttgaacgaatctggatttgtggaacaaacaattaatgcatttaaaga

SEQ ID NO: 58775 - DNA, 568 bp, Gossypium hirsutum
  unsure (1)..(568): unsure at all n locations
  Clone ID: AI725689.1
ggtgaagaagaggagaaaattgaagtagctttgtaccagcgattctcaaaagtcaaaattttggaacttaaagacgataactacttccacgataccgatgcctccatggtcaacgccctccgttgcatcaagatcaccgaggttcccaccataccatcggtctcgtcgaaatcgaagttaaatcttctgtcctcaacgacaagtttatcgtccatcgactcgatctaatctctctcactagccaatgcaccatgtctgttttcacattcagttgaagcataaggaaagtgaagcataagtaggaaaaacaatggagaagaccaaattaatgagaaggaaaagccgaagcataaggaggataaaggggagaaaccttnagaaaatgattagaaaaaaccgaagattgtgaaattgggaaaattnngaagagaaaaggaaggagagaagggagangatgcncnnngatgangaagatgatgagaacttggagaaaanngngagggannnngaccgggaggtttanacaaaaanngagcccncgaggatnnngangtggtannacaagatt

SEQ ID NO: 58776 - DNA, 568 bp, Gossypium hirsutum
  Clone ID: AI725685.1
cttgaggaaccaatggctgagtcaataaaaaaaatggcgggtgactcaacaaccgagttcccatctccttccccaaacaaacgtctcaaaaccttatccaaatcaatcatcgaagacgaacccggtaatcatcaaccagaacaacaacgacaacaacaagcagcggacgatgatgattcagatccggagatatgcgggatatgcttatcggacggtggacgaagagcaatcaggggcaaaatcaacagctgcgatcatttcttctgtttcgtttgtatcatggaatgggctaaggtggagtcccgttgccctatgtgcaaacgcaggttcaccatcattcataaaccgcccaaggaaggtgtctttgcttcccaacgcctcgttaacatccctcaacgaaatcagggttaacatctctctggaaaatgcaaattctgggccttctgatccctattcaaaatttaaatgtaccgtgtgcaatggtatgaccgacgaaaatcttctactgctttgtgatctctgtgactctgcggctcataaatactgtgttggcttgggtggcaacgga

SEQ ID NO: 58777 - DNA, 397 bp, Gossypium hirsutum
  Clone ID: AI725663.1
cacatgcagcaatgagcaatgaccccttcatcagcaacttgaccaagcctttgaaggagaagtttgatagatactggagcgactgcttcttagttttggctattgccgtggtaatggatcctaaattcaaaatgaaacttgttgaatttagcttctctaggatatatggtgatgatgctggaatgtggattaagattgttgatgatgggattcatgagctctaccttgaatatattgcacaagcacttcctccacctgaaacatttgttgaagaacggaatgggagcatcatcccaaaacagaatgggggtgtcatcctcaaaactgaaccccctccaaactgaaccccttgaaggtatccttcttcatgtaggtatccgtcttcagggaagaattc

SEQ ID NO: 58778 - DNA, 618 bp, Gossypium hirsutum
  Clone ID: AI725662.1
aaggaaaccggcgagacaaagtcgaaggcggagaagcgccgcagatgacggagccaagacgattgagaggacacaaggctaccgccacttgctgtatcgcctcacgtgacaagcccggcctcgtcgccacttccggcgaagatggttgcatttgttggtttgatatgcgatgcaaagatgtgaaatttgttatggatgttagcaatgaaccaatttcatccctttgcttcaactcaggaaatgagaatatcatctatgtttcaactggaaatgaggtcaagtcctttgatgtgcatatgttagcagataactcatggaagcctttggagagctataactataataaagaggagataaatcaggttacttgtaattccagatcatctttccttgcatctgcggatgatggcggtgagattaagatcattgacattcatcagaaacgtattttcaagaacttgagaaccggacataccagtatttgcagccatgtgcagttcaatccttgggagacttgggaaatcgttacaggaggtcttgatttcaaatttatcatatgggaactctccaaagggcgctcatcccaaattgtgggattttgggctggcccaacatgcg

SEQ ID NO: 58779 - DNA, 612 bp, Gossypium hirsutum
  Clone ID: AI725653.1
atttttttttttttttttttttttttttttttttttttttttttttttttttttttttttttttttttttttttttttttttttaatgtcaaaaaaatgtttttcaaatccaaatgaaaattaacgaaaaaccctaacctaaggggtcaaaataacggggccaccagcttcctttattttcttctcagcagttttcgacaccaacttagccttgaaaaaaatgggttggttctccggcaaaacacctttcccgaggattttaaattttccgaactgagtcacgtcaatcatcggagccgcatccttcttggctttggttactcatggttaaaggggttattatatgaaaaaaaaactggtctttggttttttacccccactctggtaatagctttgacttgcctccctttgacccttctgttaaaaaaaaaaataaaaataggtgttgtttcttgcgcgttccaaatatttgtgattgtgcaaaaatttcaaacaaatttacattatttttgattgtcaaagggggtgggaaacttgttttttaattgaaaaaaacttcgaaactttccccctaatttttgggcttaaataatgtaaattgcccgccctggc

SEQ ID NO: 58780 - DNA, 607 bp, Gossypium hirsutum
  unsure (1)..(607): unsure at all n locations
  Clone ID: AI725633.1
acgaagacatggggaatttctattctgctggtagagaccctttgttctacgctcatcatggcaatgttgatcgaatgtggaacatttggaagacattgccagggaagaagcgacgtgatttcgacgaaaaagattggctcaattcttcgtttcttttctacgatgagaatgcaaatatggttcgtgttaaagttcgcgattgccttgactctaaaactttggggtacgattaccaaagtgttgatattccatggcttagaagcaagccaacacctcgaaggcgtcgtcctggtgtggggcagggtcaggatcagggtcaggatgtancanccanacgaaagggtaaaaaccgcaggggttttcctatanttttagacaaggtancagtgcccattgagattcccagggctaanaaacccnnnaaacaacaatgaataanaaattttgggttctccaaaccttacacctagaccgaattgactccgtgcaattctatgtgtccnttantgacgatgaagacgacgacaatcctggcnaaccggaaaagtccgattccgtggggagctttccaaatataccgcccggagattgcccctccgagtcaatg

SEQ ID NO: 58781 - DNA, 603 bp, Gossypium hirsutum
  unsure (1)..(603): unsure at all n locations
  Clone ID: AI725630.1
tttttttgaacaaaagtatgattgtgggtattgccaaataaaaagaatccggacaaaagtaagtaataaatttagacactcatttaacttaaaattggaccacttgattttaacataagtttcttacggctttatcagttaagagaatccgaattcatgtaatcattccgccattgagagctacaaaaacattgtgttccaaacaaagctcgtagcattaaagagaaaaaacacatgatttagttctttaccaatcttctataactggtaccaagttcttgatgagcttcagtaatgtaaataataaaaggactatctctacccctgagatcatgaataccatacaaatggattgcaggtttatgaaaaagaatgcagcattgggtacagatgaaaggggtacttcctgccgaataataaaaccatattatcaccctggtctaattcttcacaccttctcaattccggcaacttccaatcaaaccattaaaggagattggncaagacatactcacctccggcaactgcaaatgtaattccgggacaaactcttcttccaccaccaaatggagtgtctggattatgtgggcccctaaaatcagg

SEQ ID NO: 58782 - DNA, 662 bp, Gossypium hirsutum
  unsure (1)..(662): unsure at all n locations
  Clone ID: AI725616.1
ggaaaatgctgcctctgcattgctgcaactatgccttaacagttccaagttttgtaccttggttttgcaagaaggggccattccatccctagttgcactgtctcagtccggcacaccaagagcaaaggaaaaggcacagcagcttcttagtcacttccggaatcagagagaaggtgcgacagggaagggcaggatgtgacatatgataacttgtgttatatttttattttctgattcttttgatacccttcttgcatgtaagttgttcttttctcatgttatcttgttggagctccctcttcccatacgttctttagttgtcaagctatatgcatgggcattgtgaactctattctttgtttctttttgatccctatgggaaaatagggcaagctttccattgaggtgttcggtttgactataatttgcttcgaatatttccatggagcataatancttgccataggattatggtatgacagcttcactttgtttttcttcatttagtttagttcatgcaataactggttctgatttgttccttaagttttgtaaatatgttgtacatgtaatctactatataggttcttgttaaaaagatacttttgccncccncacnnncnnntnnnnaaaattctgcggccgccacccggtggaaccct

SEQ ID NO: 58783 - DNA, 730 bp, Gossypium hirsutum
  Clone ID: AI725600.1
attttttttccttctctttccactgcactaaattcacccaccatagctactcattttctttcgatttgttagggttttggagaaacaaatggaagttgaagagaagaagaagaagatgaaaaagaagaagaagaagaagaagaggaggaggaggaagagaagaggggggaggccccttggttgctccttcctccttcttcctttcttcggtccccctggctcggggcggcggggcgtggggtgggctcgcgcgcgggttcgcgtgcctggggggcttgtggggcgccggcgctctgctccggctgcccctgtctctctcgtgcctggctcgtgcgccgttcccgtgttttctctcggtttcgccgccctttcggtcccgccctcccggtcttccctctccccgctcttgtccctctgttcgtccctttctccggcccttcttgtcgtcccggctcctgtgcttccgcgtttctgtcctcgttgccgtccctctctgggggcgtgtccctcttcctctccccccctgttccccgcccgttgcccgtttccctccgcctgtccgccgggcccctctctgcgtctcggcgtcccgctggcctcggctgctggtttgtgctccctcgtggttccgccttctctgtcctcgccgcccggtgtgtggtcctcggcgtctccgctggggccggtggggttgcttccctgcccgctgcgtgtccctcccgcctctcct

SEQ ID NO: 58784 - DNA, 718 bp, Gossypium hirsutum
  unsure (1)..(718): unsure at all n locations
  Clone ID: AI725570.1
caactagtcttcaggcgcaatgtgtgtcaacaaaccccaaaaaataaacggtaaaaaatcttccaaatccgacagtgaaacatctgaaaaagaaagtagttgaaaatggccaccctatatcagtatttctcaactccatcaatgaaataaaaaatgggttatggaggtcgaccattccgacgatcaaaaccggccacttccaaagctttcaaaggcgcatcttccatccagaacgaatctccttcagtttccataccctcaacagccattacatgcgctgctccattcccttctctcgcaatgaattggaattgacaacgttggaacttccttgctaggttcttcacgtcccaagtaaatgggcaaattggagcccatgaaggacaacaagcgcttcagcaatcaccaccgaataaaccaggttatgtccttaaaattccaactccattataaatccctcatcatttctaataataaaacctaacactgctcgttttttgacaaccgacaatcccgcatcaacgttaatttttacctacccttgtggaaggggcgaccattttaccatggatctcggctggggatgcttcaaattctcaacactactacgatattccaacctanaactcctaatgaagaattctccaacagccaactcaaccactcattaaaatttaaatttgccattaaacttggccactggacgtctaaattggac

SEQ ID NO: 58785 - DNA, 721 bp, Gossypium hirsutum
  unsure (1)..(721): unsure at all n locations
  Clone ID: AI725476.1
gttttctttaatctttgaatttgaatttgtttatttaataaaccggggcgggcgtgtcctcgctttgaaggctgccatggaagcaattgcgaggaaaaaagtggaagaagggtacgattgttcgatttgtttggaaaagtttaaagaggaagaagaaggaagtgagatgccatgcaagcatgtgtttcattccgattgtgttgaaaagtggctgcgcatcaatcggtcctgcccggtttgtcggtttgtgatgccgggtgaggagggtgaaagcancggcggcggtgagggcagtantaatttgggaatattgggatcgggaaatcaggagattgtacagtcggttgtaagagtatctancttggctaatttgatagcattagcaatgacggcttcaggtctgaggtcggaacaatgatgatggtgaggagtgtttanctgaancaatacttccagagattttgtgaacccaaactaatcaaaattcttgccttttttatttaggagacttaagtgtacagagtanagtagataattattatgatgatgctgaagcatagccttctacaggactagtattgagtaccacaatgatcttccatactggtagtagtcaatattgatttcagattttangggtgttttgatttattgaatataagattatttttttttaggttgaaaaataaatttaaaattttgatagtttttattattgttg

SEQ ID NO: 58786 - DNA, 638 bp, Gossypium hirsutum
  unsure (1)..(638): unsure at all n locations
  Clone ID: AI725460.1
gtggaaggttaaaggaggaacagtctatggaggcttttcgctcggctcttgatgattgtgacttgtaaaaagtgggttatgaagggcaatggtttacttgggaacatgggagattatcgagtaacaatattcggaaacgatcagatagaagggtgtctattccgggatggaatgatttatttcccacttatagcctaaagcattgcggtcattcaatttcggatcattgccctctattacttaatacctgtagcggaatggcaagtcaagggaatttgtattgaggttttaaatttgaagctgcatggatacttgaagaggcctgcgggggtgaggtgtgacaactatgggagaatgttgagggatcggttcttgacagacttcggtaggttgggaagggtttggcganatgggctanggatgtttgcaaaacctcacgtatgaaactagaaagattaactgctcggttaaccaaacttaataatgcttcgcaggatgatgagactctaaaagagttaatcatcacgaaaatgcagttgaatctgcaaattgataaaggaagaaggcaagaactaattggttgaagaatggtgatcnaaatacagggttttttcatanaatggcttcccaccgtaaac

SEQ ID NO: 58787 - DNA, 589 bp, Gossypium hirsutum
  unsure (1)..(589): unsure at all n locations
  Clone ID: AI725459.1
attcgaaaaggggagtttctggtccagtgcctggggctcccactatacaaattgctccatcagtcatgcaggccagatcgatacgttggaacctaacagctagtggacctagacctaatccccaaggctcttaccattatggattgatcaccccaagccgcactatcatgctctcaaactctgcaccttatattaatggaaagcagaggtatgctgtcaatggtgtctcatatgttccagcggatactccattaaaaattgcagattatttcaagattcccggagtcttcaatcttggaagcattcctacttggcccccttcaggaaataatgcctactttcagacctctgtcatggcagccaacttccgagaatatgttgagattgtatttcaaaattgggaggacactgtgcaatcatggcatattgatggttattccttctttgttgtagggatgaatggaggtcaatggacacctgctagtcgatcaagctacaatttgagagacacggtagcccgctgcaccactcaggtgtatcccangtcatggactgcaatctacatggctttagacaacgtgggaatgtt

SEQ ID NO: 58788 - DNA, 593 bp, Gossypium hirsutum
  Clone ID: AI725458.1
gttcattatgttggtacatccacacacaaccggcaggcaaaggtgagagttcatggttgggatcctgtagctgtggctagtttccatttccatgactgtcaagttcctccttttgcttctcctcctccaaaccccaatgcagcaatcaaattcccttctcatctccagccatgttttgatgcctgtcatcatcttcgtaaacctgtcactgagttgttacgcatgctttctttacaagcaaaaaaggtcgttatcattcatgactctatgatgggatccgtggttcaagatgttggttcaattcccagcacagaatcctatgctttccacactgtttctgccttttctctcttcttttatttatgggaatcagcggggaaaccacaagttaacgcagaaatgcttggtgaaaatgacgttccttctcttgaaggatgcttcactgaagatttcttggagttcattgctttgcaacaccgatatctaaacgtcacttctgggagtatatataacacaagcgaagtgatagaaggtacatacgttgagttgcttcgccaacatatgaaagaaaagcaacattgggctttggggct

SEQ ID NO: 58789 - DNA, 591 bp, Gossypium hirsutum
  unsure (1)..(591): unsure at all n locations
  Clone ID: AI725453.1
cgaagaataggcagctattgaatccactgctagaatggaagaatcccctgcacatgaaaaaggatgtgacgattggtttaggctttctttggcctaactgatcgaaggtgtggtaggcttttttcgtggtagaagaggaaatcttagagaaaatagccaaacaagtttaacccattatgcataagcataaatagagggtcaatctcctctcagaattctggtatctttatcaattttattcatttttgtatctttgattctgttaaagagaatgattttttcttcaattgtgctcaattctttttcttcaattatgattgatggaagaatgggtatttacggttatactactgaaattcaagcgcttttcttttatggcattgagatgtgttttatcaatgctgaagcacgatgccgaaggcaaataatgcattgaaagaattgtgaagtgtttgcatgctttatcatactaggagttactttggcttgactttcaaaaattatactgaatttagttttgatttttttttttcatattgatagtccgaataatccanctttgcttgggctaaatgtgggagctggcatcca

SEQ ID NO: 58790 - DNA, 592 bp, Gossypium hirsutum
  unsure (1)..(592): unsure at all n locations
  Clone ID: AI725447.1
gttgcgagcgagagcttagcccttcacagtttgaagcacatgctggaatggccgacagaagacaaccgtatcgtcacgtccgtacatctaacggattgacgcttcatgatatagccttgtcattgtcaaatggacaacgcattaccactgatatcggtgatgatatgtgttcaatatgtggagattctggagatctgcttttttgtcatgaatgctgtcaggctgttcatccagcttgtttgaatttagggcaccttcctgaaggtgattggcattgtgcaaattgtgcagatgaaaatggtcttggtagaaaagctgtttcaggagaatcttcaaggatagcaagaccaattgtgatacgattgacaagagttgttaaagcaccagaatttgaaattggtggttgtgcaatttgcagggagtatgacttcagttctactaccttcgatgatcggacaattattttttgtgaccaatgtgagaaggagttccatgttggatgcctgcgtgatantggacaatgtgatttgaaagaaattcccaaggataaatggttctgttgtgatgactgcaaaaggatttatggggccct

SEQ ID NO: 58791 - DNA, 609 bp, Gossypium hirsutum
  Clone ID: AI725435.1
gttagcgtaacagccaagcatctaaagccttcaaacacaaatttcccctttatttcctgcttcgaaaacccaaacccctagggtacccgggaattcctttcgcattcctcgtcaaagctcctcgttagatctctctctttcctggaaaaaaaagagaggaataaaagccacaaacctgtgagtaatgctgctaaagagaaggcttttaagggggttctagctcaaagaaggtcaaatatccagggaaatcgatttccctttactgctgaggcttcacgtaaagctgcagttgcccctcttcggtctggagcttttaatggtagcagagctgcagagtgtctaatttgaacaaaccaaggtaaatcatggatcttctacaatattgatgacctgtggaatatggtcctgataacttatatccaattgcatgctatgtggaactcccaaaatttgacaaatttcttgtgggaagagttgccaaatttgggattatcttgaagtgtttggcttttgttattcacactacccaaagtattatgcttgtatcctgagctttgtatctgtggtgtgcaagatccttaatctggttaagtggttaatactttggaa

SEQ ID NO: 58792 - DNA, 639 bp, Gossypium hirsutum
  Clone ID: AI725562.1
agaaagtgtctgaatgcatgcaccaatctaccgaacttttgcaaagaagaacatctgatggtggcgagagtgctttggaactaattgctgaagccttgaaaataagcatgtactcggaaaaattacttgaaatgaaagcggaagcccttttcattctgcacaaatacgaagaggtaattcagctgtgtgagaagacatttgattcagctgaaaagaattccttatcatttgatagcaatggtcaaatagccaatctggatagttcgagtttctcaaaggacttgacctttaaagtttggcggtgtcgcatgatcttcaattcttattttcatctaggaaagcttgaagaggctattgcttttctggagaagaaagaggaattgcagtcctctatgtatagggatggaagcaacagtctaaaatcatcaatcccattggctgctactgtccgcgaactcttgagtcataaggctgcagggaataaagcatttcaattgggaagacacttggaagctgttgaacattatactgctgctttatctggcaatatggagtcccggcctttttcagctatttgtttctgtaatcgtgctgctgcatataaagcactgggtcaaatcactgatgcaattgctgatt

SEQ ID NO: 58793 - DNA, 369 bp, Gossypium hirsutum
  unsure (1)..(369): unsure at all n locations
  Clone ID: AI725555.1
aacctgaactcgtacagatacaatggactcgtgcacaagaagagtgttggcattgttcctgccgctgacaaaaagggcttcactgttgtgtacaagaaggctaaggccagtcacaagcccgccaaggctaccatcaagaggacactcaagtctggaccccgccggtctctgaccaagttgaggagattgatccatgccaaccactaccgccgggatctgctcaaggctgccctccgcagggctagtgctgttctgaagtctcaaaagaaacctgttacatcaaggaaggcacgtgccaagaaggcagagtaatttaataaaaatttctttcactttnnaaaaaaaatcacaaatatataaaaataaaat

SEQ ID NO: 58794 - DNA, 631 bp, Gossypium hirsutum
  Clone ID: AI725517.1
aggatttggtgccaaaatttacagaagattgggaatttacctccaatcttcttgcataatttcctgttctttcgccatcctaatatcaatcttatggttcttcaccgagcccatattgatcttccttcaacaagacgccgaaatctcgaaaacggcggcgctttacatcaaatatctcatcccaggcttatttgcttacggattggtacaaaacatactgagattcctacagtcgcaaagtattttaatgcctttggtgtggttttcggttctgccattgggacttcatttgggcatcgtttacgcattggttaattggacggatctgggtttcaaaggagctccattggcagcttcgatttcgctgtggatttcacttgttttgttatcgtcttatgtggttttggcccaaaaatttgaggaaacatggccgggattgtcgtcggaatcgtttcgtttggtcttcgcgaacctgaaactcgcaatcccttctgcggcaatggtttgtttggaatattgggcgttcgagcttctattattattagcaggattgatgcctaattcataagtaactacttccttgattgccatgtgtgtgaatacagaatcaattgcgtacatgattacttac

SEQ ID NO: 58795 - DNA, 658 bp, Gossypium hirsutum
  unsure (1)..(658): unsure at all n locations
  Clone ID: AI725500.1
aacaaacttcgtgccatggctaataatgcgcaagaacagattcggtcacagaggaatcaagagtcatatcttgttcaacttgctggaaggactacccctaaaggacttcactgcctctccatgcagctgacggctgaatattttttccttcaaccagaggacaggcagtttcctaaccaagaaaagttgattgatccagacctttatcactattcagtattctctgacaatattctggcttgtgctgttgttgttaactccacaatttcctctgcaaaggaaccagagaaaattgtttttcatgtggtgactgattttctcaacctcccttcaatttcaatgtggtttttattaaaccctcccggcaaagctactatccgtgttcagtgcatancagattttgattggttatctaccaagtacatttcaacattggcagaacaaaagtccagtgatcctagatatacttccgtcctcaaccatcttcggttttatctgccagacatctttccagcactgaataagatcgttcaccttgatcatgatatcgtattgccaaaagatttaactgaaatttggagtgttgaccttaacggaaaaattaatgccgcactggagaaattttcctgaaaacgaaccttctttatcagcaatgctc

SEQ ID NO: 58796 - DNA, 570 bp, Gossypium hirsutum
  Clone ID: AI725385.1
gcacgaggaataaggtggcatcatttgtgactctcctggtcatcattgccgttaatttagcagttggaatcctaccacatgtcgacaactttgctcacattggaggatttctcaccggtttccttcttggatttgtatttctcatccgcccccagtttggatgggttagtcaaagatatgctcctcctggacattcaagttcagcccgacctaaattcaagaagtatcagtgcattttgtgggctgtttctttgatccttgtaattgtgggtttgagtcttggattggttatgctcctacgtggagtcaatgcaaatgatcattgttcttggtgtcattacttgtcctgcgtacctacttcaagatggagctgcaatacaaagcctgcgtactgctcgtccacccaactaagcagccaagttaatgtaacttggctccacaacgggaaggaccacacatactttttggcggggtgcaaccagttctaaaatccaaaacttatgttcttcacaatgcagctgattgtttatatatatatatatataccccaaacacatggatcttctagcc

SEQ ID NO: 58797 - DNA, 630 bp, Gossypium hirsutum
  unsure (1)..(630): unsure at all n locations
  Clone ID: AI725376.1
agctacgaacaacaacgccttcgagatgtcatgatnggacgcgtgtcgtgtggtatttcaccgtctttatttgccacagtgaatttatacgcgcccgcgtatgtgccggcgcttttcaatgaagttcttgactactgaggcttatgggatgatggcagctactttctccttggattgccggttgtcgactgacgttctgattacgggcttgcttcttgttgctgttccggtcgccgcctgtgggggctcttttcctgctgcgggtgtggtggtatcgctccttatcggctggttcccttttttttgcactttgcgtgtgttcgcttgtttcttctctttccgccgtccggtcttggggtgtgcggctgttccgcgtctcccgggtggtggtgtggtgcgtgtcttctcgattggtcgctcctcctgtcgtgtgtgcttcgctgtgggcgcgtgtggctctcttctgtttgtggggtgttctctccggtgtttcttctattactcgtcttctcgcgtcgcgtggcccggctggtcctctgcccgcccgcttctcgtgtcctgtgttctcttgtggtgtggtggtccgtttctctctgtgggtgcgtgtgatctcggcctgtttgccgctgc

SEQ ID NO: 58798 - DNA, 316 bp, Gossypium hirsutum
  Clone ID: AI725365.1
agtactactactccaagccactattttccttccagttttgttttccttgtgattaaactaaatggctagctcaatgtccctcaaacttgaatttgtggtggtgtagtgcatggtagtgggtgaacccctgcgtctaggggccctcacctgatggtcaagatcggaactccctcccgcccagcatgaattacttcacatgccgtgctgctggtgccgttacacccagttgccgcaacggcatcaaatctctcaactccgccgcccaaaaaacaccagaacggaaaccagcttgcacatgcttcagaaatgccgtcga

SEQ ID NO: 58799 - protein, 177 aa, Gossypium hirsutum
  unsure (1)..(177): unsure at all Xaa locations
  Clone ID: GOSHI-09MAY01-C58963_1.pep
LNGLSFNTFLGNISNGDEPTVLIIKDREGYIFGGFASQPWERHGDFYGDMKTFLFQLYPKASIFRPTGANSNLQWCAVNFSSETIPNGIGFGGRINHFGMFLSASFDQGHTFSCTTFNSPCLSKTAKICPEVIEXCWGVVRKGLEQETTDVVKGTVLXRFKEDXHMLNLVGIANATE

SEQ ID NO: 58800 - protein, 151 aa, Gossypium hirsutum
  Clone ID: uC-gsflmaxxa067f08b1.pep
LSYGTYEELDRGNSVTNLHFKMRDMVYLLVHTCEVKVNGQRTKKDILKSNGKSEVNESLRDSETRSDEKRLPDLSIDGPDIDDESESTSDVHEDQETETTMIAEKSADFEQLNGDSRDVIGNPKAGACWDVFRRQDVPKLTEYLAKHWRDF

SEQ ID NO: 58801 - protein, 62 aa, Gossypium hirsutum
  Clone ID: LIB3149-055-Q1-K1-H2.pep
NSVTNLHFKMRDMVYLLVHTCEVKVNGQRTKKDILKSNGKSEVNESLRDSEKGQIEKMPDYL

SEQ ID NO: 58802 - protein, 206 aa, Gossypium hirsutum
  Clone ID: GOSHI-09MAY01-C58883_1.pep
LFIPVLQVHQIARNFRDKWIRKPVRKLGYRDKDEGRMEFFRGLDCNRVSASHNHWRDQAIRSTEAINCIMQSVVGSTSSDTSTREGGSSLSVCLSQTNSTRIRKRKSRWDQPADTEKIDSQSPKKLECSLLSALGQATPDQIEKMNSGDNKCQDSFSKGEAINIENGNQRFQQDAPPGFSSPLNASWCRLLYHQLLQVSLHLKLAS

SEQ ID NO: 58803 - protein, 122 aa, Gossypium hirsutum
  unsure (1)..(122): unsure at all Xaa locations
  Clone ID: GOSHI-09MAY01-C58443_1.pep
RGRNRDVFEKSIESLPQQFGLSPTPSIGTLSDTHLXTGRKRDAQDAFEKSIERRLRRKIKNRESAARSRARKQAYHNELVNKVSRLEEDNLKLKREKEFDTKSQCETSETRYQLRRTSSASF

SEQ ID NO: 58804 - protein, 71 aa, Gossypium hirsutum
  unsure (1)..(71): unsure at all Xaa locations
  Clone ID: LIB3149-047-Q1-K1-H9.pep
RANRDAQDAFEKSIERRLRRKIKNRESAARSRARKQAYHNELVNKVSRLEEDNLKLXREKEFDTKSQCETS

SEQ ID NO: 58805 - protein, 316 aa, Gossypium hirsutum
  unsure (1)..(316): unsure at all Xaa locations
  Clone ID: GOSHI-09MAY01-C58413_2.pep
LIGMTNRKDLLDEALLRPGRLEVQVEISLPDENGRLQILQIHTNKMKENSFLAPDPRXRELAARTKNYSGAELEGVVKSAVSFALNRQVSMDDLTKPVDEENIKVTMDDFLNALLEIVPAFGASTDDLERCRLNGMVDCGDRHKHIYQRAMLLVEQVKVSKGSPLVTCLLEGSSGSGKTALAATVGIDSDFPYVKIVSAESMIGLHESTKCAQIVKVFEDAYKSPLSIIILDDIERLLEYVAIGPRFSNLISQTLLVLLKRLPPKGKKLLVIGTTSEVGFLDSVGICDAFSVTYHLPSLKTDDAKKVLEQLNVFAE

SEQ ID NO: 58806 - protein, 101 aa, Gossypium hirsutum
  Clone ID: uC-gsflnu33B141b04b1.pep
LTPSNYSSSHDDQNFFDILVVHCHYPPCFADGILFSEKKLFLLAPLFSPLPLSVVTYDPFIEEIKLFFFFFFFLKEDAFLAMDIKVLGKIGPLSIYLTADV

SEQ ID NO: 58807 - protein, 104 aa, Gossypium hirsutum
  unsure (1)..(104): unsure at all Xaa locations
  Clone ID: uC-gsflnu33B072f01b1.pep
MAGSNEINLNECKSRGSTRDGTGVHDSIVNQLLTKIDGVESLNNVLLSGMTNRNDLLDEALLRPGRLEVQVEISLPDENGRLQILXIHTNKMKENSFLASDVKP

SEQ ID NO: 58808 - protein, 172 aa, Gossypium hirsutum
  Clone ID: GOSHI-09MAY01-C58743_1.pep
ESEAGRPKFYLENLNLQADGVWSKTSSRVVFTSIPRVMVEGFLKEYMAVDDVVGTELHTGGNRFTGLLSSSGLLVKHKALKAYFGDKKPDVGLGSSSLHDHHFISLCKEAYVVHKEDGRNNQSCLMPRDKYPKPLIFHDGRLAFLPTPFATLCMFLWLPFGIVLAIFRILVG

SEQ ID NO: 58809 - protein, 127 aa, Gossypium hirsutum
  Clone ID: GOSHI-09MAY01-C58603_1.pep
MNILRGAIKLHVSVRTVKPTHVLPSFLREPPKRFSTEPDQQQQQPLPDASINQFLDSASKGFVYGKLFGITKYTMKSDIISLLEGCNLTPDDIKVSYSRSLFPVAMMLRFPSPSAFSNAARTIWRFD

SEQ ID NO: 58810 - protein, 103 aa, Gossypium hirsutum
  Clone ID: LIB3583-015-P1-K1-G2.pep
GVHTDIQDIDIEYYHTKMVQENPGNPSVLSNYARFLHQSKRDVEGSKEYYLQAIQRDPRNGETMSQYAKLIWDSHRDHDKASHYFELAVEANPVNSNILAAYA

SEQ ID NO: 58811 - protein, 75 aa, Gossypium hirsutum
  Clone ID: LIB3149-043-Q1-K1-C4.pep
QSKGDVEGAKEYYLQAIQGDPRNGETMSQYAKLIWDSHRDHDKASHYFELAVEANPENSNILAAYASFLWETERR

SEQ ID NO: 58812 - protein, 135 aa, Gossypium hirsutum
  Clone ID: GOSHI-09MAY01-C58053_1.pep
LKRRVQVEKAARESQAEAIRKILGQEASRKKREDKIKKRQEEMAQEKATNSMILASDTVRWLMGPSGTVVTFPNEVGLPSIFDPKPCSYPPPREKCAVPSCTNPYKYRDSKSKLPLCSLQCYKTMHEKMSALTAW

SEQ ID NO: 58813 - protein, 47 aa, Gossypium hirsutum
  Clone ID: GOSHI-09MAY01-C58333_1.pep
IGSPFFFFFFYIFFYFFFFFFLFFFFFLKLKYSIHFINEKKKSQLFY

SEQ ID NO: 58814 - protein, 61 aa, Gossypium hirsutum
  unsure (1)..(61): unsure at all Xaa locations
  Clone ID: GOSHI-09MAY01-C58283_1.pep
PSVRRLLEVPAIFVKAVTDMVDGXKPTAEEFLQNLAAVTATLEEVVTQVIDFISGKCLPEL

SEQ ID NO: 58815 - protein, 177 aa, Gossypium hirsutum
  Clone ID: LIB3543-030-Q1-K6-B8.pep
MSRVVLGLPGPWAEDNREPSDHYTTKIGGLPDWPLPIEALKFNPTLIHCTQCGSKLCLVAQVYAPVSSGTLNVEDRLLLVFGCVAPNCGSSSLSWRALRIQKVENESKESSSAATLDKAPSASSLVSVPKTNWWENLSDEDNEDLDLEDLSRAFSEVASLSSEPKKTSSNRNSEGAV

SEQ ID NO: 58816 - protein, 116 aa, Gossypium hirsutum
  Clone ID: LIB3149-043-Q1-K1-G1.pep
EDNREPSDHYTTKIGGLPDWPLPIEALKFNPTLIHCTQCGSKLCLVAQVYAPVSSGTLNIEDRLLLVFGCVTPNCGSSPLRKWKMNQRNHPLLLLWIKLLQLHLLFLFQKLTGGRI

SEQ ID NO: 58817 - protein, 74 aa, Gossypium hirsutum
  Clone ID: GOSHI-09MAY01-C58203_1.pep
AVYRIVAIDVRSRREGRDLRKVGFYDPINNQTYLNVPAILYFLEKGAQPTATVHDILKKAGVFTELTLNQTKFT

SEQ ID NO: 58818 - protein, 50 aa, Gossypium hirsutum
  Clone ID: GOSHI-09MAY01-C58223_1.pep
LEVRSAYCKRDFEWDNLKRLAFKMVDESNTKPTREYVLETSPATENETGK

SEQ ID NO: 58819 - protein, 153 aa, Gossypium hirsutum
  Clone ID: GOSHI-09MAY01-C59843_1.pep
MPREDRATWKSNYFLKIIQLLDDYPKCFIVGADNVGSKQMQQIRMSLRGKAVVLMGKNTMMRKAIRGHLENNPALEKLLPHIRGNVGFVFTKEDLTEIRDMLLANKVPAADRAGAIAPCEVTVPGQNTGLGPEKTSFLQALGITTKICRGTIE

SEQ ID NO: 58820 - protein, 90 aa, Gossypium hirsutum
  Clone ID: GOSHI-09MAY01-C59873_1.pep
MNSQQQKQPCTLPPQPQQQQQVKQPCQPPPQEPCIPKTKEPCLPKVPEPCHPKVPEPCHPKVPEPCHPKVPEPCPSTVTPAPAQQKTKQK

SEQ ID NO: 58821 - protein, 162 aa, Gossypium hirsutum
  Clone ID: GOSHI-09MAY01-C59593_1.pep
MERASLIQKAKLAEQAERYEDMAAFMKGAVEKGEELSCEERNLLSVAYKNVVGGQRAAWRVLSSIEQKSNEEGSEEKGPEVREYREKVETELRGVCDTVLGLLDSHLIKEAGDAESRVFYLKMKGDYYRYLAEVATGDDKKRIIDSARSAYQEAMDISKKEM

SEQ ID NO: 58822 - protein, 107 aa, Gossypium hirsutum
  Clone ID: GOSHI-09MAY01-C59413_1.pep
MAPAAASGGSTLPRGFSVFTTFPDLLFIFEFIFGGLVWILVASSLVPWPLVQGWVMFVSVFCFVATTTLIILYLIGAHGGETSWVTLDAAYHCTAALFYLSASVLEA

SEQ ID NO: 58823 - protein, 87 aa, Gossypium hirsutum
  Clone ID: GOSHI-09MAY01-C59753_1.pep
LYECYTFVVLEFLAQNLLSINCLLRFIAPLFYRFGSPAIGLGILRSKSPTLSKPPLLVQFWLNFEMACIGLPVCCGSWTLWTCINFG

SEQ ID NO: 58824 - protein, 154 aa, Gossypium hirsutum
  Clone ID: GOSHI-09MAY01-C59743_1.pep
MEVSTNTAMIQTSKTEITELRRTLQGLEIELQSQLSMKAGLENTVAETECRYALQLQQIQGLISSIEAQLSELRSEMECQNQEYKMLLDIKTRLEQEIATYRSLLEGQDAKMTGVPSSAGSVSPRSTSVTTTSSVSATTTSNASGRRTSDVRRP

SEQ ID NO: 58825 - protein, 164 aa, Gossypium hirsutum
  Clone ID: GOSHI-09MAY01-C59663_1.pep
NRYPDFYSSRRTRGRTDNISSIEATVTTEVVEDTTLDEGWQEANSKGRSGNATGKKYGRKKPVFAKLKVNGCEYSNGRESGSRRDIISPAGKTAPKNIIREMQTVKQSKSSSLNPRGTSIGLPASVSRGSSPSANLSAIASKSLSYKEVAAAPPGTVLKPLPEP

SEQ ID NO: 58826 - protein, 258 aa, Gossypium hirsutum
  unsure (1)..(258): unsure at all Xaa locations
  Clone ID: GOSHI-09MAY01-C59193_1.pep
VRDLSLVIAFRGTQDNSIQNWVKDLFXKQLDLKYPGMPNAMVHHGXFYTAYHNTTIRPXILYAVKKAKEFYGDLDIMVTGHSMGGAMSSFCALDLTVNHEAKSVQVITFGQPRIGNAAFASYYAKLVPNTIRVTNDHDIVPHLPPYYYYFPQKTYHHFPREVWLYSLGLGSLVYRVEKVCDGSGEDPTCSRSVTGNSIMDHLNYYGVDLMCQEWRSCRIVMDPRVAEYGKTDHKGNFILSRAPATRVRSNEGEVKASA

SEQ ID NO: 58827 - protein, 115 aa, Gossypium hirsutum
  unsure (1)..(115): unsure at all Xaa locations
  Clone ID: GOSHI-09MAY01-C59133_1.pep
IQSATGVVYNITGXKDITLQEVNRVSQVVTSLADPSANIIFGAVVDDRYNGEIHVTIIATGFSQSFQKTLXTDPKAAKQNDKVAGGQERKGIPLPLKPSSPSTVPSGSSQRRLFF

SEQ ID NO: 58828 - protein, 114 aa, Gossypium hirsutum
  Clone ID: GOSHI-09MAY01-C59313_1.pep
AYDDWCKTVLRKMKEASPLSLKVTLRSIREGRFQSLDQCLAREYRISLAWISKSVSNDFTEGVRARLVDNDFAPKWYPASLEEVSKDMVEYYFTPLGELEPELVLPTSLREPYI

SEQ ID NO: 58829 - protein, 263 aa, Gossypium hirsutum
  unsure (1)..(263): unsure at all Xaa locations
  Clone ID: GOSHI-09MAY01-C59323_1.pep
WKVVIGSYSNNQGMAILFQSQDFVHWTMHRDPLYSSLKTEMWECPDFFPVSINSTNGVDTSVENPSVRHVMKASFNSHDYYTVGTYVTEQERFLPDADFTGTSLDLRFDYGKFYASKSFFDGKKNRRILCAWVNESDSMEDDLKKGWSGLQSIPRQIWLDLNGKQLVQWPVEELNSLRGNEVYVYDKQLESGSVFEVSGITASQADIEIMSELPKLEEAEFIDTSLVDPQLICDKQDASVTGKFGPFGLLALAXKDLTEQTAI

SEQ ID NO: 58830 - protein, 144 aa, Gossypium hirsutum
  Clone ID: GOSHI-09MAY01-C54803_1.pep
GIFAIWLIPQLFAYAFNCPMAKFLQAQSKMMAMAVISGVAFVLHCLFSWLLMLKLGWGLVGAAIVLNASRIAIDVGQFLYIISGTCGQAWTGFSWKAFQHLWGFVRLSFASAIMLCLEVWYFMALILFAGYLKNADISVDALSI

SEQ ID NO: 58831 - protein, 215 aa, Gossypium hirsutum
  Clone ID: GOSHI-09MAY01-C54133_1.pep
MGDLSLPNDALFLGFDSSTQSLKATVLDSNLVIVASEMIHFDSDLPHYKTKDGVYRDANVNGRIVSPTIMWVEALDLIFQRLSKSNLDFGKIAAVSGSGQQHGSVYWNKGSSALLSSLDPKKPLVDQLRDAFSVKESPIWMDCSTTAQCREIEKAVGGALELSKITGSRAHERYTGPQIRKIFETQQETYENTERISLVSSFMACLFLGAYACID

SEQ ID NO: 58832 - protein, 204 aa, Gossypium hirsutum
  Clone ID: GOSHI-09MAY01-C54083_1.pep
MSVYDAAFVNSDPAFPTSVFGLKLWVVIGILFGTFIVLSLFLLSLCLTARRKSRRHRQLDPAPPICKEIQEIVHHRQPSAPDHQRVTPPVQEVKVDLGKTEQQQHVVTVFSSGESKGHTSVSETPSFGSGTVGPEVCHLGWGRWYTLRELELATDGLCEENVIGEGGYGIVYYGVLTDGTKIAVKNLLNNRGQAEKEFKVEVEA

SEQ ID NO: 58833 - protein, 174 aa, Gossypium hirsutum
  Clone ID: GOSHI-09MAY01-C54063_1.pep
MLKEEISDAGGGNDWARVCDTCRSAACTVYCRADSAYLCAGCDARVHAANRVASRHERVWVCEVCERAPAALLCKADAASLCTTCDAEIHSANQLARRHQRVPILPISGCLYGPLPTDHGCRKMASATETEDGFMCTNGDETIAEDEDEAASLVLLNLGKIAPTRITVHACLGG

SEQ ID NO: 58834 - protein, 128 aa, Gossypium hirsutum
  Clone ID: GOSHI-09MAY01-C55903_1.pep
MATVTASHFVSRISHGAETKANLSQTGLGNQSMTHNGLRFLNKVDRLQMRTNAKAVARNAVKDEHPTANDKLSGKIICGTGMNIIFVGAEVGPWSKTGGLGDVLGGLPPAMAAKGHRVMTVSPRYDQY

SEQ ID NO: 58835 - protein, 89 aa, Gossypium hirsutum
  Clone ID: GOSHI-09MAY01-C55473_1.pep
MSCGEVIDPTIYGEEEECAQLHCGVPPYELERRLHELLESRQEEQIRELEAALASAQQELVDKEREISWWKDTARLMSIHVQQPSPFGS

SEQ ID NO: 58836 - protein, 152 aa, Gossypium hirsutum
  unsure (1)..(152): unsure at all Xaa locations
  Clone ID: GOSHI-09MAY01-C55143_1.pep
MISDPKLILYACIAKGPTLVAEFTRKEAVGIEPLARACIEKAPPYHSMFSHTVSQRSYTFLIDDPFVYFIISHEDLDKSESFWFLNRFESXALDDFLLTGLVMGTDNLTPNCLQSHFDPVFSKALGLGLDFVPSPLLKDSKNPTVVAPLLGV

SEQ ID NO: 58837 - protein, 201 aa, Gossypium hirsutum
  Clone ID: GOSHI-09MAY01-C55053_1.pep
RPEGLRCGEVGGSVAKVQPTKSRSSVCCVEFNPFGDALIAAGCADQKAYAYDVRKMVEPVHIFDGHTKTITYVRFLNAQTLVSAGTDGCLKLWNIVDSRLLRTYKGHVNSRSFVGLSVWRHGGLLGCGSENNQVFVYDTRWGEPIWVHGFEPMGRDSSDHHHAFVSSVCWRQVNEDQCTLVAGGSNGVLHVFVGKRKSDSE

SEQ ID NO: 58838 - protein, 207 aa, Gossypium hirsutum
  Clone ID: GOSHI-09MAY01-C55043_1.pep
MGFRRMGWHELLWVGRLLVLMQLLHGVFGWGKDGHFAVCKIAEEYLTKDALATVKELLPDSAGGELASVCSWADDVRWHYHWSSPLHYVDTPDFKCNYKYCRDCHDAAGHKDHCVTGAIFNYTKQLFSAYQGYSPQLSYNLTEALMFLAHFMGDVHQPLHVGFLGDLGGNTITVRWYRRKTNLHHVWDTMIIDSAVKTLYGSDLATM

SEQ ID NO: 58839 - protein, 83 aa, Gossypium hirsutum
  Clone ID: GOSHI-09MAY01-C55293_1.pep
KDHIFSISISKYVSKNIHKCFIEIKTGRSLNIHFISKDFFANESNGLPDCHRKNIYLQNGIGCHSLWRLSSTNPFSLDSNFIV

SEQ ID NO: 58840 - protein, 107 aa, Gossypium hirsutum
  Clone ID: GOSHI-09MAY01-C56533_1.pep
MSSHNNNSTSANDPRQPSAAKPYVAQPVSPQDLPVDYSGFIAVIFGIAGVMFRYKLSSWLAIIFCAQSLANMKNVENDLKQISMAMMFAIMGLVTNYFGPARPGKQS

SEQ ID NO: 58841 - protein, 75 aa, Gossypium hirsutum
  Clone ID: GOSHI-09MAY01-C56333_1.pep
RERMGEMREIKICRQKNQIKKRNMRHNQRIPPLAIQEVRDLMLKTEATSTNSRGASPFQLHPGLEDHLTVMDLTG

SEQ ID NO: 58842 - protein, 154 aa, Gossypium hirsutum
  Clone ID: GOSHI-09MAY01-C57993_1.pep
MSRFRGIWHASLNATKKALAWNVDDWIPPAEKYIFNFSSKEELKKWHLYSDAEFGGLSSASLEIKDDADKSSGVFSGNLSRDVTEGTKWNITRSGFCGMRSKKFDGFIDLEAYDTIALRIKGDGRCYISTIYTENWVNSPGQMEDYSWHSFVLV

SEQ ID NO: 58843 - protein, 102 aa, Gossypium hirsutum
  unsure (1)..(102): unsure at all Xaa locations
  Clone ID: LIB3149-038-Q1-K1-G8.pep
DFQSLIYKLFFLRYXNGYPGAGFLLAPDATQVKLFIDELSETGKLDGSKFTFWDERSTSKNVELLIKPLSLHPVLTKTVVDKFAAVHILQAYLDYVNKKERR

SEQ ID NO: 58844 - protein, 102 aa, Gossypium hirsutum
  Clone ID: LIB3149-038-Q1-K1-G7.pep
DFQSLISELSLVGFVVGYPVGRQRLAPDATQVKLFIDDLSETGKLDGLKFTFWDERFTSKNVELLIKPLSLHPVLAKTVVDKFAAVQILQAYLDYVNKKERR

SEQ ID NO: 58845 - protein, 99 aa, Gossypium hirsutum
  unsure (1)..(99): unsure at all Xaa locations
  Clone ID: GOSHI-09MAY01-C57473_1.pep
KEEPKREEIFAVVMMGGRQYRGFPGRXRYTQRLKGANVNDKIVLNKVLLGGTKTXTYIGKPXVVTNAAVHAVGEEQGLNPKVVVFQYKKKKXYRRNIGH

SEQ ID NO: 58846 - protein, 231 aa, Gossypium hirsutum
  Clone ID: GOSHI-09MAY01-C57763_1.pep
MEKIQHNRVEAKGLKLHVAQIGTGPQVVAFLHGFPEIWYSWRHQMVAVANAGYRAISIDFRGYGLSEHPSEPEKATFNDFVDDVVAVLDSLGITKAHLVAKDFGAFVAAMVGILHPDRVSTIILLGVPFLLPGLSPLQSQLHLIPPGFYMLRWMVPGGAEADFGRFDAKTVIRKVYIMFSGSLPPVAADNQEIMDLVDSSAPLPPWLSEEDLAEYGSLYEKSGFRTALQVH

SEQ ID NO: 58847 - protein, 159 aa, Gossypium hirsutum
  Clone ID: GOSHI-09MAY01-C57733_1.pep
YQLLFLSARAIAQAYITRQFLVNLKQDGKALPDGPIVISPDGLFPSLYREVIRRAPHEFKIACLEEIKALFPSDCNPFYAGFGNRVTDEISYVKVGIPKGKIFIINPKGEVAVNRRVDTKSYTSLHALVHGMFPPTTCSEQEDFNSWNFWKLPPPVFDI

SEQ ID NO: 58848 - protein, 111 aa, Gossypium hirsutum
  unsure (1)..(111): unsure at all Xaa locations
  Clone ID: GOSHI-09MAY01-C57113_1.pep
MVGCQRANCTGVQKFHATISREEAAIKKKYGGIIPKKPPLISKDHERAYFDSADWAXLGKQGVEKPKGPLEALRPKLQPTQQQTRYRKSPCAPADGAGGGSAQPEGGTADE

SEQ ID NO: 58849 - protein, 123 aa, Gossypium hirsutum
  unsure (1)..(123): unsure at all Xaa locations
  Clone ID: GOSHI-09MAY01-C57093_1.pep
HASGLLQASLEGLLRVMVDXRPSRVFYPTDAKLSEEDLEILKEYCISGGDGLPRGVVENQVARVRLVVKWHGLETRELGEDWRSSSGKLGADNQTLLRILCHRADSEASQFVKKQYKIPKSSA

SEQ ID NO: 58850 - protein, 168 aa, Gossypium hirsutum
  Clone ID: GOSHI-09MAY01-C57393_1.pep
MAQTLAMPVAPSLSFICNKVSSMSLSNTASLPVSNPPKHHGLSIVCVRVGGVEIPNNKRVEFSLQYIHGIGRTRARKILCDLQMENKITKDLSEEELITIRDEVSKYMIEGDLRRFNALNIRRLKEIQCYRGVRHIQGLPCRGQHTKNNCRTLKGKRVAIAGKKKAPR

SEQ ID NO: 58851 - protein, 94 aa, Gossypium hirsutum
  Clone ID: GOSHI-09MAY01-C57253_1.pep
MDWWHKMIFPVRRLWFVVSSRVKARKNGAGLLKLHDDVQTCGYEDVQVMWEMLRRSESELLAANNNPKRKHRPAFWRVFVWSSNHTSSFSPNYA

SEQ ID NO: 58852 - protein, 174 aa, Gossypium hirsutum
  Clone ID: GOSHI-09MAY01-C57243_1.pep
MNRRVRWNEENLGEIEANKPVRQKITEPKTPYHRMIDDDGSLSPRGRSFNDCVIDVDAEELCSALKDVASSSRKTTGQSGGWTSSEDEADPMDHDEEDRNSKSFKEQRKAHYDEFLKIKELRRKGSFIEDEDDEVEGDSSSSLSSGVKDIGIGEGPASLPQKSSASPGHPGNGL

SEQ ID NO: 58853 - protein, 139 aa, Gossypium hirsutum
  Clone ID: LIB3585-015-P1-K1-F3.pep
LATVTRIVSFCSYNILSCVLDLIIILSWGNSRRVRWNEENLGEIEANKPVRQKITEPKTPYHPMIDDDGSLSPRGRSFNDCVIDVDAEELCSALKDVASSSRKTTGQSGGWTSSDDEADPMDHDEEDQNGKSFKEQRKA

SEQ ID NO: 58854 - protein, 115 aa, Gossypium hirsutum
  Clone ID: GOSHI-09MAY01-C50983_1.pep
LTLLEKKSRNGISQDVCINDLEPPAFEVLPSLKRLKQRVTAAGRGQYDAVFMSGSGSTIVGVGSPDPPQFVYDDDDYREVFLSDANFIYREENEWYKELVSTTVCDPLGTARTFE

SEQ ID NO: 58855 - protein, 82 aa, Gossypium hirsutum
  unsure (1)..(82): unsure at all Xaa locations
  Clone ID: GOSHI-09MAY01-C50923_1.pep
PHVLALLLFKPPPLYILDHVCASLYLXHSNIRRMIKAHFSHSQFIVVSLKEGMFNNANVLFRTKFVDGVSTVLRTVASKSSR

SEQ ID NO: 58856 - protein, 185 aa, Gossypium hirsutum
  unsure (1)..(185): unsure at all Xaa locations
  Clone ID: LIB3827-002-Q1-N6-H11.pep
KVAGPCFHGEAVYEDDIPSPRNCLHGAFIYSTEPLARVQGIKFXPGSSPHGVSTAISFKDIPGENIGAQTIFGSEPLXDELTQCAGQRIALVVADTQKNADMAAKLAVVDYDKKNLEPILSVEEAFEKCSFYEVPPLLNPAPVGAFSKGMAKSDHQMLSAEVIIILHCCLSLMLTGFRCEFQILC

SEQ ID NO: 58857 - protein, 56 aa, Gossypium hirsutum
  Clone ID: LIB3146-022-Q1-K1-C6.pep
NLETKHGTNLYQFQVLLIEEAFEKCSFYEVPSLLNLEPDGAFSKRMVESDHQILSA

SEQ ID NO: 58858 - protein, 59 aa, Gossypium hirsutum
  Clone ID: GOSHI-09MAY01-C50853_2.pep
HRTPHKSNLWIHLSSGNLIKSSSVHENIASGFPPSYLPAFQSDKIMNIFILKAKTIRGP

SEQ ID NO: 58859 - protein, 123 aa, Gossypium hirsutum
  Clone ID: GOSHI-09MAY01-C50853_1.pep
MANTELKSDNLFEMMKAHLASDAGKELTKKIGLVYQINIAPKKIGFDEVSYFVDLKKGEVTKGKYEGGKPDAIFSFKDDDFMKVATGKMNPQIAFMRGAMKIKGSLSAAQKFTPDIFPKPAKM

SEQ ID NO: 58860 - protein, 73 aa, Gossypium hirsutum
  Clone ID: GOSHI-09MAY01-C50453_1.pep
EFGFIGHSQYKKMVGLILWTGWGLLLPSFPLFQMFAGYGSVRHIEEEGMRGVWWPSVERAARAHGERRLEAWG

SEQ ID NO: 58861 - protein, 167 aa, Gossypium hirsutum
  Clone ID: uC-gsronu33B170b02b1.pep
LNSDQLTRLRKKSVSNKRLAHVAARHGLNRFVRRKDTAPLDLIVRKYVGAVKQGDDHKNLAVPGILADIVEALAGAVYLDLNFDLTKLWTIFKDVLVIDEIKVPKDFKSSEIIGAQNKLYGLCGKRKWGNPVYSEVKAELCEYGMKYVYSVKVETNDGVCGHEGDEK

SEQ ID NO: 58862 - protein, 54 aa, Gossypium hirsutum
  Clone ID: LIB3146-016-Q1-K1-C5.pep
DPYKQHRLELVNISQNTWNCHVFMIISLFNCPYILPNLQPIRYIYHGLNVLHFD

SEQ ID NO: 58863 - protein, 128 aa, Gossypium hirsutum
  Clone ID: GOSHI-09MAY01-C50403_1.pep
ERDATPVCFSHLLLYFVFVLDPNEKGKKREKNRINFRQLFTLEVYLDYFLLIFVCILYTISLKKRKTPLLQSKFDSFYIQIQVVSCRFLAQNAGCEDVGAEHTNVGCATRKPGSCVERAWGCCPKGEL

SEQ ID NO: 58864 - protein, 249 aa, Gossypium hirsutum
  Clone ID: GOSHI-09MAY01-C50783_1.pep
YDYMPNLSLHSHLHGHHSSECLLDWTRRMNIAIGSAEGIAYLHHHSTPHIIHRDIKASNVLLDSEFQPQVADFGFAKFVPDGATHVTTRVKGTLGYLAPEYAMLGKASESCDVYSFGILLLELASGKKPLEKVNRTVKRSISEWALPLACEGKFDEMADPKLNGEYVEEELKRFILVALVCADNRPDKRPTMLEVLELLKGESKEKLTELENNELFKTLQTVCDDDGITAAEKNSDIIKEEKDLKPAKD

SEQ ID NO: 58865 - protein, 257 aa, Gossypium hirsutum
  unsure (1)..(257): unsure at all Xaa locations
  Clone ID: GOSHI-09MAY01-C50613_1.pep
HASAVNENSKVEGIVSPLVSYCDACPYSGEENDVHLNADFKFYLVDKPGSSEIKMNDPVPISSLTKNLDVTVHWSDKMIEKSDTCLLSSLPEVFKPLLFAKRHEESISLYKCLEGFLQEEPLXPDDMWYCPKCKKHQQAIKKLDLWRLPEMGLIHLKRFSYSRFFKNKLETYVDFPIHDLNLSNYISHIDNQLSNCYQLYAGTNHYGGMGGGHYTALIDHGHGRWYEFDDDRVFPISEDRIKSSAAYVLFYRRAREM

SEQ ID NO: 58866 - protein, 90 aa, Gossypium hirsutum
  Clone ID: LIB3146-018-Q1-K1-H9.pep
MSYSPSSLIFFKAIKKLDRGRLPEILLIHLKRFSYSRFFKNKLQTYVDFPIHDLNLSNYISHIDNQLSNCYELYAVTNHYAGMGGGHYTA

SEQ ID NO: 58867 - protein, 117 aa, Gossypium hirsutum
  unsure (1)..(117): unsure at all Xaa locations
  Clone ID: GOSHI-09MAY01-C50183_1.pep
EAALAIQMGNARILCGKPIKCSWGSKPTAPGTSSAPLPPPAAAHMPGFSAADLAAYERHMAMSKYGGAQVMGMMHPQGQHXALKQVAMGMGAAAAGQAIYDGGYQSVATTQQLMYYQ

SEQ ID NO: 58868 - protein, 120 aa, Gossypium hirsutum
  unsure (1)..(120): unsure at all Xaa locations
  Clone ID: LIB3146-013-Q1-K1-C12.pep
RDPREREHIEDVRVQRDKGFGFVRYSLHTEAALAIQMGNARILCGKPIKCSWGSKPTAPGTSSAPLPPPAAAHMPGFSAADLAAYERHMAMSEYGGAQVXSMMHPQGQAIYDGGYQNVAT

SEQ ID NO: 58869 - protein, 162 aa, Gossypium hirsutum
  unsure (1)..(162): unsure at all Xaa locations
  Clone ID: GOSHI-09MAY01-C50103_2.pep
STRPPTRPPTGPVGSIFPSPMHYAGPTEVQWHAKARINAGANFYIVGRDPAGMGHPVEKRDLYDADHGKKVLSMAPARPPPRPLPFRVAAYDKTQGKMAFFDPSRAQDFLFIXSGTKMRTLAKNKENPPPGFMCPGGWEVLVEDYASLTPSDNDRIPQPVAA

SEQ ID NO: 58870 - protein, 227 aa, Gossypium hirsutum
  Clone ID: GOSHI-09MAY01-C50103_1.pep
KRNADAVFAFQLRNPVHNGHALLMTDTRRRLLEMGYKNPILLLHPLGGYTKADDVPLSWRMKQHEKVLEDGVLDPETTVVSIFPSPMHYAGPTEVQWHAKARINAGANFYIVGRDPAGMGHPIEKRDLYDADHGKKVLSMAPGLERLNILPFRVAAYDKTQSKMAFFDPSRAQDFLFISGTKMRALAKNKENPPDGFMCPGGWKVLVKYYDSLTPSDNGRIHEAVPA

SEQ ID NO: 58871 - protein, 57 aa, Gossypium hirsutum
  Clone ID: GOSHI-09MAY01-C50083_2.pep
ILASGVGIRTIDVGAPQLSMHSIREMCAVDDVKHSYEHFKAFFQEFSQLDAKITVDT

SEQ ID NO: 58872 - protein, 290 aa, Gossypium hirsutum
  Clone ID: GOSHI-09MAY01-C50083_1.pep
GRVGGAWVLPVLATSVKVELNKEFAENGHHAILTQMIANKLGCQPDQICDFELQACDTQPSIVAGAAKEFIFSGRLDNLCMSFCSLKALIDATSSESDLENESGVRMVALFDHEEVGSNSAQGAGSPAMLDALSRRPRAFTSDSKMLTKAIQRSFLVSADMAHALHPNYMDKHEENHQPKLHGGLVIKHNANQRYATNAVTSFIFREIAMKHNLPIQDFVVRNDTPCGSTIGPILASGVGIRTVDVGAPQLSMHSIREMCAVDDVKHSYEHFKAFFKEFSQLDTKITGDT

SEQ ID NO: 58873 - protein, 139 aa, Gossypium hirsutum
  Clone ID: GOSHI-09MAY01-C50013_1.pep
DGGGNNLYPFLHLSSDGNLFIFANRDSILFNYQRNRVVKTFPRIPGGGSRSYPSSGSSVILPLDHQDRFQKVEVMVCGGAASGAYEAAARGRFLPALSSCGRMVITGNNLIWKMENMPGPRTMHDMLILPTGHILIING

SEQ ID NO: 58874 - protein, 45 aa, Gossypium hirsutum
  Clone ID: LIB3584-019-P1-K1-A2.pep
DFNFTSPSKNGSDIFVSQVICLIIVAEKWSFWRSTTSEPLNCIQF

SEQ ID NO: 58875 - protein, 48 aa, Gossypium hirsutum
  Clone ID: LIB3146-014-Q1-K1-F5.pep
ARDKMKSLARVFKIQKGIHFKFKMIGFQTIGLALCDKNFSPSKQHLSL

SEQ ID NO: 58876 - protein, 100 aa, Gossypium hirsutum
  Clone ID: GOSHI-09MAY01-C50253_1.pep
PKYQAKIKSHVLGYKAPRLDCMFFYAHIAQKKGKEIKRGDFSFQYLATDLAFKLSFFSFHYYKKKEKILEVLTCGFDCRRPFSGLGIGPKEMNRRHLIFP

SEQ ID NO: 58877 - protein, 119 aa, Gossypium hirsutum
  unsure (1)..(119): unsure at all Xaa locations
  Clone ID: GOSHI-09MAY01-C50263_1.pep
IQISKALEEGHTXLKEVDMSTNFIRRAGAWHLAQVVVQKPGFRLLNINGNIISDDGVDEVKEVFKKYPGVLGSFDENDPEGGDDDDDDDDDDGEKSGGGEANEDELESKMKNLEVGQEE

SEQ ID NO: 58878 - protein, 198 aa, Gossypium hirsutum
  Clone ID: GOSHI-09MAY01-C51993_1.pep
LVSGSDDCKVKVWCTKQEASVINIDMKANICCVKYNPGSSNFIAVGSADHHIHYYDLRNISSPLHVFSGRKKAVSYVKFLSENELASASTDSTLRLWDVKENLPLRTFKGHSNEKNFVGLTVNSEYIACGSETNEVYVYHKEISKPVTWHRFGSQEMEDADEDGGGSHFISAVCWKSDSPTMLTANSQGTIKVLVLAA

SEQ ID NO: 58879 - protein, 307 aa, Gossypium hirsutum
  Clone ID: GOSHI-09MAY01-C51953_1.pep
RTGLPGSTQRSKTHWGLGWGGGVMINSEEFNGTEIVRAIKKKISGKNAVTQWLSLDLLEACTTNCEKVASEGASVFVLEEMMKMIENPNTDHGNRGRALQLIRAWGQSQDLAYLPVFHQTYESLKERSTHVPVGNGKSGLLQYSLESCMRLPPSEDYPVNDPELHASDFAYNYGNLSVEQKKEVFEVTRNSLEVLSSMLGKETEPKPTMDELTKSMLEKCKQSQPVIQMIIEGTTDDDGILFEALNLNDELQQVISKFEELEAGSMSGRQHTENSGTTAANATVPVETCNENTISDSPSTHDETKTT

SEQ ID NO: 58880 - protein, 146 aa, Gossypium hirsutum
  Clone ID: GOSHI-09MAY01-C51943_1.pep
SVLVLEKEPSVSHSIDRRSPQQQSESFVHHLASPTPPRNPLASMSLQNKYVLQSRPLSHPFPTDNIDKSPGGSASAVESIKKQSSQVDTEKERNVSLLLRSPILESNQTTTANANTELDGGDFAGLFDKFVNDNDRRLDFGISAVS

SEQ ID NO: 58881 - protein, 186 aa, Gossypium hirsutum
  unsure (1)..(186): unsure at all Xaa locations
  Clone ID: GOSHI-09MAY01-C51913_1.pep
PRVRGILFSGIFGTGNGSSVSVENGGLLAMTRVGSRRVVQISAGFMIFFSILGKFGAVFASIPAPIIAALYCLFFGYVGSGGLSLLQFCNLNNFKIKFXILGFSVFMGLSIPQYFNEYTAINGFGPVHTGARWFNDMINVPFSSEAFVAGSLAMFLDVTLHGKDNATKRERGMHLWEKFKSFKKDA

SEQ ID NO: 58882 - protein, 159 aa, Gossypium hirsutum
  Clone ID: GOSHI-09MAY01-C51903_1.pep
TPTRTPTRTTTRTSEFVDILMHYNIPMALVSTRPRKTLEAAMRTIGIEECFSAIVAAEDVCRGKPDPEMFLYAAQLLEFIAERCIVFGNSNQTVEAAHEARMKCVAVANKHLVYELRAPDLVVRRLDELSIVDLKNLADIESAEFGSVFPIPEMEIEED

SEQ ID NO: 58883 - protein, 148 aa, Gossypium hirsutum
  Clone ID: GOSHI-09MAY01-C51593_1.pep
LQLPGNQLLNSMTSRCYDSNRFLPVKGKQNTVEVLNQGVEESTVASNMGTTQDLHRALSLLSNESSVSCEPKQHGSLAYPVHVSGSSMSQPTMNVISQSFPIPYALSENWQMEQEQTTQSQVEGDNHLQEFQILKVPYDNSFYSNQMN

SEQ ID NO: 58884 - protein, 377 aa, Gossypium hirsutum
  unsure (1)..(377): unsure at all Xaa locations
  Clone ID: GOSHI-09MAY01-C51623_1.pep
YLNKXEPSYYTKXGKDPLVYPYISLLSIQLLPAMSYLSKEAREEEYHIDAAHIAIVLADNGVLSEVSGAGQKLGVMDAYAKASSIIRQYGSMYLRLGNLQMALEYYAQAAAAVGGGHVSWTGRGSVDQQRQMNLMLKQLLTEILFRDGGVYLLLGSRGAGEEGELRRFLTDHKARQQFLLEAARQCQDSGLYDKSIEIQKRIGAFSMALDTINKCLSEAICALSRGRLDGESQTAGLIHSGNEILETFKYYPEVSFQEREHVSEQQTILRQLETILSIHKLMRLGQYLDALREVAKIPFLPFDPRAPDTSADVFQNLSPHVQACLPDLLKVAITCLDNVSDTDGSLRAMRSKIATFLANNMRQNWPRDLYEKVAKSL

SEQ ID NO: 58885 - protein, 154 aa, Gossypium hirsutum
  unsure (1)..(154): unsure at all Xaa locations
  Clone ID: GOSHI-09MAY01-C51183_1.pep
PTRPPTRPEGFHHVSIMSYTAKYASSFYGPFREALDSNPRFGDKKTYQMNPANYREALVEAQXDEAEGADILLVKPGLPYLDIIRLLRDQSPLPIAAYQVSGEYSMIKAGGVLKMIDEERVMMESLMCLRRAGADIILTYFALQAARSLCGEKR

SEQ ID NO: 58886 - protein, 257 aa, Gossypium hirsutum
  unsure (1)..(257): unsure at all Xaa locations
  Clone ID: GOSHI-09MAY01-C51053_1.pep
MWSMSSINDRGPSKYSMSVSMYRGGGRGYGRPRTAPPVRPSLLLDARICYLGMPIVPAVTELIVAQLMWLDYDNPSKPIYLYINSSGTQNEKMETVGSETEAYAIADTMAYCKSEMYTVNCGMAYGQAAMLLSQGAKGYRAVQPNSSTKLYLPKVSRSSGAVIDMWIKAKELDANTESYIELVAKGTGKXKEEIAKDVLRPKYFQAQEAIDYGLADKIIDSRDAAFEKRNYDEMLAQSKAMRRGAAGGPQATPSGFR

SEQ ID NO: 58887 - protein, 154 aa, Gossypium hirsutum
  unsure (1)..(154): unsure at all Xaa locations
  Clone ID: LIB3582-019-P1-K1-G3.pep
NEKMETVGSETEAYAIADTMAYCKSEMYTVNCGMAYGQAAMLLSQGAKGYRAVQPNSSTKLYLPKVSRSSGAVIDMWIKAKELDANTESYIELVAKGTXKTKEEIAKDVQRPKYFQAQEAIDYGLADKIIDSRDAAFEKTNYDEMLAQSKSMRR

SEQ ID NO: 58888 - protein, 124 aa, Gossypium hirsutum
  unsure (1)..(124): unsure at all Xaa locations
  Clone ID: LIB3146-026-Q1-K2-D9.pep
MPKRTTHTYSSEDAAPDGPDSDLFVYYCKHCGSHVLITXMPKRKTDKADVLDKKKHLARLNISEAGKVLLKRGDGKLEKQFRMNCIGCGLFVCYRAEDDLVTAPFIYAVDGALCTVAVETKPPD

SEQ ID NO: 58889 - protein, 74 aa, Gossypium hirsutum
  unsure (1)..(74): unsure at all Xaa locations
  Clone ID: LIB3583-031-Q6-K7-H4.pep
KRXTQHRXXTLTLXXXSSTLLQALRFPXVLITDXPNCRKXXQAKETDKAXMCLEKERSTLLGXKHQRXREKVLS

SEQ ID NO: 58890 - protein, 93 aa, Gossypium hirsutum
  Clone ID: uC-gsronu33b112a02b1.pep
LTRPPTRPPTRPDNIPAPAGNSHRSIQREAALTKFRLKRKDRCYEKKVRYESRKKLAEQRPRVKGQFVRQVQVDHPTQTIHSMASYNIEKCMD

SEQ ID NO: 58891 - protein, 49 aa, Gossypium hirsutum
  Clone ID: LIB3146-051-Q1-K1-D7.pep
CYEKKVRYESRKKLAEQRPRVKGQFVRQTQVDHPTQIQAECHYHNSPDG

SEQ ID NO: 58892 - protein, 99 aa, Gossypium hirsutum
  Clone ID: GOSHI-09MAY01-C52973_1.pep
VSWVFLRNPKLWLLPTVLWGPAASKANTKPSFASVTTNRGPENPSCEAKREAVKLWRTRGIEYGRKHGARRTGIVRGVPTWGLRRGAAVQKGNLGSLKP

SEQ ID NO: 58893 - protein, 192 aa, Gossypium hirsutum
  Clone ID: GOSHI-09MAY01-C52913_1.pep
ADLMQEFKTGYLTLSSAKSMFVSQLLGTAMGCVIAPLTFWMFWTAFEVGSPEGPYKAPYAVIFREMAILGIEGFSELPKHCLALCFGFFIGAVLVNLLRDVTPKEISQFIPIPMAMAVPFYIGAYFAVDMFVGTVILFIWERINQKEAEDYAGAVASGLICGDGIWTIPSAILSILRINPPICMYFGPSLSS

SEQ ID NO: 58894 - protein, 164 aa, Gossypium hirsutum
  Clone ID: LIB3585-049-P1-K1-G3.pep
PRVRAASGYVALAAISTATIPIIFPRLEWYLVLVSYIIAPALAFCNSYGTGLTDWSLSSTYGKIGLFIIASLVGSDGGVIAPLTFWMFWTAFEVGSPDGPYKAPYAVIFREMAILGIEGFSELPKHCLALCFGFFIGAFLVNLLRDVTPKEISQFIPIPMAMAV

SEQ ID NO: 58895 - protein, 55 aa, Gossypium hirsutum
  Clone ID: LIB3146-050-Q1-K1-F9.pep
EIVVLYCTLGNMRMTDIYPVFYELSISSNTLPYDSQSISLSSTQRRPKVHAQLVD

SEQ ID NO: 58896 - protein, 97 aa, Gossypium hirsutum
  unsure (1)..(97): unsure at all Xaa locations
  Clone ID: LIB3543-065-Q6-K6-A5.pep
MNTQLLEIEPKELKFVFILKKQSSCSITLTNKTNQYVAFKGKTTSPKKYCVRPNVGIIMPKSGXDFTVTMQAQREAPPGMXVGDKFLIQDTVAPMGN

SEQ ID NO: 58897 - protein, 82 aa, Gossypium hirsutum
  Clone ID: LIB3146-050-Q1-K1-D2.pep
MNTQLLEIEPKELKFEFILKKQSSCSITLTNKTNQYVAFKVKTTSPKKYCVRPNVGIIMPKSACGFTVTMQAQEEAPPDMIC

SEQ ID NO: 58898 - protein, 230 aa, Gossypium hirsutum
  Clone ID: GOSHI-09MAY01-C52413_1.pep
GRVGNKRASNRNLRTIQSSTKPPKESTASSVKSSGGSVSPRLQQKKLELDRRSRPPTPPSDPSKLRRQSNRHPLESGSPSGKRRSKSHNTQQCDDQLSQVSSESWTSSHQGDEISLQSDSNLTLESKLDTEVTSREQSIETNCIQSPSMNATKYSVSGIMQKKSTSRLGEDGSVAELAMVTPEQPSPVSVLDTSIYRDDAPSPVRQILNAPEGDIAEVSMTVRKEEQWDP

SEQ ID NO: 58899 - protein, 108 aa, Gossypium hirsutum
  Clone ID: GOSHI-09MAY01-C52783_1.pep
MASSAPPESSSTVQNARKPLGFMKNAVKYKHNFIQFFAMTGILLLSVRSLGQKYRLHDLQEDTAALKQEQQSLNDRMSNIKRGLLHEASLEPSGRFASRLRLLFGDDN

SEQ ID NO: 58900 - protein, 127 aa, Gossypium hirsutum
  unsure (1)..(127): unsure at all Xaa locations
  Clone ID: LIB3146-047-Q1-K1-G5.pep
VLSLCIVFLTVXLNTFFLKFCLWIPPRNPVIVYRLILWWLIAIPTIREYNLYLQDRKPVKKVGAFCWLSLAICIIELLICIKFGHGLYPKPMPQWLVVFWLSMGSTLVLFLMIWSWKLQRSYQKKRR

SEQ ID NO: 58901 - protein, 106 aa, Gossypium hirsutum
  Clone ID: LIB3149-035-Q1-K1-A10.pep
LWIPPRNPVIVYRLILWWLIAIPTIREYNSYLQDRKPVKKVGAFCWLSLAICIVELLIGIKFGHGLYPKAMPQWLVIFWLSIGVTLVSFILIWSWKLQRNFGKKRR

SEQ ID NO: 58902 - protein, 49 aa, Gossypium hirsutum
  Clone ID: GOSHI-09MAY01-C52033_1.pep
VASLLYMKATKNRGNVIRKGERILQVPVLFVFLEFNLSIFHILKFRSNC

SEQ ID NO: 58903 - protein, 69 aa, Gossypium hirsutum
  Clone ID: GOSHI-09MAY01-C52023_1.pep
VRGRVGFVIWELVILAFLVFSAVSLYFGHMQLAFILVCITMLLLLCMNGTGRPDRPTKKKRRMLLPLSI

SEQ ID NO: 58904 - protein, 106 aa, Gossypium hirsutum
  Clone ID: uC-gsronu33B157f07b1.pep
MITRSNLAEQLREYQLRSKHDWASVSFFSSTSNLSSYRVDVMVFVIWELVILAFLVFSAVSLYFGHMQLAFILVCITMLLLLCMKITKQVKLARKKKRRMLLPLSI

SEQ ID NO: 58905 - protein, 225 aa, Gossypium hirsutum
  Clone ID: GOSHI-09MAY01-C52303_1.pep
MSLTCVKMSEDVWLTCLTHALSTETEEIMGLLLGDIEYSKDGNVTALIWGASPQSRSDRRKDRVETNPEQLAAASAQADRMTASTGRTTRVIGWYHSHPHITVLPSHVDVRTQAMYQLLDSGFIGLIFSCFSEDTNKVGRIQVIAFQSSDGKQNHVTGPIALSPLNRSSVIDLESSLSSSENPLLTSGSAEVDSHMQDTSDSRPAQGSAKVQFMIIEVKICHMAC

SEQ ID NO: 58906 - protein, 135 aa, Gossypium hirsutum
  unsure (1)..(135): unsure at all Xaa locations
  Clone ID: LIB3583-013-P1-K1-A1.pep
FQSSDGKXNHVTGPIALSPLNRSSVIDLESSLSSSENPLLTSGSAEVDSHMQDTSDSRPVQGSAKSGIRSVDLGGFFANADANYLGQEQGRGYYKTNNIQNAXVDIDPMDMSESMQEAMHRSNLDMSGAEYVRKE

SEQ ID NO: 58907 - protein, 44 aa, Gossypium hirsutum
  unsure (1)..(44): unsure at all Xaa locations
  Clone ID: GOSHI-09MAY01-C52243_1.pep
DTMQFVQPDXVHTICMGLAASMGSFLLAGGEITKRLAFPHARRQ

SEQ ID NO: 58908 - protein, 189 aa, Gossypium hirsutum
  Clone ID: GOSHI-09MAY01-C53883_1.pep
MAGDVDNRQFRRLEPALNGVFAPLKLGPSTQIHRPVKHVFIDHEYDDSSSDDEGNEINGHYKELIIKSGNELEPSILDPRDEATADNWVERNASMVRLTGKHPFNSEPPLNRLMHHGFITPVPLHYVRNHGQVPKASWDDWTVEVAGLVKRPVKLTMDQLFNEFQSREFPVTLVCAGNRRKEQNMIKQT

SEQ ID NO: 58909 - protein, 121 aa, Gossypium hirsutum
  unsure (1)..(121): unsure at all Xaa locations
  Clone ID: GOSHI-09MAY01-C53583_2.pep
LMSDMQVTQMKSDGTLEESGEARRLRISLEEMADEVXSSGLLKECGXPEDALLVTPENFKENRWSWSDVKSLSGSLLLALDASLEHALLGSVMSMDRYAAAESFYKLAMAFAPXVPDLHIM

SEQ ID NO: 58910 - protein, 272 aa, Gossypium hirsutum
  unsure (1)..(272): unsure at all Xaa locations
  Clone ID: GOSHI-09MAY01-C53583_1.pep
KGYLWQRVNSQLSSPSQPYSLREALAQAQSSRIGASAQALRESLHPILRQKLELWEENLSAAVSLQVLEISEKFSAMAASHSIATDYGKLDCLSSIIMSFFSRNQPLVFWKAFLPVFNNVFDLHGATLMARENDRFLKQVAFHLLRLAVFRNDNIRKRAVIGLQILVRSSFYFMQTARLRVMLTITLSELMSDMQVTQMKSDGTLEESGEARRLRKSLEEMADEVKSFGLLKECGLPEDAYWLLXVFWENGWLWWEVNFFCGGGCFWVLLWF

SEQ ID NO: 58911 - protein, 121 aa, Gossypium hirsutum
  Clone ID: GOSHI-09MAY01-C53503_1.pep
HASAEVKQLMEAADVDGNGTIDYIEFISATMNRYRLDRDELLYKAFQYFDKDNSGYITKDELETAMKEYGMVDEASIRAVISEVDTDNDGRINYEEFCTMMRSGTQQTEKAFLDTINSSIT

SEQ ID NO: 58912 - protein, 96 aa, Gossypium hirsutum
  Clone ID: GOSHI-09MAY01-C53783_2.pep
IQFENNSILQSICKAQILPGPKNQIKQLQNPLPSCKPNKPNKHKNLAHKIFFAKQVKNPSPKHVAAEPSASPRVLGHHASVISTPHASKGHLTPEK

SEQ ID NO: 58913 - protein, 80 aa, Gossypium hirsutum
  unsure (1)..(80): unsure at all Xaa locations
  Clone ID: LIB3826-001-Q1-K6-B10.pep
MLGARVFYLFSRKXFCGLSFYVYWAYWACNWVMGFVIVLFGFWAPGKIWALHSRFHHIFKHRSIYWKYKIESCSQRSVGN

SEQ ID NO: 58914 - protein, 201 aa, Gossypium hirsutum
  Clone ID: GOSHI-09MAY01-C53723_1.pep
MLFSKAEKTKKAKAVSKQHFDTSDEFEPPSFMTLVEPGGINEKSTFSEIQAAQTAENTRTMPLQAGWFPSVIHGAHASLGRKKNDEIIKKVTKWNAKQHTPLKNLLSEPNSETKPMSPNSKQSATPVVGQNYDKVGEDNEHMGGKVSSTAGPETPVAEPTNIEVEKEWSSPARFPAEIKREKRRVKGRPLWFQFVCCSSIN

SEQ ID NO: 58915 - protein, 88 aa, Gossypium hirsutum
  Clone ID: GOSHI-09MAY01-C53173_1.pep
MKLVLVTFLLVSLVLSSFLFEESMAGSGFCAYKCKARCAKADFKERCFKYCNICCQKCSCVPSGNYENKHECYCFRDMKNFKGLPKCP

SEQ ID NO: 58916 - protein, 152 aa, Gossypium hirsutum
  Clone ID: GOSHI-09MAY01-C53103_1.pep
QSTHASKPTTKPTNEPTVVAALSTSSLLWIHSPKPISPKLALFTATRFFTPKKSTSIVMAAPPTTTATEVVPAIIVGGGRVGKALQDMGKGDDSLVKRGEAVPLDCEGPILVCTRNDDLEAVLEATPKSRWNDLVFFQNGMLEPWLQSKGLN

SEQ ID NO: 58917 - protein, 120 aa, Gossypium hirsutum
  Clone ID: GOSHI-09MAY01-C53053_1.pep
PIVRLKWRKNCSLSSFISPSSSFFFLLFAFNIVGAFGTRKTLSMEGSNAPNGGSNGATGSAHGPNWDYSWGWGSSPGSGWGYGSGSGSSPNGFGRGYGFGFGSGTGSRSGSGYGYGVGGC

SEQ ID NO: 58918 - protein, 116 aa, Gossypium hirsutum
  unsure (1)..(116): unsure at all Xaa locations
  Clone ID: uC-gsflnu33B071c06b1.pep
MEKKLQLKCLHFTFFFLFFLLFAFNIVGAFGTRKTLSMEGSNAPNGGSNGATGSAHGPNWDYSWGWGSSPGSGWAYGSGSGXVPNGFGRGYGFPFARGTGSGSGFRAETWYGSSIA

SEQ ID NO: 58919 - protein, 200 aa, Gossypium hirsutum
  Clone ID: GOSHI-09MAY01-C53063_1.pep
GRRYCAVHDVGRAINTFYAYKKFKFDVGIEEFHGLLSALCRYKNVQDAEHLMFCNKDVFPLNTKSFNIILNGWCNAIRSPREAERIWREMSKRGVRHDVVSYASIMSCYSKGSNLNKVLKLCSQMKSMRIEPHRKVYNAVIHALAKARHVKKAINLLKVMEENGIGPNVVTYNSLIKPLCKARKVNEAKHVFDECCRMAS

SEQ ID NO: 58920 - protein, 127 aa, Gossypium hirsutum
  Clone ID: GOSHI-09MAY01-C53013_1.pep
KMSPEALCIIEGPKKPHSQRLPRHKIGGTSKVLQSSCSSHFTHTRLHRFLLIGRSILPCRNAETDFHYFALFFLRLASLAFSISASFSAFFLSSSACLTFFHGAFRNSRTKFKRVAVTCSNGHGQDP

SEQ ID NO: 58921 - protein, 153 aa, Gossypium hirsutum
  Clone ID: GOSHI-09MAY01-C53373_1.pep
SSSPLLLLFLFLFLFSLHLNFNFIFLITTSFIRFLPFHFHHYNLLFQHRIPTIRQHNISQPLFRSTIVKECKRVSRSSNTCNHRIPIGRHRTRFRSIVVWVIQFGLGFNHEILVGFFGFRTGFGFFSDAFSFPSEKRRNCNYRVRVLGISWSV

SEQ ID NO: 58922 - protein, 238 aa, Gossypium hirsutum
  unsure (1)..(238): unsure at all Xaa locations
  Clone ID: GOSHI-09MAY01-C53363_1.pep
VSPTRKDNHFPGPSHIAPEGGSSSSTLSLTGSSTSIIEQGQWANLPPELLLDIIQRVETKEICWPRRRDVVACASVCKSWREITKEIVXTPEQCGFFTFPISLKQPGPRDAPIQCFIRRERETSTYRLHLGLTPALSGDLSKQLLVAKRVRRATCTDFMIYLKGDDFSKSSNDYIGKLRSNFLGSKFNIFESQPQYDSTAQSSPRSRWKTYLKSVPPKVPRISLNTASISYELNVLRT

SEQ ID NO: 58923 - protein, 258 aa, Gossypium hirsutum
  unsure (1)..(258): unsure at all Xaa locations
  Clone ID: GOSHI-09MAY01-C53303_1.pep
GRVGGDLYRGIYLGQDVAVEXVRSEHLNDTLEDEFAQEVAILREVQHRNVVRFIGACTKFPQLSIVTEYMPGGSLYDYLHKNHNVLKLSQLLKFAIDVCKGMEYLHQSHIIHRDLKTANLLMDTDNVVKVADFGVARFLNQGGVMTAETGTYRWMAPEVINHQPYDQKADVFSFAVVLWELVTAKVPYDTMTPLQAALGVRQGLRPELPENAHPKLLDLMQRCWEAAPDKRPSFSEITTELETLFEEVKETTEAVNGN

SEQ ID NO: 58924 - protein, 397 aa, Gossypium hirsutum
  Clone ID: GOSHI-09MAY01-C53333_1.pep
GRVGGRVGGRVGGRVGGRVGGRVGKDWLAENAREALLGNGKELSISGIAPYQPFDGLMEFKVAVAGFMSQVMENAVSFNPSQIVLTAGATPAIEILSFCLADTGNAFLVPTPYYPGFDRDVKWRTGVEIIHVPSRAADNFHLSIAALDRSFNQAKKRGLKVRGVIISNPSNPAGNLLNRETLYSLLDFAREKNIHIISNEILAGSTLGNEEFVSMAEIVDQEDTDRKRVHIVYGLSKDLSLPGFRVGVIYTFNEDVLAAARKLSRFSATSAPTQRLLISMLSDTKFVRTFITTNWERLQRMYVQLVAGLEKMGIKSIKSSGGFYCWADMSGFISSYSEKGEVELWDKLLNIGKVNVTPGSCCHCIEPGWFRFCFATLTEKDIPIVMERIQKVLKPVN

SEQ ID NO: 58925 - protein, 111 aa, Gossypium hirsutum
  unsure (1)..(111): unsure at all Xaa locations
  Clone ID: uC-gsflnu33B051g05b1.pep
PTRPAGSTHGNEEFVSMAEIVHQEDTDRKRVHIGYGLSKDLSLPGFRVGVIYTFNEDVQAAARKSSRISATXAATQCVLISMLSATKLVRAFITTNRERLKRMYGQLAAAE

SEQ ID NO: 58926 - protein, 224 aa, Gossypium hirsutum
  Clone ID: GOSHI-09MAY01-C53323_1.pep
MESNSWRFRFSNSSSSSSRRHQSRSDPFLGGGYEEFDGDEDFKAEFLCPFCAEDFDIVGLCCHIDEEHPVEVKNGVCPVCAKRVGMDIVSHITMQHGNFLKVQRKRRLRKGGSNLTFSMLRKEPRDGNLHALLGGSSCFVSPPNVEADPLLSSFMFNPPTADEPLSLQSLSIAESSADKESTDKESLERKPQQSQLSDQEHEEKARRCEFVRGLLMSTILNENL

SEQ ID NO: 58927 - protein, 107 aa, Gossypium hirsutum
  Clone ID: LIB3825-032-Q6-K6-D8.pep
MESNSWRFRFSNSSSSSSRRHQSRSDPFLGGGYEEFDGDEDFKAEFLCPFCAEDFDIVGLCCHIDEEHPVEVKNGVCPVCAKRVGMDIVSHITMQHGNFLKISFFLC

SEQ ID NO: 58928 - protein, 51 aa, Gossypium hirsutum
  unsure (1)..(51): unsure at all Xaa locations
  Clone ID: LIB3828-025-Q6-K6-F10.pep
RSCXSLLSLRGAGDGVNQVQTRESTDKESLRKKASTVTTVRPRARGEGSKV

SEQ ID NO: 58929 - protein, 139 aa, Gossypium hirsutum
  unsure (1)..(139): unsure at all Xaa locations
  Clone ID: GOSHI-09MAY01-C53293_1.pep
MSFLPARKGRHRQRYQDHLRLVAGCIPYXLPADVEDRNSSVTSRINVLMISTPNRDDLVFPKGGWENDETVHEAACREALEEAGVKGILDEDPLGVWEFRSKSRQNCCNMEGGCRGYMFALEVTEELDSWAEQTSYKRK

SEQ ID NO: 58930 - protein, 94 aa, Gossypium hirsutum
  Clone ID: GOSHI-09MAY01-C53263_1.pep
SRVRTIKKFRDALVKHTPDRCSLSTTKGLEEKELLALSANKDLSFNYTPVRTHEEILIWKQAPSDSTRKLPLSVPTTSAKQRDSEEKTLVGVGR

SEQ ID NO: 58931 - protein, 94 aa, Gossypium hirsutum
  Clone ID: GOSHI-09MAY01-C53233_1.pep
GREWEKSSDVQAVQNSYLQTKMVKNFGINVSVERRLNSLPDLDPNVVHEEGSGRSQVDVQAVSRKGKKSQNRLMNGKRVGKKKISWQVQVAFKI

SEQ ID NO: 58932 - protein, 139 aa, Gossypium hirsutum
  Clone ID: GOSHI-09MAY01-C48883_1.pep
PPLFFFFFFFFFFFFFFFFFFFFFFFFFFFFFFFFFFFFFFFFFFFFFFFLPIANLSNRLFYTSKKILHQFAMFRPASIYCYTLRNPESRDKWLHNCNVTHQGSYQSILVHCSMHVSLILSDKYMVLPLMQTPHVYIST

SEQ ID NO: 58933 - protein, 165 aa, Gossypium hirsutum
  Clone ID: LIB3543-044-Q6-K6-H4.pep
MSGLLNSSINGSASNLPDSSGRSFATSFSGSLQGLHNIHGSFNVPNLPGTLASRNSTLSNVPTGGVQQPTGSLSGGRFASNNLPVALSQLSHGSSHGHSGVTNRGGLGVSPILGNAGPRITSSMGNMVGGGNIGRTLSSGGRLSVPGLASRLNLSGNSGSASLTV

SEQ ID NO: 58934 - protein, 113 aa, Gossypium hirsutum
  Clone ID: LIB3135-047-Q1-K1-C3.pep
HGSSHGHSGVTNRGGIGNRNAVPGLGVSPILGNAGPRITSSMGNMVGGGNIGRTLSSGGGLSVPGLASRLNLSGNSGSASLTVQGQNRLISGVLSQGSSQVLSMLGNSYPTAG

SEQ ID NO: 58935 - protein, 73 aa, Gossypium hirsutum
  Clone ID: GOSHI-09MAY01-C48483_1.pep
HSSKSGSTTMNGHQPIRASELFSALRPLIYSDFDEEEEVSWCTFKVKSYFLLPFDFLNAKHMTNIKIIGRKET

SEQ ID NO: 58936 - protein, 203 aa, Gossypium hirsutum
  unsure (1)..(203): unsure at all Xaa locations
  Clone ID: GOSHI-09MAY01-C48413_1.pep
VETLVLPFPSHPSIPPGVENMVGFPISFGPIFMEAMAELYNPLFQWFQTHPSPPVAIISDMLLSSWVNTLSSNLNIHHLTFMVTNANSTLPLVRKGMKKLSPSIEQFAKNAVVPSLKSWGIIFNTFLELDGDXMEIIKEEFTEHDRLWAIGPLLPIKATNNERGGPSSIPRDEVIAWLDSCKRVNSVVFIGFGSQISLTKLQM

SEQ ID NO: 58937 - protein, 78 aa, Gossypium hirsutum
  Clone ID: GOSHI-09MAY01-C48423_1.pep
MAPPAKAITSPVPDAWYPTLAVFMLAIGLVLTASFFIYEATSSKRNRSLAKELTTGGVASVFLGFGSLFLLLSAGVYV

SEQ ID NO: 58938 - protein, 57 aa, Gossypium hirsutum
  Clone ID: LIB3149-057-Q1-K1-D12.pep
KGPPFIFFFLFFFFFFFFFFFVFFFFFFFFFFFFFFFFFFFFFFFFFFFCKLNQCAT

SEQ ID NO: 58939 - protein, 66 aa, Gossypium hirsutum
  Clone ID: uC-gsronu33B049g08b1.pep
RFSLIRLNSRTRSEETKIAMAPPAKAITSPVPDAWYSTLVVFMFSIWYLCSPFSFLFTHHLLVLSF

SEQ ID NO: 58940 - protein, 286 aa, Gossypium hirsutum
  Clone ID: GOSHI-09MAY01-C48613_1.pep
YGPVAELAPSLQADPTRSTDMSITGTMDPEDDTIFLKVQITDKEGQARNIYFPFDIVNDTAIDVALEMVKELDINDWEPLEIADMIEEEISSLVPTWKDWGSSQVYHQHSFKYEDEDEDDAQNEICHPFYATFSHSSYEAQFSHGKSVTSKCNWPQDLFSNDDASSSCSMNSFQYSTMNYEDFDSSLHQGEHPCIPKGLKSTRFCPSESMTGHSYEQCDAQLDSWRSSHLNGHRKLTKVRSLVDIRSKLLHQMVMAEINKRRLFKTVGAVENIGYQELGEVSGKIS

SEQ ID NO: 58941 - protein, 203 aa, Gossypium hirsutum
  unsure (1)..(203): unsure at all Xaa locations
  Clone ID: GOSHI-09MAY01-C48193_1.pep
RCAVQIAVLTVSDTVASGAGPDRSGPRAVSVVNSSSEXLGGAKVVATGVVSDDVGKIKEVLRRWSDIDKLDLILTLGGTGFTPRDVTPEATKEVIEKETPGLLYVMMQESLKVTPFAMLSRSAAGIRGSTLIINMPGNPNAVAECMEALLPALKHALKQVKGDKREKHPRHIPHEHATPVDTWERSHKLASAGSVKPSCPCSH

SEQ ID NO: 58942 - protein, 298 aa, Gossypium hirsutum
  unsure (1)..(298): unsure at all Xaa locations
  Clone ID: GOSHI-09MAY01-C48183_1.pep
ERAVNHLEKSVSSKLEVTMARXIQAQFQTSGKQALQDALRSSLETSVIPAFEMSCKSMFEQIDVTFQRGLMEHTATAQQQFENSHSSLAVALKDAINSASSITQSLCGEMANAQRKLLAIAAAGGSSKAGNPLVTQLSNGPLAHLHEMQPEAQLDPTKELSRMIAEKKYDEAFTSALHRSDVSIVSWLCSQADLPGILSMKPCSLSQGLLLALFQQLACDINKETSRKLAWMTDVAVAIIPSDPTIAVHVVPIFRQVSQIVDHLQXHVTTSASESASIQVLKFVINSVLSGKGFVQNC

SEQ ID NO: 58943 - protein, 198 aa, Gossypium hirsutum
  Clone ID: GOSHI-09MAY01-C48033_1.pep
MTASELQLPPGFRFHPTDEELVMHYLCRKCASQSIAVPIIAEIDLYKYDPWDLPDLALYGEKEWYFFSPRDRKYPNGSRPNRAAGSGYWKATGADKPIGQPKPVGIKKALVFYAGKAPKGEKTNWIMHEYRLADVDRSARKKNSLRLDDWVLCRIYNKKGAIEKQSPQGSIGKSSAVTEIEDKKPDIATLGVDTRQVA

SEQ ID NO: 58944 - protein, 69 aa, Gossypium hirsutum
  Clone ID: LIB3543-031-Q1-K6-G11.pep
MQLDDWVLCRIYNKKGAIEKQSPQGSIGKSSAVTEIEDKKPDIATLGVDTRQLPPPPTGLGNDYVYFDT

SEQ ID NO: 58945 - protein, 233 aa, Gossypium hirsutum
  unsure (1)..(233): unsure at all Xaa locations
  Clone ID: GOSHI-09MAY01-C48213_1.pep
MASNDHHGHHHDHGHDHHHHHHHHDHDKSTKSSWGGADGKVYHSHDGLXAPHSHEPIYSPGYFSRRAPPLVNRDFNERAFTVGIGGPVGTGKTALMLALCTFLRDKYSLAAVTNDIFTKEDGEFLVKHQALPAERIRAVETGGCPHAAFREDISINLGPLEELSNLYKTDILLCESGXDNLAANFSRELADYIIYIIDDLGGDXIPRKGGPGITQLTLVINRRTLHCVELLES

SEQ ID NO: 58946 - protein, 317 aa, Gossypium hirsutum
  unsure (1)..(317): unsure at all Xaa locations
  Clone ID: GOSHI-09MAY01-C49943_1.pep
MGGGGVMRAVGKVAGVGIVNSSLRGGVQGTPLSAEQSVMRVAAASRSASSVVSVSSEGVSSVADTTASVSHKSSWEMVDDWEFAGDFEQEAALEGSIPASPSPLPIARVLFSGVPSLVEAKEATNDLKDAXNKVYLSSPQYSETVQVTGVASLSNTEETKDCVADSIEATSVPKPAIQAFKLLNESPAVQSVVASIASDPNVWNAVLNNSAYMDFIKSQQTNDKFEFPGSPRSSVSSVKLEENEDSGDSFSAFIQKIKTSVVEMVSKTTDFLHSLFSLPLADKAKENAGSNNMDKTIGASLMGLAVMVIMVVLLKRV

SEQ ID NO: 58947 - protein, 133 aa, Gossypium hirsutum
  Clone ID: LIB3582-055-P1-K1-A11.pep
MGGGGVMRAVGKVAGVGIVNSGLRGGVQGTPLSAEQSVMRVAASSRSASSVVSVSSEGVSSVVDTTASVSHKSSWEMVDDWEFAGDFEQEAALEGSIAASGRPEPIARVLFSGVPSLEEAKEATNDLKDALDK

SEQ ID NO: 58948 - protein, 114 aa, Gossypium hirsutum
  Clone ID: LIB3146-010-Q1-K1-D11.pep
PTRPPTRPPTRPPTRPPTRPPTRPLPFIGITEMGGGGVMRAVGKVAGVGIVNSSLRGGVQGTPLSAEQSVMRVAAASRSASSVVSVSSEGVSSVADTTASVSHKSSWEMVDDWE

SEQ ID NO: 58949 - protein, 194 aa, Gossypium hirsutum
  Clone ID: GOSHI-09MAY01-C49923_1.pep
MEGIGGDGASVASPMPQWGHDAWRMYQYYLDKSTPHTAYRWIGTLVIVAIYCLRVYYVQGFYIVAYGLGIYLLNLLIGFLSPLVDPELEGSDGPLLPTKGSDEFKPFIRRLPEFKFWYSMTKAFCIAFVMTFFSVFDVPVFWPILLCYWIVLFVLTMRRQIGHMIKYKYIPFSIGKQKYSGKKASPSSSGSRGD

SEQ ID NO: 58950 - protein, 117 aa, Gossypium hirsutum
  unsure (1)..(117): unsure at all Xaa locations
  Clone ID: uC-gsflnu33B026a03b1.pep
GIPCYGASRRPTSTKWRHYARRMASDLRAETTPNTTYRWISXTCIGAIYCXRAYYVQGVYIVTYGLWTYLLTLASGELRSLGDPELEGSDGPLLPTKGSDEFKPFIRRLPEFNSGTP

SEQ ID NO: 58951 - protein, 97 aa, Gossypium hirsutum
  unsure (1)..(97): unsure at all Xaa locations
  Clone ID: LIB3584-061-P1-K1-G6.pep
MEGIGGDSAAVASPLPQWGHDAWRIYQYYLDKTTPHTAYRWIGTXVVAAIYCLRVYYVQGIYIVSYGLXIYLLKLLIGVFVPLVDPELEVLMALAST

SEQ ID NO: 58952 - protein, 49 aa, Gossypium hirsutum
  Clone ID: LIB3493-058-P1-M1-G1.pep
FFSVFDAPVFWPILLCYGIVLFVITMRRLIGHMIKYKYIPFSIGKRVRL

SEQ ID NO: 58953 - protein, 111 aa, Gossypium hirsutum
  Clone ID: GOSHI-09MAY01-C49823_1.pep
DSMSSRYMKKLTPQTLLSSITPRRVLLTPIIKLQWGSLQHTLRGPHNLRVTLGFFSLLRHLLTSYKITSGFQEIKEHGVGNLRLKQWKKGVAISQKNKDLKQNFILFFYNG

SEQ ID NO: 58954 - protein, 192 aa, Gossypium hirsutum
  unsure (1)..(192): unsure at all Xaa locations
  Clone ID: GOSHI-09MAY01-C49463_1.pep
FIGELDYFAAIRMRKNPXLEATHLEKAXELYTRVLVQHTDNLYAANGAAVVLAEKGQLDVSKDIFTHVQEGASGSVFVQMPDVWINLAHIFFAQGNFALAVKMYQNCLRKFYYNTDSQILLYLARTHYEAEQWQECKKTLLRAIHLAPSNYTLRFDAGVAMQKFSTSTLQKEKRTADEVRSTVAELENAVRI

SEQ ID NO: 58955 - protein, 424 aa, Gossypium hirsutum
  unsure (1)..(424): unsure at all Xaa locations
  Clone ID: GOSHI-09MAY01-C49693_1.pep
PTRPLKVARLVKLSLRLLFPHQIRREWAEQDAVRKEEVVLPLKKPSTKDSVDLERPKEKTAAGPSSPRSPSKNLLPAQFRSEETSAGSVDSMSVRKTLSNGLQQSDQPASSSTSVQITGILKSETQKSATPKPSEPTIPQVPVMSRPSSAPLIPGPCPTPFVSMVQTTPLLARSVSAVGHLGPDLSPAAGYVPQSYRNAIMGNHNVASSSAGFTPNXSYSGINPSLVYSQPPTLENFRSAPHWMENSQKASSRPMHSNTLLGEFENLDLYRSVQNGSREHFSMEFPACASGPQTQGVLADEFPHLDIINELLDEEHNVGKAARAGAGFHSLGNEPYLLNQHFPFHSDLGLSDGMGSSSGSPLRYANGQQIDGLVPNRWQMASSDLSLLSMRNADGENYAYYSPEYPNMACGINGYTVFRPSNGH

SEQ ID NO: 58956 - protein, 91 aa, Gossypium hirsutum
  Clone ID: LIB3825-018-Q1-K6-H4.pep
ANNITQPPDLVLCHTNLCILPKPSKHLATSVHLSAVFFLVFRHRSSNFQARKIRWAPTVAPLIPPRMENGPVSELHFRYIILCPFSTPHYE

SEQ ID NO: 58957 - protein, 149 aa, Gossypium hirsutum
  Clone ID: GOSHI-09MAY01-C49173_1.pep
PILVATDVAARGLDIPHVAHVVNFDLPNDIDDYVHRIGRTGRAGKTGLATAFFNEGNLSMARPLAELMQEANQEVPAWLTRYASRAPYGGNKNRRYGGGGGRFGGRDFRREGSVGRNLHHYGGGNSGTAYGVPGNYGGGYAPGMTSAWD

SEQ ID NO: 58958 - protein, 74 aa, Gossypium hirsutum
  Clone ID: GOSHI-09MAY01-C49303_1.pep
KHIYIYLPIYFIYFIALYIYINVHIHIYIYFYEQKIFHIFIILCVRPKFSPGPTKPKAQTHSKPKSLTQIPAYP

SEQ ID NO: 58959 - protein, 80 aa, Gossypium hirsutum
  Clone ID: LIB3828-021-Q1-N6-A12.pep
NTKKITCQNQLLYSYYFCFCISLYPDFFLYFLFQSKKSYSLFFLKFFLFSSPPSAILASFYLLYCYSSFAGGIGATTNRG

SEQ ID NO: 58960 - protein, 118 aa, Gossypium hirsutum
  unsure (1)..(118): unsure at all Xaa locations
  Clone ID: GOSHI-09MAY01-C49273_1.pep
AAFFPSHFLASPEDILVWKYEGSADYSVGSGYRALVTKYLQDNNYTTPNFEAHKDFYKSLWTLHIPEKTKIHLWRLVNNFLLHYSNXLQRTLKVDVLCPLCKKGPEDTDHLLWTCDIL

SEQ ID NO: 58961 - protein, 88 aa, Gossypium hirsutum
  Clone ID: GOSHI-09MAY01-C44993_1.pep
MASTKVQRIMTQPINLIFRFLQSKARIQIWLFEQKDLRIEGRIIGFDEYMNLVLDDAEEVNVKKKSRKSLGRILLKGDNITLMMNSGK

SEQ ID NO: 58962 - protein, 173 aa, Gossypium hirsutum
  Clone ID: GOSHI-09MAY01-C44803_2.pep
MAYSLEQRFWCQRVLRFGFAFVCVCLGGYIVGPTSLLWRLKDKSRPRVSCLPCVCDCSSHTDDFFLTPGCGQNDPDLNQELEKDTVALLSEEIALQKIVSKETMDRTSALTMDAKRASSHYQKEAEKCNAGVETCEEAREWAEAQLREELKRTALWEQRARQLGWKDRKRAYT

SEQ ID NO: 58963 - protein, 181 aa, Gossypium hirsutum
  Clone ID: GOSHI-09MAY01-C44803_1.pep
MAYSLEQRFWCQRVLRFGFAFVCVCLGGYIVGPTSLLWRLKDKSRPQVSCLPCVCDCSSHTDDFFLTPGLADNTYSGCGQNDPDLNQELEKDTVALLSEEIALQKIVSKETMDRTSALTMDAKRASSHYQKEAEKCNAGVETCEEAREWAEAQIREELKLTALWEQRARQLGWKDRKRVYT

SEQ ID NO: 58964 - protein, 99 aa, Gossypium hirsutum
  Clone ID: GOSHI-09MAY01-C44463_1.pep
KGAAEMYESGTFVTVDLQFLVDAHICVFEDVSSYGRYLCFNHAITNHEDAIHLARLLTPSAPSPPPSYEEAYMIIQQRLSNKKLNKVMVDFESELLLED

SEQ ID NO: 58965 - protein, 206 aa, Gossypium hirsutum
  Clone ID: GOSHI-09MAY01-C44413_1.pep
MSLAVGENPSPKTMGFDKEGSATDSEASETKTPSKIPPNEDAVDGHHPPGINRKASESSLCPTEDEDDDDEEEREIELGPKCTLKEQLEKDKDDESLRRWKQQLLGTVDFESRGEKLEPAVKILSLAIKSHGRPDMVLPIPENGKPKGLWFTLKEGSKYSLQFTFQVSNNIVSGLKYTNMVWKTGVKVDSTKEMIGTFSPQAEPYT

SEQ ID NO: 58966 - protein, 206 aa, Gossypium hirsutum
  Clone ID: GOSHI-09MAY01-C44753_1.pep
ASSFSGSGTISERPPKVLAAPESEAILTVWKKSLLFNCNGFTVFGSKGDLVFRVDNYMDGNKGEILLMDATGNPILTIRRKKMSLGDSWLVYKGESTSTNPLLCVRKSMNILNNKCLAYVIPGDNTSNRSNNVVYEIEGSYSQRSCSVYDDRRRLAAEIKKKEAVHGGVAYGNDIFRLVVQPGHIRTDFAMALVILLDQMFGSSRR

SEQ ID NO: 58967 - protein, 94 aa, Gossypium hirsutum
  Clone ID: GOSHI-09MAY01-C44743_1.pep
MVLDGIVSSPHRRSGSMRKQFPKDELGSWSTLVQRHRFLLTALGLLAFLCTIYLYFAVTLGATDTCSGLEGTERATCKLQHAWSTLSHGKLKLF

SEQ ID NO: 58968 - protein, 75 aa, Gossypium hirsutum
  unsure (1)..(75): unsure at all Xaa locations
  Clone ID: GOSHI-09MAY01-C44653_1.pep
YACRYIPVGLXDVIPHRLNCRPPSYYGRYDLDTLMACDCAADWIRISKMLLGKVPYGFTFAPKHKSNAYDRAENG

SEQ ID NO: 58969 - protein, 71 aa, Gossypium hirsutum
  Clone ID: GOSHI-09MAY01-C44603_1.pep
LCPRPLLYLFFYKLLGYLNFDACCEFNSICNYKYKTSAILFVKFLVSSFWEYVVKHCHLYVSKSSIVHAFA

SEQ ID NO: 58970 - protein, 79 aa, Gossypium hirsutum
  Clone ID: GOSHI-09MAY01-C44303_1.pep
MAAKYIIGSVVASFAVAYVIDKLVADEKIFGGTTPHTVSNKEWWEETDKKFQAWPRTAGPPVVMNPISRQNFIVKSGSE

SEQ ID NO: 58971 - protein, 136 aa, Gossypium hirsutum
  Clone ID: GOSHI-09MAY01-C44283_1.pep
MLKFGCLAGCRLRHTGPYLLAAMPMSQEASNYDEVSMQQSLLFSDSLKDLKNLRTQLYSAAEYFELSYANDDQKQIVIETLKDYAVKAIVNTVDHLGSVTYKVNEFLDEKVDDVSGTELQVSCVEEKVRKCQEYID

SEQ ID NO: 58972 - protein, 100 aa, Gossypium hirsutum
  Clone ID: LIB3829-035-Q1-K6-C10.pep
KNNSSSHGEEDQRNKESLDTRFNQTLKNVQGYLFLIVPISHYFSSSIFFLVSQCLNLDCSFFIGFREIPFDLSNFSFDSEFTRKIFSSSGGNFEFAKIFN

SEQ ID NO: 58973 - protein, 73 aa, Gossypium hirsutum
  Clone ID: LIB3829-035-Q1-N6-C10.pep
NHSGSNKVYMVPNMTICPESSLVNFVTLAESVVLVPIAEFWTSWAASSFFEDEDVNLLTVVLPSQLFVFLTPP

SEQ ID NO: 58974 - protein, 81 aa, Gossypium hirsutum
  Clone ID: LIB3148-023-Q1-K1-A9.pep
MTICPESSLVNFVTLAESVVLVPIAEFWTSWAASSFFEDEDVNLLTVVLPSQLFVFLTPPSMDVSMSSLVPASFCRTFFDN

SEQ ID NO: 58975 - protein, 62 aa, Gossypium hirsutum
  Clone ID: GOSHI-09MAY01-C45923_1.pep
GFINQRHSNRVRMKWSFLNHFLNLFSDYTSLFFCVKSVHSNFILQSSFICNDFVTSIILTWQ

SEQ ID NO: 58976 - protein, 69 aa, Gossypium hirsutum
  Clone ID: GOSHI-09MAY01-C45873_1.pep
CLCFYYYLFFFFFFFYFFFFIFIIYIFFFFFFIILLIFFNFILFFIFFIIFIIFLYFIFFYFNFLYYIF

SEQ ID NO: 58977 - protein, 117 aa, Gossypium hirsutum
  Clone ID: GOSHI-09MAY01-C45423_1.pep
MKRTAGKYYWLERILRSVRPRVRSGDVGTSFKMQDEGRSRVRETLTPSTAQSALRRILPYPCKKQYTVVILMPQASRFKLLRSLFKQNAPSRDAKILAAIAGGTVLAACLWRYSRKS

SEQ ID NO: 58978 - protein, 69 aa, Gossypium hirsutum
  unsure (1)..(69): unsure at all Xaa locations
  Clone ID: LIB3148-043-Q1-K1-D3.pep
SKNQKGVKRGISPSIYTKDFNNLLCVSFSFFLEPPIYSPLMTFSISPSPIFHQQNNTSIRXXSTLXSGF

SEQ ID NO: 58979 - protein, 80 aa, Gossypium hirsutum
  Clone ID: LIB3148-052-Q1-K1-E12.pep
SKNQKGVKRGISPSIYTKDFYNLLCVSFSFFLEPPIYSPLMTFSIPHHQFPSTNNTSIRVLFHALNIIVSSHMRIISSIS

SEQ ID NO: 58980 - protein, 79 aa, Gossypium hirsutum
  Clone ID: GOSHI-09MAY01-C45193_2.pep
PKVPLPPGVVVSPPRPRGRPPKPKDLLAPPKPKPVSTGRPRGRPTKKAKTGTAAAPPPPPGVKRGRGRPPKVLPSVGFQ

SEQ ID NO: 58981 - protein, 182 aa, Gossypium hirsutum
  Clone ID: GOSHI-09MAY01-C45193_1.pep
MATEEISRTQGLNPSQQSSSLPDYPQMILEAIEALNEKEGSSMSSIAKHIDSTHSDLPASHSTLLSHHLNQMKQMGQIVMLNNNYSKPDPNAPPKRGRGRPPKPKVPLPPGVVVSPPRPRGRPPKPKDLLAPPKPKPVSTGRPRGRPPKKAKTGTATAPPPPPGVKRGRGRPPKVLPSVGFQ

SEQ ID NO: 58982 - protein, 216 aa, Gossypium hirsutum
  Clone ID: GOSHI-09MAY01-C45163_1.pep
PRVREDRHGDRDREKSRERGREREREREKSRERSHDRPRDRDREDRHHRDRERTRDRDRDRERDRGGRDRDRARERGRDRGRDYERDRERDRDRDRDRDRDYDAGDYDRDRGRSRDRDRESDYDRVESKHERDRHSERDYDHGEPDEDHGWFEQHDHGHRRSDLDDQHYEYYDHHRGRGEYDLDAHGDRYDQYSDRDRDRDRDRDRYDGMEEDDYR

SEQ ID NO: 58983 - protein, 89 aa, Gossypium hirsutum
  Clone ID: LIB3825-012-Q1-K6-D11.pep
LLDLPSLICLVTIITCNHLLPFHHNDHGQNIDHNDPREHPDHILLDPDDDHSIHSVGHLGLTAYAHDHAVHTTHDPHLAHHDHNPSHCA

SEQ ID NO: 58984 - protein, 74 aa, Gossypium hirsutum
  Clone ID: uC-gsronu33B141d03b1.pep
HNDPHEHPDHILLDLDDDHSIHSVGHLGPTVTVIVIVIVIVMMEWKKMITGDYGHKTNQAREIEQLLSLPVLLV

SEQ ID NO: 58985 - protein, 214 aa, Gossypium hirsutum
  unsure (1)..(214): unsure at all Xaa locations
  Clone ID: GOSHI-09MAY01-C45133_1.pep
QLLQNKAFTGTLDKCKACDMTVHVVDMMTLDGVPYHKTCFKCSHCKGNLQMTSLXSGWHGILYCKPHFEQLLKESGNFSKNLQTGTRPTELNRTPSKLSSLFSGTLDKCAACEKTVYPLEKVTMEGECFHKTCFRCAHGGCPLTHSSYAALDGVLYCKHHFAQLFMVKGNYNHVLQAATHRRNNSTASSSENVETRAEPEESAADEESKEASDN

SEQ ID NO: 58986 - protein, 103 aa, Gossypium hirsutum
  unsure (1)..(103): unsure at all Xaa locations
  Clone ID: uC-gsflmaxxa054a08b1.pep
LRQKMAFTGTLDKCKVCDKTVHVVDMMTLEGVPYHKTCFKCSHCKGNLQMTTYSWMDGILYCKPHFEQLFKESGNFNMNFXTGTKPTGLNRTPNKLSFLFSGT

SEQ ID NO: 58987 - protein, 127 aa, Gossypium hirsutum
  Clone ID: GOSHI-09MAY01-C45393_1.pep
ILLISSRVETDTFDAALLLKEREKKAKKKAAAASASSANVEEPTETVAEVPEPEKDVNAEEPVPAPVPVKNKVQKENTVRYKNRSRARESLPRPVLKRKKSTNYWIWAAPAAVVVLILIALAYYYLV

SEQ ID NO: 58988 - protein, 195 aa, Gossypium hirsutum
  Clone ID: GOSHI-09MAY01-C45303_1.pep
MRKPCCDKQDTNKGAWSKQEDEKLINYIRIHGEGCWRTLPQAAGLLRCGKSCRLRWINYLRPDLKRGNFTEDEEDLIIKLHALLGNRWSLIAGRLPGRTDNEVKNYWNSHLRRKLINMGIDPNNHRLITHNHLPRPHDPNSGASIISPASKVPVTDNTNIHPPEKSRGDNDQVSDAASSLEDHKLPDLNLDLTIS

SEQ ID NO: 58989 - protein, 221 aa, Gossypium hirsutum
  unsure (1)..(221): unsure at all Xaa locations
  Clone ID: GOSHI-09MAY01-C45273_1.pep
DVPEXIKTNKRYAGSXKWTVQEVAESVKQDFRSIDILVHSLANGPEVSKPLLDTSRKGYLAALSASSYSHVSLLKHFLPLMNPGGSSISLTYIASERIFPGYGGGMSSAKAALESDTRVLAFEAGRKHKIRVNAISAGPLRSRAAKAIGFIDMMIEYSKANAPLQKELSADEVGNTAAFLASPLASAITGAVIYVDNGLNAMGIGVDSPIFKDLNIPSDKH

SEQ ID NO: 58990 - protein, 69 aa, Gossypium hirsutum
  Clone ID: GOSHI-09MAY01-C46993_1.pep
RPRVRHASKKFQNPFPSPLLGFQPGRGAQSSARRGTAAGVPKGNPFWLIQPPQSRSKGYVPKLPSQTAR

SEQ ID NO: 58991 - protein, 255 aa, Gossypium hirsutum
  unsure (1)..(255): unsure at all Xaa locations
  Clone ID: GOSHI-09MAY01-C46983_1.pep
TNQSAPAGAAEASKIQDPKSHVSGSGPELRRTSSFDRTWEETVAESVANELVLQAHSSSVSSTKSGPLVSTEQQDESSKNKMKDTKSVKSGRSSXEEKKVGKSNEEKKSRPRKMMEFHNIKISHVGLLVTYEGSRFVVNDLKLLMDTFHRVEFTGTWRRLFSRVKKHIIWGVLKSVTGMQGKKFKDTAHTQQPSGTGVPDSDLNLSDNDQVEKPGPYPIAFLKRPTDGAGDGFGTSITGLFNTQRRKVQQFGLRT

SEQ ID NO: 58992 - protein, 212 aa, Gossypium hirsutum
  Clone ID: GOSHI-09MAY01-C46953_1.pep
FVFQGGTRLPEGVEFEMHTLPVDGNTVPDGDGLNVYVNTDDPGESPNIPRAVLMAVVRRSKARAKKNYARADELRQKIIESGYQVIDLQNEEILARKYRIRLRGIDAPEMSMPFGKEAKEELVKLVHGKCLRVLVYGEDHYGRCVADIYCNSIFVQEVMLKKGPAWHYVACDQRVEFATWQKEARTKKTGLWVQSNPEKPWEWRKKNKHEGR

SEQ ID NO: 58993 - protein, 58 aa, Gossypium hirsutum
  Clone ID: GOSHI-09MAY01-C46913_1.pep
KHGDSSLLPPGERSLLYLKCPLLVYVLASSLICEYAHSINLLRARLLILDITDIGSTH

SEQ ID NO: 58994 - protein, 91 aa, Gossypium hirsutum
  Clone ID: GOSHI-09MAY01-C46863_1.pep
SQNFSSDNAMEMVPLTSAQDGKGSISHHFPCFSSMIPIFSCAEGSFDVRESLSSSISKSMSVLPSTGRSVSASSVSLVYSSRFNKGTCLPE

SEQ ID NO: 58995 - protein, 103 aa, Gossypium hirsutum
  Clone ID: GOSHI-09MAY01-C46813_1.pep
MSGRGKGGKGLGKGGAKRHRKVLRDNIQGITKPAIRRLARRGGVKRISGLIYEETRGVLKIFLENVIRDAVTYTEHARRKTVTAMDVVYALKRQGRTLYGFGG

SEQ ID NO: 58996 - protein, 124 aa, Gossypium hirsutum
  Clone ID: GOSHI-09MAY01-C46823_1.pep
HASAPYVFMLRFIKAAQSDTKLEHLAFYLIELCLVEYEALKFKPSLLCASAIYVARCTLQMSPSWTPLLCRHTRYDASEIRECAEMILRFQRAASSGQLKVTFEKYASHELSQVAMITPLGRLP

SEQ ID NO: 58997 - protein, 87 aa, Gossypium hirsutum
  Clone ID: LIB3146-039-Q1-K1-E4.pep
YFYDPMIHHYIKSSISTSKGGINTSNAIEHAYNYNTTTPIDMKASGLFCVLYMTFHFYITSHAKIELIQLKSSPRKPTQGGNHCNFT

SEQ ID NO: 58998 - protein, 205 aa, Gossypium hirsutum
  Clone ID: GOSHI-09MAY01-C46593_1.pep
ALRLYHSFFFLYDDAGVKIVVYQLNKENLDTVLSWRRVYNYRDFPVMVASKSNHYWIPFLLLKLHSLPHGVASALSFVFHIELLLVLLIFPRGDKEGCLKVSTPKGFTSKTRMSTQKRKPQKNNEQKEDSSIPKLSEFVEPYNRETELKVDEVENKEGKEDLSSIGKELDIRLSNHNVVNGNGNGMILGYVVGLEKKEINSENGT

SEQ ID NO: 58999 - protein, 110 aa, Gossypium hirsutum
  Clone ID: GOSHI-09MAY01-C46463_1.pep
RWAAAAQFALAVSLTSSQNDLTRLEIEDENSILKKTRDAVITLQGVLEGKHDKTIEESLDQRQMSKDGWWSALYRMVEGLAIMSKLGRSRLHQSDYGFEDRSIDWDQTEM

SEQ ID NO: 59000 - protein, 74 aa, Gossypium hirsutum
  unsure (1)..(74): unsure at all Xaa locations
  Clone ID: LIB3829-007-Q6-N6-B11.pep
DAVIPFQGVLEGKHDNTXEESXLDQRQMSKDGWWSALHRMVEGLPIMSKLARSRLPQSDYGLEHSSMAWAQTEM

SEQ ID NO: 59001 - protein, 65 aa, Gossypium hirsutum
  Clone ID: LIB3829-018-Q6_N6-D5.pep
IVRQFWGSKLQKKKREGYQTDSWLTILDVNFGQFSDAALQNAFSYESKIQHGRDRTLHLRWTPQP

SEQ ID NO: 59002 - protein, 50 aa, Gossypium hirsutum
  Clone ID: LIB3148-053-Q1-K1-F2.pep
VKGSVTSHKVGVAPENRLSLKTELSRQSRSFGMGKFDYIFILKNSLESLC

SEQ ID NO: 59003 - protein, 50 aa, Gossypium hirsutum
  Clone ID: LIB3146-057-Q1-K1-B2.pep
YIFLLSETTFKITLKLDLSYLSYFSFFFQFSHLIKMIVKLISMLKIMLIH

SEQ ID NO: 59004 - protein, 58 aa, Gossypium hirsutum
  Clone ID: GOSHI-09MAY01-C46693_1.pep
FLRVIMDEIFNRMTNLFFDPTTLSAIFGIDEVECHQLTSSTTVFMIFSLIIFYTVRNM

SEQ ID NO: 59005 - protein, 112 aa, Gossypium hirsutum
  Clone ID: GOSHI-09MAY01-C46623_1.pep
GIVKFDLHTEPEAGKEKIEVGGNVVGVFDLGPGRFGSEAVFVPREPGTTCEEDDGYLIFFAHDENTGKSAVNVIDAKTMSADPVAVVELPYRVPYGFHAFFVTEEQLKEQAY

SEQ ID NO: 59006 - protein, 44 aa, Gossypium hirsutum
  Clone ID: uC-gsronu33B098f05b1.pep
LFSSIFRQIKRQGTLYNQLSGLKLTTIFFFSVRPIMLLLYYTHL

SEQ ID NO: 59007 - protein, 79 aa, Gossypium hirsutum
  Clone ID: GOSHI-09MAY01-C46023_1.pep
MPKIDPKGASSSLRPSQFSSSPAANVSTITWPFRSPVSSGPSPNMPIVPPPKLPPGFAELKGSGTQNGSKVPNPSGDSK

SEQ ID NO: 59008 - protein, 152 aa, Gossypium hirsutum
  unsure (1)..(152): unsure at all Xaa locations
  Clone ID: GOSHI-09MAY01-C46383_2.pep
MAELLDKAKNFVADKVANMKKPEASITDVDLSHVGRDGIQYDAKVSVTNPYSAPIPSCEISYTLKSAGRVIASGKVPDPGSLKASDSTMLDVAVKVPHSVLVSLIKDIGADWDIDYELEVGLTVDLPIFGDLTIPLSXKGEIKLPTFKDLFF

SEQ ID NO: 59009 - protein, 79 aa, Gossypium hirsutum
  Clone ID: LIB3148-053-Q1-K1-C12.pep
SQVPDPGSLKASDSTMLDVAVKVPHSVLVSLIKDIGADWDIDYELEVGLTVDLPLFGDLTIPLSQKGEIKLPTFKDLFF

SEQ ID NO: 59010 - protein, 63 aa, Gossypium hirsutum
  Clone ID: GOSHI-09MAY01-C46353_1.pep
CCSNVPIMFLALWLTLKQDLGTKFSCQIFKSEVMLDWVLFCFINSWNDKKSNKFIVHEFNLIS

SEQ ID NO: 59011 - protein, 76 aa, Gossypium hirsutum
  Clone ID: LIB3825-032-Q6-N6-A7.pep
IGRLIIIWRHEFFFAVFEMLMLLKCSNHVFGPLVNSETRLGTKFSCQIFKSEVMLDWVLFCFINSWNDKMSNKFNV

SEQ ID NO: 59012 - protein, 196 aa, Gossypium hirsutum
  Clone ID: GOSHI-09MAY01-C46273_1.pep
TQGKKNLELDNRSVQYDEEYILNSRGLKLFTCKWIPVNEEPKGLIFICHGYALECSITMSSTANRLVKAGFAVYGIDYEGHGKSSGLQGYISSFNNVVDDCSNFFTQICEKKENKRKMRILLGESLGGAVLLLIHRKMLDYWDGAILAAPMCKIADEMKPHPLVINVLKKLCNFIPTWRIIPSPDVIDTGCKLPQI

SEQ ID NO: 59013 - protein, 93 aa, Gossypium hirsutum
  Clone ID: LIB3148-051-Q1-K1-G10.pep
ELDNRSVQYDEEYILNSRGLKLFTCKWIPVNEEPKGLIFICHGYALECSITMSSTANRLVKAGFAVYGIDYEGHGKSSGLQGYISSFNNVVDD

SEQ ID NO: 59014 - protein, 287 aa, Gossypium hirsutum
  unsure (1)..(287): unsure at all Xaa locations
  Clone ID: GOSHI-09MAY01-C47993_1.pep
MAEAKNLGVVGSGQMGSGIAQLGAMHGLHVWLLDTDPTALRPAPHAISSSLQRFVSKGQISQAACTEALKRLEYTSNIDELRSADFIVEAIVESEDVKKKLFIELDKITKSSAILASNTSSISITRLASATSRPCQVIGMHFMNPPPIMKLVEIVRGADTSDETFHATKALAERFHKTIICSQDYSGFIVNRILMPMLNEAFSTLYTGVATKEDIDTAMKLGTNHPIGPLELADFIGLDVCLSIMKVLHAGLGDSKYAPCPLLVRYVDAVVLEIMXGVSVYDYRKGS

SEQ ID NO: 59015 - protein, 197 aa, Gossypium hirsutum
  Clone ID: GOSHI-09MAY01-C47933_1.pep
PTRPIARRYTGLDRGISFLHRMGIGFMISVLATLVAGFAEVKRKEAALAHGLQDKAHAIIPISVFWLVPQYSLHGIAEAFMSIGHLEFFYDQAPESMRSTATALFWTAISVGNYMSTLLVSLVHKFSARADGSNWLPDNNLNEGKLEYFYWLITALQVVNLIYYICCAKLYTYKPIQIHGKDSGSDGDAGVELASKA

SEQ ID NO: 59016 - protein, 120 aa, Gossypium hirsutum
  Clone ID: GOSHI-09MAY01-C47833_1.pep
MGYSPYPMYEDQRTRFKHQSLMQDFEDLHKETEAMRMKLQMMKEQKLTLLAEVRFLKRRHKFLMQNRSSNTLAGRNFVQPQSTVVKRANSIVKEKNSTGKDHSLRHLAIGVRSEPKGKAL

SEQ ID NO: 59017 - protein, 338 aa, Gossypium hirsutum
  unsure (1)..(338): unsure at all Xaa locations
  Clone ID: GOSHI-09MAY01-C47583_1.pep
ENQITGLIPRCFGYLKSLVFLDLSRNKFRGPVPEGLHQLKYLKHLSLASNNLTGSIPSSFAQLRSLGVLDLSSNSLSGEIPHGLLDLRNLTSLQLNNNKFSGEIPSGFSNLKSLSMLEVSSNDLSGSLPLNGNAVNHTGVHEKPLLRSHHLFSLSVRSAETTFTGSSQIGAASPSSNKIDDQSLDSIEIASIASASAIVSVLLVLVILFFYTRKWVPMSRVQVSETREITAFVDIGVPLTYEAIVQATGNFSAGKCIGNGGFGATYKAEILRELXAVKRLAIGRFQGVXQFHAEVKTLETMRHPNLVTLIGYHASETEMFLIYNYLSGGNLKNFIKER

SEQ ID NO: 59018 - protein, 93 aa, Gossypium hirsutum
  Clone ID: GOSHI-09MAY01-C47423_1.pep
GFIIRPKSPLAYRSKALRVSALRQAPDLSEASVGLQRRSFTGKAPPSFADLICKTQSLYIKTRTRFTFQFLCTFRIAFLFSSSFLYRLKIGHL

SEQ ID NO: 59019 - protein, 143 aa, Gossypium hirsutum
  Clone ID: GOSHI-09MAY01-C47753_1.pep
QRVKTNGIWLHIAEQGTGPLVLLLHGFPEIWYSWRHQITFLANHGYHVVAPDLRGYGDSDSPLSPTSYTVMHLVGDIIGLLDHFGEQHAFIVGHDWGAGIGWHLALSTPERVKGLINLSVPYFSRNPNAKFAEFLIKTYWDGI

SEQ ID NO: 59020 - protein, 80 aa, Gossypium hirsutum
  Clone ID: GOSHI-09MAY01-C47773_1.pep
FVPWHGCDELDKSQTDENILDHHQSSKDICIGLAGANKSRQQLTAIWGRLSLSFTLTHQQKPSPLSNNGYYIYKLPFKDP

SEQ ID NO: 59021 - protein, 252 aa, Gossypium hirsutum
  unsure (1)..(252): unsure at all Xaa locations
  Clone ID: GOSHI-09MAY01-C47653_1.pep
FFVRATPPPYLPSKIDIWTILSESRRILKAHSGHFQALSLLFLLPSSCFLSIYPFIYQHFSPTIESHLSFLEQNPRIFPIKLPIFNLLYTLILSIFSFFAIGTITYSVFHGFYGRPLNLLSSFKAASTSFFPLLSTSLVTQFIVYGISLVLGLVFFALIKATQFYSSPTFIVLILVYVIIFTSTITYLQLNWIFAHAVVVVESSWGLEPLKRSRNLAKGMEXVPLKMMLFFGFFFACNIWLSIQRLEDPAGD

SEQ ID NO: 59022 - protein, 319 aa, Gossypium hirsutum
  Clone ID: GOSHI-09MAY01-C47143_1.pep
AFAPRPEGHARSKGVKKESDVRAATVIYKSKIWGTKEKPAAVVYKNNQDPLNSKHTIEGKRNEQQSIAPETHDAEDGLSTKPKKTDFKSNNRKRQRNSMHSKRSSNKPEGSVLKRERNHMHSKRSSNKPEGSVLKRERNHLHSKSSSNKREGTSQGRHIRSSRSSKTTPSVPRAHGRGADSIAYRIPVKEAYAPSTSGYPGSAHGAFSGSKRPSSYMESHAGFAQPVKHNDQYLTECIAPAFHHQRQAYAGYLKLDHYERQPPAKYFKPAIGNDALPHAGFLESSFRKQSFDGARRIAEYSGPDNQRPVHGSGSITNLD

SEQ ID NO: 59023 - protein, 191 aa, Gossypium hirsutum
  Clone ID: GOSHI-09MAY01-C47233_1.pep
MAEKPQPVVVQYCQVCGLPAEYCEFGSEFDKCKPWLIQNAPDLYPDLLKEANAKEADKVADQLQSTGISSADSGSSSEAKQEEVKRLPGGKIKKKEKKEVVIEKVVRNKRKCITTVKGLELFGVKLSDASKKLGKKFATGASVVKGPTDKEQIDVQGDISYDIVEFITETWADVPETAIFSIVDGKKVPAA

SEQ ID NO: 59024 - protein, 517 aa, Gossypium hirsutum
  unsure (1)..(517): unsure at all Xaa locations
  Clone ID: GOSHI-09MAY01-C40963_1.pep
LASGMQCKTFHGFQLSSAGIIRLPKFEMVMAKPEANSKPVLASEDVYIVTVYGRIYCLQVDRVAMVLHSYRFYRDAIIQQGSLPIYSSKVAVSVVDNVLLVHQVDAKVVILYDIFADSRAPISAPLPVLLRGFQRSDISNSRPSTKESESSEASDSNDNEAIIYGADWTPSRPDLICDIANKLLWKNHLDWEAISVSSSEVPLVLEFLQRRKLEANKAKQLCLAITQTMILERRPITVVAKAMDVLVTSYSLSLKTGSYFKGIKTERTPSSVPNVSGPGQATDVFTSRTDGKSVQHEPATGVNSVSFSRPSTYSVSEQQESQLTSPAISPDEMYRFXVFAPIEEEMTVEPSYLVAIILECFRCAHLDRVKVHPSLYVLTIQLLARSEQYAELSLFIINKVIEPSKEVALQLLESGRQSLQIRKLGSDMLRQLSLNHDYVLLLVQDGYYLEALRYARKHKVTTIRPSLFLEAAFTSNDSQHLAAVLRFFSDFIPGFRSTSDFFTYYNVLNEMSSSVTA

SEQ ID NO: 59025 - protein, 121 aa, Gossypium hirsutum
  unsure (1)..(121): unsure at all Xaa locations
  Clone ID: LIB3147-036-Q1-K1-F7.pep
AEWVKVHAICYVLTMRLQARMEQYAELSXLIINKGIEPXKEVALQMLESXSQSLQIRKLGLDMLRQLSLNHDDVSLLEQDGYYVEALRYARKHNVTTIRPSLFIEAAFTSNDLQHLASVLR

SEQ ID NO: 59026 - protein, 187 aa, Gossypium hirsutum
  Clone ID: GOSHI-09MAY01-C40563_2.pep
IWNFLGRVGGGYFSEIIVRDDAYPRPVSMAVAQLVMAVGHVFFAMGWPGAMYIGTFCRPLAYAAHWAIVPAAASELFGLKKFGALYNFLTLANPAGSLVFSGVIASSIYDHEAEKQAHQHHIQLQMSGLLFSGLYGQDEVLKCEGSVCFFLTSMIMSGFCVIAAVLSMILVYRTKTVYANLYGKSRT

SEQ ID NO: 59027 - protein, 289 aa, Gossypium hirsutum
  unsure (1)..(289): unsure at all Xaa locations
  Clone ID: GOSHI-09MAY01-C40563_1.pep
NLLSVSHTLVTIFTVILFFLLVTPIIVPIALSCSEEPRDPAEEVLLPKSEQQEAGKPEQSDQEHEVIFSEVEDEKPVEVDLLPASERQKRIAQLQAELFQAAAKGAVRVKRKRGPHRGEDFTLMQALIKADFWLIFFSLLLGSGSGLTVIDNLGQMSQSLGYDYTHIFVSMISIWNFLGRVGGGYFSEIIVRDXAYPWPVSMAVAQLAMAAGHVFFAMGWPGAMYVRTLLIXGLGYGAHWAIVPAAASELFGLXKKLGALLNFLTPANPGGPLVSQVYGNLISTLSPIT

SEQ ID NO: 59028 - protein, 67 aa, Gossypium hirsutum
  Clone ID: GOSHI-09MAY01-C40533_1.pep
MMNITRPNSKQKKKKKKKKKKKKKKKKKKKKKKKKKKKKKKKKKKKKKKKKKKRHKKGKKIKRGKTT

SEQ ID NO: 59029 - protein, 54 aa, Gossypium hirsutum
  Clone ID: GOSHI-09MAY01-C40453_1.pep
IHKNLRLYIKNKVRLVKIDCRLTRRRHDCLSRRSFNYTIHHRVKELNIASDGFD

SEQ ID NO: 59030 - protein, 100 aa, Gossypium hirsutum
  unsure (1)..(100): unsure at all Xaa locations
  Clone ID: GOSHI-09MAY01-C40423_1.pep
EGCVFFLVPTCAFQNLCGPGXWMAMEKLHAELVEQFSSVWHHSRVRRYLTSEDWPGPESKGKPWYGLLMLLRKYPEHFVINTRSKGRITLEFVSLVSLLS

SEQ ID NO: 59031 - protein, 369 aa, Gossypium hirsutum
  Clone ID: GOSHI-09MAY01-C40783_1.pep
MYPPPGPGGMYYNYPPPMLVNCSGCHTPLQLPQGARSIRCAICKAVTNIADPRSLPPASQSPAPSTHALPSPSPYNHAPPGAPPHAHGRKRAVVCGISYRYSRHELKGCINDAKCMRYLLVNKFKFPEDSILMLTEEETDPYRLPTKHNIRMALFWLVQGCQPGDSLLFHYSGHGSRQRNYTGDEVDGYDETLCPLDFETQGMIVDDEINATIVRPLPHGVRLHAIIDACHSGTVLDLPFLCRMNRAGQYVWEDHRPASGLWKGTSGGEVISFSGCDDDQTSADTSALSRITSTGAMTFCLIQAIERGHAATYGSILTAMRNAIRSVGSGGGGGDFGGGAVTSLISMLLTGGTTVGLGGLRQEPRLTAC

SEQ ID NO: 59032 - protein, 243 aa, Gossypium hirsutum
  unsure (1)..(243): unsure at all Xaa locations
  Clone ID: GOSHI-09MAY01-C40713_1.pep
LRERGWKYKMQASMLEIYNETIRDLLSNNRSSGSDPTRPENSVSGKQYTIKHDANGNTYVSDLTIVDVSSISEISSLLRQAAQSRSVGRTQMNEQSSRSHMVFTLRISGXNESTEQQVQGVLNLIDLAGSERLSRSGATGDRLKETQAINKSLSCLSDVIFALAKKEDHVPFRNSKLTYLLQPCLGGDSKTLMFVNVSPDPSSVGESLCSLRFAARVNACEIGVPRRQMTLRPTDSRLSCGGS

SEQ ID NO: 59033 - protein, 100 aa, Gossypium hirsutum
  unsure (1)..(100): unsure at all Xaa locations
  Clone ID: GOSHI-09MAY01-C40613_1.pep
ANKRKXFRVLDNRLEGQYPIEGAFKAVTLALRCLSIDAKFRPSMNEVVTALEHLQDSNDSRINHNNTNSVPRRRRQSADDATGGRSTTAYPQPSASPLYA

SEQ ID NO: 59034 - protein, 129 aa, Gossypium hirsutum
  Clone ID: GOSHI-09MAY01-C40063_1.pep
MKESKSVKLNSQQHQQHENGHFSPFKFAKLLDPEASWDKDQLGDVLHWIRQVVALFCGLLWGAIPVVGGIWIFIFLAISTGIIYGYYAMILKIDEEEFGGHAALLQEGLFASMTLFLLAWILVYSLAHF

SEQ ID NO: 59035 - protein, 171 aa, Gossypium hirsutum
  Clone ID: GOSHI-09MAY01-C40353_1.pep
GAILSHLWESNFTPQKIIRGLGPWGPDLVRKYTAARFTNRYSPEGVFTEEESRLLSDYVYHTSAAKASGELCLKYIFAFGAFNRALLNSASEWKVPTTFIYGAEDWMNYQGAQEAREQMKVPCEIIRVPQGGHFVFLENRDGFHSAVLYACRRFLSPNPDKEPFPEGLVSA

SEQ ID NO: 59036 - protein, 180 aa, Gossypium hirsutum
  unsure (1)..(180): unsure at all Xaa locations
  Clone ID: GOSHI-09MAY01-C40283_1.pep
SLLPIVGGVVLASVTEASCGWPGFWSAMASNLANQSRNVLSKKLMVKKEESLDNITLFSIITIMSFILLAPVAIFVEGIKFTPAYMQSAGLNVKEVVVRSLLAALSFHAYQQGAYMILQRVSPVTHSVGNXVKRVVVIVSSVIFFKTPVSLINSLGTGIALAGVFLYSRVKRFKPNAKAA

SEQ ID NO: 59037 - protein, 168 aa, Gossypium hirsutum
  Clone ID: GOSHI-09MAY01-C40253_1.pep
RAWTLQDVQVYFQSVIATKDCIYFIYCLTFVTSHLCLKFALIPILCRSVERIAKFLRHNFSSSTLYRKYLEDPCVWVESNTTTLSILSSHAEIGLGWLLLVSLFSWQRNIVQTFMYWQLLKLMYHSPVSAGYHQSVWAKIGRTINPLILRYVPFLNTPVSAIQKWWSR

SEQ ID NO: 59038 - protein, 81 aa, Gossypium hirsutum
  unsure (1)..(81): unsure at all Xaa locations
  Clone ID: AW187289.1.pep
VITGRERTGRLKILSWLWGQRNDEQTFKYRQMXKPMYHARVTAGYHQSVWAKIGRTINPLLVGYAPFLNTPVSAIQKWWSR

SEQ ID NO: 59039 - protein, 156 aa, Gossypium hirsutum
  Clone ID: GOSHI-09MAY01-C40243_1.pep
PRVRPRVRGRVGFGPQTVSPVPKSLPIQWIDGVLSKGDKVEFFYDEYRCPVYVKDVVAIIRTLIDKWLSEGKKMQLLLNVGGPDRVSRVQMAEAVAQIRGYDSSLIKPVSASSVDRGVKSPADISMDITKLVQKLNICPTPFKDGVKLTLAAEASL

SEQ ID NO: 59040 - protein, 156 aa, Gossypium hirsutum
  unsure (1)..(156): unsure at all Xaa locations
  Clone ID: GOSHI-09MAY01-C41993_1.pep
TSTASLFLLFIFSITPPSFGFEGANATNYPVLDIDGDWLRTGVEYLRCVSXIFGAGGGGLALGRSTKQPCPEIVVQRRSDFDKGTPVIFSNADTNDTVVRLSTDVNIEFTPIRTKLCRTTTVWKIDNYDDSAGKWWVTTDGVRGNPGPNTLTSWVK

SEQ ID NO: 59041 - protein, 68 aa, Gossypium hirsutum
  Clone ID: GOSHI-09MAY01-C41953_1.pep
NWSYSWGGIYIVILQSNKNIQHDYIQNARLLQYSNLRHVVMLFISVVGSWRCALVRPYCSLAHVSSLH

SEQ ID NO: 59042 - protein, 72 aa, Gossypium hirsutum
  Clone ID: GOSHI-09MAY01-C41943_1.pep
GLPKNSSDFSSNYNCFCCESFCHVVRNATAMTLITSFSFLKHDNAPTYSFTSVTIKAKYLDSVLLVAFPFSL

SEQ ID NO: 59043 - protein, 88 aa, Gossypium hirsutum
  Clone ID: GOSHI-09MAY01-C41973_1.pep
PTEFGGKAVLEYNHEEFSERMSQDDIKSANLWGFDDKLQCIGFRHSGSDVVSRASLALHHLPVDLPALCLLCWNIIHIIHLYIVYATV

SEQ ID NO: 59044 - protein, 115 aa, Gossypium hirsutum
  Clone ID: GOSHI-09MAY01-C41923_1.pep
KCFLLAKKIKLLSLNGYTLQVMKLQNFLLIILERKSWIIIFCCFFVFVIICFALLLLLTKASFPRSLLRNSFLVSIAMHSFSSSMLITSSTLHFSKLEESRNVAFSSIPGITDKS

SEQ ID NO: 59045 - protein, 192 aa, Gossypium hirsutum
  Clone ID: GOSHI-09MAY01-C41803_1.pep
HHSLLFPLLPLKSTSSISLPLPLPLTRSSRFRSTHAPSPRPIAASFSAVESTTSTDGLGNSKTPLLEVRGLTAVIAETKQEILKGVNLVVHHGEIHAIMGKNGSGKSTFSKVLVGHPDYEVTGGDVVFKGENLLDMEPEERSLAGLFMSFQSPVEIPGVNNIDFLHMAYNARRKKLGEPELGPLEFYAYIYP

SEQ ID NO: 59046 - protein, 96 aa, Gossypium hirsutum
  Clone ID: GOSHI-09MAY01-C41833_1.pep
MVCEKCQKKLSKVIVPDKWKEGASNTNESGGRKINENKLLSKKRRWTPYGNTKCIICKQQVHQDGKYCHTCAYSKGVCAMCGKQVLDTKLYKQSNV

SEQ ID NO: 59047 - protein, 179 aa, Gossypium hirsutum
  unsure (1)..(179): unsure at all Xaa locations
  Clone ID: GOSHI-09MAY01-C41593_2.pep
MGRSPCCEKAHTNKGAWTKEEDDRLIAYIRAHGEGCWRSLPKAAGLLRCGKSCRLRWINYLRPDLKRGNFTEEEDELIIKLHSLLGNKWSLIAGRLPGRTDNEIKNYWNTHIRRKLLNRGIDPATHRPLSEAGXSSDVSSTISFNGVKQKXQMNNPHGFVETDEKKXPAVEERCPDLSL

SEQ ID NO: 59048 - protein, 190 aa, Gossypium hirsutum
  unsure (1)..(190): unsure at all Xaa locations
  Clone ID: GOSHI-09MAY01-C41593_1.pep
LVFYGGFLEFYRWSLIAGRLPGRTDNEIKNYWNTHIRRKLLSRGIDPATHRPLNEASQDVTTISFSGAKEVLEKMNTNSNNNPIGFITKAEMRIPVQERCPDLNLDLRISPPYYQHTQPESFKTGGRTLCFICSLGVKNSRDCTCXTITTAAGSSSXARSSHSNSNNSSGYDXFLGLKAGILEYSRSEMK

SEQ ID NO: 59049 - protein, 193 aa, Gossypium hirsutum
  unsure (1)..(193): unsure at all Xaa locations
  Clone ID: LIB3584-009-P1-K1-F1.pep
PGSTPRSAHTNXGAWTKXEXDRLIAYIRAHGEGCWRSLPKAAGLLRCGKSCRLRWINYLRPDLKRGNFTEEEDELIIKLHSLLGNKWSLIAGRLPGRTDNEIKNYWNTHIRRKLLNRGIDPATHRPLNEAGVHQDVSSTISFNGVKQEKDKMNNPNGFVETDEKKIPAVEESCPDLNLDLRISPSFFHQTQQH

SEQ ID NO: 59050 - protein, 139 aa, Gossypium hirsutum
  Clone ID: LIB3272-005-P1-K1-H9.pep
PCCEKAHTNKGAWTKEEDDRLIAYIRAHGEGCWRSLPKAAGLLRCGKSCRLRWINYLRPDLKRGNFTEDEDEVIIKLHSLLGNKWSLIAARLPGRTDNEIKNYWNTHIRRKLLNRGVDPLTHKQLNESTARHVANAICC

SEQ ID NO: 59051 - protein, 283 aa, Gossypium hirsutum
  unsure (1)..(283): unsure at all Xaa locations
  Clone ID: GOSHI-09MAY01-C41583_1.pep
MASSLSTTPSAAFASVAKTTTALPNSTNLQLSTVSFRFSSRLNLRFFSKSLQHGQNSKAVVKAQLNEVAIDGSSNASAAPTIKSGAPTAEAKDAKTSSDVSPPAMATEESIAEFLXQVSSLVKLVDSRDIVELQLKQPDCELXVIPKKEALPQPPSAAPVVMMQSPSQPPVMPPVPSVPALPPGQASAAPTPAPSLAASKSAKSSLPPFKCPMAGTFYRSPAPGEPPFVKVGDKVQKGQVLCIIEAMKLMNEIEADQSGTIVEILAEDGKAVSVDMPLFVIEP

SEQ ID NO: 59052 - protein, 122 aa, Gossypium hirsutum
  Clone ID: GOSHI-09MAY01-C41513_1.pep
MNDGNLNKMSTKSSQDSKAPQKKDAFQVKSGIWADSLNRGIIDLNISAPKKVSLADVGIVCGLSDVGERVKGPPTSFYMGRAMGTGSGLGKTGFASTPSTDEDGLFSSLGNHQQYQFGSFKK

SEQ ID NO: 59053 - protein, 159 aa, Gossypium hirsutum
  Clone ID: GOSHI-09MAY01-C41503_1.pep
MGWKAAEKLIRHWKILRGDNVMIIRGKDKGETGIIKRVVRSQNRVIVEGKNLVKKHIKQGPGHEGGIFTVEAPLHASNVQVLDPVTGKPCKVGVKYLKDGTKVRVSKGIGASGSIIPRPEILKIRTTPRPTVAGPKDTPMDLVLQKTYDPKTGVGMPDL

SEQ ID NO: 59054 - protein, 122 aa, Gossypium hirsutum
  unsure (1)..(122): unsure at all Xaa locations
  Clone ID: AI731789.1.pep
MGWKAAXKLIRHWKVLRGDNVMIIKRVIRSQNRVIVEGKNLVKKHIKQGPGHEGGIFTVEAPFHASNVQVLDPVTGKPCKIXVKYLEDGTKVSVXSIXASGSIIPRPEILKMKTTPELLLVP

SEQ ID NO: 59055 - protein, 68 aa, Gossypium hirsutum
  Clone ID: GOSHI-09MAY01-C41523_1.pep
LDVLCFSPPLVVLGRWIRSNSLVFVFTALDSSRLFIRCYKLHPRRMCLRISARGSKPEDPLEVPGRVG

SEQ ID NO: 59056 - protein, 149 aa, Gossypium hirsutum
  unsure (1)..(149): unsure at all Xaa locations
  Clone ID: GOSHI-09MAY01-C41453_1.pep
TIHPTLHLPANRQPSTHVAGLFASSAAPAAASAPQTSAATSAASSGGGLSLFSTPSSTPASSMSYXLFATPTTGAAIQTSLFSSSSGSLLGSASTPSLFASTVPAFGSTASAGGSLFSTPFASGAPTGSGASFGAASKSSRPKSRTARR

SEQ ID NO: 59057 - protein, 135 aa, Gossypium hirsutum
  unsure (1)..(135): unsure at all Xaa locations
  Clone ID: AW186780.2.pep
VSIYQAPQLGNVFAARVGRALYYILKAFRTAASKLEKIGYVDTENESETVEPKGGKEAIDFKEVKRVDHILASEQRKNIFCXMIXKPALPPFPDGFVPHSTAEVEKDPENQQIAEPQPCGVDPIIDQGPDKRMKF

SEQ ID NO: 59058 - protein, 131 aa, Gossypium hirsutum
  unsure (1)..(131): unsure at all Xaa locations
  Clone ID: LIB3147-041-Q1-K1-C9.pep
PTRPPTRPPTRPPTRPPQLCSVXAARVGRALYYISKAFTTAASKLEKIGYVDTENESETVEPKGGKEAINIKEVKRVDHILASLQRKLPPAPLPPPFPDGFVPPSTAEAEKDPENQQTAEPQPSAVDPIID

SEQ ID NO: 59059 - protein, 49 aa, Gossypium hirsutum
  unsure (1)..(49): unsure at all Xaa locations
  Clone ID: GOSHI-09MAY01-C41153_1.pep
MDEISNAAVVHFNGNMKPWLVLPRVRFKPLWTKXVDYDLEFVQACNFGV

SEQ ID NO: 59060 - protein, 81 aa, Gossypium hirsutum
  Clone ID: GOSHI-09MAY01-C41143_2.pep
IGYFIRLNHGSLYYNYILIQDQKCKKPITNNLSLSLHINSQKSTLFIYICESYHLPLQIPSMNQKMRNKKDLLRGKKISLD

SEQ ID NO: 59061 - protein, 129 aa, Gossypium hirsutum
  unsure (1)..(129): unsure at all Xaa locations
  Clone ID: uC-gsronu33B055e03b1.pep
SFYLLILWFIDVIYLFYINFFYFSFYYLLFFVXFVSYILILFFRLYIXYFFIILNIFYLYKYISFFLIFFIFLYSNNLYXSKYFLFIFYFFYXMFKYFFYYYILLYFNYYNTFFYIIFLIILVIIFFIF

SEQ ID NO: 59062 - protein, 129 aa, Gossypium hirsutum
  Clone ID: GOSHI-09MAY01-C41033_1.pep
PRVRKSVQMGDAVALIRGEGKNLRRKEKRVRIEQIRANLGLSDSQRTPTPGESLRDFYRRTNLYWQMAAHEHTQHTGKELRKDGFDLAEARYRELKPLLDQLAILEAEQKAEEAEGPETSSRKRGKKRV

SEQ ID NO: 59063 - protein, 165 aa, Gossypium hirsutum
  Clone ID: GOSHI-09MAY01-C41303_1.pep
MFNDIGAGVRFGGARDRGYGDMGFGRSGRQAEYGFGRSGGNRGPGFGRSGSQFSDEMGGYGGRFGSNNRSGNFGGSASSRSSGFGNFGSRRTSGFGDFGSGNPGGFKDNRSGQTAGGFGGFGSGGFGDKHSGQSSASNGDPPSSRFSRFGVSDVDNDQSTGRTPF

SEQ ID NO: 59064 - protein, 192 aa, Gossypium hirsutum
  unsure (1)..(192): unsure at all Xaa locations
  Clone ID: GOSHI-09MAY01-C41323_1.pep
MEFLDEDARPRFLFQSKPQSSSSSERSKPFLFISLSISSIILSLSLFSIESEPFKSLLFWFSFSLFLGPFAPSXSLTGGDIRVGVGPTIPDPIEQDPQPETESKKKSSQKRSKPDKIDEPIGNPGELAGNGNGFSESKVKSKESKKKEDLGSNFDGEGKEWSETEIEILNKQMVKNPVGKPGXWEAIASAFK

SEQ ID NO: 59065 - protein, 138 aa, Gossypium hirsutum
  Clone ID: LIB3189-050-P1-K1-G12.pep
MEFLDEDARPRFLWQGKPQSWGCSERPSPQKPSKPFLFISLSISSIILSLALFSIESEPFKSLLFWLSFSLFLGPFAPPSLTGGDIRVGVGPTIPDPIEQDPQPETESKKKSSQKRSKPDKIDEPIGNPGELAGNGNG

SEQ ID NO: 59066 - protein, 78 aa, Gossypium hirsutum
  Clone ID: GOSHI-09MAY01-C42903_1.pep
MADAIELKTAPADFRFPTTNQTRHCFTRYIEFHRCLAAKGEESNQCEKFAKYYRSLCPGEWIDKWNEQRENGTFPGPL

SEQ ID NO: 59067 - protein, 49 aa, Gossypium hirsutum
  Clone ID: LIB3135-031-Q1-K1-G6.pep
PLKLATDKFSMPKKQCFTSFPICDHSHRGPGKVPFSLCSFHLSIHSPGQ

SEQ ID NO: 59068 - protein, 127 aa, Gossypium hirsutum
  Clone ID: GOSHI-09MAY01-C42883_2.pep
MSSNSMSASWTAKQNKDFERALAVYDKDTPDRWYNVAKAVGGKTVEEVKKHYELLLEDVRHIESGRVPSPDYWTVTGNRQGKKPASMKDSEAQMKKKKWWTCMDLTLICVCVCVAVIVVLKNSHKCI

SEQ ID NO: 59069 - protein, 81 aa, Gossypium hirsutum
  Clone ID: GOSHI-09MAY01-C42883_1.pep
MSSISMSGSWTAKQNKDFERALAVYDKDTPDRWYNVAKAVGEKTVEEVKKHYELLLEDVRRIESGRVPFPDYWTVTGNRQA

SEQ ID NO: 59070 - protein, 244 aa, Gossypium hirsutum
  Clone ID: GOSHI-09MAY01-C42843_1.pep
NNFTILLFHYDGLTSEWDEFEWSKRAIHVSVQKQAKWWYAKRFLHPDIVAPYEYIFMWDEDLGVENFNAEEYIKLVKKHGLEISQPGLDANSAGLTWAMTRKRNDTEVHKDTEERPGWCNDPHLPPCAAFVEIMATVFSRDAWRCVWHMIQNDLVHGWGLDFSLRKCVEPPHEKIGVVDAQWIVHQSVPSLGNQGEAEGGRAPWEGVRQRCRKEWTMFQDRLTTAERAYYASLGITDPYNLTAN

SEQ ID NO: 59071 - protein, 56 aa, Gossypium hirsutum
  Clone ID: LIB3148-003-P1-K1-H6.pep
KFNIFFFKQHLCMCSDRIKVAFSCIQKSKFTRSHIEVTDLYNSNAIVKKNYIISIN

SEQ ID NO: 59072 - protein, 76 aa, Gossypium hirsutum
  Clone ID: GOSHI-09MAY01-C42873_1.pep
YKFYYPSNADYRLLHLKAKIVANQKEEAAGRFLNQIPTATAANFSVSAFVKREQNRNKTATTTTTFKFNFNDEGPS

SEQ ID NO: 59073 - protein, 351 aa, Gossypium hirsutum
  Clone ID: GOSHI-09MAY01-C42413_1.pep
EATNNFVVPFPNNSFGVIPPMVASFGNAESQAREVSRLSSFVVPHPFDPATYYAQFYRSSVDNDGRVSPFASSGVAAKYNGNVSVLPPQTSQSQEGGNSLVLTTTSSSPVVTQAAGMMQSSLAVTQQPVPVYRSAAGVHLPHYPPNYIQYAPFYSPFYVPSPAIHQFINNGVFPQQPQAGTVYPSVPAAPTTGVKFSLPQFKPGSNTPSSIHIGMPSGYGPYGSSPAGYNPSSAVATGNSTTNEDLSGTQFKESNVYVTGQQSEGSAVWIAPPGRDISTLPASSFYNLAPQGQNVTFAPTQVVPGSFAGIYHPQAATAAAVHPLLQQAQTMAGAVNMGGSAAGVYRQPQHA

SEQ ID NO: 59074 - protein, 174 aa, Gossypium hirsutum
  Clone ID: LIB3585-013-P1-K1-D10.pep
FPSAGIATKYNGNVAVLPAQTSQPPQEGGNTSVLTAGSPTPTVTQAAGLMQSSISVTQQPVPVYRSAAGVHLPHYPPNYIQYAPFYSPFYYPSPAIHQFINNGAFPLHPQAGTVYPSAPAPPTTGVKFSLPQFKPGNNPVNSTHIGMPSGYGPYGSSPAGYNPSSTGNSTTNED

SEQ ID NO: 59075 - protein, 70 aa, Gossypium hirsutum
  Clone ID: GOSHI-09MAY01-C42753_1.pep
GKMMRSRLLWFSLGFSVTAASISQFIYRDLWTDRYALKSDMKEKFDALEARVSNLESLPTENPNPAQVDG

SEQ ID NO: 59076 - protein, 150 aa, Gossypium hirsutum
  Clone ID: GOSHI-09MAY01-C42663_1.pep
KAVIMALCYENPGLTNECNGVEEIGVPEIDAGLLMSLLEESQCEEYCNEEQVTSLMESLEAEIRMVNAGSCSIEGDIGSNNYFEWSEMEMVPSSPSDDMNWYVEDHAQEMSMDGYLVQFGNDFPLNCYDSQSENGFTSLWQETYDTAIYN

SEQ ID NO: 59077 - protein, 79 aa, Gossypium hirsutum
  Clone ID: GOSHI-09MAY01-C42073_1.pep
QLAHNCLHRDPKSRPTMDEVVKVLTPLQDLNDLAILSYHSRLSQQGRRKKKPEGSQQLSNTQSKSISGSPLNTGKQRCR

SEQ ID NO: 59078 - protein, 121 aa, Gossypium hirsutum
  Clone ID: GOSHI-09MAY01-C42003_1.pep
PRVRFLIDQGYSFKVITSLPPSDAGADLSYYHLDEQLALLGKVLTAGDDAVGLEQLEEDADDIALHKARRSMGSMSAMSGANGMAYMEYSTGKHKLMGHGQNKSKPKDPSKRHHLFKKRFG

SEQ ID NO: 59079 - protein, 81 aa, Gossypium hirsutum
  Clone ID: GOSHI-09MAY01-C42353_1.pep
LRDAVSRSTTQVYPKSWTAIYMALDNVGMWNVRSEFWARQYLGQQFYLRVYTPVNSLRDEYLIPKNALLCGRAQGRSTRPL

SEQ ID NO: 59080 - protein, 101 aa, Gossypium hirsutum
  Clone ID: GOSHI-09MAY01-C42333_1.pep
DQGYVPSDVQSESGSEDEDDDSESLVESEDDDEEDSDEDSEEDEGKTWEELEREPTYADREKGDDSDSEEERKRRKMKAFGKGRVPDKRPSGNLPKRSKLR

SEQ ID NO: 59081 - protein, 114 aa, Gossypium hirsutum
  Clone ID: GOSHI-09MAY01-C42293_1.pep
EQGIQFSIFKDHSSKTCILDDFEFYETRQKIIQEKKAKHRLLQKQVSNGEPNDDAVTDSKQNAAIAKEASEKSTSASTAEVAKANGDVKHIEENGSVVVTEDGPVKPVCAASAC

SEQ ID NO: 59082 - protein, 209 aa, Gossypium hirsutum
  Clone ID: GOSHI-09MAY01-C43993_1.pep
MALSISSLSSSLSSLSFSSQISRNPSSISIAQRPKNLHISLSSKHTRSLSISATVAAPVETEPVENLKKFVKSRLPGGFAAQTIIGTGRRKCAIARVVLQEGTGKFIINYRDAKEYLQGNPLWLQYIKVPLVTLGYETSYDVFVKAHGGGLSGQAQAISLGIARALLKVSADHRSPLKKERLLTRDSRVVERKKVGLKKARKAPQFSKR

SEQ ID NO: 59083 - protein, 56 aa, Gossypium hirsutum
  Clone ID: GOSHI-09MAY01-C43503_1.pep
SRIKRISAPAPSSSGPNHLGPLISSLDTCKKEERTNSNPQTPLERNQKFFGREVDP

SEQ ID NO: 59084 - protein, 221 aa, Gossypium hirsutum
  Clone ID: GOSHI-09MAY01-C43473_1.pep
PASAQRARRGVGGTLATVTEYMVNGSLRNVLTKKERSLDLHKRLIIAMGAAFGMEYLRAKNIVHFDLKCDNLLVNLRDPQRPICKVGDFGLSRIKRNTLVSGGVRGTLPWMAPELLNGSSTKVSEKVDVFSFGISMWEILTGEEPYADMHCGAIIGGIVKNTLRPPIPEHCDPEWRKLMEQCWSPDPESRPSFTEITNRLRSMSMLLKPKGPRNQPKQTRP

SEQ ID NO: 59085 - protein, 84 aa, Gossypium hirsutum
  Clone ID: uC-gsronu33B134f11b1.pep
LLLVSYTTCKITTIIYQNSKIERKLSQKFPVVTLLVTSNSVAFSTILSVFLGHYGQIKKGYLFHGHGKAELKSVPSELLHNERE

SEQ ID NO: 59086 - protein, 88 aa, Gossypium hirsutum
  unsure (1)..(88): unsure at all Xaa locations
  Clone ID: LIB3148-016-Q1-K1-G12.pep
MVMERLNSNLYLQNCYIMKENERLKKKAQVLNQENQALLSELKQKLLKANNNSXGKNSANTIPDLNLSSTSNPNPFILAKPDPAGYLS

SEQ ID NO: 59087 - protein, 156 aa, Gossypium hirsutum
  unsure (1)..(156): unsure at all Xaa locations
  Clone ID: GOSHI-09MAY01-C43723_1.pep
FTRPACDWEGVRPDVVILGKALGGGVIPVSAVLADKDVMLCIRPGEHGSTFGGNPLASVVAIASLDVCQEVKLAERSAHLGEELXVMLVKIKEEFPNYVKEVRXRGLFTALEFNSRSXSPVSPYDICLKMKERGVFAKPTHDTIVRLTSPLCMSRD

SEQ ID NO: 59088 - protein, 135 aa, Gossypium hirsutum
  Clone ID: GOSHI-09MAY01-C43103_1.pep
GSTSRPLEIFIVKRNGKWEQVFELEEKVEVVAEEKMKFDNLKGLLLEELPGLIQFCPKGYHFVFPKGVQLKVRDCPKLTTGFFIDSQRFVHCKTKVPQLVEQDAVEESTTIRNAIFNENIYWSLFWGEGQLPHIA

SEQ ID NO: 59089 - protein, 110 aa, Gossypium hirsutum
  Clone ID: GOSHI-09MAY01-C43313_1.pep
HASGGYVRAMYNASLCYTFGEGLSHSRRQARKWMKRAADRGHGKAQFEHGLALFSEGELLKAIVYLELATRSGETAATHVKNAVLQQLSATSRDRALLLTDNWRALPSSR

SEQ ID NO: 59090 - protein, 236 aa, Gossypium hirsutum
  Clone ID: GOSHI-09MAY01-C43303_1.pep
ADKSRGIGSLNAVMGNKLAVLAGDFLLSRACVALAALKNTEVVSLVATVVENLVMGETMQMTTSSEQRCSMDYYMQKTYYKTASLISNSCKAIALLAGQTAEVAMLAFEYGKNLGLAFQLIDDVLDFTGTSASLGKGSLSDIQQGIVTAPILFAMEEFPQLHAIVYQGFDNPENIEIALEYLGKSHGMERTKELAMKHANLAAAAIDSLPESNDENVIRSRRALVDLPQRVIPRNK

SEQ ID NO: 59091 - protein, 55 aa, Gossypium hirsutum
  Clone ID: GOSHI-09MAY01-C43223_1.pep
KPLEFVLEVYVRTDFFFLMEISFFCVKKKNIFYIINFLNIFIIFYIYFFYFFFIF

SEQ ID NO: 59092 - protein, 148 aa, Gossypium hirsutum
  Clone ID: GOSHI-09MAY01-C78913_1.pep
MAISGSDTQNPTCKLSTPLETQCVKCDSCGFTEECTVAYIMRVRERYQGRWICGLCIEAVKDEVVRSVTLISTEEALDRHISFCNKFRAWSPSDETEHPIFAMGRVLRRSLDSPRPLTTKSSSVLPGLEGVKRPSLLRSDSCFSALSI

SEQ ID NO: 59093 - protein, 94 aa, Gossypium hirsutum
  Clone ID: GOSHI-09MAY01-C78903_1.pep
VKLSTLSFISFSRLKHFPLFSFFFLFPPNIISLFFMFLSHQPYLPFTNPNKAFNLRIVFLTLTFNKAFSCFRLRWKLEKRNNWMVVRYEQSSLS

SEQ ID NO: 59094 - protein, 216 aa, Gossypium hirsutum
  Clone ID: GOSHI-09MAY01-C78423_1.pep
PSGCLIQDMPNGYSRVTWVEHAEIEEKPIHQIFSHFVHSGMAFGANRWLAVLERQCERIASLMATNIPDIGVIPSPEARKNLMRLSQRMIRTFCVNISSCSGQVWTAVPDSSDDTVRITTRKVSEAGQPNGLILCAVSTTWLPYPHHHVFDLLRDERRRAQLEVLSNGNALHEVAHIANGSHPGNCISLLRINVASNSSQHVDLMLQRTCTTNPAS

SEQ ID NO: 59095 - protein, 124 aa, Gossypium hirsutum
  Clone ID: GOSHI-09MAY01-C78783_1.pep
MAWNVFKFCTALRALGSIMIVFVLAVIGLTYYAVVIAHYGPSLFLGSFETFFAIVVLIVFHSLLVMVMWCYSSVVVTDPGGVPPNWRPFTDEEKGDADPLVGSGYGSAQLDPKQSAMVAVSQEI

SEQ ID NO: 59096 - protein, 175 aa, Gossypium hirsutum
  Clone ID: GOSHI-09MAY01-C78663_1.pep
MKLRLRNHESRETLRIQLLSPCSFLQLQETLSLSLPPPHTPPSSLRFYLNANDLLLPPSPHASLHSLGVAAGDLLYFSSNPTAFSAVSVTQMDDPNQVPDNNKNQETQMQELPQFEEPMSKDPEISPETMDIDASALSERLSEPYFLRKVLGEELGDSGCIHKLLAISVHARLLE

SEQ ID NO: 59097 - protein, 88 aa, Gossypium hirsutum
  Clone ID: GOSHI-09MAY01-C78013_1.pep
VRFTDFTYKLQEMMKQKGLKKVRKWRGSVRNQWNGRNWKDFSLLKYRENSKSFQLPHSKNFQKRSLLFLLYNSLKNYKPQRIMRLKNE

SEQ ID NO: 59098 - protein, 224 aa, Gossypium hirsutum
  Clone ID: GOSHI-09MAY01-C78003_1.pep
MLSTASPSPSSLCFSNPKLYHLPSSPQPWFVLPFNSPLCGFRASSHPQRMTLSMCSSATTAADPIPTSDPHPPHSPDSQSLVVVSFYKFADFPDHADLRKPLKQLCQDLYVSGGIILAPEGINGSICGTRESVERVLMFIQTDDRLKGLRQIESPVSPEQEAIHHGHSSSSPLAAGKDAPFRWEHVRVKLKKEIVTLGMPDVSPIEKVGKYVSPRDWNALISDP

SEQ ID NO: 59099 - protein, 217 aa, Gossypium hirsutum
  unsure (1)..(217): unsure at all Xaa locations
  Clone ID: GOSHI-09MAY01-C78033_1.pep
LPSAELVPALVDNSYFHFVLASDNVRAASVVATSLVKNALRPEKFVLHIITDRKTYSPMQAWFSLHPLDPAIIEVKALHQFDWLSKGKVPVLEAMEKDQRVRSQFRGGSSAIVANNTEKPQVXAAKLQALSPKYNSLMNHIRIHVPELFPSLNRVVFLDDDIVIQTDLSPLWDIDMNGKVNGAVETCRGEDSFVMSKAVKSYLNFSHPLIAKNFDPN

SEQ ID NO: 59100 - protein, 114 aa, Gossypium hirsutum
  Clone ID: GOSHI-09MAY01-C78203_1.pep
MSGAEKVVCVTGASGYVASWLVKLLLQRGYTVKATVRDPNDPKKTQHLLALDGAKERLHLLKAQLLEEGCFDSIVDGCHGVFHTASPVIFSAADPQAEPSVPAVWVRLMVFNHV

SEQ ID NO: 59101 - protein, 74 aa, Gossypium hirsutum
  Clone ID: GOSHI-09MAY01-C79543_1.pep
KTPPFNSLTHIYILKFQLLHPLVKERAYLKLSQRMICLATKPCNAKDPVTVNCETKLLPLIAKGEKRCFFGAKR

SEQ ID NO: 59102 - protein, 174 aa, Gossypium hirsutum
  Clone ID: GOSHI-09MAY01-C79413_1.pep
AELTYFIKGQKLLEGYKQGNGIVCCCCERELSPSQFEAHAGMAARRQPYRHIYTSNGLTLHDIALSLANGQCVTTGSSDDTCAVCGNAGDLLLCRECSQAFHPSCLNLEHLPEGEWRCLNCADEHGSSRKAVAGEASSTARPIVIRLTRVVKSPEFEIGGCVVCRGHDFSGSSF

SEQ ID NO: 59103 - protein, 75 aa, Gossypium hirsutum
  Clone ID: GOSHI-09MAY01-C79663_2.pep
FKISCQQIYFLIHHQQFWNSRRTPDAIISNRPWLHPSSSSDLDEVFDIKSTSTGCGDPPVTWWRILQPGVRPRVR

SEQ ID NO: 59104 - protein, 185 aa, Gossypium hirsutum
  Clone ID: GOSHI-09MAY01-C79663_1.pep
ANTFPALTLYPSTEFPTLSLQIKNQESKKFDSPYSWPVPFLNPFSSFRLITKPHPSSSRLLAVRTQSNQPNPSDSSDASYDSSSDPLLRKLEDAIHRIIVRRSAPDWLPFIPGSSYWVPPSTAQSYGLAQLVEKLANPLTSEESMSTTAARGWPSSDYFIKGGSPRPVLVDLISNTSSKSEDEEG

SEQ ID NO: 59105 - protein, 76 aa, Gossypium hirsutum
  Clone ID: GOSHI-09MAY01-C79113_1.pep
RTRGIQSNSEGKVASSKATTEENTTLSNVTNEELSPIQQQEAVPTVDSGESQPDIDQQPVIGEQGQLDFVQEPIAP

SEQ ID NO: 59106 - protein, 90 aa, Gossypium hirsutum
  Clone ID: GOSHI-09MAY01-C79333_1.pep
VFQSRSLVLRSQNKSYRPVFFRKEDLEQSLLRASRDQNQLNPAFRPGDIQVAVFQDMFKGMKDTSTLSWGDVVFIPPGFDVSTDPTQLQQ

SEQ ID NO: 59107 - protein, 183 aa, Gossypium hirsutum
  Clone ID: GOSHI-09MAY01-C79283_1.pep
VYKSIKTVVFSNKLNLLMPFGPLAILVHKMTDSNGWVFFLSLLGITPLAERLGYATEQLAFFTGPTVGGLLNATFGNATELIISIYALKSGMKRVVQLSLLGSILSNMLLVLGCAFFCGGLVYHGKEQVFSKATAVVNSGLLLMAVMGLLFPAVLHYTHTGRHVGKSELALSRFSSWGMLLAY

SEQ ID NO: 59108 - protein, 103 aa, Gossypium hirsutum
  unsure (1)..(103): unsure at all Xaa locations
  Clone ID: AW186955.1.pep
MEDDSGNSSSSSCPSSSNDEFWVLNSXRNSTRSVKKLXAIVFYPWNSLVAVMIQALAHRINYVWVVQKNRTLFGIVTFAGMMKIFRETIEDHDLGKALKKSPT

SEQ ID NO: 59109 - protein, 154 aa, Gossypium hirsutum
  Clone ID: LIB3585-059-P1-K1-C4.pep
DVAAAIATLSAGELMAYIDFGGPPEDLIQLVKERLQERKLVKALELMEDDSGNSSVSSSCPSSSDDEFGVGRSVVKSVGNSARSVKRSEAIVCHPWSSLVAVMIQALAHRINYVWVVEEDRTLFGIVTFAGMMKIFRETIEDHDLGKALKKSPT

SEQ ID NO: 59110 - protein, 201 aa, Gossypium hirsutum
  unsure (1)..(201): unsure at all Xaa locations
  Clone ID: GOSHI-09MAY01-C79263_1.pep
MKSIQANNTFFLPRINGSNPRKPELLFPSYPYLVCFNAKVLVTKKLIAGSSLCSQQFAPLLKHKRCVSVSKCHQGTTVCKFGGQHXLAGDDEGSPWKSIDKAIGNFGNKQSIEHVLSHHIDKQDYYDEGSGQNPPSGGGGGSTGGGHGFGESYDECPSGILHXDLPLILPPLDVIFPYVSIITGDELAPLAQDYFQLSSSR

SEQ ID NO: 59111 - protein, 89 aa, Gossypium hirsutum
  Clone ID: GOSHI-09MAY01-C74973_1.pep
PRVRLEQAFIASGSEDSLVYIWRRGTGELIETLPAHSGAVNCVSWNPANPHMLASASDDRTIRIWGLNNLSTKRKEPCSNGIHYCNGGY

SEQ ID NO: 59112 - protein, 140 aa, Gossypium hirsutum
  Clone ID: GOSHI-09MAY01-C74913_1.pep
MAAPSCETTGNGIPTGDKLILRGLKFHGFHGVKSEEKKLGQKFLVDVDAWMDLRSAGRSDLLSDTISYTDIYRIVKEVVEGQSRDLLESVAQMIASKIFTNHSQIWAVRVKAGKPHVAVHGSLDYLGVEIIRYRSIDASN

SEQ ID NO: 59113 - protein, 149 aa, Gossypium hirsutum
  Clone ID: GOSHI-09MAY01-C74453_1.pep
MSNDQNKPMTQKLYESVPSSRLTAKFLTATTLSATLLFLSGLTLTWTVIALIMATPVMVLFSPVLVPSAIVIFLVITGFLFSGGCGVAAITALSWIYNYVQGKHPLGADKLDYARDMLASMTRGVTEKAKEYGQYVKYKAREVAQGERS

SEQ ID NO: 59114 - protein, 103 aa, Gossypium hirsutum
  Clone ID: GOSHI-09MAY01-C74423_1.pep
NLIMSIGIAVEFCVHIANAFLVSNGDRDQRMKKALSTIGASVFSGITLTKLVGVIVLFFSRSELFVVYYFQMYLALVLVGFLHGLVFLPVVLSLMGPPAGNIA

SEQ ID NO: 59115 - protein, 285 aa, Gossypium hirsutum
  unsure (1)..(285): unsure at all Xaa locations
  Clone ID: GOSHI-09MAY01-C74793_1.pep
IAFTFVVYPSLILAYMGQAAYLSKXSILETDYRIGFYVSVPEKIRWPVLVVPVFAAVVGSQAIITGTFSIIKQCSAWGCFPKIKIIHTSSKIHGQIYIPQINWTLMLLCLAVTIGFRDTKRMGNASGLAVITVMLVTTCLMSLVIVLCWHKSVLLAVFFLFFFGSIEALYFSASLIKFLEGAWVPIALALIFSVIMYVWHYGTLKKYEFDVQNKVSINWLLALGPTLGIVRVRGIGLIHTELVSGIPAIFSHFVTNLLAFHQVVVFLCIKSVPVPHVSPGERFLV

SEQ ID NO: 59116 - protein, 171 aa, Gossypium hirsutum
  Clone ID: GOSHI-09MAY01-C74113_1.pep
MAERGVCRQVKFLNSQGDSTAKSLPGKIEEEYDEDDKKHVKTMLISCPEVRKRKCLSSNQLRKEKAARCGKQSLSNGPNKGKQNKHKNTVERWSAERYNLAEESMLEIMKAEGAVFENPISRPALRMAARKLIGDTGLLGHLLKHIDGKVAPGGTDRFRRCYNTSGVMEYW

SEQ ID NO: 59117 - protein, 150 aa, Gossypium hirsutum
  Clone ID: LIB3825-015-Q1-K6-G10.pep
MAERGVCRQVKFLNSQGDSTAKPLPGKIEEEYDEDDKKHVKTMLISCPEVRKRKCLSSNQLRKEKAARCGKQSLSNGPNKGKQNKHKNTVERWSAERYNLAEESMLEIMKAEGAVFENPISRPALRMAARKLIGDTGLLDHLLKHIDGKV

SEQ ID NO: 59118 - protein, 264 aa, Gossypium hirsutum
  Clone ID: GOSHI-09MAY01-C74333_1.pep
FVNMLHMYSHPLLPKMHYIHPLSVIQLDSLRHQAVQMVSVRLSRAEPPLRKEVVEYILDVDSHMWSMRRSKANFFRIMGVLSGLIAVGKWFDQICNWRNPITTMLIHILFIILVLYPELILPTVFLYLFLIGIWNYRWRPLHPPHMDTRVSHAVAAHPDELDEEFDTFPTSRPSDIIRMRYDRLRSIGGRVQTVIGDLATQGERLQSLLSWRDPRATTLFVTFCLIAAIVLYVTPFQVVALLIRLYALRHPRFRHKLPSVPLNF

SEQ ID NO: 59119 - protein, 399 aa, Gossypium hirsutum
  Clone ID: GOSHI-09MAY01-C75963_1.pep
RFSDGRLTIDFIAEAFGLPFINAYLDSVGTNFSHGINFATAASTIRLPISVIPNGGFSPFYLGLQCSQFEQFKVRSLSSGKQGGLLASLMPKEEYVSKALYTFDIGQNDLGEGFFSNLTVQEVNASIPDIINKFSANIKNIYNLGARFFWVHNTGPIGCLPYVLVAFASAEKDPAGCLKPYNEVAQYFNLKLQESIAQLRNGNPLQLHLHLWKPSYSVKYSLVAEPQKHGFELPLVTCCGYGGEYNYSAAVLCGGTITVNGTEIFVGSCDNPSACVVCNGIHFTDASYIFIYDLILSGLYNSYLHVYLNLLCLIYLLLISTFSDLSSISTTIYYFYYISFYVSYIFFFCSISSLYNHIYNIHLYYYFLLLSHILSYYLYSVFHFLLLLYLPIFLSPLIL

SEQ ID NO: 59120 - protein, 223 aa, Gossypium hirsutum
  unsure (1)..(223): unsure at all Xaa locations
  Clone ID: GOSHI-09MAY01-C75493_1.pep
FPLKHRSLMNFLSNILREEGGFEYKKAIVDSIVILIRDIPEAKESGLLHLCEFIEDCEFTYLSTQILHFLGIEGPKTSDPSKYIRYIYNRVHLENATVRAGAVSTLAKFGAMVDALKPRVFVLLRXRCLFDNDDEGRDRATLYLNTLGGDGEVVETGEDVKEFLFGSLNIPLVNLENSLKNYEPSEEAFDINSVPKEVKTQPLAEKKAPGKKPTGLGAPPAGP

SEQ ID NO: 59121 - protein, 34 aa, Gossypium hirsutum
  Clone ID: GOSHI-09MAY01-C75403_1.pep
FLKELYIEGNAFRPGVNPIGAHKVLELSDADFLV

SEQ ID NO: 59122 - protein, 105 aa, Gossypium hirsutum
  Clone ID: GOSHI-09MAY01-C75743_2.pep
PKFPYWVFVFKMGTGDEVVEIESLERSLLPESVTGEQESEAVDEPVLYAASFGEMEEEFVKYQTAQWVLYSVVLVLAWGIGLFMLLYIPVRDTSCVKIFDPEEFI

SEQ ID NO: 59123 - protein, 178 aa, Gossypium hirsutum
  unsure (1)..(178): unsure at all Xaa locations
  Clone ID: AW187616.1.pep
SSLGQAQMGTGDKVVEIESLERSLLPESVTGEQDSEVVDEPVLYAASFGEMEEEFVKYQTAQWVLYSLVLVLAWGIGLFMLLYIPVRRHILRKDIRSRKLYLTPNSIVYKVTRPVPIPCFGVLKKEKHVLLPSVADVVIEQGYXQSLFGVYSLKIENVGLKRPPIDDLQIQRMVNPSA

SEQ ID NO: 59124 - protein, 211 aa, Gossypium hirsutum
  Clone ID: GOSHI-09MAY01-C75773_1.pep
MGLGERGGWDKSESRYCGVETEFEDDMPRLLSYNLSSSGFDFVVAPLMDPTYRPSLLEAENGSSHVLPFAGSDLVLSPSQWSSHVVGKISTWIDLDSEDEIFRMDSETTLKQEIAWASHLSLQACLLPSPKRASCANYARCVNQILQGLSNMQLWLRIPLLKTDEDSLDVDSDDLRDSWELWNSFRLICEHHSQLSLALDILSTLPSVNSI

SEQ ID NO: 59125 - protein, 156 aa, Gossypium hirsutum
  Clone ID: GOSHI-09MAY01-C75673_1.pep
HDLSDASPISKYLESFYTLRKPMSSTINILANVLQKVFSASSNPAMENLQHTFLGYLRLGGVFSYGASAMLCGLCPPPLSLAFHFFSIAIYGVGRLLLPFPSPRRLWDGAEFLWVASSILLPYMYSEGTRQTFFPLTVPAYYRTPPENKDKKNFMH

SEQ ID NO: 59126 - protein, 199 aa, Gossypium hirsutum
  unsure (1)..(199): unsure at all Xaa locations
  Clone ID: GOSHI-09MAY01-C75173_1.pep
PIQVVIVPIWKKVDEKTGVLDAASSVAETLKNAGLKVKLDDTDQRTPGWKFNFWEMKGVPLRIEIGPRDVSSGSVVISRRDIPGKQGKVFGISMEPSILEAYVKDRLDEIQSSLLQRAISFRDSNXIVDVSSYEELKEAISLGKWARGPWSASDADELRIKEETGATIRCFPFEQPQGTKACLMTGKPADEVAIFAKSY

SEQ ID NO: 59127 - protein, 85 aa, Gossypium hirsutum
  Clone ID: GOSHI-09MAY01-C75113_1.pep
SRNPYRSMGSTEHLIQQRSNGMNENSMEQAGGHPLDYLGVPDASMMVMGDEMGRMSMAHQNAVAALHDDQLAMGKPYLRSWNQQR

SEQ ID NO: 59128 - protein, 60 aa, Gossypium hirsutum
  Clone ID: GOSHI-09MAY01-C75063_1.pep
NKDRSGTYFVVYDKTGALTTIPEVPEIDFGGLSPEINSLVVERSESESFTAASTVGISCA

SEQ ID NO: 59129 - protein, 80 aa, Gossypium hirsutum
  Clone ID: GOSHI-09MAY01-C75003_1.pep
AVSLVRRGLRRHDDPEQCARDLVMEALRRNTFDNLTVIVICFSEPDYREQPSPRQRRLRCCSLSAEALCSLRSAMRIRDR

SEQ ID NO: 59130 - protein, 161 aa, Gossypium hirsutum
  unsure (1)..(161): unsure at all Xaa locations
  Clone ID: GOSHI-09MAY01-C75353_1.pep
MAIPFTVYLLCLFNLLAFGTLFSSATLCAVQNHCSFTIWPAALSGNGASLGNGGFELSSGSSAQFQAPPGWSGRFWGRTGCKFDNSGSGKCITGDCGGILNCTXGGVPPVTLVEFTIAGGSTDNKDFYDVSLVDGYNVALGVKAVGGSRDCQNAXCVTDLN

SEQ ID NO: 59131 - protein, 168 aa, Gossypium hirsutum
  unsure (1)..(168): unsure at all Xaa locations
  Clone ID: GOSHI-09MAY01-C75223_1.pep
FFFAHASAPASAELLLSTPDGDGGSTGNRCSKTRKLPPGPPRWPIVGNLLQLSSLPHRDLASLCDKYGPLVYLRLGKVDAITTNDPDIIREILLRQDDVFASRPRTLAAVHLAYGCGVCCLXAPLGPHCEPMRXICLEHLLTTKSIESFAKHRADETQQLVRDVSAQP

SEQ ID NO: 59132 - protein, 130 aa, Gossypium hirsutum
  Clone ID: GOSHI-09MAY01-C76843_1.pep
MVVNFSFVFLVSVLILCLGVTSEPVQDKQALLAFLSKTKHSNRIQWNSSTSACNWVGVQCDANRSFVYTLRLPAVGLVGSIPPNTIGRLNQLRVLSLRANGLFGEIPADFSNLTLLRSLYLQDNAFTGPF

SEQ ID NO: 59133 - protein, 55 aa, Gossypium hirsutum
  Clone ID: GOSHI-09MAY01-C76813_1.pep
IKIMFKYKKFNNPNLGLSNYITRDFMINKLLKIINSVNNTKIAKKYMRKISEQQQ

SEQ ID NO: 59134 - protein, 340 aa, Gossypium hirsutum
  unsure (1)..(340): unsure at all Xaa locations
  Clone ID: GOSHI-09MAY01-C76653_1.pep
YRLCVSKAQHVKVYELKRGYFWAKFTNYGATMLSVILPDKTGKLDDVVFCYDVGNDYKNDTTYFGAIVGRVANRIGGAKFILXNGVTYKTDANDGKNTLHGGSKGFSDVIWTVKSYKKHSHVTFSYESFDGEEGFPGNLSVSVTYMLLHKNKLAVKMMAKPLNKPTPVNLALHTYWNLGGHNSGDIMSHTLKLFGSKITPVDSELIPTGEIVPVRKTPYDFRRPREIGSKFDQLPHGYDINYVLHKSRRSRHLRKVAVVVESKCGRKMELWTNMPGVQFYTSNMLKNEKGKNGTVYGKHAGFCLETQGFPDAVNHPNFPSQIVKPRGIYKHFMVYRFTAH

SEQ ID NO: 59135 - protein, 116 aa, Gossypium hirsutum
  Clone ID: GOSHI-09MAY01-C76613_1.pep
MVSISRNRKHGVGKGWERQAKLNLVEEDLMIAKEQMSLIQKEKAEAIDELKEAQKAAEEANKKLGEALVAQKRAEESLKIEKFRTVELEQAGIEDAKKKGHEDFLSFLLSMRVEGI

SEQ ID NO: 59136 - protein, 129 aa, Gossypium hirsutum
  Clone ID: GOSHI-09MAY01-C76143_1.pep
MMLYNLLDGVKEILKIQKFRRIVSYTGFYCFVAVLSYAYTTNPTRAGYSRADQFYASYPAGTELLTDPAKLYKAALGNCFESEEWGPIDFCIMAKPFDRQGKSPYAYHSQYMAPLLSHGQLRWKWLEGF

SEQ ID NO: 59137 - protein, 142 aa, Gossypium hirsutum
  unsure (1)..(142): unsure at all Xaa locations
  Clone ID: GOSHI-09MAY01-C76333_1.pep
MSSVVRNQGSCVAIRSLSPSSSINRCSHASASSDGATCGRPAWIGKRLTCVCFKRKGVYEGICFNITPKQEERLNRLRHRMEGYFDGSXPDHQEASKXQLWSATYAGKELHGLISDQWKEMGWQGRDPSTDFRGAGFISLEN

SEQ ID NO: 59138 - protein, 107 aa, Gossypium hirsutum
  unsure (1)..(107): unsure at all Xaa locations
  Clone ID: LIB3825-030-Q6-K6-H12.pep
XRFAEIXRMSSVVRNQGSCVAIRSLSPSSSINRCSHASASSDGATCGRPAWIGKRLTGVCFKRKGVYEGIYFNITPKQASTMIIFTHHLFYPDIFFKEPLRFQHIRI

SEQ ID NO: 59139 - protein, 199 aa, Gossypium hirsutum
  unsure (1)..(199): unsure at all Xaa locations
  Clone ID: GOSHI-09MAY01-C76323_1.pep
SLLPLVFNPAIIQKXLNELSPENVRIFWESKKFEGLTDKVEPWYGTAYSIEKVSSSTIQAWMSSAPNENLHLPAPNVFIPKDLSIKNAQEEVKFPVLLRKSSYSKLWYKPDTVFSTPKAYVKIDFNCPHAGNSPETEVLADLFAQXLVDYLNEYAYYARVAGLLYGISHTDSGFEVTLVGYNHKLKILLETIIDKIVKF

SEQ ID NO: 59140 - protein, 167 aa, Gossypium hirsutum
  unsure (1)..(167): unsure at all Xaa locations
  Clone ID: GOSHI-09MAY01-C76293_1.pep
LNTKFCHYNNYNLYQPRHFCKSXRHYWTKGGILRNDPVGGGCRKAKRTTTKASSQTTAVAASALPPPEQQHGDQRKANSHSSSESSSLTATNSNVAVPNQNNYSSAAGTAEARTSHSNLINVSEPKSYGNPNNLGLEPGLLEPGSDCGIFPEIGSLTSLITSSNNEN

SEQ ID NO: 59141 - protein, 356 aa, Gossypium hirsutum
  Clone ID: GOSHI-09MAY01-C76203_1.pep
ASPGSLQSGLSRQLFDKWCSEKKNSCVIPGYVVEGTPAKTIINEPKEVTLMNGLMAPLNMQVHYISFSAHADYAQTSTFLKELMPPNIILVHGEANEMGRLKQKLITEFTDGNTKIITPKNCQSVEMYFSSEKMAKTIGRLAEKTPDVGETVSGVLVKKGFTYQIMAPDDLHIFSQLSTANITQRITIPFTGAFGVIKHRLEQIYESVESSTDEESGVPTLRVHDSVTVKQDSDRHISLHWTSDPISDMVSDSIVALVLNISREIPKVVVESEAIKTEEENGKKAEKVIHALLVSLFGDVKLGENGKLMVSVDGNVALLDKQSGDVESENEGLKERVKTAFRRIQSAVPPIPLSSS

SEQ ID NO: 59142 - protein, 276 aa, Gossypium hirsutum
  unsure (1)..(276): unsure at all Xaa locations
  Clone ID: GOSHI-09MAY01-C77983_1.pep
MSMGPGDQSIKGIPTHGGRYVQYNVYGNLFEVPSTYAAPPRPIGPAAYGIVCAAGNSETREEVAIKKIGNAFDNRIDAKRTLREIKLLCHMDHENVIAIKDIIRPPLRENFNDVYIVYELMDTDLHQIIRSDQQLTDDHCRYFLYQILRGLKYVHSANVLHRDLKPSNLLLNANCDLKIGDFGLARTTSETDFMTEYVVTRWYRAPELLLNCSEYTAAIDIWSVGCILGEMMTXQPLFPGRDYVHQLRLITELIGSPDDSXLGFLRSDNARRYVRH

SEQ ID NO: 59143 - protein, 174 aa, Gossypium hirsutum
  Clone ID: GOSHI-09MAY01-C77873_1.pep
MLGAQLCYRTFSTFWVFSHKSNATTYPTIPAFSFPSIRSSSIRLHFPAKLRPVSCHSIRSGSFDPQFNEDDDKDLQFLEASLLVSETVSHYRMLRQGITEEIKWQSSRREQHPMSRAKIASIGQSFLSRFPTPTIFLKISCDGDFLLPIIVGEFAGEKLIASFWGDDNGECPDQ

SEQ ID NO: 59144 - protein, 282 aa, Gossypium hirsutum
  Clone ID: GOSHI-09MAY01-C77863_1.pep
PLPALGVPFDIEEVSGPVIQSPIRSEDDLKALHPIDLEMLHFVGESLKILRQEVGGHAAVLGFVGAPWTIATYIVEGGTTRTYTTIKSMCHTAPNLLRTLLSHLTKAPSVHIIYQVESGAHCIQIFDSWGGQLPPDMWEQWSKPYITEIVSVVRNKCPKTPLVLYINGNGGLLERMKGTGVDVIGLDWTVDMADARKRLGSDFSVQGNVDPAYLFSPLSAVTKEIQRVVKCAGPCGHILNLGHGVLVGTPEEAVAHFFDVSKSLNYDGSSQNHSMEESKLLV

SEQ ID NO: 59145 - protein, 269 aa, Gossypium hirsutum
  Clone ID: GOSHI-09MAY01-C77563_1.pep
PRVRPRVRPRVRLFVFGGFTDAQNLYDDLYMLDVDTGIWTKVITMGDGPSARFSVAGDCLDPLKSGVLVFIGGCNKTLGALDDMYYLHTGLIVRDERKLEKLSLRKQLKLKCQEQNLSNLAQDKALVRIEVSNDVNQPIPLSSYGQPRRENFPLNQVLHQGKKTFRAKVTESFPHGYTIETIIDGKPLRGILFANTPSSVHVHNHNPSRKRTSVEVGGTVLNGDCDSKSRSVRQDSGDHKQADVHEKDYLLHDTEVPAPSLRDPAQSDL

SEQ ID NO: 59146 - protein, 198 aa, Gossypium hirsutum
  Clone ID: GOSHI-09MAY01-C77483_1.pep
MSLKQAMDFSSIQTMEPLPMALLFVIPFLLLLRLISRLRRKPFPPGPKGLPIIGNMMMMDQLTHRGLAKLAHQYGGIFHLKMGFLHMVAISNPEMARQVLQVQDNIFSNRPATIAISYLTYDRADMAFAHYGPFWRQMRKLSVMKLFSRKRAESWESIRDEVDSLVKAVAANTGKAINMGELIFNLTKNIIYRAAFGS

SEQ ID NO: 59147 - protein, 86 aa, Gossypium hirsutum
  Clone ID: GOSHI-09MAY01-C77743_1.pep
LLPSLLSSGVELALSLEKLTNEKLLCLHNVTVQNNDAQMADFIESEFLAEQVEAIKKISDYVSQLRRVGKGHGVWHFDQMLLHEGA

SEQ ID NO: 59148 - protein, 158 aa, Gossypium hirsutum
  unsure (1)..(158): unsure at all Xaa locations
  Clone ID: GOSHI-09MAY01-C77603_1.pep
MIMKVRRRFKQVEEDSEGEEGKKKNNPISANFCKSSTVVVGLRILTQIPQGKKSAALVKPPLKITLPTSTNPHRAHELQPNQYSCFLKSCYLCNKXLKPRXKEVFMYRGDQGFCSIECRGRQIVLDEMRELELSSKQMIPSYRHCNAVSGRRHIRLLK

SEQ ID NO: 59149 - protein, 147 aa, Gossypium hirsutum
  unsure (1)..(147): unsure at all Xaa locations
  Clone ID: GOSHI-09MAY01-C77333_1.pep
PPTSERIANPTRTLTSPPSTSLRVSLSTNFLSPFPTVGSVSGDFSGLKLRPDSLYPAFLCRSKPKRGVATVVIPFSRGSAWEQPPPDLASFLYKNRIVYLGMSLVPSVTEWILAGFLYLQYEYEQKPIYLYINSTGTTKXGEKLGYD

SEQ ID NO: 59150 - protein, 198 aa, Gossypium hirsutum
  Clone ID: GOSHI-09MAY01-C77293_1.pep
MGFLDEDGLISKTRSIVLSLSNIISRSPMLSPMQVHECQCTAPIYKQYLHLPGLKTLIYEYKTLQLQTPTLIIHSYTIPQSPSPPSLDFLSFRTHSASYSPWSSGMDDMLGTESGVYMIHSALKMITIDHKAKGSSKQGNKRKKGRPRVGEYPPPIPLLARTGNLPSHMPWILARYYSNGRLVLKEEKVKHHEYFEAY

SEQ ID NO: 59151 - protein, 125 aa, Gossypium hirsutum
  Clone ID: LIB3584-002-P1-K1-F4.pep
SMGFLDEDGLISKTRSMVLSLSNIISRSPTLSPMQVHECQCTASIHKQYLHLPGLKTLIYEYKSLQLLTPTLIIHSYTIPQSPSPPSLDFMSFRTHSASYSSWSYGMDDMLGTESGVYMIHSALK

SEQ ID NO: 59152 - protein, 106 aa, Gossypium hirsutum
  Clone ID: GOSHI-09MAY01-C70963_1.pep
GIIILNHEGLVMGACTYPLRRTGDPTTIEAKACLQAIISEEEMGFQDLVVEGDALSFDITPRKTNEAAHALATRGYNQTSPFNWIEEVPIEVKPTMANDQRSFLNR

SEQ ID NO: 59153 - protein, 280 aa, Gossypium hirsutum
  unsure (1)..(280): unsure at all Xaa locations
  Clone ID: GOSHI-09MAY01-C70833_1.pep
KRGSTPREKKHPNYKEIDDDNGEYSEASSDERKVXSVHDEDGETGEFEDDEFSGAVGAPPLNKDQSEEDAPLGDDGYEDAQASEHIRNNRILEEGGSSGSSLDSRRPTQMVSPVSPQKFGSLSALDARPGSAARRLPDDLEEGEIAGSGDSHMDHQLSESWIHDRVEGEDEQVVQPKIKRKRSIRVRPRQTVERVEEKSASEEPLVQRGGSSLLSFQLDQKYQSQLRTDTERKPTRERNAFKHDPNDSSSRSRRNLPPRQIANTSKLHASVKPCRMNSMS

SEQ ID NO: 59154 - protein, 202 aa, Gossypium hirsutum
  unsure (1)..(202): unsure at all Xaa locations
  Clone ID: GOSHI-09MAY01-C70493_1.pep
MKFMKLGSKPDSFQTDGDHIRYVATELATDIVVNVGDVKFYCHKFPLLSKSARLQKLVATSNDENGDELHIQDIPGGPGAFEICAKFCYGMTVTLNAYNVVAARCAAEYLEMYETVEKGNLIYKIDVFLNSSIFRSWKDSITVLQSTKSLLPWSEELKVVSRSLDSIASKASIDTSMVEWSYTYNRKKLPSENGNXSQWNGV

SEQ ID NO: 59155 - protein, 241 aa, Gossypium hirsutum
  unsure (1)..(241): unsure at all Xaa locations
  Clone ID: GOSHI-09MAY01-C70703_1.pep
ETEIVITKTQMLTLKCAACGFVSDVDMRDKLTTFILKNPPEAGTSSKDTTAMTRAEKERLTEGEAADEELKKINKEAKKKGSSTTTTSKATAAKGAVTKKKSKHSDEDHSPTHSQADENDRGGXMTDDAHAHGPSGSALEAAQQRIQEQLSAVTADMVMLSTEEEKKSLKKSPEREVKAQENGGTAHEKLVDEIKKYLKKGSSAAQLKSFLGSLSGTSQEIMDALFTALFHNGGKGFAGEV

SEQ ID NO: 59156 - protein, 256 aa, Gossypium hirsutum
  unsure (1)..(256): unsure at all Xaa locations
  Clone ID: GOSHI-09MAY01-C70183_1.pep
MADSLSLPIASIAANYDHSSLLSRNSAFSSRLLPSKCFSSGKNKLNLSSLGQYSFHSLHHRVAPIRALDSDVPHPLHKGSVDFKSKRSYEQWDSLTSTFSGAANIPFLLLQLPQIILNARNLLAGNKTALLAVPWLGMLTGLLGNLSLLSYFAKKKEKEAAVVQTLGVLSTYVVISQLAMAEAMPLPHFMATSVVVGSGLILNLLNYYNILNRRIWQIWEDFITXVDFSVLPQIXWSTFVPYIPNSILPGAIAFIL

SEQ ID NO: 59157 - protein, 105 aa, Gossypium hirsutum
  Clone ID: GOSHI-09MAY01-C70023_2.pep
MKDSPRVFNGCLPVREMEMSEDYTCVISHGPNPRTTHIFDNCVVENYCSVLDKKPKPEPENFLSFCHTCKKNLQQKIDIYIYRGEKAFCSQECRQQEMLLDGDEN

SEQ ID NO: 59158 - protein, 271 aa, Gossypium hirsutum
  unsure (1)..(271): unsure at all Xaa locations
  Clone ID: GOSHI-09MAY01-C70023_1.pep
MLRNRSRAVTSKQTLMADHSSQASPAQNCTKPNPSFFDSPRFKAFTSKAFPDTESLKSPTSILDNKPFFPFGNPFGLDRKHIQILKTLLAXNTHTSPANSEPKGIALAIVDTFLNNNQTEDKSCCEASNKKKVLFGTELRVQIPPILPPSLVSPTTSPTDFGIKTRNSHLTPAFASPNYGIHMKDSPRVFNGCLPVREMEMSEDYTCVISHGPNPRTTHIFDNCVVENYCSVLDKKPKPEPENFLSFCHTCKKNLQQKIDIYIYRFSLFFA

SEQ ID NO: 59159 - protein, 126 aa, Gossypium hirsutum
  Clone ID: LIB3543-030-Q1-K6-F11.pep
FWNQDQEFTFDTCFCLSQLRYRGEGGFSFNGCLPVREMEMSEDYTCVISHGPNPRTTHIFDNCVVENYCSVLDKKPKPEPENFLSFCHTCKKNLQQKIDIYIYRGEKAFCSQECRQQEMLLDGDEN

SEQ ID NO: 59160 - protein, 80 aa, Gossypium hirsutum
  Clone ID: GOSHI-09MAY01-C70303_1.pep
YFSLKTSKGEFSEILTGGFDLRRPFSDLDIEPKEVSSRFAVTRVKYHGGGGGGGVNADETQDRCLHDDIRVRPNERGKGL

SEQ ID NO: 59161 - protein, 183 aa, Gossypium hirsutum
  Clone ID: GOSHI-09MAY01-C70293_2.pep
GDCVLMRPADQSKPQYVSRIERIEADARGGNVKVHVRWYYRPEESIGGRRQFHGSKELFLSDHYDVQSADTIEAKCTVHSFKSYTKLDAVGNDDFFCRFEYNSATGAFNPDRVAVYCKCEMPYNPDDLMVQCEGCSDWFHPACIEMTAEEAKWLDHFFCETCLSEDPKKLQNSLASSVDLDTK

SEQ ID NO: 59162 - protein, 162 aa, Gossypium hirsutum
  unsure (1)..(162): unsure at all Xaa locations
  Clone ID: AI055705.1.pep
MVKAKAPRRTLDSYAVKHINKIIKAGDCVLMRPADQSKPQYVSRIERIEADARCGNVKVHVKWYYRPEESIGGRRQFHGSKELFLFDHYDVQRADTIXRKCTVHSFKNSSQLXALRNDDFFCGLKINXTGCFKSQSVVAYLRCDMTLYPTNLWGKRKVTYGC

SEQ ID NO: 59163 - protein, 291 aa, Gossypium hirsutum
  Clone ID: GOSHI-09MAY01-C70283_1.pep
PTRPAGDWHCPNCTCKFCGNGSDIAQEDNLIDYAILSCSLCEKKYHKSCMELTEEHHIDSNSLVLPFCGQTCRELFEHLQKYLGVKHELEAGFSWSLLQRTNADSDTIARGLPQRVECNSKLAVALNVMDECFLPIVDRRSGINLINNVLYNCGSNFNRLNYSGFYTAILERGDEIISAASIRFHGTELAEMPFIGTRHIYRHQGMFRRLFCAIESALCSLKVHKLVIPAIAELTHTWTAVFGFTALEEAVKQEMRVRELCWVFPGIDMLQKGSIEAGKLGAPAVTGAKVY

SEQ ID NO: 59164 - protein, 133 aa, Gossypium hirsutum
  Clone ID: GOSHI-09MAY01-C71953_1.pep
QQLQLQPQQLQNQQQLQQLQLQQLQEQQETTLPLQAVVSPSQAVSPSTVGISQLNQQQQLVQQQTAMTPQEMNQRTPMSPRLSSGAIHALSAANPEACPASPQLSFQTLGSVNSITNSPTELGVSKSNSVGNT

SEQ ID NO: 59165 - protein, 209 aa, Gossypium hirsutum
  Clone ID: GOSHI-09MAY01-C71903_1.pep
MSAKECGHHGKGHNKFRRKLLFGILFFILIVLITVLLIWAILRPSKPRFILQDTTVYGFNASVPNFLTSSFQVTVSSRNPNDRIGIYYDRLDLYATYRNQQITPRTSLPPTYQGHKDVNVWSPFINGNMIPISPDFSTSLSSEQASGSVFLTIKIDGRVRWKVGAFVSGRYHLYVRCPAIITFGSKFNGVIVAHNAVKFQFVTRCSVSV

SEQ ID NO: 59166 - protein, 140 aa, Gossypium hirsutum
  unsure (1)..(140): unsure at all Xaa locations
  Clone ID: LIB3585-003-P1-K1-H7.pep
MRVSTQTHTFGGTMSAKECFHHGKGHNKFRRRLLLGILLFILIVLITVLIIWSILHSTKPRFILQDTTVYCVNSLVPNFLTSSLQVTVSFRNPNDRIGIYYYRIDLYFTYRNXQIIPRTLLPSTYHGHNDVNVWSSYINR

SEQ ID NO: 59167 - protein, 175 aa, Gossypium hirsutum
  unsure (1)..(175): unsure at all Xaa locations
  Clone ID: GOSHI-09MAY01-C71883_1.pep
MDTVNPLLVSSASGLKMDVNGGEMRKNPTLICAPLMADSIDKMVTLMANAKATTADLVEIRLDSLKNFNPFEDLNVLIKQSPLPTLFTYRPVWEGGQYDGDEKKRLDVLRLAMELGADYIDVELKVAHEFIKSIGGKKPEKIKVIVSSHNYQSTPSVVELGNLVVKIHQXGADIV

SEQ ID NO: 59168 - protein, 197 aa, Gossypium hirsutum
  Clone ID: GOSHI-09MAY01-C71863_1.pep
MLYIIGLGLGDERDITLKGLDAVKKCEKVYIEAYTSLLSFGLSTDGLSTLEKLYGKPIILADREMVEEKVDNILLEARGSDVACRVVGDPFGATTHTDLVVRAKTMRVDVKVVHNASVMNAIGICGLQLYRYGETVSIPFFTETWRPDCFYQKIEWNRNLGLHTLCLLDIRVKEPTLESLCMGRKHYEPPMFMTINT

SEQ ID NO: 59169 - protein, 204 aa, Gossypium hirsutum
  unsure (1)..(204): unsure at all Xaa locations
  Clone ID: GOSHI-09MAY01-C71443_1.pep
FSPKIFLYLLIWAALFPHQIKLSLGFLTIFLPEQVHCSSTFPSPVGTLLGAMTGALIGQEAGSGFVRGAAVGAISGAVFSMEVFESSLLLWQSDESGIGCLLYLIDVITSLLSGRLVRERIGPAMLSAVQSQMGAAEPATTFAEVHNIFHTGRAKGLAXHLGEKIPKMIITNGNNVNASGEKVSCSVCLQDFQLGETVRNLPQC

SEQ ID NO: 59170 - protein, 266 aa, Gossypium hirsutum
  unsure (1)..(266): unsure at all Xaa locations
  Clone ID: GOSHI-09MAY01-C71473_1.pep
ISLPEQNSNWKHQGLRAQAMSTTTQGGFAASGRIGNXKNEPDHLLVLVHGILASPSDWTYAEAELKRRLGRNFLIYASSCNSHTKTFAGVDGAGKRLAEEVLQVVKKRESLKRISFLAHSLGGLFARYAVAALYSECDSSGTQSNNVTDSSDGNLQTSTPSTQGMIAGLEPVSFITLATPHLGVRGRKQLPFLLGLPILEKLAPPIAPFVVGRTGXQLCLTDGKPSRPALFLRMASDCEGGKFLSALGAFRNRTVYANVSYDHMVR

SEQ ID NO: 59171 - protein, 303 aa, Gossypium hirsutum
  Clone ID: GOSHI-09MAY01-C71773_3.pep
LIFHTDVVPSERGKWDYHPWGAHIDENGNIFARGSQDMKCVGMQYMEAVRRLKASGFQPKRSLYLSFVPDEEIGGHDGLEKLAQSDVFKNMNVDIVLDEGLASPNENSAACAAAWAPAWLVIKATGAPGHGAKLYDNSAIENLFKSIESIRRFRASQLDLVKAGLKGEGEVISVNMAFLKAGTPSPTFKQKGSTQDYRGRPLITATDRSNPWWALLVEAIKKANGKIGKPEIFPAATDSLYFRQQGLRAIGFSPMANTPVLLHDHNEFPTILMKLQDGVWKYLSLRNNCRKPSLMASLLGPWL

SEQ ID NO: 59172 - protein, 120 aa, Gossypium hirsutum
  unsure (1)..(120): unsure at all Xaa locations
  Clone ID: GOSHI-09MAY01-C71773_2.pep
ISVNMAFLEAGTPSPTGFVMNLQPSEAEAGFDIRIPPTVNAEXCEKRIAEEWAPASRNMSFEGIMESVEKRGGYMEVTGFGADVREHIYKLASVNVCSNITGQILASLGMSPPKVISFAI

SEQ ID NO: 59173 - protein, 162 aa, Gossypium hirsutum
  Clone ID: GOSHI-09MAY01-C71773_1.pep
GTPSPTGFVMNLQPSEAEAGFDIRIPPTVNAEFLEKRIAEEWAPASRNMSFEFKQKGSTQDYRGRPLITATDRSNPWWALLVQAIKKANGKIGKPEIFPAATDSLYFRQQGLRAIGFSPMANTPVLLHDHNEFLNQAEYLKGIDVYDSIIKAYTSYIPPAKR

SEQ ID NO: 59174 - protein, 154 aa, Gossypium hirsutum
  unsure (1)..(154): unsure at all Xaa locations
  Clone ID: LIB3582-053-P1-K1-C5.pep
SEKDIHLVXFESVSKGYYGECGKRGGYMEVTGFGADVREHIYKLASVNLCSNITGQILGGVVMSPPKVGDKSYESYIAERDGILSSLARRAKTLEDAFNKLEGITCNKAEGAMYLFPRINLPKKAIKAAEEVKTAPDLFYCRRLLNETGIRFVP

SEQ ID NO: 59175 - protein, 80 aa, Gossypium hirsutum
  Clone ID: GOSHI-09MAY01-C71713_1.pep
ELNATFSKPLKELLSAEAEVDDAALISIDSKGIDIRVRQGAQFNVQRLSFEEGQGVETLEEAKVALWKVIKKGQVQNLKR

SEQ ID NO: 59176 - protein, 88 aa, Gossypium hirsutum
  unsure (1)..(88): unsure at all Xaa locations
  Clone ID: LIB3825-022-Q1-N6-A1.pep
PDKIAVDXGEQNLKELNVXFSKPLKELLSAEAEVDDAALISIDSKGIDIRVRQGAQLGFRRRLSFEEGQGVETLEEAKVALWKVIKKG

SEQ ID NO: 59177 - protein, 335 aa, Gossypium hirsutum
  unsure (1)..(335): unsure at all Xaa locations
  Clone ID: GOSHI-09MAY01-C71683_1.pep
YESKAASSCKFSRCEGKFQIAKRNDLMTKSFMNYVDLKKEAMKDLEAGPDYDLEMSSTTNTMDQNLGLFLEEAEKVKQGMAVIRELLGKLQESNEESKSLHKPESLKALRNKINNDIVTVQKKARTIKAQLEEMDRANAANKRLSGYKEGILKXRTRIAVTNGLRNKLKELMMDFQGLRQKMMAEYKETVGRSYFTVTGENPDEETIEKIISDGSGGEGFLTRAVQEHGRGKVLETVVEIQDRHDAAKEIEKSLLELHQVFLDMAVMVEAQGEQMDDIEHHVMNASHYVKDGSKELNNAKRYQRSSRKWMCIGIILLLLIVLVIIIPIATSFSSS

SEQ ID NO: 59178 - protein, 62 aa, Gossypium hirsutum
  Clone ID: LIB3828-016-Q1-K6-H11.pep
MNDLMTKSFMNYVDLKKEAMKDLEAGPDYDLEMSSTTNTMDQNLGLFLEEAEKVKQGMAVIR

SEQ ID NO: 59179 - protein, 86 aa, Gossypium hirsutum
  Clone ID: LIB3582-052-P1-K1-B6.pep
MQDLEPAPDYDLEMCSTTNTMDQNLGLFLEEAEKVKQGMGGGRELLGKLQESNEESKSLHKPESLKASRNKINNDIVTMQKKARTI

SEQ ID NO: 59180 - protein, 172 aa, Gossypium hirsutum
  Clone ID: LIB3582-056-P1-K1-B5.pep
MGDNLFEGLPPPSHHQQLQGKENEEEEGKEGNQISFSLKTSSSSNNKEASPKPVLKSALKRPKPTESNPEAAVQEKRLRFKMTTDASETQVIEAMQKIASHIKNPTKFSKASKLAIQLIQAGSVKGGTSEHFFAVLEAAMSSTTSCTDPSVRGDYHSLFSAAQDAAECLNKS

SEQ ID NO: 59181 - protein, 182 aa, Gossypium hirsutum
  unsure (1)..(182): unsure at all Xaa locations
  Clone ID: LIB3585-064-P1-K2-D3.pep
HASAHASDHQQLHGKENEEEEGREGNQISFSLKTSSSSNNKEASPKPVLKSALKRPKPTESNPEAAVQEKRLRFKMTTDASETQVIEAMQKIASHIKNPTKFSKASKLAIQLIQAGSVKGGTSEHFFAVLEAAMSSTTSCTDPSVXECLNKRQKNQLTVWTFKAVMANDFLTDDRLVFFKTT

SEQ ID NO: 59182 - protein, 136 aa, Gossypium hirsutum
  Clone ID: GOSHI-09MAY01-C71363_1.pep
MAESKTLRKPIFTKVDQLRPGTSGHTLTIKVVNTKMVFQKGRPDGPQVRQIRIAESLVGDETGMIIFTARNEQVDFMKEGATLTLRNAKIDMFKGSMRLAVDKWGRVEVAEPDSFKVKEDNNLSLIEYELINIVEE

SEQ ID NO: 59183 - protein, 242 aa, Gossypium hirsutum
  unsure (1)..(242): unsure at all Xaa locations
  Clone ID: GOSHI-09MAY01-C72993_1.pep
MEGLGVSKFEEEDLILKXGECLEERVKERSSHPTDTPQFTASLQSFENIRSKNGAGIGSAASFSDDEDTAQILSSANRGRKGSSAASRSSRDASELGKSSTRGRGRGRGRGSSGLKQTTLDATLGFRRSQRSTSVKVQSIADDEENVDSASSEEHEINEVESSSENKNDEITKGRGRKRAAPRGRGRGTTSKRGKKSDNSSVHSVFMNKLDDDDDDDDAEEIARRFNKPQPRVTKSYGALRR

SEQ ID NO: 59184 - protein, 109 aa, Gossypium hirsutum
  Clone ID: GOSHI-09MAY01-C72443_1.pep
RNSTDLFRSFGFDTRPVLIGLIIFQHTVIPLQHLVSFGLNLVSRSFEFQADAFAKKLGYGSALRAGLVKLQEENLSAMNTDPWYSAYHYSHPPLVERLAAIDAADKKEE

SEQ ID NO: 59185 - protein, 172 aa, Gossypium hirsutum
  Clone ID: GOSHI-09MAY01-C72633_2.pep
MNREDHKKTDHDSHFSEWKLLICPHDWKNGKGGAVTRYRFENLPKSSGPGIYELAVCKLPSRDRRGKLEPDSVVYVGEAENIRARLQQYGRDGTHLCRKNGFGEKGCPLFDKIFARGCSIIYRWARMKSKAAAQRTEAQLLEKFDYAWNKGSYGARRHNDILPKLDKHVSNK

SEQ ID NO: 59186 - protein, 222 aa, Gossypium hirsutum
  Clone ID: GOSHI-09MAY01-C72633_1.pep
SRDRHGKLEPDLVVYVGAAENIRARLQQYGRDGTHLCRKDKGCPLFDIFARGCSIVYRWVPRENKADALRTEAQLLGTYDYPWNKGSNGIRRHDDILQKLDKHASNPRGLNQKQVGIKIKASKLASDDSEFGKYKNGENLNFLPQVFNFSRSRPRLVSNHGGSDKNETFSCGVVLDDGSICKRPPVDGRKRCAEHKGKKTTGASTSSSMKSQPHKEDYSEIE

SEQ ID NO: 59187 - protein, 74 aa, Gossypium hirsutum
  Clone ID: GOSHI-09MAY01-C72143_1.pep
MARPSLATRRTLTLALKSTRVAQSRALQTFSLPELPDDYGALEPAISGEIMQLHHQKHHQTYITNYNKALEQLH

SEQ ID NO: 59188 - protein, 68 aa, Gossypium hirsutum
  Clone ID: LIB3493-030-P1-M1-E5.pep
LYKKRIYCFSKFPSIGADHKTLTLALNSTRLAQSRALQTFSLPDLTYYYRALKPDIIVEIIQLHHQKP

SEQ ID NO: 59189 - protein, 139 aa, Gossypium hirsutum
  unsure (1)..(139): unsure at all Xaa locations
  Clone ID: GOSHI-09MAY01-C72123_1.pep
MEDGEQREWGAKAWTYLSSVRSLSPLIQCITNFVSMDLTANTLLSAGASPAMLHSPNESPDFTPQVNALYINVGTLSDNWLPAMELAAQLASQVXKPWVLDPVAAGASRFRLKACXLDLISLKPTVIRGNAPEIIAWLK

SEQ ID NO: 59190 - protein, 127 aa, Gossypium hirsutum
  unsure (1)..(127): unsure at all Xaa locations
  Clone ID: LIB3493-054-P1-M1-G11.pep
DKLFRCLGLGLGLEGNEMKEAMGGDNMVYLLKINYYPQCPQADLALGVPAHTDMSAITIXLVPNDVQGLQACKDDHWYDVEYIPNALIVHIGDQIEIVSNGKYKSVLHRAKVNKEKTRISWPVFVEP

SEQ ID NO: 59191 - protein, 106 aa, Gossypium hirsutum
  unsure (1)..(106): unsure at all Xaa locations
  Clone ID: LIB3493-054-P1-M1-G6.pep
MHGDNIVYLLKINYYPQCGETFLWLYFFDKLFLGVVERVASSWVDKVFYACKGXTYRYDVXYIPNALIVHIGDQIEIVSNGKYKSVLHRAKVNXENTRISWAVFVE

SEQ ID NO: 59192 - protein, 192 aa, Gossypium hirsutum
  Clone ID: GOSHI-09MAY01-C73993_1.pep
MLLKLAISTAPAAATIFKAVLSKGVSLNMAHKLVQVTLCLWVFTSLLLPSPTAALYRVSLKKQRLNLNRFKAARIAMNGWGMLHNYGSSDGEVIPLKNYMDAQYYGVIAIGSPPQNFTVLFDTGSSNLWVPSSKCYFSIACYFHSKYKSSRSSTYTKIGKPCEINYGSRSISGFFSQDNVEVGGVVVRDQVF

SEQ ID NO: 59193 - protein, 67 aa, Gossypium hirsutum
  Clone ID: LIB3825-011-Q1-N6-C10.pep
LHIMPLDRIHALASPVPLSHQLKYCPIQAIIGKTISGTFYVSNNTLPGIHLPSQYLVFYFFMSAKCY

SEQ ID NO: 59194 - protein, 51 aa, Gossypium hirsutum
  Clone ID: LIB3582-020-P1-K1-F9.pep
ASLQIIALQQNVWITSINFQRKYGSNLILKFEIHSFEVKGKKKEHCNYIYI

SEQ ID NO: 59195 - protein, 214 aa, Gossypium hirsutum
  Clone ID: GOSHI-09MAY01-C73193_1.pep
RSGYCKGQKIDEGFQLFRGRQFQGCEPNARTYNTLIQALCRVGRVRTAKKMFDEMDVCGTQSPTSFTYTIMLDGLCKNGHVDEAIALFRSLEGTKYESSIELYSILIYGRCRTGRMEEARNMFNEMSRKGFVPDVVTYNILIDGLCKKGMILEANKLIVEMEEKGCLPNSISFNIIIQGFLRENNIPEAMNLFKEMRRRNFAPNEAVTSLLLNL

SEQ ID NO: 59196 - protein, 151 aa, Gossypium hirsutum
  Clone ID: GOSHI-09MAY01-C73183_1.pep
MNISEQEQDIVIVGGGISGLATALALRRKGIKSMVLERSETLRAAGVGIIMQPNGWRALDQLGVAAKLRQTCTEIPSGVFISVAEGKCRESELPLGKGELRCLKRMELMKALAEELPVESVYLGCRAGSILLDPLTSKSLFQLHDGTLIKA

SEQ ID NO: 59197 - protein, 163 aa, Gossypium hirsutum
  Clone ID: GOSHI-09MAY01-C73083_1.pep
MTTGRENWLENWEWPGCQYMERCMDPGSWTQEEIRSLFGEDQAQRIIAIPLANSESQDALVWRGDNTGVYTAKNGYKWSNTIEVSNIQQNPLAKFYKRLWVIKVPSKIGVHLWRVAKDYVSVLYNLRIRKLVNNTLCPVCKREEDPPEPYLPGLFFYSTSLTG

SEQ ID NO: 59198 - protein, 314 aa, Gossypium hirsutum
  Clone ID: GOSHI-09MAY01-C73053_1.pep
MDFSYSFTFTALVLLLSLISLTFFTAKLKQKQTKNKYHPVAGTIINLLLNFNRLHHYMADLAAKYRTYRLLSPYRSEIHTSEPANVEYILKTNFDNYGKGEYNHSLLRDFLGEGIFTVDGDKWRQQRKASSYEFSTKVLRDFSSVVFRKNVARLANIVSEAANSNETMDMQDLFMKSTLDSIFKVAFGVELDSMCGSNEEGKEFAAAFDDSSALTLYRYVDPFWKIKRYFNIGSEAALKRNIKVVDNLVYKLIHNKIEQLRESKDDSAVIKKEDILTRFLEVTDTDPKYLRDIILNFIIAGKDTTAASLSWFIY

SEQ ID NO: 59199 - protein, 275 aa, Gossypium hirsutum
  Clone ID: GOSHI-09MAY01-C73033_1.pep
MAFPVSAIGYEGYEKRLEISFFDPGFSVDPRGMGLRSLSKAQLDEILKPAECTIVSSLSNNHVDSYVLSESSLFVYPYKIIIKTCGTTKLLFSIPAILKLANSLSLSVQSVRYSRGSFIFPGAQPFPHRNFCEEVAILDRFFLKLGSHRKAYIMGGSDKTKKWHVYSASARTSSHSNPVYTLEMCMTGLDRKKASIFYKTHASSAASMTEHSGIRKILPHSQICDFEFDPCGYSMNSIEKGAISTIHVTPEDGFSYASFEASGYDFETLNSNQLI

SEQ ID NO: 59200 - protein, 273 aa, Gossypium hirsutum
  unsure (1)..(273): unsure at all Xaa locations
  Clone ID: GOSHI-09MAY01-C73383_1.pep
SMMVVSVVMLISTADETPNTPIKLWICAYALXCLLHVVLVWLEYRRRNSRRISVTDEERGEAVSGDVSDSEDEEDSGLFGSNESSITKRCETVNTMASFLWWIVGFYWVVSGGDILLQNAPRGYWLAVVFLAFDVFFAIFCVVLACLIGIALFCCLPCIIAILYAITEQEGASEADLSILPKHRFQIINNREKPSLGAGKMIPIETSSGYLANERILLADDAECCICLSSYEDGVDLHALPCNHHFHSTCIVKWLKMNATCPLCKYNILKGNE

SEQ ID NO: 59201 - protein, 135 aa, Gossypium hirsutum
  unsure (1)..(135): unsure at all Xaa locations
  Clone ID: LIB3493-051-P1-M1-D4.pep
VGPIPTHIAVIMDENRRYAKRKLLEEGAGHDAGAMALLKLIIYCYELGVKYITAYAFSIDNFRRKPSEVQKIMDLLKECMTVLAKITKHHPIKVNFAGNLELLNAELMDEACKLMGATAQYSKFRVTIXVCYWCT

SEQ ID NO: 59202 - protein, 120 aa, Gossypium hirsutum
  Clone ID: uC-gsflmaxxa067f06b1.pep
VGSILTHIAEIMDGNRRYAKRKLLEEGAGHDAGAMALLKLSIYCYELGVKYITAYAFSIDNFRRKPSEVQKIMDLLKECMTVLAKIAKHHPIKVNFAGNHQLLNAELKDEACQLMGATVE

SEQ ID NO: 59203 - protein, 348 aa, Gossypium hirsutum
  unsure (1)..(348): unsure at all Xaa locations
  Clone ID: GOSHI-09MAY01-C73323_1.pep
MESTDSSIGSQQPNLPPGFRFHPTDEELVVHYLKKKASSAPLPVAIIAEVDLYKFDPWELPAKATFGEQEWYFFXSPRDRKYPNGVRPNRAATSGYWKATGTDKPVLTSGGTQKVGVKKALVFYGGKPPKGIKTRWIMHEYRLAANKNNNKPPGYDFSNKKNSLRLDDWVLCRIYKXKNNTHRPLDQDKDDSIDDMLGSIQPSISIGNQHNNPKFQFASKGTATSFGTLLENHEHSLFDGMMGNNSDEGINNSSMSQSMVNPLKRNLPSLFWTDETSTEPQANKKFHGDSNDGSMEKMDGNGSVTTLLSQLRQSPSLQQQQQEETMMGSMGDGIYRPPFQLPGLHWYS

SEQ ID NO: 59204 - protein, 209 aa, Gossypium hirsutum
  Clone ID: GOSHI-09MAY01-C73293_1.pep
MALDDNKDKQEAEDNKATRPEESDDDNEDDNAIPLGPQCSLKEQLEKDKDDESLRKWKEQLLGSVDINNIGETLDPEVKFLSVSIVSADRQDMVLPIPEDGKPHGLWFTLKEGSQYRLKFTFQVSNNIVSGLRYTNTVWKTGVKVYSTKDMIGTFSPQLEPYTHEMPEETAPSGFMARGSYTAKSKFLDDDQKCHLEINYTFDIRKDWA

SEQ ID NO: 59205 - protein, 220 aa, Gossypium hirsutum
  unsure (1)..(220): unsure at all Xaa locations
  Clone ID: GOSHI-09MAY01-C73233_1.pep
MDGEELTEQETALYDRQIRVWGADAQRRLSKSHMLVCGMKGTVAEFCKKHCTGKELVSVTXLVDDRIVTXEVFICEIFXYLPHENHYNGKTLAEVCCDSLKEFNHMVHVAVETGDISTFGVEFFEKFDAVIISCCSLGKKKLINQKCRKLSKRVAFYTVECRGSCGEMFVDLQDYKYSKKKLEETIECQIEYPSFEEAISVPWRALPRRVSKLXYFAMRV

SEQ ID NO: 59206 - protein, 161 aa, Gossypium hirsutum
  unsure (1)..(161): unsure at all Xaa locations
  Clone ID: uC-gsflnu33B013a03b1.pep
MPVMNGEELTEHETXALYDRQIRVWGADAQRRLSKSHILVYGMKGSVAEFCKNIVLAGVGSVTLVDDREVTEEALSANFLILPDENLYHGKTLAEVCCDSLKEFNPMVHVSVEKGDISTFGVEFFGKFDAMVISCCSLAKKKLINQKCRKLSKRVAFYTVD

SEQ ID NO: 59207 - protein, 204 aa, Gossypium hirsutum
  unsure (1)..(204): unsure at all Xaa locations
  Clone ID: GOSHI-09MAY01-C68973_1.pep
MSRFRDRTEDFKDAVRQSAISSGFNESKLAAIMASFIIHKPRQRTPFLKSALKTLESIGALDQFLLKHRKDYVDRHRTTEQERDSIEHEVTAFVKACKEQIDVLKNCINDEEASSKGWLGIRDSSNADTIAHKHGVXVLILSEKLHSVTAQFDQMRAVRFQEAINRAIAKKKTLERCGLNSINTSKPLNLEHRETYENQPETLR

SEQ ID NO: 59208 - protein, 78 aa, Gossypium hirsutum
  Clone ID: GOSHI-09MAY01-C68963_1.pep
METQKSQAEKQATMASCRKKKNEEATFLEDLKDHIDEFGNASMDEHKTCFKKTIQKMFGMSKFVAERNAESKETTVSK

SEQ ID NO: 59209 - protein, 317 aa, Gossypium hirsutum
  unsure (1)..(317): unsure at all Xaa locations
  Clone ID: GOSHI-09MAY01-C68483_1.pep
GTTPVDIHGKPIADLSKTGGWSAALFMFGNEMAERMAYFGLSVNMVAFMFYVMHRPFSSSSNAVNNFLGISQVSSVLGGFLADAYLGRYWTIAIFTTSFLPGLIGITLCASMKIFVPNQDQCDQLSLLLGSCEPAKPWQMLYLYVVLYLTAFGAAGIRPCVSSFGADQFDERSKDYKTLLDRFFNFFYLCVTIGAIVAFTLVVYIQIKRGWGAAFGSLAIAMGVSNMLFFAGTPLYRHRLPGGSPLTRVAQVLVAAFKKQHVPFTKTEXIGLYELPGRHSAIKGSGKIPHTDDFRCLDKAALQLKEDGGNPIPWRLC

SEQ ID NO: 59210 - protein, 144 aa, Gossypium hirsutum
  Clone ID: GOSHI-09MAY01-C68403_1.pep
MGIQTMGSQSNGQQSLLQPSPLVRQNSWHSLTLNEVENQLGNLGKPLGSINLDELLDNVWSTELNPPLGMNNSESISSSSSSLHRQASLTLARALSGKTVDQVWSEIQQGQKRRNGEGMKDQEREAKLGETTLEDFWSSRAFCC

SEQ ID NO: 59211 - protein, 64 aa, Gossypium hirsutum
  Clone ID: LIB3189-047-P1-K1-E1.pep
KFLCYYLEILILDRDRRGNFSFLNFAKLLLHKHLHVLLNYQVRLVPFHFGFLGIGASLGFLLCA

SEQ ID NO: 59212 - protein, 298 aa, Gossypium hirsutum
  Clone ID: GOSHI-09MAY01-C68143_1.pep
MKSTTYIIYFIYIKFPITFISTLVSSLSFTCLCFFCLCFKEDKSSSFAFPLIFVVKCATMTSGFEPSPSKDMPAAEEEEDDWRSSSSPMTSSSIGRNSDADVSGRSSDGDDENEVQSSYNGGLNMMDSLQQVLPMRRGISPGGKGKSRSFTSLADASTASTIKDIAKPENAYTRRRRNLLAINHIWDKNRNNGGPIRPISSSKSTLALAVAMSSSESMSSISEDSTSTSSPRLPPLYPQTRSSCNNDNTTPSSPPCRNLSNWRSFSLADVREYGTVIGSTNPHCASFHNENQLLRKGL

SEQ ID NO: 59213 - protein, 178 aa, Gossypium hirsutum
  Clone ID: GOSHI-09MAY01-C68013_1.pep
AHRRMLFGHADGLSEQRSPRDQLLADPESLEDDFKLDSSETILYAASFEELARDNLQYDTIIWVSISLLLVLAWGVGIIMLLYLPFRRYVLQKDISSRKLYVTPSEIVYEVSRPSFIPFWGTITIEKHVPLSKVIDIIIEQGWLQSVYGIHTFRVESIAHGKAAPVDELQVQGVANPA

SEQ ID NO: 59214 - protein, 219 aa, Gossypium hirsutum
  Clone ID: GOSHI-09MAY01-C69573_1.pep
DQYGSRFIQQKLETATTEEKNMVYEEIMPQALALMTDVFGNYVIQKFFEHGLPAQRRELADKLFGHVLTLSLQMYGCRVIQKAIEVVDTDQKIKMVQELDGSVMRCVRDQNGNHVIQKCIECVPEEHIQFIVTTFFDQVVTLSAHPYGCRVIQRILEHCRDPKTQSKVMDEILGSVSMLAQDQYGNYVVQHVLEHGKPHERSIIIKELAGKIVQMSQTE

SEQ ID NO: 59215 - protein, 200 aa, Gossypium hirsutum
  Clone ID: GOSHI-09MAY01-C69653_1.pep
MSRLAPLSEEPISEDHSANCSKKGLSWKNWLKTHLSLVFNKKSDLEILLSVLGCPLFPVSALSEPPINEVSSSAQYIIQHFTAATGCRQSEGTVKNIFVTGKVTMAMVDELGATVGSVAGAAGVAQKGCFVMWQMVPNKWLIELVVGGHKVIACSDGNVAWRRTPWLGAHAAKGGVRPLRRALQGLDPMAISAVFSSAQY

SEQ ID NO: 59216 - protein, 200 aa, Gossypium hirsutum
  Clone ID: GOSHI-09MAY01-C69123_1.pep
VGAGVAGAALAYSLGKDGRRVRVIERDLNAPNRIAGEGLMPGGYLKLIELGLGDCVDEIDAQQILGYTLYKDGKDAPISFPLEKFQSHVSAKNFHNGRFVQRLRKKAASLHNVSLEQGTVTSLLEENGIIKGVHYKDKSGQMLTASAPLTRVCDGCFSNLRRSLCNPKVDIPSYFVGFLLTNCKLPNEKYGAIILADPSP

SEQ ID NO: 59217 - protein, 85 aa, Gossypium hirsutum
  Clone ID: LIB3189-042-P1-K1-G11.pep
MEFPKKNSVNKTGSEGVGTADIIIVGAGVAGAALAYSLGKDGRRVRAIERDLNAPNRMACESLIPGGYLKLIELSVEGKQEKSWI

SEQ ID NO: 59218 - protein, 204 aa, Gossypium hirsutum
  Clone ID: GOSHI-09MAY01-C69323_1.pep
FLSLPKQSQSPLNPSLTLPPASVASPLPSSNPVSTAAMEAPKFVWEGAIPLQIHLHESQVTTLPPPPPALILAPRIGYLPLLAPLIKPYFSSTLPPGVDTIWFDYNGLPLRWYIPTGVLFDLLCPEPERPWNITVHFRGYPGSVLIPCEGEDSVKWSFINSLKEAAYIMNGNCKNVMNMSQSDQLELWHSVMNGNLEAYQRVSS

SEQ ID NO: 59219 - protein, 112 aa, Gossypium hirsutum
  Clone ID: GOSHI-09MAY01-C69253_1.pep
VPKSPASRAAASAAEETSRRGFQRNKVFRDVEKALHVPLRYRNWNCKISTLKVLLVTILVGSLITLLRSPAVYISDRPSNLVSRRPGFVDRWIRDSGAADPRYLSMLDVNWD

SEQ ID NO: 59220 - protein, 226 aa, Gossypium hirsutum
  unsure (1)..(226): unsure at all Xaa locations
  Clone ID: GOSHI-09MAY01-C69203_1.pep
PASGEGFGLMGKEXRDLQLAVLQQVRELRAEIGLLEGRIGKIPHQLLGSVSRELFEILSKVGSLGEXVQSRLELLSDKPHSDDLLVGENDLAHWADDHHDRIYGDGKDAELIEDDDDSFGRTLGDVVPWDQMRTDCRSPKGLMSEPCKTDKWLKCPDFDEKSILDCEDTKLTKPMRHDDGIGTDVGLVGLQVDSFYQDNPKWYDSPCELNSTTDCGDGGFKHGEIV

SEQ ID NO: 59221 - protein, 126 aa, Gossypium hirsutum
  Clone ID: LIB3189-017-P1-K1-G11.pep
QELRADIGLFVCRIDKIPHQLLGSVSRELFDILSKVRSLGEEGPNSMELLSDKPYSDDLLFGENVLAHWCDHHDRIYGDGKDALLIEDVEDSFGRTLVIVVFVTLFLQYLFYQFIFLSFIFNNFFF

SEQ ID NO: 59222 - protein, 110 aa, Gossypium hirsutum
  Clone ID: GOSHI-09MAY01-C64823_1.pep
MAASYRPPPPSAIDLDLTVVSAKHLKNVNWRNGDLKPYAVFWVDPDRRLSTRSDDAGSTRPVWNERFTLPLPSPLHDVVLTLEIFHSKPSETPKPLVATLRVELKELPDP

SEQ ID NO: 59223 - protein, 224 aa, Gossypium hirsutum
  unsure (1)..(224): unsure at all Xaa locations
  Clone ID: GOSHI-09MAY01-C64653_2.pep
MANADPSQKVDYVFKVVLIGDSGVGKSQILARFARNDFSLDSKSTIGVEFQTRTLLIEHKSVKAQIWDTAGQERYRAVTSAYYRGAAGAMLVYDVTKRQTFNHIARWLEELRGHADKNIVIMLVGNKSDLEKQRDVSTEDATEFAQKEGLFFLETSALAAKNVETAFLTVLTEIFNIVNKKNLVAGENQGNGNGNPTSLAGKKIIXPGPAQEXIQAKSNMCCRS

SEQ ID NO: 59224 - protein, 225 aa, Gossypium hirsutum
  Clone ID: GOSHI-09MAY01-C64653_1.pep
MASGGGYGDPSQKIDYVFKVVLIGDSAVGKSQILARFSRNEFSLDSKATIGVEFQTRTLVIEHKSVKAQIWDTAGQERYRAVTSAYYRGAVGAMLVYDITKRQTFDHIPRWLEELRGHADKNIVIILLGNKSDLENQREVPTEDAKEFAQKEGLFFLETSALEATNVETAFMTVLTEIFNIVNKKNLVADENQGNGNPASLAGKKIVIPGPAQEIPAKSNMCCRS

SEQ ID NO: 59225 - protein, 108 aa, Gossypium hirsutum
  unsure (1)..(108): unsure at all Xaa locations
  Clone ID: GOSHI-09MAY01-C64603_1.pep
SKKKEKKKKKIERELRKNRNEKIIGKYRKKNKKXKENKSKIKEKKKRKKXMKKDKIDKIREXKLNKKREKNMKXMNKRKNKKKYKKNKRRKRKKNSRKKREKKKKRKY

SEQ ID NO: 59226 - protein, 79 aa, Gossypium hirsutum
  Clone ID: LIB3272-007-P1-K1-H3.pep
LMQEDIQLNIHHRGSSLETLTSTDFIPQSNYTYNEHYDIISPRNRYTNTSDTNSGGEDEQGYKEYERKAKRILQKLKEN

SEQ ID NO: 59227 - protein, 165 aa, Gossypium hirsutum
  unsure (1)..(165): unsure at all Xaa locations
  Clone ID: GOSHI-09MAY01-C64123_1.pep
MDHRDRQSIEHQKKDPQQHPHPCFTNFTTHHQQQKWEDPSLLDYSTRIEPPFQAFNPNCQTKSSFPCNPNNQIKVPDPIMNELLQASKVQDWDPSAMLNNLSFLEQKIHQLQGLVHSIIGRGGQVLGQPDELVDQQQQLITAALTSIISQLISTAGSLXPSVKHH

SEQ ID NO: 59228 - protein, 164 aa, Gossypium hirsutum
  Clone ID: GOSHI-09MAY01-C64073_1.pep
MRHGAHYTPPPLLSPSPPPAINSTATGGNQHPMLVSVLLALFLPCAGMSAVFIVYICLLWYATNHRADNSGSLSVKQAGEKGLSVSELEKLPKVTGKDLVLGTECAVCLDEIEAEQSARMVPGCNHGFHLQCADTWLSKNSVCPVCRAKLEPKLFDPPGDDNPC

SEQ ID NO: 59229 - protein, 77 aa, Gossypium hirsutum
  unsure (1)..(77): unsure at all Xaa locations
  Clone ID: LIB3582-011-P1-K1-H9.pep
FEQLPKVSGKDLVLWTECAVCLDEIXAEQSGRMVAGCNHGFHXQCGDVWLXDYAVCRVCRSKLERELSDPLGDDRQC

SEQ ID NO: 59230 - protein, 136 aa, Gossypium hirsutum
  Clone ID: GOSHI-09MAY01-C65993_1.pep
MDHQGHGQPPAMGIIGGGAQMPYGTNPYPNQVTGAPNSGSVGGIQPSSQPTGAQLAQHQLAYQQIHQQQQQQLQQQLQTFWANQYQEVEKVSDFKNHSLPLARIKKIMKADEDVRMISAEAPVIFARACEMFILEL

SEQ ID NO: 59231 - protein, 170 aa, Gossypium hirsutum
  Clone ID: GOSHI-09MAY01-C65883_1.pep
MALPYTHHYDLSFFALNLKKFGSSHLQPFCCLRCNSSVSSSPFTEKHSLQRYQRDQWVYNNNNQQRPSLSCDDEAASCSVPADSDSIRLNDIALQLPELRKLLQVLKHKRESCGGQVPKNGLGDVFLVGTGPGDPDLLTLKAVKVIQKADLLLYDRLVSNAVLDLVGPDA

SEQ ID NO: 59232 - protein, 158 aa, Gossypium hirsutum
  Clone ID: GOSHI-09MAY01-C65833_1.pep
MAASPEHRDDSSSSSPVDVPVKKELEICVDAKQIDSGGGSREAASGDNSRAGVDFALNNGAAEPYSIVHRSFSEVGALRVGTSNIEKLDSSQPKLVKSKTEAPRHRSILAEDAAQIFDNKMSAQKKLQLLNRIATVKDDGTVEFEVPVMLIPMFFLVD

SEQ ID NO: 59233 - protein, 167 aa, Gossypium hirsutum
  Clone ID: GOSHI-09MAY01-C65743_1.pep
MQSLESITESPFPQNPNNSSSSSSSSNGLYGWLVECHGFWHNLALIIPSLLFVLFLGFQAKKNFQKLSHGRSYIMISYYGCLWLVSLLNLVWCFVQAWECTPGKEMAWNILSLFTTSGMLFLEVSLLAFLLQGNHASGLQALTRTFVISGLIVGLDFPLAITMMGLS

SEQ ID NO: 59234 - protein, 194 aa, Gossypium hirsutum
  Clone ID: GOSHI-09MAY01-C65163_1.pep
ASTSDGKNGGDPLRIVGVGAGAWGSVFTALLQDSYGHLRDKVLIRIWRRPGKIVDKATAEHLFEVINSREDVLRRLIRRCAYLKYVEARLGDRTLYADEILKDGFCLNMIDTPLCPLKVVTNLQEAVWDADIVINGLPSTETRVVFEEIRRYWKERITVPIIISLAKGIEAELEPEPRIITPTLMISRATGIPI

SEQ ID NO: 59235 - protein, 128 aa, Gossypium hirsutum
  Clone ID: GOSHI-09MAY01-C65023_1.pep
SAHSVAMTIFRGGIGRFSGGVRAAVFFLWIVILFFSQLGLHFAVHNNNSNKDASTSSGSHQSFTFHPPRKALSLDTASFHAPSSLSQFTVNEDDPDTIYEDDMRVVHTGPNPLHNLGSLAFFLYLYCY

SEQ ID NO: 59236 - protein, 68 aa, Gossypium hirsutum
  Clone ID: LIB3272-013-P1-K1-D3.pep
SAHSVAMTIFRGGIGRFSGGVRAAVFFLWIVILFFSQLGLHFAVHNNNSNKDASTSSGSHQSFTFHPP

SEQ ID NO: 59237 - protein, 80 aa, Gossypium hirsutum
  Clone ID: GOSHI-09MAY01-C65323_1.pep
KRKTWWQMMAPPIISMLLKFLYLTTQSLITFKEMKQENNEIWFLSFNPISIKNLENPKVIAFNNTSSFVIQFQQWQNHCL

SEQ ID NO: 59238 - protein, 137 aa, Gossypium hirsutum
  Clone ID: GOSHI-09MAY01-C66913_1.pep
MERLNLKHKLGDKWISTLASIWIQCTSGSLYTFSIYSPILKSTQRYDQSTLDTVSVFKDIGANCGVLSGFLYTFATPSNRRNAYFGGPCLVLAAGAIQCFMGYFLIWASAVGLIPRPSGVGMCFFVLLAAHAQTFLI

SEQ ID NO: 59239 - protein, 193 aa, Gossypium hirsutum
  unsure (1)..(193): unsure at all Xaa locations
  Clone ID: GOSHI-09MAY01-C66893_1.pep
MQEGSSEQEFNSIRASIAILNSNLDQQNQRKISVLNELQNLQEKIRKEGAESKVKKFVSLLENLKLLERQESEIRCDFDAKRSSLEAEVSDLEEKIAAGSDSKMLSRGLDGSLNESLLKLNXTKRELAARLRAIVSIKRQLDDAPSQSELIHYERRLSELNAHIQEKLHQXRKFYATYNALLEIKEWILRTFL

SEQ ID NO: 59240 - protein, 122 aa, Gossypium hirsutum
  unsure (1)..(122): unsure at all Xaa locations
  Clone ID: GOSHI-09MAY01-C66763_1.pep
MEVELEEMLDDLLSLRQSVSDPSLHASIDKLQLRVDRLTHLAKAVPVRRSKVKDMSAEVVDSNPYSRLMALQRMGIVENYERXIREFSVAVVGIGGVGSVAAEMLTRCGIGRLLLYDYDKVE

SEQ ID NO: 59241 - protein, 109 aa, Gossypium hirsutum
  Clone ID: GOSHI-09MAY01-C66673_1.pep
MGRPPCCDKVGIKKGPWTPEEDIILVSYIQQHGPGNWRSVPTNTGLLRCSKSCRLRWTNYLRTGIKRGNFTPHEEGMIIHLQALLGNKWAAIASYLPQRTDNDIKNYWN

SEQ ID NO: 59242 - protein, 279 aa, Gossypium hirsutum
  unsure (1)..(279): unsure at all Xaa locations
  Clone ID: GOSHI-09MAY01-C66053_1.pep
GALIEGPRIGRFDRAGRAVALRGHSATLVVLGTFMLWFGWYGFNPGSFNKISSFYTSGNYYGQWGAVGRTAVTTTLAGCTAALTTLFGKRMLTGHWNVTDVCNGLLGGFAAITSGCSVVEPWAAIICGCVAALVLIGCNKLAEKVKYDDPLEAAQLHGGCGAWGVIFTGLFASEKLVKQVYPGRPAKYGLFMGGGGKLFAAQIIQILVXIVGWVSATMGTLFYFLHKFGLLRISVEDEMAGMDLTRHGGLAYVYHDEDESQKNGIQMRKIESFPTPPSV

SEQ ID NO: 59243 - protein, 221 aa, Gossypium hirsutum
  unsure (1)..(221): unsure at all Xaa locations
  Clone ID: GOSHI-09MAY01-C66203_1.pep
MDLLHSFSSLALILYLIVLTLNSKGALGASFTFVNRCGYTVWPGILANAGSPTLDSTGFELPKDSSRSFQAPTGWSGRFWGRTGCTFDGSGSGTCVTGDCGSGQMECNGLGAAPPVTLAEFTLGPGGQDFYDVSLVXGSFIPMIVEGSGGSGFCASXGCPSDLNRQCPSXLRVGDGDACQSACEAFGSPESCCCGAFRPPASCLPSVYSEMFMAACPGSYC

SEQ ID NO: 59244 - protein, 202 aa, Gossypium hirsutum
  Clone ID: GOSHI-09MAY01-C67893_1.pep
MAPLTFTHQNLLHSTPKLTTSKPYLKPKRTKTKLSIQTIRESPQASFTDQFVLQLADSLEDSLPSSSSSSLPLQKLRDNSSETLLSTQWPSRKDESFRFTDTSFIKNSDINPISHPPNSLDLLEVSRDTQFESFNFVDGFLVDSSFSSSNLPDGVYVGSLSKLSSEGILKRVCELLGDFEWGDLFWSVNGLGAPDLMVVYVP

SEQ ID NO: 59245 - protein, 135 aa, Gossypium hirsutum
  Clone ID: GOSHI-09MAY01-C67543_1.pep
MARPQQRYRGVRQRHWGSWVSEIRHPLLKTRIWLGTFETAEDAARAYDEAARLMCGPRTRTNFPYDPNAPQSSSSKLLSATLTAKLHKCYLASLQMTKQQSVQEPKREPPTPHIITNNGIADRGSGTGVRLLEKR

SEQ ID NO: 59246 - protein, 141 aa, Gossypium hirsutum
  unsure (1)..(141): unsure at all Xaa locations
  Clone ID: GOSHI-09MAY01-C67493_1.pep
MSFSTRQRRATVSDLPSSSSPPQPSKPESYTKVDKPGRSSSDGVGEDRGLGWFTGLFALGMLRYMSATSNIIHDCDEVFNYWEPLHYLLYKSGFQTWEYSSEFALRSYLYIIFHELVGRPASWLFAEEKXRVFYAVRLFLG

SEQ ID NO: 59247 - protein, 106 aa, Gossypium hirsutum
  Clone ID: uC-gsflmaxxa095e11b1.pep
KFNSSFLPQKAPLTESLLTLKPRKKAISQKMSFSTRQRRATVSDLPSSSSPPLPAKPESYTKVDQPGRSSSYGLFLNPLLFYFLFSSTILSIFFSLLSFLPFFFSF

SEQ ID NO: 59248 - protein, 203 aa, Gossypium hirsutum
  unsure (1)..(203): unsure at all Xaa locations
  Clone ID: GOSHI-09MAY01-C67483_1.pep
FSRPIPKSRTIGRTFSNPTNHYLTSLTKRTSFLFQSSSPFSXSSSSGDGRGRGRGREGASPSGAFGGFTPALGKPDSEDTKRDSAESQAVGSGHGRGRGIPLSSEPIIPSFSSFVSQNGSGRGRVTNESVRPIPPPPPPPPPREAKQPIFVMKQDEIETDLSAKLPAESVQSSERTFSPRTPSVASLSGAGRGKPVKQPGPVL

SEQ ID NO: 59249 - protein, 102 aa, Gossypium hirsutum
  Clone ID: LIB3543-038-Q1-K1-E8.pep
HCKLGSAGSLSRSVISAARAPSLRSPPPLPRLRPSVSSAPRLQSRRLSYAPSRNLGELGCVQSFLPLHSMVPTACLTSHLTVNVRACCELSHGTFCRTCQDR

SEQ ID NO: 59250 - protein, 93 aa, Gossypium hirsutum
  Clone ID: LIB3272-048-P1-K1-D8.pep
MAWRSAGSLSRSVISAARAPSLRSPPPLPRLRPSVSSAPRLQSRRLSYAPSRNLGELGCVQSFLPLHSMVPTACLTSHLTVNVRACCELSHGT

SEQ ID NO: 59251 - protein, 185 aa, Gossypium hirsutum
  unsure (1)..(185): unsure at all Xaa locations
  Clone ID: GOSHI-09MAY01-C67133_1.pep
MSWKFFGSHSLPLFFLFFFYSFPLISTQHNDDPTFKTMHDFSGYPVDESSHTFTPSNSISLSVDIQALQKQIDELSTFSDTPAPSVTRILYTENDVLAPQXYAKNLLGLAGLSVTEDVVGNIFGRWDGYEPELTAVATGSHIDAFPYSGKYXDGRPVFKGPLESLXALKRSGFKPKRSLEIILFT

SEQ ID NO: 59252 - protein, 181 aa, Gossypium hirsutum
  unsure (1)..(181): unsure at all Xaa locations
  Clone ID: GOSHI-09MAY01-C67213_1.pep
MELGLETMAAAIGVSVPVLRFLLCFVATIPVSFLWRFVPGTLPKHVYSAFSGLVLSYLSFGISSNLLFLVPMLLGYAAMLLYRPKCGIITFFLSFGYLIGCHVYYMSGDAWKEGGIDATGALMVLTLKVISSAINYNDGLVKEEDLPEAQKXNRLVKLPSLIEYFGYCLCCGSHFAGPVFE

SEQ ID NO: 59253 - protein, 95 aa, Gossypium hirsutum
  Clone ID: GOSHI-09MAY01-C60573_1.pep
SLALITYDNRKFKLTQTLQNRHTIHQRLLITHNILPQISLKLAHISIFIFVFLSKINTSFGLLSSTFYSLHASCLPQNRDCRWKPWQLWHTSHNA

SEQ ID NO: 59254 - protein, 117 aa, Gossypium hirsutum
  Clone ID: uC-gsronu33B015g02b1.pep
RLRIALSEVFKLMVSVNPNPAQGFYFFDPMNMGLPGVNSAPPANKVAPPLHVPPPPATSGAGNTTVYPEDPSKKIRKPYTITKSRESWTEQEHEKFLEALQLFDRDWKKIEAFVGSK

SEQ ID NO: 59255 - protein, 125 aa, Gossypium hirsutum
  Clone ID: LIB3196-015-P1-M1-H5.pep
DPSIHARVRLYLQDARIAASVIFKLMVSVNPNPAQGFYFFDPMNMGLPGVNSAPPANTVAPPLQVPPTPATSGAGNTTVYPEDPSKKIRKPYTITKSRESWTEQEHEKFLEALQLFDRDWKKIET

SEQ ID NO: 59256 - protein, 326 aa, Gossypium hirsutum
  Clone ID: GOSHI-09MAY01-C60743_1.pep
LVNVSKAGENIVINAVDQTETIQENGTSLLKVDPNGKPNKKRAAPDPDLATTRSTNDTGHGENVDGVLVNDDPSEPTMAEKLASLNLIENGKNETNENQERKEPSTHGKPPIADSVMVLLKQALRADDHALLLDCLYTQDEKVIANSVSQLNPSDVLKLLQSLVSITQSRGAVLACALPWIKSLLLHHASGIMSQESSLLALNSLYQLIESRVSTFESALQISSCLDFLYAGVVEDEFVENAAIPVIFEDTDESDEEEPEDAMETDDQENEDGEALDEASDGEAHVLVGEEDLMPTFRYCCYNRDSLMEVVPFSNKYRKSHCPFQF

SEQ ID NO: 59257 - protein, 133 aa, Gossypium hirsutum
  unsure (1)..(133): unsure at all Xaa locations
  Clone ID: GOSHI-09MAY01-C60713_1.pep
MANNTNEAPAADDFLEQILGLPNFAPSETGLAGSDAGLAATAAGAGAPMFLQLSSGDGAAHIGGIGGGGGGAFHGQVFPLGLSLEQGKGGFLKPEEASRSGKRFXERVVDDRASSVKNVFHGQPMQATVSAAP

SEQ ID NO: 59258 - protein, 112 aa, Gossypium hirsutum
  Clone ID: GOSHI-09MAY01-C60053_1.pep
MAKVPDMFEDLKNCYSENEEDSSSIDHLSLNQKSFYDVSYGPLHEGCMDQSVSLSISEISKTSKLTFKQSMVVVSTNGKVLKKRRLSLSQSITDNNLEAIANDSEEEIIKPR

SEQ ID NO: 59259 - protein, 76 aa, Gossypium hirsutum
  Clone ID: GOSHI-09MAY01-C61553_1.pep
SGQEGQTLAQPANLTAQITTTYQLNPPASCSACTDTMYGGLWARCLGIQRGNINSSSPWRTVYTRLFPLASGPHLL

SEQ ID NO: 59260 - protein, 113 aa, Gossypium hirsutum
  unsure (1)..(113): unsure at all Xaa locations
  Clone ID: GOSHI-09MAY01-C61433_2.pep
MMLFSVYFQHDCSLCKFGVKCSYAEAGISDDSRSATIDVVADVRNERIVVLGGSGFVGSAICKAAVSKGIKVISLSRSGRPTYSGSWVDQVNWVPXDVFYANWDEVLVGATAV

SEQ ID NO: 59261 - protein, 182 aa, Gossypium hirsutum
  Clone ID: GOSHI-09MAY01-C61433_1.pep
MRTSFRAFPVVTVPPLPSLGPTASFPARFPSLPQRRLCKFGVKCSYAEAGISDDSRSATIDVVADVRNERIVVLGGSGFVGSAICKAAVSKGIEVISLSRSGRPTYSGSWVDQVNWVPGDVFYANWDEVLVGATAVVSTLGGFGSEEQMKRINGEANVVAVNAAKDFGIPKFILISVHDYNL

SEQ ID NO: 59262 - protein, 165 aa, Gossypium hirsutum
  unsure (1)..(165): unsure at all Xaa locations
  Clone ID: GOSHI-09MAY01-C61793_1.pep
CAGSKLRRRRARPWDPRGQAVWPLIARASGREKTRRREALQDPSFFTMGMWSIGAGALGAAALALLLANTDVFLSKPQKAALXEYLEDIDLKTLEKEPRTLKAKELWEKNGAVIMAVRRPGFXLCREEAADLSSLKSMLDQLGVPLYAVVKEHIRTEVEDFQPYF

SEQ ID NO: 59263 - protein, 57 aa, Gossypium hirsutum
  Clone ID: GOSHI-09MAY01-C61733_1.pep
PRVRPRVRPRVRPRVRRRKGKKEMHCLEYFGIGTDYTVLSEGLFKSFLLIVSLIEAI

SEQ ID NO: 59264 - protein, 345 aa, Gossypium hirsutum
  Clone ID: GOSHI-09MAY01-C61603_1.pep
PRVRPRVRPRVRPRVRPRVRPRVRAQATFTAEDQKIESFRLLSGHKIPAIGLGTWRSGSQADNSVKTAIVEGGYRHIDTAWEYGVQESVGHGVKAAIHAGVERRDIFITSKLWCTELSPERVRPALLNTLEELQLEYLDLYLIHWPFRLADGASRPPKPGDVQEMDMEGVWREMERLVEDKLVRDIGVCNFTLKKMNKLLGFAETMPSVCQMEMHPGWRNDKMLEACKQNGIHVTAYSPLGSQEGGRDLIHDETVDRIAKKLNKTPGQVLVKWAIQRGTSVIPKSNNTDRIKENIEVFGWELPQEDFQALCNIPDQKRVLHGEQLFVNKNAGPLRSVADVWDHED

SEQ ID NO: 59265 - protein, 168 aa, Gossypium hirsutum
  Clone ID: GOSHI-09MAY01-C61123_1.pep
MVAATVGLRGLSLCTLSLPILRSAKIKLPIHSFPTSRSLKPLFSPFNPTILRGFPSFCASPDVNVEATATAPPATEAENSQSADDIKNAANLLDIRVGRIIKAWRHEEADSLYVEEVDVGEPEPRIICSGLVKYMPLDLLQDAKVVVLANLKPRNMRGVKSCGMLMAA

SEQ ID NO: 59266 - protein, 92 aa, Gossypium hirsutum
  unsure (1)..(92): unsure at all Xaa locations
  Clone ID: uC-gsflnu33B145f09b1.pep
CTLLTTASDRSSWVAVATPPTTEAENFQRADDIKNAANLLDIRDGRIIKAWRHEKADSLYLEEVDVGEPXPRIICXGLVKYMPLDLLQDAKV

SEQ ID NO: 59267 - protein, 92 aa, Gossypium hirsutum
  Clone ID: GOSHI-09MAY01-C61003_1.pep
MKYSHFCYFLFLSSELFQFSVLHAFNSVLLQRQFITVNVPAPHSIWSCCPENTLQVAQTCYFAWLVTHMLSCFAAQPPPSEANLGQPTWDSI

SEQ ID NO: 59268 - protein, 86 aa, Gossypium hirsutum
  unsure (1)..(86): unsure at all Xaa locations
  Clone ID: GOSHI-09MAY01-C61253_1.pep
AVVRLKNDQANYSLNTDDPLIFKSTLDTDYQMTKRDMGFTEEEFXKRLNINAAKSSFLPEDDKRELLDLLYKAYGMPPPASAGQHL

SEQ ID NO: 59269 - protein, 161 aa, Gossypium hirsutum
  Clone ID: GOSHI-09MAY01-C62453_1.pep
SPRWLAKMGMLVDFEASLQVGRGFDTDISVEVNEIKRAVASSSRRTTIRFADLKRKRYWYPLTIGIGLLVLQQLSGINGVLFYSSNIFASAGVASSDVATFGVGAIQVIATGVTTWLVDKTGRRLLLMVSSAGMTLSLLIVAVAFYVEGIVAKDSDLYGIM

SEQ ID NO: 59270 - protein, 107 aa, Gossypium hirsutum
  Clone ID: LIB3828-025-Q6-K6-F1.pep
NFLGVASSDVATFGVGAIQVIATGVTTWLVDKTGRRLLLMVSSAGMTLSLLIVAVAFYVEGIVAKDSDLYGIMGILSLVGLVAFVIAFSLGIGAIPWVIMSEILPVN

SEQ ID NO: 59271 - protein, 98 aa, Gossypium hirsutum
  Clone ID: GOSHI-09MAY01-C62733_1.pep
MGTTVRAALVLAYLAIASAASEGGFKATGQRQLRPEHFQEVGYAAPPSPPLSRSLLMDHPDSSQHGPPFEGQSQVQPPPSQEATPIQQEELMPAQLPA

SEQ ID NO: 59272 - protein, 94 aa, Gossypium hirsutum
  unsure (1)..(94): unsure at all Xaa locations
  Clone ID: GOSHI-09MAY01-C62163_2.pep
MTQVWRGEPSGNFSVRSAYKLLQEANSGPSNNFIQTEIKDFYRKIWNLHLPSKVKITIXRISWNYISILTNLKHKKVVVEIHCPRCRNSEEDNN

SEQ ID NO: 59273 - protein, 78 aa, Gossypium hirsutum
  Clone ID: GOSHI-09MAY01-C62163_1.pep
AIRLGISMGFSILEIVRDSRMVIKKCQTTDLDKSVIGALIRDIHSKKVHFYEIGFHFIPKAENEYAHILAQEALRKGG

SEQ ID NO: 59274 - protein, 119 aa, Gossypium hirsutum
  Clone ID: GOSHI-09MAY01-C62013_1.pep
HSCFSTMSWIFKRSTSKQCRMFCRRLWFILNTNRSHSQQGANTRAMIQIDAAFDKRNFKSASGLVVWGQMGALLATKTVLNTSVPSPFAAKAYAGLQAIKLELSLDLLSVTIIEDSQTL

SEQ ID NO: 59275 - protein, 214 aa, Gossypium hirsutum
  unsure (1)..(214): unsure at all Xaa locations
  Clone ID: GOSHI-09MAY01-C62353_1.pep
PSSKPSEGKRFILSSLTFIFFLCALASINEIRFESLFKLGRCALSNAPLPLNSSSEXPHLHPIPHSDDIRILIGILTLPDQYHRRHFLRLIYGTQTPVGAQVDVKFVFCNLTKEDQKVLVALEIMRYDDIIILNCKENMNKGKTYTFFSSLPEIFNSSDRHYPPYHYVMKGDDDTYLRLDKLVESLRPLPREDLYYGYVIPCPSMDPFVHYMSG

SEQ ID NO: 59276 - protein, 81 aa, Gossypium hirsutum
  Clone ID: GOSHI-09MAY01-C62303_1.pep
FFALFIPPFLCMSPAFHVGESRVLNKFLFKNWWEGLNGNFRMFWRESHRPSNLSVLCSIQPSNRLKNRGYLGAMIVCLLIE

SEQ ID NO: 59277 - protein, 226 aa, Gossypium hirsutum
  Clone ID: GOSHI-09MAY01-C63473_1.pep
VCVFSWRHVMGVLARQVGCSVAAFDRPGWGLTSRPSRKDWEGKELPNPYKLETQVDLLLSFCSEMGFSSVVLVGHDDGGLLALKAAQKVQTSMNSFNITIKAVVLLNVSLSGEVVPAFARILLRTSLGKKHLVRPLLRTEITQVVNRRAWYDATKLTTEVLSLYKAPLCAEGWDEALHEISRLSSETILSPQNATSLLKAIEEMPVLVIAGAEDAHISLKSCQALA

SEQ ID NO: 59278 - protein, 111 aa, Gossypium hirsutum
  Clone ID: GOSHI-09MAY01-C63193_1.pep
KISGICSLIAEDFPMVDQAPVRKGGSGKSAARLKCPKNTLISNVKFASFGNPTGKCGSYSMGECHDPNSTLAVEKVCLGKNECAIELTEENFDKGLCPGTTKRLAIEAVCS

SEQ ID NO: 59279 - protein, 128 aa, Gossypium hirsutum
  Clone ID: GOSHI-09MAY01-C63213_1.pep
MSGSETGMMASREPYSLGMQQKSPVASQPVIQNMRLAFRSDGTAVYKPITSASLTYQPASGDGGAEGSAGGPAVTQEQGQALNMSMSMGSEPLKRKRGRPRKYGPESTMPLSLIPATSSVRVTQSNSG

SEQ ID NO: 59280 - protein, 196 aa, Gossypium hirsutum
  Clone ID: GOSHI-09MAY01-C18993_1.pep
MGRHSCCYKQKLRKGLWSPEEDEKLLRHITKYGHGCWSSVPKQAGLQRCGKSCRLRWINYLRPDLKRGTFSQEEENLIIELHAGWGNRWSQIAAQLPGRTDNEIKNLWNSCLKKKLRQRGIDPVTHKPLSEVEHGEDKSQPRTNSKDMASSELNINTNNPKPGTSPVTPRGYQLEMEGSPTYKTVNSSDNNGNTTT

SEQ ID NO: 59281 - protein, 147 aa, Gossypium hirsutum
  Clone ID: GOSHI-09MAY01-C18853_1.pep
SGNSPFHKSCYKEQHHPKCDVCRKFIPTNPAGLIEYRAHPYWMQKYCPSHERDGTPRCCSCERMEPVDVKYISLDDGRRLCLECLDSAIMDTHECQPLYLEIQEFYEGLNMKVEQQVPLLLVERQALNEAMEGEKNGHHHLPETRGL

SEQ ID NO: 59282 - protein, 71 aa, Gossypium hirsutum
  unsure (1)..(71): unsure at all Xaa locations
  Clone ID: LIB3083-113-Q1-L1-B6.pep
KFIPTNPAGLIEYRAHPYCMQKCWPYNERYRTPXCRRSERMDPVDVKEISFDESPRLFLQCQDSAFIDTHQ

SEQ ID NO: 59283 - protein, 404 aa, Gossypium hirsutum
  Clone ID: GOSHI-09MAY01-C18823_1.pep
YITQGAPVPRPPSAPASKPSGNDTVPNTSAPSPSGSNPSIPDSKSSHEAAILVGSIGGGTFLLILIIIAYLLKTYKVSTVKPWATGLSGQLQKAFVTGVPKLKRSELEAACEDFSNVIGSTMIGTVYKGTLSNGVEIAVVSVPVESTKDWSKNLETQFRKKIDTLSKVNHKNFVNLLGYCEEDNPFTRMLVFEYAPNGTLFEHLHIKESEHLDWAMRLRIIMGMAYCLEHMHQLNPPVPHNNLSSSAVSLTEDYAAKISDPCFWNELTASDREGDGINLSDTTMASLESNVYTFGVLLFEIVTGRMPYLVDNGSSEDMASDYLRREQALVEMVDPTLNSFDKDQFDLIGEVIKSCIDPEPGHRPDMRGVSARLREITAITPDNAIPTLSPLWWAELEIMSTEAS

SEQ ID NO: 59284 - protein, 112 aa, Gossypium hirsutum
  Clone ID: LIB3493-014-P1-M1-A9.pep
TAHTSAKSPNSPCLNYSLPPSTRTCRAPTHPACCEPSTNSTYLMVAAVTRPPSDLASKPSGNDTLPNTSAPSPSGSNPSIPDSKSSHQAAILVGSIGGGTFLLILIIIAYFL

SEQ ID NO: 59285 - protein, 293 aa, Gossypium hirsutum
  unsure (1)..(293): unsure at all Xaa locations
  Clone ID: GOSHI-09MAY01-C18543_1.pep
PRVRENIPNLFKRMGGGIYTLPSHLSPGARDLIPRMLVVDPMKRMTIPEIRQHPWFQAHLPRYLAVPPPDTMQQARKIDEEILQEVVRMGFERNHLVESLRNRIQNEGTVAYYLLLDNRFRVSSGYLGAEFQETMAPALPRVLPTEPTSPAVGHRLLGFADYQAMGLRGLERKWALGLQSRAHPREIMTEVLKALQELNVCWKKIGHYNMKCRWLPSIPGLNEGMLNNNHYFGDESTIVENDGVTKLPNVVKFEVQLYKTREEKYLLDLXRVQGPQFLFLDLCAAFRAQLRVL

SEQ ID NO: 59286 - protein, 197 aa, Gossypium hirsutum
  unsure (1)..(197): unsure at all Xaa locations
  Clone ID: GOSHI-09MAY01-C18573_1.pep
CQTVTAPLDRIKLLMQTHGVRAGQESAKKXIGFIEAIALIGKEEGIKAFRCGNLPQVIRIIPYSAVQLFAYETYKKLFKGKDGELSVVGRLAAGACAGMTSTFITYPLDVLRLRLAVEPGYRKMSEVALNMLREEGFASFYYGLGPSLIGIAPYIAVNFCIFDLVKRALPEKYRQKTQASLLTAVVSALAATVTCYP

SEQ ID NO: 59287 - protein, 209 aa, Gossypium hirsutum
  Clone ID: GOSHI-09MAY01-C18513_1.pep
MSASKFIKCVTVGDGAVGKTCMLICYTSNKFPTDYIPTVFDNFSANVAVDGSIVNLGLWDTAGQEDYSRLRPLSYRGADIFVLAFSLISRASYENVLKKWMPELRRFAPNVPVVLVGTKLDLREDRAYLADQLGSNIITSAQGEELRKQIGAAAYIECSSKTQQNVKAVFDTAIKVVLQPPRRKDVTRKKRRRRSGCSIASIICGGFDA

SEQ ID NO: 59288 - protein, 61 aa, Gossypium hirsutum
  Clone ID: LIB3197-058-Q1-M1-D3.pep
MSASKFIKCVTVGDGAVGKTCMLICYTSNKFPTDYIPTVFDNFSANVAVDGSIGKLGLWDT

SEQ ID NO: 59289 - protein, 131 aa, Gossypium hirsutum
  Clone ID: GOSHI-09MAY01-C18793_1.pep
MGHHSCCNQQKVKRGLWSPEEDEKLIRFITTHGYGCWSEVPEKAGLQRCGKSCRLRWINYLRPDIRRGRFTPEEEKLIISLHGVVGNRWAHIASHLPGRTDNEIKNYWNSWIKKKIRKTLVPPTQGTAFHY

SEQ ID NO: 59290 - protein, 72 aa, Gossypium hirsutum
  Clone ID: LIB3083-005-Q1-L1-H7.pep
GLQRCGKSCRLRWINYMRPDIKRRRSTSEEEKLIISLHGVVGNRWAHIARHLPGKTDNEIKNYWNSCIKTKI

SEQ ID NO: 59291 - protein, 258 aa, Gossypium hirsutum
  unsure (1)..(258): unsure at all Xaa locations
  Clone ID: GOSHI-09MAY01-C18683_1.pep
MAAMLQPQIILLKEGTDTSQGKAQLVSNINSCTAVGEGGRTTLGPRGMDKLIHDDKGNVTISNDGATIMKLLDIFHPAAKILVDIAKSQDSEVGDGTTTVVLLAGEFLKEAKPFVEDGVHPQNLIRSYRTACYLAIEKIKELAVSIEGKSLEEKKSLLAKCAATTLSSKLIGGEKEFFASMVVDAVIAIGSEDRLNMIGIKKVPGGNMXRDSFLVNGVAFKKTFSYAGFEQQPKKFTNPRILLLNIELELKSEKENAE

SEQ ID NO: 59292 - protein, 192 aa, Gossypium hirsutum
  unsure (1)..(192): unsure at all Xaa locations
  Clone ID: GOSHI-09MAY01-C18653_1.pep
RPRVRWRRVLLKVSGEALAGDHSQNIDPKVTTAIARDVSSVTPLGXEVAIVAGGGNIFRGSSRAGCSGLDRSSADYIGMLATVMNAIFLQATMESIGIPTRVQTAFRMSEVAEPYIRRRAVRHLEKGRXVVIFAAGTGNPFFTTDTAAALRCAEIKPEVVLKATNVDGVYDDDPRHNPNAQLHDTLTYHEVT

SEQ ID NO: 59293 - protein, 179 aa, Gossypium hirsutum
  unsure (1)..(179): unsure at all Xaa locations
  Clone ID: LIB3582-053-P1-K1-B5.pep
PRVRPRVREACGQRPEKEKAVGGDIGGEIAAETRKKRKKKGRPSLLELQKRSLKQQRLGEAQQPQLLLQNTPNSSISSKRRSTRRHPNLNGGSPVSGSTFGGDDDDDDDRLQKKHKPLLGFKSSRTDQHYPIPSGLNSASYGSDWDADGDDPDPSLKRHKHTTXKPGSDQMGEKLSKVT

SEQ ID NO: 59294 - protein, 112 aa, Gossypium hirsutum
  Clone ID: LIB3197-053-Q1-M1-C12.pep
MGGGGGGGGGGEIAAETRKKRKKGRPSLLELQKRSLKQQQLQEPQQPQLLPQKTPNSSIFSNRRSTRRHPNLNGGSPVSGSISGGEDDDDDDRLQKKHKPLLGFNSSRTDQY

SEQ ID NO: 59295 - protein, 116 aa, Gossypium hirsutum
  Clone ID: GOSHI-09MAY01-C18053_1.pep
TLAQEIKKFQQQRTLAAACPQASKRRMLPGSLMHASDHSRRPRLTPGGRGCAVGGSLLRRPNRVQAVVDLLCFRLPWVERALAFKDTVKQGLTGPLSGTGRRTRWWRDGGLGRPSA

SEQ ID NO: 59296 - protein, 66 aa, Gossypium hirsutum
  Clone ID: LIB3148-032-Q1-K1-C12.pep
PYYNCSFSFFSFFALYFFVFFCCLHSFFSAGVRRGRRLWSEACMSEPGSMRRLEAWGQAAARVLCC

SEQ ID NO: 59297 - protein, 224 aa, Gossypium hirsutum
  Clone ID: GOSHI-09MAY01-C18393_1.pep
MEVPVSWDALRKQARKLEAQLDEQMNSYRKLVSSKASIKNDLEENGIESGIDRLLKQLQEVNMKMQDWVSSGGSEMVSHTLTRHQEILQDLTQEFYRLRSSLRAKQEHASLLEDFREFDRTRLDLEEGVGSTEQALLKEHAAISRNTGHMDNVISQAQATLGALVLQRSTFGGINSKLSNVSSRLPTVNQILSAIKRKKSMDTIILSLVASVCTFLIFIYWLSK

SEQ ID NO: 59298 - protein, 203 aa, Gossypium hirsutum
  Clone ID: GOSHI-09MAY01-C18303_1.pep
MGSLGNSANSKAVHEAGEDDYDHHKHLSPTHQQLDAGALFVLKSKGSWLHCGYHLTTSIVAPPLLSLPFAFTFLGWAAGIISLVVGALVTFYSYNLLSLVLEHHAQLGRRHLRFRDMANDILGPRWGRYYVGPIQFMVCYGAVIACTLLGGQCMKAIYLLSQPNGSMKLYEFVIIFGLLMLVLAQIPSFHSLRHINLISLVLC

SEQ ID NO: 59299 - protein, 145 aa, Gossypium hirsutum
  Clone ID: GOSHI-09MAY01-C18253_1.pep
MCGDNMILRTPPPKKQRAEPILHESPSPQVASEGRLVIYEDNPLAAPPPESPHQPSDHLLCTYQCRQMVKADFIDALSNAEKQIRDYQSKLEILNENLSKAEAERKKFRDQFLYAEQELAAAKGREQMLHDQLLKEVNDSQERFK

SEQ ID NO: 59300 - protein, 56 aa, Gossypium hirsutum
  Clone ID: GOSHI-09MAY01-C18243_1.pep
VLAQVSILPYLKLSKCWHAKFSISQCLKFMHPCIWFLYNSLDTNNSGMIIDVRLVL

SEQ ID NO: 59301 - protein, 304 aa, Gossypium hirsutum
  unsure (1)..(304): unsure at all Xaa locations
  Clone ID: GOSHI-09MAY01-C18263_1.pep
EESPYVVHLTHLTTPESIYHLRLGFASFASKPYTXTTWHMWLLWPVTLCSMMLTWIYCSTFVVESNRFHNIRLQTWAIPKYNIQYRSKSQKQSTNNLIEEAILEAEEKGVRVLSLGLMNQAEELNMYGGVCIQKHPQLKVKLVHGSSLAVAVVLNSIPKGTTQVVLRGKLTKVACALAFTLCQKRIQVSVLREDEYEKLDKLLGTKSEGKLVLSKSYTCKTWLVGDGLSEVEQRKASKGTLFIPFSQFPPKKLRTDCFYHTTPAMQTPLALENVDSCENWLPRRVMSVWRIAGLVHALERWEEH

SEQ ID NO: 59302 - protein, 56 aa, Gossypium hirsutum
  Clone ID: LIB3083-094-Q1-L1-A9.pep
KTILEAEEKGVRVLSLGLMNQAEELNMYGGVFIQKHPQLKVKLVDGSSLAVAVVLN

SEQ ID NO: 59303 - protein, 277 aa, Gossypium hirsutum
  unsure (1)..(277): unsure at all Xaa locations
  Clone ID: GOSHI-09MAY01-C18213_1.pep
LGFWLNIQHDAFYAAHNLSMRSFVLSVSRNAKVTVDYISSPEVAFLRNIAPIFRRSSTKVVFRFLGPKDVEPSTNQTYDSLLTNLTFIKTFASGIIVPKSYIWPVDGALYLQPSTSIVLDAHKEGLEVFASDFYNDVPFSFNYSYDPVAEYLQFVDNGKFSVDGVLTDFPITPAAAIDCFAHIGKNASKQADLLVISNNGASGDYPGCTDMAYTKAIQDGXDVLDCSCXMTKDGIPICLGSINLIQSTDIVPTXFSHLTKTVPKLSKQWNIYHNLLE

SEQ ID NO: 59304 - protein, 60 aa, Gossypium hirsutum
  Clone ID: LIB3197-054-Q1-M1-C10.pep
PSGVQPFTNFMPDGLLTYLTFIKTFASGIIVPKSYIWPVYGALYLQPSTSIVLDAHKERL

SEQ ID NO: 59305 - protein, 225 aa, Gossypium hirsutum
  Clone ID: GOSHI-09MAY01-C19983_1.pep
PDLSEYNMEVPLSYITGSIGVPLEVDEVTSLLKRMQLHAEKAESDEAKISVSVPPTRSDILHPCDVMEDVAIAYGYNNIPKRTLSSLKPLPLNQLSDLIRYEIAMNGFTEVLTWILCSKKENFEMLNRKDDKSTAVIIGNPRSSDFEVVRTSLMPGMLKTVGHNKDHPKPIKIYEVGDVVLLDEKKDVGASNRRLLGALYCGANSGFALIHSLVDRIMEVMGNPF

SEQ ID NO: 59306 - protein, 319 aa, Gossypium hirsutum
  unsure (1)..(319): unsure at all Xaa locations
  Clone ID: GOSHI-09MAY01-C19943_1.pep
RQHKKWLHPKAGKTFPSITECDGLKYESIAADLDGTLLISRSSFPYFMLIAVEAGSLLRGLILLLSLPLVIISYLFISEAIGIQILIFISFAGLKIRDIELVSRAVLPRFYAANVRKESFEVFDRCKRKVVVTANPTFMVEPFVKDFLGGDNVLGTEVEVNPKTQKATGFVKNPGVLVGKFKRLAILKEFGDESPDLGIGDRESDHDFMSICKEGYMVHPSKSASPVPLDRLKSRIIFHDGRFVQRPDPLNAWLTYLWLPFGFILSIIRVYFNLPLPERIVRYTYEMLGIHLVIRGKRPPPPSPGXPGNLYVCNHRTAL

SEQ ID NO: 59307 - protein, 147 aa, Gossypium hirsutum
  Clone ID: GOSHI-09MAY01-C19833_1.pep
MGNIGSSGVSGRRRHGSRRNHPPPPHPPPPAQPQPEISANRYVFAAATPYPPQYPNTNPPQYYQYPRYYPHQPPVPLPLAAPYDHHHHHRGGPHIEPANCSTYACGPMMPPPATYIEHQKAVTIKNDVNSKKETLKFEADDLNPGKF

SEQ ID NO: 59308 - protein, 174 aa, Gossypium hirsutum
  Clone ID: GOSHI-09MAY01-C19583_2.pep
MTTIRRFCCNDLLRFASVNLDHLTETFNMSFYMTYLARWPDYFHVAEGPGNRIMGYIMGKVEGQGESWHGHVTAVTVAPEYRRQQLAKKLMNLLEDISDKIDKAYFVDLFVRASNTPAIKMYEKLGYVIYRRVLRYYSGEEDGLDMRKALSRDVEKKSIIPLKRPVTPDELEYD

SEQ ID NO: 59309 - protein, 176 aa, Gossypium hirsutum
  Clone ID: GOSHI-09MAY01-C19583_1.pep
MTTIRRFCCNDLLRFASVNLDHLTETFNMSFYMTYLARWPDYFQVAEGPGNRVMGYIMGKVEGQGESWHGHVTAVTIAPEYRRQQLAKKLMNLLEEISDKIDKAYFVDLFVRASNTPAIKMYEKLGYVIYRRVLRYYSGEEDGLDMRKALSRDVQKKSMIPPKRPVRPDELEYDSI

SEQ ID NO: 59310 - protein, 125 aa, Gossypium hirsutum
  unsure (1)..(125): unsure at all Xaa locations
  Clone ID: GOSHI-09MAY01-C19483_1.pep
TKKGVGFPKNFQKAQQQPKKKRQPKKNRRVGEVGTPRLLDNSGFSTEXFGHRLTKVFFSKGQNLKVXKGDLLPGTRKLKEGLKNSXGWEFQQKSPVEEIHLEENDEYAPVVKMWDDPTGSEPTSF

SEQ ID NO: 59311 - protein, 278 aa, Gossypium hirsutum
  Clone ID: GOSHI-09MAY01-C19453_1.pep
LPFPIFRSQKCEVAAASTATFLSFQSQGNALPQTRPSAVRFSPRYSLVSFSGLKEVTSVNCETESSFISKESSTTLRGSFALKARKANRASRYGLQLVASYKVAILGAAGGIGQPLALLIKMSPLVSALNLYDIANVKGVAADLSHCNTPSQVLDFTGASELGDCLKGANVVVIPAGVPRKPGMTRDDLFNINANIVMSLVEAVADNCPDAFIHIISNPVNSTVPIAAEVLKQKGVYNPKKLFGVTTFDGVRANTFLAQKKNPQLIDVDCSVIWGHAG

SEQ ID NO: 59312 - protein, 180 aa, Gossypium hirsutum
  Clone ID: GOSHI-09MAY01-C19433_1.pep
MGWIGDTVDSIKSIQIRQLLTQVVSLGMIVTSALIIWKGLMCVTGSESPVVVVLSGSMEPGFKRGDILFLHMSKDPIRAGEIVVFNIDGREIPIVHRVIKVHERQDTGEVDVLTKGDNNYGDDRLLYAQGQQYLQRHHIMGRAVGFLPYVGWVTIIMTEKPIIKYILIGALGLLVITSKD

SEQ ID NO: 59313 - protein, 103 aa, Gossypium hirsutum
  Clone ID: LIB3135-060-Q1-K1-B4.pep
MGWIGDTVDSIKSIQMRQLLTQVVSLGMIVTSALIIWKGLMCVTGSESPVVVVLSGSMEPGFKRGDILFLHMSKDPIRAGEIVVFNIDGREIPCQTCDLQQSR

SEQ ID NO: 59314 - protein, 122 aa, Gossypium hirsutum
  unsure (1)..(122): unsure at all Xaa locations
  Clone ID: GOSHI-09MAY01-C19703_1.pep
MATTSAATFSIGSTVSFGRRGSPPPLTKPSAARCTSQNSLASFSGLKAATSLNCDSESSFLGKESSAALKGSFARKAXMPNQSSHHGLQLQASYKVAILGAAGGIGQPLALLIKMSPLISAL

SEQ ID NO: 59315 - protein, 95 aa, Gossypium hirsutum
  Clone ID: LIB3196-047-P1-M1-E2.pep
MATTSAATFSIGSTVSFGRRGSPLLLTKPSAAGCSSQNSLASFSGLKAATYVNCDSESSFLGKESSATLRVSFTRKAQKPNQSSNHGLQLQASYK

SEQ ID NO: 59316 - protein, 244 aa, Gossypium hirsutum
  Clone ID: GOSHI-09MAY01-C19653_1.pep
MEFHEYQIRFSRPPPSFFGDFLEKLKDFCNFAFSAIIGNIFSAILTFFFALVGTLLGAMTGALIGQETESGFVRGAAVGAISGAVFSIEVFESSLVLWQSDESGIGCLLYLIDVIASLLSGRLVRERIGPAMLSAVQSQMGASETPFEEVQNIFDTGGLKGLAGDLVEKIPKIIITNNNNADASGEKVSCSVCLQDFQLGETVRSLPQCHHMFPLPCIDKWLVSHGSCPLCKRDLYSCFLFFLL

SEQ ID NO: 59317 - protein, 174 aa, Gossypium hirsutum
  unsure (1)..(174): unsure at all Xaa locations
  Clone ID: GOSHI-09MAY01-C19643_1.pep
ALGRVFRATLDLLVAYKXQVAEAAKEEEAEDDDGMDGFESDDDDDDDADGSDKEMGVDAEEGDEADSIRLQKLAAQAKAFHENDDDDDDDYSDDDFSDDEELQSPIDEVDPFVFFVDTVKVLQVSDPMRFQNLTQTLDFHYQALANGVAQHAEQRRAEIGKEKMEKASAATVAS

SEQ ID NO: 59318 - protein, 199 aa, Gossypium hirsutum
  unsure (1)..(199): unsure at all Xaa locations
  Clone ID: GOSHI-09MAY01-C19673_1.pep
MKDIQVPEYKEIIQKKLSSITSELEDLRVAAQSKDESLQAERTXVEELTRMEETLKKTLQEKESLLYLLEGAGDVDHGASANSEIVQVEPVINQWAVPGNSTASQVRSLRKVNNDQVAIHIDSDDVSNSRLEDEDEDKVHGFKSLTTSRIVPRFTRPVSDMIDGLWVSCDRALMRQPALRLAIMIYWAILHSLLAAFVF

SEQ ID NO: 59319 - protein, 78 aa, Gossypium hirsutum
  Clone ID: LIB3083-021-Q1-L1-G10.pep
INKRAIAGTSTASQVRSLRKVNTDQVAIPIDADDGNNSRLEDEDEDKVHGFKSLTTSRVVPRFTRPITDMIDGLWVSC

SEQ ID NO: 59320 - protein, 49 aa, Gossypium hirsutum
  Clone ID: LIB3147-045-Q1-K1-B5.pep
SVLTLRKLRTWDAVEVPAIARLFIYTNTQQNKLLNIYTHISCAVDYAKA

SEQ ID NO: 59321 - protein, 137 aa, Gossypium hirsutum
  Clone ID: GOSHI-09MAY01-C19613_1.pep
MKLTSGSIVIINLLALQYLPVLCLSQDFDFFYFVLQWPGSYCDTKQRCCYPKTGKPSADFGIHGLWPNYNDGGYPSNCDPNSRFDKSEISSLIGSLEKEWPTLSCPSNDGVKFWTHEWLKHGTCSESELGQREYFEA

SEQ ID NO: 59322 - protein, 125 aa, Gossypium hirsutum
  Clone ID: GOSHI-09MAY01-C19603_3.pep
MWAASCLASCCAACACDACRTVVSGISRRSARIAYCGLFALSLFVSWILREVAAPLMEQLPWINQFHKTPNREWFETDAVLRVSLGNFLFFTILSFLMIGVKNQRDPPDGLHPGGWMMKIAGWCT

SEQ ID NO: 59323 - protein, 410 aa, Gossypium hirsutum
  Clone ID: GOSHI-09MAY01-C19603_2.pep
MWAASCLASCCAACACDACRTVVSGISRRSARMAYCGLFALSLFVSWILREVAAPLMEQLPWINHFHKTPNREWFETDAVLRVSLGNFLFFTILSFLMIGVKNQRDPRDGLHHGRWMMKIVCWFILVILMFFVPNEIISFYETISKFGSGLFLLIQVVLLLDFVHGWNDKWVGYDEQFWYVALFIVSLVCYLATFGFSGLLFHWFTPSGQDCGLNTFLIVMTLILVILFAIVALHPAVGSSILPASVISLYCMYLCYSGLASEPRDYECNGLHKHSKAISTGTVTVGLLTTILSVVYSAVRAGSSTTLLSPPSSPRAGGGKPLLPLDKADEEKKNKAVTYSYAFFHIIFSLASMYSAMLLTGWSTSVGESGKLVDVGWPSVWIRILTAWVIAALYMWSLLAPILFPDRDF

SEQ ID NO: 59324 - protein, 79 aa, Gossypium hirsutum
  Clone ID: GOSHI-09MAY01-C19603_1.pep
KIELVFECYNNSEAKKVKLAAIEFSNYTMIWWDQLTTSRRRNREQPISTWAKMKSLMCQRFIPSYYHRKLYRKLQSLTQ

SEQ ID NO: 59325 - protein, 146 aa, Gossypium hirsutum
  Clone ID: uC-gsflnu33B088c10b1.pep
AASCLASCCAACACDACRTVVSGISRRSARMAYCGLFALSMFVSCILLEVDFLIIYYSTLYQLFSLFTQNSISFLTYFFIYCNYIQFFYYFYHFYYNIIILFFIYLYFYIIFILFLFNYSIFFIFFFIFQYNNKFFFSFFILLLYI

SEQ ID NO: 59326 - protein, 177 aa, Gossypium hirsutum
  Clone ID: LIB3825-003-Q1-K6-A3.pep
NLNLTFAETISKFGSGLFLLIQVVLLLDFVHGWNDKWVGYDEQFWYVALFIVSLVCYLATFGFSGLLFHWFTPSGQDCGLNTFLIVMTLILVILFAIVALHPAVGSSILPASVISLYCMYLCYSGLASEPRDYECNGLHKHSKAISTGTVTVGLLTTILSVVYSAVRAGSSTTLLSP

SEQ ID NO: 59327 - protein, 56 aa, Gossypium hirsutum
  unsure (1)..(56): unsure at all Xaa locations
  Clone ID: LIB3189-039-P1-K1-D7.pep
VGGFSNSLGNCSSLYVVSPCSYSLPRQXXLXTXKPKLSDIFAIKLLCICMFVCVWV

SEQ ID NO: 59328 - protein, 184 aa, Gossypium hirsutum
  unsure (1)..(184): unsure at all Xaa locations
  Clone ID: GOSHI-09MAY01-C19633_1.pep
VDKTTFHGKEGRGYQGRSWIAPPKDAKATNDHCYIPKRLVHTWSGHTKGVSASRFFPEYGHLILSAGMDTKVKIWDVFNSGKCMRTYMGHSKAVRDISFCNDGTKFLTAGYDKNIKYWDTENXQVISTFSTGKVPYVVKLNPDEDKQNILLAGMSDKKIVQWDINTGHITQEYDQHLWAVNTIT

SEQ ID NO: 59329 - protein, 80 aa, Gossypium hirsutum
  Clone ID: LIB3083-011-Q1-L1-A12.pep
LSYHDSGVPDNGANIIGRVLLKNINVRWRMHAGLDWHKTRKSNMCSNNILGRDRTVCLELAVSGLEFQYDIFTPAGFFVT

SEQ ID NO: 59330 - protein, 107 aa, Gossypium hirsutum
  Clone ID: LIB3083-068-Q1-L1-B12.pep
NNILGKDRTVCLELAVSGLEFQYDIFTPGGVSVSKLSLSVHEFHLYDKSTDAPWKLVLRYYDSKDHPRESSSKAFKLDLEAVRPDPSTPLEEYRLRIALLPIRLQLH

SEQ ID NO: 59331 - protein, 203 aa, Gossypium hirsutum
  Clone ID: GOSHI-09MAY01-C19053_1.pep
MTVTDARHKEEEEEESKNGDEDNKPEVTEDEGNGEVGGMHEHDNEIPEEGTEREEHRNDDNEETMENENKGNEETREGDNEEKENIKDSREKENKGIGEESNETEKSEGEIENAGSSDDRVRDGIDGNNEEAREEHYKGDDASSEVVHDTQNETSGSENSNDAEQLENKDKNDREDETNSSEAANVGHEESNVQENGTAGNNQ

SEQ ID NO: 59332 - protein, 66 aa, Gossypium hirsutum
  Clone ID: GOSHI-09MAY01-C19063_1.pep
MVAKPSPGTAFDMNSNPYYRTQAKTERRLPIDAKLLQAQSQFGAVGAAAVAVAAHRNAGAVHYGLS

SEQ ID NO: 59333 - protein, 146 aa, Gossypium hirsutum
  Clone ID: GOSHI-09MAY01-C19013_1.pep
MASKSEGKEPVNEQVVANMYGAMRSELNQIYSKITELEMEVSEHSLVINAIQPLDQSRRCYRMIGGVLVERTIKEVLPAVQRNKEGLEEVIARLNETLEKKKKEIADFETKYKIRIKKSDDDSKDESNKKEGSAQGVLVGPASSSQ

SEQ ID NO: 59334 - protein, 186 aa, Gossypium hirsutum
  Clone ID: GOSHI-09MAY01-C19373_1.pep
FSRPPTRPPTRGAHLKAMEVAKESGALLSYDPNLRLPLWPSADEARKQILSIWDKADIIKVSDVELEFLTGSNKIDDETAMKLWRPNLTLLLITLGEKGSMYYTKYFHGSVDAFHVNTVDTTGAGDSFVGALLCKIVEDPTILENESKLREVLKFANACGAITTTKKGAIPALPTEAEVLALINGA

SEQ ID NO: 59335 - protein, 42 aa, Gossypium hirsutum
  Clone ID: LIB3145-006-Q1-K1-D1.pep
NESKLREVLKFANACGAITTTKKGAIPALPTEAEVLALINGA

SEQ ID NO: 59336 - protein, 130 aa, Gossypium hirsutum
  Clone ID: GOSHI-09MAY01-C19313_1.pep
MAIRRAMSGRIMDRTAVVGARYMSSWWRSVQPAPKDPILGVTEAFLADQSPDKVNVGVGAYRDDNGKPVVLECVREAERRIAGNLNMEYLPMGGSVKMVEETLKLAYGENSELIKEKRIAAGQALSGTGA

SEQ ID NO: 59337 - protein, 418 aa, Gossypium hirsutum
  Clone ID: GOSHI-09MAY01-C14853_1.pep
GFSMDGGLEVKKIERVTNHDVKAVEYFLKQKCQSQPEIAKVLEFFHFACTSEDINNLAHALMLKEAMTKVMFPTMDKLVEAICKLAKANASVSMLSRTHGQPASPTTLGKEMAIFSVRLSRERQEISQVEMMGKFAGAVGNYNAHIVAYPTVNWPQIAEQFVTSLGLKFNPYVTQIETHDYMAKLYYAIIRFNNILIDFDRDIWGYISVGYFKQITKAGEIGSSTMPHKVNPIDFENSEGNLGKANEDLTYLSMKLPISRWQRDLTDSTVLRNMGGGLGHSLLAYKSALQGIGKLQVNEARLSEDLNQAWEVLAEPIQTVMRRYGVPEPYEKLKELTRGRAVTKESIREFIEGLELPEEAKTHLLKLTPHSYVGAAVELAKTVDSAVNVINGSEVLENMSLKELAKKPSHIVAPYETG

SEQ ID NO: 59338 - protein, 123 aa, Gossypium hirsutum
  Clone ID: GOSHI-09MAY01-C14863_1.pep
MATIPMTNSQSTAGSGPQSQPPITNPAFRTFLSRLTSSIRQGFSQRRPWYELIDRTAMARPDNLTDAYSRIRKNFSYFKVNYITLLALVLAFSLLSHPFSLLGLLGLLAAWLFLYLFRPSDQP

SEQ ID NO: 59339 - protein, 185 aa, Gossypium hirsutum
  Clone ID: GOSHI-09MAY01-C14813_1.pep
PRSLLKRYDSWDGGQQSSEKVKESVSKKHDAAMRRERALAYAYGYQQLQPQQQLMQPHPNGKDVGVHLNDREKAQWGWNWLEHWMSSQPYDARQLGHQEGSYMTLPTTTATTTVTDNMSEKTVEMDVVTAMDSSSYSTLQQAQSGSRNVPSYMAPTQSAKAKVRSPGPMIMHQQRVPHAPQWNPS

SEQ ID NO: 59340 - protein, 373 aa, Gossypium hirsutum
  unsure (1)..(373): unsure at all Xaa locations
  Clone ID: GOSHI-09MAY01-C14583_1.pep
PMFVQLLSSASDDVREQAVWALGNVAGDSPSCKDLVLGNGALMPLLAQLNERSKLSMLRNATWTLSNFCRGKPPTPFEQVKPALPVLRELIYLNDEEVLTDACWALSYLSDGPNDKIQXVIEAGVCPRLVELLGHPSPTRPPPPPPTRPNIVTGDDNQTQFVIDNKVLPHLYQLLVQNHKKSIKKEACWTISNITAGNKAQIQAVIEANIILPLVHLLQLAEFDIKKEAAWAISNATSGGSHEQIQFLVSQGCIKPLCDLLICPDPRIVTVCLEGLENILKVGEADKEMGMNGGINLYAQMIDECDGLDKIENLQTHDNHEIYEKAVKILERYWAEEEEDEQNIQDGGNENQQGFNFGVNXQPSVPPGGFKFG

SEQ ID NO: 59341 - protein, 200 aa, Gossypium hirsutum
  unsure (1)..(200): unsure at all Xaa locations
  Clone ID: AI730479.1.pep
HTRVVIEHGAVPMFVQLLSSAIDDVREQAVWALGNVAGDSPSCRDLVLGNGALMPLLAQLNERSKLSMLRNATWTLSNFCRGKPPTPFEQVKPALPVLRELIYLNDEEVLTDACWALSYLSDGPNDKIXAVIEAGVCPRLVELLGHPSPTVLIPALRTVGNIVTGDDNQTQFVIDNKVLPHLYQLLVQNHKKSIKKEACW

SEQ ID NO: 59342 - protein, 55 aa, Gossypium hirsutum
  Clone ID: GOSHI-09MAY01-C14453_2.pep
SPYNGSNKQHLLHVASLLLVCGLFFFLLLLLFSLIFFLVYSHEHFTCTLSSFSHS

SEQ ID NO: 59343 - protein, 49 aa, Gossypium hirsutum
  Clone ID: LIB3148-029-Q1-K1-E1.pep
ALHGLLYKYLSLSLIKLNHCDFAFWPYLNLLMTPYIFKSISLVILIGWL

SEQ ID NO: 59344 - protein, 124 aa, Gossypium hirsutum
  Clone ID: GOSHI-09MAY01-C14433_1.pep
PTRPKKSESFFALSPFPLLLTSPMAGHGLIGGRPRPHPELLSVSGETNPLILLRTGPKTKPSQSTATEEKRGGLLVRRSLPRPLAEPPRGSTTFESERDTRVPPNGGSEVRCITPLMIISYILS

SEQ ID NO: 59345 - protein, 144 aa, Gossypium hirsutum
  Clone ID: LIB3189-036-P1-K1-B5.pep
GRVGGRVGFRKKSESFFALSPFPLLLTSPMAGHGLIGGRPRPHPELLSVSGETNPLILLRTGPKTKPSQSTATEEKRGGLLVRRSLPRPLAEPPRGSTTFESERDTRVPPNGGSEVYGGSTGVKTGHFGARKQPSGVLRAQGAH

SEQ ID NO: 59346 - protein, 199 aa, Gossypium hirsutum
  Clone ID: GOSHI-09MAY01-C14763_1.pep
MATPPLSSPTYLTTNLGVGYAIVVALGFLLLLSTLLLASYICFRSSSPLPPRAISPNPISTPTAANSDGIVLPRIVFIGEEDHENDEENVVVFGLDRAVINSYPKFRFSKKEVSTAVEVTGSSAGNTICSICLCEYRESEMLRMMPECRHCFHVTCIDAWLKLNGSCPVCRNSPLPTPISTPLSEVVPLSQYDADRRWW

SEQ ID NO: 59347 - protein, 166 aa, Gossypium hirsutum
  unsure (1)..(166): unsure at all Xaa locations
  Clone ID: GOSHI-09MAY01-C14703_1.pep
SVLDQLPNEMHGGRIRDEKTTGHYDKDVGSNVINGNGTEAGQIITTVVGGRGGHPKQTISYMAERVVGTGSFGVVFQAKCMERGEPVAIKKVLQDKRYKNRELQIMHLLDHPNTVQLKHYFFSTTEKNELYLNLVLEFVPETVFRVSXHYCRMNRHMPFFYVQLYT

SEQ ID NO: 59348 - protein, 162 aa, Gossypium hirsutum
  unsure (1)..(162): unsure at all Xaa locations
  Clone ID: GOSHI-09MAY01-C14733_2.pep
MGTLGKAIYTVGFWIRETGQALDRLGCRLQGNYYFQEQLSRHRTLMNVFDKAPIVDRDAFVAPSASVIGDVQVGRSSSIWYGCVLRGDVNSISIGSGTNIQDNSLVHVAKSNLSGKVLPTIIGSNVTVGHSAXLHGCTVEDEASVGIGATLLDGSYVEKHAI

SEQ ID NO: 59349 - protein, 271 aa, Gossypium hirsutum
  Clone ID: GOSHI-09MAY01-C14733_1.pep
MGTLGKAIYTVGFWIRETGQTLDRLGCRLQGNYYFQEQLSRHRTLMNVFDKAPVVDRDAFVAPSASVIGDVQVGRGSSIWYGCVLRGDVNSISIGSGTNIQDNSLVHVAKSNLSGKVLPTIIGSNVTVGHSAVLHGCTVEDEAFVGMGATLLDGVYVEKHAMVAAGALVRQNTRIPCGEVWGGNPAKFLRKLTEEEMAFISQSAINYSNLAQVHAAENGKSFDEIEFEKMLRKKFARRDEEYDSMLGVVRETPPELILPDNVLPNKVPKTA

SEQ ID NO: 59350 - protein, 95 aa, Gossypium hirsutum
  unsure (1)..(95): unsure at all Xaa locations
  Clone ID: LIB3145-018-Q1-K1-C1.pep
RLLVVAKLAKTNWMCNSSKVVLCGSNRAYEFASLYIYIYICFTGNKILKRKTXXKKKNIKNNKKKKKKKKIKKYKFYLNKKFKNFLKKIKKKKRG

SEQ ID NO: 59351 - protein, 63 aa, Gossypium hirsutum
  Clone ID: GOSHI-09MAY01-C14693_2.pep
MAPSMSTLMVVLVAGCALMGSAIAADAPAPSPTSGASSISPPFVSVSVAAAAMALLFGSRLRI

SEQ ID NO: 59352 - protein, 63 aa, Gossypium hirsutum
  Clone ID: GOSHI-09MAY01-C14693_1.pep
MAASMSTLMVVLVAVCALMGSAIAADAPAPSPTSGAGSISPSFVSVSVAAAAVALLFGSRLRI

SEQ ID NO: 59353 - protein, 243 aa, Gossypium hirsutum
  unsure (1)..(243): unsure at all Xaa locations
  Clone ID: GOSHI-09MAY01-C14683_1.pep
MATVLSLHNRGILTAVNSGASSLSFVGSGFIVLCYSLFKELRKFSFKLVFYLSLSDMLCSFFNMVGDPSKGFFCYAQGYTTHFFCVASFLWTTTIAFTLHRTVVRHKTDVEDLEAIFHLYVWGTSLVMTVIRSIGNDHTHLGAWCWAQTGRTGKAVHFITFYVPLWGAILYNGFTYFQVIRMLYNATRIAVGMSDRAYQFDSRTDTKALNXWGYYPLILIGSWAFGTINRIHDFIEPGHKIFW

SEQ ID NO: 59354 - protein, 136 aa, Gossypium hirsutum
  Clone ID: GOSHI-09MAY01-C14633_1.pep
MECQISLFQLLISFLLFLFMVITSVRRSKAKNLTQKLIPGPWKLPLIGNLHQLAASGLPHRTLRDLATKHGGFMHLQLGQVSTVVVSSPEMAEEIMKTHDIVFANRPFPGVAKMTTYECTDIVFAPYGTYWRNLRK

SEQ ID NO: 59355 - protein, 109 aa, Gossypium hirsutum
  Clone ID: GOSHI-09MAY01-C14133_1.pep
MNRGVLQSSPVQQLMAGNPNWWNINTMRPPTHHHQQAAAVAAAPSPFLHPPPTTFFSHTPTSSSSSSSSSSLPVPSWHDNNQELPESWNQLLLGGLAGEEEKGGDIGQL

SEQ ID NO: 59356 - protein, 351 aa, Gossypium hirsutum
  Clone ID: GOSHI-09MAY01-C14123_1.pep
MSTAQSCPLPTVSLSKYLEEEGQNKNAESQLLKSSLPAENDCHTQAEDSVSDVPKYLLELGLTPECKQLISSLPAEKGWVANLLHQYQGFWHTTRQLQAVLTCQNHFQAQETDILLVTTPKSGTTWLKAIVFALMNRVKYPNTDNNHPLLSENPHILVPFLEYGLYIDSQVPNFTTFTSPRLFGTHLPLVSLPESAKNSSCKLVYLCRNPKDTFVSLWHFTNKLRTKDMGSNSLEETFDKFTTGVSLYGPFWDHVLWYWKQSLENPERVLFLKYEEMKEQPTLQLMKLAQFLGCPFSNEEETRCAVDGIQKLCSFENLTNLDVNNTRKLASGEDYKAFFTQREIGDPNNHS

SEQ ID NO: 59357 - protein, 100 aa, Gossypium hirsutum
  Clone ID: GOSHI-09MAY01-C14083_1.pep
MDLTPQQLIQFNGSDPSKPIYVAINGRIYDVTAGKSFYGPGGAYAMFAGKDASRALAKMSKNEEDVCPNLDGLSEKEMDVLNDWVKKFEAKYPVVGRVVS

SEQ ID NO: 59358 - protein, 100 aa, Gossypium hirsutum
  Clone ID: LIB3189-024-P1-K1-H6.pep
MDLTPQQLIRWNGSDPSKPIYVAINGRIYDVTAGKSFYGPGGAYSMFAGKDASRALAKMSKNEEDVCPNIDGLSEKEMDVLNDWVKKFEAKYPVVGPRVS

SEQ ID NO: 59359 - protein, 103 aa, Gossypium hirsutum
  unsure (1)..(103): unsure at all Xaa locations
  Clone ID: GOSHI-09MAY01-C14053_1.pep
QLEITIKATYKXNTVRFKFEPSAGCFQVYEEVAKRFKVQNGTFQLNYLDDEGEWVMLVSDSDLHECLEIMEYVGTRSVKFQVRDVPCTMGSSSSSNCFLSRNS

SEQ ID NO: 59360 - protein, 71 aa, Gossypium hirsutum
  Clone ID: LIB3189-024-P1-K1-D12.pep
MKTCVDSSSKITIKGTYKENTVRFKFEPSAGCFQVYEEVAKRFKGQNGTFQLNYLDDVGEWALLVFVLFLF

SEQ ID NO: 59361 - protein, 58 aa, Gossypium hirsutum
  Clone ID: LIB3189-030-P1-K1-A11.pep
KITIKATYKENTVRFKFEPSAGCCQVYEEGASRSNVQIGTCQLNCLEGSREMGDSNWD

SEQ ID NO: 59362 - protein, 165 aa, Gossypium hirsutum
  Clone ID: GOSHI-09MAY01-C14393_1.pep
MDENMKQLQQSLIELETEAEHLLLARHQLVENDKVRNGNREALTALRKRARTTKTSVPSPFESMMKNIGNPVSRPLVKEVCATCGNHDSNEQTWMMFPGTDVFAKIPFHAAHSILETDQARLDHEAQKLQSYVKEKSFFISEKGVLADKISPGVLRSLVALKDKP

SEQ ID NO: 59363 - protein, 339 aa, Gossypium hirsutum
  unsure (1)..(339): unsure at all Xaa locations
  Clone ID: GOSHI-09MAY01-C14353_2.pep
MSFRDDSEDGRDVRKPFLHTGSWYRMGSRTGSSMLGSSQVIRDSSISVVACVLIVALGPIQFGFTNGYSSPTQSAIIKELGLTVSEYSVFGSLSNVGAMIGAVVSGQMAEYIGRKGSLMIAAIPNIIGWLAISFANDVSSRFVPALLEGFGVGIISYTVPVYIAEIAPENLRGSLGSVNQLSVTTGTMVAYLLGLFVGWRILAILGGVACTILIPGLFFIPESPRWLAKMGMTEDFEASLQVLRGFDTDISIEVNEIKRSVASTNRRTTIRFAELKXRRYWFPLMVGIGLLMLQQLSGINGVIFYSATIFETAGIKSGNIATFGVGFIQVIATALTTWL

SEQ ID NO: 59364 - protein, 294 aa, Gossypium hirsutum
  unsure (1)..(294): unsure at all Xaa locations
  Clone ID: GOSHI-09MAY01-C14353_1.pep
MSFRDDAEDGRGDLRKPFLHTGSWYRMGSRMGSSMLGSSQALRDKSISVVACVLIVALGPIQFGFTSGYSSPTQSAIIEDLGLTVSEFSLFGSLSNVGAMVGAIASGQIAECIGPKGSLMTAAIXPNIIGWLAISFARDSSFLYMGRLLQGSRVGIISYTVPVYIAEIAPQNLRGSLGSANQLSVTLGIMLAYLLRLFVECRILAVLGILPCTILIPALFFIPESPRWLAKLGMTEDFETSLQVLRCSDADISIEVNEINRSVSSTTSKNYDSXLHISRKRYWSPLMVGIRSLM

SEQ ID NO: 59365 - protein, 161 aa, Gossypium hirsutum
  Clone ID: LIB3583-046-P1-K1-C2.pep
MSFRDDAEEGRGDLRKPFLHTGSWYRMGSRMGSSMLGSSQALRDNSISVVACVLIVALGPIQFGFTSGYSSPTQSAIIEDLGLTVSEDSSFLYMGRLLEGFGVGIISYTVPVYIAEIAPQNLRGSLGSVNQLSVTLGIMLAYLLGLFVEWEILAVLGILPC

SEQ ID NO: 59366 - protein, 99 aa, Gossypium hirsutum
  Clone ID: LIB3189-034-P1-K1-G8.pep
SGYSSPTQSAIIEDLGLTVSESLMIAAIPNIIGWLAISFARDSSFLYMGRLLEGFGVGIISYTVPVYIAEIAPQNLRGSLRSVNQLSVTLGIMLAYLLG

SEQ ID NO: 59367 - protein, 216 aa, Gossypium hirsutum
  Clone ID: GOSHI-09MAY01-C14343_1.pep
SSLMVKRKQQPPPEMEGTGGAEAAVEAETGIQPQRRCTKSLKTRAQMDKHNESCKRYRLKIKMRREEKEQEIPKLKDEHQKTKMELEEYKSKIGVMGNEIHLLMRKLEAQGQRLTSLEKVVEWFALQTNVQGGQVLATTGAVLRSVNELVSSGETGATYFQPSMAGFLHHTCFGLQHYGSAAVAVFANHNLRLGFDSFINLVDCIDFVIFYYFFLF

SEQ ID NO: 59368 - protein, 73 aa, Gossypium hirsutum
  Clone ID: AW186959.1.pep
TTAPISFPTTPNLRLEFLPAPSSSFGRSSFKPGNLLSLLSTPHPHLQWTSSTAFVRFIHRSSRFKRFGKPWWG

SEQ ID NO: 59369 - protein, 160 aa, Gossypium hirsutum
  Clone ID: GOSHI-09MAY01-C15993_1.pep
MASAPSKLYADDVSLVVVLLDTNPFFWSSSSLSFSQFLSHVLAFLNAILTLNQLNQVVVIATGYNSCDYVFDSSSDLNRSFENGRMPVMCSSLLQKLEEFLIKDEQLSKEEPEGKIKSSLFSGSLSMALCYIQRVFRSGALHPHPRILCLQGSPDGPEQY

SEQ ID NO: 59370 - protein, 57 aa, Gossypium hirsutum
  Clone ID: LIB3197-017-P1-M1-H4.pep
RREFHSGQLSFPFSHESNSLHSLIIREKKPNLLIVTINKSRRSCLLHGFSSFQALCT

SEQ ID NO: 59371 - protein, 48 aa, Gossypium hirsutum
  Clone ID: LIB3189-021-P1-K1-D5.pep
AVDQGGTCRKDLAFPFLGVIVNVLFVIYLLCLFFVLLISITLILLFVV

SEQ ID NO: 59372 - protein, 103 aa, Gossypium hirsutum; identical to SEQ ID NO: 58995
  Clone ID: GOSHI-09MAY01-C15953_2.pep

SEQ ID NO: 59373 - protein, 109 aa, Gossypium hirsutum
  Clone ID: GOSHI-09MAY01-C15953_1.pep
SSNLSKMSGRGKGGKGLGKGGAKRHRKVLRDNIQGITKPAIRRLARRGGVKRISGLIYEETRGVLKIFLENVIRDAVTYTEHARRKTVTAMDVVYALKRQGRTLYGFGG

SEQ ID NO: 59374 - protein, 54 aa, Gossypium hirsutum
  unsure (1)..(54): unsure at all Xaa locations
  Clone ID: LIB3149-008-Q1-K1-B8.pep
IYEESNGDLKIFXENVMRDAXVTYTEHATRKTATAMDDVYALKRQGRTLYGFGG

SEQ ID NO: 59375 - protein, 48 aa, Gossypium hirsutum
  unsure (1)..(48): unsure at all Xaa locations
  Clone ID: LIB3197-016-P1-M1-E10.pep
KGGKGLGKGGAKRHMKVLRDNIHGITNLAIRRLARRGGVKRIXGLIYQ

SEQ ID NO: 59376 - protein, 205 aa, Gossypium hirsutum
  Clone ID: GOSHI-09MAY01-C15913_2.pep
EDGEPNTEIIRKLVETIDENGDGRLSPSELKALIIGIRFEEIDFDMDDAVMKVMADFDTSLDSYIQEEEFVRGITKWINEAKQTGGAYLEPNAGTFKFIDQFHQQTKREHALLGSEEQSDEVVEHVENPRWISFKAVLMLLLGTLIAAAFADPLVDAVDNFSTATSIPSFFISFIALPLATNSSEAVSAIIFATRKKQRTASLTF

SEQ ID NO: 59377 - protein, 218 aa, Gossypium hirsutum
  Clone ID: GOSHI-09MAY01-C15913_1.pep
PPSRPSIFPENLTVLPNHEPNGGPVNLFDPRLRQTKREHALLGSEEQSDEVVEHVENPRWISFRAVLMLLVGTLIAAAFADPLVHAVDNFSTATSIPSFFISFIALPLATNSSEAVSAIIFATRKKQRTASLTFSELYGAVTMNNVLCLSVFLALVYVRGLTWDFSSEVLVILIVCIVMGAFASFRTTFPLWTCSIAYILYPFSLALVYVLDYVFGWS

SEQ ID NO: 59378 - protein, 91 aa, Gossypium hirsutum
  unsure (1)..(91): unsure at all Xaa locations
  Clone ID: LIB3197-015-P1-M1-G9.pep
ANWGCFASXIRFXIPWTKWINEAKHTGGADLEPNAGTSKPIHQGDHPTKIEHAMIASHEHSDDVCEHVENPKWISFKAVLMLLVGTLIAVA

SEQ ID NO: 59379 - protein, 166 aa, Gossypium hirsutum
  Clone ID: GOSHI-09MAY01-C15903_1.pep
MEQPLLSEEKRSEIDENERLSSYQYVGRTGSVIPTASLAGTDVSIEEIRSATSFSTPYPPSIHAPLISSPEPLPNEPAIPHQSPYAADYGAYSNDFQRQLLDEVEIRELLIDHIGHRCCWGSRPARTWKIHAVEDCNVYVGTLETFLEEREVIRETEPYLGGKIDG

SEQ ID NO: 59380 - protein, 133 aa, Gossypium hirsutum
  Clone ID: GOSHI-09MAY01-C15863_2.pep
MGSTAVEKTAEELQREIDELHRQQREITERLRDPRGLRRGGLSGIGPRNFAANGSRQRGFLRPADRIDGEDQPPAKRRLSSAVVKVEDGEIVDDEVAKAAPPFLYSFLVCCTLVFLSIVLFLHSFLSSVDVYT

SEQ ID NO: 59381 - protein, 180 aa, Gossypium hirsutum
  unsure (1)..(180): unsure at all Xaa locations
  Clone ID: GOSHI-09MAY01-C15863_1.pep
MGSTAVEKPAXEELQREIDELHRQQREITERLRDPRGLRRGGLSGIGPRNFAANGSRQRGFLRHADRIDGEDQPPAKRRLSSAVVKVEDGEIVDDEVAKDASDMAVEGSGAVHESDRKLSTQQQSGWSRRDVNQTPLKKDAEVPVAEHVPRILPKDEDPSLINRNKRMLGQLLGTLERFR

SEQ ID NO: 59382 - protein, 166 aa, Gossypium hirsutum
  Clone ID: GOSHI-09MAY01-C15583_1.pep
MGLWEAFLNWLRSLFFKQEMELSLIGLQNAGKTSLVNVVATGGYSEDMIPTVGFNMRKVTKGNVTIKLWDLGGQPRFRTMWERYCRAVSAIVYVVDAADPDNLSISRSELHDLLSKPSLTGIPLLLLGIKIDKPEALSKHALTEDMGLKSITDIEICCFMISCKNS

SEQ ID NO: 59383 - protein, 146 aa, Gossypium hirsutum
  Clone ID: LIB3543-019-Q1-K1-C10.pep
MGLLEAFLNWLRSLFFKQEMELSLIGLQNAGKTSLVNVVATGGYSEDMIPTVGFNMRKVTKGNVTIKLWDLGGQPRFRSMWERYCRSVSAIVYVVDAADPDNLSISRSELHDLLSKPSLNGIPLLVLGNKIDKPESLSKQALTEEM

SEQ ID NO: 59384 - protein, 48 aa, Gossypium hirsutum
  Clone ID: LIB3145-025-Q1-K1-B9.pep
GLLAYIQVGFNMRKVTKGNVTIKLWDLGGQPRFRSMWERYCRSVSAIV

SEQ ID NO: 59385 - protein, 146 aa, Gossypium hirsutum
  unsure (1)..(146): unsure at all Xaa locations
  Clone ID: GOSHI-09MAY01-C15553_1.pep
MGIVAGIGVLLPFPFYYLLWTYPQSWVNLCGKGRDPSKVMALVSHFIKLIQFVSLFSVPSFSWPPPLYFWPLFAFGQFLNFRVYQLLGESGTYYGVRFGKNIPWVREFPFGFIKDPQYVGSIMSLVACLSWVPFQYILXWSLGYLL

SEQ ID NO: 59386 - protein, 131 aa, Gossypium hirsutum
  unsure (1)..(131): unsure at all Xaa locations
  Clone ID: LIB3493-013-P1-M1-B10.pep
YYLMWTYAQSRVDLSGNGRCTTKELXXXXNHVELSQFETWGGVWWXYXSYTIYFWPLFAFGQFLNFRVYQSLGESGTYYGVRFGKNIPWVRXFPFGVIKGPXXVGSXLSLGACLSWVPLQYFLLWSWGYLF

SEQ ID NO: 59387 - protein, 317 aa, Gossypium hirsutum
  Clone ID: GOSHI-09MAY01-C15563_1.pep
MGFCFWVCFICLLNFYSLSFVSSQADASAEGTVFIDGKAPIGRIDDDFICATLDWWPPEKCDYGTCSWGLAGLLNLDLNKNLFLNAVKAFSPLKIRLGGTLQDKVIYDTDDNQLPCTSFVKNTSEMFGFTQGCLPMNRWDDLNSFFQKAGAKVIFGLNALAGRTIAPDGSAVGAWNYTNAESFMQYTVDKNYTIHGWELGNELCGSGVGTRVSADQYAADTAALQSIVQKIYQNVDLKPLIITPGGFYDSDWFTEYIDKTNKSLDVVTHHIYNLGPGVDDHLVGKILDPSVLEGVSGTFSGLHNIIKNSTTSASNLV

SEQ ID NO: 59388 - protein, 134 aa, Gossypium hirsutum
  Clone ID: LIB3197-006-P1-M1-D8.pep
EVSMKGNCVNVRGGESCSSGYSKSMDARKTMEGQNGHSTHQAAIRDPETALYTELWHACAGPLVTVPREGESVFYFPQGHIEQVEASTNQVPDQHMPVYNLPSKILCRVINVQLKAEPDTDEVFAQVTLLPEPT

SEQ ID NO: 59389 - protein, 76 aa, Gossypium hirsutum
  unsure (1)..(76): unsure at all Xaa locations
  Clone ID: LIB3148-011-Q1-K1-B7.pep
FLKWFFPLPLFFFFWVCLLLTSKFVVNQVEASTNQVLDXHMPVYNLPSKILCRVINVQLKAEPDTNEVFAQVTLTS

SEQ ID NO: 59390 - protein, 264 aa, Gossypium hirsutum
  unsure (1)..(264): unsure at all Xaa locations
  Clone ID: GOSHI-09MAY01-C15423_1.pep
SLSFFNLFPSFLSPFPLIFLTVAATSLTLSRFLSPAAAISLSSTTKLSSKSLPLKFSSVSSLSFNLHRRRVSKPISFSTKTTQISAAISVGDKLPDATLSYFDSDGELQTTTISSLTAGKKXVIFAVPGAFTPTCSQKHLPGFVEKSGELKAKGVNTIACVSVNDAFVMRAWKENLGIKDEVLLLSDGNGEFTKKIGCELDLPDNPVGLGVRSRRYXALLPEDGVVKXLNLEEGGAFLLSGAEDILKACDFREINTPRPPLLFG

SEQ ID NO: 59391 - protein, 90 aa, Gossypium hirsutum
  unsure (1)..(90): unsure at all Xaa locations
  Clone ID: LIB3583-031-Q6-K7-F7.pep
HSLSSFSFHFPSLSPIFPTTFXRNIXTPFLLPIPNXXNNPXISSXNLLHHTXTPPSTPFHSCLHTCLVPPPPPSPFSIANNRSRTLKEGI

SEQ ID NO: 59392 - protein, 215 aa, Gossypium hirsutum
  Clone ID: GOSHI-09MAY01-C15783_1.pep
MARRPDEEYDYLFKVVLIGDSGVGKSNLLSRFTRNEFCLESKSTIGVEFATRTLQVEGRTVKAQIWDTAGQERYRAITSAYYRGALGALLVYDVTKPTTFENVSRWLKELRDHADSNIVIMMIGNKTDLKHLRAVATEDGQSYAEKEGLSFIQTSALEAINVEKAFQTILSEIYRKISKTSPSSDEPPPPCFKEGRPLAVGGGEANTKKACCSSS

SEQ ID NO: 59393 - protein, 223 aa, Gossypium hirsutum
  unsure (1)..(223): unsure at all Xaa locations
  Clone ID: GOSHI-09MAY01-C15753_1.pep
IKLAQRMTYNFCAGVCASSIHKWDKLSVGNVGENVRVMTRKNINDPGEPHGVVLSAATSVWMPVTQERLFDFLRDERMRSEWDILSNGGPMQEMVHVAKGMGHGNCVSLLRGSAINANENNMLILQETWSDASGALVVYAPVDISSMSVVMNGGDSAYVALLPSGFAILPGISPSYHGGRSESNGALVKPEIDVKHSXGCLLSVGFQILVNNVPTAKLTSESE

SEQ ID NO: 59394 - protein, 305 aa, Gossypium hirsutum
  Clone ID: GOSHI-09MAY01-C15743_1.pep
CFYPSYDYAHCIVDSLENITHSLCTLEFETRRASYYWLLHVLDLYQPYVWEYSRLNVTNTVMSKRKLNYIVTNKYVDGWDDPRLMTLAGLRRRGVTSTAINSFVRGIGITRSDCSMIRLDRLEYHIREELNKTAPRVLVVLHPLKVVITNLESGSVLDLDAKKWPDARTDDTSAFYKVPFSNVVYIERSDFRMKDSKDYYGLAPGKSALLRYAFPIKCTDVILADDKETVLEIRAEYDPSKKSKPKGVLHWVAEPSPGSDPLKIEVRLFDKLFNSENPAELDNWLTDLSPNSKVVVPNAYAVPSL

SEQ ID NO: 59395 - protein, 120 aa, Gossypium hirsutum
  Clone ID: GOSHI-09MAY01-C15773_1.pep
MTVTPGISINDGNLVVHGKTILTGMPDNIVLTPGSGVGLVAGAFIGATASDSKSLHVFPIGVLEGLRFMCCFRFKLWWMTQRMGTCGKDVPLETQFMLVESMEEDDPNAPTIYTVFLPLL

SEQ ID NO: 59396 - protein, 92 aa, Gossypium hirsutum
  unsure (1)..(92): unsure at all Xaa locations
  Clone ID: LIB3585-044-P1-K1-H9.pep
MTVTPGISINDGNLVVHGKTILTGMPDNIVLTPGSGVGLCAGAFIGATASDCKSRYVFPIGVLKGLLFMCFFRFKLXWWMTHKMGTFWKDVP

SEQ ID NO: 59397 - protein, 147 aa, Gossypium hirsutum
  unsure (1)..(147): unsure at all Xaa locations
  Clone ID: GOSHI-09MAY01-C15763_4.pep
KGDPSLTQHQQRQWLDGPHDSLRSLSSQVSHRKSPLSPLHSRAFSAAPAPQPAVFVDKNTRVICQGITGKNGTFHTEQAIEYGTNMGGGVTPKKGGTEHLXLPVFNSVAEAKAETKANASVIYVPPPFAAAAIMEAMEAELELVVCI

SEQ ID NO: 59398 - protein, 88 aa, Gossypium hirsutum
  Clone ID: GOSHI-09MAY01-C15763_3.pep
SAHPSAEEDAAALIKESGTEKPIVAFIAGLTAPPGRRMGHAGAIVSGGKGTAQDKIKTLREAGVTVAESPAKIGVAMHDVFKQRGLLN

SEQ ID NO: 59399 - protein, 346 aa, Gossypium hirsutum
  Clone ID: GOSHI-09MAY01-C15763_1.pep
MARQASRLIQSLSSRISPHKPQLSPLTPSSSSSPLLTQSRSFSAAPAPQPAVFVDKNTRVICQGITGKNGTFHTEQAIEYGTKMVGGVTPKKGGTEHLGLPVFNSVAEAKAETKANASVIYVPPPFAAAAIMEAMEAELDLVVCITEGIPQHDMVRVKAALNQQSKTRLIGPNCPGIIKPGECKIGIMPGYIHKPGRVGIVSRSGTLTYEAVFQTTAVGLGQSTCVGIGGDPFNGTNFVDCVTKFLADPQTEGIILIGEIGGTAEEDAAALIKESGTEKPIVAFIAGLTAPPGRRMGHAGAIVSGGKGTAQDKIKTLREAGVTVVESPAKIGVAMHEVFKQRGLLN

SEQ ID NO: 59400 - protein, 69 aa, Gossypium hirsutum
  Clone ID: LIB3585-036-P1-K1-B6.pep
VFQTTAVGLGQSTCVGIGGDPFNGTNFVDCVTKFLADPQTEGIILIGEIGGTAEKNAAALIKESGTEKP

SEQ ID NO: 59401 - protein, 284 aa, Gossypium hirsutum
  Clone ID: GOSHI-09MAY01-C15653_1.pep
MFNIFVGVQDTFPVLQDLTLTTSDMMKGICDGQLSLCFPNLELLNLQFFPETSTTLPYSFIRSLPNLQKLVINNASISELVRSEGLFHNEIDTSAFSQLKELSLSQLPELTLKTLEPFLLSFKNFSGSFKMPWIHQSNGMGRALPPPAPAKSLTLLESLSIDDCEMIQEIIACEGEEIQGNIVFPKLKYLKLSCLPSLASFSLAHHLLEFPVLETVKVKKCPKMKNFCQGELSTPRLEPANLTGDEDGELQWEGDLNTSIKHMFDEMNVQNSQAVEVTDQLGSV

SEQ ID NO: 59402 - protein, 118 aa, Gossypium hirsutum
  Clone ID: LIB3197-010-P1-M1-F2.pep
FPVLQELTLKTNDMIKGICDGQLSLQCFPNLKLLNLQFFPETSTTLPYSFIQSLPKLEKLVINNASISEIVRFEGLINEERHTWACYQLEALKLSQLPELTLKTLEPFLLSVKNLLSM

SEQ ID NO: 59403 - protein, 195 aa, Gossypium hirsutum
  Clone ID: GOSHI-09MAY01-C15643_1.pep
LTCHFSFSSTFQSSFLGVFCFVEFIISSSLIMAMAASETKFHVLAVDDTLIDRKLIEKLLKTSSYQVTAVDSGTKALEFLGLNNNDHQDVEVNLIITDYCMPGMTGYDLLRKIKESSSFKDIPVVIMSSDNIPSRINRCLEGGAGEFFLKPVQLSDVNKLRPHLMKRTQTNVNKRKAMDEIVSLIERGPDTMNWK

SEQ ID NO: 59404 - protein, 79 aa, Gossypium hirsutum
  unsure (1)..(79): unsure at all Xaa locations
  Clone ID: GOSHI-09MAY01-C15673_2.pep
MFRIQLLVSVLLCCFTFWFHISFGYLITCSGIVPMRYRNDKVSITDFGGVGDGKTLNTKAFREAIYRIQHLXRRGGTLL

SEQ ID NO: 59405 - protein, 348 aa, Gossypium hirsutum
  Clone ID: GOSHI-09MAY01-C15673_1.pep
MFRIQPLVSVLLCCFTFWFHISFGYLITCSGIVPMRYRNDKVSITDFGGVGDGKTLNTKAFREAIYRIQHLRRRGGTLLYVPPGVYLTESFNLTSHMTLYLARGAVIKATQDTWKWPLVAPLPSYGRGRERPGGRYMSFIHGDGLRDVVISGENGTIDGQGGIWWNMWRQGNLQFTRPNLVEFMNSRGIIISNVIFKNSPFWNIHPVYCSNVVIRYVTILAPTDSPNTDGIDPDSSSNVCIEDSFISTGDDLVAVKSGWDEYGIAYGRPSSHITIRRVTGSSPFAGIAVGSETSGGVEHVLAENIVIYNSGIGVNIKTNIGRGGFIKNITVSQVFMENVRTGIKITGD

SEQ ID NO: 59406 - protein, 109 aa, Gossypium hirsutum
  Clone ID: GOSHI-09MAY01-C15163_1.pep
TNPNSPTTQNVSATLTPTLSAATLHQMATAYTTNRRPHAHLTPPESFAVASPEVSPLSSGLQRGGDPFSSFPSDSKKARPSSSSWNKAERLISVYHRPPNTVVARWSHD

SEQ ID NO: 59407 - protein, 242 aa, Gossypium hirsutum
  unsure (1)..(242): unsure at all Xaa locations
  Clone ID: GOSHI-09MAY01-C15103_1.pep
MALSSVVVTMEKPNKFSLVEINGSDSTLLLEKQKAVSPKQFTWFLFLKANRVFACLSWLPMALKTTFLSVKKRIALSDVSDEEAKSRRLYRFIKVFLFISIFALVLEIFAHLKKWNLNMIQPWEVQGPLXWCFMTWLSFRXDYVAPLVLTMSKFCIVLFLIQSLDRLILCLGCFWIKYKNLKPRINGDAYDIEDGSSFPMVLVQIPMCNEREVFAQSIAAACQLDWPKDRILIQVLDDSYDG

SEQ ID NO: 59408 - protein, 80 aa, Gossypium hirsutum
  Clone ID: GOSHI-09MAY01-C15043_1.pep
MELADRAVGFLLSITSLSIFTYYTFWVIILPFVDSDNFIHNYFLPQEYAILIPVCAGVVLLCLLCIFIGFVLLKSKKKKA

SEQ ID NO: 59409 - protein, 130 aa, Gossypium hirsutum
  Clone ID: GOSHI-09MAY01-C15063_1.pep
MALEWVVLGYTAGAEAIMLLLLTVPGLDGLRKGLIAVTRNLLKPFMSVVPFCLFLLMDIYWKYEMRPTCDADTCTPSEYLRHQKSIMKSQRNALLIAAALILYWLLYSVTNLVVKIEQLNQRVERLKNRD

SEQ ID NO: 59410 - protein, 144 aa, Gossypium hirsutum
  unsure (1)..(144): unsure at all Xaa locations
  Clone ID: LIB3148-018-Q1-K1-F6.pep
KNKEKKRKKKNRRKKKKEKETKKEKQNEKDEKKEKKKREKRKKKKKEKMKKKXKKKRKKIARKKYSPQGTEKERKRPTFFFFFETNPNFFLIKSKLNNRDPIITTYNSFKINLSNHPHTSEPTSNKKIIKKKRKRSSPNTTDLE

SEQ ID NO: 59411 - protein, 120 aa, Gossypium hirsutum
  Clone ID: GOSHI-09MAY01-C15033_1.pep
IAKGNFQLKKMGRGVSSGGGQSSLGYLFGSGEAPKPGTNNSQAAPAEAPAVSKPAPAPEPVDISKQIPAGINSISANNYMRADGQNTGNFLTDRPSTKVHSAPGGGSSLDYLFGGPGGSK

SEQ ID NO: 59412 - protein, 100 aa, Gossypium hirsutum
  Clone ID: uC-gsronu33B005d04b1.pep
KMGRGVSSGGGQSSLGYLFGSGEAPKPGTNISQAAPAEAPAVSKPGPAPEPVDISKQIPAGINSISANNYMRADGQNTGNFLTDRPFTKVYSAPGGRFFF

SEQ ID NO: 59413 - protein, 72 aa, Gossypium hirsutum
  Clone ID: uC-gsflnu33B006b04b1.pep
PAVSKPGPAPEPVDISKQIPAGINSISANNYMRADGQNTGNFLTDRPSTKVHSAPGGGSSLDYLFGGPGGSK

SEQ ID NO: 59414 - protein, 206 aa, Gossypium hirsutum
  Clone ID: GOSHI-09MAY01-C15393_1.pep
MEAIKKQATKLREQVAKQQQAVLRHLGHFSNEDVTVDEADLQCHQKLQDLYSSTKAAKHLQRNIVRGIEGFIATSSKLIEISRKLADDCCKYGVENQNTGSSLAKAALHFGNSHKSIEDERETLLGILGEQVSEPLRALITGAPLEDARHLTHRYDRFCQEVEAQAADVLRRRSKTREADISAESYMKLKQAEARLADLKSSMMVL

SEQ ID NO: 59415 - protein, 55 aa, Gossypium hirsutum
  Clone ID: GOSHI-09MAY01-C15363_2.pep
MSGNSSCSVYIGNLDERVSDRVLYDILIQAGRVVDLYIPRDKETDKPKGFAFVEY

SEQ ID NO: 59416 - protein, 142 aa, Gossypium hirsutum
  Clone ID: GOSHI-09MAY01-C15363_1.pep
MSGNSSCSVYIGNLDEMVSDRVLYDILIQAGRVLDLYIPRDKETDKPKGFAFVEYETEDVADYAVRPFSGLVTLYNRTLKFAISGQDKSSQNPANAAMPATNSSYKSRHYHGVVNHMETSQQPKKSSTPSRIPDYPARYSQA

SEQ ID NO: 59417 - protein, 229 aa, Gossypium hirsutum
  Clone ID: GOSHI-09MAY01-C15253_1.pep
FHGCLTTGGVSNNMLMRLVTHPEIQHKIYSEIIMAKKGLEDKAQPVVEKMPLLLATIYESARVMPAGPLLQRCSLKHDLRLKSGVIVPAGAILVVPMQLVQTDDSSWGNDAGKFNPYRFLSKTEKTSASPNMDASIAGHAEELKDQRKCTFVLKDPNKNPAFLPFGSGARACVGQKFVIQGVATLFASLLEQYEVRLRSGSKTNSKPSTNYSMSQDFLSSELVFARRNN

SEQ ID NO: 59418 - protein, 136 aa, Gossypium hirsutum
  Clone ID: uC-gsflmaxxa004f05b1.pep
PSRPIFFAKEGEDCKLTPMKENIQPSVTVPFEQGTGQKFQQPPGSGISFFMFEESELLNVGEDGIYPLAVKAEAFPVNSNDGSRNTQITLAVFEKDILILTLFFLRKSSEKLIHCFLPMDNLTWGIFQISCNPPWL

SEQ ID NO: 59419 - protein, 82 aa, Gossypium hirsutum
  Clone ID: GOSHI-09MAY01-C15273_1.pep
VSFTKCHKLMGFSTGPRSRATHWKQTVLYLEDVLTICEGEAIIGSMTVAPNKKNPRDVDIMVKYSLSGRRCVVSRVQFYKMR

SEQ ID NO: 59420 - protein, 326 aa, Gossypium hirsutum
  unsure (1)..(326): unsure at all Xaa locations
  Clone ID: GOSHI-09MAY01-C15263_1.pep
KEVENSKRKRRERIYIWQMWHXNGTRCPKGTVPIRRSTTRDVLRAKSLFHFGKKQSTTTNPTRRADAPDVVSSNGHEHAIAYTGTSQEVYGAKATINVWDPSIQEVNEFSLSQIWILSGSFDGSDLNSIQPGWQVSPELYGDSRPKLFTYWTSDSYQATGCYNLLCAGFVQTNSRIAIGAAISPVSQYDANQYDITILIWKDPKLGNWWMGFGDNNLVGYWPAELFTHLADHATMVEWGGEVVNSRANGKHTSTEMGSGHFAEDGFGKSSYFRNLELVDADNSLSSVHDISTLAENTNCYNIRSSYNKEWGTFFYYGGPGNNPRCP

SEQ ID NO: 59421 - protein, 142 aa, Gossypium hirsutum
  Clone ID: GOSHI-09MAY01-C15213_1.pep
MDINGKGDSVDELKGLRITNLDDDDDDDDDENIAVDEDDNGEDEDDDEEQESVILGFVEKPEHNWSLLRQQFPSKAGGVPAWLDPDNLPTGMSCVCDVCGEPLQFLLQVYAPLVEKDSTFHRTLFVFMCLAMKCLLRDQHEQ

SEQ ID NO: 59422 - protein, 136 aa, Gossypium hirsutum
  Clone ID: GOSHI-09MAY01-C15233_7.pep
MARTKQTARKSTGGKAPRKQLATKAARKSAPATGGVKKPHRFRPGTVALREIRKYQKSTELLIRKLPFQRLVSEIAQDFKTDLRFQSSAVAALQEAAEAYLVGLFEDTNLCAIHAKRVTIMPKDIQLARRIRGERA

SEQ ID NO: 59423 - protein, 136 aa, Gossypium hirsutum
  Clone ID: GOSHI-09MAY01-C15233_5.pep
MARTKQTARKSTGGKAPRKQLATKAARKSAPATGGVKKPHRFRPGTVALREIRKYQKSTELLIRKLPFQRLVREIAQDFKTDLRFQSSAVAALQEAAEAYLVGLFEDTNLCAIHAKRVTIMPKDIQLARRIRGERA

SEQ ID NO: 59424 - protein, 136 aa, Gossypium hirsutum
  Clone ID: GOSHI-09MAY01-C15233_4.pep
MARTKQTARKSTGGKAPRKQLPTKAARKSAPATGGVKKPHRFRPGTVALREIRKYQKSPELLIRKLPFQRLVREIAQDFKTDLRFQSSAVAALQEAAEAYLVGLFEDTNLCAIHAKRVTIMPKDIQLARRIRGERA

SEQ ID NO: 59425 - protein, 136 aa, Gossypium hirsutum; identical to SEQ ID NO: 59423
  Clone ID: GOSHI-09MAY01-C15233_3.pep

SEQ ID NO: 59426 - protein, 136 aa, Gossypium hirsutum; identical to SEQ ID NO: 59423
  Clone ID: GOSHI-09MAY01-C15233_2.pep

SEQ ID NO: 59427 - protein, 136 aa, Gossypium hirsutum; identical to SEQ ID NO: 59423
  Clone ID: GOSHI-09MAY01-C15233_1.pep

SEQ ID NO: 59428 - protein, 96 aa, Gossypium hirsutum
  Clone ID: uC-gsronu33B171h01b1.pep
EQRMPLVAALQFVQPNRHPVQGQLYGWRLVSSCQSSLASPLFMALAGQDSSLLRWLELISSRLSSPVADVELFHRLISWLFALYEPLINSSVLGEF

SEQ ID NO: 59429 - protein, 106 aa, Gossypium hirsutum
  unsure (1)..(106): unsure at all Xaa locations
  Clone ID: LIB3146-042-Q1-K1-F3.pep
MARTKQTARKSTGGKAPRKQLATKAARKSAPATGGVKKPHRFRPGTVALREIRKYQKSTELLIRKLPFQRLVRXIAQEFKNCLEVQNHACGSFXEAGEAYFVRLFE

SEQ ID NO: 59430 - protein, 80 aa, Gossypium hirsutum
  unsure (1)..(80): unsure at all Xaa locations
  Clone ID: LIB3146-050-Q1-K1-A2.pep
SMARTNQTAMKXTGGKAPRKQLATKAARKSSPSTGGVXKPYRFKPRTMALREIKKYHKSTXLLIRXLSVQRLVKEILQDF

SEQ ID NO: 59431 - protein, 44 aa, Gossypium hirsutum
  unsure (1)..(44): unsure at all Xaa locations
  Clone ID: LIB3149-022-Q1-K1-D10.pep
LLGIMLESTIMPKDIQLARRIRGERAXVACIYLDLIIKILRKGI

SEQ ID NO: 59432 - protein, 94 aa, Gossypium hirsutum
  Clone ID: GOSHI-09MAY01-C16963_4.pep
PFITVALTYFQLAAENHEWWGRSFLCGGSTGLFIYAYCLYYYYARSDMSGFMQTSFFFGYMACICYGFFLLLGTVGFRASLFFVRHIYRSIKCE

SEQ ID NO: 59433 - protein, 306 aa, Gossypium hirsutum
  unsure (1)..(306): unsure at all Xaa locations
  Clone ID: GOSHI-09MAY01-C16963_3.pep
LSKDEVVFFRGAVEKDYYFQMYYDDLPICXTRPIGKVDKEGKADPSEYKYFLFKHIQFDVLYNKDRVIEISARMDPHLLVDLTEDKEVDAEFMYTVKWKETDTPFEKRMERYSMSSSLPHHLEIHWFSIINSCVTVLLLTGFLATILMRVLKNDFIKYGQDEEAADDQEETGWKYIHGDVFRFPKYKSLFAAALGSGTQLFTLTVFIFMLALVGVFYPYNRGALFTALVVIYALTSGIAGYVATSFYCQLEGTNWVRNLLLTGCLFCGPLVLTFCFLNTVAIAYSATAALPFGTIVVIVLIWTLVT

SEQ ID NO: 59434 - protein, 341 aa, Gossypium hirsutum
  Clone ID: GOSHI-09MAY01-C16963_2.pep
PYLMKSFFKYGQDEEAADDQEETGGKYIHGAVFRFPKYKSLFAAALGSGTQLFTLTVFIFMLALVGVFYPYNRGALFTALVVIYALTSGIAGYTATSFYCQLEGNNWVRNLLLTGCLFCGPLFLTFCFLNTVAIVYSATAALPFGTIVVIVLIWTLVTSPLLVLGGIAGKNSKAEFQAPCRTTKYPREIPPLPWYRSAIPQMAMAGFLPFSAIYIELYYIFASVWGHRIYTIYSILFIVFIILLIVTAFITVALTYFQLAAEDHEWWWRSFLCGGSTGVFIYAYCLYYYYARSDMSGFMQTSFFFGYMACICYGFFLMLGTVGFRASLLFVRHIYRSIKCE

SEQ ID NO: 59435 - protein, 186 aa, Gossypium hirsutum
  unsure (1)..(186): unsure at all Xaa locations
  Clone ID: GOSHI-09MAY01-C16963_1.pep
MRNFGNSPAFVILGVFILSCVSHVRSDASDHRYKEGDPVPLYANKVGPFHNPSETYRYFDLPFCSPDHVKEKKEALGEVLNGDRLVSAPYKLNFKEEKDSSVVCKKKLSKDEVVFFRKAVEKDYYFQMYYDXDLPIWGFIGKVDKEXKADPMSSKYYLYKHMQLXYLFKDRGMEISARLDPHCLVA

SEQ ID NO: 59436 - protein, 78 aa, Gossypium hirsutum
  Clone ID: LIB3272-016-P1-K1-B5.pep
MYYDDLPIVVIVLIWTLVTSPLLVLGGIAGKNSRAEFQAPCRTTKYPREIPPLPWYRSAIPQMAMAGFLPFSAIYIEL

SEQ ID NO: 59437 - protein, 68 aa, Gossypium hirsutum
  Clone ID: LIB3083-110-Q1-L1-D4.pep
ISIKHSQSMPHLLIDIYHIYFFLTQNRGNGKGQLKPLLSLYRPVYVTHTEYRGARTPCAQHEEEYVAH

SEQ ID NO: 59438 - protein, 52 aa, Gossypium hirsutum
  Clone ID: LIB3493-024-P1-M1-H6.pep
DPSVALFHFYPSKCLICYRSFLCGGSTGIFIYAYCLYYYYARSDMSGFMQTS

SEQ ID NO: 59439 - protein, 100 aa, Gossypium hirsutum
  unsure (1)..(100): unsure at all Xaa locations
  Clone ID: LIB3083-023-Q1-L1-C1.pep
EAXSEVLNGDRLVSAAYKLKFREENDSSVVCXKKLSKDEVVLFLKAVEKDYYFHMYYDDLPIWCFIGXKVDKEGKADPNEFKYYLYKRMHVDVLYNMDRV

SEQ ID NO: 59440 - protein, 86 aa, Gossypium hirsutum
  Clone ID: LIB3584-061-P1-K1-A6.pep
IYLYIFSYFCYFFLVIGCCECLISYERYGQDEEAADDQEETGWKYIHGDVFRFPKYKSLFAAALGSGTQLFTLTVFIFMLALVGVF

SEQ ID NO: 59441 - protein, 149 aa, Gossypium hirsutum
  Clone ID: GOSHI-09MAY01-C16913_2.pep
MASVALTSSCPLGYSRIKSLAFSSRSCPNPVFSPPFLPKSTSHNSSFIKQLSLTPVITNNRIQKRHSKLTVKAAASTPAAVTPPSQQPWQGAALKPLIASIATGVILWFLPVPSGVSRNAWQLLSIFLATIVGIITQPLPLGAVALLGL

SEQ ID NO: 59442 - protein, 189 aa, Gossypium hirsutum
  unsure (1)..(189): unsure at all Xaa locations
  Clone ID: GOSHI-09MAY01-C16913_1.pep
LSSSCPVRYSGRKSLAVSYRSCANPVFSPAFLPKSTSHNSSFIKQLSLTPVITNNRIQKRHSKLTVKAAASTPAAVTPPSQQPWQGAALKPLIASIATGVILWFLPVPSGVSRNAWQLLSIFLATIVGIITQPLPLGAVALLGLGASVLTKTLTFSAAFSAFGDPIPWLIALGFFXFARGFIKTGLGNR

SEQ ID NO: 59443 - protein, 193 aa, Gossypium hirsutum
  Clone ID: GOSHI-09MAY01-C16903_1.pep
MSTINSAAWFSSVFQNPSQTELFPANFKCRFNSKLPKKQSKMGAPRIFCNLSETETGVDDNPRNSKVSVRSKNRMEEYNTAMKKMMRNPYEYHHDIGMNYTLITDNLIVGSQPQKPEDIDHLKQEEKVAYILNLQQDNDIEYWGIDLQPIIKRCRQLGIHHMRTPARDFDPDSLRNILPKAVSSLEWAIAEGK

SEQ ID NO: 59444 - protein, 93 aa, Gossypium hirsutum
  Clone ID: GOSHI-09MAY01-C16923_1.pep
ISAPGETILKKQQELESCQSLLPCPAKAFKTIDPTTLLLSQYNIRNQRGYVEPMRADLRTESSEGKTSEYKSHPQTETVRLRKKEKPSGRTGG

SEQ ID NO: 59445 - protein, 166 aa, Gossypium hirsutum
  Clone ID: LIB3543-063-Q6-K6-G9.pep
MQAVSPTQNLNSSVIRASKPRRFHQLTRSFIRCVYHNDSVQFPNGVGLNRADWQSSCAILSSKVFSQDQGSGDKSTAPSNSDHLAAAVNGHKTSIDLNLVPIETNNKPQPPTQKPLTITDLSPAPMHGSQLRVAYQGVPGAYSEAAAGKAYPNCEAIPCDQFEVAF

SEQ ID NO: 59446 - protein, 107 aa, Gossypium hirsutum
  Clone ID: LIB3197-030-Q1-M1-H6.pep
PLCFIDIRITSLSCTLMSARHFIIEENTKLICIPSPIFSFLVLEGNALFIRKYTNMQAVSTTQNLNSSVIRPSKPRRFHQLTRSFIRCVYHNDSVQFPNGVGLNRAD

SEQ ID NO: 59447 - protein, 265 aa, Gossypium hirsutum
  Clone ID: GOSHI-09MAY01-C16593_1.pep
MEGSSSDKLIVVTREPDGIAIVTINRPKSLNSLTRPMMVDLAKAFKALAKDNSVRVIILSGAGRAFCSGVDLTAAQDVFKGDVKDPETDPVVQMEQCPKPIIGAINGVAITAGFEIALACDMLVAAKGATFVDTHARFGIFPSWGLSQKLARFIGPNKAREVSLAAMPLSAEEAEKLGFVNYVVDQNEVLNKARQLAGAIMKNSQDLVLRYKSVINDGYKLDLRQGLAIEKERGHEYYDGMTPEQFKKMQEFIARRSSKKPSSKL

SEQ ID NO: 59448 - protein, 105 aa, Gossypium hirsutum
  Clone ID: AI055613.1.pep
WGLSQKLARFIGPNKAREVSLAAMPLSAEEAEKLGFVNYVVDQNEVLNKARQLAGAIMKNSQDLVLRYKSVINDGYKLDLREGLAMEKVFITLMYIFSWISMLFI

SEQ ID NO: 59449 - protein, 93 aa, Gossypium hirsutum
  Clone ID: LIB3120-060-Q1-K1-B5.pep
QPLEELIKVYLKAEKLVAFLPFSYPLKGMKSLMKMWIDGWKRKSETKTEISKVVGQTVNRKKEKATQGFFQFPLSKKAHASADAWADAWADAW

SEQ ID NO: 59450 - protein, 120 aa, Gossypium hirsutum
  Clone ID: LIB3197-027-Q1-M1-C10.pep
LTLQGIYDACLHMGGIYKPSYFANSKVLSICKKAKSHEYMMFDSSLDQSAISQNDCQLDIVSELQDNNSSIEETSTNEKTGSVESCSKSTDFYPYRFPLEQDVHRLQQILARRYRLAFCF

SEQ ID NO: 59451 - protein, 75 aa, Gossypium hirsutum
  Clone ID: LIB3189-031-P1-K1-B5.pep
LSSKKRGPWNFQNSLASISPPYANKHHKFLEELIKVYLKAEKLVAFLPFSYPLKGMKSLMKMWIDGWKKISETKT

SEQ ID NO: 59452 - protein, 249 aa, Gossypium hirsutum
  unsure (1)..(249): unsure at all Xaa locations
  Clone ID: GOSHI-09MAY01-C16533_1.pep
MADWTQLPKGLLDLIAXRLGTHYDVIRFRSVCSTWRSAVTAPNRCRNRFAPRFPLLPISSQFSLSKRSVFLLGSPTTSTQTNAWSPSSWVIKIEEDPMNGRVQLLNPLSRSRFDSLPDNFPKPLNLLDFRVLELGEEYVLHYLTHHSVGNLYMEKVVLSCLDDNVNDFIILTIHVSGKLAMFKSSVKKWAIIQDMPSPFDDVILYKGEFYAXDNTGRTVVVGWDFEXNLIAMPCFGGDKKFWGDQRLSM

SEQ ID NO: 59453 - protein, 81 aa, Gossypium hirsutum
  unsure (1)..(81): unsure at all Xaa locations
  Clone ID: GOSHI-09MAY01-C16493_1.pep
MAKLMRLISMAPLFLLLRLPFAFGGHDYNQALSQSILFFEAHRSGYLPHNQRVTCXANSTLNDGTASEVDLLGGYYDSRDN

SEQ ID NO: 59454 - protein, 239 aa, Gossypium hirsutum
  Clone ID: GOSHI-09MAY01-C16483_1.pep
MDAAKKKYSIIVPTYNERLNIALIVYLIFKHLRDVDFEIIVVDDGSPDGTQEVVKQLQTLYGEDRILLRPRPKKLGLGTAYIHGLKHASGNFVVIMDADLSHHPKYLPSFIKKQPETGASIVTGTRYVRGGGVHGWNLMRKLTSRGANVLAQTLLWPGVSDLTGSFRLYKKSVLEDVISSCVSKGYVFQMEMIVRASRKGYHIEEVPITFVDRVFGSSKLGGSEIVEYLKGLSYLLVTT

SEQ ID NO: 59455 - protein, 163 aa, Gossypium hirsutum
  Clone ID: LIB3829-001-Q1-K6-B2.pep
IFRPWLSHICKKKGSEYIYTFIVPTYNERLNIALIVYLIFKHLRHVDFEIIVVDDGSPDGTHEAEKQLQKLYGEDRVLLIPIPNKLGLGTAYIHGLKHASGNFGEIMGADLCHHPKYLPSFVKKQSETGASVATGTRCVTSGGVHGWNLMRSLTSAAANVLAQ

SEQ ID NO: 59456 - protein, 99 aa, Gossypium hirsutum
  unsure (1)..(99): unsure at all Xaa locations
  Clone ID: LIB3048-039-Q1-L1-H4.pep
MASPYRVTCYHYLMTREHTRESYEWHAKADSDYMKYSVVLPTYDARLNIGIIVYLIFXHLRDVDFEIIVENDGSPHCTQEVVKQLQTLYGEYRILLRPI

SEQ ID NO: 59457 - protein, 236 aa, Gossypium hirsutum
  Clone ID: GOSHI-09MAY01-C16453_1.pep
MGRPPCCDKVGVKKGPWTPEEDIVLVSYIQEHGPGNWRAVPTNTGLLRCSKSCRLRWTNYLRPGIRRGNFTEHEEKMIIHLQALLGNRWAAIASYLPQRTDNDIKNYWNTHLKKKLKKLHGSEVYCRDGFTSSAASDQISRGQWERKLQTDINMAKQALSDALSPEKSSDLTELKPCHGNTYAKPEGYASSTENIAKLLKGWMRKNPLKPASTNSGVTQQSYDNRVATGVTTDSAN

SEQ ID NO: 59458 - protein, 349 aa, Gossypium hirsutum
  unsure (1)..(349): unsure at all Xaa locations
  Clone ID: GOSHI-09MAY01-C16463_1.pep
MMDVRVKLLILLATSLLIYSLIVLLKVLYDYWWVPLRIQHFLNSQGLKGPPYKFIHGCNKQINKMRSEALSKPMGLTHDILPRVFPHYYSWINLYGEYEXNYLSWDGVQAQVVTTDPELIKEVLKNSEQTFRKREPPIYVGRLLGDGLVTTEGEKWAKKRKLANYAFHXESLKNMTPAVIASVETMLDKWKDKEGKEIEAFQEFRILTSEVISRTAFGSSYFEGEKIFYMLQKLADIVSRNSNKSRIPILSKFWKTDDDIESEKLAREIQDLVIEIVKKRENKVSSGGAESFGSDFLGLLVKAFNISDEKNXISMEDLVDECKTFYFAGHETGNASLALAVLVLAIHRD

SEQ ID NO: 59459 - protein, 336 aa, Gossypium hirsutum
  unsure (1)..(336): unsure at all Xaa locations
  Clone ID: GOSHI-09MAY01-C16753_1.pep
MVLTTTNPAPKQFVESSTFASRYVRQPLPRFQMPENSMPKEAAYQVITDELMLDGNPRLNLASFVTTWMEPECDKLMMASINKNYVDMDEYPVTTELQNRCVNMIANLFNAPIGSGEAAVGVGTVGSSEAIMLAGLAFKRKWQQKXKSQGKPYDKPNIVTGANVQVCWEKFARYFEVELKEVKLKEGYYVMDPVKAVEMVDENTICVAAILGSTLTGEFENVKLLNELLTKKNKETGWDTPIHVDAASGGFIAPFVYPKIEWDFRLPLVKSINVSGHKYGLVYAGIGWVVWRSKEDLPDDLVFHINYLGSDQPTFTLNFSKGSSQILAQYYQLIRL

SEQ ID NO: 59460 - protein, 163 aa, Gossypium hirsutum
  Clone ID: GOSHI-09MAY01-C16723_1.pep
MSMGTDTTWVGKKPLRRIGGMSDALSIAADLGFSVPPPPSQEEVQNLSSATGEKGDDLIKVLRELTTVQRKIADLQVELQGRKDDKNVAHLTHVSEMEKKCETLARITTILKDVIQNKDRIIARLQQPYSLDCIPVEAEYQKQFSGLLMKAASDYGALTAAVY

SEQ ID NO: 59461 - protein, 66 aa, Gossypium hirsutum
  Clone ID: LIB3197-029-Q1-M1-E12.pep
MCSTPEISSFFLDRIVYEIVDNAVDEAQAGFATLGTDTTWVGKKPLRRIGGMSDALSIAVDLGFSV

SEQ ID NO: 59462 - protein, 218 aa, Gossypium hirsutum
  Clone ID: GOSHI-09MAY01-C16653_1.pep
MGSMPSPLFFFFFLLFTIQCCFSSNTSELRALMDIKASLDPDHQYLTSWTTKSDPCSFEGLACNEQRQVANISLQGKGLSGKISPAIAELQNLTGLYLHYNYLYGEVLREIANLTQLADLHLNMNNLSGEIPPEIAHMDSSRVLQLCYNQLTGSIPTQFGSLKKLNVLALQSNQLTGAIPASLGDLSTLIRLDLSFNDLCGSIPTKLADAPLLEVLDI

SEQ ID NO: 59463 - protein, 264 aa, Gossypium hirsutum
  Clone ID: GOSHI-09MAY01-C16663_1.pep
MSAVAPSFSLSVLCFASLLSFLAVVNARIPGVYTGGAWESAHATFYGGSDASGTMGGACGYGNLYSQGYGVNTAALSTALFNNGLSCGACFEIKCANDPRWCHSGSPSIIITATNFCPPNYALPNDNGGWCNPPRPHFDLAMPMFLKIAEYRAGIVPVSFRRVPCRKQGGIRFTINGFRYFNLVLVTNVAGAGDIVKVSVKGTNTGWLSMSRNWGQNWQSNAVLVGQPLSFRVTGSDRRTSTSLNVAPANWQFGQTFTGKNFRV

SEQ ID NO: 59464 - protein, 134 aa, Gossypium hirsutum
  unsure (1)..(134): unsure at all Xaa locations
  Clone ID: LIB3828-034-Q6-K6-B12.pep
VAGATLRGGVGRDIPMFLKIAEYRAGIVPVSYVXACRXGGIRFTINGFRYFNLVGGGGGAGAGDIVKVKVKGTNTNWLSMSRNWGQNWQSNAVLVGQALSFRVTGSDRRTCTSLNVAPANWQFGQTFTGKNFRV

SEQ ID NO: 59465 - protein, 159 aa, Gossypium hirsutum
  unsure (1)..(159): unsure at all Xaa locations
  Clone ID: GOSHI-09MAY01-C16603_1.pep
MLQLLFTVIFAEMAVIIVLCFKTPLRKLVLMVLDRAKRGRGPVIVKTVGGTVSVVMLSYIFSMMMLKKRWIVDGNASLTDEILMAKNLLETTLMGGLLFLSLIIDKLHHYIKELRIRRKTMETAKKQGQGFEDAGGSDKXPLEEEIATLRARIKQLESD

SEQ ID NO: 59466 - protein, 394 aa, Gossypium hirsutum
  Clone ID: GOSHI-09MAY01-C16143_1.pep
LKDQDVIRTVLNILQTNTSVASSLGTYFLSRISLISRDMLNVYRMYSELISSSIAEGVPFASKTSYVKLLRSVKRETLKLIETFLDKAEDQPQIGKQFVPPMMDPVLGDYARNLPDARESEVLSLFATIINKYKAAMIDDVPRIFEAVFQCTLEMITKNFEDYPEHRLKFFSLLRAIATHCFPALIQLSSQQLKLVMDSIIWAFRHTEMNIAETGLNLLLEMLRNFQASEFCNQFYRTYFLSIEQEISAVLTDTFHKPGFKLHVLVLQHLFCLVESGLLTEPLWDAATVPFPYPNNGMFVREYTIKLLSTSFPNMTAAEVSQFVNGLFDSRNDLSTFKNHIRDFLVQSKEFSAQDNKDLYAEEAALQRERERQRMLSIPGLIAPNEIQDEMLDS

SEQ ID NO: 59467 - protein, 171 aa, Gossypium hirsutum
  unsure (1)..(171): unsure at all Xaa locations
  Clone ID: GOSHI-09MAY01-C16113_1.pep
MEGINPMDLLRSNLSRVRIPEPTNRIYKQECCLSFDSPRSEGGLFVDMNTFLAFGKDYVGWNYEKTGNPVYLHIKQTKKLVSEDRPLKKPTLLAIGVDGGFDNNELEYEETHKIVILPSYATLPFPSVELPEXKVRLAVDAILMAEGAERKEQVAAWTADKKQISAYAMEL

SEQ ID NO: 59468 - protein, 143 aa, Gossypium hirsutum
  Clone ID: GOSHI-09MAY01-C16093_1.pep
MDSYEATRIVFSRIQNLDPENASKIIGYLLLQDHGDKEMIRLAFGPEALIHSLIFKAKTHLGLPISNPPSPSPPPPFSYAGVVNGCAKSLHGVAADDNGGFVDDFQFQEHVSDYLTGRSGGYADSTLHRRSFSVPGLCLTVKI

SEQ ID NO: 59469 - protein, 80 aa, Gossypium hirsutum
  unsure (1)..(80): unsure at all Xaa locations
  Clone ID: LIB3197-020-Q1-M1-C4.pep
MDSYEATRIVFSRIQNLDPENASKIMGYLLIQDHGEKGMIRLAXFGPEAHIHSLILKAKSHLGXSILNPPTPSTPSPSPF

SEQ ID NO: 59470 - protein, 111 aa, Gossypium hirsutum
  Clone ID: uC-gsflmaxxa042a04b1.pep
MDSYEATRIVFSRIQNLDPENASKIIGYLLLQDHGDKEMIRLAFGPEALIHSLIFKAKTHLGLPISNPPSPSPPPPFSYAGVVNGCAKSLHGVAADDNGGFVDDFQFQEHV

SEQ ID NO: 59471 - protein, 194 aa, Gossypium hirsutum
  Clone ID: GOSHI-09MAY01-C16013_1.pep
LLPQPEWTAWDQTVEYCAFAYQHYIVISSLRPQYRYLGDVAIAHATGAVWQRRQLFVATPTTIECVFVDAGIAPIDIATRKMKEEMKLKEAQARAVADHGELALISVEGPQTATQERITLRPPMLQVVRLASFQHAPSVPPFLSLPKQYKVDGDDTAMLKEMEERKVNEIAGGGGGVSVAVTRFPTEQKRPVDH

SEQ ID NO: 59472 - protein, 354 aa, Gossypium hirsutum
  Clone ID: GOSHI-09MAY01-C16003_1.pep
MDTPTPLFSLLCFFLFSLFLGEEQHVVEGSRVWTFGFRPKMLFVFGDSYADTGNNRKALASSWKLPYGITFPGKPAGRFSDGRVLTDFIAGYLAIKTPVPYRYRKELGGRLKYGLNFAYGGTGVFDTPAPEPNMTTQIDFLQQLLNDSVYPKRALKTSVALVSLAGNDYSNYIATNGSTAGFPVFIGRVVNQMKVNLKRIHNLGVRKIAASALQPLGCLPRSTAQFSFEQCNESENALVGLHNQLLAQAVNDLNKETNSSSFFVLDMYNAFWNVFNQKQAHQVSPTFVNPFEPCCVGVSAAFSCGSVDENGVKQYTLCSNPKSKFFWDTVHPTEQGWRAVYSTPALQSSLKQFW

SEQ ID NO: 59473 - protein, 207 aa, Gossypium hirsutum
  unsure (1)..(207): unsure at all Xaa locations
  Clone ID: GOSHI-09MAY01-C16033_1.pep
MAEELTLDLEELRQLQSIAKRPRTLSLISSEIRNLEKTLKENENGASPVTAPQIPTPISTSVKTPVNPALSYVTLASFSWDQDNDKVKIYVSLEGVEQEKIQTEFKPMSFDVKFHDVQGKNYRCAVPKLNKEIEPEKCKVMVKPTRVIITLFKASKGNWTDLHYKEDKLKPILDKERDTMAGIMDLMIHMFEXGDEEMNRTIAKAWT

SEQ ID NO: 59474 - protein, 119 aa, Gossypium hirsutum
  Clone ID: GOSHI-09MAY01-C16343_1.pep
MVLSASLHSLCIIPHTSQSKIPSIFNLLKSPLAKPHLKFNPIFKPSSLSLFPQPSKLRPKTQNFRTPTIRSLFTGIVEEMGEIKQLGMADHGGFDLKIHAKTVIEDVHLGDSIAVNGTC

SEQ ID NO: 59475 - protein, 196 aa, Gossypium hirsutum
  Clone ID: GOSHI-09MAY01-C16303_1.pep
MSICFRWVSNLSSSTTGTLSTCKTYGSLPLKPPLFSSILHLPPRPRFQLLIRATAAMETDQSAVTSTTDNSSNPPMKLLFVEMGVGYDQHGQDITSAAMRACRDAISSNSIPAFRRGSIPGVSFEQMKLQIKLGVPHSLQHSLDIERVKSVFPYGKILNVEVVDGGLVCSSGVYVEEMGDKNDDCYIVNAAVYVGY

SEQ ID NO: 59476 - protein, 154 aa, Gossypium hirsutum
  Clone ID: LIB3582-005-P1-K1-E2.pep
NSIQHLSRRARGELLIRATAVMETEQSAVTSTTDNSLNTPMKLLFVEMGVGYDQHGQEITFAAMRACRDAISSNSIPAFRRGSIPGVLFEQMKLPVKLGGSYSFQHLLDIERVKSVFTYGKILNVEIVNGGLVCSSGVYVEKMGDKNDNWYIVN

SEQ ID NO: 59477 - protein, 101 aa, Gossypium hirsutum
  Clone ID: GOSHI-09MAY01-C16333_1.pep
MGQCRSANAEDAQEFSDVERAIKTLIKNFHQYSVEGGKETLTPSELRDLVTQQLPHLMPSNCGLEEKIANLGSCNDSKLEFGSFWELIREAAKSVKPERPV

SEQ ID NO: 59478 - protein, 247 aa, Gossypium hirsutum
  Clone ID: GOSHI-09MAY01-C16323_2.pep
MPSHGDLDRQIEHLMQCKPLSETEVKTLCEQARAILVEEWNVQPVKCPVTVCGDIHGQFHDLVELFRIGGHAPDTNYLFMGDYVDRGYYSVETVTLLVALKVRYRDRITILRGNHESRQITQVYGFYDECLRKYGNANVWKYFTDLFDYLPLTALIESQIFCLHGGLSPSLDTLDNIRSLDRIQEVPHEGPMCDLLWSDPDDRCGWGISPRGAGYTFGQDISGQFNHTYGLTLISRAHQLVMEGYNW

SEQ ID NO: 59479 - protein, 278 aa, Gossypium hirsutum
  unsure (1)..(278): unsure at all Xaa locations
  Clone ID: GOSHI-09MAY01-C16323_1.pep
NKSKRNHHPRLRPRARPSHGDLDRQIEHLMQCKPLSVAEVKTLCEQARAILVEEWNVQPVKCPVTVCGDIHGQFHDLVELFRIGGHAPDTNYLFMGDYVDRGYYSVETVTLLVALKVRYRDRITILRGNHESRQITQVYGFYDECLRKYGNANVWKYFTDLFDYLPLTALIESQIFCLHGGLSPSLDTLDNLXALDPIPEVPLEGPRCDPSWSDPDDPCGWGXSPRGAGYTFRHDISGAFXHTNGLPPISXSHQLVREGYXWSPDHNVVTVFSAPITA

SEQ ID NO: 59480 - protein, 166 aa, Gossypium hirsutum
  Clone ID: GOSHI-09MAY01-C16273_1.pep
MKFRYAMARSSFLNRSMEAHSLLKKQGFDVSSYGTGAHVKLPGPSLREPNVYEFGTPYKHMFDDLRRKDPELYKRNGILPMLKRNLSVKLAPQRWQDNAADGCFDIVFTFEEKVFDMVLEDLHNRDQVLLKSVLVINLEVKDNHEETAIGARIALDLCEQIEAVES

SEQ ID NO: 59481 - protein, 129 aa, Gossypium hirsutum
  Clone ID: LIB3493-038-P1-M1-C12.pep
TCCSNQWFLIRKQDWCRELRGCLLNSWKMRIKIALDAARGIEYLHNYAVPPIIHRDIKSSNILLDANWTARVSDFGLSMMGPESDRDYKPTKAAGTVGYIDPEYYGLNVLTTKSDVYGLGVVMLELLTG

SEQ ID NO: 59482 - protein, 107 aa, Gossypium hirsutum
  Clone ID: LIB3197-051-Q1-M1-F1.pep
KYQEKEIAFESELSFLSRLHHKHLVRLVGYCEEMDERLLVYEYMKNGALYDHLHDKNNIEKSSSLLNSWKMRIKIALDAARGIEYLHNYAVPPIIHRDIKSSTYTRC

SEQ ID NO: 59483 - protein, 158 aa, Gossypium hirsutum
  unsure (1)..(158): unsure at all Xaa locations
  Clone ID: AI729425.1.pep
MAESDPSQQRPARPTCIAPAFTSLQKILSHAPNTTPLLAFLFIFFVSALTLLILTALALSVTVLGFIFFTPLVLFTXPIWLPGCTLLFLTAAGFLLACGFGGAVAAGSTWMFRYFWGMHPPGSNRVGSAQTRIYDTASHVKDYVGYLQSKVRDVAPGA

SEQ ID NO: 59484 - protein, 78 aa, Gossypium hirsutum
  Clone ID: LIB3197-050-Q1-M1-H5.pep
FSLVESGVTLLIKTALDLAVTDLGFIFFTPLGLFTSPIWLPGCTLLFLTAAGFLLACGFRGAGAAGSTWMFRYFWGMH

SEQ ID NO: 59485 - protein, 118 aa, Gossypium hirsutum
  Clone ID: GOSHI-09MAY01-C17913_1.pep
MATLDSDVPMVPAGEASGSSAASSSTKKPKRFEIKKWSAVALWAWDIVVDNCAICRNHIMDLCIECQANQASATSEECTVAWGVCNHAFHFHCISRWLKTRQVCPLDNSEWEFQKYGH

SEQ ID NO: 59486 - protein, 121 aa, Gossypium hirsutum
  Clone ID: uC-gsronu33B107e02b1.pep
PRVRATLDSDVPMVPAGEASGSSAASSSTKKPKRFEIKKWSAVALWAWDIVVDNCAICRNHIMDLCIECQANQASATSEECTVPWGVCNHAFHFHCISRWLKTRQVCPLDNSEWEFQKYGH

SEQ ID NO: 59487 - protein, 45 aa, Gossypium hirsutum
  Clone ID: LIB3146-028-Q1-K1-C10.pep
LIFLFFVYVGVCNHAFHFHCISRWLKTRQVCPLDNSEWEFQKYGH

SEQ ID NO: 59488 - protein, 209 aa, Gossypium hirsutum
  unsure (1)..(209): unsure at all Xaa locations
  Clone ID: GOSHI-09MAY01-C17893_1.pep
MATQLPDFMLIFVISCLGFISLCKPILGFIKWVWVMFLRPPKNLKHHYGSWAIVTGCTDGIGTALAFQLASKGLNLVLVGRNPLKLVATADAIRENFGAQVGTRNVVIDLAKTSGEEISKTMEDAIEGLDIGVLVNNAGLAYKGARFLHKVDSEVAESIIKVNIVAATWITKAVVPIMAKXKKGAIVNVPSGSYGGFCSYPLYTIYAAT

SEQ ID NO: 59489 - protein, 140 aa, Gossypium hirsutum
  Clone ID: GOSHI-09MAY01-C17843_1.pep
MATNTSSLKKKSEQVLDGSDIMELVENQEVFTSFVDHKFKELDKDSDGHLSVKELQPAVADIGAALGLPAQGSSPDSDHIYSEVLNEFTQGKQEKVSKTEFKEVLSDILLGMAAGLKRDPIVILRIDGEDLSEFINGPSY

SEQ ID NO: 59490 - protein, 188 aa, Gossypium hirsutum
  Clone ID: GOSHI-09MAY01-C17803_1.pep
WLPLPIPHQPASPFLISPFKLQHSFPKHLNVPLFQKKKPFNFNSKTVVSCKASNGKQNDADHTSFLNRFDRRDILLGLGGGLYGATSLVRDPFALAVVPIEPDLSSCGESTVDTGKACMNVPCCPPELKDSKIIDFEPPLGCKIRYRPAAHLVDRDYLYKFELAMERMKALPVDDPRNFMQQANIHCA

SEQ ID NO: 59491 - protein, 81 aa, Gossypium hirsutum
  Clone ID: GOSHI-09MAY01-C17503_6.pep
IFVLKGAAHVLNFSLFGICWIYNGTGMPEDTVKNRKHHPYLFILNWDYSLDTIRYDPLLMWMKGAFYFQKIKPGMEKYNFF

SEQ ID NO: 59492 - protein, 188 aa, Gossypium hirsutum
  unsure (1)..(188): unsure at all Xaa locations
  Clone ID: GOSHI-09MAY01-C17503_5.pep
MAALQYLXSLRNEHPELGDWYNSLADLYQKKLWHQLTLKLEQFVALTVFQAGDALIKLYHNFITDFEMKINPLKLAHFAVIVSQQYSEKEAAISFLEGVIEKLQATKEQRIEEPILYIKMQISKFKLEQGDQKECKKLLEDGKSTLDSMTDIDPSVYATYYWVSSQYHKFRQEFAEFYRSALLYLAYT

SEQ ID NO: 59493 - protein, 175 aa, Gossypium hirsutum
  Clone ID: GOSHI-09MAY01-C17503_2.pep
MAALQYLDSLRNEHPELADWYSSLADLYQKKLWHQLTLKLEQFVALTVFQAGDALIKVYHNFITDFETKINPLKLAHFAGIVSRQYSEKEGAISYLEGVIEKLRATKEKRIEEPILYIEMQVAKFKLELGDQKECKKLLEDGKSTLDSMDGVDPSVYASYYWVSSQYHKFRQEFA

SEQ ID NO: 59494 - protein, 386 aa, Gossypium hirsutum
  Clone ID: GOSHI-09MAY01-C17503_1.pep
MAALQYLESLRNEHPELADWYSSLADLYQKKLWHQLTLKLEQFVALTVFQAGDALIQLYHNFITDFETKINLLKLAHFAVIVSRQYSDKEASTSYLEGVIEKLQATKEQRIEEPIIYIKMQIAKFKLEQGDQKECKKLLDDGKSTLDSMTDIDPSVYATYYWVSSQYHKFRQEFADFYRSALLYLAYTSVASLSESFKLDLAFDLSLSALLGDNIFNFGELLAHPIIKSLLGTKVEWLYYILQSFNSGNLVRYEELCRVHNAALSAQPALVENEKKLLEKINILCLMEIIFSRPSDDRTIPLKVIAERTKLSIEDVEYLLMKSLSVRLIEGIIDQVEGTIHVSWVQPRVLGIPQIKSLRDRLDNWMGKVHNAWLSIEAETPDLVAS

SEQ ID NO: 59495 - protein, 144 aa, Gossypium hirsutum
  Clone ID: LIB3582-015-P1-K1-A8.pep
MAALQYLDSLRNEHPELADWYNSLADLYQKKLWHQLTLKLEQFVALTVFQAGDALIKLYRNFITDFETKINPLKLAHFAVIVSQQYAEKEAAISFLEGVIEKLQATKEQRIEEPILYIKMQISKFKLEQGDQKECKKLLEDGKS

SEQ ID NO: 59496 - protein, 60 aa, Gossypium hirsutum
  Clone ID: uC-gsflnu33B110d04b1.pep
FMTNAYLYPHCSSFHFPFFLPFSNNEIVTMAERNWRKKFMMQQDQVFQPQLITKRYVLCG

SEQ ID NO: 59497 - protein, 99 aa, Gossypium hirsutum
  Clone ID: GOSHI-09MAY01-C17473_1.pep
MRKPTKESELNTEPIGQNLIKLISNLWFSVFVLSVLIFTAIAITYQPPDPWLESAPSLTKLFTQTENATFKIDDSIVKTGEDLVSSPVPAIPPALAPNP

SEQ ID NO: 59498 - protein, 104 aa, Gossypium hirsutum
  Clone ID: uC-gsflnu33B019g09b1.pep
MRKPTKESELNTEPIGQNLIKLISNLCFSVFVLSVLIFTAIAITYQPPDPWLESAPSLTKLFTQTENATVGCHFFSHFLSCQTPFFFFKRQQLVTSLIWGFKQS

SEQ ID NO: 59499 - protein, 187 aa, Gossypium hirsutum
  Clone ID: GOSHI-09MAY01-C17783_1.pep
RPETEKVARVLINEGRKESLKEVQEESENFSSPIEVAEEIPIGKLNKVTRKPRGKKRKRREITNKPVKVLKDDIAWPMMENEKKYVKERQQQLKGGNGVTKSVGEQDQPQRGKMVSEQGSQDPKIDIRTKTLVNPFDGDVNNLKISPPKRSARLLEKKKKEGLKHEEQQQRKLRERESVRLLFVLCQ

SEQ ID NO: 59500 - protein, 198 aa, Gossypium hirsutum
  Clone ID: GOSHI-09MAY01-C17743_1.pep
GGGTYEVMVTRPRLDLYMNLPALKKLDAILITMLDGFSETEFWYVDRGIVVGDGGDCGAYSSPSIRQEEKWWLPCPKVPSNGLSEDARKKLQQCRDSTNQVLKAAMAINNSVLAEMEIPTAYLETLPKNGKDCLGDIIYRYITADQFSPECLLDCLDLSTEHQTLDIANRIEAAVHVWKQKIRGTHNHTKGKRLSWGR

SEQ ID NO: 59501 - protein, 147 aa, Gossypium hirsutum
  Clone ID: GOSHI-09MAY01-C17623_1.pep
MGEEVKQEQQPPAEEKTEDKVEEKPAEENKEETPPPPPPPPPPFVLFVDLHCVGCAKKIEKTIMKIRGVEGVVIDMAQNQVTIKGIIEPQAICAKIMKKTKRRAKVLSPLPAAEGEPIPEVVTSQVSGLTTVELNVDMHCQACAEQL

SEQ ID NO: 59502 - protein, 98 aa, Gossypium hirsutum
  Clone ID: LIB3197-046-Q1-M1-A3.pep
VKQEQQPPAEEKTKDKVEEKPAEENKEETAPPAPATPTSFVLVGDLHWVGCAKKIEKTIMKIRGVEGVVIDMLKPSTIKDIDPALSKYENQRLVFLAD

SEQ ID NO: 59503 - protein, 85 aa, Gossypium hirsutum
  Clone ID: GOSHI-09MAY01-C17173_1.pep
DRTALAEWGCKLIKSDKLLKIKERSETTELRCVEVKEETKNRNERGTTTKKRRRQSSSDHFLINMLTFCGFFIISPLIHFPLSSF

SEQ ID NO: 59504 - protein, 74 aa, Gossypium hirsutum
  Clone ID: GOSHI-09MAY01-C17093_1.pep
ITSFPRLSRISLNRCHFQQIMNKLYKNVSCNRIQAIFTYLLSSDSQKELKCTIHCKSVCYLRVRYGYVLETGYD

SEQ ID NO: 59505 - protein, 150 aa, Gossypium hirsutum
  Clone ID: GOSHI-09MAY01-C17003_1.pep
ADKFGRTRTFQLDAIPLIIGAVLTAIAQNVQTMIIGRLLAGIGIGITSAIVPLYISEISPTDIRGALGSVNQLFICIGILAALVAGLPLSRSPVWWRGMFGLAVIPSILLALGMTYSPESPRWLFQQGKISEAEKSIGTLYGKERVPEVM

SEQ ID NO: 59506 - protein, 149 aa, Gossypium hirsutum
  Clone ID: GOSHI-09MAY01-C17343_1.pep
KISSLFLSTFHFSTKMLLRSSSIPIRDSWVSHSKNFSPAPELWHQSSLTRTVSCSRSISAGSIDDSSWRMMRTVSDTDLRDLVVPQMKTAKNNNVLLDGICVQEEEVEECGIGGGGGQIFGGRRGSGGSDCEDNEWGFWDSKNGNDSTD

SEQ ID NO: 59507 - protein, 154 aa, Gossypium hirsutum
  Clone ID: GOSHI-09MAY01-C17303_1.pep
MATALANRAAQNQTTGLLRLSFNFFRNLSTATSTEKTGASSSASKKPKRKKKKNLFEVAQFLPNWGLGYRMAKTHWTDVSYQITKINLYKDGRHGKAWGVVHKDGAPTADAPKKISGVHKRCWRYIPHLSKPGDTPPTLMKPTENAPKADAELA

SEQ ID NO: 59508 - protein, 148 aa, Gossypium hirsutum
  unsure (1)..(148): unsure at all Xaa locations
  Clone ID: AW187566.1.pep
MATALANKTAQNQTTGLLRLSFNFFRNLSTATSTEKTGASSSASKKPKRKKKKNLFEVAQFLPNWGLGYRMAKTHWTDVSYQITKINLYKDGRHGKAWGVVHKNXLPKKISGVHKRCWRYIPHLSKPGDTPPTLMKPTENAPKADAEL

SEQ ID NO: 59509 - protein, 129 aa, Gossypium hirsutum
  Clone ID: GOSHI-09MAY01-C17253_2.pep
MKALILGGGFGTRLRPLTLSVPKPLVDFANKPMILHQIEALKAIGVTEVVLAINYQPEVMLNFLNEFEKKLGIKITCSQETEPLGTAGPIALARDKLIDGSGEPFFGLNSDGISEYPLKEMVNFHKGHG

SEQ ID NO: 59510 - protein, 163 aa, Gossypium hirsutum
  Clone ID: LIB3583-012-P1-K1-C11.pep
YYQIEALKAIGVTEVVLAINYQPEVMLNFLKEFEKKLGIKITCSQETEPLGTAGPIALARDKLIDGSGEPFFVLNSDVISEYPLKEMVNFHKGHGGEASIMVTKVDEPSKYGVVVMEETTGKVEKFVEKPQIFVGNKINAGIYLLNPSVLNRIELRPTSIEKE

SEQ ID NO: 59511 - protein, 116 aa, Gossypium hirsutum
  Clone ID: GOSHI-09MAY01-C17233_2.pep
MGENRMTGKVKWFDDQKGYGFISPDDGGDDLFVHQSSIRSEGFRSLADGEEVEYVVESSEGRPKAVEVTGPNGNPVRGSSRSGRGGGGGGGYGGGSGGYGGGGRRGGYGGGIGGGF

SEQ ID NO: 59512 - protein, 170 aa, Gossypium hirsutum
  Clone ID: GOSHI-09MAY01-C17233_1.pep
PAKRPSGPHPPRRHAFISPPPAVADLSVPNRSIRSQGFRSPPHGQQVQSAVQSSQGRPKAVEVTGPNGNPVRGSSRSGRGGGGGSGYGGGSGGYGGGGRRGGYGGGGGGGGGGGAGCYKCGEMGHLARDCGQGGGGGGGRYGGGGGGGGGACYNCGGSGHFARECPNSGR

SEQ ID NO: 59513 - protein, 210 aa, Gossypium hirsutum
  unsure (1)..(210): unsure at all Xaa locations
  Clone ID: GOSHI-09MAY01-C10953_1.pep
MSSGAGKTVCVTGASGYIASWLVKQLLLRGYTVKASVRDPNDPRKTQHLLGLEGAESRLMLLKADLLEQGSFDPVVEGCVGVFHTASPFYHDVLDPEAELLDPAVKGTLNGLSSCAKTPSVKRVVLTSSIAAVAYNGKPRTPDVVVDENWFSDPDYCKDLKLWYVVSKTMAXDSAWKFSKEKGIDMVAINPXMVIGPLLQXTLNTSAAAI

SEQ ID NO: 59514 - protein, 62 aa, Gossypium hirsutum
  Clone ID: GOSHI-09MAY01-C10973_1.pep
STLISSKSSLTIIQSPPTAVISHSSDVCEISGWHKMGSLSEISSFRLSFDTSCIANNTESLQ

SEQ ID NO: 59515 - protein, 141 aa, Gossypium hirsutum
  Clone ID: GOSHI-09MAY01-C10913_4.pep
MPSRRRTLLKVIILGDSGVGKTSLMNHQYVNKKFSNQYKATIGADFLTKEVQFEDRLFTLQIWDTAGQERFQSLGVAFYRGADCCVLVYDVNSMKSFDNLNNWREEFLVQASPSDPENFPFVVLGNKVDVDGGNSRVVSEK

SEQ ID NO: 59516 - protein, 67 aa, Gossypium hirsutum
  Clone ID: GOSHI-09MAY01-C10913_3.pep
KKARAWCASKGNIPYFETSAKEGVNVEEAFQCIAKNALKSGEEEEIYLPDTIDVASSSQPRSTGCDC

SEQ ID NO: 59517 - protein, 207 aa, Gossypium hirsutum
  unsure (1)..(207): unsure at all Xaa locations
  Clone ID: GOSHI-09MAY01-C10913_2.pep
MPSRRRTLLKVIILGDSGVGKTSLMNQYVNKKFSNQYKATIGADFLTKEVQFEDRLFTLQIWDTAGQERFQSLGVAFYRGADCCVLVYDVNSMKSFDNLNNWREEFLIQASPSDPENFPFVVLGNKIDVDGGNSRVVSXEKARAWCASKGNIPYFETFCQXGVNVEEAFQCVAEDALKSGEEEDIYLPDTIDVGSSSSQPRSSGCEC

SEQ ID NO: 59518 - protein, 207 aa, Gossypium hirsutum
  Clone ID: GOSHI-09MAY01-C10913_1.pep
MPSRRRTLLKVIILGDSGVGKTSLMNQYVNKKFSNQYKATIGADFLTKEVQFEDRLFTLQIWDTAGQERFQSLGVAFYRGADCCVLVYDVNSMKSFDNLNNWREEFLIQASPSDPENFPFVVLGNKVDVDGGNSRVVSEKKARAWCASKGNIPYFETSAKEGLNVEEAFQCIAKNALKSGEEEEIYLPDTIDVASSSSQPRSTGCEC

SEQ ID NO: 59519 - protein, 123 aa, Gossypium hirsutum
  Clone ID: LIB3543-054-Q1-K6-F5.pep
LRFCLPLHFTFRYVNKKFSNQYKATIGADFLTKEVQFEDRLFTLQIWDTAGQERFQSLGVAFYRGADCCVLVYDVNSMKSFDNLNNWREEFLIQASPSDPENFPFVVLGNKIDVDGGNVEWCL

SEQ ID NO: 59520 - protein, 39 aa, Gossypium hirsutum
  Clone ID: LIB3166-055-P1-K1-C4.pep
SAICRVGKTSLTNQHFNKKFSNQYKAAIGADFLTKEVHV

SEQ ID NO: 59521 - protein, 170 aa, Gossypium hirsutum
  Clone ID: GOSHI-09MAY01-C10883_2.pep
MKIIDFFLISSLLSAGSRAESIASAPFIDSPTHQFLRAPSSNDASQSEPMLLPEVGATASGLLGFPPPITLSAAGSSKLNEALISNPFDRPRAVFMLEVSGVDDPLVVGPKNALFHKALKSSGGLGSTKVDIQLPDEEQGSGISLDEPLRDYPEEEINDFASWLGGSYVP

SEQ ID NO: 59522 - protein, 197 aa, Gossypium hirsutum
  unsure (1)..(197): unsure at all Xaa locations
  Clone ID: GOSHI-09MAY01-C10883_1.pep
MKIIDFFLISSLLFSISRAESIGSVFFIDSPTHQFLRAPSSNDASQSEPMLLPEVGATASVLLGFPPPITLSAAGSSKLNEVLISNPFDRPRAVFMLEVSGVDDPLVVGPKNALFHKALKSSVGLGSSKADILLPDEEAVSTISLDHPLGDYCEEEINEXASWLGGSYATDCTKPLDGVLSIPWQMVITESSMSKKA

SEQ ID NO: 59523 - protein, 264 aa, Gossypium hirsutum
  Clone ID: GOSHI-09MAY01-C10853_1.pep
MKQYIQGGGAHGIHNVDGDKNYKAYMSPEYFDAHITPLGWQQVDNLRKHVHECGLAKRIDLVITSPLLRTLQTAVGVFGGDGYTDRMDVVPLMVANAGNSGRAAISSLNCPPIVAVELCREHLGVHPCDKRRNISDYQFLFPAVDFSLIESDQDTWWKADVRETKEEVAARGQKFLNWLWTRKEKEIAIVTHSGFLFHTLSALGNDCHPLVKKEICKHFANCELRSMVIVDRSMIGFDPSMTNYPGKTPSGLDLPSDVVDEEAD

SEQ ID NO: 59524 - protein, 99 aa, Gossypium hirsutum
  Clone ID: LIB3148-030-Q1-K1-C8.pep
RKQKEYGQKFLNWLWTRKEKEIAIVTHSGFLFHTLSALGNDCHPLVKKEICKHFANCELRSMVIVDRSMIGFDPSMTNYPGKTPSGLDLPSDVVDEKAD

SEQ ID NO: 59525 - protein, 74 aa, Gossypium hirsutum
  unsure (1)..(74): unsure at all Xaa locations
  Clone ID: LIB3166-031-P1-K1-B4.pep
MDTSAGPSVFPLHRCKTFYLVRHAQGIHIVYGDMNYXHSCFHXYFDAHITPLGXHQVDNLRKHVHECGLAKRID

SEQ ID NO: 59526 - protein, 303 aa, Gossypium hirsutum
  unsure (1)..(303): unsure at all Xaa locations
  Clone ID: GOSHI-09MAY01-C10873_1.pep
PSGHFCCSRQIFRKGFWSPEEDEKLLRLITKYGHGCWSSIPKQAGLQRCGKSCRLRWINYLRPELKRGTLSXNEENLIIERLARLAIRWSQIAARLPGRTDSEIKNLWNSCLKKMLKQRGIDPVTHKPLSEVENGEGNGSNKPSLVGHHPIHQYTSPPPPPPKLSSNWFNPEFSPPMTASYGPLYYGTTTGGSANNTTWGLVQTQTEEEEEEEEEETWTELLNSPLLMAAALQNQTPQSYYNIEIKSEPCYLTNSSSSSSSSNDMWWPQTQQQQLPLRHEPLRIQTYVGKICKHSQQQLFGHN

SEQ ID NO: 59527 - protein, 130 aa, Gossypium hirsutum
  unsure (1)..(130): unsure at all Xaa locations
  Clone ID: LIB3493-030-P1-M1-D2.pep
FSIRWSQIAGXLPGRTDNEIKNLWNSCLKKKLKQKGIDPVTHKPLSEVENGEGSGSNKPSLVGHHPIHQYTAPPPPQLFSNWFNPEISTAMTASYGPLYYGTHTVAQPITQLGDVQTQLRREEEKRRTND

SEQ ID NO: 59528 - protein, 145 aa, Gossypium hirsutum
  Clone ID: GOSHI-09MAY01-C10863_1.pep
MMIVRSRDSSESSKRSLSAFVKDKRGCYKRKRFAQTKIVVSDKIEDGHAWRKYGQKNILHSKHPRSYFRCSHKHDQGCSAIKQVQRMEDDAQMYHITYIGTHTCRDQYSSMATPRIDSPSPILKLESEEQATTPSNVTDLDSMTM

SEQ ID NO: 59529 - protein, 115 aa, Gossypium hirsutum
  Clone ID: GOSHI-09MAY01-C10803_6.pep
MGYFNGIALACLMALSLSSIDVGLAARHLQQMSPLPTLPTTTLPPLPSIPNLPQPTMPRPGALPPLPTMPALPSLPAVPTATLPPLPSMPSIPTIPTAIPSIPFLSPPPSPAATP

SEQ ID NO: 59530 - protein, 118 aa, Gossypium hirsutum
  Clone ID: GOSHI-09MAY01-C10803_4.pep
MDSSNSFALAFFVAVTSSGRPRGRAGRHLLQLPPMPTLPTTTLPPFPILSPNLPQPSIPSFPRPGALSPFPTMPGLPTLPSVPRATLPPLPGIPSFPTIQPTIPSIPFLSPPPSPCTP

SEQ ID NO: 59531 - protein, 105 aa, Gossypium hirsutum
  Clone ID: GOSHI-09MAY01-C10803_3.pep
MALSFASIDVGLAARHLLQLPQLPPMPTLPTTTLPPLPSIPNLPQPSIPALPRPGALPPLPTMPALPTLPAVPTATLPPLPSMPTIPTAIPSIPFLSPPPSPSTS

SEQ ID NO: 59532 - protein, 146 aa, Gossypium hirsutum
  Clone ID: GOSHI-09MAY01-C10803_2.pep
MASFNCFALAFLIALSFASIDVGVAARHLLQQPQTQSLPSFPNLPTPSRPSFPWPGALPPLPTTFPTGLPPLPSIPSVPTIPTAIPPIPFSFPPLPSFPNLPNPGALPPLPTTLPRGLPPLPSIPSIPTAVPSIPFFSPPPSRSTP

SEQ ID NO: 59533 - protein, 123 aa, Gossypium hirsutum
  Clone ID: GOSHI-09MAY01-C10803_1.pep
AFYFRNSHKKASFNCFALAFLMALSFASIHVGVAARHLLQQPQTPSLLKKTFPPLPSFPKPSFPKPSIPSFPRRGVLPPLPSRFPSGPKAILPPLPSIPSLPQIRTTIPSIHFFSPPLSRSTP

SEQ ID NO: 59534 - protein, 116 aa, Gossypium hirsutum
  Clone ID: uC-gsflnu33B056c12b1.pep
MGYFNCFALGFFVALSLASIDVGVAARHLQQLPPIPTLPTTTLPPFPSIPNLPQPSIPSFPRPGALPPLPAMPALPTLPSVPRATLPPLPSMPSIPTIPTTIPSIPFFSPPPSPSP

SEQ ID NO: 59535 - protein, 116 aa, Gossypium hirsutum
  Clone ID: uC-gsronu33B109f10b1.pep
MGYLNCIALAFLMALSFPSIKVGQATRHLQQLPPMPTLPTATLPPFPSIPNIPQPTIPTMPRPGALPPLPTMPALPSLPSVPRATLPPLPSMPSIPTAIPSIPFLSPPPCASPSTP

SEQ ID NO: 59536 - protein, 117 aa, Gossypium hirsutum
  Clone ID: uC-gsflnu33B074h10b1.pep
MASFNCFALAFVMALSFASTDVGVAARHLLQLPQLPPMPTLPTTTLPPLPSIPNLPQPSIPALPRPGALPPLPIMPGLPTLPSVPRATLPPLPSMPSIPTAIPSIPFLSPPPSPSTP

SEQ ID NO: 59537 - protein, 116 aa, Gossypium hirsutum
  Clone ID: GOSHI-09MAY01-C10823_2.pep
MDEKMSLTVADAVDYKGHPADKSRTGGWVPAALSLGIEICERLSTMGIAVNLVTYLGGTMHLPSATSANVVTDFMGTSFLLCLLGGFLADSYLGRYLTIAIFAMVQMLGTCLLAVS

SEQ ID NO: 59538 - protein, 152 aa, Gossypium hirsutum
  unsure (1)..(152): unsure at all Xaa locations
  Clone ID: GOSHI-09MAY01-C10823_1.pep
MNAAVADAADYNGHPANKSRTGGWVPAALXLXIEICHAPATMGIAVNLVTYLGGAMHLPSATSANVVTDFMGTSFLLCLLGGSLADSYLGRYRTIAIFSMVQMLGTCLLAVSTKLPQLRPPSCKYTDVTQCEQANNFXMGILYLSIYLIALG

SEQ ID NO: 59539 - protein, 121 aa, Gossypium hirsutum
  Clone ID: LIB3166-027-P1-K1-H6.pep
STRPSTRPFDSYLNAYKEVCRALCLIPILHYVIAFMVIWVVFLYNFLEFHFFQDFFSGFRGAPVALTFHPTSHIYHGVVSKCKILHGRYLATPWLSSPHFQTTFLNFFGNPSAFSFRRQLF

SEQ ID NO: 59540 - protein, 53 aa, Gossypium hirsutum
  Clone ID: LIB3166-027-P1-K1-H12.pep
IDNMASGYVFLYKFLEFHFFQDFFSGFRGAPVALTFHPTCHIYHVRLKKSKTL

SEQ ID NO: 59541 - protein, 221 aa, Gossypium hirsutum
  Clone ID: GOSHI-09MAY01-C10553_2.pep
MEWRACYLDVILVPLSMLIPIAYHCWLWHKVRTQPLATIIGINSTGRRFWVSAIIKDNEKKNILAVQTLRNTIMGSTLMATTSILLCAGLAAVISSTYTVKKPLNDSIFGAHGEFMVALKYVTILCIFLFSFSCHTLSIRFINQVNILINTPQDPTSIVTPHYLSDLLEKGFLLNTVGNRLFYAALPLLLWIFGPVLVFVGSITIVTLLYNLDFVFGFKRN

SEQ ID NO: 59542 - protein, 127 aa, Gossypium hirsutum
  unsure (1)..(127): unsure at all Xaa locations
  Clone ID: GOSHI-09MAY01-C10553_1.pep
MAWCGGLRGVLGVLKYVTILXIVLFSFSCHTLSIRFINQVNILINTPQDPTCIGTPHYLSDLLEKGXLLNTVGNRLFYAALPLLLWIFGPVLGFVGSITIVTLLYNLDFVFGFRRNKQIDVGDCESG

SEQ ID NO: 59543 - protein, 78 aa, Gossypium hirsutum
  unsure (1)..(78): unsure at all Xaa locations
  Clone ID: uC-gsronu33B146g03b1.pep
RKKNKHDKHNEKKNILAVQTLRNXLMGSTLMATTSILLCAGLAAVISSTYTVKKPLNDSIFGAQREFMVALKYVTILC

SEQ ID NO: 59544 - protein, 71 aa, Gossypium hirsutum
  Clone ID: uC-gsronu33B046d09b1.pep
ASTARLYNGSQLVSYKLIYNCHQSRAQLGSSRSKFLINIEPHLHPHESDTRGSEPEHFRVRYRAGATSFTY

SEQ ID NO: 59545 - protein, 169 aa, Gossypium hirsutum
  Clone ID: GOSHI-09MAY01-C10563_1.pep
MAMKIFSLAALLVGGLASSVLQSTYAATYTVGDATGWTVPNPNNPEFYDDWTDNKNFVGGDVLAFSFTTGRHDVAEVNETAYDNCITTNPIVRYTTGPANVTLNRTGEYHFICTFAGHCGFGQKLSIDVRTGPSTAPTPGSTPNPSSSASSLVATISLVFMSIALALFC

SEQ ID NO: 59546 - protein, 116 aa, Gossypium hirsutum
  Clone ID: GOSHI-09MAY01-C10513_1.pep
MDSSKLGENSTMVHETHRQGNPTDPNADQNAALINSFIEITSSSKEEALFFLESHQWDLDAAVSTFLVSNSTAALHPPPSAPTVSGVGGVNNSASPLQSDSPDYSPSQSPSRSRSP

SEQ ID NO: 59547 - protein, 205 aa, Gossypium hirsutum
  Clone ID: GOSHI-09MAY01-C10533_1.pep
MRLEEEFSHCDNYDEEEEPKTMSQCSIGALQQQQQQQKFVVVGYALTSKKIKSFLQPKFEGLARNKGILFVAIDQNRPLSVPGPLDIVLHKLTGKEWRQILEDYRQTHPEVTVLDPPDAIQHLHNRQSMLQCVADMNLSTSYGRVGVPRQLVIKKDASSIADAVDKAGLILPLVAKPLVADGSAKSHELSLAYDQYSLQKLEPPL

SEQ ID NO: 59548 - protein, 125 aa, Gossypium hirsutum
  unsure (1)..(125): unsure at all Xaa locations
  Clone ID: GOSHI-09MAY01-C10523_1.pep
KKKRKKRQWQTLETLPAPVDLVIRTEPSSEATLLGQYDLGKLLGCGAFAKVYHARDLDSGQSVPIKAVSKKKALKGGFMAPVXREIAITRRVRHPNIVKLIEVLATKTKAYFVMEFAKGGELFTR

SEQ ID NO: 59549 - protein, 75 aa, Gossypium hirsutum
  Clone ID: LIB3166-027-P1-K1-A2.pep
ATLFGKYKLGKLLGCGAFAKVYHARDVDSGQSVAIKAVSKKKVLKGGFMAHVKREIAIMRRLRHPNIVKLIEVLA

SEQ ID NO: 59550 - protein, 64 aa, Gossypium hirsutum
  Clone ID: GOSHI-09MAY01-C10493_1.pep
MKGAQAWRLGSMGDMQILPGSRHRPPLKRPIWIISLVQLVGLFLVCAYIYSPQGSAACYVFSSR

SEQ ID NO: 59551 - protein, 70 aa, Gossypium hirsutum
  Clone ID: GOSHI-09MAY01-C10443_1.pep
SPRESELRFGGSEYSNTWRCRSILWRYFNQNRIVEALKSLFERLLVFYMMQCYSEISLVELLNKYHKRYM

SEQ ID NO: 59552 - protein, 101 aa, Gossypium hirsutum
  unsure (1)..(101): unsure at all Xaa locations
  Clone ID: LIB3828-025-Q6-N6-G3.pep
TEKGTPKFTWENPLGGKKPRXPLVHFKNLHYGGGTGLHGQSTCTSCGILIKSSSILISLQHCNAMDYYIHRLRSSVPTPKGFKHRSRMSTELEANTSTHIS

SEQ ID NO: 59553 - protein, 101 aa, Gossypium hirsutum
  Clone ID: GOSHI-09MAY01-C10473_1.pep
MQCLKPGPELTTTNVVTINVGGENFQTTKQTLTQAGPNSLLSQLAETTSDRFVDRDPVYFSLLLSLLRTGALPSKVKDFDLRDLIEESRYYGIESLLTNSL

SEQ ID NO: 59554 - protein, 196 aa, Gossypium hirsutum
  unsure (1)..(196): unsure at all Xaa locations
  Clone ID: GOSHI-09MAY01-C10463_1.pep
FLHNSFIELCSQXVQNSSRKAIVCVEQLSKILQTGLXTNKKEAVGRICSRQYTNCINLWASFISANVKDYDLQPLLYMIIQIINGVAVLFPGPRYLPLRIKCIQWLNNLSSASGVFIPVASFAMDILEYKTGKDNGKPGKDFNFSSTIKLPKHWLKSRKFQDKCVSSVIELLATHFAQWSCHITFPELATIPLICL

SEQ ID NO: 59555 - protein, 181 aa, Gossypium hirsutum
  unsure (1)..(181): unsure at all Xaa locations
  Clone ID: GOSHI-09MAY01-C10403_1.pep
GSCQILAQYYQLIRLGFEGYKSIMXNCIGNALILKEGIEKTGRCEGGSKDVGVPLVAFALKDSTKYTVFHISDALRKFGWIVPAYTMPADAEHIAVLRVVVREDFSCSLAERLISHIQEVLKELDSLPSQIVKDSHVVAVAKEVVEENKDGEAAKMGDRKIQEKVTKQWRHYVKTKKTGVC

SEQ ID NO: 59556 - protein, 156 aa, Gossypium hirsutum
  Clone ID: GOSHI-09MAY01-C10433_1.pep
MDHSKVQEIVEKQVLTVAKAFEDQIDEEIAALDRLDHDDLEAIRERRLQQMKKMAEKRSRWIGLGHGEYSEIPAEKDFFSIVKASERVVCHFYRENWPCKVMDKHLSALAKQHIETRFVKIQAEKSPFLAERLKIGVLPTLALIKKAKIDDILGGV

SEQ ID NO: 59557 - protein, 137 aa, Gossypium hirsutum
  unsure (1)..(137): unsure at all Xaa locations
  Clone ID: GOSHI-09MAY01-C10783_1.pep
GIGLKIGLANLGFYTYYYAPFPSDXGLSQVSVKFQKGQPFKPFDQLMSVLPXARSAHALLKLYAKLFTDVDSQIIDFYPTDFEIDMDGKRHAWQGICKLPFIDEERLLSETLRLEKELMKKQKGMQRKLTNSLYQDI

SEQ ID NO: 59558 - protein, 107 aa, Gossypium hirsutum
  unsure (1)..(107): unsure at all Xaa locations
  Clone ID: LIB3166-030-P1-K1-C2.pep
RHGLSQVSVKFQKGQPFRPFDQLMSVLPXARSAHALLKLYAKLFTDVDSQIIDFYPTDFEIDMDGKRHAWQGICKLPFIDEERLLSETLRLEKELMTFKIKDFETFA

SEQ ID NO: 59559 - protein, 145 aa, Gossypium hirsutum
  Clone ID: GOSHI-09MAY01-C10703_4.pep
SAYAIGVAGWGTGLKLGSECCGITYSGHRYIGIALFVLATVQIFALFLRPKKDHKLRFYWNIYHHSFGYAILVLGIINVFKGFPRVKPEHKWKSAYMIVIIAMGGISLLLEAITWIVVLKRKSRKSTKPYDGYNNAQSNQQPLAM

SEQ ID NO: 59560 - protein, 177 aa, Gossypium hirsutum
  unsure (1)..(177): unsure at all Xaa locations
  Clone ID: GOSHI-09MAY01-C10703_3.pep
MGFECWSWGILFHLSHDCTLHKNLESADPAWXLHAFCQVSAYAIGVAGWGTGLKLGRGSLGITWATHRNIGIALFVLATVQIFALFLRPKKDHKYRFYWNVYHHSFGYAILVLGIFNVFKGINILKPEDKWKTAYMIVIIALGGISLLFEAITWVVVLKRKSRKSTKPCDGYNNGQS

SEQ ID NO: 59561 - protein, 216 aa, Gossypium hirsutum
  unsure (1)..(216): unsure at all Xaa locations
  Clone ID: GOSHI-09MAY01-C10703_2.pep
PPVPWAVIYSFAFCVLSEKKRKGAKGLRRRPRRCQSAVFICISFLALMISPSAALTCSSQTFTHNQVYSNCLDLPYLSSYLHFSYNSSNTTLSIAFIATPSKSGGWIAWAINPKATGMAGSQSLVGYKNSTTGTGQVHTYDISSYSSIGAKDLAFEVWDKTAESRRDGSLAIFAKIKVPADLAASGKINQFXQVGPSVRTDGRLDKHAFCRLLFAI

SEQ ID NO: 59562 - protein, 405 aa, Gossypium hirsutum
  Clone ID: GOSHI-09MAY01-C10703_1.pep
MATSFLASLFFTFWALLISPAISLTCSSQKFTKNQVYSNCLDLPSLASYLHFTYDPSNTTLSVAFISTPSKPGGWISWAINPNATGMAGSQALVAYKNSTTGVAVVHTFDISSYSSIVPKDLSFEVPDKTAETRSDGSLAIFATIKVPANLAAKGTINQVWQVGPGVGEGGMLEKHDFAAANLHSKGTLDLKNGQSSTNSGGDTTVKKKNIHGILNTVSWGILFPLGAMIARYIRSFESADPAWFYLHVFCQISAYAIGVAGWGTGLKLGSESSGITYSGHRYIGIALFVLATVQIFALFLRPKKDHKLRFYWNIYHHSFGYAILVLGIINVFKGFNILKPEHKWKSAYMIVIIAMGGISLLLEAITWIVVLKRKSRKSTKPYDGYNNAQSNQQSLLPCDQLQIL

SEQ ID NO: 59563 - protein, 117 aa, Gossypium hirsutum
  unsure (1)..(117): unsure at all Xaa locations
  Clone ID: LIB3189-018-P1-K1-G12.pep
MNGRKKMFLFLLGVCFLDTFGHLIMTAGISITSSSQKFTKNQLYFNCLXDLPSLASXLHFTYDPPNTTLSVAFISTPSKLGGWIFWAINPNATGMGGSQALVSYKNCITGVCCRAYF

SEQ ID NO: 59564 - protein, 54 aa, Gossypium hirsutum
  Clone ID: LIB3148-021-Q1-K1-A3.pep
GQDTTEYGGQKKKKKKKKKKKKDTKKKKKKKRKNNCKKNKIEQRNKQTSEKEKK

SEQ ID NO: 59565 - protein, 202 aa, Gossypium hirsutum
  Clone ID: GOSHI-09MAY01-C10723_1.pep
MGLIGKLKRKDIDQGNDDFSDFSLSSPATKIRRLDADLPPIIEEDSLPENHEKAIVLFNPNPLLLHDTPPLSSPPSTLSFSFDSHLLSGFKNQILRAADMKSAETEENKMENEGCLAVVPWVPSQIASVESRDSEQQVPALMETDEMDVEESCSNSGSMQEEHGYELDGLKPRDALHNWAQQQHCMLPQPPQNPFTPITWSD

SEQ ID NO: 59566 - protein, 131 aa, Gossypium hirsutum
  unsure (1)..(131): unsure at all Xaa locations
  Clone ID: GOSHI-09MAY01-C10683_1.pep
LFTPHYITWYWPEAFTMRKQCKSQCINHGRYCAPDPEQDFSSGYEGKDVVIEILRQLCVFKVPNVSNKSWLWWDYVTDFQIRCPMKEKKYIKECADAVIKSLGLDSXKIEKCLGDPNVDADNPVLKEKQDA

SEQ ID NO: 59567 - protein, 94 aa, Gossypium hirsutum
  Clone ID: GOSHI-09MAY01-C10653_1.pep
AISIPLAASACDPWRSFFFFITKFTRSIAGHELVFPSSKQGIPLYFLTVEGKKKRKRKMENMWKWEQGTLVSELIQGMQLAKQLRLHLGASSSS

SEQ ID NO: 59568 - protein, 263 aa, Gossypium hirsutum
  Clone ID: GOSHI-09MAY01-C10673_1.pep
DAWVQVHPNSYALVISMENMTLNWYFGNDRSKLVSNCLFRMGGAAILLSNKWSDKRRSNYQLVHTVRTHKGSDDKCFSCVTQEEDSIGKIGVTLSKDLMAVAGDALKTNITTLGPLVLPMSEQLLFFGTLVGKKLFKMKVKPYIPDFKLAFEHFCIHAGGRAVLDELEKNLQLSEWHMEPSRMTLYRFGNTSSSSLWYELAYSEAKGRIRRGDRTWQIAFGSGFKCNSAVWKALRTINPVKEKNPWMDEIHNFPVDVPRVSTI

SEQ ID NO: 59569 - protein, 51 aa, Gossypium hirsutum
  Clone ID: LIB3148-030-Q1-K1-E4.pep
NFTLLLVPIRMHIDLHFTHARHMITILIPMSLLEKIQISIGSSCSHSQGFR

SEQ ID NO: 59570 - protein, 163 aa, Gossypium hirsutum
  Clone ID: GOSHI-09MAY01-C10663_1.pep
GPLGSVYETDTFSLIDKKGLKVENVVDFSWSPTDLILALFVPELGGGNQPARVSLVQIPSKVELRQKNLFSVSDCKMYWQSNGEYLAVKADRYTKTKKSTYTGFELFRIKERDIPIEVLELDNKNDKIIAFAWEPKGHKFACIHGDNPRPDIKLFSMKSSHNL

SEQ ID NO: 59571 - protein, 124 aa, Gossypium hirsutum
  Clone ID: GOSHI-09MAY01-C10193_1.pep
MVRGEMVEMVARETDEELSLLPHQSNVDRSWRLNFDGFQLSPEHKDKKPPRSLHDCLGVLGPEDNVAEYYQQQVEMLEGFSEMDALAERGFIPGMSKEERERLARSETLAIRISNIANMVLFAT

SEQ ID NO: 59572 - protein, 270 aa, Gossypium hirsutum
  Clone ID: GOSHI-09MAY01-C10103_1.pep
KQPATEFISFTNSFHGRTMGALALTSKEHYRSPFEPVMPGVTFLEYGNIQAAIDLIRNGMIAAVFVEPVQGEGGIYSATKEFLQALRSACDDAGSLLVFDEGQCGLGRTGYLWAHEAYGVFPDMMTLAKPLAGGLPIGATLVTEIVASAIAHGDHGSTFAGSPLVCSAAISVFNKIANPSFLSSVSKKGDYMKELLNQKLGGNPHVKEIRGWGLMIGIELDVSASPLVDACRNSGLIVLTARKGNVVRLVPPLIISDEELKHAAEILHEC

SEQ ID NO: 59573 - protein, 179 aa, Gossypium hirsutum
  Clone ID: GOSHI-09MAY01-C10373_1.pep
GRVGGRVGINQRMKTLQKLVPNSSKTDKASMLDEVIEYLKQLQAQVQMMNRMNIPQMMLPMAMQQPLQMSVLAPAMGMGMGMGMGMGMGMGMGVMDINTMGRPNITGISPVMPNPFMAMTSWDGSGERLQQAASAAAMMPDPLSTFLACQPQPMTMDAYSRLAAMYQQMQQPPASGSKS

SEQ ID NO: 59574 - protein, 57 aa, Gossypium hirsutum
  Clone ID: GOSHI-09MAY01-C10363_1.pep
HRNSSIHLTGSAHSKPWSRLAAVKVRSLVFFFYKSQFSYNFSIFIFLFVFIITSLVT

SEQ ID NO: 59575 - protein, 190 aa, Gossypium hirsutum
  Clone ID: GOSHI-09MAY01-C10303_1.pep
CLLSRFKVFILTFGPGKALALNFPYVLHHMPDESVTISNHRDRLLRLVKSLSPKVVTLVEQESNTNTSPFFSRYIETLDYYTAVFESIDVACPRDDKQRISAEQHCVARDIVNMIACEGQERVERHELLGKWRSRFMMAGFSPYPLSSLVTLAVRDMLKEYNNNYRLVEREGSLYLGWINRAMATSSAWR

SEQ ID NO: 59576 - protein, 146 aa, Gossypium hirsutum
  unsure (1)..(146): unsure at all Xaa locations
  Clone ID: GOSHI-09MAY01-C10293_1.pep
MAKRKGDVAQRAWRVLRLALLWARKGGXFRRRLMMGLRLVPKFLKGLAHHQPHRHHQLMSHYKERQLSFDETPIFHVKMHRPASMRFLLPCISTEEVDFDYDFGPDDYDRVYWYDDGGRKSDSTASDTDEEDGEVEECGYEGCDEK

SEQ ID NO: 59577 - protein, 83 aa, Gossypium hirsutum
  Clone ID: GOSHI-09MAY01-C10253_4.pep
SLADRTRISALLQALNLPHEEASQSASWIMSCMGATFLVFTGTVGLSLQAPPMYAYLLHKNPKRKRETLNMLIKLDMSKAINY

SEQ ID NO: 59578 - protein, 78 aa, Gossypium hirsutum
  Clone ID: GOSHI-09MAY01-C10253_2.pep
PPPPQCASKLITRADDTEEVVKQRLRIYQAMTLPVEDYYRSRGKLLEFDLPGGVRESWPKLLHALNLEDEEHKQSAAA

SEQ ID NO: 59579 - protein, 210 aa, Gossypium hirsutum
  Clone ID: GOSHI-09MAY01-C10253_1.pep
MGIREVGRGDVVGEELGSCGRRYCELEEMVNEGGLGSEEIRVDLLSTRLEAGEARGESGFIGAGCPRTVRQAEILGGGTDIELVINVKLRGEALLAKCLGRRICSEWGGKYNVGGIDIKAENGKPGMYMDPVPPPPQCASELITRADDTEEVVKQRLRIYQAMTLPVEDYYRSRGKLLEFDLPGGVRESWPKLLHALNLEDEEHKQSAAA

SEQ ID NO: 59580 - protein, 67 aa, Gossypium hirsutum
  Clone ID: LIB3166-023-P1-K1-H11.pep
HASAHAFVHASERLRIYQAMTRPVEDFYRSRGKLLEFDLLGGIPESWPKLLCALNLEDREDKQSAAA

SEQ ID NO: 59581 - protein, 46 aa, Gossypium hirsutum
  Clone ID: LIB3148-016-Q1-K1-B5.pep
FQSKTIIVSLKNTMPRISQTITYLIYIFSAIQVQNMFSFICICNVS

SEQ ID NO: 59582 - protein, 90 aa, Gossypium hirsutum
  Clone ID: GOSHI-09MAY01-C10243_1.pep
MDSSPVHTTSSLHEQEDEWDTDGFVIPSLGIEEPYETKADTSDVETSKPHSQQAKKEEYIYLGPHGAPPSQSRQQELNPSTRKPRITQNL

SEQ ID NO: 59583 - protein, 146 aa, Gossypium hirsutum
  Clone ID: GOSHI-09MAY01-C10273_2.pep
SLLFHLRKSPPNSPPPPPPPQPPPPQIQAMGRVRTKTVKKSSRQVIERYYSRMTLDFHTNKKIIEEVAIIPSKRLRNKIAGFSTHLMKRIQRGPVRGISLKLQEEERERRMDFVPDESAIKVDQIEVDKETLDMLSGLGMSDIPGL

SEQ ID NO: 59584 - protein, 142 aa, Gossypium hirsutum
  Clone ID: GOSHI-09MAY01-C10273_1.pep
MGRVRTKTVKKSSRQVIERYYSRMTLDFHTNKKIIEEVAIIPSKRLRNKIAGFSTHLMKRIQKGPVRGISLKLQEEERERRMDFVPDESAIKVDQIEVDKETLDMLSVIGMGDIPGLVKVDPVAVSVPQVGFGRGGGPGRRF

SEQ ID NO: 59585 - protein, 99 aa, Gossypium hirsutum
  unsure (1)..(99): unsure at all Xaa locations
  Clone ID: uC-gsronu33B099f09b1.pep
MGRGRTKTXRKSSGRVYGRYYSGRTLDFHTNRKIIEEVAIIPSKRLRNKIAGFSTHVMKRIQRGPVRGIFLKLQEEERERRMDFVPDESAIKVDQIEVD

SEQ ID NO: 59586 - protein, 87 aa, Gossypium hirsutum
  Clone ID: GOSHI-09MAY01-C10263_2.pep
DIDASWLKECPKIVKRCETKLSRAIANQSVTASTKSSPSNPANSVNLIVSVVQKTIVPRQKTLNYSNWRYRKMYNVNLTTKIPPFTI

SEQ ID NO: 59587 - protein, 292 aa, Gossypium hirsutum
  unsure (1)..(292): unsure at all Xaa locations
  Clone ID: GOSHI-09MAY01-C10263_1.pep
MAGDSATKIKAYAVPAVLFSLSMLYQLVLLPRAFPPSHYDVLGLKTYCSMEEVKEAYENLESKWNSGLEIPTTTEFIKIRYAYELLTNPIWKRNYDVFGINEQDHVLEKLSQQYAXEKFSNIALPLLRTGCFXLEMMLFNVITSTRSFSPXFKDSKPWLLQVYSSGSDQSAQFANSWKRIAALLNGVANIGMVELGEVQVAAYLSERKPMGRFFFRNGLPSVVAFPSGCKTSDCLIRFEGELSVDAVTDWFAMAVLNLPRIFYYSKESLGPRFLAKSSPHKVKVIFFSKTGE

SEQ ID NO: 59588 - protein, 174 aa, Gossypium hirsutum
  Clone ID: GOSHI-09MAY01-C10233_1.pep
RNCRNQNRVYFFKNGFRIFLIRSACIVCVRSFYKRKGSWLYNRTKENEKEKYNSFSFFLIALPVFCYCCCGRPLLVFICRYGGNVVGVADAYRGCWWCRRGGASHGSAGGYCGAERMGLGLGPLYLGRVIGFWNWTRTIDWFLFLWVLDLFWYFGFDMGPGKLTRLHYLFKSYI

SEQ ID NO: 59589 - protein, 200 aa, Gossypium hirsutum
  unsure (1)..(200): unsure at all Xaa locations
  Clone ID: GOSHI-09MAY01-C11993_1.pep
CANFQILTAFANTFHVLQRXGGASFCFAWLELVSHRTFMPKLLTGNSQKGWPYIQRLLVDLLQFLEPFLRNAELGVPVHFLYKGTLRVLLGRRRXIFPECLCDCHFTFCDVIPPSCIQMRNIILSAFPRNMRLPDPSTPNLKIDLLPEIREPPRILSEVDAALKAKHMKADVDEYLKMRPHGGSTFLTELKQRLLLSPSE

SEQ ID NO: 59590 - protein, 124 aa, Gossypium hirsutum
  Clone ID: LIB3196-049-P1-M1-G4.pep
FNPRPYFRLFINWLLDLGSLDPVTDGANFQILTAFANTFHVLQPLKVPSFCFAWLELVSHRTFMPKLLTGNSQKGWPYIQRLLVDLLQFLEPFLRNAELGVPVHFLYKGTLRVLLVLLHDFPEF

SEQ ID NO: 59591 - protein, 124 aa, Gossypium hirsutum
  Clone ID: GOSHI-09MAY01-C11983_1.pep
AARIDAPNAAHHPALKSNGRVLSFGLDAPICDSMASVLNLGEKKVLNGARDGFHGLEEQRVSVPNRRENGDDCSSGSSITVSNSMEEGGRSCIQENRMGNINGFPSPIPCLPGVPWPYPWNSAV

SEQ ID NO: 59592 - protein, 290 aa, Gossypium hirsutum
  unsure (1)..(290): unsure at all Xaa locations
  Clone ID: GOSHI-09MAY01-C11953_1.pep
QVSEATKPDLVIFVMDSSIGQAAFDQAQAFKQSVAVGAVIVTKMDGHAKGGGALXAVAATKSPVIFIGTGEHMDEFEVFDVKPFVSRLLGMGDWSGFMDKIHEVVPMDQQPELLQKLSEGNFTLRIMYEQFQNILKMGPIGQVFSMLPGFSAELMPKGREKESQAKIKRYMTMMDSMTNEELDSSNPKLMNESRMMRIARGSGRHIREVMEMMEEYKRLAKIWSKMKGLKIPKKGEMSALSRNMNAQHMSKVLPPQMLKQIGGMGGLQNLMKQMGSTKDMMGMFGGGGDK

SEQ ID NO: 59593 - protein, 158 aa, Gossypium hirsutum
  Clone ID: GOSHI-09MAY01-C11963_1.pep
PTRPSIYPAEVSNFQLLCSLSNLKRFRLEKVSVPSFSTSAFQLKNLRKISLVMCNISQAFEKGTNKMSDNFPNLLEIDIDYCDDLTELGEGLCDVVQLMKLSITNCHMLRALPEGIGKLVNLEVLRLTSCTDLMSLPETIGSLSQLTILDISDCLSIK

SEQ ID NO: 59594 - protein, 212 aa, Gossypium hirsutum
  unsure (1)..(212): unsure at all Xaa locations
  Clone ID: LIB3543-044-Q6-K6-D6.pep
XIQNLVKNYSQFVSFPIYXFWQEKSRTVEVEEEEPPKEGEENPEEVKKKKTTKTEKYWDWELANETKPIWMRNPKEVEKDEYNEFYKKTFNEFLDPLGYTHFTTEGEVEFRSVLYIPGMGPLNNEDVVNPKTKNIRLYVKRVFISDDFDGELFPRYLSFVKGVVDSDDLPLNVSREILQESRIVRIMRKRLVRKTFDMIQEISESENKEDYK

SEQ ID NO: 59595 - protein, 100 aa, Gossypium hirsutum
  unsure (1)..(100): unsure at all Xaa locations
  Clone ID: LIB3583-031-Q6-K7-E3.pep
LVRGTQXTLYLRSDDKYEFSDPTRIQNLVKNYSQFVSFPIYTWLXKSRTVEVEEEEPPKEGEENPEEVKRGKTTKTEKYWDWELADETKPMWVRSPKEVE

SEQ ID NO: 59596 - protein, 112 aa, Gossypium hirsutum
  Clone ID: LIB3166-045-P1-K1-C11.pep
EEVVATQFEKVKIEEEPPKEGEENPEEVKKKKTTKTEKYWDWELANETKPIWMRNPKEVEKDEYNEFYKKTFNEFLDPLGYTHFTTEFPRYLSFVKGVVDSDDLSLNVSREI

SEQ ID NO: 59597 - protein, 133 aa, Gossypium hirsutum
  Clone ID: GOSHI-09MAY01-C11563_1.pep
MDPCPFVRILVGNLALRFPLSTKPSLSRIHPSTSPCYCKIKLKNFPHQVGSIPLIHANTQNPESCNFSLQKSLAACFSLSKSQVDRIISKGGSSYKLSIEVYADPDDSTCGLASGKLLGKVTVPLDLRGAELK

SEQ ID NO: 59598 - protein, 48 aa, Gossypium hirsutum
  Clone ID: GOSHI-09MAY01-C11523_1.pep
AVGQRVRCPGYRVITSEVEASKFTVAKFIYGTSWLPSTGVAFLAGLQV

SEQ ID NO: 59599 - protein, 95 aa, Gossypium hirsutum
  unsure (1)..(95): unsure at all Xaa locations
  Clone ID: LIB3583-041-P1-K1-B10.pep
MQNNIKKKKLIEAAPPPDVIAAFEKYAEGGPQMTAEQLHRFLVDAQGQGGAKVSNAEEILLQGLQKRHHMAKFXKTQALTLDDFHHYLFSANLNL

SEQ ID NO: 59600 - protein, 102 aa, Gossypium hirsutum
  Clone ID: LIB3166-039-P1-K1-A6.pep
MGTYRMCGCFTRKFKIIEAAPPPDVIAAFEKYAEGGPQMTAEQLHRFLVDVQGQGGAKVSDAEEILLQVLQKRHHMAKFRKHALTLDDFHHYLFSADLNPPI

SEQ ID NO: 59601 - protein, 239 aa, Gossypium hirsutum
  Clone ID: GOSHI-09MAY01-C11413_1.pep
MPFPMKIQPIDFSPSEDVLPPRLETVKPVVKSRFKRLFERQFPSILRNSAAEKVDADELPFSKECTTAELEPSSFCLAKMVQNFIEDNNEKQQSGAVRCSRNRSNCFNRNCNDSSDDDMDGFGFSDSNLSSSAEASEILKSLVPCGSVNERNLLAHTARIMEKNKISKRKDDICRKIVIDGLLAFGYDASICKSRWEKSPSYPAGEYEYHNVIIDGERLVIDNHFRSEFEIARSTKTYK

SEQ ID NO: 59602 - protein, 208 aa, Gossypium hirsutum
  unsure (1)..(208): unsure at all Xaa locations
  Clone ID: GOSHI-09MAY01-C11433_1.pep
RVGRNGADQPVRGRVRTRGVYPKNWYPIPLMFCRPWGKLPENVPCHPKLADFANCMKKKGRGMSIFINILDGDYHERAEDAKAACKQLDTYINYKNCEGVAEIVVAPNMSEGFRGVVQTMGLGNLKPNIVVMRYPEIWRRENLKEIQAXFVGIIXDCIVXNRQVVIVXGLDEWPMSIXRWSIDLXWIGNVGLMLLLSQLLLRRELQSL

SEQ ID NO: 59603 - protein, 163 aa, Gossypium hirsutum
  Clone ID: LIB3585-043-P1-K1-C8.pep
DAPSWRPRWKFHHWSFCVLGASLCIVIMFLISWSFTVVSLALASLIYYYVSIKGKAGDWGDGFKSAYFQLALRSLRSLGANQVHPKNWYPIPLIFCRPWGKLPENVPCHPKLADFANCMKKKGRGMSIFINILDGDYHERAEDAKAACKQLDTYINYKNCEGV

SEQ ID NO: 59604 - protein, 172 aa, Gossypium hirsutum
  Clone ID: GOSHI-09MAY01-C11783_1.pep
MVKHLSEKSAIERRDSRFTGVRKRKWGKWVSEIRLPNSRERIWLGSYDTAEKAARAFDAALFCLRGRSAKFNFPDNPPEIAGGTSLSPHEIQAAAARFANSEPSTIHSEQTDSAFQMESPSPSVSDARFANLEPSTIHSEQTDSAFQMESPSPSVSYATVQFDGSVMDLLTM

SEQ ID NO: 59605 - protein, 233 aa, Gossypium hirsutum
  Clone ID: GOSHI-09MAY01-C11753_1.pep
MVRERETPKQQQQVSYTVEQLVAVNPYNPDILPDLENYVNEQVSSQTYSLDANLCLLRLYQFEPERMSTQIVARILVKALMAMPAPDFSLCLFLIPERVQMEEQFKTLIVLSHYLETGRFRQFWDEAAKNRHIVEAVPGFEQAIQTYAIHVLSLTYQKIPRPVLAEAINIEGLSLDKFLEHQAANSGWILEKGHGRGQLIVLPRNEFNHPELKKIAADSVPLEHITRIFPILG

SEQ ID NO: 59606 - protein, 103 aa, Gossypium hirsutum
  Clone ID: AI055119.1.pep
MVRERETPKQQQQVSYTVEQLVAVNPYNPDILPDLENYVNEQVSSQTYSLDANLCLLRLYQFEPERMSTKLVTLFGKALRQCRSKFSSALFIPDQCNGGPFKT

SEQ ID NO: 59607 - protein, 226 aa, Gossypium hirsutum
  Clone ID: GOSHI-09MAY01-C11723_1.pep
GGTLIFQVGNWCRWLTDMFGMDSDDNLNEDQCSSQDDFRKNGDGESKSFLFLNSLSDLLMPPPPVLMDRSIREELCPSIDLPLVKRILCNFTPDEFCPDPVPGAVLEALNAETIVERRLSGDPARSFPYTAALVVYTPPSSADVAEKVVEAGGKSPLSRNASVVQRKGYTSDEELEELNSPLSSIIEKFPLSPTIVTNGGVNGNHEHAGYGGINARYKLLHEVWSV

SEQ ID NO: 59608 - protein, 189 aa, Gossypium hirsutum
  unsure (1)..(189): unsure at all Xaa locations
  Clone ID: GOSHI-09MAY01-C11683_1.pep
MALQTAALVPATFTLPKEGKSSPSFKDSTFFGVSLSEHAKADFSSSALRCKDKHGCFYCFFSIXREFNPRNGAVRAETTATAAPAISRSAVDGKKTLRKGSVIITGASSGLGLATAXALAETGKWHIIMACRDFLKAERAAKSAGMSKQNYTIMHLDLASLDSVRQFVDRYKRSGRPLDVLSCNAAVYQ

SEQ ID NO: 59609 - protein, 117 aa, Gossypium hirsutum
  unsure (1)..(117): unsure at all Xaa locations
  Clone ID: LIB3120-009-Q1-K1-A3.pep
MALQTAALVPATFTLPKEGKSSPSFKDSTFFGVSLSEHAKADFSSSALRCKREFNPRNGAVRAETTATATPAISRSAVDGKKTLRKGSVIITGAXSGLGLATAKALAETGKWHIIMA

SEQ ID NO: 59610 - protein, 282 aa, Gossypium hirsutum
  Clone ID: GOSHI-09MAY01-C11673_1.pep
GFLPFLLIFLVIAYFPSCAHPQNADLILPLEAVNLGNWLVTEGWMKPSRFDGIINKDLLDGTQVQFRSTKLNKYLCAENGGGTVVVANRPSPSGWETFRLWRVSESCFNLRVFNKQFVGLGNQGVQAVSDTPTDTETFEIVRKDDDRNRVRFKASNGLFLQAQSETLVTADYAESSWDDSDPSVFIMTIVNTIQGEFQITNGYGPDKAPQVMQDHWNSYITEEDFNFMSANGLSAVRIPVGWWIAQDPTPPKPFVGGSSIALDNAFTWAEKYGMEGIIDLHA

SEQ ID NO: 59611 - protein, 127 aa, Gossypium hirsutum
  unsure (1)..(127): unsure at all Xaa locations
  Clone ID: GOSHI-09MAY01-C11623_1.pep
MAGLLAWAADVVGGHGGNSNQDDDFNIIPLIFSPEQQQYVQELDRTASSLTRLIQDLRLRLPPPDISQRLPHLHAHSLASNAALALQLNAHSSTXREQAQLREETLQQENTAYENAISDCDGKIHEK

SEQ ID NO: 59612 - protein, 126 aa, Gossypium hirsutum
  Clone ID: GOSHI-09MAY01-C11163_1.pep
HRIVVTHSDIATPFMAEAQAGLQAMKLGNFTGLNKMKVMGDSKTVIKKCQRFEIDKSAIGAIIRDIQSTKDRFQEIWFHFIPKKENTYAHVRAKEALKRKESCNWVGGITENVGQALNMEPPRHFK

SEQ ID NO: 59613 - protein, 99 aa, Gossypium hirsutum
  Clone ID: LIB3166-035-P1-K1-E11.pep
LTDQIFLLWTLVNQSNRSFHSMFGARVTVYFDAAYDQQHSRSASGLLVRNEEGKILASKMVNHSDIATPFMAEAQVGLVGGIPEHVRQALEKYRPRHPD

SEQ ID NO: 59614 - protein, 400 aa, Gossypium hirsutum
  Clone ID: GOSHI-09MAY01-C11133_1.pep
MNLVEGLLTQIQGLSSTASDVLSLQNVLNQADESLHAESTRLLPFLDQLDPSKHSLGYLYFLEACTAGPVTTESASSFVLVIARFISSCVAEQIRLAPDKFISVCKRFKDQVLLLEEPLRGVAPMLTAVRKLQSSTEHLTTLHPEFLLLCLLAKCYKTGLSILGRVGFEVDQPRDLYLYCYYGGMICIGQKCFRKALELLHNVVTAPMSTINAIAVEAYKKYILVSLIHHGQLSTSLPKYASRVAQRNLKSLCLSYMQLANSYNNGKIADLETYVQANMEKFGSDNNLGLVKQVVSSIYKRNIQRLTQTYLTLSLQDIANTVQLNSPKEAEMHVLQMIQDGEIYATINQNDGMVRFVEDPELYKTCEMIEHIDLSIQKLMTLSNKLTVMDELMSCDPLYL

SEQ ID NO: 59615 - protein, 99 aa, Gossypium hirsutum
  Clone ID: LIB3165-042-Q1-K1-D3.pep
MNTVEGLVNQIQGLSTTASDVLSLQNLLKQADDSLHAESTRLFPFLDQLDPSKHSLGYLYFLEACTAGPVTKEQAGSYVLMIARFITSCIAEQIRLAPD

SEQ ID NO: 59616 - protein, 70 aa, Gossypium hirsutum
  Clone ID: GOSHI-09MAY01-C11123_1.pep
GIQWTSEEEEKFKAKVMEAYEREGNPYYSTARLWDDGIIDPADTRIIAGLCISASRNRPFEDTKYGVFRM

SEQ ID NO: 59617 - protein, 86 aa, Gossypium hirsutum
  unsure (1)..(86): unsure at all Xaa locations
  Clone ID: GOSHI-09MAY01-C11093_1.pep
ALEFLLESLGFANCTDVFPVGIGDDRTDEDAFKILRDRGQXFGILVSKFPKDTNASYSLQEPDEVMDFLRRLVEWKELSLRTQSRM

SEQ ID NO: 59618 - protein, 166 aa, Gossypium hirsutum
  Clone ID: GOSHI-09MAY01-C11043_1.pep
FLGENQISTVNYHGEVPAEQRVENLNKFKSDDGDCPTLVCTDLAARGLDLDVNHVIMFDFPLNSIDYLHRTGRTARMGAKGKVTSLVAKKDLLLAERIEEAIRKNESLESLTVDNVRRDTARTRITEQKGKNVKLFKASNQKNKTKAVSASVRTSGKKPTIAKSVK

SEQ ID NO: 59619 - protein, 155 aa, Gossypium hirsutum
  Clone ID: GOSHI-09MAY01-C11063_1.pep
PTRPPTRPDSSTSDGPSGWLRLSLYGNSHSAGSAKTNTTGSYASSLPSNLCRHFSFAEIKAATKNFDEALVLGVGGFGKVYKGEIDGGTTKVAIKRGNPLSEQGVHEFQTEIEMLSKLRHRHLVSLIGYCEENCEMILGYDYMAYGTLREHLYKT

SEQ ID NO: 59620 - protein, 73 aa, Gossypium hirsutum
  unsure (1)..(73): unsure at all Xaa locations
  Clone ID: GOSHI-09MAY01-C11003_1.pep
VYAYRLVAGDSPXERRIYSTCFKKELIAKMWFEWNKYVGNRCFDMETVNLNACNDLFLESQLLREDIRVLYRR

SEQ ID NO: 59621 - protein, 126 aa, Gossypium hirsutum
  Clone ID: GOSHI-09MAY01-C11023_1.pep
MIGPTNFIDEIDCGSFFDHIDDLLDFPNEDVEAGFSAADSAVNAAAFPSIWTAHPESFPGSDSGFSNNSASDLSAELSVPYEDIVQLEWLSNFVEDSNCGASLTIKKQEPNSNNKDSPSHHDHDHH

SEQ ID NO: 59622 - protein, 75 aa, Gossypium hirsutum
  Clone ID: LIB3585-009-P1-K1-A5.pep
MIGPTNFIDEIDCGSFLDHIDDLLDLPNEDVEAGFSGNDSVINAVSFPSIWTAHSESFLGSDSDFSNNSSSNLSG

SEQ ID NO: 59623 - protein, 128 aa, Gossypium hirsutum
  Clone ID: GOSHI-09MAY01-C11383_3.pep
MQTQSFGATAGTVMNQSQASGSTTGGAPAQPKQRVRARRGQATDPHSIAERLRRERIAERMKALQELVPNANKTDKASMLDEIIDYVKFLQLPLRPLCLSRLGGAAAGAPLVAEVPSLGGDCGPNLFC

SEQ ID NO: 59624 - protein, 65 aa, Gossypium hirsutum
  Clone ID: GOSHI-09MAY01-C11383_2.pep
HDLFNVFINHYFLKIQFVVWASLKNRGGVVGQVLSMSRLGGAAPVAPLVSEVITLMIKICANLFC

SEQ ID NO: 59625 - protein, 236 aa, Gossypium hirsutum
  Clone ID: GOSHI-09MAY01-C11383_1.pep
MTQSQGSGPTAGEAVTAPEKPKQRVRARRGQATDPHSIAERLRRVRIAERMKALQELVPNANKTDKASMLDEIIDYVKFLQLQVKVLSMSRLGGAAAVAPLVSEGGGDCIQTSANGGSHPRNSNGDQTPSANDRLTMTEHQVAKLMEEDMGSAMQYLQEKGLCLMPISLATAISSATSRSRNPMINHENPANGSHLLIQSSGGDGPSSPSMSVLTVQSATMGNGGLEGGAASVSKP

SEQ ID NO: 59626 - protein, 60 aa, Gossypium hirsutum
  unsure (1)..(60): unsure at all Xaa locations
  Clone ID: LIB3145-005-Q1-K1-F5.pep
AAEPSSSKPVEQKAKPPEPPKQDYIHVRARXGQATDPHSIAERLRRERIAERMKLFKTVS

SEQ ID NO: 59627 - protein, 159 aa, Gossypium hirsutum
  Clone ID: GOSHI-09MAY01-C11343_1.pep
TLVFTPISSPLISFHGLINNWENPNTMIPACFSQPSNLSGTSQVPQNLITCIYHTQLWDSPTCLTLTWSKTHFSHSLTVYAADSFSITISLFPSTFSFFRNRPGSKSVYLTHHHRQRIKLYWDFTRADFAENSAEPESSFYIAISCNGNARIHPWGSHG

SEQ ID NO: 59628 - protein, 174 aa, Gossypium hirsutum
  unsure (1)..(174): unsure at all Xaa locations
  Clone ID: AI055120.1.pep
TLIFTPISSPLISFHGLINNWENPNTMIPACFSQPSNLSGTSQVPQNLITCIYHTQLWDSPTYLTLTWSKTHFSHSLTVYAADSFSITISLFPSTFSFFRNRPGSQICLLDSPPSSKNQAVWXFHRADXAENSAELESSFYIXISCNGKLEFILVILRMNSXKVFXVPMAHGTP

SEQ ID NO: 59629 - protein, 194 aa, Gossypium hirsutum
  unsure (1)..(194): unsure at all Xaa locations
  Clone ID: LIB3829-030-Q6-K6-A2.pep
FSITISLFPSTFSFFKNRPGSKSVYLTHHHRQRIKLYWDFTRADFXENSAEPESSFYIAISCNGKLEFILGDLMDELAKRCSGLSMARQVLLEPTLLSRREHVFGHKSYVSRAKFLGSKHEIGIDCNGGVLKVKVDGQTSLVIKRLAWKFRGNERIYVNGIEVEFFWDVFNWVNSENNNNNNNNTNGHGVFIFQ

SEQ ID NO: 59630 - protein, 445 aa, Gossypium hirsutum
  unsure (1)..(445): unsure at all Xaa locations
  Clone ID: GOSHI-09MAY01-C11363_1.pep
MSSESQIWVIPFFGQGHLLPSMELCKHIASRNFKATLIISFNLSSSIPSSFHDHPLIQVAQIPSSPPTPPELSSGPHHHHSDLAQGIASLLENTSQPACAVIDNMMDWTADIFKKLKIPTIAFFTSGACSAALEFAMWKARVLNIKPGETILLPGLPEEMALTDSDLKQGPPPGPPPPQLGGFGFPRGPPGPPPPPAAHGFPLGHPPPKMGPPQPGGQPQWMETAKDSVALMLNSCHELEGPFLDYLRLQIGKPVWGVGPLLPQQFWKSSDSLLHDREIRPNKQSNVTDDEVMGWLDSKPHGSVLYVSFCTEVAPTKQQFQQLADALEASNRPFIWVIQHGSGRPGSPSGPPPGPPQFLGNQPDSNDGVFEEKGYFPHGFGPKGRXKEGLXIHGWAPPLLIXNHASTGGFLSHCGWNSTVEAIGRGVPLLAWPIRGDHTPMPNWY

SEQ ID NO: 59631 - protein, 78 aa, Gossypium hirsutum
  unsure (1)..(78): unsure at all Xaa locations
  Clone ID: GOSHI-09MAY01-C11283_2.pep
QKVGYIGSHGVQALKRYKYSGVDHSYLPKYVLQPFWCRFVNXFFPLWMPPIMITLTGFMLLVTLSVLGXVYSPHLDFT

SEQ ID NO: 59632 - protein, 89 aa, Gossypium hirsutum
  Clone ID: GOSHI-09MAY01-C11283_1.pep
MGYIGSHGVQALKRYKYSGVDHSYLAKHVLQPFWSRFVNFFPLWMPPNMITLMGFMFLVTSAVLGYVYSPHLDSPPPRWVHFAHGLLLF

SEQ ID NO: 59633 - protein, 50 aa, Gossypium hirsutum
  Clone ID: LIB3146-005-Q1-K1-B9.pep
TGASLELRIDTRLTEEIWKEHWVSAMSFINKDMEEASSLAHLVTHIAKHC

SEQ ID NO: 59634 - protein, 145 aa, Gossypium hirsutum
  Clone ID: GOSHI-09MAY01-C11243_1.pep
VSENTSREQSFLLPESHHRQPHSLHRSSTRSRHCAPSLTGIPTTVGLEGLSSPNISRFCTENRSNTTTPLLLSRFNEPLATPKPFPRLGSNSTGSVNDNKPNCSSTGSRLELRFKPVDSSTEDEDEIAPTAIYFLFPLRKSNLGF

SEQ ID NO: 59635 - protein, 169 aa, Gossypium hirsutum
  Clone ID: GOSHI-09MAY01-C11233_2.pep
GREARGDPIFLPLFLFFTNTKWSNPQAIFGYKSGATTTTAAEQPQATHIPEKPGTQAPWKPVVPTPSAKPAPKSDTILGKPYEDIRLHYTIGKELGKGQFGVTYLCIENSTGKQYACKTISKRKLITKNDKEDMRREIQIMQHLSGQPNIVEFKGAYEDKLSVHLVMEL

SEQ ID NO: 59636 - protein, 153 aa, Gossypium hirsutum
  unsure (1)..(153): unsure at all Xaa locations
  Clone ID: LIB3543-062-Q6-K6-D7.pep
ACTSSTPIPPSLEKPGTQTPWKPVAPSPSPKPVAPRVDTILGKPFEDIRMHYTIGKELGKGQFGVTYLCIENSTGKQYACKTISKKKLVTRNDKEDMRREIQIMQHLSGQPNIVEFKGAYEDKLSVHLVMELCXCGELFDRIIAKGHYIERAT

SEQ ID NO: 59637 - protein, 542 aa, Gossypium hirsutum
  unsure (1)..(542): unsure at all Xaa locations
  Clone ID: GOSHI-09MAY01-C12993_1.pep
MLITVREASSWPLTFNLSSFSSPKPSPILKNSVCRASLSVHPKPTSNSQSWNLSLLSNSQKGSVFDPLGINPDESSGLNRVWDSFLSLLTPTFESTSGTRKEKSSSARGVAAAIEDSSIEFGDFFKGPLPGKFLKLLAFLALSRLGVYIPLGGVNREAFVGNLDQNSLLSTLDSFSGGGIGRLGICSLGIVPFINAQIVFQLLAQVYPKLQDLQKREGEAGRKKILQYTRYASVFXAIVQAIGQVLYLRPYVNDFSTQWVLSSVTLLTLGAVLTTYIGERISDLKLGNGTSLLIFTNILSYLPASFGRTVAQAYQDGNYIGLVAIIISFFLLVLGIVYVQEAERKIPINYASRYSSRSGGLQKSAYLPFKVNSSGVMPIIFSTSSLALPGTLARFTGISVLKKAAVALNPGGSFYLPTNILLIAFFNYYYTFLQLDPDDVSEQLKRQGASIPLVRPGKSTAAFLKTVLSRISVLGSVFLAILAAGPAVIEQTTHLTAFRGFAGTSVLILVGCATDTARKVQAEIISQKYKNIEFYDFDKYSP

SEQ ID NO: 59638 - protein, 153 aa, Gossypium hirsutum
  Clone ID: GOSHI-09MAY01-C12983_1.pep
MRKGQVNVFFLLLFLSLSSASDQKWRKAMMSAYNGSSSSSSMMMNRVGSSILFPIHGNVYPTGYYNVTINIGHPPKPYFLDFDTGSDLTWLQCNAPCVHCIEAPHPLYQPSNDLVACRHPLCAALHPPDYKCESPDQCDYEVEYADGGSSLGV

SEQ ID NO: 59639 - protein, 182 aa, Gossypium hirsutum
  unsure (1)..(182): unsure at all Xaa locations
  Clone ID: GOSHI-09MAY01-C12943_1.pep
LSEASSIVSEVPDYLFGLENSDEIQPRDPKLRTRQLLYENNSVSDPGSPAPVVSSSPFCSTSSATVVPSVAKPDNPEPVLKSKQSQTDSXVEQPVSQPTTYSGTPMWHHYVPDSHYSAPAVQQIPVYXYVPGHVQPGNHQGQAQPVQIRTQYVQQYSNSSGQVPVGYHQQVHGAGQTILAGT

SEQ ID NO: 59640 - protein, 123 aa, Gossypium hirsutum
  Clone ID: GOSHI-09MAY01-C12883_1.pep
KRTRHHLFLQIQGCLGLTFSVITKVERRASRMTVKAMGAAKYKGTQMREKKLTEMIGKKVTEAKQVCEGDETSDECKVAWDEVEELSQAKADLRLRLEIEKKDPLESFCQENPETEECKIYED

SEQ ID NO: 59641 - protein, 276 aa, Gossypium hirsutum
  Clone ID: GOSHI-09MAY01-C12843_1.pep
MASWGVAECSLRPFTAVKIHHKPRPSLPSNTINAFKFKPLPCSAFKVPTLWSKGRNLGGLGLLSVSAPLKVTITSEEDKGKEESTTDGVNNGEFDPGAAPPFKLSDIKAAIPKHCWVKDPWRSMSYVVRDVVVVFGLAAVAAYFNNWVVWPLYWIAQGTMFWALFVLGHDCGHGSFSNNPALNSVAGHLLHSSILVPYHGWRISHRTHHQNHGHVENDESWHPLSEKIYKSLDNATRLLRVTLPFPMLAYPIYLWSPSPRKKGSHFHPHSDLFVPN

SEQ ID NO: 59642 - protein, 169 aa, Gossypium hirsutum
  Clone ID: GOSHI-09MAY01-C12583_1.pep
PTRPPTRPFTLPPTRPSSSRQSHLGYPAAMAACSLTLSSSLPQPKPAFFGSKPSHLSLHSTSFALKSQCFRVSSSSVSISSRPADDLVASLLSKVIQTDGGVSLTTKQHQEVAQVANELNKYCVDEPVKCPLIFGDWDVVYCSNPTSPGGGYRSALGRLFFKTKDMVQA

SEQ ID NO: 59643 - protein, 84 aa, Gossypium hirsutum
  Clone ID: LIB3166-054-P1-K1-C2.pep
QAAMAACSLILSSSLPQPKGSFFGSKPSHLSLHSTSFALKSQCFRVSSSSVSISSRPADDLVASLLSKVFFLSPPFSSINLFFF

SEQ ID NO: 59644 - protein, 82 aa, Gossypium hirsutum
  Clone ID: GOSHI-09MAY01-C12443_1.pep
MVSVDQENEEFQDCEVRAEGHEGTPHEALILALGYLGVRDLFLIENVCTSLRSVVQNDPLLWRDIHINLPLNEKITDDVLLQ

SEQ ID NO: 59645 - protein, 143 aa, Gossypium hirsutum
  unsure (1)..(143): unsure at all Xaa locations
  Clone ID: AW187980.1.pep
IFFSTVKGSEIQRKRFEKWRLKKKYKYKKTVEIFSGIVFKMTNINYMEYEQIKCQDGNQHGRMNSVRSQQTCRRKRPRVIESRMNGVDVDLKWEWDQQPWWQRSTWIVSSSEGERKRKNQXXXXXXXXIMETVDIEGYLIYKL

SEQ ID NO: 59646 - protein, 104 aa, Gossypium hirsutum
  Clone ID: uC-gsronu33B011f09b1.pep
HCPCASLPPRLLILFPLQIRMHPIHPTLNHSWLFPSASLLISQTIHPTMLISILTFYLFIFHVVYICHLENNSTKNFNSLFILYFFSNAIFQIFFFEFRIPSEC

SEQ ID NO: 59647 - protein, 89 aa, Gossypium hirsutum
  unsure (1)..(89): unsure at all Xaa locations
  Clone ID: LIB3145-028-Q1-K1-B7.pep
MGTRDMVSVDQENEEFQDCEVRAEGHERTPHEAFILALGYLGVRDLFLIENVCTSLXSVVHNDPLLWRDIHINPPLNEKITDDVLLQIT

SEQ ID NO: 59648 - protein, 72 aa, Gossypium hirsutum
  Clone ID: LIB3196-008-P1-M1-C8.pep
RCGQRAEKYSRAIGWGLQGATSGMEDAKEQIEQESKNSKPPSQDEEAAIKKKYGGIIPQKPALIYNDHERAY

SEQ ID NO: 59649 - protein, 342 aa, Gossypium hirsutum
  unsure (1)..(342): unsure at all Xaa locations
  Clone ID: GOSHI-09MAY01-C12463_1.pep
PPSVRPASAHASAHASGRTNTGVRGSTXKKGTGSGKSSKGDSANPAPADGKLKWSQYEGPDPDLAEMLERDVLETTPGVRWDDVAGLTEXKRLLEEAVVLPLWMPEYFQGIRRPWKGVLMFGPPGTGKTLLAKAVATECGTTFFNVSSATLASKWRGESERMVRCLFDLARAYAPSTIFIDEIDSLCNARGASGEHESSRRVKSELLVQVDGVNNTGTNEDGSRKIVMVLAATNFPWDINEALRRRLEKRIYIPLPNFESRKELIRINLKTVEVAADVDIDEVARRTEGYSGDDLTNVCRDASLNGMRRKIAGKTPDEIQNMSXDEISXDPVAMCDFEETLA

SEQ ID NO: 59650 - protein, 108 aa, Gossypium hirsutum
  Clone ID: GOSHI-09MAY01-C12793_1.pep
GSTLKPSSSHRYQEGGTSVTIQFDAAFDSRNFKSASGLVVWGRGGRLMATKTVLHRNVQSPFAAEALTGLQAVKLGSEMELPSVTVMGDSLVRGRDDLPEGRSSRDPD

SEQ ID NO: 59651 - protein, 265 aa, Gossypium hirsutum
  unsure (1)..(265): unsure at all Xaa locations
  Clone ID: GOSHI-09MAY01-C12693_1.pep
QTLVSLGIRFAFLSPLDALHGDIGALSATDILVLFSKSGSTEELLRLIPCARAKGVYIISVTSVPNNALANACDMNVHLPLERELCPFDLAPVTSTAIQMVFGDTVAIALMGARNLTKDQYAANHPAGRXWGKSLIFKVKDVMKKQDELPICKEGDLIMEQLVELSSKGCGCLLVIDDEYHLLGTFTDGDLRRTLIKASGEAIFKLRVGDMCNREPRTIGPDAMAVEAMQKMESPPSPVQFLPVIDHQNVLIGIITLHGLVSAGL

SEQ ID NO: 59652 - protein, 217 aa, Gossypium hirsutum
  unsure (1)..(217): unsure at all Xaa locations
  Clone ID: GOSHI-09MAY01-C12653_3.pep
YQKIVISAPSADAPMFVVGVNENTYNPSMDIVSNAFCTTNCXAPLGGGFFXFIISLMTTVHQLHNSKLYPFNKTEGGRGAGQNIIPSSTGAAKAVGKVLPELNGKLTGMAFRVPTPNVSVVDLTCRLQRSASYEDVNAVMKYAAEGPLKGILGYTDEDVVSNDFVGDSRSSIFDAKAGIGLSKSFMKLVSWYDNEWGYSNRVLDLIEHIALVGATRD

SEQ ID NO: 59653 - protein, 184 aa, Gossypium hirsutum
  Clone ID: GOSHI-09MAY01-C12653_2.pep
MAFSSLFRSTAAASASLIEAASDRSDLSLSPSDRLKVSSLGFGGNFNSFFGASVSTRSSSLQKCNSRSIQPIKATATEIPPTIPKSRSSGKTKIGINGFGRIGRLVLRIATSRDDIDVVAVNDPFIDAKYMAYMFKYDSTHGPFKGTIRVVDESTLEINGKQVQVVSKRDPAEIPWGEYGAEFV

SEQ ID NO: 59654 - protein, 447 aa, Gossypium hirsutum
  Clone ID: GOSHI-09MAY01-C12653_1.pep
MVFSVVSECLLCICAFFFPLLHVSIRPPPPFRLFSFDGLPSDRSDLSLSPSDRLKVSSLGFGGNFNSFFGASVSTRSSSLQKCNSRSIQPIKATATEIPPTIPKSRSSGKTKIGINGFGRIGRLVLRIATSRDDIDVVAVNDPFIDAKYMAYMFKYDSTHGPFKGTIRVVDESTLEINGKQIQVVSKRDPAEIPWGDYGAEFVVESSGVFTTLAKASAHMKGGAKKVVISAPSADAPMFVVGVNENTYNPSMDIVSNASCTTNCLAPLAKVVHEEFGIVEGLMTTVHATTATQKTVDGPSMKDWRGGRGAGQNIIPSSTGAAKAVGKVLPELNGKLTGMAFRVPTPNVSVVDLTCRLQKSASYEDVKAVIKYAAVGPLNGILGYTEDDVVSNDFVGDSRSSIFDAKAGIGLSDSFMKLVSWYDNEWGHSNRVLDLIEHIALVAATRD

SEQ ID NO: 59655 - protein, 112 aa, Gossypium hirsutum
  Clone ID: LIB3146-061-Q1-K1-E4.pep
PRVRAFRVPTPNVSVVDLTCRLQKSASYETVKAAIKRASQGPLKGILGYTDEDVVSSDFVGDPRSSIFDAKAGIGLGNSFMKLVSWYDNEWGYSNRVVNLIQHMELVGSTPK

SEQ ID NO: 59656 - protein, 102 aa, Gossypium hirsutum
  Clone ID: GOSHI-09MAY01-C12643_1.pep
NTLCYGNRFWLFEPRCGMHDIGGWYIETFGRDKKGRTVPSQRYWDGFDTTKQFEERLHPAMYLLALAYRTLDIEDTKIRKQTIWKFVEGKLFSILSLYKKFV

SEQ ID NO: 59657 - protein, 162 aa, Gossypium hirsutum
  Clone ID: GOSHI-09MAY01-C12613_2.pep
MGSGAGSFLKVLFRNFDVLAGPVISLLYPLYASVRAIESESRADDRQWLTYWVLYSMMTLLELTFAKVIEWIPIWSYAKLIFTCWLVIPYFSGAAYVYEHYLRPFFMNPQQTINIWYVPRKKDFFSKPDDILTAAEKYIEENGTDAFEKLIHRVRQQPSDCY

SEQ ID NO: 59658 - protein, 209 aa, Gossypium hirsutum
  Clone ID: GOSHI-09MAY01-C12613_1.pep
MGSGAGSFLKVFFKNFDVLAGPVISLLYPLYASVRAIESESRADDRQWLTYWVLYSMMTLLELTFAKVIEWIPIWSHAKLIFTCWLVIPYFSGAAYVYEHYLRPFFMNPQQTINIWYVPRKKDFFSKPDDILTAAEKYIEENGTDAFEKLIHRADKSRSSSYGHIYDDDGYRHGYPYSNPAIFCCSCEELLNACLKRVNYLNLLVSASF

SEQ ID NO: 59659 - protein, 62 aa, Gossypium hirsutum
  Clone ID: LIB3147-029-Q1-K1-E6.pep
TSVQEFFSRATKYSRVAVRISMPVAIIIIYVAISTTPGLVSPMNELLKCICAILFNVFLRGS

SEQ ID NO: 59660 - protein, 206 aa, Gossypium hirsutum
  Clone ID: GOSHI-09MAY01-C12603_2.pep
MWTKKKQDPAVHREKYQLPQFSSSTMSSPGSGIFSGFTKLCKGLTVILIGGHIVVRLLPSSVIYLALIPARTIPFGWNLITAGYIEQSLHGVVVSVIGLLFMGKLLEPIWGSKEFLKFIFIVNFLTSVCVFTTAIALYYITREENYLYMPLSGFHGVLAGFLVGIKQIVPDQELSLLKIKAKWLPSLMLLISIAISFFTPDSATYL

SEQ ID NO: 59661 - protein, 304 aa, Gossypium hirsutum
  Clone ID: GOSHI-09MAY01-C12603_1.pep
MSSPGSGMFSGFTKLCKGLAVILIGGHVVVQLLPTSVTYLALIPARTIPFGWNLITAGYIEQSVHGVVVSTLGLLFMGKLLEPIWGSKEFLKFIFIVNFLTSVCVFITAIALYYLTMQEKYLYMPLSGFHGVLAGFLVGIKQIVPDQELYLLKIKVKWLPSLMLLLSIAISFFTPESATYLPTLIFGTYIGWIYLRYLQRKPESKLRGDPSEDFAFSTFFPEFLRPIIDPIASIFHRMLCGKSEVSSNPQGYTLGGAPLLGSDPIEASRRRERGARALEERLAAEKLAAGRDSEEPHIDGNDRV

SEQ ID NO: 59662 - protein, 205 aa, Gossypium hirsutum
  unsure (1)..(205): unsure at all Xaa locations
  Clone ID: GOSHI-09MAY01-C12153_1.pep
MEGSSSSSRHVLAILLIILQFTPSIAKTFSHKPYHTKRNTEYIRSSCTTTTYPRLCYRSLSSYASKINTSPRLIAHTALLVTFRASKSTSRFMRKIARTHRLKPQVAAAMADCIEMIDDSIDEPQKSIGEIARIRRSNFVLIMSDLQTWVSAALTDEDTCMDGFSGRAMNGYAKMMVRKRIVXIAHLTSNALALINNYASSQILD

SEQ ID NO: 59663 - protein, 219 aa, Gossypium hirsutum
  Clone ID: GOSHI-09MAY01-C12173_1.pep
PTRPLEESVRMGLTGDSSMGHYADWGSNKYKGSQNGYAVAYTESECYNQIRKPTHRMIKPQKAYGMAETWDEENAQSYATYKSQTGPPMFKTQVHGPSRNGFGSHSNTATAHMQSYGFSSPGKREGRVYGYGGPTAAARHQKSNGGMGHGFDIHGNYKKTEAYGYEESNGYGEYAMNGMARTQPHIRGKHTGHGNGFVKNQAYGPTKNKGFWIYLKPEF

SEQ ID NO: 59664 - protein, 212 aa, Gossypium hirsutum
  Clone ID: GOSHI-09MAY01-C12163_1.pep
TFSKWFNHHKEIGTNTVKKKDKIRAENARLHSAVSIAGLAAGLASVAAAGNSDGGGAGSKMSMALASATELLASHCIELAELAGADHDRVASVVKSAVDIQSAGDLITLTAAAATALRGEAALKARIPKEAKKNSAISPYAETQWSDALHTQMKDQNPPCQGELLQHTRKGVLRWKRVNVYINKKSQVIIKLKSKHVGGAFSNNNKWIVYEV

SEQ ID NO: 59665 - protein, 99 aa, Gossypium hirsutum
  unsure (1)..(99): unsure at all Xaa locations
  Clone ID: GOSHI-09MAY01-C12113_1.pep
HFGKGVPQVEATFLALPVLINFLRLGFLRYWQRHGFCSLILLQHSXDGGDEDVMALTQELSCVGLHVTAVDTPTASAKRITITAHNAIYDAFIFSFFYV

SEQ ID NO: 59666 - protein, 111 aa, Gossypium hirsutum
  Clone ID: GOSHI-09MAY01-C12053_2.pep
SSRFLFSDSLAFFLPSFLSRKTKDSVSFANSSSDRYVYFLFLKPSTFFNKSPLSNSHPCLPLLYPTPQLRRRLILTRPSSACASLMPPRLALPRWLFCWGGSPDAVARPCL

SEQ ID NO: 59667 - protein, 106 aa, Gossypium hirsutum
  unsure (1)..(106): unsure at all Xaa locations
  Clone ID: GOSHI-09MAY01-C12053_1.pep
MSSTSLSDATTTSASDPHAPLLRSRQSDASAARSSALALLLGRVTGRRGASMLVRETAARELEERRADWGYSKPVVALDILWNTAFVVVSVVMLICTVNEXPNTPV

SEQ ID NO: 59668 - protein, 230 aa, Gossypium hirsutum
  Clone ID: GOSHI-09MAY01-C12333_1.pep
RFLIGCLGALAPLPLSSICSLGGVNLNYSSIEASLPAVEATQKHPGDPTAVAVVEVTQDGRHKILGEISASKLWKCDYLAAAWALANLSAGQFVMGAEDNVSSRLLPDISVNSTVEDNKVANGGGSARARKFSSRSIGFNPVSPSFGMGRTMYRGRSAPLTCKTSSSLAAVMAQMLSHRANHVWVTEDDNDDVLVGMVGYADILVAVTKQPAAFIPSTRSIMELASEIQS

SEQ ID NO: 59669 - protein, 229 aa, Gossypium hirsutum
  unsure (1)..(229): unsure at all Xaa locations
  Clone ID: GOSHI-09MAY01-C12323_1.pep
FIDEQFSCVANGRPDRDYQKLKWKPKGCTLPRLNGGHMLELLRGKRLVFVGDSLNRNMWESLVCILRNAANNPENVYEAHGRHYFRGEASYSFIFKDFNFTIEFFVSPFLVREWEMPDKTGAKKETLRLDLVGKSSDQYKSADILIFNTGHWWTHEKTSKGKDYYQEGSHVYNELNVLEAFRKALTTWARWVDASVNPMKTMVFFRGYXSASNFTGGQWYTGGACDSET

SEQ ID NO: 59670 - protein, 145 aa, Gossypium hirsutum
  Clone ID: GOSHI-09MAY01-C12293_1.pep
KSTGADRPITCGDSLIGTKKTLVFYKGRTPNGLRTDWVMHEFRATADSLPPNALLVPKIMQLGLRLWSPTVRILILLCGCIWKRKECLILISYHPVACTVSHHPVPFSIMTRAGLKKNVSPWRILITNSLMTWLKVNSYTPLMMK

SEQ ID NO: 59671 - protein, 65 aa, Gossypium hirsutum
  Clone ID: GOSHI-09MAY01-C12273_1.pep
MGPIKIAFGDMLITFMRVFCSSMFGLFTSWIATAIRVQTISWAPIGIITFIIFAFVLIFNIIGGF

SEQ ID NO: 59672 - protein, 125 aa, Gossypium hirsutum
  Clone ID: LIB3149-046-Q1-K1-B5.pep
SRSLWGSVLRWIPTSTGHIIASEKRLLSLVKTLYVQELVNIGSGPPGSKVRWFRSSSNEPRFINTVTFDSKEGSPTLVMVHGYAASQGFFFKNFDYLANRFKAIAIDQLGWGGSSKPDFTCKSTE

SEQ ID NO: 59673 - protein, 115 aa, Gossypium hirsutum
  Clone ID: LIB3584-020-P1-K1-A10.pep
LCWLFFFLFSFFAFDIYIIIVSYSFFIFLSSWGGSSRPDFTCKSTEETEAWFIDSLEEWRKAKNLSNFILLGHSFGGYVAAKYALKHPEHVQHLILVGTAGLSSESDTTYEWVTR

SEQ ID NO: 59674 - protein, 117 aa, Gossypium hirsutum
  unsure (1)..(117): unsure at all Xaa locations
  Clone ID: LIB3166-050-P1-K1-D10.pep
PTRPPTRPSTRPPTRPPTRPVMVHGYAASQGFFFKNFDYLANRFKVIAIDQLGWGGSSRPDFTCKSTEETEAWFIDSLEEWRIAKNLSNFILLGHSFGGYVAAXYALKHSEHVQHLI

SEQ ID NO: 59675 - protein, 267 aa, Gossypium hirsutum
  unsure (1)..(267): unsure at all Xaa locations
  Clone ID: GOSHI-09MAY01-C13983_1.pep
FQPWITEYLTSQHQSSRHLEETSVRAHDRVQASTTKALLEKFSKLDREAGIGISSFRSDSEFSGNVREAVSLSRNAPPGPPPLCSICQHKAPVFGKPPRWFTYAELELATGGFSQANFLAEGGFGSVHRGLLPDGQAIAVKQHKLASSQGDLEFCSEVEVLSCAQHRNVVMLIGFCIEDRRRLLVYEYICNGSLDSHLYGRHREPLEWSARQKIAVGAARGLRYLXHEECTVGCIVHRDMRPNNILIHXDFEPLVGDFGLARWQPDG

SEQ ID NO: 59676 - protein, 190 aa, Gossypium hirsutum
  Clone ID: GOSHI-09MAY01-C13863_1.pep
IRLSIGYADFDMKINGILSIILQDEGDSFAKRAEMYYQKRPQLIQMVEDLHKSYRSLADKYEQLRSQLNHGSHPTLLSSLSSPVNQVQGYVELNAEDPDLETEFDDDVSNHVSSKESKMKAEDKIRQGEKKKRSNGIGMQRNTSDGYEAAMLENEKLWNELRFKVSELVKDNLSHHAELIRRNDEKREIF

SEQ ID NO: 59677 - protein, 447 aa, Gossypium hirsutum
  Clone ID: GOSHI-09MAY01-C13583_1.pep
MADSKGYISKTELETHKKPDDLWISIQGKIYDVTQWSHHHPGGPLPLLNLAGQDATDAFIAYHPGIAWQYLDKFFTGYYLEGYLVSDISKDYRKLAVEFSKMGLFDKKGHGTCILLTIIALLFFICVYGVLCCDKTWVPLCCGGLMGFLWIQSGWIGHDSGHYTVMSNKNLNRLAQLLTGNCLAGITMAWSKWTHNAHHIACNSLYFDPDLQHMPFFTVSSKFFNSITSAFYGRKLNFDSLTRLLVSYQHWTFYPVMCFARINLFAQSIILLLSKRKVPNKGQEIFGILVFWTWYPLLVSLLPNWYERVMFVVVSFAVTGIQHVQFCLNHFSSSVYVGPPNGNDWFEKQTDGTLNILCSSWMDWFYGGLQFQVEHHLFPRLPRCHLRTISPFVKELCKKHNLAYNCASFWKANAMTIETLKSAALQARVLTNAVPKNLVWEAVNTHG

SEQ ID NO: 59678 - protein, 84 aa, Gossypium hirsutum
  Clone ID: LIB3197-027-Q1-M1-H1.pep
WSHHHPGGPLPLLNLAGQDATDAFIAYHPGIAWQYLDKFFTGYYLEGYLVSDISKDYIQLAVELLKMVLFDKNCFGRCILHFQL

SEQ ID NO: 59679 - protein, 440 aa, Gossypium hirsutum
  Clone ID: GOSHI-09MAY01-C13563_1.pep
RLKKLGISKSQPEDRAPEEVKKFARLDIDPNSITWRRVMDVNDRFLRKITVGQGPEEKGMVRETGFDISVASEIMAVLALTTSLADMRERLGKMVIGNSKAGEPITADDLGVGGALTGLMNDAINPTLMQTLEGTPVLVHAGPFANIAHGNSSIVADKIALKLVGPQGFVVTEARFGAHIGTEKFMNIKSRYSDLRPQCAVIVATIRALKMHGGGPEVVAGRPLRHAYLNENVPLVEAGCVNLARHIINTKAYGVNVVVAVNKFSTDTEAEMNAVMNAAMAAGAFNAVICTHHAHGGKGAVDLGVAVQRACASGNQQLKYLYPLDISIKEKIEAIAKSYGASGVEYTEQAEKQIEMYTKQGFSGLPICMAKTQYSFSHNAAEKGAPGGFILPIRDVRASIGAGFIYPLVGTMSTMPGLPTRPCFYEIDLDTATGKVIGLS

SEQ ID NO: 59680 - protein, 118 aa, Gossypium hirsutum
  unsure (1)..(118): unsure at all Xaa locations
  Clone ID: LIB3585-025-P1-K1-C8.pep
GGAVTVLRYDETLRCLPQTGGGTQAFVDAGTYANIAHGNSSIVADKIALKLVGPQGFVVTEAGSGAAIGTESIRNIKCRYSDRRPHWADSAATIRGWTMHGGGPEVVXGKPLDHAYLN

SEQ ID NO: 59681 - protein, 241 aa, Gossypium hirsutum
  Clone ID: GOSHI-09MAY01-C13493_1.pep
PTRPTDSSVFVRYNRMLHGRKTERGRKLDNLTIKFLKPCVRPASHRIQPELTDEASEQIATAYADLRNASSNAKTGGTLPITARTLETIIRLSTAHAKLKLSRKITKVDVEAALKVLNFAIYHKELTEMEDREQEREREQQRKQRADRRGQTADAMEVDDPPLAQQATATGSVERIEAFKTIFGQHMRVNHKETVSIAEVEDIVNVGADIHYSRVEIMSILEKLQDENILMIAGETVHMIV

SEQ ID NO: 59682 - protein, 60 aa, Gossypium hirsutum
  unsure (1)..(60): unsure at all Xaa locations
  Clone ID: LIB3147-054-Q1-K1-G11.pep
RKRSNQVPKNQLISTSLKHDLNFLHLLILVDPGLLLHLKLSYARFLQLSSIYSHLAISXI

SEQ ID NO: 59683 - protein, 138 aa, Gossypium hirsutum
  Clone ID: LIB3189-011-P1-K1-G2.pep
NRMLHGRKTERGRKRDTLTIKVVKKYIHYAKHRIQPELTDEASEHIATAYAELRNASSNAKTGGTLPITARTLETIIRLSTAHAKLKLSRKVTKVDVEAALKVLNFAIYHKELTEMGDREQERQREEARTHRADRQGP

SEQ ID NO: 59684 - protein, 248 aa, Gossypium hirsutum
  unsure (1)..(248): unsure at all Xaa locations
  Clone ID: GOSHI-09MAY01-C13413_1.pep
MSASTLSISANPAVSARRRPVLLAENKSNFESIPAEPNPIGVNVGEDKATGAANSRDLSHHSVRAEALKDSGQARKVTVAQKSNVPLRRTRKGVVNKTEKPRWQTVVSIFIKNLVLLLVLAGLVQMVRRLALKSGEVSRAGTEVSSISXFEGRVAEVENFLKTTAXMIQVQVEVVDRILENEIGXLGRELDERIDDQSVALGNSLKILEEKSEGLDKSLRELKSANLLTKDEFENMYEQMFKEKGGIG

SEQ ID NO: 59685 - protein, 107 aa, Gossypium hirsutum
  Clone ID: GOSHI-09MAY01-C13423_1.pep
GSGEEVAERVLSQPSLAGLQGPTVCPVFCKRDGKVTADYYAIVICVPKKALYKSVQQLRAIGGSGVLISPLTYIFDEETPRWRELLSLLGVLSILGLRHGWFYLHFI

SEQ ID NO: 59686 - protein, 202 aa, Gossypium hirsutum
  Clone ID: GOSHI-09MAY01-C13723_1.pep
MAAAAPEGSQFDARQYDAKMDELEAVGQDFFTSYDEVYDTFDVMGLQENLLRGIYAYGFEKPSAIQQRGIVPFCKGLDVIQQAQSGTGKTATFCSGILQQLDYSLVQCQALVLAPTRELAQQIEKVMRALGDYLGVKVHACVGGTSVREDQRILSSGVHVVVGTPGRVFDMLRRQSLRPDHIKMFVLDEADEMLSRGFKDQI

SEQ ID NO: 59687 - protein, 102 aa, Gossypium hirsutum
  unsure (1)..(102): unsure at all Xaa locations
  Clone ID: uC-gsflmaxxa090f08b1.pep
MAAAAPEGSQFDARQYEAKMDELEAVGQDFFTSYDEAYDTFYDLGXQDNLLRGIDAYGSEKPSAVQPRGLVLFCKGLDGIQQAQSGXGKNCSFCSGILQRLD

SEQ ID NO: 59688 - protein, 190 aa, Gossypium hirsutum
  Clone ID: GOSHI-09MAY01-C13693_1.pep
MMQQPAAGGVAPPPSMAADQSQAHQYQQQPQSQPWMMMSQQQQGGQPVPPPTGWTPQPVPPPTQMQQYSAGSAAAGSGEIRSLWIGDLQPWMDENYLINIFAQTGEVVSAKVIRNKQSALPEGYGFIEFVSRVAAERGLQPYNGLPMPNAEQNLKLNWASLGSGEKRQQEAPEYTISVRDGAADVSDYML

SEQ ID NO: 59689 - protein, 177 aa, Gossypium hirsutum
  Clone ID: GOSHI-09MAY01-C13663_1.pep
MACKGCLECLLKLLNFLMTLVGLAMVGYGIYLFVEYKRAADVAMLLSPVGTDQIQLGRPMLMAVSLSSSIFDNLPKAWFIYLFIGVGVVLFVISCFGCIGASTRNLCCLSCYSLLVVLLILVELGCAAFIFFDKSWKEELPTDKTGYFDMIYQFLEENWSIGKWVALGIVVLEVSVT

SEQ ID NO: 59690 - protein, 85 aa, Gossypium hirsutum
  Clone ID: uC-gsflmaxxa096h02b1.pep
MACKGCLKCLLKLVHFLMTLDGLAMVGYGIYLSVEYKRAADDAMLVTPVGTDQIQLGRPMLMAVSLSSSIFDNLPKAWFIYPAIG

SEQ ID NO: 59691 - protein, 189 aa, Gossypium hirsutum
  Clone ID: GOSHI-09MAY01-C13613_1.pep
MVTIPFFVLNILLFLSSSAATPKSGADHDLVRSSCVHASYPSLCFRTLSSYSGPANTPRELAQAAVKVSLSRARKVSNYLSTSVTGYNKRERVALSDCVEQIDESMEELSKTLGELKHLRGETFEFQMSNARTWVSAALTNEDTCLDGFEGVDGKVKSNVKRKITNVAKVTSNALYMINRLNESRGRHR

SEQ ID NO: 59692 - protein, 68 aa, Gossypium hirsutum
  Clone ID: LIB3120-043-P1-K1-H8.pep
PTRPPTRPPTRPPTAVLIMLLGLSSSAATPKSGAGHDLVRSSCVHASYQGLCFSTLVSYSGQANTPRE

SEQ ID NO: 59693 - protein, 446 aa, Gossypium hirsutum
  unsure (1)..(446): unsure at all Xaa locations
  Clone ID: GOSHI-09MAY01-C13193_1.pep
EKVDREARDRRRERDGDTEGDRPEKRSKCSDKESDDGCADGEGATEREKEGFNSGVQQRKRMLRPRGSPQVASREPSFRPRPQDNEGSQGKPEVSTVVYKVGECMQELIKLWEEYEASQADKNGESSQNGPTLEIQIPAEHVTATNRQVRGGQLWGTDIYTDDSDLVAVLMHTGYCRPTASPPPPAIQELRATIRVLPPQDCYTSKLRNNVRSRAWGAGISCSYRVERCCIGKKGGGTIDLEXPCLTHSSTVEPTXLAPVAVERTITTRAAASNALRQQRFVREVAIQYNLCNEPWIKYSISIVADKGLKKPLYTSARLKKGEVLYLETHSCRYELCFTGEKMVKATVASQAHEADTEKSQNHHSHSSNGEKNDSENTLIDVFRWSRCKKPLSQKVMRSIGIPLPLEHVEVLVENVDWEDVQWSQTGVWIAGKEYTLARVHFLSPN

SEQ ID NO: 59694 - protein, 79 aa, Gossypium hirsutum
  Clone ID: LIB3189-004-P1-K1-H9.pep
MSRGNQRDRDRDRAHARAAHIAKGSKDDGLTPEHRRERDALALFDKLAFYAAHATVVIYRRSVFKNLLLQLVVCIVFFP

SEQ ID NO: 59695 - protein, 48 aa, Gossypium hirsutum
  Clone ID: LIB3582-005-P1-K1-A8.pep
RYSRKGINERGNLSRRCSGVNPSSLEPLAMWAALACALSRSRSLWLPR

SEQ ID NO: 59696 - protein, 68 aa, Gossypium hirsutum
  Clone ID: LIB3148-032-Q1-K1-G2.pep
MSRGNQRERDRERAQARAAHKAKGSKDDGLTPEQRRERDAKALQDKLAKKAAQATVESERRSGIKNKK

SEQ ID NO: 59697 - protein, 458 aa, Gossypium hirsutum
  unsure (1)..(458): unsure at all Xaa locations
  Clone ID: GOSHI-09MAY01-C13173_1.pep
VVGAYLYAYTAFNEITAFLVFMQLMLDYHIGAASIARSLASYVATIFELIPALKGNIPPWVGHGGQEFFGGTLSINILAPILLAVLTVILSLGVGESSAVNSFMTAAKVVIVIFVIIVGSFKVDVDNWSPFAPNGVKHIFTGATVVFFAYVGFDAVANSAEEANRPQRDLPIGILGSLLVCVVLYVGVCLXVLTGMVXYNLLGEDAPLSEAFTSKGLKYVSILISIGAVAGLTTTLLAGLYVQSRLYLGLGRDGLLPSIFAKVHPIRHTPIHSQIWVGIVAAVLGGLFNVHILSHILSVGSLTGYSVVAACVVTLRWKNNTGNRVSSKCISTWCEGVLCIFLVACCGFAAGVLYRFGTHFIFMIVAVAIAIMACAALCFRQAYSDPPGFSCPWVPIVPSVCIFFNIYLFAQLHYEAWIRFIILSIVSVGIYAFYGQYHANPRSHEAIISHMAPEEHRP

SEQ ID NO: 59698 - protein, 75 aa, Gossypium hirsutum
  Clone ID: LIB3147-055-Q1-K1-G9.pep
IDPPGFSCPWVPIVPSVCIFFNIYLFAQLHYEAWIRFIILSIVSVGIYAFYGQYHANPRLDETIIYHMGPEEDRH

SEQ ID NO: 59699 - protein, 198 aa, Gossypium hirsutum
  Clone ID: GOSHI-09MAY01-C13163_1.pep
MKLTWNKNNNNNNKRSREAIASYPNLPFDLQDPSHDDMQLQNQEHAHSQHQDKPAAGALDSDFKQLAQSFQAQGNKLAEDGKFREALGKWETALNLMPENAVLLEQKAQVLLELGDAWSALKAATRATELEPSWAGAWITLGRSQLNFGEPDSAIESFGRALAIKPDSVEAQDDRKTASHLIKKRKQLHSSGLSTDKN

SEQ ID NO: 59700 - protein, 140 aa, Gossypium hirsutum
  Clone ID: LIB3189-004-P1-K1-A11.pep
LEQASTEKIDGGGIDGIQTMDDSAQPTEMMAAREMEVSDADSESKRSVAMAVEESHLPKSVEQNSFEGEMQEEHHQNEGAEIGGSDTDGEAESMFFENADAAEQFLKELERGAAIGSHSGADTSHDHSQTIDGQIVIDSG

SEQ ID NO: 59701 - protein, 135 aa, Gossypium hirsutum
  Clone ID: LIB3189-004-P1-K1-A6.pep
QSDHQLSANDHEKYQHPSENQWQLLVLAPSRIAQQHQHSQRTCFQPLRQYLSLQFQHLHSDGAPLALHLQNYFVHHTLVNQILVFGTAKAATFVYFWEHFFGFMKRLLVLVEKNHPWYGYYLYGTMYGSGRRHGS

SEQ ID NO: 59702 - protein, 151 aa, Gossypium hirsutum
  Clone ID: GOSHI-09MAY01-C13053_1.pep
MYRTVVNRILLTKNTGGGRRCLLRFPDLRTAVTSSRFSTTTEPQTSPNRPLNPADSSTSSSSTSFQTSSGAGDIPRQERKNPPAEYQGEQARVLQASLRHVVRLGWSEEAMIAGAKEVGISPSIVGSFPRKEAALVEFFMDDCLQRLIDRI

SEQ ID NO: 59703 - protein, 216 aa, Gossypium hirsutum
  Clone ID: GOSHI-09MAY01-C13063_1.pep
MASLCLLVLLLLCLPFISVAYRPGDIVPMSKMGQYHSSRTVWHDVIGKHCPIFAVNREVLIPIAKPTGYTGADPYKISFQVGKEKFLVPWLFLINRKSSEVPMIDMHLRYSGGDLHGVTAKIVDMPHHYVEIHPNIRKQFWDPQHWPKHVLVRYTWEEQLEIDVTSGFYVLFGSGLMLSFILSIYILQSSRDKLARFVMETVAESSAPAVGVAKVE

SEQ ID NO: 59704 - protein, 53 aa, Gossypium hirsutum
  Clone ID: GOSHI-09MAY01-C13013_1.pep
GLYFDLVCNPFPTSTRPGVGFSWRVSRELKVVLMWEMDYFKIKVHPSGRVSRP

SEQ ID NO: 59705 - protein, 154 aa, Gossypium hirsutum
  Clone ID: GOSHI-09MAY01-C13033_1.pep
MAVSFLAISAASTALSFIGLQVWAEFSLDKLQNDGLISENFIHTENVDRALELLLGSYASLVLLANFVLNVFILLILSLKTVFFGDLYPLETRKLVERLINYVIYKGTFLPLVIPPTVFQAGLWSIWLIVICCLKMFQALARDRFERLNASPSA

SEQ ID NO: 59706 - protein, 197 aa, Gossypium hirsutum
  unsure (1)..(197): unsure at all Xaa locations
  Clone ID: GOSHI-09MAY01-C13023_1.pep
PCVRPRRLKMEHPYVPRDLQLPGYVPVSLSQSTILTVYGLSSLLVVSLVWFLSGRSRSISKLDRLLMCWWAFTGLTHIILEGYFAFSPEFYKDKTGFYLAEVWKEYSKGDSRYAGRDSAIVAVEGITSVLEGPPCLLAVYAIAKGKGYSYILQFAISLGQLYGTFVYFITALNLXEGDNFSATHLYYAYYVLQIVWL

SEQ ID NO: 59707 - protein, 90 aa, Gossypium hirsutum
  Clone ID: GOSHI-09MAY01-C13393_1.pep
IGFVNWIMHWVHACYLGFRPVTVLLIGTGNYGPCFVPTYAQVLGAAVIAFPPRGNPIPPIINPFWPRPWPAFSKVRNREKPRGYPILTAV

SEQ ID NO: 59708 - protein, 69 aa, Gossypium hirsutum
  Clone ID: GOSHI-09MAY01-C13373_4.pep
ARAPAVPVSVFLARPTLSFSRSGKPPRENWKELKVEDAGLAALVGMECFAWFGACEIAGRGFTFTGYYV

SEQ ID NO: 59709 - protein, 122 aa, Gossypium hirsutum
  Clone ID: GOSHI-09MAY01-C13373_2.pep
MASKLQQLQSQACQASKFVAKHGTAYYKQLLEQNKQYIQEPPTVEKCNELAKQLFYTRLASIPGRTESFWKELDYVKQLWKNRKELKVEDAGIAALFGMECFAWYCAREIMGRGLTFTGYYV

SEQ ID NO: 59710 - protein, 122 aa, Gossypium hirsutum
  Clone ID: GOSHI-09MAY01-C13373_1.pep
MASKLQQLQSKACQASKFVAKNGTAYYKQLLEQNKQYIQEPPTVEKCNELSKQLFYTRLASIPGRNEAFWKELDYVKNLWKNRQELKVEDAGIAALFGLECFAWFCAGEIVGRGFTFTGYYP

SEQ ID NO: 59711 - protein, 122 aa, Gossypium hirsutum
  unsure (1)..(122): unsure at all Xaa locations
  Clone ID: LIB3543-031-Q1-K6-H2.pep
MASKLLQFQSKAFEAXKFVAKNGSAYYKQLLEQNKQYIQEPPTAEKCNELTKQLFYTRLASIPGRTESFWKELDYVRNLWKNRQELKVENAGIAALFGLECFAWFCAGEIVGRGFTFTGYYV

SEQ ID NO: 59712 - protein, 187 aa, Gossypium hirsutum
  unsure (1)..(187): unsure at all Xaa locations
  Clone ID: LIB3585-034-P1-K1-G9.pep
DSIISQAFSNDKTFQNALNSSFEYFINLNNRSPEFISLFVDDKLRKGLKGVSEEDVEIILDKVMMLFRYLQEKDVFEKYYKQHLAKRLLSGKTVSDDAERSLIVKLKTECGYQFTSKLEGMFTDMKTSQDTMQGFYASHPELTDGPTLVVQVLTTGSWPTQPSITCNLPAXTSALCEKFRSYYLGTH

SEQ ID NO: 59713 - protein, 83 aa, Gossypium hirsutum
  Clone ID: LIB3189-008-P1-K1-G10.pep
SLFYAKQILLNIFHLSYFHIFFTLFFFSIFIYLFYLRTFFHTIFSFFFLSMLFSKIFSHFFFLLNFFSPLFFFFLSFFLRLFF

SEQ ID NO: 59714 - protein, 314 aa, Gossypium hirsutum
  Clone ID: GOSHI-09MAY01-C13313_1.pep
MTTMESLIGLVNRIQRACTVLGDYGGGDNTFSSLWEALPSVAVVGGQSSGKSSVLESIVGRDFLPRGSGIVTRRPLVLQLHKTDEGSQEYAEFLHLPKRRFTDFGAVRNEIQEETDRITGKTKQISPVPIHLSIYSPNVVNLTLIDLPGLTKVAVEGQPETIVEDIETMVRSYVEKPNCIILAISPANQDIATSDAIKLAREVDPSGDRTFGVLTKLDLMDKGTNALDVLEGRSYRLQHPWVGIVNRSQADINKNVDMIVARRKEREYFATSPDYGHLASKMGSEYLAKLLSQHLENVIRSPIPSITSLINKSI

SEQ ID NO: 59715 - protein, 61 aa, Gossypium hirsutum
  Clone ID: LIB3189-008-P1-K1-A7.pep
IGTSLIGKERRNICSRHVILQPFNKRTSCCPGPRNHRAPYVLVGSCLLNGLQLSMVDIFDG

SEQ ID NO: 59716 - protein, 194 aa, Gossypium hirsutum
  Clone ID: GOSHI-09MAY01-C13333_1.pep
MVFSTVLTSVPNLYLTRKPKNIHIQIRCLSSPSVSISSQSNLTQFDLKAYWATLYAEITQKLEEAIPVKYPDQIYEAMRYSVLAKGAKRAPPVMCVAAYEIFGDNRLAAFPTACALEMVHAASLIHDDLPCMDDALERRGPPSNHKAFGDDMAILAGDALFPLGFHHIGMLTPPELVPESRLLRVIAEIARTVG

SEQ ID NO: 59717 - protein, 77 aa, Gossypium hirsutum
  Clone ID: LIB3582-029-P1-K1-C7.pep
EITQKLEEAIPVKYPDQIYEAMRYSVLAKGAKRAPPVMCVAAYEIFGDNRLAAFPTACALEMVASSFPIYPISSLFT

SEQ ID NO: 59718 - protein, 141 aa, Gossypium hirsutum
  Clone ID: GOSHI-09MAY01-C13293_1.pep
MLNRLKLQPPDFSATFINGASPTNISPNRRVRNLRLPLLRYGSPSVRSEYGSASPPPPSSLSEPSVSTHYVSSVGSPSLQLSQWSLTNRHILVLNVVACAVAVSATWLFLSAIPALLAFKRAAESLEKLMDVTREELPDTM

SEQ ID NO: 59719 - protein, 140 aa, Gossypium hirsutum
  unsure (1)..(140): unsure at all Xaa locations
  Clone ID: GOSHI-09MAY01-C13253_1.pep
MEFNCSSPTTIPVVSTFASPFDTSAAGNGSDSASTRKPISLWPGMYHSPVTNALWEAKSQIFERLLDPPKDAPPQSELLTKTPSQSRTSIXYNLSSDYILREQYRXDPWNEVRIGKLLEDLDALAGTISVKHCSDDDSTT

SEQ ID NO: 59720 - protein, 246 aa, Gossypium hirsutum
  Clone ID: GOSHI-09MAY01-C13203_1.pep
KNVPLVEHLLRECNLLGKMLEAEKNCTLTSDPNMPTISAEGRPPPKIGNLGHLTRISNKLVQLGNSNAEIQAHLQENSEWVDWHTNVLLKRNATENIYQWACGRPTALHDRTRDSDDDDYHDRDYDVAALANNLSQAFRYGIYSNDDMDQVHGSLERDDEDVYFDDESAEVVISSLRLGDDQESGSLFTNSNWFAFEDDRVSNECSTGALASASPNTGRAAVVNGEGEDDEVVGGEDDDDLDDTAT

SEQ ID NO: 59721 - protein, 66 aa, Gossypium hirsutum
  Clone ID: GOSHI-09MAY01-C8950_1.pep
PSKKGLLHSNQEIFNGSSLTDGWVKKYAADTSLLFKEFAKSMIKMGNIKPLTGYAGEIRINCRKAN

SEQ ID NO: 59722 - protein, 165 aa, Gossypium hirsutum
  unsure (1)..(165): unsure at all Xaa locations
  Clone ID: GOSHI-09MAY01-C8900_1.pep
QCRWGYHNLSVVEDVVESYRKAQIPXDVIWSDDDHMDGHKDFTLNPVNYPRPKLLAFLDKIHSRGMKYIVIIDPGIGVNSSYGVYQRGIANDVFIKYDGEPYLAQVWPXGAVNFPDFLNPNTVAWWGDEVRRFHELVPVDGLWIDMNEXFELLFWEVHXPKGKQC

SEQ ID NO: 59723 - protein, 125 aa, Gossypium hirsutum
  Clone ID: GOSHI-09MAY01-C8930_3.pep
KLDTTRLVEMQGVGLLPVLLCATYHIALSANNVRWRTVRIYIYNIYIYGHRSFYPSRPISSKVILFILKAQGVKINKHLYFLFMNFWLVSGNVASSMVSCYSVKNRFKIVIVINKTKILIKEYAY

SEQ ID NO: 59724 - protein, 226 aa, Gossypium hirsutum
  Clone ID: GOSHI-09MAY01-C8930_2.pep
PRVRNYAWAFKSQSDAVMLIIHNPGVEEDPACGPLIDAVAIKALYPPRPTNKNIMKNGGFEEGPYIFPNTPWGVLIPPNIEDDNSPLPAWVVESLKAVKYIDSAHYFVPQGRRAVELVGGKESAIAQITRTIVGKTYRLSFSVGDANNSCAGSLVVEAFAGKATLKVPYESKGTGGFKRAALRFVAVSNRTRIMFLSTFYTMRSDDFSSLCGPVVDDVKLLSIRNP

SEQ ID NO: 59725 - protein, 270 aa, Gossypium hirsutum
  Clone ID: GOSHI-09MAY01-C8930_1.pep
MQGLVLLPVLLCATYHIALSATNVTVADGLLDNGNFEQAPNASNMKGTVVVGRYAIPGWVNEGFVEYIKSGQKQGDMLLVVPEGAYAVRLGNEASIKQEIKVAKGMYYSITFSAARTCAQEERLNVTVAPDSGVMPIQTVYSSSGWDNYAWAFKTQSDAVMLIIHNPGVEEDPACGPLIDAVAIKALYPPRPTNKNIMKNGGFEEGPYIFPNTPWGVLIPPNIEDDNSPLPAWVVESLKAVKYIDSAHYFVPQGRRAVELVCGKESAIAQ

SEQ ID NO: 59726 - protein, 112 aa, Gossypium hirsutum
  Clone ID: GOSHI-09MAY01-C8860_1.pep
MMLTLFFRKLLKGLWVTASRGPALNQEDFDEELEAASPTVPDDVKEGYFTVFAVKGKEAQRYVIELDNLTNPGFLSLLELAREEYGFQQKGVLCLPCRPQELQDILQLWKLA

SEQ ID NO: 59727 - protein, 245 aa, Gossypium hirsutum
  Clone ID: GOSHI-09MAY01-C8540_2.pep
MMIMEWDQQQENQSQNQREDSVNLNVNNGVMYVKVMTDEQLETLRKQIAVYASICEQLVEMHKNLTAQQDLTGGRLGNLYCDPLMTSGGHKISARQRWTPTAVQLQILERIFDEGTGTPSKQKIKEITSELSQHGPISETNVYNWFQNRRARSKRKQVMVASSSNNNNNHNNAGESEVETEVESPKTKPENLLLVSEGQGQHHDVCFQNPEITSQLHFLGVGDDHMSAKRMGGSYHIYDQAWQGE

SEQ ID NO: 59728 - protein, 85 aa, Gossypium hirsutum
  Clone ID: LIB3147-045-Q1-K1-C10.pep
PTRPPTRPPTRPAGESEVETEVESPKTKPENLLLVSEGQGQHHDVCFQNPEITSQLHFLGVGDDHMSAKRMGGSYHIYDQAWQGE

SEQ ID NO: 59729 - protein, 164 aa, Gossypium hirsutum
  Clone ID: GOSHI-09MAY01-C8560_1.pep
KLVPATPFDYGSGHVNPRAGLDPGLIFDAGYEDYVGFLCTTPGIDIHEIKKYTNSPCNSTIGRPSNLNTPSITISHLVGTQTVTRTVTNVAEEETYVITARMHPSVAIETRPSAMTLRPGASRKFSVTLTARSVTGSYCFGEITMKGSRGHKGTIPVVAMGHWR

SEQ ID NO: 59730 - protein, 202 aa, Gossypium hirsutum
  unsure (1)..(202): unsure at all Xaa locations
  Clone ID: GOSHI-09MAY01-C8510_1.pep
MEVTQVLFNAQSIDGTVRKNAEESLKQFQEQNLPGFLLSLSGELANEEKPSETRKLAGLILKNALDAKEQHRKFELVQRWLLLDATAKSQIKACLLQTLSSPVFDARSTTSQVIAKVAGIELPQKQWPELIGSLLSNVHQIPAHAKQATLETLGYLCEEVSPDVIDEDQVNKILTAXVVQGMSASEGNIDVRLAATRALYNA

SEQ ID NO: 59731 - protein, 114 aa, Gossypium hirsutum
  unsure (1)..(114): unsure at all Xaa locations
  Clone ID: GOSHI-09MAY01-C8530_1.pep
MDSVSCPQQPQTGSTIGLNSLTQAQIHQIQLHFHLSQQPTQLPLPRSPTQHHXANSNPMVSFLCPKPVPMKHVGAPFKPTKLYRGVRQRPWGKWVAEIRVPRNRTRFLLGTFDT

SEQ ID NO: 59732 - protein, 71 aa, Gossypium hirsutum
  Clone ID: LIB3166-002-Q1-K1-G6.pep
SYEVDMCRVRVRAAIWVKISMCLGRKVRKVRSIRTRDRGREINQNGKWKKKETLFIKGSRTSINSPPYRSD

SEQ ID NO: 59733 - protein, 109 aa, Gossypium hirsutum
  Clone ID: GOSHI-09MAY01-C8520_1.pep
LEARATAGRCPLVLPSKHGSRMSTEPTSIEGSGTPPTSIDSEHSGVGASSQAKGTTGKRKATPQRSEVWSHFTKIINSEGASKAKCNYCQKDFCCDMKKKWYRVIEISY

SEQ ID NO: 59734 - protein, 97 aa, Gossypium hirsutum
  Clone ID: AW186796.2.pep
SNLENPPFSNLFAVHFSSTTPIPRPRMSTKPTSIEGSVTPPTSIDSENSGVGASIQTKGITGKRKATLQRFNANGDLLERRNGYKWRILQTYILIIC

SEQ ID NO: 59735 - protein, 106 aa, Gossypium hirsutum
  Clone ID: LIB3584-009-P1-K1-B1.pep
LLEPGAWSYGWLQPAAVVVEAKDKVLFGWSKESDRMSTEPTSIKGSVTPPTSIDSENSGVGASSQANVTTGKRKATPQRYNANEDFLERRNGHKWRILKTYISIMC

SEQ ID NO: 59736 - protein, 75 aa, Gossypium hirsutum
  Clone ID: LIB3149-064-Q1-K1-E8.pep
QKKNPNFSSFKLLIENCKSLKTFKIFKISQNLQKYHSWRLELQLAAARWCCRRSTGAECPPNQHLLRVVVHILLR

SEQ ID NO: 59737 - protein, 93 aa, Gossypium hirsutum
  Clone ID: LIB3166-002-Q1-K1-F7.pep
LNTPSPKSLIFSISVESGNRKTHYFSHLFGFCCLFLFCRSQTTTPIPRPRDSVTPPTSIDSENSGVGASIQTKGTTGKRKATPSKAKSWSSFN

SEQ ID NO: 59738 - protein, 62 aa, Gossypium hirsutum
  unsure (1)..(62): unsure at all Xaa locations
  Clone ID: LIB3543-064-Q6-K6-A11.pep
GLELQSKQRGLPPGKEMPLIKRHKFGLTSLSLLIVTVQVKLNVIILIRNFFVISKKXTGSLK

SEQ ID NO: 59739 - protein, 351 aa, Gossypium hirsutum
  Clone ID: GOSHI-09MAY01-C8490_1.pep
ELRPVNASTGSAMPSPRSAVINAADMANLSPLALGSSALPLPTTSTPPMPPLAVDSSPKSGGLWHKQVNLTPPTLQLPGSRLKTAFNARDFDLEMQLLALENHASQLQQQQLMDEISSLSSPSCWTKEYSRLEDLKPTKLDDAFGSLDPSLQSPLKGLSIESVTQTQSQSRQNMNQFRASYPPNLSSSPVRKPSAFGFDSSAAVAAAVMNSRSSGFAKRSQSFIDRGAMTGRAGLTTSANSKTMMSSNISDWSSPDGKLDWGIQGDELNKLRKSVSFGFRNNNPTTTETTNMMPTDADEPDVSWVHSIVKDAAPTEARLHQQQRYSLGKGVRETLPPWMEQMYIEQEQMVA

SEQ ID NO: 59740 - protein, 191 aa, Gossypium hirsutum
  unsure (1)..(191): unsure at all Xaa locations
  Clone ID: GOSHI-09MAY01-C8470_1.pep
REHLLKGTVIVIFQPAEEAGNGAKRMIGDGALENVEAIVAVHVSHEHPTGIIGSRPGPLLAGCGFFRAVFSGRKGLAGSPHHSVDPILAASAAVISLQGIVSRESNPLDSQVVSVTSFNGGNNLDMIPETVVIGGTFRAFSNANFYNFLQRIEEVIVEQANVFRCWVTVGFFEKDSXIYSPTLNDDRMSST

SEQ ID NO: 59741 - protein, 159 aa, Gossypium hirsutum
  Clone ID: GOSHI-09MAY01-C8780_1.pep
MAKLLLFIALFVVPCLVSATRMVKNPLVVQGQVYCDHCRAGFETPKTRNMAGAKVKVVCSNRKTGDVVYEKEGHTDSTGQYKIAVSEDHLDEICDAVLVKSSQPECAEMSPGRERARVVLTNFNGISSNTRFANAMGFMANKVEAGCAEVMKVYLEEDD

SEQ ID NO: 59742 - protein, 112 aa, Gossypium hirsutum
  Clone ID: LIB3166-021-P1-K1-D5.pep
LISTPSFYYFITFSREKAISKKMAKLLLFIALFVVPCLVSATRMVKNPLVVQGQVYCDHCRAGFETPKTRNMAGTFHLCLSYMFFLCFLMPVFSVFLLLALLDLFLFVCVHV

SEQ ID NO: 59743 - protein, 44 aa, Gossypium hirsutum
  Clone ID: LIB3189-026-P1-K1-H4.pep
SPTRPRKTQSQKKMAKLLLFIALFVVPCLVSATRMVKNPLVVQG

SEQ ID NO: 59744 - protein, 171 aa, Gossypium hirsutum
  unsure (1)..(171): unsure at all Xaa locations
  Clone ID: GOSHI-09MAY01-C8740_2.pep
LSLTFSLLPETASAQLGQNYYAKTCPNVESIVRNAVTKKFRQTFVTVPATIRLFFHDCFVQVLLKSTTIFQFFTMLELMLFYLYIXQSLCCFQGCDASVIIQSTGSNKAEKDHPDNLSLAGDGFDTVIKAKRAVDAVPSCRNNVSCADIMAMATHDVIAMSGVPSYAVRIG

SEQ ID NO: 59745 - protein, 302 aa, Gossypium hirsutum
  Clone ID: GOSHI-09MAY01-C8740_1.pep
MAHFITFLLVLSLSLTFSLLPETASAQLRQNYYAKTCPNVESIVRNAVTQKFRQTFVTVPATIRLFFHDCFVQGCDASVIIQSTGSNKAEKDHPDNLSLAGDGFDTVIKAKQAVDAVPSCRNKVSCADILAMATRDVIALSGGPSYAVELGRLDGLSSTAASVNGKLPHPDFNLNQLNSMFAAHGLTQTDMIALSAAHTVGFSHCSKFSNRIYNFSRQSAVDPTLNRAYATQLQQMCPKNVDPRIAINMDPNTPRAFDNVYYKNLQQGKGLFTSDQGLFTDKRSKPVVDAWAANSNTFNSAF

SEQ ID NO: 59746 - protein, 208 aa, Gossypium hirsutum
  Clone ID: GOSHI-09MAY01-C8770_1.pep
MEEHLSPLAVTHLLQHTLRSLCIHENSQWVYAVFWRILPRNYPPPKWDGQGAYDRSRGNRRNWILVWEDGFCNFAASAAEINSGDCHGSSVHGSSEFQHYQGLQPELFFKMSHEIYNYGEGLIGKVAADHSHKWIYKEPNEQEINFLSAWHNSADSHPRTWEAQFQAGIKTIALIAVREGVVQLGAVHKVIEDLSYVVLLRKKFSYIE

SEQ ID NO: 59747 - protein, 145 aa, Gossypium hirsutum
  Clone ID: LIB3584-021-P1-K1-D6.pep
MEEHLSPLAVTHLLQHTLRSLCIHENSQWVYAVFWRILPRNYPPPKWDGQGAYDRSRGNRRNWILVWEDGFCNFAASAAEINSGDCHGSSVHGSSEFQHFQGLQPELFFKMSHEIYNYGEGLIGKVAADHSHKWIYKEPIEQEIN

SEQ ID NO: 59748 - protein, 86 aa, Gossypium hirsutum
  unsure (1)..(86): unsure at all Xaa locations
  Clone ID: LIB3166-031-P1-K1-G9.pep
MEEHLRPLAVTHLLQHTLRSLCIHENSQWVYAVFWRILPRNYPPPKWDGQGAYDRSRGNRRNWLLXWEDWFCNFAALSAEINFRRL

SEQ ID NO: 59749 - protein, 347 aa, Gossypium hirsutum
  unsure (1)..(347): unsure at all Xaa locations
  Clone ID: GOSHI-09MAY01-C8760_1.pep
MRFGMGQNSDVAWHIAMILLNPCLILIDHGHFQYNCISLGLTIAAIAAALSQKDLVASVLYCLALNHKQMSAYFAPAFFGYLLGKCLRKKNPLLEVTKLGLMVIGTFAVVWWPYLQSKDAALAVLSRLAPFERGIYEDYVANFWCTSSVLVKWKKLYSTQSLRIFSLAATLITCLPSMVQQILAPSSKGFLYALLNSSFSFYLFSFQVHEKSILLPLLPLTLLALEESRLILWLTHFAMFSMFPLLHRDKLVLAYMALYPLFILLYXAPVGQVGKSPAPELSYSPKTGKIEDFFLLTFHPLVWAFWVGXSLILHVIYLAMHPPNKYLFLFEALIMLICFSHFVLCTF

SEQ ID NO: 59750 - protein, 145 aa, Gossypium hirsutum
  Clone ID: GOSHI-09MAY01-C8630_1.pep
MAKTFACFVLLALIVSCALGQAPSSAPTKSPPSSNPTPAPKVSPTMSPTTTPTASPPSTSTPPSSAPESSPTSSPTTSPPAPPAGSPAGSPAGSPAGSPASAVSPTNSISDTPGSSPTSPTSAAALNRVTVAGSAVAVVFAALLI

SEQ ID NO: 59751 - protein, 72 aa, Gossypium hirsutum
  Clone ID: uC-gsronu33B021a07b1.pep
MPGPTHAFFSVYHLSIKRGTLKTYAFFDLLAVIRRPLGEAPSSVPTNSPASSNPTPAPKVFPTMYETATPTG

SEQ ID NO: 59752 - protein, 105 aa, Gossypium hirsutum
  Clone ID: uC-gsronu33B090a06b1.pep
RIWVDSIQWLRAVTNFDLLAFIVSCALGQAPSSAPTNSPPSSNPTPAPKVSSTMSPTATPTASPPSTSTPPSSAPESSPTSSPTTSPPAPLAGSPAGSPPTADST

SEQ ID NO: 59753 - protein, 110 aa, Gossypium hirsutum
  Clone ID: uC-gsronu33b025h07b1.pep
MGKLWSAKTFACFVLLAIIARCALGQAPSSAPTNSPPSSNPTPDPKVSPTMSSTATPTAFPPSTYTPPSLGPESSPTCSPTTSPPAPSRWYFRWLSPYPLILPPTSSSRH

SEQ ID NO: 59754 - protein, 103 aa, Gossypium hirsutum
  Clone ID: GOSHI-09MAY01-C8120_1.pep
PPSSSAQQSRMKPVPKHSSLLHAHERPLLPCDHSHNGTLQISHGSLPSSLKIEVGGVQRHHRLSLECHRSPDEVVYSVAAGICPNNLIFRAEKFGEVGAVFRK

SEQ ID NO: 59755 - protein, 181 aa, Gossypium hirsutum
  Clone ID: GOSHI-09MAY01-C8060_1.pep
MPSKMRMMRKMMSSDHTDLSNSPTPKSEDHQEQKQPSSSPDNNNSTIRVCADCNTTKTPLWRSGPRGPKSLCNACGIRQRKARRAAAVAAAAASSVVAAETPPSMRSEVQLKAKRSSNNGVPHLKNKKCKHNSQSQSRKKLCFEDLRIILSKNSAFHGVFPQDEKEAAILLMALSYGLVHG

SEQ ID NO: 59756 - protein, 102 aa, Gossypium hirsutum
  Clone ID: GOSHI-09MAY01-C8000_1.pep
MAGIVVIFDFDKTIIDCDSDNWVLDELGFTDLFNQLLPTMPWNPLMDKMMKELHAQGKTIDDIVEVLKRAPIHPRIVPAIKAAHALGCELRVVSDANMFFIE

SEQ ID NO: 59757 - protein, 356 aa, Gossypium hirsutum
  unsure (1)..(356): unsure at all Xaa locations
  Clone ID: GOSHI-09MAY01-C8030_1.pep
MAGIPIRFGIIGCAEIARKVSRAIQLAPNATVSAVASRSFDKAANFAKANGFPPDTKIYGSYESLLDDPDIDAVYLPLPTSLHLKWAVLTAQKKKHLLTEKPVALSVAEFDQILKACEENGVQIMDGTMWVHNPRTHKMKQFLNDKEQFGQLRTVNSCFTFFADPDFLKNDIRVKPDLDALGALGDAGWYGIRSILWAADYELPKTVTAFRNPVLNEAGVLLECGASLLWADGKIATFHCSFLSNLTMNLTAIGTXGTLHLTDFIIPYQEHQASYTTSAKPGFNELVTGWVQLPSEHTVTVDLPQEACMVREFASLVANIKKNGAQPDKKWPTISRKTQLVLECCEGVDGERFSIC

SEQ ID NO: 59758 - protein, 134 aa, Gossypium hirsutum
  Clone ID: GOSHI-09MAY01-C8350_1.pep
MDLSCFRLLCLLSLFVTHLSFSHVLADSHFEGFDAEEDDPVEDDILHHHSIPSPPVTQSDSRPLSDLETKSHPDPNPVPTSDPPAQSDLQKPSTTSFDYWDEDQFEGLPIEQPPPEPPKVTETATSDDPESKTT

SEQ ID NO: 59759 - protein, 321 aa, Gossypium hirsutum
  Clone ID: GOSHI-09MAY01-C8370_1.pep
MGGGAMRAAAKVAGAGIVNTGLRGGVQVAPSSAEYSVMCVAASRSASSGISVSGGGVSSVADMTASPNQMMSWEMVDDWEFAGGVEEEVPTAISGGGEPMPRVLFGGAPTLEEAKAAASDLKDALDKAYLSSLDSTDDTRSSRSSLLSEETKDCVAYDAKATLLPKPAVQAFKLLNESPAVQSMVASIAADPNVWNAVLHNPAYMDFIGSHKTNYPSRPNRSRQGCESTSVKIEEYFKANEGKEVGNPFSEFLENLKSSVVEVANKATDFLQCLFTIPIAGMEKENGGLNYLEKTIGASLMGLAVMAIMVVLLKRVYNKSM

SEQ ID NO: 59760 - protein, 53 aa, Gossypium hirsutum
  Clone ID: LIB3166-036-P1-K1-G4.pep
FLKFYFKKNTFCVCFKKFVIILIGDVKNRFKLSKPWFFLLNIYFLKQNSGRVG

SEQ ID NO: 59761 - protein, 133 aa, Gossypium hirsutum
  Clone ID: GOSHI-09MAY01-C8360_1.pep
ATSSTDGTACIWDLRSMSGHKLKTLKTVSHSRAVHSAYFSPSGSSLATTSLDNKVGIISGVNFEDACMIYHDNWTGRWLSSFRGIWGWDDSYIFIGNMKRGVDVISPSQKRSVMTLQSPEMSAIPCRFDAHPY

SEQ ID NO: 59762 - protein, 237 aa, Gossypium hirsutum
  Clone ID: GOSHI-09MAY01-C8310_1.pep
NILELYTLGRKLGQGQFGVTYLCTEISTGIEYACKSISKRKLICKEDVEDVRREIQIMHHLAGHKNIVTIKGAYEDPLFVHIVMELCSGGELFDRIIHRGHYTERKAAELTKIIVGVVEACHSLGVMHRDLKPENFLLVNKDDDFSLKAIDFGLSVFFKPGEVFTDVVGSPYYVAPEVLLKCYGPEADVWTAGVILYILLTGVPPFWAETQQGIFDAVLKGYVDFDSDPWPLISDSA

SEQ ID NO: 59763 - protein, 275 aa, Gossypium hirsutum
  unsure (1)..(275): unsure at all Xaa locations
  Clone ID: GOSHI-09MAY01-C8300_1.pep
MGEEEKKPADEKKTEEQVSEKDGKKGDEEEVKQAEKPVEEKKAEESKEETPPPPPQEIILKVYMHCEGCARKVRRCLKGFQGVEDVMTDYKSNKVVVKGEKADPLEVLERVQRKSHRKVELLSPVPKPPFAEEKQPXEKEKPKPEAKIEKPAPITVVLKVHMHCEACAQEIKKRIQRMKGVESAEPDLKSSEVTVKGVFEPPKLVAYVYKRTGKHALIMKEEATETDKKEGEEKEKAKDGNKEEKKGEEKEGGEEVKKEAGGEEDNKDKKDEGDQ

SEQ ID NO: 59764 - protein, 162 aa, Gossypium hirsutum
  Clone ID: GOSHI-09MAY01-C8330_1.pep
ATRTIFFLTPSGTLKPVAIELSLPHTSPNSRSKRVVTPPVDATTNWIWQLAKAHVCSNDAGVHQLVNHWLRTHACMEPFILAAHRQLSAMHPIFKLLDPHMRYTLEINALARQSLICADGVIENCFTPGRYCMEMSAAAYRSHWRFDREGLPADLIRRVITE

SEQ ID NO: 59765 - protein, 210 aa, Gossypium hirsutum
  unsure (1)..(210): unsure at all Xaa locations
  Clone ID: GOSHI-09MAY01-C8320_1.pep
KIKDHPSLFFLRYSPLLFSFCCCFLPFPAPFPTSXPLPSAPVLSWQDSGLPFNSLVETSDLHTVNSNTSLGLQLELHHLDALSSEETPERLFDLRLQRDALRAETINSLVSKAVARKHPRAPGRRPGFSSSVISGLAQGSGEYFTRLGVGTPPRYLYMVLDTGSDVIWVQCSPCKKCYSQSDPIFDPTKSRSFSGIPCGSQLCRSLDSSG

SEQ ID NO: 59766 - protein, 127 aa, Gossypium hirsutum
  Clone ID: GOSHI-09MAY01-C8250_1.pep
ELFPFQDCWVVPAKVAFDQTAWAAVWNSIYFVILGFLRLESPISIFNEWKATFLPMLTAGWKLWPFAHLITYGFIPVEQRLLWVDCVELIWVTILSTYSNEKSEARISEAAPAEASSILPPVGPPEE

SEQ ID NO: 59767 - protein, 113 aa, Gossypium hirsutum
  Clone ID: GOSHI-09MAY01-C8200_1.pep
MSKGPGLFVDIGKRAKHLLTKDYTSQRTGTASTYTGAGVAITSTSLKKGGLSTGDVAALYTYKNTHLDVKVDTDSNISTTMTFTDILPSTKTIASSNAPDYNAGQLDVQHFHH

SEQ ID NO: 59768 - protein, 119 aa, Gossypium hirsutum
  unsure (1)..(119): unsure at all Xaa locations
  Clone ID: GOSHI-09MAY01-C9980_1.pep
MTSIMDAEHDKYSMINFEETELRLGLPTGIENDNETAKNNGKRGYSDMVDLKLNLSTTKEASVDEAEKMKEKNTAKPPXKAHVVRWPPVRSFRKNIMTGQKNSSDNKGEKTGSGNTINT

SEQ ID NO: 59769 - protein, 59 aa, Gossypium hirsutum
  unsure (1)..(59): unsure at all Xaa locations
  Clone ID: LIB3048-040-Q1-L1-C9.pep
SRIMGIIRXCGAVMHMAERRWSEAITDFYXALNNYDVSSYDRHILCIIYAMTSYYGFRT

SEQ ID NO: 59770 - protein, 190 aa, Gossypium hirsutum
  Clone ID: GOSHI-09MAY01-C9950_1.pep
MLGALSAASLTLGLAGAPAAFTAQCGNGGAAKALAFPSSSNSNNRAQLLVKSSFTSTSRTPPSFRTAVAAVDSDQLSPDMQQSKKYYFVVANAKFMLDEEEHFKELLFERLRYYGERNKEQDFWLVIEPKFLENFPDITKRLRRPAVALVSTNGPWITFMKLRLDRVLSDSYEADNLEEALASNPTTLEF

SEQ ID NO: 59771 - protein, 68 aa, Gossypium hirsutum
  Clone ID: LIB3166-020-P1-K1-D7.pep
LDEEEHFKELLFERLRYYGEGNKEQDFWLVIEPKFLENFPDITKRLRRPAVALVSTNGPWITKKCILV

SEQ ID NO: 59772 - protein, 247 aa, Gossypium hirsutum
  unsure (1)..(247): unsure at all Xaa locations
  Clone ID: GOSHI-09MAY01-C9970_1.pep
MDLWAVHLKNANPGNPPASASLLLKRNSIPERPNSCKVSNFGVLSIGVSRTCLPSSSIRSFTVTSMAKNNNHDSSSSPSFGNGDQSIPDRDSSRRNNSSESNKSNGDASQKFLDVNTNWREFRAMLYNNYQVEKTDSVAQGGTPHVSKPLGPKWAHPLSLPETGCVLLATEKLDGVRTFERTVVLLLRSGTRHPQKXPFGVVINRPLHKKIKHMKPNNNELATTFADCSLHFGGPLEXSMFLLKVGK

SEQ ID NO: 59773 - protein, 126 aa, Gossypium hirsutum
  Clone ID: GOSHI-09MAY01-C9910_1.pep
RLSSVCRGESSGEFSVRSAYKLLQEANSGPSNNYLQTETRDFYRKLWNLHLPPKIKITNWRISWNYIPTLSNLKNKKVVVAAICPKCHNPEEDSNHIFRHCPGFLDEEILSNVDSSVTYYGQSGHA

SEQ ID NO: 59774 - protein, 140 aa, Gossypium hirsutum
  Clone ID: GOSHI-09MAY01-C9930_1.pep
MEILPQRSSLSSTLNPNAPLFIPLAYRMVKDFSDQWWALVQSSPCFRDYWLQERFHDPENDDVSDDDDDPLFPGDLDDIFEQYDDVLLDPRPEEKEKKLVPFGTSKWRKDRVVTESPRFIEKAPKIVNVKVSPRTIHQPR

SEQ ID NO: 59775 - protein, 73 aa, Gossypium hirsutum
  Clone ID: LIB3584-044-P1-K1-B2.pep
IQLTPDDSHESIKYKLGTFFFFFAAEEKEKKLVPFGTSKWRKDRVVTESRRFIEKAPKIVTVKVSPRTIHQPR

SEQ ID NO: 59776 - protein, 217 aa, Gossypium hirsutum
  Clone ID: GOSHI-09MAY01-C9800_1.pep
MASILNPPPPPYFHLTSLPTSVSSSPVILSYPFLKTTSLQVRFKALRTWSDGGKIGSQEAYGADFLRKPSTVPKKDSDGILEEEEGSEGKRNRGEWTDWEDRILEDTVPLVGFVRMIIHSGKYGAGDRLSPEHERTILERLLPYHPEFEKKIGCGIDYITVGYHPDFVGSRCLFIVRKDGELVDFSYWKCIKGLIRKTYPLYADSFILRHFRRRRRS

SEQ ID NO: 59777 - protein, 270 aa, Gossypium hirsutum
  Clone ID: GOSHI-09MAY01-C9820_1.pep
GPVGSAKSWYIWGCFPFQLAVNSIPTLTHLAPLSIFADIVDLGAMGAVFVEDVSLIMKQSNEIIAFGGLSVFFYGMGVAVYAFEGIGMVFPIESEMKESGRFGKILALSMGLISLMYGAFGALGYFAFGPDTKDIITANLGAGWISAMVQIGLCVNLFISFPLMMNPVYEIVKRRFGGGRYCLWLKWLLVLIVSLVALFVPNFADFLSLIGSSVCCGLGFVLPALFHLLVFKEELEWKGWTVDVGIVTLGLALGVSGTWSALVEMFSVKV

SEQ ID NO: 59778 - protein, 232 aa, Gossypium hirsutum
  Clone ID: GOSHI-09MAY01-C9550_2.pep
MASKSSKKKPNSKRSSSKPAFSPMASPKHFHLKRFFILISIMLPVCVIVVLGVSSNTSFKISSDHYSVKIYGFELVNEFPHDPRAFTQGLVYAGNESLYESTGLYKQSTVRRVAIQTGKVEVLHKMPDAFFGEGLTLLGERLFQVTWLTKIGFIYDTKNLQKLERFTHQMEDGWGLATDGKILYGSDGTSTLYQIDPQTLKVTTKNVIKFNGQNVRYLNELEYINGEIWANV

SEQ ID NO: 59779 - protein, 202 aa, Gossypium hirsutum
  Clone ID: GOSHI-09MAY01-C9550_1.pep
PTRPEILHKMADSYFGEGLTLLGESWLFQVTWLTKIGFIYDRKKLQKLEQFTHEMEDGWGLATDGKILYGSDGTSTLYQIDPQTLKVTTKNVIKFNGQNVRYLNELEYINGEIWANVWQTDCIARISPNNGTILGWILLPSLREGLLAAGYNGIDVVNGIAWDSGNNRIFVTGKLWPKLYEIKLHPAKKHYNSEDIEKLCLA

SEQ ID NO: 59780 - protein, 116 aa, Gossypium hirsutum
  unsure (1)..(116): unsure at all Xaa locations
  Clone ID: LIB3166-015-P1-K1-E7.pep
MIVCVAVVGHGENPLYIQSFTDADDALKLHHIVHCSLDVVDERVNNPKKSGPTLNETFLGLLYPTENYKXFFRRFHAAYVDAVSNPFHVPGKKITSRTFADRVSTIVQSFGLSSSV

SEQ ID NO: 59781 - protein, 130 aa, Gossypium hirsutum
  Clone ID: LIB3145-020-Q1-K1-E6.pep
MIVCVAVVGHQNGPLYIQSFTDADDALKLHHIVHCSLDVVDERVNNPKKSGPTLNETFLGLLYPTENYKVYGYLTNTKVKFILVTTDLDVRDADVRNFFRRFHAAYVDAVSNPFHVPGKKITFRTFADRV

SEQ ID NO: 59782 - protein, 216 aa, Gossypium hirsutum
  unsure (1)..(216): unsure at all Xaa locations
  Clone ID: GOSHI-09MAY01-C9560_1.pep
ADCGHKIGLNGVYNGRIWFDGVRVPRENLLNSVADVSPDGKYLSAIKDPDQRFAAFLAPLTAGRVNIAVNAVYQSKVGLAIAIRYALTRRAFSLKPKEPEVLLLDYPSHQRRLLPLLAKTXAMSFGANXEMLYVKRTPQSNKIIHVVSSSFKATFTWSNMQILQECREACGGQGLKTENRVGHLKAEHDVQSTFEGDNNILMLQVNLLSSFLTNLL

SEQ ID NO: 59783 - protein, 178 aa, Gossypium hirsutum
  Clone ID: uC-gsronu33B129d11b1.pep
CVFSLKPKEPEGLLLDYPSHQRRLLPLLAKTFAMSFGANYLKMLYVKRTPQSNKIIHVVSSSFKATFTWSNMQILQECREACGGQGLKTENRVGHLKAEHDVQSTFEGDNNILMLQVSKALFAEYMAAQKPNKAFKGLGLEHMNKPCPVIPSQLTTTTLRCSQFQIDALCLRERDLFE

SEQ ID NO: 59784 - protein, 248 aa, Gossypium hirsutum
  Clone ID: GOSHI-09MAY01-C9520_1.pep
PSVRFYVMGELWGSVVISVLFWGFAYQITTVEEAEGFYPLFGLGANIALIFSGRTVKYFSNLRQNLGPGVDGWAISLKGMMSIVVLMGLAICFLYWWVNKFVPLPTRSKKKKEKPKMGTMESLKFLLSSKYIRDLATLVVAYGISINLVEVTWKSKLKAQFPSPNEYSSFMGDFSTATGIATFTMMLLSQFIFDKYGWGVAAGITPTVLLLSGVGFFSLILFGGPLGPTLAKFGMTPLLAAVYVGALQ

SEQ ID NO: 59785 - protein, 85 aa, Gossypium hirsutum
  unsure (1)..(85): unsure at all Xaa locations
  Clone ID: LIB3166-015-P1-K1-A12.pep
NLFATLLSYLDXGEQRQGTYLAMSFLVAFPXNWIXVXDAIXGCRHLVMESMKYMNNLVMITTLMTMTMMMMVVMIANVPNSKVYR

SEQ ID NO: 59786 - protein, 77 aa, Gossypium hirsutum
  unsure (1)..(77): unsure at all Xaa locations
  Clone ID: LIB3827-001-Q1-N6-E10.pep
LQYIFPILPRIVASRIWKSVNFGVRNISYXXHQHHHHHHHHHHHRRRRRCCCRRRRRCRRQSSYYHQIVHIFHTLHH

SEQ ID NO: 59787 - protein, 73 aa, Gossypium hirsutum
  Clone ID: LIB3166-023-P1-K1-A1.pep
QGHTCKSFLVAFHQLDLVLMLYRLQTLVMESMKYMNNLVMITTLMTMTMMMMVVMIANVPNSKVYRSCLHISS

SEQ ID NO: 59788 - protein, 112 aa, Gossypium hirsutum
  Clone ID: GOSHI-09MAY01-C9480_1.pep
VQNIHDSHSNTSCSKPLEGHKRKKIICKKEEANEEFMHVEEPFIKGTSRHPISWNRRTSMIRSLKALLDPPSNFPYSILFLRGCRFLNLPDLYSPIDRGNNPSSAKNFHYFA

SEQ ID NO: 59789 - protein, 151 aa, Gossypium hirsutum
  unsure (1)..(151): unsure at all Xaa locations
  Clone ID: GOSHI-09MAY01-C9470_2.pep
MATSQLTASSMTVSVRNLASAVGFWPSSIVKFSSFGSLKPGSLTQRSFKGLVVKAATVVAPKYTSIKPLGDRVLVKIKETEEKTEGGILLPTTAQSKPQGGEVVAIGEGKTIGKTKLECSVKTGAQXIYSKYAGTELEFNGSNHLILKEDD

SEQ ID NO: 59790 - protein, 194 aa, Gossypium hirsutum
  Clone ID: GOSHI-09MAY01-C9470_1.pep
MATSQLTASSMTVSVRNLASFEGLRPSSIVKFSSFGSLKPGSLTQRSFKGLVVKAATVVAPKYTSIKPLGDRVLVKIKETEEKTEGGILLPTTAQSKPQGGEVVAIGEGKTIGKTKLECSVKTGAQVIYSKYAGTELEFNGSNHLILKEDDIVGILETDDIKDLKPLNDRVFIKVAEAEEKTAGRLLLTESSKE

SEQ ID NO: 59791 - protein, 337 aa, Gossypium hirsutum
  Clone ID: GOSHI-09MAY01-C9420_1.pep
LAHVLWMIRVRPVFVTFGRVNRVEPVSLGELGIPRNDVADNCSGVFRDLFINQMNLLDRAVKMVAELDEPVEQNYVRKHALEQAKALGIEVREAATRVFSNASGSYSSNVNLAVENSSWNDEKQLQDMYLSRKSFAFDCDAPGAGMTEKRKVFEMALSTADATFQNLDSSEISLTDVSHYFDSDPTNLVQNLRKDGKKPSAYIADTTTANAQVRTLAETVRLDARTKLLNPKWYEGMMSSGYEGVREIEKRLTNTVGWSATSGQVDNWVYEEANSTFIQDENMLSRLMNTNPNSFRKLIQTFLEANGRGYWETSEENIEKLRQLYSEVEDKIEGIDR

SEQ ID NO: 59792 - protein, 280 aa, Gossypium hirsutum
  unsure (1)..(280): unsure at all Xaa locations
  Clone ID: GOSHI-09MAY01-C9780_1.pep
MRQDSLSRGQLTRFAATTTTSAGNDSLEPTYFGNAKRALQDKLFLAPPPINGEWLPKSAVYALVDLMVIIFGRPKGNFKECDKRIQSGIHIIKEELIRLGITDDVREVDLQHSAIWMAGVYLMLLMQFLENKVAVELTRSEFLEAQEALMQMKNWFIRFPTILQACESIIEMLRGQYSHSVGCYNEAAFHYVEAAKITESKSMQIMCQAYAAISYFCIGDAESSSQALDLIGPVYRMKDSFVGVREEASILFAYGLLLMKQXDLQEARNPLAKGCRWLMF

SEQ ID NO: 59793 - protein, 91 aa, Gossypium hirsutum
  Clone ID: GOSHI-09MAY01-C9750_1.pep
MAASGAGVPMRREVLRLRPPLRRVARQFGDYNIREYSKRRTMDAFRDNKNLRDPSQLSAAFSNGKAQLEVAKRQSLLYSLYAPKVKSIMDF

SEQ ID NO: 59794 - protein, 175 aa, Gossypium hirsutum
  Clone ID: GOSHI-09MAY01-C9770_1.pep
MAEGEEDLPRDAKIVKSLLKSMGVEDYEPRVIHQFLELWYRYVVDVLTDAQVYSEHAGKQTIDCDDVKLAIQSKVNFSFSQPPPREVLLELARNRNKVPLPKAIPGPGIPLPPEQDTLISTNYQLAIPKKQPAQAMEETEEDEESVEPNSSQEHKTDAPHPTSQRVSFPLTKRSK

SEQ ID NO: 59795 - protein, 154 aa, Gossypium hirsutum
  Clone ID: GOSHI-09MAY01-C9660_1.pep
MATLHFTPSPCTPPLIVNKPKHPTTISTSQSKFNPKTHHGSFKRLSTLIARSYKGVLEHEGNSTELEVEDDETILSKALDLGITVPYDCQLGVCMTCPAKLLSGTVDQSEGMLSDDVIDRGFALLCVAYPTSDCHIRTIPEEELLSLQLKTAND

SEQ ID NO: 59796 - protein, 431 aa, Gossypium hirsutum
  Clone ID: GOSHI-09MAY01-C9170_1.pep
MPSLEDELFPSTPGKFKVDRAHNMNRQFHRCFASTSTMFLWALFLIALTASYLSFQSFVDSGSRYFSASWGGIQWEKQVRNSAQIHRSGGMSVLVTGAAGFVGTHVSLALKKRGDGVVGLDNFNNYYDPSLKKARKSLLNSHGILVVEGDLNDAKLLAKLFDVVAFTHVMHLAAQAGVRYAMENPNSYVHSNIAGLVTLLEICKSANPQPAVVWASSSSVYGLNEKVPFSEADRTDQPASLYAATKKAGEEITHTYNHIYGLSVTGLRFFTVYGPWGRPDMAYFSFTRNILQGKPITIYRGKNRVDLARDFTYIDDIVKGCLGSLDTSGKSTGSGGKKKGNAPYRIFNLGNTSPVKVPELVNILERHLKVKAKRNIVDMPGNGDVPFTHANISLAQREFGYKPSTDLQTGLKKFVRWYLSYYGYNNRKGLQ

SEQ ID NO: 59797 - protein, 72 aa, Gossypium hirsutum
  Clone ID: uC-gsronu33B040b05b1.pep
LVNILERHLKVKAKRNIVDMPGNGDVPFTHANISLAQREFGYKPTTDLQTGLKKFVRWYLSYYGYNNRKGLQ

SEQ ID NO: 59798 - protein, 60 aa, Gossypium hirsutum
  Clone ID: LIB3166-028-P1-K1-B9.pep
DAWADAWSDAWAGLRLGTVYGPWGRPDMAYFSFTRNILQGKPITIYRGKNRVDLARDFTY

SEQ ID NO: 59799 - protein, 118 aa, Gossypium hirsutum
  unsure (1)..(118): unsure at all Xaa locations
  Clone ID: GOSHI-09MAY01-C9160_1.pep
MEAAGSDSDGREVRNAQEMWREQIGDEGDDPKKIQWYREGVAYWEGVEASVDGVLGGFGQVNDADIKGSEAFLNSLIAXKDLVLVDXNQHLVALDCGSGIGRITKNLLIRYFNEVDLL

SEQ ID NO: 59800 - protein, 108 aa, Gossypium hirsutum
  Clone ID: GOSHI-09MAY01-C9100_1.pep
ETLSYLAPLSDDSIAKEIDFMMKKGWIPCLEFDEVVAVHRENSSIPGYYDGRYWTLWKLPMFGCNDSSQVLKEIHECKKAYPNAYIRCLAFDNKHQGQCMSFVIHKPN

SEQ ID NO: 59801 - protein, 397 aa, Gossypium hirsutum
  unsure (1)..(397): unsure at all Xaa locations
  Clone ID: GOSHI-09MAY01-C9130_1.pep
MQQQRLKQQHALMQQALYHNPSLMSGPQIEPILSGNLPPGFDAATCRSVYVGNIHPQVTEPLLQEVFLSTGPIEGCKLIKKDKSSYGFVDYFDRRSAALAIVTLNGRHLFGQPIKVNWAYASSQREDTSAHHNIFVGDLSPEVTDATLFACFSVYSSCSDAXRVMWDQKTGRSXRGLGFVSFRNQQDAQSAINDLNGKWLGSRQIRCNWAAKGATSNDDNAKSIVDSNGPSEEGQEKSNDDSPENNPMYTTVYVGDLAPEVTSADLHSHFHALGAGTIEDVRVQRDKGFGFVRYSSHDEAALAIQMGNARILCSKPIKCSWGSKPTALGTSSGPLPPPTAAHMAGGAQVMNMMHPQGQYAVKAQAAMGMSGGEASQAMYNGGYQNVATSQQQLMYYQ

SEQ ID NO: 59802 - protein, 123 aa, Gossypium hirsutum
  unsure (1)..(123): unsure at all Xaa locations
  Clone ID: LIB3543-042-Q1-K6-G4.pep
MQQQRLKQQHALMQPALYHNPSLMSGPQIEPILSGNLPPGFDAATCRSVYVGNIHPQVTEPLLQEVFLSTGPIEGCKLIKKDKSSYGXVDYFDRRSAALAIVTLNGRHLFGQPIKVNWAYASS

SEQ ID NO: 59803 - protein, 169 aa, Gossypium hirsutum
  Clone ID: LIB3825-025-Q6-K6-A11.pep
MQQQGLNPQQQAMMQQALYHHPSLFAGPQIEPILSGNLPPNFDSATCRSVYVGNIHPQVSEPLLQEVFLSTGPIEGCKLIKKDKSSYGFVHYFDRGSAALAIVTLNGRHLFGQPIKVNWAYASSQREDTSTHHNIFVGDLSPEVTDATLFACFSVYSSCSDARVMWDQK

SEQ ID NO: 59804 - protein, 279 aa, Gossypium hirsutum
  Clone ID: GOSHI-09MAY01-C9120_1.pep
DANKAAIVKAGAVHKMLKLLESPNEPNQAVSDAVVANFLGLSALDSNKPIIGSSGAIPFLVKSLKILDTNSRSQARHDALRALYNLSISPSNISFISEADLIPFLLNALGDMEVSERILSILSNVVSTPEGRKGISIAPEAFPILVDVLNWTDSPGCQEKASYILMVMAHKAYGDRQAMIEAGIVSSLLELTLLGSTLAQKRASRILEVLRVDIGKRVSENFGGNMNAAVSAPICGSSSSSSTNLNGKECLVEEAGMMSEEKKAVKQLVQQSLQNNMRR

SEQ ID NO: 59805 - protein, 385 aa, Gossypium hirsutum
  Clone ID: GOSHI-09MAY01-C9080_1.pep
MTISASFLLASTLLLTGCVLGPISLVSAKHGVPSYAHKKIASKPFEGYLENGNFEEQPNPTALKKTVLIGAHALPKWTITGLVEYISGGPQPGGMFYPVAHGVHAVKLGNEATISQTIPVKPGVLYALTFGASRTCAQDEVLRVSVGTQSGDLPLQTLYSSMGDDVYAWGFIPKTKYATVKFHNPGVQEDPTCGPLLDAVAIKELVRPRATRYNLVKNSGFEEGPHRLVNSTNGVLLPPRQEDFTSPLPGWIIESLKAVKFIDAKHFNVPAGHSAVELVAGRESAIAQILRTIPNKSYNMTFIIGDARNGCNGEMMVEAFAAKHTVKVPFTSRGKGEFKAASLMFKADTARTRVTFYSSYYHTRSDDFGSLCGPVLDEVTVYPIA

SEQ ID NO: 59806 - protein, 214 aa, Gossypium hirsutum
  Clone ID: GOSHI-09MAY01-C9040_1.pep
MMNPKSASSKGNFCKKQKVFNPPSCLKIPSCERSRSAAIDVVILIAVIAAFGILLFPTIKCISLKVIEFIEAAYDLVRDEMMISPMIYGSIGLGFSCSAIAAWILLLCTARKCGNPHCKGLNKATEFDIQLETEECVKNLSPTVKDGVSKGLLQLLHNRHKELEAELKRLAPVNGRAVLVFRAKCGCSVGRLVVPGLKKQRKIKKLGLRIRLDR

SEQ ID NO: 59807 - protein, 66 aa, Gossypium hirsutum
  Clone ID: uC-gsflmaxxa046a04b1.pep
NHQYVHLMLHIDGLSFLVFCTPILFNNSHSLAPIYPRGKKNQKLCFSVEFFFSVLTDWRSCIAVTK

SEQ ID NO: 59808 - protein, 76 aa, Gossypium hirsutum
  Clone ID: LIB3166-009-P1-K1-A2.pep
MKHKDGKYNSQPEKPFKIVPATLLVIVLCGFSFYLGGIFCSEKSRLEGKSVQYVSKTASSPKEPAMDPLQINIHGF

SEQ ID NO: 59809 - protein, 152 aa, Gossypium hirsutum
  Clone ID: GOSHI-09MAY01-C9000_1.pep
MGQGTPGGLNRQGLPGDRKGDGSNKKEKKFEPAAPPARVGRKQRKQKGPEAAARLPTVTPLSKCKLRLLKLERIKDYLLMEEEFVANQERLKPQEEKAEEDRSKVDDLRGSPMSVGNLEELIDENHAIVSFSVGPEYYVGILSFVDKDQLEP

SEQ ID NO: 59810 - protein, 107 aa, Gossypium hirsutum
  Clone ID: GOSHI-09MAY01-C9020_1.pep
MKFKAFLTEHGVNLLERRFLPALDKMGKICHLFLTRDHAIFLHNLLNGDGVQCIAQFRKEALFDDYRISSQNEDRIAFAIDVSLLLRAVRSSVSICTEFGNGPSANR

SEQ ID NO: 59811 - protein, 329 aa, Gossypium hirsutum
  Clone ID: GOSHI-09MAY01-C9390_1.pep
ADEDLKKEAAQVKKCWRKEHVNDKQGLEHGQGLGNNVKTQRLIPEIIEEDNEMMTKDIMLDQISECSSHGLSRRETSEADDQMLGLWEASDRDGTIDLSGDKALKIVTGPSDHQQIDTVKVHKGSQHSTKSHVKELGVDKEKSKRYTEPNQEEKKRKILERLDSDAQKLANLQITVQDLKRKVEITEKGKKGKGIEYGTVKEQLEEAEEAITKLSDFNRKLIVHAGDPSRSLLDGKPAIDSDGSGSGRRQRISEQARKGSEKIGRLQLEVQKIQFLLLKLDDEKESRGRTKITEHKTTVLLRDYLYGGVRNIKKRKNSLFCACVRPQTK

SEQ ID NO: 59812 - protein, 192 aa, Gossypium hirsutum
  unsure (1)..(192): unsure at all Xaa locations
  Clone ID: LIB3585-026-P1-K1-E8.pep
SSSFKKESYTTELELFRKLSHTRFIPLLGHCLEHETDKLLVYKYMPNGDLANSFYRAINSDDDSLKSLDWITRLKVATGAAEGLCYLHHECNPPLVHRDIQASSILLDDKFEVRLGSLSEVHCQEGDTHQKVLTRLLRKPGTSEPGPSGSGSTSATCAYDVYCFGKRLLELITXKXXINKVEDTSTKEWLEQ

SEQ ID NO: 59813 - protein, 68 aa, Gossypium hirsutum
  Clone ID: LIB3166-013-P1-K1-D12.pep
GRVGGRVGLVLGSEIPKYETIHHFIGFFQHILMVSFGTDRFYFSYLRLRCVLFRKSITRAYNGETWDQ

SEQ ID NO: 59814 - protein, 162 aa, Gossypium hirsutum
  Clone ID: GOSHI-09MAY01-C9360_1.pep
KLKKHFMKGRLDIARQKLIDELITFSMLRGVKVVVVFDAMMSGLPTHGETFAGIDIVYSGESCADAWIEKEVVALREDGCPKVWVVTSDHCQQHAAHGAGAFIWSSKALVSEIKASQKEVERMLLEQRSTSFPGKLLKHNLDTEGVDALKGLRRQLSENESC

SEQ ID NO: 59815 - protein, 213 aa, Gossypium hirsutum
  Clone ID: GOSHI-09MAY01-C9240_1.pep
GRVGFCGDTSSFNWQHGCEIGDPWSLEHFTSTRAVDKAAPESSIHHAQVMIDQCQSDNFHSDAFVPSEAKFKHYTTCSSTSYGVDLQSYSTSMDAMGLILFLCKHVEDHNFMRCEISDALQLAPDPARLVLDAISTFNIPESSNTHEKKWNGSNSGNLCHVRKSCILLLEQLRTFPFQIDPHVNEEVLKLAFDWKDRALKGVVAYGFLQLIFT

SEQ ID NO: 59816 - protein, 98 aa, Gossypium hirsutum
  Clone ID: GOSHI-09MAY01-C9230_1.pep
RTARAGRSGVAISLVNQYELEWYLQIEKLIGKKLSEYPAQEEEVLQYLESVTEAKRLSQMKLKEIGGTKKRRGGDDDDEDIERYLGVKGKSSKKVKRK

SEQ ID NO: 59817 - protein, 124 aa, Gossypium hirsutum
  Clone ID: LIB3166-011-P1-K1-F9.pep
LDIPSVDMVINYDIPTNSKDCIHRVGRTARAGRSGVAISLVNQYELEWYLQIEKLIGKKLPEYPAQEEEVLQYLESVTEAKRLSQMKLKEIGGTKKRRGGDDDDEDIERYLGVKAKSFKKGKRK

SEQ ID NO: 59818 - protein, 204 aa, Gossypium hirsutum
  Clone ID: GOSHI-09MAY01-C9220_1.pep
TFTKNYGSLIYQAKLRLQYGESHGIICRQGLICSSISSSVTQTALGAVKVLKQAGEYDATVHKSASGVVVRDEERLVLLSYSEINHGVSSAFAAEAIACRKAVKVGVGQQWPKVIIESDSLTIIKKCTTKSQDRSHIGAYIHDIQQNINRSRSFFFKRTIRSANNLAHVITTETLRRKEETYLEMGVPVYAEIQQRMDQRREPD

SEQ ID NO: 59819 - protein, 89 aa, Gossypium hirsutum
  Clone ID: LIB3148-002-P1-K1-B3.pep
WITWIFDLFFIGQQIADFINNYIVEPNGLEIRRSIKGKETRKWSYPHREFVKINFDGEYDATHHKSASGVVVRDEERLVLLSYSEINHG

SEQ ID NO: 59820 - protein, 259 aa, Gossypium hirsutum
  unsure (1)..(259): unsure at all Xaa locations
  Clone ID: GOSHI-09MAY01-C4990_1.pep
PRVRRVLLPIKSKGLRQDMIXRRGINYTHNSLQSLIVRDHHFVKGSLLELELQKKQRVIVEAIVSLLPTQSRKSPVPMAFLSSLLKTALSSSVSTSCRSHLERRTGLQLDHAILEDILIPANSHGNNHTAMYDTESILRIFSIFLNLDDDDDDDDDDDDEDNRLTDESEMAYDFDSPGSPKQSSILKVSKVLDSYLAEVALDTNLSPSKFIALAELLPDHARIVSDALYRSVDIFLKVHPNIKDSERYRLCKTIDCQKL

SEQ ID NO: 59821 - protein, 95 aa, Gossypium hirsutum
  Clone ID: GOSHI-09MAY01-C4940_1.pep
IQPSVRSYRHSPSMSYSRSSVDLRDVSSHLVSPASLNYPSISPLNARYMSQYFPSPSNASPSLVQSSSRRLYPLHCSKSAASFSPFASAQSLPEC

SEQ ID NO: 59822 - protein, 201 aa, Gossypium hirsutum
  Clone ID: GOSHI-09MAY01-C4970_1.pep
MDNKGCNKVQPVARKAKKKQVKDELDRIKQAEKKKRRLEKALATSAAIRSELEKKKQKKKEEQQRLDEDGAAIAEAVALHVLVGEDSGDSCEIMVKKDEGFNRWDWGRRARLPHQAHTTSQGWVANAYSGGCEWAEFGSSDWSFTYGACRRDLHAPWFEDRGWGNEELSAGLIAAQAVSALQITEDAEVVDTIVLDRMLRG

SEQ ID NO: 59823 - protein, 260 aa, Gossypium hirsutum
  unsure (1)..(260): unsure at all Xaa locations
  Clone ID: GOSHI-09MAY01-C4910_1.pep
EHAFPLDELRPLSCEGEDTLGGYALTLIDSLDTLALLGDRERFTASVEWIXNKTVSIFETTIRVLGGLLSAHLIASDYATGMRRPSYDNELLDLAEDLARRLLPAFDTPTGIPFGSVNLMYGVDEHESKITSTAGGGTLTLEFGVLSRLTNDPIFEQVTKNAVRGLWARRSKLNLVGAHINVFTGEWTQKDAGIGTSIDSFYEYLLKAYLLFGDEECLFIFQEAYSAAMHYLYNDPWYVEVNMDSAAMVWPLFNSLQAFW

SEQ ID NO: 59824 - protein, 153 aa, Gossypium hirsutum
  Clone ID: GOSHI-09MAY01-C4920_1.pep
MLSFSYSLPLFLCFISSFNGIFAATEFDFGTLNLSSLKLLGDAHLNNGSVRLTRDLQVPASGAGRALYSKPVRFREPQTHSPCSFSTFFSFYITNLNPSSIGGGLAFVISPDGDFIGAGGGSLGLLDDKGRASGFVAVEFDTLMDVEFDDFNG

SEQ ID NO: 59825 - protein, 192 aa, Gossypium hirsutum
  unsure (1)..(192): unsure at all Xaa locations
  Clone ID: GOSHI-09MAY01-C4850_1.pep
ERKARPDPRVRPRVGPVVGWPPIRSFRKNIAERSSSKLASESSPSVLPHKVGNEKKAAEPSAKFVKINMDGVPIGRKVDLNXAYDSYEKLSTAVDELFRGLLAAQRDSSAGGIVKKQQEEKAITGLLDGSGEYTLVYEDNEGDRMLVGDVPWHMFVSTVERLRVLKSSELSALSLGSSKRGKYRLDSVSTKV

SEQ ID NO: 59826 - protein, 135 aa, Gossypium hirsutum
  unsure (1)..(135): unsure at all Xaa locations
  Clone ID: LIB3829-031-Q6-K6-A12.pep
TAPGPVVGWPPIRSFRKNIANSQFIVNXASESSPSVLPHKVGNEKKAAXPTAKFVKINMDGVPIGXRKVDLKAYDSYEKLSTAVDELFRGLLAAQXNSSAGGIVNKQEEEKAITGLLDGSGEYTLGYEDNEGDRM

SEQ ID NO: 59827 - protein, 90 aa, Gossypium hirsutum
  Clone ID: uC-gsflnu33B018g05b1.pep
YFFLLFLFSYFIFFFVFFFSKWHSCRERKKTNVKNYIADLLIYTVSESGLKAKQGTKCQNMNIIQISMPHLQTLVETESSRYFPRLLLPR

SEQ ID NO: 59828 - protein, 47 aa, Gossypium hirsutum
  Clone ID: LIB3148-025-Q1-K1-H6.pep
KSKWHSCRERKKTKSKITYRPTNIYSKCVRFKGKTGHLMSKHEHYNV

SEQ ID NO: 59829 - protein, 55 aa, Gossypium hirsutum
  Clone ID: LIB3584-035-P1-K1-A12.pep
HYCSGPNITSSQTKRKTISNSPFYGHFTKIIEHKYHLNSINYSISCKETRPQSIS

SEQ ID NO: 59830 - protein, 55 aa, Gossypium hirsutum
  Clone ID: LIB3584-053-P1-K2-H1.pep
HYCSGPNITSFQTERKTTSNSPFYGHFTKIIEHKYHLNSINYSINCKETRPQSIS

SEQ ID NO: 59831 - protein, 156 aa, Gossypium hirsutum
  unsure (1)..(156): unsure at all Xaa locations
  Clone ID: GOSHI-09MAY01-C4550_1.pep
MVGFKNRYMVMEVLLDPNKEISGDDPIVVTQFNISKAIKDSILVNFGECGLASSLGSFQVKYVNPITKLCVIRVSRDEYQKIWSSISMVRRIGNXGPVLFNLLDLSGKYKGACKTAALKCDELKFEQYKLMVGARLSADVTQHMKNCLEKIRILEH

SEQ ID NO: 59832 - protein, 116 aa, Gossypium hirsutum
  Clone ID: LIB3148-017-Q1-K1-G10.pep
KDSILVNFGECCLASSLRSLQVKYVNSITKLCIIRASRDEYKKIWYSISMVRSIGNCLVLFNLLDLSGSIKACKTAALKCDELKFEQYKLMVGARLSVDVIRHMQNCIEKIKILEH

SEQ ID NO: 59833 - protein, 186 aa, Gossypium hirsutum
  Clone ID: GOSHI-09MAY01-C4500_1.pep
PTRPRKSTKNSDSVVDETFYFRYSSAVAPPSSSSSNPNQATSKSTGGGGGSGGLAPSKSTLYVSNLDYSLTNSDLHTLFSTFGKIARVTVLKDRATRNSKGVAFVQFVSRDDALSAASVMHGNILIGRTLSASIAVDNGRAPEFIKKRVYKDKSRCYECGAGGHLSYECPKNQLGPRERPVPKKGR

SEQ ID NO: 59834 - protein, 131 aa, Gossypium hirsutum
  unsure (1)..(131): unsure at all Xaa locations
  Clone ID: uC-gsflmaxxa090f11b1.pep
PPTSHRGGGSAGGLAPSKSTLYVSNLDYSLTNSDLHTLFYTFGKIARVTVLKDRATRNSKGVAFAQIDSREDALSAASVMHGKILNGRTLSATIAVYNGRAPEFIKKRVYKDKSRCYECGAXGHLSYECPK

SEQ ID NO: 59835 - protein, 133 aa, Gossypium hirsutum
  Clone ID: LIB3584-046-P1-K2-B1.pep
MGREGKVGHSSNFKKRVRSKHEGSDDSDEDYVASEGNERSDDDAEYYCSSLDECASEEGFQGYNEEEEEEVREVVRLKRERISSVRERKILDKKSVKRESMSCEEDEDTDSHEEEEEDEEVREAVRLKRERIS

SEQ ID NO: 59836 - protein, 143 aa, Gossypium hirsutum
  unsure (1)..(143): unsure at all Xaa locations
  Clone ID: LIB3582-019-P1-K1-H5.pep
PCFLEGFLETADLFLFVCLEGYFFRKTCLLTFVLFFLLVIVNSSSSSKQSSSSGVNSSSKQSSSSRVNSSSKQSSKSGVNSSSSSSFSSSSSSXSLSSSSSTDKLSRLTDFLSAIFLSLSEDIRSLFNLTTSLTSSFSSSSSS

SEQ ID NO: 59837 - protein, 96 aa, Gossypium hirsutum
  Clone ID: GOSHI-09MAY01-C4470_3.pep
ILTKVVYIFKLIKRFLEKNACSLIQTWKIIQVNNLAHLSKQLKFMTHDLQQTNACLPKSYVSSTSETQQCNRNPKSKSQCRNFYFLRRIWQLLGRL

SEQ ID NO: 59838 - protein, 241 aa, Gossypium hirsutum
  Clone ID: GOSHI-09MAY01-C4470_2.pep
PTRPPTRPVCTTSRNPRIGHLEHIGIDLAQNKSSKEGLHLQNGFSHESEEESSSDLPGSIVDPHQRLLIVLSNIGYCKDELSSELYKKYKCIWLQSRDKDEEESDIQELVVSFTGLEEKVLEQYTFAKANLIRTAAMNYLLDSGVQWGSAPAVKGVRDAAVELLHALVAVHAEVFAGAKPLLDKTLGILVEGLIDILISLFHENESKDLSSLDANGFCQLMLELEYFETILNPFFTQRRRR

SEQ ID NO: 59839 - protein, 124 aa, Gossypium hirsutum
  Clone ID: GOSHI-09MAY01-C4470_1.pep
KSLQGVLLEKATESLSEVENPGHNRRPTRGSEDAAADEKLLAAAVSPDDLIALAQQYSSELLQGELERTRINTACFVESLPMESAPDSVKAAYASFRGPMDSPSKNYRGTQATGSPSFTQRRRR

SEQ ID NO: 59840 - protein, 238 aa, Gossypium hirsutum
  Clone ID: GOSHI-09MAY01-C4410_1.pep
GRVGFAYSSIGLGLSIAKVAGGEHVRTSLTGVTVGVDVSGSEKVWRTFQAIGDIAFAYAYCTVLIEIQDTIKSSPPENKSMKRASSIGVSTTTLFYVLCGLIGYAAFGNDAPGNFLTGFGFYEPFWLIDFANICIAIHLIGAYQVFAQPLFGFVEGWCSRNWPNSRFITSEHAGDVPFYGIYYLNFFRLVWRTAYVIITAVVAMIFPFFNDFLGLIGAGSFWPLTVYFPIEMHIAQSK

SEQ ID NO: 59841 - protein, 115 aa, Gossypium hirsutum
  Clone ID: GOSHI-09MAY01-C4400_1.pep
RGEYFGEFSVRSACKLLQEANMDPITYLIQTETKIFCRKLWNLHLPKKIAITIWCISWNFIPALNNLRLRRVASDSSCPRCRNTEEDSNHAFRQCLGFSPWVIVNNFDFFAVPHG

SEQ ID NO: 59842 - protein, 96 aa, Gossypium hirsutum
  Clone ID: LIB3584-045-P1-K2-D4.pep
VNMAPIPYLIQPEPNIFYSNLCHLLLPKHIAIPIWCFSWNFIPALQYVRLSIVASYSSCPLCGESVQDSAHAFSLCLGFSPWVIVNNFDFFAVPHG

SEQ ID NO: 59843 - protein, 141 aa, Gossypium hirsutum
  Clone ID: GOSHI-09MAY01-C4420_2.pep
LTLAHVKSHLQMYRTVKTTDRAAASSGQMDAFENGSSGDTSEDMMFEIQNPRRSEISVQQGRSSSSNAHQDKEYHGLWSNSSREAWLHGKPDEAPLNLPSLQKDMDPKCLSYERISDVSSSSLSETCSKKPNLEFTLGVPH

SEQ ID NO: 59844 - protein, 166 aa, Gossypium hirsutum
  unsure (1)..(166): unsure at all Xaa locations
  Clone ID: GOSHI-09MAY01-C4420_1.pep
MATSSSGASSGSSTLRSSSSSEDFQPILDERKRKRMLSNRESARRSRMRKQKHLDELMAQVSNLTNHNNQIHTSINVTTQLYSNVEAENLVLRAQMTELSNRLQSLNEIIHFINSSNGVLQNDTNFXTRPAYCHPHHQLNDDSLMNPWNFSTTNQPCMPSADMMMY

SEQ ID NO: 59845 - protein, 57 aa, Gossypium hirsutum
  Clone ID: LIB3584-045-P1-K2-F3.pep
MATSRTGSSSSSTTPRSSSSVEEFQQVLNERKRKRMASNREAACRSRMRKQKQFDDL

SEQ ID NO: 59846 - protein, 65 aa, Gossypium hirsutum
  Clone ID: LIB3135-061-Q1-K1-G1.pep
LASEPRNFIMQRNSDMELFMKNGEEKLKKIRAGYGVTIRERERERGYLILFTNSPFSSLRSQRYI

SEQ ID NO: 59847 - protein, 232 aa, Gossypium hirsutum
  unsure (1)..(232): unsure at all Xaa locations
  Clone ID: GOSHI-09MAY01-C4690_1.pep
KTCIDLSAGDEKAINLSAMSHVVVYLDWKSKLLEKYNINYLENLPEVFKYGPITKKARTEPLSLYTCLEAFLREEPLVPEDMWYCPQCKEQRQASXKLDLWRLPEVLVIHLKRFSYSRSMKHKVETFVNFPIHDFDLTNYVADKRSSCSQLYELYALTNHYGGMGSGHYTAHIKLLDENKWYNFDDSHISPINEEDVKSAAAYVLFYRRAKSDTSGTSSAGSRRARDKTSYK

SEQ ID NO: 59848 - protein, 221 aa, Gossypium hirsutum
  unsure (1)..(221): unsure at all Xaa locations
  Clone ID: GOSHI-09MAY01-C4680_1.pep
SLGSKQEAHVFKSKSGACAAFLANYDTRYSVKVKFGNGQYDLPRWSISILPDCKTAVFNTAKIGAHSSKKAMVPLNRAFSWQSYNEQSPTADDREATVHNGLWEQIYLTRDASDYLWYMTDVKIDPNEGFLKGGQGPILTFWSAGHALHVFINGQLSGTVYGGLDNPKLTFSNNVKLRAGINRIXLLSVAVGLPNVGTHFETWIAGRLXPVTLKGLNEGTR

SEQ ID NO: 59849 - protein, 83 aa, Gossypium hirsutum
  unsure (1)..(83): unsure at all Xaa locations
  Clone ID: LIB3583-058-P1-K1-G9.pep
QGRLTSYQAXGWTHKASHRKXLSGGNDDQTTSATGTAGGVVKSSGGKSHECSICHKSFPTGQALGGHKRRHYEGGAGNNNAGA

SEQ ID NO: 59850 - protein, 148 aa, Gossypium hirsutum
  Clone ID: LIB3584-054-P1-K2-F2.pep
MALEAINSPTSATAPFRFDDTNLHCLESFTKRKRSKRPRLDHVTAEEEYLALCLIMLARGGGQRSPSPTTMPEPTSTEEQKPSYKCSVCNKAFNSYQALGGHKASHRKLSGGNDDQTTSATGTAGGVVKSSGGKSHECSICHKSFPTG

SEQ ID NO: 59851 - protein, 299 aa, Gossypium hirsutum
  unsure (1)..(299): unsure at all Xaa locations
  Clone ID: GOSHI-09MAY01-C4640_1.pep
MAHTCVTTSTSSIQFSSLLYNPNSSTSLDSHNLSLPSHPRRTRKLKKLVSNQNNVVMGFQPKAFWDAETSSRKGIWSIRDDLQLPSSPYIPMNAQGQGPPPMVQERFQSVVSQLFQHRIIRCGGAVDPRVPNIIVAQLLYLDAVDPQKDIVMYVNSPGGSVTAGMAIFDTMRHIRPDVSTVCVGLAASMGAFLLSGGTKGKRYSLPNSRIMIHQPLGGAQGXGQTDIDIQANEMLHHKANLNGYLAYHTGQSLEKINQDTDRDFFMSAKEAKEYGLIDGVIMNPLKALQPLAPTADSDE

SEQ ID NO: 59852 - protein, 68 aa, Gossypium hirsutum
  Clone ID: GOSHI-09MAY01-C4670_1.pep
LAQVVLKSEQARMETMKEIEKMRVEAEAKRGEMDLKRTEIIANTQLEIARLFAGSNKGVDSSLRIGRN

SEQ ID NO: 59853 - protein, 144 aa, Gossypium hirsutum
  Clone ID: GOSHI-09MAY01-C4620_4.pep
MMQTEQQPQHQNQLTVQNSGSLSFSSHLSKEDEEISKSALSTFRAKEEEIERKKMEVREKVQLQLGRVEEETKRLATIREELEALADPMRKEVAVVRKKIDAVNKELKPLGHTCQKKEREYKEALRAFNEKNRKSTANTKLWSL

SEQ ID NO: 59854 - protein, 168 aa, Gossypium hirsutum
  Clone ID: GOSHI-09MAY01-C4620_3.pep
MMQTEQQPQHQNQLTVQNSGSLSFSSHLSKEDEEISKSALSTFRAKEEEIEKKKMEVREKVQLQLGRVEEETKRLASIREELEALADPVRKEVAVVRKKIDAVNKELKPLGHTCQKKEREYKEALEAFNEKNKEKVQLITKLMELVSESERLRMKKLEELSKNVDSLH

SEQ ID NO: 59855 - protein, 172 aa, Gossypium hirsutum
  Clone ID: GOSHI-09MAY01-C4620_1.pep
MMQIEQQQQQPQQQQNQLMVQNSGSLSFSSHLSKEDEEISKSALSTFRAKEEEIERKKMEVREKVQLQLGRVEEETKRLAVIREELEALADPMRKEVAQVRKKIDAVNKELKPLGNTCQKKEREYKEALDAFNEKNKEKVQLITKLMELVSEREKLRMKKLEELSKNIDSIH

SEQ ID NO: 59856 - protein, 117 aa, Gossypium hirsutum
  unsure (1)..(117): unsure at all Xaa locations
  Clone ID: LIB3582-061-P1-K1-C9.pep
MMQTEQQPQHQNQLTVQNSGSLSFSSHLSKEDEEISKSALSTFRAKEEEIEKKKMEVREKVQLQLGRVEEETKRLASIREELEALADPMRKEVAVVRKKXDAVNKELKPLGHTCQKR

SEQ ID NO: 59857 - protein, 79 aa, Gossypium hirsutum
  Clone ID: LIB3148-036-Q1-K1-G6.pep
EISKSALSTFRAKEEEIERKKMEVREKVQLQLGRVEEETKRLATIREELEALADPMRKNPCAHCCAIFSEAKVLQLRFG

SEQ ID NO: 59858 - protein, 74 aa, Gossypium hirsutum
  Clone ID: LIB3829-035-Q1-N6-H11.pep
VVRKKIDAVNKELKPLGHTCQKKEREYKEALEAFNEKNKEKVQLITKLMELVSESERLRMKKLEELSKNIDSLH

SEQ ID NO: 59859 - protein, 96 aa, Gossypium hirsutum
  unsure (1)..(96): unsure at all Xaa locations
  Clone ID: LIB3584-031-P1-K1-D10.pep
MMQIEQHQQLPQHHQNQLMFQNSRSLSFSGHCSKDHEYISQSSFSPFKPNKKDNYRRNICVXEKVQLQLGRVEEETKRLAXIRXELEALAYPIRKE

SEQ ID NO: 59860 - protein, 79 aa, Gossypium hirsutum
  Clone ID: uC-gsronu33B104h05b1.pep
MMQTEQQPQHQNQLTVQNSGSLSFSSHLSKEDEEISNSALSTFRAKEEEIARKKMEVRENVRLGWAIGHITLSYTLTHY

SEQ ID NO: 59861 - protein, 174 aa, Gossypium hirsutum
  Clone ID: GOSHI-09MAY01-C4180_1.pep
MGRELRGVQVDNKPNGLVKSNGAVNKKSSPPALKSPGAGNTQAHLTFSKTAANGIANGDSPPFPIKDSETNSPKTPLISRKHTDEEDNWSVASSTAASVRTARSRVTIGTAPTFRSAERAEKRREFHQKLEEKHQALEAERSQYEARLREEQEAAIKQLRKGLFVKANPVPSFY

SEQ ID NO: 59862 - protein, 133 aa, Gossypium hirsutum
  Clone ID: LIB3166-014-P1-K1-H10.pep
PTRPKTSTDEFSYIHVRTARGRVTIGTAPTFRSAERAEKRREFHQKLEEKHQALEAERSQYEARLSEEQEAAIKQLRKGLFVKANPVPSFYYEGPPPKVELKKLPLTRPKSPNLTRRKSCSDVVHSTEDEKAK

SEQ ID NO: 59863 - protein, 193 aa, Gossypium hirsutum
  unsure (1)..(193): unsure at all Xaa locations
  Clone ID: GOSHI-09MAY01-C4170_1.pep
ELVHNLVDESTADRILSIPISGSGPEDRLVWKHEGFGDYTVKSGYRVLNREYLQDTIYMSSINEDYKDFYKALWSLNIPGKIKIHIWRPVNNLVPHFGNLARRTLCMEVSCPLCKAELEDSDHLLWSCGILXWVWASLQVKIPSFEESMCHKLRFVRTFSAADDQQKRIIAISMWSIWFHRNKLVHEGVKFSL

SEQ ID NO: 59864 - protein, 75 aa, Gossypium hirsutum
  unsure (1)..(75): unsure at all Xaa locations
  Clone ID: LIB3145-047-Q1-K1-A1.pep
SSSIEDMYIVSCKYFVFRTRYPLLTVYSPEPLCFQTNLSSRPLSDMGIEKIRSAVLLNXKNKNLKNYIIYFFFLI

SEQ ID NO: 59865 - protein, 242 aa, Gossypium hirsutum
  unsure (1)..(242): unsure at all Xaa locations
  Clone ID: GOSHI-09MAY01-C4100_1.pep
GNGVSKDILAQWSNQGGRGSPDPETSMILVQHEGGPCGVLADIQAFVLKHLMFCPDDLHKAAQSTPQNSTPRRLSKNQYVASNNFAAFTENAKARALVKSMGEILCLCGNNKRAVIATLSSIGDGVEESVDSLTDVIIAQALQGLSIESASDSHKVLRVETYTTPASAYKKLEAIIPVFQXRMGALLFLISALLSRRLDCVQXRDDPSLPLLTAPFGHASQEIVELLLCGQAVPNVXDGRMD

SEQ ID NO: 59866 - protein, 147 aa, Gossypium hirsutum
  unsure (1)..(147): unsure at all Xaa locations
  Clone ID: GOSHI-09MAY01-C4130_4.pep
DVSNSLVYKRSPSIRRHPFSPVLNLQNIPKRTNVLVSKPLHISSVECIGKEKKPVIQCNAYEADKSEPIEAAEQVKSEAAKRVKIGIYFATWWGLNVVFNIYNKKVLNAYPYPWLTSTXLSLAWGSLMMLISWATKIAWTPKTDFEV

SEQ ID NO: 59867 - protein, 388 aa, Gossypium hirsutum
  Clone ID: GOSHI-09MAY01-C4130_2.pep
MSFSFKQSGLATCMNVTNSGFHKRLISTICSRSSFSPCLNLQNPERRNLSVSKPLHISSIEKINEKKPVFECKAFEADKSQPIEVEVKSEAAKRLKIGIYFATWWALNVVFNIYNKKVLNAYPYPWLTSTLSLACGSLMMLISWATRIAETPKTDFEFWKTLFPVAVAHTIGHVAATVSMSKVAVSFTHIIKSGEPAFSVLVSRLLLGESFPPAVYLSLVPIIGGCALAAVTELNFNMTGFMGAMISNLAFVFRNIFSKKGMKGKSVSGMNYYACLSLLSLVILTPFAIAVEGPQMWAAGWEKALSQIGPQFIWWVAAQSIFYHLYNQVSYMSLDEISPLTFSVGNTMKRISVIVSSIIIFHTPVQPINALGAAIAILGTFLYSQAKA

SEQ ID NO: 59868 - protein, 248 aa, Gossypium hirsutum
  unsure (1)..(248): unsure at all Xaa locations
  Clone ID: GOSHI-09MAY01-C4130_1.pep
MSFSLKQSALAACSDVSNSVLQRRSLSCRSSILPPLVFQNNSKRTNLSLSKPLHVSAVEIIGKDKEPVIKCRAYEADKSQPIQAAAQEVKSEAAKRVKIGIYFATWWALNVVFNIYNKKVLNAYPYPWLTSTLSLACGSLMMLISWATRIAEAPKTDFEFWKTLFPVAVAHTIGHVAATVSMSKVAVSFTHIIKSAEXAFSVLVSSLLLGESFPPAVYLSLVPIIGGCALAALPESNFILYRFLGCFF

SEQ ID NO: 59869 - protein, 217 aa, Gossypium hirsutum
  Clone ID: LIB3543-064-Q6-K6-D7.pep
PASASFEGWGHALKETNVLVSKPLHISSVECIGKEKKPIIQCNAYEADKSEPIEAAEQVRGRSCKRVKIGIYFATWWGLNVVFNIYNKKVLNAYPYPWLTSTLSLACGSLMMLISWATRIAETPKTDFEFWKTLFPVAVAHTIGHVAATVSMSKVAVSFTHIIKSGEPAFSVLVSRFLLGENFPLSVYLSLIPIIGGCALSALTELNFNMTGFMGAM

SEQ ID NO: 59870 - protein, 101 aa, Gossypium hirsutum
  Clone ID: LIB3166-002-Q1-K1-E2.pep
MSFSLKQSALAACNDVSNSVLQRRSLSCRSSILPPLVFQNNSKRTNLSLSKPLHVSAVEIIGKDKEPVIKCRAYEADKSQPIEAAAEEVKSEAAKRVKMGI

SEQ ID NO: 59871 - protein, 59 aa, Gossypium hirsutum
  Clone ID: LIB3146-022-Q1-K1-A4.pep
HASALDEISPLTFSVGNTMERISVIVSSIIIFHTPVQPINALGAAIAILGTFLYSQAKA

SEQ ID NO: 59872 - protein, 91 aa, Gossypium hirsutum
  Clone ID: GOSHI-09MAY01-C4090_1.pep
EDGTGELKVMMIMIGIKEAEVIGRDRMMHDICFIFASKRSKSSRLSICFFDKTTSQLPYSYESTKTLSLITNYDLFQGVVLYLHELLLIFF

SEQ ID NO: 59873 - protein, 139 aa, Gossypium hirsutum
  unsure (1)..(139): unsure at all Xaa locations
  Clone ID: GOSHI-09MAY01-C4030_1.pep
MALGKYSRVDNNNNNNRKSSSSYCSTVTIVVFVGLCLVGIWMLTSSSVVPVQTGNGSAEEKKNQVEDQVTPVTSDNNDSSNTSDFEDXPRDLPDDATKGDANVSLAENDGKGYLNTQENQDNTEETKMAESKKHDEQSA

SEQ ID NO: 59874 - protein, 97 aa, Gossypium hirsutum
  Clone ID: GOSHI-09MAY01-C4390_1.pep
MKSIIATLLFVSLVLCSSFIQLSFASPAAAPSPAPPSYCDGKCGERCAKAGMKDRCLKYCGICCQECKCVPSGTYGNKSECPCYRDKKNSKHQPKCP

SEQ ID NO: 59875 - protein, 380 aa, Gossypium hirsutum
  unsure (1)..(380): unsure at all Xaa locations
  Clone ID: GOSHI-09MAY01-C4380_1.pep
LRVRKWAEYFRLHKDLFVFWSAKAATAELEGKLLTDHWKMENNMRKSDDPETKIHGRDELLARLQYEAEEIVKMRKSGSDTSTSSNIHSPRNNAEGTSAPKSVMVGFVAYPNVGKSSTINALVGQKRTGVTSTPGKTKHFQTLIISDELTLCDCPGLVFPSFSSSRYEMIXASGVLPIDRMTEHREAVHVVANRVQRHVIEDVYKIKLPKPKPYESQSRPPQASEFLRAYCASRGYVASSGLPDETRAGRQILKDFIDGKLPHYEMPPGMSAEDGEEDDGNPSLSEVLKSDASDVEDSLENGTETTPVFEHVLDDLSSFDLANGLVSKKATVKKSNESRKHHKKPQRKKDRSWRVGNDDEDGMPVTRVFQKPVNSGPLNV

SEQ ID NO: 59876 - protein, 66 aa, Gossypium hirsutum
  Clone ID: GOSHI-09MAY01-C4260_1.pep
QRSFSLRHIIKNKFKSQMINTSSILLDGISIYLILNNIFYILSYASCSLFFSTTLYYVLLQSGRVG

SEQ ID NO: 59877 - protein, 198 aa, Gossypium hirsutum
  unsure (1)..(198): unsure at all Xaa locations
  Clone ID: GOSHI-09MAY01-C4200_1.pep
MGIFSIGPLFGRYWYSRNETTAGETPYRSKAEYTEKQLLLNVSAQLTIIGKDYSNFSVLFLEGLYDPHFGRMYLVGCRDVRASWKILSQTIDLESGLDCLIEVIVSYPPTTARWLFNPTARISISSQRPEDDPLYFGMIKLQTLPIMYRKQREDILSRXGIEGILCVLTLSFAVACISSQLFYLNQDVGSSPFISFVM

SEQ ID NO: 59878 - protein, 97 aa, Gossypium hirsutum
  Clone ID: GOSHI-09MAY01-C4220_1.pep
VHICKIFYLCVSQLTVVSYFVYVCKNKIFIASMYVFQKPQNHPFTSSQFGLFIATEKEKERIFTIFGLFLAIFVLFLSFSFYFCRYLREIQRWRRLR

SEQ ID NO: 59879 - protein, 97 aa, Gossypium hirsutum
  unsure (1)..(97): unsure at all Xaa locations
  Clone ID: GOSHI-09MAY01-C5970_3.pep
RDPVAETSYSFRLAIYFFARVPTHWEGGCXQGPGELTFLTCLMNVAGSLVRVFTSLQEKAPTMVLLGSVLGIATNGAVLSQIILYWNSQVPKEKKAE

SEQ ID NO: 59880 - protein, 218 aa, Gossypium hirsutum
  unsure (1)..(218): unsure at all Xaa locations
  Clone ID: GOSHI-09MAY01-C5970_2.pep
MDYLGIDLSCAIGSLXDGNFPPKDCWLPLISKLLGYAIVAASTTVKLPQILKIVNHKSVRGLSLIAFELEVVGXTIALAYCLHNGLPFSAYGELVFLLIQALILVAVIYYYSKPVGITTWIRALLYCAVAPTILAGQIDPILFEALYASQHAIFFFARVPQIWKNFSNKSTGELTFLSCLMNVAGSLVRVFTSLQEKAPTMGILFLLYSHILERFLYT

SEQ ID NO: 59881 - protein, 235 aa, Gossypium hirsutum
  Clone ID: GOSHI-09MAY01-C5970_1.pep
MDYLGIDLSCAIGSLKDGNFPPKDCLLPLISKLLGYAIVAASTTVKLPQILKIVNHKSVRGLSLIAFELEVVGYTIALAYCLHNGLPFSAYGELVFLSPRPPFLGAGVYYYSKPVGITTWVRALLYCAVAPTILAGQIDPVLFEALYASQHAIFFFARVPQIWKNFSNKSTGELSFLTCLMNVAGSLVRVFTSLQEKAPAMVLLGSVLGIATNGAVLSQIILYWNSQVPKEKKAE

SEQ ID NO: 59882 - protein, 262 aa, Gossypium hirsutum
  Clone ID: GOSHI-09MAY01-C5820_1.pep
MAAPKISLTLLCFTSLLPFFTSVNARIPGVFSTGSWETAHATFYGGSDASGTMGGACGYGNLYSQGYGVNTAALSTALFNNGLSCGACFEIKCASDPRWCHPGSPSIFVTATNFCPPNFALRSDNGGWCNPPRPHFDLAMPMFLKIAEYRAGIVPVSFRRVPCRKHGGIRFTVNGFRYFNLVLITNVAGAGDLVKVSIKGTKTGWMSMSRNWGQNWQSNAVLIGQALSFRVTGSDKRTSTSWNVAPPNWQFGQTFTGKNFRI

SEQ ID NO: 59883 - protein, 256 aa, Gossypium hirsutum
  Clone ID: GOSHI-09MAY01-C5590_1.pep
KPNFCASLVSLFVSTCENQFAFNRFCVLPRALSCSKGVSLVVGLFSLLIPARAFTSSKVPNGSVVTKTIGNINHRGKIYPITRGFDRRRLRNTGLLMAKLRFPNERLGNIYEKTGGFGVTRGSSLICLSSRTQKSETDCSDASSAQIAEGEVGHSSMHGRTIHSSPGLAEACRFACNDAKFVNERARNDIVLLSRGIMRLDARARQDVAILGSGFLKLDARAREDTEKIDRGVKKKAERLHHIATILKAKAESRLK

SEQ ID NO: 59884 - protein, 318 aa, Gossypium hirsutum
  Clone ID: GOSHI-09MAY01-C5550_1.pep
MGSSFGEAFPAMQETLLEFRAGKMMLEGKRVVPDTRKGLIRIARGEEGLVHFQWLDRTQNVIEDDQIIFPDEAVFEKVNQASGRVYILKFNTDDRKFFFWMQEPKAEDDSQLCCAVNNFINQPLELGVDEPDASEPLQASEDMVEDDISSRAGNLTLTNLGAEAISDVTSSSGPVKLEDLQRILSSIGPAEVAGEPDGGLGLDDILKPDLIMPLIETLSLEERLASYLPEGQWTPEDLLELLQSPPFRQQVDSFTYVLRTGQIDLSQFGIDPSKYKFTVLSFLEALEDSVSKTSGETQDEKDVRPQSCNRNDPMDESK

SEQ ID NO: 59885 - protein, 159 aa, Gossypium hirsutum
  Clone ID: GOSHI-09MAY01-C5480_1.pep
MAEEHRCQAPQLCANNCGFFGSPTTQNLCSKCYRDLQLKEQQSSSAKQAFNHTFVPSSSSLPSSSSARSSFSASLPAKEEPSAGTKETKVVEEEEVQVTPNRCLSCKKRVGLTGFKCRCGMVFCGIHRYPEQHACAFDFKGMGKQQIAKANPLVKGEKL

SEQ ID NO: 59886 - protein, 87 aa, Gossypium hirsutum
  Clone ID: LIB3272-018-P1-K1-A9.pep
IVICGSSNLKEQLIFLLPNKLFNHTFVPSSSSLPSSSSARSSFSASLPVEDEPLAGTKETNVVEGVEVQVTPNRCLSCKKRVGLTGF

SEQ ID NO: 59887 - protein, 76 aa, Gossypium hirsutum
  Clone ID: LIB3543-020-Q1-K1-A2.pep
MAEEHRCQAPQLCANNCGFFGSPTTQNLCSKCYRDLQLKEQQSSSAKQAFNHTLVPSSSSLPSSSSARSSFFASLP

SEQ ID NO: 59888 - protein, 44 aa, Gossypium hirsutum
  Clone ID: LIB3197-029-Q1-M1-B10.pep
PHAFLASQACVWRNLINMLVLLISKGWENTKSPKLILLLRVRSF

SEQ ID NO: 59889 - protein, 201 aa, Gossypium hirsutum
  Clone ID: GOSHI-09MAY01-C5450_1.pep
MASSLALKRLVSSNILPSSLRVAIAPSISRLFNTNAATPDDHDDRRRADGFFPDLQGRRQGAKKDMFDPLSPTRSLNMMDQVKGNRFLSTSRDIPGLGSEAKESNLRPLSPHLPIYKPQLSATLSITNRISGVFLTTALLFSYLLSLKMGSICFTYSNFYQFFFYSAKLAPVTVSIAALAVSYHLCYGVRHLLADFSGKLR

SEQ ID NO: 59890 - protein, 133 aa, Gossypium hirsutum
  unsure (1)..(133): unsure at all Xaa locations
  Clone ID: uC-gsflnu33B132f08b1.pep
GIEPTYTLYLLLGGEGIRLFYIFYTNAATPVFIFYLRYADGFFPDLQGRGQGAKKDMFDPLSXPTRSLNMMDQVKGNRFLSTFRDIPGLGSEAKESNLRPVFSDLSIYKPQLFGTLSITNRIFGVFLTTGLLV

SEQ ID NO: 59891 - protein, 208 aa, Gossypium hirsutum
  Clone ID: GOSHI-09MAY01-C5460_1.pep
MTSSVGGGGRYMAFSPSPSAPHSPHLSGLRSAAAALLDQEKYLSELLAERYKLSPFMTVIPHTCRLLNQEILRITTLLGNASVLGQNGLEQASPLASGGTFSNGGADMNRWMSQFQSEMPGLVQPSLAENWLNSQGGSSGLIVKRTIRVDIPVDKYPNYHFGGRLLGPKGNSLKRVEANTECRVLIRGRGSIKDPAREEMMKGKPGYE

SEQ ID NO: 59892 - protein, 169 aa, Gossypium hirsutum
  Clone ID: LIB3543-033-Q1-K1-C2.pep
MTTSDGGGGRYMAYSPSPSAPHSSHLSGLRSVAAAAASSAALLDQEKYLSELLAERQKIIPFMPVLPNTYRLLNQEILRVTTLLGNASVLGQSVLEQASPLASGGIFSNGGADMNGWTSRFQSEMSGLVRPSSAQNWVGSQGSSSGLIVKRTIRVDIPVDSYPNYNFVG

SEQ ID NO: 59893 - protein, 140 aa, Gossypium hirsutum
  unsure (1)..(140): unsure at all Xaa locations
  Clone ID: GOSHI-09MAY01-C5420_6.pep
MGRFEERGFDSGVCPKPIRTFRWSTNCYQTEMADSKTGAELLDIILPEGGYGAENSTNQXLHQPPVLCGSPPSTASNPVXQDARFNDEHAGXLPPLTSPATSSRGGCVRVKFGQMPAAVRIEGFDCLTRDGRHRSISAVA

SEQ ID NO: 59894 - protein, 140 aa, Gossypium hirsutum
  Clone ID: GOSHI-09MAY01-C5420_2.pep
MGRFEEGGFDSVVCPKPIRTFRWSTNSCYQTEMADSKAGAELLDIILSEGGYGAENPTDQMASSPPYFCGSPPSRASNPVIQDARFNDEQPVLPPLTSPGPSSRGGCVRVKFGQMPAAVRIEGFDCLTRDGRHRRISAVA

SEQ ID NO: 59895 - protein, 140 aa, Gossypium hirsutum
  Clone ID: GOSHI-09MAY01-C5420_1.pep
MGRFEERGFDSVVCPKPIRTFRWSTNSCYQTEMADSKTGAELLDIILPEGGYGAENPTNQMASSPPYFCGSPPSRASNPVIQDARFNDEQPVLPPLTSPATSSRGGCVRVKFGQMPAAVRIEGFDCLTRDGRHRSISAVA

SEQ ID NO: 59896 - protein, 88 aa, Gossypium hirsutum
  Clone ID: AW187223.1.pep
MGRFEEGGFDSVVCPKPIRTFRWSTNCYQTEMADSKAGAELLDIILSEGGYGAENPTDQMASSPPYFCRSPPNRAYNPVLHHPRLHQE

SEQ ID NO: 59897 - protein, 68 aa, Gossypium hirsutum
  Clone ID: uC-gsflnu33B146h12b1.pep
ATAEMLRWRPSLVRQSNPSIRTAAGICPNFTLTHPPLEEVAGDVSGGLYQEALHQFLNQPSQSDNSCW

SEQ ID NO: 59898 - protein, 101 aa, Gossypium hirsutum
  Clone ID: uC-gsronu33B015e09b1.pep
TNTNAMGRFDERGFDSVVCPKPIRTFRWSTNSCYQTEMAASNTGAELVDIILPEGGFGAENPTNQMASLPPYFCGSSSSRCVYLVFPRCPIQTTSSRSFLY

SEQ ID NO: 59899 - protein, 326 aa, Gossypium hirsutum
  Clone ID: GOSHI-09MAY01-C5780_1.pep
GRIYEITAGSANGGMVSSTVAGGIDCLDLLLEHGSGRKCLSVIKRHIRGFVAALFNIILHLQSPLIFYRKSVSNEGDRNLDPGSVVLMCIEVLTRVSGKHALFQLDLCHIGQSLRIPGALFQEFHQLRISEGPVSSNTFLDEQNHNSTVSMEYHVLGLDQQFSINLFAACCRLLYSILKHHKSECERCIAVLEESVSLLLHCLETVDADLVVQKGYFSWEIQEGVKCAGFLRRIYEEIRQQKDVFAGHCYKFLSTYIWVFSGYGPHKTGIRREIDEALKPGVYALIDACSANDLQYLHTVFGEGPCRNTLASLQRDYKLNFQYEGE

SEQ ID NO: 59900 - protein, 86 aa, Gossypium hirsutum
  Clone ID: LIB3583-029-Q6-K1-E5.pep
SEIKRHIRGFVDDLLNIILHLQSPLIFYRKSVSNEGDRNLDPGSVVLMCIEVLTRVSGKHALFQLDLCHIGQSLRIPGALIKNSIN

SEQ ID NO: 59901 - protein, 142 aa, Gossypium hirsutum
  unsure (1)..(142): unsure at all Xaa locations
  Clone ID: GOSHI-09MAY01-C5720_1.pep
FVTVLGTLSDVSGVVLVVSPCGXSEADAPLVQIXSNTIDRPVRSCVGKWDVRSLISSAPESHRPEKSTREHKLPRHIKFTFKNPIRYRIVCITLPLHRPASSSVNFGNDFILLSLDENPFTQDTRRASFVGSTESSPCLHAK

SEQ ID NO: 59902 - protein, 112 aa, Gossypium hirsutum
  Clone ID: GOSHI-09MAY01-C5660_1.pep
MSDLDRQIEQLKKCEPLKESEVKALCLKAMEILVEESNVQRVDAPVTICGDIHGQFYDMKELFKVGGDCPKTNYLVLGDFVDRGFYYVETWMLVSPLKDRYSDRITLIRGNH

SEQ ID NO: 59903 - protein, 238 aa, Gossypium hirsutum
  unsure (1)..(238): unsure at all Xaa locations
  Clone ID: GOSHI-09MAY01-C5620_1.pep
QPSAHASAALTACAHGKLSPRELATGLKDSPDFLPASLATMVGXFSAEVSRCVWKPVVMNGMDWPSPAANLSNVEEHIKKILAATGVDVPRLSAGGSSTATLPLPVAAFVSLTITYKIDKTSERFLNLAGPALESLAADCPWPCMPIVASLWTQKAKRWFDFLVFSASRTVFLHNSDAIVQLLKSCFTATLGLNIAPISSNGGVGALLGHGFGSHFWGGLSPVAPGILYLRVYRSIRD

SEQ ID NO: 59904 - protein, 104 aa, Gossypium hirsutum
  unsure (1)..(104): unsure at all Xaa locations
  Clone ID: GOSHI-09MAY01-C5160_1.pep
TETLPTPARIRRGEAIEEAKLSEFPQELVQLAAVLXGDHILTSYPERIGKDMSVKEGKEYMEDPVKRFFEAGHYAKKMGVDGEQIVQMKPSLTTRSSKPSSQHP

SEQ ID NO: 59905 - protein, 208 aa, Gossypium hirsutum
  Clone ID: GOSHI-09MAY01-C5120_1.pep
LLSISVLVQYREYLAAFESNEVAKQRMPKALLSAFDNRSWIPVTTILLRLCKGSGFGSSKHGESSSSSIIFQGLLREACISDEELFSAFLNRLFNTLSWTMTEFSVSIREMQEKYQVLEFQQRKCCVIFDLSCNLARLLEFCTHEIPQAFLSGPDTNLRRLTELIVFILNYITSASDVEFFDLSLRRHGQSLEKVNRGMILAPLVGII

SEQ ID NO: 59906 - protein, 201 aa, Gossypium hirsutum
  Clone ID: GOSHI-09MAY01-C5030_5.pep
MILPSKFQDETEKSDKSSPPLDVSVAFPQATPASVFPPSVSDYYRFDDLSRPARKTLRMKVREFMEKEVAPIMAEYWEKAEFPFQILPKLADLGIAGFNTEGYGSPGLSITTSAIANAEIARVDASFSTFLLVHSVGMLTIASCGSEEQKQKYLPSLAQLKTIACWALTEPEYGSDASAVNTTARKVEGGWIIDGQKRWIG

SEQ ID NO: 59907 - protein, 438 aa, Gossypium hirsutum
  Clone ID: GOSHI-09MAY01-C5030_2.pep
MTVHSQIQDETGRSVKPSYFNSPPLDVSVAFPQATPASTFPPLASDYYQFNDLLSPEEQALRKKVRECMEKEVAPIMAEYWEKAEFPFQIVPKLGALHISGGTIKGYGCPGLSLTGSAIAMAEVARVDASCSTFILVHSSLAMLTIALCGSEEQKQKYLPSLAQLKTVACWALTEPDYGSDASSLKTTATKVEGGWILDGQKRWIGNSTFADVLVIFARNTTTNQINGYIVKKNSPGLTATKIANKIGVRIVQNGDILLKNVFVPDEDRLPGLNSFLDTNKVLAVSRVMVAWQPIGISMGVYDMCARYLKERKQFGAPLAAFQINQQKLARMLGNIQAMTLVGWRLCKLYEEGKMTPGHASLGKSWITSMARETAALGRELLGGNGILADFLVAKAFCDLEPIYTYEGTYDINSLVTGREITGFASFKPASVSQRSRL

SEQ ID NO: 59908 - protein, 67 aa, Gossypium hirsutum
  Clone ID: GOSHI-09MAY01-C5030_1.pep
CHIQALTEPDYGSDASSLKTTATKVDGGWVLEGQKRWIGNSSFADVLVIFSRNTTTNQIKSETAYKK

SEQ ID NO: 59909 - protein, 153 aa, Gossypium hirsutum
  Clone ID: LIB3583-030-Q6-K1-C9.pep
MTVHSQIQDETGRSVKPSYFNSPPLDVSVAFPQATPASTFPPLASDYYQFDDLLSPEERALRKKVRECMAKEVAPIMAEYWEKAEFPFQIVPKLGALRISGGTIKGYGCPGLSLTGSAIAMAEVARVDASCSTFILVHSSLAMLTIGEIYDTC

SEQ ID NO: 59910 - protein, 60 aa, Gossypium hirsutum
  Clone ID: LIB3584-030-P1-K1-C6.pep
LIILLNILKFLFVPCLLSYKKFQVEGGWIIDGQKLWIGNSTFADVLVIFARNTTTNQING

SEQ ID NO: 59911 - protein, 159 aa, Gossypium hirsutum
  Clone ID: GOSHI-09MAY01-C5390_2.pep
SGHERSCILSGQHKSGRCTCRVNNRDFSSNDDPPGARSSVSRIVMLAEALFEVLDEIPQQSMVLFSRPSVFPIGSVPAPNEVVESLPVKVSKSPKLKNDEAVQCYICLVEYEEGDSIRRLPCNHEFHRTCIDKWLKEIHRVCPLCRGDICEPDLMPGEK

SEQ ID NO: 59912 - protein, 245 aa, Gossypium hirsutum
  Clone ID: GOSHI-09MAY01-C5390_1.pep
PIIFNDSDGSGETLESNARFSRALSVGRLRDRVLGRAPTFCPLQQDIQITQQQLATSPSTTASAHASSVISHDEIETSRSREARYHDLLHHRSNFLERRRRIRSQVRALQRLGSRFENFSGHERSCILSGQHRSGRCTCHVNNRDSSSNDDTTGARSSVSRIVMLAEALFEVLDEIHQQSMVLSSRPSVSPIGSVPAPNEVVESLPVKVYKSPKLKNDEAVQCFICLGGPVVGGFLIECCELQPT

SEQ ID NO: 59913 - protein, 144 aa, Gossypium hirsutum
  Clone ID: GOSHI-09MAY01-C5360_1.pep
MQEDPQAKSLEPIEDYPRSDMVFGWIKPKQDKKSSKCLVYILVIMVIQGSILLVLANIFLRARTPDFEIGSVKVRNLKYGNSSVPSFNFTLVTQVTVENTNFGEFRFDKSTGTVWCGSEVVALMKIPKGIAQARATEKKKGSIM

SEQ ID NO: 59914 - protein, 161 aa, Gossypium hirsutum
  Clone ID: LIB3584-010-P1-K1-A5.pep
MQEDLQAKSLEPIEDCPRSDVGGGWIEPKQDKNSSKCLVYILAIMVIQGSILLVLANIFLRARTPDFEIGSVKVRNLKYGNSSAPSFNFTLVTQVTVENTNFGEFRFDKSTGTVWCGSEVVGLMKIPKGIAQARATGEMKVSINVSSLWLSCAKNLRKNLS

SEQ ID NO: 59915 - protein, 77 aa, Gossypium hirsutum
  Clone ID: LIB3083-061-Q1-L1-F10.pep
VWCGSEVVALMKIPKGIAQARATDKMKVSINWWPGMKLRSLAEPSFLGPICCFHGFTLMQTHAPCTIPLYKSQQEAT

SEQ ID NO: 59916 - protein, 249 aa, Gossypium hirsutum
  unsure (1)..(249): unsure at all Xaa locations
  Clone ID: GOSHI-09MAY01-C5300_1.pep
MSLEEVLKVVFPFLDGVDLAACMVVCKQWRHIAKDDYFWKCVCAKRWPSICKRPNPPTVTYYKLYQTFYKRKHQRTLLPPRLSFDDLEFFIDIWTEDKLIFSEVVPGPVLQRGIKIPPAGICDMLKFHLQGPEYKMILPVDPRFTIPWSQTVSVSVLVGRKDSNKVACIINKSMFDYIDRTASRALAFDYLVFSPYYPFISGIRAWISLLFMEDRSDGVXDVFGFEMDFCDAANSQEEVLWLVDMLDWK

SEQ ID NO: 59917 - protein, 106 aa, Gossypium hirsutum
  unsure (1)..(106): unsure at all Xaa locations
  Clone ID: LIB3584-036-P1-K1-D1.pep
MSDITQEAWRKYLIQLQVHPLRTKAITAGCLAGCSDLIAQKISGVKRIQLRRLLLIMEWKKLNSPFXQLYGFAYSGPFGHFLHKVMDIIFRGKKGSKIVAKKVKKG

SEQ ID NO: 59918 - protein, 151 aa, Gossypium hirsutum
  Clone ID: AI727166.1.pep
MSDITQEAWRKYLIQLQVHPLRTKAITAGCLAGCSDLIAQKISGVKRIQLRRLLLIMLYGFAYSGPFGHFLHKVMDIIFRGKKGSKIVAKKVLLEQMTSSPWNNFFFMMYYGLLVEGRPWGLVRSKVRKDYPSVQLTAWRFWPIFGWINYH

SEQ ID NO: 59919 - protein, 249 aa, Gossypium hirsutum
  unsure (1)..(249): unsure at all Xaa locations
  Clone ID: GOSHI-09MAY01-C5260_1.pep
MSCVSTSASSDSSVSSSTSWFSGIVRGRLDKSSSLKMAGSSSSGGGLASNNEGPIKGKNQFRGVLFKYGPKSIQVAFKTGDYKQQVIFIGGLTDGFLATDYLEPLAVALDNEKWSLVQLLMASSYSGYGTSSLEQDAMEIDQLISYLINKENSEGVVLLGHSTGCQDIVHYMRTNAACSRAVRAAILQAPVSDREYRATLPETAAMIDLATSMIKEGXGSDLMPKEADPSPITAYRYNSLCAYMGMMTC

SEQ ID NO: 59920 - protein, 435 aa, Gossypium hirsutum
  Clone ID: GOSHI-09MAY01-C5200_1.pep
QTLSRDLAAAVSQIHDFVLSLGDEARAVDDISFDGNGLSHKIGEFSVTYNKVLCSNVRWDDFVLDLSSVLVKASELRFNVLGYKGNEVEINSPDCIDKVALPENKVTQNGSLGGIYQNGCAHISSPTSNPEVPDDGNLVSDFESKQLSKFSLEEFEELKLEKESLAMDLSRCTENLEITKSKLHETELLLTEAKSQLASAQKSNSLAETQLKCMAESYRSLETHAEELATELNIFRVKTETFENELQDEKKGHHDALARCKELEEHLQSKEICSVCSSAANVDRTSKQEKELAAAAEKLAECQETIFLLGKQLKAFRPQTETKGSPYNERIPGFHEDETVTSSINLHDLNQAEIETAGSGNASRSCAESPMESSFNTPCSPSDTEANLLRSPINSNNSNHRSTMSSSESSSSTPTPEKQSRGFSRFFSSKAKNGH

SEQ ID NO: 59921 - protein, 149 aa, Gossypium hirsutum
  Clone ID: LIB3584-034-P1-K1-G1.pep
TQEKELAAAAEKLAECQETIFLLGKQLKAFRPQTETKGSPYNERIPGFREDETITSSINLHDLNQAEIETAGSGNASRSCAESPMESSFNTPCSPSDTEANLLRSPINSNNSNHRSTMSSSESSSSTSTPEKQSRGFSRFFSSKAKNGH

SEQ ID NO: 59922 - protein, 86 aa, Gossypium hirsutum
  Clone ID: LIB3165-013-P1-K1-C6.pep
MENFLFIIFFSFTLLIYVPEISSMPWFFFFFFLSYTLGVRKEEIKVEVEDSRYLIIRTEAIDDSTKPAMDFKRKFRLPGSIDIDGI

SEQ ID NO: 59923 - protein, 74 aa, Gossypium hirsutum
  Clone ID: LIB3165-007-P1-K1-H10.pep
KSFFPLYMASPFPSYQLAALYHYLTPSPALFSNQLLPENHVNWTQTPEAHVYSADLPGVMEGGNKSGSRGLKIS

SEQ ID NO: 59924 - protein, 139 aa, Gossypium hirsutum
  Clone ID: GOSHI-09MAY01-C6900_1.pep
EKPGRTQASAHPSGDRILITDQKRDTAAVLLEVIEYVQFLQEKVQKYEGSYQGWSSEPTKLMPWRNSHWCGQSFVDQPHAIKNDPGLRSTFSGKLDENNINITPSMIASALDPSEADPIRDNEQAELAVPIQGGHSLQR

SEQ ID NO: 59925 - protein, 232 aa, Gossypium hirsutum
  Clone ID: GOSHI-09MAY01-C6920_1.pep
VLAAVFGNGLSTACVVNLGAQVSSVICIEDGVALPNTEKTLPFGGEDISRCLLWTQRHHQTWPQIRTDILTKPIDLLMLNRLKESYCEIKEGELDAIAVVHSYEDAMPAGSHKTRLTALNVPPMGLFYPTLLIPDLYPPPPRSWFHDYEDMLEETWHIEFPRRSDMPDGLYPGSNVGLQMWDNYPFVSMKPKKEEKVGLAEAITSSILSTGRIDLQRKLFCSIQLIGGVALT

SEQ ID NO: 59926 - protein, 69 aa, Gossypium hirsutum
  Clone ID: GOSHI-09MAY01-C6580_1.pep
LDDVEFYGYIRYLQASALLSFLQSQLDPPRAGVSLQQNSAACSLQIWIYPVINTTLFCDSAPASNLRLR

SEQ ID NO: 59927 - protein, 89 aa, Gossypium hirsutum
  Clone ID: GOSHI-09MAY01-C6540_1.pep
NNPRWEKVAKGITEPVRSLLFSASKTTYIFNEGGTRFSTLFLPLYKAIFTKAKLARPVFIFVVKTVPFSYKYGAFLFFFPFQAPCSMSR

SEQ ID NO: 59928 - protein, 158 aa, Gossypium hirsutum
  Clone ID: GOSHI-09MAY01-C6510_1.pep
MPCPSGILLFLILISLPASSFAVADDDNLSAYQALQQYDFPVGILPNGVVGYELNRETGEFSAYLSGTCKFDIDSYQLSYESTIKGVISPGRITNLKGVSVKILFFWLNIGEVIHNGDQMEFSVGIASANFPIDNFYESPQGGCRSNCNGLNALASSI

SEQ ID NO: 59929 - protein, 285 aa, Gossypium hirsutum
  Clone ID: GOSHI-09MAY01-C6440_1.pep
MAAITNAAATSSFMGTRFPDVYTSSGRFVARFGFGGKKAAPKKVSKRTPDRPLWYPGAVAPDWLDGSLVGDYGFDPFGLGKPAEYLQYDLDSLDQNLAKNMAGEIIGTRTEVADVKATPFQPYSEVFGLQRFRECELIHGRWAMLATLGALTVEWLTGVTWQDAGKVELVEGSSYLGQPLPFSMTTLIWIEVLVIGFIEFQRNAELDPEKRLYPGGKYFDPLGLAADPEKKATLQLAEIKHARLAMVAFLGFAVQAAATGKGPLNNWATHLSDPLHTTIIDTFTS

SEQ ID NO: 59930 - protein, 97 aa, Gossypium hirsutum
  Clone ID: LIB3165-036-P1-K1-G2.pep
HAAHAVTPPIPLGEPLPLAMTTLIWIEVLVIGFIEFQRNAELDPEKRLYPGGKYFDPLGLAADPEKKATLQLAEIKHARLAMVAFLGFAVQAAATGK

SEQ ID NO: 59931 - protein, 134 aa, Gossypium hirsutum
  Clone ID: GOSHI-09MAY01-C6410_1.pep
MDYVYGPGKNHLFVPGPVNIPEPVLRAMNRNNEDYRSPAIPAMTKTLLQDVKKIFKTTTGTPFLIPTTGTGAWESALTNTLSPGDRTVSFLIGQFSLLWIDQQQRLNFNVDVVESEWGQGANLDILAEKLAADH

SEQ ID NO: 59932 - protein, 167 aa, Gossypium hirsutum
  Clone ID: GOSHI-09MAY01-C6420_1.pep
MATITSAAVAIPSFTGLKAGATAAKVSATAKVAASPVPRGSIKASLKDVGVAVAATAASAILASNAMAIEVLLGSDDGGLAFIPKEFSVSPGEKIVFKNNAGFPHNVVFDEDEIPSGVDVSKISMPEEELLNAKDETYAVTLTEKGTYSFYCSPHQGAGMVGKVTVN

SEQ ID NO: 59933 - protein, 97 aa, Gossypium hirsutum
  Clone ID: LIB3120-024-Q1-K1-G1.pep
SPRSPRSPRLPRLPRLRRVAPRVRTMSSAAVAIPSFTGLKAGATAAKVSATAKVAASPVPRVSIKASLKDVGVAVAATAASAILCHNAMAIEVLLRQ

SEQ ID NO: 59934 - protein, 217 aa, Gossypium hirsutum
  unsure (1)..(217): unsure at all Xaa locations
  Clone ID: GOSHI-09MAY01-C6650_1.pep
MQGEIKHTPRVRFLEFSSQPPNQIIHFININPPKELSIQFKDTMTSTPTQENTQVEGSHEPTVEAPPSEEDIKKWGTHVMGSPAAPSAHPDNQKAALWNASDHQQIYELPYVVYSPAERPSHNPFEPVINMFNTWSRKTESIARNIWHNLKTGPSVSEAAWGKLNLTAKAITEGGFESLFKQIFATDTDEXLRKTFAWYLSTTTGPVAGTLYLSTAR

SEQ ID NO: 59935 - protein, 80 aa, Gossypium hirsutum
  Clone ID: GOSHI-09MAY01-C6660_1.pep
GGANQILMNSRSSVASTVSCQSGNKDDFLFGILASLLPSFLGTLVAYVNFQLFKVNGRSLSSSYAHIVIFTTVASTRSLK

SEQ ID NO: 59936 - protein, 126 aa, Gossypium hirsutum
  Clone ID: GOSHI-09MAY01-C6600_2.pep
MALRMWASTTANALKISCATTKAPVFSLSTCFSTVLDGLKYAVSHEWVKHEGPVATIGITDHAQDHLGEVVFVELPEPGGSVSKGLGLGAVESVKATSDGNSPISGEIVEGNFKLTETPGLINIRP

SEQ ID NO: 59937 - protein, 165 aa, Gossypium hirsutum
  Clone ID: GOSHI-09MAY01-C6600_1.pep
MALRMWASSTANALKISCSSKPNVSLAFSLSRCFSTVLDGLKYANSHEWVKHEGPVATIGITDHAQDHLGEVVFVELPEPGGSVSQGKGFGAVESVKATSDINSPISGEVVEVNSKLSETPGLINSSPYADGWMIKVKPSSPSELESLMGPKEYTKFCEEEDASH

SEQ ID NO: 59938 - protein, 200 aa, Gossypium hirsutum
  Clone ID: LIB3825-023-Q6-K6-F5.pep
LYNCINLTETIEEFELSWSSLIEKYNLSAHDWLQSLYSARAQWVPVYFRDSFFAAISLNQGFDGSFFDGYVNQQTTIPMFFRQYERAMENWFEREIEADFDSICTTPVLRTPSPMEKQAADLYTRKIFTKFQEELVETFVYTANRIDGDETISTFRVAKFEDVNKAYMVTLNYPEMRANCSCQMFEYSGILCRHVLTVFT

SEQ ID NO: 59939 - protein, 153 aa, Gossypium hirsutum
  unsure (1)..(153): unsure at all Xaa locations
  Clone ID: LIB3585-048-Q6-K1-E4.pep
LHTLCPTPDLRTPSPMEKQALDLYTRKILTKFQEELVETFVYTANRIEGDGAISTFRVAKYEDVNKVYMVTLNYPEIRANCSCQMFEYSGILCRHILTVFTVTNVLTLPPHYILKRWTRNAKSXVGTDECGADLHGQESLASRYNSLCREAIK

SEQ ID NO: 59940 - protein, 378 aa, Gossypium hirsutum
  unsure (1)..(378): unsure at all Xaa locations
  Clone ID: GOSHI-09MAY01-C6150_1.pep
MSLTIKSHFASRTYLSFTTKPSRFTGYNTKIRPNSIYHFNPLRLTYYQPKKMQAPVQYSPAPLIKSSLIEPDGGALVDLVVPEGERGAKTIEAESLPKVRLTKIDVEWVHVISEGWANPLKGFMREDEYLQSLHFSSLRLKDGYVVNMSLPIVLAIDDETKERIGSSSHVGLVGPDGDLIAILRSIEIYKHNKEERIARTWGTTAPGLPYVEEVITPAGNWLIGGDLEVLKPIKYNDGLDHYRLSPKQLRKEFDRRNADAVFAFQLRNPVHNGHALLMNDXRRRLLEMGFKNPILLLHPLGGFTKADDVPLDVRMEQHSKVLEDGVLDPETTIVAIFPSPMHYAGPTEVQWHAKARINAGANFYIVGRDSAGIGYPNR

SEQ ID NO: 59941 - protein, 154 aa, Gossypium hirsutum
  unsure (1)..(154): unsure at all Xaa locations
  Clone ID: GOSHI-09MAY01-C6170_1.pep
MKMSKASIVLLYFGFIFIHCEAKSIREKPQAFESFNVSYIQNLGSCSYSVVFTTSCSSTSYTRDQISIAFGDAYGNQIYVPRLDDPASRAFEQCSSDKFEIKGPCAYQICYVYLYRTGPDGSKPEQVKIYGYNSRAVTFYYDTFIPXTLWYGFN

SEQ ID NO: 59942 - protein, 137 aa, Gossypium hirsutum
  Clone ID: LIB3145-034-Q1-K1-H6.pep
RPERRVRHKPANRSSSVRYIQSLWSGCYSVVFTTSCSSTSYTRDQISIAFGDAYGNQIYVPRLDDPASRAFEQCSSDKFEIKGPCAYQICYVYLYRTGPDGWKPEQVKIYGYNSRAVTFYYDTFIPGYTWYGFNYCN

SEQ ID NO: 59943 - protein, 140 aa, Gossypium hirsutum
  Clone ID: GOSHI-09MAY01-C6160_2.pep
RFLIFLIISSFISKFPFILLHHIRNGLTLFQETERSTSEAVTDLPQERSLPITHHVRSSMYPRIVVNPPLTGVAPPTTRASSFHQNSSPSSSSGLGIRVALKQNIDTPRSVSPSWIFLEAIFSLISSLRGKFWLKQKKKT

SEQ ID NO: 59944 - protein, 214 aa, Gossypium hirsutum
  Clone ID: GOSHI-09MAY01-C6160_1.pep
MDYDFRNRTGPPYEAQIPIYRQQPTSSSSTHPMYGSSMYPRIGGQPAAHSVAPPTTRASSFHQNSSPSSSSGLGIRVALKPEYRITPPPQLSPQVGDIPRSNFQFDFEFERKILAEAEKENMNWSKLGLENLSSKPIETSSSTGANSDPVVSKYIASGLSREAVTLAVANYGDNPTKVREFVTGYNLLREMGFSSNNVAEALLMYDNDTDKALA

SEQ ID NO: 59945 - protein, 91 aa, Gossypium hirsutum
  Clone ID: GOSHI-09MAY01-C6100_1.pep
EGTGTSPNADLRYIYLMNSSIAGLEKADVFLLVATQPRVEAAMVNARIRKTVRASNAKVAYIGPPTEFNYDCPHLGSGPLTRNNEEGKTHT

SEQ ID NO: 59946 - protein, 72 aa, Gossypium hirsutum
  Clone ID: LIB3189-003-P1-K1-E10.pep
IGPPTEFNYDCQHLGTGPQTLTEIAEGRHSFCSAISNAKNPAIIVGAGLFERDDKDAIFAAVEAIAKNGNVI

SEQ ID NO: 59947 - protein, 147 aa, Gossypium hirsutum
  Clone ID: GOSHI-09MAY01-C6090_1.pep
MNRIFATKAGSNVYRLRIPWRPLSNDAAPLLSSQNAGNPEKESEAKQYDIAIVGGGMVGLALACSLASRPLTRHLNVAIIDSNPALGRKHFIKKEDLPDPRVSTITPATISFFKDIGAWQFVEQHPLAYFDKMQVRYYTGLSYSKFN

SEQ ID NO: 59948 - protein, 452 aa, Gossypium hirsutum
  unsure (1)..(452): unsure at all Xaa locations
  Clone ID: GOSHI-09MAY01-C6060_1.pep
MTSCHPSYGRKDLLVDCCPPGFQLPLPFVDFQFPDPQSPLRIHRPAHAVDVDYIAKYDKALSIMKSLPHHDPRSFSRQANLHCLFCTGAYDQQNSNAPLSIHRTWLFFPWHRMMIYFHERILGSLIGDETFALPYWAWDIPQGMVIPDMYTNNSSSFYHTMRDVSHLPPQTADLNYVSDTKLIPEDQIDINLXIYVYNQMVSGARKTELFRGCTYKAGKEGYCNGPGTIELAPHNALHTWIGSSLNPGREDMGKFYSAAKDRIFYAHHANIDRLWEVWREAHKQQLDIKDPDWLDSFFYFYDENLRLVRVKVGDVVDTIKLGYSYEQVHRPWLNMRPKPSYPPKLARQTLKTKEKNKLEMLSRTHVSSSELDTHGRALDASLTVKVRNHWRKMEKQQDKVLVVPGIEVKGDAYVKFDVCVNLIDQFKNPPKVQGICGDLPSHSRRRTPDEYH

SEQ ID NO: 59949 - protein, 166 aa, Gossypium hirsutum
  Clone ID: AI728976.1.pep
HTWIGSSLNPGREDMGKFYSAAKDRIFYAHHANIDRLWEVWREAHKQQLDIKDPDWLDSFFYFYDENLRLVRVKFRDVVDTIKLGYSYEQVHRPWLNMRPKPSYPPKLTRPTLKTKEKNQEMLFRNHVSSSQLETHCRTLEASLKLKLGNHGRKKEKKKVLVFPRN

SEQ ID NO: 59950 - protein, 123 aa, Gossypium hirsutum
  unsure (1)..(123): unsure at all Xaa locations
  Clone ID: GOSHI-09MAY01-C6010_1.pep
NGYYYNLIFHRVIKGFMMQTGDPLGDRTGGQSIWGREFEDEFHRKXRHDRPFTVSMANAGPNTNGSQFFITTVATPWLDNKHTVFGRVVNGMDVVHGIEKVKTDKADKPYQDVKILNVTVPKS

SEQ ID NO: 59951 - protein, 110 aa, Gossypium hirsutum
  Clone ID: GOSHI-09MAY01-C6020_1.pep
QAFLALQKFKSHQLSFILNYNLVGFFPWILQLMFACFSGQIYLLVLIVFETNSTLICCIYSIPCCWLHYYQGCLTFSYMCSNFSFSFLSSSGPKCKFLQEEQADPSTDHS

SEQ ID NO: 59952 - protein, 204 aa, Gossypium hirsutum
  Clone ID: GOSHI-09MAY01-C6370_1.pep
MMVGETHRLNPTVHVPPWPNLDDDQTAEIYSPLNYNAADSHFNNNGGNPVHFHEALAALQRYLPSNEPDFVYPDSDLPVLENADSPVDAYSCDHFRMFEFKIRKCPRGRAHDWTECPYAHPGEKARRRDPRKYHYSGTACADFRKGNCRKGDGCEFAHGVFECWLHPARYRTELCKDGPGCKRKGCFFAHSLDQLRVGAPPVLA

SEQ ID NO: 59953 - protein, 101 aa, Gossypium hirsutum
  Clone ID: LIB3582-014-P1-K1-A1.pep
MMVGETHRLNPTVHVPPWPNLDDDQTAEIYSPLNYNAADSHFNNNGGNPVHFHEALAALQRYLPSNEPDFVYPDSDLPVLENADSPVDAYSCDHFRMFEFK

SEQ ID NO: 59954 - protein, 106 aa, Gossypium hirsutum
  Clone ID: GOSHI-09MAY01-C6310_2.pep
HLDLTTAFPRGFAFEVIQVYSGPPSIVYKFRHWGYKEGPFKGHPPTGELVQLYGISIFDADDEMNILKVEFFFDRGELLGGLMKGDKLTSGTDQAALSCPFLRNTG

SEQ ID NO: 59955 - protein, 198 aa, Gossypium hirsutum
  Clone ID: GOSHI-09MAY01-C6310_1.pep
MDSSLTDQQQDKYRSYLHGEGEKNTNWKLGAPPNYDTVNKLFEEGRTKIWPPASLEEKVQNLVKTWEMEMFNKISFPDYKSVKLQNYTVSVNGRKPLSLEEKRKLGGGYNSFMQTSLPEDLRGYNPAQETEHSSHLAFTTAFPRGFALEVIQVYSGPPSIVYKFRHWGYKGGPFKGHAPTGELFNLWNINFEVDDEMK

SEQ ID NO: 59956 - protein, 273 aa, Gossypium hirsutum
  Clone ID: GOSHI-09MAY01-C6330_2.pep
MGATKNIWTAMEANHAKQSHNGNSTFDDHSILHSNLSVDTALPFPLMVPRVIALCKDLFRKWAKLNDSCFSVDTVSGGITNLLLKVSVKEENGEYVSVTVRLYGPNTEYVINRERELQAIKYLSAAGFGAKLLGVFGNGMVQSFIYARTLTPADMRKPKLVSEIAKQLRRFHQVEIPGSKEPQLWVDIFKFFEKASTLQFEDTDKQRTYELISFKEVHKEVKELKELTTLLNSSVVFAYNDLLSGNLMHNDEQEKLYLIDFEYGSYNFRGFYI

SEQ ID NO: 59957 - protein, 240 aa, Gossypium hirsutum
  unsure (1)..(240): unsure at all Xaa locations
  Clone ID: GOSHI-09MAY01-C6330_1.pep
RYCSARKLRANILLPIFPLPDMRKPKLVSEIAKQLRRFHQVEILGSKEPQLWVDIFKFFEKASTLQFEDTDXQRTYETIXFKEVHXEVQSLSGVAHNDWLLEMMHNEEQERLYLIDFEYGSYKYRGFDIGNHFNEYAGYDCDYSLYPSKDEQYHFFRHYLEPEKPRRVPEKDLEALYVETNTFMLASHLYWALWALIQARMSPIDFDYLGYFFLRYNEYKKQKRMCFSLAKSHISGSGKA

SEQ ID NO: 59958 - protein, 219 aa, Gossypium hirsutum
  Clone ID: GOSHI-09MAY01-C6280_1.pep
MATTASPMATQLKSSFTSSVTRGLVVPRGISGSPFKVSSGKTRTPCFTVKAVQSDKSTFQVIQPINGDPFIGSLETPITSSPLIAWYLSNLPAYRTAVNPLLRGIEVGLAHGFLLVGPFVKAGPLRNTAVAGQAGSLAAAGLVVILSICLTMYGVASFKEGEPSIAPSLTLTGRKKEPDQLQTADGWAKFTGGFFFGGISGVTWAYFLLYVLDLPYYFK

SEQ ID NO: 59959 - protein, 91 aa, Gossypium hirsutum
  Clone ID: LIB3165-050-Q1-K1-C5.pep
CRLHTKGLVNPRGISGSPFKVSSGKTRTPSFTVKAVQSDKSTFQVIQPINVDPFIGSLETPITSSPLIAWYLSNLPAYMTAVNPLLRGIEV

SEQ ID NO: 59960 - protein, 132 aa, Gossypium hirsutum
  Clone ID: GOSHI-09MAY01-C6240_2.pep
MAFAGFFLLGLLSMVSAVHGYGGGWTNAHATFYGGSDASGTMGGACGYGNLYSQGYGTNTAALSTALFNNGLSCGSCYEIKCVNDGKWCLPGSIVVTATNFCPPNNALPNNAGGWCNPPLQHFDLSQPVFNT

SEQ ID NO: 59961 - protein, 179 aa, Gossypium hirsutum
  Clone ID: GOSHI-09MAY01-C6240_1.pep
HANAHASAHASGANIKNAGVVLSGLLSMVSAVHGYGGGWTNAHATFYGGSDASGTMGGACGYGNLYSQGYGTNTAALSTALFNNGLSCGSCYEIKCANDGKWCLPGSIVVTATNFCPPNNALPNNAGGWCNPPLQHFDLSQPVFQHIAQYKAGIVPVSYRRVPCRRKGGIRFTINGHSY

SEQ ID NO: 59962 - protein, 409 aa, Gossypium hirsutum
  Clone ID: GOSHI-09MAY01-C6210_2.pep
MAFHHSSTHLSQDLPLLHFTDQQQQQQQPNQAQQGDQLQETAAPNWLNSALLRPQQPQPPQPHPHFSDPNFLNLHTTTTASDSTAASQAPNPMLSRSSSSLLHRNHSNVIDDAAAAAAAAVAAAAVGGGVMAVESGDLKNSISETMNNNKSEGVVVESGGGGGGDGIVNWQNARYKAEILAHPFYEQLLSAHVACLWIATPVDQLPRIDAQLAQSQHVVAKYSALGGGSQGLVSDDKELDQFMTHYVLLLCSFKEQLQQHVRVHAMEAVMARSRGEQSLQSLTGVSPGEGTGATMSDDDDDQVDSDANLFDASLEGPDSLGFGPLVPTESERSLMERVRHELKHELKQGYKEKIVDIREEILRKRRAGKLPGDTTSVLKAWWQSHSKWPYPTEEDKAKLVQETGLQLKQ

SEQ ID NO: 59963 - protein, 277 aa, Gossypium hirsutum
  Clone ID: GOSHI-09MAY01-C6210_1.pep
SQTLQANTWQNTRCKAEILAHPLYEQLLSAHVSCLRIATPVDQLPRIDAQLDQSQHVVAKYSALGGAAQGLVADDKELDQFMTQYVVLLCSFKEQLQQHVRVHAMEAVMACWEIEQSLQSLTGVSPGEGTGATMSDDDEDQVESDANMFDARAAGPDSMGFGPLIPTETERSLMERVRRELKHELKQGYKEKIVDIREEILRKRRAGKLPGDTTSVLKAWWQAHSKWPYPTEEDKARLVQETGLQLKQINNWFINQRKRNWHTNPSTSTALKTKRKK

SEQ ID NO: 59964 - protein, 103 aa, Gossypium hirsutum
  unsure (1)..(103): unsure at all Xaa locations
  Clone ID: LIB3048-037-Q1-L1-B5.pep
PTLVSNLYGATGVSCITIATPVDQLPRIDAQLDQSQHVVTLYSALSXAAHSLVADDIXLDQFMTQYVVLLCSFKEQLQQHDQFHTMEAVMAYSENEQSLQSFT

SEQ ID NO: 59965 - protein, 102 aa, Gossypium hirsutum
  Clone ID: LIB3585-048-Q6-K1-G6.pep
DDQVDSDANLFDTCLDGTDSMGCGRLIPTESERSLMERVRHELKHELKQGYKEKIVDIREEILRKRRAGKLPGDTTSVLKAWWQSHSKWPYPTVSATSPRSL

SEQ ID NO: 59966 - protein, 211 aa, Gossypium hirsutum
  unsure (1)..(211): unsure at all Xaa locations
  Clone ID: GOSHI-09MAY01-C6230_1.pep
MASSTLSPAAPWQLCSSKSGMFCPSRAFLVKPARTHMVKNEKGMRITCQATSIPADRVPDMGKRQLMNLLLLGAISLPSGFMLVPYAAFFVPSGGRGTGGGTVAKDAIGNDVIAEEWLKTHGPGDRTLTQGLKGDPTYLVVEKDRTLATYGINAVCTHLGCVVPWNQAENKFICPCHGSQYNDQGXVVRGPAPLXSLALAHAGVEDGKVVF

SEQ ID NO: 59967 - protein, 60 aa, Gossypium hirsutum
  unsure (1)..(60): unsure at all Xaa locations
  Clone ID: LIB3149-053-Q1-K1-D12.pep
PTINSLEFPWNQAENKFICPCHGSQYNDQXRVVRRPAPLSLALAHAGVENGKVVFVPWVE

SEQ ID NO: 59968 - protein, 378 aa, Gossypium hirsutum
  Clone ID: GOSHI-09MAY01-C7930_2.pep
MDTTPPLDNPDGMGSSHIDIQQDLNSHMDTPPHTENPNDMGSPHIDIHQDLFPDYYGGTASAPAPASALDSAPSEPKLEFEGNDNHNGNNDSAPVIKDNNSPPPVPPGSSGEGLPYAPPPAETEDTNSGLDLSFLDNETGRAEFDNYLSSLDEILAQPFSEEPFSHPAEMQNSFAGDSEMAEARRKLSSPPRAPSPPRTRGKDLEELASLASKLRKDPTLTAEQLAKLKLIEEIPSFCEVFLENREVMEQADKFFRGLDDNRAKVSSLKQEYSELKQQVTNLESEVDSNTMTVQDIDNQIAQLKAHRAELTKLIDKKKRDKDELTYNQKLVANSIPKVVHEVQLANAKKPEWEVKKENALKREGEILAKFAPLKGVSL

SEQ ID NO: 59969 - protein, 222 aa, Gossypium hirsutum
  Clone ID: GOSHI-09MAY01-C7930_1.pep
MDTTPPLDNPHDMGSSHIDIQQDLNSHMDTPPHTENPNDMGSPHIDIHQDLFPDYYGGTASAPAPAPALDSAPSEPKLEFEGNDNHNGNNDSAPVIKDNNSPPPVPPGSSGEGLPYAPIHWPNAGDIWTWKVGRRVNSAGFYGDRFLHLPESLRKANSPKVFASKPALERFIRLNFPDADVNAFFASFVWKIPAVVESPTKVAAAPASPAEGTEDDQHECVT

SEQ ID NO: 59970 - protein, 123 aa, Gossypium hirsutum
  Clone ID: LIB3166-045-P1-K1-B2.pep
GSAKTKRPTRQRGKESAPPPAETEDTNSGLDLSFLDNETGRAEFDNYLSSLDEILAQPFSEEPFSHPAEMQNSVAGDSEMAEARRKLSSLLDMDFPSLICFKDLEELASLASKLRKDPTLTAE

SEQ ID NO: 59971 - protein, 194 aa, Gossypium hirsutum
  Clone ID: GOSHI-09MAY01-C7920_1.pep
MAFRLSNNLVGILNLITFLLSIPILGAGIWLRREGVTECEQFLDTPVIIIGVFLMLVSLAGLIGACCRVTWLLWLYLVVMFLLIVLGIAFTIFAFVVTNKGAGQVLSGKGYKEYRLGDYSNWLQKRVTDNKNWNKIKSCLADSKGCTDFHDKYLNAALPEFYQPHLSAAQSGCCKPSNDCQLNYVGPTNWTRGS

SEQ ID NO: 59972 - protein, 82 aa, Gossypium hirsutum
  Clone ID: GOSHI-09MAY01-C7850_1.pep
MPMDRTLQSESMRSPTVLSIECLKGSSKADEWTADMLQTGDIVEEIRIGSGSGLAHKAPFKGGRSGVQRVLHSSYKNKETSI

SEQ ID NO: 59973 - protein, 384 aa, Gossypium hirsutum
  Clone ID: GOSHI-09MAY01-C7840_1.pep
MGAGGRMSVPPSQRKQESGSMKRVPISKPPFTLSEIKKAIPPHCFQRSLIRSFSYLVYDFILVSIFYYVATTYFHNLPQPLSFVAWPIYWALQGSVLTGVWVIAHECGHHAFSDYQWIDDTVGLILHSSLLVPYFSWKYSHRRHHSNTGSLERDEVFVPKKRSSIRWWAKYLNNPPGRFVTITIQLTLGWPLYLAFNVAGRPYEGFACHYNPYGPIYNDRERLQIYISDVGVLAVTYGLYRLVLAKGLAWVICVYGVPLLIVNAFLVMITYLQHTHPALPHYDSSEWDWLRGALATVDRDYGILNKVFHNITDTHVAHHLFSTMPHYHAMEATKAIKPILGEYYSFDGTPVYKAIFREAKECIYVEPDEGEQSSKGVFWFRNKI

SEQ ID NO: 59974 - protein, 150 aa, Gossypium hirsutum
  unsure (1)..(150): unsure at all Xaa locations
  Clone ID: AI055433.1.pep
YYVATTYFHNLPQPLSFVAWPIYWTLQGSVLTGVWVIAHESGHHAFSDYQWIDDTVGLILHSSLLVPYXSWKYSHRXRHHSNTGSLERXEVFVPKKRSSXRWWANSLTIPRRVGQVPIIHFVGLSLPSVXGRPYXGLACHYXPYGPITRP

SEQ ID NO: 59975 - protein, 197 aa, Gossypium hirsutum
  unsure (1)..(197): unsure at all Xaa locations
  Clone ID: AI054898.1.pep
LHSSLLVPYFSWKYSHRRHHSNTGSLERDEVFVPKKRSSIRWWAKYLNNPPGRFVTITIQLTLGWPLYLAFNVAGRPYEGFACHYNPXYGPIYTXRERLQIYIPTXRVFAVTWAVRSSCYXRSTWVFWVNRGPWSIXNAXFGMNTYLAHTHPAYHLRLSNGMVTWSLRRSTRYGILTFIHTDLYRHIVSTCAYTHGA

SEQ ID NO: 59976 - protein, 73 aa, Gossypium hirsutum
  Clone ID: LIB3146-032-Q1-K1-F8.pep
TDTHIAHHLFSTMPHYHAMEATKAIKPILGEYYSFDGTPVYKAIFREAKECIYVEPDEGEQSSKGVFWFRNKI

SEQ ID NO: 59977 - protein, 88 aa, Gossypium hirsutum
  Clone ID: GOSHI-09MAY01-C7810_1.pep
PSYTDLFFVFSFCLIPFVFFFACCFLFVRFSAVGICLRVDLHFAGRVRGWWLVPRAVVAHVAEEAAAESLQLGFLLLKIFSWLGCLGL

SEQ ID NO: 59978 - protein, 76 aa, Gossypium hirsutum
  Clone ID: LIB3165-021-P1-K1-E11.pep
SPRQPNQLKIFSSKKPSCRLSTAASSATCATTARGTNHQPLTRPGSRGRASENTFSSPTSDPKGGVEGLLRFFQFW

SEQ ID NO: 59979 - protein, 85 aa, Gossypium hirsutum
  Clone ID: uC-gsflnu33B061g12b1.pep
SSRVRPRVRATKTQRIEGEPQPPLLGPMSAMEKCSPTRDQEIQGMGVSDAWREHMLVVVREAAIGWPSVLLRLEGCCCFLFSAGG

SEQ ID NO: 59980 - protein, 290 aa, Gossypium hirsutum
  Clone ID: GOSHI-09MAY01-C7820_1.pep
FDADITEAAWPMDEKRATAFGLMKIDEEGRIIEFAEKPKGDQLKAMQVDTTILGLDDERAKEMPFIASMGIYVVSKDVMLNLLRDQFPGANDFGSEIIPGATSIGMRVQAYLYDGYWEDIGTIEAFYNANLGITKKPVPDFSFYDRSSPIYTQPRYLPPSKMLDADVTDSVIGEGCVIKNCKIHHSVVGLRSCISEGAIIEDTLLMGADYYETDADRRFLSAKGSVPIGIGKNSHIKRAIIDKNARIGDNVKIINSENVQEAARETDGYFIKSGIVTVVKDALIPSGTVI

SEQ ID NO: 59981 - protein, 66 aa, Gossypium hirsutum
  Clone ID: LIB3829-033-Q1-N6-H12.pep
SVPIGIGKSSHIKRPIFAKNARIGANVKFITSENVQKAARETDGYFIKSGIVPVIKDPLIPSGTVI

SEQ ID NO: 59982 - protein, 119 aa, Gossypium hirsutum
  Clone ID: GOSHI-09MAY01-C7560_2.pep
MASSTLSTVSLRSPSYPSPTTTTAHFFKTPSLQFPLRSTATTTLTHRTTFLRPLNATAAPEKIENLGTEISNLTLEEARTLVDYLQDKLGVSAAAFAPAPVAAPPPDAGGAGTPVVEEK

SEQ ID NO: 59983 - protein, 185 aa, Gossypium hirsutum
  Clone ID: GOSHI-09MAY01-C7560_1.pep
GWQSFSQFPFLSFTHYYYSPFFFKTPSLQFPLRSTATTTLTHRTTFLRPLDATAAPEKIENLGTEISNLTLEEARTLVDYLQDKLGVSAAAFAPAAVAVAAPDAGGAAAPVVEEKTEFDVVIEEVPSNARIAVIKAVRGLTSLALKEAKELIEGLPMNIKGGVSKEEADDAKKQLEEAGAKVSIA

SEQ ID NO: 59984 - protein, 242 aa, Gossypium hirsutum
  Clone ID: GOSHI-09MAY01-C7490_1.pep
MCDRERDWDFCLRTVSNSARDSSFANDPASDPSLLHAVKKLCDFCRQEEKSSEDLVARVYPHINKLFQRSIASLSQPTSPNGILLLVILQFFLDFGEVVLHDADPSLRTFFRSCLSREFADPVVAAATLDFLNVNKNKLLFSFPNLLPQFFPLLLKLIAWNGGKLEKPFLKVLPGLVSPGSFLPLFPSLVDSPILVVALEKVERSSGSLIGSSIASIQKSAASEMLLALMDEAYTGSTIGDG

SEQ ID NO: 59985 - protein, 123 aa, Gossypium hirsutum
  unsure (1)..(123): unsure at all Xaa locations
  Clone ID: LIB3166-038-P1-K1-G11.pep
NRRRNFLFAERTEKERKVSDQERDWDFYLRTVSNSAGDSSSATNQPSILLFXHAVKKLCDFCRQEEKSSEDLVARVYPHINKLFQRSTCFLSQPTSPNGILLLVILQFFLDFGEVVLHDADPS

SEQ ID NO: 59986 - protein, 156 aa, Gossypium hirsutum
  Clone ID: GOSHI-09MAY01-C7450_2.pep
CILMTSRGPRRMQCNMNTIPATSIAPGGLDPTTQAELNPYQSTPTSFLSKSASMENSVSDQKNGGLVLINKAPRWHEQLQCWCLNFHGRVTIASVKNFQLVASPENEPAGPEHEKIILQFGKVGKDLFTMDYRYPISAFQAFAICLSSFETRIACE

SEQ ID NO: 59987 - protein, 553 aa, Gossypium hirsutum
  Clone ID: GOSHI-09MAY01-C7450_1.pep
KVRFLSVIGFSSSSLLLKEVSVIRSSSQAKISKTELGCRDLRFCFGKSHDKNKIFSRKPNSVCFDSQISRFRKAGLRFTLKAVQSDPILESKSPATSKSLDRLRLFVGLPLDAVSDGNSVNHARAIGAGLKALKLLGVEGVELPVWWGVVENERGKYDWSGYLAVAEMVQKAGLKLHVSLCFHASSQPRIPLPKWVTKIGESQSSIFFADRSGQHYQQCLSLAVDDLAVLDGKTPVQVYQGFCESFKSTFSPFMGSTITGISMGLGPDGELRYPSHHKPAKSGTITGVGEFQCYDTNMLNLLKQYAEANGNPLWGLGGPHDAPTYEQAPNSNSFFKDHGGSWESPYGDFFLSWYSSELVSHGNRLLSLASSIFGDTEVNVYGKVPLMHLWYKTRAHPSELTAGFYNTASRNGYEAVAEMFARNSCKINLPGMDLSDEHQPHDALSSPESLLAQIRTTCNKHRVEVAGQNLASGAPGGLEQIKKNMLGENPIDLFTYQRMGAHFFSPEHFPSFTEFVRSLSQPELHPDDLPSDEAEATESVQTSSDPNIHLQTA

SEQ ID NO: 59988 - protein, 82 aa, Gossypium hirsutum
  unsure (1)..(82): unsure at all Xaa locations
  Clone ID: LIB3825-006-Q1-K6-F6.pep
RWHEQLXQCWCLNFHGRVTIASVKNFQLVASPENEPAGPEHEKIILQFGKVGKDLFTMDYRYPISAFQAFAICLSSFETRIA

SEQ ID NO: 59989 - protein, 142 aa, Gossypium hirsutum
  Clone ID: LIB3543-028-Q1-K6-H6.pep
MEVSVIRISSQAKISKTGGGGGFFFKVMIKNKIFSWKPPPVCFDSQISRFRKAGLRFTLKAVQSDPILESKSPATSKSLDRLRLFVGLPLDAVSDGNSVNHARAIGAGLKALKLLGVEGVELPVWWGVVENEMGKYDWSGYL

SEQ ID NO: 59990 - protein, 205 aa, Gossypium hirsutum
  unsure (1)..(205): unsure at all Xaa locations
  Clone ID: GOSHI-09MAY01-C7470_1.pep
PPPAPSPPYLHQQHLTSXRVNRRHLLLLTSLSLSSFSVSDSVATARGLLQMPPPRLTNRYFLVRAGESQYESLGIINTNPVAKTSVDSGLSDKGKNQTLKSALELKAMGACERNCWIWPSITQRAYQAAEIIAAVNGVSRSYIVPEYSFLDARGLGAYEGKELEAISQVYESDSISSTIKPPPIDDGTPNESVADVFVRVTQLMS

SEQ ID NO: 59991 - protein, 204 aa, Gossypium hirsutum
  Clone ID: GOSHI-09MAY01-C7400_1.pep
MAEDKAETQAFTPGPGYRQFKGRDEFPSNILHGTLACAIWIGSMHFNVSLLLFSFLFLPFSKFLLVVGVLLIFVVLPIDHNSKFGLRLARYICQHMSSYFPATLHVEDINDFHPGRAYVLGYAPHSVLPIGVVTLAERTGFMPLPKLKCLTSSPVFYTPFLRHIWTWLGASPPTRKNFCSLLEAGYTCIVVPGGVQETFLMPHD

SEQ ID NO: 59992 - protein, 193 aa, Gossypium hirsutum
  unsure (1)..(193): unsure at all Xaa locations
  Clone ID: AW187812.1.pep
MVEEREEKKTYAAGSGYRQFNGRNEFSSNVLHGILACAMWIGALHFDFYLIVFSLLFLPFSKFLLVVGLLLVFAVVPIDHNSKFGLRLAXYICRNMSNYFPTTLHVEDINDFXPDRAYVFGYEPHSVLPIGVVTLAERTGFMPLPKLKCLTTSPVFYTPFLRHIWTWLGASPXTRKNFCSLLEXGYXCIVLPG

SEQ ID NO: 59993 - protein, 97 aa, Gossypium hirsutum
  Clone ID: uC-gsflmaxxa070f05b1.pep
MAEDKAETQAFTPGPGYRQFKGRDEFPSNILHGTLACAIWIGSMHFNVSLLLFSFLFLPFSKFLLFVLFLYSFLCMAFMLLLVKEKEKVKTAHKIYL

SEQ ID NO: 59994 - protein, 111 aa, Gossypium hirsutum
  Clone ID: GOSHI-09MAY01-C7430_1.pep
MPYSSSSSSAMASKLAFTLMPPRFFTATIQKPVVCFSSSSSSSSIRVQPSGKHLCFRRRLLLLPLKATADQQGQVEEDEVVDSKILPYCSIDKKEKKSLGEMEQEFLQALQ

SEQ ID NO: 59995 - protein, 127 aa, Gossypium hirsutum
  Clone ID: GOSHI-09MAY01-C7790_1.pep
MASSALSTLSLRLPTSSNPTNPSHFKAPSLQFPLRSLTPPNLTHRSTALRATAAPEKIEKLGTEISNLTLEEARTLVDYLQEKLGVSAAAFAPAAVSVAAPGGADAEAAVVEEKTEFDVVIEEVPSN

SEQ ID NO: 59996 - protein, 125 aa, Gossypium hirsutum
  Clone ID: LIB3165-021-P1-K1-B4.pep
MAGVTLSTTLSLRLPSYPPPTYCYPTHPALFKTPSLQFPPRSATPTNLTHRSTGLLPLNATAAPEKIGKLGTEISNLTLEEARTLVDYLQEKLGVSAAAFSPAAVPVAAPGVADAGETVVEEKTE

SEQ ID NO: 59997 - protein, 160 aa, Gossypium hirsutum
  Clone ID: GOSHI-09MAY01-C7720_2.pep
MATSLSLSNFFSFLLPPNPSPPKAPPALNSLSLSSQKPKNAPLSWSAPEDQSSSLSTELSSVMCPSLANANTLFFKSAYNIQVIVDDNEPEERLLNRFRREVMKAGVIQECKRRRFFENKQDEKKRKSREAAKRNRRRRPQARFSQPNKQEVSTKKGMRM

SEQ ID NO: 59998 - protein, 148 aa, Gossypium hirsutum
  Clone ID: GOSHI-09MAY01-C7720_1.pep
MATWLSLSKFLSSFLPSIPPPPPPPPPKAPLLNNLSLSSQKPKSTLLSLSAQEDQSPSSSTELSSVICPSLAYSNTLFFKSAYNVHVIVDDNEPEEKLLNRFRREVMKAGVIQECKRRRFHENKQDEKKRKSREAAKRNRRRFYWFLI

SEQ ID NO: 59999 - protein, 190 aa, Gossypium hirsutum
  Clone ID: GOSHI-09MAY01-C7680_1.pep
MAPHPPFKPSSIAPLPLPSPFTQFSYQPNMFDPTKELPKSYVSLSDHLTGGFSDCNDSYDRAMNYGPKVQKTAQNYANYSSWNTLEGRFEAETLMADDESGISSPPLWKSSPQHENNVNYRCLSPSSRAQAIARGQKELMEMVSKMPESCYELSLKDLVEHQPVVVVEPKQESFAQGRGSNSIDERKYKN

SEQ ID NO: 60000 - protein, 430 aa, Gossypium hirsutum
  Clone ID: GOSHI-09MAY01-C7650_1.pep
CPRVRFNNLGDLLCTITGFDSFALQPNAGAAGEYAGLMVIRAYHMSRGDHHRNVCIIPVSAHGTNPASAAMCGMKIVSVGTDSKGNINIEELRKAAEANKDKLSALMVTYPSTHGVYEEGIDEICKIIHDNGGQVYMDGANMNAQVGLTSPGFIGADVCHLNLHKTFCIPHGGGGPGMGPIGVKKHLAPFLPSHPVVPTGGIPAPEKSDPLGTISAAPWGSALILPISYTYIAMMGSKGLTDASKIAILNANYMAKRLEKHYPVLFRGVNGTVAHEFIIDLRGFKNTAGIEPEDVAKRLMDYGFHAPTMSWPVPGTLMIEPTESESKAELDRFCDTLISIREEIAEIENGKADIHNNVLKGAPHPPSLLMADAWTKPYSREYAAFPASWLRTAKFWPTTGRVDNVYGDRNVICTLLPVSQMVEEAAAANA

SEQ ID NO: 60001 - protein, 55 aa, Gossypium hirsutum
  Clone ID: LIB3585-039-P1-K1-E9.pep
KPYSREYAAFPASWLRTAKFWPTTGRVDNVYGDRNVICTLLPVSQMVEEAAAANS

SEQ ID NO: 60002 - protein, 63 aa, Gossypium hirsutum
  unsure (1)..(63): unsure at all Xaa locations
  Clone ID: LIB3146-023-Q1-K1-H11.pep
AKDWLDEXSFPFRXXCCXXYQLXFHSQISEQISXXLMEMXEAFTEPXSKLRPLALHFQXGVQS

SEQ ID NO: 60003 - protein, 201 aa, Gossypium hirsutum
  unsure (1)..(201): unsure at all Xaa locations
  Clone ID: GOSHI-09MAY01-C7640_10.pep
ASKALFRQLFEXRSSTYTYLLADCSHPDKPALLIDPVDRTVDRDLNLVKELGLKLIYAMNTHVHADHVTGTGLIKGKVPGVKSVISKASGSKADVFVEAGDKISFGDLFLEGGSSQQLYKSVHSQIFTLPKETLLYPAHDYKGFSVTTVGEEMLYNPRLTKDEETFKNIMENLNLAYPKMIDVAVPANMVCGLQDLEPKAD

SEQ ID NO: 60004 - protein, 167 aa, Gossypium hirsutum
  unsure (1)..(167): unsure at all Xaa locations
  Clone ID: GOSHI-09MAY01-C7640_8.pep
PKQIHEIKDFLLTARRKDACSVKIKKSKDFVKFKARCSKYLYTLCVSDAEKADKLKQSLPRGAKRLVPVGLGDDDQCIEDDFTAXRESVWPELDQLLRDDDDATTVSTPYTAAVLEYRVVFYDPANAPVKDKNWNNANGHTVYDAQHPCRSNVAVRKELHTPASDRS

SEQ ID NO: 60005 - protein, 69 aa, Gossypium hirsutum
  Clone ID: GOSHI-09MAY01-C7640_7.pep
MPKQIHEIKDFLLTARRKDARSVKIKKSRDVVKFKVRCSKYLYTLCVSDAEKADKLKQSLPPGLSVQDL

SEQ ID NO: 60006 - protein, 69 aa, Gossypium hirsutum
  Clone ID: GOSHI-09MAY01-C7640_6.pep
MPKQIHEIKDFLLTARRKDARSVKIKKSKDVVKFKVRCSKYLYTLCVSDAEKADKLKQSLPPGLSVQDL

SEQ ID NO: 60007 - protein, 134 aa, Gossypium hirsutum
  Clone ID: GOSHI-09MAY01-C7640_4.pep
GNRVTESSSNGSQVRATPGHTMGCVTYVTGDGPDQPQPRMAFTGDALLIRGCGRTDFQIFTLPKETLLYPAHDYKGFSVTTVGEEMLYNPRLTKDKETFKNIMENLNLAYPKMIDVAVPANMVCGLQDLEPKAN

SEQ ID NO: 60008 - protein, 90 aa, Gossypium hirsutum
  Clone ID: GOSHI-09MAY01-C7640_2.pep
NKLCYLKGTTLALDGRAGVEDIKSLKHCVQVMSYSQQHRSLGNSVPNYLLYLFLEPHGQGALRLISPLFTILNLARSNGVEPISFCTCKR

SEQ ID NO: 60009 - protein, 305 aa, Gossypium hirsutum
  Clone ID: GOSHI-09MAY01-C7640_1.pep
MLLNVGTSVRAATRFSPFIITHSSPSSPSSFGFTFSPKQTVSFTLQSSQMASFTTLSQSPPKLLFRQLFEKESSTYTYLLADCSHPDKPALLIDPVDRTVDRDLNLVKELGLKLIYAMNTHVHADHVTGTGLIKGKVPGVKSVISKASGSKADVFVEPGDKISFGDLFLEVRATPGHTMGCVTYVTGDGPDQPQPRMAFTGDALLIRGCGRTDFQGGSSQQLYKSVHSQIFTLLKETLLYPAHDYKGFSVTTLGEEMLYNPRLTKDEETFRNIMENLNLAYPKMIDVAVPANMVCGLQNLEPKAN

SEQ ID NO: 60010 - protein, 61 aa, Gossypium hirsutum
  Clone ID: LIB3825-033-Q6-N6-D5.pep
GTRVPESSSNGSQVTPVGEEMLYNPRLTKDEETFKNFMEIFNLAYLKMIDVAVPANMVCGL

SEQ ID NO: 60011 - protein, 128 aa, Gossypium hirsutum
  unsure (1)..(128): unsure at all Xaa locations
  Clone ID: AI055183.1.pep
MLLNVGTFIRSATRFSPFIITHSSPSSPSSFCFSFSPKQTVSFTLQSSQMASFTTLSQSPPKLLFRQLFEKESSTYTYLLADCSHPDKPALLIDPVDRTVDXDLILVKELWLKLYYALNTHVHADHVT

SEQ ID NO: 60012 - protein, 79 aa, Gossypium hirsutum
  Clone ID: LIB3146-027-Q1-K1-A9.pep
QQWFPNVENALAKFTWAKEVHKKMVTLKEEGKPMPKNFAEVQKLMGSTPLDLAKFNMVKSGEMSRNAPCPCGCKKRYKR

SEQ ID NO: 60013 - protein, 59 aa, Gossypium hirsutum
  unsure (1)..(59): unsure at all Xaa locations
  Clone ID: LIB3197-029-Q1-M1-G6.pep
GNRVTESSSNGSQVRATPGHTMGCVTYVTGDGPDQPQPRMAFTGDALLIRGCGRTDFXV

SEQ ID NO: 60014 - protein, 69 aa, Gossypium hirsutum; identical to SEQ ID NO: 60006
  Clone ID: LIB3147-056-Q1-K1-G5.pep

SEQ ID NO: 60015 - protein, 212 aa, Gossypium hirsutum
  unsure (1)..(212): unsure at all Xaa locations
  Clone ID: LIB3543-054-Q1-K6-C11.pep
KYEHFNKVAXVGDELLTEQGAKRIVPLGLGDDDQCIEDDFTAWRELVWPELDQLLRDEDDATVSTPYTAAVLEYRVVFYDPADAPLEDKNWSNANGHATYDAQHPCRSNVAVRKELHAPESDRSCTHLEFDIAGTGLSYETGDHVGVYCENLDEVVDEALSLLGLSPDTYFSVHTDKEDGTPLGGSSLPSSFPPCTLRTALARYADLLSSPK

SEQ ID NO: 60016 - protein, 62 aa, Gossypium hirsutum
  unsure (1)..(62): unsure at all Xaa locations
  Clone ID: LIB3147-040-Q1-K1-E10.pep
SNNVLKFKVRYYKYLPAETRVKAINEICGQAKFSDLTNNFLVILYDNGXLIHIESIAKRFVE

SEQ ID NO: 60017 - protein, 48 aa, Gossypium hirsutum
  unsure (1)..(48): unsure at all Xaa locations
  Clone ID: LIB3148-031-Q1-K1-H7.pep
SFKTAAPXFFFFYFYFFFFFFFFFFFYSLFFFNFFFFFFFXALNLDGI

SEQ ID NO: 60018 - protein, 92 aa, Gossypium hirsutum
  Clone ID: LIB3083-099-Q1-L1-A1.pep
SRILTEQRAGRLVPEGRGNYDQCIEHHFTASRESLWSELNQLLRDDYDATSVSTPYTDAVLEYRVVFYDPANAPVKDKNWNNANGHTVYDAQ

SEQ ID NO: 60019 - protein, 390 aa, Gossypium hirsutum
  unsure (1)..(390): unsure at all Xaa locations
  Clone ID: GOSHI-09MAY01-C7660_2.pep
VILVFGGCGGGGGGVWVPMLTLIVGFDTKSAAAISKCMIMGASASSVWYNLRVPHPTKEVPIIDYDLALLFQPMLMLGITVGVXLSVVFPYWLITVLIIILFLGTSSRSFYRGIEMWKEETILNKELTKPQESFVNSRGELLIDTEYEPLVPKEEKSKLQILCFNLRWKRLLVLATVWVLFTVIQVIKNDVVPCTTLYWVLFSLQFPIATLVFGYEATKLYKEHKKRMSTGNAETVCGASIQWSPLNIAFCALCGILGGTVGGLLGSGGGFILGPLLLEIGVIPQVASATATFVMMFSSSLSVVEFYLLKRFPMPYALYLMGVSILAGFWGQYFVRKLITILRRASLIVFILSGVIFASALTMGVIGIERSIRMIHNHEFMGFLDFCSRQ

SEQ ID NO: 60020 - protein, 97 aa, Gossypium hirsutum
  unsure (1)..(97): unsure at all Xaa locations
  Clone ID: AI055721.1.pep
IGFLRIHVVPVGGVGGGGIFVPMLTLIVGFDTKSAAAISKCMIMGALALAVWDNLIESHTTHEMPNIFVQXLVFFFTPLLKTLVNTCGVSLRAAFPL

SEQ ID NO: 60021 - protein, 77 aa, Gossypium hirsutum
  Clone ID: LIB3149-046-Q1-K1-G3.pep
LKRFPMPYALYLMGVSILAGCWGQYFVRKLITILRRASLIVFILSGVIFASALTMGINLLKLNDSAFLNFSITEGLS

SEQ ID NO: 60022 - protein, 91 aa, Gossypium hirsutum
  Clone ID: LIB3165-023-P1-K1-B9.pep
VILPINCSSNWGALVYVGGPHPNLSKSKGPISKCMIMGASASSVWYNLRVPHSTKEVPIIDYDLALLFQPMLMLGITVGVALSRRFPLLPQ

SEQ ID NO: 60023 - protein, 131 aa, Gossypium hirsutum
  Clone ID: GOSHI-09MAY01-C7610_1.pep
MAASSACLLGNGLSTHRTKSKLSKDFYGRNIVFTPAISSLGRKSNAVLVKASLKLKQHEGRRGFLKSLLGTAGIGVPALLGNGKAYADEQGVSSSRMSYSRFLEYLDKDRVKKVDLFENGTIAIVEAVSPE

SEQ ID NO: 60024 - protein, 117 aa, Gossypium hirsutum
  unsure (1)..(117): unsure at all Xaa locations
  Clone ID: LIB3165-018-P1-K1-F4.pep
MAPASACLLGNGLSTHRTKSKLSKDFYGRNIVFTPAISSLGRKSNAVLVKASLKLKQHEGRRGFLKSLLGTAGIGVPALLGNGEAYAFXQGVSSSRMFLFLVFKFFYFIIWLYKFFS

SEQ ID NO: 60025 - protein, 225 aa, Gossypium hirsutum
  unsure (1)..(225): unsure at all Xaa locations
  Clone ID: GOSHI-09MAY01-C7150_1.pep
LEPSSQTPDYLISPITPPAPPSPPPPPTKPNQFLSLISNRPSLRVTSEFDSDSRVFFHKVSFKLFDDLAKLKLSFVNNVKREISEPLLALTSKHLSIHYDPEEKNALIKTSFDVGPKLQFKAAHDVKAKRGEVAMIANVADPGYAVEVSSPVPYIGLPKATIRFPTGEVTLEEREDEEXQAKLLINGILKGPILNGVGAAHYTDEELRLRYSYKDESLSFIPSIS

SEQ ID NO: 60026 - protein, 111 aa, Gossypium hirsutum
  Clone ID: GOSHI-09MAY01-C7110_1.pep
MSSNYGKGSSGSLKSFDFDLGLGSGRPKSLNDQKNKTSSSFSSYSSATSAPSKPAWQPNKPSWTHQPAPNQASQAAISGPTSMVGDIFGKSWSSSGGNSSGIGIVNKNPNL

SEQ ID NO: 60027 - protein, 145 aa, Gossypium hirsutum
  Clone ID: GOSHI-09MAY01-C7120_1.pep
MGVVIIDGSTVRAFVTDDQQFTKSVDERFAALDLNNDGVLSRSELRKAFESLRLLESHFGVDVATPPDELTQLYNSIFERFDCDGSGTVDLQEFRSEMKKILLAIADGLGSCPIQMVLEDDDQSFLKKAADLEAAKLDPNHAQAS

SEQ ID NO: 60028 - protein, 79 aa, Gossypium hirsutum
  Clone ID: uC-gsflnu33B091e08b1.pep
PTVRAFVTDEQHFTKSVDERTAALDLNNDGVLSRSELRKAFESLRLLETHFGVHVFTTSDTVKPSDTPILERLDCYRLC

SEQ ID NO: 60029 - protein, 143 aa, Gossypium hirsutum
  unsure (1)..(143): unsure at all Xaa locations
  Clone ID: GOSHI-09MAY01-C7090_1.pep
DIYYRDQQGFFNNDYLTLGVDHVPLLSGRTALQCYEDFMLSFVNKFESFIGTVIEEISIGLGPSGELSXRYPAHPFGDGRWKFPGIGEFQCYDKFMMEDLKMAACREGKPQWGDKGPQNAGCYNSLPSGVPFFEEGKESFLSD

SEQ ID NO: 60030 - protein, 121 aa, Gossypium hirsutum
  unsure (1)..(121): unsure at all Xaa locations
  Clone ID: GOSHI-09MAY01-C7010_6.pep
VSFVNQFKLAIENQEXTVREIKPKNSKIMGAGGPDEEHNRWPPWLKPLLKEQFFVQCKHHVDFHKSECNMFCLDXCVNGALCSFCLAYHKASLALSRFSNYPFKLLSWFMLRQILFTLLFI

SEQ ID NO: 60031 - protein, 121 aa, Gossypium hirsutum
  Clone ID: GOSHI-09MAY01-C7010_5.pep
NRALPFRVQDFKLAIENQESTVREIKPKNRRIMGAGGPDEEDNRWPPWLKPLLGEHFFVQCKLHADSHKSECNMYCLDCMNGALCSLCLAHHKDHRYIQIRRSSYHDVTRVSEIQKYPDIS

SEQ ID NO: 60032 - protein, 189 aa, Gossypium hirsutum
  unsure (1)..(189): unsure at all Xaa locations
  Clone ID: GOSHI-09MAY01-C7010_4.pep
GPSRPALALSVLPSLLFTETLKQTRYPLSFPLLFSFNYFKLAIDNQEPTVREIKPKNRRIMGAGGPDEEDNRWPPWLKPLLREHFFVQCKLHADSHKSECNMYCLDCMNGALCSFCLAYHKDHRYIQIRRSSYHDVIRVSEIQKYLDISGVQTYVINSXAKVVFFXERAHPMPGNCFSYHLLGFFFLSF

SEQ ID NO: 60033 - protein, 177 aa, Gossypium hirsutum
  unsure (1)..(177): unsure at all Xaa locations
  Clone ID: GOSHI-09MAY01-C7010_3.pep
EFKLAIENRESIVREIKPKNRRIMGAGGPDEEDNRWPPWLKPLLREHFFVQCKLHVDSHKSECNMYCLDCMNGALCSFCLADHKGRPLVQIRRSSYHDVIRVSEIQKYLDISGVQTYVINSAKVGFINERPQPRXPGKGVINTCEVCERSLVDNLRFCSLGCKVVGTSKGFPGRRRG

SEQ ID NO: 60034 - protein, 70 aa, Gossypium hirsutum
  Clone ID: GOSHI-09MAY01-C7010_2.pep
TSKNFHKKKRQLGMNMAALDSEDSYSSSCHEKINNKVQSFRPSTPPPTRTAKRRKGIPHRAPMGGLIIEY

SEQ ID NO: 60035 - protein, 234 aa, Gossypium hirsutum
  Clone ID: GOSHI-09MAY01-C7010_1.pep
FKLAIENKETTVREIKPKNRRIMGAGGPDEEDNRWPPWLKPLLKEQFFVQCKHHVDFHKSECNMFCLDCVNGALCSFCLAYHKDHRYIQIRRSSYHDVIRVSEIQKYLDISGVQTYIINSAKIVFLNERPQPRPGKGVTNTCEVCDRSLVDSFRFCSLGCKIVGTSKNFHKKKRQLGMNMAALDSGDSSSSSCHEKITTKVQGFRPSTPPPTRTAKRRKGIPPRAPMGGLIIEY

SEQ ID NO: 60036 - protein, 80 aa, Gossypium hirsutum
  unsure (1)..(80): unsure at all Xaa locations
  Clone ID: LIB3135-043-P1-K1-G7.pep
VSFVNYFKLAIENKETTVRXIKPKNRRIMGAGGPDEEDNRWPPWLKPLLKEQXFVQCKHHVALHKSECNMFCLHCVNGAL

SEQ ID NO: 60037 - protein, 371 aa, Gossypium hirsutum
  Clone ID: GOSHI-09MAY01-C7320_1.pep
MAALRSFLRKRCLTCDELMMTRRLISTEPIIDSPSFAQRLRDLPKDLPGTKIKREVSQLIGRTPLVFLNKVTEGCGAYIAVKQEMMQPTSSIKDRPAFAMINDAEKKNLISPGKTTLIEPTSGNMGISMAFMAAMKGYKMVLTMPSYTSLERRVTMRAFGADLILTDPTKGMGGTVKKAYDLLESTPNAFMLQQFSNPANTQVHFETTGPEIWEDTLGKVDIFVMGIGSGGTVSGVGQYLKSQNPNVQIYGVEPAESNVLNGGKPGPHHITGNGVGFKPDILDMDVMEKVLEVSSEDAVNMARELALKEGLMVGISSGANTVAALRLARMPENKGKLIVTVHPSFGERYLSSVLFQELRNEAENMQPVAVD

SEQ ID NO: 60038 - protein, 154 aa, Gossypium hirsutum
  unsure (1)..(154): unsure at all Xaa locations
  Clone ID: LIB3829-021-Q6-K6-A11.pep
DKVDIFXMGIGSGGTVSGVGQYLKSQNPNVLFFFLEPAETFGGGGGKPXPHHITXNPXKFKPXILXMDVMXKVLEVSSEDAVNMARELALKEGLMVGISSGANTVSALRLARMPENKGKLIVTVHPSFGERYLSSVLFQELTNEAENMHPVAAH

SEQ ID NO: 60039 - protein, 58 aa, Gossypium hirsutum
  Clone ID: GOSHI-09MAY01-C7260_4.pep
AKVKIPRGRSYWYNSYGSVVTGDQDPKTRYPVVVRFNKVNYANVSTNNYALDEIEEVK

SEQ ID NO: 60040 - protein, 136 aa, Gossypium hirsutum
  Clone ID: GOSHI-09MAY01-C7260_3.pep
MVSCCNMASAASGFLLTPNVSAGTSKTNNNNMVFFPSKTNNTSRLVVRAADEEASPPPPSPTPATTTAPPEGGEAPKPKPPPIGPKRGTKVKILRRESYWYNSYGSVVTVDQVTLSLFLLPAPFACMHACMKELWI

SEQ ID NO: 60041 - protein, 134 aa, Gossypium hirsutum
  unsure (1)..(134): unsure at all Xaa locations
  Clone ID: GOSHI-09MAY01-C7260_2.pep
MGSCSGMASAASGFLLMPNLTGTAASKTNNISMLFSPSRNNYYNSSRLVVRAAEEEASPPAPTPATTTAPPEGGEAPKPKPPPIGPKRGTKVRILRRESYTPRXRYPVVVRFNKVNYANVSTNNYALDEIEEVK

SEQ ID NO: 60042 - protein, 147 aa, Gossypium hirsutum
  unsure (1)..(147): unsure at all Xaa locations
  Clone ID: GOSHI-09MAY01-C7260_1.pep
MGSCSGMASAASGFLLMPSLTGTAASKTNNISMLFSPSRNNYYNGSRLVVRAAEEEASPPAPPPAATTAXPEGGEAPKPKPPPIGPKRGTKVRILRRESYWYNGYGSVVTVDQDPKTRYPVVVRFNTGNHANVSTNNYALDEIEEVK

SEQ ID NO: 60043 - protein, 361 aa, Gossypium hirsutum
  unsure (1)..(361): unsure at all Xaa locations
  Clone ID: GOSHI-09MAY01-C1990_1.pep
PRVRAFILSNIGGTYSWTGEPYTGAWLVKKAGSTSLNHRNMIRNFDWLDPXCSKIARSINEFGKSAFVALRKGLKSQIKRVARESLTTIAWLGCEISKSSNSLRYSACEILLGEVEKFLHPGMDLEERLLACLCIYNYASGKALASPLPSAEGVRESLRRFSNVIWMADELHRVADFYLPNKSRISCVHTQIVEVSHKYSGAVNALIYYKGMLYSGYSDGSIKVWDIKRQSATLLWDIKEHKDSVTCFSLFEPGETLLSGSIDKTIRVWQMVHNKLECIEVIATKEPVQKLDTYGQMIFMITHAHHLKVIDSLRTTNSICKTKSVKCMKMVQGRIYAGCTDSSIQEVSLSSNHQREIKAAV

SEQ ID NO: 60044 - protein, 153 aa, Gossypium hirsutum
  unsure (1)..(153): unsure at all Xaa locations
  Clone ID: LIB3583-024-P1-K1-G10.pep
QLSAFILSNIGGTYSWTGEXCAVAWLVKKAGSTSLNHRNMIRNFDWLDPSLQDMVTDLWCSKIARSINEFGKSAFVALRKGLKSQIKRVAREFLTTIAWLGCEILKSSNSLRFSACENLLGEVEKFLHPGMDLEERLLTCLCIYNHAFGKGIK

SEQ ID NO: 60045 - protein, 153 aa, Gossypium hirsutum
  Clone ID: GOSHI-09MAY01-C1930_6.pep
PLAAAGSWAFVSAYARLPHEERKWPECCPTVSEEYQKSVEKAKRKLRGLIAEKNCAPLMLRLAWHSAGTFDVKTKTGGPFGTMKHPAELAHAANNGLDFAVRLLEPIKEQFPNLTYADFYQLAGVVAVEITGGPEIPFHPGGEDKPTTPEAVS

SEQ ID NO: 60046 - protein, 250 aa, Gossypium hirsutum
  Clone ID: GOSHI-09MAY01-C1930_4.pep
MTKCYPTVSEEYQNAVQKAKRKLRGLIAEKNCAPLMLRLAWHSAGTFDVKTKTGGPFGTMKQPAELAHAANNGLDIAVRLLEPIKEQFPILSYADFYQLAGVVAVEITGGPEIPFHPGREDKPHPPPEGRLPNATEGADHLRQVFSNQMGLSDQDIVALSGGHTLGRCHKERSGFEGPWTTNPLIFDNSYFKELLTGEKDGLLQLPTDKVLLSDPVFRPLVEKYAADEDAFFADYTEAHLKLSELGFADA

SEQ ID NO: 60047 - protein, 250 aa, Gossypium hirsutum
  Clone ID: GOSHI-09MAY01-C1930_3.pep
MTKCYPTVSEEYQKSVEKAKRKLRGLIAEKNCAPLMLRLAWHSAGTFDVKTKTGGPFGTMKHPAELAHAANNGLDIAVRLLEPIKEQFPNLTYADFYQLAGVVAVEITGGPEIPFHPGREDKPHPPPEGRLPDATEGADHLRQVFSHQMGLSDQDIVALSGGHTLGRCHKERSGFEGPWTTNPLIFDNSYFKELLTGEKAGLLQLPTDKVLLSDPVFRPLVDKYAADEDAFFADYTEAHLKLSELGFADA

SEQ ID NO: 60048 - protein, 215 aa, Gossypium hirsutum
  Clone ID: GOSHI-09MAY01-C1930_2.pep
MAEQAVKLRCQRIGCNATFTEDDNPEGSCTFHASGPIFHDGMKEWSCCKKRSHDFSLFLEIPGCKTGKHTTEKPVLNKPVATKTIPTSSPAVTLSTSATSKESCPRCSQGFFCSDHGSQPKVPNPTPAVLAKSSADVKESSPPPKKIVDINQPQTCKNKGCGKVFKEIENHESACTYHPGPAVFHDRVRGLKCCDIYVKEFDEFMTIPPCKKGWH

SEQ ID NO: 60049 - protein, 250 aa, Gossypium hirsutum
  Clone ID: GOSHI-09MAY01-C1930_1.pep
MTKCYPTVSEEYQKSVEKAKRKLRGLIAEKNCAPLMLRLAWHSAGTFDVKTKTGGPFGTMKHPAELAHAANNGLDIAVRLLEPIKEQFPNLTYADFYQLAGVVAVEITGGPEIPFHPGREDKPHPPPEGRLPDATKGSDHLRQVFSAQMGLSDQHIVALSGGHTLGRCHKERSGFEGPWTTNPLIFDNSYFKELLSGEKEGLLQLPTDKVLLSDPVFRPLVEKYAADEDAFFADYTEAHLKLSELGFADA

SEQ ID NO: 60050 - protein, 203 aa, Gossypium hirsutum
  unsure (1)..(203): unsure at all Xaa locations
  Clone ID: LIB3829-030-Q6-K6-C7.pep
RSNPGRPAPKKTRSHRTRSTKRRSKAKRKLRGLIAEKXCAPLMLRLAWHSAGTFDVKTKTGGPFGTMKQPAELAHAANNGLDIAVRLLEPIKEQFPILSYADFYQLAGVVAVEITGGPEVPFHPGREDKPHPPPEGRLPNATEGADHLRQVFSHQMGLSDQDIVALSGGHTLGRCHKERSGFEGPWTTNPLIFDNSYFKELLT

SEQ ID NO: 60051 - protein, 117 aa, Gossypium hirsutum
  unsure (1)..(117): unsure at all Xaa locations
  Clone ID: uC-gsronu33B159g10b1.pep
ERHDAARXMEKNLRKCIKFLDMXVLVQAQGEQLDDIESHVNRANSFVRGGTEXLQTARNYQKNTRKWTCYAIILLLVIVLFVVLFTVRPWENNGGGGGGGNNKTISPTSSTYCLTLG

SEQ ID NO: 60052 - protein, 87 aa, Gossypium hirsutum
  unsure (1)..(87): unsure at all Xaa locations
  Clone ID: uC-gsflnu33B084c03b1.pep
SASGNEHYEFIVEYAYTQHLTVRXSDDERAQAPELIGCAQEALKDLVPRKVKDIWLKLAKDLVGQKDAKNRGEVQLALLYWPVDTER

SEQ ID NO: 60053 - protein, 90 aa, Gossypium hirsutum
  unsure (1)..(90): unsure at all Xaa locations
  Clone ID: LIB3493-001-P1-M1-D4.pep
WSXCKKRSHDFSLFLEIPGCKTGKHTTEKPVLNKPVATKTIPTSSPAVTLSTSAXSKESCPRCVKGFSRSDHCXQGYIDRTLRPAVLGYS

SEQ ID NO: 60054 - protein, 85 aa, Gossypium hirsutum
  unsure (1)..(85): unsure at all Xaa locations
  Clone ID: uC-gsronu33B031e03b1.pep
DGTFDVKTKTGGPFGTMKHPAELAHAANNGLDIAVRLLEPIKEQFPNLTYADFYQLACVVPVEITGGPEIPFHPGXEDKPYPPPE

SEQ ID NO: 60055 - protein, 103 aa, Gossypium hirsutum
  Clone ID: uC-gsronu33B018f12b1.pep
MTNCYPTVSEEYQNAVQKAKRKLKGLIAEKNCAPLMLRLAWHSAGSIDVKTKTGGPFTTMKQPAELAHAANNGLDIVVRFLEPIKEQLPILLYADFYQLAGVV

SEQ ID NO: 60056 - protein, 97 aa, Gossypium hirsutum
  Clone ID: uC-gsronu33B018c01b1.pep
MTKCYPTVSEEYQNAVQKAKRKLRGLIAEKNCAPLMLRLAWHSAGTFDVKTKTGGPFGTMKQPAELAHAANNGLDIAVRLLEPIKQQFPILSYADFY

SEQ ID NO: 60057 - protein, 72 aa, Gossypium hirsutum
  Clone ID: LIB3165-008-P1-K1-B2.pep
MGGDRWHSAGTFDVKTKTGGPFGTMKQPAELAHAANNGLDIAVRLLEPIKEQFPILSYADFYQLAGVVVLRS

SEQ ID NO: 60058 - protein, 32 aa, Gossypium hirsutum
  Clone ID: LIB3272-059-P1-N1-B1.pep
PLVDKYAADEDAFFADYTEAHLKLSELGFADA

SEQ ID NO: 60059 - protein, 80 aa, Gossypium hirsutum
  Clone ID: LIB3166-016-P1-K1-A10.pep
PSVAATVSEEYQKSVEKAKRKLRGLIAEKNCAPLMLRVAWHSAGTFDVKTKTGGPFCTMKHPAELAHADNNGLDIAVRLI

SEQ ID NO: 60060 - protein, 62 aa, Gossypium hirsutum
  Clone ID: LIB3149-050-Q1-K1-G11.pep
SQQHLPRRNEWGGVCHLSVVYGQLLLDEYGYLQFYFVEHVRYAVLFIEISRFCILLFLWIGL

SEQ ID NO: 60061 - protein, 116 aa, Gossypium hirsutum
  unsure (1)..(116): unsure at all Xaa locations
  Clone ID: GOSHI-09MAY01-C1920_22.pep
PRVRVHKLMHLEELIDIFLAHDWPLGITDYGNWQXSCLLQKNRFKGEIQQGTLGSKPAAQLLEKXLRPSYWFSAHLHCKFTALGEHEEGGRVTXFLALDKCLPGRKFLQVVDIDLI

SEQ ID NO: 60062 - protein, 115 aa, Gossypium hirsutum
  Clone ID: GOSHI-09MAY01-C1920_16.pep
HQSFQIPFLSHSWKFKSSLLHFPNSSPSLSLQIFPLSSVFFSSFSIVYVFFIWKSLASSIDFGFSALGNIVSVRLFKSMDVFVVVLVACFGNERNSGSARFQQQWPLFCSQSLLH

SEQ ID NO: 60063 - protein, 168 aa, Gossypium hirsutum
  unsure (1)..(168): unsure at all Xaa locations
  Clone ID: GOSHI-09MAY01-C1920_15.pep
QGVLKPGAHAADGWVTECSQNKPHNGDXGTWAHHFKQNLGLVGGPFXFEQEQAQLTSVDQMRGGNIESLAAIQQTKMLAHTLSQNSDPKFQXSTIHNFLQFVSQMSXRGALIIDDNQVKPASENWATEYQQQYNGGASWADEFAHDEASRDLVEAKEAHRLICPDNQS

SEQ ID NO: 60064 - protein, 145 aa, Gossypium hirsutum
  Clone ID: GOSHI-09MAY01-C1920_14.pep
CDIGITCFIHRFWVFSPRKYCFGSSFQIYGCRCGCSCWMLWERKKFWFCKISPAMASLLQSTTLLFIFSITLILIPNRHAIPFIVLHGYCSNDACSGSQSYQSGSTSCSWCESYKCFAQRARKSGTVGGPLTLSVYHLGIMACIF

SEQ ID NO: 60065 - protein, 109 aa, Gossypium hirsutum
  Clone ID: GOSHI-09MAY01-C1920_13.pep
HYICKCYCYILVLIEVFSAIQVARLFNEAAQMSPEDVDVHIVLGVLYNLSSENDKAIASFKTALKLKPNDYSLWNKLGVTQANSVQSADAILAYQQALDLKPNHVRAWA

SEQ ID NO: 60066 - protein, 137 aa, Gossypium hirsutum
  Clone ID: GOSHI-09MAY01-C1920_12.pep
NSFSSPLIPKFLSPSSQPICHRRHRPDHLVHRPRLTPLLRRRRRRSLLPQPIAMMRAQEADPINLEVLLALGVSHTNELEQTAALKYLYGWLRHHPKYGTLAPRKLLVFHTLTYALDLKPNYVRAWANMGISYANQV

SEQ ID NO: 60067 - protein, 71 aa, Gossypium hirsutum
  Clone ID: GOSHI-09MAY01-C1920_11.pep
SQTMCVLGQTWVSVTPTRFVISFIVLTFMKRELHFFLYVFISFCIFLRWSILLNQNLWVCDQKLNHLVFNI

SEQ ID NO: 60068 - protein, 180 aa, Gossypium hirsutum
  unsure (1)..(180): unsure at all Xaa locations
  Clone ID: GOSHI-09MAY01-C1920_7.pep
ILKLQGGGGAEDLVVKLVGGFGISLSDNWANSYDEFLSXSDASWGVYVFSDMNPYVGDENPLKECQELFRKGLLSEAVLALEAEVMKNPENAEDWRLLGITHAENDDDQQAIAAMMHAQEADPTNLEVLLALGVSHTNELEQTTALKYLYGWLRHHPKYGTLAPLELANSLYYADGAATT

SEQ ID NO: 60069 - protein, 156 aa, Gossypium hirsutum
  Clone ID: GOSHI-09MAY01-C1920_6.pep
MTRTNREMVQIFMSPEDADVHIVLGVLYNLSREYDKAIASFKTALKLKPNDYSLWNKLGATQANSVQSADAILAYQQALDLKPNYGRAGANMGISYANQGMYEESIRYYVRALAMNPKADNAWQYLRISLSCVSRNDMVEACDSRNLELLQKEFPL

SEQ ID NO: 60070 - protein, 200 aa, Gossypium hirsutum
  unsure (1)..(200): unsure at all Xaa locations
  Clone ID: GOSHI-09MAY01-C1920_5.pep
VFRGPDDWANEFGAERLQKESVDDQWVNECSKLHLDDWAEEFGRQVGGGALGDSSSDNWANSYDDXTGSLEEVPQRSDASRGXVLVFSDMNPYVGHQNPLKEGRELVREGLLSEAALALEAEVMKNPENAEGWRLLGITHAENDDDRLVIHFALVCQSWIVRVYSYTKRHCFCVSLILQEFLLRDVTACLAQPSVQHLWL

SEQ ID NO: 60071 - protein, 299 aa, Gossypium hirsutum
  unsure (1)..(299): unsure at all Xaa locations
  Clone ID: GOSHI-09MAY01-C1920_4.pep
NSLLHRSCFENSKFLQFVSKMSSGELIIDDNQVKPASENRATVYQQQYNGGAXADEFAHDEASRDLVEGXRGPDHWANEFGAERLQQESVDDQWVNEFSKLHVDDWAEEFDSQVGEGALGDSSSDNWENSYDEXCGSLEEVHFVTSLNSTXIVLVVRTCXVPQRLDASRVFYVFSDMNPYVGHQNPLKEGQELLSKGLLSEAVLALEAEIMKNPENAEGWRLLGITHAENDDDQQVIHFACXSEQADPANLEVLLALGVNHTNGTSFEAKLCACLGKHGYQLRQPVQNKARHARLSSMG

SEQ ID NO: 60072 - protein, 191 aa, Gossypium hirsutum
  unsure (1)..(191): unsure at all Xaa locations
  Clone ID: GOSHI-09MAY01-C1920_1.pep
IQQGTLGSKPAAHPPRKLRPSYWFSAHLHCKFTALVEHEEGGRVTKFLALDKCLPGRKFLQVVDIXSDLGPYEVQYDEEWLAITRKLNCLSFDLPTWRRWVGEQSSTXQDCRQWVKSRMEDRGAKPCEFSQTAPPHKPFDXTFSGSPRNPQIVSFLELLDLXYVLDNASTPGYSSLLPQRMIQRRIPMKMR

SEQ ID NO: 60073 - protein, 123 aa, Gossypium hirsutum
  unsure (1)..(123): unsure at all Xaa locations
  Clone ID: LIB3829-019-Q6-K6-B12.pep
SDPGPYEVQYYEDWLAITRKLNCLSFDLPTWKLWENIAXMQGCRQWVKNRMEDRGAKPCEFFQTAPPHKPSDSVSNATFSGSLRNPQTLSFLKLLDLPYVLDNASDSRDTPASLPQKGLEGGL

SEQ ID NO: 60074 - protein, 198 aa, Gossypium hirsutum
  unsure (1)..(198): unsure at all Xaa locations
  Clone ID: LIB3543-051-Q6-K6-A7.pep
LIDIFLSHDGPFGIADYANCNNLFATKKPFKDEIQQGTLGCKPAAQLLEKLKPSYCFSAQLHCKFTAVVEHEEGGRVTKFLTLDNCLPGHKFLXGPYEVQYNEDWLAITQKLNRCSFDLPTWRLWVRTQLDMEDCRQWVKSRMEDRGAKPCEFSQTAPPHKPSDSVSNATFSGNWSGSAEWIWFNRNNTLHCWSTTSL

SEQ ID NO: 60075 - protein, 191 aa, Gossypium hirsutum
  unsure (1)..(191): unsure at all Xaa locations
  Clone ID: LIB3543-050-Q6-K6-E7.pep
RTRGFLGYAVVVKFGNIRIGGLSGIYNARNYCLGHHERPPYNDNTIRSVYHVWEYDVHKLMLLEELIDIFLSHDWPLSITDYGNWQQLVCCKKXHFKAHLHCKFTALVEHEDGGRVTKFLALDKCLPGRKFLQIFDIDXDLGPYEVQHDEEWLAITRKLNCVFPLTFRRDVGRTKLDMQDFRQWVKEQDGR

SEQ ID NO: 60076 - protein, 68 aa, Gossypium hirsutum
  unsure (1)..(68): unsure at all Xaa locations
  Clone ID: LIB3584-034-P1-K1-H10.pep
FTYTLDHLFQNAFFNAFRSCICSLICLASVTEIVHLKLFDDKLTFACGGHIFSTIEXSHLVYVWIFRH

SEQ ID NO: 60077 - protein, 108 aa, Gossypium hirsutum
  Clone ID: LIB3197-056-Q1-M1-D9.pep
FSDMNPYVGHQNPLKEGQELFRKGLLSEAVLALEAEIMKNPENAEGWRLLGITHAENDDDQQVGEQSSTCKIVVNGLREGWKTEEPNLVGFLKQLHLTNPLILTFSGK

SEQ ID NO: 60078 - protein, 107 aa, Gossypium hirsutum
  unsure (1)..(107): unsure at all Xaa locations
  Clone ID: LIB3828-003-Q1-K6-F12.pep
HQIAQLNILNTLAXXXXXXXXXXXXXXXXXXXXXXXXXXXXXXXXXXXXXXXXXXXXXXXXXXXXXXXXXXXXXXXXXXXXXXXXXNNITLNNEFNTLIDHFKLTNG

SEQ ID NO: 60079 - protein, 185 aa, Gossypium hirsutum
  unsure (1)..(185): unsure at all Xaa locations
  Clone ID: LIB3825-008-Q1-K6-H3.pep
SWVNEFXKLHVDDWAEDLVVKLXGGFGISMSDNWANSYDEFLSXSDASRGVYVFSDMNPYVGHQNPLKEGQELFRKGLLSEVVLALEAEVMKNPENAEGWRLLGITHAENDDDQQAMAAMMRAQEADPTNLEVLLALGVSHTNELEHTAALKYLYGWLRHHPKYGTLALPELANSLYYADEARLG

SEQ ID NO: 60080 - protein, 51 aa, Gossypium hirsutum
  Clone ID: LIB3582-019-P1-K1-A5.pep
ASLSLLVLFNVIVDTQKVRRLARHSNHTIWLNLVIFGAFISDYKACISLMF

SEQ ID NO: 60081 - protein, 78 aa, Gossypium hirsutum
  Clone ID: uC-gsronu33B076g03b1.pep
TAALKYLYGWLRHHTKYGTLSPPELANSLYYAYVSTLGYNSLFFWLVFFFWNNALILQSWFECKSLPLMLLWDSLLML

SEQ ID NO: 60082 - protein, 89 aa, Gossypium hirsutum
  Clone ID: LIB3825-010-Q1-K6-D10.pep
AKHTGTSSGNVCRSNERGKYRKFIFTCMSPFSLLFLHNTINELNIQEQAQVTSVDQMRGGNIESLAAIQWTRMLAHTLSQNSDPKFRVI

SEQ ID NO: 60083 - protein, 66 aa, Gossypium hirsutum
  Clone ID: GOSHI-09MAY01-C1850_2.pep
SRFIFFLPFHFLLFLVHDLHQGFKLRSRSRFRSRRVCRGRGHNGLLLRSLRYRGREFYITYCVLRV

SEQ ID NO: 60084 - protein, 97 aa, Gossypium hirsutum
  Clone ID: GOSHI-09MAY01-C1850_1.pep
SNFFFSFFPFPSKLLLFFIVTSESSSFFHSSSYFLPTISLFFMLLSSDLNCGRGRVFSRVVFVAVADITDAIAVTAGIAVVNFTLLIVYCGYSGFRQ

SEQ ID NO: 60085 - protein, 110 aa, Gossypium hirsutum
  Clone ID: GOSHI-09MAY01-C1840_12.pep
YIYGGLKDIYIYTAETLKGNTTTSKEEEIGRTTTFRRQSSTPTVRRRVAFVHTTLTSYSTDMNKIPRNSVYSRDVHNLSKPGYYPPPRRIKPRIRNPFKTTLTKYPTSTA

SEQ ID NO: 60086 - protein, 182 aa, Gossypium hirsutum
  Clone ID: GOSHI-09MAY01-C1840_9.pep
MMLRIKRVPTVVSNYQKDEADDTARRSAGCGKNCLKSCCIPGAKLPLYAFKKVCMEREEDVRGMENTESPVAFLDSLVLGEWEDRMQRGLFRYDVTACETKVIPGEYGFIAQLNEGRHLKKRPTEFRVDKVLQPFDGNKFNFTKVGQEEVLFQFEASEDGEVQFYPTAPIDVENSSSVVAIN

SEQ ID NO: 60087 - protein, 149 aa, Gossypium hirsutum
  Clone ID: GOSHI-09MAY01-C1840_8.pep
DQPFPARPPARPIHPGVVAINVSPMEYGHVLLIPRILECLPQRIDRESFLLALYMAAEAGNPYFRLGYNSLGAFATINHLHFQAYYLAVAFPIEKAPTKKITSLNDGVIISELLKYPVRGVVFEGGNTLQDLSDAVSEACICLQDNNIA

SEQ ID NO: 60088 - protein, 121 aa, Gossypium hirsutum
  unsure (1)..(121): unsure at all Xaa locations
  Clone ID: GOSHI-09MAY01-C1840_6.pep
FRLVAGSTRGGDTQVYADGIHNTYTTXYLGLLLMTKLXLNTIVKTXQHTGVTGRIEHVPPNVHGLSICDIILYIGQISRGTSEHISTRAYALSKHANVLHTKELCHRFKQVGANVTVDCVH

SEQ ID NO: 60089 - protein, 215 aa, Gossypium hirsutum
  Clone ID: GOSHI-09MAY01-C1840_5.pep
MAKVDEPQPHPPKEQLPNISYCITSPPPWPEAILLGFQHYLVMLGTTVIIPTSLVPQMGGGNEEKAKVIQTLLFVAGLNTLLQSLVGSRLPAVIGGSYTFVPTTISIILAGRFSDSSDPIERFKRIMRATQGALIVASTLQIDLGFSGLWRNGARFLSPLSVVPLVSLAGYGLYEFGSPGVAKCVEIGTQRGLFRYDVTACETKVIPGEYGFLPS

SEQ ID NO: 60090 - protein, 175 aa, Gossypium hirsutum
  Clone ID: GOSHI-09MAY01-C1840_4.pep
MMLRIKRVPTVVSNYQKDETEETARRSSGCGKNCLRSCCIPGAKLPLYAFRKLNNIESEKVVLGIENKEPPVAFLDSLILGEWEDRMQRGLFRYDVTACETKVIPGEYGFIAQLNEGRHLKKRPTEFRVDKVLQPFDGNKFNFTKVGQEEVLFQFEASEDGEVQVYPSAPIDAEN

SEQ ID NO: 60091 - protein, 442 aa, Gossypium hirsutum
  Clone ID: GOSHI-09MAY01-C1840_3.pep
MIQLSIKRVPTVVSNYQKDEAEETARRSGGCGKNCLRNCCIPGAKLPLYAFKKESEKDAFESDNKEPPVAFLDSLVLGEWEDRMQRGLFRYDVTACETKVIPGEYGFIAQLNEGRHLKKRPTEFRVDKVLQPFDGNKFNFTKVGQEEVLFQFEASEDGEVQFFPNAPIDVENHPSVVAINVSPIEYGHVLLIPRILECLPQRIDRESFLLALYMAAEAGNPYFRLGYNSLGAFATINHLHFQAYYLAVPFPIEKAPTKKITTLNDGVIISELLNYPVRGLPVVAARALPARPDTVSEACICLQDNNIAYNGLISDCGKRIFLLPQCYAEKQALGEVSVELLDTQVNPAVWEISGHMVLKRRKDYDEASDENAWRLLAEVSLSDERFDEVNALIFEAIGGGKDAIENVEEPDTKAQSIEKENGITETSHHAMVAGTQQCLVLQ

SEQ ID NO: 60092 - protein, 285 aa, Gossypium hirsutum
  Clone ID: GOSHI-09MAY01-C1840_2.pep
SFAHASAHAWGGGGGTLPVSPIEYGHVLLIPRILECLPQRIDRESFLLALYMTAEAGNPYFRLGYNSLGAFATINHLHFQAYYLAVPFPIEKAPTKKITTLNDEVIISELLNYPVRGLVFEGGNTLQALSDTVSDACICLQENNIPYNVLISDCGKRIFLLPQCYAEKQALGEVSPELLDTQVNPAVWEISGHMVLKRRKDYDEASDENAWRLLAEVSLSDERFREVNALIFEVIASGEDGIEHDAKSLPKEPDPKAESTEEESTITKTSHRAMVGGTQECVVLQ

SEQ ID NO: 60093 - protein, 525 aa, Gossypium hirsutum
  Clone ID: GOSHI-09MAY01-C1840_1.pep
MAKVDEPQPHPPKEQLPNISYCITSPPPWPEAILLGFQHYLVMLGTTVIIPTSLVPQMGGGNEEKAKVIQTLLFVAGLNTLLQSLFGSRLPAVIGGSYTFVPTTISIILAGRFSDSSDPIERFKRIMRATQGALIVASTLQIVLGFSGLWRNVARFLSPLSVVPLVSLVGFGLYEFGFPGVAKCVEIGLPQLILIVFVSQYVPHVIKSGRNVFDRFAVLFSVVIVWIYAHLLTVGGAYNGTAPKTQTSCRTDRSGLIDAAPWIRVPYPFQWGAPSFDAGEAFAMMMASFVALVESTGAFISVSRYASATPMPPSILSRGIGWQGVAILVSGLFGTANGSSVSVENAGLLALTRVGSRRVVQISAGFMIFFSILGKFGAVFASIPAPIIAALYCLFFAYVGAGGLSFLQFCNLNSFRTKFILGFSVFMGLSVPQYFNEYTAINGYGPVHTSARWFNDIVNVPFSSEAFVAGCLAYFLDNTLHRKDSGIRKDRGKHWWDKFRSFKGDSRSEEFYSLPFNLNKYFPSV

SEQ ID NO: 60094 - protein, 124 aa, Gossypium hirsutum
  Clone ID: LIB3197-047-Q1-M1-B9.pep
MAKVDEPQPHPPKEQLPNISYCITSPPPWPEAILLGFQHYLVMLGTTVIIPTSLVPQMGGGNEEKAKVIQTLLFVAGLNTLLQSLFGSRLPAVIGGSYTFVPTTISIILAGRFNDSSDPIERFK

SEQ ID NO: 60095 - protein, 64 aa, Gossypium hirsutum
  Clone ID: uC-gsronu33B141b08b1.pep
PQPKPKKKKKKKGGPPQGFVCFVFFFFGWLFFFFFFFFFFFFFFFFPFFFFFYTKSYLYQLLKL

SEQ ID NO: 60096 - protein, 84 aa, Gossypium hirsutum
  Clone ID: uC-gsflnu33B133e12b1.pep
FCVISTCKVQGSINEMLLQNKALLCPSHHSMVGSFGDAILLFNRLSFGIRLQNIFKWISAADNGLNDKCIQFIKPLVREIYLCK

SEQ ID NO: 60097 - protein, 43 aa, Gossypium hirsutum
  Clone ID: LIB3148-038-Q1-K1-H3.pep
LEFLWIMAGTKSLNKQTQFALLLSTLLKLLYAFGFMMYYLFGS

SEQ ID NO: 60098 - protein, 275 aa, Gossypium hirsutum
  unsure (1)..(275): unsure at all Xaa locations
  Clone ID: GOSHI-09MAY01-C1810_2.pep
NPNPVSLNQINGVDAQWGRSGNVTKRSNKYLKEALFQRLFKEGGSEIXVRQQLNHFLKSSKRVYKWEVNETLKKLRHRKLYFPALKLSEMMATKRGMNKTVSDQAIHLDLVAKAQGIPAAENYFVDLPEALKNHLTYGALLNCYSKELMTEKAEALMEKMKELNLPLSSMSYNSLMTLYTKIGQPERVLEIIQEMKSCSVIPDSYTYNVWMRALAAMNDISGVERVIEEMKRDAEDADDWTTYSNIASIYVDAGLFEKAEKALKGIEKRNAHRNL

SEQ ID NO: 60099 - protein, 222 aa, Gossypium hirsutum
  unsure (1)..(222): unsure at all Xaa locations
  Clone ID: GOSHI-09MAY01-C1810_1.pep
MGAAMNDIPGVEXVIEEMGRDAEDPDDWTTYTNIPAVYVDPGLFEKAEKALXELEKRNAHRNLSAFQFLITLYGRIGNLHEVYRIWRSLRLSFHKTANISYLNMIQVLINLKDLPGAEKCFREWESDCSTYDIRIANVLIGAYAKEGLLKSSXKLKRRPVKKGQPNGQTWEIXFWDYYLKIGDTSLAVDCVGHCHFPWAEEDWRKCGSLPPEAFGEGVNLSF

SEQ ID NO: 60100 - protein, 193 aa, Gossypium hirsutum
  unsure (1)..(193): unsure at all Xaa locations
  Clone ID: GOSHI-09MAY01-C1800_3.pep
MFLVDWFYGILASLGLWQKEAKILFLGLDNAGKTTLLHMLKDERLVQHQPTQYPTSEELSIGKIKSKAFDLGGHQIARRVWKDYYAXVDAVVYLVDAYDKERFAESKKELDALLSDEALANVPFLILGNKIDIPYAASEDEVRYHLGLTNFTTGKGKVNLADSNVRPLEVFMCSIVRKMGYGNGFKWMSQYIK

SEQ ID NO: 60101 - protein, 194 aa, Gossypium hirsutum
  unsure (1)..(194): unsure at all Xaa locations
  Clone ID: GOSHI-09MAY01-C1800_2.pep
MFLVDWFYGVLASLGLWQKEAKILFLGLDNAXGKTTLLHMLKDERLVQHQPTQYPTSEELSMGKIKFKAFDLGGHLIARRVWKDYYAKVDAVVYLVDAYDKERFAESKKELDALLSDEALANVPFLILGNKIDIPYAASEDELRYHLGLXNFTTGKGKVNLADSNVRPLEVFMCSIVRKMGYGDGFKWMSQYIN

SEQ ID NO: 60102 - protein, 193 aa, Gossypium hirsutum
  Clone ID: GOSHI-09MAY01-C1800_1.pep
MFLLDWFYGVLASLGLWQKEAKILFLGLDNAGKTTLLHMLKDERLVQHQPTQYPTSEELNIGKIKFKAFDLGGHQIARRVWKDYYAKVDAVVYLVDAYDKERFAESKKELDALLSDEALANVPFLILGNKIDIPYAASEDELRYHLGLTNFTTGEGKVNLADSNVRPLEVFMCSIVRKMGYGDGFKWMSQYIK

SEQ ID NO: 60103 - protein, 89 aa, Gossypium hirsutum
  Clone ID: LIB3583-061-P1-K1-B5.pep
MFLLDWFYGVLASLGLWQKEAKILFLGLDNAGKTTLLHMLKDERLVQHQPTQYPTSEELNIGKIKFKAFDLGGHQIARRVWKDYYAKVA

SEQ ID NO: 60104 - protein, 33 aa, Gossypium hirsutum
  Clone ID: LIB3149-003-P1-K1-H5.pep
RSSSNFLGGFNNAGKTTLLHMLKDERLVQHQPT

SEQ ID NO: 60105 - protein, 130 aa, Gossypium hirsutum
  unsure (1)..(130): unsure at all Xaa locations
  Clone ID: GOSHI-09MAY01-C1820_4.pep
MVLKTELCRFSGAMIYPGKGMRFVRGDSQVLLFSNXKCRRYFHIPLXPSKLTWTAMGRKLHMKDVAQYAVKNRRRASNNPYSRSIVGASLEVIHKKISEKPEVRDAASEAALREIMERKKRRKTMKLRKR

SEQ ID NO: 60106 - protein, 164 aa, Gossypium hirsutum
  Clone ID: GOSHI-09MAY01-C1820_2.pep
MVLKTELCRFSGAKIYPGKGIRFVRGDSQVFLFSNSKCKRYFHNRLKPSKLTWTAMYRKQHKKDIAQEAVKKRRRTAKKPYSRSIVGATLEVIQKKRSEKPEVRDAAREAALREIKERIKKTKDEKKAKKAEVAAKQQKTQGKGNLPKGGAPKGPKLGGGGGKR

SEQ ID NO: 60107 - protein, 164 aa, Gossypium hirsutum
  Clone ID: GOSHI-09MAY01-C1820_1.pep
MVLKTELCRFSGAKIYPGKGIRFVRGDSQVFLFSNSKCKRYFHNRLKPSKLTWTAMYRKQHKKDIAQEAVKKRRRAAKKPYSRSIVGATLEVIQKKRSEKPEVRDAAREAALREIKERIKKTKDEKKAKKAEVAAKQQKTQGKGNVPKGGAPKGPKLGGGGGKR

SEQ ID NO: 60108 - protein, 51 aa, Gossypium hirsutum
  Clone ID: LIB3148-023-Q1-K1-H12.pep
REIKERIKKTKDEKKAKKAEVAAKQQKTQGKGNIPKGGAPKGAKLGGGGKR

SEQ ID NO: 60109 - protein, 60 aa, Gossypium hirsutum
  unsure (1)..(60): unsure at all Xaa locations
  Clone ID: LIB3197-033-Q1-M1-A6.pep
MVLKTGLCRFSGAKIYXPGKGIRFIRSDSQVFFFSNSKCKRYLHNRLSHQNYMAAIIGAH

SEQ ID NO: 60110 - protein, 325 aa, Gossypium hirsutum
  Clone ID: GOSHI-09MAY01-C1590_1.pep
MGGWAIAVHGGAGVDPNLPNERQEEAKRLLNRCLDIGISALRSNLSAIDVVELVVRELETDPLFNSGRGSALTEKGTVEMEASIMDGPKRRCGAVSGLTTVKNPISLARLVMDKTPHSYLGFAGAEEFARKQGVELVDNEYFITEDNVGMLKLAKEANSILFDYRIPTLTTCGGSAAMENQLQMNGLPISLYAPETVGCVVVDKQGHCAAATSTGGLMNKMTGRIGDSPLIGSGTYACDLVAVSCTGEGEAIIRSTLAREVAAVMEYKGLNLHEAVDYVIKTRLDEGKAGLIAVSKNGEVACGFNTTGMFRGCATEDGFMEVGVW

SEQ ID NO: 60111 - protein, 110 aa, Gossypium hirsutum
  unsure (1)..(110): unsure at all Xaa locations
  Clone ID: LIB3135-025-Q1-K1-H5.pep
LGITTVNNPISGAGLVMDKTPHSYMLLARAXEFASKLRLXSVDNEYFITXDNVGMLKVAKEANSMLFYYRILTLTSCGLCAYRENQSQMNDLPISLYALETVRFVVVDKQ

SEQ ID NO: 60112 - protein, 62 aa, Gossypium hirsutum
  Clone ID: LIB3148-007-Q1-K1-G2.pep
DQLCLHLVSLQLLNCMHDYIIQFIIHTILRAESRHHSLVLFLPNFSQSPEIAHIKYIQNRPS

SEQ ID NO: 60113 - protein, 55 aa, Gossypium hirsutum
  Clone ID: GOSHI-09MAY01-C1540_6.pep
KFQFQTNQADHNIKSKTHFPNRVQHQLHRRNLLTNLVKPENFSIHYLKQLNMHSS

SEQ ID NO: 60114 - protein, 197 aa, Gossypium hirsutum
  Clone ID: GOSHI-09MAY01-C1540_3.pep
MNGILVSVKPYPFEELEDDECISPALQNLFSASKVNNCMNWSGEINFRALKGMNSQSFRGAVLPKPNKPGRKKQKFDHAEPDSSVGREYDVYTNFRLYESASARKRTVTTEERERAINAAKSFEPMNPFCRVVLRPSYLYRGCIMYLPSCFAEKYLSGVSGFIKLQLPDGRQWPVRCRYRGGKAKFSQGWYEFTLEN

SEQ ID NO: 60115 - protein, 209 aa, Gossypium hirsutum
  unsure (1)..(209): unsure at all Xaa locations
  Clone ID: GOSHI-09MAY01-C1540_2.pep
MFGGSKLSNCINWGGDVARLNPKAVNNQPIRGSGAMKPEPKKRGRKRKFDPNVQDSSAGREDDADMRLRCYESASARKRTVTAEERERAINAAKAFEPTNPFCRVVLRPSYLYRGCIMYLPSCFAEKHLSGVSGFXIKLQLPDGRQWSVRCRYKGGKAKFSQGWYEFTLENNLGEGDVCVFELLRSREFVLKVTVFRVRESAGLMHRSQ

SEQ ID NO: 60116 - protein, 333 aa, Gossypium hirsutum
  Clone ID: GOSHI-09MAY01-C1540_1.pep
MPRPFFHKLILSTTLQDRKLRIPDNFIKKFRDELSVAAALTVPDGHVWRVGIKKVDNKAWFKEGWQEFVERYYIRVGYFLIFRYEGNSAFSVSIFDLYNSEINYQTNALVGTQYNLGRQYPFEELEDDECVSPALPNLFGGSKLNCINWSGEVNHHAPKELPKLKKPGRKKQKFEPSEEDSSLGHEDDMQMRNRFYESASARKRIVTAEERERAINAAKAFEPTNPFCRVVLRPSYLYRGCIMYLPSCFAEQHLSGVSGFIKLQLPDGRQRPVRCRYRGGRAKFSQGWYEFTLENNLGEGDVCVFELLRSREFVLKVTVFRVMESAGLMYRSQ

SEQ ID NO: 60117 - protein, 75 aa, Gossypium hirsutum
  Clone ID: LIB3146-019-Q1-K1-B7.pep
RDENAYVRVRCAPASERVIAANAGLELERIDHLWRVLLLPSYRYKRCIMYTPSCSDEKHISGVSDSIKLQLPDGR

SEQ ID NO: 60118 - protein, 142 aa, Gossypium hirsutum
  Clone ID: LIB3543-054-Q1-K6-E2.pep
AYSLYHPPRKETGIKKVDNKVWFQEGWQEFLERYYIRVGYVLVFRYEGNSAFSVSIFNLYNSEINYQTNALVGTQYNHGKQYPFEQLEDDECISPALQNLFGGSKLNNCINWGGDANLQTSKGVNNQPIRGMAFHFYAIELK

SEQ ID NO: 60119 - protein, 269 aa, Gossypium hirsutum
  unsure (1)..(269): unsure at all Xaa locations
  Clone ID: GOSHI-09MAY01-C1570_2.pep
AASDKKIKIGINGFGRIGRLVARVALQRNDVELVAVNDPFISTDYMTYMFKYDSVHGQWKHHDLKVKDSKTLLFGXKPVTVFGIRNPEEIPWAEAGAEFVVESTGVFTDKDKAAAHLKGGAKKVVISGPSKDAPMFVMGVNEKDYKPELDIVSNASSTTNCLAPLAKVIHDRFGIVEGLMTTIHAITATQKKVDGPVLSRYIFNLILISPFNIIPSSTGAAKAVGKVLPALNGKLTGMSFRVHTVDVSVVDLTVRLEKSASYDEIKAAI

SEQ ID NO: 60120 - protein, 237 aa, Gossypium hirsutum
  Clone ID: GOSHI-09MAY01-C1570_1.pep
MASDKKIKIGINGFGRIGRLVARVALQRNDVELVAVNDPFISTDYMTYMFKYDSVHGQWKHHDLKVKDSKTLLFGEKPVTVFGIRNPEEIPWAEAGAEFVVESTGVFTDKDKAAAHLKGGAKKVVISAPSKDAPMFVMGVNEKDYKPELDIVSNASCTTNCLAPLAKVIHDRFGIVEGLMTTVHAITATQKTVDGPSMKDWRGGRAASFNIIPSSTGAAKGCGILPHGTLNVSESTR

SEQ ID NO: 60121 - protein, 116 aa, Gossypium hirsutum
  unsure (1)..(116): unsure at all Xaa locations
  Clone ID: uC-gsflnu33B006f04b1.pep
STRTSTRSIVLNALESKYKPSYRGDGEEEKRSCLTDYITRLESKYKPGYGGNDVEVKTANDSFITTDYMRYIVKYYSVHGXWKHHDLKVKDSKTLLFGEKPVTVFGIRNPEEIFMG

SEQ ID NO: 60122 - protein, 113 aa, Gossypium hirsutum
  Clone ID: LIB3135-038-Q1-K1-A12.pep
HAFGHAFGHAFAHAYVHASEGGAKKGVISAPSKDAPMFVMGANEKDYKPELDIVFNASCTTNCLAPLGKVIHDRFGIGEGLMTTDHAITATQKTVDGPSMKDWRSGRAAFFNI

SEQ ID NO: 60123 - protein, 212 aa, Gossypium hirsutum
  Clone ID: GOSHI-09MAY01-C1500_2.pep
FSMLSCMTGLSSTSPASLVSTGGTFAASNESSTFWLEDNSGEPDGFPPLSSVIPWSATSTAPPTVESLVSSCPVSFDSTSVESSDTTVVSAADNSSVSLALVWSNSKDGETFSSVSLSSNSATSESPNFSTDGSVSSVKETPTDSETTFSSTDSETSFSSELSSLSELLLLELESSSPPFTTPNSSLFSSSCTCTFWESSTSRFPFEYSSIW

SEQ ID NO: 60124 - protein, 127 aa, Gossypium hirsutum
  Clone ID: GOSHI-09MAY01-C1500_1.pep
DSTCGESSDTTVVSAADNSSVSLALVWSNSKDGETFSSVSLSSNSATSESPNFSTDGSVSSVKETPTDSETSFSSELSSLSELLLLELESSSPPLTTPNSSLFSSSCTCSFWESSTSRVPFEYSSIW

SEQ ID NO: 60125 - protein, 145 aa, Gossypium hirsutum
  Clone ID: GOSHI-09MAY01-C1520_3.pep
LGTFDYKGAGVAFDGFAACLAGTAISNGLIMMRKKMDPSFETPNKPPPTLLNAFTWATHMGVSSNLRYQTLNGVEFLLAKGLPPLAFKSSVVVLRCLNNVLGGMTFVILAKFTGSQSVEQKPPNINKEKKSVDGDSLDNSQSTFK

SEQ ID NO: 60126 - protein, 167 aa, Gossypium hirsutum
  Clone ID: GOSHI-09MAY01-C1520_2.pep
MAAMARYLFSDLPRQSPNMTDTCRLRSQPPHVVSFPRNQPFRFQCSQMSIPKLRISCGGGDGGNHGVGGSGGGGTGRGGGSNSSDDPWKRFGILGLFLSGWRDRVAADPQFPFKVLMEELVGVTACVLGDMASRPNFGLNELDFVFSTLVVGSIMNFTLMYLLAPTA

SEQ ID NO: 60127 - protein, 343 aa, Gossypium hirsutum
  Clone ID: GOSHI-09MAY01-C1520_1.pep
MAAIARYRFSDLTRQFPNTSGARPLKSQPPHVVSFPRNQPFRFQPSQISIPKLQFSCGGGDDGNHGVGGNGGGGKGDGGSNSNDDPWQRFGILGLLLSGWRDRVAADPQFPFKVLMEELVGVTACVVGDMASRPNFGLNELDFVFSTLVVGSILNFLLMYLLAPTASAASSSLPSIFANCPQSHMFEPGAFTLINRFGTFVYKGTVFAAVGLAAGLVGTAISNGLITMRKKMDPTFETPNKPPPTLLNAITWAIHMGVSSNFRYQTLNGIEFVLEKGLPPLAFKSSVVVLRCLNNVIGGMSFVILARMTGSQSVEQKPANIDKEKEMLMDGGVNMENNQSTFK

SEQ ID NO: 60128 - protein, 100 aa, Gossypium hirsutum
  Clone ID: LIB3189-014-P1-K1-C10.pep
GNKFDQVGESIHQMGAMARYLFSDLPRQSPNMTDTCRLRSQPPHVVSFPINQPFLFQLTLIFFLNFRIFFVVFCLFDSMFFFIYFLFFFILFCFCVFFNY

SEQ ID NO: 60129 - protein, 64 aa, Gossypium hirsutum
  Clone ID: LIB3189-011-P1-K1-D9.pep
GNKVHQITEASDQITAMARYLFSDLPRQSPNMTDTCRLISQPPNVVSLPINQPFRFQCSQMSIP

SEQ ID NO: 60130 - protein, 124 aa, Gossypium hirsutum
  Clone ID: GOSHI-09MAY01-C1480_1.pep
AMSMMGTIPLKRMDSRSQLECLKRCMDLIGNGASVFFFPEGTRSKDGKLGDFKKGAFSVAAKTRVPVVPITLIGTGGIMPAGMEGVVNSGSVKVIIHKPIKETDPEILRQIARNTILDTLKLRG

SEQ ID NO: 60131 - protein, 147 aa, Gossypium hirsutum
  unsure (1)..(147): unsure at all Xaa locations
  Clone ID: LIB3829-022-Q6-K6-E5.pep
LIGRSLKFISKTAIVVFPIIGWAMSMMGTIPLKRLXFVVSQLECLGGGGDLIGNGASVFFFPEGTRSKDGKLGDFKKGAFSVAAKTRVPVVPITLIGTGGIMPAGMEGVVNSGSVKVIIHKPIKETDPEILRQIARNTILDTLKLRG

SEQ ID NO: 60132 - protein, 112 aa, Gossypium hirsutum
  Clone ID: GOSHI-09MAY01-C1440_3.pep
NIEKSLAEAFQPLGISDWNSLFWIAHPGGPAILDQVEAKLALKSEKLRATRHVLSEYGNMSSACVLFILDEMRKKSKEDGLGTTGEGLEWGVLFGFGPGLTVETVVLHSISA

SEQ ID NO: 60133 - protein, 389 aa, Gossypium hirsutum
  Clone ID: GOSHI-09MAY01-C1440_2.pep
MVTVEEVRKAQRAEGPATVLAIGTSTPPNCVDQSTYPDYYFRITNSEHKTELKEKFKRMCEKSMIKKRYMYLTEEILKENPNVCEYMAPSLDARQDMVVVEVPRLGKEAATKAIKEWGQPKSKITHLVFCTTSGVDMPGADYQLTKLLGLRPSVKRLMMYQQGCFAGGTVLRVAKDLAENNKGARVLVVCSEITAVTFRGPSDTHLDSLVGQALFGDGAAAVIVGADPLAEIEKPMFELVSAAQTILPDSDGAIDGHLREVGLTFHLLKDVPGLISKNIEKSLAEAFQPLGISDWNSLFWIAHPGGPAILDQVEAKLALKPEKLRATRHVLSEYGNMSSACVLFILDEMRKKSKEDGLGTTGEGLEWGVLFGFGPGLTVETVVLHSISA

SEQ ID NO: 60134 - protein, 205 aa, Gossypium hirsutum
  Clone ID: GOSHI-09MAY01-C1440_1.pep
MLTVEEVRKAQRAEGPATVLAIGTSTPPNCVDQSTYPDYYFRITNSEHKTELKEKFKRMCEKSMIKKRYMYLTEEILKENPNVCEYMAPSLDARQDMVVVEVPKLGKEAATKAIKEWGQPKSKITHLVFCTTSGVDMPGADYQLTKLLGLRPSVKRLMMYQQGCFAGGTVLRVAKDLAENNKGARVLVVCSEITAVTFRGPSDTT

SEQ ID NO: 60135 - protein, 138 aa, Gossypium hirsutum
  unsure (1)..(138): unsure at all Xaa locations
  Clone ID: LIB3146-043-Q1-K1-D3.pep
HASANSEHKTELKEKFKRMCEKSMIKKRYMYLTEEILKENPNVCEYMAPSLDARQDMVVVEAXKAIKEWGQPKSKITHLVFCTTSGVDMPGADYQLTKLLGLRPSVKRLMMYQQGCFAGGTVLRVAKDLAENNKGARV

SEQ ID NO: 60136 - protein, 419 aa, Gossypium hirsutum
  Clone ID: GOSHI-09MAY01-C1460_1.pep
LSRVRPRVRAFTATVLSWAILEYGDQMAAVNQLEPAQQSLKWITDFLINAHPKDNVLYIQVGDPDLDHKCWERPENMKEKRPLTQVNITVPGTEVAAETAAAMASASLVFKTSNSAYSSTLLKHAKQLFNFADKYPASYSENIPEVATYYNSTGYGDELLWAASWLYHATGDRSYLDYATGENGKQFASWGSPTWFSWDNKNAGTQVLLSRLSLFGAKGVSGNSGLGNYRSSAEGVMCGLLPKSPSATSSRTDGGLVWISEWNALQHPVASAFLAALYSDYMLTSQTAKITCGDHSFKPSDLRKFAKSQADYVLGKNPLKMSFLLGYGDKYPQYVHHRGASIPADATTGCTDGFKWLDSTQPNPNVAVGGLVGGPFLNETYIDSRNNSMQAEPTTYNSALIVGLLSSLVTTSSAVKSFT

SEQ ID NO: 60137 - protein, 298 aa, Gossypium hirsutum
  unsure (1)..(298): unsure at all Xaa locations
  Clone ID: GOSHI-09MAY01-C1410_1.pep
VASDPSDANTNSTTLFSDDTDERSRKSSNPEMGISTHQEDESAAATVEPPQSDSPECRPDVPGISDRRTGQFSSVPKKSELKIGESSAFFTYVKSSAVKTSSTQVATPNHESAAQNKISEENLPQPGEQVVTDTRVHENGETWENNSQGDDFRSSSSVPDSLSLERSSTPASMEFSQQRDFKEDKFSPALVXSRNETQHDVSGLPTQSAYLHYMPGVLNQVMMPSSTQLFQNNLHDIHNHTSSPVVPQYNHLQQCLPHPHVSGMASFPYYPVNMCMQPGQMPTGHSWPSFGNSSSNEV

SEQ ID NO: 60138 - protein, 157 aa, Gossypium hirsutum
  unsure (1)..(157): unsure at all Xaa locations
  Clone ID: GOSHI-09MAY01-C1430_4.pep
LIAVEQLSDVKLNSRILQDSIVKQVNQNPKAGWEAALNPRFSNYTIGEFKHLLGVKPTPKKELLGVPILSHDKSLKLPTSFDARTAWPQCTSIGRILDQLTLCLGAXCGSSGAFGAVESLSDRFCIHFDMNISLSVNDLLACCGFLCGDGCDGGYPI

SEQ ID NO: 60139 - protein, 174 aa, Gossypium hirsutum
  Clone ID: GOSHI-09MAY01-C1430_3.pep
MKKMATPLLFFATFLVLRATGHPKVIAVGQPSEVKLNSRILQDSIVKLVNENPKAGWKAALNPRFSNYTVGEFKHILGVKPTPKKELLGIPIIRHDKSLKMPANFDARTAWPQCSTIGRILDQGHCGSCWALGAVESLSDRFCIHFGMNISLSVNDLLACCGFLCGSGCDGGVP

SEQ ID NO: 60140 - protein, 202 aa, Gossypium hirsutum
  Clone ID: GOSHI-09MAY01-C1430_2.pep
MASPPFFFATFLLLLATVHPKVIAVGQPSDVKLNSRILQDSIVKRVNENPKAGWEAALNPRFSNYTVGEFKHLLGVKPTPKKELLGVPILTHDKSLKLPASFDARTAWPQCTSIGRILDQGHCGSCWAFGAVESLSDRFCIHFDMNISLSVNDLLACCGFLCGDGCDGGYPISAWRYFVRSGVVTEECDPYFDDIGCSHPGC

SEQ ID NO: 60141 - protein, 187 aa, Gossypium hirsutum
  Clone ID: GOSHI-09MAY01-C1430_1.pep
MASPSFFFATFLLLLSTVHPKVIAVEQLSDVKLNSRILQDSIVKQVNKNPKAGWEAALNPRFSNYTIGEFKHLLGVKPTPKKELLGVPILTHDKSLKLPTSFDARTAWPQCTSIGRILDQGHCGSCWAFGAVESLSDRFCIHFDMNISLSVNDLLACCGFLCGSGCDGGAPISAWRFFVRRGVVVTG

SEQ ID NO: 60142 - protein, 151 aa, Gossypium hirsutum
  Clone ID: LIB3829-021-Q6-K6-A6.pep
KPQAGWKAALNPRFSNYTGGEFKHILGVKPTPKKELLGIPIIRHGKSLKMPANFDARTAWPQCSTIGRILDQGHCGSCWAFGAVESLSDRFCIHFGMNISLSVNDLLACCGFLCGSGCDGGVPISAWRYFVRSGVVSEECDPYFDDIGCSH

SEQ ID NO: 60143 - protein, 121 aa, Gossypium hirsutum
  Clone ID: LIB3825-027-Q6-K6-A8.pep
LIAVEQLSDVKLNSRILQDSIVKQVNQNPKAGWEAALNPRFSNYTIGEFKHLLGVKPTPKKELLGVPILSHDKSLKLPTSFDARAAWPQCTSIGRILGELCAGLLNFANFKQIGLMISFFL

SEQ ID NO: 60144 - protein, 55 aa, Gossypium hirsutum
  Clone ID: LIB3272-051-P1-K1-D1.pep
MLWGHCGSCWAFGAVESLSDRVCIHFDMNISLSVNDLLACWGFLCGDRCDGGYSI

SEQ ID NO: 60145 - protein, 163 aa, Gossypium hirsutum
  Clone ID: GOSHI-09MAY01-C1420_1.pep
QASALLLFNSSDRLSYSEIMTQLNLTDADVIRLLHSLSCAKYKILNKEPSTKTISSTDHFEFNSKFTDKMRRIKIPLPPLDEKKKVIEDVDKDRRYAIDASIVRIMKSRKVLGHQQLVMECVEQLGRMFKPDFKAIKKRIEDLITRDYLERDKDNPNTFRYLA

SEQ ID NO: 60146 - protein, 126 aa, Gossypium hirsutum
  Clone ID: GOSHI-09MAY01-C1770_1.pep
RDRALREWVLEETSENMHRSFGSGYPGDPETKAWLAHHKHSIFGFPTLVRFSWGTCTSYYKDMVEVLWESDKVDEDVGYGSSRKQLKLSNVGFGKAAKRKIEEIESSGKGRCKFFHSRKLEQLTHF

SEQ ID NO: 60147 - protein, 250 aa, Gossypium hirsutum
  Clone ID: GOSHI-09MAY01-C1720_1.pep
STWLQRTGHPIINFNQTGPLPEPFIKGLTTASLQGRAQIVPDIESPGNLVFYLDGAHSPESMEACARWFSLCTRDDNHLSNLNYQPQQHMDEGSKKDAPQILLFNCMSVRDPQLLLPRLMRTCASHGVCFQKALFVPNISVYHKVGSQALPTVDPQVDLSWQFGLQRAWESLMQSDKGVKPSNTDQACEEVKDDTGMRVTSFKNSSVFSSLPSAIKWLRDTAQKDRFVCFQVLVTGSLHLIGDVLRLIKK

SEQ ID NO: 60148 - protein, 131 aa, Gossypium hirsutum
  Clone ID: LIB3583-038-P1-K1-F4.pep
MDTNNHLHYHQQPTTNNNNPLPNLSHFLTPNTVVSTPVTSSSPNNIQNQARGSLKPGTIAAIAVADLAGISILGMIILYVYQLKKLKDHLDDPSTAATSCNVLKQPKVIVSKTNVELRTKMPPSPPSSSSS

SEQ ID NO: 60149 - protein, 143 aa, Gossypium hirsutum
  unsure (1)..(143): unsure at all Xaa locations
  Clone ID: LIB3582-025-P1-K1-F10.pep
LEDYIDSARSAFVLGRLISDNVLLAYEIFHTFQQKRIRKKKGFMALKLDMSKIYDRVEXRIFKGEMEQMGFARPGVETIMCCISSISYSMIMNGKFGKVFKPSKGLQXRDPLNLFLFLICREGVKKWLKIGSGLLLLVVGCWW

SEQ ID NO: 60150 - protein, 118 aa, Gossypium hirsutum
  Clone ID: GOSHI-09MAY01-C1640_1.pep
MVKRQPFLKEPSLEQRLEESKTILAKYPDRIPVIIERYSRTDLPVIEKNKILVPRDMLVGQFIHILSSRLHLSPGKALFVFVHNTLPQTASLMGCVYNSFKDDDGFLYMCYSTEKTFG

SEQ ID NO: 60151 - protein, 120 aa, Gossypium hirsutum
  Clone ID: LIB3582-025-P1-K1-E10.pep
MIMIMVFCFWFCFGFVFAEQRLEESKTILAKYPDRIPVIIERDSRTDLPVIEKNKILVPRDMLVGQFIHILSSRLHLSPGKALFVFVHNTLPQTASLMGCVYNSFKDDDGFLYMCYSTEK

SEQ ID NO: 60152 - protein, 193 aa, Gossypium hirsutum
  Clone ID: GOSHI-09MAY01-C1610_1.pep
MGSSSGQSSGSYDLSFKILLIGDSGVGKSSLLARFRSASAQDPAPTIGVDFKIKLLTVGGKRLKLTIWDTAGQERFRTLTSSYYRGAHGIILAYDVTRRETFTNLSDVWAKEVELYSTNQDCVKILVGNKVDRDSERAVTREEGVALAKELGCTFIECSAKTGQNVQQCFEDLSLKIMEVRSLLEKGRLVERT

SEQ ID NO: 60153 - protein, 66 aa, Gossypium hirsutum
  Clone ID: uC-gsronu33B179g07b1.pep
CFHGIILVYDVTLRETFTNLSDLWAKEVELYSTNQDCVKMLVGNKVDRVSLMFSFQFISAFYLTYL

SEQ ID NO: 60154 - protein, 155 aa, Gossypium hirsutum
  Clone ID: GOSHI-09MAY01-C1630_1.pep
MSRHPIVKWAQRLDDVFITIELPDAQDVKLKLDPEGKFFFSAKSGADKIPYEVDLDLHDKVDVDGSKASVGNRNICYLVKKAESKWWSRLLKQEGRPPVFLKVDWDRWVDEDEDDVDTKPAPDMDFGDFDFSKMNMGGGEGFGAVEGEDDDDSDT

SEQ ID NO: 60155 - protein, 306 aa, Gossypium hirsutum
  unsure (1)..(306): unsure at all Xaa locations
  Clone ID: GOSHI-09MAY01-C1180_1.pep
MEEKKGYKGNLVVSSNPKALPRSSFRQITAIRNHRNVKGAAGHVAIFLLKVAALETVRRVSKAKCPFLWRGFQALQVICYPPFNFVQKWVPFKGLVKGMQMLSRPLLVLSIATSLSDQEELVGEASVRRSGPLVNTESHSEEPSLQPALDASNHEASQNLECESWLGKLHKELENQGISLPESRPXIVVFXRINYEDLRRFYTAANGDFVVFLSSIKKTIKWRETYRILSPEELETWANMVFWHGYDLMHRPCLIVRLGLACSCLPSHDRPRFAQAVSMFLAPVVLFTFPFCCHLKFNETSSVIGF

SEQ ID NO: 60156 - protein, 157 aa, Gossypium hirsutum
  Clone ID: LIB3585-020-P1-K1-G8.pep
PRVRKWVPFKGLVKGMQMLSRPLLVLSIATSLSDQEELVGEASVRRSGPLVNTESHSEEPSLQTALDASNHEASQNLECESWLDKLHNELENQGISLPERINYEDLRRFYTAANGDFVVFLSSIKKTIKWRETYRILSPEELETWANMVFWHGYDLM

SEQ ID NO: 60157 - protein, 482 aa, Gossypium hirsutum
  Clone ID: GOSHI-09MAY01-C1150_1.pep
MVLSKTASETDVSVHSTFASRYVRTSLPRFKMPENSIPKEAAYQIINDELMLDGNPRLNLASFVTTWMEPECDKLIMDSINKNYVDMDEYPVTTELQNRCVNMIAHLFNAPLGESEAAVGVGTVGSSEAIMLAGLAFKRKWQNKRKAEGKPYDKPNIVTGANVQVCWEKFARYFEVELKEVKLREGYYVMDPVKAVEMVDENTICVAAILGSTLNGEFEDVKLLNDLLIKKNKETGWDTPIHVDAASGGFIAPFLYPELEWDFRLPLVKSINVSGHKYGLVYAGIGWVIWRSKENLPEELIFHINYLGADQPTFTLNFSKGSSQVIAQYYQLIRLGYEGYRNVMENCHENAIVLKEGLEKTGRFNIVSKDNGVPLVAFSLKDNKRHDEFEISEMLRRFGWIVPAYTMPADAQHITVLRVVIREDFSRTLAERLVIDIQKVLHELDTPPPAPLPFFLLIFSFCFSPCLFSPFFSSFSMLRKLA

SEQ ID NO: 60158 - protein, 156 aa, Gossypium hirsutum
  Clone ID: GOSHI-09MAY01-C1170_2.pep
YPGCTNMAYSKAIQDGVDVLDCPVQMTKDGIPICLGSINLIESTDIVRTGFSNLTTTVPEIMQSGRVGTYNLSWSDIKSLKPVISSPQSQYKLFRNPKFQNAGTYLQLSEFLSMANTTSSLNGVLISIEVGSCRSIFSSLYWCLCCSFIFYSHYWN

SEQ ID NO: 60159 - protein, 397 aa, Gossypium hirsutum
  unsure (1)..(397): unsure at all Xaa locations
  Clone ID: GOSHI-09MAY01-C1170_1.pep
INVASGDHPGCSSMAYTNAMQNGVYVLDCXVHTPRPGIPICLGSINLMESTXLVRTRFSNLTTTVPEIMQSSGIFTYNLSWSDIKSLKPVISSPQSQYKLFRNPKFQNAGKYLQLSEFLRMANTTSSLNGVLISIENAAYLAKQGFGVTDAVLKALNEAGYDKQTTQKVMIQSSSSSVLMKFKGKTNYQLVYKIDEDIGGAQSSTIDDIKRFASAVVISKDSVFPENSAFLARATDVVSRLQAANLSVLVQTFSNEFTSQAWDFFSDATVEINSFYAGAGINGVITDFPKTSDRYRRNRCLKRGNKTPIYMSPVQPGSLLQLVTTDYLPPAEAPKPYLTESDVVEPPLPPVAKTTSTSTPSGTVAAAPAPNGQPKVAASIIVPLMAVLLAMYYCFEI

SEQ ID NO: 60160 - protein, 70 aa, Gossypium hirsutum
  Clone ID: LIB3147-058-Q1-K1-F6.pep
PTRPEAPKPYLTESDVVEPPLPPVAKTTSISTPSGTVAAAPAPNGQPKVAASIIVPLMAMLLAMYYRFEI

SEQ ID NO: 60161 - protein, 55 aa, Gossypium hirsutum
  Clone ID: uC-gsflmaxxa047a08b1.pep
KELTLLFGGETTKKNWSLPRALHSCSKTFNLLNIMYKLQSMLRQLLFSTCYVSIL

SEQ ID NO: 60162 - protein, 271 aa, Gossypium hirsutum
  Clone ID: GOSHI-09MAY01-C1160_1.pep
MSTFPDSFTQLADDSLDSFDSVPHQDEDGAGYAGYDPSQQFDSFADHSDHAKGSTDDVFASDSYTNGVGFGQDFGGSDGPVLPPPAEIEPEEGVALREWRRENAIRLEEKDKREKELLSQIIEEADQYKVEFYKKREVTCENNKANNRDKEKIFVANHEKFHAEADKNYWKAIAELIPNEVPTIEKRRKKEEKKPAIVVVQGPKPGKPTDCSRMRQILVKLKHNTPSHLKHSPPPPPAAAAAKDQDAKTGNTSSVPAALPVTSTPEAVVAA

SEQ ID NO: 60163 - protein, 121 aa, Gossypium hirsutum
  unsure (1)..(121): unsure at all Xaa locations
  Clone ID: LIB3585-020-P1-K1-E8.pep
GRVGCDWKSSWDRRSITSFCILIFCSSSCRWWRRXNAIRLEEKEKREKELLSQIIEEADQYKVEFYKKREVTCENNKANNRDKEKIFVANHEKFHAEADKHYWKAIAELIPNEVPTIEKRG

SEQ ID NO: 60164 - protein, 521 aa, Gossypium hirsutum
  Clone ID: GOSHI-09MAY01-C1110_2.pep
LMSLQGSQMETDDPTTSYMLQAWARLCKCLGQDFLPYMSVVMPPLLQSAQLKPDVTITSADSDNDIEDSDDESMETITLGDKRIGIKTSVLEEKATACNMLCCYADELKEGFFPWIDQVAPTLVPLLKFYFHEEVRKAAVSAMPELLRSAKLAVEKGMAQGRNETYVKQLSDYIIPALVEALHKEPDTEICASMLDALNECVQISGPLLDESQVRSIVDEIKQVITASASRKSERAERAKAEDFDAEEGELIKEENEQEEEVFDQVGEILGTLIKTFKASFLPFFDELSSYLTPMWGKDKTPEERRIAICIFDDVAEQCREAALKYYDTYLPFILEACNDENPDVRQAAVYGLGVCTEFGGPVFKPLVGEALSRLNAVIWHPNALQPENVMAYDNAVSALGKICLFHRDSIDAAQIVPAWLNCLPIKGDLIEAKVVHEQLCSMVERSDSEVLGPNHQFLPKIVAVFAEVLCGKDLATEQTASRMVNLLRQLQQTLPPAALASTLSSLQPQQQLALQSILSS

SEQ ID NO: 60165 - protein, 389 aa, Gossypium hirsutum
  Clone ID: GOSHI-09MAY01-C1110_1.pep
AIAMRLVLDIEDDAACHTAEVEDDDAGETSNYAVGQECSDRLAISLGGNTIVPVASEQFSTYLAAPEWQKHHAALIALAQIAEGCSKVMVKNLEQVVSMVLNSFNHSHPRVRWAAINAIGQLSTDLGPVLQNQYHQRVLPALAAAMDDFHNPRVQAHAASAVLNFSENCTPEILTPYLDGIVSKLLVLLQNGKQMVQEGALTALASVADSSQEHFQKYYDAVMPYLKAILVNATDKSNRMLRAKSMECISLVGMAVGKEKFRDDAKQVMEVLMSLQGSQMETDDPTTSYMLQAWARLCKCLGQDFLPYMTVVMPPLLQSAQLKPDVTITSADSDNDIEDSDDESVETITLEAKKRIYSVCTTRYTGFRALFSVDLIDELKKLPCVRWVL

SEQ ID NO: 60166 - protein, 96 aa, Gossypium hirsutum
  Clone ID: AW187425.1.pep
IKGDLIKAKVVHEQLCSMVKRSDSEILGPNHQYLPKIVAVFAEVLCGKDLPTEQTASRMVNLLRQLQQTLPAATLASTWSSLQPQQQLALQSMLSS

SEQ ID NO: 60167 - protein, 73 aa, Gossypium hirsutum
  Clone ID: LIB3825-024-Q6-K6-E7.pep
MPHDTVRQHHQKYYDTYLPFILEACNDENPDVRQAAVYGLGVCAEFGGPVFKPLVGEALSRLNAVIQHPCFAT

SEQ ID NO: 60168 - protein, 153 aa, Gossypium hirsutum
  unsure (1)..(153): unsure at all Xaa locations
  Clone ID: GOSHI-09MAY01-C1130_1.pep
YSRAHRETCATVNVNDGTDVCSSVENGDLESAMVNRKSNAMGRKRKRELEETCQKVGSDGSIRSPCEGLRPRARKXHSSSFDADKASSEGLQTKETRKPSTHAHRKIIIEKGSHGCDLEGCHMSFKTYEELWLHKRHRCPYEGLGKKFRSHKM

SEQ ID NO: 60169 - protein, 187 aa, Gossypium hirsutum
  Clone ID: GOSHI-09MAY01-C1120_2.pep
MSEKRTEVMDHNHPPSDILKLDQSSSAGDLKFYGSTMPAPYDSLHQHDTFDASHPLPASVGSFLPQHLQPVQMHGSRWSVEEATSLANSLKGLKMLENGHLTKSQMEDNLGFSHPAAHSVAIQLPINVHASGMYCSRTKISETVMPSRINAIVSSEVAGDDLAARTTSASLVGMQKNPISRPVRHLG

SEQ ID NO: 60170 - protein, 383 aa, Gossypium hirsutum
  unsure (1)..(383): unsure at all Xaa locations
  Clone ID: GOSHI-09MAY01-C1120_1.pep
ALANVIRVDQKXVCFDSKAKKFLIGAEPSEDVTFSSSTSLATNGVGHETPSEKSVNIGNVQPIPQPRMVEEEDDDDEVIVFQPAVSEKRTEVVGPNWPPSEALKHDRSSAPGDVKFYGSTMSGPPASLHQHNTFDVSSPLPVSFGSIGPKLQQPVRMQSSGWSVEEATSLPTRPKGLTMLENGHLTKRRLQDNAGLSHPAARSVAIQQPINVHASGMYCSRTKISETVMPSRINAIVSSEVTGDDLAARTTSSSLVGMQKNPISRPVRHLGPPPGFSPVPLKALNESVSAVELRNPPMDDYSWLDGHQLASSLEGSTRESSLYYASHADPQHVNNRSNGFTGTVSFPFPGKQAPAVQFHMEKDKGWQDYHTLEHHHEQKSHQQ

SEQ ID NO: 60171 - protein, 70 aa, Gossypium hirsutum
  Clone ID: GOSHI-09MAY01-C1090_5.pep
GGRRKTRAPSPAGPAVGPNLGGSTKFSNEMRKKSREDGLQTTGEGLEWGVLFGFGPCLTVETVVLHSVAA

SEQ ID NO: 60172 - protein, 64 aa, Gossypium hirsutum
  Clone ID: GOSHI-09MAY01-C1090_4.pep
IKLNTFKNPHPYLFLLLFITLFFFFFFFYFFFFFFFFFFFFFFGRIVCKGTYYCHKFNISWYMN

SEQ ID NO: 60173 - protein, 223 aa, Gossypium hirsutum
  unsure (1)..(223): unsure at all Xaa locations
  Clone ID: GOSHI-09MAY01-C1090_3.pep
PGRPTPFAPRPSNPTGAGGLFVDHPGKKNGDRGKKFVRAQTCPRPLATVLAIGTXPPPFNCVDQSTYPGXCVSVSQIGEHENTELXKEKFKRMCEKSMIKKRYMYLTEEILKENPNVCEYMAPSLDARQDMVVVEVPKLGKEAATKAIKEWGQPKSKITHLVFCTTSGVDMPGADYQLTKLLGLRPSVKRLMMYQQGCFAGGTVLRVAKDLAENNKXARVLVV

SEQ ID NO: 60174 - protein, 211 aa, Gossypium hirsutum
  unsure (1)..(211): unsure at all Xaa locations
  Clone ID: GOSHI-09MAY01-C1090_2.pep
PASDPRPPPARPASAMIKKRYMYLTEEILKENPNVCEYMAPSLDARQDMVVVEVPKLGXRAATKAIKEWGQPKSKITHLVFCTTSGVDMPGADYQLTKLLGLRPSVKRLMMYQQGCFAGGTVLRVAKDLAENNKGARVLVVCSEITAVTFRGPSDTHLDSLVGQALFGDGAAAVIIGADPMPEIEKPMFEIVSVAQTILPDSDGAIDGHLR

SEQ ID NO: 60175 - protein, 389 aa, Gossypium hirsutum
  Clone ID: GOSHI-09MAY01-C1090_1.pep
MVTVEEVRKAQRAQGPATVLAIGTSTPPNCVDQSTYPDYYFRITNSEHKTELKEKFKRMCEKSMIKKRYMYLTEEILKENPNVCEYMAPSLDARQDMVVVEVPKLGKEAATKAIKEWGQPKSKITHLVFCTTSGVDMPGADYQLTKLLGLRPSVKRLMMYQQGCFAGGTVLRVAKDLAENNKGARVLVVCSEITAVTFRGPSDTHLDSLVGQALFGDGAAAVIIGADPVPEIEKPMFELVSAAQTILPDSDGAIDGHLREVGLTFHLLKDVPGLISKNIEKSLVEAFQPLGISDWNSLFWIAHPGGPAILDQVEAKLALKPEKLRATRHVLSEYGNMSSACVLFILDEMRKKSREDGLQTTGEGLEWGVLFGFGPGLTVETVVLHSVAA

SEQ ID NO: 60176 - protein, 126 aa, Gossypium hirsutum
  unsure (1)..(126): unsure at all Xaa locations
  Clone ID: LIB3166-010-P1-K1-B11.pep
ARYGGSLGAKARQRSGRGLPLRSENNKCARVLVVCSEITAVTFRGPSDTHLDSLVXQALFGDGASAVIIFADPVPEIVKPMFELFSSSQTILPDSDGAIDGHLFEVCLTFYLLKDFSVLISKNIEN

SEQ ID NO: 60177 - protein, 96 aa, Gossypium hirsutum
  Clone ID: LIB3148-014-Q1-K1-F7.pep
DWNSLFWIAHPGGPAILDQVEAKLALKPEKLRATRHVLSEYGNMSSAWVLFILDEMRKKSREDGLQTTREGLEWGVLFGFGPGLTVETVVLHSVAA

SEQ ID NO: 60178 - protein, 53 aa, Gossypium hirsutum
  unsure (1)..(53): unsure at all Xaa locations
  Clone ID: LIB3146-021-Q1-K1-F5.pep
AXIPGRPPSGKIREDGLTQQCKDWLGSAFGFRPGLLLNCVLHNVLFKENKHAF

SEQ ID NO: 60179 - protein, 74 aa, Gossypium hirsutum
  unsure (1)..(74): unsure at all Xaa locations
  Clone ID: LIB3829-002-Q1-K6-B3.pep
QLSPTVQLHTHHHWLFLIIRKRMVTVEEVRKAQRAQGPATVLAIGTSTXAXNLWFXXXPXXXXXXXPPPPPFFF

SEQ ID NO: 60180 - protein, 212 aa, Gossypium hirsutum
  Clone ID: GOSHI-09MAY01-C1050_2.pep
MGSVVEKSALIICGDYMEDFEVMVPFQVLQAFGVRVDCVSPTKLPGQKCFTAIHVSLGFEHYSELPGHLFTLNSNFNEVEVGCYDALVIPGGRFSEHFSVDERVLSIVKAFAEAGKPIVTTCHSQLILAAAGLLKGKKCTAFASMKPVIELAGGIWWEQPGITSPFDITACLKDGNILSSIGWPAHAEILKTLFESMGARIHTTMANSVLFL

SEQ ID NO: 60181 - protein, 368 aa, Gossypium hirsutum
  Clone ID: GOSHI-09MAY01-C1050_1.pep
GPDSRVAPRFPRVRPASAWSKCFTAIHVSLGFEHYSELPGHLFTLNSNFNEVEVGCYDALVIPGGRFSEHFSVDERVLSIVKAFAEAGKPIVTTCHSQLILAAAGLLKGKKCTAFASMKPVIELAGGIWWEQPGITSPFDITACLKDGNILSSIGWPAHAEILKTLFESMGARIHTTKANSVLFLCGDYVEDYEFNVPFRALQALGCKVDAVTPSKKKGETCVTAIHDDEGAQAFSEKRGHNLVITANWSDVSVYDYDCLVVPGGRSPELLVMNDKAVTLVKEFAERNRVIAGVGQGQWLLAAAGVLKGKRCASGDGMKVMVKMGGGELEESKGCVSDGKLVTAVGWPALPYFISHLSKLLGLSLSFE

SEQ ID NO: 60182 - protein, 162 aa, Gossypium hirsutum
  Clone ID: LIB3829-028-Q6-K6-G11.pep
GLCCGETALIICGDYMEDFEVMVPFQVLQAFGVRVDCVSPTKLPGQKCFTAIHVSLGFEHYSELPGHLFTLNSNFNEVEVGCYDALVIPGGRFSEHFSVDERVLSIVKAFAEAGKPIVTTCHSQLILAAAGLLKGKKCTAFASMKPVIELAGGIWWEQPGIT

SEQ ID NO: 60183 - protein, 54 aa, Gossypium hirsutum
  Clone ID: LIB3543-064-Q6-K6-B1.pep
INGITSSSWNFVSSSFSKEIGFILNPDGRLFGWPALPYFISHLSKLLGLSLSFE

SEQ ID NO: 60184 - protein, 163 aa, Gossypium hirsutum
  Clone ID: GOSHI-09MAY01-C1040_7.pep
SIDGRPRVRDAETRLEHVVVDKEKEEKKWMKIKEVSHEWSLVNKQKPIWMRKPEEITKEEYAAFYKSLTNDWEEHLAFKHFSFLGLLVLLCFFYYFFYLFFFFIFIFFFIFYIILYLFFFFFFFYILCFIYYGIFFFYFFFLFFLFYFFIFIFCFLFFIIFFL

SEQ ID NO: 60185 - protein, 368 aa, Gossypium hirsutum
  unsure (1)..(368): unsure at all Xaa locations
  Clone ID: GOSHI-09MAY01-C1040_6.pep
MMYLKLRSDLCVKGHVSDSNRTVPFVTCSRSKCCAHNKTLKVIRKNLVKXKCIELFFEIAEHMEDYNKFYEAFSKNLKLGIHEDSQNRTKIAELLRYHSTKSGDEMTSLKDYVTRMKDGQNDIYYITGESKKAAENSPFLEKLKKKGYQVLYMADAMGEYXVGQLMEFVGKKLVSATKEGLKLDESEDEKKKKEALKEKFEGLCKHILDDLAKTLKDVLGDKVEKVVVSDRVVDSPCWLVTGEFGWTANMERIMKAQALRDNSMAGYMSSKKTMEINPENPIMEELRKRADADKYDLSVKDLGLLLCETALLTSGFSLDDPNTFGNRIHRMLKLGLSIDEDAGDADADADMPPLEDADGEGSKMEEVD

SEQ ID NO: 60186 - protein, 96 aa, Gossypium hirsutum
  Clone ID: GOSHI-09MAY01-C1040_5.pep
PRVRNPENPIMEELRKRADADKNDKSVKDLVLLLLRTALLTSGFSLDDPNTFGNRIQRMLKLGLSIDEDAGDADADSEMPPFEDADAEGSKMEEVD

SEQ ID NO: 60187 - protein, 271 aa, Gossypium hirsutum
  Clone ID: GOSHI-09MAY01-C1040_3.pep
NCRELLRYHSTKSGDEMTSLKDYVTRMKEGQNDIYYITGESKKAVENSPFLEKLKKKGYEVLYMVDAIDEYAVGQLKEFEGKKLVSATKEGLKLDESEDEKKKKEALKEKFEGLCKVIKDVLGDKVEKAVASDRVVDSPCCLVTGEYGWTANMERIMKAQALRDNSMAGYMSSKKTMEINPENPIMEELRKRADAEKNDKSVKDLVLLLFETALLTSGFSLDEPNTFGNRIHRMLKLGLSIDEDAGEGEADADMPPLEDADAEGSKMEEVD

SEQ ID NO: 60188 - protein, 178 aa, Gossypium hirsutum
  Clone ID: GOSHI-09MAY01-C1040_2.pep
MPPLEDADAEGSKMEEKFEGLCKVIKDVLGDKVEKVVVSDRVVDSPSCLVTGEYGWTANMERIMKAQALRDNSMAGYMSSKKTMEINPENPIMEELRKRADAEKNDKSVKDLVLLLFETALLTSGFSLDEPNTFGNRIHRMLKLGLSIDEDAGEGEGDADMPPLEDADAEGSKMEEVD

SEQ ID NO: 60189 - protein, 592 aa, Gossypium hirsutum
  Clone ID: GOSHI-09MAY01-C1040_1.pep
ALAAGADVSMIGQFGVGFYSAYLVAEKVIVTTKHNDDEQYVWESQAGGSFTVTRDTSGENIGRGTKITLFLKEDQLEYLEERRLKDLIKKHSEFISYPISLWIEKTTEKEISDDEDEEDKKDEEGKVEDVDEEKEKEEKKKKKIKEVSHEWSLVNKQKPIWMRKPEEITKEEYAAFYKSLTNDWEEHLAVKHFSVEGQLEFKAVLFVPKRAPFDLFDTRKKPNNIKLYVRRVFIMDNCEELIPEFLSFVKGIVDSEDLPLNISREMLQQNKILKVIRKNLVKKCIELFFEIAENKEDYNKFYEAFSKNLKLGIHEDSQNRTKIAELLRYHSTKSGDELTSLKDYVTRMKEGQNDIYYITGESKKAVENSPFLEKLKKKGYEVLYMVDAIDEYAVGQLKEFEGKKLVSATKEGLKLDESEDEKKKKEALKEKFEGLCKVIKDVLGDKVEKVVVSDRVVDSPCCLVTGEYGWTANMERIMKAQALRDNSMAGYMSSKKTMEINPENPIMEELRKRADADKNDKSVKDLVLLLFETALLTSGFSLDDPNTFGNRIHRMLKLGLSIDEDAGEAEADADMPPLEDADAEGSKMEEVD

SEQ ID NO: 60190 - protein, 147 aa, Gossypium hirsutum
  unsure (1)..(147): unsure at all Xaa locations
  Clone ID: uC-gsronu33B027f06b1.pep
LTHEQEKDVDKLITRLVTKEEAHVALMELMKWRSEGLEPLYAQAVQVKQRDSVTGKLKIANPQSSRLVWETCLSEYKSLGKVAVRLIFLHATCXGFKRNWSLMKWYLCTXHSRIGLERAQKMIFIAAHSKLGRXDFANEEEKYADLL

SEQ ID NO: 60191 - protein, 138 aa, Gossypium hirsutum
  unsure (1)..(138): unsure at all Xaa locations
  Clone ID: uC-gsflnu33B088h09b1.pep
KAQALRDNSMAGYMSCKKTMEINPENPIMEELRKRADADKNDKSVKDLVLLLLETALLTSGFSLDDPNTFGNRIHRMLKLGLSIDEDAGEAEADAXDMPPLEDADAVCSKILEVALFYPCPLLPLLNLSFPPFGYFLI

SEQ ID NO: 60192 - protein, 59 aa, Gossypium hirsutum
  Clone ID: uC-gsronu33B172b05b1.pep
LILDFSGKYLPPFKCLTHEQEKDVDKLITRLVTKEEAHVALMELMKWRSEGLEPLYAQA

SEQ ID NO: 60193 - protein, 120 aa, Gossypium hirsutum
  Clone ID: uC-gsronu33B028a10b1.pep
FKEALKEKFEGLCKVIKDVLGDKVEKVVVSDRVVDSPCCLVTGEYGWTANMERIMKAQALRDNSMAGYMSSKKTMEIIPENPIMEELRKRAVAEKNDKSVKDLVLLLFVTVLLTFCFSLD

SEQ ID NO: 60194 - protein, 137 aa, Gossypium hirsutum
  Clone ID: LIB3165-007-P1-K1-F4.pep
NSGADHASADASAHASVLVVSGFLIQVGKPEEITKEEYAAFYKSLTNDWEEHLAVKHFSVEGQLEFKAVLFVPKRAPFDLFDTRKKPNNIKLYVRRVFIMDNCEELIPEFLSFVKGIVDSEDLSLNILREMLQQNKI

SEQ ID NO: 60195 - protein, 93 aa, Gossypium hirsutum
  Clone ID: uC-gsronu33B061e09b1.pep
TMEINPENPIMEELRKRADAEKNDKSVKDLVLLLFETALLTSGFSLDEPNTFGNRIHRMLKLGLSIDEAAGEGEGDADMPPLEDADAQGCMTV

SEQ ID NO: 60196 - protein, 73 aa, Gossypium hirsutum
  Clone ID: LIB3148-055-Q1-K1-A1.pep
PTRPPTRPPTRPPTRPPTRPATRPPTRAPTRPALTRMQVKLKLMLICPHWRMLMPKAARWRKLIKPNMFLYEL

SEQ ID NO: 60197 - protein, 240 aa, Gossypium hirsutum
  unsure (1)..(240): unsure at all Xaa locations
  Clone ID: GOSHI-09MAY01-C1070_2.pep
PRAGTRLGNRAVPEEDNLQSCLNAYFGPEVSRIRDQVDSLCQSILEDLWSGLESSKVSVRLKDLVPYLQDKCYECVSAILKELQTELDILYTAIGSEHNEGNSMSPSIIVEISLFIGRLLFAFENHSKHIPVVLGSPRFWVKYTAPAIFEKLPSLLWQSKAVNGSPFSDSLGRQMLTSSQRQSSSPTAALLGANESASPKLDYLWKVMRELCVRAYXLMDVVVSDELSVILSRELGQDDG

SEQ ID NO: 60198 - protein, 186 aa, Gossypium hirsutum
  Clone ID: AW186641.1.pep
NAYFGPEVSRIRDQVDSLCQSVLEDLLSFLESSKVSVRLKDLVPYLQDKCYESLSTIMKELKTELDILYTAIGSEPPSIIVEISLFIGRLLFAFENHSKHIPVILGSPRFWVKYTAPAIFEKLPSLLWQSKAVNSSPFSDSLGRQMLTISQRQSSYATAALLGANESASPKLDDLWKVMRELCVRA

SEQ ID NO: 60199 - protein, 209 aa, Gossypium hirsutum
  unsure (1)..(209): unsure at all Xaa locations
  Clone ID: GOSHI-09MAY01-C1060_1.pep
MSVKECGNHGKYRRKIFRRIIAGILIFIIIVLITILLIWAILRPSKPRFILQDTTVYAFNASTPNLLTSNFQVTLSSRNPNDRIGIYYDRLDVYATYQNQQITLRTSIPPTYQGHKEINVWSPFVNGNSVPIAPEYSASLGSDQSAGSVFLMIKIDGRVRWKXGTFISGRYHLYVRCPAFITFGSKSNGVSVGDNAIKLQLVTKCSVSV

SEQ ID NO: 60200 - protein, 135 aa, Gossypium hirsutum
  Clone ID: LIB3584-053-P1-K2-E8.pep
MSVKECGNHGKYRRKIFRRVIAGILIFILMVLITILVIWAILRSSRPRFILQDTTVYAFNAWTTNLLTYNFQVTLSSRNPNDRIGIYYDRLDVYATYQNQQMTLRTAMPATYQGHKEINVWSPFVNGNSVPIAPE

SEQ ID NO: 60201 - protein, 141 aa, Gossypium hirsutum
  unsure (1)..(141): unsure at all Xaa locations
  Clone ID: LIB3189-025-P1-K1-B5.pep
GLGTGRLDIYFISTISLKEFVNHGKYLRKIFRRIIAGILIFIIIVLITILLIWAILRPSKPKFILQDTTVYAFNAFTPNLLTSNFQVTXSSRNPNDRIGIYYDRLDVYATYQNQQITLRTFIPXTYQGHKEINVWSPFVNG

SEQ ID NO: 60202 - protein, 282 aa, Gossypium hirsutum
  unsure (1)..(282): unsure at all Xaa locations
  Clone ID: GOSHI-09MAY01-C1010_2.pep
MWAERIPFSSNVXLMHVSYARMNITSKLALESGMXPLILVAHRQIFATXLAIGASDFFLERKTRPTLTMPILFQIFLCSLTGATANQVFYFVGLQNTTATIACALNNVLPAATFLLAAICWQEAEEIMLASRLAIVIGSLVXVGGAMXLSFYQGHIISIRESCIHWNYANKKANSSPSPRGSNFFLSPFLRKARASCXALWFIIQGQTSKSFPAPYTSTTLMSFMASIVCTIIGIFSDPKPSAWSXSSSMKLIAALYAGIICNAVAFCVMSWSIQKRGPLYV

SEQ ID NO: 60203 - protein, 376 aa, Gossypium hirsutum
  Clone ID: GOSHI-09MAY01-C1010_1.pep
MLADFMPFLANVLLQVGYAGMNITSKLALESGMKPLILVAYRQIFATLAIAPFAFFLERKTRPKLTMPILFQIFLCSLTGATANQVFYFVGLQNTTATIACALNNVLPAATFLLAAICRQEAVGIKKASGQAKVIGTLVCVGGAMLLSFYHGHIIGIGESSIHWNYANKMANSSPSPSGSNFFLGPFLGMASAVAWALWFIIQGQTSKSFPAPYTSTTLIPASASIECTIIGIFSDPKPSAWSLSSSMRLIAALYAGIICNAVAFCVMSWCIQKRGPLYVSVFSPLLLVIVAILSWALLREKLYVGTVVGSLLIVGGLYAVLWGKDKEMKQMKGNEKGGGGGEQVVVEEGAVEVTKAGDRDHDLEMQSQQGGGARG

SEQ ID NO: 60204 - protein, 161 aa, Gossypium hirsutum
  Clone ID: GOSHI-09MAY01-C1020_3.pep
MADRDRDPDRNQPQEIQLLHPPPHYRQTEPSSTQIVAVLTLLPVGGSLLALAALTLTGTLIGLSIAIPLFIIFSPVIVPATIAISMAVAGFLSSGAFGLTGLSSLNYGLKHMIRANAGAGVGKGQAKRGMWDMVGYVGQKTKDVGQNMENKAHEGGGAVRT

SEQ ID NO: 60205 - protein, 164 aa, Gossypium hirsutum
  Clone ID: GOSHI-09MAY01-C1020_2.pep
MKEYYYFSFSSSMADRDRDRNQPQEIQLLHPPPHYRQTGPSTTQIVAVLTLLPVGGSLLALAALTLTGTLIGLSIAIPLFIIFSPVIVPATIAISMAVAGFLSSGAFGLTGLSSLNYGLKRMIRANAGAGVGKGQAKRGMWDMVGYVGQNMENKAHEGGGAVRT

SEQ ID NO: 60206 - protein, 150 aa, Gossypium hirsutum
  Clone ID: GOSHI-09MAY01-C1020_1.pep
MPINDQNRPMAQKLYDSAPSSRQVAKFLTASTLGATLLFLSGLTLTGTVIALIIATPLMVIFSPVLVPAGITIFLVTTGFLFSGGCGVAALTALSWIYNYVQGKHPPGADQLDYARNKLASTARDMTEKAKEYGQYVQHKAQEVTQGQAS

SEQ ID NO: 60207 - protein, 68 aa, Gossypium hirsutum
  Clone ID: LIB3583-029-Q6-K1-B5.pep
KGPPFFFFFFFFGFFFFFFFFFFFFFFFFFFFFFFFFFFYNNKHKISFRVTNTKTSKYISLIQIYDSN

SEQ ID NO: 60208 - protein, 88 aa, Gossypium hirsutum
  Clone ID: uC-gsflnu33B060g06b1.pep
HASAFLFHHSWLTETVTGDRNQPQEIQLLDPPPHYRQTEPSSTQIGAELTLLPVGGSLVVLAALTLTLPLNPGSCITIHPINALEQMP

SEQ ID NO: 60209 - protein, 453 aa, Gossypium hirsutum
  Clone ID: GOSHI-09MAY01-C1380_1.pep
MPTDTSKPMKLERYNSYIRKVHSTKLLNASSKFLFRVTLLIALVLILFFTINYPPLSDNTHSAPHHHHRHSFLSTSLFSGSSLVGGAAWEKQVRHSSTPRRVNGFSVLVTGAAGFIGSHCSLALKKRGDGVLGLDNFNDYYDPSLKRARQNLLSKHQIFIVEGDLNDGPLLTKLFDVVPFTHVLHLAAQAGVRYAMQNPQSYVKSNIAGFVNLLEVAKAVNPQPAIVWASSSSVYGLNTENPFSERDRTDRPASLYAATKKAGEEIAHTYNHIYGLSLTGLRFFTVYGPWGRPDMAYFFFTKDILQGKPIDIYRTQDQKAVARDFTYIDDVVKGCLGALDTAEKSTGSGGKKKGPAQLRVYNLGNTSPVPVGRLVSILEGLLNTKAKKHVISLPRNGDVPYTHANVTLAYKDFGYKPTTDLAAGLRKFVKWYVSYFGIESKRSKETQHFDESS

SEQ ID NO: 60210 - protein, 170 aa, Gossypium hirsutum
  unsure (1)..(170): unsure at all Xaa locations
  Clone ID: GOSHI-09MAY01-C1350_1.pep
LPIPCNGEMAELAVDKHVKYILAVEKNKDSFESVVMDHLRMNGAYWGLTALDLLGKLDSVNVDEVISWILKCQHESGGFSGNIGHDPHILYTLSAVQVLALFNKLDVLDIDKVATYITGLQNEDGXSFSGDMWGEVDXRFSYIAICCLSILCCLDKINVEKAVSYILSCK

SEQ ID NO: 60211 - protein, 222 aa, Gossypium hirsutum
  unsure (1)..(222): unsure at all Xaa locations
  Clone ID: GOSHI-09MAY01-C1340_1.pep
MEEFSTGTDPRVPAVKPDSKPSAFEGVPLEAASAAVSEDAEVDKDLLCPICMQIIKDAFLTSCGHSFCYMXGGTHLRNKSDCPCCSQFLTNNQLFPNILLDKLLKKTSARQISKTASPVEQFRQALQQGYEVTIKELDSLLSLLAEKKRKMEQEEAERNMKILLDFLHCLRKQKVDELNEVQTDLQFIKEDINSVERHRMDLYRARDRYSVKLRMLGDDSST

SEQ ID NO: 60212 - protein, 87 aa, Gossypium hirsutum
  unsure (1)..(87): unsure at all Xaa locations
  Clone ID: LIB3585-022-P1-K1-G8.pep
IIGRSLLTSLLDTEFCYMCIITHLRNKSDCPXRSQFLTNNQLFPNITLDKLLKKTSARQISKTASPVXQFCQALQQGYEVTNKELDN

SEQ ID NO: 60213 - protein, 71 aa, Gossypium hirsutum
  Clone ID: GOSHI-09MAY01-C1360_28.pep
VFHNPSGSCFISLCYKNDFVFIEQNVDLFIPLVLFFLFTSLRKVVEICCEVEVKTKLYACISLACTPFRGS

SEQ ID NO: 60214 - protein, 174 aa, Gossypium hirsutum
  unsure (1)..(174): unsure at all Xaa locations
  Clone ID: GOSHI-09MAY01-C1360_23.pep
FREYQKSIKKTEYETIKNQWLCISPGQAKRFTKFRERKGLIEKDVVRTDRSLSFYDGDDNPNVNLLHDILLTYSFYNFDLGYCQGMSDLLSPILFVMEDESESFWCFCGSDGTPLGPILIRDQNGMQFSAFLHLSKHGWELLDRTSCTKYFXQNDCLXNYFFCFRWXILNQFKR

SEQ ID NO: 60215 - protein, 85 aa, Gossypium hirsutum
  Clone ID: GOSHI-09MAY01-C1360_22.pep
TRFINPYNHSLPNSSPNCCYEHKLSPCLYHFNRLPPVKLLHMKKQLFNMPNPWPLPPCSRPSFLFHPFGPPKEKKSKSTDNIYII

SEQ ID NO: 60216 - protein, 78 aa, Gossypium hirsutum
  unsure (1)..(78): unsure at all Xaa locations
  Clone ID: GOSHI-09MAY01-C1360_19.pep
GPALRVDPAFAERLRKNLSDELLALDNQMKXFQMPPFIEGNWDATIDAFLNGDATQDGGNPMDLWNFDDFPAMAEGVF

SEQ ID NO: 60217 - protein, 61 aa, Gossypium hirsutum
  Clone ID: GOSHI-09MAY01-C1360_18.pep
LLFLTCQAMVDSWGKPFYDAFSESESVQLYEVLYFCYLTFHSFLACVVNQLFSVSVARKNL

SEQ ID NO: 60218 - protein, 158 aa, Gossypium hirsutum
  Clone ID: GOSHI-09MAY01-C1360_16.pep
MLLMDSSTKISFNRCIRDGDLVIVYERHDTMKAVKVCENSVLQNRFGVFKHSDWIGKPFGSKVFSNKGGFVYLLAPTPELWTLVLSHRTQILYIADISFVIMYLEVVPGCLVLESGTGSGSLTTSFARAVSPMGHVYTFDFHEQRAASAREDFERTGI

SEQ ID NO: 60219 - protein, 75 aa, Gossypium hirsutum
  Clone ID: GOSHI-09MAY01-C1360_15.pep
PPFLFHPFGPAKEKKSTDKEKYIIEENMKFSPSFHHRFPFSRSRKRNFKEFPSPIFSPRVSAFLADAGGTREGRT

SEQ ID NO: 60220 - protein, 61 aa, Gossypium hirsutum
  unsure (1)..(61): unsure at all Xaa locations
  Clone ID: GOSHI-09MAY01-C1360_14.pep
LSLILFVMKDESEXFWCFVALIERFGPNFNRDQNDMHSQLFALSKASLSLSQTHTHTHKHA

SEQ ID NO: 60221 - protein, 263 aa, Gossypium hirsutum
  unsure (1)..(263): unsure at all Xaa locations
  Clone ID: GOSHI-09MAY01-C1360_13.pep
LVCLRILLMDSSMKISFNRCIRDGDLIIVNERHDTMKAVKVCENLILQNHVGVFKHSDWVGKPFGSITFSNKGGFVYLLAPAPELWTLVLSHRTQILYIADIIFVIMYLEVVPGCLVLESGTXVAPTGHVYTFDVHXQRAASAREDWXSALVTVGVRDIQGEAFPXQFSRLADSVFLDLPQPWLTIPSAXNMLKQDGXCSFSPCIGQVQLHVKLRFDFTDHLKVNDGNSTTCPPRKRRQPSSEASVGDNASSPSVMAWPSAET

SEQ ID NO: 60222 - protein, 111 aa, Gossypium hirsutum
  Clone ID: GOSHI-09MAY01-C1360_11.pep
KPHSQAHSICPILDSTRQQRAGHLYPARTHSIVLKFISSSQQQSMIFNPAIHNYLVPKLNSIMQQMGLSLQPSIDMKIEPLICLNFGQHNRGTKLDSSNFYTISEQHLNLQ

SEQ ID NO: 60223 - protein, 154 aa, Gossypium hirsutum
  unsure (1)..(154): unsure at all Xaa locations
  Clone ID: GOSHI-09MAY01-C1360_9.pep
MTGSADELNRGYFGDMSELKQRGGGMSDLLSSILFVMKDESESFWCFVALIECFGPNFNRDXNGMHFQLFALSKLVVGRPLHRYFEQNDCLNYFFCFRWILSPFKRYFWLAWSSLVLTLKACWLNKMNKFTVLRDLNFVAKNLGVEFFKGTLVV

SEQ ID NO: 60224 - protein, 269 aa, Gossypium hirsutum
  unsure (1)..(269): unsure at all Xaa locations
  Clone ID: GOSHI-09MAY01-C1360_8.pep
NSVKSVEFKAQAEKSAKRKRECQYRGIRQRPWGKWAAEIRDPRKGVRVWLGTFNTAEEAARAYDSXEARRIRGKKAKVNFPDEMPRTSPKRVIKTNDEKPLPMSNLSPVEPNINQNFNCLNKPEQVFYDTMGFVEEKAPMDPFAYVDTVPAAVDVGLKPFGQSDNTPLYFGSDQGSTSFDCSDFGWGEHGAKTPEISSALEATMDGDDFLVDANPKKKLKPSSENVMPIEDNSAESLSDELLALGDQMKYPFLEGNWDATLDALLNGDA

SEQ ID NO: 60225 - protein, 235 aa, Gossypium hirsutum
  Clone ID: GOSHI-09MAY01-C1360_7.pep
WCARCKRARGRNLAGPHPPPYVNLLRDILLTYSFYNFDLGYCQGMSDLLSPILFVMEDESESFWCFVALMERLGPNFNRDQNGMHSQLFALSKLVELLDRPLHKYFEQNDCLNYFFCFRWILIQFKRELEYEQTMRLWEVLWTHYLSEHLQLYVCVAILKRYRGKIMGEQMDFDTLLKFINELSGQIELDAILRDAEALCLCAGGNGAACIPPGTVPSLPVDNGLFYSQQDDEVL

SEQ ID NO: 60226 - protein, 142 aa, Gossypium hirsutum
  Clone ID: GOSHI-09MAY01-C1360_6.pep
FSLNPFASGIFPLMASEKEAALAAAPSDSPTIFDKIINKEIPATVVYEDDKVLAFRDIAPQAPTHILIIPKSKDGLTGLSKAEERHCEILGCLLYTAKLVAKQEGLEDGFRIVINDGPKGCQSVYHIHVHLLGGRQMNWPPG

SEQ ID NO: 60227 - protein, 118 aa, Gossypium hirsutum
  unsure (1)..(118): unsure at all Xaa locations
  Clone ID: GOSHI-09MAY01-C1360_4.pep
DSNSNEQLRSRKFPAMDVIYSDGRKSKLPIVFDASGVDASKLAVPEASLVCLPFRANSQVSFIDSWLLCLNPIKXLLLRFMRKSSDGANNALQRHIVFSFGDHYYFRKELKILNLLTG

SEQ ID NO: 60228 - protein, 314 aa, Gossypium hirsutum
  Clone ID: GOSHI-09MAY01-C1360_3.pep
MCGGAIISDFIPPARSRLVTANYLWPDLKKSCSKKWSGRKHSKKPAVGFEDDFEADFQVFKDEDSDVDDFDDDVDDVLADVKSFAFSATKKPSPAVSHGSNSIKSVEFNGQAEKSAKRKRKNQYRGIRQRPWGKWAAEIRDPRKGVRVWLGTFNTAEEAARAYDAEALRIRGKKAKVNFPDETPRTSPKHAAKMNSQKPLSGSNLSSVQSSLNPDFSYSNKLEQGYYDTVGFIEEKSLMDQFAYADPVRAAVDDGLKPFAEPENTASYFNSDQGSNNFDSSDLVWGEQGAQTPEISSSLEPTLEVNEFLDNATL

SEQ ID NO: 60229 - protein, 76 aa, Gossypium hirsutum
  Clone ID: GOSHI-09MAY01-C1360_2.pep
WWEMGPTAPNLTPPSIIYPLTFRPSATKQNPIIHGRPYRHVPLSIITSPCSTKCSTTLNGRQGRSEKDCKIFLLSI

SEQ ID NO: 60230 - protein, 390 aa, Gossypium hirsutum
  Clone ID: GOSHI-09MAY01-C1360_1.pep
MCGGAIISDFIPPSRSRRLTADFLWPDLKKSGLKKGSGKRYSKPVIDLGDDFETDFQEFKDEESDIDDYDVDDVLADVKPFAFNATKKPASAVSHGSNSEKSMQFNGQAEKCAKRKRKNQYRGIRQRPWGKWAAEIRDPRKGVRVWLGTFNTAEEAARAYDAEARRIRGKKAKVNFPNETPRTSPKRAVKTNSQKPLSKSNLSPVQLNLNQNYNYLSQPEQEYFDTMGFVEEKPLVNQFAYVDPVPTSIDAGFNQSDNAPLYFNSDQGSNSINCSDYGWGEQGARTPEISSILEASVVGEEFLEDANPSKKLKPSSDNLMHAEENSAKTLSDELLALDNQMKYFQMPPFIEGNWDATIDAFLNGDATQDGGNPMDLWNFDDFPAMAEGVF

SEQ ID NO: 60231 - protein, 98 aa, Gossypium hirsutum
  Clone ID: LIB3828-027-Q6-N6-F3.pep
MNRDLVSDFELYYFFQLVELLDRPLHKYFEQNDCLNYFFYFRWILIHFKRYFWLAWSSLVLTLKACWLNKMNKFTVLRDLNFVAKNLGVEFFKGTLVV

SEQ ID NO: 60232 - protein, 105 aa, Gossypium hirsutum
  Clone ID: AW187386.1.pep
MSELKQHGGKILIPGIAARKFHAVDVIYSDRRKSKLLIVFDTSKLAVPEASLVYLSFRANSQAMVNSWGKPFYDAFSESKSVQLYEITRDLLFYCQLQLLRVREI

SEQ ID NO: 60233 - protein, 91 aa, Gossypium hirsutum
  Clone ID: AI730640.1.pep
CAIIFSNRGGFLYLLASTPELWTLVLSHRTQILYIADISFVIMYLEVVPGCLVLESGTGSGSLTTLFARAVAPTGHVYTFDFHEQKAASAK

SEQ ID NO: 60234 - protein, 116 aa, Gossypium hirsutum
  unsure (1)..(116): unsure at all Xaa locations
  Clone ID: uC-gsflnu33B028c11b1.pep
MTVNTLKACHLGTCALANLEELLDRPMHIDSVQTDCSNHMMXLAMXVIQIKRGPEYEHSMRLRKVLWTHYWSKHLRLYECVAILKRYRWKIMGEHTEFDTLGNFINELIGQIELDA

SEQ ID NO: 60235 - protein, 59 aa, Gossypium hirsutum
  unsure (1)..(59): unsure at all Xaa locations
  Clone ID: LIB3582-030-P1-K1-D2.pep
MFIVPGCLVLESGTGSGSLTTLFARAVAPTGHVYTFDFHEQRAASARHVXDFERTGIST

SEQ ID NO: 60236 - protein, 140 aa, Gossypium hirsutum
  unsure (1)..(140): unsure at all Xaa locations
  Clone ID: uC-gsronu33B002b05b1.pep
GEDFETDFQEFKDEESDIDDYDVDDVLADVKPFPFNARTKPASAVSHGSNSEKPMQLDGQAEKCATRKRKNQYRGIRQRPWGKRAAENRDPRKGARAWLGTFNTAEEAARAYDAEAXRKIRGKKAKVNFPNETPGTSPSM

SEQ ID NO: 60237 - protein, 108 aa, Gossypium hirsutum
  Clone ID: LIB3584-002-P1-K1-D4.pep
PRVRDGTLCSFSPCIEQVQRSCETLRSDFTDIRTLEILLRTYEVREWKMDHSKVDDGNSTACPPRKRRQPSSEASVGDNASSPAVMARPSAETRGHTGYLTFARKCVS

SEQ ID NO: 60238 - protein, 47 aa, Gossypium hirsutum
  Clone ID: LIB3166-032-P1-K1-H8.pep
MFIVPGCLVLESGTGSGSLTTLFARAVAPTGHVYTFDFHEQRAASAR

SEQ ID NO: 60239 - protein, 172 aa, Gossypium hirsutum
  Clone ID: LIB3582-017-P1-K1-G9.pep
GRVGGRVGGRVGWLGTFNTAEEAARAYDAEARRIRGKKAKVNFPNETPRTSPKHAVKTNSQKPLSKSNLSPVQPNLNQNYNYLNQPEQEYFDTMGFVEEKPSVNQFAYVDPVSTSIDAGFNQSDNAPLYFNSHQGSNSINCSDYGWGEQGAKTPEISSILEASVEGDEFLED

SEQ ID NO: 60240 - protein, 50 aa, Gossypium hirsutum
  Clone ID: uC-gsflmaxxa026f07b1.pep
MCGGAIISDFIPPSRSRRLTADFLWPDLKKSGLKKGSGKKYLNPGDRLGL

SEQ ID NO: 60241 - protein, 124 aa, Gossypium hirsutum
  Clone ID: LIB3584-013-P1-K1-D5.pep
VLLQNHPFASSLFTRLQARKKSRRTSKTGSADELNRGYFDDMSELKQHGARKFHAVDVIYSDGRKSKLLIVFDASKLAVPEASLVCLSFRANSQLWSILGASLFMTPLVSPRACNYMRFYIFSI

SEQ ID NO: 60242 - protein, 140 aa, Gossypium hirsutum
  unsure (1)..(140): unsure at all Xaa locations
  Clone ID: LIB3146-014-Q1-K1-G7.pep
RRIRGKKAKVNFPDEMPRTSPKRVIKTNDEKPLPMSNLSPVEPNIYQNFNCLNKPEQVFYDTVGFVEEKAPMDPFAYVDTVGLKPFGQSDNTPLYFSSDRGSTSFDCSDFGWGEHGAXTXXISSALEATMEGDDFWKMQP

SEQ ID NO: 60243 - protein, 85 aa, Gossypium hirsutum
  Clone ID: LIB3145-044-Q1-K1-B5.pep
HASAHASEETLNTKTLPTLPSPLLPLSNLKKADGQSFIAGSACKQGKNGERTSKTGSADELNKGYFDDMSELKQHGGKEFGQNLL

SEQ ID NO: 60244 - protein, 69 aa, Gossypium hirsutum
  Clone ID: LIB3145-050-Q1-K1-E1.pep
ATIGPGFKNQTTRNYSIEYIDDVGLICNFCTKIYSQSKNIYHISKFLLRINYRLKYQGDPNSFKIYECI

SEQ ID NO: 60245 - protein, 79 aa, Gossypium hirsutum
  Clone ID: uC-gsflnu33B097b07b1.pep
PPRVRFISLPNNPIDKGIVYLFVAIYRHFKLNSLKIFVLNSFFLFVLPCVEVLLFIFTLPLFLSFPSLLITLFFFFFFP

SEQ ID NO: 60246 - protein, 98 aa, Gossypium hirsutum
  Clone ID: LIB3146-002-P1-K2-A11.pep
HASVHAFAHAFAHASGTFNTAEEAARAYDAEARRIRGKKAKVNFPNETPRTSPKCAVKTNSQKPLSKSNLSPVQLNLNQNYNYLSQPEQEYFDTMGFV

SEQ ID NO: 60247 - protein, 71 aa, Gossypium hirsutum
  Clone ID: uC-gsflnu33B146d02b1.pep
SRVRLTGLSKAVEWHCEILGCLLYTAKLVAKQEGLEDGFRIVINDGPKGCQSVYHIHVHLIGGRQMNWPPG

SEQ ID NO: 60248 - protein, 95 aa, Gossypium hirsutum
  Clone ID: uC-gsronu33B047a01b1.pep
MCGGAIISDFIPPARSRLVTANYLWPDLKKSCSKKWSGRKHSKKPAVGFEDDFEADFQAFKDEDSDVDDFHYVAVHFLSLYYYLISFSLLSLLHE

SEQ ID NO: 60249 - protein, 87 aa, Gossypium hirsutum
  Clone ID: uC-gsronu33B134h07b1.pep
LYSSDHSCAHAGRVNQCRGIRQRPWGKWAAEIRDPRKGVRVWLGTFNTAEEAARAYDAEARRIPGKKAMVNFPNETSWTSAKHAVKT

SEQ ID NO: 60250 - protein, 207 aa, Gossypium hirsutum
  Clone ID: GOSHI-09MAY01-C1300_1.pep
MSTIEVRGPSLRGYRRRKALLDLNVPPTEIREQEGTSQQAGSEQLTAQPVQPPPPATIDVEAIDDDVIESSAIAFAAAKNNSRRSRGRTVVDVDSGRLARSTNNNLNRCRRLPPSPVVINCDRYINLESSPQSMVKEITKPQPLPKEPTFTCPICMGSLNEEMSTRCGHISCKACINAAIAAQGKCPTCRKRVTVKELIRVFLPSAS

SEQ ID NO: 60251 - protein, 55 aa, Gossypium hirsutum
  Clone ID: LIB3585-022-P1-K1-D2.pep
ESNEKHAQITCQKDCLQKYSLKLGHLGDSKNPKISSADTQNSLLLSLFNSSLNYP

SEQ ID NO: 60252 - protein, 88 aa, Gossypium hirsutum
  Clone ID: uC-gsflmaxxa041b10b1.pep
MSTIEVRGPSVRGYRRRKALLDLNVPPTEIREQEGTSQQAGSEQLTTQPVQPPPSATIDVEAIDVEAIDDDVIESSAIAFAAAKNNSR

SEQ ID NO: 60253 - protein, 186 aa, Gossypium hirsutum
  Clone ID: GOSHI-09MAY01-C1330_1.pep
YLQPESERSTAQPLSLGLPTASTFEDDINDTWPDQNERDDFNVPEDSFEQEILMWKKNGKLDQYGFSTAVENKLRKPNGQTKWKEPIRSDIKHSKSDDDLNALLQEEEDLVNAHRKQVEETMNIVKEEMNLLVEADQPGNQLDDYISRLTTILSQKAAGITQLQTRLANFQRRLKEHNVLVSSSGY

SEQ ID NO: 60254 - protein, 120 aa, Gossypium hirsutum
  Clone ID: GOSHI-09MAY01-C1320_3.pep
MKWFEENYPKRNQEFEVYSIEATASIDVSDWLMMNVREEDYVVMKAEAEVVEKMIERKTIGLVDELFFECNNQWQDEVKKKKKKKMRKKKRKKNKRAYWECVALYGRLRDEGVAVHQWWE

SEQ ID NO: 60255 - protein, 807 aa, Gossypium hirsutum
  Clone ID: GOSHI-09MAY01-C1320_1.pep
MEETLLHGTLHATIYEVDRLHDGGGNFFGKLVANVQETIGIGKGVPKIYATIDLERARVGRTRTIENETSNPRWFESFHIYCAHNASNVVFTVKDDNPIGATLIGRAYVPVKDLTEGDEVDRWVEILDEDKNPIKSGGTLPAGLQYFGVTKDRNWARGIVSRKFPGVPYTFYPQRKGCKVSLYQDAHIPDGFVPKIPLAGGKNYEPHRCWEDIFDAITNAKHMIYITGWSVYTEIALVRDSRRPKPGGDITIGELLKKKASEGVRVNMLVWDDRTSVGLLKKDGLMATHDEETEQFFKDTDVNCVLCPRNPDDGGSFVQELQISTMFTHHQKIVVVDAAMPNGDPEKRRIVSFVGGIDLCDGRYDTPFHSLFRTLDTAHHDDFHQPNFTDASITKGGPREPWHDIHSRLEGPIAWDVLFNFEQRWRRQGGKDVLLQLRELEDVIIPPSPVAFPDDHETWNVQLFRSIDGGAAFGFPETPEDAARAGLVSGKDNIIDRSIQDAYINAIRRAKNFIYIENQYFLGSSFGWSPDDIKPEDINALHLIPKELSLKIVSKIEAGERFTVYVVVPMWPEGIPESASVQAILDWQRRTMDMMYKDVIQALRAKGSDENPRNYLTFFCLGNREVKKSGEYEPSERPDPDTDYARAQEARRFMIYVHAKMMIVDDEYIIIGSANINQRSMDGARDSEIAMGAYQPYHLSLREPARGQVHGFRLSLWYEHLGMLDDTFLAPESEECVRKVNQVADKYWDLYSSESLERDLPGHLLRYPIGVSSDGSVTELPGIEFFPDTKARVLGAKSDYLPPILTT

SEQ ID NO: 60256 - protein, 76 aa, Gossypium hirsutum
  Clone ID: AI055542.1.pep
QIINNNGRTYTRRLQVLLYQSALKSQHGITDDGKAIATQHCSSADTSTKTSFIVTTKASNTKLDKLLLLKNKVKIP

SEQ ID NO: 60257 - protein, 162 aa, Gossypium hirsutum
  unsure (1)..(162): unsure at all Xaa locations
  Clone ID: LIB3825-030-Q6-K6-G12.pep
LGNREVXQSAPYEPCEDPXPDADHARAHEARRYMIYVNAXMMMEDDEYIIIGYGNINQRNMDGARDSEIGHGSLYXPYHLSLREPXRGEEHGFRLSLRYEHLEMLDDTFLAPEREECVKKVNQGADKCWDLYXVSXLERDLSGHLLRYHICECSDGYVTELP

SEQ ID NO: 60258 - protein, 130 aa, Gossypium hirsutum
  Clone ID: uC-gsflnu33B078a02b1.pep
VCETDVIYGIACINLNSNDDAKCFFIAMGAYQPYHLSLTEPARGQVHGFRLSLWYEHLGMLDDTFLAPESEECVRKVNHVADKSWDLYSSESLERDLPGHLLPFPIGVSSDGSVTELAGIEFFPDTKLVF

SEQ ID NO: 60259 - protein, 91 aa, Gossypium hirsutum
  unsure (1)..(91): unsure at all Xaa locations
  Clone ID: LIB3148-031-Q1-K1-A11.pep
SGGEYEPSERPDPDTDYARAQEARRFMIYVHAKMMIVDDEYIIIGSANINQRSMDGARDSEIAMGAYQPYHXSLREPARGEVHGFRLSLWY

SEQ ID NO: 60260 - protein, 64 aa, Gossypium hirsutum
  Clone ID: AI728438.1.pep
QIINNNGRTYTRRLQVLLYQSALKSQHGITDDGKAIATQHCSSADTKARVLGAKSDYLPPILTT

SEQ ID NO: 60261 - protein, 84 aa, Gossypium hirsutum
  Clone ID: uC-gsronu33B111g01b1.pep
LFRAADHHPEGRTRGSFGQELQISTMFTHHQKIVVVDAAMPNGDPEKRRIVSSVGGIDLCDGRYDTPFHSLFRTLDTAHHDDFH

SEQ ID NO: 60262 - protein, 175 aa, Gossypium hirsutum
  unsure (1)..(175): unsure at all Xaa locations
  Clone ID: GOSHI-09MAY01-C1270_7.pep
MQRSGKLDQVQEPRRLALLQLSWKPASTNTTEQGHIHSTTYTMTYXICNYIILKAHSAVHKYLPHXFYHGRTGRVWNVTKRAIGVEVNKQVGNRIIRKRIHVRVEHVQTLRGAEEFKLRKVKNDQLKAEAKAKGEVITTKRQPXGPRPGFMVDGATLETVTPIPYDVVNDLKGGY

SEQ ID NO: 60263 - protein, 183 aa, Gossypium hirsutum
  Clone ID: GOSHI-09MAY01-C1270_4.pep
ASLSIFYKPAREGKPERVKNATGHGLRSRTRDLFSKPFRKKGYIPLSTYLRTYKIGDYVDVKVNGAVHKGMPHKFYHGRTGRVWNVTKRAIGVEVNKQVGNRIIRKRIHVRVEHVQPSRCTEEFKLRKLKNDQLKAEAKARGEVISTKRQPEGPKPGFMVEGAMLETVTPIPYDVVNDLKGGY

SEQ ID NO: 60264 - protein, 164 aa, Gossypium hirsutum
  Clone ID: GOSHI-09MAY01-C1270_3.pep
MPAGHGLRSRTRDLFARPFRKKGYIPLSTYLRTYKIGDYVDVKVNGAVHKGMPHKFYHGRTGRVWNVTKRAIGVEVNKQVGNRIIRKRIHVRVEHVQPSRCAEEFKLRKVKNDQLKAEAKAKGEVISTKRQPEGPRPGFMVDGATLETVTPIPYDVVNDLKGGY

SEQ ID NO: 60265 - protein, 164 aa, Gossypium hirsutum
  Clone ID: GOSHI-09MAY01-C1270_2.pep
MPAGHGLRSRTRDLFSRPFRKKGYIPLSTYLRTYKIGDYVDVKVNGAVHKGMPHKFYHGRTGRVWNVTKRAIGVEVNKQVGNRIIRKRIHVRVEHVQPSRCTEEFKLRKMKNDQLKAEAKAKGEVISTKRQPEGPKPGFMVEGAMLETVTPIPYDVVNDLKGGY

SEQ ID NO: 60266 - protein, 593 aa, Gossypium hirsutum
  unsure (1)..(593): unsure at all Xaa locations
  Clone ID: GOSHI-09MAY01-C1270_1.pep
MADETPAQNPPMAAAPPPPSSATVSDSDSPAVLEKQDPSPPSHVPAVSVSVTESASTTIAENEEQAPPPEPAALEPDSSDKGSGKEELPPTPPPQAVESESEPPVVTEAPKEENPPAPAAETVVISESEPQQPPAPLQQEVVTESESLAAMMEKEETGAPAEPTAAGTTTTTTTSAQEEVAAAVEEKKVPQNLASFKEESNKEADLSDSERKALEELKQLVREAIDSNLFNSESKSEENPEKEKKQESKEVSIWGIPLLKDERSDVILWKFLRAGDFKAKDAFVMIKNTIRWRKEFGIDELLDEDLGDDMEKVVFMHGQDKEGHPVCYNVYGEFQNKESYQKAFSVEEKRMKFLRWRIQLLEKSIRKLDFSPGGVSTIFQVSDLKNSPGPGKKELRLATKQALQVLQDNYPEFVAKQVFINVPWWYLAFYTMISPFMTQRTKSKFVIALPSKSAETLFKYIPPEQVPIQYGGLSVDYCDCNPEFSDADPATEMTVKPGTKQTVEITIFEKCILVWEIRVVGWEVSYGAEFVPDAKDSYAVIIQKPTKMTAKDEPVVSQSFKVGELGXVLLTVDNPTSKKKKLLYRFKVKPFCD

SEQ ID NO: 60267 - protein, 121 aa, Gossypium hirsutum
  unsure (1)..(121): unsure at all Xaa locations
  Clone ID: uC-gsronu33B168e06b1.pep
FFKSIRKLDFRAGXVSTIVQVSDLKNSPGPGKKELRLATKQALQVLQDNYPEFVAKQVFINVPWWYLAFYTMISPFMTQRTKSKFVIALPSKSAETLFKYIPPEQVPIQYGGLSVDYCDCN

SEQ ID NO: 60268 - protein, 102 aa, Gossypium hirsutum
  unsure (1)..(102): unsure at all Xaa locations
  Clone ID: LIB3585-011-P1-K1-H5.pep
DPRVRPRVRYLLQAGEECENLRGCRVPGGHGLRSRTRDLFSRPFRKKGYIPLSTYLRTYKIGDYVDVKVNGAVHKGMPHKFYHGRTVRVXWNVTNLAIFFEV

SEQ ID NO: 60269 - protein, 87 aa, Gossypium hirsutum
  Clone ID: uC-gsronu33B002f10b1.pep
QKNCPPLGVGTLFFFYFFFFFFFFFFLCIFVRSMVDSKLLMVLKFVLGMLGYPGVVHCTFLWCIMSILWNLLHCYRFVRTRGIVWFM

SEQ ID NO: 60270 - protein, 421 aa, Gossypium hirsutum
  Clone ID: GOSHI-09MAY01-C1260_1.pep
GGSALGPQFVAEALAPDNPALEIRFIDNTDPAGIDHQIAQLGPELASTLVIVISKSGGTPETRNGLLEVQKAFREAGLDFAKQGVAITQENSLLDNTARIEGWVARFPMFDWVGGRTSEMSAVGLLPAALQGVDIREMLVGASMMDEATRSTVLRKNPAALLALCWYWATDGIGSKDMVVLPYKDSLLLFSRYLQQLVMESLGKEFDLDGNRVNQGISVYGNKGSTDQHAYIQQLREGVHNFFVTFIEVLRDRPPGHDWELEPGVTCGDYLFGMLQGTRSALYANDRESITVTVQEVTPRSVGALIALYERAVGIYASLVNINAYHQPGVEAGKKAAGEVLALQKRVLAVLNEASCEDPAESLTLQEIADRCHAPDDIEMIYKIIEHMAANDRALIAEGDCGSPYSLKVFLGECNVDELYA

SEQ ID NO: 60271 - protein, 216 aa, Gossypium hirsutum
  Clone ID: GOSHI-09MAY01-C1210_5.pep
NSARGTNRSHLRIVREVEAIGGNVNAAVSREQIGYTFDALKTYVPEMVELLIDSVRNPAYLDWEVNEQLQKVKEEIAEAAKNPHGLLLEAIHSAGYSGALANPLLAPESAVNMLNSTVLEDFVAEIFTASRMVLAATGVEHEELLSVAEPLLSDLPNIPRAQEPKSVYTGGDYRCQADSGGRTHFALALELPGGWHNEKEAIILTVLQILMGGGGS

SEQ ID NO: 60272 - protein, 49 aa, Gossypium hirsutum
  Clone ID: GOSHI-09MAY01-C1210_4.pep
GVFLKVVDEITLKDISSIAQKLLSSPLTMASYGNVINVPSYDSVSRKFK

SEQ ID NO: 60273 - protein, 127 aa, Gossypium hirsutum
  Clone ID: GOSHI-09MAY01-C1210_3.pep
AQSFFKQYFHYFKEKEAIILTVLQILMGGGGSFSAGGPGKGMYSRLYVRVLNEYPQVYSFSAFNSIYNHTGIFGIQATTGSDFAPTAIDVAVKELIAVATPGQVDQIQLDRAKKSTKSAILMNLESR

SEQ ID NO: 60274 - protein, 291 aa, Gossypium hirsutum
  unsure (1)..(291): unsure at all Xaa locations
  Clone ID: GOSHI-09MAY01-C1210_2.pep
MYRTAASRLRALKGRTSHIAPARFASSSTVATTSSSSGGLLSWLTGSQSKSVPSLDFPLPGVALPPSLPDYVEPGKTKITTLPNGLKVASETSASPAASIGLYVDCGSIYESPASFGVSHLLERMAFKSTTNRSHLRIVREVEAIGGNVNAAVSREQIGYTFDALKTYVPEMVELLIDCVRNPAFLDWEVNEQLQKMKEEIAEAAKNPQGLLLEAIHSAGYSGALANSLLAPESAVNNIEXQVLEDFILENFTASRMVLAASGVENEELLSVAEPLLIDLSNVLVLKSQNL

SEQ ID NO: 60275 - protein, 319 aa, Gossypium hirsutum
  unsure (1)..(319): unsure at all Xaa locations
  Clone ID: GOSHI-09MAY01-C1210_1.pep
RPRGFRSERGNAEAAKNPHGLLLEAIHSAGYSGALANPLLAPESAVNMLNSTVGRVXDAAAENLTASRMVLAASGVEHEELLSVAEPLLSDLPNVPRPREPKSVYTGGDYRCQADSGGQTHFALAFELPGGWHNEKEAIILTVLQILMGGGGSFSAGGPGKGMYSRLYLRVLNQYPQVQSFSAFNSIYNHTGLFGIQATTGSDFVPSAIDVAVKELIAVATPGQVEQKELERAKQSTKSAILMNLESRAVASEDIGKQILTYGERKPVEHFLKVVDEITPKDISSVAEKLLSSNLTMASYGNVINVPRYDSISSKFKGK

SEQ ID NO: 60276 - protein, 69 aa, Gossypium hirsutum
  Clone ID: LIB3120-030-Q1-K1-A2.pep
ISPYLVLPYHLHCQADSGGQTHFALAFELPGGWHNEKEAIILTGLQILMGGGGSFSAGGPGKGMYSRLY

SEQ ID NO: 60277 - protein, 145 aa, Gossypium hirsutum
  Clone ID: LIB3493-034-P1-M1-G8.pep
EMVELLIDCVRNPAFLDWEVNEQLQKMKEEIAEAAKNPQGLLLEAIHSAGYSGALANSLLAPESAVNTLNGTVLEDFILENFTASRMVLAASGVENEELLSVAEPLLSDLSNVPRPQEPKSVYTGGDYRCQADLGDQTHFALAFE

SEQ ID NO: 60278 - protein, 194 aa, Gossypium hirsutum
  unsure (1)..(194): unsure at all Xaa locations
  Clone ID: GOSHI-09MAY01-C1230_1.pep
KDREEISKYLKDERDRLRSERDVMREQHNKDVESLNRQREDFMXKMVTEHSDWFNKIQQERADFLLGIETQKRELENCIEKRREELESSLKEREEAFEREKKNQLDHISALKEIAEKELEQATLEMKRLDAERTEIKLDRERREHEWAELNKSIEELKVQRXQLKQQRELLHADRKEIHFDIEELKKLGDLKAA

SEQ ID NO: 60279 - protein, 325 aa, Gossypium hirsutum
  Clone ID: GOSHI-09MAY01-C1220_1.pep
MAEVKGKWVKLNQNGTGPGARSSHAITIVGQKAYVFGGEFTPRVPVDNKLYVFDLNNLTWSVADVTGDVPPPRVGVTMATVSETIYVFGGRDSAHKELDELYSFDTCTNKWVLLSNGDSGPAHRSYHSMTADDRHVYVFGGCGVSGRLNDLWAYDVACQKWIKYPTPGDGCKGRGGPGLAVVQGKIWVVYGFSGVEMDDVHCFDPVQGQWSQVETSGEKPTARSVFSIVGIGKCIIIYGGEVDPSDLGHLGAGKFSGEVYCLDTDTLGWKKWEDERGVETHPGPRGWCAFSSGVRDGQLGLLVYGGNSASNDRLDDIFIFTPSVA

SEQ ID NO: 60280 - protein, 389 aa, Gossypium hirsutum
  Clone ID: GOSHI-09MAY01-C2990_1.pep
LDPMTMTTFRDLIPTKLAAGIWNCLVKYKSIPNFPQKETCELLILDRSIDQVAPVIHEWTYDAMCHDLLNMEGNKYVHEVPSKIGGPPEKKEVLLEEHDPIWLELRHAHIPAPPERLHEKMTTFISKNKAAQLQHGSRDGGEISTRELQKMVQALPQYSEQIDKLSLHVEIAGKINRIIREQGLRELGQLEQDLAFGDAGMKDVIKFLSTNEVASRENKLRLLMILAAIYPEKFEGEKGLNLMKLARLPLEDMTAVNNMALLAPPSEAKKSSGSAFSLKFDMHKKKHATRKDRSGGQETWQLSRFYPIIEELVEKLGKGELSKDDYPCMNDPSPTSHGTSHTASVYEAPVAHSMRSRRTPTWARPRGSDDGYSSDSVLRHASSDFKKFG

SEQ ID NO: 60281 - protein, 143 aa, Gossypium hirsutum
  Clone ID: GOSHI-09MAY01-C2980_1.pep
PTRPIPPEALDSMWAEGQRKMWGRKLNASSSADELLKLLTQLESAIKRDYLSSNFETTKELLGSSLQSENDSSTVSVLPWIPQTTPAVALRLLELDSSIMYVKPEKVEPPENREARASYIKLPSRTSLFIKNKELGLKRARPR

SEQ ID NO: 60282 - protein, 279 aa, Gossypium hirsutum
  unsure (1)..(279): unsure at all Xaa locations
  Clone ID: GOSHI-09MAY01-C2950_1.pep
TFSDGTVYKGTLXSGVEIAVTSTAISSREDWSKNLETQFRNKIDSLSKVNHKNFVNLIGYCEENTPFTRMMVFEYVPNGSLFEHLHIQEAEHLDWGMRLRIAMGIAYCLEHMHQLTPPIAHRNLQSCSVYLTEDYAAKISDFSFLNNATAAKVGSATMELLESPSADAESNVYSFGVILFEMITGRIPYSIDNGSLADWASDYLKRDQPLEDTVDPTLXNFQGDDLEKLFEVLKXCVNPDPKERPTMRESAAKXKEITAMGPDGATQNSLPFWWAELEI

SEQ ID NO: 60283 - protein, 215 aa, Gossypium hirsutum
  Clone ID: GOSHI-09MAY01-C2970_1.pep
IGFHFLKNMIHQEMDIDHEWVFLPDNRFLDINQDHGGKRVSDSNLVFFTDYFDEEQSPPSGNSGKVAKQVVPVPFPLEPRILKVPENEIGKEITKRVPLDFSSTPSMILEKIKEGGMESVGGDKEVKTQVSFRKPSYNNNESVDMTNKMNSPRSTTKGVIPQLDAAGTFNFDDETEFLENMNSPKIKDLVEKEAENKDVNWGRKLWVALIYGNGV

SEQ ID NO: 60284 - protein, 38 aa, Gossypium hirsutum
  Clone ID: LIB3828-005-Q1-N6-F6.pep
RMKQVVHHTTKLNEAISVVRGVPITRAQITFGGYYDGI

SEQ ID NO: 60285 - protein, 135 aa, Gossypium hirsutum
  Clone ID: LIB3166-021-P1-K1-G3.pep
PVLTGRTDPRVGRHVDHEWVFLPDNRFLDINQDHGGKRVSDSNLVFFTDYFDEEQSPPSGNSGKIAKQVVPVPFPLEPRILKVPENELGKEITKRVPLDFSSTPSMILEKIKEAGMESVGGDKEVKTQVSFRKPS

SEQ ID NO: 60286 - protein, 261 aa, Gossypium hirsutum
  Clone ID: GOSHI-09MAY01-C2890_1.pep
MRTSNHLIGLLNFLTFLLSIVILGGGIWLSSRANSTDCLKFLQWPLIVIGASIMVVSLAGFAGACYRNTFLMWLYLFVMFFIIAALIGFIIFAYAVTDKGSGRPVLNKGYLEYYLQDYSGWLKDRVVDESYWAKISSCIRDSKVCSKTGRTFNGVPETYDMFSMRKLSPIESGCCKPPTECGYVYVNETLWNSGSGLAATNLDCSRWSNDQQMLCYQCDSCKAGVLGSLKMSWRTVSVINIVVLILLVIFYVISCAAFPNN

SEQ ID NO: 60287 - protein, 122 aa, Gossypium hirsutum
  Clone ID: LIB3135-050-Q1-K1-F6.pep
MRASDHLIGLLNFLTFLLSTVILGGGIWLSSRANNIDCLKFLQWPLIVIGAEIMVVSLAGFAGACYRNTFLMWLYLFAMFFIIAALVGFIIFAYAVTDKGSGRPVMNKGYLEYYLRDYSGWL

SEQ ID NO: 60288 - protein, 146 aa, Gossypium hirsutum
  Clone ID: GOSHI-09MAY01-C2850_2.pep
QIFVILGGHTIGLAKCATFDNRLFNFSGTGAPDSTMEATMLADLQSFCPVNGDSNRFTALDRKLTDLFDNHYFKNLLNGKGLLGSDQILYSSDLAVSTTKSLVESYSSNSILFFNDFVNSMIKMGNISPLTGTDGEIRKNCRDVNS

SEQ ID NO: 60289 - protein, 224 aa, Gossypium hirsutum
  Clone ID: GOSHI-09MAY01-C2850_1.pep
MMKSPNKIKSYYYSLFMISLMLCLGARSQLTTDFYSQTCPSLLSTVRKQVQSAIKTEMRMAASLLRLHFHDCFVNGCDASVLLDGDNSTEKFALANVNSARGFEVIDAIKSAVESSCSGVVSCADILAIAARDSVVLSGGPTWRVLLGRRDGLVSNGTLANAALPSPFEALDAIIQKFVDVGLNITDVVSLSGGHTIGLAKCATFDDRLFNFSGTGAPDSTMEA

SEQ ID NO: 60290 - protein, 262 aa, Gossypium hirsutum
  Clone ID: GOSHI-09MAY01-C2870_1.pep
EIKSKELLPFFDRFHRIKSSWNDRCFCVGKYPLSLSPDLHQGEYKASQEIIICHSKPASLSSTESSEGGSSRRLDNILDFDQINSEKPYPPIYQGLNETCHGKMGNGFIEPLVLNQESLTVKSSPFQHSENIYNDTGHSERSDFSSLERELPPSRSKAEGIPSFNAVGIGAASMLHVDHYDAPKNILADESSFSAQQIAVDFVHFREGHYEIIQQNGSGKLSVHANDDVDSISSNHCGKEKLEEDGENDEMLGGIFLFSEEG

SEQ ID NO: 60291 - protein, 310 aa, Gossypium hirsutum
  Clone ID: GOSHI-09MAY01-C2860_1.pep
MGMPPATCASASSSSIVNSSPIGGAGGGGGEIMLFGVRVVVDSMRKSVSMNNLSQYEQPHESNKHNNKNDKDQGDDNLTAGYASADDAVPHSSGNRERKRGVPWTEEEHKLFLVGLQKVGKGDWRGISRNFVKTRTPTQVASHAQKYFLRRSNLNRRRRRSSLFDITTDTVQAIPMEEERVDRQENSTQPSETNVFPIMPATFPMAFNQVVPPVPIQNPTENLTIAQGNQLNNNVPTANLIRPVPNFPALQRSDLNTDLNPATDPLSLSLKLSLQSDQMDSSSSSTSRHSPFQVMPNFSSGDNNNIISVA

SEQ ID NO: 60292 - protein, 82 aa, Gossypium hirsutum
  Clone ID: uC-gsflnu33B111c12b1.pep
FEDIQTCELDLLFFKSNKDQGDDNLTAGYASADDAVPHSSGNRERKRGGPCTEDELTLLLVGLHKVWKGDRRGISRNFVKTR

SEQ ID NO: 60293 - protein, 62 aa, Gossypium hirsutum
  Clone ID: LIB3493-003-P1-M1-D1.pep
NFTAPGSHSSLNLHSSSFVTNTGPPARTFWLHSKSRRHVARVTTVGIIALSLLLLLLCLFDS

SEQ ID NO: 60294 - protein, 198 aa, Gossypium hirsutum
  Clone ID: GOSHI-09MAY01-C2800_1.pep
DAWVSRQGSLVPVSSQGAHQITDSPAVQNNNDFLSGLISEPGSKPAQTVTPTSTGALAIVPQPSKDKFELKSAVWADTLSRGLVNLNISGPKTNPLADIGVDFDALNRKEKRMEKPAPNAVTSTVTMGKAMGSGSGIGRSGATTLRPPANPMMGSSMGSMGMGMGMGMGGGPVGGMGMGGGYGGMNQQPMGMGMGMNN

SEQ ID NO: 60295 - protein, 131 aa, Gossypium hirsutum
  Clone ID: LIB3585-040-P1-K1-B9.pep
SKPQTRRRCNSPHDTTLAIVPQPSKINLAYISVWAHTLTRRLMNSNIYLPKTHPLADIGIDFDALNHKEKRMEKPAPNAVTSTTTMTKAMESESSIARSDATTLIPTANPIIATSIGSIGMDISMEMGGPP

SEQ ID NO: 60296 - protein, 184 aa, Gossypium hirsutum
  Clone ID: GOSHI-09MAY01-C2830_1.pep
MSLLISLLLFLAMTGHSSATYCLCKDGLGDQALQKALDYACGAGADCSAILQKGGCYNPNTVKDHCNYAVNSYFQKKGQAQGSCDFSGTATVSANPPSNIASTCSFPSSSTGMTAPTGTTTGTPTTTGSTTGTPSTVFGGAGTTLGPTGTTETGFNDQSNAVGLFTKNINFFFTFAIMTLWIEG

SEQ ID NO: 60297 - protein, 124 aa, Gossypium hirsutum
  Clone ID: AI729707.1.pep
YLNTQIHDTTPFFLKSCFAQFPTAALRVYLFLRLTIVIKRGLYIISYTHHTIITTMTGHSSATYCLCRDGLGDQALQKTLDYACGAGADCSAILQKGGCYNPNTVKDHCNYAVNSCNSTKRWLL

SEQ ID NO: 60298 - protein, 699 aa, Gossypium hirsutum
  Clone ID: GOSHI-09MAY01-C2820_2.pep
DLVVIHGHEEPRPLKNLDGQVCEICGDEIGLTVDGDLFVACNECGFPVCRPCYEYERREGSQQCPQCKTRYKRLKGSPRVEGDEDEEDVDDIEHEFNIDDEQNRYRNIAESMLHGKMSYGRGPEDDEGLQIPPARAGVRSRPVSGECPIGSSLAYGEHMSNKRVHPYPMSEPGSARWDEKKEGGWRERLDDWKMQQGNLGPEPDDAYDADMAMLDEARQPLSRKVPIASSKINPYRMVIVARLVILAFFLRYRILNPVHDAIGLWLTSVICEIWFAFSWILDQFPKWFPIDRETYLDRLSLRYEREGEPNMLASVDIFVSTVDPLKEPPLVTANTVLSILAMDYPVDKISCYISDDGASMLTFESLSQTAEFARKWVPFCKKFAIEPRAPEMYFTLKVDYLKDKVQPTFVKERRAMKREYEEFKVRINALVAKAQKVPPEGWIMQDGTPWPGNNTKDHPGMIQVFLGQSGGHDTEGNELPRLVYVSREKRPGFLHHKKAGAMNALVRVSGVLTNAPFMLNLDCDHYLNNSKAVREAMCFLMDPQIGRKVCYVQFPQRFDGIDRHDRYANRNTVFFDINMKGLDGIQGPVYVGTGCVFRRQALYGYEPPKGPKRPKMVTCGCCPCFGRRRKDKKHSKDGGNANGLSLEAAEDDKELLMSHMNFEKKFGQSAIFVTSTLMEQGGVPPSSSPATLLKEAIHV

SEQ ID NO: 60299 - protein, 409 aa, Gossypium hirsutum
  Clone ID: GOSHI-09MAY01-C2820_1.pep
MVTCGCCPCFGRRRKDKKHPKDGGNANGLSLEAAEDDKELLMSHMNFEKKFGQSAIFVTSTLMEQGGVPPSSSPAALLKEAIHVISCGYEDKTEWGSELGWIYGSITEDILTGFKMHCRGWRSIYCMPKLPAFKGSAPINLSDRLNQVLRWALGSVEIFFSRHCPAWYGLKGAKLKWLERFAYVNTTIYPFTSLPLLAYCTLPAICLLTDKFIMPPISTFASLFFIALFLSIFATGILELRWSGVSIEEWWRNEQFWVIGGISAHLFAVIQGLLKVLAGIDTNFTVTSKATDDEEFGELYTFKWTTLLIPPTTVLIINLVGVVAGISDAINNGYQSWGPLFGKLFFSFWVIVHLYPFLKGLMGRQNRTPTIVVIWSVLLASIFSLLWVRIDPFVMKTKGPDTTMCGINC

SEQ ID NO: 60300 - protein, 129 aa, Gossypium hirsutum
  Clone ID: LIB3585-038-P1-K1-G7.pep
AKVDFCWETAGRWKDFGELYTFKWTTLLIPPTTVLIINLVGVVAGISDAINNGYQSWGPLFGKLFFSFWVIVHLYPFLKGLMGRQNRTPTIVVIWSVLLASIFSLLWVRIDPFVMKTKGPDTTMCGINC

SEQ ID NO: 60301 - protein, 123 aa, Gossypium hirsutum
  unsure (1)..(123): unsure at all Xaa locations
  Clone ID: LIB3083-015-Q1-L1-E11.pep
FDTRLEVLARIDTNFTGTDNATDDDESGELHTFKWTTLLIPATTVLIINLVGVVAGISDAINNGYQSWRPLFGKLFFSIWVIVHLYPFLKGLMGRHNRTPTIVVIWSVLLAXIFSLLWVRIDP

SEQ ID NO: 60302 - protein, 116 aa, Gossypium hirsutum
  Clone ID: LIB3083-108-Q1-L1-H5.pep
GIRSRRDFFNLEKKLGQGAIFVTSTLMEQGGVPPSSSPAALLKEAIHVISWGYEDKTQWGSELGWIYGSSTEDILTRFKMHCRGWRSIYCMPKLPAFNGSAPINLSDRLIQVLRWA

SEQ ID NO: 60303 - protein, 369 aa, Gossypium hirsutum
  Clone ID: GOSHI-09MAY01-C2590_1.pep
KLQWQEGFREAGESAYCSMKKAFSSMVFIIRELHSYTLQMRELLFYEDLQGILVRVQKEMHASFVWLFQQVFSHTPTLMVYVMILLANYSVHSMGSNAALAATAAANPTPGSYVAVVDVQDQKDSNFDSSSIKSFSVSSSSGKTASIGGNNGGGGKVRSVANGTDGDGWFNKAGQFRTIFPDGASQLSSPRAAAETQSESTREEELTLWNSIVDEASKMLASYRDETLDHETIQRFVSPVTANIEPDGDYEDYIRTELLYQTGLSQDPTNSLLLANYAQFLYLVAHDYERAEEYFKKAVTVEAVDAEAYSKYASFLWKARNDLWAAEETFLEAIEADPSNSYYAANYAHFLWNTGGEDTCFPLDTTQDA

SEQ ID NO: 60304 - protein, 179 aa, Gossypium hirsutum
  unsure (1)..(179): unsure at all Xaa locations
  Clone ID: LIB3584-005-P1-K1-A7.pep
GESAYCWMXEAFSSMVFIIRELHSYTLQMRELLFYEDLQGILVRVQKEMHASFVWLFQQVFSHTPTLMVYVMILLANYSVHSMGSNAALAATAAANPTPGSYVAVVXVQDQRASNFDSSSLLVFSVXVSRGLTASIGGFFGGGGSVRSCAPGSSGVCLVFPCLPFFFPFFPAVSFPFFL

SEQ ID NO: 60305 - protein, 47 aa, Gossypium hirsutum
  Clone ID: GOSHI-09MAY01-C2550_2.pep
LQLLITSYKGEIYHHINQPKRILLLALSYNTVQYISIKHYIRFRILC

SEQ ID NO: 60306 - protein, 425 aa, Gossypium hirsutum
  Clone ID: GOSHI-09MAY01-C2550_1.pep
RQDWTENEFNAFVLREREGRRPVVTGDLNITLVDGVGTVDNVIFTDNSSWIRCRKFRLGARIVQRSAGEVTIREATSDAFMVKDHRGELYKKHYPPLLHDEVWRLERIAKDGAFHKRLAYKSVHTVKDFLRLLVTDPIALRNILGGGISNRVWETIIEHALSCVPDDDEWYTYHGTAQRVELLLNSIYNVVKVTFDGQDYLPVENLTFSQKLLVEDAKRQAYKNVWNLTPFDRRAIMGPSMPFTDLLPEPVGTSNLLLHQPDFSGTRPDMPLGFNQSSTSFSYEVENPNPLQGIEPLNPMLSNSSFRMEGIFPYNADNSFSFFADDGFGTNQDNTQAQMLSLTSATPAWAQGSGFIFTPDYETSSISFLSSFPSCNVNDRSIGETREVCPKNRWLKVRAVIQWKSISRGAAKRRRQHWLQHGICT

SEQ ID NO: 60307 - protein, 307 aa, Gossypium hirsutum
  Clone ID: GOSHI-09MAY01-C2540_1.pep
MGCLLSTPEVAGGARRRPRNIGEVVVFVPGLKSPRPLGFAQPLGDGLSKSLVERLSALRTRIEVMAGQEAPMTTKPRRTATQHGGSTLTDLQQALEDYLPVLLGLVENGNWLKHNLRFCWINQEDDVEETTMSDSWYEVLSVLHLMAVLLLSQANLLLLPNKFTSGYQSTALEDCKRASIDIFLKAAGYLDFAVQKVLPQLPLELRSDLPLVLSEGVLKALCLQALGQGVEIQLGMAIDSIKATLAVKRRLACEMVKYWHQAEEYIKELPVANGWGEKHKLFIQWKHIEAKAIAYYLHGLILEKRNT

SEQ ID NO: 60308 - protein, 251 aa, Gossypium hirsutum
  Clone ID: GOSHI-09MAY01-C2520_1.pep
MAETAINSKPKNARWFLNGMTALVTGGTRGIGHAIVEELAGLGASVYTCSRNGDELNKCLKEWESKGFLVNGSVCDASSKDQRLKLIDNVASVFNGKLNILVNNVGTNISKPTVEYTAEEYSKLMSTNFDSSYHFCQLAHPLLKASGKGSIVFISSVAGLTHVGSGSIYAPAKAAMNQLTKSLACEWAKDNIRTNCVAPWYIRTSLVERLLEKKEFMEKVISRTPLERIGEPEEVSSMVAYLCLPAASYIT

SEQ ID NO: 60309 - protein, 426 aa, Gossypium hirsutum
  unsure (1)..(426): unsure at all Xaa locations
  Clone ID: GOSHI-09MAY01-C2490_1.pep
KYLWKTATSWKLDEALQLFYVGNEGGVVGTASESPAVENVDSWVDQNSGELKESGNSDVGPIGGEEVRPPLPVVRETLYDDASLYGASRLGLPPQQSSSLIAFRNFDEEMKRPGVWESDEGASSTVDAPRDNLASLLSSSFSFLMFQGXFEKAKAAASVEDKWLLVNLQSTKEFSSHMLNRDTWGNEAVSQTVSTNFIFWQVYDDTSEGRKVCTYYKLDSIPVVLVIDPITGQKMRSWFGMVQPESLLEDLVQFMDGGPRDYHATLSHKRPRGSSVTPQQKIKVSTDETNEDKEMLRAIAASMENAKESIKTTEDDKVSSTTEEEPCLTKKPAYPPLPEEPKGDRNLLCRVGVRLPDGRRVQRNFLRTDPIQLLWSFCYSQLGEAESKPFRLTQPIPGASKSLDYDSKLTFEESGLANSMISVAWE

SEQ ID NO: 60310 - protein, 153 aa, Gossypium hirsutum
  unsure (1)..(153): unsure at all Xaa locations
  Clone ID: GOSHI-09MAY01-C2480_5.pep
STPALIKALRPFTYACGIILLCQKCEGKGRXLFKNLQRIYFSPIKHSIVINLGDQLEVITNGKYNSVMHRVIAQTDGTRMSIASFYNPGSDAVIYPAPALLPTRADKSQVYPKFVFEDYMNLYADLKFQAKEPRFEAMKTVESAVNLGPIATV

SEQ ID NO: 60311 - protein, 172 aa, Gossypium hirsutum
  Clone ID: GOSHI-09MAY01-C2480_3.pep
MEVAFPVIDLSKINGEERGATMDMIKDACENWGFFELTNHGISHELMDTVEKLTKEHYKKCMEDRFKEMVTSKGLEVVQSEITDMDWESTFFLRHLPESNLYEIPDLEYDYRKVMKQFAVELEKLAEKLLDILCENLGLEQGSLKKVFYGSKGPTFGTKVSNYPPCPKPDLI

SEQ ID NO: 60312 - protein, 319 aa, Gossypium hirsutum
  Clone ID: GOSHI-09MAY01-C2480_2.pep
MELTFPVIDFSKLNGEERAAAMEMIKDACENWGFFELVNHGISHELMDTVERLTKEHYRKCMEQRFKEMVASKGLEAVQSEINDMDWESTFFLRHLPESNMSEIPDLEEDYRKVMKEFAVELEKLAEQLLDLLCENLGLEPGYLKKVFYGSKGPTFGTKVSNYPPCPKPDLIKGLRAHTDAGGIILLFQDDKVSGLQLLKDGQWIDVPPMKHSIVINLGDQLEVITNGKYKSVMHRVIAQTDGTRMSIASFYNPGSDAVIYPAPALLEKEADKSQVYPKFVFEDYMNLYADLKFQAKEPRFEAMKTVESAVSLGPIATV

SEQ ID NO: 60313 - protein, 156 aa, Gossypium hirsutum
  unsure (1)..(156): unsure at all Xaa locations
  Clone ID: GOSHI-09MAY01-C2480_1.pep
ALPLCFAFIYVSFFFFYCFFFFFFFFFVVTSTFHTETAKKILQIPLAEAKHEDFQVWKEEPSGVFSVRSAYTLLQCASMDPNSYLLQTESKDFFRKLWDIQLPXKITITIWRIYWNYISTLINLSYKRVANNIICPCCGVGEEDSDHVFRQCPGFL

SEQ ID NO: 60314 - protein, 123 aa, Gossypium hirsutum
  Clone ID: uC-gsronu33B155e04b2.pep
MELTFPVIDFSKLNGEERAAAMEMIKDACENWGFFELVNHGISHELMDTVERLTKEHYRKCMEQRFKEMVASKGLEAVQSEINDMDWESTFFLRHLPESNMSEIPDLEEDYRKVMKELHSKGR

SEQ ID NO: 60315 - protein, 76 aa, Gossypium hirsutum
  Clone ID: LIB3829-023-Q6-K6-H7.pep
MGGSNSCNRTQANDGFHGPPAFEPRLLVFEITGRGRPSCSPRTEFRVRMGSQFFATKAGAGYITAPSRVVKGTRTS

SEQ ID NO: 60316 - protein, 46 aa, Gossypium hirsutum
  Clone ID: uC-gsronu33B011h01b1.pep
IHGIGNLPLKVVVFLRTIFHIKYSLVTSDSQNISFKAQPLAIRHHI

SEQ ID NO: 60317 - protein, 291 aa, Gossypium hirsutum
  Clone ID: GOSHI-09MAY01-C2440_1.pep
TEFCPGGDLHVLRQRQPLKRFPDSSVRFYASEVVVALEYLHMMGIVYRDLKPENVLVRSDGHIMLTDFDLSLKCDESTSTPHIVSDQKPPVPGLRNDYPKDHPPFTSSSCIIPNCIVPAVSCFHPKRKRKKKSAHRGGPEFVAEPIDVRSMSFVGTHEYLAPEIVSGEGHGSPVDWWTLGIFMYELFYGVTPFKGVDHELTLANIVARALEFPKEPMVPAAAKDLISQLLVKDPPRRLGSTMGASAIKHHPFFQGVNWALLKCTTPPYVPPPFSKEVVSDESCPETPVEYY

SEQ ID NO: 60318 - protein, 241 aa, Gossypium hirsutum
  Clone ID: GOSHI-09MAY01-C2470_2.pep
QEAEAKAAAAEERERSLNDRLSQTLSRINVLEAQISCLRAEQTQISRSLGKERQRAAENRQEYLAAKEEADTQEGRANQLEEEIRELRRKHKQELQDAYVQQERLQQEVEREKAARLDLERTTHVHSMAISEQAPMARHNSASENGSLSRKLSTASSLGSMEESYYLQASLDSSDGFSEKRNIGEATLSPLYMKSMTPSAFESALPQKEGELASYMSRLSSMEAIRDSLAEELAKMTEQCE

SEQ ID NO: 60319 - protein, 210 aa, Gossypium hirsutum
  unsure (1)..(210): unsure at all Xaa locations
  Clone ID: AW186918.1.pep
VLEAQISCLRAEQTQLSRSLEKERQRAAEQRQEYLXAKEEADTREVRANQLEEEIRELRRKHKQELQDALVHQELLQQEVEREKAARADLERTVRVQSTELAPIARHNSTLENGSLSRKLSTTSSIKSMEESYYLQASLDSSDGFFEKRNIVGETALSPLYMKSMTPSAFESALRQKEGELASYMSRLTSLESIRDSLSEELVXMTAQCE

SEQ ID NO: 60320 - protein, 63 aa, Gossypium hirsutum
  Clone ID: LIB3147-003-Q1-K1-B2.pep
MHLKDSTDGGSDESNVEEASLKTIYMKSMTPIACESALRQKEGELASYMSRLSSMEAIRDSLA

SEQ ID NO: 60321 - protein, 66 aa, Gossypium hirsutum
  unsure (1)..(66): unsure at all Xaa locations
  Clone ID: LIB3584-003-P1-K1-A3.pep
GGLFFFXFXFFXFFFFLFFFFFFFFFFFFFFFFFFFFFXNPSWGTFDSFKNWVQLFELNCMVLVVI

SEQ ID NO: 60322 - protein, 77 aa, Gossypium hirsutum
  Clone ID: uC-gsflnu33B071b06b1.pep
SDFGLHRKLYRQLGKLKRMVNSWVVEGVFEVLDSCHDSCAGSSNVIVQHEQVKHQQLQWLSRSLGRRQKSRGKEEGM

SEQ ID NO: 60323 - protein, 173 aa, Gossypium hirsutum
  unsure (1)..(173): unsure at all Xaa locations
  Clone ID: GOSHI-09MAY01-C2780_2.pep
LINVYDELHIPDKAAILTEEDIVKPGQAPNLWRLNTIHRVEELIAVIRMGPIWAAGILLITAYAQQNTFSLQQAKSMNRHLTKSFEIPAGSMTVFTMVSMLSTITLYDRVFVRIARIYTLLKRSISFLHNMXYXFMISLLATLVACFVXEVKRKQASLPHWLHYKAHSIIPIS

SEQ ID NO: 60324 - protein, 175 aa, Gossypium hirsutum
  unsure (1)..(175): unsure at all Xaa locations
  Clone ID: LIB3584-007-P1-K1-H6.pep
GSTQLSPRVSDDELDASISVGXKLVHTPDMTFLDKAAIVTEEDXVKPGQAPNLWRLNTIHRVGELKAVIRMGPIWAAGILLITAYAQQNTFSLQQAKTMNRHLTKSFEIPAGSMTVFTMVSMLSTIALFDRVLVRFARRSSGLDRGFCFLPRLGLGCLISVFASLLACFSAAKRF

SEQ ID NO: 60325 - protein, 199 aa, Gossypium hirsutum
  unsure (1)..(199): unsure at all Xaa locations
  Clone ID: GOSHI-09MAY01-C2750_3.pep
HASAHASGPTRPILDKKIGLGQPKRIENAKILVANTAMDTDKVKIYAARVRVDSMSKVAEIEGAEKEKMREKVKKILGHGINCFVNRQLIYNFPEELFADAGILAIEHADFDGIERLALVTGGEIASTFDNPESVKLGHCKLIEEIMIAEDKYDPLSGVEMGSACXIVLIGASHXVLDESERLCMIPLCAAHTDNILRL

SEQ ID NO: 60326 - protein, 527 aa, Gossypium hirsutum
  Clone ID: GOSHI-09MAY01-C2750_1.pep
MAIEKILKDDASEEKGERARMASFVGAIAITDLVKTTLGPKGMDKILQSTGRGNEVTVTNDGATILKSLHIDNPAAKVLIDISKVQDDEVGDGTTSVVVLAGEPLREAEKLVAAKIHPMTIISGYRMAAECARNALLQRVVDNKENAEKFKSDLMKIAMTTLSSKILSQDKEHFAQLAVDAVMRLKGSTNLEAIQIIKKPGGSLKDSFLDEGFILDKKIGLGQPKRIENAKILVANTAMDTDKVKIYGARVRVDSMSKVAEIEGAEKEKMREKVKKILGHGINCFVNRQLIYNFPEELFADAGILAIEHADFDGIERLALVTGGEIASTFDNPESVKLGHCKLIEEIMIGEDKLIHFSGVEMGQACTVVLRGASHHVLDEAERSLHDALCVLSQTVNDTRVLLGGGWPEMVMAKEVDELARKTPGKKSHAIEAFSRALVAIPTIIADNAGLDSADLVAKLRAEHHKEGCNAGIDVISGSVGDMAELGISEAFKVKQAVLLSATEAAEMILRVDEIITCAPRKREDRM

SEQ ID NO: 60327 - protein, 198 aa, Gossypium hirsutum
  Clone ID: LIB3582-007-P1-K1-A2.pep
RSGKTQRTYNVREELFADAGILAIEHADFDGIERLALVTGGEIASTFDNPESVKLGHCKLIEEIMIGEDKLIHFSGVEMGQACTIVLRGASHHVLDEAERSLHDALCVLSQTVNDTRVLLGGGWPEMVMAKEVDELARKTPGKKSHAIEALSRALLAMPTIIADNAGLDSADLVAKLRAEHHKEGCNAGIDVISGSVG

SEQ ID NO: 60328 - protein, 263 aa, Gossypium hirsutum
  unsure (1)..(263): unsure at all Xaa locations
  Clone ID: GOSHI-09MAY01-C2760_1.pep
MADGYWNRRQPTPPMLSSSGALKRPRTEYDGPPSGLHPSHEMHNYLARDSDRGGHLPVKDTKTIGSAYDRYLQSAQISSFPSGEARTFGGLGKPVGGAMPARPIADPPVMGRPGSAAPDMVPNGRNVGYGNQLPLDAMSRLGRDTVPLPPDASNTLYVEGLPSDSTRREVAHIFRPFVGYKEVRLVSKEFRHRGGDPLILCFGDFTTPACAATAMSALQGYKIDEHDPDSNYLRLQVSRYPXGPRSGPGARGRKVNVIFWMEL

SEQ ID NO: 60329 - protein, 121 aa, Gossypium hirsutum
  Clone ID: GOSHI-09MAY01-C2710_3.pep
LDRDACGNLNSMIYPCCDDLRDLKSGHYHKIVEITENASQCLEDEYMVDKPSCSTPRKRSFNLPSVSSIDELRTPPFEELLKLFWEAKSAKLANGDVKHMLAAYEAAQALKDSRVPLTAIN

SEQ ID NO: 60330 - protein, 288 aa, Gossypium hirsutum
  unsure (1)..(288): unsure at all Xaa locations
  Clone ID: GOSHI-09MAY01-C2710_2.pep
GCAANEEKQLLXKVAELLAGSSARKKXLVQMAVHDLRENASSKTSKLQKEMSTMQESTSVVKAEWNVHMESTESHYIEDTSAVESGKKDMEDVLQNCMKKAKIPPLRPRVPQESLLSLEKSNVDSVDSIVRGGMEANQILRDQFSCAVSTALEDVDTANNSCLTSIDYSLQLDRDACGNMNSMIIPCCEELRELKGGHYHKIVEITDNAGKCLEEEYMVDKPSCSTPTKRAFNLPSMSSIEELKTPPFEELLKLFWEAKSAKVANGDIKHMWGNMKQHQQLPNPHPNN

SEQ ID NO: 60331 - protein, 326 aa, Gossypium hirsutum
  Clone ID: GOSHI-09MAY01-C2710_1.pep
SKLTKIVEESQTVNDNKLSEFEKKFEECAANEEKQLLQKVAELLAGSSARKKKLVQMAVHDLRENASSKTSKLQKEMSTMQESTSVVRAEWNVHMESTESHYIEDTSAVESGKKDMEDVLQNCMKKAKMSAQQWKNAQESLLSLEKSNVDSVDSIVRGGMEANQILRDQFSCAVSTALEDVDTANNSCLTSIDYSLQLDRDACGNMNSMIIPCCEELRELKGGHYHKIVEITDNAGKCLEEEYMVDKPSCSTPTKRAFNLPSMSSIEELKTPPFEELLKLFWEAKSAKVANGDIKHMLGEYEAASAAPQSPSQQLKDSRLPLTAIN

SEQ ID NO: 60332 - protein, 366 aa, Gossypium hirsutum
  Clone ID: GOSHI-09MAY01-C2700_1.pep
MGNDAPALKLADIGIAGPDATDAARSASDIVLTEPGLSVIISAVLTSSATRAQRMKNYTIYAASITIRMVGGFLFIALIWKFDFAPFMVLIIAILNDGTIMTISKDRVKPSPQPDSWKLKEIFSTGIVLGGYLALMTVIFFWAMKDTNFFSNTFNVRSLRHNNIDGEKEMMAALYLQVSIVSQALIFVTRSRSWSYFERPGLLLVSAFLVAQLVATLIAVYADWGFARIKGMGWGWAGVIWLYSVVTFIPLDLIKFAIRYVLSGKAWDNLLENKTAFTTKKDYGKEEREAQWAAAQRTLHGLQPPETTSIFNERSSYRELSEIAEQAKRKAEVARLRELNTLKGHVESVVKLKGLDIDNIQQHYTV

SEQ ID NO: 60333 - protein, 138 aa, Gossypium hirsutum
  Clone ID: LIB3585-027-P1-K1-H5.pep
GIRFDHAYAYGSRALYLQVGVASQALIFVTRSRSWSYFERPGLLLVSAFLVAQLVATLIAVYADWGFARIKGMGWGWAGVIWLYSVVTYIPLDLIKFAIRYVLSGKAWDNLLENKTAFTTKKDYGKEEREAQWAAAQR

SEQ ID NO: 60334 - protein, 127 aa, Gossypium hirsutum
  unsure (1)..(127): unsure at all Xaa locations
  Clone ID: LIB3148-017-Q1-K1-D8.pep
LKEIFSTGIVLGGYLALMTVLFFWAMKDTDFFSDKFHVRSLRDRPEQMMAALYLQVSIVSQALIFVTRSRSWSFVERPGLLLVTAFIAAQLVATLIAVYAXWRFAKIQGMGWGWAAVIWLYSLVTYI

SEQ ID NO: 60335 - protein, 84 aa, Gossypium hirsutum
  Clone ID: uC-gsflnu33B025g11b1.pep
GLSVIISAVLTSRAIFQRMKNYTIYAVSITIRIVFGLMFFALSWLSSYSLFFYFISTTFFSYILSLFLSILFYSSLFFFPHSFL

SEQ ID NO: 60336 - protein, 220 aa, Gossypium hirsutum
  Clone ID: GOSHI-09MAY01-C2720_1.pep
MGRRPARCYRQIKNKPYPKSRYCRGVPDPKIRIYDVGMKKKGVDEFPFCVHLVSWEKENVSSEALEAARIACNKYMAKYAGKDAFHLRVRVHPFHVLRINKMLSCAGADRLQTGMRGAFGKPQGTCARVAIGQVLLSVRCKDSNSHHAQEALRRAKFKFPGRQKIIVSRKWGFTKFNRTDYLKYKSENHIVPDGVNAKLLGCHGPLANREPGRAFLHAAV

SEQ ID NO: 60337 - protein, 407 aa, Gossypium hirsutum
  unsure (1)..(407): unsure at all Xaa locations
  Clone ID: GOSHI-09MAY01-C2680_1.pep
FHHEVVKRALVLAMEIRTAGPFLLKLLKEAAEEGLISSSQMVKGFARLAESLDDLALDIPSAKTLFPPRPPKAFSQGWLDASFMKSSCTDGEAQNEDKKLDRYKKEIVTIIHEYFLSDDIPELIRSLEDLGLPEYNPVFLKKLITLAMDRKNRXEKEMASVLLSALHIEIFSTEDIVNGFVMLLESAEDTALDILDASNELALFLARAVIDDVIVPLNLEEITSKLPPNCSGSETVRMARSLITARHAGERLLRCWGGGTGWAVEDASAHASELLEEYESGGVVAEAWRGIRDLGMPFFNHEVVKKALVMAMEKKNDRMLDLLQVCFNEGLITINQMTKGFTRVKDGLDDLALDFPNAKDKFSFYTEYAQKKGWLLPSFGVICNQKLCPLQQPLEKENIFMSLVSHV

SEQ ID NO: 60338 - protein, 210 aa, Gossypium hirsutum
  unsure (1)..(210): unsure at all Xaa locations
  Clone ID: GOSHI-09MAY01-C2640_1.pep
TPPRKAALIAMAAHATEPSEAEKLKFLSSPQGKDEYSQWVVASQRSLLEVMAEFPSAKPPLGVFFAAVAPRLQPRYYSISSSPRFVPARVHVTCALVYGPTPTGRIHRGVCSTWMKNAVPLEKSNDCSWAPIFIRQSNFKLPADPSVPIIMVGPGTGLAPFKSFLQXKIGPQKNGAELGSSLLFFGCRNRXMDFIYEDELXNFVEQGALS

SEQ ID NO: 60339 - protein, 224 aa, Gossypium hirsutum
  Clone ID: LIB3583-025-P1-K1-B2.pep
RNKSDRSSSMINHGDVLKALSRALKKTEESYLDIADKMLMENLQLALMGSCVLVMLMKGEDVYVMNVGDSRAVLAQKAEPDYWLGKVKQDLERINEETLHDLEGFDGDKFSSIPDLTAFQLSVDHSTNEKEEVQRIKNEHPDDPCAVMNDRVKGSLKVTRAFGAGFLKQPKWNNALLEMFRIDYKGNSPYITCVPSLHHHRLGPKDRFLVLSSDGLSIFVVNGL

SEQ ID NO: 60340 - protein, 236 aa, Gossypium hirsutum
  unsure (1)..(236): unsure at all Xaa locations
  Clone ID: LIB3582-036-P1-K1-C6.pep
GRVGLNKTEYLDIADKMLMENPELALMGSCVLVMLMKGEDVYVMNVGDSRAVLAQKAEPDYWLGKVKQDLERINEETLHDLEGFDVDKFSSIPDLTAFQLSVDHSTNEKEEVQRIKNEHPDDPCAVMNDRVKGSLKPKWNNALLEMFKIDYKGNSPYITCVPSLHHQRLGPQILRIIIRWLSQYLTNEEAVSDVELFITLXPEGDPAHHLIEEVLFRAAKKASMDFYDLLRIPQGI

SEQ ID NO: 60341 - protein, 178 aa, Gossypium hirsutum
  Clone ID: LIB3583-022-P1-K1-G8.pep
MGQSVSSAKLTTRRDCYHSQRSYSRSTVLISPMKTEEAEVIDELSDFISDLPDECLACVFQCLTPADRKRCSLVCRRWLRIEGQNRHRLSLNAQSDLHPLIPSIFSRFDAVTKLALKCDRRSVGIGDEALASISERCPNLTRLKLRACRDLTDAGMLAFAKNCRGLKKLSCGSCTFGA

SEQ ID NO: 60342 - protein, 63 aa, Gossypium hirsutum
  Clone ID: LIB3165-007-P1-K1-C2.pep
LPWMGQSVSSAKLTTRRDCYHSQRSYFRSTVLISPMKTEEAEVIDELSDFISDLPDECLARVF

SEQ ID NO: 60343 - protein, 163 aa, Gossypium hirsutum
  unsure (1)..(163): unsure at all Xaa locations
  Clone ID: GOSHI-09MAY01-C2140_1.pep
MASCCNSLRLEGFFSSAFKSSKRSSNAIPIPIPSSSFSHLCNHRFPLQSISFSVPRSPSFTIKASSSSSSSSTTIAEPEGIKITSVPTKPIEGQKTGTSGLRKKVKVFMEENYLSNWIQSLFNSLPPEDYKNGXLVLGGDGRYFNREASQIIIKXAAGNGVGK

SEQ ID NO: 60344 - protein, 271 aa, Gossypium hirsutum
  Clone ID: GOSHI-09MAY01-C2170_1.pep
FVSDKVPEMVMGDPGRFRQIITNLVGNSVKFTERGHIFVKVHLAENPKPMEDPKAETCLNGGSDEDALVSGARQFKTLSGYEAADERNSWDSFKHLVAGEELRYDASVKMKAADEASQSVTLMVSVEDTGIGIPLIAQDRVFMPFMQADSSTSRNYGGTGIGLSITKCLVELMGGHISFISRPQVGSTFSFTTVFGRCKRASFSDTKKPNAEDLPSGFRGLKAVVVAGKPVRAAVTRYHLKRLGMLVEFANSVKIAASACGKNGSSCGSKT

SEQ ID NO: 60345 - protein, 156 aa, Gossypium hirsutum
  Clone ID: GOSHI-09MAY01-C2130_1.pep
PRVRPRVLGRVAGMMSNRGGGDFDRMRHRSPSPMASSNIMSNVSGTGLSNWNSLPQERLSGPPGMTMDWQGAPASPSSYNVKRILRLEIPVDTYPNFNFVGRLLGPRGNSLKRVEATTGCLVYIRGKGSIKDPDKEEQLRGRSGYEHLNDPLHILI

SEQ ID NO: 60346 - protein, 116 aa, Gossypium hirsutum
  Clone ID: LIB3583-022-P1-K1-F10.pep
MSGLYNHRFSPVRTASPHIRNTPDIDSNQLLSELLAEHQKLGPFMQILPTCSRLLNQEILRVSGMMSNQGFGDFDRMRHRSPSPMASSNIMSNVSGTGLSNWNSLPQEVLFLFLFG

SEQ ID NO: 60347 - protein, 136 aa, Gossypium hirsutum
  Clone ID: GOSHI-09MAY01-C2120_2.pep
MSSYENVVGGKLKLKGKALDVKAGGILLKKKHKKQIQHDDQITQNDPSDAASAGETTEVSVDPNEEDINNAEMSSGEKAAPHYDDHLTPAERRYIEQREQLDVHRLAKQANKSHRDRIQDFNQYLANLSEHYDIPE

SEQ ID NO: 60348 - protein, 140 aa, Gossypium hirsutum
  Clone ID: GOSHI-09MAY01-C2120_1.pep
MSSYENVVGGKLKLKGKALDVKAGGIKKKKKHKKQIQHDDQITQNDPSDAASAGETTEVSVDPNEEDINNAEMSSGEKAAPHYDDHLTPAERRYIEQREQLDVHRLAKQANKSHRDRIQDFNQYLANMSEHYDIPKVGPG

SEQ ID NO: 60349 - protein, 258 aa, Gossypium hirsutum
  unsure (1)..(258): unsure at all Xaa locations
  Clone ID: GOSHI-09MAY01-C2090_5.pep
HASAHASNLAEQAERSEEMVRXMENVVSAVPAPDELTVEERNLLSVAYKNVIGARRASWRIVSSIEQKEEGRGNADHVSVIRESRAKIEAELSEICAGILKLLAGESFSARGTRXSQVFYLKMKGDSPMALVCLKHGXHRKASADNPLTAYKSAQDIANAELPPHSSLFRIGDXVVLNICLYLYYEILNSPDRACTLAXQAFDEAIAELDTLGEDSYKDSTLIMQLLRDNLTLWTSDMQDDGTDEIKEASKQEDEKQP

SEQ ID NO: 60350 - protein, 223 aa, Gossypium hirsutum
  Clone ID: GOSHI-09MAY01-C2090_4.pep
MATPSARDENVYLAKLAEQAERYEEMVKFMENVVSAVPAPDELTVEERNLLSVAYKNVIGARRASWRIVSSIEQKEEGRGNADHVSVIREYRAKIEAELSEICAGILKLLDEKLVPAAGTGDSKVFYLKMKGDYHRYLAEFKTGDDRKAAAENTLTAYKSAQDIATFDEAIAELDTLGEDSYKDSTLIMQLLRDNLTLWTSDMQDDGTDEIKEAPKQEDEKQP

SEQ ID NO: 60351 - protein, 261 aa, Gossypium hirsutum
  Clone ID: GOSHI-09MAY01-C2090_3.pep
MATSSPREDNVYMAKLAEQAERYEEMVKFMETVVSAVPSSDELSVEERNLLSVAYKNVIGARRASWRIVSSIEQKEEGRGNADHVSVIREYRAKIEAELSEICAGILKLLDEKLVPAAKTGDSKVFYLKMKGDYHRYLAEFKTGDDRKAAAENTLTAYKSAQEIATSELAPTHPIRLGLALNFSVFYYEILNSPDRACSLAKQAFDEAISELDTLGEDSYKDSTLIMQLLRDNLTLWTSDMQDNATNEIKEAPKREEEKQE

SEQ ID NO: 60352 - protein, 261 aa, Gossypium hirsutum
  Clone ID: GOSHI-09MAY01-C2090_2.pep
MATPSPREENVYMAKLAEQAERYEEMVKFMENVVSAVPAPDELSVEERNLLSVAYKNVIGARRASWRIVSSIEQKEEGRGNADHVAVIRDYRAKIEAELSEICAGILKLLDEKLVPAAGNGDSKVFYLKMKGDYHRYLAEFKTGDDRKSAAENTLTAYKSAQDIAVAELAPTHPIRLGLALNFSVFYYEILNSPDRACSLAKQAFDEAIAELDTLGEDSYKDSTLIMQLLRDNLTLWTSDMQDDGTDEIKEAPKPEDEKQP

SEQ ID NO: 60353 - protein, 261 aa, Gossypium hirsutum
  Clone ID: GOSHI-09MAY01-C2090_1.pep
MAATSPREENVYKAKLAEQAERYEEMVKFMETVVSAVPAPDELTVEERNLLSVAYKNVIGARRASWRIVSSIEQKEEGRGNADHVSVIREYRAKIEAELSEICAGILKLLDEKLVPAAGTGDSKVFYLKMKGDYHRYLAEFKTGDDRKAAAENTLTAYKSAQDIAVAELAPTHPIRLGLALNFSVFYYEILNSPDRACSLAKQAFDEAIAELDTLGEDSYKDSTLIMQLLRDNLTLWTSDMQDDGTDEIKEASKPEDEKQQ

SEQ ID NO: 60354 - protein, 181 aa, Gossypium hirsutum
  Clone ID: LIB3584-056-P1-K2-F9.pep
GRVGGRVGGRVGGRVGEEMVKFMENVVSAVPAPDELSVEERNLLSVAYKNVIGARRASWRIVSSIEQKEEGRGNADHVAVIRDYRAKIEAELSEICAGILKLLDEKLVPAAGNGDSKVFYLKMKGDYHRYLAEFKTGDDRKSAAENTLTAYKSAQDIAVAELAPTHPIRLGLALNFSVFYY

SEQ ID NO: 60355 - protein, 137 aa, Gossypium hirsutum
  Clone ID: LIB3148-011-Q1-K1-D11.pep
PRVRLVHQRLCKYILYIAKALFCVYLEFVYFVLQIIFSQNMFCFFPQAFDEAIAELDTLGEDSYKDSTLIMQLLRDNLTLWTSYMHDDGTDEIKEASKPEEENTTVKFPVFVVAFYFSSCFCMEKLVDPTLLFSYLL

SEQ ID NO: 60356 - protein, 137 aa, Gossypium hirsutum
  Clone ID: uC-gsronu33B049f03b1.pep
YYGNAGRSGPNFRVGPRLRPFVLPTVPPTLPKNPTNPITTGNHGHSFPREENVYMAKLAEQAERYEEMVKFMENVVSAVPAPDELSVEERNLLSVAYKNVIGARRASWRIVSSIEQKEEGRGNADHVAVIRDYRAQI

SEQ ID NO: 60357 - protein, 185 aa, Gossypium hirsutum
  unsure (1)..(185): unsure at all Xaa locations
  Clone ID: GOSHI-09MAY01-C2040_3.pep
VINNPIGPGPSVPDDRVMHRGATVDPLLLSAPAASLLRDVKRTSVVWDQDAGRYVSVPVSATDARNRSSIQTGLPNSSGETSMQGRRVGFPHRSCLCKQGVQHNRYRTYCIHXDSFFFGGPLSSVPVRDSLRNHKGSGLREAQQRVGLNLPRESRFKRDSVSNQLPVFVPGGFENNSAASVSGFK

SEQ ID NO: 60358 - protein, 76 aa, Gossypium hirsutum
  Clone ID: GOSHI-09MAY01-C2040_2.pep
IISSFFGSFGKRPLEPCNNLVSNISKLQGSSEQASQTRRLFRSLLPFDSRGKMCRNFVRSWTEIYLKPETDAAELF

SEQ ID NO: 60359 - protein, 88 aa, Gossypium hirsutum
  Clone ID: GOSHI-09MAY01-C2040_1.pep
SRAFSAQQAEKLLYTGDSIFFGGPLSSVPVRDSLRNDKGSGLREAQERVGLNLPRESRFKRDSVSNQLPVFVPGGFENNSAASVSGFK

SEQ ID NO: 60360 - protein, 69 aa, Gossypium hirsutum
  Clone ID: GOSHI-09MAY01-C2030_1.pep
TLGLPLHRNKIKKRTLSMTLNMVSPLDHAKQDSDVVCSSILNHQQPSMRKLYHKYLNNRTEEQLAAYYF

SEQ ID NO: 60361 - protein, 174 aa, Gossypium hirsutum
  Clone ID: GOSHI-09MAY01-C2350_1.pep
MAANGEREVQKNYWMEHSIDLTEDGTILDSKDADLDKEDRLEVLSLLPPYEEKSILELGAGIGRFTGELAQKADSVIALDFIEDVIKKNESINGHYKNIKFLCADATAPDLDISEGSMDLIFSNLLLMYLSDEEVENLAQGMMKWLKVGGHIFFREACFDQSGDCKQKHDPSLY

SEQ ID NO: 60362 - protein, 200 aa, Gossypium hirsutum
  unsure (1)..(200): unsure at all Xaa locations
  Clone ID: GOSHI-09MAY01-C2340_1.pep
IVLFRDGVSEGQFDMDLNEELMDLKSAFHRINYFPTITLIVAQKRHQTRFFPEGKWDGGPXGNISPGTVVDTKIVHPFEFDFYLCSHYGSLGTSKPTHYHVLWDEHGFSSDQLQELIYNMCFTFARCTKXPVSLVPPVYYADLVAYRGRLYYQAMIKRQSPISTLSSSSSMTSSSSMSSAASFHVWFKLHAYLENMMFFL

SEQ ID NO: 60363 - protein, 262 aa, Gossypium hirsutum
  unsure (1)..(262): unsure at all Xaa locations
  Clone ID: GOSHI-09MAY01-C2270_1.pep
KCSVCLEFPHNAVLLXCSSYDKGCRPYMCATXRRFSNCLEQYKKAYTKATSADNGSVDNANVGQPSEKMEVPELLCPLCRGQVKGWTVVKPVRKYLNRKKRACMQDKCSFVGTYKELKKHVRQSXPITRPRAVEPVLEEKWKKLENERERDDVISTIMSSPPRARVRGDCVIEPGYRGRIYRDESDSDDSFGNPFDDDFIRLDSSVHMHGRFMDYDLYEEDDFGMRRAFRAVPPVARTWPARLLGSVGLRRIPRVRGRNGGR

SEQ ID NO: 60364 - protein, 181 aa, Gossypium hirsutum
  unsure (1)..(181): unsure at all Xaa locations
  Clone ID: GOSHI-09MAY01-C2200_1.pep
MDSHVEPTIATAGPTALSPPRDSLDLIPVGSVEAEEEIETLSPPSEEDHDHANGQNRDQKQNQENSSATAVLTDDLKNKIIKQVEYYFSDENLPTDKYMMSLIKKNKEGFVAISVIASFRRMKRLSRSYPSIVAALKESSLLVVSSDGKMVKRRNSLPSIEVRDPXENLPEDHSVENIRRI

SEQ ID NO: 60365 - protein, 151 aa, Gossypium hirsutum
  Clone ID: GOSHI-09MAY01-C2230_3.pep
MGRMHSRGKGISASALPYKRTPPSWLKISSQDVEENIYKFAKKGLTPSQIGVILRDSHGIAQVKSVTGSKILRILKAHGLAPEIPEDLYHLIKKAVAIRKHLERNRKDKDSKFRLILVESRIHRLARYYKKTKKLPPVWKYESTTASTLVA

SEQ ID NO: 60366 - protein, 151 aa, Gossypium hirsutum
  Clone ID: GOSHI-09MAY01-C2230_1.pep
MGRMHSRGKGISASALPYKRTPPSWLKISSQDVEENICKFVKKGLTPSQIGVILRDSHGIAQVKSVTGSKILRILKAHGLAPEIPEDLYHLIKKAVAIRKHLERNRKDKDSKFRLILVESRIHRLARYYKKTKKLPPVWKYESTTASTLVA

SEQ ID NO: 60367 - protein, 140 aa, Gossypium hirsutum
  Clone ID: LIB3583-025-P1-K1-F7.pep
MGRMHSRGKGISASALPYKRTPPSWLKISSQDVEENICKFAKKGLTPSQIGVILRDSHGIAQVKSVTGSKILRILKARGLAPEIPEDLYHLIKKAVAIRKHLERNRKDKDSKFRLILVESRIHRLARYYKKTKKLPPVWK

SEQ ID NO: 60368 - protein, 109 aa, Gossypium hirsutum
  unsure (1)..(109): unsure at all Xaa locations
  Clone ID: LIB3189-042-P1-K1-G6.pep
MGRMHSRGXKGISASALPYKRTPPSWLKISSQDVEENICKFAKKGLTPSQIGVILRDSHGIAQVKSVTGSKILRILKAHGLAPEIPEDLYHLIKKAGAIRKHLERNRKD

SEQ ID NO: 60369 - protein, 56 aa, Gossypium hirsutum
  unsure (1)..(56): unsure at all Xaa locations
  Clone ID: uC-gsflnu33B132b12b1.pep
MGHMHSQFMGISASALPYXRTPPTWLKISSQETEDNICMSVNNGLTSSQIADILLN

SEQ ID NO: 60370 - protein, 41 aa, Gossypium hirsutum
  Clone ID: uC-gsronu33B047c12b1.pep
LHAIFMLLKNQFTLWFEIDILRRDTIMFSDQNDFSSTFKWY

SEQ ID NO: 60371 - protein, 165 aa, Gossypium hirsutum
  unsure (1)..(165): unsure at all Xaa locations
  Clone ID: GOSHI-09MAY01-C3950_1.pep
MVKSVTVSDQMLRLWRGLKTVVRTSPANTHHYHTIQAIPRECTGSRISSRDRAQGRIPAVVFSQGLLEINPSNRSPSRKQILTAERXQIRSIIKSVQLPFFCSTRFQLQXSGTGSGSSVLLESGTVLPIXIHRDDESGXKILNLVFVWAEDGPELMVVCLYFERL

SEQ ID NO: 60372 - protein, 96 aa, Gossypium hirsutum
  Clone ID: LIB3166-050-P1-K1-B4.pep
PAIPHHSHTIQAIQRDCTASRFSSRVRAQGRIPAVVFSQGLLEKNPSNRSPSRKQILTTERKQIRSIIKSVQLPFFCSTRFQLQIRAGSGSSVLLE

SEQ ID NO: 60373 - protein, 261 aa, Gossypium hirsutum
  Clone ID: GOSHI-09MAY01-C3960_3.pep
IAFEYPRGRLEDRSSLMADIQNIKPTHVFNAAGVTGRPNVDWCESHKTETIRTNVAGTLTLADVCREHGLLMMNFATGCIFEYDAGHPEGSGIGYKEEDKPNFTGSFYSKTKAMVEELLKEYDNVCTLRVRMPISSDLNNPRNFITKISRYNKVVNIPNSMTVLDELLPISIEMAKRNLRGIWNFTNPGVVSHNEILEMYKTYIDPKFKWENFTLEEQAKVIVAPRSNNEMDASKLKKEFPELLSIKESLIKYAFEPNRRT

SEQ ID NO: 60374 - protein, 525 aa, Gossypium hirsutum
  unsure (1)..(525): unsure at all Xaa locations
  Clone ID: GOSHI-09MAY01-C3960_2.pep
MSSYTPKNILITGAAGFIASHIANRLIRNYPDYKIVVLDKLDYCSNLKNLLPSKSSPNFKFVKGDIGSADLVNYLLITESIDTIMHFAAQTHVDNSFGNSFEFTKNNIYGTHVLLEACKVTGQIRRFIHVSTDEVYGETDEDAVVGNHEASQLLPTNPYSATKAGAEMLVMAYGRSYGLPVITTRGNNVYGPNQFPEKLIPKFILLAMRGKTLPIHGDGSNVRSYLYCEDVAEAFEVILHKGEVGHVYNVGTKKERRVIDVAKDICKLFSMDSETSIKFVENRPFNDQRYFLDDQKLKNLGWSERTVWEDGLKKTIEWYTQNPDWWGDVSGALLPHPRMLMMPGXRQFDSEEGKXTSYISSPNQIQMVVPTSKCSVSSQKPVLKFLIYGRTGWIGGLLGQLCDKQGIPFEYGKGRLEDRSSLTADIRNIKPTHVFNAAGLTGRPNVDWCESHKTETIRTNVAGTLTLADVCREHGLLMLNFATGCIFQYDAXHPHGSGIGFKEEDIPNFTGSFFYKPKLLLKNSL

SEQ ID NO: 60375 - protein, 313 aa, Gossypium hirsutum
  Clone ID: GOSHI-09MAY01-C3960_1.pep
PNQTRMVVPTFKTSSSTQKPALKFLIYGRTGWIGGLLGQLCEKQGIPFEYGRGRLEDRSSLMADIQNINPFVRPRVRTHVFNAAGVTGRPNVDWCESHKTETIRTNVAGTLTLADVCREHGLLMMNFATGCIFEYDAGHPEGSGIGYKEEDKPNFTGSFYSKTKAMVEELLKEYDNVCTLRVRMPISSDLNNPRNFITKIARYNKVVNIPNSMTILDELLPISIEMAKRNLKGIWNFTNPGVVSHNEILEMYKTYIDPKFQWVNFTLEEQAKVIVAPRSNNEMDASKLKNEFPDLLPIKESLIKYVFEPNKRT

SEQ ID NO: 60376 - protein, 72 aa, Gossypium hirsutum
  Clone ID: LIB3146-025-Q1-K2-F8.pep
MVLIPKRKPFKGYLVKINEVEDKIITNELNCKDIPGNNSMKKKHRIIPNSIPVNCGSKGSGSRVGWVGPSGP

SEQ ID NO: 60377 - protein, 99 aa, Gossypium hirsutum
  Clone ID: LIB3272-037-P1-K1-E4.pep
MATYTPKNILITGAAGSIASDGANRIVLNYPDYKIVVLDTLDYCSYLKNLIPSESSPNFKCEKGDIGSADLVNYLLITESIDTIMHFASQTHVDNSFGN

SEQ ID NO: 60378 - protein, 299 aa, Gossypium hirsutum
  unsure (1)..(299): unsure at all Xaa locations
  Clone ID: GOSHI-09MAY01-C3910_1.pep
FSTAQEFKDLVWRIMEDSAKPNLSDYFPILKXFDLQGIRKHIRPSYTRLHEIFDEMIDERMEVRASDSVSRNGDLLDVLLDQRQQDGSDFTRQNIKPLILDLFIAGSDTSAITTEWAMAELLRKPGVLQKTRRELMEVIGTKRTVQESDLDKLPYLEAVAKETMRLHPAAPLLLPYKAKNDVEICGYTIPNNTQLLVNAWAIARDPNYWNHPFSFCPERFLDSSLDFRGRYFEYIPFGAGRRICPGLPLAVRMVHLILASMIHSFDWKLPHGIHPQDLDMQEQFGMTLKKAIPLCAIPI

SEQ ID NO: 60379 - protein, 229 aa, Gossypium hirsutum
  unsure (1)..(229): unsure at all Xaa locations
  Clone ID: GOSHI-09MAY01-C3930_1.pep
MNFTASKQPENCLLGPESDSQRTLYPYVTGTSVVALKYKDGILMAADMGGSYGSTLRYKSVERMKPIGKHSLLGASGEISDFQEILKYLDELILYDNMWDDGNSLGPKEVHNYLTRVMYNRRNKFNPLWNSLVLGGVXKKGEKYLGTVSMIGVNFEDNHVATGFGNHLARPILRQEWHENLSFEDGVKLLEKCMRVLLYRDRSAVNKLQIAKITENGVPFSKTYIWNTL

SEQ ID NO: 60380 - protein, 53 aa, Gossypium hirsutum
  Clone ID: GOSHI-09MAY01-C3880_1.pep
NAHKSLAVTVLKLVGDQATLHHISYLSLPLSMEISVMIVGVEFIKLPQQFFYL

SEQ ID NO: 60381 - protein, 44 aa, Gossypium hirsutum
  Clone ID: LIB3135-053-Q1-K1-C9.pep
CIFGVDHFISCHPSGEGSFVGFFLSLREKLLELEKTIMGWWWNV

SEQ ID NO: 60382 - protein, 194 aa, Gossypium hirsutum
  unsure (1)..(194): unsure at all Xaa locations
  Clone ID: GOSHI-09MAY01-C3840_5.pep
QINTDVYTFQXRLVNTLGTPNDTPELREKLHKTRLHIGQLVKDTSAKLKQASETDHHAEVCTSKKITDAKLAKDSQAVLKEFQKAQRLAAERETSYSPFVPQSALPASYTAGEMDAGSDKSAEQRALLVERRQEVVLLDNEIAFNEAIIDEREQGIQEIQQHIVEVNEIFKDLAVLVHEQCYIIVDIGPYFEYS

SEQ ID NO: 60383 - protein, 154 aa, Gossypium hirsutum
  unsure (1)..(154): unsure at all Xaa locations
  Clone ID: GOSHI-09MAY01-C3840_4.pep
MSFRDLEAGRPLVSRQNLINGKQDATQAVASGIFQINTAVSTFQRLVNALGTPKDTPELREKLHKTRLHIGQLVKDTSAKLKQASETDHSAGISASKKVADAKLAKDSQAAPKEFQKAQRLAAERETSYATSAAKAALAXSYSADDVDVGSDGG

SEQ ID NO: 60384 - protein, 73 aa, Gossypium hirsutum
  unsure (1)..(73): unsure at all Xaa locations
  Clone ID: GOSHI-09MAY01-C3840_3.pep
KFLKGSSSCIGAMRVKNACIAFWSFNDAXNRDGCLRCLQQLSHEYSLLKNMLQTLFQLEQQIVAAGGSIPRVH

SEQ ID NO: 60385 - protein, 273 aa, Gossypium hirsutum
  unsure (1)..(273): unsure at all Xaa locations
  Clone ID: GOSHI-09MAY01-C3840_2.pep
MSFRDLEAGRPLVSRQNLINGKQDATQAVASGIFQINTAVSTFQRLVNTLGTPKDTPELREKLHKTRLHIGQLVKDTSAKLKQASETDHSAGISASKKVADAKLAKDFQAVLKEFQKAQRLAAERETSYAPSVPKAVLPSSYSADEVDVDSDGGAVQQAFLLESRRQKVLLLDNEIAFNEAVIEEGEQGIQEXQQQIGEVNEIFKDLAVLVHEQGTMIDDIGTHIENSRAATIQAKSQLAKAAKTQRSNSSLTCLLMVIFGIVILIVVILLVV

SEQ ID NO: 60386 - protein, 272 aa, Gossypium hirsutum
  Clone ID: GOSHI-09MAY01-C3840_1.pep
MSFQDLEAGRPFASRQNMINGKQDASQAVASGIFQINTAVSTFQRLVNTLGTPKDTPELREKLHKTRLHIGQLVKDTSAKLKQASETDHHAEVSTSKKITDAKLAKDFQAVLKEFQKAQRLAAERETSYSPFVPQSALPASYTAGEMDAGSDKSAEQRALLVERRQEVVLLDNEIAFNEAIIDEREQGIQEIQQQIGEVNEIFKDLAVLVHEQGTMIDDIGTHIENSQAATSQAKSHLVKAAKSQRSNSSLACLLLVIFGIVLLIVIIVLAA

SEQ ID NO: 60387 - protein, 44 aa, Gossypium hirsutum
  Clone ID: LIB3048-033-Q1-L1-E11.pep
SDAFSHLLHRSVKFQASKKVADAKLAKDFQAVLKEFQKAQRLAA

SEQ ID NO: 60388 - protein, 65 aa, Gossypium hirsutum
  Clone ID: uC-gsronu33B156e12b1.pep
DYHAEVSTSKKITDAKLAKDFQAVLKEFQKAQRFAAERETSYFPFVPQSALPASYTVGEMDACSD

SEQ ID NO: 60389 - protein, 167 aa, Gossypium hirsutum
  unsure (1)..(167): unsure at all Xaa locations
  Clone ID: LIB3583-035-P1-K1-F3.pep
KRGKKKEKGEKLAEKAAAYDVARGGWSETRTCVVLGGRGFIGRTLVNRLLRLGGWIVRVADSSSHLLLLDTXSGSDSLLSDAISSGQATFCHVDVLDTSQIVKVTTGADVVFYMEPTDLDTHDFSNCYMIIVQGAXNVINACQEKXSKRLVYNSSADXVFDGSQDIL

SEQ ID NO: 60390 - protein, 127 aa, Gossypium hirsutum
  Clone ID: LIB3585-067-P1-K1-B7.pep
VTTGADVVFYMEPTDLDTHDFSNCYMIIVQGAKNVINACQESKVKRLVYNSSADVVFDGSQDILNGDESFAYPGKFKDMTVDLKFQAEGLIRLANNIGGLQTCVLRPSNVFGPGETQFVPLLANLAK

SEQ ID NO: 60391 - protein, 124 aa, Gossypium hirsutum
  Clone ID: GOSHI-09MAY01-C3860_12.pep
MSGVPQSHASSQAARGSKRKWVPEEDAALVSCMVDLHNVGTFNADTGFKAGYLNELEKMLEKTLPRAMLKAKPNIESRIRCLKREWSVVYDMLNGQNNSGFGWDEHKQLVVAKDAVWESYVKSH

SEQ ID NO: 60392 - protein, 170 aa, Gossypium hirsutum
  Clone ID: GOSHI-09MAY01-C3860_11.pep
PRVRGFKAGYLTHAAALAAVVLPNAMLEKRLAFNSFLLSHKEAAQFRHRSFLYYDQLTAIYAKDRAIGKDAQTSADIFEEINVEDVAATNTHEEINDFYGSEADVSLDDMDLSATQQQSESNQLEIKVILYFQRRKKGFLMQVIFLLHLMMLPLYSRKIYGPLALKSVRV

SEQ ID NO: 60393 - protein, 86 aa, Gossypium hirsutum
  Clone ID: GOSHI-09MAY01-C3860_9.pep
FQYLAVMARLPLIAQSVRRKRIGIAVTIWLQICGIAIWFLLTLGACLSLRSWTPSLGAYILDFYAKRDYVKRLVYASDETCMNKLG

SEQ ID NO: 60394 - protein, 202 aa, Gossypium hirsutum
  Clone ID: GOSHI-09MAY01-C3860_8.pep
IMARLPLIVQSVRRKRIGLALTIWLQLCTVASWFLITLGATGKDAQTAVDIIEEIDAEDAATTNTHEERNDFHGCEADVSLDDVDLSDTQQQPAINQEKIKPVGVEISRSIASEVLIQQKLKMTIQESALKLYSTLCEVEGLTDDELYHALIKILDYPTQMLIFFSLLYNWNRSKDFLLTIKYHGSVDDILVTFCVCNIWMV

SEQ ID NO: 60395 - protein, 110 aa, Gossypium hirsutum
  Clone ID: GOSHI-09MAY01-C3860_7.pep
CRRWLPVWSTCTMLEPLMLIRGFKAGYLNELEKMLEKALPNAMLKAKPNLESRIRTLKRDWSIVYDMLSGKNNSSFGWDDHRQLVVAEDAVWNSYINVRIISSIYYLILT

SEQ ID NO: 60396 - protein, 138 aa, Gossypium hirsutum
  Clone ID: GOSHI-09MAY01-C3860_6.pep
MSGVPQSHAYSQAFRGSKRKWVPEEDAALVSCMVDLHNVGTFNADTGFKAGYLNELERYLQTVSPNAMLKAKPNIESMIRLLKREWSIVYDMLNGQNNIGFGWDEHMQLVVAEDAVWESYLKSHKEAAQFKFRTFPYY

SEQ ID NO: 60397 - protein, 165 aa, Gossypium hirsutum
  Clone ID: GOSHI-09MAY01-C3860_5.pep
TVSAGYHFSSFLFAYFSAKRFFVHWFLHRSRPDLLITDASSQASRGSKRKWIPEEDAALVSCMVDLHNVGTFNVDTGFKAGYLNELEKMLEKALPRAMLKAKPNIESRISCLKREWSVVYDMLNGQNNSGFGWDEHRQLVVAENTVWESYVKSHKEASQFRHRSF

SEQ ID NO: 60398 - protein, 305 aa, Gossypium hirsutum
  Clone ID: GOSHI-09MAY01-C3860_4.pep
GTKRKWVPKEDAALVSCMVDLHNVGTFNADTGFKAGYLNELERMLEKALPNAMLKARPNIESRIRLLRRDWSIVYDMLNGQNNSGFGWDEHWQLVVVEDAVWDSYLNSHKDAGQFRHRSFPYPRVRPPVRARDRATGKDAQTAADVLEEINAEDVPSADINEDRNEYYDCDANVSFDDMDVSATEPQTDKNQGGSSSSKRKKKYSDATGHFSSSVNDAATLLAENMRAIGEQISRSFASDVVVHQGIQQKAANLYPTLCEIEGLTVDERFQALSKIPDHPTQMVVFFSLPSDVRLEWVRRFLADH

SEQ ID NO: 60399 - protein, 148 aa, Gossypium hirsutum
  unsure (1)..(148): unsure at all Xaa locations
  Clone ID: GOSHI-09MAY01-C3860_3.pep
MSGVSESNVSYQASRGTKRKWVPEEDVALVSCMVDLHNVGTFNADIGFKAGYLNELEKMLEKALPNAMLKARPNIESRIRLLKRDWSIVYDMLNGQNNSGFGWDEHRQLVVAEDAVXDSYLNSHKEVGQFRHRSFPYYDQLTVIYARD

SEQ ID NO: 60400 - protein, 326 aa, Gossypium hirsutum
  unsure (1)..(326): unsure at all Xaa locations
  Clone ID: GOSHI-09MAY01-C3860_1.pep
MSSVSESNVSSQAFQGTKRKWVPEEDVASVSYMVDLHNVGTFNADTGFKAGYLNELEKMLEKALPNTMLKARPNIESRIMLLKRDWSIVYDMLNGQNNSGFGWDEHRQLVVAKDAVWNSYLNSYKKAGQFRHRSFPYYDQLTAIYARDRATGKDAQTTADVIEEINVQDVPTTDINEERNEFYDCEADVSLDDMDVSATEPQLDSHQGGSSSSKKKKKXSDASDHFSSSFHDAATLLAENMRAIGEQISRSIASDVVVQQKSEEFQIIQEKATNLYPTLCEIEGLTVDERFRALSKIPDHPTQMLVFFSLPSDVRLEWVRRFLADH

SEQ ID NO: 60401 - protein, 92 aa, Gossypium hirsutum
  unsure (1)..(92): unsure at all Xaa locations
  Clone ID: AI055042.1.pep
ICPSLFKVDRQDQWCYCFLFFFGLFDLFPLLTVXRLVNHXNYVQVPSESKWFLPKHXRGTKRKLGSRKKMQRFGSYMGGTCTMLEPLMLIXV

SEQ ID NO: 60402 - protein, 66 aa, Gossypium hirsutum
  Clone ID: LIB3585-067-P1-K1-A7.pep
WQLELFGLFDCFLHPQLSVLYSLNHYNYVRCYRIKCFFSNFSRNQKEIGSRRRCSVGLLHGGLAQC

SEQ ID NO: 60403 - protein, 102 aa, Gossypium hirsutum
  Clone ID: AW186891.1.pep
LGHFKRFRNTRRAQIYSFLLPTSSEKSQDFLDLHSFWIEPIPSGNLPPGFDPVEGCKLIKKEKVLFSRFSLFFFSLYEAVRVHCNEYFIWSFNSLPLEGTFF

SEQ ID NO: 60404 - protein, 121 aa, Gossypium hirsutum
  Clone ID: LIB3583-057-P1-K1-A2.pep
DPRLRGKLSSARVQVLPISSALFYPPNPRATSTLSLPTSNRTVPYIFPYFPSLLQVQKKSESDLFLKVTAKKKKTRGLATLTPGKSKRPHYFRAGTRALQEIRKYQKTSNLLFLLPASSEK

SEQ ID NO: 60405 - protein, 90 aa, Gossypium hirsutum
  Clone ID: LIB3829-008-Q6-K6-F4.pep
SGLFDCFLHPQLTVFFSHNHLMARLPLIAQSVRRKRIGIALTIWLEICRIAIWFLFTMGASLSLHTYRRRIRSSALSLHTYRRRIRSSAT

SEQ ID NO: 60406 - protein, 78 aa, Gossypium hirsutum
  Clone ID: uC-gsflnu33B036d05b1.pep
PFCPKENSVLLRCCFSQFLLPCFTLPTRKPPSPSPFQHQTESPLTFSFFCPVNFSACLLFKLQENRRGLIVFEQELGL

SEQ ID NO: 60407 - protein, 123 aa, Gossypium hirsutum
  unsure (1)..(123): unsure at all Xaa locations
  Clone ID: uC-gsflnu33B100g08b1.pep
VRFVPEGNCKKIGGLATPTPGKSKRPHRFRAGTRSLQEIRKYQKTSNLLVPTASFIREIEPIPSGNLPPGFDPIEGCKLIRKENVLFSRFSLFFFSLYEAVRVHYNEYXIWSFNSLPLEGTFF

SEQ ID NO: 60408 - protein, 111 aa, Gossypium hirsutum
  Clone ID: LIB3829-008-Q6-N6-F4.pep
ISSSFNDAVTLLAENMRIIGKQISRSIASDVVVQQKSEEFQIIQEKATNLYSTLCEVEGLSVDERYRALSKIPDHPTQMLVFFSLPSEVRLEWVRSFFLTIKNQCSNFLML

SEQ ID NO: 60409 - protein, 125 aa, Gossypium hirsutum
  Clone ID: LIB3165-013-P1-K1-E9.pep
PSSWMSLSLSPQILRLLLAKTPSSSQSWPILHSPCCCSSISSPISLVTVMARLPLIAQSVRRKRIGAALTIWLEICIIAIRFLFRMGANLSLHTYRPMIRSYTLDFYTKRDYVKRLVYASDETCI

SEQ ID NO: 60410 - protein, 106 aa, Gossypium hirsutum
  Clone ID: LIB3166-014-P1-K1-D1.pep
SVLFYPPKPLSISTHPLPPSIDIDRSCQRKLQPIPTFIFAYFSAKRSQPVIISHLSSSHISLLNGLRLPSSHISHISSHLSSLHALVGVVAFFFINLITIVSSVSW

SEQ ID NO: 60411 - protein, 41 aa, Gossypium hirsutum
  unsure (1)..(41): unsure at all Xaa locations
  Clone ID: LIB3196-035-P1-M1-F5.pep
DYSDSTKELKPNTLGLNXXEDSSNTLYPRLSPESSTRCHPI

SEQ ID NO: 60412 - protein, 59 aa, Gossypium hirsutum
  Clone ID: LIB3146-025-Q1-K1-F1.pep
HASADSFAFAYVSMGGRNWLKKLLLDIKLYISAGDRLITFSVCNIWDGMSLQSFNFLMY

SEQ ID NO: 60413 - protein, 165 aa, Gossypium hirsutum
  Clone ID: GOSHI-09MAY01-C3820_1.pep
MSRCFPYPPPGYLRQGFAESIKLENEKVPSKREQRLHKRSEKKQKKKERERKDKTHGLTKKFKHDDSLNVYKDDQLENSDLTEEHGPPVCYTSDVSQNSNKRKRETLFFSEYRVNDNALKIRFTLKKPCQSAASLSEETVSTSVRSDSTREQCSSWNYKANTVTH

SEQ ID NO: 60414 - protein, 262 aa, Gossypium hirsutum
  unsure (1)..(262): unsure at all Xaa locations
  Clone ID: GOSHI-09MAY01-C3550_3.pep
MEAGVACKLNYPTWIRFGRKSTGSLRFDRIAKQEHKTRVVVSAHFPVQTSSNRHRSVSLEVSCSSYTNFSASTMETGSIHAPFGEALMLKNKSLEVEPYLNGHSIYLVGLMGSGXTTVGKILSHVLGYSFCDRLNIRSVNGMSVAEIFKLHGESFFRKKETEVLQRLSSQKQLVVSTGGGAVVQDVNWDYMQKKGIVVWLDVPLEALAQRIAAVGTHSRPLLHYEDGDPYTKAXKRLSYLLEQRGKKYAKANARVSLEGMYS

SEQ ID NO: 60415 - protein, 145 aa, Gossypium hirsutum
  unsure (1)..(145): unsure at all Xaa locations
  Clone ID: GOSHI-09MAY01-C3550_1.pep
FRKKETEVLQRLSSKKQLVVSTGGGAVVRDVNWDYMQKKGVVVWLDVPLEALAQRIAAVGTHSRPLLHYEHGDPYTKALKRLSYLLELRGKNYAKANARVSLXEIAGLLGYXDVSDLTPTEIAIEALGQIGVYLKEEDGMAIAGL

SEQ ID NO: 60416 - protein, 61 aa, Gossypium hirsutum
  unsure (1)..(61): unsure at all Xaa locations
  Clone ID: LIB3825-020-Q1-K6-D11.pep
XAWADAWVMLKQMPGFHWKEIAGKLGYRDVSDLTPTEIAIEALQQIEGYLKEEGGMVIAGL

SEQ ID NO: 60417 - protein, 51 aa, Gossypium hirsutum
  Clone ID: LIB3584-020-P1-K1-C6.pep
PTRTVSTTKLCNSQCIVTKYHEHDALVYVSLKKKNKKKTTKRLKKTLKKQN

SEQ ID NO: 60418 - protein, 217 aa, Gossypium hirsutum
  unsure (1)..(217): unsure at all Xaa locations
  Clone ID: GOSHI-09MAY01-C3480_1.pep
MASMAFPVVQSPRRRGPLFSSNKEQTQNWNALKFVRGKKLLKDLSTWGIGGPCNYFVQVFHQTHLLSAIRYCREFSIPCVVIGKGSNCLFDDLGFDGCVLLNQIDFLERMEPGVYRAGSGFRFNHLGSLSCNEGFTGLEFAAGIPGTVGGATYMNAGANGQETANVIESVDIVTTEGNFXTLNRIDLTFGYRSSSFQDMDNLAAIVARTFRLEHSGS

SEQ ID NO: 60419 - protein, 56 aa, Gossypium hirsutum
  Clone ID: GOSHI-09MAY01-C3450_2.pep
PNPCFPLFCYSIFCPRPQPSDSTTPPCTGCCSSNSSPISLVTQVSFPPQVKLICDL

SEQ ID NO: 60420 - protein, 84 aa, Gossypium hirsutum
  Clone ID: GOSHI-09MAY01-C3450_1.pep
KSLDYKTKEKRQQSSMYQMVRYNPKPNTHSTYGTRGGTKFSQQSKALLTTKYNQTKQTKTQQQLKLRKISIVWNLSRLSMPNTN

SEQ ID NO: 60421 - protein, 154 aa, Gossypium hirsutum
  Clone ID: GOSHI-09MAY01-C3410_1.pep
MDDPELEWEIQESSTGYSENGKLSWLMRLGRKIFVTGIVISSAPLVFPPIMAISAIGFVCSVPYGVLLVSYVCTKTLMSRLLPMPSRSAPLLLEYGKACNGEGEGDGEGEGEGEGEGEGGGGEETNGVQNEVIKGDISIEREEEELKEDIIGRN

SEQ ID NO: 60422 - protein, 346 aa, Gossypium hirsutum
  unsure (1)..(346): unsure at all Xaa locations
  Clone ID: GOSHI-09MAY01-C3400_1.pep
IDCMDVMENLGYMDLIDNNDLFDXSSIFHHDDTGLEEFQQDQQNQQQQEHDSTQQQLGQQVGAXCTGRTNDQTQQEKASDDLAMGFLEWLKTNKETXSAEDLWGVKIKKATIECAARRLGGGKEAMKQLLKLILEWVQTNHLQRRRIKESASNNQPDHPYQYSNPNPRVPRPNPNLNCNPILPSEPNSCFSQPAWVPQPAYTTDPEAAPPPLPGFTPVVGYMGDPFANGAPNVTTHHHPYQPPTDYQVLDTAQTWPPSQFALAASQYNSFADNNLHPAPLQQQPSAFPGYVNQYPYHYVPGHNNNDQRLLRXGSSATKEARKKRMARQRRFASHHRNHGHHHNNQQ

SEQ ID NO: 60423 - protein, 234 aa, Gossypium hirsutum
  Clone ID: GOSHI-09MAY01-C3780_1.pep
ELHHLRAVAILMTFIMVVSILTSIAIVRRILMATSVLKVAAKVIGEVQALIIFPIIPYAILAIFYMFWISAALHLFSSGQVVKNNCNTNCCAYDLVAKKVNCDGCCGYSTHYTPHIAVAIFFHLFGGYWATQFFIACSSTVIAGSVASYYWARGETSPEIPFLPVFASMKRLIRYNLGSVALGSLVVSFVESIRFILESIRRKLKVAGVTSDGWLGKIGHHTSQGCLRCVEGTI

SEQ ID NO: 60424 - protein, 63 aa, Gossypium hirsutum
  Clone ID: LIB3493-041-P1-M1-F7.pep
TNCCAYDLVVKKVNCDGCCGYSIHYTPHIAVAIFFHLFGGYWATQFFIAWTVIKFAGVIIILY

SEQ ID NO: 60425 - protein, 106 aa, Gossypium hirsutum
  unsure (1)..(106): unsure at all Xaa locations
  Clone ID: uC-gsflmaxxa064c05b1.pep
RADARADARVLFFGGYWATHFFIACSSTAIAGSVAXSYYWARGETSPEIPFLPVFASMKRLIRYNLGSVALGSLVVSFVESIRFILESIRRTLKVAGVTSDGLVWK

SEQ ID NO: 60426 - protein, 148 aa, Gossypium hirsutum
  Clone ID: GOSHI-09MAY01-C3750_2.pep
MAGGLIHQVLRRKFQSQSAVQALSWFSSRKVNDDAGSAGMRTVALLGAGVSGLLGFATVASADEAEHGLGVANYPWPHAGILSSYDHASIRRGHQVYQQVCASCHSMSLISYRDLVGVAYTEEETKAMAAEIEVVDGPNDEGEMFTRP

SEQ ID NO: 60427 - protein, 186 aa, Gossypium hirsutum
  Clone ID: GOSHI-09MAY01-C3750_1.pep
MAGGLIHQVLRRKFQSQSAVQALSWFSSRKVNDDAGSAGMRTVALLGAGVSGLLGFATVASADEAEHGLGVPNYPWPHAGILSSYDHASIRRGHQVYQQVCASCHSMSLISYRDLVGVAYTEEETKAMAAEIEVVDGPNDEGEMFTRPGKLSDRFPQPYANEQAARFANGGAYPPDLTLITKARHN

SEQ ID NO: 60428 - protein, 120 aa, Gossypium hirsutum
  Clone ID: GOSHI-09MAY01-C3740_2.pep
FNYCFSEYFLLSFVIFFTNLNIKIIISYYFPFCLQLNEKNQSFLGYLRAHQTPPSSPTPPLKQRHPVLQQPPQRRLPRPIKPIANPVESSLVPTSSVPRRRYWLLQRPCFSLYSQLDLLQ

SEQ ID NO: 60429 - protein, 196 aa, Gossypium hirsutum
  Clone ID: GOSHI-09MAY01-C3740_1.pep
MIKMGFIVLALMVVSAATVVTAADESGLANECSKDFQSVMTCLSFAQGKAASPSKECCNSVAGIKENKPKCLCYILQQTQTSGAQNLKSLGVQEDKLFQLPSACQLKNASVSDCPKLLGLSPSSPDAAIFTNSSSKATTPSTSATTATPSSAADKTDSKSSGIKLGPHFVGSTAALLVATAAVFFLVFPAGFASIV

SEQ ID NO: 60430 - protein, 66 aa, Gossypium hirsutum
  unsure (1)..(66): unsure at all Xaa locations
  Clone ID: LIB3189-017-P1-K1-E11.pep
RKMMERGFIVSVLTEXFAATVVTAADESGLANECSKDFQSVMTCLSFAQGKAASPSKECCYSKACV

SEQ ID NO: 60431 - protein, 78 aa, Gossypium hirsutum
  Clone ID: LIB3083-007-Q1-L1-B1.pep
METSAGRCFTLPGGNPLSYACIKYFQSVMTCLSFAQGKSSSPSNECCNSMAVIKENKPKCLCYILQHTQTCGAQNLIS

SEQ ID NO: 60432 - protein, 110 aa, Gossypium hirsutum
  Clone ID: GOSHI-09MAY01-C3770_1.pep
MSRRNGPKLELKLNLSPPRFNPRVESPSRSATVSPTSPPGSCVSSEMEYDTGSSSEATTTSMVLVGCPRCLMYVMLSEDDPKCPKCKSTVLLDFLNDTATAASTKTRKSS

SEQ ID NO: 60433 - protein, 84 aa, Gossypium hirsutum
  Clone ID: LIB3145-034-Q1-K1-A2.pep
MLHACFIQVIFIYVNITKMSRRNGPKLELKLNLSPPRFNPRVESPSRSATVSPTSPPSSCVSSEMEDDTGSCSEATTTSMVLCG

SEQ ID NO: 60434 - protein, 194 aa, Gossypium hirsutum
  Clone ID: GOSHI-09MAY01-C3760_1.pep
KKDVCYQWFFSSETEDRKSFGPLPSQRSCSFKVCFEDIGRCLKCECIVTDVFGRSSEPVYAETAPVLPGIPRIDKLEIEGRGFHTNLYAVRGTYFGGKEGKSKIQWLRSMVGSPDLISIPGETGRMYEANVDDVGYRLVAIYTPVREDGIEGQPVSASTEPIAVEHDVYKEVKQKLDIGSVKFEVLCDRVRILF

SEQ ID NO: 60435 - protein, 111 aa, Gossypium hirsutum
  Clone ID: LIB3146-010-Q1-K1-D8.pep
KEVKQKLDIGSVKFEVLCDKDRNPKKVPGEGCLERRILEINRKRVKVVKPGSKTSFPATEIRGTFAPPFHVEVFRNDQRRLRIVLDSENEVDLMVHSRYIRDVIVLVIRGL

SEQ ID NO: 60436 - protein, 207 aa, Gossypium hirsutum
  unsure (1)..(207): unsure at all Xaa locations
  Clone ID: GOSHI-09MAY01-C3720_1.pep
SRGTNASTFLAAKRVAVVTGANKGIGFELCRNLASKVIMVVLTSRDEKRGLEAFAKLKDSGLSHHLVFHQLDVTVPSSIASLVDYVKSKFGKLDLLVNNAGTFGAILHQQAFVKATELAGYFPSEEQASEYEIATQTFELAQECLETNYYGAKRMVEAFVPLLHLSDSPRIVNVSSIMGLLKNIPSQWAKEVLSDAEXVTEEQVDEV

SEQ ID NO: 60437 - protein, 163 aa, Gossypium hirsutum
  Clone ID: GOSHI-09MAY01-C3690_1.pep
TPFLLWQTGGGGAIPDRWMLVVKEQKDGSSLSYYTCPESGQKFNTYEDLMRYVNYAKAAKRGTCSPDFCPRKPPRKPKKKASTPEVAQNVAEKDKDSDSDSDSDSSDSTFELPPIASLEFLDEWSSAESDKQSASGKKKLEKNHASNEGCSSGNMGKAKKQKK

SEQ ID NO: 60438 - protein, 172 aa, Gossypium hirsutum
  unsure (1)..(172): unsure at all Xaa locations
  Clone ID: LIB3582-017-P1-K1-C4.pep
GKPSGEITILAMADKVSSRPIPDRWMLVVKEQKDGSSLSYYTCPESGQKFNTYEDLMRYVNYAKAAKLSIYSPDFCPRKPPRKPKKKASTPEVAQNVAEKDKDSDSDSDSDSSDSTFELPPIASLEFLDEWSSAESDKQSASGKKKLEKNHASXEGCSSGNMGKAKKQKKVM

SEQ ID NO: 60439 - protein, 70 aa, Gossypium hirsutum
  Clone ID: GOSHI-09MAY01-C3650_5.pep
HDAFFFVSRGLVSSKTAGVFVSFPFNFSPLPNFPLLIFVISSLLFSLLTFSNYGASFFSCLDSKCFACKR

SEQ ID NO: 60440 - protein, 70 aa, Gossypium hirsutum
  Clone ID: GOSHI-09MAY01-C3650_4.pep
RKRVNRALDRCQHECYAYPLFLNQAIHLLVKLESDFDLVKCRTEILDCRHSDCPSHLDILDLPVSCSLPI

SEQ ID NO: 60441 - protein, 100 aa, Gossypium hirsutum
  Clone ID: GOSHI-09MAY01-C3650_3.pep
LASPDGRVIGGGVGGMLIAAGPVQVIVGSFIWGGSKAKNKKGGQEGIKDSDDQMVDNLVAPPGISPSQNMTPSAPAGVWPGSRSMDMRNNSHVDIDLMRG

SEQ ID NO: 60442 - protein, 186 aa, Gossypium hirsutum
  Clone ID: GOSHI-09MAY01-C3650_2.pep
RPPGTGRKQQLSSLGELLSGSAGMGFTPHVITHCNRKKTLQQKLMSFSQQGPREVCILSANGAVSTVTLRKPSSSGGTVTYEGRFEILCLSGSYLLTSNTGSRNRTGGLSVSLASPDGRVIGGGVGGMLIAASPVQVLRSQSSCLFFQLKIKLACFIASLKKQEAIIVIPFQSLNHLNLPYALLGI

SEQ ID NO: 60443 - protein, 340 aa, Gossypium hirsutum
  Clone ID: GOSHI-09MAY01-C3650_1.pep
MDRGDAMALSGSASYYMQQRGITGSGSEPESGIHGSPGIHPFSSPNVQYQSSIPVTTVGSTLAMESPSGIAPHSVNVGTPSAQPSSETVKRKRGRPRKYGPDGTVSLALTPASAPHPVTTTPGQKRGRGRPPGTGRKQQLASLGDWLSGSAGMGFTPHVITVAVGEDIATKIMSFSQQGPRAVCILSANGAVSTVTLLQPSSSGGTVTYEGRFEILCLSGSYLLISNNGSCSRSGALSVSLATPDGRVIGGGVGGMLIAASPVQVIVGSFQWGGPKAKNKKPEGQECLNDSDNQSVDNLVSPSGISPSQNLIPPSPAGVWPGSRTMDMRNTHVDIDLMRG

SEQ ID NO: 60444 - protein, 97 aa, Gossypium hirsutum
  Clone ID: uC-gsflnu33B055b04b1.pep
LARAESLPSSISARHGTTSKSESSFTSRCTAWVKNNGYAAHSCVTLILSAGDSFPLIGSQAMYKVCCYRQPDFQLDGISLDFTRRQERWFGPIFCSF

SEQ ID NO: 60445 - protein, 112 aa, Gossypium hirsutum
  Clone ID: LIB3272-002-P1-K1-G4.pep
MDRRDAMALSGSASYYMQQRGITGSGSEPESGIHGSPGIHPFSSPNVQYQSSIPVTTVGSTLAMESPSGIAPHSVNVGTPSAQPSSETVKRKRGRPRKYGPDGTVSLALTPA

SEQ ID NO: 60446 - protein, 173 aa, Gossypium hirsutum
  Clone ID: GOSHI-09MAY01-C3670_1.pep
MSLGYAEKLSFIEDVGQVGMTEFFDSAHVLQDKIEQLAKLIEKSRHLVVFTGAGISTSCGIPDFRGPKGIWTLQREGKPLPEASLPFHRAMPSMTHMALVGLEKAGILKFVISQNVDGLHLRSGIPREKLAELHGNSFMETCPSCGAEYYRDFELETIGLKETSRRCLMRNVE

SEQ ID NO: 60447 - protein, 144 aa, Gossypium hirsutum
  unsure (1)..(144): unsure at all Xaa locations
  Clone ID: LIB3543-039-Q1-K1-H4.pep
MDENLLDNIMGRLLGTKNGRSTKQVQLTEAEIKQLCAASKDXFLSQPNLLELEAPIKICGDVHGQFSDLLRLFEYGGYPPTANYLFLGDYVDRGKQSIETICLLLAYKIKYKENFFLLRGNHECASINRIYGFYDECKRSLMFV

SEQ ID NO: 60448 - protein, 112 aa, Gossypium hirsutum
  unsure (1)..(112): unsure at all Xaa locations
  Clone ID: LIB3583-053-P1-K6-C1.pep
SSSNELGDVHGQFSDLLRLFEYGGYPPTANYLFLGDYVDRGKXQSIETICLLLAYKIKYKENFFLLRGNHECASINRIYGFYDECKRRFNVRVWKLFTECFNCLPVAALIDE

SEQ ID NO: 60449 - protein, 216 aa, Gossypium hirsutum
  Clone ID: GOSHI-09MAY01-C3620_1.pep
MEDEKARSKFKRLCVFCGSNSGHRQVFSDAALELGNVLASGKLDLVYGGGSVGLMGLISQTVYDGGCHALGIIPKALMPLEISGETVGEVRTVLDMHERKAAMARESDAFVALPGGYGTMEELLEMITWSQLGIHKKTVGLLNVDGYYNNLLALFDNGVKEGFIKPSARHIIVSAPTANELLEKMEQYTPSHEHVAPHESWQMEQLGDYPNQLNAQ

SEQ ID NO: 60450 - protein, 66 aa, Gossypium hirsutum
  Clone ID: LIB3583-053-P1-K6-B10.pep
ASSKFKGVCVFCGSNSGRRKVFSDAALELGNELVKRKIDLVYGGGSVGLMGLISQTVYDGGCHVLG

SEQ ID NO: 60451 - protein, 164 aa, Gossypium hirsutum
  Clone ID: GOSHI-09MAY01-C3140_1.pep
MERNISLVSLLCFIIFNGCLVLEADAVKSQRSEKLKLIHRHSPELGHNPGTTLGPPKNSEERLKQLVQSDKARLHAIKRRLGVVGKANDRVEFPFRSAADLGFGQYFVSLRMGTPAHTFTLLVDTGSCLTWLKCKYTCIDCSAAWYGRRFFSANESSSFKSIPC

SEQ ID NO: 60452 - protein, 197 aa, Gossypium hirsutum
  Clone ID: GOSHI-09MAY01-C3130_4.pep
HANVCTILSSYTMDIRDGVNIKVKAKMIEGERPRGKLTRNFKHLNLYFHLTKDEETGTRKLTIEAWFGTRKTSAAIRTVLSHMENLITGVTKGYRYKLTFVYAHLPIGASITSGNKSIEIRNFLGEKKVRKVDMLEGVSIVRSEKVKDEIVLDGNDIELVSRSAALINQKCHVKNKDIRKFLDGIYVSEKGRVAEEE

SEQ ID NO: 60453 - protein, 194 aa, Gossypium hirsutum
  Clone ID: GOSHI-09MAY01-C3130_3.pep
MKTILSSETMDIPDGVAIKVKAKMIEVEGPRGKLIRNFKHLNLDFHLIKDEESGKRKLRIEAWFGSRKTSAAIRTALSHVENLITGVTKGYRYKMRFVYAHFPINASITNGNKSIEIRNFLGEKKVRKVDMLEGVSIVRSEKVKDEIVLDGNDIELVSRSAALINQKCHVKNKDIRKFLDGIYVSEKGRIAEQE

SEQ ID NO: 60454 - protein, 194 aa, Gossypium hirsutum
  Clone ID: GOSHI-09MAY01-C3130_2.pep
MKTILSSETMDIPDGISIKIKAKVIEVEGPRGKLIRDFKHLNLDFHLIKDEETGKRKLRLEAWFGSRKTSAAIRTALSHVENLITGVTKGYRYKMRFVYAHFPINASITNANKSIEIRNFLGEKKVRKVDMLEGVSIVRSEKVKDEIVLDGNDIELVSRSAALINQKCHVKNKDIRKFLDGIYVSEKGRIAEEE

SEQ ID NO: 60455 - protein, 194 aa, Gossypium hirsutum
  Clone ID: GOSHI-09MAY01-C3130_1.pep
MKTILSSETMDIPDGVSIKVKAKVIEVEGPRGKLTRNFKHLNLDFHLIKDEETGKRKLRIEAWFGSRKTSAAIRTALSHVENLITGVTKGYRYKMRFVYAHFPINASITNGNKSIEIRNFLGEKKVRKVDMLEGVSIVRSEKVKDEIVLDGNDIELVSRSAALINQKCHVKNKDIRKFLDGIYVSEKGRIAEEE

SEQ ID NO: 60456 - protein, 509 aa, Gossypium hirsutum
  Clone ID: GOSHI-09MAY01-C3120_1.pep
MALASLVRRKAYLLSRNLSNSPADALKYSFSLSNFSRGFASGSEENDVVVIGGGPGGYVAAIKAAQLGLKTTCIEKRGTLGGTCLNVGCIPSKALLHSSHMYHEATHSFAGHGVKFSSVEIDLPAMMAQKDKAVSNLTRGIEGLFKKNKVNYVKGYGKFISPSEVSVDTIEGVSTVVKGKNIIIATGSDVKSLPGITIDEKRIVSSTGALALQEVPKKLIVIGAGYIGLEMGSVWGRLGSEVTVVEFAPDIVPSMDAEIRKQFQRSLEKQKMKFMLKTKVVGVDTSGNGVKLTVEPAAGGDQTTLEADVVLVSAGRSPFTAGLGLDKIGVETDKIGRILVNDRFATNVAGVYAIGDVIPGPMLAHKAEEDGVACVEFIAGKHGHVDYDKVPGVVYTHPEVASVGKTEEQVKALGVDYRVGKFPFLANSRAKAIDDAEGIVKILADKETDKILGVHIMAPNAGELIHEAVLAINYDASSEDIARVCHAHPTMSEALKEAAMATYDKPIHI

SEQ ID NO: 60457 - protein, 132 aa, Gossypium hirsutum
  unsure (1)..(132): unsure at all Xaa locations
  Clone ID: uC-gsflnu33B011a11b1.pep
FTRPDVHSRSQRMKLMLKTKVVGVDTSGNDVKLTVEPAAGGDQTTLEADVVLVSAGRSPFTAGLGLDKIGVETDKIGRILVNDRFATNVXGVYAIGDVIPGPMLAHKAEEDGVACVEFIAGKHGHVDYDTAT

SEQ ID NO: 60458 - protein, 89 aa, Gossypium hirsutum
  unsure (1)..(89): unsure at all Xaa locations
  Clone ID: uC-gsflnu33B057g01b1.pep
FPNSEARGCSWGVVCKSPWTAGLGWDKIGGETDKIGRILVNDRFATNVAGVYAMGDVIPGPMLAHKAEEDGXVSVSXFIAGKYGHVDYD

SEQ ID NO: 60459 - protein, 114 aa, Gossypium hirsutum
  Clone ID: GOSHI-09MAY01-C3090_1.pep
EKQASIMPKKDEIEEAEQLVQQQRGILRLTTPSVAKSASSPWHSLSTAAVTLCRTIHSLFFHIGKQRIQCMRPLLCNYIPFLLPLRLVLAWLCCKTSILSPPLNRWYTSPTPRK

SEQ ID NO: 60460 - protein, 55 aa, Gossypium hirsutum
  Clone ID: LIB3583-040-P1-K1-C11.pep
QNLKYESQKPLQHFHIWISKVVSQILLRKMENATADKVKEQHRKVMVANKPLKIL

SEQ ID NO: 60461 - protein, 72 aa, Gossypium hirsutum
  Clone ID: uC-gsflnu33B131a11b1.pep
LHRRPRYFRTGVPPVQRRLRMEALQQSHASTSRNSNKKGMSLQSKGPGLDFVLAKMKKDSMNGPAQCNGSSR

SEQ ID NO: 60462 - protein, 99 aa, Gossypium hirsutum
  Clone ID: GOSHI-09MAY01-C3080_3.pep
RFVLTFALGAGPVPSLLLPEIFPSRIRAKAMAICMSVHWVINFFVGLLFLRLLEQLGPQLLYSMFASVCMMAVVFVKKNVIETKGKSLQEIEVALLPQE

SEQ ID NO: 60463 - protein, 260 aa, Gossypium hirsutum
  unsure (1)..(260): unsure at all Xaa locations
  Clone ID: GOSHI-09MAY01-C3080_1.pep
WLYKQGRIPTXSAEAEAEFERLLGGSHVRYAMVELAKLDRGDDADTVKLSELLCGRHFRVVYIGSTLFALQQLSGINAVFYFSSSVFKSAGVPSDVANALIGVANLTGSIVAMLLMDKLGRKLLLLWSFFGMAMSMLLQVAAANSFVSGSASLYLSVGGMLMFVLTFALGAGPVPGLLLPEIFPNRIRAKAMAFCMSVHWVINFFVGLLFLRLLEQLGPQLLYSMFASVCMMAVVFVKKNVIETKGKSLQEIEIALLPPE

SEQ ID NO: 60464 - protein, 76 aa, Gossypium hirsutum
  Clone ID: LIB3584-015-P1-K1-H6.pep
MTDASHAKSAGVPADVANAFIGVANLSGSIIAMLLMDKLGRKMLLLWSFFGMVNSSFTNFLMESISFITRNLEEWF

SEQ ID NO: 60465 - protein, 110 aa, Gossypium hirsutum
  Clone ID: LIB3828-025-Q6-N6-B1.pep
GSLYLSVGGMLMFVLTFALETGPVPGLLLPKIFPNRIRAKAMAFCMSVHWVINFFVGLLFLRLLEQLGPQLLYSIFASVCIMAVIFVKKNVMETKGKSLQEIEIALLPPE

SEQ ID NO: 60466 - protein, 52 aa, Gossypium hirsutum
  Clone ID: uC-gsflmaxxa058c06b1.pep
LFLRLLEQLGPQLLYSIFASVCMMAVIFVKKNVMETKGKSLQEIEIALLPPE

SEQ ID NO: 60467 - protein, 193 aa, Gossypium hirsutum
  Clone ID: LIB3543-058-Q6-K6-B2.pep
SNYASLIFMALFISIAATGILEMQWGGVGIDDWWRNEQFWVIGGVSSHLFALFQGLLKVLAGVSTSFTVTSKAADDGEFSELYLFKWTSLLIPPTTLLVINIIGVVVGISDAINNGYDSWGPLFGRLFFAFWVIIHLYPFLKGLLGKQDRMPTIILVWSILLASILTLMWVRINPFVSKDGPVLEVCGLNCDD

SEQ ID NO: 60468 - protein, 123 aa, Gossypium hirsutum
  Clone ID: LIB3584-015-P1-K1-D6.pep
AHASAHASAHASDLFKWTSLLIPPTTLLVINIIGVVVGISDAINNGYDSWGPLFGRLFFAFWVIIHLYPFLKGLLGKQDRMPTIILVWSILLASILTLMWVRINPFVSKDGPVLEVCGLNCDD

SEQ ID NO: 60469 - protein, 274 aa, Gossypium hirsutum
  Clone ID: GOSHI-09MAY01-C3070_1.pep
MEFPYMEAVVGFMILMYLFETYLDLRQHAALKLPTLPKTLEGVISQEKFEKSRAYSLDKSHFHFVHEFVTILIDSAILFFGILPWFWKKSGTFLPLLGLNEENEILHTLSFLAGVMIWSQITDLSFSLYSTFVIEARHGFNQQTIWLFFRDLIKGICLAIVLGPPIVSAIIVIVQNGGPYLAIYLWAFMFVLSLVMMTIYPVLIAPLFNKFTPLPEGELRLKIEKLASSLKFPLKKLFVGDGSTRSSHSNAYMYGFFKNKRIVLYDTLIQQCKN

SEQ ID NO: 60470 - protein, 132 aa, Gossypium hirsutum
  unsure (1)..(132): unsure at all Xaa locations
  Clone ID: LIB3083-060-Q1-L1-E4.pep
FLAGVMIWSQITDLPFSLYSTFVIEARHGFNKQTIWLFFRDLIKGICLAIVLGPPIVSAIIVIVQNGGPYLAIYXWALMFVLSLEMITINPVLIASIFXNKSTLFLKENLNLRMGNLVSSLKFLLKNYLVVN

SEQ ID NO: 60471 - protein, 199 aa, Gossypium hirsutum
  Clone ID: GOSHI-09MAY01-C3060_1.pep
TYDSLGLFYKSTAGEPSQYTLPAIWDKWAVSSSFHQRTEMIKEFNRFNKWRKRGISRVPIVQEVIVKPTRATVSILNDGSIVVEVGGIEMGQGLWTKAKQTAAYGLSLIKCDGSEELLDKVRVIQADTLSLIQGGFTGGSTTSESSCEAVRLCCNVLVERLTALKEKLVEQMGSLRWETLILQAYVASVDLSASTLFLP

SEQ ID NO: 60472 - protein, 63 aa, Gossypium hirsutum
  Clone ID: GOSHI-09MAY01-C3010_17.pep
SRPAASAVESGSLSAMPTISFTIGDKVFDLYPEEYILKVGEGPQAQCISGFTALDVPPSRGPL

SEQ ID NO: 60473 - protein, 183 aa, Gossypium hirsutum
  unsure (1)..(183): unsure at all Xaa locations
  Clone ID: GOSHI-09MAY01-C3010_16.pep
SRPAATSDPPKICTAEDQKKKDDEDLSEKDLALKQQLELYVERVQDSDPRLQKVGLESMRHEIRTSTSSMTSVPKPLKFLHPHYGTLKAFYETMPESDLKESLKXRLLGLEGDIGSWGHEYVSSTLCWCSDLGFVTRRSPMRIYFWNLAGEIAQEYGKRQSEEAAIEDLLELVQQIVSFHMNV

SEQ ID NO: 60474 - protein, 161 aa, Gossypium hirsutum
  unsure (1)..(161): unsure at all Xaa locations
  Clone ID: GOSHI-09MAY01-C3010_15.pep
MFSYGTGDDVFSSQSIPETPPSYSGGGGNSAFSSEQNEKGLNGEFGGSDGPILPPXPAEMGPEEGSALREWRRQNVIRLEEKGKKEKEXTLEQIMKEAEEYKVEFYREDKSSCENKXSNRDKEKQCLENREKFXAVSEKNYWKAIAXIPHEVPTIEKREEG

SEQ ID NO: 60475 - protein, 205 aa, Gossypium hirsutum
  Clone ID: GOSHI-09MAY01-C3010_11.pep
LESNPNYDVGSENDAGTSQANAPANDPKKKEDQKKKDDEDLSEEDLALKQQLELYVERVQDSDPGLQKVALESMRHEIRTSTSSMTSVPKPLKFLRPHYGTLKAFYETMPESDLKKYLADILSVLALTMSAEGERESLKYRLLGSEGDIGSWGHEYVRNLAGEIAQEYGKRQSEEAAIEDLMELVQQIVSFHMKHNAEPEAVDLL

SEQ ID NO: 60476 - protein, 246 aa, Gossypium hirsutum
  Clone ID: GOSHI-09MAY01-C3010_8.pep
MAVNQTAALKVGLCLLGLCLFGYIVGPPLYWHFMEGLVAFSHTSNTCPPCLCDCSSQPLLTIPEAYKHGQAYFVGDNVKNLKLELAKGAKLKCSRCGLKGAALGCYVKSCRRSYHFPCAKEIPKCRWDYVDFLVLCPAHSSVKFPSEKSRKAHSAAKFPNEKPGNCLSADDRVPTESGQLKSNTFWGQPENKKDWVFCGSALSPEEKFLLVKFAKMIGVTVSKFWRPDVTHVIASTDENGACTRTL

SEQ ID NO: 60477 - protein, 80 aa, Gossypium hirsutum
  Clone ID: GOSHI-09MAY01-C3010_7.pep
SRPAAALDPPKICTAEDQKKKDDEDLVSGCLGFHPAGSLHRKSMLFTSLLAFAIALLSLFSQSLKVNSFPVLGLKSFINA

SEQ ID NO: 60478 - protein, 186 aa, Gossypium hirsutum
  Clone ID: GOSHI-09MAY01-C3010_6.pep
MGTTVKGVVLSLFISSLLCSVVLASNDGLVRIGLKKMKLDPNNRLAAQLDSKDREALRASIAKKYRFRNDLGDSEETDIVALKNYMDAQYYGEIGIGTPPQKFTVIFDTGSSNLWVPSTKCYFSVACFFHSKYKSSESSTYKKNGKSASIQYGTGAISGFFSNDSVKVGNLVAKDQEFIEATKEPG

SEQ ID NO: 60479 - protein, 116 aa, Gossypium hirsutum
  Clone ID: GOSHI-09MAY01-C3010_3.pep
QNQLKQNQTQDIILNYVNQLCDRMPSPMGESAVECGSLSSMPTVSFTIGDEVFDLSPEEYILKVGEGPQAQCISGFTALDVPPPRGPLWILGDVFMGRYHTVFDFGKERVGFAEAA

SEQ ID NO: 60480 - protein, 386 aa, Gossypium hirsutum
  unsure (1)..(386): unsure at all Xaa locations
  Clone ID: GOSHI-09MAY01-C3010_2.pep
MGLTMELNNLKDAFDRVAKKQKLACSKXREVWVRSCKKIEKAIEMMQSTXPLDHKSILAGLNKKLHEIAPLAQLEGTQKELNIALSKYPKALEKTLNPDISKAYRNIEFDSHTVNQIIASHFYRQGMFDVGDCFITEAGEAEAAAAVRSLFQEMYQILEAMKSRNLEPALKWAATNSDKLKENGSDLLLGLHQLQFVKILQKGSREEALKYARTNFVPFAGNHMAEIQKLMGCLLYSDRLSESPYAHLLSPTNWDIVAVELTRQFCNSLGQSYQSPLSVTIAAGVQGLPPLLKFMTVMAGKNXEWQSMKQLPVPVELDKEFQFHSIFVCPVSKEQSTEDNPPMLMSCGHVLCKQSINKMSKNGSKTFKCPYCPSDVDAPRCRQLNF

SEQ ID NO: 60481 - protein, 514 aa, Gossypium hirsutum
  Clone ID: GOSHI-09MAY01-C3010_1.pep
MGMSMNVVVLSLFVLSILFSVMTASDDGLVRIGLKKKKFDPNNRLASRLESEDQQALIASMQEKYGLHNNHGDHEETDIVALKNYMDAQYYGEIGVGTPPQKFTVIFDTGSSNLWVPSSKCYFSVACYFHSKYKASESSTYKKNGKSASIQYGTGAISGFFSYDNVQVGNLVVEDQEFIETTKEPGLIFLAAKFDGILGLGFKEISVGDAVPVWYNMVKQGLIKDQVFSFWLNRNVGEEMGGEIVFGGVDPNHYKGKHTYVPITQKGYWQFDMGDVLIGDKPTGYCAGGCAAIADSGTSLLAGPTTVITMINQAIGASGVASQECKAVVQQYGQTIIDLLVSQAEPMKICSQIGLCAFDGSHGVSMGIENVVDESNGKSSGILHSAMCPACEMAVVWMQNQLIENQTQDRILDYANQLCDRVPNPMGESTVDCGSLSSMPTISFTIGGKAFDLTPEEYILKVGEGAEAQCISGFTALDVPPPRGPLWILGDAFMGRYHTVFDFGKLRVGFAEAA

SEQ ID NO: 60482 - protein, 214 aa, Gossypium hirsutum
  unsure (1)..(214): unsure at all Xaa locations
  Clone ID: LIB3830-001-Q1-K6-A7.pep
VVVLSLFVLSILFSVMTASDDGLVRIGLKKXIDPNNRLASRLESEDQQALIASMQEKLASIIITDTMRTQILXALKNYMDAQYYGEIGVGTPPQKFTVIFDTGSSNLWVPSSKCYFSVACYFHSKYKASESKTYKKNGKPASIQYGTGAISGFFSYDNVQVGNLVVEDQEFIETTKEPGLIFLAAKFDGILGLGFKEISVGKAVPVWYNMLKQG

SEQ ID NO: 60483 - protein, 59 aa, Gossypium hirsutum
  Clone ID: LIB3147-052-Q1-K1-D11.pep
MQDILKVGECAEAQCISGFTALDVPPPRGPLWILGDAFMGRYHTVFDFGKLKVGFAESA

SEQ ID NO: 60484 - protein, 93 aa, Gossypium hirsutum
  Clone ID: LIB3582-006-P1-K1-B2.pep
VVLDCVNVFVFVCILVSSSTLCWCSDLGLVTRRSPMRIYFFYKSSTSNLKIEELIFTRLVLASHSPSIFHPYIKVNFVLVYVDAQTSMLLRFS

SEQ ID NO: 60485 - protein, 90 aa, Gossypium hirsutum
  Clone ID: LIB3582-020-P1-K1-E3.pep
AFRDCEKRLRRAIAKASKDVNSMDLRCREPARAKSRTATHQIVIIFLLLVLNRTDLGRIQSSCRTASAYEIERHDSFPPPNRSKRKRLGF

SEQ ID NO: 60486 - protein, 77 aa, Gossypium hirsutum
  Clone ID: LIB3825-022-Q1-K6-H6.pep
FSTLQILNQTTALKVGLCLLGLCLFGYIVGPPLYWHFMEGLLAFSHTSNTCPPCLCDCSSQPLLTIPEDVCEKKKAH

SEQ ID NO: 60487 - protein, 87 aa, Gossypium hirsutum
  Clone ID: uC-gsronu33B012g03b1.pep
DLNIDLKFYFSKGNKIKKGKSVRICGVENQRGRNPERPLTKSSSSFFFWSSTVQILGGSKAAAGRLQHMRSKDMIPSPPPIEAKGRG

SEQ ID NO: 60488 - protein, 67 aa, Gossypium hirsutum
  unsure (1)..(67): unsure at all Xaa locations
  Clone ID: LIB3825-030-Q6-K6-E11.pep
MEIGLFVNFASPLKSLRAPQVYFVGDNVKNLKPELAKGAKLKCXLGCYVKSCRRSYHFPCAKKIPKC

SEQ ID NO: 60489 - protein, 90 aa, Gossypium hirsutum
  Clone ID: LIB3189-042-P1-K1-G2.pep
QDIINLILRTYHSKASGNTVKVEMIRICGVENQRGRNPERPLTKSSSSFFFWSSTVQILGGSKAAAGRLQHMRSKDMIPSPPPIEAKGRG

SEQ ID NO: 60490 - protein, 94 aa, Gossypium hirsutum
  Clone ID: LIB3582-030-P1-K1-E11.pep
PNKQRPNRHNPTFNAVVWFTAISSISESKDLQCRESARAKSRIATHQILIIFLLLVLSRTDLGRIRSSCRTASTYEIERHDSLPPPPIETKGRG

SEQ ID NO: 60491 - protein, 110 aa, Gossypium hirsutum
  unsure (1)..(110): unsure at all Xaa locations
  Clone ID: LIB3825-005-Q1-K6-C11.pep
KQNAWLAFHSILLFVLLFQVYSPRLDSPPPRWVHFAHGLLLFLYQTFDAVDGKQARQTNSSSPLGELFDHGCDALACAXFETMAFGSTAMCRGDSFWFWVISSIPFYGAT

SEQ ID NO: 60492 - protein, 66 aa, Gossypium hirsutum
  Clone ID: LIB3148-016-Q1-K1-B6.pep
HASGDYPLSLSISISGGNSGGRGVEQKVQLTPTTASVYDDYVPAISKSAILDICFLVTFNIIVRIF

SEQ ID NO: 60493 - protein, 112 aa, Gossypium hirsutum
  unsure (1)..(112): unsure at all Xaa locations
  Clone ID: LIB3166-015-P1-K1-D5.pep
RQQSRRVGAGQRNPAKSMSSFDDDGYLGYDPRLASHQFQSFDAHSVKDSVADSPPMFSYGTGDDVFSSQSIPETPPIYNGRWWKLCFLIGAERKRIERRVRRIGWTNLATXC

SEQ ID NO: 60494 - protein, 65 aa, Gossypium hirsutum
  Clone ID: LIB3543-022-Q1-K1-E3.pep
DKRDGIEPDGSVEGGVVSIGLLLFGYIVGPPLYWHFMEGFSLQPHFQHLPTLPLRLLFSASSYNP

SEQ ID NO: 60495 - protein, 68 aa, Gossypium hirsutum
  Clone ID: uC-gsflmaxxa049b05b1.pep
SSKSSPFFSSLLPTPHPHRDFALADSLHRKSESFQLLPYAPKLLNVASVTKYSNIRTDTVNGIDNGVE

SEQ ID NO: 60496 - protein, 82 aa, Gossypium hirsutum
  unsure (1)..(82): unsure at all Xaa locations
  Clone ID: LIB3197-048-Q1-M1-C5.pep
PCILIQYXMLMSSEGKESKDVNSIDXRCRESARAKSRTATHQILIIFLLLVLSRTDLGRIRSSCRTASAYEIERHDSLPPSR

SEQ ID NO: 60497 - protein, 84 aa, Gossypium hirsutum
  unsure (1)..(84): unsure at all Xaa locations
  Clone ID: LIB3197-060-Q1-M1-G7.pep
HHSKASGNTVKVEMIRXCGVENQRGRNPKQPLTKSSSSFFFWSSAVQILGGSKAAAGRLQHMRSKDMIPSSPPPDRSKRKRLGF

SEQ ID NO: 60498 - protein, 110 aa, Gossypium hirsutum
  unsure (1)..(110): unsure at all Xaa locations
  Clone ID: uC-gsronu33B080c09b1.pep
MTRSGFHPQSXTIXGATGGKEQETIEATKEPGATYMAAKFDGILGLGSKEISVGDAVPVWYNMVKQGLIKDQEFSFXXKRNVREETGGEIGVGGGDPNHYKGKHTNRPIT

SEQ ID NO: 60499 - protein, 60 aa, Gossypium hirsutum
  Clone ID: LIB3165-022-P1-K1-F8.pep
PLPFASIGGGGKESCLSISYAEAVLQLLWILPRSVRLRTKRRKMMRIWNHFNFYRIPRSF

SEQ ID NO: 60500 - protein, 234 aa, Gossypium hirsutum
  unsure (1)..(234): unsure at all Xaa locations
  Clone ID: GOSHI-09MAY01-C3000_1.pep
MGLEENLKSMNINEEENKNPNPNTKDEEDGELEEGEIAGEEDDTTSSSLKKGVVEQPHQLEHSWTFWFDNPSAKSKQAPWGSSMRPIYTFSTIEQFWSLYNNIHHPSKLAVGADFHCFKHKIEPKWEDPVCANGGKWTVVFQKGKSDTSWLYTLLALIGEQFEYGDEICGAVVSVRGKLDRIALWTKNAANETAQMSIGKQWXKELLGYNDTIGFIFHDDAKTHERSAKNRYTV

SEQ ID NO: 60501 - protein, 152 aa, Gossypium hirsutum
  unsure (1)..(152): unsure at all Xaa locations
  Clone ID: GOSHI-09MAY01-C3020_3.pep
MEQTFIMIKPDGVQRGSVGEIIGRFEKKGFYLKGLKLITVDQSFAEKHYADLSAKPFFNGLVEYIISXPVAAMIWEGKNGATTGRKIIGATNPAESAPGTIRGDFAIDIGRNVIHGSDSVESARKEIALWFPESPVNWQSSVHPWIYEQISN

SEQ ID NO: 60502 - protein, 148 aa, Gossypium hirsutum
  Clone ID: GOSHI-09MAY01-C3020_1.pep
MEQTFIMIKPDGVQRGLVGEIIGRFEKKGFYLKGLKLISVDRSFAEKHYADLSAKPFFNGLVEYIISGPVVAMIWEGKNVVTTGRKIIGATNPAESAPGTIRGDFAIDIGRNVIHGSDSVESARKEIALWFPECPVNWQSSLHPWIYE

SEQ ID NO: 60503 - protein, 68 aa, Gossypium hirsutum
  Clone ID: uC-gsronu33B016h05b1.pep
ETQVSHFEPTIQQNKVLNQKNVRAFHMSQINTFFFKNSSLEVFDFIALACKRIDFKKKQKQQYSFCEA

SEQ ID NO: 60504 - protein, 90 aa, Gossypium hirsutum
  Clone ID: uC-gsflnu33B008g04b1.pep
MEQTFIMIKPDGVQRGLVGEIIGRFEKKGFYLKGLKLISVDRSFAEKHYADLSAKPFFNGLVEYIISGPVVAMIWEGKNVVTTGRKIIVA

SEQ ID NO: 60505 - protein, 49 aa, Gossypium hirsutum
  Clone ID: LIB3147-043-Q1-K1-C6.pep
IIYFFFFFFFFFIFFFFCFLSNTQNSFDYSNTVHLHCGVVIGAFNTTPT

SEQ ID NO: 60506 - protein, 87 aa, Gossypium hirsutum
  Clone ID: GOSHI-09MAY01-C3370_1.pep
MQASDRFNINSQLEHLQAKYVGTGHADLNRFEWAVNIQRDSYASYIGHYPMLAYFAVAENESIGRERYNFMQKMLLPCGLPPEREDD

SEQ ID NO: 60507 - protein, 147 aa, Gossypium hirsutum
  unsure (1)..(147): unsure at all Xaa locations
  Clone ID: GOSHI-09MAY01-C3330_3.pep
MNNLLTGLTNYPNPKIAQKGRRKFHITFLAVGFIEFRNRETFPDETEACKHCNCRRSRCLKLXRYCECFAARIYCLDCCACDNCLNKPDYEDIVLDIPLQIELLNPLAXHKSGCKCRWSKCLKLYCECYRXGCHYEDCDNSFGKKSY

SEQ ID NO: 60508 - protein, 153 aa, Gossypium hirsutum
  unsure (1)..(153): unsure at all Xaa locations
  Clone ID: uC-gsronu33B047f11b1.pep
KKKKKKKKKRNIKNNKEKEKEEYKXIKKRKRIYTNRNRKXKENKNRKEXTKYKNDKKKKKNQKKINRCKKQXERERKEIKENTNKKIREKIMKINVKNNKKKKKRXRKKKNKQIKIEIIEKKTRKRKREKKKRKKRKEKNEKIKKKRKIGKRR

SEQ ID NO: 60509 - protein, 159 aa, Gossypium hirsutum
  unsure (1)..(159): unsure at all Xaa locations
  Clone ID: AI054446.1.pep
PXSSSINLYSPLTFNDSDTDRDEICGSSSNGRNQDDSLIKHGEYWAQHDELHGACFNASEVTTGKTNDNTNDGIAEISDDERLDKMEFLSNIWEHVESDDFMERVCQGLDSRPSSLGGNQAMLIQLPSHILPLNHDPFDLTSWESLVIMLIMITWEFDH

SEQ ID NO: 60510 - protein, 100 aa, Gossypium hirsutum
  unsure (1)..(100): unsure at all Xaa locations
  Clone ID: uC-gsronu33B109f08b1.pep
VLLFVVIGSYCECFAAGIYCKDCCACDDCLNKPDYEDIVLDIRHQIELHNPLAFAPPIVNPPNDSPNMNTPSAKHKSGCKCKRLKLLKXYCECYRVCFNL

SEQ ID NO: 60511 - protein, 110 aa, Gossypium hirsutum
  Clone ID: GOSHI-09MAY01-C3270_2.pep
FTLSNIRLGAILFSIETFLKLEFNFHSILSINLKIISLLNRTYQPSNQAHLLNPNCLFPLIHLHNSIFIRHQNENFSSTIGQLRGTTRLTWAGSYHGAAPIRQSATKVWM

SEQ ID NO: 60512 - protein, 85 aa, Gossypium hirsutum
  Clone ID: GOSHI-09MAY01-C3270_1.pep
RVPCSLIMTKNIRLNQGSSITTCIHLLKYICLSLKLTIGAPHSAKLYYDNLVFSFQNFLAFSSLINYLDIKSLLRPFGYLAEHYK

SEQ ID NO: 60513 - protein, 188 aa, Gossypium hirsutum
  Clone ID: GOSHI-09MAY01-C3260_1.pep
WIRSFGRLTWPRISDIIISKWLSKVVPEDASKLVDFQKIVKCTSEFEFSLKEMMFISASDGKDYRLSSFSENVEVHFAFRKKTEILGKARNSLLQCDFSLPQDYTSKGPLLKNDGMAINSSNQVVDLIFSSERCVVSKAASQLMELVHQTLQDVCLSSARVALEFYHAVRDAILLYEAVIPVKKGSLM

SEQ ID NO: 60514 - protein, 245 aa, Gossypium hirsutum
  unsure (1)..(245): unsure at all Xaa locations
  Clone ID: GOSHI-09MAY01-C3210_3.pep
MPHKPVPATVWELRGLQKQGWKLIMQPDCLFARVMKAKYFLNGDFMSAXEARTLXYTWRSILGARYLLEEGVGWRIGNGDSVNIWNDRWLPGXWKQGIIRTVFGEEQLQHITSIPLVSSRIQDVPVWRGDNTGIYTAKSGYRWLITDGGTRLNNEIPTTFFTRLWELKIPSKIRIFLWRIANDFLPTLHNLKARNLVVNTWCPMCQTEEESADHLFRRCLFTQQVLRGLGMAVPTMGKDCRSSDG

SEQ ID NO: 60515 - protein, 98 aa, Gossypium hirsutum
  Clone ID: GOSHI-09MAY01-C3210_2.pep
PFLYQITKFSISGIIARNKEGLIMAACTYPWENIADPVMAEARACLQAVILAEDMGFQEVCIEGDALTIIRKLNSREANKAAHTMAKEGGATSILDSG

SEQ ID NO: 60516 - protein, 135 aa, Gossypium hirsutum
  Clone ID: LIB3583-026-P1-K1-F2.pep
ARERLKNSCAVGHLVWEPPVNDSIKINFDSSFNQLTKCSISGIIARNKEGLIMAACTYPWENIADPVMAEARACLQAVILAEDMGFQEVKGDQQSGSYDGERRGRYEHLRFWIEEAPHAVEILINHERRNNIHGG

SEQ ID NO: 60517 - protein, 100 aa, Gossypium hirsutum
  Clone ID: LIB3582-037-P1-K1-D11.pep
TLLIHAASPWENIADPVMAEARACLQAVILAEDMGFQEVCIEGDALTIIRKLNSREANKAAHTMAKEGGRYEHPRFWIEEAPHAVEILINHERRNNIHGG

SEQ ID NO: 60518 - protein, 66 aa, Gossypium hirsutum
  Clone ID: GOSHI-09MAY01-C3200_1.pep
KFQKPYAFQIISLTGSTMSCSSFFFFFKYPYLKHDWASKYMEKLEKLKSIAKSDNILISKSHHKPM

SEQ ID NO: 60519 - protein, 235 aa, Gossypium hirsutum
  Clone ID: GOSHI-09MAY01-C3230_7.pep
MDLEMNLNASHSMGTTIIGVTYNGGVVLGADSRTSTGMYVANRASDKITQLTDNVYVCRSGSAADSQIVSDYIRYFLHQHTIQLGQSATSKVAANLIRLLSYNNKNMLETGLIVGGWDKYEGGKIYAIPLGGTLIEQPFAIGGSGSSYLYGFFDQAWKEGMTKDEAEQLVVKAVSLAIARDGASGGVVRTVIINSEGVTRNFYPGDKLQLWHEELEPQNSLLDLLNSSNPEPMNI

SEQ ID NO: 60520 - protein, 144 aa, Gossypium hirsutum
  Clone ID: GOSHI-09MAY01-C3230_6.pep
SSNLLSCMLSGMVNSSWAIVVISHAKLQENKLNAAQPAFSSYCAETQAYYPIPWRSVLPFLPRSIPINKLKTNPSNVKTTMRPIFYQTKRNCLLKLVMKILKLQLVLMLYISMSHMFILYIFLFFILYKKFIKEKATSVSTLQP

SEQ ID NO: 60521 - protein, 118 aa, Gossypium hirsutum
  Clone ID: GOSHI-09MAY01-C3230_5.pep
GSINHQTSESGGSHENDPSLGSNTSKTPKSPWMPFPMLFAAISNKIPRSDMDQVTNHYELFRAKKISRDDFVKKLRLIVGDSLLRSTITSLQCKFPSRHELEAAAAAKQKNTNGPGGL

SEQ ID NO: 60522 - protein, 107 aa, Gossypium hirsutum
  Clone ID: GOSHI-09MAY01-C3230_4.pep
KFNQGIPRKDPSLGSNTSKTPKSPWMPFPMLFAAISNKIPRMDMDQVANHYELFRAKKITRDDFVKKLRLIVGDNLLRSTITSLQSKIPSRHELEVAKQNMKGPGSL

SEQ ID NO: 60523 - protein, 106 aa, Gossypium hirsutum
  Clone ID: GOSHI-09MAY01-C3230_3.pep
MAHTAAACAERATNDMLIGPDWALNIELCDIINMDPGQAKDALKIIKKRLGSKNPKIQLLALFVLDSLSKNCGEHVFQQIVERDILREMVKIVKKKRKKEKKKKEK

SEQ ID NO: 60524 - protein, 235 aa, Gossypium hirsutum
  Clone ID: GOSHI-09MAY01-C3230_2.pep
MDLDMNVNAPHSMGTTIIGVTYNGGVVLGADSRTSTGMYVANRASDKITQLTDNVYVCRSGSAADSQIVSDYVRYFLHQHTIQLGQPATVKVAANLIRLLSYNNKNMLQTGLIVGGWDKYEGGKIYGIPLGGTLVEQPFAIGGSGSSYLYGFFDQAWKEGMTKEEAEQLVVKAVSLAIARDGASGGVVRTVVINSDGVTRNFYPGDKLQLWHDELEPQHSLLDILNAPSPEPMNI

SEQ ID NO: 60525 - protein, 521 aa, Gossypium hirsutum
  unsure (1)..(521): unsure at all Xaa locations
  Clone ID: GOSHI-09MAY01-C3230_1.pep
AFPKRIMFFEKXEWTDFPKDLIASIRKDLITKKPFIELEKDGQSFVLDFLHMFRLDGKTGLKQPIAWIDEADGCFFPETCXEDELYQAHEYESDHESYVPPEIKLHLEIDINGDQSRLKECSGESSSFVSNCQIAQKPATSCCAVEAEDNCNRDGDAKHSKIIEDIQQPRLKFSXKEFVDVEFGEQLDSQTVETMFLLGMSSSGGSDVIDIKPCSSSSTQYRLERFLKQVQIMKKYRGDANVQHAWLACSQSDLPIIMMHGLGDCRLSRIPHKYGTGVHLATVEFTNTSANYCDVDENGIKYMILCRVIMGKRELLRPGSGQCYPINEDFDSGVDDLQHPKYYIIWNMNISTHIYPEFVVSFKISNAEGRLIGSETNHAVSGVTASTPGLQGRLPVLSSAGELGSINHQTSESGGSHENDPSLGSNTSKTPKSPWMPFPMLFAAISNKIPRSDMDQVTNHYELFRAKKISRDDFVKKLRLIVGDSLLRSTITSLQCKFPSRHELEAAAAAKQKNTNGPGGL

SEQ ID NO: 60526 - protein, 60 aa, Gossypium hirsutum
  unsure (1)..(60): unsure at all Xaa locations
  Clone ID: LIB3148-001-P1-K1-G9.pep
IDFDRDGARLGIVRTVIIKLSXVTRNFYAGDILQVWNEELXPDNSLMDLLNSSNAEPMNI

SEQ ID NO: 60527 - protein, 49 aa, Gossypium hirsutum
  Clone ID: uC-gsronu33B132h11b1.pep
SCSLARTFRFILIYFKRKSEKRRREIHKRESNLRFYSTALSNSASYYIK

SEQ ID NO: 60528 - protein, 111 aa, Gossypium hirsutum
  unsure (1)..(111): unsure at all Xaa locations
  Clone ID: LIB3083-056-Q1-L1-C12.pep
ATCAYRAFNDMMIGPDYALNIELCDIINMDPSQAKDALKIIKKRLGSKNPKIQLLALFVLDSLSKNXGEHVFQQIVERDILREMVNIVKKKPDLNVRETILILIDTWQETL

SEQ ID NO: 60529 - protein, 471 aa, Gossypium hirsutum
  Clone ID: GOSHI-09MAY01-C0_1.pep
MEAKLIERLEAAVARLESLSAGGISARGLPDGVDEVSSDPSVLAFDDLMDQYAARVSAAAEKIGGQVLDVTKLVLEAFSVQKKLLIEIKQTQKPDMAGLVEFLKPLNEVILKVNAMTEGRRSDFFNHLKSAGDSLSALAWIAYTGKDCGMSMPIAHVEESWQMAEFYNNKVLVEYRNKDQIHVEWAKALKELYLPGLRDYVKSHYPLGPVWSASGKKASSAPPKAPPPGAPAPPPPPPASLFSSEPSQPSSSNPKQGMSAVFQEISSGNVSAGLKKVTADMKTKNRTDRTGVVSASGKETRSSSPSFSKAGPPKLELQMGRKWAVENQIGRKNLVIDDCDAKQSVYIYGCKDSVLQIQGKVNNITIDKCTKMGVVFKDVVAACEVVNCNGVEVQCQGSAPTISVDNTSGCQLYLSKDSLGTSITSAKSSEINVLVPTGPDGDWGEHSLPQQYIHVFKDGQFETTPVSHSGA

SEQ ID NO: 60530 - protein, 141 aa, Gossypium hirsutum
  Clone ID: LIB3145-025-Q1-K1-F8.pep
PRVRLRKVTDDMKAKNRTDRTGVVSTSEKQTSSTPSTTTPTVKKVAPPKLELQMGRKWAVENHIGNKNLVIDDCDAKQSVYVFGCKDSVLQIQGKVNNITLDKCTKMGVLFKDVVAAFEIVNCNGVEAQCQGFAPTISVDN

SEQ ID NO: 60531 - protein, 80 aa, Gossypium hirsutum
  unsure (1)..(80): unsure at all Xaa locations
  Clone ID: LIB3584-008-P1-K1-A3.pep
KLSFPLGEKQLCCFIFLDTYLWVNFTSSVRLFIYFNTHIIWSSSVLFHNYSLNLFRNLFFGWCVXFYWRCCVGFFFFFSF

SEQ ID NO: 60532 - protein, 87 aa, Gossypium hirsutum
  unsure (1)..(87): unsure at all Xaa locations
  Clone ID: uC-gsflnu33B135e01b1.pep
YSSGPARLELLVGDKWGGENQVGRLNLVIDDCDAKQSVYIYGCKDSVLQIQGKVNNITIDKCTKMGVVFKDVXVAVCEGGNCNGEAV

SEQ ID NO: 60533 - protein, 46 aa, Gossypium hirsutum
  Clone ID: LIB3493-038-P1-M1-G12.pep
MEAKLIERLEAAVARLESLSAGGISARGLPDGVDEGLTLARLWEMT

SEQ ID NO: 60534 - protein, 63 aa, Gossypium hirsutum
  Clone ID: GOSHI-09MAY01-C90_1.pep
ALLSASSCLPELANLEQNKMLVELVSILLFAYIGILPYEKRVFDRSRVSSDLNSKSRVGIISI

SEQ ID NO: 60535 - protein, 226 aa, Gossypium hirsutum
  Clone ID: GOSHI-09MAY01-C80_1.pep
MRKPCCDKQGTNKGAWSKQEDQKLIDYIRIHGEGCWRSLPKAAGLHRCGKSCRLRWINYLRPDIKRGNFAQDEEDLIIKLHALLGNRWSLIAGRLPGRTDNEVKNYWNSHIKRKLMKMGIDPNNHKLNQYPHHVGPLNPTTTNSMDVACKLRVFSTENDDGVSDAASYLEDATPPTGVSNLDLDLTIAFPSSPIKNIIEESQQNPASIVPNDEEDQYTVPTLLLFR

SEQ ID NO: 60536 - protein, 260 aa, Gossypium hirsutum
  unsure (1)..(260): unsure at all Xaa locations
  Clone ID: GOSHI-09MAY01-C50_1.pep
PTRPPTRPGKTRFSINGKPGYHFVGTSTFSEYTVAHVGSVAKINPAAPLDKVCILSCGISTGLGATLNVAKPTKGSTVAIFGLGAVXGLAAAEGASIAGASRIIGVDLNPNRFEEAKKFGCTEFVNPKDHNKPVQEVLAEMTNGGGDRSVECTGNINAMISAFECVHDGWGVAVLVGVPNRDDAFKTHPVNFLNERTLKGTFFGNYKPRSDLPSVVEKYMNKELELEKFITQQVAFRDINKAFDYMLAGEGIRCIIRMDA

SEQ ID NO: 60537 - protein, 107 aa, Gossypium hirsutum
  unsure (1)..(107): unsure at all Xaa locations
  Clone ID: GOSHI-09MAY01-C40_20.pep
LCHLHCRCCEPQNTQPIQLDEAYELFYESISXSGPYWDHVLGYWKASLERPDKLRLLKYEDLVEDTVSDLKKTADFMGYPFFVEEQQQGVPDNIVLMCSYLLLLVVW

SEQ ID NO: 60538 - protein, 93 aa, Gossypium hirsutum
  Clone ID: GOSHI-09MAY01-C40_14.pep
PRVRFMGYPFSSEEQQQGVRENIVKMCSSHASGGLEVNKTGRHREGKGNMETENNIFFRKGKVGDWKNYLTTEMAQRLDQRTLQQLSGSGLSL

SEQ ID NO: 60539 - protein, 222 aa, Gossypium hirsutum
  unsure (1)..(222): unsure at all Xaa locations
  Clone ID: GOSHI-09MAY01-C40_13.pep
MARGLKKHLKRLNAPRHWMLDKLGGAFAPKPSSGPHKSRECSPLILILRNRLKYALTYREVIAILMQRHVMVDGKVRTDKTYPAGFMDVVSIPKTNEDFRLLYDTKGRFRLHAISGDETKFKLCKVXRSVQFGQKGIPYFNTYDGRTIRYPDPVIKANDTIKLDLESNKIVDFIKFDVGNVVMVTGGRNRCLLVVVNNRVFHMGFFDNYSFLGCFLVMSLLL

SEQ ID NO: 60540 - protein, 262 aa, Gossypium hirsutum
  Clone ID: GOSHI-09MAY01-C40_12.pep
MARGLKKHLKRLNAPRHWMLDKLGGAYAPKPSSGPHKSRECSPLILILRNRLKYALTYREVIAILMQRHVMVDGKVRTDNTYPAGFMDVVSIPKTNEDLRLLYDTKGRLRLHAITGDETKCKLCKVRSVQFGQNGIPYLNTYDGRTIRYPDPLIKANDTIKLDLESNKIVDFIKFDVGNVVMVTGGRNRGRVGVIKKREKHKGSFETIHIQDAAGHEFATRLGNVFTIGKGTKPWVSLPKGKGIKLSIIEEARKRLAAQATV

SEQ ID NO: 60541 - protein, 226 aa, Gossypium hirsutum
  Clone ID: GOSHI-09MAY01-C40_9.pep
HASAHASADAWVRNRLKYALTYREVIAILMQRHVMVDGKVRTDKTYPAGFMDVVSIPKTNEDFRLLYDTKGRFRLHAITGDETKFKLCKVRSVQFGQKGIPYLNTYDGRTIRYPDPLIKANDTIKLDLESNKIVDFIKFDVGNVVMVTGGRNRGRVGVIKNREKHKGSFETIHVQDAAGHEFATRLGNVFTIGKGTKPWISLPKGKGIKLSIIEEARKRLAAQAAA

SEQ ID NO: 60542 - protein, 96 aa, Gossypium hirsutum
  Clone ID: GOSHI-09MAY01-C40_8.pep
HEINSKHWPIKFDIIPFLLVKISIIQVYLSLLPYKKEHQGTQGVYASLNGPRLERSEAFLLNAAKAQTHLGTCLDNTDPTIQPQTRDPDFIHPCSK

SEQ ID NO: 60543 - protein, 201 aa, Gossypium hirsutum
  Clone ID: GOSHI-09MAY01-C40_7.pep
AKQTEYALTYREVIAILMQRHVMVDGKVRTDKTYPAGFMDVVSIPKTNEDFRLLYDTKGRFRLHAITGDETKKGIPYLNTYDGRTIRYPDPLIKANDTIKLDLESNKIVDFIKFDVGNVVMVTGGRNRGRVGVIKNREKHKGSFETIHVQDAAGHEFATRLGNVFTIGKGTKPWISLPKGKGIKLSIIEEARKRLAAQAAA

SEQ ID NO: 60544 - protein, 262 aa, Gossypium hirsutum
  Clone ID: GOSHI-09MAY01-C40_6.pep
MARGLKKHLKRLNAPRHWMLDKLGGAFAPKPSSGPHKSRECLPLILILRNRLKYALTYREVIAILMQRHVMVDGKVRTDKTYPAGFMDVVSIPKTNEDFRLLYDTKGRFRLHAITGDETKFKLCKVRSVQFGQKGIPYLNTYDGRTIRYPDPLIKANDTIKLDLESNKIVDFIKFDVGNVVMVTGGRNRGRVGVIKNREKHKGSFETIHVQDAAGHEFATRLGNVFTIGKGTKPWVSLPKGKGIKLSIIEEARKRLAAQNAA

SEQ ID NO: 60545 - protein, 184 aa, Gossypium hirsutum
  unsure (1)..(184): unsure at all Xaa locations
  Clone ID: GOSHI-09MAY01-C40_5.pep
MESHFDSHVEQHNEDEFQKSFKEMISTLPKGNSWGLPDHLYQYQDFWFTSPFLQGVLLAHQQFEAQPTDIILPRAPRXGTAWLKSLTVASLSRTSYHDSTTPLLFRMPHDVVPFMELEHAHFSANRHLGIPLLATHAPYSFLPTSIIDSGCKIIYICRDPKDTFVSMYHICTKYAKSQTLTHRT

SEQ ID NO: 60546 - protein, 188 aa, Gossypium hirsutum
  unsure (1)..(188): unsure at all Xaa locations
  Clone ID: GOSHI-09MAY01-C40_4.pep
PVGGFIQIDSHVAQHNADGVPKSFKEMISTLPKGSCWGLPDHLYQYQGFWFTPPFLQGALSAQQQFQAQPTDIILSSAPRTGAAWLKSLTFATITRTSYDDSTXPLLSRMPHDGXPFMELDHAQFSANRHLGIPLLATHPPYSFLPTSIIDSXGCKLIYICRDPXDTFVSMYHICTRYAKSKHSTHRT

SEQ ID NO: 60547 - protein, 327 aa, Gossypium hirsutum
  Clone ID: GOSHI-09MAY01-C40_3.pep
MESHLEKQNGDVLQKSFKEMISTLPKKSCWGFPEDQYQYQSFWFSPPFLQGALSAQQQFQAQPTDIILCSSPRTGTAWLKSLTFATITRTSYNDSTTPLLSKMPHDVVPYMEFDHAQISTNRHLGIPLLATHLPYSFLPRSIIDSGCKLIYICRDPKDTFVSLYHFIAGHCKSQNAQPVQLDEAFELFYEGVSPFGPYWDHVLGYWKASFEHPDKFMFLKYEEMNEDTVLYLKKLAEFMGCPFSTEEQQKGVPEKIIKMCSFENLSNLEVNKSGIHREGQGNLEIQNKIYFRKGKVGDWKNYLTPKMATQLDQITQQKLSSSGLSLN

SEQ ID NO: 60548 - protein, 330 aa, Gossypium hirsutum
  Clone ID: GOSHI-09MAY01-C40_2.pep
MESHFDSHVEQHNEDEFQKSFKEMISTLPKGNSWGLPDHLYQYQDFWFTSPFLQGVLLAQQQFEAQPTDIILSSAPRTGTAWLKSLTFATITRTSYDDSTTPLLFRMPHDVVPFMELDHAHFSANRHLGIPLLATHAPYSFLPTSIIDSGCKIIYICRDPKDTFVSMYHICTRYAKSQNTQPIQLDEAFELFYEGVSWYGPYWDHVLGYWKASLEHPDKLMFLKYEELIEDTVLYLKKIAEFMGYPFSSEEQQQGVPENIVQLCSFENLSGLEVNKTGKHRDGQGDLAMENNIFFRKGKVGDWKNYLTTEMARRLDQRTLQKFRGSGLSV

SEQ ID NO: 60549 - protein, 262 aa, Gossypium hirsutum; identical to SEQ ID NO: 60544
  Clone ID: GOSHI-09MAY01-C40_1.pep

SEQ ID NO: 60550 - protein, 179 aa, Gossypium hirsutum
  unsure (1)..(179): unsure at all Xaa locations
  Clone ID: LIB3583-045-P1-K1-H12.pep
VNLFTSAGAGGAFVSLHHFNARYNKSQNTQPVQLDEAFELFYEGVNWYGPYWDHVLGGVRPGSEHPDKLLFLKYEELIEDTVLYLKKIAEFMGXPYSSEEQQQGVPENIAQLFFFFFLIGXEGNKXGKXRDGQGDLAMENNIFFLKGKVGDWKNYLTTEMARRLDQRTLQKFRGSGLSV

SEQ ID NO: 60551 - protein, 59 aa, Gossypium hirsutum
  Clone ID: LIB3583-056-P1-K1-B9.pep
HQDTQGVYASLNGPRLERSEAFLLNAAKAQTHLGTCLDNTDPTIQPQTRDPDFIHPCSK

SEQ ID NO: 60552 - protein, 123 aa, Gossypium hirsutum
  Clone ID: uC-gsflnu33B055f04b1.pep
MARGLKKHLKRLNAPRHWMLDKLGGAFAPKPSVEPHKSSECLTLILILLNTKYNVTPTEGILCCSLTTGTGWLKYLTFATITRTSYKDFTTPLLYTLPYDVVPLMEFGHSQFSTNLHLGNSSF

SEQ ID NO: 60553 - protein, 73 aa, Gossypium hirsutum
  unsure (1)..(73): unsure at all Xaa locations
  Clone ID: LIB3145-024-Q1-K1-D1.pep
QGLVVAFAPKPFXGPHKSRECLPLILILRNRLMFALTYREVIAFLMLRHVMVDGMVRTVXTYPAWFMVVVSFL

SEQ ID NO: 60554 - protein, 141 aa, Gossypium hirsutum
  Clone ID: LIB3147-055-Q1-K1-C9.pep
PTRPPTRPPTRPLTYREVIGVLMQRHVMVDGKVRTDKTYPAGFMDVVSIPKTNEDFRLLYDTKGRFRLHAITGDETKFKLCKVRTVQFGQKGIPYLNTYDGRTIRYPDPLIKANDTIKLDLESNKIVDFIKFDVGNVVMVT

SEQ ID NO: 60555 - protein, 106 aa, Gossypium hirsutum
  unsure (1)..(106): unsure at all Xaa locations
  Clone ID: LIB3147-021-Q1-K1-A11.pep
QPNFSIIARGLKKRVIVLYSPRHXILHKLGGAFAPKPSSGPYKSKECLPLILILRNRLXYALTYKQVIAILMHRHFMVDGKVWTDNIYPAGFIDLIFIXNTNEDFP

SEQ ID NO: 60556 - protein, 53 aa, Gossypium hirsutum
  Clone ID: uC-gsflnu33B024e09b1.pep
DVSLPQVRFYSAMNSLRDDRISSARFPDSDIPGSKPTCRLPEAYRRQATSFFA

SEQ ID NO: 60557 - protein, 122 aa, Gossypium hirsutum
  Clone ID: GOSHI-09MAY01-C70_5.pep
MGICYCRHFLFFSMAMDASLTMCKSVTSPPGLFLGRSRVIRSSQCTFMVGSRINFPRQKAQSTQVKCKSSRCGVALGAKCRAEKILVANRGEIAVRVIRTAHEMGIPCVAVYSTIDKDALHV

SEQ ID NO: 60558 - protein, 166 aa, Gossypium hirsutum
  Clone ID: GOSHI-09MAY01-C70_4.pep
FYVWGLFLGRSRVIRSSQCTFMVGSRINFPRQKAQSTQVKCKSSRCGVALGAKCRAEKILVANRGEIAVRVIRTAHEMGIPCVAVYSTIDKDALHVKLADESVCIGEAPSSPSYLLIPNVLSAAISPYCSMLHPGYGFLAENAVLVKLSEFHRINFIGPFPGTFPG

SEQ ID NO: 60559 - protein, 379 aa, Gossypium hirsutum
  Clone ID: GOSHI-09MAY01-C70_2.pep
MADGSKRPSVFHKMHGQSYFISRLTPSLPAQNYNMTGAYTNGGIHVALQPSRHSTGLAYMPTVSPIFVQAPSEKGFTGFMVDFLMGGVSAAVSKTAAAPIERVKLLIQNQDEMIKAGRLSEPYKGITDCFARTIKDEGVIALWRGNTANVLRYFPTQALNFAFKDYFKRMFNFKKDRDGYWKWFAGNLASGGAAGASSLLFVYSLDYARTRLANDNKAAKKGGQRQFNGLVDVYRKTIQSDGIAGLYRGFNISCVGIIVYRGLYFGMYDSLKPVVLVGGLQDSFLASFLLGWGITIGAGLASYPIDTVRRRMMMTSGEAVKYKSSMAAFSQIIKNEGAKSLFKGAGANILRAVAGAGVLAGYDKLQVLFLGKKYGSGGG

SEQ ID NO: 60560 - protein, 484 aa, Gossypium hirsutum
  unsure (1)..(484): unsure at all Xaa locations
  Clone ID: GOSHI-09MAY01-C70_1.pep
MAMDASLTMCKSVTSPPGLFLGRSRVIRSSQCTFMVGSRINFPRQKAQSTQVRCKSSRCGGALGAKCRAEKILVANRGEIAVRVIRTAHEMGIPCVAVYSTIDKDALHVKLADESVCIGEAPSSQSYLLIPNVLSAAISRNCTMLHPGYGFLAENAVFVEMCRDHRINFIGPNPDSIRVMGDKSTARETMKNAGVPTVPGSDGLLQSTEEAIKLAHEIGFPVMIKATAGGGGRGMRLXAKEPDEFVKLLQQAKSEAAAAFGNDGVYLEKYIQNPRHIEFQVLADKYGNVVHFGERDCSIQRRNQKLLEEXPSPALTPELRKAMGDAAVAAAASIGYIGVGTVEFLLDERGSFYFMEMNTRIQVEHPVTEMISSVDLIEEQIRVAMGEKLRYKQEDIVLRGHSIECRINAEDAFKGFRPGPGRITSYLPSGGPFVRMDSHVYSDYVVPPSYDSLLGKLIVWAPTREKAIERMKRALDDTVITGVP

SEQ ID NO: 60561 - protein, 174 aa, Gossypium hirsutum
  Clone ID: LIB3543-062-Q6-K6-D5.pep
MALDSSMTMCKSVTSTPGLFLRRNTSSRSFQCTFKVGTRINFPRQKAQVTQVRCKSSKRGGALGATCRAEKILVANRGEIAVRVIRTAHEMGIPCVAVYSTIDKDALHVKLADESVCIGEAPSSQSYLLIPNVLSAALSLNCTMLHPGYGFLAENAVFVEMCRDHRINFIGPDP

SEQ ID NO: 60562 - protein, 125 aa, Gossypium hirsutum
  Clone ID: LIB3197-047-Q1-M1-B6.pep
SLLFWLVDCRIVSWQVSCWVGASHSVLYLHSSKVIRKFQCTFMVGSKINFPRQKAQSTQVRCKSIRCGGALGAKCRAEKILVANRGEIAVRVIRTAHEMGIPCVAVYSTIDKDALHVKLADESVC

SEQ ID NO: 60563 - protein, 333 aa, Gossypium hirsutum
  Clone ID: GOSHI-09MAY01-C30_1.pep
MQGKAGHHTPVFEKYRQKAEYFMCSLIGKGSRNIQKTPGGLIYRQRWNNMQFVTSASFLATVYSDYLTSYRGSLKCAAGNVAPSELLSFAKSQVDYLLGDNPRATSYMVGYGNNYPRQVHHRGSSIVSIKVNPKFVACRQGYATWFTRKASDPNVLTGAVVGGPDAYDNFADERDNYEQTEPATYNNAPLLGILARLAGGHAGYNQLLPVVAPVPNPVIAKPKPAPKPKRTPTPASSSSPITINQKMTTSWNHKGKTYYRYSTVVTNKSYKTLKALKLSISKLYGPIWGLTKSGNSYGFPEWLNSLPAGKSLEFVYIHAASPADVSVSSYNIA

SEQ ID NO: 60564 - protein, 102 aa, Gossypium hirsutum
  Clone ID: GOSHI-09MAY01-C990_1.pep
ISVSVNNSSSSDAIPCQPVRTLFYHSPIVNISSSFAIYQFNHRNRCLLNPVLGTFVLSSCSCHSMSHVVSLPGGFKFAYESQCVSFHHNVLEVHFLCHSNCL

SEQ ID NO: 60565 - protein, 48 aa, Gossypium hirsutum
  Clone ID: GOSHI-09MAY01-C890_3.pep
VIIRDDKCRGTQKRPNSAHQLLAKLVILLNSFIFFISQLRYKSFCLQL

SEQ ID NO: 60566 - protein, 234 aa, Gossypium hirsutum
  Clone ID: GOSHI-09MAY01-C890_2.pep
MSTGDLLTIDPLELKFPFELRKQISCSLQLSNKTDNHVAFKVKTTNPKKYCVRPNTGIVLPRSTCEVIVTMQAQKEAPADMQCKDKFLLQSVKAPDGVTAKDITAEMFNREAGNVAEECKLRVVYVFSHQQTSPSQEGSELVPRGSISDNSEFVMAARTFMDQLDTQDKSPEAKALITKLTDEKNKAIQQNNKLRQELELLKRESSKSGGNLSFMFVALIGLIGLIMGYIMKRS

SEQ ID NO: 60567 - protein, 240 aa, Gossypium hirsutum
  Clone ID: GOSHI-09MAY01-C890_1.pep
MSTADLLSIEPLELKFPFELRKQISCALQLSNKTDNYVAFKVKTTNPKKYCVRPNTGVVLPRSTCDVVVTMQAQKEAPPDMQCRDKFLLQSVKVNDGASAKDITAEMFNKEAGHVVEECKLKVVYVSPPQPPSPVREGSEEGSPPRVSASDNGHANAAEFAAAAKQFSEGLEAQDKSFEARALITKLTAEKNSAIQQNNKLRQELELLKRQSSKSGGGVSFMVVILIGLIGIIMGYIMKK

SEQ ID NO: 60568 - protein, 148 aa, Gossypium hirsutum
  unsure (1)..(148): unsure at all Xaa locations
  Clone ID: LIB3583-012-P1-K1-C4.pep
MSAGELLSSEPSELKFPFELKKQISFSLQLSNKTDNYVAFKVKTTNPKKYCVRPNTGVVLPRSTCDVIVTMQAQKEAPPDMQCRDKFLLQSVKVNDGLTANDITAEMFNKEAGNVVEECKLKVVYISPPSTAQEGSEEGPSPGVSXSD

SEQ ID NO: 60569 - protein, 104 aa, Gossypium hirsutum
  Clone ID: LIB3584-039-P1-K1-C1.pep
AGHVVEECKLKVVYVSPPQPPSPVREGSEEGSPPRVSASDNGHANAAEFAAAAKQFSEGLEAQDKSFEARALITKLTAEKNSAIQQNNKLRQELVRGINRDFTS

SEQ ID NO: 60570 - protein, 382 aa, Gossypium hirsutum
  unsure (1)..(382): unsure at all Xaa locations
  Clone ID: GOSHI-09MAY01-C850_1.pep
MAMKQVANSAIKAIANSGSSSLLTRQLHASPGSKKIVGVFYKANEYFTKNPNFVGCVEGALGLRPWLESQGHQYIVTDDKEGPDCELEKHIPDLHVLISTPFHPAYVTAERIKKAKNLQLLLTAGIGSDHVDLKAAAEAGLTVAEVTGSNVVSVAEDELMRILILVRNFVPGYHQVITGDWNVAGIAYRAYDLEGKTVGTIGAGRIGKLLLQRLKPFNCNLLYHDRVKIDPELEKQTGAKFEEDLDAMLPKCDIIVINMPLTEKTRGMFDKDRIAKMKKGVLIVNNARGAIMDTQAVADACSSGHIAGYSGDVWYPQPAPKDHPWRYMPNQAMTPHISGTTIDAQLRYAAGXRDLLERYFKGDDFPEQNYIAKAGELAPQYR

SEQ ID NO: 60571 - protein, 140 aa, Gossypium hirsutum
  Clone ID: LIB3583-057-P1-K1-H4.pep
QASPGSKKIVGVFYKANEYFTKNPNFVGCVEGALGLRPWLESQGHQYIVTDDKEGPDCELEKHIPDLHVLISTPFHPAYVTAERIKKAKNLQLLLTAGIGSDHVDLKAAAEAGLTVAEVTGSNVVSVAEDELMRILILGR

SEQ ID NO: 60572 - protein, 113 aa, Gossypium hirsutum
  Clone ID: AI730474.1.pep
KRDPTTQAERTSRGAGRPAGAFPQNPKEAKGRPAAARIRRQPRPTPQSGRHKTRTRARGEHDPPLEGKGAPPPRRPQQTDKWSRLNKNARGRRHRKTHQNAHRGPPSRADHHH

SEQ ID NO: 60573 - protein, 64 aa, Gossypium hirsutum
  unsure (1)..(64): unsure at all Xaa locations
  Clone ID: LIB3272-059-P1-N1-H10.pep
TFTIXFHIVATRLTTQPNTXWTSLSWTEETAKSSVLRSELTCFDNVVLFRKVFTFEVPLKHILD

SEQ ID NO: 60574 - protein, 105 aa, Gossypium hirsutum
  unsure (1)..(105): unsure at all Xaa locations
  Clone ID: LIB3197-014-P1-M1-H1.pep
KCSSEVAMKQVANSAIMAFGGVGSXCLLTRQLHASPGGKXIVGVLYMANEYFTKNPNFVGCVEGALGLRQWLXLRGRQYIVTDDKERPDCGKYNNPYCLFCQCRC

SEQ ID NO: 60575 - protein, 148 aa, Gossypium hirsutum
  unsure (1)..(148): unsure at all Xaa locations
  Clone ID: GOSHI-09MAY01-C800_2.pep
MEDDAMATEAPLAPVTSGRRVRNDLEDKLPKPYMARALVAPDVDHPNGTPGHYHNGMSVLQQHAAYFDQDDNGIIYPWETYAGCRALGFNPIASLFFTILINGSMSYPTLPVSXPLLPCWISLLYLTQFGSSRHAYILITIHLIFTIT

SEQ ID NO: 60576 - protein, 235 aa, Gossypium hirsutum
  Clone ID: GOSHI-09MAY01-C800_1.pep
MEDDAMATEAPLAPVTSGRRVRNDLEDKLPKPYMARALVAPDVDHPNGTPGHYHNGMSVLQQHAAYFDQDDNGIIYPWETYAGCRALGFNPIASLFFTILINGSMSYPTLPGWLPSPFFPIYVYNIHKAKHGSDSGIYDNEGRFTPANIESMFSKYARTVPDKFTLGELWKMTEGNRDAFDLFGWLAGKFEWGVLYVLARDEDGMLSKEAVRRCFDGSLFEYCARMNMGRHGKVA

SEQ ID NO: 60577 - protein, 121 aa, Gossypium hirsutum
  Clone ID: LIB3583-004-P1-K1-E8.pep
MTPFFPIYVYNIHKAKHGSDSGIYDNEGRFTPANIESMFSKYARTVPDKFTLGELWKMTEGNRDAFDLFGWLAGKFEWGVLYVLARDEDGMLSKEAVRRCFDGSLFEYCARMNMGRHGKVA

SEQ ID NO: 60578 - protein, 125 aa, Gossypium hirsutum
  unsure (1)..(125): unsure at all Xaa locations
  Clone ID: LIB3582-051-P1-K1-H11.pep
MEDDAMATEAPLAPVTCGRRVPNDLEDKLPKPYMARALVAPDVYHPGGAXXHYHNXMSVLQQHAAYFDQDDNGIIYPWETYAGCRAMGFNPIASLFFTILINGSMSYPTLPVSFLFFHVGFHSHT

SEQ ID NO: 60579 - protein, 208 aa, Gossypium hirsutum
  Clone ID: GOSHI-09MAY01-C550_1.pep
LVQAFAFVPLMYMCMCTYYSLFKVGMLMFYSLTPRQTSSVSLLMICSMVARYAPPISYNFLNLISLGGKKTIFEKRMGNIDDAVPFFGEGFNNIYPLIMVVYTLLVASNFFDRVVGFFGNWKRLRFQTEADDMDGFDPSGLIILQKERSWLEQGRRVGEQVIPLARNFNGADIEYGHNITDRTVVEMKAATTSATGGVKGSPSKPAKE

SEQ ID NO: 60580 - protein, 347 aa, Gossypium hirsutum
  Clone ID: GOSHI-09MAY01-C540_1.pep
MAEESGAPVSCADLPVKRPREDEENGVSSAAAVVAMEMEADTNNTSKEVDGISSVIPGWFSEISPMWPGEAHSLKVEKVLFQGKSDYQNVMVFQSSTYGKVLVLDGVIQLTERDECAYQEMITHLPLCSIPNPKKVLVIGGGDGGVLREVSRHSSVEQIDICEIDKMVVDVSKQYFPDVAVGYDDPRVKLHIGDGVAFLKAVPEGTYDAIIVDSSDPIGPAQELFEKPFFESVAKALRPGGVVCTQAESIWLHMHIIEDIVANCRQIFKGSVNYAWTTVPTYPSGVIGFMLCSTEGPLVDFKHPVNPIDKDESCCKSKRPLKFYNSEIHSAAFCLPSFAKKVIESKP

SEQ ID NO: 60581 - protein, 55 aa, Gossypium hirsutum
  Clone ID: uC-gsronu33B137e09b1.pep
YVSAKCQYYPLWTYILLQPLPQILFLSETKKKVHYLNFQIQGSLLHWAIKAKDDN

SEQ ID NO: 60582 - protein, 81 aa, Gossypium hirsutum
  Clone ID: LIB3189-032-P1-K1-F7.pep
QTTLKSVKRKCYTYTWNTTTAAKETQFYSSSLGLLTGKTAQLTGAPLSSAIETPICFCFRNPKKLGKRPKKNRKIENLGLA

SEQ ID NO: 60583 - protein, 199 aa, Gossypium hirsutum
  unsure (1)..(199): unsure at all Xaa locations
  Clone ID: GOSHI-09MAY01-C570_1.pep
LSALCCYTDSLPSSLPFAGSLFCPLLILKGNRPDTHFTKDGWLKIITNFEKETGKGISXRQLKNRWDALKKGWKAWKKLKGEDTGLGWNPIKRTVDASDDWWESRLQVVPEAKNFRTSGIDPEFEAKLDQMFMGIVATGDKAWAPSSGTLRSDFFEDVNNEIPEESEEENMRNDVHILNDVHISKDVHISNDVQMDGNG

SEQ ID NO: 60584 - protein, 149 aa, Gossypium hirsutum
  Clone ID: LIB3582-045-P1-K1-D5.pep
MSTSAVEVSGEKVKTMWDKRLTEIFCDICIKEFLKGNRPGTHFTKDGWLKIMTNFEKEAGKVFSQKQLKNKWDALKKEWKAWKKLKGEDTGLGWNPIKRTVDAPDDWWESRLKVVPEAQNFRTSGIDPEFEGKLDQMFMGIVATSDKAW

SEQ ID NO: 60585 - protein, 81 aa, Gossypium hirsutum
  Clone ID: LIB3120-031-Q1-K1-A9.pep
KSAFRLLFYLFSHTHNTGSLLSSLLPSLVLCSSAGSLFFCWCWFFVPLLVLVLCSSTGYLFLCWCWFFIPLLLLCSSFPPP

SEQ ID NO: 60586 - protein, 91 aa, Gossypium hirsutum
  Clone ID: LIB3120-060-Q1-K1-D7.pep
MSTSAVEVSDEKVNAMWDKRLTEIFCDICIKEILKGNRPGTHFTKNGWLKIMTTFEKETGKGFSQRQLKNRWDALKKEWKAWKKLKSEDTG

SEQ ID NO: 60587 - protein, 110 aa, Gossypium hirsutum
  Clone ID: LIB3148-002-P1-K1-B9.pep
SPITGSLFLCLFFVPLLVLVLCSSAASLFLFSTTEILKGNRPSTHFTRDGWLKIMTNFEKETGKGFSQRQLKNRWDALKKEWKAWKKLKGEDTGLGWNPIKRTRDASDGW

SEQ ID NO: 60588 - protein, 144 aa, Gossypium hirsutum
  Clone ID: GOSHI-09MAY01-C560_4.pep
NTITHTQTPKMPFKRYVEIGRVALVNYGKDYGKLVVIVDVVDQNRALVDAPLVRRGQMNFKRLTLTDITIDIPRVPKKKTLIEAMEKADVKNKWESSSWGRKLIVQKRRASLNDFDRFKLMLAKIKRSGVIKQELAKLKKENAS

SEQ ID NO: 60589 - protein, 134 aa, Gossypium hirsutum
  Clone ID: GOSHI-09MAY01-C560_3.pep
MPFKRYVEIGRVALVNYSKDYGKLVVIVDVVDQNRALVDAPDMVRGQMNFKRLQLTDFKIDIPRVPKKKTLIEAMEKADVKNKWENSSWGKKLIVQKKRASLNDFDRFKIMLAKIKKAGVVRQELAKLKKENAS

SEQ ID NO: 60590 - protein, 149 aa, Gossypium hirsutum
  Clone ID: GOSHI-09MAY01-C560_2.pep
FSPLSLLHSHTLTAKKPFKRYVEIGRVALVNYGKDYGKLVVIVDVVDQNRALVDAPDMVRGQMNFKRLTLTDITIATPPVPKKKTLIEAMEKADVRDKWENSSWGRKLIVQKRRAALTDFDRFKLMLAKIKKAGVVRQELAKLKKENAS

SEQ ID NO: 60591 - protein, 152 aa, Gossypium hirsutum
  Clone ID: GOSHI-09MAY01-C560_1.pep
FLLASVVSNTLTHTQTPKMPFKRYVEIGRVALVNYGKDYGKLVVIVDVVDQNRALVDAPDMVRGQMNFKRLTLTDITIDIPRVPKKKTLIEAMEKADVKNKWENSSWGRKLIVQKRRASLNDFDRFKLMLAKIKRAGVVRQELAKLKKENSS

SEQ ID NO: 60592 - protein, 116 aa, Gossypium hirsutum
  unsure (1)..(116): unsure at all Xaa locations
  Clone ID: LIB3149-028-Q1-K1-C6.pep
RCVEMPFRRYVEIGRVALVNYSKDYGKLVVIDDVVDQNRAVVXDPPDMERGQVNSNRHKMTDFANVIPSVPKKKTLIEAMEKADVKNKWENSSWGKKLIVQKKRASLNDFDRFKIM

SEQ ID NO: 60593 - protein, 55 aa, Gossypium hirsutum
  Clone ID: LIB3147-054-Q1-K1-F9.pep
RKSSWSKKLFVQNRKAAITDIHRIKLMLSKIKKAGIRRQELAKLKKENAYSGILN

SEQ ID NO: 60594 - protein, 132 aa, Gossypium hirsutum
  unsure (1)..(132): unsure at all Xaa locations
  Clone ID: GOSHI-09MAY01-C510_1.pep
MESSLLQWESDPLFSAAEVVQDSADXMESFFRLLLHEKTLLQSDLPDPKLLTSIGYHTRDLATVLETAKWQLEDFERAVNSSARMDQSHSREHVISRHKQFIRAIRGQINDVEKSLEDMEMGNPMKKSKWGN

SEQ ID NO: 60595 - protein, 116 aa, Gossypium hirsutum
  Clone ID: GOSHI-09MAY01-C500_1.pep
MKRAVISVFVMLAMFQFVVKQGQAAVTCKQVDDALAACVPYLTNGGVPSTPCCNGVGELRNSAETTADRQAACNCVKQAAARIPTIKEDDAATLPAKCHVQVDFPISKNTNCEDIH

SEQ ID NO: 60596 - protein, 51 aa, Gossypium hirsutum
  Clone ID: LIB3582-043-P1-K1-E9.pep
YLNRWRQRVLPLYLRLDGFHLSECPHTWCYCLLQNAAGIPTLQGELRRHLL

SEQ ID NO: 60597 - protein, 173 aa, Gossypium hirsutum
  unsure (1)..(173): unsure at all Xaa locations
  Clone ID: GOSHI-09MAY01-C530_1.pep
KYVMADAEVARVSDYGKLFYIRTHLGHILKPGDRALGYDLYGANSNDIELDKYRGLVLSEAILIKKSYEEKRQKKRGKPSSWKLKSLDMELDESKGRANEQKLDTEYEEFLRDLEENPELRFNLSLYRNRDYQXASEMVSVSDGDDLPSVPWEELLADLELSEQEDGEDSMRE

SEQ ID NO: 60598 - protein, 172 aa, Gossypium hirsutum
  unsure (1)..(172): unsure at all Xaa locations
  Clone ID: GOSHI-09MAY01-C520_1.pep
MIFQPIVAEKILKIPLAEMEHEDFQVWRGESTGEFSIRSAYKLLHESTLDPNDLILHTKTINFYRKLWKLHIPSKIKMIIXRISWNFIPSFFNLKIKWVVVNTRCPRCDSEEENSCHIFQQCGEYLDNEMMSNFAFSVMVSGLFGLVEINFSTLLKVFNRCSKGEGQRFILK

SEQ ID NO: 60599 - protein, 217 aa, Gossypium hirsutum
  unsure (1)..(217): unsure at all Xaa locations
  Clone ID: LIB3828-014-Q1-K6-A1.pep
CHQDPEQLLRRRIATGPGSDPFEALVVSHQDRLLSNTKLLHSTYXTFIPRTRAPPIGAQCSNRNFAYRMTEELHNPWVKRLLIGFARTSEYNGPRMPDGPHCLIQEIDSQLPVALPALQLTYKIFGSCPPMQSFDHAKLLTDSGKLQTLDILLKRLRAENHRVLLFAQMTKMLNILEDYMNYRKYRYLRLDGSSTIMDRRDMVRDFQLRNDIXCVLA

SEQ ID NO: 60600 - protein, 158 aa, Gossypium hirsutum
  Clone ID: LIB3582-043-P1-K1-B6.pep
IGAQCSNRNFAYRMTEELHNPWVKRLLIGFARTSEYNGPRMPDGPHCLIQEIDSQLPVALPALQLTYKIFGSCPPMQSFDHAKLLTDSGKLQTLDILLKRLRAENHRVLLFAQMTKMLNILEDYMNYRKYRYLRLDGSSTIMDRLDMVRDFQLRNDIF

SEQ ID NO: 60601 - protein, 155 aa, Gossypium hirsutum
  Clone ID: GOSHI-09MAY01-C460_3.pep
MASSSSSSSSLSDSLTDKNVVFKKLKAKSDNKMCFDCNAKNPTWASVTYGIFLCIDCSAVHRSLGVHISFVRSTNLDSWSPEQLRMMIYGGNNRAQVFFKQHGWTDGGKIEAKYTSRAADLYRQILSKEVGKSMAEEAGLPSSPVASQSSLHLMG

SEQ ID NO: 60602 - protein, 408 aa, Gossypium hirsutum
  Clone ID: GOSHI-09MAY01-C460_2.pep
MASSDSLSDKNAVFRKLKAKSENKMCFDCNAKNPTWASVTYGIFLCIDCSAVHRSLGVHISFVRSTNLDSWSPEQLKMMIYGGNNRAQVFFKQHGWTDGGKIEAKYTSRAADLYRQMLSKEVAKSMAEDAGLPSSPVAPQLSAATNGFSGSKIDEVLKESSLGSQEKPEVSAAPKASHTVVTSAVKKPLGARKVTGKTGGLGARKLTNRPSENLYEQKPEEPVVPVASSTNDIAPTGSSFPSRSRFEYVENVQSTEWNHGGPQVLNHVAPPKSSSFFAEFGMDSGFQKKSSSNSSKVQIQETDEARKKFSNAKSISSAQFFGDQTRAADNEAQVTLQKFSSSTAISSSDLFGQGADNALDLTASDLINRLSFQAQQDISSLKNIAGETGKKLSSFASTFMSDFQDRIL

SEQ ID NO: 60603 - protein, 158 aa, Gossypium hirsutum
  Clone ID: GOSHI-09MAY01-C460_1.pep
PTRPPTRPPTRPENLYEQKPEEPVVPVASSTNDIAPTGSSFPSRSRFEYVENVQSTELNHGGPQVLNHVAPPKSSSFFAEFGMDSGFQKKSSSNSSKVQIQETDEARKKFSNAKSISSAQFFGDQTRAADNEAQVTLQKFSVCAIAISFLRLERVQQN

SEQ ID NO: 60604 - protein, 79 aa, Gossypium hirsutum
  Clone ID: LIB3583-055-P1-K1-D11.pep
GVLLDVFSSLKNLYILCRSTNLDSWSTEQLKMMIYGGNNRAQVFFKQHGWSDGGKIEAKYTSRAADLYRQILSKEVAKS

SEQ ID NO: 60605 - protein, 118 aa, Gossypium hirsutum
  Clone ID: LIB3146-061-Q1-K1-C8.pep
EISVVPKTSLLFLTSTIKKPVGANKLGGLGARKLTNKHSENLYDQKPEEPVVPVASSSINTAPITSPFPSRFEYVENAQSTMLNSDGPQLLGHVALPKSSSFFAEFEMDNGFHKKSSS

SEQ ID NO: 60606 - protein, 102 aa, Gossypium hirsutum
  Clone ID: GOSHI-09MAY01-C400_1.pep
CSRYLAQSVLDFRILTGNVLEFRLLLSFLQREFCTTQSNTNEVSAAGSVQLSITAQIMRKRIMYLHIYVYILCVVLVSCCISSRIRRIPGLNWKRTQVYEKS

SEQ ID NO: 60607 - protein, 219 aa, Gossypium hirsutum
  unsure (1)..(219): unsure at all Xaa locations
  Clone ID: GOSHI-09MAY01-C760_1.pep
MADQTNGVTLNENQRIRKEETLYDVLHRSVSMILPDASSTESAPLLQRIKISVSENGPRLGEASRNTGQTLLRWTRRGSPLRALLVISVMLSPCFKFDKTIIXILNFWLLTFMLIFLVATVNARIVSLLISLAAAGGFLFFXLACVTAIYIGAMSIAALVFSIATISAIFAAMIAAGWVGFFWVIWLGTRKSVGFAKQSLSKTGSVISAYSFAQHARID

SEQ ID NO: 60608 - protein, 142 aa, Gossypium hirsutum
  Clone ID: LIB3135-052-Q1-K1-G2.pep
ENGPRLGEASRNTGQTLLRWTRRGSPLRALLVISLGSVAFLALTGLLTFMLIFLVATVNAIIVSLLISLAAAGGFLFFSLACVTAIYIGAMSIAALVFSIATISAIFAAMIAARCVGFFWVIWLGTRKSVGFAKQSLSKTGS

SEQ ID NO: 60609 - protein, 106 aa, Gossypium hirsutum
  Clone ID: GOSHI-09MAY01-C720_1.pep
MGLGFMVGVLGVLFLFHAAYSTIQYRGLLKIMEEEFSGPPMNVVLELLLGFVFCISAALTVPGNFLSIHPDSEENRIVSLSANLDFMIFNHRAKALPLETDMKLKH

SEQ ID NO: 60610 - protein, 53 aa, Gossypium hirsutum
  Clone ID: GOSHI-09MAY01-C690_1.pep
PKSPMPGYTQDPISLNPWPKTYLPITPLAQKTNGAQEAQIVNKIRKGLGFQKP

SEQ ID NO: 60611 - protein, 214 aa, Gossypium hirsutum
  Clone ID: GOSHI-09MAY01-C650_1.pep
KLVTLRDSSFNVQNHQLFFFEMEGSENDGNVTPIAKWKTEFSRKVQSFLDRSTPHTMDWWLGTLAVAMIYVLRVYYVQGFYVISYGLGIYVLNLLIGFLSPKVDPELEALDGASLPTKGSDEFKPFIRRLPEFKFWYAITKAFVVAFVLTFFSMLDVPVFWPILLCYWIFLFFLTMKRQIFHMIKYKYVPFDIGKQSIPIRSLQVVAVHQETER

SEQ ID NO: 60612 - protein, 110 aa, Gossypium hirsutum
  Clone ID: GOSHI-09MAY01-C670_3.pep
GVRERKLTTTAVRSEHREEELWESIQFDAAIDINNSRSASGMVVRGQNGKIAASKSTIHSNVSSPYVAEALACLEATNLGISMGLNSVTVMGDSKTIIKKCKIGRVGGRV

SEQ ID NO: 60613 - protein, 252 aa, Gossypium hirsutum
  Clone ID: GOSHI-09MAY01-C670_2.pep
FTVWKLTISYLEKYFGNERTPSNGLIWRVGKGDAISNFPRETAQKILQIPLARTDCEDTQVWKGEPSREFTVRSAYKLLQEASLDPSNYLLQADTKDFYRKLWSLQLPTKILILIWRISWNYIPSLVNLRYKRVTTTARCPRGCSAEEDSFHVFRQCPGYSVEEQRSRSEFFVAPYGLSTTPGRSEHREEDLGESIQFDAAFDTNNSRSASGMVARGQNGEIGVSKSILHSNGPAPFVAEAWARADAWADAW

SEQ ID NO: 60614 - protein, 155 aa, Gossypium hirsutum
  Clone ID: GOSHI-09MAY01-C670_1.pep
GSPYSLTQLSTPTTSRSASGMVVRGQNGEIAASKSTIHSNVSSPYVAEALACLEATNLGISMGLNSVTVMGDSKTIIKKCKMGVRDKSVLGAMIVDIQNNKTRFQRIAFRYIQRAENVRAHDLAKEALRKGEGSYLVEETRETLDAGGRWPRNPD

SEQ ID NO: 60615 - protein, 118 aa, Gossypium hirsutum
  Clone ID: LIB3585-008-P1-K1-G2.pep
TNVRCPRCCLSKENSFHVFRQCPRYSAKVKKEQIRAFCCALWVISTPVRSEQKEVDLRESIQFDAAFDINNSRSASGIVARGQNGEIRVSKSILHSNVSSGGGDERRTESWREMATKS

SEQ ID NO: 60616 - protein, 50 aa, Gossypium hirsutum
  Clone ID: LIB3148-009-Q1-K1-D9.pep
LVSWGTSWNMMYHIWRSIWATKGLLLNGLIWRVGRGDAISIFQKEIAQKI

SEQ ID NO: 60617 - protein, 95 aa, Gossypium hirsutum
  Clone ID: LIB3135-046-Q1-K1-F1.pep
YNLFPSVFCLFIKIHILLQEVWKGELSGEYTVRSAYKLLQEASLDPSNYLLQADTKDFYRKLWSLQLPTKILILAWRISWNYIPSHANLIQKRVT

SEQ ID NO: 60618 - protein, 140 aa, Gossypium hirsutum
  Clone ID: GOSHI-09MAY01-C660_3.pep
MSKRGRGGSAGNKFRMSLGLPVAATVNCADNTGAKNLYIISVKGIKGRLNRLPSACVGDMVMATVKKGKPDLRKKVLPAVIVRQRKPWRRKDGVYMYFEDNAGVIVNPKGEMKGSAITGPIGKECADLWPRIASAANAIV

SEQ ID NO: 60619 - protein, 140 aa, Gossypium hirsutum; identical to SEQ ID NO: 60618
  Clone ID: GOSHI-09MAY01-C660_2.pep

SEQ ID NO: 60620 - protein, 159 aa, Gossypium hirsutum
  Clone ID: GOSHI-09MAY01-C660_1.pep
CTVPVSEVLRARAHRRPPIMSKRGRGGSAGNKFRMSLGLPVAATVNCADNTGAKNLYIISVKGIKGRLNRLPSACVGDMVMATVKKGKPDLRKKVLPAVIVRQRKPWRRKDGVYMYFEDNAGVIVNPKGEMKGSAITGPIGKECADLWPRIASAANAIV

SEQ ID NO: 60621 - protein, 68 aa, Gossypium hirsutum
  unsure (1)..(68): unsure at all Xaa locations
  Clone ID: uC-gsflnu33B081h02b1.pep
LYLNACDLGTGNVLRRMDLAETVVRNRKQWRLKEGGLLXCEVXAGVIVNPKGEMKGSAITGPIGRSVL

SEQ ID NO: 60622 - protein, 103 aa, Gossypium hirsutum
  unsure (1)..(103): unsure at all Xaa locations
  Clone ID: LIB3189-011-P1-K1-G8.pep
PTRRPRVAHSLKRGRGGSGGDKFRCTGFTRAATVNCADNTXAKTLYISGKESRAVHRLPSAXVGDMVMATVKKGKPDLEEGLPAALETRSHVHKVVFHLSYLI

SEQ ID NO: 60623 - protein, 475 aa, Gossypium hirsutum
  unsure (1)..(475): unsure at all Xaa locations
  Clone ID: GOSHI-09MAY01-C610_1.pep
MVGRILLLVLFMNAAFFIVNAVPETCPADLGGKCGEDGEWEGEFFPGVPKIKYEGPSSKNPLSYKWYNAEEVILGKKMKDWLRFSVAFWHTFRGTGADPFGAPTKYWPWEDGTNSIAMAKRRMRANFEFLSKLGVDRWCFHDRDIAPDGKTLKETNSNLDEVVALAKELQGDKIRPLWGTAQLFMHPRYMHGAATSSELGVYAYAAAQVKKAMEVTHYLGGENYVFWGGREGYQTLLNTDMERELDHMAKFLEAAAAYKKKIGFNGTLLIEPKPQEPTKHQYDWDAATTLNFLRKYGLLGEFKLNIECNHATLSGHSCHHDLETARINGMLGNIDANTGDPQVGWDTDQFLTDVGEATMIMLSVIRNGGLAPGGFNFDAKLRRESTDVEDLFIAHISGMDTLARGLRNAAKLIEDGSLAELVSKRYSSFDTELGAQIEAGXADFEMLEKKAMEWGEPKVASAKQELAXMIFQSAL

SEQ ID NO: 60624 - protein, 195 aa, Gossypium hirsutum
  unsure (1)..(195): unsure at all Xaa locations
  Clone ID: GOSHI-09MAY01-C600_2.pep
MSDLRDLHGNPIPLTDEHGNPVQLTDEHGNPVYVSGVAAKQTDMYGGQMGYDPTLSAAAXSAAAAAAASVPAAGGTAAAVSAXHLHYEVSTTEEIQRSNASSPSSSEDDGMGGRRKKKGLKEKIKEKLTGGKHKTEGGGRRGNXQTVTYVAKTRIPTTSNATTPPPEEPYPPHDQHEKKSMMEKIKEILPGHPSH

SEQ ID NO: 60625 - protein, 195 aa, Gossypium hirsutum
  unsure (1)..(195): unsure at all Xaa locations
  Clone ID: GOSHI-09MAY01-C600_1.pep
MSDLRDVHGNPIPLTDEHGNPVQLTDEHGNPVYVSGVAAKQTDMYGGQMGYDPTLSAAAXVSAAAAAPASVPAAGGTAAAVSATAXHYEVSTTEEIQRSNASSPSSSEDDGMGGRRKKKGLKEKIKEKLTGGKHKTEAGEEGQSQTVTYVAKTRITTTSNATTPPPEQHYHHHDQHEKKSMMEKIKEILPGHHSH

SEQ ID NO: 60626 - protein, 111 aa, Gossypium hirsutum
  unsure (1)..(111): unsure at all Xaa locations
  Clone ID: GOSHI-09MAY01-C630_3.pep
MEGIPHPIPRTVEEVFNDFKGRRSGLIKALTTDVDKFYQQCDPEKENLCLYGLPNETWXVNLPVEEVPPELPEPALGINFARDGMQEKDWLSLVAVHSDSWLLAVAFYFGA

SEQ ID NO: 60627 - protein, 49 aa, Gossypium hirsutum
  Clone ID: GOSHI-09MAY01-C630_2.pep
MEGIPHPIPRTVEEVFNDFKGRRAGLIKALTTDVDKFYQQCDPEKENLC

SEQ ID NO: 60628 - protein, 252 aa, Gossypium hirsutum
  Clone ID: GOSHI-09MAY01-C630_1.pep
MEGIPHPIPRTVEEVFNDFKGRRAGLIKALTTDVDKFYQQCDPEKENLCLYGLPNETWEVNLPVEEVPPELPEPALGINFARDGMQEKDWLSLVAVHSDSWLLAVAFYFGARFGFGKNERKRLFLMINDLPSIFEVVTGNVKQSKDQSANHNSSGKSKSSAKSRQSEPQSKMVKMSPPSKDEDESGEEEEEDDEQGATCGACGDSYGTDEFWICCDICERWFHGKCVKITPAKAEHIKQYKCPSCSSKRARV

SEQ ID NO: 60629 - protein, 293 aa, Gossypium hirsutum
  Clone ID: GOSHI-09MAY01-C180_1.pep
DIFKTVTKTMPESNIHRGDHELGGCQNHAHYHNVYGMLMARSTYEGMGLADRRKRPFVLTRAGFIGSQRYAATWTGDNLSNWEHLQMSISMMLQLGLSGQPLSGPDIGGFAGNATPKLFGRWLGFGAMFPFCRGHSETGTIDHEPWSFGKECEEVCRLALKRRYRLIPHIYTLFYMAHTRGTPVATPAFFADPKDPNLRTLESCFLLGPLLVYSSIMPDLGSDKLQPLLPKGIWLSFDFDDSHPDLPALYLQGGYIIPFGPSHQHVGESNPMDDLTLIVSVDEHGKAKALFLR

SEQ ID NO: 60630 - protein, 316 aa, Gossypium hirsutum
  Clone ID: GOSHI-09MAY01-C150_3.pep
PRVRPRVRPRVRPRVRKNHGVILLPEGLIESIPEVYALLKEIHSLLRQNVSADKISSQLSPWASALFEPSPPFIRKQLLLQPESDDSAQLSQIETEKLLAHLVENEINKRLKAGTYKGKKFNAICHFFGYQARGSLPSKFDCDYAYVLGHICYHILAAGLNGYMATITNLKNPVNKWRCGAAPLPAMMTVKRWSQNPNAASIGKPAIHPATVDLKGKAYEMLRQNATRFLLDDIYRNPGPLQFDGPGADAKAVTLCVEDQDYMGRIKKLQEYLDKVRTIVKPGCSQEVLKAALSVMASVTEVLSVMSSSSSGGQAL

SEQ ID NO: 60631 - protein, 258 aa, Gossypium hirsutum
  Clone ID: GOSHI-09MAY01-C150_2.pep
HASGTLQSHPNMVILGEEVAASKLTLFDITKQICDAVQARAEQDKNHGVILLPEGLIESIPEVYALLKEIHSLLRQNVSADKISSQLSPWASALFEFLPHFIRKQLLLQPESDDSAQLSQIETEKLLAHLVENEINKRLKAGTYKGKKFNAICHFFGYQARGSLPSKFDCDYAYVLGHICYHILAAGLNGYMATITNLKNPVNKWRCGAAPLPAMMTVKRWSQNPNAASIGKPAIHPASKASYNLNNAQVLLRFSNSD

SEQ ID NO: 60632 - protein, 433 aa, Gossypium hirsutum
  Clone ID: GOSHI-09MAY01-C150_1.pep
MDSDYGIPRELSDLQKLRSQYQPQLPPCLEGTTVRVEFGDTTTSLDPADAHTIARAFPHTYGKPLAHFLRATAKVPDAQIITEHPAIRVGLVFCGRQSPGGHNVVWGLHKALKIHNPNSTLLGFLGGTQGLFAQKTLEITDDILSTYKNQGGYDLLGRTQDQIRTTEQVKAALAACNDLKLDGLVIIGGVTSNTDAAQLAETFAEAKCPTMVVGVPVTLNGDLKNQFVETNVGFDTICKVNSQLISNVCTDALSAEKYYYFIRLMGRKASHVALECTLQSHPNMVILGEEVAASKLTLFDITKQICDAVQARAEQDKNHGVILLPEGLIESIPEVYALLKEIHSLLRQNVSADKISSQLSPWASALFEFLPHFIRKQLLLQPESDDSAQLSQIETEKLLAHLVENEINKRLVAGPFLGTYLFDAFLLTLEQAL

SEQ ID NO: 60633 - protein, 61 aa, Gossypium hirsutum
  Clone ID: LIB3083-119-Q1-L1-C3.pep
KQGYLKIQFLTNSLGSLRKTRAPLQSLLSSQRACPPDDDEDITDRTSVTEAITLKAAFRTS

SEQ ID NO: 60634 - protein, 151 aa, Gossypium hirsutum
  unsure (1)..(151): unsure at all Xaa locations
  Clone ID: GOSHI-09MAY01-C140_2.pep
DFKAKIADFNLSNQAPXMAARLHSTRVLGTFGYHAPEYAMTGQLTQKSDVYSFGVVLLELLTGRKPVDHTMPRGQQSLVTWATPRLSEDKVKQCVDPKLKGEYPPKAVAKLAAVAALCVQYESEFRPNMSIVVKALQPLLKAPVPVPALET

SEQ ID NO: 60635 - protein, 387 aa, Gossypium hirsutum
  unsure (1)..(387): unsure at all Xaa locations
  Clone ID: GOSHI-09MAY01-C140_1.pep
MRRWLCCSCQAEESYQAHENEHLKAPKDHTDGNHRNSRVAAPVKPEVQKSPPPIEVPALSLEELKEKTDNFGSKALIGEGSYGRVYYASLNNGKAVAVKKLDVSTESESNVEFLTQVSMVSRLKHDNFVELQGYCVEGNLRVLAYEFATMGSLHDILHGRKGVQGAQPGPVLDWMQRVRIAVDAARGLEYLHEKVQPSIIHRDIRSSNVLLFEDFKAKIADFNLSNQAPDMAARLHSTRVLGTFGYHAPEYAMTGQLTQKSDVYSFGVVLLELLTGRKPVDHTMPRGQQSLVTWATPRLSEDXVKQCVDSKLXGEYPPKAVAKVAACAALCVQYEIXSSSNMSIVVRLFTGCEAQCHTTLRLKQRGSSFRIYEFITLKWSNQIDLST

SEQ ID NO: 60636 - protein, 125 aa, Gossypium hirsutum
  unsure (1)..(125): unsure at all Xaa locations
  Clone ID: LIB3120-025-Q1-K1-D7.pep
GNIRGLGYYNATMGSLYDTLHGRKGVXGAQPRAVLDWIQRARIAVDAARSLEYFDDKVQPLIMHRDNTYSNGLLYGDMKANSSNGYLXNQLTTWIARLHSTRVEGTFGYHAPEYAMTGRETQKSD

SEQ ID NO: 60637 - protein, 65 aa, Gossypium hirsutum
  Clone ID: LIB3196-064-P1-M1-H12.pep
KEELKEKTDNFGSKALIGEGSYGRVYYASLNNGKAVAVKKLDVSTESESNVEFLTQVSMVSRLKH

SEQ ID NO: 60638 - protein, 105 aa, Gossypium hirsutum
  unsure (1)..(105): unsure at all Xaa locations
  Clone ID: LIB3148-008-Q1-K1-B11.pep
IRLMVQRSLXXXXEDKTSSTNIMLQTLRLVPIILSENIHTHLRTSSKKTKKMIQTELYSLTRPNPSVTTQSVGQFYDYIRKNMTLRVRKNPAIDRYQTDQTQSYT

SEQ ID NO: 60639 - protein, 50 aa, Gossypium hirsutum
  Clone ID: LIB3135-062-Q1-K1-D6.pep
PTKAVAKLAAVAALCVQYECEFRPNMSIGVKALQPLMKASVSASATSPVT

SEQ ID NO: 60640 - protein, 222 aa, Gossypium hirsutum
  Clone ID: GOSHI-09MAY01-C170_1.pep
RPIKKKNNRSSYRERKDPKVLQKLFDSCKEVFKGPETVPSDSDVNKLCSILDEMKPKHVGLSKNMQFFKSKSVEKGTPSVAYTPIYQCDEFSLCIFFLAANAVIPLHNHPARPVFSKLLLGDLHIKSYDWVDSMPPPESQPRLARLKVDSVLKAPCKTSVLYPTTGGNIHEFRAVTPCAVLDVLGPPYSKDDRDWSYYQEIPTTRLCQMEKVVQGMKEEVII

SEQ ID NO: 60641 - protein, 265 aa, Gossypium hirsutum
  Clone ID: GOSHI-09MAY01-C110_1.pep
SSLSFDPPKRRLMDCEAVNDPTQAAIKPNVTVSSSVRELLECPVCLNAMYPPIHQCSNGHTLCSGCKPRVHNRCPTCRHELGNIRCLALEKLAASLELPCKYQSFGCNGIYPYYSKPKHESQCSYRPYGCPYAGSECTVIGDIPHLVAHLKDDHKVDMHNGCTFNHRYVKSNPHEVENATWMLTVFSCFGQYFCLHFEAFHIGLAPVYIAFLRLMGDNNEAKNYSYSLEVGGNGRKLLWQGVPRSIRDSHRKVRDSFDGLIIQPN

SEQ ID NO: 60642 - protein, 143 aa, Gossypium hirsutum
  Clone ID: AF175125.pep
GCERTTEGYGCEEDDRRELKHESQCSYRPYSCPYAGSECTVIGDFPYLVAHLKDDHKVDMHNGSTFNHRYVKSNPHEVENATWMLTVFSCFGQYFCLHFEAFQLGISPVYIAFLRFMGDDNEAKNYSYSLEVGGNGRKMIWQG

SEQ ID NO: 60643 - protein, 288 aa, Gossypium hirsutum
  Clone ID: GOSHI-09MAY01-C100_1.pep
MAFPVVDTEYLKEIDKARRDVRALIALKNCAPIMLRLAWHDAGTYDVSTKTGGPNGSIRNEEEFTHGANSGLKIAIDFCEEVKAKHPKITYADLYQLAGVVAVEVTGGPTIDFVPGRKDSNICPREGRLPDAKRGAPHLRDIFYRMGLSDKDIVALSGGHTLGRAHPERSGFDGPWTNEPLKFDNSYFLELLKGESEGLLKLPTDKALLDDPEFRKYVELYAKDEDAFFRDYAESHKKLSELGFTPTSARSKVMVKDSTVLAQGAVGVAVAAAVVILSYFYEVRKRMK

SEQ ID NO: 60644 - protein, 133 aa, Gossypium hirsutum
  Clone ID: LIB3583-055-P1-K1-G11.pep
MAFPVVDTEYLKEIDKARRDLRAFIALKNCAPIMLRLAWHDAGTYDVSTKTGGPNGSIRNEEEFTHGANSGLKIAIDFCEEVKAKHPKITYADLYQLAGVVAVEVTGGPTIDFVPGRKDSNICPREGRLPDAK

SEQ ID NO: 60645 - protein, 93 aa, Gossypium hirsutum
  Clone ID: LIB3120-009-Q1-K1-C6.pep
MFLIVYIPGYVRYMINIKPLAVAMVLQGTAHPERSGFDGPWTNEPLKGDSSYFGELLKGESERLLELPTDKALLDDPQFRKYVKHYAKDEDAF

SEQ ID NO: 60646 - protein, 137 aa, Gossypium hirsutum
  Clone ID: uC-gsflmaxxa061b12b1.pep
MPQSSTATPHTLLLSLLDRGITFLHRMGIGFLISVLATLVAGFIEVKRKQAAVAHGLEDKPHSIIPMSVFWLVPQYGLHGIAEAFMSIGHLEFFYDQSPESMRSSATALFWTAISVGNYVSTLLVSLVHIYSAKPDG

SEQ ID NO: 60647 - protein, 139 aa, Gossypium hirsutum
  unsure (1)..(139): unsure at all Xaa locations
  Clone ID: LIB3585-027-P1-K1-C1.pep
DAWTDFFEIKAVKEIEPALKRQVIISTVLMTVGIAIVTWVGVPSPFTIXNFGDQKVVKNWQLFLCVGVGLWAGLIIGFVTEYYTSNAYSPVQDVADSCRTGAATNVIFGLAXVAALGMLSTIATGLAIDAFGPISDNAG

SEQ ID NO: 60648 - protein, 137 aa, Gossypium hirsutum
  unsure (1)..(137): unsure at all Xaa locations
  Clone ID: uC-gsflnu33B066f09b1.pep
MGKEKTHINIVVIGHVDSGKSTTTGHLIYKLGGIDKRVIERFEKXAAEMNTRSFKYAWVLDKLKVXSVERGITIDIVLWKSDTXTTYYCTAIDALGHRDFIKNMISGTPQADCAVLTLDSXTAGSEAGFPHVGLILE

SEQ ID NO: 60649 - protein, 89 aa, Gossypium hirsutum
  unsure (1)..(89): unsure at all Xaa locations
  Clone ID: GOSHI-09MAY01-C120_4.pep
TFSEYPPLGRFAVRDMRQTVAVGVIKSVEKKDPTGAKVTKSAAKKGKXPQGILLIQQHRSITGRLVTCFNGSPSSLGYWSQNWVLDRRW

SEQ ID NO: 60650 - protein, 224 aa, Gossypium hirsutum
  unsure (1)..(224): unsure at all Xaa locations
  Clone ID: GOSHI-09MAY01-C120_5.pep
MGKEKVHINIVVIGHVDSGKXSTTTGHLIYKLGGIDKRGGERFEKEAAEMNKRSFKYAWVLDKLKAERERGITIDIALWKFETTKYYCTVIDAPGHRDFIKNMITGTSQADCAVLIIDSTTGGFEAGISKDGQTREHALLAFTLGVKQMICCCNKMDATTPKYSKARYDEIVKEVSSYLKKVGYNPEKIPFVPISGFEGDNMIERSTNLDWYKGPTLLEALDQI

SEQ ID NO: 60651 - protein, 144 aa, Gossypium hirsutum
  Clone ID: GOSHI-09MAY01-C120_6.pep
RTRGRGYVASNSEDDPAKEAANFTSQVIIMNHPGQIGNGYAPVLDCHTSHIAVKFAELVTKIDRRSGKELEKEPKFLKNGDAGFVKMIPTKPMVVETFSEYPPLGRFAVRDMRQTVAVGVIKSVEKKDPTGAKVTKSAAKKGGK

SEQ ID NO: 60652 - protein, 204 aa, Gossypium hirsutum
  Clone ID: GOSHI-09MAY01-C120_7.pep
GIGTVPVGRVETGSLKPGMGVTLGPSGLTTEVKSVEMHHEALQEALPGDNVGFNVKNVAVKDLKRGFVASNSKDDPAKEAANFTSQVIIMNHPGQIGNGYAPVLDCHTSHIAVKFAELLTKIDRRSGKELEKEPKFLKNGDAGMIKMVPTKPMVVETFSAYPPLGRFAVRDMRQTVAVGVIKSVEKKDPSGAKVTKSAAKKGGK

SEQ ID NO: 60653 - protein, 98 aa, Gossypium hirsutum
  Clone ID: GOSHI-09MAY01-C120_8.pep
KLTGDPYVPAGQVAFRARVGKRYQLPHNGLIPEEFGVVARYKGQGRLAEPGFRNPRWVDGELVILDGKYIKGGPVVGFVYWAPEYHFLVFFNRLRLQL

SEQ ID NO: 60654 - protein, 143 aa, Gossypium hirsutum
  Clone ID: GOSHI-09MAY01-C120_9.pep
LLTFQSPIPIIFCELIGPIRRYQVQTHQYQLSSITVAISVAIYKFFHCAWYLFHLVSWSIILPSFQHQSMPRFIGFPWYMFELQTSKLGGSPLDFLDQTSMHDLSSTAAISFPITVNVSLSTHMSWKPISSAIVTAYKHALAS

SEQ ID NO: 60655 - protein, 123 aa, Gossypium hirsutum
  Clone ID: GOSHI-09MAY01-C120_10.pep
ANFTSQVIIMNHPGQIGNGYAPVLDCHTSHIAVKFAELLTKIDRRSGKELEKEPKFLKNGDAGMIKMVPTKPMVVETFSAYPPLGRFAVRDMRQTVAVGVIKSVEKKDPTGAKVTKSAAKKGK

SEQ ID NO: 60656 - protein, 250 aa, Gossypium hirsutum
  unsure (1)..(250): unsure at all Xaa locations
  Clone ID: GOSHI-09MAY01-C120_11.pep
MSHHIRERTDALDAAGNTTAAIGKGFAIGSAALVSLALFGAFVSLAAISTVDVLTPKVFIGLIVGAMLPYWFSAMTMKSVGSAALKMVEEVRRQFNTIPGLMEGRAKPDYATCVKISTDASIKEMIPPGALVMLTPLIVGTFFGVETLAGVLAGALVSGVQIAISASNTGGAWDNAKKYIEAGASEHARTLGPKGXSDPHKAAVIGDTVGDPLQDTSGPSLNILIKLMAVESLVFAPFFATHGGLLFKIF

SEQ ID NO: 60657 - protein, 227 aa, Gossypium hirsutum
  Clone ID: GOSHI-09MAY01-C120_12.pep
NISRNGHANENGAGRRKKKGNQGKRRLNNMTSMAHREEVIRRTVYVSDIDQQVTEEQLAGLFVSCGQVVDCRICGDPNSVLRFAFVEFTDEEGARAALNHAGTMLGFYPVRVLPSKTAIAPVNPTFLPRNEDERQMCARTIYCTNIDKKVTQADVKLFFETVCGEVYHLRLLGDYQHSTRIAFVEFVMAESAIAALNCSGVVLGSLPIRVSPSKTPVRPRAPRLPSY

SEQ ID NO: 60658 - protein, 222 aa, Gossypium hirsutum
  unsure (1)..(222): unsure at all Xaa locations
  Clone ID: GOSHI-09MAY01-C120_13.pep
CLFSVRGIVMEIQTCGKPIDSLLEKVLCMNILSSDYFKELYXRLKTYHEVIDEIYNQVDHVEPWMTGNCRGPSTAFCLLYKFFTMKLTVKQMHGLLKHPDSPYIRAIGFLYLRYAADPKTLWSWFEPYIKDEEEFSPGSSGRMTTMGVYVRDLLLGQYYFDTLFPRIPVPVLRQVTFNLEKMKLATXPSGSTGDNNPHGSDDTARRPPSVKAALSVXFGQRA

SEQ ID NO: 60659 - protein, 233 aa, Gossypium hirsutum
  Clone ID: GOSHI-09MAY01-C120_14.pep
NTTAAIGKGFAIGSAALVSLALFGAFVSRAAITTVDVLTPKVFIGLIVGAMLPYWFSAMTMKSVGSAALKMVEEVRRQFNTIPGLMEGTAKPDYATCVKISTDASIKEMIPPGALVMLTPLVVGIFFGVETLSGVLAGSLVSGVQIAISASNTGGAWDNAKKYIEAGASEHAKTLGPKGSDPHKAAVIGDTIGDPLKDTSGPSLNILIKLMAVESLVFAPFFATHGGLLFKIF

SEQ ID NO: 60660 - protein, 336 aa, Gossypium hirsutum
  Clone ID: GOSHI-09MAY01-C120_15.pep
MAVVENASNQDTAAATVTSNDQDQSKLRSTTDLSLHDNDQGLYNKIGGTNGGGGKDELGDSFKRDMRELQELFSKLNPMAEEFVPHSLVNNGLNGGFHTNNIALQNNNNNISRNGNANCNGGGKRKKNLGQGKRKSNSRTSMAQREEVIRRTVYVSDIDHQVTEEQLAGLFVGCGQVVDCRICGDPNSVLSFAFIEFTDEEGAQAALNLAGTMLGFYPVRVLPSKTAIAPVNPTFLPRNEDERQICARTIYCTNIDRKVTQADVKLFFETVCGEVYRLRLLGDYQHSTRIAFVEFALAESAIAALNCSGVVLGSLPIRISPSKTPVRPRAPLLPSY

SEQ ID NO: 60661 - protein, 394 aa, Gossypium hirsutum
  Clone ID: GOSHI-09MAY01-C120_16.pep
LLERIIVILTALPSSFTIFNFGDHKAVKNWQLFLCVAAGLWAGLIIGFGTEYYTSNAYSPVQDVADSCRTGAATNVIFGLALGYKSCIIPIFAIAISIFVSFSFAAMYGIAVSALGMLSTIATGLAIDAYGPISDNAGGIAEMAGMSHRIRERTDALDAAGNTTAAIGKGFAIGSAALVSLALFGAFVSRAAISTVDVLTPKVFIGLLVGAMLPYWFSAMTMKSVGSAALKMVEEVRRQFNTIPGLMEGTTKPDYATCVKISTDASIKEMIPPGALVMLTPLVVGIFFGVESLSGVLAGSLVSGVQIAISASNTGGAWDNAKKYIEAGASPHAKSLGPKGSDPHKAAVIGDTIGDPLKDTSGPSLNILIKLMAVESLVFAPFFATHGGLLFKLF

SEQ ID NO: 60662 - protein, 467 aa, Gossypium hirsutum
  unsure (1)..(467): unsure at all Xaa locations
  Clone ID: GOSHI-09MAY01-C120_17.pep
DLVCKVERNIPEGDRRNPAGIADNVXDNVGDISGMGSDLFGSYAESSCAALVVASISSFGINHEFTPMLYPLIISSVGIIVCLITTLFATDFFEIKAVKEIEPSLKRQLIISTVLMTIGIGVVSWVALPSSFTIFNFGDQKVVKNWQLFLCVAVGLWAGLIIGFVTEYYTSNAYSPVQDVADSCRTGAATNVIFGLALGYKSCIIPIFAIAVSIFVSFSFAAMYGIAVAALGMLSTIATGLAIDAYGPISDNAGGIAEMAGMSHRIRERTDALDAAGNTTAAIGKGFAIGSAALVSLALFGAFVSRAAISTVDVLTPKVFIGLLVGAMLPYWFSAMTMKSVGSAALKMVEEVRRQFNTIPGLMEGTAKPDYATCVKISTDASIKEMIPPGALVMLTPLVVGIFFGVETLSGVLAGSLVSGVQIAISASNTGGAWDNAKKYIEVSIILLTSMSRSFDWRFKTIVLYLC

SEQ ID NO: 60663 - protein, 449 aa, Gossypium hirsutum
  Clone ID: GOSHI-09MAY01-C120_18.pep
MGKEKVHINIVVIGHVDSGKSTTTGHLIYKLGGIDKRVIERFEKEAAEMNKRSFKYAWVLDKLKAERERGITIDIALWKFETTKYYCTVIDAPGHRDFIKNMITGTSQADCAVLIIDSTTGGFEAGISKDGQTREHALLAFTLGVKQMICCCNKMDATTPKYSKARYDEIVKEVSSYLKKVGYNPEKIPFVPISGFEGDNMIERSTNLDWYKGPTLLEALDQINEPKRPSDKPLRLPLQDVYKIGGIGTVPVGRVETGTLKPGMVVTFGPSGLTTEVKSVEMHHEALQEALPGDNVGFNVKNVAVKDLKRGYVASNSKDDPAKEAANFTSQVIIMNHPGQIGNGYAPVLDCHTSHIAVKFAELLTKIDRRSGKELEKEPKFLKNGDAGMIKMVPTKPMVVETFSEYPPLGRFAVRDMRQTVAVGVIKSVEKKDPSGAKVTKSAAKKGGK

SEQ ID NO: 60664 - protein, 317 aa, Gossypium hirsutum
  Clone ID: GOSHI-09MAY01-C120_19.pep
WVKEKVHINIVVIGHVDSGKSTTTGHLIYKLGGIDKRVIERFEKEAAEMNKRSFKYAWVLDKLKAERERGITIDIALWKFETTKYYCTVIDAPGHRDFIKNMITGTSQADCAVLIIDSTTGGFEAGISKDGQTREHALLAFTLGVKQMICCCNKMDATTPKYSKARYDEIVKEVSSYLKKVGYNPDKIPFVPISGFEGDNMIERSTNLDWYKGPTLLEALDQINEPKRPSDKPLRLPLQDVYKIGGIGTVPVGRVETGVLKPGMVVTFGPSGLTTEVKSCEMHHEALSEALPGDNVGFNVKNVAVKDPKDGFVASNS

SEQ ID NO: 60665 - protein, 503 aa, Gossypium hirsutum
  unsure (1)..(503): unsure at all Xaa locations
  Clone ID: GOSHI-09MAY01-C120_20.pep
MGKEKVHINIVVIGHVDSGKSTTTGHLIYKLGGIDKRVIERFEKEAAEMNKRSFKYAWVLDKLKAERERGITIDIALWKFETTKYYCTVIDAPGHRDFIKNMITGTSQADCAVLIIDSTTGGFEAGISKDGQTREHALLAFTLGVKQMICCCNKMDATTPKYSKARYDEIVKEVSSYLKKVGYNPEKIPFVPISGFEGDNMIERSTNLDWYKGPTLLEALDQINEPKRPSDKPLRLPLQDVYKIGGIGTVPVGRVETGILKPGMVVTFGPSGLTTEVKSVEMHHEALQEALPGDNVGFNVKNVAVKDLKRGFVASNSKDDPAKEAANFTSQVIIMNHPGQIGNGYAPVLDCHTSHIAVKFAELLTKIDRRSGKELEKEPKFLKNGDAGMIKMVPTKPMVVETFSEYPPLGRFAVRDMRQTVAVGVIKSVEKKDPTGAKVTKSAAKKGKXNLGILLIRQKFIMVTPMKLVHVSRSITGRLVTCFNASPSSLGYCSQNWVLDRRW

SEQ ID NO: 60666 - protein, 223 aa, Gossypium hirsutum
  Clone ID: GOSHI-09MAY01-C120_21.pep
AQEGLQTKPLRLPLQDVYKIGGIGTVPVGRVETGVLKPGMVVTFGPTGLTTEVKSVEMHHEALTEALPGDNVGFNVKNVAVKDLKRGYVASNSKDDPAKEAANFTSQVIIMNHPGQIGNGYAPVLDCHTSHIAVKFAELLTKIDRRSGKELEKEPKFLKNGDAGMIKMIPTKPMVVETFSEYPPLGRFAVRDMRQTVAVGVIKNVEKKDPSGAKVTKSAAKKK

SEQ ID NO: 60667 - protein, 546 aa, Gossypium hirsutum
  Clone ID: GOSHI-09MAY01-C120_22.pep
DGLFEAITGYGRGGFYMALFGRVGGGIYTKAADVGADLVGKVERNIPEDDPRNPAVIADNVGDNVGDIAGMGSDLFGSYAESYCAALVVASISSFGINHEFTAMLYPLLISSVGILVCLITTLFATDFFEIKAVKEIEPALKKQLIISTVLMTVGIAIVTWVGVPSSFTIYNFGDQKVVKNWQLFLCVGVGLWAGLIIGFVTEYYTSNAYSPVQDVADSCRTGAATNVIFGLALGYKSVIIPIFAIAISIFVSFSFAAMYGIAVAALGMLSTIATGLAIDAYGPISDNAGGIAEMAGMSHRIRERTDALDAAGNTTAAIGKGFAIGSAALVSLALFGAFVSRAAITTVDVLTPKVFIGLIVGAMLPYWFSAMTMKSVGSAALKMVEEVRRQFNTIPGLMEGHAKPDYATCVKISTDASIKEMIPPGALVMLTPLIVGTFFGVETLSGVLAGALVSGVQIAISASNTGGAWDNAKKYIEAGASEHARTLGPKGSDPHKAAVIGDTVGDPLKDTCGPSLNILIKLMAVESLVFAPFFATHGGLLFKIF

SEQ ID NO: 60668 - protein, 450 aa, Gossypium hirsutum
  unsure (1)..(450): unsure at all Xaa locations
  Clone ID: GOSHI-09MAY01-C120_23.pep
MGKEKTHINIVVIGHVDSGKSTTTGHLIYKLGGIDKRVIERFEKEAAEMNKRSFKYAWVLDKLKAERERGITIDIALWKFETTKYYCTVIDAPGHRDFIKNMITGTSQADCAVLIIDSTTGGFEAGISKDGQTREHALLAFTLGVKQMICCCNKMDATTPKYSKARYDEIVKEVSSYLKKVGYNPEKIPFVPISGFEGDNMIERSTNLDWYKGPTLLEALDQINEPKRPSDKPLRLPLQDVYKIGGIGTVPVGRVETGILKPGMVVTFGPSGLTTEVKSVEMHHESLPEALPGDNVGFNVKNVAVKDLKRGYVASNSKDDPAKEAANFTSQVIIMNHPXGQIGNGYAPVLDCHTSHIAVKFAELVTKIDRRSGKELEKEPKFLKNGDAGFVKMIPTKPMVVETFSEYPPLGRFAVRDMRQTVAVGVIKSVEKKDPSGAKVTKSAAKKGGK

SEQ ID NO: 60669 - protein, 532 aa, Gossypium hirsutum
  Clone ID: GOSHI-09MAY01-C120_24.pep
SSMALFGRVGGGIYTKAADVGADLVGKVERNIPEDDPRNPAVIADNVGDNVGDIAGMGSDLFGSYAESSCAALVVASISSFGINHELTPMLYPLIISSVGIIVCLITTLFATDFFEIKAVKEIEPSLKRQLIISTVLMTIGIGIVSWVALPSSFTIFNFGDQKAVKNWQLFLCVACGLWAGLIIGFVTEYYTSNAYSPVQDVADSCRTGAATNVIFGLALGYKSCIIPIFAIAMSIFVSFSFAAMYGIAVAALGMLSTIATGLAIDAYGPISDNAGGIAEMAGMSHRIRERTDALDAAGNTTAAIGKGFAIGSAALVSLALFGAFVSRAAISTVDVLTPKVFIGLLVGAMLPYWFSAMTMKSVGSAALKMVEEVRRQFNTIPGLMEGTAKPDYATCVKISTDASIKEMIPPGALVMLTPLIVGIFFGVETLSGVLAGSLVSGVQIAISASNTGGAWDNAKKYIEAGASEHARTLGPKGSEPHKAAVIGDTIGDPLKDTSGPSLNILIKLMAVESLVFAPFFATHGGLLFKIF

SEQ ID NO: 60670 - protein, 366 aa, Gossypium hirsutum
  Clone ID: GOSHI-09MAY01-C120_25.pep
PGKYYCTVIDAPGHRVFIKNMITGTSRSDCAVLIIDSTTGGFEAGISKDGQTREHALLAFTLGVRQMICCCNKMDATTPKYSKARFDEIVKEVSSYLKKVGYNPEKIPFVPISGFEGDNMIERSTNLDWYKGPTLLEALDQITEPKRPSDKPLRLPLQDVYKIGGIGTVPVGRVETGVLKPGMVVTFGPTGLTTEVKSVEMHHESLPEAFPGDNVGFNVKNVAVKDLKRGFVASNSKDDPAKEAANFTSQVIIMNHPGQIGNGYAPVLDCHTSHIAVKFSELLTKIDRRSGKELEKEPKFLKNGDAGMVKMIPTKPMVVETFSEYPPLGRFAVRDMRQTVAVGVIKSVEKKDPTGAKVTKSAAKKK

SEQ ID NO: 60671 - protein, 449 aa, Gossypium hirsutum
  unsure (1)..(449): unsure at all Xaa locations
  Clone ID: GOSHI-09MAY01-C120_26.pep
MGKEKVHINIVVIGHVDSGKSTTTGHLIYKLGGIDKRVIERFEKEAAEMNKRSFKYAWVLDKLKAERERGITIDIALWKFETTKYYCTVIDAPGHRDFIKNMITGTSQADCAVLIIDSTTGGFEAGISKDGQTREHALLAFTLGVKXQMICCCNKMDATTPKYSKARYDEIVKEVSSYLKKVGYNPDKIPFVPISGFEGDNMIERSTNLDWYKGPTLLEALDQINEPKRPSDKPLRLPLQDVYKIGGIGTVPVGRVETGVLKPGMVVTFCPSGLTTEVKSVEMHHEALSEALPGDNVGFNVKNVAVKDLKDGFVASNSXKDDPAKEAASFTSQVIIMNHPGQIGNGYAPVLDCHTSHIAVKFSELLTKIDRRSGKELEKEPKFLKNGDAGMIKMVPTKPMVVETFSEYPPLGRFAVRDMRQTVAVGVIKSVEKKDPTGAKVTKSAAKKK

SEQ ID NO: 60672 - protein, 475 aa, Gossypium hirsutum
  Clone ID: GOSHI-09MAY01-C120_27.pep
PRGTRPRIPRLTTPFRSFLVTSISSESEWVREKTHINIVVIGHVDSGKSTTTGHLIYKLGGIDKRVIERFEKEAAEMNKRSFKYAWVLDKLKAERERGITIDIALWKFETTKYYCTVIDAPGHRDFIKNMITGTSQADCAVLIIDSTTGGFEAGISKDGQTREHALLAFTLGVKQMICCCNKMDATTPKYSKARYDEIVKEVSSYLKKVGYNPDKIPFVPISGFEGDNMIERSTNLDWYKGPTLLEALDQINEPKRPSDKPLRLPLQDVYKIGGIGTVPVGRVETGVLKPGMVVTFGPTGLTTEVKSVEMHHEALTEALPGDNVGFNVKNVAVKDLKRGYVASNSKDDPAKEAANFTSQVIIMNHPGQIGNGYAPVLDCHTSHIAVKFAELLTKIDRRSGKELEKEPKFLKNGDAGMIKMIPTKPMVVETFSEYPPLGRFAVRDMRQTVAVGVIKNVEKKDPTGAKVTKSAAKKK

SEQ ID NO: 60673 - protein, 447 aa, Gossypium hirsutum
  unsure (1)..(447): unsure at all Xaa locations
  Clone ID: GOSHI-09MAY01-C120_28.pep
MGKEKVHINIVVIGHVDSGKSTTTGHLIYKLGGIDKRVIERFXKEAAEMNKRSFKYAWVLDKLKAERERGITIDIALWKFETTKYYCTVIDAPGHRDFIKNMITGTSQADCAVLIIDSTTGGFEAGISKDGQTREHALLAFTLGVKQMICCCNKMDATTPKYSKARYDEIVKEVSSYLKKVGYNPDKIPFVPISGFEGDNMIERSTNLDWYKGPTLLEALDQINEPKRPSDKPLRLPLQDVYKIGGIGTVPVGRVETGVLKPGMVVTFGPSGLTTEVKSVEMHHEALSEALPGDNVGFNVKNVAVKDLKRGFVASNSKDDPAKEAASFTSQVIIMNHPGQIGNGYAPVLDCHTSHIAVKFSELLTKIDRRSGKELEKEPKFLKNGDAGMIKMVPTKPMVVETFSEYPPLGRFAVRDMRQTVAVGVIKSVEKKDPTGAKVTKSAAKKK

SEQ ID NO: 60674 - protein, 475 aa, Gossypium hirsutum
  unsure (1)..(475): unsure at all Xaa locations
  Clone ID: GOSHI-09MAY01-C120_29.pep
PSSSFSFSCSFLRRLLLFVTSISSESEWVREKTHINIVVIGHVDSGKSTTTGHLIYKLGGIDKRVIERFEKEAAEMNKRSFKYAWVLDKLKAERERGITIDIALWKFETTKYYCTVIDAPGHRDFIKNMITGTSQADCAVLIIDSTTGGFXEAGISKDGQTREHALLAFTLGVKQMICCCNKMDATTPKYSKARYDEIVKEVSSYLKKVGYNPDKIPFVPISGFEGDNMIERSTNLDWYKGPTLLEALDQINEPKRPSDKPLRLPLQDVYKIGGIGTVPVGRVETGVLKPGMVVTFGPSGLTTEVKSVEMHHEALTEALPGDNVGFNVKNVAVKDLKRGFVASNSKDDPAKEAANFTSQVIIMNHPGQIGNGYAPVLDCHTSHIAVKFAELLTKIDRRSGKELEKEPKFLKNGDAGMIKMIPTKPMVVETFSEYPPLGRFAVRDMRQTVAVGVIKSVEKKDPTGAKVTKSAAKKK

SEQ ID NO: 60675 - protein, 448 aa, Gossypium hirsutum
  unsure (1)..(448): unsure at all Xaa locations
  Clone ID: GOSHI-09MAY01-C120_30.pep
MGKEKVHINLVVIGHVDSGKSTTTGHLIYKLGGIDKRVIERFEKEAAEMNKRSFKYAWVLDKLKAERERGITIDIALWKFETTKYYCTVIDAPGHRDFIKNMITGTSQADCAVLIIDSTTGGFEAGISKDGQTREHAXLLAFTLGVRQMICCCNKMDATTPKYSKARFDEIVKEVSSYLKKVGYNPEKIPFVPISGFEGDNMIERSTNLDWYKGPTLLEALDQITEPKRPSDKPLRLPLQDVYKIGGIGTVPVGRVETGVLKPGMVVTFGPTGLTTEVKSVEMHHESLPEAFPGDNVGFNVKNVAVKDLKRGFVASNSKDDPAKEAANFTSQVIIMNHPGQIGNGYAPVLDCHTSHIAVKFSELLTKIDRRSGKELEKEPKFLKNGDAGMVKMIPTKPMVVETFSEYPPLGRFAVRDMRQTVAVGVIKSVEKKDPTGAKVTKSAAKKK

SEQ ID NO: 60676 - protein, 196 aa, Gossypium hirsutum
  Clone ID: GOSHI-09MAY01-C380_1.pep
NFQSSLKSRFLIKTHFSFWSASASSLLLTAMEPNFFEQEGQSEPGNISLKHKWDSISSPTGDQNKDTSGFDCNICFDSAQDPVVTLCGHLYCWPCIYKWLHVQTSSLDADQRQRNCPVCKANISSSSLVPLYGRGTASDCQSKDPHSDLDIPQRPPSLGLNPMTTYSQPSQQLHENLFRHQQYFPHPYETMQLSII

SEQ ID NO: 60677 - protein, 68 aa, Gossypium hirsutum
  unsure (1)..(68): unsure at all Xaa locations
  Clone ID: GOSHI-09MAY01-C350_1.pep
PRVRLDFASCFAGTFQINRRENRSVLHVAVPAPWDAVMXRDGKHVVPDVCNVLDKIMDFAEKVLSSSS

SEQ ID NO: 60678 - protein, 364 aa, Gossypium hirsutum
  unsure (1)..(364): unsure at all Xaa locations
  Clone ID: GOSHI-09MAY01-C340_1.pep
VVKELMEKQILSYNAKALCVGKGSMSAVMALKDLGFSDVTGVYRHPCFSLKHKKFVYELDYEDRSRGFVISRDLDKASAPAMLVLEVERVLTPGGIGSMLVGRSGSLIRSVTPVSSLLKASSVVHVDYVNGFALIVFKKKLKNGTYFEQYRLPADCRSMANTKPMLDNIEPLLEKRPVGFEKTIAYLPEFVXISHKQRLVYIDVGASEHLNSNVTDWFLPSYPVDRKAFHVYFIDHNTSVMLSYVNKPGINFVYYPSLAGNRATSNSEASIDSDDSDPYVEDEGFDFLLWIKETVQNADFVVLKMNAGEVELKILSDLFESGTICSIDELFLHCSNRAVNRDWMDLFKSLRGTGVYVHQWWGDQ

SEQ ID NO: 60679 - protein, 258 aa, Gossypium hirsutum
  Clone ID: GOSHI-09MAY01-C370_1.pep
MVKILKTDEDEHQVNTTTRCYGFEHRISHKSRLPRSHFGQVPHVNQLVSRDCGLACVLMAVTTIGANDGGIECLAELCCTPSIGTGDLADLLHKFSVRFSYYTVTFGANPNYSGETYYKEQLPNDLVRVDTLFKKAVEAGINIGCRSISGEEISCWILSGKYIAIALVDQYKLSQSWMEDVIIPGFQGNDVGYTGHYVVICGYDSGTDEFEIRDPASSREHDRVSSKCLEEARKSFGTDEDLLLISLEESRKPNYSVL

SEQ ID NO: 60680 - protein, 115 aa, Gossypium hirsutum
  Clone ID: LIB3582-005-P1-K1-H11.pep
MWPLYLLLNKILKTDEDEDRMNTTTRCYGFEHRIGHKSMLPRSHFVQVPHVNQLFSWDCGLACVLMALTTIGVNDCSIENLAELCCTTSIWTVDLAYLLQKFSVRFSYYTCTFGA

SEQ ID NO: 60681 - protein, 89 aa, Gossypium hirsutum
  Clone ID: LIB3120-060-Q1-K1-E3.pep
FYNLIQNRSHLMWPLYLLLNKILKTDEDEDRMNTTTRCYGFEHRIGHKSMLPRSHFVQVSEIMGFFLKLPWVTSCNYEFVLMVFYRFHM

SEQ ID NO: 60682 - protein, 145 aa, Gossypium hirsutum
  unsure (1)..(145): unsure at all Xaa locations
  Clone ID: GOSHI-09MAY01-C360_1.pep
MDNNKNNLSTGESSLQHLLPWGSEKVDKDKHEKVGAVASANLVDHTRTNVGGPSCSQNNVDRNVRQKGPRIAKVVRRINCNVEPLEFGVVLSGKLWCNSQAIFPKGFKSRVRYIXGLDPTNMAYYVSEIXDAERDGPLVMVSVEH

SEQ ID NO: 60683 - protein, 59 aa, Gossypium hirsutum
  Clone ID: GOSHI-09MAY01-C310_14.pep
GCFDESIYFSKSFLGTLHEKCHLLHLDAFKYWRVLFSCAVSYGACLILIFGQVYVLSLC

SEQ ID NO: 60684 - protein, 173 aa, Gossypium hirsutum
  unsure (1)..(173): unsure at all Xaa locations
  Clone ID: GOSHI-09MAY01-C310_13.pep
LLVTPPQRGLGIPLAFHIFFSISCPHQASESPTFPFQGKGTRSFGKRRNKTHTLCIRCGRRSFHLXKSHCSACAFPAAHNWSVKANIRKTTGTGRMRYLLHVPRRFKTGFREVPVLDHDLRTGCSTDELGCSSCCLRITRLFWMKPSLFRKTLTRTLLLRGVITLNALVVYSL

SEQ ID NO: 60685 - protein, 95 aa, Gossypium hirsutum
  Clone ID: GOSHI-09MAY01-C310_10.pep
MGKGTGSFGKRRNKTHTLCVRCGRRSFHLQKSRCSACAFPAARKRTYNWSVKAIRRKTTGTGRMRYLRHVPRRFKTGFREGTEAAPRKKVAAAFA

SEQ ID NO: 60686 - protein, 119 aa, Gossypium hirsutum
  Clone ID: GOSHI-09MAY01-C310_8.pep
SSCIFENEIKKSGNVQGKRTWSFGKRRNKTHTLCIRCGHRSFHLQKSHCSACAFPAARKRTCKCLMRFVLASGSVKAIRRKTTGTGRMRYLRHVPRRFKTGFREGTEAAPRKKVAAASA

SEQ ID NO: 60687 - protein, 95 aa, Gossypium hirsutum
  Clone ID: GOSHI-09MAY01-C310_7.pep
MGKGTGSFGKRRNKTHTLCVRCGRRSFHLQKSRCSACAFPAARKRTCSWSVKAIRRKTTGTGRMRYLRHVPRRFKTGFREGTEAAPRKKVAAASA

SEQ ID NO: 60688 - protein, 101 aa, Gossypium hirsutum
  Clone ID: GOSHI-09MAY01-C310_6.pep
SPTFPFQGKGTGSWGKRRNKTHTLCVRCGRRSFHLQKSRCSACAFPAARKRTYNWSVKAIRRKTTGTGKMRYLRHVPRRFKTGFREGTEAAPRKKVVAASA

SEQ ID NO: 60689 - protein, 110 aa, Gossypium hirsutum
  Clone ID: GOSHI-09MAY01-C310_4.pep
MGEEANAVDPESLLKKNKRNEQWQLAKKQQLVFPQKKKHCYACAFPAARKRTCKCLMRFLFVIKIVKAIRRKTTGTGRMRYLRHVPRRFKTCFREGTKAAPRKKVAAASA

SEQ ID NO: 60690 - protein, 196 aa, Gossypium hirsutum
  Clone ID: GOSHI-09MAY01-C310_3.pep
DLFGALMPCPFQEPASSKGETSHGEGTKKTPPGALPSADAGLGSLGSIAVADPARKHVKLDPHAEAQITSSGHQSCTLEFDGASKGNPGPAGAAAVLKTDAGNVICKLREGLGIATNNAAEYRAIILGLKHALRKGYTNIRVRGDSKLVCMQLQGLWKVKHEHMSELYEQAMKLKDKFLSFQINHGLREPNGAADA

SEQ ID NO: 60691 - protein, 221 aa, Gossypium hirsutum
  unsure (1)..(221): unsure at all Xaa locations
  Clone ID: GOSHI-09MAY01-C310_1.pep
RWFGPFLMGKERRPIINWEDDKXFSTPMLAVLVFASVALFPTILLPSTPSIWVAGMTFGCGWGFLLIISTAAVGVSLPFFIGSLFLHRIQGWLEKYPKKAAILRAAGEGNWFHQFKAVTLIRISPFPYIIYNYCAVATHVKYGPYILGSLIGMVPEIFVAIYTGILIQTLADASQEQHTLSAPQILLNVGGFLLTVVTTIVFTVYAKRQLKVLQGEELLLQ

SEQ ID NO: 60692 - protein, 94 aa, Gossypium hirsutum
  Clone ID: uC-gsronu33B178f08b1.pep
MAAESPSSARKVVVHLRATGDAPILKQAKFKILGTDKFAKVIDFLRRQLHRDTLFVYVNSAFSPNPDELVIDLYDNFGFDGKLVVNYACSMAWG

SEQ ID NO: 60693 - protein, 99 aa, Gossypium hirsutum
  Clone ID: uC-gsronu33B170g12b1.pep
SMRPPTRPRKAPAPFLSQHQTESPLTFSFLLLFLKVTAKKIGGPATQVHRFRAGTRASRDSKIPASSEKSQDFLDLHPFWNFGFDGKLVVNYACSMAWG

SEQ ID NO: 60694 - protein, 110 aa, Gossypium hirsutum
  Clone ID: LIB3272-030-P1-K1-C12.pep
VSQFSTKSCCPFESNWGCPHTKTSQIQVVVHLRATGDAPILKQAKFKILGTDKFAKVIDFLRRQLHRDTLFVYVNSAFSPNPDELVIDLYDNFGFDGKLVVNYACSMAWG

SEQ ID NO: 60695 - protein, 56 aa, Gossypium hirsutum
  Clone ID: LIB3165-032-P1-K1-D3.pep
IFLSSPSSESSSDNWSVKAIRKKTTGTGRMMYLRHVPRRFKIGFRESTEAAPKKKV

SEQ ID NO: 60696 - protein, 66 aa, Gossypium hirsutum
  Clone ID: LIB3147-046-Q1-K1-C1.pep
DAWADAWADAWADAWGTYRGSVKAIRRKTTGTGRMRYLRHVPRSFKTGFREGTEAAPRKKVAAASA

SEQ ID NO: 60697 - protein, 63 aa, Gossypium hirsutum
  Clone ID: GOSHI-09MAY01-C300_4.pep
MAAFCEGKCKGRCNKAAVWDRCFKYCGICCEECQCVPSGTYGNKHECPCYRDKVNNKGKPKCP

SEQ ID NO: 60698 - protein, 90 aa, Gossypium hirsutum
  unsure (1)..(90): unsure at all Xaa locations
  Clone ID: GOSHI-09MAY01-C300_2.pep
MKLLFLSLLLCSLLLWSSVXQPTVAQPRSPFCEGKCKGRCNKAAVWDRCFKYCGICCEECQCVPSGTYGNKHECPCFRDKVNNKGKPKCP

SEQ ID NO: 60699 - protein, 90 aa, Gossypium hirsutum
  Clone ID: GOSHI-09MAY01-C300_1.pep
MKLLFLTLLLCSLLLCSSVFEPTMAQPRSPFCEGKCKGRCNKAAVWDRCFKYCGICCEECQCVPSGTYGNKHECPCYRDKVNNKGKPKCP

SEQ ID NO: 60700 - protein, 67 aa, Gossypium hirsutum
  Clone ID: LIB3585-019-P1-K1-D12.pep
AHASFNLFVNGKCKGRCNKAAVWDRCFKYCGICCEECQCVPSGTYGNKHECPCYRDKVNNKGKPKCP

SEQ ID NO: 60701 - protein, 57 aa, Gossypium hirsutum
  unsure (1)..(57): unsure at all Xaa locations
  Clone ID: LIB3146-037-P1-K1-G5.pep
GKCKRSCNKHGSLXRCFKYCGICCEECKCVPSGTFGNKHECPCYRDKVNNKGKPKCP

SEQ ID NO: 60702 - protein, 67 aa, Gossypium hirsutum
  Clone ID: LIB3146-037-P1-K1-F7.pep
MRAKSDPAQARRSPLIERKCRSRCYIAAEWDLCFKYCGICCDECKCVPSNTFGNKHYVPCYRDKVNY

SEQ ID NO: 60703 - protein, 153 aa, Gossypium hirsutum
  Clone ID: GOSHI-09MAY01-C330_1.pep
MTIPTIASNFSLNPSLFPLKTSSISRRTVLSRHQTPPSFLSIPQAFIPRPAPNFLLLSGKRLGLSLNRKSKFYANAGNGGEDGGVDEAERLARGESTMPERFRYLTKEAPDPPVRWPFFVAVAFLLYAWRAVLLKLSNWRNAAFGVVRFVQTN

SEQ ID NO: 60704 - protein, 202 aa, Gossypium hirsutum
  unsure (1)..(202): unsure at all Xaa locations
  Clone ID: GOSHI-09MAY01-C290_3.pep
LDTTLTTKGDSKETFYLGPLADGLNQWPLEEDLPSWRSAMETYHQKVLSAGTKLLSLIALSLKLDEDFFWKVGALNEQVGVIRLLHYPGSGDSDSSSEEIYGASAHSDYGMPTRXMTDGVPGLQICREKSKQPQVWEDVPSISGAFIVNIGDMMERWTNCLFRSTLHRVLPPRQERYSVMIHPFAVYAEQFHFFGKFNYVRK

SEQ ID NO: 60705 - protein, 138 aa, Gossypium hirsutum
  Clone ID: GOSHI-09MAY01-C290_1.pep
ATTRQTKRSTALQLPIMDWASPDRFSTANSIRQACIDHGFFYLVNHGVDEELVKKVFEQSSNFFSFPIEEKMKLAIKNHRGYTALYAEKLDTTLTTKGSDSKETFYLGPLADGLNQWPLEEDLPSWRSAMETYHQKVL

SEQ ID NO: 60706 - protein, 130 aa, Gossypium hirsutum
  Clone ID: LIB3583-061-P1-K1-C8.pep
MSNALQLPIIDLASPDRFSTANSIRKACIDHGFFYLVNHGVDEELVKKVFEQSSNFFSFPIEEKMKLAIKNHRGYTALYAEKLDTTLTTKGDSKETFYLGPLADGLNQWPLEEDLPSWRSAMETYHQKVL

SEQ ID NO: 60707 - protein, 107 aa, Gossypium hirsutum
  Clone ID: GOSHI-09MAY01-C250_15.pep
MAPPIETTVKSSDSHCAPHPPLNERILSSMTRRSVAAHPWHDLEIGPGAPTVFNCVIEIGKGSMVKYELDKKTGLIKVDRVLYSSVVYPHNYGFIPRTLCEDNDPLD

SEQ ID NO: 60708 - protein, 227 aa, Gossypium hirsutum
  Clone ID: GOSHI-09MAY01-C250_10.pep
FDLKGNRTVKVFSGRKLDYEPKHCEKQKNEGDFMTAVEFSVEHPYGKAVALLNLKSRCLKAKEGWFVLPGLVSMFILSHILKKEGRFGFTVDGKSTKEIDGATRKVIVDNDQHASMETEVHSDVTLENAVIPKKDGSCNGDCGSEKGNTVSSGGCGGCGAGCGNVVKSGGCGSGCGSGCGGGWGSVVNSGGCGAGGCGAGCGNMVKSGGCGGGCGGGCGSGCGGSCS

SEQ ID NO: 60709 - protein, 216 aa, Gossypium hirsutum
  Clone ID: GOSHI-09MAY01-C250_9.pep
MAPPIETPTKSSGSHHASHPPLNERILSSMSRRSVAAHPWHDLEIGPGAPMVFNCVIEIPKGSKVKYELDKKTGLIKVDRVLYSSVVYPHNYGFIPRTLCEDNDPMDVLIIMQEPVIPGCFLRAKAIGLMPMIDQGEKDDKIIAVCADDPEYRHYNDIKELPPHRLAEIRRFFEDYKKNENKEVAVNDFLPASTAYEAIQHSLNLYADYIVESLRR

SEQ ID NO: 60710 - protein, 215 aa, Gossypium hirsutum
  Clone ID: GOSHI-09MAY01-C250_6.pep
MANNDGEATSGKSTGFSRVALNERILSSMTRRSIAAHPWHDLEIGPGAPAVFNCVVEIGKGSKVKYELDKTSGLIKVDRVLYSSVVYPHNYGFIPRTICEDSDPMDVLILMQEPVLPGSFLRARAIGLMPMIDQGEKDDKIIAVCADDPEFRHYTDIKQLPPHRLAEIRRFFEDYKKNENKKVDVEDFLPAETAIAAIKYSMDLYASYIVESLRK

SEQ ID NO: 60711 - protein, 274 aa, Gossypium hirsutum
  Clone ID: GOSHI-09MAY01-C250_3.pep
LILSGAAPLSTHVEEFLRVVACCHVLQGYGLTESCAGSFVSLPNELSMLGTVGPPVPNIDVRLESVPEMNYDALASTPRGEICIKGNTLFSGYYKREDLTREVLIDGWFHTGDIGEWQPNGSMKIIDRKKNIFKLSQGEYVAVENLENIYGLVSAIDSIWIYGNSFESFLVAVVNPNKEALESWAADNNVSGDFESLCKNPKAKEFILGELAKTGKEKKLKGFEIIKAVHLDPMPFDMERDLLTPTYKKKRPQLLKYYQSVIDEMYKSANKPNA

SEQ ID NO: 60712 - protein, 216 aa, Gossypium hirsutum
  Clone ID: GOSHI-09MAY01-C250_2.pep
MAPPIETTVKSSDSHCAPHPPLNERILSSMTRRSVAAHPWHDLEIGPGAPTVFNCVIEIGKGSKVKYELDKKTGLIKVDRVLYSSVVYPHNYGFIPRTLCEDNDPLDVLIIMQEPVLPGCFLRAKAIGLMPMIDQGEKDDKIIAVCADDPEYRHYNDIKELPPHRLAEIRRFFEDYKKNENKEVAVNDFLPASTAYEAIQHSMNLYADYIVESLRR

SEQ ID NO: 60713 - protein, 464 aa, Gossypium hirsutum
  Clone ID: GOSHI-09MAY01-C250_1.pep
MEKAINRQQVLLQHLNPSASSFSSHQNNSALSASACLAGDSAAYLRTNVFGDDVVIVAAYRTALCKSKRGGFKDTYPDDLLAPVLTAVIEKTNLNPSEVGDIVVGTVLAPGSQRASECRMAAFYAGFPETVPVRTVNRQCSSGLQAVADVAAAIKAGFYEIGIGAGLESMTTNPMAWEGSVNPRVKQMEQAQNCLLPMGITSENVAHRFGVTRQEQDQAAVESHRKAAAATASGKFKDEIVPVATKIVDPKTGDEKPVTISVDDGIRANTSVSDLGKLKPVFKKNGTTTAGNSSQVSDGAGAVLLMKRSVAMRKGLPILGVFRTFAAVGVDPAIMGVGPAVAIPAAVKSAGLELDDVDLFEINEAFASQFVYCQKKLELDPQKINVNGGAMAIGHPLGATGARCVATLLHEMKRRGKDCRFGVVSMCIGTGMGAAAVFERGDCVDELCNARKVETHNLLSKDAR

SEQ ID NO: 60714 - protein, 58 aa, Gossypium hirsutum
  unsure (1)..(58): unsure at all Xaa locations
  Clone ID: LIB3543-037-Q1-K1-E6.pep
FQTRFSNFFRVISVQDTVLGNVXRKFNYLLCLFYETEMRKIFNKLSYLVYFPNLLLGS

SEQ ID NO: 60715 - protein, 117 aa, Gossypium hirsutum
  Clone ID: LIB3825-008-Q1-N6-H5.pep
KSAGLELDDVDLFEINEAFASQFVYCQKKLELDPQKINVNGGAMAIGHPLGATGARCVATLLHEMKRRGKDCRFGVVSMCIGTGMGAAAVFERGDCVDELCNARKVETHNLLSKDAR

SEQ ID NO: 60716 - protein, 192 aa, Gossypium hirsutum
  unsure (1)..(192): unsure at all Xaa locations
  Clone ID: LIB3584-004-P1-K1-F9.pep
RSPRVXMLGTVGPPVPNIDVRLESVPEMNYDALASTPRGXNLYQRKTLFSGYYKREDLTREVWIDGWFHTGDIGEWQPNGSMKIIDRKKNIFKLSQGEYVAVENLENIYGLVSAFDSXWXYGNSFESFLVAVVXPXXGALESWAAXXXVSGDFXSLCFFPFALGFLLGVLALSGPVFLSFGSRSPLCWFFLN

SEQ ID NO: 60717 - protein, 148 aa, Gossypium hirsutum
  Clone ID: LIB3048-010-Q1-L1-A5.pep
TTDPAGIVERSTRESMTTNPMAWEGSVNPRVKQMEQAQNCLLPMGITSENVAHRFGVTRQEQDQAAVESHRKAAAATASGKFKDEIVPVATKIVDPKTGDEKPVTISVDDGIRANTSVSDLGKLKPVFKKNGTTTAGNSSQVSDGAGA

SEQ ID NO: 60718 - protein, 77 aa, Gossypium hirsutum
  Clone ID: LIB3189-027-P1-K1-H2.pep
MEKAINRQQVLLQHLNPSASSFSSYQNNSALSALALLAGDSAAYLRTNVFGDDVVIVAAYKTALCKSKRGGFKGSYS

SEQ ID NO: 60719 - protein, 44 aa, Gossypium hirsutum
  Clone ID: LIB3148-016-Q1-K1-A11.pep
YYSQSCIKGNLVFGKQILMMKERHVQSKLPKNTQVLTPYHVTYH

SEQ ID NO: 60720 - protein, 62 aa, Gossypium hirsutum
  unsure (1)..(62): unsure at all Xaa locations
  Clone ID: LIB3148-013-Q1-K1-F5.pep
FLHHQNLFTKNQIPFDTTLGIILLGKLFDDPNVKVPKLLKKKKKKKKKKKKKKKKKKKKKKX

SEQ ID NO: 60721 - protein, 91 aa, Gossypium hirsutum
  unsure (1)..(91): unsure at all Xaa locations
  Clone ID: LIB3147-036-Q1-K1-C5.pep
QSPARPTPSKNFLAGPGASMVFNCVIEIPKCSMVKYELXKKTVLIKVDRVLYSSIAYSHNYGFIPRTLCEDNDPMDVLIIMQLRFLIHICL

SEQ ID NO: 60722 - protein, 64 aa, Gossypium hirsutum
  Clone ID: LIB3148-016-Q1-K1-A10.pep
SFVIPIIGRSSLESYFCGYARGELNKQKSHWNVVQLVQTYKSWNHNHYRNAVKISFMISPFCTS

SEQ ID NO: 60723 - protein, 91 aa, Gossypium hirsutum
  Clone ID: LIB3148-028-Q1-K1-C9.pep
SGFQDKKKTHASEDDKIIAVCADDPEYRHYNDIKELPPHRLAEIRRFFEDYKKNENKEVAVNDFLPASTAYEAIQHSLNLYADYIVESLRR

SEQ ID NO: 60724 - protein, 101 aa, Gossypium hirsutum
  Clone ID: LIB3145-054-Q1-K1-F11.pep
MEKFLSFERSLANNGGEATSGKSAGFSRVALNERILSSMTRRSIAAHPWHDLKIGPGAPAVFNCVVKIGKGSKVKYELYNTSGLIKCEMDDKIFAVCADDP

SEQ ID NO: 60725 - protein, 82 aa, Gossypium hirsutum
  Clone ID: LIB3197-003-P1-M1-E9.pep
MAPPIETPTKSSGSHHASHPPLNERILSSMSRRSVAAHPWHDLEIGPGAPMVFNCVIEIPKGSKVKYELDKIPARGFEGYLS

SEQ ID NO: 60726 - protein, 390 aa, Gossypium hirsutum
  Clone ID: GOSHI-09MAY01-C240_1.pep
MLAVSPLRNNTSKDDDEGEMESTFTISSDEFPDFADGNLLESIDFDDLFLSIDVDGDVLPDLELDPVILAVLPPAGEESEMNASGEKTEESDNQRKDEEENKVSTSKGDEETVSKREEPKAVKTGSKDGDKGRKSSIKGKSNNNNQGTRKVKVDWTPELHRRFVQAVEQLGVDKAVPSRILELMGIDCLTRHNIASHLQKYRSHRKHLLAREAEAASWIHRRQIYGSATPVGGPRNPGGNHWLPPTMGFPPSASPMHHQNHLFRPLHVWGHPTMDQSLVHLWPKHLAPPPPPPRPAGGPPPPADPCFWHLRHPRVPNGQTPGTPCFPPPLTAAPTRFGVVPVPGIPPHHAMYKADTGIGVPASQLRRHPLVDLHPSKESIDAAIGDVLSK

SEQ ID NO: 60727 - protein, 62 aa, Gossypium hirsutum
  Clone ID: LIB3148-030-Q1-K1-G6.pep
HASVYMQRFGVVPVPGIPPHHAMYKADTGIGVPASQLRRHPLVDLHPVSSLYFVINELVIKH

SEQ ID NO: 60728 - protein, 73 aa, Gossypium hirsutum
  Clone ID: GOSHI-09MAY01-C260_10.pep
PTRPRSGRFCLKGVAINFAKSDDIKILRDIEQYYRTQIGQMAMNGANLILKMLSLVLGPELGRYRWTFFIGVG

SEQ ID NO: 60729 - protein, 133 aa, Gossypium hirsutum
  unsure (1)..(133): unsure at all Xaa locations
  Clone ID: GOSHI-09MAY01-C260_6.pep
TQAVIFCNTXKVDWLTEKMRSNNFTVSSMHGDMPQKERDVIMAEFRDGATRVLITTDVWARGLDVQQVSLVINYDLPNNRELYIHRIGRSGRFGRKGVAINFVKSDDIKILRDIEQYYSTQIDEMPMNVADLI

SEQ ID NO: 60730 - protein, 146 aa, Gossypium hirsutum
  Clone ID: GOSHI-09MAY01-C260_5.pep
MAAATTSRAARRMGAEDEKLVFETTEGIEPILSFDQMGLKDDLLRGIYNYGFEKPSAIQQRAVMPIINGRDVIAQAQSGTGKTSMIALTVCQVVDTASREVQALILSPTRELASQTEKVIRTIGDFMNIQAHACIGGKSVGEDIRK

SEQ ID NO: 60731 - protein, 138 aa, Gossypium hirsutum
  Clone ID: GOSHI-09MAY01-C260_3.pep
AWRGRVARKELRKLKMAARETGALQAAKNKLEKQVEELTWRLQLEKRMRVDLEEAKTQENAKLQSALQDIQLQFKETKELLAKERDAAKKAAEVVPIIQEVSVVDPLMLEKLTNENEKLKALVRSVEKKIDETEKKFE

SEQ ID NO: 60732 - protein, 171 aa, Gossypium hirsutum
  unsure (1)..(171): unsure at all Xaa locations
  Clone ID: GOSHI-09MAY01-C260_2.pep
RATRETGALQAAKNKLEKQVEGLTWRLQLEKRMRVDLEEAKTQENAKLQSALQDIQLQFKETKELLAKEREAAKKAVEVVPIIQEVLVVDPVMLEKLTNENEKLKXSSLEKKIDETEKKFEETNKISEERLKQALDAESKIVQLKTGMHSLEEKISDIEFENQVFEAAYPI

SEQ ID NO: 60733 - protein, 407 aa, Gossypium hirsutum
  Clone ID: GOSHI-09MAY01-C260_1.pep
MSAAAAATSRATRRMGAEDEKLVFETTEGIEPILSFDQMGLKDDLLRGIYNYGFEKPSAIQQRAVMPIINGRDVIAQAQSGTGKTSMIALTVCQVVDTASREVQALILSPTRELASQTEKVIRTIGDFMNIQAHACIGGKSVGEDIRKLENGVHVVSGTPGRVCDMIKRRTLRTRAIKLLILDESDEMLSRGFKDQIYDVYRHLPPELQVCLISATLPHEILEMTSKFMTDPIRILVKRDELTLEGIKQFFVAVEREEWKFDTLCDLYDTLTITQAVIFCNTKRKVDWLTEKMRSNNFTVSSMHGDMPQKERDAIMAEFRDGATRVLITTDVWARGLDVQQVSLVINYDLPNNRELYIHRIGRSGRFGRKGVAINFVKSDDIKILRDIEQYYSTQIDEMPMNVADLI

SEQ ID NO: 60734 - protein, 128 aa, Gossypium hirsutum
  Clone ID: AI055063.1.pep
MEALLSQFTFLSDQALQGNKNFDPSAIEDLMKLFEIESYKAWAALELEEEKQVKRAEITMQAAKNKLEKQVEELTWRLQLEKRMRVDLEEANTQENAKLQSALQTYNFSLKKPKNLLAKEREACKKAV

SEQ ID NO: 60735 - protein, 141 aa, Gossypium hirsutum
  Clone ID: LIB3829-028-Q6-K6-H5.pep
RSHSVSNFHSSLSTATKRKVDWLTEKMRSNNFTVSSMHGDMPQKERDAIMAEFRDGATRVLITTDVWARGLDVQQVSLVINYDLPNNRELYIHRIGRSGRFGRKGVAINFVKSDDIKILRDIEQYYSTQIDEMPMNVADLI

SEQ ID NO: 60736 - protein, 81 aa, Gossypium hirsutum
  Clone ID: LIB3145-057-Q1-K1-C3.pep
QVDWLTEKMRSNNFTVSSMHGDMPQKERDAIMAEFRDGATRVLITTDVWARGLDVQQASLGRLLCLPFFSCILLVKCFLVE

SEQ ID NO: 60737 - protein, 101 aa, Gossypium hirsutum
  unsure (1)..(101): unsure at all Xaa locations
  Clone ID: LIB3828-005-Q1-N6-D5.pep
MPHKEIEAIMAEFWDGATRVLITTDVWARGLDVQQVSLVINYDLPNNRELYIHRIGRSGRFGKKGVAINFVKSDDIKIVRDIXQCYSTQMVEKPMNVADVI

SEQ ID NO: 60738 - protein, 62 aa, Gossypium hirsutum
  Clone ID: LIB3584-044-P1-K1-G5.pep
INYDLPNNRELYIHRIGRSGRFGRKGVAINFVKSDDIKILRDIEQYYSTQIDEMPMNVADLI

SEQ ID NO: 60739 - protein, 106 aa, Gossypium hirsutum
  unsure (1)..(106): unsure at all Xaa locations
  Clone ID: LIB3048-013-Q1-L1-H11.pep
QSTQQIRTRDLKILFETTASIFPIFSLHPIGLKDDILRGIYNYRFXKPSAIQQRTVMPIINGRDVIAQAQSGTGKTSMIALTVCQVVDTASREVQALILSPTRELA

SEQ ID NO: 60740 - protein, 108 aa, Gossypium hirsutum
  Clone ID: LIB3149-037-Q1-K1-E7.pep
MPILSFDQMGLKDDLLRGIYNYGFEKPSAIQQRAVMPIINGRDVIAQAQSGTGKTSMVALTVCQVVDTASREVQALILSPTRELASQTEKVIRTIGDFMNIQAHACIG

SEQ ID NO: 60741 - protein, 294 aa, Gossypium hirsutum
  Clone ID: GOSHI-09MAY01-C210_1.pep
PIRALSESCPQKGSMMNQHDISFQSAAIDSSSEMFPMGGYFAPPPMNFSGNSSIFTTSPALIEPGNSSGSSLIDSVAGFTHDTGLAVEWSVDEQYVLKEGLEKSQVDPRVRKYIKIAATLPDKTVRDVALRCRWMQRKRRKPEELNAGKRVNSRKDKLVESSSKMNMPSDLPQNTAPYPLTMHPLDQNGRIPSEGIFGTTMHLLKQNSQVLSQITSNLSAYKLQDNVDLFCHAKNNITAMLKDMRDMPGLMSHMLPLPVSVSEDLANSMFCSATQATILGINLKQEPRVLIGNC

SEQ ID NO: 60742 - protein, 100 aa, Gossypium hirsutum
  Clone ID: LIB3197-050-Q1-M1-C8.pep
EKKKIQRKKNQRRTQKSKETKQELNRSTLCYQSCEIFVLKEKDLKVIREAKIREEMLDREASLRQARAEASLSDGISWVSFDQKKAKPIRDFRKVALHKV

SEQ ID NO: 60743 - protein, 143 aa, Gossypium hirsutum
  Clone ID: GOSHI-09MAY01-C200_3.pep
MESSGPSRRPCFIEEDDGLASLVDMEAGYSGTHYQSCNQNGFFSRPLLCYSRRSSLRNLASSSSSSVFSPRFTRFYDARFEDHHYHQPHFLDACFLCKKPLGGNRDIFMYRGDTPFCSEECRQEQIDMDEALEKNRNLSSSMK

SEQ ID NO: 60744 - protein, 180 aa, Gossypium hirsutum
  Clone ID: GOSHI-09MAY01-C200_2.pep
MDCFVPSRKPCFVEEDDGLASLAGMEGVGYSDGSYYKNHSQNGFFSTPFCFSRRNNSLRNMSSSSSSSSFSCLIPSSPRSTRFYDGRFEDHHQPHFLDACFLCKKPLGGNKDIFMYRGDTPFCSEECRQEQIDMDEAKENNLSFSSSMKALRKKKDQRKSSKSPTKAEDYPFRTSTVAAA

SEQ ID NO: 60745 - protein, 173 aa, Gossypium hirsutum
  Clone ID: GOSHI-09MAY01-C200_1.pep
MESSGRSRRPCFIEEDNGLASLAVMESGYAGIHCQTHKQNGFFSRPLCYSRRSSLRNLSSSSSSSFYCSSVSSPRSGRFCDARFEDHQPHFLDACFLCKKPIGGNRDIFMYRGDTPFCSEECRQEQIEIDEAKEKNHNLSSSIKAMRKKDQKKSTSPTKAESYPFRPGTVAAA

SEQ ID NO: 60746 - protein, 145 aa, Gossypium hirsutum
  Clone ID: LIB3582-023-P1-K1-A10.pep
GFKRNPSSHKATEGGGSSHAKTRFSALFNRAESKAPYKLRKCERKGLSLFPLSQILTMENRSVEVTRDFGIQGVNEAVDGHFDETEVEPWAPCMPRAHMEAQHPKLLGFFLFYILGYFSRLGSLVWACILFGPCSEMDHYYYFLF

SEQ ID NO: 60747 - protein, 114 aa, Gossypium hirsutum
  unsure (1)..(114): unsure at all Xaa locations
  Clone ID: LIB3189-012-P1-K1-E9.pep
VLLVSFFSAKQTVVEQPLLPHLRLCSTRVAKETHHRHHRTKPSRAVAGATRRPGFQPFSREPESKAPPKLRKCERKGPSLFPLSQILTTENRSVEVTRXFGEMPSFIIFLKIDF

SEQ ID NO: 60748 - protein, 146 aa, Gossypium hirsutum
  Clone ID: LIB3189-051-P1-K1-H9.pep
PRVRDFGLAVTTESQNKNVKLWGTLCYVGAEYLLEGKLTDKSDVYAFGVVLLELLIGKKPIEKMSPTQHQSIVTWVMPQLTDRLKLPKLVDPVIKDTMDLKHLYQVAAVAVLCIQPEPSYRPLITDVLHCLIRLVPIELGGSLRLT

SEQ ID NO: 60749 - protein, 63 aa, Gossypium hirsutum
  unsure (1)..(63): unsure at all Xaa locations
  Clone ID: LIB3147-003-Q1-K1-B8.pep
MPQLTDRLKLPKLVDPVIKDTMDLKHLYXVAAVAVLCIQPEPSYRPTITDGLHSLIPLVPIEL

SEQ ID NO: 60750 - protein, 74 aa, Gossypium hirsutum
  Clone ID: GOSHI-09MAY01-C38923_1.pep
SPAPVVAKIVIVEEGEAEVERNEKKKKKHKKSEEDADAETEEKVGKEKKKKNKDKVEASSPDTEKSEKKKKKKS

SEQ ID NO: 60751 - protein, 168 aa, Gossypium hirsutum
  Clone ID: uC-gsflnu33B081b04b1.pep
VPYRPIPSGAISENEVISQIWLLLLGGLGISGLLDVWAGHDFPIVFYLALGGSLLSYIYSAPPLKLKQNGWIGNFALGASYISLPWWAGQALFGTLTPDIVVLTLLYSIAGLGIAIVNDSKSIEGDKALGLQTLSVAFGAETAKWICVGAIDITQLSIAGYLLWAGEP

SEQ ID NO: 60752 - protein, 96 aa, Gossypium hirsutum
  Clone ID: LIB3147-001-Q1-K2-C10.pep
MLVMVEQSLPVAFGAETAKWICVGAIDITQLSIAGYLLGAGKPYYALALVGLIVPQVVFQFQYFLKDPVKYDVKYQASAQPYLVLGLLVTALATSH

SEQ ID NO: 60753 - protein, 71 aa, Gossypium hirsutum
  Clone ID: GOSHI-09MAY01-C38523_1.pep
CSKKSLDGKIQRLAGIVIYLKIYIFLTMVKDLISPEVVGLFLDLRIYRSRTSDVLRQAMLDRKVVYVWKDV

SEQ ID NO: 60754 - protein, 167 aa, Gossypium hirsutum
  Clone ID: GOSHI-09MAY01-C38473_1.pep
MPSIRLLVLFFFLFFSVHSQEDTPIARFLRYLQFNTAHPNPSYADPISFLISQANAIGLHARTLEFTPSKPLLLLTWPGSNPSLPSVLFNSHLDSVPAEPSKWIYPPFSATLAPDGKIYARGAQDDKCIAMQYLEAIRNLKANGFTPSRTVHISYVPDEEIGGFDGS

SEQ ID NO: 60755 - protein, 294 aa, Gossypium hirsutum
  Clone ID: GOSHI-09MAY01-C38413_1.pep
EFDLENIVTAAKVPGRKVNVLLRINPDVVPQVHPYVATGNKNSKFGIRNEKLQWFLDAVKAHPNELKLVGAHCHLGSTITKVDIFRDAAVLMVNYIDEIRAQGFEVDYLNIGGGLGIDYYHSGAVLPTPRDLIDTVRELVLSRNLNLVIEPGRSLIANTCCLVNRVTGVKTNGTKNFIVIDGSMAELIRPSLYDAYQHIELVSPTPPDAEVSTFDVVGPVCESADFLGKERELPTPAKGTGLVVHDARAYCMSMASTYNLKMRPPEYCVEEDGSVTRIRHGETFEDHIRFFEGL

SEQ ID NO: 60756 - protein, 180 aa, Gossypium hirsutum
  Clone ID: GOSHI-09MAY01-C38783_1.pep
VLCLHGFRTSGEILKKMMVRWPHSVLNNFDFDFLDAPFPARGKSDVESLYDPPYYEWYQVNEIECVHFDECIACIEDYMIKHGPFDGLLGFSQGGMLASVVPPMQREGAAFTSVPKIKFVIIISGFELRELKSGPPKLLANVYSVPIDCPSLHLIGDPDVLLVRRATRSSLLENVNFLIR

SEQ ID NO: 60757 - protein, 238 aa, Gossypium hirsutum
  Clone ID: GOSHI-09MAY01-C38743_1.pep
NFSVIPIVVTETGWPWQGGSNEPDATVENAETFINKLIQRVSNNSGPPSQPTIPINTYIYELFNEDKRLGPISEKNWGLLFTNGTAVFPLSLGGPSQITGNSTAVFCVAKDDASDVPRRRGINWACGQGQANCSAIQSGQPCYLPNNIKNHASYAYNDYYQKMHTVGGTCDFDGTATTTTIDPSYGSCIFTGSSNSSTGRESLPPTALGPISPGGSTKLPLYKIQFLISATCLLVVLL

SEQ ID NO: 60758 - protein, 223 aa, Gossypium hirsutum
  Clone ID: GOSHI-09MAY01-C38713_1.pep
MQKSPSASSLGPGGLDLAQAFFKPILNTDPPSSTKRHTKISVIGVGNVGMAIAQTILTQDLADELALVDAKSDKLRGEMLDLQHAAAFLPRTKINASVDYSVTAGSDLCIVTAGARQNPGESRLNLLQRNVALFSNIIPPLAKYSPDSILLIVSNPVDVLTYVSWKLSGFPSNRVIGSGTNLDSSRFRFLIADHLDVNAQDVQAFIVGEHGRQLVALWSSISI

SEQ ID NO: 60759 - protein, 217 aa, Gossypium hirsutum
  Clone ID: GOSHI-09MAY01-C38683_1.pep
GFVGEYEPLPTPVLTFETRAPKESALFTKLQHAADVHPRKDDATHRTTPVPATDVRKDVGTYRTPVPAKPHPLDVPVSESKSSSFCSANGSTSEGRPSLFTPPAMPSVPPIRRDESSNAAAVAARAWMSIGAGAFKEANENFGTSKGKISADSLYNPARELHPQAPQVRGQFPLSAGMHFQPQPEKNNFPLHGFPPQHVRMMNEAQFPKTEPMGFPS

SEQ ID NO: 60760 - protein, 238 aa, Gossypium hirsutum
  Clone ID: GOSHI-09MAY01-C38623_1.pep
SNNSNTKERGKNATQTLEYGGVSYHMVNCGLILLKMLSEYIDMNHLLPALSLEVVHRVVEILKFFNTRTCQLVLGAGAMQVSGLKSITSKHLALASQVISFIYAIIPELRQILFLKVPEPRKSLLLSEFDRVAQDYKVHRDEIHTKLVQIMRERLLVHLRGLPQIVESWNRPEEADPQPSQFARSLTKEVGFLQRVLSRTLHEVDVQAIFRQVVVIFHSQISDAFSRLEISTPQAKNR

SEQ ID NO: 60761 - protein, 226 aa, Gossypium hirsutum
  Clone ID: GOSHI-09MAY01-C38133_1.pep
PRVREEPPLGPAANLGLFTTNDEFDIPLWSLPTGTQDGSGFQLFNTDPDVADTLVDLQRSSLNCPSTMNGYPLAPETTMGSTNLVPTSSIGQVDTNLNDSLVDSTFFGGEDPSLQIFLPTHPSGASAEADLRDQADVPNGDDWISLRLGGGATGGHGDSTIVNGLKSRQQIPSKERAMDAASLLLGMNDSRNGKSSRQRTESPFSFPRQKRSVRPRLYLSIDSDTE

SEQ ID NO: 60762 - protein, 182 aa, Gossypium hirsutum
  unsure (1)..(182): unsure at all Xaa locations
  Clone ID: LIB3825-005-Q1-K6-E12.pep
PXVAXTLVDLQRSSLNCPSTINGYPLAPETTMGSTALVPTCSIGQVDTNLNDSLVDTTLFGGEDPSLQIFLPTHPSGASAESGFRDEADVSNGICTDDWISLSLGGGASVGHGDSTTVNGLNSRQPIPSKERAMDTASLLLGMNESRNGKSSRQRTESPFLFPRQKRSVRPRLYLSIDSDTE

SEQ ID NO: 60763 - protein, 132 aa, Gossypium hirsutum
  Clone ID: LIB3145-050-Q1-K1-E6.pep
KSPFLVSERKGCGGNGHSSNKVPLDANSNGSSTVTCHKCGEQFSKWEAAETHHLSKHAVTELVEGDSSRKIVEIICRTSWLKSENHCGRIERVLKVHNMQKTLARFEDYREIVKIKASKLPKKHSRCIADGN

SEQ ID NO: 60764 - protein, 105 aa, Gossypium hirsutum
  Clone ID: LIB3145-050-Q1-K1-E9.pep
KPGPTHAYGKAPILVSQLLCWGGKEHSGGCFPLDADSNGSFTVTCDKCGEQFSKCEAAETHHLFKHADTELVEGDSSRKIVEIICRTSWLKSENHCSRIERVLNV

SEQ ID NO: 60765 - protein, 236 aa, Gossypium hirsutum
  unsure (1)..(236): unsure at all Xaa locations
  Clone ID: GOSHI-09MAY01-C38053_1.pep
PRVRTVEVTCETEGEEGIQEGDVVTVQAWITLERGNGLIGALPHAPCFPFHKEENFWFLLADSVSNNVWFSQKVSFMDEATAITAASKTIQETMEVSGVSAKETSEAVKRTIEKVRGGSRLVMGKFPAPTEGNYNLTCFCLCDSWIGCDKKXQTLRVKILKRTRAGTXGGLVSEDPPVREDGIEEEEENEEDYDDYESEYSEEEEEEKDTKKKGPAANGAVHNKGSSSEGSGSDEE

SEQ ID NO: 60766 - protein, 163 aa, Gossypium hirsutum
  Clone ID: GOSHI-09MAY01-C38003_2.pep
QSFSHADPHPKICYFFLDLSLKILFLFFNNQIKFPFFSEKVQYLHADPNAESFRGETRSFLRGIDVNRLPSTVDCEEAAALASPNSTISSVSGKRSEREGTNGDELDIERACSRGISDEEDGDASRKKLRLSKDQSAILEESFKENNTLNPVSNSNASFDVII

SEQ ID NO: 60767 - protein, 300 aa, Gossypium hirsutum
  Clone ID: GOSHI-09MAY01-C38003_1.pep
MVGKEDLGLSLSLGFPQNHHSLQLNLRPSLLPSSVDSCSSVPSGFTAFHKSSWNDVSAPSDPNAESFRGETRSFLRGIDVNRLPSTVDCEEEAGVSSPNSTISSVSGKRSEREGTNGDELDIERACSRGISDEEDGDASRKKLRLSKDQSAILEESFKENNTLNPKQKMALAKQLGLRPRQVEVWFQNRRARTKLKQTEVDCEFLKRCCENLTEENRRLQKEVQELRALKLSPQFYMQMTPPTTLTMCPSCERVGASSTVDPRSHHQLPQNHHRAIPINPWAPAAAPIPHGPLDALRLRS

SEQ ID NO: 60768 - protein, 347 aa, Gossypium hirsutum
  Clone ID: GOSHI-09MAY01-C38393_1.pep
MADEALVKNKQVVLKNYVNAGLPKESDMEIKEKSIQLKVPEGTKDSILVKNLYLSCDPYMRNRMKKLEDSYVPSFEPGSAISGYGVAKVVDSTHPEYKNGDLVWGMTGWEEYSLLTVPGLLFKIQHTDVPLTYYTGLLGMAGMTAYAGFYEICTPKKGEYVYVSAASGAVGQLVGQFAKLLGCYVVGSAGSKEKIDLLKNKFGFDEAFNYKEEPDLDAALKRYFPEGIDIYFENVGGKMLDAVLLNMRVHGRIAVCGMISQYNNDKPEATHNLMYIIPKRVRMQGFIVSDFYHLYPKYLEMVIPSIKEGKITYIEDVAEGIESAPTALIGLFIGRNVGKQLVVVARD

SEQ ID NO: 60769 - protein, 111 aa, Gossypium hirsutum
  unsure (1)..(111): unsure at all Xaa locations
  Clone ID: LIB3585-056-P1-K1-B7.pep
GKMLDAVLLNMRVHGRIGVXGMISQYNNDKPEATHNLMYIIPKRVRMQGFIVSDFYHLYPKYLEMVIPSIKEGKIKYIEDVAEGIESAPTALIGLFIGRNVGKQLVVVSRD

SEQ ID NO: 60770 - protein, 179 aa, Gossypium hirsutum
  Clone ID: GOSHI-09MAY01-C38333_1.pep
RKLSKRVAFYTVDCRGSCGEIFVDLKDYKYSKKKLEETVECQLEFPSFEDTISVPWKALPKRVSKLYFAMRVIEQFEDAEGRNPGETSIADLPGVLKLRKELCETNSVNESQIPDALLERLLMDTSEYPPVCAIIGGILGQEVIKPISGKGDPLKNFFFFDAMDGKGLIEDISEPKPVS

SEQ ID NO: 60771 - protein, 75 aa, Gossypium hirsutum
  Clone ID: GOSHI-09MAY01-C38323_1.pep
MATELPKPATEDVKFDLFEDDDEFEEFEIDEEWEDKEEGKEITQQWEDDWDDDDVTDDFSLQLRRELENNTENNN

SEQ ID NO: 60772 - protein, 226 aa, Gossypium hirsutum
  unsure (1)..(226): unsure at all Xaa locations
  Clone ID: GOSHI-09MAY01-C38223_1.pep
NNKLVSQIKSSTKIPVLGHADGICHVYVDKSANMDMAKRVDLDAGGGAFFVCNAMETLLVHKDLVTNGALNELIVDLRIQGVTLYGGPRASLLLNIPQARSFHHEYNSMECTVEIVDDVAAAIDHIHHHGSAHTDCIITEDQETAEIFLHQVDSAAVFHNASTRFCDGARFGLGAEVGISTSRIHARGPVGVEGLLTTRWILKGSGQVXNGDKGVTYTHKDIPINS

SEQ ID NO: 60773 - protein, 188 aa, Gossypium hirsutum
  unsure (1)..(188): unsure at all Xaa locations
  Clone ID: GOSHI-09MAY01-C39983_1.pep
DVLDDLKTNVELSHPGAELRLLEVFYHKIYRPLPRSEKIENINDQYWTLRAEEIPEEEKDLGPHDRLIHXFTHFMKDATQNQQVQNFGEPFFLVIHETETLAEVKVRVQKRLQVPDEEFAKWKFAFLSLGRPEYLQDSDVVSXRFRRRDVYGAWDQYLGLEHSDNAPKRSYAANQNRHTFEKPVKIYN

SEQ ID NO: 60774 - protein, 158 aa, Gossypium hirsutum
  Clone ID: GOSHI-09MAY01-C39953_1.pep
LAYDQYSLQKLEPPLVLQEFVNHGGVLFKVYIVGEAIKVVRRFSLPDVTKRELSKVTGVFRFPRVSCAAASADDADLDPSVAELPPRPLLERLAKELRWRLGLRLFNLNIIREHGTRDHFYVIDINYFPGYGKMPGYEHIFTDFLLSLVQSRYKKRSS

SEQ ID NO: 60775 - protein, 375 aa, Gossypium hirsutum
  unsure (1)..(375): unsure at all Xaa locations
  Clone ID: GOSHI-09MAY01-C39933_1.pep
ATVQVVDLQVFAVPRITLKPLLSVFPCFANIYVSLMDKPHVDFGLKVLGADXVMAIPGLSRFVQELIKDQVANMYLWPKALQVPIMDPTQAMKKPVGMLDVKVVKAMKLRKKDFLGKSDPYVKLKLTEEKLSAKKTTVKQSNLNPEWNEEFSFVVKDPNTQALEIILYDWEQVGKHDKMGMNVVPLKDLTPEEPKVFTLDLLKNMDPNDQQNEKSRGQLVLEALYKPFKEDEIPKDVDDSIMVQKAPEGTPAGGGLLVVIVHEAEDIEGKYHTNPHVRLLFRGEERKTKRVKKSRDPRWEEEFQFMVDEPPTNYKIHIEAFSTSSRIGLLHPKESLGYVTISLADVVNNRRINERYHLIDSKNGRIQIEMQWRTS

SEQ ID NO: 60776 - protein, 130 aa, Gossypium hirsutum
  Clone ID: GOSHI-09MAY01-C39863_1.pep
GLGPFYCWVWFKGNKTMSLRVKTQQANAQKNAEFLASHPRVKQVNYAGLPDHPGRALHYSQAKGAGSVLSFLTGSLALSKHVVETTKYFSVTVSFGSVKSLISLPCFMSHASTPASVREERGLTDYLVRI

SEQ ID NO: 60777 - protein, 67 aa, Gossypium hirsutum
  Clone ID: GOSHI-09MAY01-C39533_1.pep
CMWRVVTKGVRPVPQVSVPLIACIDCLSCSEVLDRTIHEANNAGALNGCYLNFKHSYCGGSRFSLYL

SEQ ID NO: 60778 - protein, 274 aa, Gossypium hirsutum
  Clone ID: GOSHI-09MAY01-C39523_1.pep
YLPKLYDPFLHGPYRGRIKEWGSPLSINQTYKKKNTDPFWINKIHALLLTTDYHDLEQTLDTLNIKSLATEKELSLLTLTEDEQGNIDSEDRVKILKFLFNIVITNPNNQTIRKKSIGIKEISKKVPRWSYKLIDDLEQQEGENEENVTAEHEIRSRKSKRVVIFTNNQANADTYTNTKDANDPDQTDEVALIRYSQQSDFRRDIIKGSMRAQRRKTITWELFQANVHSPLFLDRVDKPLFFSFDISGPLKRISRNWICKNKESKISDYTEKKI

SEQ ID NO: 60779 - protein, 205 aa, Gossypium hirsutum
  Clone ID: GOSHI-09MAY01-C39433_1.pep
DKKLIEERCEQLRTAMDTSSAMFDREKAQERLSKLSGGVAVFKVGGASEAEVGERKDRVTDALNATRAAVEEGIVPGGGVALLYSTKALQNLQTENEDKKRGVQIIQDALKVPTSTIASNAGYDGSLVLGKLLEQDDDNLGFDASKGAYIDMVKAGIIDPLKVIRTALVDAASVSLLLTTTEVSVLENPDEKKPPSRMPDIDNDY

SEQ ID NO: 60780 - protein, 152 aa, Gossypium hirsutum
  Clone ID: GOSHI-09MAY01-C39793_1.pep
ANSILFDYRIPAVGTCGAGAAMDSPLQMNGLPISVYAPETVGCVVVDKQGRCAAATSTGGLMNKMSGRIGDSPLIGSGTYASELCGVSCTGEGEAIIRSTLAREVSAVMEYKGLNLHESVDYVIKNTLDEGKAGLIAVSKDGEVACGFNTTG

SEQ ID NO: 60781 - protein, 330 aa, Gossypium hirsutum
  unsure (1)..(330): unsure at all Xaa locations
  Clone ID: GOSHI-09MAY01-C39723_1.pep
DVGIARSSEYPEVQRITDKGLGTLEGFLNPGRPTPSGEMGPMARKSPERTQXEKPPXREEPETNMNEIKALPAPENYNPPPPPPEPEQPKTVPPQVTEDLVNLRDDAVSADEQGNKLALALFSGSPTSNANGSWEAFPSNGEPEVTSAWQTPAAEPGKADWELALVESASNLSKQKAGLAGGFDPLLLNGMYDQGAVRQHVSSSQLSGGSASSVAMPGPGKAATQVLALPAPDGTVQPVGQQDPFAASLTVPPPSYVQIADMEQKQQLLVQEQQLWNQYGRDGMQGQSSLAKITASSVYYGAAAQLVMMPYGMPQVNGMGQAGGYYYPPY

SEQ ID NO: 60782 - protein, 131 aa, Gossypium hirsutum
  Clone ID: LIB3147-015-Q1-K1-B10.pep
DVGIARSSEYPEVQRITDKLLGTLEGFLKEMANGRKSPERIKEEKPPVKEEPETNMNEIKALPAPENYNPPPPPPEPEQPKTVPPQVTEDLVNLRDDAVSADEQGNKLALALFSGSPTLNANGSWEAFSLN

SEQ ID NO: 60783 - protein, 245 aa, Gossypium hirsutum
  Clone ID: GOSHI-09MAY01-C39663_1.pep
MATRLQFENSCEVGVFSKLTNAYCLVAIGGSENFYSAFESELADVIPVIKTSLGGTRIIGRLCAGNKNGLLVPHTTTDQELHHLRNSLPDQVVVQRIEEKLSALGNCIACNDHVALTHTDLDRETEEIIADVLGVEVFRQTIAGNILVGSYCAFSNRGGLVHPHTSIEDLDELSTLLQVPLVAGTINRGSEVIAAGMTVNDWTAFCGSDTTATELSVIESVFKLREAQPTAIVDEMRKSLIDTYV

SEQ ID NO: 60784 - protein, 93 aa, Gossypium hirsutum
  Clone ID: LIB3146-049-Q1-K1-B1.pep
AFSNRGGLVHPHTSIEDLDELSTLLQVPLVAGTINRGSEVIAAGMTVNDWTAFCGSDTTATELSVIESVFKLREAQPSAIVDEMRKSLIDTYV

SEQ ID NO: 60785 - protein, 113 aa, Gossypium hirsutum
  Clone ID: LIB3135-026-Q1-K1-D5.pep
PTRPSTRPIPVVKTSIAGTRMMGRLCAGNKNGLLVPHNTTDQELQHLRNSLPDQVVVRRIEEKLSALGNCIACNDHVALTHTDLYKETEEIIADVLGVKVFRQTIAGNILVGS

SEQ ID NO: 60786 - protein, 134 aa, Gossypium hirsutum
  Clone ID: GOSHI-09MAY01-C39163_1.pep
MQVASSWASQTSSTEGDPESIECVSFAPKFPWAVSGGMDRNLTIWDLQNSSPRFICNHEEGVTCLAWLGASKFLATGCCDGRICIWNCLSGECVITFKGHEHAIQSLSVSSNLEFLVSVSMDSTARVFEIRNFH

SEQ ID NO: 60787 - protein, 220 aa, Gossypium hirsutum
  Clone ID: GOSHI-09MAY01-C39113_1.pep
CASSQSQSSSFTQNVPPEKGCSEERLHDLSMEAIKEFYSARDEKEVALCTDAWGSSSSHPTMIALWVTDCFERKDIERDLLAKLLVNLTRSHDGVLSQAELVKGFESVLSTLEDAVNDAPKAPEFLGRIFGKMIVENVMSLKEIGRLIGEGGEEPGQLVEIGLGGDVMGSTLGMIKREKGESVLNEIRGSSCLRLEDFRPSHPNRSRILETFLYLAHSKV

SEQ ID NO: 60788 - protein, 82 aa, Gossypium hirsutum
  Clone ID: GOSHI-09MAY01-C39123_1.pep
VHASADAWACSLLGAKILIDDNPRYAVECAQVGIRVLLFDYENSYPWCKTESIDKHPLVTRVNNWEEAEQQIAAWIFSSTIP

SEQ ID NO: 60789 - protein, 113 aa, Gossypium hirsutum
  Clone ID: GOSHI-09MAY01-C39393_1.pep
NEGSLPQNPSASFEVFSVKIRIFHQNSPFSVQIRRQYAHAIISTEKMINVFKIQKQSFFAPIMNWVYRCCSRIEIWSKFLLKQAQFSTLILFLPTIACDNQLNPFLSSNDLTS

SEQ ID NO: 60790 - protein, 84 aa, Gossypium hirsutum
  Clone ID: LIB3828-021-Q1-N6-E4.pep
DQRHLENGEYDRANSEKQRLERRQRMSRKLQENGWKPRWFQRDSENGSFRYVGGYWESRKQAKWDGCPNIFGEFNDVVDSSEQG

SEQ ID NO: 60791 - protein, 95 aa, Gossypium hirsutum
  Clone ID: LIB3147-007-Q1-K1-E5.pep
EKLPPTDSRLRPDQRHLENGEYDRANAEKQRLERRQRMSRKLQENGWKPRWFHQDSENGSFRYTGGYWEAREQGKWDGCPNIFGVFDEEFVDSSE

SEQ ID NO: 60792 - protein, 205 aa, Gossypium hirsutum
  Clone ID: GOSHI-09MAY01-C39253_1.pep
TGCGFQTKQRYRFGWFSMRLKLVGGDSAGVVTAYYMCSENGAGPERDELDFEFLGNRTGQPYLIQTNVYKNGVGGREMRHMLWFDPTEEFHSYSILWNNHQIVFFVDEVPIRVFKNNGDEKNDFFPSEKPMYLFSSIWNAHEWATRGGWEKTHWERAPFVSSYKDFSVDGGQWEDPYPACVSTTTKNWWDQYKAWRLSDSQKMDY

SEQ ID NO: 60793 - protein, 192 aa, Gossypium hirsutum
  unsure (1)..(192): unsure at all Xaa locations
  Clone ID: GOSHI-09MAY01-C34993_1.pep
RTKFLNAPLSNSPSLTWRSIWSSKKLLTDGLCWRVGKGDHISVWDDLWVPRMXFSSDIARKILQIPLSKSIQEDIQVWRGEATGDFSVRSAYKLLQKATIDPSVYLQTDTKNFYRKLWNLHMPSKIKITVWRIAWNYIPTFSNLKLRTVMAEDRCSRCGQEGEDSFHVFHLCPGFSAKGQTNSAGVSVAGSG

SEQ ID NO: 60794 - protein, 86 aa, Gossypium hirsutum
  Clone ID: LIB3829-018-Q6-K6-F4.pep
FPCFLSVPWVFSQGTNEQCRSFCCGLWLIILFYAAFDLKNSRSATGLVVCNEEGKIVAAKSTLHEDIVSPFTAEAVAGLEGETFDL

SEQ ID NO: 60795 - protein, 190 aa, Gossypium hirsutum
  Clone ID: AI731200.1.pep
FFFFFFTIDPSVYLQTDTKNFFRKLWNLHLPSKIKITIWRIAWNYIPTFSNQKMRTVMAEDRCLRCGQEGEDSFHVFYLCPGFSAKGQMNSAGISVAGSGQFIEGTSARSRQSSQRGKNAIFFDAAFDLKNSRSASGLVVCNEEGKIVAAKSTLHEDIASPFTAEAVAGLEGETRSSRGEMVPNHRVSSE

SEQ ID NO: 60796 - protein, 100 aa, Gossypium hirsutum
  Clone ID: uC-gsflmaxxa090a09b1.pep
DALPEEEDDIFQVQIVSDSARETEVLQLVGCFLTASIVHFPAMRSTMANLWHPSLTWSSIWSSKNLLTDGLCWRVGKGDHISVWDNTRVLQITSDRISLG

SEQ ID NO: 60797 - protein, 96 aa, Gossypium hirsutum
  Clone ID: LIB3145-008-Q1-K1-H5.pep
KTMEFTFTLKNQDYNLENSLELHFHFFNLKMRTVMAEDRCSRCGQEGEDSFHVFYLCPGFSAKGQMNSAGVSVVGSRYSGQIGINYYMKTYQTLVG

SEQ ID NO: 60798 - protein, 120 aa, Gossypium hirsutum
  Clone ID: GOSHI-09MAY01-C34973_1.pep
SGNLVCRLGATSAGWSIDHVEKWALYDELNYPMQSSNKLEKVIFFPLVTWIKAMNRPNYARPKTQIPEPKLHQLRPLTLARANNKKTAKKEKPWSPPCHLPPHASASTIPWHLHTLLGEV

SEQ ID NO: 60799 - protein, 182 aa, Gossypium hirsutum
  unsure (1)..(182): unsure at all Xaa locations
  Clone ID: GOSHI-09MAY01-C34863_1.pep
MGNALRWVYSHCCKPTTAGDSQGKDGVSALSHDLFQFDITSQVPEGLSYHVVSSKKAQANWYRKLLDAWREAKPPPKTPEEASSLVIQTLKRHQKADVEGLLAYYGLPQQPSASATTSLPQGVKFELQTLPVDTKAVPDGDTITVYVSTTDPRESLNVPXDVQSAADQRSRARAAKNYTKAD

SEQ ID NO: 60800 - protein, 101 aa, Gossypium hirsutum
  Clone ID: GOSHI-09MAY01-C34553_1.pep
RAAGGIERVDVSIDGGKTWMEATRFQKTGIPYIADGISNDKWAWVLFELTVDIPQSTEIIAKAVDSAANVQPEKVQDIWNLRGILNTSWHRVHVRIGHSNM

SEQ ID NO: 60801 - protein, 251 aa, Gossypium hirsutum
  unsure (1)..(251): unsure at all Xaa locations
  Clone ID: GOSHI-09MAY01-C34503_1.pep
MDQSISQQSSNALRGFRVQAPLVDSVSCYCKVDSGLKTVVEARKFVPGSKLCIQPDINPNAHKSKSSRKERSRVQPPLLPGLPDDLAIACLIRVPRAEHRKLRLVCKRWYHLLAGNFFFSLRKSLGMAEEWVYVFKPDRDGKISWNAFDPIHQLWQPLPPVPREYSEALGFGCAVLSGCHLYLFGGKDPLRGSMRRVVFYSARTNKWHRAPGMLRKRHFFGSCVINNRLYVAGXECDGIHKTLRFAEIYDP

SEQ ID NO: 60802 - protein, 423 aa, Gossypium hirsutum
  Clone ID: GOSHI-09MAY01-C34523_1.pep
RTRPTRPPTLLSNKKKAIMAIPLSFLLLFPLLAPTFVFSSPVQDPEQVVQQVNESIRNATMARRSLGFLSCGTGNPIDDCWRCDHHWEKNRQKLADCAIGFGKHAIGGRDGFFFVVTDPSDHDPGNPKPATLRYAVIQDEPLWIIFARDMTIKLKEELLMNSFKTIDGRGVSVHISGGPCITVQYVTNIIIHGINIHDCKRGGNAYVRDSPTHYGRTPGPARGGVSIFGGSHVWVDHCSLSNCNDGLIDAIHGSTAITISNNYLTHHNKVMLLGHSDTYKQDKNMQVTIAFNHFGEGLVQRMPRCRHGYFHVVNNDYTHWEMYAIGGSADPTINSQGNRFLAPNDADNKEVTKHEDAPQSQWKHWNWRSKGDLMLNGAFFPASGTGASSSYAKASSLGASPSSLVSSLPAGAGALVCKKGSHC

SEQ ID NO: 60803 - protein, 48 aa, Gossypium hirsutum
  Clone ID: GOSHI-09MAY01-C34483_1.pep
RAKPCILSSIDLYIEITKHKSQKVFPQFVNYLDETEKASLETHVALAR

SEQ ID NO: 60804 - protein, 288 aa, Gossypium hirsutum
  unsure (1)..(288): unsure at all Xaa locations
  Clone ID: GOSHI-09MAY01-C34473_1.pep
MAATNVGRIKLGSQGLEVSAQGLGCMGMSAFYGPPKPEPDMIALIHHAINSGVTFLDTSDVYGPHTNEILLGKALKDGVRNKVELATKFGIDYTDGKREIRGDPVYVRAACEGSLKRLGVDCIDLYYQHRVDTRVPIEVTIGELKKLVEEGKVKYIGLSEASASTIRRAHAVHPITAVQLEWSLWSRDVEADIIPTCRELGIGIVAYSPLGRGFFSSGPKMMETLSEGDFRKYLPRFQPENMEHNKRLYERVNEIAVKKGCTPSQLAXLAWVHHPRDRVCPIPGTTKI

SEQ ID NO: 60805 - protein, 238 aa, Gossypium hirsutum
  Clone ID: GOSHI-09MAY01-C34433_2.pep
FPRPPSVRPRVRVFDKVTSICGVLFPLPKEERRAGIRRELEKIQVQGDDLYLPTAPNKLVRGIQVDSGIPLQSAAKVPIMITFNVVDRDGDQNDIKPQACIFKVGDDCRQGPLALQVIALLRDIFAAVGLNLYLFPYGVLPTGPERGIIEVVPNTRSRSQMGETTDGGLHEIFQHDFGPVGSPGFEAARRNFIISSAGYAVTSLLLQPKDRHNGNLLFDHVRRTVHIDFRFILETSPG

SEQ ID NO: 60806 - protein, 221 aa, Gossypium hirsutum
  unsure (1)..(221): unsure at all Xaa locations
  Clone ID: GOSHI-09MAY01-C34433_1.pep
HILIWHLQGETCDLGKDASGKNSAFLELLPIVRQHIIDGFTPKALDAFRREFEFFDKVTSISGVLFPLPKEERRAGIRRELEKIQVQGDDLYLPTAPNRLVRGIQVDSGIPLQSAAKVPIXMITFNVVDRDGLIQNDIKPQACIFKVGDDCRQDVLALQVIALLRDIFAAVGLNLYLFPYGGLPTGPERGIIEVGPNTRSRTQMGETPDGGSDVPGYCCGL

SEQ ID NO: 60807 - protein, 120 aa, Gossypium hirsutum
  unsure (1)..(120): unsure at all Xaa locations
  Clone ID: GOSHI-09MAY01-C34743_2.pep
DVAKLGRRYGGGSCXKGYTPGMRAYQSARKTETSLSKCALMARMTTKISCDENISSPGSGRVSREDENGQSTGIIKRKNDNSLNWKWIAIAGTVALAFGLRSGVVGKALLVGAGQRIGRR

SEQ ID NO: 60808 - protein, 247 aa, Gossypium hirsutum
  unsure (1)..(247): unsure at all Xaa locations
  Clone ID: GOSHI-09MAY01-C34743_1.pep
ALQVVRDFFWDDEFRPNWDTMLAYFKTLDECPCTGLMIVHWIRKFPFFCSDRDYIIGRKIWEDGKTYYCVTKGVPYPGLPKRDKPRRVELYFSSWIIRPVDPRXGDGQLSACEGALVHYEDMGIPKDVAKLGVRHGMWGAVKKVXTPGMRAYQSARKTETSLSKCALMARMTTKISCDENISSPGSGRVSRDVEICQSTDIIKMVYFFILIWCGILYYYLYEYVYLLYNILLELLFCYLQILSLCIF

SEQ ID NO: 60809 - protein, 165 aa, Gossypium hirsutum
  Clone ID: LIB3585-018-P1-K1-B5.pep
MALDSKLIDDGLAADNTLQAICYKRGSLQLLDQRKLPLETMYLDIHGSTDGWNAIRDMVVRGAPAIAIAAALSLAVEVANLKDFNGGSKDAASFLESKLEYLVSSRPTAVNLSDAAIKLKEIISKAASTVTVPESVFQAYIEAAEIMLDDDVATNKAIGSHGANF

SEQ ID NO: 60810 - protein, 119 aa, Gossypium hirsutum
  Clone ID: LIB3585-030-P1-K1-C10.pep
MALDSKLIDDGLAADNTLQAICYKRGSLQLLDQRKLPLETMYLDIHGSTDGWNAIRDMVVRGAPAIAIAAALSLAVEVANLKDFNGGSKDAASFLESKLEYLVSSRPTAVNLSDAAIKL

SEQ ID NO: 60811 - protein, 95 aa, Gossypium hirsutum
  Clone ID: LIB3145-005-Q1-K1-C1.pep
LHHLFQYDHSFENMYLDIHGSTDGWNAIRDMVVRGAPAIAITAALSLAVEVANLKDFNGGSKDAASFLESKLEYLVSSRPTAVNLSDAAIKLKEI

SEQ ID NO: 60812 - protein, 52 aa, Gossypium hirsutum
  Clone ID: LIB3582-009-P1-K1-A10.pep
MALDSKLIDDVLAVDNTLQAICYKRGSLQLLDQRKLPLETVYLDIHGSADGW

SEQ ID NO: 60813 - protein, 157 aa, Gossypium hirsutum
  Clone ID: GOSHI-09MAY01-C34613_1.pep
NRLHKIVDKLHLLLQNGKKPEDNFVKINFDAAYEKGQNKAAIGVVARDKEGLVLLSFSEVHQRVSSAFGAEAMACRKALQIGVHKQWERVIIEGDSLSIIKKCKAKSPDKSVVSAFIHDIHQLSFYFKECKFEHIPRSTNSLAHILATEANNRNRRD

SEQ ID NO: 60814 - protein, 152 aa, Gossypium hirsutum
  Clone ID: GOSHI-09MAY01-C34623_1.pep
MLGLTPSSVLSFQHSFLNIWLFFCWEKKVGSVMMEGEPALPSYYNVLGVKVDASIQDIKRAYRKLAMQWHPDRWTRTPSLLSEAKHKFQQIQEAYSVLSDQRKRTLYDAGLYDPEDEEDEGFSDFMGGMISLMFQTRKEVIHLAYILKTPFF

SEQ ID NO: 60815 - protein, 104 aa, Gossypium hirsutum
  Clone ID: LIB3148-003-P1-K1-A2.pep
RRHVSCYRPKFSKGLDFGTFSSVTAKSCTALRLQCQLQRMSWFWVLLIFFQKRPSWRIVQSLYILEMQWLWSLKWCHMRWQLKSGFSGVPIMNRISFHLPLILM

SEQ ID NO: 60816 - protein, 63 aa, Gossypium hirsutum
  Clone ID: LIB3135-014-Q1-K1-H1.pep
SGHAFAHASAHAFAHASALSEKTTVPTQTHVMISGASDFLPKEAKLADSSIALTFWKCNGCGA

SEQ ID NO: 60817 - protein, 116 aa, Gossypium hirsutum
  unsure (1)..(116): unsure at all Xaa locations
  Clone ID: GOSHI-09MAY01-C34143_1.pep
NLNPVWNESLMLSIPDSIPPLKVIVYDKDTFSHDDFMGEAEIDIQPLVAAAXAHERSEIHESMQLGIWVASKDNTLXNDRIITVTDGKVKQDISLRLHKVERGVLEIELECVPLTQ

SEQ ID NO: 60818 - protein, 174 aa, Gossypium hirsutum
  Clone ID: GOSHI-09MAY01-C34173_1.pep
EVANQGAKKRIEENTRHMANLRRLIIACNVVYVLVRMLIFHSSFTWKHWVGLLLTSVAYFIPYQQLSQMAKPAYSDDGELLDGGFDMSTGGICGYLHDVIYITSFVQLMSIISDKFWYTYLVIPAFGAYKSFGFIRGFLSLGSEGEVEDEKTRKKREKMEKKASRPKLVKTRNR

SEQ ID NO: 60819 - protein, 93 aa, Gossypium hirsutum
  Clone ID: GOSHI-09MAY01-C34163_1.pep
EPGIAEIGSCSAFKVSCLCPSVNCRRLSSGSISFLLYFWVNPTRMGIRGSAKQRAAPLCTFSEADQSGLEKGGELLTEAKEAVRMKEAGSYRF

SEQ ID NO: 60820 - protein, 89 aa, Gossypium hirsutum
  Clone ID: GOSHI-09MAY01-C34103_1.pep
KMWCGFISLDQFRFKGRVIEGTQTLDLFSMAGGLFRIKSVLGRPGKTDWIERRCLCLFFIDRIPIILSLRRRRQGRGTEHVLSSTSICH

SEQ ID NO: 60821 - protein, 111 aa, Gossypium hirsutum
  Clone ID: GOSHI-09MAY01-C34123_1.pep
LRVRPRVRPRVRPRVRPRVRPRVRPRVRPRVRPRVRKKKRSRRRKKRLKSFAKMVLQRLEMCVELMKLAVEFVVVVAEAVGIVIHQNHSPPVMTASRSFATPVPLVGFLPC

SEQ ID NO: 60822 - protein, 74 aa, Gossypium hirsutum
  Clone ID: GOSHI-09MAY01-C34393_2.pep
CINTILLHNIKLVNLFTTPSKPQKCKHARRGKIIGFFIPYNKKLLSNTSYSLDQKHNFFTGLQKKLQHALVDAM

SEQ ID NO: 60823 - protein, 102 aa, Gossypium hirsutum
  unsure (1)..(102): unsure at all Xaa locations
  Clone ID: GOSHI-09MAY01-C34393_1.pep
DLPVRLEKFASYDEMKAAIKEEFEGKLKGILGXVEEDFVPTAFVGDSRWSIFDPKAGIALHKTFARPVSWYHNEWGSSSXRVVDLIVHMAPTKRMLKFLQAQ

SEQ ID NO: 60824 - protein, 72 aa, Gossypium hirsutum
  Clone ID: LIB3148-015-Q1-K1-B10.pep
CINTILLHNIKLVNLFTTPSKPQKCKHSRRGKIIGFFIPYNKKLLSNTSYSLNQKHNFFTGLQKKTSTCFGG

SEQ ID NO: 60825 - protein, 102 aa, Gossypium hirsutum
  Clone ID: GOSHI-09MAY01-C34313_1.pep
AMAMSLPVITTNWSGPTEYLTEENSYPLPVERKSEVTEGPFKGHLWAQPSVIKLQALMRHVISNVEEARAKGRQARKDMINSFSPEIVAEIVTGHIQNILDK

SEQ ID NO: 60826 - protein, 95 aa, Gossypium hirsutum
  Clone ID: LIB3135-019-Q1-K1-E12.pep
TRPVGDASLKLLTYPLSTGGQWSGACFSEVDCYSLSGERKSVVTDAPFLGHLKAQPALIKLQALMRHVISNVEEARAKGRQARKDMINSFSSEIV

SEQ ID NO: 60827 - protein, 40 aa, Gossypium hirsutum
  Clone ID: GOSHI-09MAY01-C34243_1.pep
EMPFWHCCCCHRHCCQCRWWRTLKPFLQPIIVHLLGDYSL

SEQ ID NO: 60828 - protein, 82 aa, Gossypium hirsutum
  Clone ID: GOSHI-09MAY01-C34223_1.pep
QPQPKSQVTVRCIQLPSFTLPISIHCIFILEIQLLNMAEENLISTNKSRKVVFCHQIISEKAVPIPRYYLPAMKNVVDLASV

SEQ ID NO: 60829 - protein, 104 aa, Gossypium hirsutum
  Clone ID: LIB3146-053-Q1-K1-F4.pep
QPQPKSQVPIRCIRLPSFTLPISIHCIFILEIQLLNMAEENLISTNELRKVVFCHQNISLLVFPELCKYRIYVLKGCACLVSHLAPVIQSFLPKIRRRVVARDS

SEQ ID NO: 60830 - protein, 101 aa, Gossypium hirsutum
  Clone ID: GOSHI-09MAY01-C35943_3.pep
MSRSGQPPELKKYMDKQLQIKLNANRMVVGTLRGFDQFMNLVVDNTVEVNGNEKTDIGMVVIRGNSVVTVEALEPVGRMQRFGFFYWKFRNHLMVSGGWIT

SEQ ID NO: 60831 - protein, 80 aa, Gossypium hirsutum
  Clone ID: GOSHI-09MAY01-C35943_2.pep
MSRSGQPPDLKKYMDKKLQIKLNANRMVVGTLRGFDQFMNLVVDNTVEVNGNEKTDIGMVVIRGNSVVTVEALEPVGRMQ

SEQ ID NO: 60832 - protein, 68 aa, Gossypium hirsutum
  Clone ID: GOSHI-09MAY01-C35943_1.pep
MSRSGQPPDLKKYMDKQLQIKLNANRMVVGTLRGFDQFMNLVVDNTVEVIRGNSVVTVEALEPVGRMQ

SEQ ID NO: 60833 - protein, 380 aa, Gossypium hirsutum
  unsure (1)..(380): unsure at all Xaa locations
  Clone ID: GOSHI-09MAY01-C35973_1.pep
QLASAMFKPIKSHELWIRPPFGGRGRKLTGSLEAHTNGFRLSTLRPDERVDVMFGNIKHAFFQPAEREMITLVHFHLHNHIMVGNKKTKDVQFYIEVMDIVQTLGGGKRSAYDPDEIEEEQRERDRKNKINTDFQNFVNRVNDLWGQPQFKAFDLEFDQPMRELGFHGVPHKASAFIVPTSNCLVELIETPFVVITLREIEXVNLERVGLGQKNFDMTIVFKDFKRDVLRIDSIPSTSLDGIKEWLNTTDLKYYESRLNLNWRPILKTITDDPEKFIEDGGWEFLNMEVSDSESENSEESDQGYVPSDVQSESGSEDEDDDSESLVESEDDDEEDSDEDSEEDEGKTWEELEREASYADREKGDDSDSEEERKRRKMKAF

SEQ ID NO: 60834 - protein, 190 aa, Gossypium hirsutum
  Clone ID: GOSHI-09MAY01-C35963_1.pep
LLVFTSVASKEAEEGIAYQGKYILENEAGDPGVKPGSCPNRKESRPLNSKSASLFLMNYFPSYPVETEACKEHSARLADMIGTCFKAAGSMMPNFLAVNFYMRSDGGGVFYDLDSMNGQRLCGCNTIAACQAGAPFGSCKNITMPSSSPMTNTAGSFSGSVQFSKSASTIYYPNQFAIGFFSIPWMLFLL

SEQ ID NO: 60835 - protein, 46 aa, Gossypium hirsutum
  Clone ID: GOSHI-09MAY01-C35513_1.pep
PRVRFEEVELPRLKEEKPGRAHTQYKDLIWKLWKKSPDNPLNQMSE

SEQ ID NO: 60836 - protein, 339 aa, Gossypium hirsutum
  Clone ID: GOSHI-09MAY01-C35423_1.pep
DEVYGKAESEGEAEGIADAHVGGDGTSLSFSERFLFTVKPLSKHVPPALPEDEKYNSWVFYANDDFYVLFRLHQILYERILSAKTNLAGGEIKWKHLKDTGASDLYARFMSALYSLLNGSTDNTKFEDECRAIIGNQSYVLFTLDKLIYKLVKQLQAVAADEMDNKLLQLYEYEKSRKHWKTMDSVYYENARVLLHEENVYRLKCSSSPPRLSIQLMDNVIEKPEAFAVSMEPNFSAFLHSDFLSVFPGKKEPHGITLKRNKTNYATLDEFAATCMAMEGVELVNGLENKIACNSYKISYVLDTEDFFFRRRRKSPQRRSSYIYQARVQRFQRFLSASQ

SEQ ID NO: 60837 - protein, 88 aa, Gossypium hirsutum
  unsure (1)..(88): unsure at all Xaa locations
  Clone ID: LIB3829-021-Q6-N6-G4.pep
KKDPHGIXLKRTKKXXANLDEFDATCMAMEGVELVNGLENKIACNSYKISYVLDTEDFFFRRRNSSRRRSRNNQARIQRFLRFLSTSQ

SEQ ID NO: 60838 - protein, 70 aa, Gossypium hirsutum
  Clone ID: LIB3585-003-P1-K1-E5.pep
NLLATCMAMEGVELVNGLENKIACNSYKISYVLDTEDFFFRRRRKSPQCRSSYNNQAGVQRFHKFLSASQ

SEQ ID NO: 60839 - protein, 110 aa, Gossypium hirsutum
  Clone ID: LIB3145-014-Q1-K1-D6.pep
AKTNSTGSEIKWKIPTEATPTELYARFMSELYSLLDGSADNAKFEDECRAIIGNQSYVLFTLDKLLYKLVKQLQAVSADDMDTKLLQLFEYEKSRKHGKTMDSVYYENAR

SEQ ID NO: 60840 - protein, 95 aa, Gossypium hirsutum
  unsure (1)..(95): unsure at all Xaa locations
  Clone ID: GOSHI-09MAY01-C35763_1.pep
DWHPFKRIKLEXEKKVXEVIDDEDEKLRDLTDHMGIEAYKSVTSAIKEINEYNPSGRYIISELWNYGEGRKATLKEGVTFLLKLWDNAKRKRGMT

SEQ ID NO: 60841 - protein, 236 aa, Gossypium hirsutum
  Clone ID: GOSHI-09MAY01-C35693_1.pep
MEVGECIATEAPKAPVTKERKIGTDLEKYIAKPYVARALQAPDVGNPDGTKGYPDNGMTVLQQHVAFFDQNNDGVVYPWETFKGIRDLGFDPFSSFVITFVINAAFSYRTLPGWVPNPLLPIYIERIHRDKHGSDSATYDTEGRFMPVNLENMFTKYALTKPDNLSLKELWQMTEGNRAAFDYLGWLASKLEWLLLYYVAKDKQGFLSKEAVRGCFDGSLFKTISKMYKDSDRKSK

SEQ ID NO: 60842 - protein, 84 aa, Gossypium hirsutum
  Clone ID: LIB3145-048-Q1-K1-D4.pep
CISKGWVPNPLLPIYIERIHRDKHGSDSATYDTEGRFMPVNLENMFTKYALTKPDNLSLKELWQMTEGNRAAFDYLGWLASKLE

SEQ ID NO: 60843 - protein, 69 aa, Gossypium hirsutum
  Clone ID: GOSHI-09MAY01-C35653_1.pep
EQHIISGSNILLVQTLHFADQAKTEAAITELLVGLNYVYRIGGAHNDKSLPESAGNGCAQYLLKRDDKR

SEQ ID NO: 60844 - protein, 77 aa, Gossypium hirsutum
  Clone ID: GOSHI-09MAY01-C35663_1.pep
IPKSFSRTIAFSHDHSRHARTPCSTFASTSSRPESLSEGLRWARTEGRGASISARKQGESERLESMRVFFKQNGRVG

SEQ ID NO: 60845 - protein, 46 aa, Gossypium hirsutum
  Clone ID: LIB3145-017-Q1-K1-D2.pep
LFRLEHEYWAYVNGPKLFGLFYAIGLVKKIRIAVFCFIFCICMSSG

SEQ ID NO: 60846 - protein, 185 aa, Gossypium hirsutum
  Clone ID: GOSHI-09MAY01-C35633_1.pep
FYRRSYKFIRQRSEQANMKGCKRFVLIAVGGLGSWDEPLNSGEIYDSLSNKWSEIQKLPIDFGVVCAGVVCNGMFYVCSENDKLAGYDIERGFWIGIQTSAFPPHVHEYYPKLVSCNGSLFLLSVSWCEGDGHIGRRNKAVRKLWELDLMYLTWTEVSVHPDAPMDWNPVFVADRNLIFGVEMLK

SEQ ID NO: 60847 - protein, 143 aa, Gossypium hirsutum
  unsure (1)..(143): unsure at all Xaa locations
  Clone ID: GOSHI-09MAY01-C35193_1.pep
DMKAMDPVELLGILPTCNLGKFCSKKYLAIVHPKMEECLFGDLEHRNQVMAGIHTRSQIYGEFLGLPKAIGLLHLLAFXLDPSPSQFEASRGAEFHPPYMESVGKISGGRVPTGQIVGFPVSPGFKLGNGSVVKARVYLVART

SEQ ID NO: 60848 - protein, 136 aa, Gossypium hirsutum
  Clone ID: GOSHI-09MAY01-C35163_1.pep
MNGENQLNLLDANEGQKFEILELESQIEKNNLILKSLQDLDSTFRRLDALEQIEDALTGLKVIGFDGNCIRLSLQTYIPKVEGVLCQNVSEDISEPSEMNHELLVEIVDGIMEVKNVEMFPNDVYIGDIVDAAKSF

SEQ ID NO: 60849 - protein, 55 aa, Gossypium hirsutum
  Clone ID: GOSHI-09MAY01-C35103_1.pep
FKPWENFKTAKMTELLQAVQENMRENQASRIEQPAISSEGTMLRDKATHDSNKQS

SEQ ID NO: 60850 - protein, 71 aa, Gossypium hirsutum
  Clone ID: uC-gsronu33B089f06b1.pep
RSVCENRKRTSSLLRNLLDVIEEVQIARLEIRGLILTSFRSPSDHPSRGTTRGNVFNHKFTARESRKFKGA

SEQ ID NO: 60851 - protein, 99 aa, Gossypium hirsutum
  Clone ID: LIB3148-032-Q1-K1-E5.pep
RGDNSVPDGERKLVRIRPLISNRAICTSSITSNRFRKSEYSFVLVPSDSHKQIFSLLLPFHTESSLVPPFSSSFFLFEYNLFLLNFFLRFLRTRGRTRG

SEQ ID NO: 60852 - protein, 107 aa, Gossypium hirsutum
  Clone ID: LIB3582-008-P1-K1-C3.pep
DKVMLPLCLSLNSFTSRCLLHLWKLNLFHNISLPLRTDGERKLVRIRPLISNRAICTSSITSNRFRKSELPTLTNRSLAYCFHFIQNRLWCLHFPLLFFFLNIISSC

SEQ ID NO: 60853 - protein, 100 aa, Gossypium hirsutum
  Clone ID: LIB3145-009-Q1-K1-D9.pep
DGGIWIPTHFFLCFLLFLFHVPTSVKWIVSYLALQNQINDAPHSNIVPSFPFPKFLLWDKVVLPLCLSLNSFTRRFLLHLWKPSLGWAPLNFLLSLPVNL

SEQ ID NO: 60854 - protein, 126 aa, Gossypium hirsutum
  Clone ID: LIB3145-012-Q1-K1-H9.pep
MSQDYEMMTSQMNEHEDHIALISQIYPGFYTQIATHQGEPKPRRRRKKNKGGENSQWAVAKKRKLNQEQVTLLELNFGNEHKLESERKDRIASELGLDPRQVAVWFQNRRARWKNKKLEEEYSKLK

SEQ ID NO: 60855 - protein, 101 aa, Gossypium hirsutum
  unsure (1)..(101): unsure at all Xaa locations
  Clone ID: LIB3145-012-Q1-K1-H11.pep
MKKRGCQDYELMTSQMNEHDDHIALICQIYPGFYTQIATHHGEPKPPQLEIMNMVGENRQCSVAQKWTHNLEQVTLLELNFGHXHKLQSERKDRNALELGT

SEQ ID NO: 60856 - protein, 172 aa, Gossypium hirsutum
  unsure (1)..(172): unsure at all Xaa locations
  Clone ID: LIB3543-030-Q1-K6-D12.pep
RFRVDHLPHLPHLRGGGGRNCEEAALGFRLSEIVLCLISFSVMAADKTSGWSGDSFDRYKEYRDCRSVNVIGFVYAGFQAYALAYHLIXRKHVIRHYLRQHFDFFMDQILAYLLLSASSAAATRIDDWQSNWGKDEFTEMTSASVAMAFLAFTAFALSSLLSGYELCTHESA

SEQ ID NO: 60857 - protein, 119 aa, Gossypium hirsutum
  Clone ID: LIB3145-013-Q1-K1-C2.pep
PTRPNRSVREEGQGMTTKTKVSGGGGRGGGARAVAAVLRRSKVKETVKMAALGFRLSEIVLCLISFSVMAADKTSGWSGDSFDRYKEYRYCLSVNVIGFVYAGFQAYALAYHLIMRKHV

SEQ ID NO: 60858 - protein, 121 aa, Gossypium hirsutum
  Clone ID: GOSHI-09MAY01-C35283_1.pep
TTSTQSSYASRKGQHTAPYSYLQKRTNESNKNTKKEEMNFILFFLHWAIKPINFDCKLVFFFWGTNASNTNAIQTDTICILNTKKRPPIRRRFSDLDLRAFLFFYCSSFCVVFFFIRKQIK

SEQ ID NO: 60859 - protein, 144 aa, Gossypium hirsutum
  Clone ID: GOSHI-09MAY01-C35213_1.pep
PTRPGDSSVVVNDENRDAARWAKAKAMDAISEGKLEEAIENLTQAILLNPTSAIMYGTRASVYIKMKKPNAAIRDANAALEINPDSAKGYKSRGIARAMLGQWEDAAKDLRLASKLDHDEEINSVLKKVEPNAHRIEEHRRSMI

SEQ ID NO: 60860 - protein, 108 aa, Gossypium hirsutum
  Clone ID: GOSHI-09MAY01-C35233_1.pep
PTRPPTRPPRCKQKHPMLLQEVRQVLLIKGCFYLICFIRSCHTYLSMRVHNEVLPKKQLLLPRLTSLVPGIHADQMTLNKIHRTRNVRRRSNLSRGRFTEASRGYENS

SEQ ID NO: 60861 - protein, 94 aa, Gossypium hirsutum
  unsure (1)..(94): unsure at all Xaa locations
  Clone ID: GOSHI-09MAY01-C36913_1.pep
DFHAKLSTLQAFSICVAVLRGTETSAAATGETEGKHSSQYNSLKMLIEEEVKSLIKAATAVETKTXKTKRVCWTGEAIPPSYVINPPFSPIARV

SEQ ID NO: 60862 - protein, 216 aa, Gossypium hirsutum
  Clone ID: GOSHI-09MAY01-C36903_1.pep
GFGGHSGRFPLPSSSPSASSQETVGPSESNSQGNNQPCPRLALILERHDDDVLGMAHSLRALAADIEGRHRLISEIRQVLNAVHRGENLQIEDYMPFDPFIYHGMAAMHDRHRDMRLDVDNMSYEELLALQERIGDVSTGLSEEMILKLMEQRKHSSTSTESQQDLEPCCICQEEYANGDDTGILDCGHDFHSNCIKQWLMLKNLCPICKTTGLLK

SEQ ID NO: 60863 - protein, 100 aa, Gossypium hirsutum
  unsure (1)..(100): unsure at all Xaa locations
  Clone ID: uC-gsronu33B078a06b1.pep
AAPYPPRPTPPPTLLPRIGDXSTGRGDXKIFFLVEQPKHSSTSTESQQDLEPCCICQEEYANGDDTGILDCGHDFHSNCIKQWLMLKNLCPICKTTGLLK

SEQ ID NO: 60864 - protein, 213 aa, Gossypium hirsutum
  Clone ID: GOSHI-09MAY01-C36843_1.pep
MHLPEAFIDNNYIVDNLWHHPNRLSEEMVLRMRDIFIFLADSSKLSSSSSSSSVSPASPHCPLANFLASSSDSPVVTSFVSSPSGGGAYDPYGISDKVDWTFSIGTYSKAIEVSWLSVGKKELEYAAMALKRFRLLVEQLLRVDPSQMSSNERLAFWVNLYNALIMHAYLAYGVPRNDIKLFSFMQNAAYTIGRLSVSAADIECTRLKMNPAT

SEQ ID NO: 60865 - protein, 66 aa, Gossypium hirsutum
  Clone ID: GOSHI-09MAY01-C36473_1.pep
SSGSNSIDNMDGVAYNDGQMKDSPKIFIYPLPILKIGWLNLKIPSLNKETIQLHALELDGTNEIER

SEQ ID NO: 60866 - protein, 50 aa, Gossypium hirsutum
  Clone ID: LIB3145-028-Q1-K1-C9.pep
LKPPPLLFFLIKFFNFEFLLFFFFFFFFFFFFFFFFFFFFFFFFFFFFFL

SEQ ID NO: 60867 - protein, 224 aa, Gossypium hirsutum
  Clone ID: GOSHI-09MAY01-C36783_2.pep
RTRGLRIRAGQSQALVGASGSGKSSVIALIERFYDPTAGKVMIDGKDIRRLNLKSLRLKIGLVQQEPALFAASIFDNIAYGKEGATEAEVIEAARAANVHGFVSALPDGYKTPVGERGVQLSGGQKQRIAIARAVLKDPTILLLDEATSALDAESECVLQEALERLMRGRTTVLVAHRLSTIRNVDSIGVVQDSRIVEQGSHSELIARPEGAYSRLLQLQHHHI

SEQ ID NO: 60868 - protein, 221 aa, Gossypium hirsutum
  unsure (1)..(221): unsure at all Xaa locations
  Clone ID: GOSHI-09MAY01-C36783_1.pep
PASESCWSKPTLVGASGSGKSSVIALIDXLLDPTAGXVMIDGKDXRRLNSQPPPRVGGGGQQEPALFAASIFDNIAYGKXGATEAEVIEAARAANVHGFVSALPDGYGAPVGERGVQLSGGQKQRIAIARAVLKDPTILLLDEATSALDAESECVLQEALERLMRGRTTVLVAHRLSTIRNVDSIGVVQDGRIVEQGSHSELISRPEGAYSRLLQLQHHHI

SEQ ID NO: 60869 - protein, 110 aa, Gossypium hirsutum
  unsure (1)..(110): unsure at all Xaa locations
  Clone ID: LIB3145-032-Q1-K1-D10.pep
IRGEIELRHVDXAYPSRPDGIVFKDLNLQIRAGQSQPLVGPRGFAKSSVLAWFDRFFDLPVGKVLTXGKKIPRMDLKSLMLKIGLVQQEPALFAASIFDNIAYGKRGATE

SEQ ID NO: 60870 - protein, 52 aa, Gossypium hirsutum
  Clone ID: LIB3148-038-Q1-K1-F4.pep
QYLQLSSFKKGKYEKHKRLKGPKHNYTTQQAHPTRPPTRPPTRPPTRPPTRP

SEQ ID NO: 60871 - protein, 159 aa, Gossypium hirsutum
  Clone ID: GOSHI-09MAY01-C36773_2.pep
TESGSLDTVGTVGILELYPGAINSIPSKAHLEIDVRDIEESFRNAVINKIHKAAKSIAKKRKVTLSEFKIINQDPPAHSNGSVIKAVVDAADELNLTYKYMISRAYHDSLFMARIAPMGMIFIPCYKGYSHKPEEYASPQDLENGVKVLALTLAKLSLR

SEQ ID NO: 60872 - protein, 88 aa, Gossypium hirsutum
  Clone ID: GOSHI-09MAY01-C36773_1.pep
SDLVVPNTGMFRSFFYIWKVFGGSIPVLIFIYALDIGVEDGYFRKNEELEQHGIMLASILPREHKFTMRIFSCLTCLIQVKKSLLQQR

SEQ ID NO: 60873 - protein, 60 aa, Gossypium hirsutum
  Clone ID: LIB3145-032-Q1-K1-B6.pep
ILQLDADIQISYSSRIAPMGMIFIPCYKGYSHKPEEYASPQDLENGVKVLALTLAKLSLR

SEQ ID NO: 60874 - protein, 250 aa, Gossypium hirsutum
  unsure (1)..(250): unsure at all Xaa locations
  Clone ID: GOSHI-09MAY01-C36683_1.pep
HASGVVSVVWNWFGKEKRGLIMGVWTSHTSVGNIIGSVVASGVLEFGWGWSFLVPGILIIVVGILVWGFLVVSPDDLGFEMMASGKEIEMCVGEENVANLEKAESEEAGLLENKDSDSLAAIGFLEAWRLPGVAPFSFCLFFSKLVAYTFLYWLPFYIRHTAIAGVHLSHKTAGILSTIFDIGGVLGGVLAGFISDVIDARAVTSVTFLLLSIPALILYRXYGSVSMVTNIGLMFISGLLVNGPYSLITT

SEQ ID NO: 60875 - protein, 262 aa, Gossypium hirsutum
  Clone ID: GOSHI-09MAY01-C36643_1.pep
QKFDYVEGFVIVAEGLINNWGSSLFSPQNPVKISTLFPTSGVLYCLEIAKNYHESTAQTIDQEVEFLLKKLNFISTSVFTTDLLYVDFLDRVHMAEMKLRSKGLWEVPHPWLNLFIPSSKIAEFDKGVFKGILGNKTSGPILIYPMNKNKWDHRSSVVTPDEGLFYLVALLRSALDSGEETQSLEYLNNQNRQILRYCDEAGIKVKRYLPHYTTQQEWMDHFGNKWDRFYEMKMEFDPRHILASGQRIFTPTFPSLSNMPSW

SEQ ID NO: 60876 - protein, 163 aa, Gossypium hirsutum
  unsure (1)..(163): unsure at all Xaa locations
  Clone ID: GOSHI-09MAY01-C36663_1.pep
MAASSRRSSGPVLRSHSPSSRFTSFYASQSHSPSSSSSAFAYSSSGFSSRSTFFNQPRSTSPPRVNLHRNSSSASSVRFSLDNRPISPNRSITTVRRTTEALKNLQSKQTKRTCMCSPTTHRGSXFRCSLHKSFNTSHAGTGYAPSYRLNARRSAMTNSLVRI

SEQ ID NO: 60877 - protein, 178 aa, Gossypium hirsutum
  Clone ID: GOSHI-09MAY01-C36143_1.pep
YLDEIASKLSRNCSGSETIRMARSLITARHAGERLLRCWGGGTGWAVEDAKDKIMKLLEEYESGGVVAEACQCIRDLGMPFFNHEVVKNALVTAMEKKNDRMLNLLQVCFDEGLITINQMSKGFTRVKDGLDDLALDIPNAKDKFSFYMEYAQKKGWLITSFGSSAMEAPPIATAPEI

SEQ ID NO: 60878 - protein, 93 aa, Gossypium hirsutum
  Clone ID: GOSHI-09MAY01-C36173_1.pep
LTQHNTTFYKHKFYSIFGPKICLVVNHHVRPLIFLNLQSSSSSSFSLLWSALQILYLLVLRAFSFSFSSLQLQHSLHPWSDVSSFPSPRTRGS

SEQ ID NO: 60879 - protein, 63 aa, Gossypium hirsutum
  Clone ID: LIB3135-031-Q1-K1-D5.pep
LTQQNTTFYKHKLNSIFLPKICLAVDHHVRPLIFLYLPLIFFFFHFFFMFIFSLAPHASAHAS

SEQ ID NO: 60880 - protein, 286 aa, Gossypium hirsutum
  unsure (1)..(286): unsure at all Xaa locations
  Clone ID: GOSHI-09MAY01-C36093_2.pep
FHASDRSDKGLNLSGSWVPFDADPYLGINEDFQVFVRPQADVKCYGLVSDNQLASSLLSELRDKIDESNNILMDILVRNLSTITELEIDDLTKQLTEPFTPDDAFMFGPRSILDLDHNQMTPYSKESLSFDGDVQTSQLLEDDARSEASVLDLSHFIPKAPAXPSISNVINIGQLLQSALEVAGQVAATSVSTSPLPYDTMASQCEAFGTGTRKKLSNWLAHENHQNEAADKTILTTAAADRHAMMLKKSSNGNAFNGAVSQLDPCLSMRLPPASPFDNFLKAARH

SEQ ID NO: 60881 - protein, 333 aa, Gossypium hirsutum
  unsure (1)..(333): unsure at all Xaa locations
  Clone ID: GOSHI-09MAY01-C36093_1.pep
HQGGGGGHKRFFQLPLSLKXISLDPSNGTLTPAFQRSILMLSMSMLMFAAKGGGXVFFSSHQSIVPFDADPYLGINEDFQVFVRPQADVKCYGLVSDNQLASSLLSELRDKIDESNNILMDILVRNLSTITELEIDDLTKQLTEPFTPDDAFMFGPRSILDLDHNQMTPYSKESLSFXEDVQTSQLXEXDARSEASVLDLSHFIPKAPASPSISNVINIGQLLQSALEVAGQVAATSVSTSPLPYDTMASQCEAFGTGTRKKLSNWLAHENHQNEAADKTILTTAAADRHTMMLKKSSNGNAFNGAVSQLDPCLSMRLPPASPFDNFLKAARH

SEQ ID NO: 60882 - protein, 135 aa, Gossypium hirsutum
  unsure (1)..(135): unsure at all Xaa locations
  Clone ID: LIB3585-006-P1-K1-H5.pep
ATITELPIDDLMKHFSDPFTPDDAFMCGPRSILDWXPRSNDSLLXESRPFDEDVHTSXLLEDDARSEASVLDLSHFIPKAPACPSISNVINIGQLLQSSLEVAGQVAATSISTLPFPLESIASQCEAFRTGSREK

SEQ ID NO: 60883 - protein, 108 aa, Gossypium hirsutum
  Clone ID: GOSHI-09MAY01-C36003_1.pep
MKGGQTKSDSMQAGNKLKGNGAGAGKRAKKAAMDPNKPKRPASAFFAFMEEFRKQYKEANPDNRSVSAVGKAGGEKWKSMTDAEKAPFVQKAEKRKSEYNKKMQAYSL

SEQ ID NO: 60884 - protein, 171 aa, Gossypium hirsutum
  unsure (1)..(171): unsure at all Xaa locations
  Clone ID: GOSHI-09MAY01-C36023_1.pep
MPRTREEIEEQVDLDGDNDPEETIEEEVEYEEIEEEEEVEVEEEVEEEVEVEEEEEEDEDEDAELVDFHKGSDANEGMDDFETQEEKKKKHAELLALPPHGSEXVYLGGIPHDASDEDLRRSCESIGEVIEVRIMKEKDSGVAKGYAFVTFRSKKLAXQAIENLNGSEFKA

SEQ ID NO: 60885 - protein, 75 aa, Gossypium hirsutum
  Clone ID: GOSHI-09MAY01-C36383_1.pep
ATKGKQVHQNPKYGDRRGSVIQLSYTSMYRSNQRIASYNNTHNRTKNKTIVCQHVPIKKNLVKIVSAPGNRVMAG

SEQ ID NO: 60886 - protein, 52 aa, Gossypium hirsutum
  Clone ID: LIB3145-026-Q1-K1-C6.pep
HASGESYGTYGAPQIGVSNSAYGAYGGYSSGRSGPSGLSSHNSVSRRKNYGY

SEQ ID NO: 60887 - protein, 221 aa, Gossypium hirsutum
  unsure (1)..(221): unsure at all Xaa locations
  Clone ID: GOSHI-09MAY01-C36323_1.pep
MGCLQCKAKRLCPKRENPVKLASQTAFSVSEVEALGELFKIISSSLIDDGLISKEEFRLALVHNNKKKNIFTDRIFDLFDANKKGVIDFADFVRALSVFHPNTSXEDKINFSFRLYDMDGTGFIERQEVKEMLIALLSECEMKFSEEIIEALLDKTFMDADTNQDGKIDMHEWESFVYRNPSLLRVMTLPYLRDITTTFPSFVFNTEVDEVATLSENTRSG

SEQ ID NO: 60888 - protein, 145 aa, Gossypium hirsutum
  Clone ID: GOSHI-09MAY01-C36233_1.pep
MGSAPAQIPTSFGHELRACLRCRLVKTYDQFRVPGCENCPFFKMDEANERVVDWATPNFNGVIAVMDPSRSWAARWLRIGRFVPGCYTLAVSEALPEVLQNLCDEVHVQFVPPKRVCDMSPGNIVCYHRKTELLFTSCDRFLMLL

SEQ ID NO: 60889 - protein, 84 aa, Gossypium hirsutum
  Clone ID: GOSHI-09MAY01-C37883_1.pep
HYMDSKVPSEKFTQELARELLIAISYSVPDTDPNSDHALKIVDGANGAVAAIDKAEKYRSELISISDTSPDAQVPPVVLGNHAG

SEQ ID NO: 60890 - protein, 98 aa, Gossypium hirsutum
  Clone ID: GOSHI-09MAY01-C37813_1.pep
KVESRYRQVSVGGCKGLVKWEILIQKRDWLAEEVYKEIFGWKSLDDTMVDDLVDKDMSTKYGRWLDFDMEAFEEGVEIEKIVLTSLVDELVSDLLLLL

SEQ ID NO: 60891 - protein, 108 aa, Gossypium hirsutum
  Clone ID: GOSHI-09MAY01-C37833_1.pep
MASSFRAFLNSPVGPKTTHFWGPVANWGFVLAGLVDMNKPPEMISGNMTSAMCVYSALFMRFAWMVQPRNYLLLACHASNETVQLYQLSRWARAQGYLSEKKEEASSQ

SEQ ID NO: 60892 - protein, 75 aa, Gossypium hirsutum
  Clone ID: LIB3145-047-Q1-K1-A6.pep
ERRPIMIPLNSNRLTMCLSFGQMKVELNQFLYKVKLRIDSYRDHKKIAESQNGKKSRKKGYFTEMRLPLSSQTNT

SEQ ID NO: 60893 - protein, 134 aa, Gossypium hirsutum
  Clone ID: GOSHI-09MAY01-C37553_1.pep
MGTMAVPPWLESLLSTAFFTVCTTHGDAARGECNMYCLDCKGDAFCFYCRSSKHKVRLVVQIRRSSYHDVVRVTEIQKVLDISGGQTYVINSARVLFLNERPQPKSGKGVAHICEICGRSLLDPFRFCSLGCKE

SEQ ID NO: 60894 - protein, 225 aa, Gossypium hirsutum
  Clone ID: GOSHI-09MAY01-C37533_1.pep
HASGHSKAANVHFDGLCSIKSKVYLSPKLWYLRVSVIEAQDVLGEKGSTLLRYPELSAKVQVGNQVSRTRISGVSPNRSLSNPFWNEDFMFVVAEPFEDYLLVSVEDRVGPGRDEVVGRVLLPVMAVERRTDDKQVVSRWFNLDNHFGNPAETKLVTGFGSRIHLRVSLDGGYHVLDEATMYSSDVRPTAKQLWKAHIGVLEMGILGATGLMPVKVRKAKVAPLM

SEQ ID NO: 60895 - protein, 386 aa, Gossypium hirsutum
  Clone ID: GOSHI-09MAY01-C37403_1.pep
QIQGSFANLSSLLGCNFSYNDLTGPIPSLPRLDNMAVSSFIENNGLCGGPLGGCNPTPSSLSLQPNAKDKGTGLGKVVAIVAAAIGGVSLVLIVVILYFMRRPVEIVAPLQEKPSTARVSDIYFSPKEGFTFQDLLEATDNFDESFVVGRGACGTVYKAVLPSGHVIAVKKLASNREGNNNVDNSFRAEILTLGNIRHRNIVKLYGFCYHQGSNLLLYEYMSRGSLGELLHGASCNLDWRTRFLIALGAAQGLAYLHHYCKPRIFHRDIKSNNILLDEKFEAHVGDFGLAKVIDMPQSKSMSAIAGSYGYIAPEYAYTMKVTEKCDIYSYGVVLLELLTGKTPVQPLDQGGDLVTWVRNYIRDQSLSPGILDTRLNQQDETTISHM

SEQ ID NO: 60896 - protein, 119 aa, Gossypium hirsutum
  Clone ID: uC-gsflnu33B037h06b1.pep
MEEQLEFRHWDELIPDALGLILSYLSLQEVLTVIPSVCKSWRKAVTGPYCWQEVDIEEWGSRCQPHHLDRMLRMLITRSSGSLRMLCVTGLHNDSICSFITENAGFLQTLRVRRSEMSD

SEQ ID NO: 60897 - protein, 65 aa, Gossypium hirsutum
  Clone ID: LIB3145-042-Q1-K1-B2.pep
KSWRKAVTGPYCWQEVDIEEWSSRCQPHHLDRMLRMLITRSSGSLRKLCVSGLHNDSIFSFITEK

SEQ ID NO: 60898 - protein, 193 aa, Gossypium hirsutum
  Clone ID: GOSHI-09MAY01-C37423_2.pep
MEMEAMVVVETIMAMELKRWRQNGGGGGHEMMNKIKSGGFQDIDVINHGKGGGGGGGAGGGGKNMGQMGQMGGQMGHMGPMGGQMGYNMGQMGNHPMNQMSNFAAVQGLPAAMNNGGGYYQGMGPGNPYNQPQYMAAMMMNQQRANGGMYPPMMYAHQPYPQPNYGPPPMHPPPSESYAHYFSDENANSCSIM

SEQ ID NO: 60899 - protein, 221 aa, Gossypium hirsutum
  unsure (1)..(221): unsure at all Xaa locations
  Clone ID: AI727372.1.pep
NARTRAGSETRRNKERKEQQRPRTGRNKESGRRGKEGEKKGEDRKARGGQRRERGPDAEEEGEREKREEKHERRERGAGHREEEGGGEGHRKARGRRPRERQEEKKGTXRRGRGGPPARGGGGGGGGGPPPPLPLPLLITSMSXNPPLLILFIISWPPPPPFLPPPFLAPWPLLFPPPPLPPFPLWEPLFLPPLPSHSFLPLLEKSFSPLSFLKNPRAGTR

SEQ ID NO: 60900 - protein, 47 aa, Gossypium hirsutum
  Clone ID: LIB3145-042-Q1-K1-A2.pep
ILGWFFYTCFARFKKTFAYVFLANGKCLVFPIVIPQTVFGSLCRREV

SEQ ID NO: 60901 - protein, 110 aa, Gossypium hirsutum
  Clone ID: LIB3148-051-Q1-K1-D3.pep
GEKNKGGKGNNGEGDKKSGKKGGGGGGLLGFFKKDKGEKDFSSKGKNEWDGSGGKNKGSHNGNGGNGGGGNNNGHGAKKGGAGFGGGAGAGGGVGGGGGLGRGGGGRFRS

SEQ ID NO: 60902 - protein, 142 aa, Gossypium hirsutum
  Clone ID: GOSHI-09MAY01-C37763_1.pep
MASLQRSASSSDSDPQYANIDERKRKRMLSNRESARRSRMRKQKRLQDLVQEVNALQKDNSQISEKIGVATQYYIEMQSANNVLRAQAMELTERLRSLNSVLQVVEEADGYAIDIPEIPEPWQLPCSIQPIMALVDMFEYDG

SEQ ID NO: 60903 - protein, 236 aa, Gossypium hirsutum
  unsure (1)..(236): unsure at all Xaa locations
  Clone ID: GOSHI-09MAY01-C37713_3.pep
HASGIINGFALPLKEEHKLFLVRALIPLHKPKCIPMYHQQLSYCITQFVEKDCKLADTVIRGLLKYWPITNSSKEVMFLGELEEVLEATQPAEFQRCMVPLCRQIGRCLSSSHFQVAERALFLWNNDHIESLIRQNRKVILPIIFPSLGEGTARSHWNPAVQSLXTLNVRKIFSDTDPELFEECLHKFEEDQAQENEVKSKRETTWKRLEEIAAMKAASNEPVLVSPKATTRNPSC

SEQ ID NO: 60904 - protein, 241 aa, Gossypium hirsutum
  unsure (1)..(241): unsure at all Xaa locations
  Clone ID: GOSHI-09MAY01-C37713_2.pep
RVRADYWGGGGGVIKGFALPLKEEHKLFLVRALIPLHKPKCIPMYHQQLSYCITQFVEGGGGVFFLLXGLLKYWPITNSSNPRVRPRVREEVLEATQLAEFQRCMVPLFHQIGRCLSRSHFQVAERALFLWNNDHIETLIKQNRNVILPIIFPSLEKNARSHWNPAVQSLTLNVRKIFSDTDPELFEECLHKFEEDQAQENEVKSKREATWKRLEEIAAMKAASNEPVLVSPKATTRNPSC

SEQ ID NO: 60905 - protein, 183 aa, Gossypium hirsutum
  Clone ID: GOSHI-09MAY01-C37713_1.pep
REYLKTVLHRVYGKFMVHRPFIRKAIHNIFYRFIFETEKHNGIAELLEILGSIINGFALPLKEEHKLFLVRALIPLHKPKCIPMYHQQLSYCITQFVEKDCKLADTVIRGLLKYWPITNSSKEVMFLGELEEVLEATQPAEFQRCMVPLCRQIGRCLSSSHFQVGISSFLYLQLLLLFRMNVP

SEQ ID NO: 60906 - protein, 267 aa, Gossypium hirsutum
  unsure (1)..(267): unsure at all Xaa locations
  Clone ID: GOSHI-09MAY01-C37733_1.pep
LIIACSKGGTSIEDLAEKYPDMIIKVPVDVFKGITDEDAARVVDGLAPKVADRNDSIEQVKKLYKLFCERDCTLLEINPLAETSSNQLVAADAKLNFDDNAAFRQKEIFALRDPSQEDPXREVAAAKADLNYIGLDGEIGCMVNGAGLAMATMDIIKFHGGTPANFLDVGGNASEGQVVEAFKILTSDDKVKAILVNIFGGIMKCDVIASGIVNAAKQVALKVPVVVRLEGTNVDQGKRILKESGMTLITAEDLDDAAEKAVKAASK

SEQ ID NO: 60907 - protein, 282 aa, Gossypium hirsutum
  unsure (1)..(282): unsure at all Xaa locations
  Clone ID: GOSHI-09MAY01-C37693_1.pep
MGERKVLNKYYPPDXGAAKLPRARRPKNQQMKVRMMLPMSIRCNTCGNYIYKGTKFNSRKEDVIGETYLGIQIFRFYFKCTKCSAEMTIKTDPQNSDYVVESGATRNFEPWRAEDEEAEKEKQKRESEEMGDAMKSLENRTLDSKREMDILAALDEMKSMKSRHATVSVDSMLEALQRTAAEKEKKIEEEDEALIKSIFQKPKEFVRRISDDXSNDDEDLTRLLSGNGETSNDGLKRRKVSEESSSNPTDALTKASLPDYSSSKEGSSGSVSCQVKAPFKSS

SEQ ID NO: 60908 - protein, 153 aa, Gossypium hirsutum
  Clone ID: GOSHI-09MAY01-C37603_1.pep
AEQMAIYDANNGGKMPLTWEQTRSMPLTHRVVMESLRMASIISFTFREAVVDVDYKGYLIPKGWKVMPLFRNIHHNPEFFPNPQEFDPSRFEVAPKANTFMPFGNGVHACPGNELAKLEALILIHHLVTNFRCEVVSSKSGIQYGPFPVPQQG

SEQ ID NO: 60909 - protein, 82 aa, Gossypium hirsutum
  Clone ID: GOSHI-09MAY01-C37633_1.pep
EKLAIREKVWKVRIYLLEVIPEKCTNAEILINCFGYVFASGVLNELESRNASSQIPLIYMLVTSVYVKKHLIDKIDTSFVCI

SEQ ID NO: 60910 - protein, 211 aa, Gossypium hirsutum
  unsure (1)..(211): unsure at all Xaa locations
  Clone ID: GOSHI-09MAY01-C37623_1.pep
FWKLVRNLLKPPGQEQIDCQKPKPILLDTGEMKLPYDWAPSILPVQIVRMGQLVILSVPAEFTTMAGRRLRDAVKTVLTSGHNKQFDSNVHIVIAGLTNTYSQYVTTFEEYQVQRYEGASTLYGPHTLNAYIQEFKKLAAALIGGGSVEPGPQPPDLLDKQISLLXAVVLDATPLGVNFGDVKDDIANSTFKRGNTVSVTFWSACPRNDLM

SEQ ID NO: 60911 - protein, 45 aa, Gossypium hirsutum
  Clone ID: uC-gsronu33B113a12b1.pep
KNINFEDNILKGQNLSSFHEKFDSHFIYKGMRVPVMKQLAHGLLV

SEQ ID NO: 60912 - protein, 53 aa, Gossypium hirsutum
  Clone ID: LIB3145-038-Q1-K1-H6.pep
FDIYIIMIIKINFNLKNNNSNTEEKPSICTKEEPLCLLWLFPDAWADASADAW

SEQ ID NO: 60913 - protein, 58 aa, Gossypium hirsutum
  Clone ID: GOSHI-09MAY01-C37153_1.pep
ICYICKHKIQKQNKQTFTWYYLLCNLICLPFNCNVNDYALHKNTNVLHSLREYKLILF

SEQ ID NO: 60914 - protein, 48 aa, Gossypium hirsutum
  Clone ID: LIB3828-028-Q6-N6-A3.pep
VIMPISMISVAKIKYVYTLVMKIKHLYFYVRHNHLHYDRLGYTINSTM

SEQ ID NO: 60915 - protein, 119 aa, Gossypium hirsutum
  Clone ID: GOSHI-09MAY01-C37133_1.pep
EFPARPGLLECSYFLKTGGCKCKSGGKYHHPKNRVAKMAPCVLSDKGLPLRPDQTICSHYSRYGICKFGPACKFDHSKQEAPSTMAMAGLDQPPPFSHFAATEQTGIASGTDTAVQQPV

SEQ ID NO: 60916 - protein, 148 aa, Gossypium hirsutum
  Clone ID: GOSHI-09MAY01-C37033_1.pep
FHASESFSKNGKPHGDESFQREKAIFAVILVCTFVMGFAWSWGPLGWLIPSEIFPLETRSAGFAFAVSTNMLFTFIIGQAFLSMLCQMQAGIFFFFAAWVIIMGAFTWFLLPETKGVPVDAMDDTVWKQHWFWRTFMIEDDRSDATVV

SEQ ID NO: 60917 - protein, 182 aa, Gossypium hirsutum
  Clone ID: GOSHI-09MAY01-C37373_1.pep
STRPPTRPAIFSDNVLATSVVVNSTVLHANEPEKHVFHIVTDKLNFAAMRMWFILNAPEKATVQVENIDDFKWLNSSYCSVLRQLESARVKEYYFKNHPSSLSVGSDNLKYRNPKYLSMLNHLRFYLPEVDPKLHKILFLDDDIVVQKDLTPLWDVDLNGMVNGAVETCKGSFHRFDKFLNF

SEQ ID NO: 60918 - protein, 105 aa, Gossypium hirsutum
  Clone ID: GOSHI-09MAY01-C37363_2.pep
LKGEDITSLPYKELMALEDALENGLTCVRAKQMDVLDMANKNTKFLEEDNKQLNFIVNQQQLTYENVREHMDHHGYHRAARADFNSQMPFAFRVQPMQPNLQERM

SEQ ID NO: 60919 - protein, 209 aa, Gossypium hirsutum
  Clone ID: GOSHI-09MAY01-C37363_1.pep
MGRGKIEIKRIENSSNRQVTYSKRRNGIMKKAKEITVLCDAKVSLIIFASSGKMHEYCSPSTKLIDILDQYQKTSGKKLWDAKHENLSNEIDRIKKENDSMQIELRHLKGEDITSLPYKELMAIEDALENGLTYVRGKQMDVLDKTWKNTKFLEEDYKQLSFILNQQQVAYESAREQMDHGYQRARDYNSQMSSTFQVQPMQPNLQERM

SEQ ID NO: 60920 - protein, 120 aa, Gossypium hirsutum
  Clone ID: GOSHI-09MAY01-C37313_1.pep
FPNFLTSFPLNFPKLFFLNYFSQFPNFQSLCDPNSQFPKSLYFLSGSSMLHLPFSPKFKLFLSKFKLPIRRKARFFNKKVLEQCRSSILIPVGAFDPLLYATITFRFLGCKCSSFFFPLV

SEQ ID NO: 60921 - protein, 219 aa, Gossypium hirsutum
  unsure (1)..(219): unsure at all Xaa locations
  Clone ID: GOSHI-09MAY01-C37333_1.pep
VVSFFEQLAEGFFFKSFDYLAEHFQVIAIDQLGQXWGGPSRPNXTCKSTEETEAWFVDSFEERRRVKNLSNLIILGHSFGGYIASKYALKHPEHVQHLILVGPAGFSSEPDSSIEWLTRLRETWKGAILNRLWESNFTPQKXLGLGPWGPKIGHQDTATRFNSKDSADFVLAEEQNKLLTDYAYHISAAKASGELCLKHIFSFGALPRVPLLKRLGYTA

SEQ ID NO: 60922 - protein, 105 aa, Gossypium hirsutum
  Clone ID: GOSHI-09MAY01-C30993_1.pep
MEATAVYSSKGSPFLFSSRITTKKSFKSSQNAATFSPFLIQSMATQKPLPSVAKTVGPRNSTVVTQPVKLLTNVEKLKLLTKAEKAGLLSAAEKFGLSLSSIEKL

SEQ ID NO: 60923 - protein, 114 aa, Gossypium hirsutum
  unsure (1)..(114): unsure at all Xaa locations
  Clone ID: GOSHI-09MAY01-C30973_1.pep
HASAAAYGKWASAIATRLNAGGLSCKVLDKEAFQKQMLEKLIWICAFMLVGARHPGATVGVVEKEYRSEXLASAAAAEKGITFEEAMEDRLCAYSRAVAHFPTAVKEFKWKEWM

SEQ ID NO: 60924 - protein, 102 aa, Gossypium hirsutum
  Clone ID: GOSHI-09MAY01-C30893_1.pep
QVLPCLKSVKQFMSASPDIILGPESYGLRRVGNLLHKFKTWRIDSCGQLRKIWEDNSRALHSVILDWLQESFHKHFEKLWSEMLSEGFLEPQERFPKRLKRG

SEQ ID NO: 60925 - protein, 124 aa, Gossypium hirsutum
  unsure (1)..(124): unsure at all Xaa locations
  Clone ID: GOSHI-09MAY01-C30843_1.pep
MGKLKAVVVVTMISTVLLSILWRATLHLEDNESFVRCLLDHSHPSHPISSAIYTPKSSSFSSVLESYIRNLRFNXSSTPKPFLILTALHESHIQAAVTCGKSHWVQVENPKGGHDYEGLSYGST

SEQ ID NO: 60926 - protein, 203 aa, Gossypium hirsutum
  Clone ID: GOSHI-09MAY01-C30803_1.pep
MVVRRSPGSANLTASKPSLGLGGTTTRLSLSRPIPNLHVTKKPNSSIVASVSASSSPSTGQTNWSLDSWKSKPAQQLPEYPDADELDSVLKTIGSFPPIVFAGEARRLEEKLASAAVGKAFLLQGGDCAESFKEFNGTNIRDTFRVLLQMGIVLTFGAQMPVITGGRMAGQFAKPRSDPFEIKDGVKLPSYRGDYINGDAFDE

SEQ ID NO: 60927 - protein, 197 aa, Gossypium hirsutum
  Clone ID: GOSHI-09MAY01-C30563_1.pep
HASAHASAPESIQTQMMWFDKYLESEGCKDPESDQCKEAFDDALFWVGEIGVNDYAYTIGSTVSGDTIRKLAINTFTEFLQGLLKKGAKYVVVEALPTTGCLPLAMTLAPSDDRDDIGCVKSVNNQSNAHNLVLQSKVSDLRQQFPQAIIVYADYWNAYRTVMQSPEKYGFKESLKACCGTWEPYNFEVFNTCGNPS

SEQ ID NO: 60928 - protein, 116 aa, Gossypium hirsutum
  Clone ID: GOSHI-09MAY01-C30443_1.pep
HAYGTRTLTTQIPLLPNSSCSASAFPCALTSRNTRPHKFRIHANLGEGEGELKPKGKKKFITREEEPEQYWQTAGEREGENPMKTPLPYIIIFGMSTPFVILAIAFANGWINVPVR

SEQ ID NO: 60929 - protein, 166 aa, Gossypium hirsutum
  unsure (1)..(166): unsure at all Xaa locations
  Clone ID: GOSHI-09MAY01-C30463_1.pep
PRVRINPDGAMRDIRDLDNISVXDWFLSKGGTRMSIQRMWDPVAYALGFIDCDNISARCMLTIFSLFATKTEASLLRMLKGSPDVYLSGPIRNYITERGGRFHLRWGCREILYDKSADGETYGTGLAMSKATYKELXVTAVAYVAAWDVPGIKRVLSFGWRELEFF

SEQ ID NO: 60930 - protein, 126 aa, Gossypium hirsutum
  Clone ID: GOSHI-09MAY01-C30723_1.pep
MAMLGASPIRFSSFPPSSSYLTSTFKPTSSSTLSLVVVGKSIIYRRCVACSAVQESSTPTATAETKGTTPPSAGVAGGEEEVKAAPKAAAAKPKPAAKAPAKSLPELMSEDVIPSLKTILEAQDDI

SEQ ID NO: 60931 - protein, 78 aa, Gossypium hirsutum
  Clone ID: GOSHI-09MAY01-C30693_1.pep
MAFLGDALRQAFMPKHEYESLREEDKAWTKLQRPILIGSIVIICVAIFVGMIISLKIVFPGDDLKRPFCDDRRLQPLP

SEQ ID NO: 60932 - protein, 201 aa, Gossypium hirsutum
  Clone ID: GOSHI-09MAY01-C30683_1.pep
MASTFSYNSFGFLLILVAFSSLINISSAGRQIAPKTSIEFIRTSCSSTTYPKLCYESLLTQASMIQTSPQLIAHAALNVTLSTAKSTSAMMVKLAKSQGLKPTEVGAMQDCVEELEDTIDELRKSISEMGQIKGSNFGLMINDIQTWVSAALTDENTCPDGFGGKNMNGSIETAVRSKIVTIAHLTSNALALVNSYASFHG

SEQ ID NO: 60933 - protein, 106 aa, Gossypium hirsutum
  Clone ID: GOSHI-09MAY01-C30643_1.pep
MPAGGFSSGTPAGVEFEAKITPIGIISCVMAATGRLMFRYDVGVSGGVTSMPDFLKKFFPVVYRKTRNPGIDGNYCKYDNQGLQLLTSSLYLAGLTATFFASYTTR

SEQ ID NO: 60934 - protein, 134 aa, Gossypium hirsutum
  Clone ID: GOSHI-09MAY01-C30173_1.pep
RGTEANIGSKGVAKISNSGGGGIGSSGQTISNSDMSKQGKQASMLHGIPDFAEVYSFIGSVFDPDTDGHVQKLKEMDPIYPVPVLLLMRNLTGNLCSPDFEPIRKVLSSYDVGTNTVGVTKGIIPQNQMNDILC

SEQ ID NO: 60935 - protein, 161 aa, Gossypium hirsutum
  Clone ID: GOSHI-09MAY01-C30293_1.pep
LERPLFYCHLSSLPTRLSRVALKNCFQFTSVCNTRASVLQSYHHHHVSSVDKIHFQTFKGLKLNKPNLSFTAGRCQKSRLICKASEAVAQVEVVTEADWEELVVGSKTPVVVDFWAPWCGPCRVIEPAIAELAKEYAVKIVCYKLNTDDSPNIATKFGIRS

SEQ ID NO: 60936 - protein, 87 aa, Gossypium hirsutum
  Clone ID: GOSHI-09MAY01-C31853_2.pep
VYFQRKKKRNPSLRAAAAPPSGAPLALRPEAWLLCSIPSPPSKPLIFFSGRHRWCAHNGAAARMGYLFCPSRERLTTYFASFYFGAS

SEQ ID NO: 60937 - protein, 104 aa, Gossypium hirsutum
  unsure (1)..(104): unsure at all Xaa locations
  Clone ID: uC-gsflnu33B003b05b1.pep
IKRSKIGFQSFSARAKELAHPCSCSVVRAPTMAARKKINGSALCMLLSLLLFYHCFSLCYGCYFRFFFALFASFEGGDGMEQRSQASGRRAGGAPEEEPRQLLX

SEQ ID NO: 60938 - protein, 78 aa, Gossypium hirsutum
  Clone ID: LIB3148-047-Q1-K1-H7.pep
KIYRAHLLIFSSFPLLGCQSLACAEIKRNKIGFQSFSARAKELAHPCSCSVVRTPTMAAGKKINGKGIPSLFLFDFRM

SEQ ID NO: 60939 - protein, 304 aa, Gossypium hirsutum
  unsure (1)..(304): unsure at all Xaa locations
  Clone ID: GOSHI-09MAY01-C31593_1.pep
SRGRYPPGIGVGRGGGVNANPSFQSRPSQQHYVQRNLLQNHQHFQQQQQQHQQQQQHQQQLWLRRDQLPGGNDSSVVDEVEKTVQSEAVDSSSQDWKARLNVPPPDTRYKTEDVTATKGNEFEDYFLKRELLMGIYEKGFERPSPIQEESIPIALTGRDILARAKNGTGKTPAAFXCIPALEKIDQDNNVIQVVILVPTRELALQTSQVCKELGKHLQFQVMVTTGGTSLKDDIMPLYQPGHLLVGTTGKILDLAKKGVCILKDCSMLIMDEADKLLSAEFQPSIEQVIHFLAANRQILMFSAT

SEQ ID NO: 60940 - protein, 158 aa, Gossypium hirsutum
  unsure (1)..(158): unsure at all Xaa locations
  Clone ID: LIB3189-039-P1-K1-D11.pep
MNSRGRYPPPGIGVGRGGGVSANPSFQSRPSQQHYVQRNLVHNQQHFQQHNQQHFQQQQQWLRRNQLPGGNDSSVIDEVEKTVQSEAVDSSSQDWKARLKIPPADTRYKTEDVTATKGNEFEDYFLKRELLMGIYEKXFERPSPXQEESIPIALTGVI

SEQ ID NO: 60941 - protein, 247 aa, Gossypium hirsutum
  Clone ID: GOSHI-09MAY01-C31583_1.pep
KLHRANVNFLSEPIKDGTTGTVIVLTTPDAQRTMLAYQGTSSTINYDSCLAGIVSKTNIFVVEGYLFELPDTIKTIIRACEEARRSGALIAVTASDVSCIERHYDDYWEIVGNYADILFANSDEARALCHFSSKESPISATRYLSHFVPLVSVTDGPKGSYIGVKGEAVYIPPSPCVPVDTCGAGDAYASGVLYGILRGVSDLKGMGTLAARIAATVVGQQGTRLMVQDAVDLAESFAFTLRGLVLV

SEQ ID NO: 60942 - protein, 165 aa, Gossypium hirsutum
  Clone ID: GOSHI-09MAY01-C31473_1.pep
MATPLRSNSRLSTAMERTGQWVFSQEIPTDVIVEVGEANFNLHKFMLVAKSNYIRKLIMETNEADLTRINLSEIPGGPEIFEKAAKFCYGVNFEITVHNVAALRCAAEYLQMTDKYCDNNLAGRTEDFLSQVALSSLSGAAVVLKSCEDLLSMAEELKIVQRCID

SEQ ID NO: 60943 - protein, 210 aa, Gossypium hirsutum
  unsure (1)..(210): unsure at all Xaa locations
  Clone ID: GOSHI-09MAY01-C31143_1.pep
MTSSLGTTASSRISASSSPGVRLSLHPPSSFSLLSFSSSVRPCAFSPLSSHFSPHQRRSAVNVSSSRGFGTGASPKCAASNPDQLKRAGEHLKQLLNSQFCHPILGRLGWHDAGTYNRNIEEWPHRGGANGSLRFEVELKHAANAGLVNALSLIQPIKDKYSDVTFADSFQLASATAIEEAGGPKIPMKYXRGDVSGPNECPEEGRLPDA

SEQ ID NO: 60944 - protein, 125 aa, Gossypium hirsutum
  Clone ID: GOSHI-09MAY01-C31123_1.pep
MASLTVHLLPPLLLQDRKTLFGTFPKLPVSYTGGRRNCAVFVKATGDSSESSTSLSIVKSVRNVWDKSDEDRVGLIGLGFAAIVALWTSTNLISVIDKLPIIPNVLEIIGILVSLGFIYRYLLFK

SEQ ID NO: 60945 - protein, 121 aa, Gossypium hirsutum
  Clone ID: GOSHI-09MAY01-C31393_6.pep
MSQTVVLKVGMSCQGCVGAVKRVLGKMEGVESYEVDLEQQKVTVKGNVQPDAVLQTVSKTGKKTAFWEAEALAESEAKPAESEVQPAETEANPAETKVKPAETEAKPTEPEAKPTEAVAAA

SEQ ID NO: 60946 - protein, 94 aa, Gossypium hirsutum
  Clone ID: GOSHI-09MAY01-C31393_5.pep
KAMAQTVVLKVGMSCEGCVGAAKRVLGKMQGVESYEVDSKEQKVTVKGNVQPDAVLQTVSKTGKKTAFWEGEAPAEAETKPGNGLKCLKPLLID

SEQ ID NO: 60947 - protein, 160 aa, Gossypium hirsutum
  Clone ID: GOSHI-09MAY01-C31393_3.pep
CIISARLIFYSDCSFKSSYPSWEPAPPGKHFLSNIRTFRDQMLQGQGARHVYSSDRLWRGSPLRAYSDRNDFLSKEMQQNIPGGYNMDSLWLIDANQKNHPYLLDWYYTSRAQQMPSYRRDTAARPFEPAEEQHKNYWGPINTTHDEARDKEYRPRLKMS

SEQ ID NO: 60948 - protein, 152 aa, Gossypium hirsutum
  Clone ID: GOSHI-09MAY01-C31393_2.pep
KATTNNSSINFDSFHHLCFILTPINILFFLFPQNFFLFSHSKTKAMSQTVVLKVGMSCQGCVGAVKRVLGKMEGVESYEVDLEQQKVTVKGNVQPDAVLQTVSKTGKKTAFWEAEALAETEVKPAETEVKPAETEAKPAEPEAKPTEAVAAA

SEQ ID NO: 60949 - protein, 91 aa, Gossypium hirsutum
  Clone ID: GOSHI-09MAY01-C31393_1.pep
IGTIPLERNRCLVIEATLQPGPFEPAEEQHKNYWGPINTTHDEARDKEYRPHHFDDGSLSHLEASTSAPFFHESVLQHHDTNVSVHHTRSC

SEQ ID NO: 60950 - protein, 123 aa, Gossypium hirsutum
  Clone ID: LIB3543-059-Q6-K6-D11.pep
IIIFHTYSLRCCVEDGPGTPHTAQIIPSINSTFAINAQSSPFWGGGILISKPKAMSQTVVLKVGMSCEGCVGAVKRVLGKMEGVESYEVDLKEQKVTVKGQVEPDAVLQTVSKTGKRTTFWDA

SEQ ID NO: 60951 - protein, 84 aa, Gossypium hirsutum
  Clone ID: uC-gsronu33B089g09b1.pep
KAMSQTVVLKVGMSCEGCVGAVKRVLGKMQGVESYEVDLKEQKVTVKGNVQPDAVLQTVSKTGKKTTFWEGEAPAEAETKPATA

SEQ ID NO: 60952 - protein, 59 aa, Gossypium hirsutum
  unsure (1)..(59): unsure at all Xaa locations
  Clone ID: LIB3493-027-P1-M1-G2.pep
SSSSLXILFSFPIAKQKPCSDCCAQGWHVMPRMCWSREESSVFNGRCVIILCIFFTILC

SEQ ID NO: 60953 - protein, 27 aa, Gossypium hirsutum
  Clone ID: uC-gsronu33B012a05b1.pep
RKSSSIFSTNTGSKSQSSKNSTVHRIV

SEQ ID NO: 60954 - protein, 194 aa, Gossypium hirsutum
  unsure (1)..(194): unsure at all Xaa locations
  Clone ID: GOSHI-09MAY01-C31383_1.pep
PTRPANLISDQEANYAMERYGTKFMDDYQAILSQKLGLQKYNKQLVNKLLSNLAVDKVDYTNFFRALSNIKADPSIPGDELLVPLKAVLLDIRPRRREAWTSWVQTYIQELVASGVSDEERKASMNSVNPKYVLRNYLCXQSAIDAGGRGDLEEXKLLKGMERPYDEQPGMEKYAHLPAAWAYRPGVCMLSCSS

SEQ ID NO: 60955 - protein, 142 aa, Gossypium hirsutum
  Clone ID: GOSHI-09MAY01-C31273_2.pep
HASAHAAALLKKFNAPDSPYFMFLLSTRAGGLGLNLQTADTVIIFDSDWNPQMDQQAEDRAHRIGQKKEVRVFVLVSVGSIEEVILERAKQKMGIDAKVIQAGLFNTTSTAQDRKEMLEEIMRRGTSSLGTDVPSEREINRL

SEQ ID NO: 60956 - protein, 184 aa, Gossypium hirsutum
  Clone ID: GOSHI-09MAY01-C31273_1.pep
SQYHDNTIIFTYAAQDRKEMLEEIMRRGTSSLGTDVPSEREINRLAARSDDEFRMFEQMDEERRVKENYRSRLMEDHEVPEWVFVLNDDRKGKISESYVELGKRKRKGGNYYPDTLSDLQFMRAVENAEDMAKKLPSKRKRKDHLPADEDSELPINNIGVEFRNENMAAISEGTSEDTTYGSSA

SEQ ID NO: 60957 - protein, 192 aa, Gossypium hirsutum
  Clone ID: GOSHI-09MAY01-C31223_1.pep
SWEGRECAEGLFRKRLWGGTFGEVYKRPLCWVEHMSLDNETGLEPCGIRVRPVSGLVAADYFAPGYFVWAVRSANLARIGYEDKTMYMAAYDWRLSFQNTEVRDQTLSRIKSNIELLVATNGGRKVVVIPHSMGVLYFLHFMKWVEAPAPMGGGGGPDWCSKHIKARVNIGGPFLGVPKAIAGLFSAEAKDI

SEQ ID NO: 60958 - protein, 135 aa, Gossypium hirsutum
  Clone ID: GOSHI-09MAY01-C32913_1.pep
MTSTACFIIVSRNDIPIYEAEVGSAAKREDAAQLHQSVLHAALDMVQDLAWTTSAMFLKAIDRFNDLVVSVYVTAGHTRFMLLHDSRNEDGIKSFFQEVHELYIKILLNPLYLPGSRITSSHFDTKVRALARKYL

SEQ ID NO: 60959 - protein, 114 aa, Gossypium hirsutum
  Clone ID: GOSHI-09MAY01-C32903_1.pep
MLGDENGEMSTIPGLNQIQFEGFCGFMDRGLTDELYKFPKIEDTEQEIEFQLFVETYQLVEPLIKERDAVYESLTYSSELYVSAGLIWKTSKDMQEQTIFIGNIPLMNSLGTFI

SEQ ID NO: 60960 - protein, 257 aa, Gossypium hirsutum
  unsure (1)..(257): unsure at all Xaa locations
  Clone ID: GOSHI-09MAY01-C32593_1.pep
MSFTFPLRSVPVSSRLHKPVPCSSSFACSHHLATTALFRSSSESGDVPFLRLSAASSPLLSGDLGGLSQALPSLPKRRGSNLVPRASKDVPXSFRFPPMTKKPKWWWRTLACLPYLMPLHETWMYAETAYHLHPFLEDFEFLTYPFLGAIGSLPSWFLMAYFFVAYLGIVRRKEWPHFFRFHVVMGMVLEIALQVIGTVSRWMPLAIYWGKFGMQFWTAVAFAYLFTILECIRCALAGMYADIPFVCDAAYIQIPYD

SEQ ID NO: 60961 - protein, 225 aa, Gossypium hirsutum
  Clone ID: GOSHI-09MAY01-C32563_1.pep
MTDHLQEQEMEIEALEAILMDEFKEIHSGESGLNTSNRCFQITLSPQDDDTDQSTTLPVLLALIFSHTEKYPDEPPLLNVKSIRGIQVSDLKVLKEKLEQEASENLGMAMIYTLVTSAKEWLSERYGQDADADNVEEEESTKDEVIIPHGEPVTVDTFLAWRERFEAELALERAKLMPESALTAPKEKKLSGRQWFGSGRATAKGAARVNEESDEEDEEDIDFDD

SEQ ID NO: 60962 - protein, 120 aa, Gossypium hirsutum
  Clone ID: GOSHI-09MAY01-C32713_1.pep
MAGHSDSSSSEKKSSEAMNDVPTFSTENMQNNMKVIYYSRTFMSIIGGVIAGILGFTGFMGFIFYFLVMAITSIGLIAKAKFSVHLYFDSWNRIILDGFMGGLMSFVLFWTFAYDIVHIF

SEQ ID NO: 60963 - protein, 143 aa, Gossypium hirsutum
  unsure (1)..(143): unsure at all Xaa locations
  Clone ID: uC-gsflnu33B005d07b1.pep
MAGHSDSSSSEKKSSEAMNDVPTFSTENMQNNMKVIYYSRTFMSIIGGVIAGILGFTGFMGFIFYFLVMAITXSIGLIAKAKCSVHLYFDRWNRIIXQGLMGGLIVLVLFWTFSYLHCSSFLSKIFYTQHLTGLWYLFLPLSF

SEQ ID NO: 60964 - protein, 96 aa, Gossypium hirsutum
  unsure (1)..(96): unsure at all Xaa locations
  Clone ID: LIB3583-041-P1-K1-F7.pep
MAGHSDSSSSEKKSSEAMNDVPTFSTENMQNNMKVIYYSRTFMSIIGGVIAGILGFTGXMGFIFYFLVMAITSIGLIAKAKFSVHLYFDSWNRNIL

SEQ ID NO: 60965 - protein, 78 aa, Gossypium hirsutum
  Clone ID: LIB3135-056-Q1-K1-E10.pep
MRGGKLATIASTTLWTGHSDIRSTGRKSREVMNDAPTFSTENMRNNTKVIYYSRTCMSIIGGVIAGTLGITGFIGDIF

SEQ ID NO: 60966 - protein, 159 aa, Gossypium hirsutum
  Clone ID: GOSHI-09MAY01-C32693_1.pep
VRIPGRHASSLLHTLSLLHSSPDPPPETYDFVVRPSIEGQVMNFYVLKRPGVDFFLEEISKKHEVVVFTAGLKQYASQVLDKLDPKGLISHRLYRDSCKELNGKFVKDLSEMGRDLGRIVIVDDNPNAYSLQPENAVPIRPFVEDSHDRELEKLVQFFQ

SEQ ID NO: 60967 - protein, 136 aa, Gossypium hirsutum
  unsure (1)..(136): unsure at all Xaa locations
  Clone ID: GOSHI-09MAY01-C32613_1.pep
MAWIQYSSPWVRTTSFPTLSVPIRASSRLSLPTTFRKWVAHFRVKSLNWVFSGALALTLSAAGVGFAEAKVGVNKPELLPREFTPVIDVAXFLSDGQEKRLIQEISDIEKDTGFKLRVLAQKYPDTPGXAIKDFWQ

SEQ ID NO: 60968 - protein, 191 aa, Gossypium hirsutum
  Clone ID: GOSHI-09MAY01-C32193_1.pep
ETAWAGAAYNLILYMLASHVLGACWYLLAIERQEACWRTACDVEDPWCQYKFFDCHRVKDPGRDTWFKSSNITNLCSPSSSFYVFGIYGDALTFDVSTSPFFNKYFYCLGWGLRNLSSLGQNLVTSTYVGEIIFVIIIATLGLVLFSLLIGNMQTYLQSTTVMLEECRIRRTDTYQWMRHRQLSSELNLSV

SEQ ID NO: 60969 - protein, 259 aa, Gossypium hirsutum
  Clone ID: GOSHI-09MAY01-C32093_1.pep
PRVRPRVRNKNKTICSSQIQIENWGQKIRRKMTMFHFFNCAILTFGPHAVYYSATPLSEYDTLGTSVKAALVYLGTALVKLVCLATLLKVSENDGFDPYQELLKAVIGFIDVAGLYFALTQLTHRNISQNHKFQAVGLGWAFADSVLHRLAPLWVGARGLEFTWDFILQGLEANANLVLSISLAALGSLMWLRKNKPKTLIPIIYACAGIVATMPSITSYLRRGLGWHFPKVVGFELFTSLSMAFISWQLFSACQRPSS

SEQ ID NO: 60970 - protein, 71 aa, Gossypium hirsutum
  Clone ID: LIB3135-011-Q1-K1-H11.pep
SQSSTPPLDLKDHLWKFSVHIGSNCRINSSTHAPSLRNKHNHMKHRSPKIILMVNSNIKNFLHEEKARTRG

SEQ ID NO: 60971 - protein, 66 aa, Gossypium hirsutum
  Clone ID: LIB3146-059-Q1-K1-E7.pep
GRVGGRVGSYGCVCFSTMEHELMPITREPKISKGGPSNPRVELKIGSTFIYCLWCCMLFFLLLPLL

SEQ ID NO: 60972 - protein, 106 aa, Gossypium hirsutum
  Clone ID: GOSHI-09MAY01-C33923_2.pep
SAPLASTLVWERDFSSSEELITEFCPECRIVNKGLNGDLKNAMKDGKPIIIEIQHTETSGILMVLFLVVGLASGSVIAWFWVIGSSAKISPTRGRYEFLLMMCLPL

SEQ ID NO: 60973 - protein, 99 aa, Gossypium hirsutum
  unsure (1)..(99): unsure at all Xaa locations
  Clone ID: GOSHI-09MAY01-C33923_1.pep
AVYLLENAKLAISACVVRLLFFPLFLGCLHGPQLFRTEFPVSLLTCLLGLTRADAPGRLMIMAPKSVXIQHAETSGIVVVLFLVLGLASGSVIAWFWVI

SEQ ID NO: 60974 - protein, 44 aa, Gossypium hirsutum
  Clone ID: uC-gsronu33B016g02b1.pep
SAPLASTLVWERDFSSSEELITEFCRECRIVNKGLRGDLWEISV

SEQ ID NO: 60975 - protein, 138 aa, Gossypium hirsutum
  Clone ID: GOSHI-09MAY01-C33833_1.pep
PRVRKKKTLTMAPFLSLGRLRVAVRSRKGFKPTSRARHGKKRGTKELRGRVERLKTEMEKRSEEQKDIRERQRQVKDKVTAIEAECEELKRETRFIVQQTARTQIKLGLMFRILKARETGHLDESRPSHSDAPRNCKI

SEQ ID NO: 60976 - protein, 76 aa, Gossypium hirsutum
  unsure (1)..(76): unsure at all Xaa locations
  Clone ID: LIB3148-037-Q1-K1-D9.pep
VGSFKRAAPFFFINFCLFFFLFFFFYFXXLIXFFFFFFFFFFXFFFFXKKIKAQIKLKPKIRNNSLQFSPDPNTSF

SEQ ID NO: 60977 - protein, 69 aa, Gossypium hirsutum
  unsure (1)..(69): unsure at all Xaa locations
  Clone ID: LIB3135-009-Q1-K1-E4.pep
GAFHCVVSGSSSFQQTAAASVQAPHVSSCIIRRASPPLAGSVSTLMLAPSCPCLLRCNQSLSEDLKGXE

SEQ ID NO: 60978 - protein, 118 aa, Gossypium hirsutum
  unsure (1)..(118): unsure at all Xaa locations
  Clone ID: LIB3493-015-P1-M1-A4.pep
VESLYMLTVFIYRDQGKMRGTKELRGRVERLKTEMEKRSEERKDIRERQRQVKDKVAAIEAECEELKRETRFIVQQTVRTQIKLGLMFRILKARETGHLDEXRLLTQMLRQENAYFVG

SEQ ID NO: 60979 - protein, 153 aa, Gossypium hirsutum
  Clone ID: GOSHI-09MAY01-C33563_1.pep
GSKCFDNRENIRISVIGDLTKLPKALQELMVNLEEATKNNTRFQLIVAVSYSGHYDVVQACQRLALKAKCGLIEPSDINVSLMEQELETNCTEFPHPDLLIRTSGEFRISNFMLWQLAYTELYFAQSLWPDFGKAEFLNALLAFQQKQKRYGV

SEQ ID NO: 60980 - protein, 76 aa, Gossypium hirsutum
  Clone ID: LIB3135-005-Q1-K1-E10.pep
LHCKIYALCKLILILQCQIQLLVNPLRMSPSITKCQQSYTNNFIHRNVSAFAERQRMPSKSRFLRNPAPRVRVRVG

SEQ ID NO: 60981 - protein, 93 aa, Gossypium hirsutum
  unsure (1)..(93): unsure at all Xaa locations
  Clone ID: GOSHI-09MAY01-C33513_1.pep
HASAKRSCYGEQEPLSGSTXQAGAPPSAAIVNKVLGSMNKPVYLLDITTLSQLRKDAHPSTYSGDHSGNDCSHWCLPGLPDTWNQLLYAALGM

SEQ ID NO: 60982 - protein, 177 aa, Gossypium hirsutum
  Clone ID: GOSHI-09MAY01-C33423_1.pep
GRIPGSPKCSPLRPGDLELFRSGAEKFSTAFSSDRTHNLIVRLRHNVIRTGLRNISISYSRIALADVAKKLRLDSVADAESIVAKAIRDGAIDATLDHSNGCMLSKETGDIYSTTEPQTAFNSRIAFCLNMHNEAVRALRFPPNSHKEKESAEKRRERQQQEQELAKHIAEEDDDEF

SEQ ID NO: 60983 - protein, 170 aa, Gossypium hirsutum
  unsure (1)..(170): unsure at all Xaa locations
  Clone ID: uC-gsflnu33B056g04b1.pep
LGFRVQCNKWAIIVRLLLGEIPERTVFMQKGMEKALRPYFELTNAVRIGDLELFRSVAEKFSTTFSSDRTHNLIVRLRHNVIRTGLRNISISYSRIALADVAKKLRLDSVADAESIVAKAIRDGAIDATLDHSNGCMLSKETGDIYSTTEPXTAFNSRIAFCXNMHNDAV

SEQ ID NO: 60984 - protein, 270 aa, Gossypium hirsutum
  unsure (1)..(270): unsure at all Xaa locations
  Clone ID: GOSHI-09MAY01-C33683_1.pep
YVSSRGGWFMDVFHVTDQQGKKXTDGKTIDYIERVLGPKGHTTDGMKDCPGKRVGVHSFGDHTAIELIGRDRPGLLSEISAVLANLHFNVTVAEVWTHNRRIACVLYVNDNTTSGSVDDPNRLSIMEEQLKHIMRGCEDDDNVARTSFSMGFTHIDRRLHQMLFADRDYEGGGVTTEVDYPPSFKPKITVERCEEKGYSVVTVRCKDRAKLMFDIVCTLTDMQYVVFHANISSNGPYASQEYFIRHMDGCTLDTEGEKERVVKCLETSIH

SEQ ID NO: 60985 - protein, 128 aa, Gossypium hirsutum
  unsure (1)..(128): unsure at all Xaa locations
  Clone ID: GOSHI-09MAY01-C33653_2.pep
KPVGILSSITSILGNRLLNRTSTRTPSVVMYTSSPTRSPHXSAYDKNLDDQVHATVVPDDGIQPQSGMYWAPDPRAGVFGPATEQLNASAVWXQGTHSSGAYLVLEEKVWFFFTCIEDLSFLLHSFII

SEQ ID NO: 60986 - protein, 126 aa, Gossypium hirsutum
  Clone ID: GOSHI-09MAY01-C33653_1.pep
MAANLKSGGGIASLGKRLLNRTSTRTPSLFISTSSPTRSPHASAYDKNLDDQVHAAVVPDDVIQPQSDKYWAPDPRTGVFGPATEQLNASAGGEQGIHSSGANSVLEEKAWFRPTSIEDLEKPHHH

SEQ ID NO: 60987 - protein, 57 aa, Gossypium hirsutum
  Clone ID: GOSHI-09MAY01-C33093_1.pep
NHPSFLHRSISCFPLPHQRRPTNTASPAPKFSMRVASKQAYICRDCGYIYNERTPFE

SEQ ID NO: 60988 - protein, 57 aa, Gossypium hirsutum
  Clone ID: GOSHI-09MAY01-C33053_1.pep
MSMSRNWGQNWQSNAVLVGQSLSFRVTGSDRRTSTSWNIVPAHWQFGQTFTGKNFRV

SEQ ID NO: 60989 - protein, 78 aa, Gossypium hirsutum
  Clone ID: GOSHI-09MAY01-C33393_1.pep
MSDRDRQRGRDRERDRDRERDRETNRRRYRDVRDRERDRDRERTRSKRSRTPERTRSRHTRSSTRSPDRERYRSRSHS

SEQ ID NO: 60990 - protein, 139 aa, Gossypium hirsutum
  Clone ID: GOSHI-09MAY01-C33363_1.pep
TKGIRLDAEGDASLEDLANAGAQGTGVDPSPDPEKAKSSNKKRKSASERQTSAKQRISQKTSEPSFVDNELDDALQDDMQSQRPKRPKRPKKSVNENLQPAITTAAAASASGQVPGNEFGPGGFGTEMGHNMAQSNMST

SEQ ID NO: 60991 - protein, 331 aa, Gossypium hirsutum
  Clone ID: GOSHI-09MAY01-C33323_1.pep
MEAHGAGLRRVLVLAFCVAGIWSAYIYQGFLQETLSTKRFGSDGKRFEHLAFLNLAQNVVCLVWSYIMIKLWSSRSNGGAPLWTYWSAGITNTIGPAMGIEALKYISYPAQVLAKSSKMIPVMLMGTLVYGIRYTFPEYICTFLVAGGVSAFALMKTSSKTISKLAHPNAPLGYGLCFLNLAFDGFTNATQDSITARYPKTSAWEIMLGMNLWGTIYNMIYMFGWPHGSGFEAVQFCKQHPEAAWDILLYCLCGAVGQNFIFLTISRFGSLANTTITTTRKFVSIVVSSLLSGNPLSPKQWGCVLMVFSGLSYQIYLKWRKLQRLPKKKKT

SEQ ID NO: 60992 - protein, 182 aa, Gossypium hirsutum
  Clone ID: GOSHI-09MAY01-C33263_1.pep
MDAAKLNLGFNFFFIFQLKFVVFAAVGGGGGCSRSDFPPGFVFGASTSAYQYEGAADKDGRTPGIWDTFVHAEGNFNEGNGDVACDGYHRSKEDVGLMVDTGLEAYRFSISWSRLIPNGRGPVNVKGLQYYNNLINELIKNGIEPHATLHHYDLPQTLEDEYGGWLNRGIVKDFTAYADICF

SEQ ID NO: 60993 - protein, 119 aa, Gossypium hirsutum
  Clone ID: GOSHI-09MAY01-C33203_2.pep
KWSYEVRKKLEMVRFIKKKKKVLMIASIVYILYISEISREVEERPHHIYISFGFHVFYLADFRWKPSICKDWSMKSQYAVIIYICYILTRSHSIKILGLRLIDSYCKIIEQTMMIQTII

SEQ ID NO: 60994 - protein, 206 aa, Gossypium hirsutum
  unsure (1)..(206): unsure at all Xaa locations
  Clone ID: GOSHI-09MAY01-C33203_1.pep
FAGEGKNKSDSPEATSNNSSANLQKAVKSEPAETESSQPLISDPTVENRGIKRKDREKVKGQTKKSKTTAKESSDDAEKLPYVHVRARRGXQATDSHSLAERARREKINARMKLLQELVPGCNKISGTALVLDEIINHVQSLQRQVEFLSMRLAAVNPRVDFNFDSVFTAESGFFMDSNFSGMVMPMMWPEIQLSATCLGERRSLQ

SEQ ID NO: 60995 - protein, 56 aa, Gossypium hirsutum
  Clone ID: LIB3148-006-Q1-K1-H4.pep
LKQSMVFSALLYNFLYIVIDHILFDDALESIENGAMKSERSSKWLDWWPIKKNLSC

SEQ ID NO: 60996 - protein, 391 aa, Gossypium hirsutum
  unsure (1)..(391): unsure at all Xaa locations
  Clone ID: GOSHI-09MAY01-C28953_1.pep
GKIVLLSKGADEAILPFAYVGQQTRTFIEAVEQYAQLGLRTLCLACRELREDEYQEWSLLFKEASSTLVDREWRIAEACQRLEHDFEVLGVTAIEDRLQDGVPETIETLRKAGINFWMLTGDKQNTAIQIALSCNFISPEPKGQLLLIDGKTEDEVCRRLERVLLTMRVTSSEPKDVAFVADGWALEFALKHYRKAFTELAILSRTAICCRVTPSQKAQLVELLKSCDYRTLAIGDGGNDVRMIQQADIGVGISGREGXQAARAADYSIGKFRFLKRLILVHGRYSYNRPAFLSQYSFYKSLVIWFIQIFFSFNXSGGLWELSLFNSGSLMAYNVFYTSIPVLVSVLDKDLSEGTVMQHPQILFYCQAGRFTVSPPFLAFFLLYNRVRKWD

SEQ ID NO: 60997 - protein, 182 aa, Gossypium hirsutum
  unsure (1)..(182): unsure at all Xaa locations
  Clone ID: GOSHI-09MAY01-C28693_1.pep
HLLNIFEAENRTLGAATFNVTSTQKWAVSNAGLFADRQDPQFVQNTLAQVKSTNTPELYQTSRLSPGSLRYYGLGLQNGPYTVRLFFAETGFPGRTTQSWKSXARRVFDVYIQGTRRLRDFDISKAAGGVERAIIKNFTANVTENHLEIHLFWAGKGTCCTPIQGYYGPSISAISVVPSKTP

SEQ ID NO: 60998 - protein, 119 aa, Gossypium hirsutum
  unsure (1)..(119): unsure at all Xaa locations
  Clone ID: GOSHI-09MAY01-C28183_1.pep
MGESEEKKSTKRDKIRWRWVIGASITIVLAIALASRTKPEISPNFGDTNKSCQCSQGKHRHXGTVEDCCCDYETVDHLNGEVLHPILQELVKTPFFXYYKVKXWCDCPFWPEDHMCRLR

SEQ ID NO: 60999 - protein, 172 aa, Gossypium hirsutum
  Clone ID: GOSHI-09MAY01-C28073_1.pep
QRAVDNAKGVDEHLKGVGLRMLGLCLGKQDKVSSSGVERSRLQNEALKDLDSALSFEQDNPDIIFELGAHYAEQWNLNAALRFAKKYIDITGGSVMKGWRLLALILSAQQRFTEAEVVTDAALDETGKWEQGPLLRLKAKLKVSQSRPMEAIETYCYLLALVQAQRKSSGPM

SEQ ID NO: 61000 - protein, 173 aa, Gossypium hirsutum
  Clone ID: AI729055.1.pep
MNCQSNSDDTTLEMELPGFRFHPTEEELLGFYLKNMIYGNKLRDDVIGFLNIYHHDPSDLPGLSKIGEREWYFFVPRDRKHGNGGRPNRTTENGYWKATGSDRKIVSLSDPKRITGLKKTLVFYKGRAPRGNKTDWVMNEYRLPDGCSLPKDIVLCKIYRKATSLKVLEQRAA

SEQ ID NO: 61001 - protein, 63 aa, Gossypium hirsutum
  unsure (1)..(63): unsure at all Xaa locations
  Clone ID: LIB3048-048-Q1-L1-A3.pep
MNCQSNSDDTTLEMELPGFRFHPTEEELLGFYLXNMIYGNKLRDDVIGFLNIYHHDPSDLPGT

SEQ ID NO: 61002 - protein, 255 aa, Gossypium hirsutum
  Clone ID: GOSHI-09MAY01-C24993_1.pep
MASTFSLQMVHCPRFSFQGQAVSNAHSPHMIGSWSAYSQPNSSAIVLASKLNYASGLPVTQLSKSPSVKYRRMVCNSMGNDVKLQAKVTTKCFFDVEIGGKAVGRIVMGLFGDVVPKTVENFRALCTGENGYGFKGCSFHRIIKDFMIQGGDFTNGNGTGGMSIYGSKFEDESFALKHVGPGVLSMANAGPNTNGSQFFICTVKTPWLDNRHVVFGHVIDGMDVVRELESQETSRTDGPRVPCRIVNCGELPIGG

SEQ ID NO: 61003 - protein, 141 aa, Gossypium hirsutum
  unsure (1)..(141): unsure at all Xaa locations
  Clone ID: GOSHI-09MAY01-C24913_1.pep
MGFSINNSLAPPHTRTHITFLIASYSLLGTASGWIXLTLSLRLLPSLCGLFFILLHAITIAGAVTGCSVPVSGSNRFYAAHMVVMVLTSIFQGSVSVLILTRSSDFLGYLKSYVREDDGIVILKPXGGLCVTAFCLEWMVL

SEQ ID NO: 61004 - protein, 179 aa, Gossypium hirsutum
  unsure (1)..(179): unsure at all Xaa locations
  Clone ID: GOSHI-09MAY01-C24883_1.pep
LSFVKVTNRRSRRWLNDRLLMELVPRLNAEEVRGLFAPPPWGXNIIGALNNSSMKKRFPARPARAACLSAWRTVDCRTREALRRSVLSDLIASYEDCIRTFIQERGHGDVLALQVQDPFHRLLLHGVCEFYNVVSVTVTQSKGAESLKVTRIKKKKTGVVELPNITLSNFLKMSKEGIW

SEQ ID NO: 61005 - protein, 71 aa, Gossypium hirsutum
  Clone ID: LIB3825-033-Q6-N6-D7.pep
ILMNILHGESVIISSLTFVKQFYNVVSVTVTQSKGAESLKVTRIKKKKTGVVELPNITLSNFLKMSKEGIW

SEQ ID NO: 61006 - protein, 119 aa, Gossypium hirsutum
  Clone ID: LIB3146-006-Q1-K1-E2.pep
ELVPRLNAEEVRGLFAPPPWGDDVPPSAFCMTNVGEWDKFRTIDMDKEANIIGALNNSSMKKKFHADADKAAFLSAWRRVDCRTREALRRSFLSDLIASYEDCIRTFIQERGHGDVLAL

SEQ ID NO: 61007 - protein, 54 aa, Gossypium hirsutum
  Clone ID: LIB3146-016-Q1-K1-E4.pep
LNPGNLASQSFHTDDDLTPINYSIEGSHVPQPILFTDIECPPGGGGEFRPQKNP

SEQ ID NO: 61008 - protein, 121 aa, Gossypium hirsutum
  Clone ID: GOSHI-09MAY01-C24873_1.pep
GKDSSVGLQILKGQTWVPVKPIPNALVINIGDTLEVLTNGKYKSVEHRAVTHKERDRLSIVTFYAPSYEIELGPMAELVDEKNPCRYRSYNHGEYSKHYVTNKLQGKRTLDFAKIQSKTSN

SEQ ID NO: 61009 - protein, 110 aa, Gossypium hirsutum
  unsure (1)..(110): unsure at all Xaa locations
  Clone ID: LIB3146-011-Q1-K1-A11.pep
EDVLCRLYKLVTMNYHPSCTRPDLALGLIPHSDGRAITVXQQGNDSSFGLQILKGQTCVPVKPIASALVINIGDTLEVLDRAADXMDYLYTLPHIERDTLSIVTFYAPSY

SEQ ID NO: 61010 - protein, 107 aa, Gossypium hirsutum
  Clone ID: GOSHI-09MAY01-C24503_1.pep
MSRPMEEDTPKNEEEEFNTGPLSVLMMSVKNNTQVLINCRNNKKLLGRVRAFDRHCNMVLENVREMWTEVPKTGKGKKKALPVNKDRFISKMFLRGDSGIIGLRNPR

SEQ ID NO: 61011 - protein, 165 aa, Gossypium hirsutum
  Clone ID: GOSHI-09MAY01-C24533_1.pep
QYYIDIIETKPSNAISIIETDCEVDFAPPLDYKEPERPAVPTSSKAHSQVEEALAETEPKFSAFTGTGRRLDGKPLKQQPPPVSWSGTKDKEPAASNRNNRQPSPGASSQSSARQAQGKLVFGSNVSRFKETKQEPGNQAKQEQPEKKEDPKFQPFTGRKYSLEG

SEQ ID NO: 61012 - protein, 155 aa, Gossypium hirsutum
  Clone ID: GOSHI-09MAY01-C24403_1.pep
KQLSAEGNYSEEELEEYMQSHKKLMIDSLWKLNVADIEATLSRVCQMVLHDQKCKKEELRARAKGLKTLGKIFQSVKSTNGNESDPVLGNNARHKLDGVEPSYNSGSPNVSTKSSSREELSPSPLAPQSPYVEAPNFVNAQLPRPTAPPGAQRHP

SEQ ID NO: 61013 - protein, 118 aa, Gossypium hirsutum
  Clone ID: GOSHI-09MAY01-C24783_1.pep
EVAYKKQRLGKSSKARDSVFAALCSTLSQAVLPSKKTTNAMPLSSQSPWVRGNHTEMESSSPRSSGKSGSEEDSHREKEPPRNCSDCLHSPSDNRQLSGDDCPLVPPKSSPEMTVNGS

SEQ ID NO: 61014 - protein, 66 aa, Gossypium hirsutum
  Clone ID: LIB3146-004-P1-K1-D2.pep
MKKIIIIAVLIFCVLSSQMENVTPQVDCYDACSTGCVQSNTRLMQRCDRKCQIRCSPDSKVEGNLG

SEQ ID NO: 61015 - protein, 49 aa, Gossypium hirsutum
  unsure (1)..(49): unsure at all Xaa locations
  Clone ID: LIB3148-056-Q1-K1-B1.pep
PXLFFFFFFFFFFFFFFFFFFFFFFFFFFFFFFFFFFFFYIILLNTKSR

SEQ ID NO: 61016 - protein, 313 aa, Gossypium hirsutum
  Clone ID: GOSHI-09MAY01-C24723_1.pep
MGLESEMKLPVINFSEENLKPGTSGWASACKDVRRALEEHGCFEAKFDKLPGQLHDAVFATAEELFQLPTEVKMRNTSDMPFFGYFGQYKTVPLYESLAIDHPTSLDGTQRFTNLMWPAGNDRFRESAQRYSEVVAELHRTVMRMLFESYGVGNCYDYYIKITRYLLRYLRYSEPKMGESNAGLLPHTDKTFLSILHQGDISGLQVQLKDGQWVAPPPSPTSFVVMAGDALMAWSNDRIPSCNHQVIMKEKGIRYSLGMFTFMDGIIHILEEVGDETHPIKYKSFHHFELLQFMNSNLKTNPNMCFIKAFCGV

SEQ ID NO: 61017 - protein, 79 aa, Gossypium hirsutum
  Clone ID: LIB3146-003-P1-K1-A2.pep
HPSFPPFIRTLKRPNPSHHVATANDERQGLVFSFFTPFRSIFKDSMLSTMKNQKESLPLLLDLILTEKNSDDTNGSRLR

SEQ ID NO: 61018 - protein, 109 aa, Gossypium hirsutum
  Clone ID: LIB3083-058-Q1-L1-G7.pep
FIRTLKRPNPSHDVAAANDERQGLVFSFFTPFRSIFKDSMLSTMKNQKESLPLLLDLILTEKNSDDTNGSRLRYIEGQRGCRLSFWCNGAESRASACRGRTWRRGALGY

SEQ ID NO: 61019 - protein, 92 aa, Gossypium hirsutum
  unsure (1)..(92): unsure at all Xaa locations
  Clone ID: GOSHI-09MAY01-C24663_2.pep
PRVRFYVLYVFILTGRMIRGRVILIXNMDKLIGSFETIHVQDAAWHELAPRLGNLFTIGKGTKPCVFLPKGNGLKSSIIVDAKKRLAAQNAA

SEQ ID NO: 61020 - protein, 67 aa, Gossypium hirsutum
  unsure (1)..(67): unsure at all Xaa locations
  Clone ID: LIB3146-003-P1-K1-C4.pep
PTRPHKGSFEXTIHVQDAAGHGFATRLGNVFTIGKGTKPWVSLPKGKGIKLSIIEEARKRLAAQNAA

SEQ ID NO: 61021 - protein, 282 aa, Gossypium hirsutum
  unsure (1)..(282): unsure at all Xaa locations
  Clone ID: GOSHI-09MAY01-C24613_1.pep
MKKMAEKGKTDHPALLHGKYELGRMLGHGTFAKVYHARHVTTGKSVAMKVVGKEKVIRVGMMEQIQREISVMNMVKHPNIVELHEVMASKSKIYFAMELVRGGELFSKIVQGRLKEDLARVYFQQLVSAVDFCHSRGVYHRDLKPENLLLDEDGNLKVTDFGLSAFSEHLKQDGLLYTTCGTPAYVAPEVIAKKGYDGSKADIWSCGVILYVLLAGFLPFQDDNLVAMYRKIYRGDFKCPPWFSSEARRFITXLLDPNPXSRITISKIRDSSWFKKSFPQSC

SEQ ID NO: 61022 - protein, 221 aa, Gossypium hirsutum
  Clone ID: GOSHI-09MAY01-C24623_1.pep
THRSYDFTGVISWFADKCDLILVVFDPHKLDIRDEFKRVISCLRGNDDKIRVDLNKAHQVDTQQLMRVYGALMWSLGKVLNTPEVARVYIGSFNDNQINGADVDPLGQDLFEKEQDDLLKDLLDIPRKACDRRINEFVKRARAAKINAYIVSHLKKEMPSMMGKAKAQQRLIDNLQDEFAKVQREYHLPPGDFPSVEHYKEVLNNYNIDKFEKLKPKLVQA

SEQ ID NO: 61023 - protein, 196 aa, Gossypium hirsutum
  Clone ID: GOSHI-09MAY01-C24183_1.pep
RQESVLLSAVDENQFNTMVQTYMIDKAKGRMRIRMKVSLALVVVVGCIAIGTVAVHFLENLDWVNSFYLAVTSVTTVGYGDFSFETLMGRCFAVLWLLVSTLAVARAFLYLTELRIEKRNRKIAKWVLQKKMTLGDLVAADLDNDGSVSKSEFIIYKLKDMGKIAEKDVLQICDQFDALDNSNCGKITVADLMDSS

SEQ ID NO: 61024 - protein, 283 aa, Gossypium hirsutum
  unsure (1)..(283): unsure at all Xaa locations
  Clone ID: GOSHI-09MAY01-C24153_1.pep
LNEAIYGLLFAASRRGDFPELLEIRAVFTLYYGKEFDARAIELRNNCGVNAKIIQKLATRQPDLQSRWNVLDQMAAECGIAXQLEETTDSSEGNLDVSKKQEISVKASHDAGDDDEFSDSIKTRRKYRDVADAAQAAFESAAYAAAAARAAVELSRSDSYDPDDQNGPNTRQNTVFDKQEANSKDMENHGSQAVELNHTKKAPEIKMSSPSSEGSAEGIIDLRTMSFDEVDPLKLLEKEVVIYESDDDKYDSRGSSFDLNARKLKGKVLDTDNDGEHSEKKLD

SEQ ID NO: 61025 - protein, 75 aa, Gossypium hirsutum
  Clone ID: GOSHI-09MAY01-C24093_1.pep
TTLILSGAMPVMSPYIYPRRRRRRTSKSIVVPIHFLFLLINSKKLSVFLQRDCDNNKNTTPRLAAGNRSHNHRPD

SEQ ID NO: 61026 - protein, 93 aa, Gossypium hirsutum
  Clone ID: GOSHI-09MAY01-C24313_1.pep
HAKEKNLTANAKCHTEEKSSRLTNTLAFYWPITHRPDNNSIQLTSPSTSSQLPHNNIISIFNLKRWFTQLSTGSRHIPYNQQLIEKVNGNSES

SEQ ID NO: 61027 - protein, 59 aa, Gossypium hirsutum
  Clone ID: LIB3145-042-Q1-K1-H8.pep
LISHRPDNNGSQFSFSFNLEPITFQLIYFQFSFFFYKNMPNLYKHKLLKCQKLYNHKIT

SEQ ID NO: 61028 - protein, 133 aa, Gossypium hirsutum
  Clone ID: GOSHI-09MAY01-C24303_1.pep
MANRSLVSLYKFLFRHPFQSSAKPTSPFLFKSLSPFQTQLAANSVPSPRPASFRFPVFQTSQVQHPIYHILRKYSSESPASKLDVNKEVDSINLKFAEAREEIEMAMESKETVYFNEESQCARAVVKEVLDMF

SEQ ID NO: 61029 - protein, 144 aa, Gossypium hirsutum
  Clone ID: GOSHI-09MAY01-C25993_1.pep
AFTGCSHSLTAEEDDELRRMRYEVSHWKEKEINGTERRLLGGCPLTPRETSLLLRALGFPPSTRIYLVAGEAYGNGSMEPLKEDFPNIFSHSSLATDEELNPFKNHQNMLAGLDYVVALQSDVFGYTYDGNMAKAVQGHRRFEN

SEQ ID NO: 61030 - protein, 136 aa, Gossypium hirsutum
  Clone ID: GOSHI-09MAY01-C25983_2.pep
MAESKSLRKPVFTKVDQLRPGTIGHTLTVKVVNTKMVLQKGRADGPQVRQMRIAECLVGDETGMIIFTARNEQVDLMKEGTTITLRNAKIDMFKGSMRLAVDKWGRVEVAEPANFNVKEDNNLSLIEYELVNVVEQ

SEQ ID NO: 61031 - protein, 136 aa, Gossypium hirsutum
  Clone ID: GOSHI-09MAY01-C25983_1.pep
MAESKSLRKPVFTKVDQLRPGTSGHTLTVKVVSTKMVLQKGRADGPQVRQMRIAECLVGDETGMIIFTARNEQVDLMKEGATVTLRNAKIDMFKGSMRLAVDKWGRVEVDEPASFNVKEDNNLSLIEYELVNVVEE

SEQ ID NO: 61032 - protein, 156 aa, Gossypium hirsutum
  Clone ID: GOSHI-09MAY01-C25903_1.pep
MSAYRDKDPRIHGIQSKIRVVPNFPKPGIMFQDITTLLLDPKAFKDTVDLFVERYKGKNISVVTGIEARGFIFGTPIALEIGAKFVPLRKPNKLPGKVISEEYELEYGRDCLEMHLGAVEPGERALVVDDLIATGGTLCAAMKLLERAGAEVVECA

SEQ ID NO: 61033 - protein, 140 aa, Gossypium hirsutum
  unsure (1)..(140): unsure at all Xaa locations
  Clone ID: GOSHI-09MAY01-C25933_1.pep
TVSDHNGVLFSTERHTRTXGVMVFALPGEPGLTELAGDFKIHFHDRQGDFYCWLNTTMMENRKILNTSDLDWFDKRKLPSPGFQVEVVLADYNDPVPSNPPTKTTTTKPDESSGTSAAPSSNNNNKDDVFSDGEEEESAT

SEQ ID NO: 61034 - protein, 128 aa, Gossypium hirsutum
  Clone ID: GOSHI-09MAY01-C25893_1.pep
MAAPITMLILCTSFLSLSLLSTAFTSRDYADALEKSILFFEGQRSGPLPSNQRLKWRGNSGLSDGASYHVDLVGGYYDAGDNVKFGLPMAFTTTMLAWSVIEFGGSMHSQIGNAKTALRWATDYLLKA

SEQ ID NO: 61035 - protein, 120 aa, Gossypium hirsutum
  Clone ID: GOSHI-09MAY01-C25813_2.pep
EQEANNRLTRYGGDGCNYMFNIGSQINDMSRLIEGQARYFIDASKYGNVSRFINHSCSPNLVNHQVLVDRMDCHRAHIGLYASQDISVGEELTFDYRYELLPGQGYPCQCGASTCRGRLY

SEQ ID NO: 61036 - protein, 227 aa, Gossypium hirsutum
  Clone ID: GOSHI-09MAY01-C25813_1.pep
CFPETCDHVYLFDNDYEDARDVFGKPMRGRFPYDDKGRIILEEGYLVYECNRKCSCNIPCPNRVLQKGVRVKLEVFKTENKGWGVRAGEPILSGTFVCEYVGEIFGEQEANNRLTRYGRDGCNYMFNIGSQINDMSRLIEGQARYFIDASKYGNVSRFINHSCSPNLVNHQVLVDRMDCHRAHIGLYASQDISVGEELTFDYRYELLPGQGYSCRLMFPNMLECNAV

SEQ ID NO: 61037 - protein, 82 aa, Gossypium hirsutum
  Clone ID: GOSHI-09MAY01-C25583_1.pep
VLRGFVLLLKIKLMAAIHKLEAEEDADPRAGVLSISGGGDAAPSKNPKEEPDIDTTLGAMPAAVHVPSGVPVPPVTGGTRRA

SEQ ID NO: 61038 - protein, 290 aa, Gossypium hirsutum
  Clone ID: GOSHI-09MAY01-C25573_1.pep
ALLPHYPSKLRSLRRCISLNSYFIFTMLQAFEPPLDMSQDVDGCKDPHLENFEHGHCHSEERNASLSVCINQRKMGCSNHAQACPQEKSNIMSNPTTGEVKSEQQHEPIFGSGAGEVENKNEIAECCSNDVADSNGNAFSSPHDWLDPSLQLNVPLVDVDKVRCIIRNIVRDWAAEGEKERNQCYKPILEELDAQFPNRSKESPPACLVPGAGLGRLALEISCLGFISQGNEFSYYMMICSSFILNHTETTGQWTIYPWIHSNCNSLSDNDQLRPVLIPDIHPASAGITE

SEQ ID NO: 61039 - protein, 140 aa, Gossypium hirsutum
  Clone ID: GOSHI-09MAY01-C25513_1.pep
MITRSLKTTTTVAAGAVSASNNPSLTSQDFPSSKKASPKKPPPPTVSKLTQNRGASTHKPPVFDCDCFDCYTSYWFRWDSSPNLELIHQIIEAFEDHLTKRESQMLSKKNARPIRRDCNSRTATPVSVSPVQPDNDVSGL

SEQ ID NO: 61040 - protein, 380 aa, Gossypium hirsutum
  Clone ID: GOSHI-09MAY01-C25443_1.pep
AELFLGLPLFPGASEFDLLRRMIRILGSQPPDYVLKEAKNTSKFFKCIGSTHDIENGEVPIGSRSAYQALTEEEYEARELKKPLMGKEYFSHKNLEAIVTNYPYRKNLPEEDIIKEGQIRLALIDFLRGLVEFDPAKRWSPLQASKHPFVTGEPFTCPYRPPPETPRLPVAQNLKVDHHPGGGHWFAAGLSPNIPNRNRVSFHNSPHFPMVPYGHANSYGSVGSHGSYNDNAGLGSSYGSYGDNGNMFAYYSPVGPSTMNMHPQSGASMLGSSPDARQRFLPYSHGNGLGVSPSAGNFAPLPLGTSPSQFTPPNSYGQVSGGSPGHYGPTSPARNSCQGSPLSKMAAAGQFNRRKGWGYFWKFPILREFIFFTFAWTSDR

SEQ ID NO: 61041 - protein, 137 aa, Gossypium hirsutum
  Clone ID: GOSHI-09MAY01-C25743_1.pep
FEGHPFIVEAGVSVGGKDVKQGLNIFRFANRIPLLFEQGGDVVTRTALKRISWNNYKINQTQDKIGVFVSIVSTKIPFKGTGKEYIGDDISEIASAVKSAIQQCCIQLKSKIVKKMQAREQQERKRNLSKYIPDATN

SEQ ID NO: 61042 - protein, 269 aa, Gossypium hirsutum
  unsure (1)..(269): unsure at all Xaa locations
  Clone ID: GOSHI-09MAY01-C25683_1.pep
LIAVFGSSSSNSLDSVSSTPVPEIFTNYRRLKEQAAVDYFELRTILSGSSRQRELGLCGKERENYVPCYNVTANLISRFKDGQEFDRRCEVPRQGSWCLVRPPKDYKIPLRWPAGRDVIWSGNIKITKDQFLSSGGVTKRIMLLEENQIAFHPEDGLIFDGVKDYSRQIAEMLGLGSDSELFQAGVRTVLDIGCGFGSFGAHLVSLKLMTLCIAAYEATGSQVQLALERGLPAMIGNFIXKQLAYSKXSIDMVHCAQCGIVWDKKEGIF

SEQ ID NO: 61043 - protein, 135 aa, Gossypium hirsutum
  unsure (1)..(135): unsure at all Xaa locations
  Clone ID: GOSHI-09MAY01-C25673_1.pep
KIVFHIITDKKTYAGMHAWFALNPVSPAIVEVKGVHQFDWLTRENVPVLEAVENHHGIRNYYHGNHLAGANLSNTTPRTFASKLQARSPKYISLLNHLRIYLPKLFSKLYKVVFLDDDIXIQRDLSPLWEIDLWG

SEQ ID NO: 61044 - protein, 136 aa, Gossypium hirsutum
  unsure (1)..(136): unsure at all Xaa locations
  Clone ID: GOSHI-09MAY01-C25663_1.pep
GDVKEYWINDGVWGSMNILKDEHDGVICTPLTIKNPTCQGLKTWDSTXFGPTCDPNDFRLNGFQXPELDLNDXVVFQNMGAYPSSRGNDFNGFKTSAIPTYILVLMPPVRQEKYAGWANLLANLYLLAIMTRSKII

SEQ ID NO: 61045 - protein, 88 aa, Gossypium hirsutum
  unsure (1)..(88): unsure at all Xaa locations
  Clone ID: LIB3048-054-Q1-L1-G12.pep
MTCGHVTIENPTCEGLKTWNSTXFGPTCDPNNIGLKGFKQPELDVNDWMAFQNMGAYTASPVNDFTGSIPSTVPTYILTLIADARRER

SEQ ID NO: 61046 - protein, 284 aa, Gossypium hirsutum
  Clone ID: GOSHI-09MAY01-C25153_1.pep
GVGIGSILLLGLAGFLFWFVKRQRQAYKVRPIATASPPPMPPFNLKPFSDSTTYTSNSWSVSISSQGVRHAIESLTRYKFEDLKAATGNFSESNRIKGSVFRGSFQGDAAAMKVMNGDVSSEINLLKKINRAGIIRLSGFCVHEGNTYLVYEYADKGSVSDLLHSNKFQTSFTLSWKQRVQIAYDVPDALNYLHNYLNPPYIHKNLKSSNILLDGNFRAKVTNFGLARTIGDNDEGGLQLTRHVGGTKGFMAPDYIENGVITPKLDVFALRAIILELLSWERLL

SEQ ID NO: 61047 - protein, 69 aa, Gossypium hirsutum
  Clone ID: GOSHI-09MAY01-C25163_1.pep
MKNQAVPENGRKRKRSMQAKENIDSIKKGNGITTKSSTDDATKSVGYRQNGSRRKNKPRRAAEAVVECK

SEQ ID NO: 61048 - protein, 111 aa, Gossypium hirsutum
  Clone ID: GOSHI-09MAY01-C25123_1.pep
AQNKKSGQNPSSFCLRRSSPSLHAPSAPYDHVRASVCPTPRANACQRTPYLQANTKTPAQQRERKKNDKKLVFSFSFFSVSGYESHVIAIPYFFTHTTQIQYKEPAKKIRR

SEQ ID NO: 61049 - protein, 220 aa, Gossypium hirsutum
  Clone ID: GOSHI-09MAY01-C25383_1.pep
HASGLRQRNTYQGTSSGKLLNPSGKIGEQGSQLSSFDPMHHVQESVSHVAEIVESSRRKARSMVDAALKAMSSLRKGGKNIERIEDAIDFVNNQLSLNEFSAPAPRSAAPVDSVRSHDNLTACSSYPFATSHIPEMKLQNLSDQDELKIPSDLISQCVATLLMIQKCTERQFPPGDVAEVLDSAVTSLKPCCSQNLPIYTEIQKCMGIIRNQILALVPTS

SEQ ID NO: 61050 - protein, 118 aa, Gossypium hirsutum
  Clone ID: GOSHI-09MAY01-C25313_1.pep
VRSRPHDKQYDTILCLSVTKWIHLNWGDDGLITAFGKIWRLLRPGGVFVLEPQPWSSYERNRRVSETTRSNYRDIKYRPDFFREMLLDKIGFRRVEVVTSDLSGTRTGFNRPIFAYYK

SEQ ID NO: 61051 - protein, 67 aa, Gossypium hirsutum
  unsure (1)..(67): unsure at all Xaa locations
  Clone ID: GOSHI-09MAY01-C25283_1.pep
MSYLPARKGRHTQRYEDNLRLVAGGIPYRVEKDVEDSRISVLMISTPDRDDLVFPXGGWEDDETVNE

SEQ ID NO: 61052 - protein, 84 aa, Gossypium hirsutum
  Clone ID: LIB3149-007-Q1-K1-A4.pep
KTGIYATAAAKGAGGGKEEKGLFEWNLGNLQKEEQWYETDPIHKKVEEKNGGGSGRGTTRGRKNSVSIPQKKKDNGWLWALEGL

SEQ ID NO: 61053 - protein, 98 aa, Gossypium hirsutum
  unsure (1)..(98): unsure at all Xaa locations
  Clone ID: LIB3165-060-Q1-K1-H5.pep
MASLPRFSFVPSKTRIYATAAAKGAGGGKEEKGLFDWILGNLQKEEQFYETDPILKKVEEKNGGGSGSGTTSGRKNSVSIPXKKKDNAGFWLGGLFKK

SEQ ID NO: 61054 - protein, 110 aa, Gossypium hirsutum
  Clone ID: GOSHI-09MAY01-C26913_2.pep
LVYEYVDNGNLEQWLHGHVGPCSSLTWEIRMNIVLGTAKGLTYLHEGLEPKVVHRDIKSSNILLDKQWNPKVSDFGLAKLLGSERSYVTTRVMGTFGFVAPEYASTGMLN

SEQ ID NO: 61055 - protein, 175 aa, Gossypium hirsutum
  unsure (1)..(175): unsure at all Xaa locations
  Clone ID: GOSHI-09MAY01-C26913_1.pep
PRVRRMLVYEYVANGNLEQGLHGDVGPCSSLTWEIRMNIGLGTCKGHLTYLHEGLEPKVVHRDIKSSNILLDKQWNPKVSDFGLAKLLGSERSYVTTRVMGTFGFVAPEYASTGMLNERSDVYSFGILLMELISGRNPVDYSRPQGEVNLVEWLKAMVTNXNAEGVLDPRLPEKP

SEQ ID NO: 61056 - protein, 140 aa, Gossypium hirsutum
  Clone ID: GOSHI-09MAY01-C26933_1.pep
SDLLPRSRLNRLDSPEEETGKIILEDGTEVTVSELTDRVLASALTEDDSPELKLNECCCDDRNLVDVATSTELKSNACWVSNVVDGGGNYGIKGIRPPGLKPPPVMKLPVVDSACSTWDLFRDFAPEDDRRCIVQVHLHS

SEQ ID NO: 61057 - protein, 47 aa, Gossypium hirsutum
  Clone ID: GOSHI-09MAY01-C26863_1.pep
NSRSTKNYSFISTSINHKIHKRTLDLLPCHLDFLHFLNFLPPPSMNS

SEQ ID NO: 61058 - protein, 106 aa, Gossypium hirsutum
  Clone ID: GOSHI-09MAY01-C26543_1.pep
MEITSILPEECLCLIISLTSPEDACRSAMISHASRSVANRDEVWERFLPSDCRSIISGSSSSSLLSLGKKDVYFHLCFHPILIQNGTMVNPKAHSLISISIGFIRF

SEQ ID NO: 61059 - protein, 279 aa, Gossypium hirsutum
  Clone ID: GOSHI-09MAY01-C26403_1.pep
MSRKSAGPVQTQMAVAVFKSPLGGEYPRNNAVEEKQPTRRRRVFVQTETGCVLGMELDRSDNAHTVKRRLQVALNFPTEQSSLTFGDVELKNDLSAVRNDSPLLLTRNYLHRSSSTPCLSPTGRDLQQRDRSGPIEILGHSDSFNVLKVVVKDIVKAIKMGVDPLPVHSGLGGAYYFRNPRGENVAIVKPTDEEPFAPNNPKGFVGKALGQPGLKRSVRVGETGFREVVAYLLDHDYFANVPPTALVKITHSVFNINGGVNRNRPHTNLVSKIASCHTV

SEQ ID NO: 61060 - protein, 209 aa, Gossypium hirsutum
  Clone ID: GOSHI-09MAY01-C26723_1.pep
MQPFNDDSADVSMPSNAPPLRRVRPQTDRNDSNRLPSSNTAVNNIDSSEDDDSPLARHVTRQLGAVLAEERALSAREAAEAAAAAVEQAAVTVNNAPPASEEPVRMSLMELLEETSQQMGLMGSSYIISDAGEEYEKEEVTDEDEDEKEVVQSSGGMEHACCVCMVRHKGAAFIPCGHTFCRLCSRELWVQRGNCPLCNGSILGILDIF

SEQ ID NO: 61061 - protein, 112 aa, Gossypium hirsutum
  Clone ID: GOSHI-09MAY01-C26683_1.pep
MEENTEKLDQSSWSMTSEFEGKSDHLVAKEVSSSKVGVQRHSEIATIDLFLDRSISCIPGLSKRHSRQLEECGFYTLRKLLHHFPRTYADLQNAQTEIDDGQYLIFAGTIMS

SEQ ID NO: 61062 - protein, 150 aa, Gossypium hirsutum
  Clone ID: GOSHI-09MAY01-C26673_1.pep
YKVQMLRKLKKIPGFHWYLQVFPGLQPILKDDSQYLPVSISPSSENISVLGVLRYIAIYVSIWQRRKRKDFSTPNNEICSLRHLDHDTQCVLFATLSQGFVQISTSMSNLLCANAIMIFKIFIRPLNPSPSSLFTSCSVSFDWMVIIHVC

SEQ ID NO: 61063 - protein, 74 aa, Gossypium hirsutum
  Clone ID: GOSHI-09MAY01-C26663_1.pep
MRTICDACESAAAIVFCAADEAALCGACDEKVHLCNKLASRHVRVGLANPSDVPCCDICENAPAFFYCEIEEHP

SEQ ID NO: 61064 - protein, 203 aa, Gossypium hirsutum
  Clone ID: GOSHI-09MAY01-C26133_1.pep
EGSCSKIVPYLLNSAAAQTQSFAYPHENIDQPSPVVASKEHLADAKLCSYSNFWVHEKKADSLFESRRVENSLSRQNVAPLLLHDQSRNNSQNKQSQKVEHDSRLRLLPSLGSPEAEKSGKAYDEYLLLPRIPRSVHDVKTMRICTTIDSVEELPTGPSKISQTTHQFFITKKTGVNLTEGGQEFRDATVSPKLKGNMFNEFL

SEQ ID NO: 61065 - protein, 126 aa, Gossypium hirsutum
  Clone ID: GOSHI-09MAY01-C26093_1.pep
NSGHLVLKDPKGKELWRSQRLTDGSQVSHAAMLDTGNFVIASKNSTNIWESFKYPTDTILPSQELDMADHLLSTLVETSYSKGKYQLRFNNESFILNQIDMFTGKPYEAYFNFGNGSRLVFNESRH

SEQ ID NO: 61066 - protein, 244 aa, Gossypium hirsutum
  Clone ID: GOSHI-09MAY01-C26043_1.pep
EFLWLGSSWTCKRKKKHYESFRRNGVIISVHDFVYVLAEENKRLVAYLEDLYEVSRGNKMVVVRWFHKIDEVDIDLHHNYNCREIFFSHCLQDLSIECIDGLATVLSPLHFKKFLNEATHTRLEPFVCCKQFENDVKPFDVTQVKGYWKQDILRYMYGLSPSNDCVTRQQRADDLKTVWDVDDDVWIRPRKRYCRSKDDYMHMHFSGSRESLDTSFADVQDFHKAKMEMHHSISVLGFCVPVHW

SEQ ID NO: 61067 - protein, 131 aa, Gossypium hirsutum
  Clone ID: GOSHI-09MAY01-C26063_2.pep
PGCAAKGPRPRYPRVWESRNRIGTVSKSAKLVTCVKQLSNVKEEVYGALDSFIAWELKFPLITVKKALKILQNEQEWKRIIQVIKWMLSKGQGRSLKLFSSAVVNFIGQEIMGALCFYFLVWLLHYMLLEP

SEQ ID NO: 61068 - protein, 416 aa, Gossypium hirsutum
  Clone ID: GOSHI-09MAY01-C26063_1.pep
MEKTDGIGKENGSTEEKQSFKDGSICGYNSLHHLLSANLKPQIYQEVSRLLLGLNCGKTLETIVLPESAKALSSKHDFDLQAFKFSADQELLREPRVVRVGLIQNSIALPTTAPFSDQKNAIFEKLGPIIDAAGASGVNILCLQEAWMMPFAFCTREKRWCEFAEPVNGESTQFLQEFARKYNMVIISSILERDINHGETLWNTAVIIGNHGNIIGKHRKNHIPRVGDFNESTYYMEGNTGHPVFETAYGKIAVNICYGRHHPLNWLAFGLNGAEIVFNPSATVGELSEPMWPIEARNAAIANSYFVGSINRVGTEIFPNPFTSGDGKPQHPDFGHFYGSSHFSAPDASCTPSLSRYKDGLMISDMDLNLCRQLKDKWGFRMTARYELYADTLASYLKPDFEPQVISDPLLHKKSS

SEQ ID NO: 61069 - protein, 123 aa, Gossypium hirsutum
  unsure (1)..(123): unsure at all Xaa locations
  Clone ID: LIB3825-020-Q1-N6-C6.pep
MHNNQLKLGPIIDAAGASGVNILCCRKHXMMPFAFCTXEKRWCEFAEPVNGESTQFLQEFALKYNMVIISSILERDINHGGTLWNTAVIIGNHGNIIDSLEYCSFLFKLGTSMEPIAFVDCNC

SEQ ID NO: 61070 - protein, 70 aa, Gossypium hirsutum
  Clone ID: uC-gsflnu33B071d04b1.pep
SSACHQPTPILNTRHRLSSTFFLCFDFGAIIEGIRKLRKLMELGKKMEAQKKSKVSKMDQFVGILRFTTS

SEQ ID NO: 61071 - protein, 160 aa, Gossypium hirsutum
  unsure (1)..(160): unsure at all Xaa locations
  Clone ID: LIB3585-017-P1-K1-A11.pep
MLCCGYALPLVTKRLESVKINQRPRNTVVCAAKGPRPRYPRVWKSRNRIGTVSKSAKLVTCVKQLSNVKEEVYGALDSFIAWELEFPLITVKKALKILQIEQEWKRIIXVIKWMLSKGQGRTMGTYFTLLNALAEDGRLEEAEELWVKLFSDNFESTPRI

SEQ ID NO: 61072 - protein, 162 aa, Gossypium hirsutum
  Clone ID: LIB3135-048-Q1-K1-A8.pep
LNWLAFGLNGAEIVFNPSATVGELSEPMWPIEARNASIANSYFVGSINRVGTEIFPNPFTSGDGKPQHPDFGHFYGSSHFSAPDASCTPSLSRFKDGLMISDMDLNLCRQPQQWRHLIRTSPDFRFPLHSSGQPTHSHRQIRHRQRNPLRFPQTSHGGKPNQ

SEQ ID NO: 61073 - protein, 116 aa, Gossypium hirsutum
  Clone ID: GOSHI-09MAY01-C26333_2.pep
MSCYNASRKVLNWTTAIVHTDLLRVVSRRLVLATKTQSITTMAAQEEECKGNVKAQLAKLFEVSLKVTVPNEADVDPLIAACTGKFGDYQCNNAMGLWSKIKGKGTQFPGPPAVGE

SEQ ID NO: 61074 - protein, 147 aa, Gossypium hirsutum
  unsure (1)..(147): unsure at all Xaa locations
  Clone ID: uC-gsflnu33B142b04b1.pep
YRRHLLLHCFPSIASLISHSLPPSPPPPPPPLTDLLRVVSRRLVLATKTQSITTMASLEEECKGNLKAQLAKLFEVSLKVTVPNEADVDPLIAACTGKFGDSQCNNAMGLWSKIKGKGTQFRGPPAVGEAIKNNLXTSXMIDSCSVA

SEQ ID NO: 61075 - protein, 126 aa, Gossypium hirsutum
  Clone ID: GOSHI-09MAY01-C26213_1.pep
SLDCRSESLLFSSGGTSYMQDANSGHKVIYTLQELETALMAPDENEDLTTPSVSHGESSRPQTAGQRSRAWSRGRQGSLALLPQTSFVSKHRQSTEVSHVEKRQKSIEDFSWLGIPPGNLKQLLIA

SEQ ID NO: 61076 - protein, 211 aa, Gossypium hirsutum
  unsure (1)..(211): unsure at all Xaa locations
  Clone ID: GOSHI-09MAY01-C26203_1.pep
MGLIFIIISISIVWVASLWKIFFSHSKPTFLNEGTPLHTKNVLLVVAHPDDESMFFSPTINYLTSKGHNLYLLCLSIGNADGMGSSRKDELYRACVVHKIQLQQVNVLDHPQLQDGFGQFWIHGLLAPIIQDEVYTHVIDVIITFDSYGVSGHCNHXDVHYGVPKFLRDSXHRGYIEAWELVSLNIMPKFSRLFDIWMSNLNVMQHPSGVM

SEQ ID NO: 61077 - protein, 114 aa, Gossypium hirsutum
  Clone ID: GOSHI-09MAY01-C27923_1.pep
MSWSCTKCTFLNSPSQTAACKVCLSPPSPSPSSPSKWACKACTFLNLYNKSNCEIWGTRSWLSRFDDLKVTNFNDEADSSVGSVFLPLKPCNKKKIREPNLGNEDVSNWWFSWH

SEQ ID NO: 61078 - protein, 192 aa, Gossypium hirsutum
  unsure (1)..(192): unsure at all Xaa locations
  Clone ID: GOSHI-09MAY01-C27803_2.pep
GIGRLLLYDYDKVELANMNRLFFRPDQVGMTKTDAAVQTLSDINPDVVLESYTLNITSVQGFETFMSSLKNKTFRPSKEGSGVDLXVLSCVDNYEARMVVNQACTELNQAWMESGVSEDAVSGHIQLLIPGETACFACAPPLVVASGVDERTLNREGVWAASLPTTMGVVAGLLVXNTLKFLVGFGHVSPTW

SEQ ID NO: 61079 - protein, 205 aa, Gossypium hirsutum
  Clone ID: GOSHI-09MAY01-C27803_1.pep
LLKRGNFWTGVSEDAVSGHIQLLIPGETACFACAPPLVVASGVDERTLKREGVCAASLPTTMGVVAGLLVQNTLKFLLGFGHVSPYLGYSSLKDFFPTMTMKPNPQCSNAACLERQTEYIRAKPARDAAAKAKMEAEAAAAAAAGDMPLHVDNEWNISVVDDYEPAKSSCGTSSDARPEGLTRELPSADEFQKPQASGATDSAID

SEQ ID NO: 61080 - protein, 177 aa, Gossypium hirsutum
  Clone ID: GOSHI-09MAY01-C27543_1.pep
MASFHMITTLLFLLTIMLGASNAQLSATFYAKTCPNVSTIVSNVLQQAQGNDIWIFPKIVRLHFHDCFVHGCDASLLLNGTDGEKTATPNLSTEGYEVIDDIKTALEKACPRVVSCADVLALAAQISVSLGGGPTWQVPLGRRDSLTAHREGTGSFPTGHESLGYIVNLVQGVGFDL

SEQ ID NO: 61081 - protein, 224 aa, Gossypium hirsutum
  Clone ID: GOSHI-09MAY01-C27463_1.pep
MHRIVLQREIRSRASHKALSWFSSSNLFRSVHSLPFATVEAEGISGSQPAEVQNLVQGKWTGSAAWNTLVDPLNGEPFIKVAEVDGNGIQPFVESLSKCPKHGLHNPFKSPERYLLYGDISAKAAHMLALPKVSDFFTRLIQRVSPKSYQQAFGEVYVTQKFLENFSGDQVRFLARSFAVPGNHIGQQSHGYRWPYGPVAIITPFNFPLEIPVLQLMGALYMGN

SEQ ID NO: 61082 - protein, 124 aa, Gossypium hirsutum
  unsure (1)..(124): unsure at all Xaa locations
  Clone ID: GOSHI-09MAY01-C27763_1.pep
MEFSKVSTLALTCLVGLVLVLPSHAQDSQQDYLNAHNTARAAVGVGPMTWDDTVAAYAENHAKQRMADCNLVHSSGHYGENLAGGSADLSGTDAVNMWVNEKADYDYSSNXCAAGKVCGHYTQM

SEQ ID NO: 61083 - protein, 148 aa, Gossypium hirsutum
  Clone ID: GOSHI-09MAY01-C27723_1.pep
PIASDLTFSRYWNCLRKQTFVLESYISTVNWLMNRALFLTHFYLSWGFVAPYFMAMVHVAAALQIYIKDYSYGETTCTSGGLLLAIWLAICTFTELLSMWNLTRIEVQLCNILSPEAPKLSLDYYNWSMIFVAMLVDNFLYPISAFWS

SEQ ID NO: 61084 - protein, 130 aa, Gossypium hirsutum
  Clone ID: GOSHI-09MAY01-C27663_1.pep
PDGYKEVGDSGEIRVPSVAPKASRANSERRGSNRGIYSNSTKEKGPGSMEFTMEEILKATRNFSPAFKIGQGGFVTVYKGRLDDGTFVAIKRAKQSVYDKHLGVEFQSEIRTLAQVEHLHLVKFCGYLKH

SEQ ID NO: 61085 - protein, 120 aa, Gossypium hirsutum
  unsure (1)..(120): unsure at all Xaa locations
  Clone ID: GOSHI-09MAY01-C27633_1.pep
TKKELKLFLSDYECHLKDISINVDGXIDAFRGKIMSEVEDAIIKKIKEGIIKLDSLLQSLPKQLQVNSIGALNVTFMDDPLFTNSSVELEINGLFNRADEISVSNYYSKRARNFLSCNGF

SEQ ID NO: 61086 - protein, 49 aa, Gossypium hirsutum
  Clone ID: uC-gsflmaxxa003f11b1.pep
MSSERYLHKCRWWSFLALSRICYRCLFRQLCQSNSSFLLKHPRPTYVHT

SEQ ID NO: 61087 - protein, 182 aa, Gossypium hirsutum
  Clone ID: GOSHI-09MAY01-C27193_1.pep
PAKGGLFRAGSMENGDGIAVGWLGHPIFRDKDGRELFVRRMPTFFETFPVVLVDGDGIVRADVPFRRAESKYSVEQVGVTVEFYGGELNGVSYSDPATVKKYARRAQLGEIFELDRATLKSDGVFRSSPRGWFTFGHASFALLFFFGHIWHGARTLFRDVFAGIDPDLDAQVEFGAFQKLGD

SEQ ID NO: 61088 - protein, 135 aa, Gossypium hirsutum
  Clone ID: GOSHI-09MAY01-C27123_1.pep
QLCFMHPSKYKFEHPRFCFERLEYVGQKIQDLVMAERLLMKHLDAPGRWLQEKHRRVLMNKFCGRYLREKYLHRFMIYSEQVQDAYENNRRLRNPATTAVQQALHGLSYTVYGKPDVRRLMFEVFDFEQIQPKSV

SEQ ID NO: 61089 - protein, 86 aa, Gossypium hirsutum
  unsure (1)..(86): unsure at all Xaa locations
  Clone ID: GOSHI-09MAY01-C27333_1.pep
MSVQEYLDKHMLSRKIEDAVNAAVRAKTPDPVLFISNHXKKAVPSVITKVKARQILDSRRIPTVEVELYTNKGVFRASVPCGDSTG

SEQ ID NO: 61090 - protein, 193 aa, Gossypium hirsutum
  Clone ID: GOSHI-09MAY01-C27253_1.pep
PRPARFWQETNSRLRRLQDPGSPLSSSPGSRIGSPAKFSQPKRVSCDGAVASPIRGCIRPASPSKLWTSSASSPTPSRGLSPGRVRNAVGGKEMIGNAVNTPSILSFSVDIRRGKKGEDLIFDAHALRLFYNGYLQWRFANARADAAFIVQKLSAEKNLWNAWVTTSELRHSVTLKRIKLLLLRQKLKLTSIL

SEQ ID NO: 61091 - protein, 227 aa, Gossypium hirsutum
  Clone ID: GOSHI-09MAY01-C27263_1.pep
MERKSQAKPILFFFVLVSALIETSYAGDIAIYWGQNGNEGTLSDTCATGRYKYVNIGFLNTFGNGATPGLNLAGHCNPASNGCTSLSGEIKSCQNQGIKVMLSLGGGAGSYSLASQEDAKSVADYLWNNFLGGTSSSRPLGDAVLDGIDFDIEAGSGQYWDDLARSLSAYSSQGRKVYLTAAPQCPFPDAHLGTAINTGLFDYVWIQFYNNPLAQCQYASGNTKDIL

SEQ ID NO: 61092 - protein, 102 aa, Gossypium hirsutum
  unsure (1)..(102): unsure at all Xaa locations
  Clone ID: LIB3272-051-P1-K1-B6.pep
HVPTGQDIKYRKHRVFLNHLSANGCPTPGTSKLGPGQLVNPRHPNGLGTSXXSGENKKGLXQNQRESRGHASXXWRGGAREGLLTFRFSRKNPPKSGSWNYL

SEQ ID NO: 61093 - protein, 136 aa, Gossypium hirsutum
  unsure (1)..(136): unsure at all Xaa locations
  Clone ID: GOSHI-09MAY01-C27203_1.pep
EIGGVSKRSEKGEEVVRDGSNSQRVEEEKAEEEEAAAAAAAFAAKARAKRKSSRPNPRLSNPPRHVHGEQVAAGWPSWLSNVAGEAISGWTPRRADSFEKIDKIGQGTYSNVYKARDTLTGXVVALKKVRFDNLEP

SEQ ID NO: 61094 - protein, 133 aa, Gossypium hirsutum
  unsure (1)..(133): unsure at all Xaa locations
  Clone ID: LIB3083-055-Q1-L1-B8.pep
LDLGVDPPSSRDPGIXAVVPASHSLTSSLGLESSTYGVGKGSNRNGGLIMSDIISQIQASKDSSKLSYRSSVATESLPTFSSYSAKRAFERQDRGSFEENSDIREAKRFTNPHIERQYLEMPYRDVSSMDSHN

SEQ ID NO: 61095 - protein, 79 aa, Gossypium hirsutum
  Clone ID: LIB3083-055-Q1-L1-B4.pep
KSSNRNCELIMSDIISQIQASKDSSKLSYISRATTYSLPTSSSYSCKMTFYKQHPRSFKENRYIMNATRFTNPHIERQY

SEQ ID NO: 61096 - protein, 112 aa, Gossypium hirsutum
  Clone ID: GOSHI-09MAY01-C20893_2.pep
VGAYSLLRSCTIEPECIIGQHSILMEGSLVETHSILEAGSVVPPGRRIPTGELWAGNPARFVRALTHEETLEIPKLAVAINDLSKEHFSEFLPYSTVYLEVEKLKKSLGITI

SEQ ID NO: 61097 - protein, 46 aa, Gossypium hirsutum
  Clone ID: uC-gsflnu33B005a02b1.pep
NMPSHSTQRTNHNKLDIIQNEINSPTIYIPFHRSLMIKRFFFQQPT

SEQ ID NO: 61098 - protein, 240 aa, Gossypium hirsutum
  unsure (1)..(240): unsure at all Xaa locations
  Clone ID: GOSHI-09MAY01-C20863_1.pep
KTNNLGRVVKRVGIWRDIYGIDEKKXASMIRDDKIDILVELTGHTANNKLGTMACRPAPVQVTWIGYPNTTGLPTIDYRITDSLADPPGTRQKHVEELVRLPECFLCYTPSPEAGLVSPTPALANGFITFGSFNNLAKITPKVLQVWARILCAVPNSRLVVKCKPFCCDSVRQKFLSTLEQLGLESLRVDLLPLILLNHDHMQAYSLMDIRLDTFPYAGTTTTCESLYMGVPCVTMAGSV

SEQ ID NO: 61099 - protein, 299 aa, Gossypium hirsutum
  unsure (1)..(299): unsure at all Xaa locations
  Clone ID: GOSHI-09MAY01-C20833_1.pep
FFILQPSLSRLGPTDARSPIRRSCSKDNIVSSDVSVVSDNHDSSASFSSGTNRAVYGKVGRVPVGIGRRRMRVVVTGGAGFVGSHLVDKLIARGAAAWAPAWGCPGGKDNLVHLFGNPMFELIRHDVVEPILLEVDQIYHLACPASPVHYKYNPXGAIKTNVMGTLNMLGLAKRVGARFLLTSTSEVYGDPLQHPQKETYWGNVNPIGERSCYDEGKRTAETLAMDYHRGAGVEVRIARIFNTYGPRMCLDDGRVVSNFVAQAIRKLPMTVYGDGKQTRSFQYVSDLVDGLCALMDGEH

SEQ ID NO: 61100 - protein, 208 aa, Gossypium hirsutum
  Clone ID: GOSHI-09MAY01-C20753_1.pep
PASDKCKPWVGTPSLGPAQYSAVCPWVSGLDMKARMLKFSRTAHMITIIRDQGSGKVHAGGRVTYKFEEVDRQNLRAGLRQSLRILVAAGAVEVGTHRSDGQRIRCKGISNEELDEFLDSVSMLTSPLCTGENWVVHTTAHQMGSCRMGINEKEGAVDENGESWEAEGLFVCDASILPSAVGVNPMITVQSTAYCLSKKIAESLRQQK

SEQ ID NO: 61101 - protein, 442 aa, Gossypium hirsutum
  Clone ID: GOSHI-09MAY01-C20773_1.pep
MPVEMEMEERGKVGALIGKATNSTAAEVDPRLLKAIKSVVRVSDSELRLAAHTLMDLMKRDHSQETAARIERERRERERRTREILQNKFETMKTNFSSVKEEIQATVDEIGECLDIVRTKEEGVPHVLLDDEDFVEFRSSELRQIRLPASAPRPKVHENSDNKVVFDALRELFKLLVTKHLVSVQEWISLLVRVEVADNRSRDSMLKDLIDIRNSLMSVKKDCEESGCTLPKTVNKNEEEEEDFWEEGNLGLTENGSTTEPEKRREVHSSNIEKRSKSVEDRNSKKSNKQSGNLAKVSASCKVKAKDKECSSSKGKECSGSEKSARSELLAEAPVLRWGSFMDNWGSVSNKDTLLNQKGLEFDNHWGRVDYDAVIPAEKIAELNLQAIVYEENLGEIQPCHAPLKKGGLCQRRDLKICPFHGPIIPRDDAGNQINQSSSTDD

SEQ ID NO: 61102 - protein, 185 aa, Gossypium hirsutum
  unsure (1)..(185): unsure at all Xaa locations
  Clone ID: GOSHI-09MAY01-C20663_1.pep
FWQEWWVANSLDFNKDYDASVFETTIRVVGGLLSAYDLSRDNVFLEKARDIADRLLPAWDTTTGIPYNVSNLAHGNAHNPGWAGGQSILADSGTEQLEFIALSQRTGDPKYQEKVEKVIVALNKTFPADGLLPIYINPETATGSYSTITFGAMGDSFYEYLLKAWIXGNKTSSLKLYRDMWETSM

SEQ ID NO: 61103 - protein, 363 aa, Gossypium hirsutum
  unsure (1)..(363): unsure at all Xaa locations
  Clone ID: GOSHI-09MAY01-C20193_2.pep
MLKMCLEQVKRYKEKPVFFFFAKTSQSHDDKFIKDNPHLHLLSEKSLFLDNQTQXNTTYQMLAAASELKEVFDCLDTYDPDYKLAPSMEDWKLAETLCSFLKPLFDAARILTTTTFPTAITFFHEAWTIHAELGRSITSEDPFISNLAKSMHEKIGATRQGRSLILAIAVVMDPRFKMKLVEFSFTKIFGEDAPTYIKIVDDGIHELFLEYVALPLPLTPTYTEEGNAGNNGKTDESQQGNLLSDQGLTDFDVYIMETSSQQMKSELDQYLEESLLPRVQEFDVLGWWKLNKMKYPTLSKMARDILSIPVSAAAPDSVFDIIIKQLDEYRSSLRPETVEALICAKDWLHHGSEESNALVKMEF

SEQ ID NO: 61104 - protein, 229 aa, Gossypium hirsutum
  unsure (1)..(229): unsure at all Xaa locations
  Clone ID: GOSHI-09MAY01-C20193_1.pep
CVATYLREKQSLMKLIEGIPGRVCLTLDMWSSNQTLGYVFITGHFVDSDWKLHRRVLNVVMEPYPDSDSALSHAVAACLSDWSLEGKLFSLTFNHPTSEAGLENLRPLLCTKNPLILNGQLLLGNCIARTLSSMAKDVLGAGHEIVKKIRDSVKYVKTSESHDEKFVQVKNQLQVPSEKSLILDNQTQGNTTYQMLAAASELXKEVFDWLDTYDPDYKLAPSMEDWKLA

SEQ ID NO: 61105 - protein, 69 aa, Gossypium hirsutum
  Clone ID: LIB3083-030-Q1-L1-E3.pep
LNGQLLLGNCIARNLSSMAKDVLGAGHEIVKKIRDSVKYVKNPMHLLKWNFRCSCFTYGRMLYGTLFDY

SEQ ID NO: 61106 - protein, 44 aa, Gossypium hirsutum
  Clone ID: GOSHI-09MAY01-C20183_2.pep
YEKWTVQFQAKVINVITLVSSNPGGSHDERHLNSKCCEFQFILS

SEQ ID NO: 61107 - protein, 105 aa, Gossypium hirsutum
  Clone ID: GOSHI-09MAY01-C20183_1.pep
PTRPTTRTAYIIKKPILLIHLQEDNNPGTLTMQSDRFFNALKGHGALCRLVILPFESHGYSGRESIMHVLWETDRWLQKHCVSNTSEVSADIGKSKDGEAGSYRY

SEQ ID NO: 61108 - protein, 154 aa, Gossypium hirsutum
  Clone ID: GOSHI-09MAY01-C20003_1.pep
MVQNHRSEFPQLVQNLEQANSRPKSHSRSLSDTEKPCRNGNVKLFGQILNSSSQDDGKIRFREQSMKSSNLNFRGHNNVDGNASFSKVDQNIIFAPENVPRRSYGFWDGTRIQTGLTCLPDCEIIVAKYAAAFVNYPVPYFKCRCRHRGYGSGY

SEQ ID NO: 61109 - protein, 256 aa, Gossypium hirsutum
  Clone ID: GOSHI-09MAY01-C20383_1.pep
MATSQLTASSVTASARNLASLQGLRLSTVKFSSFGTLKPGALTSRSFKRLVVKAATVVAPKYTSVKPLGDRVLVKIKETEEKTEGGILLPTTAQSKPQGGEVVAVGEGKTIGNTKLESSVKTGAQVIYSKYAGTEVEFNGANHLLLKEDDIVGLLETDDIKDLKPLNDRVFIKVSGAEEETAGGLLLTEAAKEKPSIGTVIAVGPGTLDEEGNLKPLSVSPGNTVLYSKYAGNDFKGNDGSNYIALRASDVMAALY

SEQ ID NO: 61110 - protein, 156 aa, Gossypium hirsutum
  unsure (1)..(156): unsure at all Xaa locations
  Clone ID: GOSHI-09MAY01-C20353_1.pep
SFKGSSAEIIPFLKTWVNLPMAVGFMLLYTKLANVLSKKALFDTVILPFIAFFGAFGFPLYPLSNHIHPEALADKLLAVPGPRFLGPLAIMRIXWSFCLVHVTAELWGSGVISGLFWGXAHQITXVEEATRFYPLVGPATKKSLNSLGKNVNILLQ

SEQ ID NO: 61111 - protein, 284 aa, Gossypium hirsutum
  Clone ID: GOSHI-09MAY01-C20283_3.pep
MASLQLRRESSMDQQESPRSPEAKLGMKVEDLWGVQEPKLSPNEKLNACFESIPVSAFPLAPQGIEIKSDASLAEAVQILAQNKILSAPVVDVNAPEDATWIDRYIGIVEFAGIAIWILQQSEPPSPRSPSSPSGTYFAVSINGMTSAVGLGTLGPEDASITSGDFFEALTSSKFYKNTKVRDISGTFRWAPFLALQKSNTFLTMLLLLSKYKMKSVPVLDLGDGKIDNIITQSAVIHMLAECTGLHWFESWGSKKLSEIGLPTMSPEHIITVSDCYLLSSFFY

SEQ ID NO: 61112 - protein, 99 aa, Gossypium hirsutum
  unsure (1)..(99): unsure at all Xaa locations
  Clone ID: GOSHI-09MAY01-C20283_2.pep
VSILQVYEDEPVLQAFKLMRKKRIGGIPVIECGGKKAIGNISLRDVQFLLTAPDIYRDYRSITAKNFLIAVRNYLEKHEKRSPMLSGMITCXRDETVKE

SEQ ID NO: 61113 - protein, 427 aa, Gossypium hirsutum
  Clone ID: GOSHI-09MAY01-C20283_1.pep
MAMAMASVQLERQTSIQDSPRSPEAKLGMQVEDLWDVQEPELSPNEKLNACFESIPVSAFPISPQGIEIKSDASLAEAVQILAQNKILSAPVVDVDAPEDATWMDRYIGIVEFAGIAVWILQQSEPSSPRSPSSPNGAEFAITANGMVSAAGLGALGPEDASITSGDFFEALTSSEFYKNTKVRDISGSFRWAPFLALQKSNTFLTMLLLLSKYKMKSVPVLDLGDGKIDNIITQSAVIHMLAECTGLHWFESWGSKKLSEIGLPTMSPEHIITVYEDEPVLQAFKLMRKKRIGGIPVIECGGKKAIGNISLRDVQFLLTAPDIYRDYRSITAKNFLIAVRNYLEKHEKRSPMLSGMITCKRDETVKELIQKLDSEKIQRVYVTDEDGNLEGVITLRDIISRLVHEPRGYFGDFFDGVLPLPENSRV

SEQ ID NO: 61114 - protein, 92 aa, Gossypium hirsutum
  Clone ID: uC-gsflmaxxa004h01b1.pep
MASLQLRRESSMDQQESPRSPEAKLGMKVEDLWGVQEPKLSPNEKLNACFESIPVSAFPLAPQGIEIKSDASLAEAVQILAQNKILSAPVGD

SEQ ID NO: 61115 - protein, 179 aa, Gossypium hirsutum
  Clone ID: GOSHI-09MAY01-C20273_1.pep
MAAVVDNSGEAVEAAKNNDLEVETTKSESKEFNVQNLVDMFTKLNPLAKEFFPSYFHHNQTKKSDNFNQVPVKQSAGNENFSNKRGRNNVNQGRRRLNGKAFRAQRDDSIRRTVYVSDIDQTITEEQLAGLFSNCGQVVDCRVCGDPHSVLPFAFVEFADEQGARSALSLDGTMLGFYP

SEQ ID NO: 61116 - protein, 143 aa, Gossypium hirsutum
  Clone ID: GOSHI-09MAY01-C20203_1.pep
GPRPELYQNFTSTPSDFCIAACVNKLPQLIRHTDILHFTVLPFLRFHRVKPKRTTSILRPGNQIPPPTCSDPNARVDLCPIQQFPIFPYPHTRSRASTRFPNPFHPSPLFRLEPVHLSAPIKLTLALRSVSTHHPELLFRTRG

SEQ ID NO: 61117 - protein, 92 aa, Gossypium hirsutum
  Clone ID: LIB3543-028-Q1-K6-E5.pep
QIFGDPDAANIVFTCGAYVLAVGINVTHQVVLTSTYFGYFSIFFNMLLARIILLSIGLYEHLIILISGTAFLFFFFLSFEFPPFFLIKLVIF

SEQ ID NO: 61118 - protein, 89 aa, Gossypium hirsutum
  Clone ID: LIB3083-076-Q1-L1-A7.pep
VRGKFAQALLKILEVYFNYHHDAYSTKGVYLHDPTAMLAAINPSLITYVEGAVRVQTNGITRGLTLLYNKQKRFAEITKWSDQPSVKVA

SEQ ID NO: 61119 - protein, 101 aa, Gossypium hirsutum
  unsure (1)..(101): unsure at all Xaa locations
  Clone ID: GOSHI-09MAY01-C21963_1.pep
MAESDNESGGHNNSGGNAHSETSAREQDRFLPIANVSRIMKKALPANAKISKDAKETVQECVSEFISFITGEASDKCQRXERRKTIYGDDLLWAMTTLGFE

SEQ ID NO: 61120 - protein, 72 aa, Gossypium hirsutum
  Clone ID: GOSHI-09MAY01-C21853_1.pep
HQIRLYLESYPPNPHLTSISTKQTRIRRPLIGAWWTWALTWRREWRGARSRRQRDVWRLGLACGARGRLKPF

SEQ ID NO: 61121 - protein, 238 aa, Gossypium hirsutum
  Clone ID: GOSHI-09MAY01-C21873_1.pep
RFYAIVKPIHEAIKPESWAWSWTDVKLTSPQLSRESMYKLSRKHLTLQCVSSSESRNPFVENAIQYTIAAAHATFDKNKKEALDKLLLQGLDITILGCNDFYSYRNQIEALGLPLTPEALATLPPFTSITFNSEESNGANCKPEVAKTGLGSSAAMTTAVVAALLHYLGVVNLSTSSADQHQENKNSTDLDIVHMIAQSAHCIAQGKVGSGFDVSSAVYGSQRYVRFSPKVLSAAQAA

SEQ ID NO: 61122 - protein, 84 aa, Gossypium hirsutum
  Clone ID: GOSHI-09MAY01-C21573_1.pep
FTQNKRSPKSSLKKISHTLSLALSLPAYNKHTLFLTHNHHQNRNQIHHFFFVKRNFNSQNRRSIVVVINRTYKKIFSSFWRSLT

SEQ ID NO: 61123 - protein, 178 aa, Gossypium hirsutum
  Clone ID: GOSHI-09MAY01-C21493_1.pep
QKVVENKANYDDNNAAAAANKMKRKRVKKLELFKGFCEDIVNKLMIQQEEMHNKLIEDMVKRDEEKVAREEAWKKQELDRINQELELRAKEQAIAGDRQATIIKFLSKFSQTGSSKKQCFGRVNEDVVKVPSECSNPPIASSSPLVAVAENPNPIVTDQNKVDQVSTTSPSSMILAHQ

SEQ ID NO: 61124 - protein, 114 aa, Gossypium hirsutum
  Clone ID: GOSHI-09MAY01-C21473_1.pep
HFLLQKCLRIGYHYSSLLFFLVLKLQSFFTYLLLLFINNMSAKTKSGLFETPTKVSPATPKVASKVSRGLAKPEPDSPSPLPSTRHSVERSPRTSLNSKPTIDRRSPKVATTPD

SEQ ID NO: 61125 - protein, 218 aa, Gossypium hirsutum
  unsure (1)..(218): unsure at all Xaa locations
  Clone ID: GOSHI-09MAY01-C21773_1.pep
MDRLLKAARASGSLNLSNRSLRDVPEEIYRSLDAVGEGEKWWEAVELQKLILAHNNIESLKEEVRNLPLLTVLNVSHNKLTDLPAAIGQLSMLKLLDVSFNSIVTIPEEIGLATSLVKFDCSSNRIKELPSSLGKCSDLSDLKVSNNLITSLPEDLTNCLKLTKLDVEGNKLTALSENLFASCTMLTELNXKNLLSGIPENIGCLTRLIRLDIHQNTE

SEQ ID NO: 61126 - protein, 92 aa, Gossypium hirsutum
  unsure (1)..(92): unsure at all Xaa locations
  Clone ID: LIB3584-041-P1-K1-D6.pep
PNTGYLIQLIQVKTSRFDGSSNRIKELPSSLGNCSDLSDLKVSDHLITSLPGDLTNCLKLTKLDEEGNKVTAXSENLVASCTMLTGFNQRTC

SEQ ID NO: 61127 - protein, 185 aa, Gossypium hirsutum
  Clone ID: GOSHI-09MAY01-C21733_1.pep
MAWCSLRSIHVPTVDVGLLRTRSPLAAVGGVVAGSSFLRSSSRNGSPFACLSLSTSPGIKEAVATDKAPAALGPYSQAIKANNLLFVSGVLGLIPETGKFISDSVEDQTEQVLKNMGEILKASGADYSSVVKTTIMLADLKDFKKVNEIYAKYFPSPAPARSTYQVAALPLDAKIEIECIAALKA

SEQ ID NO: 61128 - protein, 113 aa, Gossypium hirsutum
  unsure (1)..(113): unsure at all Xaa locations
  Clone ID: GOSHI-09MAY01-C21343_3.pep
LSWNVVAVTTAXWIKGEGPTIWFLAIRYGISGVPGGYVMWYRPLYRAMRTDSALKFGWFFLFYLLHIGFCIFASVAPPIIFKGKSLAGILPAIDLIGHNALVGIFYFIGFGFF

SEQ ID NO: 61129 - protein, 307 aa, Gossypium hirsutum
  unsure (1)..(307): unsure at all Xaa locations
  Clone ID: GOSHI-09MAY01-C21343_2.pep
MSRFDANPFAEEEVNPLSDPADRKGSGQSNYGGGAFYTTNPGSVPTATSRLSPLPPEPYDRGATVDIPLDSAKDLKAREKELKAKEAELNKREQELRRKEDAIARAGIVIEDKNWPPYFPIIHHDIANEIPVHLQKIQYVAFTTLLGLVLCLTWNVVAVTTAWIKGEGGFSXPTFWFLAIIYFISGGPGGYVMWYRPLYRAMRTDSALKFGWFFLFYLLHIGFCIFASVAPPIIFKGKSLAGILPAIDLIGHNALVGIFYFIGFGFFCIESLLSVWVIQQVYMYFRGSGKADEMKREAARRTVAAAL

SEQ ID NO: 61130 - protein, 308 aa, Gossypium hirsutum
  unsure (1)..(308): unsure at all Xaa locations
  Clone ID: GOSHI-09MAY01-C21343_1.pep
MSRFDANPFAEEEVNPFSDPAVRKGSGQSNYGGGAFYTTNPGSVPPATSRLSPLPPEPYDRGATVDIPLDSAKDLKAREKELKAKEAELNKREQELRRKEDAIARAGIVIEDKNWPPYFPIIHHDIANEIPVHLQKIQYVAFTTLLGLVLCLTWNVVXVTTVLVSKEEVQQFGPTIWFLAIIYFISGVPGGYVMWYRPLYRAMRTDSALKCGXFFLFYLLHIGFCIFASVAPPIIFKGKSLAGILPAIDLIGHNALVGIFYFIGFGFFCIESLLSVWVIQQVYMYFRGSGKADEMKREAARRTVAAAL

SEQ ID NO: 61131 - protein, 285 aa, Gossypium hirsutum
  unsure (1)..(285): unsure at all Xaa locations
  Clone ID: GOSHI-09MAY01-C21373_1.pep
IISSIIDPLMGGGNVEKADVINTVLFVAGINTLLQTLFGSRLPEVIGGSYAFIIPTISIALSRRYSIFVDPHRRFKASMRDVQGSLIVASFFTMVIGFFGCWRIMSRFXSPLAAIPLVILTGLGLYAQGFPQLARCIEVGLPALGAVVFLSQHVPHFLKSRRGIFERFAILFSGAIVWAFAEILTAAGAYDNRAPQTQFSCRTDRSGLISAAPWIRFPYPFQWGRPRFNAGDAVAVIAASFVAIIESTGTFITASRYASATPMPPSVLSRGVGWLGVGLLLDGLF

SEQ ID NO: 61132 - protein, 240 aa, Gossypium hirsutum
  unsure (1)..(240): unsure at all Xaa locations
  Clone ID: GOSHI-09MAY01-C21333_1.pep
MVLFGLLLLPVLLLLLLYFIGRPRPINIPIKNRHVFITGGSMGIGLAIAXRLHREGARISLLARSVDQLQKAKESICQAYEVEVSIFSADVRDYDAVERAINEAGSIDVLVVNHGVYYVEEFETQGLDVMKTMIDVNLMGSFNVIKAALPLMKDRKDKGPASIALMSSMAGQVGTYGFAAYSATKFGLRGLAEALQQEVLENNIHLSLIFPPVTETPGFEPARKTMPEITKIISSTSAGM

SEQ ID NO: 61133 - protein, 198 aa, Gossypium hirsutum
  unsure (1)..(198): unsure at all Xaa locations
  Clone ID: GOSHI-09MAY01-C21293_1.pep
MSEMANTDPEGVDAMRRTWNVWPXTKVEARKGVIPVAATIAPIRPHPDIPTLPYAPLRGRMWSAALNGFARVDFVAKIWICPFCYQRNHLAPHYAMISETNLPCELYPQYTTVQYTLQPDPNNPSSAPQWPPGFGFVLDACMIEEELEFVKSAMKQAIGLLPENALVGVVSFATQAHVHELGFSDMSNVYVFRGNKKL

SEQ ID NO: 61134 - protein, 82 aa, Gossypium hirsutum
  Clone ID: uC-gsflmaxxa047e06b1.pep
MSEMANTDPEGIDAVRMTWNVWPRTKVEASKCVIPLAATIAPIRPHPDIPTLPYAPLRCRMCSAALNAFARVDFGAKTGSGL

SEQ ID NO: 61135 - protein, 221 aa, Gossypium hirsutum
  unsure (1)..(221): unsure at all Xaa locations
  Clone ID: GOSHI-09MAY01-C21273_1.pep
SKPNRGFAFVLYYNEACADYSRQKMASANFKLDGNNPTVTWADPKSSPDHSAASQVKALYVKNIPDNTSTEKLKEVFQRHGEVTKVVMPPGKAGKRDFGFIHYAERSSALKAVKDTEKYEIDGQVLEVVLAKPQADKKTDAAYPYIAGLNPNHLQHPGYGGFTGTTYGSPSAGFGAATSFQQPAIYXGRGPMPINMAMVSMVLPDGRISICLSTVIIAYAY

SEQ ID NO: 61136 - protein, 74 aa, Gossypium hirsutum
  Clone ID: GOSHI-09MAY01-C21263_1.pep
RELVSSFFFFFFTFSIKRLIWEHYINMDPFWKYTTIILTIICHHNMMVSTSTHIISYHIISFPNQHATLFRIRT

SEQ ID NO: 61137 - protein, 148 aa, Gossypium hirsutum
  Clone ID: GOSHI-09MAY01-C22993_2.pep
MAEEHRCQAPEGHRLCVNNCGFFGSSATMNLCSKCYRDLCLKEQEASSIKSALSSSPSSSSTVVESISQVPLLALPEVNRESAVPEIAPAAEQRSQQQPNRCMVCRKRVGLTGFRCKCGVTFCGSHRYPENHGCTFDFKKVGRERYTR

SEQ ID NO: 61138 - protein, 161 aa, Gossypium hirsutum
  Clone ID: GOSHI-09MAY01-C22993_1.pep
MAEEHRCQAPEGHRLCVNNCGFFGSSATMNLCSKCYRDLCLKEQEASSIKSALSSSPSSSSTVVESISQVPLLALHEVNRESAVPEIAPAAEQRSQQQPNRCMVCRKRVGLTGFRCKCGVTFCGSHRYPENHGCTFDFKKVGREEIARANPLVKAGKLEKI

SEQ ID NO: 61139 - protein, 172 aa, Gossypium hirsutum
  Clone ID: GOSHI-09MAY01-C22953_1.pep
FLFCIYGSSGCLGCCARPIFNPLVNESSKGLKFQGQTVSKPNISEGFWTTSTCDMDNSAVQSQGSISSISTSNQTLDPNGNAASANGPSEFVNHGLILWNQTRQRWGGNRRSQNRKQLVQEPKLNWNATYENLLGSNKPFPQPIPLSEMIDFLVDVWEQKGCMTEQQQYNYI

SEQ ID NO: 61140 - protein, 123 aa, Gossypium hirsutum
  unsure (1)..(123): unsure at all Xaa locations
  Clone ID: LIB3147-040-Q1-K1-D1.pep
GISEDFWTTSVXDLDNHRLAVEKCISSISTSNQTLDLHGSVATADAPAEFVNHGLLLWNQIRQSWVGNRRSQNRKQLVQEPKLNWNATYENLLGSNKPFPQPIPLSEMIDFLVDVWEQEGLYD

SEQ ID NO: 61141 - protein, 221 aa, Gossypium hirsutum
  unsure (1)..(221): unsure at all Xaa locations
  Clone ID: GOSHI-09MAY01-C22853_1.pep
PTRPRVFNALGQISFAFAGHAGALEIQATIPSTPERPSKIPMWKGALGAYFINAICYFPVAMIGYWAFGQDVDDNVLMALKKPAWLIASANLMVVVHVIGSYQVYAMPVFDLLENMMIKRLNFPPGIALRLISRSTYVAFTLFIGVTFPFFGDLLGFFGGFGFAPTSYFLXSLALTQPKRFSLNWFINWGCIFVGVFIMMALTIGGLRNIIADASTYSFYT

SEQ ID NO: 61142 - protein, 59 aa, Gossypium hirsutum
  Clone ID: LIB3584-002-P1-K1-D7.pep
GFGFAPTSYFHNVVGDQEPEGSPNWFINWGCIFVGVYYDGITIGGLRNIIQMLNIQFYT

SEQ ID NO: 61143 - protein, 240 aa, Gossypium hirsutum
  Clone ID: GOSHI-09MAY01-C22413_1.pep
FLSSAHASVALHELVIASGEDPGERIEEMASLLKKLKDFVLTENPEADTSEGEKGLMKHRSPVIPVDFRCPISLELMKDPVIVSTGQTYERSCIQKWLDAGHKTCPKTQQTLLHTALTPNYVLKSLIALWCESNGVELPKKQGTCRSRKAGSSASDCDRTAIITLLEKLANGNSEQQRAAAGELRLLAKRNADNRVCIAEAGAIPLLVELLSSTDPRTQEHAVTALLNLSINDSNKGTIV

SEQ ID NO: 61144 - protein, 156 aa, Gossypium hirsutum
  Clone ID: GOSHI-09MAY01-C22673_1.pep
KTGFYDLQTARDEYRFSCGSGGMNRDLVWRFMDVQTRLITPVCPHYAEFVWRELLKKDGFVIKAGWPSAGSPDLKLKSANKYLQDSIVLMRKLLNKQILGSKKSNKKGAPASSLSEDKLKGLIYVNEKFEGWQAECLQILQSKFDSNARTFASDGE

SEQ ID NO: 61145 - protein, 153 aa, Gossypium hirsutum
  Clone ID: GOSHI-09MAY01-C22603_1.pep
FQSSANPYGQPTQPNADPYGQSAQPNANPYSQPAQTNANPYSQPVQVHANPYGQPAQPSANPYNQPAQPNANPYSQPTQPNANPYGQPVQPSANPYAQPTQSVSAAPQIPGSAAQSSNGSLMIGSNGPVSSQMAAQPPTPAAPATQFNTGNFI

SEQ ID NO: 61146 - protein, 161 aa, Gossypium hirsutum
  Clone ID: GOSHI-09MAY01-C22153_1.pep
IGRDSSRLSEDLKVLLSQLSSRGMEQLMSDVSPRIAASPRIVVSPRISINSDDLKASDSSAFNGIEILQRRVSLERNESGLSLDGSIVSEIEGESVVDRLKRQVEHDRKLLSALYKELEEERNASAVSTNQAMAMITRLQEEKATLQMEALQHLKMMEEQA

SEQ ID NO: 61147 - protein, 172 aa, Gossypium hirsutum
  Clone ID: GOSHI-09MAY01-C22143_1.pep
MGREVSESCIDSLLIEMVSTYCNRFYANKPELAARRIEAIGYQVGHQLSERYTMERPRFSDHLEAIKFICKDFWSELFKKQIDNLKTNHRGTFVLQDNRFRWLTRMSIDQSPENGASEEPSIMADDKAVQSMHLYFPCGIIRGALSNLGIPCAVSADISNLPACSFVIRIKA

SEQ ID NO: 61148 - protein, 156 aa, Gossypium hirsutum
  Clone ID: GOSHI-09MAY01-C22173_1.pep
MSKRYVPPLPPPSQQSSPLFKQRSWSPDAERDEAWLRRKEVYGSGIRRSQSFTEDDLDELKGCLDLGFGFEPDSPELDPKLSLALPALPFYCAVNRQYNGRISRSSSASSMDSFSDAGSANSIIDQGDDPETVKIKSRQWAQVVACSVRQFSRGPK

SEQ ID NO: 61149 - protein, 79 aa, Gossypium hirsutum
  Clone ID: GOSHI-09MAY01-C22033_2.pep
SAWFCLSELLLQILHGRQVRVDYANDRPSRNFGGADGYGGGGEEVMDSHTCHAVPTQLAFGFLWIELITTRLALVSYEL

SEQ ID NO: 61150 - protein, 186 aa, Gossypium hirsutum
  unsure (1)..(186): unsure at all Xaa locations
  Clone ID: GOSHI-09MAY01-C22033_1.pep
GPDSGSTNPSGGRPLTPLFKGQVEEEKGGIKTDAFFRTXGVPNVYAVGDLTTFPLKLYNELRRVEHVDHARKSAEQAVKAIKASGEGKSVDEYDYLPYFYSRSFDLSWQFYGDNVGDTVLFGDSNPKSPKAKFGSYWIKDGKVVGAFLEGGTAKENQAIAKVAKLQPSVQSLEAVKHEGLSFACKI

SEQ ID NO: 61151 - protein, 68 aa, Gossypium hirsutum
  Clone ID: LIB3145-008-Q1-K1-G3.pep
MININRNSKEIGANSIVISSIRRKPKASCVETAWQVCESIRSNRQKKDFHVSQLPNSEEKDEVYSFMQ

SEQ ID NO: 61152 - protein, 135 aa, Gossypium hirsutum
  Clone ID: GOSHI-09MAY01-C22023_1.pep
TKSVKSAGSSSARPGEPTASSTTPRFAGLARSSSWFDMNGGHLPLTFRTPPVSPPRQNFLTGMRRVCSLEFRPHLMNSPDSGLADPLLGSSSGVSERSLLPQSTIYNFSCGHFSKPLLTASDDSEELLAIREERE

SEQ ID NO: 61153 - protein, 314 aa, Gossypium hirsutum
  Clone ID: GOSHI-09MAY01-C22353_1.pep
KMFRESTITKLADVPLSHISDDVYKTSADWISQQSLEALGFFVLWSLDIILGDLVAQQANAKGSKKSVQQPSSKSKVGIFVALAMVLRRKPDALISVLPKLREGSKYQGQDKLPVIIWMIIQASRGDLAVGLYMWAHHLLPIVGGKNCNPQSRDLILQLVEWILSAPKAWTILVNAAVRKRERLVPPASFEILMRVTFPASSSRVKATERFEAIYPTVKEVGLAGSHGSKAMKQVSLQIFHFAFKAAGDGTPELSKEAAGIVIWSLNQNAECYRIWEKAYLDNLEASVAVLRRLSEDWKQHSAKLTTLDPLRET

SEQ ID NO: 61154 - protein, 243 aa, Gossypium hirsutum
  unsure (1)..(243): unsure at all Xaa locations
  Clone ID: GOSHI-09MAY01-C22343_1.pep
MSRKKEEKTQAAAERIKAAALSAAKGLSRAQAERAAAAAARNVNAYGQKEEGPSRWQEKREAKRQMYLMSTEKAVRLGERKDKMTMTSTMGASQCQKCFQVGHWTYECKNERVYMSRPSRTQQLKNPKLRMKLSVSYDLDNPDVKDDEKDDNSRSNKSKRKHRSDSGSSSDSEASVFETDSGGASSVTGSGSSSAVSSTDYSSSSESEEERKRRXKKNRKKKQKKVRRRRYSSSSESSDSEST

SEQ ID NO: 61155 - protein, 382 aa, Gossypium hirsutum
  unsure (1)..(382): unsure at all Xaa locations
  Clone ID: GOSHI-09MAY01-C22373_1.pep
VILKLVPKLEECRAFELLKSTADRANYLMTKQAKIVAXMTCTHAALKRKDFXQLGFKYDNLLMEESAQILEIETFIPMLLQRQEDGYARLKRCILIGDHHQPPPGAKNMAFQKVSHMDQSLFTRFVRLGIPYIELNAQGRARPSIAQLYNWRYRDLGDLPSVKEEAIFYRANAGFSYDYQLVDVPDYHGRGESAPSPWFYQNEGEAEYVVSVYIYMRLLGYPANKISILTTYNGQKLLIRDVINRRCLPYDFIGPPCKVTTVDKFQGQQNDFILLSLVRTRFVGHLRDVRRLVVAMSRARLGLYVFCRRSLFEQCYELQPTFQRLLQRPDHLALNLNEGTSFTERHVDDIGHPYLVSSVEEMANIFFGRIDQLHRHKPCIST

SEQ ID NO: 61156 - protein, 58 aa, Gossypium hirsutum
  Clone ID: GOSHI-09MAY01-C22333_1.pep
LERPSFYLKWELIINGLSREPLKMLLLPLLSIFFVPPPPFCTCFTILEIVWKMNHGCP

SEQ ID NO: 61157 - protein, 205 aa, Gossypium hirsutum
  Clone ID: GOSHI-09MAY01-C22293_1.pep
PRVRPRVRDGLGGFWNRGISACAVCDGAAPIFREKPLAVIGGGDSAMEESTFLTKYGSKVYIIHRRDTFRASKIMQNRVISNPKIEVIWNSVVVEAYGDRVLGGLKVKNLVTEEVSDLKVNGLFFAIGHEPATKFLGGQLELDSDGYVVTKPGTTQTSVHGVFAAGDVQDKKYRQAVTAAGTGCMAALEAEHYLQELGSQEGKSD

SEQ ID NO: 61158 - protein, 115 aa, Gossypium hirsutum
  unsure (1)..(115): unsure at all Xaa locations
  Clone ID: LIB3584-011-P1-K1-G11.pep
LWGGGGDGDRVLGGLKVKNLVTXRISDLKVNGLFFAIGHEPATNFLXGQLELFWGCGGVIIPGTTXTTVHGVYAAGDVHDMKYRQAVTAAGTGCMAALEAEHYLQELGSQEGKSD

SEQ ID NO: 61159 - protein, 102 aa, Gossypium hirsutum
  unsure (1)..(102): unsure at all Xaa locations
  Clone ID: LIB3189-015-P1-K1-B7.pep
IEVIWNSFVVEVNCHRVLGGLEVINLVTEQVSNXKVNGLFFAIGHEPATKFLGGQLELYSYGYVVTNPGSTYTIMHFFFSSLVFSLYDLFTSFFFLLIPFSF

SEQ ID NO: 61160 - protein, 167 aa, Gossypium hirsutum
  Clone ID: GOSHI-09MAY01-C22283_1.pep
MALLIAVLTLVLLVSASTSPAIALSLNHYEKTCPDVESIVAKAVERATMKDKTVPAALLRMHFHDCFIRGCDASVLLYSKGNNKAEKDGPANLSLHGFYVIENAKKEVEAACPGVVSCADILAFAARDAVVLSGGPTWEVPKGRKDGRTSKASETIQLPAPTFNISQ

SEQ ID NO: 61161 - protein, 175 aa, Gossypium hirsutum
  Clone ID: GOSHI-09MAY01-C22203_1.pep
PVPTSSFVSYPIIDQSVVVPVSQPPIQSSSEAYPISDQGISVPAVPQTPPSSVSYPIIDFSEAAPVGPSQVPHPAISVQAPSQGESENIVEQSLLKELEDMGFKQVDLNKDILRRNEYDLEKSVDDLCGVAEWDPILEELQEMGFCDAETNKKLLKKNNGSIKGVVMDLLTGEGA

SEQ ID NO: 61162 - protein, 177 aa, Gossypium hirsutum
  Clone ID: GOSHI-09MAY01-C23993_1.pep
LTDDFDSDSSQKSHETRKNNRWFKKFFSSLDALRIEEINDPARQWHCPACQGGPGAIDWYRGLQPLMTHAKTKGAKRVKLHRELAELLDEELCRRGTSVIPSGEAFGKWKGLKDEEKDHEIVWPPMVMIMNTRLEQDENDKWIGMGNQELLDYFSSYAAVKARHSYGPQGHRGMSCL

SEQ ID NO: 61163 - protein, 222 aa, Gossypium hirsutum
  Clone ID: GOSHI-09MAY01-C23913_1.pep
LFSVVVIVVTIIVWLLLMGFLTTQILVFISSQLLLVAFMFGNTAKTVFEAIIFVFVMHPFDVGDRCVIDGIQMIVEEMNILTTVFLRYDNEKIFYPNSVLATKPISNFYRSPEMSDSVEFTVDVSTSIEQIGELKAKIKEYLESKPQHWRPGHSVQVKDIENVNKMKMGLYVTHTINFQNYGDKSSRRSELVLELKRIFEALNIKYHLLPQEVQVTYVGSLA

SEQ ID NO: 61164 - protein, 84 aa, Gossypium hirsutum
  unsure (1)..(84): unsure at all Xaa locations
  Clone ID: GOSHI-09MAY01-C23933_1.pep
NYGAIRQIRIGTSKETRGTAFVVYEDIYDAKTAVDHLSGFNVANRYLIVLYYQQAKMSKKFDQKKKEEEIAXMQEKYGVSTKDK

SEQ ID NO: 61165 - protein, 171 aa, Gossypium hirsutum
  unsure (1)..(171): unsure at all Xaa locations
  Clone ID: GOSHI-09MAY01-C23893_1.pep
METITQNGHHKGSLESFCTASKGAGGAVDPLNWGVAAESLKGSHLDEVKRMVAEYRNPLVKLGGETLTISQVAAIATRDLGVKVELSEDARAGVKASADWVLDGMNKGTDSYGVTTGFGATSHRRTKQGAALQKELIRFLNAGIFGHGTESCHTLXHSATRAAMLVRINTL

SEQ ID NO: 61166 - protein, 140 aa, Gossypium hirsutum
  Clone ID: GOSHI-09MAY01-C23573_1.pep
MATETSVDYDRTKELKQFDDTKAGVKGLVDAGILNIPKIFVRPAEDLAADELNSGHKTVEVPIIDVSNVGDSIRRQEIVNEVKIASGEWGFFQVINHGIPLSVLDEMIEGIRLFNEQDLELKMELYSRERCKEREIPLLL

SEQ ID NO: 61167 - protein, 136 aa, Gossypium hirsutum
  Clone ID: LIB3145-030-Q1-K1-E10.pep
NSSQKTIEVLIIDVSNIGDSILRQEIVNEVKIASGEWGFFQVINHGIPLSVLDEMIEGIRLFNEQDLELKKEIYSRDSAKKVKFLSNFDLYTSKALDWKDTLQLSLLDFDPDPSEMPPVCRKSTMEYIKHLKKLGE

SEQ ID NO: 61168 - protein, 281 aa, Gossypium hirsutum
  unsure (1)..(281): unsure at all Xaa locations
  Clone ID: GOSHI-09MAY01-C23533_1.pep
DSKTAWRTDEEFAREMLAGVNPVIIRRXQEFPPASNLDPKVYGNQNSAITNEHIEHNLEGLTVEEALRTNRLFILDHHDSLMPYLRRINTTTTKTYASRTILLLRNDGTLKPLVIELSLPHSDGDQLGAVSKVYTPTEHGVEGSIWQLAKAYVAVNDSGVHQLISHWLNTHATMEPFVIATNRQLSVVHPIYKLLYPHFRDTMNINAFARQILINGGGVLELTVFPGKYAMEMSSIIYKSWNLFDQALLRDLKKRGVAVDYKSSPNGLRLLIKDYPYAVDG

SEQ ID NO: 61169 - protein, 202 aa, Gossypium hirsutum
  Clone ID: GOSHI-09MAY01-C23483_1.pep
MGKPGLLDLENHFAFYGAYHSNPINILIHTLFVWPIFFTSLILFYFTPAFYDLSQSGIFPSGINHALVLNYGSAFSIFLGLFYVVLDKKAGSLAALLCLACWVGASFIAAKLGYPLAWKVVLVSQLLCWTGQFLGHGIFEKRAPALLDNLVQALLMAPFFVLLEVLQSLFGYEPYPGFQMRVNAKIKAEIKEWQDKKQKKVS

SEQ ID NO: 61170 - protein, 71 aa, Gossypium hirsutum
  unsure (1)..(71): unsure at all Xaa locations
  Clone ID: LIB3585-039-P1-K1-H8.pep
QFFCHRIFEKRALALLDNLVQALLMAPFFVLLEVLXSLFVYXPYPGFQMRVNAKIKAEIKEWQDKKQKKVS

SEQ ID NO: 61171 - protein, 85 aa, Gossypium hirsutum
  Clone ID: LIB3147-045-Q1-K1-C4.pep
LKSMQCCLTTLIPQQYIILKPKFTRYQTYNLQQCNLRNLFQFLVLPLLDFGFDLCIYAHLKTRTRFVSKRTRGRTRGRTRGRTRG

SEQ ID NO: 61172 - protein, 162 aa, Gossypium hirsutum
  Clone ID: GOSHI-09MAY01-C23473_1.pep
MDLLHWKLFPLLALLASFLFFLYIQDSSKSSQSGCSLFPHSHYWIASKRIVTPQGIISGAVEIKGGSIVSIVKNKDWSGKFKQVADYGNAVVMPGLIDVHAHLDDPGRAEWEGFPSGTKAAAAGGITTLIDMPLNNFPSTVSTETLKLKIEAAEKSIYVDVG

SEQ ID NO: 61173 - protein, 132 aa, Gossypium hirsutum
  unsure (1)..(132): unsure at all Xaa locations
  Clone ID: GOSHI-09MAY01-C23423_1.pep
CCHRIGVTGLAGXELTRRLISKSKWKIYGVARQPEIIPIKSSSYHFIPCDLLDPFETKQKLSILHDVTHVFWVTCASQHPLDTAECCEENKAMLSNVLSAILPIAKGMKHFVLQTGMSHYVPIAVNGKTTHL

SEQ ID NO: 61174 - protein, 102 aa, Gossypium hirsutum
  Clone ID: GOSHI-09MAY01-C23753_1.pep
DAWADAWAALEDTAWSLWPMNPSQAAASASSVPPNVGGRFPTNTGSLHIKSASRTANEGVANILAMAETVREVLPHVPDEVIFQDLQRTNSVTVTVNNLLQM

SEQ ID NO: 61175 - protein, 193 aa, Gossypium hirsutum
  Clone ID: GOSHI-09MAY01-C23773_1.pep
MPQGNLETLVSACACGSCDNKIVCETLTTTEGHYDDCLHTAEKLLEEETPPDFPPESFLLSKDAELVWFDSNAFLERKDSQKRNSVSNSTNLNPNLNSVPNSQRFSLRKSKASILGLPKPQKSCFVETKNRKPGNTRLFPKRSGSVKSDPPVIEPSSPKVSCMGGVGSRRDRGRRVRGRTAKSRLESRRCGGG

SEQ ID NO: 61176 - protein, 147 aa, Gossypium hirsutum
  Clone ID: uC-gsflmaxxa045e12b1.pep
SLNTRLFPKRSGSVKSDPPVIEPSSPKVSCMGRVRSKRDRNRRIKKNRQKSAGIETVKKKTTRAGSGFFSSFRAIFRCNGKARESHALPLTLSPPRYSDIRSRLPPDDGDDVLNVAPEIAESGPVAEPVSLGGMKRFSSGRRSETLI

SEQ ID NO: 61177 - protein, 112 aa, Gossypium hirsutum
  Clone ID: LIB3120-010-Q1-K1-C8.pep
PRVRKTQVLTLHSPRLKRIYISYINLLKTTLYSLKFSLILLQGLKSSDNATGQSGNPRFRLRLQLLRQQNCLRDFNNHRMRLRRLPPHRGETSRRRNPCGFSARIVFVDQRR

SEQ ID NO: 61178 - protein, 61 aa, Gossypium hirsutum
  Clone ID: GOSHI-09MAY01-C23723_1.pep
DTVSVSNSCRGASSLTLSENIMVSNSGHAKLQTHFYIAGGILVKTLAYCSKRGMEDYDQEK

SEQ ID NO: 61179 - protein, 134 aa, Gossypium hirsutum
  unsure (1)..(134): unsure at all Xaa locations
  Clone ID: GOSHI-09MAY01-C23683_1.pep
MDDLVLHKLAISGPALSSMIQRLSTSPADVDGLLFGHVXSVAPSTLSDESAQSSSDSQLVATISGFLCFPSLLSFYDSLGRVDSSRLSPTHLNHKPLIGWFSSRRKTPLRPSMREFSVTRSLSFTPNLSLPIQN

SEQ ID NO: 61180 - protein, 98 aa, Gossypium hirsutum
  Clone ID: LIB3145-057-Q1-K1-E2.pep
PLLSSRWMNGYSTRKHTLYGSLTVTMILLVRKGNINQLLDYKAGRQVGLEVIRTHLQFIYLFTFVGQQEIVVIQWLGYLASIYCFRLKELVRFEASNI

SEQ ID NO: 61181 - protein, 63 aa, Gossypium hirsutum
  Clone ID: LIB3083-099-Q1-L1-B11.pep
INELQMNPNYLQTDLSSCLVIQQLVYVAFPSQQYRRSSSVSRNSGTHHVLGIQHMLCQYRALT

SEQ ID NO: 61182 - protein, 158 aa, Gossypium hirsutum
  Clone ID: LIB3582-010-P1-K1-F2.pep
HASAHASASSSSPLPHPSSPSSSLSFSASSFSSSNPHPLSIDTELWLLSEQRTQEILCIIQPSLVSEQNRQNIIAYFQRLIKGYYGIEVFPFGSVPLKTFLPDGDIDLTALSHQNMEENLARYICGILQHNQQNSEVLVQDVQYIRAQVKIVKCTVND

SEQ ID NO: 61183 - protein, 74 aa, Gossypium hirsutum
  Clone ID: LIB3083-097-Q1-L1-A3.pep
IDFELWLLSEQRSQEILCIIQPALVSEQNRQNIIAYFQRLIKGYYGIEVNLIFLHIFSRGCVKWSHFCVLVLLV

SEQ ID NO: 61184 - protein, 217 aa, Gossypium hirsutum
  Clone ID: LIB3543-061-Q6-K6-C11.pep
SIKNLAGKKRGEERRVHPGCINASNPYHECVEYCFRKIAEAKARKDNSVTETPQPEHGQPVTPAAYQEQDVQPGIPEPEESPDADSDGPVEENIEGDITNLTGRQKKLFELRLKMNEARKANQTAMVAEKKRMEALPESRGISKQKWLEERKKKIGKLLDANGLDLQNAYMLDTQEAAEAKYKKWEKDPAPFGWDVFNQKTLYNAYKKRTKNIDIDL

SEQ ID NO: 61185 - protein, 61 aa, Gossypium hirsutum
  Clone ID: LIB3083-094-Q1-L1-F7.pep
MEEERRVHPDCINASNPYHECVEYCFRKIAEAKARKDKSVTGLTVILVILKLMFLFTLPFP

SEQ ID NO: 61186 - protein, 308 aa, Gossypium hirsutum
  unsure (1)..(308): unsure at all Xaa locations
  Clone ID: GOSHI-09MAY01-C98853_1.pep
HCKVIWVEHLECQKNTVHTLYRTIVRSGLAFGARHWMATLQHQCERLVFFMATNVPTKDSTGVATLAGRKSILKLAQRMTWSFCHSIGASSYHTWNKVSTKTGEDIRVSSRKNLNDPGEPHGVIVCAVSSVWLPVSPTLLFDFLRDESRRSEWDIMSNGGPVQSIANLAKGKDRGNAVTIQAMKSKENSMWVLQDSCTNAFESMVVFAHVDVTGIQSVITGCDSSNMAILPSGFSILPDGLESRPLVISSRHEKSNDPEGGSLLTVAFQILTTSPXTAKLPMESVESVNTIVSCPLRHINTSLQCEDG

SEQ ID NO: 61187 - protein, 264 aa, Gossypium hirsutum
  unsure (1)..(264): unsure at all Xaa locations
  Clone ID: GOSHI-09MAY01-C98763_1.pep
IFAYGQTGTGKTYTMEVNAKDEEGPNGELPAEAGVIPRAVQQIFDTLEGQNAEYSVKVTFLELYNEEITDLLAPEEISKVALEDKQKKQLPLMEDGKGGVLVRGLDEEIVTSASEIFTLLERGSAKRRTAETLLNKQSSRSHSLFSITIHIKEATPEGEELIKCGKLNLVDLAGSENISRSGARDGRAREAGEINKSLLTLGXRVINALVAHLGHIXPHRDSKLTRLLRDXSLGGRTNTCIIATVSPAAXCLEDPLSTLDYAHR

SEQ ID NO: 61188 - protein, 51 aa, Gossypium hirsutum
  Clone ID: GOSHI-09MAY01-C98733_1.pep
WLYRFGRNQFTNNFKFTYQIRHLISHAKSDSLISRNWNLNLIYFLRGEHKR

SEQ ID NO: 61189 - protein, 63 aa, Gossypium hirsutum
  Clone ID: GOSHI-09MAY01-C98693_2.pep
IKMTSKGSESEYKQYPCYRLVIKPNKTATRTDIIDTKCNYNSTLLPVKNIRPLKLATLNKLTS

SEQ ID NO: 61190 - protein, 136 aa, Gossypium hirsutum
  unsure (1)..(136): unsure at all Xaa locations
  Clone ID: GOSHI-09MAY01-C98693_1.pep
LPQEITCDPECKAHIEKTLYSGHASYKVLSMAGFLVIWEPATLGGGRDGYSIKCSGPNGPVVTEKFYPTTQIKITFEEPTEFTIFGSXGVQRVLRADNNSQDISCSRDTIVLTLRLFILRAGERRKGKKRGLFFNK

SEQ ID NO: 61191 - protein, 178 aa, Gossypium hirsutum
  unsure (1)..(178): unsure at all Xaa locations
  Clone ID: GOSHI-09MAY01-C98053_1.pep
CEVRLRYCPEVTVSRXYGGSIVEYQDFMVRNYSPPPSINNSIKMEVGIEDCLHIEFEYNKSKYHLKDVIIGKIYFLLVRIKIKNMDLEIRRRESTGSGANTHVETETLAKFELMDGAPVRGESIPIRLFLSPYELTPTHRNINNKFSVKYYLNLVLVDEEDRRYFKQQEIAIYRLQDS

SEQ ID NO: 61192 - protein, 120 aa, Gossypium hirsutum
  Clone ID: GOSHI-09MAY01-C98063_1.pep
PPSASAAACLLCHVRHHRSGHQPPASDTTCKMKVHTQANTNSRETNKEKNDKQKKKRKEANKMKKKQRTNQCNSAIKSRNQSLYFFTHTINQKEQNKSFERWIFLSIFVFVSFVFIFSIS

SEQ ID NO: 61193 - protein, 141 aa, Gossypium hirsutum
  Clone ID: GOSHI-09MAY01-C98003_1.pep
MNIGKSNDKVAAELELTRAAKQEAIMKLGLAMEEADKNNRKATRVAEQLEAAQAANSEMAAELRRLKVQSEQWRKAAELAAALLSAGNNGKKLIERTGSLDSNYNPKISSPYTEDMDDDLLNKKNGNMLKKIGILWKKPLK

SEQ ID NO: 61194 - protein, 123 aa, Gossypium hirsutum
  unsure (1)..(123): unsure at all Xaa locations
  Clone ID: LIB3829-010-Q6-N6-F9.pep
PSYSTPVRELESLTLAREPIQVKDSLALKYAELVYAGRWFAPLRESMDAFMEKITETPPGSVXTLKLYKGSVSVPGRTSAYSLYREDISSFESGDIYNQADAAGFIRLYGLPMRVRAMLNKGI

SEQ ID NO: 61195 - protein, 104 aa, Gossypium hirsutum
  unsure (1)..(104): unsure at all Xaa locations
  Clone ID: LIB3829-004-Q6-N6-G12.pep
FKSYTSPSKYGQLVYAGRWVXTPLRESMDAFMEKITETTPGSXVTLKLYKGSVSVTGRTSAYSLYREDISSFESGDIYNQADAAGFIRLYGLPMRVRAMLNKGI

SEQ ID NO: 61196 - protein, 253 aa, Gossypium hirsutum
  unsure (1)..(253): unsure at all Xaa locations
  Clone ID: GOSHI-09MAY01-C98233_1.pep
AADENVELNEQTLDGEPRPSDRSPKNQLREDQQQAQEWETLARAWVGAFPEAKAVTESQVKVWIDSNFGSLPADLQSMPRSELIERLLSIQNYLRFPSQTQDREPSQHDLPPARFQRTDQWIPVYSWLESLDTDEVVKSKDILDWLNDNPQVRXQLCSRHSRYHLMHYIKKCHLKILKRREKKVGSQPLNKESVLKVRKDVVAKKPAPVPNNPLNNIPKDSDLYIAKRNEALRKYEILLELEKKLSPVFSMKK

SEQ ID NO: 61197 - protein, 128 aa, Gossypium hirsutum
  Clone ID: GOSHI-09MAY01-C99843_1.pep
ERYFNVKEISSLMTISTYSIYCRQTSYEQSRECLQKELDGCWFDHIPDTIGNEWGSCKKALELQFHVKDPLFTLELEICQQAIDGNFNSCFAWERMVDAVKVLILHLQLKALIFMGCLLENLTKVTSD

SEQ ID NO: 61198 - protein, 91 aa, Gossypium hirsutum
  Clone ID: GOSHI-09MAY01-C99873_1.pep
KSPNLCRSLYLVLYNVCGLHLLPFKSFLRPADPPLFIFPIFYLFLCSQHLKNLLLCILQGPKKKDNSGIGVKRLIIGVLARGGCLSNLEMC

SEQ ID NO: 61199 - protein, 131 aa, Gossypium hirsutum
  Clone ID: LIB3825-026-Q6-N6-H8.pep
DEYIVANDCSLLLTYHHTSFYLQLSLISFHIQQWKLHLFELEAELKVEPLIKYVLYGDERGKQWRVQAVAASPDSFESRKPLPAQWRGLRDDELSKETRISGCVFVHMSGFIGGNQTYEGALVMARTALKM

SEQ ID NO: 61200 - protein, 145 aa, Gossypium hirsutum
  Clone ID: LIB3829-012-Q6-N6-H8.pep
AGSEFLESVQFHARSWLPARSIVMECIAERFDIDPSGEIMVLKRFCPWKLHLFELEAELKVEPLIKYVLYEDERGKQWRVQAVSVSPDSFESRKPLPAQWRGLRDDELSKETRISGCVFVHMSGFIGGNQTDEGALVMARTSLKM

SEQ ID NO: 61201 - protein, 63 aa, Gossypium hirsutum
  Clone ID: GOSHI-09MAY01-C99463_1.pep
KSQISNSILQNLKPTTKLAQIIAQQLKVFSSNPSLLHPQPPHVSSATCTTADRGTNHQLSANA

SEQ ID NO: 61202 - protein, 247 aa, Gossypium hirsutum
  unsure (1)..(247): unsure at all Xaa locations
  Clone ID: GOSHI-09MAY01-C99683_1.pep
RSASQDSNSDIAKTPPPKSSTINSSAAATPAGSHVTPAPLNLPPHSLSGASSPSVLPDSNSAQGLLESTGTTNPPPVNLSNATKEEDITNFPGRRSSPSLADTEVRGIGRGLSGQPSSTIPLVSGSVASGNGALGAVPPASDMAKRNILGVDERLGNSSMGQSLTSPISNRMILPHAAKANDGSAPVDSSNPNEPAGLPGRAFSPSMVPGMQRRPGSSFXNQNELVQFSGRTEIAPDXREKFLKPVQ

SEQ ID NO: 61203 - protein, 138 aa, Gossypium hirsutum
  unsure (1)..(138): unsure at all Xaa locations
  Clone ID: GOSHI-09MAY01-C99273_1.pep
GSREEHLRQKEDPRPTPIPLSHWRGAHVLEFLRDLHAGAKTQVHHPLCPFFGHPNPTAPCPCPLRHAWGXLDALIGSPPLPXEEHGGKPEANPYGARAVRLYLREVRDSQAKARGISYEKKKRKRPPHNPASLPPPNQ

SEQ ID NO: 61204 - protein, 296 aa, Gossypium hirsutum
  Clone ID: GOSHI-09MAY01-C94553_1.pep
AILSRYALQDLPERGIFDPNSTAFGRLTLPVAAPGMKVDNANSLDLAEHLYMHSNNQLDPFSSGNPSFYQQVLGNVYASHPGAMESFHARKNGQLENSWTAKEIPQLNLEAELQRRESEVDSSAWASAGGVNENSKKALMDLLYQKLGIQSMQSSEIDRQNSTSSSRGRETFWPVSEQQTSNFPFNHFPNQEVHVNNLFPEGPQNSNSSALLQDHLFGVAPSASANHMVNCERLPLKANFGSFAEEQSFLLGIEDPSRSSYVDASLMGKSAVDIEIAELEGKDKENGMKGMSNRNG

SEQ ID NO: 61205 - protein, 212 aa, Gossypium hirsutum
  unsure (1)..(212): unsure at all Xaa locations
  Clone ID: GOSHI-09MAY01-C94053_1.pep
GKFGSGNQGLNVPQTITCNIMSLETLKSLTTMSSHKGDVEQPKPIEQDLELGLAGRGSSLVLAGLHACGDLSVTMLKSKYAXTLLECEEVRAVISIGCCYNLLSEEGFTNAQIQYGFPMSCGVKSVYLSLGKSSRDLACQSAERWKSLGKDAGLHNFELHAFRAAFQMVLHKYFPEVGTSPSIGRQGKALRRKQQRKIIESELQAEEVLILI

SEQ ID NO: 61206 - protein, 70 aa, Gossypium hirsutum
  unsure (1)..(70): unsure at all Xaa locations
  Clone ID: GOSHI-09MAY01-C94353_1.pep
NHLQTESTTXLSAQLTLFQRDTXTGLTTENTELKLRLQAMEQQAQLRDALNEALKKXEVERLKMATATAS

SEQ ID NO: 61207 - protein, 122 aa, Gossypium hirsutum
  Clone ID: GOSHI-09MAY01-C94303_1.pep
SPNSKPTMGGCASKPKEFDGPADAPISSDTTAQSSTNGGESQIEKPAVDGSEPEKKAQTAVSAETDAGKSVKPAEDDAKADDKNAEDKVEATPKQEAEEPEHKSNDAPSKEEVKSEAPLASL

SEQ ID NO: 61208 - protein, 151 aa, Gossypium hirsutum
  Clone ID: GOSHI-09MAY01-C94243_1.pep
AYYSFYLPVACALLMAGENLDNHTEVKNVLVEMGTYFQVQDDFLDCFGDPEVIGKVGTDIEDFKCSWLVVKALERANEEQKKLLYENYGKDDRVCLAKVKELYQTLDIQGAFEEYESKSYEKIMKQIEGHPSKAVQAVLKSFLAKIYKRQK

SEQ ID NO: 61209 - protein, 70 aa, Gossypium hirsutum
  Clone ID: LIB3825-022-Q1-K6-B9.pep
ILWKAQKIIFRRRTFWFDLYTCFFPVVNSSYVLNAFLSSEYFIIIEIFKSHAKFLYLSWAVGCISYHFSF

SEQ ID NO: 61210 - protein, 67 aa, Gossypium hirsutum
  Clone ID: LIB3825-025-Q6-K6-H9.pep
SYIKQIQRLNFNKGCYETHYYIFLIFNIEDIRIFKSKSGMKYSPQPNSRKETLHGLKELNDNKILRT

SEQ ID NO: 61211 - protein, 102 aa, Gossypium hirsutum
  Clone ID: GOSHI-09MAY01-C95863_1.pep
STRNHLSIIWLLFYSVCVSSTDYIRWLFIAGKIRIKITNNLFPFFFFLLFFPLYSVIAASCVFCCRNDRTEEVVHGDVEAVRGKPIVGGGSSGATLAYSRNL

SEQ ID NO: 61212 - protein, 99 aa, Gossypium hirsutum
  Clone ID: GOSHI-09MAY01-C95593_1.pep
FDQDKSSYGDPNIMDPPRNRGVQFPFAVTDRVIIKGNKRTPQRFVGREAVVTMQCLNGWYVVKTLDNAESVKLQYRSLAKVADNTAPKPITSKMGPNWL

SEQ ID NO: 61213 - protein, 97 aa, Gossypium hirsutum
  Clone ID: GOSHI-09MAY01-C95463_1.pep
KVAYCIEDAHSTRLKGVVVLTKDGGSDDEPYLVASASSDGFIRVWDVRMAAKEKPNPLAEANTKSRLTCLAGSSLKSSKRPRIGKSTPKEEDVAEEV

SEQ ID NO: 61214 - protein, 108 aa, Gossypium hirsutum
  Clone ID: GOSHI-09MAY01-C95683_1.pep
SQRIQSYMAELIGIIERSSTLTINKNHSSREINTRAETKFGAAFDKKNFKPASSLVAWDYLGELLASKTVLHSNVPLPCTVKAYIGQLRANPDLSYLNPEGRWRICPD

SEQ ID NO: 61215 - protein, 285 aa, Gossypium hirsutum
  unsure (1)..(285): unsure at all Xaa locations
  Clone ID: GOSHI-09MAY01-C95253_1.pep
MENGEIPENANEHCPGPQSESAGKSDACQGCPNQEVCATAPKGPDPDLVAIAERMATVKHKILVLSGKGGVGKSTFSAQLSFALAAKDFQVGLLDIDICGPSIPKMLGLEGQDIHQSNLGWSPVYVESNLGVMSIGFMLPNPDEAVIWRGPRKNGLIKQFLKDVYWGELDFLVVDAPPGTSDEHISIVQFLQATGIDGAIIVTTPQQVSLIDVRKEVSFCKKVGVPVLGVVENMSGLCQPLKDFRFLRMTENGEHTDLTEKVIEYMKEKAPEXLDLIAASEIFDS

SEQ ID NO: 61216 - protein, 76 aa, Gossypium hirsutum
  Clone ID: GOSHI-09MAY01-C96533_1.pep
FLDTEVFFADYYLSSSTAILFTNFSDHLLLQSTSREVKRLDSITSSPVYAQFREAFDGFSSIPAYRAYDRVAIVIG

SEQ ID NO: 61217 - protein, 303 aa, Gossypium hirsutum
  Clone ID: GOSHI-09MAY01-C96753_1.pep
RGYNRSRISSHAIEAYLIQILRTGFFHADPHPGNLAIDVDESIIYYDFGMMGEIKSFTRERLLELFYAVYEKDAKKVMKSLIDLGALQPTGDLSSVRRSVLFFLDNLLDQRPDQDTTLAAIGEDLFAIAQDQPFRFPSTFTFVLRAFSTLEGIGYILDPNFSFAKIAAPYAQELLDIRQRQRTGSQLVQEIRKQADDARSYTMSMPYRVQRIEEILKQLESGDLRLRVRVLESERAARKATILQMATMYTVLGGTLLNLGVTFSSQGSQIIANGSFVGAGVFLTLFLRSMQRVKKLDKFEKMI

SEQ ID NO: 61218 - protein, 175 aa, Gossypium hirsutum
  unsure (1)..(175): unsure at all Xaa locations
  Clone ID: GOSHI-09MAY01-C96763_1.pep
MENCTMSAXEGFSGLCIXHGGGRRCLFIRRTNGAQGTTMFCKASWSAEKRCTYPGCTKGAEGSTPFCPGHGGGKRCAFQGGGVCTKSAHGGTNFCVSHGGSKKCDMPECTKSARGRTDYCAHHGRCKRCKFEGCGKSAQGITDFCKAHGGRKRCSWGHPVSEYGNQPSGPCNYFA

SEQ ID NO: 61219 - protein, 42 aa, Gossypium hirsutum
  Clone ID: GOSHI-09MAY01-C96693_1.pep
KEDQKAVDASLIKSIEGVADLKAYLAARFSLKSGMKPHELVF

SEQ ID NO: 61220 - protein, 86 aa, Gossypium hirsutum
  Clone ID: GOSHI-09MAY01-C96343_1.pep
KKDLAEEVWRLQAALGEQSEITKYSQQEFERLQNEKVLCRVCFEREISVVLLPCRHRILCSTCCEKCRKCPICRVSIEERLPVYDV

SEQ ID NO: 61221 - protein, 34 aa, Gossypium hirsutum
  Clone ID: GOSHI-09MAY01-C97953_1.pep
RVDLASEFREAYKRAGRSNIVQELGPPIAIGVPN

SEQ ID NO: 61222 - protein, 103 aa, Gossypium hirsutum
  Clone ID: GOSHI-09MAY01-C97973_1.pep
GSTLRPHTFRFHLIKGEVTHCALGIHLKDKQQWPGCRRMIVFCFITLVVCSFLVKASNAGQNDHGCNHGGAQPGDSQRCEDTPEDEDDFDDTFKLVNNIKIKI

SEQ ID NO: 61223 - protein, 117 aa, Gossypium hirsutum
  unsure (1)..(117): unsure at all Xaa locations
  Clone ID: GOSHI-09MAY01-C97903_1.pep
FVEAKEAFKKCVEKYFXMLDSNGNGVICRRKLREGLDLLFTVEHESTVSKEDIDNFHSMIFDKFDEDRNGKLDLYEFAALVKEIMMAMARGMGSLPVIVALDQDSLLMMAVQHEIGS

SEQ ID NO: 61224 - protein, 176 aa, Gossypium hirsutum
  Clone ID: GOSHI-09MAY01-C97823_1.pep
MEETIIPVTEQKQFPQTPEHIFILSGQSNMAGRGGVHRHHWDGVVPLDSQPHASIIRLSANLHWEPAREPLHHDIDVRKACGVGPGMSFANAVKDHLGGGGECLGLVPCAVGGTAIKEWERGQHLYDNMLKRSKESVEKTKGEIKALLWYQGESDTPSYHTAEAYKENMERLIHNV

SEQ ID NO: 61225 - protein, 169 aa, Gossypium hirsutum
  unsure (1)..(169): unsure at all Xaa locations
  Clone ID: GOSHI-09MAY01-C97473_1.pep
LNTVGPIHRPPVLSKMQLGLITALLLLCLPLVAKRIFAGETLIHDPKIWLSGAVFVYFFSVSGAMHNIIRKMPMFLVDRNVPXKLVFFYQGSGMQLGAEGFAAGFLYTVVGLLLAVVTHVLVYVKDATAKRLAMLFTLLVSFWAVKKVILLDNWKTGYGIHGFWPSSWN

SEQ ID NO: 61226 - protein, 97 aa, Gossypium hirsutum
  Clone ID: GOSHI-09MAY01-C97663_1.pep
DSNRRKLNILHISRMTEAPNPEKLLISRETRRTELLCFPFLHRPELFSPGRPTNCGLAQPESPQPVESHSSKIILVLVEGLLWLTSSLLRWPMFSHA

SEQ ID NO: 61227 - protein, 142 aa, Gossypium hirsutum
  Clone ID: GOSHI-09MAY01-C97143_1.pep
SYVERLLGPVMVSRIGSVLAIPLLQSYPLTAMLSGFTLTLVINCASVLKNVLSVSIITGLFILQNRAVDQHQRGAANGIAMTGMSLFKAVGPAGGGALFSWSEKRLDASFLPGTQMVFFVLNIVEAVGFLLTFEPFLAQRRQ

SEQ ID NO: 61228 - protein, 143 aa, Gossypium hirsutum
  Clone ID: GOSHI-09MAY01-C97383_1.pep
MNQIARSHLIMFLFALSFLVPSLEASEGDADPIYKTCLEDCEISGCVGEMCFQHWKFSSDGKPIDGPWYLQEPLYQKWKQWDCRSDCRYHCMTAREEQRWKLGGKPIKYHGKWPFQRVYAIQEPAAVAFSAISLAIQFHEMSS

SEQ ID NO: 61229 - protein, 202 aa, Gossypium hirsutum
  unsure (1)..(202): unsure at all Xaa locations
  Clone ID: GOSHI-09MAY01-C90503_1.pep
ARGRAAFFEEXGETYKRVAAVCLRPLEQLASKLVQGFEGSADDKTFSISDQLQSPTNPRQNSKCHELVNDFQVYTWSARALASLTSRSRREDRFGVAQLSGSNAAAISTLIACLLAVETLMGKKISLQPSHQLMGAFSTKSATFSTGRRDVRTGKRRDDPLYSKAYAMADVLRTSIYGIVSAFHHEMLTRAKARFFREDWIT

SEQ ID NO: 61230 - protein, 113 aa, Gossypium hirsutum
  Clone ID: GOSHI-09MAY01-C90483_1.pep
MSLHWALICHGLITLTIVVSFLCGQWPIFQGTPISSIHRFLTFGAYQYFLRFIGAVFGDRGTNLILSVEYYCCDRPNPILQLIYLAIIGTTYYIIVKTSFSYIPGYYLSEVHR

SEQ ID NO: 61231 - protein, 260 aa, Gossypium hirsutum
  Clone ID: GOSHI-09MAY01-C90423_1.pep
KPGEGGCGHKSYVGGIPYRYTEDDIRYYLESCGTITDVDCMKFPDTGKFRGIAIISFETEAAAKEALALDRAEMGGMQLTIQPYKSTRANKVTGFAPKMVEGYNRIYVGNLSWDITEDDLKRFFSDCNISSIRFGTNKETGEFRGYAHVDFSDSVSVAMALKLDQEIVCGRPAKISCAVPKNGVKTQSTSDPTSNEVRKKDEGALSVEAPVSVEAPTVNEVDDGGSSVTSGKLRRRTCYECGQKGHISSACPKGSVSVEA

SEQ ID NO: 61232 - protein, 74 aa, Gossypium hirsutum
  Clone ID: GOSHI-09MAY01-C90763_1.pep
WRINGRLAGLDCIAVEAKSGSLLSFAMVEACSCHGFVAMLGDCLPYPGRKDILAMCVLFNQTTAFNSKNQNFIL

SEQ ID NO: 61233 - protein, 284 aa, Gossypium hirsutum
  Clone ID: GOSHI-09MAY01-C90703_1.pep
MEGIAFSPSNNFHCYPQIHPIKTLTPIPFRFCNYKTNNPNQSLLSFSINSSKTTQTPITQPPPLVVVGSANADIYVEIDRLPTEGETISAKNGQTLAGGKGANQATCGAKLSYPTYFVGQVGDDAHGKLITQALGNGGVRLEYLKNLGGGVPTGHAVVMLQSNGQNSIIIVGGANMSSWPDKLSDQDLDVVKNAGIVLLQREIPDSVNIQVAKAAKGAGVTVIMDAGGMDAPMPQELLKFVDIFSPNESELRRLTGMPTDNFEQISQAAAKCHKMGVKQVLVKL

SEQ ID NO: 61234 - protein, 173 aa, Gossypium hirsutum
  unsure (1)..(173): unsure at all Xaa locations
  Clone ID: GOSHI-09MAY01-C90663_1.pep
MGFATRSLRMPRVSSKTSGSLFSSVGELDKETREERRVADVWREIHGVDDWVGMLDPMDPLLRSELIRYGEMAQACYDAFDFDPFSKYCGSCRFTPRQFFDSLAMADHGYVVSRYIFATSNINLPNFFXKSRWPKVWSKSANWIGYVAVSNDEISKRLGRRDIVVAWRGTVTR

SEQ ID NO: 61235 - protein, 122 aa, Gossypium hirsutum
  Clone ID: GOSHI-09MAY01-C90373_1.pep
MFYSFCSSNIFFLITKKGSFDYLQSGQPSRVRSFPHVEGDYALHIYIPDTFFEWPQFFINNIELNELPFFLFTLPIISVFVQSISKKEMGQFLKRVSSVGPNLHVGDIDVPLDTLCKEEHKP

SEQ ID NO: 61236 - protein, 93 aa, Gossypium hirsutum
  unsure (1)..(93): unsure at all Xaa locations
  Clone ID: GOSHI-09MAY01-C91983_1.pep
GILTVLFPXEGGPTLQVAISLIATFYFTHDRLKSKIRTLLYGAGAFIFSWLLGTFLMVSVIPPIPILKGPRSFEVLTSLITYVLLWVSSTYLK

SEQ ID NO: 61237 - protein, 61 aa, Gossypium hirsutum
  Clone ID: GOSHI-09MAY01-C91963_1.pep
VGSQRALFGDVQGKVKVLSDKFPVIRGLLGSIRWRRSRDTLILSAVIAGCTLFLIIYWLSK

SEQ ID NO: 61238 - protein, 158 aa, Gossypium hirsutum
  Clone ID: GOSHI-09MAY01-C91903_1.pep
VGLVISMLLLGDFSLVLLTFLQLYSVSLVDVSLVVFIIPLGILLPFPVGINALFSHGPRRSAGLARFYALWNITSLINVVVAFLCGYINHNSRSSSSIRTPSLQPWNINMDESEWWIFPSGLVLCKLFQSQLINWHVANLEIQDRSLYSDDFELFWQS

SEQ ID NO: 61239 - protein, 108 aa, Gossypium hirsutum
  unsure (1)..(108): unsure at all Xaa locations
  Clone ID: GOSHI-09MAY01-C91893_1.pep
ESDTLERQTRISLHFHLQKQXKKLRHAFSYSWRLWSLPEIRDCLEEAGFQSVHFWLRKMPDTSENRSTEGFGSGRDVKYEEVKTFQQEDAWNAYIVAVTNLKAASAAS

SEQ ID NO: 61240 - protein, 81 aa, Gossypium hirsutum
  Clone ID: LIB3828-008-Q1-N6-B11.pep
QQKKLRHAFSYSWRLWSLPEIRDCLEDAGFQSVHFWLRKMPDTSENRSTEGFGSGRDVKYEEVKTFQQEDAWNAYIVAVTN

SEQ ID NO: 61241 - protein, 162 aa, Gossypium hirsutum
  Clone ID: GOSHI-09MAY01-C91833_1.pep
GVADKVFKYDTIPDDPPAEITKITMEPIVLNLTHRNFMEIIFENRETAIQSYHLCGYAFFAVAVETGQWSPEKRKNYNLLDAVSRHTIQVFPKSWAAILLSFDNCGMWNIRSEIWDRRYLGQQLYVSVLSPNKSLRDEYNMPEGALVCGVVENMPRPPPAYT

SEQ ID NO: 61242 - protein, 50 aa, Gossypium hirsutum
  Clone ID: GOSHI-09MAY01-C91593_1.pep
DQTTSHSPLLSKKTSVTVKKKKRKAPPTISTLNYHLHQIYIILPLLKTQK

SEQ ID NO: 61243 - protein, 91 aa, Gossypium hirsutum
  Clone ID: GOSHI-09MAY01-C91513_1.pep
GWFYKIWALYFLSIIVMGPGKIWFSQSLWQLLLGIYYVDHKCKKSSYEVAIGRVCSKLAYSIDPVFHGICILMLSNCRFFIFFNENYRPFT

SEQ ID NO: 61244 - protein, 63 aa, Gossypium hirsutum
  Clone ID: uC-gsflnu33B080e06b1.pep
LITIEKNRYYFSVVAAIFCCFLPSFLAVCRSLEVQAMGRGQGVVEPRASDVLTRHVGSGTYCC

SEQ ID NO: 61245 - protein, 120 aa, Gossypium hirsutum
  Clone ID: GOSHI-09MAY01-C91503_1.pep
FFFFFFFFFFFFFFFFFFLFLVTPYFFFYFFFFFFLFFFFLRLIAYLYYNISIIPHYKATIELKFGNPPSKRQTIPPIISIYRMKLKSIEFRKEEELDKPRKAFHKMRFLDRNNPHGMHP

SEQ ID NO: 61246 - protein, 75 aa, Gossypium hirsutum
  Clone ID: GOSHI-09MAY01-C91483_1.pep
VIQELQHQIECTQAEIDQIYYTIAICRTQNAHRLQMQKIDDGDRCQMMNKLPLIGFETEKLANLSIKSDDNIGEK

SEQ ID NO: 61247 - protein, 165 aa, Gossypium hirsutum
  unsure (1)..(165): unsure at all Xaa locations
  Clone ID: GOSHI-09MAY01-C91403_1.pep
PRVRGNHFFKDCHIRGTVDFIFGSGKSLYLNTKXFVEGDPGLTVITAQARESSSEDTGYSFVHGSISGTAKNAFLGRAWKSSPRVVYAYTEMGNVVNPAGWSHNLQPERAKTVYYGEYKCTGQGANPKTREPFVKQLPDAEAQPFLVLDYVEATKWLLPSPTVPN

SEQ ID NO: 61248 - protein, 328 aa, Gossypium hirsutum
  Clone ID: GOSHI-09MAY01-C91603_1.pep
VLIKAASVKGMSYVVFTAYCYILGTLVFLLLVSLFKSKSVLPQLKYPLFSRIFLIGLFGFSGQLCMYKGLQLSSPTLASAISNLTPAFTFILAVFFRIEKVAFRSSSSRAKIMGTFSSICGALVIIFYKGPKVFSLSSSAIHQRPLGLMSSESNWIIGGLLLAVAFVLVSLGYIIQSQIMKIYPEEVTVNFFYNLFGTIISLPICFLAEPNLSSWRLSSDLAAVAVLYSGLFGFSFLCVVHIWGIHLKGPVFVASFKPTSIAIAVVMSAIFLGEAIFLGSVIGSLILCTGLYCVLWGKAKEEEETIDDDCGLSTPINGRVPLLRSQQS

SEQ ID NO: 61249 - protein, 261 aa, Gossypium hirsutum
  unsure (1)..(261): unsure at all Xaa locations
  Clone ID: GOSHI-09MAY01-C91033_1.pep
VDPAFAARGLCKTLGDRFIIKQVTKTELESFVKFGPAYFKYLSESINTRSPTCLAKILGIYQVSXGHLKGGRESKMDMLVMENLLFRRNVTRLYDLKGSSRSRYNPDTSGSNKVLLDQNLIEAMPTSPIFVGSKAKRLLERAVWNDTSFLALIDVMDYSLLVGVDEEKHELILGIIDFMRQYTWDKHLETWVKTSGILGGQNTSPTVISPQQYKKRFRKAMTAYFLMVPDQWSPPTIVPSGSQTDLCEENNNRSQSGLLQQ

SEQ ID NO: 61250 - protein, 107 aa, Gossypium hirsutum
  Clone ID: GOSHI-09MAY01-C91353_1.pep
ITSVGNGDVSAPQGPITGQSNDTASGGSAAKSTKQPPGHSVAPPCISVHGVPTMGQPIGGPLISAVGTPVNLPAPAHMAYGVRATLPGAVVPGAPVTYPMPHTSAHR

SEQ ID NO: 61251 - protein, 170 aa, Gossypium hirsutum
  Clone ID: GOSHI-09MAY01-C91323_1.pep
LSYGVGHRHEAGNLQLFWMTMIDTLWQSLVLFYIPLFTYKESTIDIWSMGSLWTIAVVILVNIHLAMDIRRWVFITHAAVWGSIIITYACMVVLDSIPVFPNYWTIYHLVKSPTYWLTILLIIIVALLPRFLFKVIHQIFWPSDIQIAREAEILRKVAPNLRSKPDEDSS

SEQ ID NO: 61252 - protein, 169 aa, Gossypium hirsutum
  Clone ID: GOSHI-09MAY01-C91253_1.pep
KHWISNLSSSISERNGRFLAMANSKGSTNIRNFMVSGKHALLPPKSPFPTVSPAYTDYVPNSVIGSKAVQKPREGNTHHQRTSSESLRMEEQPSWLDDLLNEPETPVRRGGHRRSSSDSFAYIDASSAPNLDYAAQDEFRFQNMINTPSWASQDARLSSLYSDVNLVRH

SEQ ID NO: 61253 - protein, 84 aa, Gossypium hirsutum
  Clone ID: GOSHI-09MAY01-C92903_1.pep
HPLTIRHYNHQPQLPRPSFLNSLQCRTTDDIVFLLSLSEPKTLVRHSLPKAKVLSQCSHPLLLQPFHSVADQIFSHIVQMGTRT

SEQ ID NO: 61254 - protein, 85 aa, Gossypium hirsutum
  Clone ID: GOSHI-09MAY01-C92923_1.pep
PKRAMWGFMFFSQVERENIKKTNPGASFAEISRILGEKWKKLSEEEKEPYEAKAKVDKRRYDVERNAYKNPQPMNIDSGNESDSE

SEQ ID NO: 61255 - protein, 130 aa, Gossypium hirsutum
  Clone ID: GOSHI-09MAY01-C92533_1.pep
DDEYINDFRSKNDDDESIVYTENVVNSSEETVAAIRKLDNYHDLLIVGRGHGVMSPLTTGLTDWSECPGLGAIGDILAESDFSSTVSVLVIQQYIGSSQHELTGSPHSTSQSDDELIHRRTWSPKKTDYI

SEQ ID NO: 61256 - protein, 162 aa, Gossypium hirsutum
  Clone ID: GOSHI-09MAY01-C92523_1.pep
VRAAKRRESIHGLVDVYTKTLKSDGIAGLYRGFNISCVGIIVYRGLYFGMYDSLKPVILVGKLQDSFFASFALGWVITNGAGLASYPIDTVRRRMMMTSGEAVKYKSSMDAFSQILKKEGFKSLFKGAGANILRAVAGAGVLAGYDKLQMIVFGKKYGSGGA

SEQ ID NO: 61257 - protein, 110 aa, Gossypium hirsutum
  Clone ID: GOSHI-09MAY01-C92403_1.pep
KKICSSASFSVIRSTKRMRTLIKWEVKMQKKICSSASFSVIRSTKDNEMMQGCRKQDRDNHIPFIHLLVIYHSNSYLAFGFPPYPVVLVKMRLLLLTADVTIFFFFPTVN

SEQ ID NO: 61258 - protein, 119 aa, Gossypium hirsutum
  Clone ID: GOSHI-09MAY01-C92053_1.pep
PCSNQYECCACSKEPEPCSCGPDICGGQIKLDKCTVSKNDSPMENRASKNPIHWFIRKRRNHAQKKLENDIALGLENEQDWAPGGWGFVDRALLVGIFVSFFMIVAVIMHLEFRTLLSK

SEQ ID NO: 61259 - protein, 55 aa, Gossypium hirsutum
  Clone ID: GOSHI-09MAY01-C92043_1.pep
KSFNFQPRYKQGYDRKPKADVLSSIGGYAPSTTVHQMFSRLKLFKIHNQDRLQLY

SEQ ID NO: 61260 - protein, 140 aa, Gossypium hirsutum
  Clone ID: GOSHI-09MAY01-C92073_1.pep
ASKPENNGFIPTSPDVPASKPENSGLIPISPDLSASKPENNGVMPISPDLSASKPENNGVIPISPDLSASKPENNGVIPISPNLSASKAAHKGEIKLKKHKHKKKKHHGKGKKHRGKGKKKGKKSKKHHGKVELKSIIQA

SEQ ID NO: 61261 - protein, 75 aa, Gossypium hirsutum
  Clone ID: GOSHI-09MAY01-C92003_1.pep
PIFQKNTNLITNCPLFFLQLILHSFRNYNPSTNMIIVIIWYYWSDVDRFRRDFQFHLGGLQFQSLPYFHLKICCF

SEQ ID NO: 61262 - protein, 62 aa, Gossypium hirsutum
  Clone ID: GOSHI-09MAY01-C92243_1.pep
LKPKESRSGPAASPSGPDHLDSLISGRDIIKFLQGFETFRTLTAVRGGVDDGAWAPNDRSVA

SEQ ID NO: 61263 - protein, 84 aa, Gossypium hirsutum
  Clone ID: GOSHI-09MAY01-C93993_1.pep
LFDSPNSDLGSVSLEDCPKVARKKEKTFRLFRVLKKPFYIKRRSLFLDSDDLGCLRSRRIDHQVTETSNACGCGGVLGRSNGSL

SEQ ID NO: 61264 - protein, 209 aa, Gossypium hirsutum
  unsure (1)..(209): unsure at all Xaa locations
  Clone ID: GOSHI-09MAY01-C93983_1.pep
AAWADAWASQLFIEATGTGTVPAIAVSVNGTLKIPTSSGKQEGELPKKRRXRPSNSEFIDINEHQSSVSSGLAPIAPMTCNSFNLNSQGLVPIWPMGTFSVLPAAPGSNQAQLWAIPATATPFXNVTGRPISSFVSAMQPEVQDSSVGSMGSSVLPTSSSGATSVSNGNNSSNHSTTQMLREFSLEILDKRELQFLGCPANQQAPCSKP

SEQ ID NO: 61265 - protein, 66 aa, Gossypium hirsutum
  Clone ID: GOSHI-09MAY01-C93923_1.pep
KNTGNINPQASWVSGILRSSDLQFANPNSKEIATVEKSNISQNRVDLTERDPGLTSSKPTRPPTLR

SEQ ID NO: 61266 - protein, 104 aa, Gossypium hirsutum
  Clone ID: GOSHI-09MAY01-C93843_1.pep
PNSHTFPSLHLKWGISLFLKRVSRLGVPETSWRPKCPYYQPPPLILAKGVDEAQWVDAQKREYVRKRLRRKRLESHVHPLIPILIPDLLLFSLLWFNPFHLNDS

SEQ ID NO: 61267 - protein, 148 aa, Gossypium hirsutum
  Clone ID: GOSHI-09MAY01-C93583_1.pep
MEEIGFSGDGFGTGGKIGGDNGDDSYGDKGKMGDYYREMLKLNPGDPLLLRNYGRFLHEVEKDMERAEEYYGRAILASPGDGEVLSLYGNLIWERHRDESRAKSYFDRAVTASPDDCMVLGSYANFLWDAEEDDEEEVEMSKAMVAAF

SEQ ID NO: 61268 - protein, 84 aa, Gossypium hirsutum
  Clone ID: GOSHI-09MAY01-C93553_1.pep
PPPGPADLNINSAVYPGGPPVPVQAPKLLKFVDTTEITRGPQEVPGYWVVSGARLVVKKGRISLLVKYSLLTALLPDEDDIDEH

SEQ ID NO: 61269 - protein, 197 aa, Gossypium hirsutum
  Clone ID: GOSHI-09MAY01-C93443_1.pep
IHFSGPLMKGGSPTGVVRTYPVHLSPWNPKPKTRSVQTLDSLPVSGSFSTVTPKASNHSKFSGKCGRLHCVECHLNPVSKSKDKSKGTQKFRTCNLAGFKFSGFSATGVLEYLYSFNDDDDDDEIGNHVNDHDYVYEDVGTYVLNDNDDNDDFLAKFWSLHDKQNDDDDDDDDTSYCDVDFMLDIEEDEGWCLLREL

SEQ ID NO: 61270 - protein, 75 aa, Gossypium hirsutum
  Clone ID: GOSHI-09MAY01-C93433_1.pep
TLHARTLGLLPIASMLMCEPFNRIIHPANIFRSTCLRALHDLISSSPSQDTLYCEDLTMKGINNPTPSLHLKTTN

SEQ ID NO: 61271 - protein, 89 aa, Gossypium hirsutum
  Clone ID: GOSHI-09MAY01-C93673_1.pep
SNKRKLSLLSKKLPIFGADISSFSKVISLLFFFFFNFFAVKETFFIDLSRFFYCFAFLSLSLLFCLRFYCFTKLLSFTISRFSCFTILS

SEQ ID NO: 61272 - protein, 61 aa, Gossypium hirsutum
  Clone ID: LIB3825-012-Q1-K6-F4.pep
SIYMIISRHWNIPQGPYMYQQAPKTPSPTTTTFQLDPSPQFQPPHSSPMATTTTFSLIARV

SEQ ID NO: 61273 - protein, 68 aa, Gossypium hirsutum
  Clone ID: LIB3828-022-Q1-N6-F7.pep
YTFSGVFKSRSPNHTSWECYCLAALIFGRDYNTMQSLQAKLVNTDEPTSSTSITDVYDMESDDIFYIP

SEQ ID NO: 61274 - protein, 119 aa, Gossypium hirsutum
  Clone ID: LIB3828-024-Q6-N6-D3.pep
RKNYKVICWAVGVLDKVVLRWRRKGVGLRGFRSESDCIDDEEEDILKVFRKQKVDVAIDEAVSRVLSMVDSPDARQQYRRMLEKYRQAKAKLVNTNEPTTSTSITDGYDMESDDLSYFP

SEQ ID NO: 61275 - protein, 74 aa, Gossypium hirsutum
  Clone ID: LIB3825-006-Q1-N6-D1.pep
WAVGVLNKVVLQWPRKGVGLRGFPSESDCIYDEKKALFKVFPKQKVDVPIDEAVSRVLSMVDSPNARQQYPRML

SEQ ID NO: 61276 - protein, 117 aa, Gossypium hirsutum
  Clone ID: GOSHI-09MAY01-C93103_1.pep
AVGVSDGPFRSIYEGCLSSCDIVIERRRYPRNWGCALHDKSRRNCLPKFSKSRKVSYPIRRIWNEGCLALDGTPRASPSSSRGIRGFHKAVKQPLELCKEEEDDGYEANYYRGKLWN

SEQ ID NO: 61277 - protein, 76 aa, Gossypium hirsutum
  Clone ID: GOSHI-09MAY01-C93093_2.pep
VELLRYHKSTLSIIHPSAKEALGAAASMCVLGARSAQGTAPLTPVTPKWQAFASLTLRTCKNRDKKKARGRNEAKQ

SEQ ID NO: 61278 - protein, 60 aa, Gossypium hirsutum
  Clone ID: GOSHI-09MAY01-C93093_1.pep
TSITKFVIIPISKIGAIRSDCKKRMKTAKLIHPTNKTPIYTERQCLSSHNLDSTGFSSVY

SEQ ID NO: 61279 - protein, 116 aa, Gossypium hirsutum
  Clone ID: GOSHI-09MAY01-C93043_1.pep
PFLIHKACHATTSSAFVSSYDGWRPFVADEQWRMPAGEYNTDNQHGGWISGRNPSPCGPLFVREAGYFRPPVERPSSNVGFPLASANNLPAGAPNSGHGIFPCRPDMSAINCWRPA

SEQ ID NO: 61280 - protein, 216 aa, Gossypium hirsutum
  Clone ID: GOSHI-09MAY01-C93023_1.pep
PTGDCVRWYKSKSTFKEKDSSSESEKTTENQFEDIEFEGLGEISPETHKYILHLQSRLASVKKELHELKKKNEAMQMQQFVGEEKNDLLDYLRSLQPEKVVELSEPSSPELKETIHSVVHGLLATLSPRMHSKVPLSENTATRTVNIGSENCSELVEDTSLQLQPLISLTRDYLARLLFWCMLLGHYLRGLEYRQELMELLSLTSSVNNNDCGGDQ

SEQ ID NO: 61281 - protein, 240 aa, Gossypium hirsutum
  unsure (1)..(240): unsure at all Xaa locations
  Clone ID: AI727884.1.pep
LVLLIILFLPFKILYRTNRFFFLTCLFHSICAPLYKVTLPDFFLADQLTSQVQAIRSLEFYVCYYGWGDFKHRENKCRDSNVFATFYFIVAVLPYMARLLQCLRRLFEERDPVQGYNGLKYFLTIVXVCLRTAYYVNTGIGWRVIXGIVSAIAAIFCTYWDFVYDWGLLNRQSKKPWLREKLLVPHKYIXFGAIGLNVVLRXAWLQTVLNXKFDLHRETLATLVASLEIIRRGVWNXFRL

SEQ ID NO: 61282 - protein, 88 aa, Gossypium hirsutum
  Clone ID: LIB3830-002-Q1-N6-B8.pep
FPVPTPPFEEKDPVQGYNGLKYFLPIVPVCLRTAYYVNTGIGWKVIVGIVSAIAPIFCTYWDFVYDWGLLNRHSFNPWLRAKPLFPPK

SEQ ID NO: 61283 - protein, 179 aa, Gossypium hirsutum
  Clone ID: GOSHI-09MAY01-C88593_2.pep
LASAHASGESVFGIGDIRQSQEWLGNRWINLKERHDLVSTILWAGKQDVSRSYNFNTDKNTICESGQCGKEATECKGSAVEPGNERAQDASVVPDLSKDGRLSQLKWKSSRKRKRVTSTCVRKLNCSRNLIKSTAQSVACERFLIPASLKVDNENCKNIGDPLFSSSVVPPLTSLVMTR

SEQ ID NO: 61284 - protein, 247 aa, Gossypium hirsutum
  Clone ID: GOSHI-09MAY01-C88593_1.pep
LTQDSGMRGCWFRARIIKKHRNKMKLQYQDIQDAANEANKLEEWILATKVATSDEVGIRVSGRTTIRPSSQFTKGSTSCIGVGSVVDVWWHDGWWEGLVVQELEDKFRVHFPGEKRESVFGIGDIRQSQEWLGNRWINLKERHDLVSTILRAGKQDASRSYNFNTDKNTIWVSGQCGKEATEGKGSAVEPGNERPQDASVVPDLSKDGRLSQLRWKSLERNGDSTVYELFAANLSSLKSCLDDLICS

SEQ ID NO: 61285 - protein, 162 aa, Gossypium hirsutum
  unsure (1)..(162): unsure at all Xaa locations
  Clone ID: LIB3543-032-Q1-K1-A2.pep
LSKHRNKMKLQYQDIQHAANEANKLXEWILATIVATSDEVGIRVSGRTTIRPSSQFTKGSTSCIGVGSVVDVWWHDGWWEGLVVHELEDKFRVHFPXKSGNQCFGIGDIRHSQEWIXNRRINMKERHDLVSTIIHAGKQVEMIGHKMLVLFQIFQRMVGFLS

SEQ ID NO: 61286 - protein, 144 aa, Gossypium hirsutum
  unsure (1)..(144): unsure at all Xaa locations
  Clone ID: GOSHI-09MAY01-C88153_1.pep
VGWPPIRXFRENSMASNLAKNSDEAAGCLYVKVSMDGAPYLRKVDLKTYNNYREFSSALEKMFSCFTIGQCGSNGDGLSESRLMDLLHGSEYVLTYEDKDGDWMLVGDVPWEMFTDSCRRLRIMKGSEAIGLAPRAMEKCKNQN

SEQ ID NO: 61287 - protein, 175 aa, Gossypium hirsutum
  Clone ID: uC-gsronu33B158d10b2.pep
KNKLPSGREVGGPPQPPKPGQDKNILVPSANEHSNAPASKAQVVGWPPIRSFRKNTMASNSAKNSEDAAGCLYVKVSMDGAPYLRKVDLKTYKTYKEISSALEKMFTCFTLGHCSSNGLAVRDGLSESRLMDLLHGSEYVLTYEDKDGDWMLVGDVPWEMLIDTCKRLRIVKGSE

SEQ ID NO: 61288 - protein, 179 aa, Gossypium hirsutum
  Clone ID: GOSHI-09MAY01-C88163_1.pep
KLRSLPNSICKMRSLRFLDAHFNELCGLPNEIGRLTNLEVLNVSSNFSDLTELPESLGELTNLKELDLSNNQIQVLPDTFGRLDNLKKLNLEQNPLVIPPLEVVEQGVDAVKIFMAKRWADKLVEEERKSMIEVNEEEENGWLTRSTTWLKRSVSVVGETVSGYLGTAGPRDPILDEER

SEQ ID NO: 61289 - protein, 123 aa, Gossypium hirsutum
  Clone ID: GOSHI-09MAY01-C88133_1.pep
DFVAKVKEALANEPQPLTPEQIYNLSWEAATQRFVEYSELDRVLNNRHNPAKVGSKIIAKSSSLPNLSEIVDGGLAFAHYCLTGNELLRLCTGAIPGTRDYDKQHCKDLHLLPPQVENPIYGW

SEQ ID NO: 61290 - protein, 247 aa, Gossypium hirsutum
  unsure (1)..(247): unsure at all Xaa locations
  Clone ID: GOSHI-09MAY01-C88093_1.pep
PHMFVSYASPLPTGINEKGMYYGVNLRQTKILMVCGRLQGKNQPISDLYVDEVPIPSSVMIGTSQELYDYIAAELVKFVSAHPEKDDEAPANDKKLGFTVSSGDDQSTAISGSNIKLKNFAADTTGVKDLITGMNRALEKHGLKLRVHALVDDIVGNLAGGRYYDKDCVAAITLGMGTNAAYVDTTQSAPRWHDSLPKKGEIVVCMEWGNLXTCHLPITQYDTSLDAASSNPGHRIFEKXISGMYLG

SEQ ID NO: 61291 - protein, 106 aa, Gossypium hirsutum
  unsure (1)..(106): unsure at all Xaa locations
  Clone ID: GOSHI-09MAY01-C88333_1.pep
RVRGIVRDAVDIEREFVCDALPCALVGMNGELMSRYIEFVADRLLGALGYXKMYNVVNPFDWMELISLQGKTNFFEKRVGEYQKAAVMSSLNGNGGTPEFKMDEDF

SEQ ID NO: 61292 - protein, 208 aa, Gossypium hirsutum
  unsure (1)..(208): unsure at all Xaa locations
  Clone ID: LIB3543-050-Q6-K6-H9.pep
VRTSGARGGGGVAVKEDFADEEDFIKAGGSEILFVQMQQNKEMGKQSKLADKLPPISTGGGVLDLVVIGCGPAGLALAAESAKLGLNVGLIGPDLPFTNNYGVWEDEFKDLGLERCIEHVWRDTIVYLDDDKPIMIGRAYGRVSRYLLHEELLRRCIESGVMYLNSKXETIVEATDGHNLVVCEHNRVVPCWLATVASGAASSKLLQY

SEQ ID NO: 61293 - protein, 170 aa, Gossypium hirsutum
  Clone ID: LIB3828-005-Q1-K6-C9.pep
MMITTSVGARNFEAVAVSKSATWRSHRRKDPVSTKMAVSNNQRLISLDVSGSGAVRESYVAVKEGFADEEDYVKAGGSQLLFVQMQQHKEMDEQSKLADKLPPISIEDNILDLVVIGSGPAGLALAAESAKLGLNVGLISPDLPFTNNYGLWEDEIKDLGLEKCMEHVWP

SEQ ID NO: 61294 - protein, 165 aa, Gossypium hirsutum
  Clone ID: GOSHI-09MAY01-C89583_1.pep
QYKYTPVSGYREEKKESLVTEEIKASASEVYHGDEICQVKSKSLLEEMGMPRGLLPLKDIEECGYVKETGFVWLKQKKSITHKFEKIGKPVSYATEVTAVIEKNRIKKLNGVKSKELLIWVTLSDIYVDDPATGKITFKTPAGLSRSYPVSAFEIEGEESSKEKN

SEQ ID NO: 61295 - protein, 93 aa, Gossypium hirsutum
  Clone ID: GOSHI-09MAY01-C89663_1.pep
RLCFSFPLLLLLGPFLASLRMSSSNLSYAEIADSSISMALLRSFVATLNTSSMSKVSFSDLLSSTLHNPLFQSPIYKPSHLLKQIPNCLSHSP

SEQ ID NO: 61296 - protein, 84 aa, Gossypium hirsutum
  Clone ID: GOSHI-09MAY01-C89133_1.pep
METLHGSVPAACADTAANGNTVTPFLSKTFDVVDDPSTDSVVSWSSDNNSFVVWKVPEFARDLLPMYFKHNNFSSFVRQLNTYV

SEQ ID NO: 61297 - protein, 376 aa, Gossypium hirsutum
  unsure (1)..(376): unsure at all Xaa locations
  Clone ID: GOSHI-09MAY01-C89123_1.pep
MAKLSCDFRYLLIPAAFVFIYIQMRLFTTQSEYADRMAEAVDAEHHCTSQMRLLIDQISMQQEQIVALEEGKKRKDQECAQLKTLVNDLEKKALQRVIDKTQVPVAAVVIMACNRADYLERTVASVLKYQSSVASKYPLFVSQDGSDPRVKTKALSYKELTYMQHIDYDPVHTDRPGELIAYYKIARHYKWALDELFYKHNFDRVIILEDDMEIAPDFFDYFEAAAALLDKDKSIMAVSSWNDNGQKQFVYDPYALYRSDFFPGLGWMLTKSVWNELSPKWPKAYWDDWLRLKNNHNGRQFLRPEVCRTYNFGEHGSSMGQFFEKYLAPIKMNDXQVDWKSXDLSYLTEEKYAQYFADILKAAKPVPGTDSALMAL

SEQ ID NO: 61298 - protein, 73 aa, Gossypium hirsutum
  unsure (1)..(73): unsure at all Xaa locations
  Clone ID: LIB3829-029-Q6-K6-C11.pep
ALYRSXFFPGLGWMLTRSVWNELSPKWPKAYWDDWLRLKENHKGRQFLRPEVCRTYNFGEHVCITLSFRRFLV

SEQ ID NO: 61299 - protein, 208 aa, Gossypium hirsutum
  Clone ID: GOSHI-09MAY01-C89043_1.pep
PSVRWQVVRNISGGHNQNQTFLLHTAKKDEKDFNYVKSTVPVGVSSEIVSKSFQPLKRIQPRLEWAKPQQSAVPAEKRWPSSGSNPSVSYSLASPLQASPPLAKTESRNVAVGSDYKKLQPSIREPVMMMQRPQSVNTKQVPATCISSSPPGTTPFLYPSSSVEITKSNGFMPHIASARSLSSNSLSSNPMHPQLYYPQQQQFLSSSS

SEQ ID NO: 61300 - protein, 177 aa, Gossypium hirsutum
  Clone ID: LIB3582-032-P1-K1-F9.pep
NIGSKSKRLLMHSVDALELRLTWEEAQDLLRPPPSVRPSIVTIEDHEFEEYDEPPVFGKRTIFGAWPSGEQEQWAQCDDCSKWRRLPVDVLLPSKWTCSDNVWDSSRCACSAPEEIGPKELENILKVGTDLKKTKVQEGPKVAPEPEPTSLDALASAATLGDKMGDVGESSVGATTK

SEQ ID NO: 61301 - protein, 51 aa, Gossypium hirsutum
  Clone ID: uC-gsflmaxxa119a11b1.pep
QEQWAQCDDGSKWRRLPVDDLLPSKWKCSDNVWDSSMWACNDQNTLSIISS

SEQ ID NO: 61302 - protein, 203 aa, Gossypium hirsutum
  Clone ID: GOSHI-09MAY01-C84813_1.pep
PRVRLIRILATRCMTHAVYFCSEDLSPSEYHHYGLAAPLYTHFTSPIRRYADVIVHRLLAASLGIDKLPPVFQDRSQLTSIADNLNYRHRNAQMASRASVELHTLIYFRKRPTDTEARIVKIRSNGFIVFVPKYGIEGPVYLTGRGEKGSGEWHVDEQQQKIVKMDNSNSNSLSYSVLQSVRIHMEVVEPQPNRPKLQLTLIS

SEQ ID NO: 61303 - protein, 62 aa, Gossypium hirsutum
  Clone ID: GOSHI-09MAY01-C84613_1.pep
FQVCCFRQFSGSVTKVDYLTLRHGFIMAHLAPENETQSDFQKYIMRSLDDDCKVFVGIRGII

SEQ ID NO: 61304 - protein, 160 aa, Gossypium hirsutum
  Clone ID: GOSHI-09MAY01-C84143_1.pep
MADSILRTLDYESKGFVAVGLLCLMMMMMIQKGYAREFQVNWGLHSGSNAQTYNQWAEHNRFQIGDSLVFNYAPNEDSVLYVSEDAYKNCNVESPWSKYTDGHAVFSLDHSGPYHFISGTKGNCQKNEKLVVVVLADRTNRSSTANVTNAPSPRHLVRSM

SEQ ID NO: 61305 - protein, 169 aa, Gossypium hirsutum
  unsure (1)..(169): unsure at all Xaa locations
  Clone ID: GOSHI-09MAY01-C84343_1.pep
MLLGNAIAGARIIMASSSNHIVFEPDDIPFGSFEWFVFAGVSCLLVLFAGIMSGLTLGLMSLGLVDLEILQRSGTITEMKQAAVILPVLKKQHQLLGTLLLCNACAMDAXLPITLDKIFHPLVAVSLSVTFVLAFGEIIPQAILLRYGLSVGGKFVWLVRIQIIICYPI

SEQ ID NO: 61306 - protein, 262 aa, Gossypium hirsutum
  Clone ID: GOSHI-09MAY01-C85913_1.pep
GLVGKNPEKKNKNMPAQDDEEQGQVFVDESDIIHEVDVDEEDLPDADDEDDTENIEDPDDSIHIFTGHTGELYAVACSPTDPVLVATGGGDDKGFLWKIGHADWASELQGHTDSVSTLAFSSDGQLLASGGFDGLVKVWDTFGNFKRTLEGPGGGIEWIRWHPKGHLILAGSEDCTAWMWNADNGNCLNVFSGHDAIVTCGDFTPDGKTICTGSEDATLRIWNPRSGESIHVVRGHPYHTERLTCLSISLIHFSYTGSKMAL

SEQ ID NO: 61307 - protein, 273 aa, Gossypium hirsutum
  Clone ID: GOSHI-09MAY01-C85803_1.pep
RCFTKLLQPRGFSTVSRSLAEYTSNPSVCLPSYPATFRSQSLPCGLNEASGCPGYYDQNDTMWVQPGDINGLKGPPARLLDLSGGCMPLTRVPAEYQKIFGRPLYVAEYGALKLGNLFKKMGDTLAIDGKGHKKFVYLRNWKANPSAPPLVLTRKDKKGKGVREEITDVTAGAGSSDEFSDEERVVVDERDQRKTDDNLEQFKYELQEILVSYSCRIFLGCFEEIYQQRYKKTLDYRKLSVEKLEELFDKVRDVVVLHEEPVSKRKFLCAVGS

SEQ ID NO: 61308 - protein, 218 aa, Gossypium hirsutum
  unsure (1)..(218): unsure at all Xaa locations
  Clone ID: GOSHI-09MAY01-C85743_1.pep
MEARLSASLGLPSSDLNHPPVNTDFGSLYSHFITLTSSPKNPQKPLKPLLHHLSFASASISGGPQPAKPTKFRIPLPFSNLTESQQPKSPKFPKWLEPRSRNSSKAQILMKNLSVFERALIGAGGGGIAGAFTYVCLLPLDTIKTKMQTKGASEIYANTFDAVVKTFQTNGILGFYRGVSAVIVGSTASSAVYFGTCEFGKXFLSKLEYPALLIPPLL

SEQ ID NO: 61309 - protein, 125 aa, Gossypium hirsutum
  Clone ID: LIB3582-054-P1-K1-B11.pep
MEAPEQHNKSRVVKIDSVESWDFYFNQATNQGCPIVVHFTASWCIPSVTMNPYFEELASAFQDALFLTVDVDDVKEVATRMEVKAMPTFLLMKGGTVVEKLVGANPEEIRKRTDAFMQSNRVYVA

SEQ ID NO: 61310 - protein, 114 aa, Gossypium hirsutum
  Clone ID: uC-gsronu33B127g07b1.pep
KSRKEKNMEAPEQHNKSRVVKIDSVESWDFYFNQATNQGCPVSYSISHLHVYFLSSGNSLALVLVLHHCSLQQSHLSPLLCLIKVPYPHSTVHVFIINGQSVDLNQGILLWFIF

SEQ ID NO: 61311 - protein, 100 aa, Gossypium hirsutum
  Clone ID: GOSHI-09MAY01-C85173_1.pep
GVFGYKKRLYYKRLGKSRAKIRKKVVFGFNSLFFFFLFDHFLFIYFWFQIHFKTKIKGKKGLPERPRDAVVGNFSPGVKLGLKGKPMTFLSAFESRRFDL

SEQ ID NO: 61312 - protein, 66 aa, Gossypium hirsutum
  Clone ID: GOSHI-09MAY01-C86783_1.pep
ALGSATQAAQMGAILAPFVVILGGGFPFLVFGVCGLIGGMLASYLPETLNKPLYDTMTGLEEGELA

SEQ ID NO: 61313 - protein, 74 aa, Gossypium hirsutum
  Clone ID: GOSHI-09MAY01-C86743_1.pep
FFFFFFPAPDETGFVSLMVGCTHKWVLDVNVDVLKRLSNGLRQWNEEELAIALLGLGGATAAGTAAELIVEIGA

SEQ ID NO: 61314 - protein, 200 aa, Gossypium hirsutum
  Clone ID: GOSHI-09MAY01-C86243_1.pep
AAWAAAWEWLFEVELDHADVLLRYSSALVQGATNVLWIDIQSNARCFQSLFKYLLDEVALKPTRLNKIPVQAQRDLYLLLSRFIFFYNAVEKLESFLKLCPTFPNAILVGGPADIFVTEVADQLQKLKVEPVLLHYLVQIKVLGGMQLRIPTSTRLKTCLYNFTSPGGPMYPTRAVRHAAWDALDLLYPVGRFPLHLLSM

SEQ ID NO: 61315 - protein, 207 aa, Gossypium hirsutum
  Clone ID: GOSHI-09MAY01-C87993_1.pep
ADFGMARLFPEDQTHVNTRVAGTNGYMAPEYVMNGRLSVKADVFSFGVVVLELISGQRNSSFNLDVDAHSLLEWAYKLYKKGKSLEFMDPVLASSAVPEQVAMCIQIGLLCTQGDPQLRPDMRRVVILLSKRPGSLEEPTRPGALGARHRRSHRPPGFSSTAGTSGVSDSHSSESSFNTYTASASASTSALASPLKSDRHGKRPIQS

SEQ ID NO: 61316 - protein, 74 aa, Gossypium hirsutum
  Clone ID: GOSHI-09MAY01-C87943_1.pep
SDLSPGFFTVEYCESRISVMSRSRWENAYFFGKVVEWFALQTNVQGDQVYILILPSDWKRIMFCSCPKIVSSIC

SEQ ID NO: 61317 - protein, 182 aa, Gossypium hirsutum
  Clone ID: LIB3828-023-Q6-K6-E6.pep
PHTPRRVGSQFLGTDSIGGKVLQMAKSLLKARLSGERILRCWGGGGGGGPGWAVEDVKHKIGKLLEEYESGGDIREAYRCIKELGMPFFHHEVVKKAMVMVMEKKNERLWGLLAHCFGSGLITMNQMTKGFSRVEESLDDLALDVPDARKQFLAYVEKAKTTGWLDSSFHYGNSINGKGNGG

SEQ ID NO: 61318 - protein, 117 aa, Gossypium hirsutum
  Clone ID: GOSHI-09MAY01-C87973_1.pep
GKSPLCRPSTTAPVAGRRRRRRRSRWPENKKAPFFSFLRIESRSGVRKAEIPAKRAKIERDLSVLPLSTAAGNRCGKRHGGGRQHRRVGVVLVADNMGEWEEASGSLGFWDWAWMLG

SEQ ID NO: 61319 - protein, 275 aa, Gossypium hirsutum
  unsure (1)..(275): unsure at all Xaa locations
  Clone ID: GOSHI-09MAY01-C87833_1.pep
GLAAATVGLTXEASQHLEQIVPPVLNSFSDQDSRVRYYACEALYNIAKVVRGDFIIFFNQIFDALCKLSADSAANVQSAAHLLDRLVKDIVTESDQFSIEEFIPLLRERMNVLNPYVRQFLVGWITVLDSVPDIDMLGFLPDFLDGLFNMLSDSSHEIRQQADSALSEFLQEIKNSPSVDYGRMAEILVQRAASPDEFTRLTAMTWINEFVKLGGDQLVPYYADILGAILPCMSDKEEKIRGFARETNEELRSVKGEPEKTFNVGAILSIARRQL

SEQ ID NO: 61320 - protein, 80 aa, Gossypium hirsutum
  Clone ID: GOSHI-09MAY01-C87563_1.pep
PKRLTSNWCLIRGFSGLRQGFEGVFEVGLVAFFLLLLKWGPCNESGDGFQAISFFCDLHVKEEATFGLIFKVCPCEKELG

SEQ ID NO: 61321 - protein, 204 aa, Gossypium hirsutum
  Clone ID: GOSHI-09MAY01-C87493_1.pep
HVSIGQRNPDLIGVLNGQGGPNGSIVGEHPYGELPSRTLFVRNINSNVEDSELKTLFEQYGDIRTLYTACKHRGFVMISYYDIRAARNAMRALQNKPLRRRELDIHYSIPKDNASEKDVDQGAVVVYKVDSFVSTDELQRVFGAFGEIKEIREVPNKHNHKVIEFYDVRAAEAALNALNWSNSAGKQIKLEPSRPGGLRALYSA

SEQ ID NO: 61322 - protein, 42 aa, Gossypium hirsutum
  Clone ID: GOSHI-09MAY01-C87733_1.pep
FFFFFFFFFFFFFFFFFFFLFLIFFLIFLLINFLNLPMGKWG

SEQ ID NO: 61323 - protein, 175 aa, Gossypium hirsutum
  Clone ID: GOSHI-09MAY01-C87693_1.pep
MPRTTTVDCPGCPPLRALTFDALGLIKAIEAPEKGGGGVAKVVERWGGPDASKCVLAASMNDRKIDPLLAVARKNGVIEILNPLNGELSRTVSDVSNAGVRPEDDAIAGLHLFRRQRVELTPRSCTLLTCKTKGNASIKTGDLADTQADSGASKTWTVCGSGNILVSEVDGSESY

SEQ ID NO: 61324 - protein, 231 aa, Gossypium hirsutum
  Clone ID: GOSHI-09MAY01-C87643_1.pep
VNAKRFLQENVTDGLLALGYDASICKSHWEKSPSYPAGEYEYIDVIIEGERLLIDIDFRSEFEIARSTKTYKSILQMLPFIFVGKTDRLQKIIAIVSDAVKQSLKKKGMHVPPWRKAEYVKSKWLSPHNRTTPYPSPTVTSTSTIETPKEVELETKAKEKTQPELNPEMKNSVEDSELGESIFAFSDSSEEGKEEEKEAWKLPEIKPKNSLIGVKLVTGLASVIEDEPIKF

SEQ ID NO: 61325 - protein, 122 aa, Gossypium hirsutum
  Clone ID: GOSHI-09MAY01-C87603_1.pep
MEKKFMGFSWSLVVVFLFIMILIAKSKSVDAITCQEALLSLMPCRPFLTGGESTPVATCCSAVANINSAATTTAIRKDLCRCLEAASRSEGVDPDKAKQLPQLCGVTVAISFDPTINCDTIK

SEQ ID NO: 61326 - protein, 300 aa, Gossypium hirsutum
  unsure (1)..(300): unsure at all Xaa locations
  Clone ID: GOSHI-09MAY01-C87623_1.pep
MQPNMKSSRFEEMSEAIKFLVSQKLINRNQLTEGGELQASKEAMHALQILSLNEELFLKLLRDPNSSLVKNSKNSPNARDEESKPFSRSNFSEQEPVGLRQLNETVNRKQRNFFRRKSKSLERDLSDEQKVSEASTKIVVLKPGPTCSQTAETGSSIGSSPESKNIIRRRETNEKVGSHFFLSEIKRKFRHAMGREHHRIPAKEIPKRLSGERQSSSDNGGLKEYIGMNSPTKDHFFIERIAKPSSSVKKGEKTSKLKGPESSTEYETTHXSRHSNIYIEAKKHLSEMLTNGDDIMDLFS

SEQ ID NO: 61327 - protein, 138 aa, Gossypium hirsutum
  Clone ID: GOSHI-09MAY01-C87123_1.pep
FPLIFTAGKPNPISDKRVVNEEKAMVLSGQIGSRPPRCERRCSTCGHCEAIQVPTNPQLRIQNKPSSTSVSDVAYARRDDSSNYKPLSWKCKCGKLHLQPLNINYPSFNLVNLHKRITYFIGSVSFLVSFFFHCYLTY

SEQ ID NO: 61328 - protein, 129 aa, Gossypium hirsutum
  Clone ID: LIB3829-029-Q6-N6-H9.pep
KQNGFHPQFHSSPESLPYSPRFLLILTPTQARYKAEGKPNPIFDKRVVNEEKAMVLSGQIGSRPPKCERRCSTCGHCEAIQVPTNPQLRIQNKPSSTSVFDVAYARRDDSSNYKPLSWKCKCGNFIFNP

SEQ ID NO: 61329 - protein, 80 aa, Gossypium hirsutum
  Clone ID: GOSHI-09MAY01-C80913_1.pep
MSEMKDKLKGFMKKVNTQFSSSSSSSSSSGKFKGQGRVLGSSSSSGPVNPILTRPSPIPNPAPSSSSSNSKPVLPSKPPG

SEQ ID NO: 61330 - protein, 195 aa, Gossypium hirsutum
  Clone ID: GOSHI-09MAY01-C80923_1.pep
EKCGGEQQVRIFKDYVSGFPKESDMAVAVDENLKLKVAGDSQGILVKNLYLSCDPYMRLLMTNRSSEIFGTYTPGAPITGFGVGKVIDSRNPEFKEGDLVWGITGWEEYSLLTSSEGLCKIHHTDIPLSYYTGILGMPGLTAYGGFYEVCAPKKGEYVFVSAASGAGGQLVGQFAKLMGCYVVGSAGTQDKVELL

SEQ ID NO: 61331 - protein, 178 aa, Gossypium hirsutum
  Clone ID: GOSHI-09MAY01-C80833_1.pep
MDSATNPNIIKKDPVPVTVSAPSSTGIQQGVGESPSSSTSPAAPSRYESQKRRDWNTFLQYLKNHKPPLTLARCSGAHVIEFLKYLDQFGKTKVHMTGCPYFGHPNPPGPCSCPLKQAWGSLDALIGRLRAAYEESGGRPESNPFAARAVRIYLREVREGQARARGIPYEKKNEKAFC

SEQ ID NO: 61332 - protein, 134 aa, Gossypium hirsutum
  Clone ID: GOSHI-09MAY01-C80683_1.pep
MQGGVGDGGSESGSVSTVSREENMVVSSEDSSCPDQSELELGLGLSLGGGGGGFKMHHVSKGGQFARILTAKDLPSLVFSAASPSSSSSSSSSSLSRADVTAKIKRTADSMAAANGFSQLVGWPPVQTHRINSM

SEQ ID NO: 61333 - protein, 79 aa, Gossypium hirsutum
  Clone ID: GOSHI-09MAY01-C80623_1.pep
LKQSVKEEVANIIAPLMVRPITRWPGFAFLGGAMFCLLASSTCHLLSCPSERLSYIMLRLDYAGITALISTSLYPPVYY

SEQ ID NO: 61334 - protein, 245 aa, Gossypium hirsutum
  Clone ID: GOSHI-09MAY01-C80143_1.pep
GINDYEPGPVPSESRVDRWGFIKQNVSNSSAAEGLGKSREARRVRKWRKMIGVGGSDWKHYVRRKPHVVKSPLASALPAGLRGLVWQLISGSRDLLLMNPGVYEQLVIYETSASELDIIRDISRTFPTHVFFQQRHGPGQRSLYNVLKAYSVFDRAVGYVQGMGFLAGLLLLYMSEEDAFWLLVALLKGAVHAPMEGLYQVGLPLVQQYLFQFEHLVREHLPKLGEHFSREMINPSMYASQWFIT

SEQ ID NO: 61335 - protein, 122 aa, Gossypium hirsutum
  Clone ID: LIB3585-057-P1-K1-G7.pep
MFMLLQQLVIYETSASELGIIRDISRTFPTHVFFQQRHGPGQRSLYNVLKAYSVFDRAVGYVQGMGFLAGFLLLYMSEEDAFWLLVALLKGAVHAPMEGLYQVLLYLKPIFTIYNAELTICW

SEQ ID NO: 61336 - protein, 149 aa, Gossypium hirsutum
  Clone ID: GOSHI-09MAY01-C80113_1.pep
MFRNWILVLRGSTASSLVGNGPQLPEVAGEWGGYSSNSTRPSPGEWNPDLVPKSSIKPTDLGSDHAATPTSGSGQLTHSSPTDPPNNESGWDSIVPEPNEYSLGDESVSDLLAEVEAMESLNGLASPTSILRCDGDLAQGSEPDCFSPV

SEQ ID NO: 61337 - protein, 192 aa, Gossypium hirsutum
  unsure (1)..(192): unsure at all Xaa locations
  Clone ID: GOSHI-09MAY01-C80363_1.pep
MAASLLAREVSDLCLGKPALRSLSVSATVGDALTTLKRSRDNYISFWNCNHGHFSEVDKVDAVAALDDCRCVGKVCVADIIGFLCKEENLSNPGIALQAPVSVLIPKTGDFVRHLESNASLVEAMDLILEGVQNIVIPMEIGGKNSRXKLLHNNLSTSTLHHRPRYCWLPPRPPRRYLGDSIRLFSSCAVNP

SEQ ID NO: 61338 - protein, 133 aa, Gossypium hirsutum
  Clone ID: uC-gsflmaxxa009d07b1.pep
MSRKACAAVPLCLCHRRRCLDVFGEIQRPLSLRSISLDQEGGLQPSRRRSLFTLASYMLIFSARAGDLPELIPIVKASLTDKIVDPYLKLVEDVRLQAVRVKSDVDSVAYGSKEDDAAASKASLAIELDDPHL

SEQ ID NO: 61339 - protein, 116 aa, Gossypium hirsutum
  Clone ID: uC-gsflmaxxa009d02b1.pep
PRVRRAIFVGVRIGDPTAVGHALTTFKRSRDNYISFWNCNHGHFSEVDKVDAVAALDDCRCVGKVCVADIIGFLCKEENLLNPGIALQAPVSVLIPKTGDFVRHLESNASLAEAMD

SEQ ID NO: 61340 - protein, 212 aa, Gossypium hirsutum
  Clone ID: GOSHI-09MAY01-C80273_1.pep
HASYWVPEEGGYLIGNLQPAHMDFRFFTLGNLWSIVSSLGTSKQNEAILNLIENKWDDIVGHMPLKICYPAVENEEWRIITGSDPKNTPWSYHNGGSWPTLLWQFTLACVKMGRLELAQKAIALAEKRLSSDHWPEYYDTRSGKFIGKQSRLSQTWTIAGFLTSKMMVENPRTASLLFWDEDYNLLEICVCGLSKSGRKKCSRGAARSQILI

SEQ ID NO: 61341 - protein, 180 aa, Gossypium hirsutum
  Clone ID: GOSHI-09MAY01-C81483_1.pep
PTRPKPNALADMNQKKKRKTRFKKNPKKNSPMSQSDYSYSSLPKEISLKIASSLEAPALSSLACCSRDWQEICVSDCLWKSLLKERWPLLCGADKDPNFKDWRGFYVKQHEEQKRQAESVINLVEQRSLFGSLNAVDYLHAISCLERIQLGFRDVQMLLLKPKLNVLLNLIGLHYYLNNL

SEQ ID NO: 61342 - protein, 206 aa, Gossypium hirsutum
  Clone ID: GOSHI-09MAY01-C81713_1.pep
MSTPSPSSPTYLTNLGLGYSIAIAVGFLVLLSTILLASYICFRSSTSPRAFSSNPSAIPASNSDGILLPTIIFVAEDEATDNVVLGLDQAVINSYPKFQFCKDSGASNLNTTCSICLCEYKDLEMLRMMPECKHYFHVFCIDAWLKLNGSCPVCRNSPLPTPLSTPLSEVVPLSQFAADRRKISDFWVSSCFFPCPTKKKKFFGVR

SEQ ID NO: 61343 - protein, 122 aa, Gossypium hirsutum
  unsure (1)..(122): unsure at all Xaa locations
  Clone ID: LIB3829-022-Q6-K6-F6.pep
SRTSLGGHVGHDSFTSYQSHNGSVHSNSSPSSSANLPYGMCPLPAMXLNGVSSNGPGGASVVMLYPYDHNSACGSPAEPLDNGSLGTMGFSGVNEVSQLSNGRSSGGVFDKQIFHGTSAQRF

SEQ ID NO: 61344 - protein, 112 aa, Gossypium hirsutum
  Clone ID: LIB3585-015-P1-K1-F12.pep
MIHLHHTSLTDGSVHSNSSPSSSANLPYGMCPLPAMNLNGVSSNGPPIPSVVMLYPYDHNSACGSPAEPLDNGSLGTMGFSGVNEVSQLSNGRSSGGVFDKQIFHGTSAQRF

SEQ ID NO: 61345 - protein, 86 aa, Gossypium hirsutum
  Clone ID: GOSHI-09MAY01-C81043_1.pep
ENTGPINIGNPGEFTMLELAETVKELINPKVEIKMVENTPDDPRQRKPDITKAKELLGWEPKVKLRDGLPLMEEDFRLRLGVSKEN

SEQ ID NO: 61346 - protein, 147 aa, Gossypium hirsutum
  Clone ID: GOSHI-09MAY01-C81273_1.pep
FTRPLNPQLRGMFDSNPQLREMMQNPEVLRQMFSPETMQQMLTLQQSLLSQLNRQQSTQDSTQSSTTTGAPGTPSLDLLMNMFGGLSAGSLSVPNQPNVPPEELYATQLSQLREMGFYDTEENIRALRATSGNVHAAVERLLGNPGQ

SEQ ID NO: 61347 - protein, 65 aa, Gossypium hirsutum
  Clone ID: GOSHI-09MAY01-C81213_1.pep
TTSEVAKDLCSSLQLTPILNSIHGQPLPPSLYIKNASRKCTCEEKCRTTFHRYVSIYFQITIARE

SEQ ID NO: 61348 - protein, 312 aa, Gossypium hirsutum
  Clone ID: GOSHI-09MAY01-C82983_1.pep
EIATTQTQVEQPLCLECMRVLSDKLDKEVEDVTRDIEAYEACLQRLEGEPRDVLSETDFCKEKLKIEEEERKLEAAIEEIEKQNAAVNAELKELEQKSKRFKELEERYWQEFNNFQFQLIAHQEERDAILAKTEVSQAHLELLKRTNVLNDAFPIWHDGEFGTINNFRLGRLPKIPVEWDEINAAWGQACLLLHTMCQYFRPKFHYRIKIIPLGSYPRIMDSNHNTYELFGPVNLFWSTRYDKAMTLFLTCLKDFAEFANAKDLENNIPPEKCFNLPYRIENDKVENYSITQSFNKQENWTKALKYTLCNLK

SEQ ID NO: 61349 - protein, 81 aa, Gossypium hirsutum
  unsure (1)..(81): unsure at all Xaa locations
  Clone ID: LIB3493-036-P1-M1-B8.pep
QLSKISVEGDEINAAWGQAXLLLHTMCQYCRPKFHYRIKIIALSSYPWIMDSNHNTYELFGPGNLSXLHRYDKAMTLFLTC

SEQ ID NO: 61350 - protein, 99 aa, Gossypium hirsutum
  Clone ID: GOSHI-09MAY01-C82863_1.pep
MMGSDGINSASMVNPLKRALPSLYWTDDETAGPSTSKRFHGDSNDGSMEKTDGNGSIATLLSQLPQTPPLQQQQAAMLGSMGDGIFRPPYQLPGLNWYS

SEQ ID NO: 61351 - protein, 189 aa, Gossypium hirsutum
  Clone ID: GOSHI-09MAY01-C82453_1.pep
GIPLLRLRLQRYNCLSARIVSSPCRPWCAAAEPTGHQDEVSSSEKSSVVLTVKDPPKYHRWDDPDYRKWKDKEEEMLRDIEPIILLVKEILHSSRYMDGERLTVADEETVVEKLLRHHPHSEDKIGCGFDCIMVDRHPQFRHSRCLFVVRTDGGWIDFSYQKCLRAYIRDKYPSHAERFIREHFKRGSG

SEQ ID NO: 61352 - protein, 181 aa, Gossypium hirsutum
  unsure (1)..(181): unsure at all Xaa locations
  Clone ID: AI731172.1.pep
AAFLSNFHMKSAARVTFNNRHYDLPPWSISILPDCKNVAFNTALVGVKTSRIQMLPANTKMFPWEAYGENISSLGASSRITAPGLLEQMNVTRDNSDYLWYTTSVDISPSESFRRGGQKPTLNVDSAGHALHVFVNGQFSGSAYGTRENRRFTYTGPVNLHAGTNHIALLSVXVGLPVSCS

SEQ ID NO: 61353 - protein, 154 aa, Gossypium hirsutum
  Clone ID: LIB3585-006-P1-K1-F8.pep
GEDISSLGASSRITAPGLWEHMNVTRDNSDYLWYTTSVDISPSESFRRGGQKPTLNVDSAGHALHVFVNGQFSRSAYGTRENRRFTYTGPVNLHAGTNHIALLSVAVGLPNDGLHFETWKTGIQSVLLHGLNQRKKDLTWHKWSYHVGLRGEAM

SEQ ID NO: 61354 - protein, 224 aa, Gossypium hirsutum
  unsure (1)..(224): unsure at all Xaa locations
  Clone ID: GOSHI-09MAY01-C83943_1.pep
MGTPETSREPCPDRILDDLGGAFGMGAVGGXAFHFLKATNNSPSGSRLIGGTQAVRMNAPRVGGSFAVWGGLFSTFDCTMVYVRQKEDLWNSIIASAATGGFLSMRQGLGAASRSALVGGVLLALIEGAGIMLNKFLSQPQMPIMIEEPAPNVAGMPGFPMGQLPNQAPALVDSSTQGSPESSSSWFGGVFGGGKNQDPPAGNGSKTEVLESFDAPAVPSFEYK

SEQ ID NO: 61355 - protein, 150 aa, Gossypium hirsutum
  Clone ID: LIB3493-038-P1-M1-D12.pep
KEDPWNSIIAGAATGGCLSMRQGLGAASRSAVFGGVLLALIEGAGIMLNKFLSQPQMPIMIEEPAPNVAGMPGYPMGQLPNQAPVSVDSLRQASPSSSSTSSGSSSDSSSSWFGGLFGGGKKQESATGSGSRTEVLESFDAPPVPSFEYK

SEQ ID NO: 61356 - protein, 233 aa, Gossypium hirsutum
  unsure (1)..(233): unsure at all Xaa locations
  Clone ID: GOSHI-09MAY01-C83883_1.pep
MGRWRAAASLLFTHLTKTSFPSLPPKPLFLSLSSSPAFCFLLARPFSALLSQLPIYPSDSENGSPCFSQQNHGFVSQEEEEEIGKIPIKAYFLCTSIDLKSMQAENLSNIVPPSSRSSNYIALRYXDFPPGCYCTWNEXDKVSSCRYMVIFQYGSAVLVNIEDREVESYLEIVQRHGSGLRPEMRRDDYCVKEQPLWARDMQEDKLPCGQTLDTDESDLLEVLSKHTWDICYR

SEQ ID NO: 61357 - protein, 187 aa, Gossypium hirsutum
  unsure (1)..(187): unsure at all Xaa locations
  Clone ID: AI055522.1.pep
ILLNHLIKTPFPSPKSLSPKPLSSSNPPLLFRFTRHFSALPSPVSVYATDFDNGSPEFPHQNLGFVSQGGEEEEKHGKIPVKAYFLCTSIDXKSMQAEKLSNIIPPSSRSSNHIALIHWEFPPDITGLGMKNKASCYRIWIGFRTGLVAWLTLWTLKIIVSLKWFEHIVLDGYIIEVIEYTGMSSLS

SEQ ID NO: 61358 - protein, 157 aa, Gossypium hirsutum
  unsure (1)..(157): unsure at all Xaa locations
  Clone ID: AI055269.1.pep
ILLNHLIKTPFPSPKSLSPKPLSSSNPPLLFRFTRHFSALPSPVSVYATDFDNGSPEFPHQNLXFVSQGGEEEEKHGKIPVKAYFLXTRXDLKSMQAENLSNIIPPSSRSSNYIALNIXDFPPDITGLXNEKQSQLLNGXVXXQXGPVALLNIETWN

SEQ ID NO: 61359 - protein, 190 aa, Gossypium hirsutum
  unsure (1)..(190): unsure at all Xaa locations
  Clone ID: GOSHI-09MAY01-C83753_1.pep
MQLHSAVALICATVSLFVIAGAEDPYRFFNWNVTYGDIXYPLGVHQTGILINGQFPGPDIHSVTNDNLIINVFNSLNEPFLLSWNGVQNRRNSYEDGVYGTTCPIPPGKNFTYILQVKDQIGSFYYFPSLGFHKAAGGFGGIRILSRPRIPVPFPDPAGDYTVLIGDWYKANHTDLRAQLDSGRKLPFPD

SEQ ID NO: 61360 - protein, 110 aa, Gossypium hirsutum
  unsure (1)..(110): unsure at all Xaa locations
  Clone ID: GOSHI-09MAY01-C83143_1.pep
LLFRLSFAVGLMGQAVKLARDSFMRSAIXYFEVTRARPXLDGTVLITTWSKLSFHTIDFGWGEPIXTGPVALPEKPVLLFLPHQKDKKSINLLLGLPVSAMNSFEELMQV

SEQ ID NO: 61361 - protein, 182 aa, Gossypium hirsutum
  unsure (1)..(182): unsure at all Xaa locations
  Clone ID: GOSHI-09MAY01-C83023_1.pep
MGGCCCCSSRGVEISSGPAYYYYPSASDERVPLSPHCVAASALSTGLLVDTYPEXTAPDAYRPPPAPVPFDAILGPQTPSVAQIHSSKSDEAAHSTNVDSGQETLAANTRETRTKSEDTTGLRCKAQSDTEIESPKELEVELSKPAEPAVSTREEEDVCPTCWEVLRDRIIQMRALLPDVSE

SEQ ID NO: 61362 - protein, 147 aa, Gossypium hirsutum
  Clone ID: GOSHI-09MAY01-C83333_1.pep
SLWPPEARQSLLLAVQELGTRFPQDLTKLNPVTDMKIEDQEIVELVKQIEEHEKKLFAHPLHKSQDENQIRSFQRKAEVNHEIQQLKSKMRDSQLQKFRDELKNRSRVLKKLGHIDADGAVQLKGRAACLIDTGDELLVTELMFNDQ

SEQ ID NO: 61363 - protein, 135 aa, Gossypium hirsutum
  unsure (1)..(135): unsure at all Xaa locations
  Clone ID: uC-gsronu33B125c06b1.pep
VLAHPRHRWQDERHIRPFEKKAEVDHEIQHMMSNMRDSQLQKFREELKNRSRVLKKLRHIDADGVVHQKGRLACLIDTGDELIVTELMINGHSRIWTSQGSSHARCFIPLDXSSEQIQLRTDSAIALQLLQESAR

SEQ ID NO: 61364 - protein, 235 aa, Gossypium hirsutum
  Clone ID: GOSHI-09MAY01-C83253_1.pep
WVTLGEGGRLQAMSKRSTFIGTPHWVAPEVIQESRYDGKVDLWALGISAIEMAEGLGGGAAVHPMRVIFMISIEPAPMLEDKEKWSLVFHDFVAKSLTKDPRLRPTASEMLKHKFIEKCKCGASVMLPKIEKAKQIRAAMVQQAQILAPTISEPNPMVGSNLNDDYGDTVPSRPQDMGLQVANEASTTGTLNKHNILGGVEVTGEGEFGTVIVHNEDESQKPFAQTELHNGKEAS

SEQ ID NO: 61365 - protein, 194 aa, Gossypium hirsutum
  Clone ID: LIB3584-044-P1-K1-A3.pep
PRVRARMERAAEKGKAIAAAVEGVEKNWGASFSGQSTFIETLRERMFRPSLSTIITDNPKIVTVSPDDTVLAAAKKMLESRLNSAVVTVENKPRGILTSKDILMRVIAQNMSPETTLVEKVMTPNPECATIDTPIVDALHTMHDGKFLHLPVVDRDGEIVACFDVIHITHACCATLSQVGSTSGVNNEATTTMM

SEQ ID NO: 61366 - protein, 131 aa, Gossypium hirsutum
  Clone ID: LIB3584-061-P1-K1-C2.pep
YAGHSTFIETLRERMFRPSLSTIITDNPKIVTVSPDDTVLAAAKKMLESRLNSAVVTVENKPRGILTSKDILMRVIAQNLPPETTLVEKVMTPNPECATIDTPIVDALHTMHDGKFLHLLVVDRDGEIVAV

SEQ ID NO: 61367 - protein, 95 aa, Gossypium hirsutum
  Clone ID: GOSHI-09MAY01-C58952_1.pep
FNCKNPTFRKLFPEYVDKPNKQQQFVSEHLSPESPQGENSKPETEKVVNSSGKDVKKVDTLRNTRRNQKQSFPTWMMLLLVSIFGIVMALPLLQL

SEQ ID NO: 61368 - protein, 270 aa, Gossypium hirsutum
  unsure (1)..(270): unsure at all Xaa locations
  Clone ID: GOSHI-09MAY01-C58942_1.pep
GRVDPTQFRFWTSFRSKTGVKLKASAEPPALTRELKGDELKGIMEMESGCDLFDKLKNGFLSFKSHKYMENLECYQALAKGQAPKFMVIACADSRVCPSTILGFEPXEAFMVRNVANAAPTYESGPSETNAALEFAVNSLEVENVFIIGHSCCGGIRALMSMQDKAESSSFIRSWVIVGKNAKLSTKAAASNLSFDQQCTHCEKESINNSLLNLLTYPWIEKKVNKGMLSLHGGYYDFVNCTFEKWTLDYKGSIMNGKTRVVVKDRLFWC

SEQ ID NO: 61369 - protein, 124 aa, Gossypium hirsutum
  Clone ID: uC-gsronu33B031b10b1.pep
MIETTSCGRTGAMGKVQHKDAIKESIRSWVTAGKNAKLSTKAAALNLSFDQQCTHCEKELINTSLLNLLTYPWIEEKVNKGMLSLHGGYYDFVNCTFEKWTLDYKGSIMNGKTRVVVKDRLFWC

SEQ ID NO: 61370 - protein, 67 aa, Gossypium hirsutum
  Clone ID: GOSHI-09MAY01-C58912_1.pep
LSRGRTRGLASKLTGAGGGGCVLTLLPTHISGEVIDKLVEELGSFGFQCFSAGIGGKGVQISFDHSS

SEQ ID NO: 61371 - protein, 55 aa, Gossypium hirsutum
  Clone ID: LIB3825-030-Q6-N6-G5.pep
LFPFPFVFCTLHFRISRFLVKLERRKTTATENNVVAVSIFLCTLVYCTNLCCLCC

SEQ ID NO: 61372 - protein, 207 aa, Gossypium hirsutum
  unsure (1)..(207): unsure at all Xaa locations
  Clone ID: GOSHI-09MAY01-C58872_1.pep
RQGPSTTRLLAAFVFGDSTVDPGNNNYVKTLFRGNFPPYGKGFRDHVPTGRFTNGKLSTDLIVSXVGIKEYLPPYLDPNLSIEELMTGVSFASAGSGFDPLTPQMPSVISLPKQLEYFKEYKKRLQSAIGNRRTEAIIKEAVFLISCGTNDFVVNYFSPYQFDEKAIPSQLINSSSCKVLSKSYRFGLIRTTTTIQRDHNNIFNKSN

SEQ ID NO: 61373 - protein, 182 aa, Gossypium hirsutum
  Clone ID: GOSHI-09MAY01-C58572_1.pep
RTAESVAVAANGSSQVVGWPPIRAYRMNSMVNQAKVLTMENRKKETSMVENSSIGGYRNDGNTKLKKSTFVKVNMDGTPIGRKVDLNAHESYEKLAKTLEDMFLETAPSVNPSGSTALQLDMLNRMTRRSRLLDGSSDFVLTYEDKEGDWMLVGDVPWEMFLTSVKRLRIMRKSEATGLAPR

SEQ ID NO: 61374 - protein, 96 aa, Gossypium hirsutum
  Clone ID: LIB3149-049-Q1-K1-F7.pep
RADIGTPEIGEQHTVNSNISSFSSDGYTYLKKSTFVKVKMDGTPIGRKVDLNAHESYEKLAKTLEDMFLETAPGVNPSGSTALQLDMQNRMTRHSR

SEQ ID NO: 61375 - protein, 75 aa, Gossypium hirsutum
  Clone ID: GOSHI-09MAY01-C58792_1.pep
PQLTYRIPLDTIINRPSISSFTPRNQEMKLFNFSFKCIRLEVCLPQVLFLSHTSHVRIINSKNLPWLSVERMTTT

SEQ ID NO: 61376 - protein, 103 aa, Gossypium hirsutum
  Clone ID: GOSHI-09MAY01-C58172_2.pep
MNVSHASVHPVEDLPTTDGGVGIGGGNNNNNEVPRVRMKDIQGMPGTAGGLALRICQFVSAVMGLCIMATTSDFPSVTAFCYLVAATGLQSVWSMSQAIIDIY

SEQ ID NO: 61377 - protein, 166 aa, Gossypium hirsutum
  Clone ID: GOSHI-09MAY01-C58172_1.pep
IEGDLVEERDVSHASVHPVEDLPAADGGVGIGGGNNNNNEVPRVRMKDIQGMPGTAGGLALRICQFVSAVMGLCIMATTSDFPSVTAFCYLVAATGLQSVWSISQAIIDIYALLVRRSLQNYRVVSLFAIGDGITSTLTFAAACASAGITVLIDNDLNSCAHNHCL

SEQ ID NO: 61378 - protein, 91 aa, Gossypium hirsutum
  Clone ID: LIB3584-043-P1-K1-F10.pep
APRCCCCRRLYLRLRPWLVDLPLGGLRHGSNSSLQLNLLQFILKAPKTYQITNLLFPLLLVFAEILNNESQRIRREILLTLFFFVFVALSP

SEQ ID NO: 61379 - protein, 180 aa, Gossypium hirsutum
  unsure (1)..(180): unsure at all Xaa locations
  Clone ID: GOSHI-09MAY01-C58352_1.pep
MALRSSVTRRTLTLGLNSTMLLPLSRSLQTFSLPDLPYDYGALEPAISGEIMQLHHQKHHQTYITNYNKALEQLHEAIQKGDSSTVVKLQSAIKFNGGGHVNHSIFWKNLAPIREGGGEPPKASLGWAIDTHFGSLESLIQKMNAEGAALQGSGWVWLGVNQELKKLVIETTXNQDPLVT

SEQ ID NO: 61380 - protein, 64 aa, Gossypium hirsutum
  Clone ID: GOSHI-09MAY01-C58332_1.pep
LFKAFNLVFSSQCRFNFGVFLWISLFFFLGGGVVGSQIDYACTDTGSCFLFYSLPIYIYVSLFF

SEQ ID NO: 61381 - protein, 70 aa, Gossypium hirsutum
  Clone ID: GOSHI-09MAY01-C58202_1.pep
AVVLLCYLAIHAGDHKALEQARVLTAIEGADRTMFAQHPDLKDLVSRAIYQLNLYHTHTGVHPQRQLYAP

SEQ ID NO: 61382 - protein, 135 aa, Gossypium hirsutum
  Clone ID: GOSHI-09MAY01-C59772_1.pep
LAGAALPCSLAPGCGAAAGASPCPGAGRRRAAGRHCLACECTSLTCAGESGKSTIVKQMRILHVNGFNGDSEKATKVQDIKNNLKEAIETIVAAMSNLVPPVELANPENQFRVDYILSVMNVPDFDFPPEFYEHA

SEQ ID NO: 61383 - protein, 128 aa, Gossypium hirsutum
  unsure (1)..(128): unsure at all Xaa locations
  Clone ID: LIB3196-014-P1-M1-D6.pep
CLLLLGAVESGKSTIVKQMTILHANGSNGEGGEQDPQAARSNSDGAKATKVQDIKNNLIEAMETIVAGMSNLVPPVELSNPDNQFRVDYILSVMNAPDSDFPPEFYEHAKALWEDHXVRACYERFNEF

SEQ ID NO: 61384 - protein, 60 aa, Gossypium hirsutum
  Clone ID: LIB3149-060-Q1-K1-A2.pep
DGLWDVVSDMEVTNIIRDTGKEPALCSKRLATEAAKRGSKDNITVIVVFLCPVSTAERVY

SEQ ID NO: 61385 - protein, 60 aa, Gossypium hirsutum
  Clone ID: LIB3149-060-Q1-K1-H7.pep
RPNAVAHNMDDLIHLYFKRIEFTKNNQKHPTQRFLIEFLLADYTTRKVLLVQKPRNFVFL

SEQ ID NO: 61386 - protein, 158 aa, Gossypium hirsutum
  Clone ID: GOSHI-09MAY01-C59022_1.pep
LAHFALFFNHGQCCCAGSGTFVHERVYDEFIEKAKARALRRVVGDPFRKGVEQGPQIDTEQFEKVLRYIRAGIESNATLECGGDRLGTKGYFVQPTVFSNVMDDMLIAKDEIFGPVQSILKFKDIDEVIRRANNTRYGLSAGVFTKSVETASTLTRAL

SEQ ID NO: 61387 - protein, 121 aa, Gossypium hirsutum
  unsure (1)..(121): unsure at all Xaa locations
  Clone ID: GOSHI-09MAY01-C59292_1.pep
DPRGRPRVLKRIEDLRDNEPQPXLEELIEGLSRMWEVMSECHRRQFQIISVAYKNGIMRISVLSESHRHVTAHLEHELSLLCSSFTKWIGALKAYLKAINSGLSKCVTIGKSWERSKKKNF

SEQ ID NO: 61388 - protein, 107 aa, Gossypium hirsutum
  Clone ID: GOSHI-09MAY01-C59252_1.pep
MGQDSFTPQKRSFTGGGGLPTTNNAAAGGGRSRVLAGMPRGRQIHKTFNNIKITILCGFVTILVLRGTIGVGNLGSSEADAVNQNLIEETSRILAEIRFDFDPTDPD

SEQ ID NO: 61389 - protein, 96 aa, Gossypium hirsutum
  Clone ID: GOSHI-09MAY01-C54022_1.pep
HASDLFSFLSLSSMASHENITVITSPKGNNSEAAASAAANSPKGGQCLCSPTTHQGSFRCRFHRSSSSSWMMKRSKSMPTNNTSMVSLSPKSGETS

SEQ ID NO: 61390 - protein, 66 aa, Gossypium hirsutum
  unsure (1)..(66): unsure at all Xaa locations
  Clone ID: GOSHI-09MAY01-C54242_1.pep
HATEAITHDLPTMASVDGADFNSVDATFXSRPNGTTHVMITSLPGHFKSAWLSADCVLKYIALYEE

SEQ ID NO: 61391 - protein, 95 aa, Gossypium hirsutum
  Clone ID: LIB3165-047-Q1-K1-G7.pep
LAHNSNSAHASAPIVHGGICLYIANTCNVRENCWLTADTKTQAPTGLEKGSFYPLVFARFIPRLFWKGDKEPDIGEPSSRSVPFSIDSSRSCCFL

SEQ ID NO: 61392 - protein, 88 aa, Gossypium hirsutum
  Clone ID: LIB3493-002-P1-M1-E5.pep
TPSDRAIKAQWCTQSRKDYTMDRYSIPFPEQPQNETSKDYGVKGTLLEASRSLCLSVCHKPAAVPRHCRYWLYIGKCLHARSAHWHGH

SEQ ID NO: 61393 - protein, 183 aa, Gossypium hirsutum
  Clone ID: GOSHI-09MAY01-C55522_1.pep
MKGKWKGSKRKLGLPAALLLCSLSFLAGLFVPTFFFQDVPIIKPKPRMLEAVQEKTFRDPMANGVTGESSIESIPFQVLSWKPRAYYFPNFATSEQCEHVIEMAKVNLKPSGLALREGETEESTKGTRTSSGTFISASEDETGTLDLIEKKIAKVTSIPQSHGEAFNILRYEIGQKYDSHYDA

SEQ ID NO: 61394 - protein, 47 aa, Gossypium hirsutum
  Clone ID: LIB3165-047-Q1-K1-F9.pep
LSPAHSICHRITKRLLLHCLEHYRLGFILLEHLEIKKWFLSFFLLNK

SEQ ID NO: 61395 - protein, 59 aa, Gossypium hirsutum
  Clone ID: LIB3083-004-Q1-L1-E9.pep
VTGESPIESIPFQVISWKPLAYYFPNCATSKQCEHVIEMAKVNLKPSGLALREGETEES

SEQ ID NO: 61396 - protein, 261 aa, Gossypium hirsutum
  Clone ID: GOSHI-09MAY01-C55472_1.pep
MGRIYYTSCVVQNPVAMFNTLCYLLLLLLLLHFSLSQGLTFPQDISALKAFKASIKPTSIPSWSCLASWDFAAADPCALPPPTHFTCGIICSIDSTRVTQITLDPAGYSGQLTPLLSQLTQLTILDLSDNSFFGSIPSSISSLRSLQTLILKSNSFSGSIPDSVTTLKSLESLDISHNSLSGPLPKTLNSLSGLRRLDLSYNQLTGFLPKLPYNLLELALKGNSLSGYISNSSFDGLTQLEVVELSENSFTGTLGARTRGR

SEQ ID NO: 61397 - protein, 108 aa, Gossypium hirsutum
  Clone ID: GOSHI-09MAY01-C55412_2.pep
FNAKHKPPLDPFLNPSSSFVTEVERKCRLYPRLLLHGARSMQMEMMMTMILTMLPQHAWKAMATMMMETMTLLQQLLSRAMMMTMAAMIMLQLHDWSEVYECPLPWGF

SEQ ID NO: 61398 - protein, 146 aa, Gossypium hirsutum
  Clone ID: GOSHI-09MAY01-C55412_1.pep
YNSTPNTSEPPLDPFLNPNSSFVTEVERKCRLYPRFLLHGARSMQMEMMMTMILTMLPQHAWKAMATMMMETMTLLQQLLSRVMMMTMAAMIMLQLHDWSEFMSAPNRGVSNPKLFCIYECPPPPPPRAPLKHPVVVGFIRIILIK

SEQ ID NO: 61399 - protein, 156 aa, Gossypium hirsutum
  Clone ID: GOSHI-09MAY01-C55192_1.pep
MESYEEKREVEDEEQEEALSLCDLPVNLIEEKELKNEENGEPSQEEDFNFGSWPGHGGSFRSEPEMCVADEVFFKGQILPLRHSVSSDTGFRPHDSHNMSRSLSRSESMDHGSLSRFTSVSSSSTRSSSHYSTSSTNSKPGMKIRNNFNTHPSPKP

SEQ ID NO: 61400 - protein, 207 aa, Gossypium hirsutum
  unsure (1)..(207): unsure at all Xaa locations
  Clone ID: GOSHI-09MAY01-C56952_1.pep
FYANLYTLNKLRESKGMQTIKLRPHCGEAGDIDHLAAAFLLCNNISHGINLRKSPVLQYLYYLAQIGLAMSPLSNNSLFLDYHRNPFPSFFQRGLNVSLSSDDPLQIHLTKEALVEEYSVAAQVWKLSACDLCEIARNSVYQSAFSHMSKLHWLGHKYFLXRPEGNDIQKTDVPXLRIALRHETWIDEIQYLYSGRARIPQEIDPAM

SEQ ID NO: 61401 - protein, 96 aa, Gossypium hirsutum
  Clone ID: uC-gsflmaxxa038a12b1.pep
MNSPFKIVQLIQLLMLIILLSFYQIGLAMSPLSNNSLFLDYHRNPFPSFFQRGLNVSLSSDDPLQIHLTKEALVEEYSVAAQVWKLSACDLCEIAR

SEQ ID NO: 61402 - protein, 203 aa, Gossypium hirsutum
  Clone ID: GOSHI-09MAY01-C56962_1.pep
MADSAVALEDVASVDIMTELLRRFKCSSKPDKRLILIGPPGSGKGTQSPMIKDDYCLCHLATGDMLRAAVAAKTPLGINAKEAMDKGELVSDDLVVGIIDEAMKKPSCQKGFILDGFPRTVVQAQKLDEMLEKQGTKIDKVLNFAIDDSILEERITGRWIHPSSGRTYHTKFAPPKVPGLDDVTGEPLIQRRDDTPAVLKSRL

SEQ ID NO: 61403 - protein, 113 aa, Gossypium hirsutum
  Clone ID: GOSHI-09MAY01-C56922_1.pep
MPAPLTDVTFVLKLPVDPTLLKVSPKAVLNRSERELKWHVPEVPLKGTPGKLRVRMPLDSADIDEELEVVGYVKFSVQGATSLSGVCLKPATEGKTDFYEVNHRYQSGVYTCN

SEQ ID NO: 61404 - protein, 128 aa, Gossypium hirsutum
  Clone ID: GOSHI-09MAY01-C56862_1.pep
MAKKGSSTTPSRKAKNKKEESVPEQKNSASKVAGNEIDEIFAGKKRKKPDPKGSEKPNGDEISKPKSSKKKSKKSRETNREGGFNESSSGPWKRTADGFAIYTEEELGISKSDAGSTPLCPFDCECCF

SEQ ID NO: 61405 - protein, 65 aa, Gossypium hirsutum
  Clone ID: GOSHI-09MAY01-C56462_1.pep
DNGYRITSTAATSDQSALILSIPKRKPGDETQETLRTSQFPSTHVKEKWAKNLYLACLCYGRTVS

SEQ ID NO: 61406 - protein, 104 aa, Gossypium hirsutum
  Clone ID: GOSHI-09MAY01-C56022_1.pep
YSCVFLALLSLYARGPRQFQSLDLNDFPPDISPAESAQLERETEENARECDRLHNEIFQKTKEIARAAGVDDNQKLEKIVDAVKFLSDVEDLAEEARIPYLHEF

SEQ ID NO: 61407 - protein, 139 aa, Gossypium hirsutum
  Clone ID: GOSHI-09MAY01-C57802_1.pep
MEPMDIVGKSKEDASLPKATMTKIIKEMLPPDVRVARDTQDLLIECCVEFINLISSESNEVCNREEKRTIAPEHVLKALEVLGFGEYIEEVYAAYEQHKIETMHDSLKGGKWSNGAEMTEEEAAAEQQEEFAEARARMN

SEQ ID NO: 61408 - protein, 200 aa, Gossypium hirsutum
  unsure (1)..(200): unsure at all Xaa locations
  Clone ID: GOSHI-09MAY01-C57532_1.pep
GFSDLERSVCRMVHRXVATIAWFEAAQLWQPLIAIPXVLVIPYIWRLLXCLRQYKXQKETNLFNALKYSTAVPVIFLSALKYHVSPDRWTYVYRRLWLFSSVVNSLYSFYWDITRDWDLSVFTRIFKFNKPSLCTNLFYGRRWVYFWVIGSNLILRCTWTYKLSAHLRHNYLTVFMVTALEMLRRFQWIFFRVENEWNKI

SEQ ID NO: 61409 - protein, 160 aa, Gossypium hirsutum
  unsure (1)..(160): unsure at all Xaa locations
  Clone ID: LIB3582-027-P1-K1-G6.pep
ADILTSMAKVXADLERSVCRMVHRQVATIAWFEADSVCGSHSVAIPLVLVIPYIWRLLQCLRQYKDTKEKPTLSNALKYSTAVPVIFLSALKYHVSPDRWTYVYRRLWLFSSVVNSLYSFYWDITRDWDLSVFTRIFKFNKPSLCTNLFYGRRWVYFWVI

SEQ ID NO: 61410 - protein, 255 aa, Gossypium hirsutum
  unsure (1)..(255): unsure at all Xaa locations
  Clone ID: GOSHI-09MAY01-C57462_1.pep
MEASNSRMQTFGQTEINWDKLDKTKFYVVGAGIFTGVTVALYPVSVVKTRLQVASKDTAERSAFSVIRGILKTDGIPGLYRGFGTVITGAIPARVIFLTALETTKVAAFSMVEPFKFSEPTQAAIANGIAGMTASLFAQAVFVPIDVISQKLMVQGYSGHAKYNGGLDVARKVLKSDGIRGLYRGFGLSVMTYSPSSAVWWASYGSSQRVIWRFLGQGTDLKEVTSNLSXILAVQAVGGIIAGATASCIQLHWTL

SEQ ID NO: 61411 - protein, 70 aa, Gossypium hirsutum
  unsure (1)..(70): unsure at all Xaa locations
  Clone ID: GOSHI-09MAY01-C57182_1.pep
MCDPKISITYIVLKGCQHFDLGTGLQAKIRAVSVVPTKCFIGFFHPEAMDEGXFDFLHCAMSFDNIWDEI

SEQ ID NO: 61412 - protein, 125 aa, Gossypium hirsutum
  Clone ID: GOSHI-09MAY01-C57172_1.pep
ILGYRQIFTANPDNVQHILKTRFNNYPKGEFFINVFFDFLGNGIFNADGEAWKFERQVSSHEFNTRSLRKFVETVVDAELNDRLVPMLSGAVTGKTVLDLQDVLQRFAFDNICKIAFGYDPECLL

SEQ ID NO: 61413 - protein, 136 aa, Gossypium hirsutum
  Clone ID: GOSHI-09MAY01-C57162_1.pep
MARTKQTARKSTGGKAPRKQLATKAARKSAPTTGGVKKPHRYRPGTVALREIRKYQKSTELLIRKLPFQRLVREIAQDFKTDLRFQSHAVLALQEAAEAYLVGLFEDTNLCAIHAKRVTIMPKDIQLARRIRGERA

SEQ ID NO: 61414 - protein, 122 aa, Gossypium hirsutum
  Clone ID: GOSHI-09MAY01-C57132_1.pep
LTSGYGYSLLVRYPIYHIPMGRTIKDLSTCFLTYHTLSSSFQGNFSLHIHINNQKEKEGNISLPPFGLATYKMQGDVWLSSSGCGGGDQERLLSLLGVADSWLKQLSVQHHDFNYFSGIRHG

SEQ ID NO: 61415 - protein, 217 aa, Gossypium hirsutum
  Clone ID: GOSHI-09MAY01-C57082_1.pep
MLDLNSYGYELREGLGPFGINVNNNCGSCSSSCNSSSSGGADDGGGGTKTRRLLDEENRIVPKTLPLLFWTNQRPNDEDEPKDVDDHSSSAIFKNDGEGLVGWPPVKAWRKKVRRRVANVRAAVENSCGGRASSSTYVKVKMEGNAIARKIDISLHHSFESLTTTLMRMFDISDENGQKSFKLTYLDREGDWLLAEDVRWRTFIRSLKYIKLIRSRC

SEQ ID NO: 61416 - protein, 107 aa, Gossypium hirsutum
  Clone ID: GOSHI-09MAY01-C57072_1.pep
TPIPARIHLSKSSSRFKKQRKKTNLFSSIFDRPMVSQSTALLPLLLTHRVVNQGFIEPRRFVRSMGGVSTGAVLAYGGAGVVAGGFGGWGCWSRGVVQFLAAAQNPS

SEQ ID NO: 61417 - protein, 121 aa, Gossypium hirsutum
  Clone ID: GOSHI-09MAY01-C50982_1.pep
APPPLPDEPEPKRQKLDDAKLVPEDQFLAQHPGPACITVSVPNLDEGNLKGQLLEITVQALSETVGSLKEKIAGEIQLPANKQKLSGKAGFLKDNMTLAYYNVGAGETLALSLRERGGRKR

SEQ ID NO: 61418 - protein, 101 aa, Gossypium hirsutum
  Clone ID: LIB3149-033-Q1-K1-H1.pep
LVPEDQFFAQHPGPACITVSVPNLDEGNLKGQLLEITVQALSETVGSLKEKIAGEIQLPANKQKLSGKAGFLKDNMTLAYYNVGAGETLALSLRERGGRKR

SEQ ID NO: 61419 - protein, 64 aa, Gossypium hirsutum
  Clone ID: LIB3825-010-Q1-N6-A12.pep
GWVHEWVSRPATIKADPAVMADQLLISSRLGFSGSYSEFESGQSKGLLSPKNNYMCRSSPNYWV

SEQ ID NO: 61420 - protein, 58 aa, Gossypium hirsutum
  Clone ID: LIB3146-023-Q1-K1-B10.pep
GFNSPPQHFGGGVYPNWYHSQTGVSLDPQQQNPRDGSLSGSQGQPPSKHTQQVWQNNY

SEQ ID NO: 61421 - protein, 65 aa, Gossypium hirsutum
  Clone ID: LIB3146-024-Q1-K1-B12.pep
QAGGFRQGLQPPSQHFGSLGYPNFYHSQTGVSLDPQQQNPRDGSLSGSQGQPPSKQTQQLWQNNY

SEQ ID NO: 61422 - protein, 78 aa, Gossypium hirsutum
  Clone ID: LIB3146-040-Q1-K1-E1.pep
HASAHASEVISGMGRDVTVLIYLDVRKALETITAKGMKLYISDNKAILTEGFDGVVRVKCFEKIESWPDRKPIPFSNV

SEQ ID NO: 61423 - protein, 59 aa, Gossypium hirsutum
  Clone ID: LIB3146-021-Q1-K1-H1.pep
YISDNKVILTEGFDGVVPVKCFEKNRIMARQKTYTFLKCLKLDEMISFFFFFSLSFKPV

SEQ ID NO: 61424 - protein, 143 aa, Gossypium hirsutum
  Clone ID: GOSHI-09MAY01-C50442_1.pep
MEEKYETLKIQQESPNSGVFNLIINRPSVSNALGLNFFSEFPKVLNALDQNPTVAVIVLSGSGNHFCGGIDLKSLAAIADDNSGDQGRTSERLRRKIKLLQDAITAIERCPKPVIAAIHGACLGLGINIVTACDIRYWTKDAF

SEQ ID NO: 61425 - protein, 119 aa, Gossypium hirsutum
  Clone ID: GOSHI-09MAY01-C50652_1.pep
IRMSSLLFFPFAYVAISILLYLPFILNYLSSTQYTFFKLLNYYFNYLLELSHGHLTFPTTILTFLSCRFQFAPFPCLLSEAHVSIPDQHNKAYNLYIKLLISSILYSLLPVQVLPLGLN

SEQ ID NO: 61426 - protein, 227 aa, Gossypium hirsutum
  Clone ID: GOSHI-09MAY01-C50602_1.pep
NNKQYVKDDDYGEEMERVDVLLTLPDEDRNPHMDDTDIKALIQDMIAAATDTSAVTNQWAMAEVIKHARVLRKIQYELDSTVGPNRMVNESDLPHLNYLRCVIRETFRMHPAGPFLIPHESLRATTINGFYIPAKTRVFINTHGLGRNTKLWDDVESFRPERHWLADGARVEISHGADFKILPFSAGKRKCPGAPLGVTLVLMALARLFHCFDWAPRNGMRPEDINT

SEQ ID NO: 61427 - protein, 84 aa, Gossypium hirsutum
  unsure (1)..(84): unsure at all Xaa locations
  Clone ID: LIB3146-038-P1-K1-D10.pep
MHPAGPFLIPHESLRATTVNGAHIQPGTRVFINTHGLDRNTRLWDXDVESFRPERHWLADGARVEISHGADFKILPFSAGKRKC

SEQ ID NO: 61428 - protein, 137 aa, Gossypium hirsutum
  unsure (1)..(137): unsure at all Xaa locations
  Clone ID: GOSHI-09MAY01-C50132_1.pep
GFVESLCPIHYPDNKXFITREHANDVPFCGVYYLNFFRLVWRTAYVIVTAVLAMIFPFFNDFLGLIGAGSVWPLTVYFPIEMHIAQAKIPKYSFRWVWLKILSWVCLIISLIAAAGSVEGLIQSLKTYKPFQTRNEE

SEQ ID NO: 61429 - protein, 209 aa, Gossypium hirsutum
  unsure (1)..(209): unsure at all Xaa locations
  Clone ID: GOSHI-09MAY01-C50092_1.pep
PQSSKGKKIKTGTDGSHDEMKILHDSSVSKAVDMAVGFTNALAGLAVNDVIQRTAGRLDSLHSEGVHRLSEMCCLAMSHLLMLGKSVISGSNKVQDEDADGDMMNIDWPEDSVEKAXLIRLKAQSMTGYVEAVSSSFITGISDVAGAYLAAIKSVNADSHEALTKASIQEKANSFSEHLRSDQNIAVSKIQDGLQNFSYVVLSNSMPAA

SEQ ID NO: 61430 - protein, 129 aa, Gossypium hirsutum
  Clone ID: GOSHI-09MAY01-C50002_1.pep
NSRVDPRVRPRVRTLFALVIAITKDLPDVEGDRKFQISTLATKLGVRNIAFLGSGLLLVNYVAAVLAAIYMPQAFRRSLMIPAHIFLAVCLIFQTWVLEQANYKKEAISGFYRFIWNLFYAEYAIFPFV

SEQ ID NO: 61431 - protein, 190 aa, Gossypium hirsutum
  unsure (1)..(190): unsure at all Xaa locations
  Clone ID: GOSHI-09MAY01-C50392_1.pep
MQDLLMRMTLDSICXVGFGVETGTLAPTLPDNNFGRALDTANIIXVKKMTYXNTLKTRKRYFSVGSEALLGKSIKDIVDFTYNVIRRRKSEIKEIRESLQNQRSIKHDIXLSRFIELSXDPEGSLTDKSLRDIVLNFVIAGRDTTATTLTWAIYMIMTNARVAVKLYSELKAFEEAQAKEERFSFLPCDS

SEQ ID NO: 61432 - protein, 96 aa, Gossypium hirsutum
  Clone ID: LIB3146-016-Q1-K1-A6.pep
GLVVEMGPLLPTLPDTTFVRPLDPANIIVPLRFVDPLWKLKRFLNVGSEALLGKSIKVIDAFTYNVIRRRKSEIKEIRESCKTSKIKHDILSKIMN

SEQ ID NO: 61433 - protein, 205 aa, Gossypium hirsutum
  Clone ID: GOSHI-09MAY01-C51912_1.pep
MELSQHGFLEELLAPRRDSWTTFSAGATEFLPSGSWNFDSFDENPTLATSNLSLVAFSPPPPPDQTPSFECPFSDQPYPFVDGFTVRDMDSSYTNVNVVHPHTSPFPATQQDFPSMVDDEDQFGLLTTDHQQHSLEETKSSCKVEIEQTSNIQGFNMGDLLLGKKRAKTKKLEGQPSKDLMAERRRRKRLDDKLSMLRSIVPKIS

SEQ ID NO: 61434 - protein, 71 aa, Gossypium hirsutum
  unsure (1)..(71): unsure at all Xaa locations
  Clone ID: LIB3583-048-P1-K1-A8.pep
SSXWLMDFDLLRESNFGYIKSLLGCILSTPXPDQTPALNVLSVINPTLLRLRFTARCGGGWYFRVASPHRP

SEQ ID NO: 61435 - protein, 100 aa, Gossypium hirsutum
  Clone ID: GOSHI-09MAY01-C51542_1.pep
MSDSGGSASANRMLCSVPERLQLHMAMLALQFGYAGFHVVSRAALNMGISKLVFPVYRNIIALLLLLPFAYFLEKKERPPITLNFLLQFFLLALVGITAN

SEQ ID NO: 61436 - protein, 148 aa, Gossypium hirsutum
  unsure (1)..(148): unsure at all Xaa locations
  Clone ID: GOSHI-09MAY01-C51402_1.pep
LGYQKESSITSCNLGFKTYDWDYRWMDYPPQARDLKHPSDQSIATYKXHSVLRTLIRCYFSPEYSTGQKYIYTGSHDSRVYIYDVATGAQVAVLKHHTSPVRDCSWHPYYPMLVSSSWDGDVVKWEFPGSGEAPTPVSKKRIRRRYYY

SEQ ID NO: 61437 - protein, 98 aa, Gossypium hirsutum
  unsure (1)..(98): unsure at all Xaa locations
  Clone ID: LIB3146-027-Q1-K1-D8.pep
SIYIVISISCTLYRSTGQKYIYTGSHDSRVXIYDVVTGAQVAVLKHHTSPVRDCSWHPYYPMLVSSSXDGDVVKWEFPGSGEAPTPVSKKRIRRRYYY

SEQ ID NO: 61438 - protein, 289 aa, Gossypium hirsutum
  Clone ID: GOSHI-09MAY01-C51762_1.pep
QTLLRGRKNLWQLTTSRVLVLLSSSAASTSIHQFLKNYEDLNTFILAGEAFCGVEVVEFRKKLKGVCENYFSAFHQQNISALKMVLEKETWLILPPEMMQIINFAGLLGDGVPFIAASDGNSSKPRVLHTDKSAKKIDRVAKKSGFSPWVRNGNPFLLKLSGIAKEANDCSPLSGATSGGYEGNVHNLHVDIVSSCNGDVNHINGSNSISEEENEDLLADFIDEDSQLPSRISQPNFPRSRSLHFSNDEFTAQTGSSVCLLRSMDKYARLMQKLEIVNVEFFKGICQLF

SEQ ID NO: 61439 - protein, 270 aa, Gossypium hirsutum
  unsure (1)..(270): unsure at all Xaa locations
  Clone ID: GOSHI-09MAY01-C51152_1.pep
HASAHASALFNALAKANINIRAIAQGCSEYNITVVLKREDCIRALRAVHSRFYLSRTTIAMGIIGPGLIGATLLDQLRDQAAVLKEEFNIDLRVMGITGSRTMLLSEVGLDLSRWRELLKQKGQVADLEKFTQHVHGNHFIPNTVLVDCTADSNVASCYHDWLRKGIHVITPNKMANSGPLDKYLKLRALQRQSYTHYFYEATVGAGLPIISTLRGLLETGDRIXLRIEGFFSGTLSYIFNNFTGNKTFSEVVAEAKAAGFTEPDPRDDL

SEQ ID NO: 61440 - protein, 115 aa, Gossypium hirsutum
  Clone ID: LIB3543-021-Q1-K1-E8.pep
QYSRMEERHEEEEDDGEEEEEEDEEENDIKTINKDEGQTKEQSQFRDSLSEERGRKSQPETVDKSSAVVQNQKGIITQNEEESKAVQQQRYKVFVSPISLFSLPTFSFCIICNVL

SEQ ID NO: 61441 - protein, 127 aa, Gossypium hirsutum
  Clone ID: LIB3146-024-Q1-K1-E7.pep
KGRCLSISIAVWRRGMRRRKMMGKKRKRRMRKKMISRLLTKMKVKRKSNHSSQIACQRSAVENLSLKQWISPVQYVQNQKGIITHNEQESIAVQQQRYKEAQERQQMSKMLESLCYENPMLLNYVEI

SEQ ID NO: 61442 - protein, 251 aa, Gossypium hirsutum
  unsure (1)..(251): unsure at all Xaa locations
  Clone ID: GOSHI-09MAY01-C51382_1.pep
MSGAIKAVIFNSQGSCLFQRAALFHSTPVLEHKKRNYWQFGKRKRRMRAKQELLRNFGAYADIMFENWRDEFHEDDPSSSRGPSWFKKQQSKGSRRDWSGIXTVFVHGLRXFEFCEDIDDDIENIFRSAFGGSRFFYWSFINDEYPQWRRSRXSDNYEKSWRWSSRFDEDSDSTESGNAESSDQDTIADRRALGLSASGPLTLEDVKTAYRACALKWHPDRHHGSSKAVAPVHFGPCNSAYQSLCDKLALN

SEQ ID NO: 61443 - protein, 102 aa, Gossypium hirsutum
  Clone ID: LIB3584-020-P1-K1-H6.pep
MNRAINAVIINSQGSCLFQRAGLFHSTAVLEHKKRNYWQFGKRKRRMRAKQELLRNLGAYADIMCENWRDECHEDDPSSSGGPTWFKKQQRPCEFWKTLVMT

SEQ ID NO: 61444 - protein, 154 aa, Gossypium hirsutum
  Clone ID: GOSHI-09MAY01-C51242_1.pep
TDKASLLAEVIQHVKELKRQTCLIAETSPVPTETDELTVDTSDQDGKFVIKASLCCEDRSDLLPDLIKALKDLRLKTLKAEITTLGGRVKNVLFITGEEQESSCSSDGGDVIGSIQEALKPVMEKSTCGDESNSSGNVKRQRTNISTVLQRRSL

SEQ ID NO: 61445 - protein, 135 aa, Gossypium hirsutum
  Clone ID: LIB3146-025-Q1-K2-D11.pep
KSHSEAERRRRERINNHLAKLRSLLPSTTKTDNASLLAEVIQHVKELKRQTCLIAETSPVPTETDELTVDTSDQDGKFVIKASLCCEDRSDLLPDLIKALKDLRLKTLKAEITTLGGRVKNVLFITGEEQESSCS

SEQ ID NO: 61446 - protein, 190 aa, Gossypium hirsutum
  Clone ID: GOSHI-09MAY01-C51202_1.pep
ATPMISIVKDIVNNIRAMEEEEEEEKSCGIEKGNGVNKTNSTSPNSKRKENFKTRRAYFYWVTREQGSFDWFKGIMNEVAEMDHNHVIELHNYCTSVYEEGDARSALITMLQSLNHAKNGVDIVSGTRVKSHFAKPNWRSVYKHIAVNHNNSRVGVFYCGAPALTKELRQLASDFSHKTSTKFDFHKENF

SEQ ID NO: 61447 - protein, 303 aa, Gossypium hirsutum
  Clone ID: GOSHI-09MAY01-C51222_1.pep
MGSEEEPKEGFPKMVNPGKATILALGKAFPHQLVMQEFLVDGYFKNTNCDDPDLRKKLSRLCKTTTVKTRYVVMSEEILKQYPELAIEGLPTVKQRLDICNDAVTEMAVEASRVCIKKWGRPISDLTHLVYVSSSEARLPGGDLYLAKGLGLSPETQRVMLYFMGCSGGAAGLRVAKDIAENNPGSRILLATSETTIIGFKPPSADRPYDLVGAALFGDGAGAMIIGSDPVLSIERPLFELHTAMQNFLPDTEKTIDGKLTEEGISFKLARELPQIIEDNVESFCEKLMATVGLTDKDYNKMF

SEQ ID NO: 61448 - protein, 145 aa, Gossypium hirsutum
  Clone ID: GOSHI-09MAY01-C52862_1.pep
MPKVKTNRVKYPEGWELIEPTLRELQAKMREAENDPHDGKRKCETLWPIFKIAHQKSRYIFDLYHRRKEISKELYEFCLDQGYADRNLIAKWKKPGYERLCCLRCMQPRDHNFATTCVCRVPKHLREEKVIECVHCGCKGCASGD

SEQ ID NO: 61449 - protein, 153 aa, Gossypium hirsutum
  Clone ID: GOSHI-09MAY01-C52832_1.pep
GMFVPMLKLIIGCDPKYSTGISKRMIMGAAGSTVYYNLRLRHPTLEMPLIDYDLALLFQPMLMLGISIGVALNVMFADWMVTVLLIILFIGTSTKALFKGIDTWKKETILKKEAAKVESEESKPADGASQDYKPLPSGPGNQTEDEVPLLQNI

SEQ ID NO: 61450 - protein, 58 aa, Gossypium hirsutum
  Clone ID: GOSHI-09MAY01-C52562_1.pep
AGINLNYLFPNRVMWKRRISIYYALMFYAQVTRLGPIQLLSCLNWSWAGLNIFSFYFC

SEQ ID NO: 61451 - protein, 220 aa, Gossypium hirsutum
  unsure (1)..(220): unsure at all Xaa locations
  Clone ID: GOSHI-09MAY01-C52532_1.pep
ISRVHHRHLVSLVGYCISEHQRLLVYDYVPNNTLHYHLHGKGRPVMDWALRVKVAAGAARGIAYLHEDCHPRIIHRDIKSSNILLDRNFEAQDLHWDFLSCRXVSDFGLAKLALDSNTHVTTRVMGTFGYMAPEXATSGKLTEKSDVYSFGVVLLELITGRKPVDDSQPLGDESLVEWARSLLAEAIEHXDFDMLVDPRLEKNYVDHEMFRMIEAAAPCV

SEQ ID NO: 61452 - protein, 129 aa, Gossypium hirsutum
  unsure (1)..(129): unsure at all Xaa locations
  Clone ID: GOSHI-09MAY01-C52702_2.pep
PKLECLKQWVPREASGPITHATXSCDSQSIYVSFEDGSVGVLTASTLRLRCRISPAAYLPPNPSLRVFPLVIAAHPSDPNQFALGLTDGGVQIVEPLESEGKWGTSPPAENGAGPSTTSGVTGSEPPQR

SEQ ID NO: 61453 - protein, 57 aa, Gossypium hirsutum
  Clone ID: LIB3825-008-Q1-N6-F2.pep
AAHPSDPNQFALGLTDGGVQIVEPLESEGKWGTSPPAENGAGPSTTSGVTGSEPPQR

SEQ ID NO: 61454 - protein, 119 aa, Gossypium hirsutum
  Clone ID: LIB3146-040-Q1-K1-C7.pep
SLSTGGHTGWLGYSYAEDRDLYVAGDLYENDVVTPAMIVVPRKKKKVGESHVKEGKKQRWEASEEKAAAATSPIVMAKPTPKPVDEDLYKISPDLLYPKPKKKKGLGLLSSCLVPSWLS

SEQ ID NO: 61455 - protein, 125 aa, Gossypium hirsutum
  unsure (1)..(125): unsure at all Xaa locations
  Clone ID: LIB3146-040-Q1-K1-C8.pep
HSYNHNATYYYSETGSNTGGLFYSYSLDRNLYVAGDLYENDVVTPAMIVVPRKKKKVXESHVKEGKKQMWEASEEKASTATSPIVMAKPTSKPVDEDLYKIFPDLLYPKPKKKKGLGLLSSCLVP

SEQ ID NO: 61456 - protein, 72 aa, Gossypium hirsutum
  Clone ID: LIB3146-040-Q1-K1-C6.pep
SGVGTIALPLTKGLETVRQTGLRRYSYAEDRDLYVAGDLYENDVVTPAMIVVPRKKKKVGESHVKKGKKQKW

SEQ ID NO: 61457 - protein, 84 aa, Gossypium hirsutum
  Clone ID: LIB3146-039-Q1-K1-H2.pep
MKGKATKNPIFAFTTWIRRQPPKMKAFLATISGMAALLFLRMVVEDHNNLFVAAEAVHALGTFVLIYKLTKEKACAGTSFFFFD

SEQ ID NO: 61458 - protein, 102 aa, Gossypium hirsutum
  Clone ID: LIB3196-041-P1-M1-A5.pep
MKGKATKNPIFAFTTWIRRQPPKMKAFLVTISGMAALLFLRMVVEDHNNLFVAAETVHALGTFVLIYKLTKEKACAGLSLKSQELTAIFLAVRLYCSFVMEY

SEQ ID NO: 61459 - protein, 151 aa, Gossypium hirsutum
  Clone ID: GOSHI-09MAY01-C52142_1.pep
RFSFDWSVNNTSVSPDGKLLAVLGDSTDCLIADAQSGKVTGTLEGHLDYSFASAWHPDGNILATGNQDTTCRLWDVRKPAQSLAVLKGRMGAIRALKFTSDGRFLAMAEPADFVHVFDTKSGYVKCQEIDFFGEVAGISFSPDTESPAVEL

SEQ ID NO: 61460 - protein, 104 aa, Gossypium hirsutum
  Clone ID: GOSHI-09MAY01-C52102_1.pep
PTRPPTRPPTRPVESTTEGVEPGPKPVIISEALAKFLGTGGREMLATEAENRVWEYIKVNRLEDPSNSMVVLCDANLRELLGCESISVMGVRETLLRHHLFKQS

SEQ ID NO: 61461 - protein, 291 aa, Gossypium hirsutum
  unsure (1)..(291): unsure at all Xaa locations
  Clone ID: GOSHI-09MAY01-C52292_1.pep
LHRSTVGGLLNATCGNATELIIALFALYRSKXHVLKYSLLGSILSNLLLVLGSSLLCGGLANLKKEQRYDRKQADLNSSLLLLGLLCHMLPLMSRYAAAPGVLIADSTLQLSRASSILMLVAYIGYIIFQLKTHRQIFDSLQEDEEEEEEEEKAVIGFWSAFSWLVGMTLIIALLSEYVVGTIEAASETWGISISFISIILIPIVGNAAEHAGAIIFAFKNKLDISLGVALGSATQISMFAVPLCVVVGWIMRIKMDLDFNLLETGCLALTIPVVAFTLQDGTSHYMKGVV

SEQ ID NO: 61462 - protein, 182 aa, Gossypium hirsutum
  Clone ID: GOSHI-09MAY01-C53882_1.pep
MISRETGMCHDDSAKGVKAQTIDELHFLQKKRSAPTTPLEGNQGAFASLPDDERRRQQLQSISASLASLTRGTGPKVVRGDPAAKSSQAVEHVAHRHHHVEAPAISVSDDSSLKFTHVLYNLSPAELYEQAVKYEKGSFITSSGALATLSGAKTGRSPRDKRVVMDDTTQNELWWGKGLTQH

SEQ ID NO: 61463 - protein, 73 aa, Gossypium hirsutum
  Clone ID: GOSHI-09MAY01-C53562_1.pep
IMTNAQELAPRRQGEDQANVTPDSSVTANSKSDLDNLLLVQEMLKDLVKWKAKIKQQLTDISSAVSVLQKSRQ

SEQ ID NO: 61464 - protein, 380 aa, Gossypium hirsutum
  unsure (1)..(380): unsure at all Xaa locations
  Clone ID: GOSHI-09MAY01-C53492_1.pep
KGNLVRIVEAGRGIFWAHFQCIHFSQFLRGDFLHQLEIPXKIAKNIRKKLPETVTVKGASGIIWDLGLTADGDTSRFDPACXNFVLDHSLEENDLLIFKYNGLSHFDVLMFEGQSLCEKGSSYFVRKCVHPESENGYQNKRKIDENPDEIVHKSSQCGLESSPEKSTNNDIGTAPSRGPINSAPTNKKMRYAGSSTKSIYARHLGGKERCTFPGEVRFETEFDGAIMDEGDFSPPPTCDNGPLTQFEKANAVAKAQEALTRDGFMVVMKPTHVWRPFYMAIPVAWTAKHHLKENTDIILRINKRTWRTRYNYHKNRDCGGLSGGWKCFVNDNNLIEHDVCVFEPSNIGGKPIILDVIIIRVLDSAVQAPVPLTITHPASC

SEQ ID NO: 61465 - protein, 114 aa, Gossypium hirsutum
  Clone ID: LIB3196-043-P1-M1-D1.pep
MGGMKPTHVWRRVYMVNFIPELDREKYPFAALKLDDGVKPPPCLLSGYMQAIPVAWTAKHHLKENTDIILRINKRTWRTRYNYHKNRDCGGLSGGWKCFVNDNNLIEHDVCVFE

SEQ ID NO: 61466 - protein, 119 aa, Gossypium hirsutum
  Clone ID: GOSHI-09MAY01-C53732_1.pep
APYFPLIWPMLIPPDNKLHVQAWGMTFQLLKSPLGFDFNKVKRKSMAYSPGKNLFPFFLFAFKYKNDKPKRTKTRKKNRVSRYLNRKSPLNFGGLLVYFSMRKYLQVHSVAFIAGKIKI

SEQ ID NO: 61467 - protein, 246 aa, Gossypium hirsutum
  Clone ID: GOSHI-09MAY01-C53192_1.pep
ATTVAVKRLKEVTSAKREFEQHMEVIGHIRHENVSALRAYYYSKDEKLVVHDYYELGSISALLHGKRGEDRTPLDWETRLKIAIGAAKGIAYIHRQNNGKLVHGNIKASNIFLNSKRYGCVSDIGLAAVMSPMPLPVMRAAGYRAPEVTDTRKATQASDVYSFGVFLLELLTGRSPIHATGGEEIVHLVRWVHSVVREEWTAEVFDVELLRYPNIEEEMVEMLQIAMSCVARVVEQRPKMAGLVKM

SEQ ID NO: 61468 - protein, 56 aa, Gossypium hirsutum
  Clone ID: GOSHI-09MAY01-C53172_1.pep
MKRWFDPWPGVCEGEFNRTWPFLVGFAVTGTIITKFSLGLTEEDAKNSPFAQKHKR

SEQ ID NO: 61469 - protein, 69 aa, Gossypium hirsutum
  Clone ID: uC-gsflnu33B115g08b1.pep
FWLISMLLVVFKSKTNFVYNFTKFFKENVFIWCHFLQIEVVDLVSEGCTGGKLSSTTLRKLEAEKAKNQ

SEQ ID NO: 61470 - protein, 54 aa, Gossypium hirsutum
  Clone ID: LIB3146-053-Q1-K1-H1.pep
RTRGPWPVFFKREFNRTWPFVVGFAVTGTIITKFSLGLTEEDAKNSPFAQKHKR

SEQ ID NO: 61471 - protein, 128 aa, Gossypium hirsutum
  unsure (1)..(128): unsure at all Xaa locations
  Clone ID: GOSHI-09MAY01-C53132_1.pep
MQTAQPPKPHPLCDIIILGASGFTGKYVVKEALKFLNTPSSPLKTLALAGRSREKLVKTLQWAAHPSSPPNDVSVITADTTDPPSLSSLCNQTKLLLNXVGPYRIHGEPDVAGCAFYGGEYLDITGEP

SEQ ID NO: 61472 - protein, 102 aa, Gossypium hirsutum
  Clone ID: uC-gsflnu33B107d09b1.pep
ATMGGCATKPKVLKGDEPEIPAPAPSKEAVPEPKEAALAVAADGEKKVEADEVAKDKDVIDDDAIDDQSNKRRSLSNLFQEKEKGTAESETTPSEPTKNETP

SEQ ID NO: 61473 - protein, 87 aa, Gossypium hirsutum
  Clone ID: LIB3146-051-Q1-K1-H3.pep
LIINGIIIDNIFVLSNLISFHLLFTISSNSKSSLLWFGNRLFRRCWSRDLGFVTLQNLGLGSTTTHVCSAFNIVLINSTSKLFLFIL

SEQ ID NO: 61474 - protein, 172 aa, Gossypium hirsutum
  unsure (1)..(172): unsure at all Xaa locations
  Clone ID: GOSHI-09MAY01-C53362_1.pep
MGYAQLVIGPAGSGKSTYCSSLYQHCETLGRSIHIVXFYPAAENFDYPVAMDIRELIRLDDVMEELGLGPNGGLIYCMEHLEDNLDDWLNEELDNYLDDDYLVFDCPGQIELFSHVPVLRNFVEHLKRKNFNVCAVYLLDSQFITDVTKYVSGCMASLSAMVQLEVPHINIL

SEQ ID NO: 61475 - protein, 194 aa, Gossypium hirsutum
  Clone ID: GOSHI-09MAY01-C53312_1.pep
MSSLSRLCKSIVFFFPSPTAVSAGFSRIRPVSDTEIMVSGLINANPIVYEKKERRVRNEAAVPDEYAVEPIDQLEIFYHIRDIKDPEHPYSLEELKVITEDAIEVDNERSYVRVTFTPTVEHCSMATVIGLCLRVKLMRSLPSRYKMDIRVAPGTHATEAAVNKQLNDKERVAAALENPNLLDMVDECLAPSYA

SEQ ID NO: 61476 - protein, 73 aa, Gossypium hirsutum
  Clone ID: GOSHI-09MAY01-C53252_1.pep
QKGHLLQLRSLQTPDPCPTVYFERMQEPPPLTPRFIFTNGFFGGRHFSSSIFYQVNQSINSMYNTESGQIQFN

SEQ ID NO: 61477 - protein, 143 aa, Gossypium hirsutum
  unsure (1)..(143): unsure at all Xaa locations
  Clone ID: GOSHI-09MAY01-C53272_1.pep
CPYEGCEKAYIHEYKLKLHLRREHPGHMSDENAENATANADNEMDEASDQDAYAGKRVNGKXQKQQSRAKPNVKMPPAKVARQKGSSPSPATLPIPKKQWPIKEQVFEEEDSEETEEDRDNVDDGWRYRENNEDDDEETEYED

SEQ ID NO: 61478 - protein, 53 aa, Gossypium hirsutum
  Clone ID: GOSHI-09MAY01-C53232_1.pep
TKKTSLPLMGSGSQSTNTYHIVTRHVAIDVFFFPTEAVSLNSLVITLKFEPQK

SEQ ID NO: 61479 - protein, 224 aa, Gossypium hirsutum
  Clone ID: GOSHI-09MAY01-C48982_1.pep
TAGAALATHIPSGQLGFTGSTETGKIVLELAAKSNLKPVTLELGGKSPFIVCKDADVDKAVELAHFALFFNQGQCCCAGSRTYVHESVYDEFLEKAKARALKRSVGDPFVAGIEQGPQIDSEQFEKIMRYIRSGVESGATLETGGERIGDKGFYIQPTVFSNVKEDMLIAKDEIFGPVQSILKFKDINEVIRRANTTSYGLAAGVFTQDIDTANTLTRALKVGE

SEQ ID NO: 61480 - protein, 105 aa, Gossypium hirsutum
  Clone ID: GOSHI-09MAY01-C48902_1.pep
ILKMKSKHVAGTFTKKKKNVVLEVCKDIPSWPGRHLFASGEQHRYFGLKTETRGIIEFECRSEREYDMWTQGVSRLLLIAAETERKHRRQSSTTWPPGGQNLDLD

SEQ ID NO: 61481 - protein, 244 aa, Gossypium hirsutum
  Clone ID: GOSHI-09MAY01-C48582_1.pep
VWVQDNVSWGWGFGIPAIAMAIAVVFFFSGTRLYRNQKPGGSPLTRLCQVVVASFRKCRVAIPADKSLLYETTDAESNIKGSRKVEHTEDLSFFDKAAVETESDEKKGTVNSWRLCTVTQVEELKAVIRLLPIWATGIIFAAVYSQMSNLFVLQGERMNTHVGNSTFKIPPASLSIFDTLSVIFWVPIYDRIIVPVTRKFTGHKNGLTQLQRMGIGLFISIFAMVVAAILELERLREVRRHNYY

SEQ ID NO: 61482 - protein, 139 aa, Gossypium hirsutum
  Clone ID: GOSHI-09MAY01-C48472_1.pep
VLSMVDPSRDPTKSGASLVLPTRKDNVVAESVASKEIRSSNGDLTRNQKKKICNRAKKAAQGCVGREASEENEIDSKTGGTEDTNADAKSNEVCGDEQANSSEVKDDAKRDGINNGNQGKERHRRGSRATRKKLLAEVD

SEQ ID NO: 61483 - protein, 178 aa, Gossypium hirsutum
  unsure (1)..(178): unsure at all Xaa locations
  Clone ID: GOSHI-09MAY01-C48092_1.pep
MAEQMPLGRAREETQSSDEETKCHKSYDHILSLLEAEEDEPNQDLSSLLTTLQQELSSDSVLDDPLPYPTSAALDAGQKNPRPNTTAEATNTNTITGSLEDEDIQDDKEKVIRHLLEASDDELGIPNREHGFDXEFLSLNTVVTMVEMGLLYVIGLREFEDDAADYYTLLQSELCLEL

SEQ ID NO: 61484 - protein, 77 aa, Gossypium hirsutum
  Clone ID: GOSHI-09MAY01-C49992_1.pep
VFKNNSSIQCRVFCCSLWAIMRHECMGWCPPTGSVVKLNFDAAFNESRENSVSGMVVRNVSGEVLAFKTVVHGEVAS

SEQ ID NO: 61485 - protein, 390 aa, Gossypium hirsutum
  unsure (1)..(390): unsure at all Xaa locations
  Clone ID: GOSHI-09MAY01-C49972_1.pep
VKPNVVIYNTLLVAAGXAQRPWQARSIYKEMLSNGFSPNWATYAALLRAYGRARYGEDALNVYKEMKDKGLELTVVLYNTLLAMCADVGFADEAAEIFEDMKNSGACKPDSWTFSSLITIYSCSGKVSEAEGILNMMLEAGFEPNIFVLTSLIQCYGKAQRTDDVVRMFNRVYELGITSGRVGFCGCLLNVMTLTPREELGKVMDCIEKAKPELGRVVXLIGEQNGEGNFKNEASELPTRPPSDVKKPYCNCLIDLCVNLDLLERACDLLELGLSLEIYAGIQSRSPTQWSLNLKSLSLGAALTALHVWINDLTKVQESGEELPPLLGINTGHGKHKYSEKGLATVIESHLKELDAPFHEASDKAGWFLTTKVAAESWLESRRSPNLVVA

SEQ ID NO: 61486 - protein, 176 aa, Gossypium hirsutum
  unsure (1)..(176): unsure at all Xaa locations
  Clone ID: LIB3825-004-Q1-K6-F5.pep
GKAQRTDDVVRMFNRVYELGITPDYRFCGCLLNVMTHTXNCLIDLCVNLDLLERACDLLELGLSLEIYAGIQSRSPTQWSLNLKSLSLGAALTALHVWINDLTKVQESGEELPPLLGINTGHGKHKYSEKGLATVIESHLKELDAPFHEASDKAGWFLTTKVAAESWLESRRSPNW

SEQ ID NO: 61487 - protein, 244 aa, Gossypium hirsutum
  unsure (1)..(244): unsure at all Xaa locations
  Clone ID: GOSHI-09MAY01-C49962_1.pep
FNPSGFEWQKIVDDWTDWNKWINNRGGIGVPSEKSWESWWEEEQEHLQYSGKRGIIAEILLALRFFIYQYGLVYHLHVTRETKSFLVYGASWLGIVLILFVMKTVSVGRRRFSASYQLVFRLIKGLIFLTFVSILVILVTLAHMTIQDIIVCIFIFMPTGWGMLLIAHALTPVVNKAGFWGSVRTLARGYEIVMGLLLFTPVAFLCXWFHFVSEFQTRMLFNQAFSTGLQIFTYSKPPPLRSHI

SEQ ID NO: 61488 - protein, 228 aa, Gossypium hirsutum
  Clone ID: GOSHI-09MAY01-C49852_1.pep
QRLTAQEVLEHPWLQNAKKAPNVPLGETVKARLKQFSVMNKLKKRALRVIAEHLSVEEVAGIKEAFDVMDTGKRGKINLEELRMGLQKLGQQIPDADLQILVEAADVDGDGTLNYGEFVAVSVHLRKMANDEHLHKAFAFFDLNQSGFLEIEDLRDSLNDEVDTSEEVINAIMLDVDTDKDGRISYEEFVAMMKAGTDWRKASRQYSRERFNSLSLKLMRDGSLQLGN

SEQ ID NO: 61489 - protein, 83 aa, Gossypium hirsutum
  Clone ID: GOSHI-09MAY01-C49572_1.pep
KHKKRNTVFLFFNLFVILFFENESRCSLRFVLHNISQNFTNKLRRKRVSNLQSANTTVLNQILKTFHGLTVQIIFNPHPSLSP

SEQ ID NO: 61490 - protein, 82 aa, Gossypium hirsutum
  Clone ID: LIB3189-010-P1-K1-E1.pep
RHLSSEMTDLGQLTAAEYEKSGEFSAPFFLILCLFFKKTQVKKIKKKNERIKRPTFFYFRLFFSIFVFDSLFFVFDFSLCLR

SEQ ID NO: 61491 - protein, 125 aa, Gossypium hirsutum
  Clone ID: GOSHI-09MAY01-C49482_1.pep
RISHADFQVWKGKQSGELSVRSAYKLLQYSLLDPSSIILQTESKKFYSKLWSLQLPTKIAITVWRISWNYLPTLINLRSKRVLTNVRCLRCCSGDEDCSHVFRQCPGYSCRGLRSRVESFATLYG

SEQ ID NO: 61492 - protein, 82 aa, Gossypium hirsutum
  Clone ID: LIB3135-059-Q1-K1-A11.pep
WYLRTKLVHERISITGRQLAQNILSYKVEHNGARTKQKSPDVARRHRSTEILPMVEIHFDVDFDKRTFRSVSEWWFGVVEIA

SEQ ID NO: 61493 - protein, 147 aa, Gossypium hirsutum
  Clone ID: LIB3135-058-Q1-K1-B4.pep
HASGNYRPQYYAESFDQTKKRRDYYHYTREEISPLWHDGLKFLFVTDGTLRIHYYTPLFDGVVVGTEDVLITPFTCDRTCSGDAVVAGIMRKLTTYPEIFENQDVLERQLRFAVAAGIISQWTIGAVRGFPTESATQNLKEQVYVPS

SEQ ID NO: 61494 - protein, 51 aa, Gossypium hirsutum
  Clone ID: LIB3135-058-Q1-K1-F11.pep
MPCSDIELITPFTCDRTCSGDAVVAGIMRKLTTYPDIFENQGVLDRQLRFS

SEQ ID NO: 61495 - protein, 198 aa, Gossypium hirsutum
  Clone ID: GOSHI-09MAY01-C49142_1.pep
RANAVAAGRVAGIDPIEQITKRCIRIIRTPEAEVPSVCVLCRGHDFSKSGFGPRTVILCGEGEREYHVGCLRDHNIDDLKELPKGKWFCCTDCNRIHSALQKLVIRGEEQLPDSSLAVVKKKHVESSLRSKAKLDIRWRVLSGKMTSLDDTRVTLSKAVAIFHERFDPISDSGSSRGDLIPSMVYGRTVKGQDFGGMY

SEQ ID NO: 61496 - protein, 62 aa, Gossypium hirsutum
  Clone ID: GOSHI-09MAY01-C49172_1.pep
INKIQYLFINRDADHLCCNIKSYTTIASKQGIRKWPKTNTCNSQLGKILYLFVSWPKQTALT

SEQ ID NO: 61497 - protein, 214 aa, Gossypium hirsutum
  unsure (1)..(214): unsure at all Xaa locations
  Clone ID: GOSHI-09MAY01-C49202_1.pep
DGIHLQNSNDVLIHSSDLACGDDCVSIQTGCSNVYIHNVNCGPGHGISIGSLGRDNTKACVSNITVRDIVMHNTMNGVRIKTWQGGSGSVQGVLFSNIQVSEVQLPIVIDQFYCDKRKCSNETAAVALSGITYEKIRGTYTVKPVHFACSDSLPCIGVTLSAIELKPVQEHYYLYDPFCWQXFGELTTPPVPPISCLQIGKPTNNRVQSDHDVC

SEQ ID NO: 61498 - protein, 86 aa, Gossypium hirsutum
  Clone ID: GOSHI-09MAY01-C49222_1.pep
KKGCPPSQLALAWVPPQGNDVCPIPGTTKIENFNQNIGALSVKLTPEEMAELESIASADSVKGDRYGGTVATYYESDTPPLSSWKP

SEQ ID NO: 61499 - protein, 288 aa, Gossypium hirsutum
  unsure (1)..(288): unsure at all Xaa locations
  Clone ID: GOSHI-09MAY01-C44912_1.pep
MFYYIMSCPFAESLASAPASGALQDDPTLAAALVRMHFHDCFVEGCDGSILIDSTKDNTAEKDSPGNLSLRGYEVIDDAKEQLEDQCPGIVSCADIVAMAARDAIFWSEGPVYDIPKGRKDGRRSKIEDTINLPFPTFNTSELISAFGKRGFSAQEMVALSGAHTLGVARXCSSFKNRLSYADANLDSNFAKTLSKTCSAGDNAEQPFDATHNTFDNFYFNALIRKSGVLFSDQVLYTTPRTRNIVYGYAMNQAMFFFDFQQAMVKMGKVDVKEGSNGEVRQNCRKIN

SEQ ID NO: 61500 - protein, 114 aa, Gossypium hirsutum
  Clone ID: uC-gsronu33B138d08b1.pep
MVLNLVKMITMANLLSMLILMEVVAGGFPFGVDGLRMDYYIMSCPFAESIVKNTVNRALQDDPTLAAAVARMHSHDCSVEGWDGSILIDSTKDNTAYKDSPGNVSLRGYEDIDD

SEQ ID NO: 61501 - protein, 89 aa, Gossypium hirsutum
  Clone ID: GOSHI-09MAY01-C44592_1.pep
MAASVMKEGKKTEPVVIVKLAECDCCGLTEECTQAYIASVREKFEGRWLCGLCSEAVNDETVRSEEDITTNEAMDRHMKFCEQFKSSSP

SEQ ID NO: 61502 - protein, 78 aa, Gossypium hirsutum
  Clone ID: GOSHI-09MAY01-C44542_1.pep
YKYNIFKIIIRKPDEFRYLTNLHEKLGPVLLKVCSVKFMLGNHFHLLQAMHAAKTRSYNSQVNCRLLQVSSCTKAGRK

SEQ ID NO: 61503 - protein, 72 aa, Gossypium hirsutum
  Clone ID: GOSHI-09MAY01-C44532_1.pep
MRMDMESPLPPSPIGFEGFEKRLEITFFDPPAFNDPNGYGLRALSRAQIDSILEPACCTIVSQISNSNFDSY

SEQ ID NO: 61504 - protein, 75 aa, Gossypium hirsutum
  Clone ID: GOSHI-09MAY01-C44422_1.pep
GNVQSELLFRKDKATFTFEKGWAFALKIYFNGDNCVMPPPHAYPWLPNGSSHHLISTLSLLTTLLAALAFLLGYA

SEQ ID NO: 61505 - protein, 153 aa, Gossypium hirsutum
  unsure (1)..(153): unsure at all Xaa locations
  Clone ID: GOSHI-09MAY01-C44782_1.pep
HGSGRYSEHMMPEVEKDHGRKGSXWVFMTRQHAIIVMADSLYYTKFRCYCKPNMGGRNCYADEHYLPXTFFNMIDPGGIANRSVTYVDWSERKWHPKSFKAEDITLKFLENLTTIDDIVHFTSDEKRMLTGPCLWNGIKRPCYLFARKFIQKH

SEQ ID NO: 61506 - protein, 160 aa, Gossypium hirsutum
  Clone ID: GOSHI-09MAY01-C44752_1.pep
EIPSLKNRLLKLPDSDKISIAFPDDGAWKRFHKQLQHFPTIVCNKVRIGDQRIVRIKEGDATGRHVVIVDDLVQSGGTLIECQKVLAASGATKISAYVTHGIFPKSSWQRFEHDNGGQLEKGLTYFWITDSCPHTVKEVKCKRPFEILSLSGSIAAALQV

SEQ ID NO: 61507 - protein, 192 aa, Gossypium hirsutum
  Clone ID: GOSHI-09MAY01-C44652_1.pep
MDNKACNKVRPGVRKAKKKQVKDELDRIKQAEKKKRRLEKALATSAAIRSELEKKKQQKKEEQQRLDEEGAAIAEAVALHVLLGEDTDDVGNFDLFINGGSGPSLPHQVHSKGLVTNASYRAGCEWAMFGNSDWSFSCGDYGRDLIEPCFEDSVWGTAGLSAGLIAAQAVSALRITENAEVNTVVLNGMLRG

SEQ ID NO: 61508 - protein, 127 aa, Gossypium hirsutum
  Clone ID: GOSHI-09MAY01-C44192_1.pep
MSNKYAAMREQSRQISNPKPVENNITSAKVSLLEVGNSHLDNLKGGPSAGLASTWRSMKSGFQNFKANIEARKFLPVRQNQEATLISHVNSSDSESLDEIFQRLKRPSVDHSDENENENDTETKSTR

SEQ ID NO: 61509 - protein, 63 aa, Gossypium hirsutum
  Clone ID: GOSHI-09MAY01-C44112_1.pep
MVRVATYFGMSLGAFVFWQSMEKVHVWIALHQDEKKERLNSEAEIRRMREELLHQAKQNERLA

SEQ ID NO: 61510 - protein, 119 aa, Gossypium hirsutum
  unsure (1)..(119): unsure at all Xaa locations
  Clone ID: LIB3148-054-Q1-K1-D5.pep
PRVRGRVGGDASNKGALKSSNVTHILTVANLSLPLYPNEFAHKIIEXFIDEAKRLGGGVLVHCFMGISRSVTVVIAYLMKKHGMRLSQALEHVKRRRPQASPNSGFILQLQQFEKTLRG

SEQ ID NO: 61511 - protein, 64 aa, Gossypium hirsutum
  Clone ID: LIB3148-025-Q1-K1-F3.pep
HLYRVHRNNAKKPGLSSHCFLLKKEKMDRQTNADRSSRVFSYSLPRRVFSNCCSCKMKPEFGEA

SEQ ID NO: 61512 - protein, 186 aa, Gossypium hirsutum
  Clone ID: GOSHI-09MAY01-C44202_1.pep
TSIPSFTWKSIWASKGLLQRGLGWRVGKGSCISIWEDNWIQGIDKVAFKKILLGRFYKFLWQRPNMRIFRCGVENYLVSFQVRSAYKLLQDASTANDYLLQTEIRNFYKKLWSLQLPSKIAITIWRISWDYIPHFGNLSLRRVSSTARCPRCYFGVEERLHVFRECPGFSRTATITSVGFSAMRYG

SEQ ID NO: 61513 - protein, 145 aa, Gossypium hirsutum
  Clone ID: LIB3585-059-P1-K1-F4.pep
SRKWKSDLINSTFQEDTARKILQIPLAETEHEDIQVWSGELSGEFSVRSAHKLLQDASTANDYLLQTEIKKFYKKLWSQQLPSKIEITIWRISWDYTPHLGNLNLRKVISTACCPRCYSGVEESLHVFRECPDRKRTGTSYFNLG

SEQ ID NO: 61514 - protein, 65 aa, Gossypium hirsutum
  Clone ID: LIB3148-023-Q1-K1-A8.pep
SWVMENTSQNTWEWLTWVFNNNNYYQCRLFCYALWLIWSFRNKLIGKELERHISTLDEDWQRNPD

SEQ ID NO: 61515 - protein, 107 aa, Gossypium hirsutum
  Clone ID: GOSHI-09MAY01-C44222_1.pep
HFVREVKAAAGPYGVRTEQPVQRTWVPPQPPPVAIPEAAEAIRRPKPLASKEQSADEQSMVHPAEPIDELQRITKISESGGSVEMNVGFPSGTSSDVQEHPVSYEGN

SEQ ID NO: 61516 - protein, 135 aa, Gossypium hirsutum
  Clone ID: GOSHI-09MAY01-C45952_1.pep
MVLPLLKLGTLALKTLSKPVAARLKKQAAYAPRFREFIVASAQANHRITTRMQRRIYSHATDAAIRPLDEEKAVQAAVDLMGELFVFTVAGAVLIFEVQRSSRSGAKKEEARRKDLEVFIEQSPFFLLFSSFVSR

SEQ ID NO: 61517 - protein, 147 aa, Gossypium hirsutum
  Clone ID: GOSHI-09MAY01-C45942_1.pep
MAEEGHKVTLNVYDLSQGMARQLSMTLLGKVIEGIWHTGMVVYGNEYYFGGGIQHIPAGTAPYGRPIKVIDLGVTHVPKDLFEMYLQEISPRYTAETYSLLTHNCNNFSNEVAQFLVGTNIPDYILQLPNEVMSSPMGSLLMPMIQN

SEQ ID NO: 61518 - protein, 152 aa, Gossypium hirsutum
  Clone ID: GOSHI-09MAY01-C45512_2.pep
FYNSYVHHYMEGESMRVSFEPWFVEYKVDVVLAGHVHAYERSERISNIAYNIVNGLGTPIKDPSAPVYLTIGDGGNLEGLVTEMTEPQPNYSAYREASFGHGILEIKNRTHAYFGWHRNQDGYAVEADSLWLNNRYWSVSDSEELSVATATI

SEQ ID NO: 61519 - protein, 110 aa, Gossypium hirsutum
  unsure (1)..(110): unsure at all Xaa locations
  Clone ID: GOSHI-09MAY01-C45512_1.pep
GYNIVNGLCTPIKDPFGPVYLTLGDGGNLEGLVKNVCFFXRITEPQPNFSAFREASFGHGILEIXNRTHAYFGWHRNQNGYAVEADSLWLHNRYWSVSDSEELSVATATI

SEQ ID NO: 61520 - protein, 129 aa, Gossypium hirsutum
  Clone ID: GOSHI-09MAY01-C45702_1.pep
KPELPSTDSGHMEPGVPKPVLNGDKAEETDTETDQINPMDVVEDSLRSLDDAAEAVGLPADEENSNDINKTEGNSSVYCAEERHAFGDAISGSLNGSPKVSGALIPGSNESGSESVILTRIHHSPENTH

SEQ ID NO: 61521 - protein, 217 aa, Gossypium hirsutum
  Clone ID: GOSHI-09MAY01-C45632_1.pep
MRVFPALFLASLALVLGASRADPDLLQDVCVADLSSGIKLNGFPCKHPSTIGANDFFFAGLANPNFPNNTLGSLVTAANVEKIPGLNTLGVSMSRIDYAVGGVNPPHTHPRASEIAFVLEGELEVGFFTTSNVLISKHIKKGEIFVFPKGLMHFQKNIGKTRASAITAFDSQFSGTQSIATTLFAASPTIPNDVLSKAFQIHPREVERIKVKLTPKK

SEQ ID NO: 61522 - protein, 105 aa, Gossypium hirsutum
  unsure (1)..(105): unsure at all Xaa locations
  Clone ID: LIB3828-016-Q1-K6-H7.pep
LLFLCXXLAPIQNXSLTTHFXGSXLLXXQLXGXEKXIPXXLNHXXWXVFHCXSYFDLPAXSGGVQTLXXTSHPRMHQRIAFRCCEGRIRGVGFFHYNPMCLISKA

SEQ ID NO: 61523 - protein, 101 aa, Gossypium hirsutum
  Clone ID: GOSHI-09MAY01-C45172_2.pep
KVPLQFNSPHQMQDPQHPRVRQHQQAMQGQMGIRPGGPNNSMHPMHSEASLGGGSSGGPPQPSGPSDGRAGNKQEGSEAGGNGQGSTTGGHGGGDGADEAK

SEQ ID NO: 61524 - protein, 207 aa, Gossypium hirsutum
  Clone ID: GOSHI-09MAY01-C45172_1.pep
MPQPPQMIPVMPSYPPTNITTEQIQKYLDENKKLILAILDNQNLGKLAECAQYQAQLQKNLMYLAAIADAQPQSTPAMSPQMAPHPAMQPGGYFMQHPQAAAMSQQPGMYPQKVPLQFNSPHQMQDPQHLLYQQHQQAMQGQMGIRPGGPNNSMHPMHSEASLGGGCSAGPPQSSGPSDGRAGNKQNPETGANGQGSTTGDRAEEAK

SEQ ID NO: 61525 - protein, 196 aa, Gossypium hirsutum
  unsure (1)..(196): unsure at all Xaa locations
  Clone ID: GOSHI-09MAY01-C45132_1.pep
PTRPPTRPPTRPLAPDRSKLSKRHGAASVGQYRDMGYLPQATVNYLALLGWGDGTENEFFTIDQLVEKFSIGRVNKSGAVFDSXKLRWMNGQHLRAIPFEELSQLIGERWKSTGLLTQSEGPFVDDAVQLLKDGIDLVTDSDTALSNLLSYPVHATLTSPEGRPIVEDKLSEVSAHLLAAYDSGELFGALEEGLAG

SEQ ID NO: 61526 - protein, 51 aa, Gossypium hirsutum
  Clone ID: GOSHI-09MAY01-C45052_1.pep
ATIAPAPQLVEKTNQQVEQTYPKFVFGDYMSVYVQQKFLPKEPRFQAVKAV

SEQ ID NO: 61527 - protein, 144 aa, Gossypium hirsutum
  Clone ID: GOSHI-09MAY01-C45012_1.pep
MGPLNLNAFDLIILSQGLNLATLFDRGKDTMKHQTRFVSRKPARVVLSSMEVVAQSMGYKTHIRNYKMRVEGPSANKTSHLSVILEVFEVAPTFLMVDMEKAAGDAGEYLKFYQAFYSNLEEIIWKPPNESSKTRITKSRSKRR

SEQ ID NO: 61528 - protein, 77 aa, Gossypium hirsutum
  Clone ID: LIB3585-012-P1-K1-H6.pep
RTGRPDPGDATAHFSVVLEVFEVAPTFLMVDIQKAAGDAGDYLKFYKTFCSNLDDIIWKPPNESSKSRITKSKSKRR

SEQ ID NO: 61529 - protein, 138 aa, Gossypium hirsutum
  Clone ID: GOSHI-09MAY01-C45382_1.pep
MLSRNIRPDGDEQSNLQDKPNGQSDECCSYTSSNRESWGRCSSLGGSDEESSADCTAANNGNQVTLDVLATPLKSTQQKSSDPPKEEKKKQLMQKKQKKRDSTTPKPKHEKLEKLEALSKRLRLCILKRVSHRRPRST

SEQ ID NO: 61530 - protein, 38 aa, Gossypium hirsutum
  Clone ID: GOSHI-09MAY01-C45312_2.pep
NLFFFFKICLFFFFFFFFFFFFFENQFINLMKNITFYL

SEQ ID NO: 61531 - protein, 75 aa, Gossypium hirsutum
  Clone ID: GOSHI-09MAY01-C45312_1.pep
TQRPHFETKMARQLVVLALVLIFLAGVVSTDASSAGGSPASAPAGASTVGSTASSSPTSQATNPGLSDGIPIDDP

SEQ ID NO: 61532 - protein, 103 aa, Gossypium hirsutum
  Clone ID: GOSHI-09MAY01-C45202_1.pep
MTEISRNRSLRFLLFFASVSLHFISGFSDDSKGSNNSSKTKSNAINNTGTKVIFIVLGLVAVGLFSFFLFKLWQKKKRDEQYARLLKLFEEDDELEVELGLRD

SEQ ID NO: 61533 - protein, 127 aa, Gossypium hirsutum
  unsure (1)..(127): unsure at all Xaa locations
  Clone ID: LIB3582-053-P1-K1-G9.pep
MDPFRNISWFEANMATYQNLITQSMYDKQLDSGRGTLLHLCDDVIQGEVKXVIISFFILMEQGKATMEDLDLRCEELIKEEFGESCNFDVDDAVEKLEKLKIVSRDSIGRFYCVGLKRANEIIWCHH

SEQ ID NO: 61534 - protein, 130 aa, Gossypium hirsutum
  Clone ID: LIB3148-059-Q1-K1-D8.pep
EIVLPEKKNPGLTPMDWVKFLASAVVGPVTVFSSLQMPTADLWVIFAILSTVIGYCAKTYFTFEANMATYQNLITQSMYDKQLDSGRGTLLHLCDDVIQQEVKEVIEVIISFFILMEQGKATMEDLDLRC

SEQ ID NO: 61535 - protein, 198 aa, Gossypium hirsutum
  Clone ID: GOSHI-09MAY01-C46822_1.pep
LTRHNVASHLHKYRVRRRHILPKDDDRRWLQRPQTQRICNYPHKPIMAFPPYNHVPVGPVYPMWRAPSHPPTIQMWGTQGYPPWQPTESWHWKPYPGVQADAWGCPVMPPPQGYFSTFPQNASGFQPCNVDKRNGMPQTLVEHHPEEEVIDKMVKEAINKPWLPLPLGLKPPSTDSVLAELYRQGISTVPPYINASGR

SEQ ID NO: 61536 - protein, 135 aa, Gossypium hirsutum
  Clone ID: GOSHI-09MAY01-C46532_1.pep
YYHFRNGDKYAGEYFGDKMHGFGVYHFANGHCYEGSWHEGRKQGYGMYTFRSGDTRCGEWDSGTLKTPLPQLTDAVLRAVEAARKTAVNAVHLRRVDDQVKKAVLAANRAATAARVAAVRAVQNQMDAKFCDIDV

SEQ ID NO: 61537 - protein, 82 aa, Gossypium hirsutum
  Clone ID: GOSHI-09MAY01-C46522_1.pep
IEYNAKTTSFDLEKQCLEFHIFSKFQYSHIYCVFQNFPLVRNFFPSSVAANCTHFRADFLLQQLPPAMFTECKNVRRNGTLS

SEQ ID NO: 61538 - protein, 143 aa, Gossypium hirsutum
  unsure (1)..(143): unsure at all Xaa locations
  Clone ID: GOSHI-09MAY01-C46442_1.pep
PGSIVVDIDGDGSFMMNVQEXATIRVENLPIKILLLNNQHLGMVVQWEDRFYKANRAHTFLGNPSDESDIFPNMLLFAEACGIPAARVTKKEDLRQAIQKMLETPGPYLLDVIVPHQGHVLPMIPGGGAFKDVITDGDGRTKY

SEQ ID NO: 61539 - protein, 53 aa, Gossypium hirsutum
  Clone ID: GOSHI-09MAY01-C46782_1.pep
PKHRGRVEPYIGGINESSEEISTTSKVRYRCSRLLVSPISWMMALVIYLKIVV

SEQ ID NO: 61540 - protein, 147 aa, Gossypium hirsutum
  Clone ID: GOSHI-09MAY01-C46182_1.pep
PCVLPRVRFYLSMASSVSLYEVLGVPVSANGNEIKAAYRRLARTWHPGAPSRSQKEMSADRGMRIHAAYSTLSDPNQRADYDRNLRRWNRPFTTMEATATAVGSYGFSSYGGNRNWETEHCWHVIICILFSLLMYVSCSWSIQIRSF

SEQ ID NO: 61541 - protein, 108 aa, Gossypium hirsutum
  Clone ID: LIB3148-050-Q1-K1-E3.pep
SSVSLYEVLGVPVSANGSEIKAAYRRLARTWHPDVVSVNQKEMSADRFMRIHAAYSTLSDPNQRADYDRNLRRWNRPFTTMEATATSVASYGFSSYGANRNWETDQCW

SEQ ID NO: 61542 - protein, 158 aa, Gossypium hirsutum
  Clone ID: GOSHI-09MAY01-C46052_1.pep
SAFVSISPVMLGVLCTRPPKPWILNSLSLIAHGGSAAHHHENRLLHWPSHFADLSADNRRCRHHSTACRLGGGSEGGAASIWHAILPCGGDRGVKNRGDVWKNVERKGEGSWNVSWDARPLVASPDLLLLLSLACLRRCHDELRTLPRADINRCFLIR

SEQ ID NO: 61543 - protein, 261 aa, Gossypium hirsutum
  Clone ID: GOSHI-09MAY01-C46012_1.pep
ETVKFRFSNRPKKGTRNDDGVYRWSKQSQRFQEVDGILALGLDPLSFAVKAAHEFGGKFSFCLENHWIIKSESSYLVFGAEDQVPNMQFTDLLTEESKMTSLYPIKVTGISINGTMLDIPSYVWDMTDKGAGGMIVDSGTTVTHLVEQAFDKVIAAFEPSLSMYNKTKGNLDYCFNAPPAEIFDESIIPRVAIHFEGGAKLEPAVDGYIFDDSKGVKCLGFVRVAWPEMNIMGNLLMQNHLWEFDLANKKVGFAPSKCMLD

SEQ ID NO: 61544 - protein, 120 aa, Gossypium hirsutum
  Clone ID: LIB3828-033-Q6-N6-D4.pep
VTHLVEQVFEKVIAAFEPSLSMYNKTKGNLDYCFNAPPAGEFDETRVPRVALHFEGGAKLEPAVNGYIFDDSKGVKCLGFTRLAWPQMNILGNLLMQNHLWEFDLANKKVGFARSKCMLD

SEQ ID NO: 61545 - protein, 110 aa, Gossypium hirsutum
  unsure (1)..(110): unsure at all Xaa locations
  Clone ID: GOSHI-09MAY01-C46382_1.pep
NVMSLHRTKATLIGLFETGRANEWVVTEKLGDVAKKVAEANKNKTNSKAVKRXDQNLSDRLNTLELGFSAFLFLCGGFDFMYGKNNYFIYLWLQAITFFITGIGYVGTII

SEQ ID NO: 61546 - protein, 143 aa, Gossypium hirsutum
  Clone ID: GOSHI-09MAY01-C46292_1.pep
MDCLVLPVCLLGGRGGGSRLGYRRLTRELEPQVRVVVGKEKREFWVDPLVLEENPFRVLMETLKKGNGSHATRQKKNKVIFLDVDAILFEHMLWLMNNDSSSLFQLALHHIIDSYAQDYHNFHLALTNFTSYITFSIVNTHKP

SEQ ID NO: 61547 - protein, 92 aa, Gossypium hirsutum
  Clone ID: LIB3148-052-Q1-K1-A12.pep
MDCLVLPVCLLGKRSMGSRLGYRRLTRELEPQVRVVVGKEKREFWVDPLVLEESPFRVLMETLKKGNGSHATREKKKKVIFVDVDAILFEHM

SEQ ID NO: 61548 - protein, 117 aa, Gossypium hirsutum
  Clone ID: GOSHI-09MAY01-C47942_1.pep
STRPAALKFHSDKGIENFYSLHSWLGIACLFLFGIQWAAGFATFWYPGGSRNSRAALLPWHVFFGMYTYALAVATATTGILEKLTFLQTNRVISRYSTEALLVNSLGILIGVLGGFL

SEQ ID NO: 61549 - protein, 85 aa, Gossypium hirsutum
  Clone ID: GOSHI-09MAY01-C47862_2.pep
LVVWSLNRFFSALGSFVLRQGQFTFSSVNGTLSRADGEIDFLFEVQEKREGPPPNDAFTKVRSPVAKTFSTLSNLKSTLNRSYFY

SEQ ID NO: 61550 - protein, 155 aa, Gossypium hirsutum
  unsure (1)..(155): unsure at all Xaa locations
  Clone ID: GOSHI-09MAY01-C47862_1.pep
MELLVELMARSIFCSRFKRKAPKKATPSPSRFFNLAMATLDSDVPMVPVGESSNSSAASSSTKKPKRFEIKKWSAVALWAWDIVVDNCAICRNHIMDLCIECQANQASATSEECTVAWGVCNHAFHFHCISRWLKTRQVCPLDNSEWEXFQKYGH

SEQ ID NO: 61551 - protein, 167 aa, Gossypium hirsutum
  unsure (1)..(167): unsure at all Xaa locations
  Clone ID: GOSHI-09MAY01-C47822_1.pep
GTHVDAPSHFFQKYYEEGFDVSTLSLQXLTGPVLVVDVPRNKNITAEVMKSVNIPRGVHRVLFKTLNTDRRLMHRREFASDFTGFKKDGAQWLVDNTDIKLVGIDYLSISAYVDAAPTHHILLKSREIVXVEGLNLYRIKPKKYTGQCLPLRMVGADGCPTRCLLTA

SEQ ID NO: 61552 - protein, 154 aa, Gossypium hirsutum
  Clone ID: GOSHI-09MAY01-C47532_1.pep
LSNLLRDKGLTMDDMVTLLGGHTVGVAHCFFFSGRLTNFQGTGKPDPSMDAGLVTTLKGICGNGSNPKAFLDQGTSFSFDNEFYRQIRAKKGVMKIDQELADDRLSSGIVSRFASNANLFRTRFAQAMVKMGNIQVLVGNAGEIRKNCRVINSK

SEQ ID NO: 61553 - protein, 331 aa, Gossypium hirsutum
  Clone ID: GOSHI-09MAY01-C47652_1.pep
QVMMGKRVFGDGSGGADPEADEFKSMVVELLPRPPARPIGDFIPALEWLDLQGVQAKMKKLHNKFDRFLSAILEEHKTKARQSNGQVKHKDFLSTLISLENVDGAEGGKLSDTEIKALLLNMFTAGTDTSSSTVEWAMAELIRHPNIMAQVRKELDSVVGRDRLVSDLDLPNLTYFQAVIKETFRLHPSTPLSLPRMASDSCDINGYHIPKGATLLVNVWAISRDPNEWNNPLEFRPERFLPGGERPNADVRGNDFEVIPFGAGRRICAGMSLGLRMVQLLTATLAHPVLWELADGLMPEMLDMEEAYGLTLQRAAPLMVHPRPRLSKHAY

SEQ ID NO: 61554 - protein, 159 aa, Gossypium hirsutum
  Clone ID: GOSHI-09MAY01-C47152_1.pep
MDTTWLQQSHQLKCGTACILDGDTLIPQMLPQAFKSVEYIEGNGEAGSIKKVTFGEGSQFKYVKQKVEAVDKDKFVYIYSVIEGDALMDKLEKISYETKLETSPDGGSVCKTTSKYYTIGEFELKEEGIKAGKEKALGMFKAIEAYLLANSYTYCNDPH

SEQ ID NO: 61555 - protein, 71 aa, Gossypium hirsutum
  Clone ID: GOSHI-09MAY01-C40992_1.pep
GRVGCKCIVFFSLSAGHWKMAILDRVDGPFSRVCKTLFYLSFSNIEGMEPVTNLRTSLAGENHTRKKLVVK

SEQ ID NO: 61556 - protein, 50 aa, Gossypium hirsutum
  Clone ID: GOSHI-09MAY01-C40802_1.pep
FYSFTRFRTTETFPFARERSTEIGGSPYYMAPEVLKRNYGPEMHVWSAGV

SEQ ID NO: 61557 - protein, 46 aa, Gossypium hirsutum
  Clone ID: LIB3825-018-Q1-N6-F11.pep
MDEPSTGLDPASRNSLWSVVKQAKREGAIILTSISLSALPLLIHHS

SEQ ID NO: 61558 - protein, 44 aa, Gossypium hirsutum
  Clone ID: LIB3147-031-Q1-K1-G6.pep
ERRIQFIYKVNAYMTKTKSNTTPISVESRMQKRKKSGRVVERVG

SEQ ID NO: 61559 - protein, 174 aa, Gossypium hirsutum
  unsure (1)..(174): unsure at all Xaa locations
  Clone ID: GOSHI-09MAY01-C40542_1.pep
LFEDGRIQTASRVMKXLVEKGVKEHMDLVSKILEALLMRGHVEEALGRIELLMQNGCATNLDSLLSILSEKGKTIAALKLLDFGLERACSIDVSSYEKVLDALLTAGKTLNAYSILCKIMEKGGITNWSSLEDLIKSLNQEGNTKQADILSRMIKGGAAASGNKKGKKQATVAS

SEQ ID NO: 61560 - protein, 152 aa, Gossypium hirsutum
  Clone ID: GOSHI-09MAY01-C40572_1.pep
PRVRSNEESKSLHKQESLKALRNKINNDIVTVQKKARTIKAQLEEMDRANATNKRLSGCKEGTLAYRTRIAVTNGLRNKLKELMMDFQGLRQKMMTEYKETVGRRYFTVTGENPDEAIIEKIISDGNGGEGFLTRAIQEHGRGKVLETVVEI

SEQ ID NO: 61561 - protein, 78 aa, Gossypium hirsutum
  unsure (1)..(78): unsure at all Xaa locations
  Clone ID: GOSHI-09MAY01-C40502_1.pep
MAGAFWGTRVMEIVXKHDSGGLVWKRIKLTSTRKANAKKRLHRVWQNEAVLRACAEPPPSKATDVAGGGGEKGVEQST

SEQ ID NO: 61562 - protein, 48 aa, Gossypium hirsutum
  unsure (1)..(48): unsure at all Xaa locations
  Clone ID: AW187324.1.pep
MVGAFWGTKVMEIVKKHNSGDLVWKRIKLTSTRKXNAKKHLHRVWQGQ

SEQ ID NO: 61563 - protein, 120 aa, Gossypium hirsutum
  unsure (1)..(120): unsure at all Xaa locations
  Clone ID: GOSHI-09MAY01-C40402_1.pep
LSYEVNWVESTAFNFLLKHSKYDSIIQELLALGEVVGTESRGLSADSLASLPSIKYKAGSSQTGSNDSCXVICRVDYDDGDSLTVLSCKHSYHPECINNWLKINKVCPVCSAEVSTSGQS

SEQ ID NO: 61564 - protein, 40 aa, Gossypium hirsutum
  Clone ID: GOSHI-09MAY01-C40422_1.pep
YYQTSKIMPAGIVAGISFLMTGFYLYKLATGGNHIPAKAE

SEQ ID NO: 61565 - protein, 104 aa, Gossypium hirsutum
  Clone ID: GOSHI-09MAY01-C40192_1.pep
MVIAKPGSVRTYKRFEAEIYVLTKDEGGRHTAFESNYRPQFYLRTADVTGKVELPESVKMVLPGDNVTATFELISPVPLEAGQRFALREGGRTVGAGVVSKVLT

SEQ ID NO: 61566 - protein, 83 aa, Gossypium hirsutum
  unsure (1)..(83): unsure at all Xaa locations
  Clone ID: uC-gsflnu33B050h12b1.pep
FTRPNYRPQFYLRTADVTGKVELPESVKMVLPGDNVTATFELISPVPLEAGQRFALREGGXTVGAGVVSKVLSYGFAIARYIS

SEQ ID NO: 61567 - protein, 108 aa, Gossypium hirsutum
  Clone ID: GOSHI-09MAY01-C40172_1.pep
DSSSGCGSARVCCCFRMGKGNKERTSNQFTWTKPMEHLFLEILAEKAQKGNKPFSTFKAISINRFVKAISERFQVQYNVEVCGKSFEDCKKPVTKWTMRRMKMMKLYS

SEQ ID NO: 61568 - protein, 94 aa, Gossypium hirsutum
  Clone ID: GOSHI-09MAY01-C40132_3.pep
KFLINILQPFFSLYFRFLFCLPKIKQKNPLFKYEIVAFKAIYKIIYSYFLVVFLSRLYCLRANLSLQVTDECQAHGRPVVGAPNGGGGARDGQG

SEQ ID NO: 61569 - protein, 111 aa, Gossypium hirsutum
  Clone ID: GOSHI-09MAY01-C40132_2.pep
RTKPPKYQIVFPVPNDRFRLFKADLPNIHSIFFLVLGPLVIFFPSFACFLLPLYSFLLQVPCDAWKRRQSGAWWPRRHAWESQWWKRWLKKGERLEAWGLLKIFKISWVRV

SEQ ID NO: 61570 - protein, 89 aa, Gossypium hirsutum
  Clone ID: GOSHI-09MAY01-C40132_1.pep
PPPTVADGGWSIRILTPFRLAIKNLTSMIARNQKDSITLFIRFGFNREETPIYTNGLRFRCHATRGRGDSQGRGGRGGMRGKANGGSGG

SEQ ID NO: 61571 - protein, 130 aa, Gossypium hirsutum
  unsure (1)..(130): unsure at all Xaa locations
  Clone ID: LIB3543-064-Q6-K6-A10.pep
MIAAISPPPPTATLGPGRIRIPNSNRHSIRFSNLGFLLWKPKLNWLSYERVQQMQMAWVRSMAGGCFKSKEPLPEHRIKVEEDSGGQDFFDSDAMASKVSPEHLVIMVNGLIGSAAXDWRFAAEKVVAKL

SEQ ID NO: 61572 - protein, 98 aa, Gossypium hirsutum
  Clone ID: LIB3147-026-Q1-K1-C5.pep
EACAHASSHSFAHFFLPRVQPPYLKETSFATLGPVKIPIPNSNRHSICFSNLGSLLRKPKLNWLSHEPEQHMHMAWVRSMAGGCFKSKETLPELRIKV

SEQ ID NO: 61573 - protein, 69 aa, Gossypium hirsutum
  Clone ID: GOSHI-09MAY01-C41962_2.pep
NLDCQRPNADLFSIPDGSELGVYLHQRLMIFSGEADSARNHQQAWWFSPLKLGLRVHQKQLRYRPDEHY

SEQ ID NO: 61574 - protein, 109 aa, Gossypium hirsutum
  Clone ID: LIB3825-007-Q1-N6-C12.pep
AAPIIKTNYTHHAHLDCQRPNADLFSIPDGSELGVYLHQRLMIFSGEADSARYHQQAWWFSQLKLGLRVHQKQLRYRPDEHYCSHFILKIECHLHQEKDLILSSFPSLY

SEQ ID NO: 61575 - protein, 352 aa, Gossypium hirsutum
  unsure (1)..(352): unsure at all Xaa locations
  Clone ID: GOSHI-09MAY01-C41932_1.pep
VAYTCGICNIIIHKXCISLPLIIKSKWHDHHLLHTYFHHIEDLGFXNCLRCHDEVNTEHGSYYCSKCNGIFHVKCALKDKDSYEIVENEDETEMPNESSIIVIESNDAGEATKIKHFKHMHNLMSGPFVGGYENSCDGCMLPISDPFYYCSECVFFLHKACAELPKMKNVWHHHCQEPLALISDKAFVCQLCWHISNAFAYECCGCEGNTCLRCVIALTPGARTCLKHVHPLYFYRDYDGQCNACGDTTRGYPPVRPRVRNFVLHLRCFSLPITARHKCDEHLLSLTDHDDNSYSERHHCDICEESRDPNRWFYNCATCDTSADRNCVLGEYPFLNSGAFKKEMIIHIHSPL

SEQ ID NO: 61576 - protein, 123 aa, Gossypium hirsutum
  Clone ID: GOSHI-09MAY01-C41512_1.pep
KKFYESALRLLPGYLGAALAGAELHVIEGRNGDAVSLLERYLKDWADDSLHVKLAQVFAATNMLQDSLSHYQSALRINPQNEAAKKGLERLEKQMKGVDPDAPEEEENEVDDADAEQEEAELL

SEQ ID NO: 61577 - protein, 166 aa, Gossypium hirsutum
  Clone ID: GOSHI-09MAY01-C41472_1.pep
MGSASKSKDFQDGVDGDALRSTMATDQNVMQKHAAFFDRNHDGLVYPWETFQGFRAIGAGYLLSMAGAVFINLSLSGTTRPGKFPSLLFPIEVKNIQMGKHGSDSGVYDREGRFVPSKFDEIFSKYARTHANALTSDELMAMLKSNREPKDYKGWFGCCSNFFIVS

SEQ ID NO: 61578 - protein, 127 aa, Gossypium hirsutum
  Clone ID: GOSHI-09MAY01-C41722_1.pep
EAKRCSSAIFLVGINLLFLTSVSGCYTCVHPRPSGSPPTKRSCPRDALKLGVCAKVLNGTVAGVVVANPPDTQCCSALGGLVDLEAAVCLCTAIKANVLGINIDIPIALSLLINTCGKNLPSDFICA

SEQ ID NO: 61579 - protein, 154 aa, Gossypium hirsutum
  Clone ID: GOSHI-09MAY01-C41692_1.pep
MGAFKSLALVAFLLAMLTIVSESRVVRKDLGIDLGGVGVGIGAGVGLGLGGGGSGSGAGAGSGSGSGSSSSSSSSSSSSSYSNSGSGSDAGSYAGSSAGSRAGSGSGGNKGRQGGSGHGEGYGEGSGRGNGSGNGEGYGEGHGYGEGHGSGGDN

SEQ ID NO: 61580 - protein, 43 aa, Gossypium hirsutum
  Clone ID: LIB3147-044-Q1-K1-F9.pep
CMYNSRGATAKDLLIIKSYNKRLHPILQDSRNVRLRDGRNFKI

SEQ ID NO: 61581 - protein, 98 aa, Gossypium hirsutum
  Clone ID: GOSHI-09MAY01-C41152_1.pep
IRPFSTPPSTDGSADSNSCTKSGPDSGEGIIEHHRGVSLKVFVARNVCVEGRSAPRRAPIGVLLAALEVVAGGAFEERLGFCSFCFLLCCIGYWVWAN

SEQ ID NO: 61582 - protein, 143 aa, Gossypium hirsutum
  Clone ID: GOSHI-09MAY01-C41012_1.pep
PTRPPTRPVSNDDIKELFSEGGDLKRFSVHYDRSGRSKGTADIVFTRRADALAAVKRYNNVELDGKPMKIEIVGTNIATPPAPLGANGAFRSSNGAIKGGQGKGGGFGRQRGGGAAGRGCGRRKGRGEKVSAEDLDADLEKYH

SEQ ID NO: 61583 - protein, 328 aa, Gossypium hirsutum
  unsure (1)..(328): unsure at all Xaa locations
  Clone ID: GOSHI-09MAY01-C41022_1.pep
MAGTSSARIVLVVVSGVLALIGSAQAQLQMNFYASSCPKAEQIVLDYVKQNIPNAPSLAASFLRMHLHDCIVRGSAPSVLLNNTSGQAXKTAVPNLTLRGFDFIERVKSLLEAECPGVVSCADILTLAARDSVVTTGGPFWNVPTRRRDGVISNITEANTNIPSPFHNFTTLLSLFNNLGLNSTDLVLLSGGHTIGISHCPAVSPRLYNSTGPGGIDPTMDSEYAENLKANKGKTASDNTTILEMDPGSRKTFDLSYYSLLLKRRGLFQSDAALTTDSTSLAFINQLLSSPTQFFFDEFGKAMEKMGRINVKTGSEGEIRKQCALVNS

SEQ ID NO: 61584 - protein, 64 aa, Gossypium hirsutum
  Clone ID: LIB3147-040-Q1-K1-D4.pep
EGLEKIESLLSHDNNEIYEKAVKILETYWVEDEDEPLPPGDAAQSGLQFGGNQLPVPSGGFNFN

SEQ ID NO: 61585 - protein, 65 aa, Gossypium hirsutum
  Clone ID: LIB3147-040-Q1-K1-C12.pep
QFQYKIKKKNIHDNNEIYKKSKKKKKKRNGWRMRTKPLPPGDAAQSGLQFGGNQLPVPSGGFNFN

SEQ ID NO: 61586 - protein, 102 aa, Gossypium hirsutum
  Clone ID: GOSHI-09MAY01-C42882_1.pep
MTFEDQERQATATNIDGLEILDEIMTRSRGEIRRTQSPKVSSTTPSSVGDIKPSYSRGIFQNAYSPRISQLRGKNEKGLELKQTPSPGPSTLGQGGRASSSI

SEQ ID NO: 61587 - protein, 334 aa, Gossypium hirsutum
  Clone ID: GOSHI-09MAY01-C42542_1.pep
MAVKSHIISGFTIPLKPTASSSSSGNSSTLCLVKKPLTSSFFNGGVASLKLTRLRSVPGRSHCYRQRGGALGTRMNLFDRFARVVKSYANALLSSFEDPEKILDQAVLEMNDDLVKMRQATAQVLASFIRLENKYKAAQQASEDWSRKAQLALQKGEEDLAREALKRRKSFADNANSLKAQLDQQQTVVDNLVSNTPLLESKIQEAKSKKETLKARAQSAKTATKVNEMVGNVNTGSALAAFEKMEEKVLAMESEAEALGQLTTDDLEGKFALLESTSVDDDLAKMKRELSGSSQKGELPPGRTVSASNNTAFPYRDSEIEMELNELRRKAKDF

SEQ ID NO: 61588 - protein, 186 aa, Gossypium hirsutum
  Clone ID: GOSHI-09MAY01-C42572_1.pep
DAWAGSPAQLTIFYAGEVNVFDDITPEKAQAIMFLAGNGSSMASNSAYPKPPVQTPILKPVQVDSWPANQLINTQLSFGKPSPLPVSSHAGTQSWSGSTSTEEQIICKASVPSTPSTPISKLESPNLVNTMGSDAATGMMPSVPQARKASLARFLEKRKGRIMSTASPYNLSKKSLDYATTMESNA

SEQ ID NO: 61589 - protein, 70 aa, Gossypium hirsutum
  Clone ID: LIB3147-058-Q1-K1-H11.pep
MHGMFSFDQLSFGIVRDKIMAKVDWHINMFLDCERRNFVIQAYHRDLLEHMPAPVAVIRRPPTLPNIITR

SEQ ID NO: 61590 - protein, 41 aa, Gossypium hirsutum
  Clone ID: LIB3148-025-Q1-K1-B9.pep
KYIKNFNLEIRLILNGIPCKILYNSYIFRKGSMMEMKILVM

SEQ ID NO: 61591 - protein, 282 aa, Gossypium hirsutum
  unsure (1)..(282): unsure at all Xaa locations
  Clone ID: GOSHI-09MAY01-C42792_1.pep
KDKHEGQKQPIFIPLFLIFSVLFLCFSASVAHNDEEVEDEREFDYKENSSXGPLHWGDLKTEWAACKNGAMQSPIDLTNDRVKIITKPVELEKNYKPAESIIKNRGHDISLQWPDHKAGSIIIDGIEYGLLQVHWHSPSEHTIAGAGAAVEAHMVHKAADPNVKSGLAVSALLYEHGSPNDFLPQLISNITDMTDVVQQRSMGVTDPNLIEIDGVEYYRYIGSLTVPPCTEGVIWIINKKIATVSKEQVHAIREAVHDYAEQNARPVQTPNEREMELHSPHS

SEQ ID NO: 61592 - protein, 141 aa, Gossypium hirsutum
  unsure (1)..(141): unsure at all Xaa locations
  Clone ID: LIB3543-037-Q1-K1-H8.pep
RNSLHGWVERAHHWGDLKKEWAACKTGALQSPIDLTNDXVKIIAKSVNLEKNYKPAESIIKNRGHDISLQWPDHKAGSITIDGIEYVLLQVHWHSPSEHTINGKRFALEALLVHKAAHPNVEXGLAVSALLYEHGSPNDYL

SEQ ID NO: 61593 - protein, 122 aa, Gossypium hirsutum
  unsure (1)..(122): unsure at all Xaa locations
  Clone ID: GOSHI-09MAY01-C42762_1.pep
GDEDLARDYRERAYIEANTIQRSRKTRNRNSGHSAASVHGVVLAXAASVLSDPYDMPSWLPHHVTLLARFSGEPSPVKSTVTKAVAEGRRTHADTWNVQKDSFTEEQLEVLADTSSSSSYFA

SEQ ID NO: 61594 - protein, 111 aa, Gossypium hirsutum
  Clone ID: GOSHI-09MAY01-C42682_1.pep
MATFAGTQQKCMACDKTVYLVDKLTADNRVFHKACFRCHHCKGTLKLSNYNSFEGVLYCRPHYDQLFKRTGSLDKSFEGTPKIAKPEKHIENENAQKVVNLFRGTKEKCVG

SEQ ID NO: 61595 - protein, 440 aa, Gossypium hirsutum
  Clone ID: GOSHI-09MAY01-C42672_1.pep
DAWVSKLKGEICLDNLSIKELHEVFKATFGRDTTVKDKLWLKRRIAMGLTNSCDVSTTTFVIKDNKLVKKDNEDGFNNVNLGAGKEHLAVAVGYNEDLLNNLSSQIDEHQTTSEVRLGNNVVENNFASEDLAADQRAAKRVRKPTKRYIEELSEAESKEYSGRSIASTKNIGFRPLPSKAHARPARNVSSHASAVITRLVSLGGFGIQVPCVYRIRRSRPRKNVTALLKFHPSGMGMTATLIKKGFDVHGSQMDNGSMNKVLEAKSTPEQAPEQFVAESKKETTPTDMGQNMGLKYVDPSGDAPGGYVVTVPTAKGGIRRKHHRAWTLSEVMKLVEGVSKYGAGRWSKIKRLAFASYSYRTSVDLKDKWRNLLKASFAQTPTDKGANSRKHPSMPIPAPILLRVRELAEMQAQASLPNLSTGKLSACGGRSVNETRPGYL

SEQ ID NO: 61596 - protein, 141 aa, Gossypium hirsutum
  Clone ID: GOSHI-09MAY01-C42082_1.pep
TAFEIEFTRSQIIAAIPWTFFCAWYASQKHWLANNILGLACCIQGIEMLSLGSFKTGAILLAGLFVYDIFWVFFTPVMVSVAKSFDAPIKLLFPTADSTRPFSMLGLGDIVIPGIFVALALRYDVSRGKERQYFKSAFFGY

SEQ ID NO: 61597 - protein, 133 aa, Gossypium hirsutum
  unsure (1)..(133): unsure at all Xaa locations
  Clone ID: LIB3147-051-Q1-K1-F3.pep
PRRPRXRPRVRPKQWNEDHIIWRFPFFRSFEIEFTRSQIIAAIPGTFFCAWYASQKHWLANNILGLAFCIQGIEMLSLGSFKTGAILLAGLFVYDIFWVFFTPVMVSVAKSFDAPIKLLFPTADSARPFXMLG

SEQ ID NO: 61598 - protein, 186 aa, Gossypium hirsutum
  Clone ID: GOSHI-09MAY01-C42052_1.pep
EGDQIVPLLTDLWKRIEKSGYMGGSGSGSNNLDLQKIDQRVDRLEYSAVMELVADVQLVLKSAMRVYGFSLEVRSEARKVHDLFFDLLKIAFPDTDFREARNALSFSSLVTTSTMGSSARQAAGDKRQKLINEVESDSGLTQKSLQRRSSHAGEDTRVRVHMPQKESRVGCVSGITKELYQQDDSI

SEQ ID NO: 61599 - protein, 187 aa, Gossypium hirsutum
  Clone ID: GOSHI-09MAY01-C42012_1.pep
MDECSKTQSDRSGVSWPEIDVQSDRTQLSISVPMAASDYISFTSSTNNDKVTLSPLRLSRRFDPIHMGLGVGSVINDSNQRQANWIPISWEASLGGPLGEVLHSTNSSTGECKSSSALNLMTEGWDSSPRLGSSPTGVLQKTSFGSLSNSSAGSSPTAEHNKTHEGASLCNNLLGSALVQSSSLPAS

SEQ ID NO: 61600 - protein, 283 aa, Gossypium hirsutum
  unsure (1)..(283): unsure at all Xaa locations
  Clone ID: GOSHI-09MAY01-C42352_1.pep
VGLYSWAHLLLPVLSSKNCNRQSRDLILQLVEWILSVSKARSILVNNAVRKGERLVPPSSFEILMRATFPASSSRVKATERFEAIYPTVKEVALAGAHGSKAMRQVALQMFAFAIKAAGESSPELSKEAAGIVIWCLNQNAECYKQWDKVYLDNLEASVSVLRRLSHEWKEHSTKLTTLDPLRETIKNFRNKNEKEMGNESDAATQALFQDANKYCKLIXGKLSRGPGCLKHWPFSLSHLVWVPLLYPPHGRLGMEPTVCYLSLSNPCLKNSVKLRLSRLNAF

SEQ ID NO: 61601 - protein, 80 aa, Gossypium hirsutum
  Clone ID: LIB3147-056-Q1-K1-A3.pep
PTRPKEHSTKLTTLDPLRETIKNFRNKNEKMGNESDAATRALFQDADKYCKLIAGRLSRGPGCLKSLAFLVVAFGVGAAV

SEQ ID NO: 61602 - protein, 102 aa, Gossypium hirsutum
  Clone ID: GOSHI-09MAY01-C42272_1.pep
PSRPVLLWLLTAACIKTGRPQIARRAIDLAETRLLKDGWPEYYDGKLGRYVGKQARKYQTWSIAGYLVAKMMMEDPSHLGMISLEEDKQMKPLIKRSSSWTC

SEQ ID NO: 61603 - protein, 71 aa, Gossypium hirsutum
  Clone ID: LIB3147-055-Q1-K1-A10.pep
AEEKKGQNWEMERDQLQNFHCTGTSLSSSFTLCFQVKKIVTKKKKRKEDFAAMADGSCIVYFHYKYTLKGS

SEQ ID NO: 61604 - protein, 178 aa, Gossypium hirsutum
  Clone ID: GOSHI-09MAY01-C42202_1.pep
PRVRITVANPSDLVKVRLQAEGRLPPGVPRRYSGALNAYSTIARQEGVKALWTGIGPNIARNAIINAAELASYDQVKQTILKIPGFTDNVVTHLLSGLGAGFFAVCIGSPVDVVKSRMMGDSAYKSTLDCFIKTLKNDGPMAFYKGFIPNFGRLGSWNVIMFLTLEQAKKIVRDLESS

SEQ ID NO: 61605 - protein, 147 aa, Gossypium hirsutum
  unsure (1)..(147): unsure at all Xaa locations
  Clone ID: LIB3147-054-Q1-K1-E10.pep
LNERRAMQGKSRNDFFDFVLEELQKEGTILTEAIALDLMFVLLFASFETTSLALTLAIKFLSDDPSVLKXLREEHEAILRNREDTDSGLTWKEYKSMTYTFQFINETVRLANIVPGIFRKALREIQFKGYTIPAGWAVMVCPPAVHL

SEQ ID NO: 61606 - protein, 98 aa, Gossypium hirsutum
  Clone ID: LIB3147-060-Q1-K1-E10.pep
FRVEPRLPVIESQPSQGIYPNDSFDFVLAELHKEGTILTEAIALDLMFVLLCASFETTFLALTLKTKRPPDDPCVTTDLDAEPDDTLRDTAYTHSDPT

SEQ ID NO: 61607 - protein, 169 aa, Gossypium hirsutum
  Clone ID: GOSHI-09MAY01-C43952_1.pep
FDIDANGILNVSAEDKTAGGKNKMTITNDKGRLSKEEIERMVQEAERYKAEDEEVKKKVEAKNGLENYAYNMRNTVKDDKFAGKLDPAEKQKIEKAIDDTIEWLDGNQLAEVDEFEDKLKELEGICNPIIAKMYQGGAGGHVPMGGGAEMPNGGGSGGSGAGPKIEEVD

SEQ ID NO: 61608 - protein, 74 aa, Gossypium hirsutum
  Clone ID: LIB3135-034-Q1-K1-F9.pep
VQQFNPFEESGVGWTFDSADASKLIHALRNCLLTYRQYKTSWEGLQIRGMKQDLSWDNAADKYEEVLVAAKYQW

SEQ ID NO: 61609 - protein, 52 aa, Gossypium hirsutum
  unsure (1)..(52): unsure at all Xaa locations
  Clone ID: LIB3148-018-Q1-K1-F5.pep
MYQLALGNCLLTYRQYKTSWEGXQIRGVKQDLSWDNAAEKYEEVLVAAKYQW

SEQ ID NO: 61610 - protein, 79 aa, Gossypium hirsutum
  Clone ID: uC-gsronu33b112h06b1.pep
ISLQRFQSRNWFVGRSFIVCINSSTGLFALLFLLVVWVFIFLIFGFGFCFCFFCFLFLVPLKPLEQFARFQCFFLLMGD

SEQ ID NO: 61611 - protein, 74 aa, Gossypium hirsutum
  Clone ID: LIB3148-018-Q1-K1-E3.pep
SFIVCINSSTGLFALLFLLVVWVFIFLIFGFCFCFCFFCFLFLVPLKPLEQFARFQCFFLLLKKKTKKIKKKKN

SEQ ID NO: 61612 - protein, 166 aa, Gossypium hirsutum
  Clone ID: GOSHI-09MAY01-C43842_1.pep
FGSESFITARFQRFLQKIMELTNTIKNSTFGLEDILELYSCTSESSMQTINHKCEMPSLWLRGREQSPCLPAIPWVFEKGTKEQCQVFCCALWVMWNSRNQMVHERKFVSEGDLVQKIQTYLAELKEVGKEKHTWKTVKIQRQMNERMQDIILFDASFDANRYKSA

SEQ ID NO: 61613 - protein, 73 aa, Gossypium hirsutum
  Clone ID: GOSHI-09MAY01-C43562_1.pep
SVELGLRRLQGIVETRRGDLIYLRDREADMREVSEATNARVAWFSIMSLGVCIAVSVLQIWYLKRYFVKKKLI

SEQ ID NO: 61614 - protein, 120 aa, Gossypium hirsutum
  unsure (1)..(120): unsure at all Xaa locations
  Clone ID: GOSHI-09MAY01-C43402_1.pep
MGQRLTYRTRHSYATKSNQHRVVKTPGGKLVYQTTKKRASGPKCPVTGKRIQGIPHLRPAEYKRPRSPRNRWTANRAYGGVXTGSAVRERIIRAFLVEEQKIVKKVLKIQKTKEKVSSKN

SEQ ID NO: 61615 - protein, 137 aa, Gossypium hirsutum
  Clone ID: GOSHI-09MAY01-C43432_1.pep
FTGKLKMIEDAQNGNKNLPFVGENRYTILYVCTNCVGKAQMNLSKPSLFILVRFSALYHLFILYLKLLFKPIKIITLLYDPSVSFGKNLMTRPYFVFYLDQWWRHDLNTNYTGHDNNFIIINNHHALHHDPRHQHPN

SEQ ID NO: 61616 - protein, 131 aa, Gossypium hirsutum
  Clone ID: GOSHI-09MAY01-C43742_1.pep
LRVRFWQVPQYAFIGASEVFMYVGQLEFFNAQTPDGLKSFGSALCMTSISLGNYVSSLLVTMVMKISTEDHMPGWIPGNLNKGHLDWFYFLLAGLTTIDLIVYIACARWYKSIKLEGKTAENIDDQVSFKL

SEQ ID NO: 61617 - protein, 89 aa, Gossypium hirsutum
  Clone ID: GOSHI-09MAY01-C43692_1.pep
SELLFWPLHEEILSDTMCLHHFHDFLLCSSAANVPKACIALSFSTSSTGVLPPAIVLYPFTGVNIISNSVIAKNDNAKFFNLFFTILFR

SEQ ID NO: 61618 - protein, 64 aa, Gossypium hirsutum
  Clone ID: GOSHI-09MAY01-C43092_1.pep
FPNCMSIYSCSIFMLYSYIESIFVYPSSNYALEYIRTAIYRYRCLVYVVFQFFSFVSVTTYGNI

SEQ ID NO: 61619 - protein, 89 aa, Gossypium hirsutum
  Clone ID: LIB3828-003-Q1-N6-H11.pep
KINWSMAPFKAHFQGFDISGCRKTDSNNNNNNNKLCFLPEHWWNSKKYWTLDSKQKTNFKNVRKKYMNYDYCSDQKRYPVPPPECLVNS

SEQ ID NO: 61620 - protein, 38 aa, Gossypium hirsutum
  Clone ID: LIB3148-006-Q1-K1-C7.pep
NGRPLFFFFFFFFFFFFFFFFFFFFFFFFFFFFFFFFK

SEQ ID NO: 61621 - protein, 69 aa, Gossypium hirsutum
  Clone ID: LIB3148-041-Q1-K1-D3.pep
KYNIILILKNYCVFINALNSHPINLFSLIQQLFKFTPSSSGHKPIISNLKPHRNLAINKTFRRKQPDAW

SEQ ID NO: 61622 - protein, 121 aa, Gossypium hirsutum
  unsure (1)..(121): unsure at all Xaa locations
  Clone ID: GOSHI-09MAY01-C43032_1.pep
QNLYSRELIGPGERRDGFYCFWQVLTVKAILVEASSSLELWHKRLRHPFDKLVNLLPYVSNSRDHLNKACEICHRAKQTTNSFPISEQKVTCIFELVHCDLWGXYDTPSTCGFHYFLDQNP

SEQ ID NO: 61623 - protein, 178 aa, Gossypium hirsutum
  unsure (1)..(178): unsure at all Xaa locations
  Clone ID: GOSHI-09MAY01-C43242_1.pep
GRPRVRPRVRPHVRPRVRDDFETFQAAIRAEXTYTSTLTQSLSLSLDEFYKNSRSVGVSAISGAGMNEFFKAIEACAEEYMETYKADLDKRRAEKQRLEEERRKESMDKLRRDMEQTRGETVVLSTGLKDKDGRRNTMMDPEDEVEEPEDEDDYDRFTDEDEDLIQEDEDEEIARFSF

SEQ ID NO: 61624 - protein, 244 aa, Gossypium hirsutum
  unsure (1)..(244): unsure at all Xaa locations
  Clone ID: GOSHI-09MAY01-C43212_1.pep
MGHLGFLAAALLSLLNFVHGSLGPWTNAHATFYGGGDASGTMGGACGYGNLNSQGYGINTAALSTALFDNGLSCGACYELKCVNDPQWCLPGSIVVTATNFCPPGGWCDPPNHHFDLSQPIFQHIAQYRAGIVPVMYRRVKCRRXGGIRFTINGHSYFILVLITNVXGAGDVHSVSIKGSKTRWQAMSRNWGQNWQSNSYLNGQSLSFIGTTSNGHSVVSFDVAPSGWSFGQTYTGGQFGATKI

SEQ ID NO: 61625 - protein, 159 aa, Gossypium hirsutum
  Clone ID: GOSHI-09MAY01-C78872_1.pep
DIKIDVKANYRPQHVPLVSLMSELNGKAIIGHPLTVEVLNDGYYDNPSQEAAMECTEVDHSLKQNSGGRVPRKHIKLQSQFPPRKSAKVKKSGLLSKKIRKLSSLTGQKLCVGFRKPIAEKPKGPVIACIPLKLVFSRINEALNGSARPTHRSLTSSNS

SEQ ID NO: 61626 - protein, 116 aa, Gossypium hirsutum
  Clone ID: GOSHI-09MAY01-C78512_1.pep
MAAAMKLISVMGLIVLISLGKVVDAAGECGKSSPDNEAMKLAPCAEAAQDENAPVSASCCAQVRKIGQSPKCLCAVMLSNTAKASGIKPEIAVTIPKRCNIANRPVGYKCGAYTLP

SEQ ID NO: 61627 - protein, 159 aa, Gossypium hirsutum
  Clone ID: GOSHI-09MAY01-C78422_2.pep
GLYPGNNVGLQMWDNYPFVSMKPNKEEKAGLAEAITSNLLSTGHIDLQRKLFCSIQLIGGVALTGGLIPAVEERVLHTIPSNEAIHTAEVLQSRTNPTFASWKGGAILGVLDYGRDAWIHREDWIRNEIHIWSGQEYKDSYFLQAQAMRYINADKLVDR

SEQ ID NO: 61628 - protein, 50 aa, Gossypium hirsutum
  Clone ID: LIB3582-027-P1-K1-E7.pep
LLQILGVLDFGRDAWVHREDWIRNGIHIGSGRKYKDSYFLQAQAMCYINS

SEQ ID NO: 61629 - protein, 85 aa, Gossypium hirsutum
  Clone ID: GOSHI-09MAY01-C78612_1.pep
PPVGGVGCSSSFLDTSKDIIFLFYILFQDLGEGGIGSFNEPNRKNKKKFSIQTNRERNSIQTLTVAVFVNSNKQGKNSIQTLSNK

SEQ ID NO: 61630 - protein, 128 aa, Gossypium hirsutum
  Clone ID: GOSHI-09MAY01-C78632_1.pep
MSNPSAGASSKSKVGSSQPSETSFKRKRGVFQKDLQHMMYGFGDDPNPLPETVALVEDFVVEYVTDMAHKAQDIGSKRGKLSVDDFLYLIRKDLPKLNRWTELLSMQEELKQARKAFEVDEEKLGTLE

SEQ ID NO: 61631 - protein, 98 aa, Gossypium hirsutum
  Clone ID: GOSHI-09MAY01-C78252_1.pep
GIFYQDSLEDFAGVTDKQGSFSSEMNMQQVVFPKSSANGFGRQRGDREVGARLENKMQLGKSNQSRIQTTGALAVGKTVGNESFSRDRLVYLTTCLIG

SEQ ID NO: 61632 - protein, 165 aa, Gossypium hirsutum
  Clone ID: LIB3585-043-P1-K1-F12.pep
MQIETASAKDNIAGFHGLRVPTISIRQYIDRIFKYARCSPSCFLVAYIYLDRFSQQTDMHLTSLNVHRLLITSVMVAAKFIDDTYFNNAYYARVGGISTAELNRLEMKFLLSLDFRLQVSINTFRRYCLQLQKEGNQVERPIRACGIKESWPSKSDTQCAPTIAR

SEQ ID NO: 61633 - protein, 140 aa, Gossypium hirsutum
  unsure (1)..(140): unsure at all Xaa locations
  Clone ID: uC-gsflnu33B012f11b1.pep
CPRVRHGLRVPSIRIRHYIERMLKYAQCIPCXYLVAYIYSDRXRXQIDVTLTSCXDHRFLITSVMVAANSIDDTYFNNAYYGIVGGICAAKVNRWEMKXCIRLDFRLXVSIITLERGCLQLQKEGNQVERAIRASGIKES

SEQ ID NO: 61634 - protein, 196 aa, Gossypium hirsutum
  Clone ID: GOSHI-09MAY01-C79512_1.pep
PTRPRTRGRTRGLCQWIQLTDCLVSNQQQSHCSSAVRRLCEEWHLGFEKLPDKAASETIKSFLLAIQSIIQQQAEEHNQKKKSEKLQKRLQKELISLTEMEKKVEGSVLTLDMNSTLSPKHPLSLKRAKTEALKKRVDVEKGKHLNSVQLSKTMILNNLKTSLPNVFQALMGFSKACVEVFEAIHGNSQPKIPCAS

SEQ ID NO: 61635 - protein, 170 aa, Gossypium hirsutum
  unsure (1)..(170): unsure at all Xaa locations
  Clone ID: GOSHI-09MAY01-C79402_1.pep
AAILDPRFKMKLVEYYYSQRCGSTALERIKEASDGIKELLXAYSICSXLIDQGSALPGSSLPSSSNDTRYRLKGFDKFLHETSQSQTAISDLEKYLDEPVFPCNCDFNILNWWRVHTPRYPILSMMARDVLGTPMSTVAQEFAFNAGGRMLDSNQSSXAPDTQQALICTR

SEQ ID NO: 61636 - protein, 205 aa, Gossypium hirsutum
  unsure (1)..(205): unsure at all Xaa locations
  Clone ID: GOSHI-09MAY01-C79722_1.pep
ESFSKGNFELEANTRRSKQGILHLRVRAGIIGESKFLQNNPPELIPEEDRVIKHVLDCLLPYSTTTGGPLIVNHVTYFPGRGNLIVEYPGTQPGKILSVVGMHMDVVTAYPNDWDFDPFSLSIDGDKLRGRGTTXDCLGHVALVTELMKRLAETKPKLESTVVAVFIANEENSAISGVGVDALLNDGLLDKLKGGPXFWIDTGDK

SEQ ID NO: 61637 - protein, 158 aa, Gossypium hirsutum
  Clone ID: GOSHI-09MAY01-C79642_1.pep
MPVSAAEAEKDMQHVKDKVDGALENTTTANIPTDVHLNIRLPDSSSLQEKFPVTYTLSMIKDYVDRNQSNGMGSYDLAIPYPRRLFGDQDLIKSLLDLGLFNRQALIVVPRRRTAGFQGQRPSDDNRNLTPIEDSAGSSGGYFSYIKSFLSYVNPFAY

SEQ ID NO: 61638 - protein, 171 aa, Gossypium hirsutum
  Clone ID: GOSHI-09MAY01-C79632_1.pep
MGCSASRPNTNIITKPQNSSQSSTSLESMASSHSSPPPVSRALSLPTPLVHHPPLRKGDTNHLVSLTSTTYGSLSLIDVQKPVIDDTQSLSDQDSPVHGGQTDSLSPDSVINTWELMDGLDDDDDVGHDFDLGKPKSKPSFNTIIKQSLTKPLWKHLSEESLLSKLDPNVV

SEQ ID NO: 61639 - protein, 230 aa, Gossypium hirsutum
  Clone ID: GOSHI-09MAY01-C79302_1.pep
MVWRWRYCYKDVLPFSAMVTMECINVGLNTLFKAATLMGMSYHVFVVYAYAIAALVLLPAPFFSYRSRVLPPLTFPILCKIGLLGLIGSSSQIMGYTGINYSSPTLASAISNLTPAFTFILAIIFRMEKLAWKRTSSQAKVIGTIISITGAFVVTLYKGPAIVIASTPSSSLQQHLNPSNRLFVGRNSSNTNWVIGGIFLTAEYILVPLWYLGQTPINEEYPDEMTGVAF

SEQ ID NO: 61640 - protein, 144 aa, Gossypium hirsutum
  unsure (1)..(144): unsure at all Xaa locations
  Clone ID: GOSHI-09MAY01-C74972_1.pep
MPSAVRFRTSRSYDHRWNRMRQMENIAVPSVAKLYNSKSYQTKRNDGKFELCACTMLWNQAPALREWIMYHTWLGVERWFIYDNNSDDGIQDVIEELDFQDYNVSRHTWPWIKTQEAXGFSHCALRAEMSVNGRILGVDEFYYF

SEQ ID NO: 61641 - protein, 85 aa, Gossypium hirsutum
  unsure (1)..(85): unsure at all Xaa locations
  Clone ID: GOSHI-09MAY01-C74912_1.pep
LNWLEIHLSLASWRNNKEARTDRPNKQSRRMNGEWHALCSHSSSAVGVVLTRRVIDTLASXLALVSFAFFPFLLGTFAGFAKQDI

SEQ ID NO: 61642 - protein, 85 aa, Gossypium hirsutum
  unsure (1)..(85): unsure at all Xaa locations
  Clone ID: AI055044.1.pep
LAVHNAIKASPIQFAGRQVYIEERRPNSTGTRGGRRGRGRGSYQPDASRGRIGSRSLGRGNNQESGDYRSRSNGFYHXVLDKMAS

SEQ ID NO: 61643 - protein, 117 aa, Gossypium hirsutum
  unsure (1)..(117): unsure at all Xaa locations
  Clone ID: LIB3583-038-P1-K1-G2.pep
PTRPGEYKSVYVRNLXSTVTATEIEQEFRNFGRIKPDGVFIRNRKDVVGVCYAFVEFEDILAVHNAIKASPIQFAGRQVYIEERRPNSTGTRGGSMCLYTHPCCLLYMLEFVLHFIK

SEQ ID NO: 61644 - protein, 462 aa, Gossypium hirsutum
  Clone ID: GOSHI-09MAY01-C74782_1.pep
MLRSIAKRATLLKPRADSPIIPPLISSQSKLYSSKNAKASHGKSKKGDPKSKTKSKTGGSSSSVASSTGDDLDSAGADDFEAARARRLVEDENDPSLDVGPNGRPLFTSTPSLSLLTRKDCCSYMKFSEKGLNQVLPEGLPTGMVTEFKESMRPALLVRQSFLDLRDNFRRIVDPPMWSSNAKAPKARKQIVLDGPVSCGKSIALAMLVHWARDEGWLVLYAPRGREWTHGGCFYKNSETGFWDTPVQAENILKDFLKYNESRLQQLPCQIFDPIRLGEGAGVGFMKGVESMALPEESTLYDLVQMGIKYTHAAVGVVVRLRKELSLVKDVPVLIAIDQYNNWFTFSEYEEPVTVRSCRPIHARELAMVNAFRSMMHEDMMVGAFSHSTAVGKLRLDLPDIPVGARVNMPRYSPDEAATVCHYYVRQRLVRREAFSEESWKKVYYLSNGNGAEMRWLLPLMR

SEQ ID NO: 61645 - protein, 197 aa, Gossypium hirsutum
  Clone ID: LIB3828-028-Q6-K6-H10.pep
QAEKSSGFSEYNESRLQQLPCQIFDPIRLGEGAGVGFMKGVESMALPEGATLYDLVQMGIKYTHAAVGVVVRLRKELSLVKDVPVLIAIDQYNNWFTFSEYEEPVTVRSCRPIHARELAMVNAFRSMMHEDMMVGAFSHSTAVGKLRLDLPDIPVGARVNMPRYSPDEAATVCHYYVRQRLVRREAFSEESWKKCTT

SEQ ID NO: 61646 - protein, 203 aa, Gossypium hirsutum
  Clone ID: GOSHI-09MAY01-C74182_1.pep
LLAEAIERVVEFMSTLPTENGWNSFQPLRLYEGFWTFPHFLESIILAQHRFKPKPGDIFLCSAPKSGTTWLKALSFAIVTRNLYDTSNSPLLTKGPHHCVPNMVGFEYKPDVRQPGIPLIPTHAPYHCLPKSVLGSDDVKVVYICRDPKDAFVSMFHFAANRRPKENEHIAIEEAFELFCLGRSVFGPAWDHILGYWKASQER

SEQ ID NO: 61647 - protein, 110 aa, Gossypium hirsutum
  unsure (1)..(110): unsure at all Xaa locations
  Clone ID: LIB3829-022-Q6-K6-B3.pep
LTNXPHHXXPIXXFKIFFFSTXIPLFWGAPYHXXPKSVLGSDDNKLVYICRDPKYAFVSMFHFASNRKPKENEHIAIXDAFELFCLGMSVFGPSCDHILPYRIASQQPPD

SEQ ID NO: 61648 - protein, 246 aa, Gossypium hirsutum
  Clone ID: GOSHI-09MAY01-C74232_1.pep
MNQNFQNANEDSSDDSEVDFSIHLENDQLDSSHSAPPGWNREINLPSEATSAALSNQNGEESSEGAISGHVADVSFKYISEHASPICWEQHYREFMIASIPQLRVLDNLPIRNIDREMANLTFFKHFERLPYRRSDKESVVSILQKREIRAIPSSFRTQKQMPMDPVGKSQHSYARSLCAAKMGSSAWPYMNSLSISGNDLGDENGSFRPRQFEYHPTNSSLMVFGTLDGEVVVVNHEKQKMLVTS

SEQ ID NO: 61649 - protein, 200 aa, Gossypium hirsutum
  unsure (1)..(200): unsure at all Xaa locations
  Clone ID: GOSHI-09MAY01-C75962_1.pep
FYQYVDRRLSYHCDLLTRGVGGVEMESRKAEEWASQLQCWSLQLINCFAFKPEFLPTLXCKPEFLVKLPGMWGGLVNENSPAGIXLLRTIRHHKIGRGSVASCPGIIEALVNIACSSDDWQYMAIDCLLWLLQDPSTXHKVIDKAVPALVDLAEITTLGDHKKLGDTIVNVLQECIQSQGTGRSSVSNRTKELIEELLSS

SEQ ID NO: 61650 - protein, 135 aa, Gossypium hirsutum
  Clone ID: GOSHI-09MAY01-C75412_1.pep
MPPEDNQVPLLSDEESDRDVAYESGEKVHIVGIDEPDDEGLLGTPPFSWKKLWLFTGPGFLMSIAFLDPGNLEGDLQAGAIAGYSLLWVVMWATVIGLWVQLLSARLGVATGRHLAELCRGEYPTWARMVLWVMA

SEQ ID NO: 61651 - protein, 211 aa, Gossypium hirsutum
  Clone ID: GOSHI-09MAY01-C75772_1.pep
QKTHAPTPQHGAGRFRPAPGLMASPVYHGSSSTFIQQPNSQYSIPYSAYGYTGYSQDSIYPLNYYSLFRGQQFSPYYTAGASMTPGVFHNFYPFYAQYAQNSQAHGSGVQYPQMLQYPYLPQQGILSLPSSMPSATTPTAPTTTATVTTATTTTATTTAARTAVSSSETAKTTSPTTESLPPATIATTGVVGSESGPSQISGTPTEKKTSS

SEQ ID NO: 61652 - protein, 123 aa, Gossypium hirsutum
  Clone ID: LIB3493-010-P1-M1-A5.pep
GRVGSVPKKKKKKGVIGRSVAMSPSKIIAVKWRIHQKRTKKKKKWCYCQYIFIQSQVLHKFLGHLPKRKHQVNFCCGMQRLSQYNQRCFEREAKVESKRKQLNNKEYNKVYLSQKKDASCLTT

SEQ ID NO: 61653 - protein, 124 aa, Gossypium hirsutum
  Clone ID: GOSHI-09MAY01-C75682_1.pep
MRALRLLLVLGFLTVLSVASCVVIPLERAFPLNGRVELSQLVARDQLRHSRMLQGLVGGVVDFSVQGTSDPYLVGLYFTKVKLGSPPREFNVQIDTGSDILWVTCSSCADCPQSSGLGNSAQFI

SEQ ID NO: 61654 - protein, 191 aa, Gossypium hirsutum
  Clone ID: GOSHI-09MAY01-C75082_1.pep
MEVGMSLNALVRLPLSSTSRAHHEPVDGLVKHSLFSSRTTPLRLPQQTRRQQHGGGMLVVEAKGKKGMAARQFQRPPPPPLPKIEDDGNPRFVIFIRMANVNLWYPLSLITGGTTAKIMVAAKDNFLGKYIYKDTIARNLAAVIYRDEKEIQKTAFKQFRVLQSATEFRYGYKLVENGNVKAALSTNDVIE

SEQ ID NO: 61655 - protein, 174 aa, Gossypium hirsutum
  Clone ID: GOSHI-09MAY01-C75052_1.pep
MGNCQATDAATLVLQHPCGKVERFYWPMSAREVMKTNPGHYVALLISTTLYHSHRNNNDKAPQGTSSKTNVNPVRLTRIKLLRPTDTLLLGHVYRLITTQEVMKGLYAKKHAKMKKSQQESDPNEKDGQRSEPDKQNKVSKHDRQRARSTTSSNTGSRSKTWQPSLQSISEAAS

SEQ ID NO: 61656 - protein, 139 aa, Gossypium hirsutum
  Clone ID: GOSHI-09MAY01-C75342_1.pep
MQEIHLIEGGRLFNGGGGGGGDGGGGDRKLRAHHQALKCPRCDSSNTKFCYYNNYNLSQPRYFCKNCRRYWTKGGVLRNVPVGGGCRKAKRSKTKPFSETTVRATAVFGLSHSEQQQREHQNSDQRKADSYFMSESLSL

SEQ ID NO: 61657 - protein, 307 aa, Gossypium hirsutum
  unsure (1)..(307): unsure at all Xaa locations
  Clone ID: GOSHI-09MAY01-C76932_1.pep
LEKPVAVDVDQLKKETFSSRIHLRVCLDGGYHVLDESTHYSRDLRPTAKQLWRPPIGVLELGILNAVGLHPMKTRDGRGTSDTYCVAKYGHKWVRTRTLVDNLSPKYDEQYTWEVFDPATVLTVGVFDNSQLGEKGSNGNKDLKIGKVRIRISTLEAGRVYTHSYPLLVLHPTGVKKMGELHLAIRFTCISFVNMLYQYSRPLLPKMHYVRTFSVMQLDMLRQQAVNIVAARVGRAEPPLRKEIIEYMSDVDSHXWSMRKTKXNVFRLMTVFSGLFGYGKWFGDICMWENPITXVLVHVLFLMLGGS

SEQ ID NO: 61658 - protein, 317 aa, Gossypium hirsutum
  unsure (1)..(317): unsure at all Xaa locations
  Clone ID: GOSHI-09MAY01-C76532_1.pep
MEVTARAPGKIILAGEHAVVHGYTAVASSIDLYTVFSIRLRSEDDDTVKLKLNDIGLDFSWSVRRIKEVLSHLGSPFSSTPTSCSLETIKSLATLVDEQSFPETKIGLASGVYAFLWLYTSILGFKPATVTVSSELPVGAGLGSSAAYCVSLSAALLALSDSVKLDVSQKGWSTFKESEAELVNKWAFEGEKIIHGKPSGVDNSVSTFGNVIKFKSGVMTRVNSNMPLRMLITNTKVGRDTKALVANVSARKSRHPDAMCSVLNAIEAISDEWSTIFQSHAVDDPXLSANEEKPREVMEMNHGLLLFIGVSHASIEN

SEQ ID NO: 61659 - protein, 138 aa, Gossypium hirsutum
  unsure (1)..(138): unsure at all Xaa locations
  Clone ID: uC-gsronu33B143f09b1.pep
PRVRPRERPRVRLYPGLGILTGEHAEDHGYTAXASCIDLYTGDSLRLRPEDEDTVKLKLNDIGLDFSWTVGRIKEVLSHLGSPFSSTPTXCSLETIKSLATIVDEQSCPETKIGLATGDYAFLWLYTSILGVKPATVT

SEQ ID NO: 61660 - protein, 169 aa, Gossypium hirsutum
  Clone ID: GOSHI-09MAY01-C76522_1.pep
VTSSLTSEFPEDCKFYPADTKDDLHKFMWLFKEQRLTTPHWRNQRPYLIAQKVDMVPDDSSPEKCTLLLTGYTPAHSLSVNQLVHVSGAGDFQLSRIEIMKDPIPLNARKDHNALDSDDIQDAEIIRSVAPDPSSQEPFLVENVPDPLAGEQTWPTEVEMAEAERNQKQ

SEQ ID NO: 61661 - protein, 155 aa, Gossypium hirsutum
  Clone ID: LIB3493-021-P1-M1-H2.pep
IEFKQQVTIWWAGLMRGAVSMALAYNQFTSLGHTQVRGNAMMITSTITVVLFSTVVFGLMTKPLVRILLPSPKHLSRMLSSEPTTPKSFFLPLLDNGQGSEAEQGNRSVVRPSSLRMLLTTPSHTVHYYWRKFDDAFMRPVFGGKGFVPFVPGSP

SEQ ID NO: 61662 - protein, 138 aa, Gossypium hirsutum
  unsure (1)..(138): unsure at all Xaa locations
  Clone ID: uC-gsronu33B029b11b1.pep
MFPFTRGGKINIVEIWNSIKFMFVKTMQVFGLMTKPLVRILLPSPKHLSRMLSSEPTTPKSFFLPLLNNGQESEAEQGNRSXDPXPSSLRMLLTTPSXTVHYYWRKFDDAFMRPVFXEGGFVPFVPGSPTEQNGLQWQ

SEQ ID NO: 61663 - protein, 391 aa, Gossypium hirsutum
  Clone ID: GOSHI-09MAY01-C76612_1.pep
MATRSLWRTRAKLAVAATALCTGGAAATIATSDDPAAALKLCTAVPLRLLRDSATAASIVFDYQYSLWGLPEGSNERAKIKHEVHLRSARKLQELCFRNGGIYIKLGQHIGQLEYLIPQEYVLTMRESMLNKCPVSSYDQVCEVFKKELGETPDKVFDEFDPKPIASASLAQVHIARTHDGQKVAVKVQHTHMTDTAAADQATVEFLVNTLHRLFPSFDYRWLVAEIRESLPKELDFLIEAKNSVKCLENFRKLSPHIADYVYAPEVHWSLSTSKLLIMEFMDGAYVNDVITVPWLGIHPSDVARLVSQTFAEMMFKHGFVHCDPHAANLLVRPLPSGKRRIFGKKKPQLILLDHGLYKELDFSTRFSYASLWTARGPSPAKFGYISWMHL

SEQ ID NO: 61664 - protein, 246 aa, Gossypium hirsutum
  unsure (1)..(246): unsure at all Xaa locations
  Clone ID: GOSHI-09MAY01-C76182_1.pep
MEQAAKSIVFLAFVLLFFPSSGVADPLTYNVLNYGAKPDDNFDSTQALVAAWTLACGSINPATIYVPPGRFLVRNVVFRGQCKNNGIVFRIDGTLVAPSDYKVIGSTGNWLLFEHVNGVSIYGGIIDGQGTGLWTCKRSGKGCPSGATSLGFSNSRNIVIRGLTSLNSQMYHIVINGCNNVKVEGVRVSASGNSPNTDGIHVQSSSGVTILNTRIGTGDDWCLGGPGTNQLWXEKVACGPGHGISI

SEQ ID NO: 61665 - protein, 196 aa, Gossypium hirsutum
  unsure (1)..(196): unsure at all Xaa locations
  Clone ID: GOSHI-09MAY01-C76052_1.pep
PRPGNEQCPKSGENNKVGEAIAIANPKTMPPTSVMTRLILIMVWRKLIRNPNTYSSLIGLTWSLISFRWNVEMPAIIAKSISILSDAGLGMAMFSLGLFMAWHPKIIACGNSVAAFAMAGXFLTGPAVMAAASIAVGLKGVLLHVAIVQAALPQGIVPFVFAKEYNVHPDILSTAVIFGMLIALPITLVYYILLGI

SEQ ID NO: 61666 - protein, 141 aa, Gossypium hirsutum
  Clone ID: GOSHI-09MAY01-C77802_1.pep
MSLNKLVAFIYTIVGVRRSVSDEGKRTKEATPPPPTAAGYVVVMEGTAMGSSSSSYLQGSTEGETCCVCLSSMEEGEETRVLPCFHEFHRVCVDKWVNTCQKNCPICRFSMGEEDRFMFHRREAFTEEMMIWFSSFHIAGF

SEQ ID NO: 61667 - protein, 235 aa, Gossypium hirsutum
  unsure (1)..(235): unsure at all Xaa locations
  Clone ID: GOSHI-09MAY01-C77762_1.pep
PRVRPRVRGRVGSYGLVRSYLLHYGYEDTLNSFDLASKSTIPPICIAQENGFDEQDVVYALNQRKTIRQLIRNGEIDAAMNKLRDWYPQIVQDDKSAACFLLHCQKFIELIRVGALEEAVKHGRIELYKFFGSAEADDPFDDLVQKCVALLAYERPQESPVGYLLEESHRDVVADTLXAMILSHNPQXRDVHGCIQSYLERLLRQLTACCLERSANGGQGETFHLHRLLNSSREI

SEQ ID NO: 61668 - protein, 124 aa, Gossypium hirsutum
  unsure (1)..(124): unsure at all Xaa locations
  Clone ID: LIB3585-032-P1-K1-D3.pep
FALLVPDRPALERGPSSAFNSPFWTTNSGAPVWNNNSSLTVGARGPVLLEDYHLVXKLANFDRERIPERVVHARGASAKGFFEVTRDIXHLTRADFLRGPGVXTPPIVRFSTVIHERGSPETLR

SEQ ID NO: 61669 - protein, 81 aa, Gossypium hirsutum
  unsure (1)..(81): unsure at all Xaa locations
  Clone ID: LIB3585-005-P1-K1-E1.pep
PRVRHFSQNLEVLNQRLSNTLVAGPVLLEDYHLVXKLANFDRERIPERVVHARRASAKGFFEVTRDIXHLTRADFLRGPGV

SEQ ID NO: 61670 - protein, 202 aa, Gossypium hirsutum
  Clone ID: GOSHI-09MAY01-C77632_1.pep
KEHNFNDARVASEGEETREFPCSVDSVEGDANLSVLPSHVADNLDIKDHVSLDDLATGNALAESVVVSTAACGSADFDDAVDNTTFQTSNLIGSASGNLMYLEESPSGDGDLCQEELESNEVISQGCLTGLETREETNPVEGAPADIVSTSCKSVSHNCSNLEDDSQHLSPVQPTKNRLTSIDLTATPTSLELSNQESESKI

SEQ ID NO: 61671 - protein, 191 aa, Gossypium hirsutum
  Clone ID: GOSHI-09MAY01-C77142_1.pep
CDENANKETISMCRVFLVPSDEMQEKVSRARIGTENHLPQPPILEANCGTGIGSSSNHQVNKHDEKEGLAVAGTIPVPEHQDENDVGMDCFTDAYIDSFSRGDFLEMNDLVNHVSSSSSGNSSAPSMSSDECFDSMAFLQDLDQDLVLEQNDMGKKLNVSASNRLDEVVLVPAALGSVVSIGGNDSLVMNC

SEQ ID NO: 61672 - protein, 108 aa, Gossypium hirsutum
  unsure (1)..(108): unsure at all Xaa locations
  Clone ID: GOSHI-09MAY01-C77362_1.pep
MLEGVEAALGLPKGSLPRPIYSRVQLWGAALPTNTPGIPCIFDPHGRAGFCGDGLLGSNLESAALSGMALANHMADYLQSDGACPEEFAAGLXKEFGAIEGHDIGQFE

SEQ ID NO: 61673 - protein, 230 aa, Gossypium hirsutum
  Clone ID: GOSHI-09MAY01-C77252_1.pep
QWEPRGPTQRASALAALSSAFNPSSKSTSSAQARSNGNNGGPTQRASALAALSSAFNPSSASKTSAPKPSSSGQGSQRAAAVAALSSVLTAEKKKQSHDGSPTKSTSSTPAVSSPLSEAQSEADPSEAEDSQLVAEAKETGVASQTNGDDSEPKQKIPQDENGSGSTQSAYSYEQLKAITGNAATGIDLKRREAYLADNEFQTVFGMEKEAFYKFPKWKQDLKKKTVGLF

SEQ ID NO: 61674 - protein, 215 aa, Gossypium hirsutum
  Clone ID: GOSHI-09MAY01-C77272_1.pep
MEALLCKKLGDPASASVGNESESSSSPIEVIRNYPIPQLNSPTAVRVKVKATSLNYANYLQILGKYQEKPPLPFIPGSDYAGTVDAVGPAVTKFKVGDHVCSFAALGSFASFIVQDQSLLFGLPKGCDLVAAAALPVAFGTSHVALVHRASLSSSQVLLVLGAAGGVGFSAVQIGKVCGAVVIAAARGAEKVQFLKSLGADHVVDLTSQNLTASV

SEQ ID NO: 61675 - protein, 129 aa, Gossypium hirsutum
  unsure (1)..(129): unsure at all Xaa locations
  Clone ID: LIB3825-023-Q6-K6-H6.pep
EMGDPASASVGNESEPSSSPIEVIRNYPIPQLNSPTAVRVKVKATSLNYANYLQILGKYQEKPPLPFIPGSDYAGTVDAVGPAVTKFKVGDHVCSFAALGSFASFIVQDQSXLSVPCLIKFIQFNSKVL

SEQ ID NO: 61676 - protein, 141 aa, Gossypium hirsutum
  unsure (1)..(141): unsure at all Xaa locations
  Clone ID: LIB3583-012-P1-K1-D8.pep
WDLRLACLLLYAFDKEDNFWQLYGDFLPSADECTSXLLAAEDDLSQLQDPDLVSTMKNQQLRALEFWEKNWHSGVPLKIKRLARDPERFIWAVSIAQSRCINMQVRIGALVQDANMLIPYAGLVILLHGTPLFFISMPSCL

SEQ ID NO: 61677 - protein, 170 aa, Gossypium hirsutum
  unsure (1)..(170): unsure at all Xaa locations
  Clone ID: LIB3583-012-P1-K1-B2.pep
WQLYGDFLPSADECTSLLLATEDDLSELQDPDLASTMKNQQLRALEFWEKNWHSGVPLKIKRLARDPERFIWAVSIAQSRCINMQVRIGALVQDANMLIPYADMLNHSFQPNCFLHWRFKDRMVEVMINAGQRIRKGEEMTINYMNGQQNQMLMQRYGFSSSVNPWXSIP

SEQ ID NO: 61678 - protein, 152 aa, Gossypium hirsutum
  Clone ID: LIB3585-063-P1-K2-C8.pep
GASLDANYIMDAPIRNNNASVDANFGMGHMIGLGFPRHQIVSNGYAAGYSIFAQTVMGESSNGTENGNRTNSLLQPAVAPQNKKRIVDGPPEVVVERRQRRMIKNRESAARSRARRQAYTVELELELNQLKRENAKLKQLVVNKYFPCKSEN

SEQ ID NO: 61679 - protein, 71 aa, Gossypium hirsutum
  Clone ID: LIB3582-015-P1-K1-F9.pep
ARSRARRQAYTVELELELNQLKQENAKLKQLVEENDKRRKEEVLKRKKELTCAKKKVDKMMTLRRTVSLGW

SEQ ID NO: 61680 - protein, 73 aa, Gossypium hirsutum
  Clone ID: GOSHI-09MAY01-C71982_1.pep
NFGVDSQLFATDLTSCKCEDIRYDTGNLMSVSAGCRCPLQSSNSRDLLYYISISSQSTDLSSNSSSNCRSLLF

SEQ ID NO: 61681 - protein, 191 aa, Gossypium hirsutum
  unsure (1)..(191): unsure at all Xaa locations
  Clone ID: GOSHI-09MAY01-C71662_1.pep
MGAYGGVLFINQGGLSSVSSSSPSLGDLPESCVASIIGYLDPPEICKLGKLNRAFGGASWADFVWESKLPSNYQVFVDKILTFVPENLGKPEIYSLLCTTNTLDGGTKKVWLDKSSGGLCMSISSKGLHITGIDDRRYWNHIPTDESSMHGDDYDDCLNXFHSIAYLQQTWWFEVDGEVEFPFPAGSYSVF

SEQ ID NO: 61682 - protein, 122 aa, Gossypium hirsutum
  Clone ID: LIB3582-032-P1-K1-B5.pep
MGAYFSALFINQGGLSSVSSSSPSLGDLPESCVASIIGYLDPPEICKLGKLNRAFRGASWADFVWESKLPSNYQVLVDKILTFVPENLGKREIYSLLCTTNTLDGGTKVWSFTSLSFIVFVW

SEQ ID NO: 61683 - protein, 60 aa, Gossypium hirsutum
  Clone ID: GOSHI-09MAY01-C71102_1.pep
SSPSSYHTVENKSKASSYCSFGHLPVSLIIHYSKIRYICLWFCCNGSLVVLQQVVSRVQM

SEQ ID NO: 61684 - protein, 363 aa, Gossypium hirsutum
  Clone ID: GOSHI-09MAY01-C71352_1.pep
MELPVIDLAPYLAIADAGNRGSESTKRVSGLTELCHEVSRLLKETGALLVKDPRCTAEDNDRFIDMMEKYFEKPAEFKRLQERPFLHYQVGVTPEGVEVPRSLVDKEMQEKLRAMPKEHQPLTPKGPDPKWRYMWRVGPRPSKTRFQELNSEPVIPEGFPEWKETMDSWGYKMISAIEAVAEMAAIGFGLPKDAFTSLMKQGPHLLAPTGSDLKRYGQEGTVFAGYHYDLNFLTIHGRSRFPGLNIWLRTGEKIEVKVPIGCLLIQTGKQIEWLTAGECTAGMHEVVVTKRTIDAIKLASEQNRSLWRVSSTLFAHIASDAVLKPLGHFAESPLASKYPSICTGEFVEQELSVINLKGNKGES

SEQ ID NO: 61685 - protein, 437 aa, Gossypium hirsutum
  unsure (1)..(437): unsure at all Xaa locations
  Clone ID: GOSHI-09MAY01-C71322_1.pep
SRSIVVQPCVGIWSDKCTSKYGRRRPFILAGALMISLAVIIIGFSADIGYLLGDTKEQCSTFKGTRTRAAFVFVIGFWMLDLANNTVQGPARALLADLSGPDQHNSSNAIFCSWMAVGNILGFSAGASGSWHRWFPFLENRACCEACANLKAAFLVAVVFLLFCAGVTVCFAKEVPLPLPADQPTRLSDSAPLLDGSTQXGFQHSKSKADASIVPNEDGNXPENGYEWVSNSKLANSNDNNAQNEVFSDGPGAVLVNLLTSLRHLPPAMHSVLIVMALSWLSWFPFXFDTDWMGREVYHGDPKGNAAEIKLYDQGVREGAFGLLLNSVVLGVSSFLIRPMCRRMGSRLVWATSNYTVFACMAVTAIISLVSVTEYTQGIEHVIGGSAAIRIAALGVFTLLGFPLAITYSVPFSVTAELTADSGGGQGLAIGVLNLAI

SEQ ID NO: 61686 - protein, 130 aa, Gossypium hirsutum
  unsure (1)..(130): unsure at all Xaa locations
  Clone ID: GOSHI-09MAY01-C71252_1.pep
MVVPTKKAMNQRLASWTLGVGLFVVSRVAELERFEHAGKPDGSLSFLVVGDWGRRGHYNQSQVAFQMGKIGEQLDIDFIISTGDNFYDNGLTGVDDPLFHQSFTDIYTAXSLQKQWFNVLGNHVFQVQAE

SEQ ID NO: 61687 - protein, 206 aa, Gossypium hirsutum
  Clone ID: GOSHI-09MAY01-C72992_1.pep
SILDHLAFALSVSGELRALARQVEELQPEIMERKEQYRTLALCYYGEGEEIIALNLLRNLLNSRDNPDCVLELWLASKMGGENMNYIEEGTTWARKALVGLNGGCWQMVSKANCLLGVLLSAQSRMVSSDSQRNLQQSETIEVLETAEKLMKESDPYIVFHICLENAEQRKLDVALHYAKQLLKLEAGSYVRDMSFWLDMSAQNGL

SEQ ID NO: 61688 - protein, 197 aa, Gossypium hirsutum
  unsure (1)..(197): unsure at all Xaa locations
  Clone ID: GOSHI-09MAY01-C72502_1.pep
MSYAYLFKYIIIGDTGVGKSCLLLQFTDKRFQPVHDLTIGVEYGARMITIDNKPIKLHIWDTAGQESFRSITRSYYRGAAGALLVYDITRRETFNHLASWLEDARQHANANMTIMLIGNKCDLAHRRAVTTEEGQQFAKDHGLIFMEASAKTAQNXVEEAFIKTASTIYTRIQEGVFDVSNEALASSTRAHISYIDS

SEQ ID NO: 61689 - protein, 196 aa, Gossypium hirsutum
  Clone ID: LIB3543-044-Q6-K6-A9.pep
MSYAYLFKYIIIGDTGVGKSCLLLQFTDKRFQPVHDLTIGVEFGARMITIDNKPIKLQIWDTAGQESFRSITRSYYRGAAGALLVYDITRRETFNHLASWLEDARQHANANMTIMLIGNKCDLAHRRAVTTEEGQQFAKDHGLIFMEASAKTAQNVEEAFIKTASTIYTKIQDGVFDVSNESYGIKVGYGGIPGPS

SEQ ID NO: 61690 - protein, 68 aa, Gossypium hirsutum
  Clone ID: GOSHI-09MAY01-C72432_1.pep
NPLHHPTPFLESFLLRSSENKLQETKLCILTGFEVLNQQLIQLGSRLSHQRVSNYHLFHALDIKRNIE

SEQ ID NO: 61691 - protein, 199 aa, Gossypium hirsutum
  Clone ID: GOSHI-09MAY01-C72672_1.pep
MTSRCHTILNRGSNTETSSDHGLTNDDLEDDNLQNVAYVVSRMKSHISVQLLILEVVTDMYRTHLQFLSAANINIIVEIFSSSSAHALQLNSETTMQKKIQVACSILELSEPPMLHFEKEAYQNFLDFLAIFCHKRILSISKEMNLELLLVAVCEKIMKIYLNCTTVNHNVQRKSGDKVVVVTHWTLPLSSAKKEELAA

SEQ ID NO: 61692 - protein, 116 aa, Gossypium hirsutum
  Clone ID: GOSHI-09MAY01-C72602_1.pep
MGMGGLRDFVLLAPAASFNHHHHHHHHHHTQDPIMVNEQINGPSSAAAAATALGVGVIPLLTASPWLPPQNVEDTGKFSGMQLWQNPSSSHYLKKPASLLDNNPSMMAGDRRGNGG

SEQ ID NO: 61693 - protein, 167 aa, Gossypium hirsutum
  Clone ID: GOSHI-09MAY01-C72182_1.pep
GRVGLDPNELSQGSNAYVGKLSSDFLGTNFKIYDSQPPHSGAKPSSSRACRRFACKQICPQVPAGNFEVGQVSYKFNLLKSRGPRRMVCSIQRPLPEDMADEKYLDDIQMKMPEHASSGHTILWNKAPRWHVHFQCWCLNFHGRVTVASVKNFQLAATVEESQLGGK

SEQ ID NO: 61694 - protein, 222 aa, Gossypium hirsutum
  Clone ID: GOSHI-09MAY01-C72062_1.pep
MKSMDSRGVLVGRNIMFFFLICVLGWSSKLSEAQMVPALFVFGDSQVDVGNNNHLFFSIAKANFPHNGVDFPTQKATGGFSNGKNAADFLAEKLGLSSSPAYLSLSSNTHASYMNGVSFASGGSAILNTSSQVLGQSIPLSDQVNNFLSVHKVMLQKMGTDGLEKHFSKSLFAIVIGSNDILNYFESEDEKDTPEHLVNSMVNNLKAEIKKLYGFGAHKILV

SEQ ID NO: 61695 - protein, 292 aa, Gossypium hirsutum
  Clone ID: GOSHI-09MAY01-C73882_1.pep
CSICVKYYSYTTFSFDCLPSFPVTNTVAAANAEISRCVAASSRPIFDEPTIATQPPLVIRPYRLFSQRFPLLSLSLLERNSISSTRLRSLPNDSDASGGLTYKDAGVDIDAGSELVRRIAKMAPGIGGFGGLYPLGDSFLVAGTDGVGTKLKLASETAIHETIAIDLVAMSVNDIVTSGAKPLFFLDYFATSHLDVDLAEKVIKGIVDGCQQSDCALLGGETAEMPDFYANGEYDLSGFAVGIVKKDSVIDGKNIVAEDVLIGLPSSGVHSNGFSFVRRVLANMGLSLKDQL

SEQ ID NO: 61696 - protein, 136 aa, Gossypium hirsutum
  Clone ID: GOSHI-09MAY01-C73802_1.pep
MAYLYLSFLLVWFLSKSFLGEAQLNDQATLLAIKEELGGVAGWGDNETDYCRWEGIRCGLDHSLVERLDLSRRMLRGNVTLISNLKALKELDLSFNNFHGRIPSAFGNLSELEYLDLSSNKFEGSIPVELGGLRNL

SEQ ID NO: 61697 - protein, 120 aa, Gossypium hirsutum
  Clone ID: GOSHI-09MAY01-C73432_1.pep
MAPLAVISLSLCFLLPLLSPAISTNSEGNALHALRRRLSDPTNVLQSWDPTLVNPCTWFHVTCDSHNHVIRLDLGNSNISGTLGPELAQLQHLQYLELYKNDISGEIPKELGNLKNLVGL

SEQ ID NO: 61698 - protein, 210 aa, Gossypium hirsutum
  Clone ID: GOSHI-09MAY01-C73682_1.pep
RVRRIIQLLEDQLVLTIKLIQTVYIPGWRFLPTKTNREMKMKHRDIKESLREMIKRREQAIKAGEESNEDLLDILVESNIREMEAKNMGMSIEDVIEECKLFYFAGQETTSVLLVWTMVLLARYPDWQSKAREEVLHVLGDSKPDADGLNRLKVVTMILYEVLRLYPSATELGRSVPKEIKLGNLLLPAGTEISVPILLIHHDKDLWGDD

SEQ ID NO: 61699 - protein, 170 aa, Gossypium hirsutum
  unsure (1)..(170): unsure at all Xaa locations
  Clone ID: uC-gsflmaxxa092a04b1.pep
PTRPPTRSPTRPPTRPRASNGTPRVGLFRHSNPKLGEQLXYFXLSSLRGPAQSARDFDRVWPIFDSAQSRDFRKVVQGIITELEAQGALPRSNSRVSSLATCCGPRFVELLWQLSLHALREFHRRNFAADVASNPLPAPLTDVAFSHAATLLXVTXARIALERRRFLINS

SEQ ID NO: 61700 - protein, 164 aa, Gossypium hirsutum
  Clone ID: LIB3582-021-P1-K1-D5.pep
GRVDGRVGDREKEREIELESAVDTNCLLLGLDPSIIGLRASNGTPRVGLFRHSNPKLGEQLLYFILSSLRGPAQSARDFDRVWPIFDSAQSRDFRKVVQGIITELEAQGALPRSNSRVSSLATCCGPRFVELLWQLSLHALREFHRRNFAADVASNPLPAPLTD

SEQ ID NO: 61701 - protein, 76 aa, Gossypium hirsutum
  Clone ID: uC-gsflnu33B101a07b1.pep
PPHLPPSLDHNIFHLSCQIFNVRINSPVTVASYIILESLISLSLSIYLYSFESPLTLRLSTLDLYIFAVDRLKHQI

SEQ ID NO: 61702 - protein, 62 aa, Gossypium hirsutum
  Clone ID: LIB3493-047-P1-M1-A7.pep
EKLIKPNQEIIVSLETSDSLSPTSSSWITFTLHARTTLYYLGTLPRINFDKILLDLVLQTIY

SEQ ID NO: 61703 - protein, 125 aa, Gossypium hirsutum
  Clone ID: LIB3493-046-P1-M1-E10.pep
FTKERNGNFYFSPFFFSIKHRQCGQKKSFARFDSICISPIFHQWLLAQEHWLRDTDREPCQLSEHMKCSLCLRRCLEVVSLALLLNKLRRGLIEVGEGRLNSETKTVWLLSHSTCVLENREQRLL

SEQ ID NO: 61704 - protein, 77 aa, Gossypium hirsutum
  Clone ID: uC-gsflmaxxa076f07b1.pep
RNGDFYFSPFFFSIKHRPCGQKKSFARFDSLSISPIFHQWLLAQVFFFLFPLLITFFFYFYVLFPINFLDSIIFFGK

SEQ ID NO: 61705 - protein, 73 aa, Gossypium hirsutum
  Clone ID: LIB3585-011-P1-K1-E2.pep
FQKKDFLHTLQLIHGKVCLVRVQVNQLQDNVSNRVSTSYVLITDKVHGQYLSINVPPLAVLHQQPHKNIQILQ

SEQ ID NO: 61706 - protein, 341 aa, Gossypium hirsutum
  unsure (1)..(341): unsure at all Xaa locations
  Clone ID: GOSHI-09MAY01-C73382_1.pep
QRPPEAADPINLESLLLLYNYLNNEGILKPGNKGLLLGEDYDDRIHSXNSFLTKTDMEFSSTNDFDRLMLIPDESFDFXFFTENIQSALEFIDRSLKVGGTVAVQQLDSSLSFNKPSNYKIVYFRKFNSNLFVMKKVENARPIPSSQRRLLGYNTSEAKRAALKKLEDVLLEPPRASSGTSRTYLKRTKYLPDLLGDSLESYPRRVFIDVGLPKKDGGSATTWFVKNYPTRNLKFEMYKIETLTKDSTKKEVPQTAAETGMSGWLRKNVQEEEYVVMKAEAEVVEDMVKSKAIRLVDELFLECKPKGLGGRKNMSRRAYWECLALYGKLRDEGVAVHQWWG

SEQ ID NO: 61707 - protein, 141 aa, Gossypium hirsutum
  unsure (1)..(141): unsure at all Xaa locations
  Clone ID: GOSHI-09MAY01-C73232_2.pep
ILDAEVVSLSPKTLLESDRYVCEICNQGFQRDQNLQMHRRRHKVPWKLLKRETPAVKKRVFVCPEPSCLHHQPCHALGDLVGIKKHFRRKHSNHKQWVCEKCSKGFAVNFDIRXYLKTCGTPGHSCDCGRVFSRVESFIEH

SEQ ID NO: 61708 - protein, 96 aa, Gossypium hirsutum
  unsure (1)..(96): unsure at all Xaa locations
  Clone ID: LIB3583-047-P1-K1-H9.pep
MLPDNSCSSQPLYLENGSTNNKRKRRPAGTPDPDAEVVSLSPKTLLESDRYVCEICNQGFQRDQNLQMHRRRHKVPXWKLLKRETPXVRKRVFVCP

SEQ ID NO: 61709 - protein, 245 aa, Gossypium hirsutum
  unsure (1)..(245): unsure at all Xaa locations
  Clone ID: GOSHI-09MAY01-C68952_1.pep
ETQAQTQPPGVQQQLQQQNSFNNHQHQQQLQHPLSQQHQQLVDHQHISTGVAAMSQYAPASQSRSSPFQAIPSLCQQQSFSDSNGHTVTSPIVSPLHSLLGSFPQDEPSGLLNLPRSNPVITSAAWPSKRAAVEVLSSGSPQCVLPQVETVGAHXTNISHNSISLPPFPGRXECSIDQAAGSDPQSHLLFGVNIEPSSLLLXTGMSSLRGSXGSESDSTTIPFSSNYASTAGTDFLVIPATLTVD

SEQ ID NO: 61710 - protein, 69 aa, Gossypium hirsutum
  Clone ID: LIB3189-039-P1-K1-A3.pep
KSFSDSNGHTVTSPIVSPLHSLLGSFPQDEPSGLLNLPRSNPVITSAAWPSKRAAVEVLASGSPQCVLP

SEQ ID NO: 61711 - protein, 72 aa, Gossypium hirsutum
  unsure (1)..(72): unsure at all Xaa locations
  Clone ID: GOSHI-09MAY01-C68492_2.pep
MGAACCCXARDKTIVNGSGSEVLHRNIRYSPTWSFRWDNRGRVAGEDTSISWFSDAVSRNDGSEIKYESACA

SEQ ID NO: 61712 - protein, 343 aa, Gossypium hirsutum
  Clone ID: GOSHI-09MAY01-C68492_1.pep
MGAACCVAARDKTIVNGSGSEVLHRNMRYSPTWSFRWDNRGRVAGEDTSISWFSDAVSRNDGSEIKYESACASEDGNSSESFQSRTWQKSPTSEGTAGHARTPASDQSISRNISVDVNLEQVKELVESPVASYPSPSKLSHSLPSASSLATSPLSSQSHVHPTGSTITRWPLRSPGHHLLRQVSDNRILGLKAPNGYSVGEERLVMPSWSNESTGGSRGGSSDGWSMQAFSEFMPPSRRERWSFDNDTWGFQREKISKPSGRISAPPSVDLQTCGVCSKLLSEKILWSTQKIIISNDLSVVAVLTCGHVYHAECLENMTPEIDKYDPACPICTLGEKKTHKLF

SEQ ID NO: 61713 - protein, 63 aa, Gossypium hirsutum
  Clone ID: GOSHI-09MAY01-C68442_1.pep
PGQPAGNPVRRKKIWVLERKIRVRMKWIYFGWRLLREGNPHSVVFIRLGHKAMIDLNKKSERT

SEQ ID NO: 61714 - protein, 191 aa, Gossypium hirsutum
  Clone ID: GOSHI-09MAY01-C68462_1.pep
MGSRDKDQTTSHHQPLLSSLVVGPSASDGADGGASGGRGRGGGGSDYEPGEVRREPHPYSRSDRYKDEPGYRIRAGSSSPIRRRDADHRNGSHFDRSGGPSRGRDFGNGRDPGRYRDSSPPYSRGPGGGRQHSSRGFDGTGYGPGPIGGEGMTRNNPNVRPREGDWICPDPLCANLNFARRVYCNNCKRFR

SEQ ID NO: 61715 - protein, 185 aa, Gossypium hirsutum
  unsure (1)..(185): unsure at all Xaa locations
  Clone ID: uC-gsronu33B012h10b1.pep
SRVRPRVRPRVRPRVRPRVRRDPGRYRDYSPPYNRGPGGERQHSNRRFDGTGYGPGPIGGEGMTRNNPNVRPREGDWICPDPLCANLNFARREYCNNCKRFRYAPTGSPRGGYPGPPPPHAPPRRFPGSPVDLSPPGRNINSNFRSPXRSWAREGTRDCRAAGPPPSRHEGRFFDHSMRRDRLDI

SEQ ID NO: 61716 - protein, 142 aa, Gossypium hirsutum
  Clone ID: GOSHI-09MAY01-C68432_1.pep
MAVISLNSLPIGIRFRPTDEELIDFYLRAKVNGKRKDEIGVIREVDFCKCEPWDLPHLSAVKARDPEWFFFCPLDRKYPNGNRLNRATEAGYWKATGKDRKIKSGSCLIGMKKTLVFYTGRAPKGKRTNWVMHEYRTTLDEL

SEQ ID NO: 61717 - protein, 63 aa, Gossypium hirsutum
  Clone ID: GOSHI-09MAY01-C68722_1.pep
HTWISRSYHLLGNMNRVSQNSSLFRRLLHTLSRDDGPSETLKKKVPEIERTRKRRNPKKAQLF

SEQ ID NO: 61718 - protein, 122 aa, Gossypium hirsutum
  unsure (1)..(122): unsure at all Xaa locations
  Clone ID: GOSHI-09MAY01-C68152_1.pep
MASSMLNAPETFTLIRGVTPKSIGFLGSRLHGKQFSSAGLIYSPRMSRLGTTIAPRCSLSASRPASQPRFIHHKKXRPFWFYRFLSIVYDHVINPGHWTEDMRDDALEPADLNDRDMVVVDV

SEQ ID NO: 61719 - protein, 160 aa, Gossypium hirsutum
  Clone ID: GOSHI-09MAY01-C69592_1.pep
RTVSLTQARIDMSELDEDSDGFLQPHEMEAYIRGLIPNLAQRRDMPAAFVQMYCRIAAHKFSFFCDPHRRGKACIKKVLLSNCLQELMELHQESEEEVTDTEQAENWFSLTSAQRICDMFLALDKDMNGTLSKQELKEYADGTLTEIFIERVFDDHVRRC

SEQ ID NO: 61720 - protein, 167 aa, Gossypium hirsutum
  Clone ID: GOSHI-09MAY01-C69582_1.pep
MRARLGTIPFIASLLDECSSTKSLHKLKQIHAKTILLNISSHSFVRNKLLSAYASCSQMREAHILCGFTSRQPIFLYNSLIRAYSSLHQFSQSLAIFHHMIIAQRPFDIFTLPPVLKSCGHLSHVTLGRQLHGSVVANGYSFDLANNNSLISMYGKCGELEVCEETG

SEQ ID NO: 61721 - protein, 62 aa, Gossypium hirsutum
  Clone ID: GOSHI-09MAY01-C69622_1.pep
GRPFFFFFFFFFFFFFFFFFFFFFFFFFFFFFFAELCFLLLLNQTDYNNGSLKIKFARKIST

SEQ ID NO: 61722 - protein, 205 aa, Gossypium hirsutum
  unsure (1)..(205): unsure at all Xaa locations
  Clone ID: GOSHI-09MAY01-C69082_1.pep
EKPGRPTRPQEPSPSLLLHHLYVALFLARWGARLWEFSVGLYMISVWPDSLLLVAIYGCXVNHPLLALFGPIIGRWLDRLTYVKVLQLWLVTQNLSFILAGGAVVALLVFPSLKFTNIVAFIALVILTNISGAVGVLSTLTGTILIEREWLVVISEGHSPNLLAGFNSVIILIDLLVGICHGIMAYFSLFSVARHDGPCDSIFYG

SEQ ID NO: 61723 - protein, 151 aa, Gossypium hirsutum
  Clone ID: GOSHI-09MAY01-C69392_1.pep
MASSMISAPAVTTVNRAGAGMVAPFTGLKSMAGFPTRKTNNDITSIASNGGRVQCMQVWPPVGKKKFETLSYLPDLDDAQLAKEVEYLLRKGWIPCLEFELEHGFVYREHNRSPGYYDGRYWTMWKLPMFGCTDASQVLKELQEAKTAYPN

SEQ ID NO: 61724 - protein, 110 aa, Gossypium hirsutum
  Clone ID: LIB3189-002-P1-K1-B1.pep
MASSCASSAIAAVAISTPSSQKNGSLLGSTKASFLSGRKLKVNNFTAPVGARSSTTVCAVAEPDRPLWFPGSTPPPWLDGSLPGDFGFDPLGLASDPESLRWNVQAELVH

SEQ ID NO: 61725 - protein, 95 aa, Gossypium hirsutum
  Clone ID: LIB3189-002-P1-K1-B7.pep
PLSPGGPRRRGRTTPPLPFFGLYLQQPFTTLIRDPSCIILTLPFLARSNTSVCATAEPDKTLWFPSSTPPPWLDGSLPGDYCFDPLGLGFDPDSL

SEQ ID NO: 61726 - protein, 139 aa, Gossypium hirsutum
  Clone ID: uC-gsflnu33B140h07b1.pep
MLKICGLCIHWEILTSCNGCDRSRRIWKPNVQEKRVFSYILDRHIRVKVTTHALRCIDKAGGIDEYLLKTPYHKMDTEMGLFWKAKIEKMYEELGQMEVVFFSPEDEAKFEQGFTELKLAERATRRDARRQMYGWSGKL

SEQ ID NO: 61727 - protein, 126 aa, Gossypium hirsutum
  Clone ID: LIB3189-001-P1-K1-E9.pep
MAFRGKEMMKLLKKVGEKNLAHGVKEQLQKSIPDSKVVMNRAKRGLYAGRHIQFGNRISEDGGNKSRRIWKPNVQEKRLFSYILDRHIRVKVTTHALRCIDKAGGIDEYLLKTPYHKMDTEMGLFW

SEQ ID NO: 61728 - protein, 112 aa, Gossypium hirsutum
  Clone ID: GOSHI-09MAY01-C69302_1.pep
MDSTSSAAAPTPPPPPPSFYFDDKWKLSKKETTSSSSSKGRSLSSSSTSNSSSFMIKTTPSSSSTSPPSSSKTKRCAFTRKCARLFKEQRARFYIMRRCVIMLICWREYTDS

SEQ ID NO: 61729 - protein, 136 aa, Gossypium hirsutum
  unsure (1)..(136): unsure at all Xaa locations
  Clone ID: GOSHI-09MAY01-C69322_1.pep
MGHGERGRPNKXFKFAKDDHRGSAMEDDYSFYPDEADDEPRDGENEGKKRDFTKLELKLDHGNRPLWACADGRIFLETFSPLYKQAYDFLIAIAEPVCRPESMHEYNLTPHSLYAAVSVGLETETIISVLNKLSKT

SEQ ID NO: 61730 - protein, 124 aa, Gossypium hirsutum
  Clone ID: GOSHI-09MAY01-C69212_1.pep
MAKPIPKVGSRRNGRSSARKSARRIPKGVIHVQASFNNTIVTVTDVRGRVISWSSAGTCGFKGTRRGTPFAAQTAAGNAIRAVVDHGMQRAEVMIKGPGLGRDAALRAIRRKGILLSFVRDVTP

SEQ ID NO: 61731 - protein, 321 aa, Gossypium hirsutum
  Clone ID: GOSHI-09MAY01-C69232_1.pep
MENSFTLVTIFGLLFTLGNVGPQAEAARAFFVFGDSLVDNGNNNYLATTARADAYPYGIDYPTHRATGRFSNGLNIPDLISEQIGSEPTLPYLSPELNGQRLLIGANFASAGIGILNDTGVQFVNIIRIGEQLQYFRQYQQRVSALIGSEQTQRLVNEALVLMTLGGNDFVNNYYLVPFSARSRQFALPDYVVYIISEYRKILLRLYELGARRVLVTGTGPLGCVPAELAQHSRAGECAIELQRASALFNPQLAEMLSGLNNELGADIFVAVNTNEMHMDWINNPQQFGFVTSKIACCGQGPYNGIGLCTIASNLCPNRDI

SEQ ID NO: 61732 - protein, 99 aa, Gossypium hirsutum
  Clone ID: GOSHI-09MAY01-C64982_1.pep
QFLGTLTLASFVWRRSSLQHPPALPSLTPPRRHNRTTSVHHHVLFWCRFGRRWLLRSKVDRSLWVWLKPRRWWRHIMRFSSHCYSRSRWISGGADPFAP

SEQ ID NO: 61733 - protein, 130 aa, Gossypium hirsutum
  Clone ID: GOSHI-09MAY01-C64842_1.pep
MEVEELEKRKSRKITSSSPSSALINNLDDGCLMHIFSFLSPIPDRYNTALVCHRWCYLACHPRLWLRVDRSAQDFSEPGVFPNIEEAVSAARPGDTILIAAGGSHLASNIQIKKPLCLIGRGELLMKQMS

SEQ ID NO: 61734 - protein, 117 aa, Gossypium hirsutum
  Clone ID: GOSHI-09MAY01-C64822_1.pep
MMKKAELVFLPAPGIGHLVSAVEAAKLLVDLNANLSISGLTIKQPLNYKATAYIDYLNAATITTTTTRIKFIDLHQSDADMDRLKFVGSLVQTHGPLVKEAVAKIVEHSNSVPGSPR

SEQ ID NO: 61735 - protein, 169 aa, Gossypium hirsutum
  Clone ID: GOSHI-09MAY01-C64612_1.pep
WIQPATVFDIYYFYFNGYESAIKAQADETNPKCSIKLPGLPPLFPRDLPSFVIASNVYQSALSLFQEQMDVLAEEPNAKILINTFDALEHEALNAIEKFKTVGIGPLVPSSFLNPKDALDNSLRVDLFQFDSKDYIPRVDSKPKSGRGYTFLGVSRRLRNPSGGENSSA

SEQ ID NO: 61736 - protein, 150 aa, Gossypium hirsutum
  Clone ID: GOSHI-09MAY01-C64162_1.pep
MTMKRGESAGVRVPPSAPASFFSSKGTCKRGGSVRSGFCKRDFSQNNANFGWSAVPLRFMYFRNDSWVNFSADVVETLRAGFLERKPIIETSIDGSKYIFDFKRMLQIEYSTGNCRSISWIDESGKCFFPSDFFSEEEFIQSECSEWDDY

SEQ ID NO: 61737 - protein, 143 aa, Gossypium hirsutum
  Clone ID: GOSHI-09MAY01-C64062_1.pep
MDSQTKTENCLGWAATDPTGVLSPYKFSRRPLGSDDVSIKITHCGVCYADVIWSRNMLGDSIYPLVPGHEIAGIVKEVGSNVQGIKVGDHVGVGTYVNSCRNCEYCNDGVEVQCVKGPVFTFNHIDVDGTVTKGGYSSHIVVH

SEQ ID NO: 61738 - protein, 182 aa, Gossypium hirsutum
  Clone ID: GOSHI-09MAY01-C64292_1.pep
MAPSISSIFISHTFNAFASFTNCSKNNKNHTTPPSQHKNHQLFSSSPGKVSFAAATGELFLGIASRFIKSSSNYEDSGSTIPVFSRPRKRINGSEAGNNDKDRIGLVMEDEIEPEVIWEQRVKDIEAEKERRVVTSPGFSFSAAGLLFPYHLGVAQFLIEKGYIKETTPLAGSSAGAIICAV

SEQ ID NO: 61739 - protein, 123 aa, Gossypium hirsutum
  Clone ID: GOSHI-09MAY01-C64212_1.pep
IFLLFILSFCFCFIHHFEAMVTTLLLLAILFILGFIHIYFSFLPNKFYYWIQSLSCNTRPSSSSSSSSSSAVNYKTAHKISVTERGDPNNLELKRVFSTFDKNGEGFITKQELRESLKNIRMF

SEQ ID NO: 61740 - protein, 134 aa, Gossypium hirsutum
  Clone ID: GOSHI-09MAY01-C65942_1.pep
EHQYLDPLNHQMALHLFHLLLFLLLSPLSYVSSVGINYGTLGNNLPSPKKVAQLLQSTLIDKVKIYDTNPDILEAFSNTGVDLIVAVENYHVANISKDAAAADDWFATRVQPFIPATSIVAVCVGNEYLTSDDN

SEQ ID NO: 61741 - protein, 93 aa, Gossypium hirsutum
  unsure (1)..(93): unsure at all Xaa locations
  Clone ID: GOSHI-09MAY01-C65712_1.pep
MAGMEGGGTLSDVYQSARKLLLRARDGIERLERFVSSVSGTDSPELSFAVKKDISQIHSLCADMDRLXWRSIPAKSQRDLWKRKVEQVAEEAD

SEQ ID NO: 61742 - protein, 119 aa, Gossypium hirsutum
  Clone ID: GOSHI-09MAY01-C65642_1.pep
MAEETQKPEAAAPPAPAEEVVVEKESEQEAASEKPTDAVVEDKPAEAVEEEPKVEAKDTKVTESASFKEETNIAGELPDPQKKALDELKQLIQEALNKHEFTPPPAKDKDKPAPEEKKE

SEQ ID NO: 61743 - protein, 213 aa, Gossypium hirsutum
  unsure (1)..(213): unsure at all Xaa locations
  Clone ID: AI055072.1.pep
AHFILKERIQKMGILGCITCIAGSVVIVIHAPQEHTPSSVQEIWTLATQPAFLIYVAATLSIVLALILHFEPRYGQTNILVYLGICSLMGSXTVVSIKAIGIAIKLTLDGINQMAYPQXWFFLTVAXICVITQLNYLNXALDTFNARLFLXVYYVMFTTLTIIASVIMFKDWSXSNVSSIASEXCGFILCSLNYILMHERQDHLSDTSGIKPG

SEQ ID NO: 61744 - protein, 135 aa, Gossypium hirsutum
  Clone ID: LIB3272-014-P1-K1-E9.pep
LTLDGINQMAYPQTWFFLTVAAICVITQLNYLNKALDTFNAEIVSRVYYVMFTTLTIIASVIMFKDWSGQNVSSIASEICGFITVLSGTIILYATREQEPPTARGTVTWYVSGDSMKSAEDEHLITLRSSEYYKP

SEQ ID NO: 61745 - protein, 159 aa, Gossypium hirsutum
  unsure (1)..(159): unsure at all Xaa locations
  Clone ID: LIB3543-044-Q6-K6-E11.pep
MELCFGWFLLVASIPAIFAQDISHGSIVVDGTMTVAQTDDNFVCATIDWWPHDKCNYDQCPWHYTSVMNLNLSHPFLAKAIQAFNRLRIRVGGSLQDQVLYDVGNLKPPCHPFQKMKDGLFGFSKGCLHMERWDELNRFFKETGAMVTFGLNAXHGRHK

SEQ ID NO: 61746 - protein, 63 aa, Gossypium hirsutum
  Clone ID: LIB3272-013-P1-K1-C3.pep
MELCFGWFLLVASIPAIFAQDISHGSIVVDGTMTVAQTDDNFVCATIDWWPHDKCNYDQCPWH

SEQ ID NO: 61747 - protein, 199 aa, Gossypium hirsutum
  Clone ID: GOSHI-09MAY01-C65362_1.pep
MGKQSNDKYKPIPEISSFQSLSALLWRAVTRGRKLPASQTTTFRMAVNCRHRLNPKLNPLYFGNAIQSIPTYASAGDVTSRDLRWCAQRLNENVNAHHDETVRRFIKEWEKDPRCFPFGNFDGASMTMGSSPRFPMYDNDFGWGRPLAVRSGGANKFDGKISAFPGREGNGSVDLEVVLAPETMAAIESDGEFTPHVSN

SEQ ID NO: 61748 - protein, 117 aa, Gossypium hirsutum
  Clone ID: LIB3829-027-Q6-N6-E2.pep
SHKAGLQFPVGRIARFLKAGKYAERVGAGAPVYLSAVLEYLAAEVLELAGNAARDNKKNRIVPRHIQLAVRNDEELSKLLGSVTIANGGVLPNIHQTLLPSKGGKSKGDIGSASQEF

SEQ ID NO: 61749 - protein, 107 aa, Gossypium hirsutum
  unsure (1)..(107): unsure at all Xaa locations
  Clone ID: LIB3272-017-P1-K1-B11.pep
MSPTEGSTKGGRGKPKSTKAVSRSHKAGLQFPVGRIARFLKAGKYAERVGPELPXYFFGLLKYFACEGLELAXNPTRDNXKEXIVPRHIQLAVRNDEELSKLWVQSP

SEQ ID NO: 61750 - protein, 85 aa, Gossypium hirsutum
  Clone ID: GOSHI-09MAY01-C65262_1.pep
KNHCIETTNRFNKKRTIKYIKSIKVIFRLKSRISFSFVRLGFVFIYSKEKKGAYLRFWFPRILTGSVAIGVWVLILRSLSVALDS

SEQ ID NO: 61751 - protein, 78 aa, Gossypium hirsutum
  Clone ID: GOSHI-09MAY01-C66492_1.pep
MGEMFWANEEDKAKVESVLGTEACDYLILLASKNMLSDFISPPPSYLGLQQKLCEVVKRSNWNYASYWQVSSLKSGGS

SEQ ID NO: 61752 - protein, 120 aa, Gossypium hirsutum
  Clone ID: GOSHI-09MAY01-C66052_1.pep
MATTTQSPSPPNSNDDKPQPSSEVVEQANGVQQDVRPEATKQNVPASVFVNSEPIREDQVSNAVKFLSHPKVRGSPVIYRRSFLERKGLTKEEIDEAFRRVPDPPLVHSQLVRIRLTVIT

SEQ ID NO: 61753 - protein, 267 aa, Gossypium hirsutum
  unsure (1)..(267): unsure at all Xaa locations
  Clone ID: GOSHI-09MAY01-C66322_1.pep
MHASKPLNLFCILTVMIRVCCDDLPYFWEAPAFRIGRECPQTTWAFLDKEIHNASIIHIAMTLDTAYPRGSVAGVFSVLHHATCPXENIVFHFVTTHRHGAKLTRAITSTVPDLNFDLYYFNTNLVKGKISSSIRRALDQPLNYARMYLADLLPAGVRRIIYFDSDLIVVDDVINLWSINLRSHVLGAPEYCHANFTNYFTSKFWSNPAFAASFKGRPRNPCYFNTGVMVIDLWKWREGKYTEKLENWMRIQKRYRIYELGSLPPFC

SEQ ID NO: 61754 - protein, 165 aa, Gossypium hirsutum
  Clone ID: GOSHI-09MAY01-C67422_1.pep
MEAVNMKKKDPKIVVAVDESDESMYALSWCLANLISQTSTSNLVLLYVKPSPPVYSSLDAARYMFSTDVIVALEKYGSDMVNTVMRRAEAICRKSTTKINVERIVGSGDAKDEICNIVGKIKADTLVMGCHDYGFFKRAILGSVSDHCAKHVKCPVVIVKHPKQI

SEQ ID NO: 61755 - protein, 56 aa, Gossypium hirsutum
  unsure (1)..(56): unsure at all Xaa locations
  Clone ID: LIB3825-028-Q6-N6-B10.pep
RTKHIDXRYHFVRDIIASGDIVVSXISTHENSADMKTKSFPITKFEHCLDLVGVHC

SEQ ID NO: 61756 - protein, 81 aa, Gossypium hirsutum
  Clone ID: LIB3196-020-P1-M1-F3.pep
DLQISTVFCDSQSAIFFTKIKCFMREQKHIDVRYHLVRDIIARGDIVLSKISTNENPTNMMTKSHFITKFEHCLDLVGVHC

SEQ ID NO: 61757 - protein, 119 aa, Gossypium hirsutum
  Clone ID: GOSHI-09MAY01-C60582_1.pep
MSRSVALAVLALLSLSGLEAIQRTPKIQVYSRHPPENGKPNFLNCYVSGFHPSDIEVDLLKNGEKMGKVEHSDLSFSKDWSFYLLYYTEFTPNEKDEYACRVNHVTLSGPRTVKWDRDM

SEQ ID NO: 61758 - protein, 131 aa, Gossypium hirsutum
  Clone ID: GOSHI-09MAY01-C60442_1.pep
MAVMAPRTLLLVLSGVLALTETWAGSHSLRYFHTAVSRPGRGQPRFISVGYVDDTQFVRFDSDAESPRKEPRAPWVEQEGPEYWDRETRIAKAHAQTDRGGLRILRRYYNQSEAGSHTLQWMYGCDLGPDG

SEQ ID NO: 61759 - protein, 96 aa, Gossypium hirsutum
  Clone ID: GOSHI-09MAY01-C60432_1.pep
MKIFLPVLLAALLGVERASSLMCFSCLNQKSNLYCLKPTICSDQDNYCVTVSTSAGIGNLVTFGHSLSKTCSPACPLPESINVGVASMGISCCQSF

SEQ ID NO: 61760 - protein, 128 aa, Gossypium hirsutum
  unsure (1)..(128): unsure at all Xaa locations
  Clone ID: GOSHI-09MAY01-C60672_1.pep
MAKLDDTGGDISWDIEVSELRRDNMGEEDVSDEEIRADELERRMWKDSVRLRRIKERERVAAQQAAELNQTSXLARRKKISRAQDGILKIMLMLMESLXARGFVYGIGPRYGLAGCGASIYPIILEYI

SEQ ID NO: 61761 - protein, 244 aa, Gossypium hirsutum
  unsure (1)..(244): unsure at all Xaa locations
  Clone ID: GOSHI-09MAY01-C60072_1.pep
PTRPPTRPASSIDHVGSEYSDATLAAGRYTSSLSNTYNSHKLRPADTFIRSSWGSPSKENHAICSSEWENEFPASVVRAVMKFGMKRFAVDEDGRXDTYNHSSTSGHEQRSLXPGLGYATSLARFAAIIGPVWKIATRKIESVLPSGLTFSPGWVGENRTVEQPQCSFSDKQRSPNSLSDNPPFAGIEDMVAVRGLNSQNDSTLEPSYQLQQSLVLHSSINGSIGGFGFGYFSQRSCNQCVITV

SEQ ID NO: 61762 - protein, 74 aa, Gossypium hirsutum
  Clone ID: GOSHI-09MAY01-C60252_1.pep
MRVPDADLFNPQSIMDSDFSPGGASASASVDPDFGFAFDDSNFFDRTLRIEIMPDLPETKFDGGGCCSIADWAR

SEQ ID NO: 61763 - protein, 163 aa, Gossypium hirsutum
  Clone ID: GOSHI-09MAY01-C61922_1.pep
EAYKKGLIDYETFKELCEQECEWEEITITGSDGSTRVVLVDRKTGSQYDIQDAIDKGLVDRKFFDQYRSGSLSLTQFADMISLKNGVGTSSSMGSGVSDDVFSSTRHDSVSKISTISSVRNLTIRSSSFSDTLEESSPIAAIFDTKNLEKISITEGIERGIVD

SEQ ID NO: 61764 - protein, 152 aa, Gossypium hirsutum
  Clone ID: GOSHI-09MAY01-C61592_1.pep
AGMSLLIFESSAAGYLETARLRKHFKEQGRDRDAWDCSRVPFCPGGKRQLYGYIAMKEDLDLFNQHSQGKSRLKFETRSYQEMVESQIKKINDDSQQLNLLKKKVAQEQQPSQVLAESLGRLSEKLRQTTEEYGIMRQQSRLQHEQNKEELG

SEQ ID NO: 61765 - protein, 205 aa, Gossypium hirsutum
  Clone ID: GOSHI-09MAY01-C61682_1.pep
DTEGSEIHMGDLGGAASVKAEDGEIWTFSVRAFGTPRPERTINVNYDGFAEDVKVGDELLVDGGMVRFEVIEKIGPDVKCRCTDPGLLLPRANLTFWRDGSLVRERNAMLPTISSKDWLDIDFGVAEGVDFIAISFVKSAEVINHLKSYIAARSRGSDIAVIAKIESIDSLKNLEEIIQASDGAMVARGDLGAQIPLEQVPSAQQ

SEQ ID NO: 61766 - protein, 99 aa, Gossypium hirsutum
  Clone ID: GOSHI-09MAY01-C61132_1.pep
SSFSNLRSLLLPAPQQQSDSSFVPPYAPTFQQPQPRCSSRQAPARSPYTHPYLGIRAVGILISFVDIKVEDGILGLKSTAFEARLQPESIKAPLCAFTH

SEQ ID NO: 61767 - protein, 53 aa, Gossypium hirsutum
  Clone ID: LIB3196-023-P1-M1-E7.pep
PIYKIVQSFEAQNSSKVETTSVTVGHSSFMRSNNNRTSASCLRTPQRFSSPSL

SEQ ID NO: 61768 - protein, 73 aa, Gossypium hirsutum
  Clone ID: GOSHI-09MAY01-C61082_1.pep
VEPDPSISDLRMILGVCKQLYEIAFLVSSHSIISPLLPGSLGSLSWLVLWPETWGSSYSTLLLFHTFMTGPAF

SEQ ID NO: 61769 - protein, 90 aa, Gossypium hirsutum
  Clone ID: GOSHI-09MAY01-C61232_1.pep
MPVKGGTKCIKYLLFGFNFIFWLAGIAVLAIGLWLRFDSQTKSIFEQETNNNNSSFYTGVYILIGAGALMMLVGFLGCCGAVQESQCMLG

SEQ ID NO: 61770 - protein, 130 aa, Gossypium hirsutum
  unsure (1)..(130): unsure at all Xaa locations
  Clone ID: GOSHI-09MAY01-C62752_1.pep
ERDCESDRRNREREREEEAKARERAXLDKLAEREREKELDKLAAINEQYLGSKKPKMRVIKPSEKFRFSFDWESTKDTSRDMNSLYQNPHEAQFLFGXRFRAGMDRRDQKKLATKNEKGMREEIRKKEGG

SEQ ID NO: 61771 - protein, 167 aa, Gossypium hirsutum
  Clone ID: GOSHI-09MAY01-C62692_1.pep
EAAGRDGRDGREEKKAVTPLREMTPERIFGKMGHLQRLLDRFLSCRPTGLAKNCRMILIALYPVVKESFQLYADICEVLAVLLDKFFDMEYPDCVKAFDAYASAAKQIDELFAFYNWCKDTGVARSSEYPEVQRITSKLLETLEEFVRDRAKRPKSPERKELPSSPK

SEQ ID NO: 61772 - protein, 120 aa, Gossypium hirsutum
  unsure (1)..(120): unsure at all Xaa locations
  Clone ID: GOSHI-09MAY01-C62682_1.pep
SWRGQSSDRGQSSTPGSRTGRNDYRNSSSRDGHPSGVPRPYGGRGRGRGSYNSSRGHNEGQDSSYNGTPKRDSGNXEGKMVWGNFPGAKVQNSPGREAFPGGWGGSAGTQSGSGSGSGWQ

SEQ ID NO: 61773 - protein, 112 aa, Gossypium hirsutum
  unsure (1)..(112): unsure at all Xaa locations
  Clone ID: LIB3829-023-Q6-K6-F6.pep
QWELRKRXIQGTQKRGRWCGGEFPRCPKVQNSFQVGXSFPLVCWVCASAXNPKVARGEWAGGWQXTKVIXDCXDWSPKVVILLSTWRIAVVLGVGGLVLNSQLKLLLCLLTE

SEQ ID NO: 61774 - protein, 340 aa, Gossypium hirsutum
  unsure (1)..(340): unsure at all Xaa locations
  Clone ID: GOSHI-09MAY01-C62092_1.pep
MPATKKSSDCSHIGYAFNKLMKQIGHPVEFELPDCFNKWKDTPYTVIRRKXKRRLEDDGIFCSCTPSSPGSSVCGRDCHCGMLLSSCSSGCSCGSSCLNKPFQHRPVKKLKLIKTEKCGEGIVADEDIKHGEFVIEYVGEVIDDKTCEERLWNMKHRGETNFYLCEINRDMVIDATYKGNKSRYINHSCCPNTEMQKWIIDGETRIGIFAMRDIKKGEHLTYDYQFVQFGADQDCHCGAAGCRQKLGVKPSKSKMSSDATLKLVACQVAVSSPTLKAVLFGKENGGLPVGTSQHDYNQRQLRFRCCIGEVIKISRPINDSYFGIIKRFDKYSKKHLVMFE

SEQ ID NO: 61775 - protein, 68 aa, Gossypium hirsutum
  Clone ID: GOSHI-09MAY01-C62252_1.pep
LFMDNQELLRMLGPGGRFSFIIALAHVNYYVKSQMQCQIQSLKRKVSSVPKRTAIAQQCKTSSRVYQH

SEQ ID NO: 61776 - protein, 128 aa, Gossypium hirsutum
  unsure (1)..(128): unsure at all Xaa locations
  Clone ID: GOSHI-09MAY01-C62222_1.pep
MFLQAGPVVNTRVPKDRVTGQHQGYGFVEFLSEEDADYAIKIMNMIKLYGKPIRVNKASAHNKNLDVGANIFIGNLDPEIDEKLLYDTFSAFGVILQTPKIMRDPDTGNSKGYAFIXFASFDASDAAI

SEQ ID NO: 61777 - protein, 246 aa, Gossypium hirsutum
  Clone ID: GOSHI-09MAY01-C63992_1.pep
MSLVYDRNNENSSSMRRSGFIHGMQCISVYDSPEEKRDDRLRLLSTEEEEEERDDDESGSCSSSSIGRNSDDSGGSPSDDDDSPEPEVQSQLKGPLDTMDALQEILPLRKGISKFYNGKSKSFTSLADAAAVSSVKDFAKPEDPYNRKRKNLLARSSSLDKKPNNLLGNIGTKISMASSPSNCLPPLHPQCKKSTTIIKPSSSSLTARPKPPCRSYSLSDLQFVAATTPNMAGLAVHSGNKGNKLR

SEQ ID NO: 61778 - protein, 86 aa, Gossypium hirsutum
  Clone ID: GOSHI-09MAY01-C63842_1.pep
MRADHPLKAVTLAHVRYQRGDQLGHFLDWVSLVPVFISLGGFVSHFYFRRELQGMFFGLGLLISHFINELIKKSGQQAKPEACALL

SEQ ID NO: 61779 - protein, 99 aa, Gossypium hirsutum
  Clone ID: GOSHI-09MAY01-C63582_1.pep
MSSGAVSASKAWIVAATIGAVEALKDQGICRWNYTIRSLHQHAKNNIRSSSFFSSSSSSSSSAAAAVSNKLREEKMRKAEQTMKKVMDLNCWGPNTVRF

SEQ ID NO: 61780 - protein, 141 aa, Gossypium hirsutum
  Clone ID: GOSHI-09MAY01-C63532_1.pep
KGISSHDFSELLMSSGIVLNDNVHWVTFHSGYDFGYLLKLLTCKNLPETQTGFFSLIKIYFPTLYDIKHLMKFCNSLHGGLNKLAELLEVERIGICHQAGSDSLLTCCTFMKLKENFFSGSAEKYAGVLYGLGVENGQNTL

SEQ ID NO: 61781 - protein, 132 aa, Gossypium hirsutum
  Clone ID: GOSHI-09MAY01-C63142_1.pep
LTPFPESRGVRPQKFPAAGAAPYVPIRQLRTPCCGIAPPVTIRTAVPVFSAPPRPAPAAVSPQPPTSAVPTHPPQPAQSVLPPHQLPATLPSQVLRAPPVRIAQAVTIRQVVPVFAAPPVREEDKQFRSSQK

SEQ ID NO: 61782 - protein, 168 aa, Gossypium hirsutum
  unsure (1)..(168): unsure at all Xaa locations
  Clone ID: GOSHI-09MAY01-C63072_1.pep
SVGCLRHKAEMVIFEAARAITELNGVTSRELTPAITVLQLFLSSSKPVLRFAAVRTLNKVAMSHPRAVTNCNIDMESLISDQNRSIATLAITTLLKTGNESSVDRLMKQITXLMSDIAXDEFKIVSGGRXIRSLCLKFPLKHRXLMNFLSNILREXEGGFXYKKAIVD

SEQ ID NO: 61783 - protein, 123 aa, Gossypium hirsutum
  unsure (1)..(123): unsure at all Xaa locations
  Clone ID: GOSHI-09MAY01-C63002_1.pep
PTRALILEKLAIADLVHFDFMDPPAPETLMRALQVLNYLGALADEGNLTETXGESMSEFPLDPQMSKMLVASSEFNWSNEILSVXACLSVPNCFVRPTEAQKAADEAKARFGHIDGDHLTLLN

SEQ ID NO: 61784 - protein, 149 aa, Gossypium hirsutum
  unsure (1)..(149): unsure at all Xaa locations
  Clone ID: GOSHI-09MAY01-C18982_1.pep
YQIPAKRAYNLLKHARXKWPACSPTTNLLNQSSCKLALRNLPEDVYKLKWDVVVVDGPIGDTPEAPGRMPTIYTAGMLARTGGIGKKTTTDVVVHDVHRTIEKWFSWEFFCEQNLVSARGKLWVFRIPVHQSNSTSFCSSETVVNGGSI

SEQ ID NO: 61785 - protein, 59 aa, Gossypium hirsutum
  Clone ID: LIB3083-020-Q1-L1-F3.pep
DVVVHDVHRTIEKWFSWEFFCEQNFVSAKGKLWVFRIPVHQSNSTSFCSSETVVNGGSI

SEQ ID NO: 61786 - protein, 178 aa, Gossypium hirsutum
  Clone ID: GOSHI-09MAY01-C18942_1.pep
DNLSEGCNKKGDCLDEVIGDIGKEAFLTKEFVPYLLFGLLLATVETISPTVTLATMYLLDNPSALQRLTEEHEEILKNREDANSGLVWEEYKSMTFTRYVINETLRLENVLPGMLRKVIADIHVDEYTIPKGWILLLMPTALHLNPNIYEDPLTFNPSRWKNIGSNGMGKNFMPFEGG

SEQ ID NO: 61787 - protein, 519 aa, Gossypium hirsutum
  Clone ID: GOSHI-09MAY01-C18922_1.pep
MALARLQILVALSLVPFFLFPVALGYRANDVRSWCRKTPNPQPCEYFLSHDPKNTPIKDEFQFFKISMHLALERAARAESNTHSLGPKCRNGREMAAWSDCVNLYELTILRLNKTVDSGTNLNKDDAQTWLSTALTNLETCQTGFMELGVPDYLLPMMSNNVSQLISNTLALNKAPYKEPTYKDGFPTWVKPGDRKLLQSSSPASTANIVVAQDGSGNYKTIKDAISAASKRSGSGRYVIYVKAGTYKENVEIGSKLKNIMMVGDGIGKTIITGSKSVGGGSTTFNSATVAVVGDGFIARGITFRNTAGPTNHQAVALRSGSDLSVFYKCSFEGYQDTLYVHSERQFYRECDIYGTVDWIFGNAAVVFQNCNIYARNPPNKTNTVTAQGRTDPNQNTGIIIHNSRVTAASDLKPVQSSVKTYLGRPWKQYSRTVFMKTYLDSLINPAGWMEWDGNFALKTLYYAEYMNTGPGSSTSNRVKWGGYHVLKSASEVSKFTVGNFLAGNSWLPSTGVPFTSGL

SEQ ID NO: 61788 - protein, 126 aa, Gossypium hirsutum
  Clone ID: LIB3083-078-Q1-L1-C4.pep
AISAASKRSGSGRYVIYVKAGTYKENVEIGSKLKNIMMVGDGIGKTIITGSKSVGGGSTTFNSATVAVVGDGFIARGITFYKCSFEGYQDTLYVHSERQFYRECDIYGTVDWIFGNAAVVFQNCNI

SEQ ID NO: 61789 - protein, 306 aa, Gossypium hirsutum
  unsure (1)..(306): unsure at all Xaa locations
  Clone ID: GOSHI-09MAY01-C18542_1.pep
MAQPTLIAAICVLTLSHVVQATTFTIVNKCDYVVCPGILSNAGVPTLATTGFTLQRGETKTITAPTSWGGRFWGRTHCSQDSDGKFSCLTGDCGSGKLECSGNGAAPPATLAEFTLDGAGGLDFFDVSLVDGYNIPMLVVPQGGKGQNCSSTGCVEDLNGLCPSELRXMSSNGRGGIACKSACEAFPQPQYCCSGPYATPDTCKPSSYSQVFKTACPRAYSYAYDDKTCTFTCANAAHYSITFCPSPNTSQKSSQEATTPGQNTETTTTAMPTSPLVDNTIMSGVGCAGSHGDMESSHDIESSPVN

SEQ ID NO: 61790 - protein, 129 aa, Gossypium hirsutum
  Clone ID: GOSHI-09MAY01-C18572_1.pep
METGFYSAWENGSLLEEDGDDELIPQPLTPTEPMEFLSRSWSLSTSEISKALAQKHNHFEFDHHNNDNKNQSSLFSESFDAPQIAGKVMNSINGRRTGTISKWFNHHKEIGTNTVKKKDKIRAENARLH

SEQ ID NO: 61791 - protein, 229 aa, Gossypium hirsutum
  unsure (1)..(229): unsure at all Xaa locations
  Clone ID: GOSHI-09MAY01-C18512_1.pep
MLPRWSRAVTHLSKLRSFNSIELGKDFSLIHRQSYAAVAPAPAPSADSFPPTRSSVNLDKMFWSKPCSLALAPDSPLRVEDPKYEGIRRIVLKMMLFYSKQSKSIRGANVIYRRVLSQVDKPAIYEVFSLEKTFRMTFSLLVLHMWLCLRRLKAEGKDGVELGQYVYEIYNHDVELRVSKAGVDLLLTKWMKELEKIFSGNIGAYDAXLLPEATHEELTEVIWRNIFSD

SEQ ID NO: 61792 - protein, 207 aa, Gossypium hirsutum
  Clone ID: GOSHI-09MAY01-C18442_1.pep
MEKGKSARQAVEISLKKLNLNADRNFKSSRLISSLHSSKLRIEKTKPPSLVSLCLGVIGRHLEEIIEDLSEIAVNFPADIKIPLAAIARRRKLLNDDVIISLADSSWEILDLSGSDVSDFGLAKVAEMCKSLRAVDISQCKKITANGVSELVRHCHSLETMRCGGCPSSESTARRCLGILKPKLNDVEGDSWEELDTMEIGHGAQSL

SEQ ID NO: 61793 - protein, 246 aa, Gossypium hirsutum
  unsure (1)..(246): unsure at all Xaa locations
  Clone ID: GOSHI-09MAY01-C18412_1.pep
MSTLSLPPVLTSPRDDAIQLYRAFKGLGCDTAAVVNILAHRDATQRSLIQHEYRAMYSEDLLKRLVSELRGKLETAVLLWMHDPAGRDAIVIRQALLPDLTNLDAATEVICSRTPSQIQLIKQNYQAKFGVFLEQDIERHTSGDHKKLLLAYVSTSRYEGLEVDREMAMKDAKALYKAGEKXLGTDEKTFIRIFSXRSQAQLAAISAAYHDIYGGSLXKAVKSEXSGKFERGLLTIXQCSENPAST

SEQ ID NO: 61794 - protein, 88 aa, Gossypium hirsutum
  Clone ID: LIB3272-042-P1-K1-B11.pep
MSTLSVPPVLTSPRDDAIQLYRAFKGLGCDTAAVVNIVSHRDVTQRTFIQHEYKTMDADDLLKPLKSELRGKLETAVLLWMLDPAQRG

SEQ ID NO: 61795 - protein, 205 aa, Gossypium hirsutum
  Clone ID: GOSHI-09MAY01-C18612_1.pep
HASGQPKSCLVCFRCLAVSFTKKMSEFSLACKKKNDEDHELSRLLVSDFILFCSSIFSHPLYFSYFIFFSPYFVKLLSFLSPLFFTTTLLVLTLFTLDQSDASICHLESKLLTSLLTAYQTLVETLRCEVEDESDGFGCLEPLEAYKIVFETSNPLQVCLDMESKEAPIDKGLDSKPAPETNQVKAVVKIFENFLQEKERVEIVV

SEQ ID NO: 61796 - protein, 189 aa, Gossypium hirsutum
  Clone ID: GOSHI-09MAY01-C18632_1.pep
MNPQQPSPSEPDLQVPSLASLRIQPSSPRFPFSTPIAGSQRRIAIAVDLSDESAYAVRWAVQNYLRPGDAVVLLHVRPTSVLYGADWGSIKLQITPNSTNNRENATAISGDHSDEESQQKLENDFDVFTTTKANTLAQPLVDAQIPFKIHLVKDHDMKERLCLEVERLGLSAVIMGSRRFRALKNCREG

SEQ ID NO: 61797 - protein, 174 aa, Gossypium hirsutum
  unsure (1)..(174): unsure at all Xaa locations
  Clone ID: GOSHI-09MAY01-C18162_1.pep
QLQSGENSEDKTLVEIVDENKQIELAKYINYVSAPQAGAIATFSGTTRDTFEGKTVVELRYEAYVPMAIRXLKSICSAARPSWDLHSIAVAHRVGLVPVGETSVFVAVSATHRADALDACKFLIDELXASVPIWKKEVYSDGEVWKENPEFLERRFELGKDGGCCRRKIETAAR

SEQ ID NO: 61798 - protein, 189 aa, Gossypium hirsutum
  Clone ID: GOSHI-09MAY01-C18112_1.pep
MAQVSVDKVAEVDQSFLLDKENGKLDKDPVHNETIPVIPRSEEPSKGDGNNASNDNFPTDAVDEWPAAKQVHSFYFVRYRLYEDPKIKAKIDEADKELQKWSKTRFKITDELKAKRSDRAELLAQVRALNVDFEQYKEILDEKKKEIEPLQQALGKLRTNSYTGRGSMCSSEEELNDVIHCLQYRIQHE

SEQ ID NO: 61799 - protein, 143 aa, Gossypium hirsutum
  Clone ID: GOSHI-09MAY01-C18122_1.pep
MEIERETNEGNSRRIQVRFITKLKAPYKVPTTAIAIPSDLSRLGLSSIVNKLLQAAVDSEWKTEPFDFLIDGELVRMSLEQFLLVKGISAEKILEIEYIRAVAPRKEEEPSPHDDWVSAGDGSSPRFILTGCYDSLGKIWKQA

SEQ ID NO: 61800 - protein, 146 aa, Gossypium hirsutum
  unsure (1)..(146): unsure at all Xaa locations
  Clone ID: GOSHI-09MAY01-C18092_1.pep
MAEILSALRSLMASHSPPLHALIVPSEDYHQSEYVSDRDKRREFVSGFTGSAGLALITKDEARLWTDGRYFLQAMQQLSDQWQLMRIGEDPSVDSWISDNLPREAAIGVDPWCVSVDTAQXWERAFAKNQQKLIQTSSNLVDEVWK

SEQ ID NO: 61801 - protein, 57 aa, Gossypium hirsutum
  unsure (1)..(57): unsure at all Xaa locations
  Clone ID: LIB3582-016-P1-K1-D2.pep
IHNLQILFLLIEIFYPKNGLGVAVMKXRQSKQPRVTXKIIHQGTRGRVEELIETGLR

SEQ ID NO: 61802 - protein, 135 aa, Gossypium hirsutum
  Clone ID: LIB3197-052-Q1-M1-E12.pep
RVPKIGESNHRPLAMLRPNASLGAALSLLVQAEVSSIPIVDENDALIDIYARSDITTLAKDKAYAQIRLDDMSIHQALQLEQYANSFNGQRCQMCLQSDTLHKVMERLANPGTRRLVIVEAGSKRVEGIISLSDV

SEQ ID NO: 61803 - protein, 148 aa, Gossypium hirsutum
  Clone ID: GOSHI-09MAY01-C18252_2.pep
THCKRKKPPPGNSANGYLYHHHTADQLQQYINLVHAEPTNTSPRETIIKQIKMRLKNVDFAVIDCKFDDEYLKLMFKTMVEEEDGIKTGSTVIVHNVHHKKDGSIFGQLLRKKRVEAVTLPIGEGTEMTRILGCRFKRRNRFLVTFHN

SEQ ID NO: 61804 - protein, 184 aa, Gossypium hirsutum
  unsure (1)..(184): unsure at all Xaa locations
  Clone ID: GOSHI-09MAY01-C18252_1.pep
MATCTTTPSSSLMITYAAASTVHAQALTPSVLSFKSNKPTFSINPLALKTSIDGKSGIKWANLYPQSDSKHHVMAAVAAEAEVAEATDENDGVAAEGGTATAIATAPPKPKKGKAALPLKRDRTRSKRFLEIQKLRETTXEYDLKTAISLLKEMSSTKFVQTAEAHFRLNIDPKYNDQQLIATV

SEQ ID NO: 61805 - protein, 198 aa, Gossypium hirsutum
  Clone ID: LIB3825-009-Q1-K6-E1.pep
DNFYNKKKKDGLLKNAMKAYLDTLHLVSSSFPTAWNPTAKSPVEEDDKQGLIEPNCMELISAMAAGKGAKHIVEITTQGITPLTIALAVAAKHTGGQLTCILPSHHHHHHHTADQLQQYINLVHAEPTNTSPRETIIKQIKMRLKNVDFAVIDCKFDDEYLKLMFKTMVEEEDGIKTGSTVIVHNVHHKKEGRYLVNF

SEQ ID NO: 61806 - protein, 71 aa, Gossypium hirsutum
  Clone ID: LIB3197-054-Q1-M1-F5.pep
RKKLSQDTAPMATCTTTPSSSLMITYAAASTVHAQALTCSVLSFKSNMPTFCISLLASQDFYRQLISHQLF

SEQ ID NO: 61807 - protein, 147 aa, Gossypium hirsutum
  Clone ID: GOSHI-09MAY01-C18212_1.pep
NYSPNEQIPNPKIHGPMAQNLDLGSVKQKPRVSLAPLPPTFSLQAPYDHQRLRTMPANSVPANKCKNNSKTETKKRSRFLYFFFFSLFCFRLQKPKKKNVMYTQRSRTKNQYKEKKENRFTKKQRNQILSKVPLLFLFFFLFCFDSK

SEQ ID NO: 61808 - protein, 344 aa, Gossypium hirsutum
  Clone ID: GOSHI-09MAY01-C19952_1.pep
RTLREWISSALGPSAVAKHMVAVSTNLTLVEKFGIDPNNAFAFWDWVGGRYSVCSAVGVLPLSLQYGFSIVEKFLKGASSIDEHFRSAPFEKNIPVLLGLLSVWNVSFLGYPARAILPYSQALEKFAPHIQQVSMESNGKGVSIDGVPLPYEAGEIDFGEPGTNGQHSFYQLIHQGRVIPCDFIGIVKSQQPVNLKGEVVSNHDELMSNFFAQPDALAYGKTAEQLLKENVSQHLIPHKTFSGNRPSLSLLLPSLNAYNIGQLLASYEHRVAVEGFVWGINSFDQWGVELGKSLATQVRKQLNGSRTKSEPVEGFNFSTTTLLTRYLQASSDIPAEPLTLLPRI

SEQ ID NO: 61809 - protein, 179 aa, Gossypium hirsutum
  unsure (1)..(179): unsure at all Xaa locations
  Clone ID: uC-gsronu33B029c12b1.pep
LSCCLSTFYSIFSCYSSFSFCLSSFFSYILLNIYFFFIFYSLLSLIFFLISYLISSYLFFLYLLSFIFLSFHHLISFFSTFFFFXLIFFSSLITSNYYLPFFFNTLPYSLSLILSFLIFFYILSIPHLFFYLILILLYHFHTFLIIHFIFHLFLLLYFILHSFXYLSYYILLILSFIIF

SEQ ID NO: 61810 - protein, 142 aa, Gossypium hirsutum
  unsure (1)..(142): unsure at all Xaa locations
  Clone ID: LIB3048-031-Q1-L1-G3.pep
WXXPPGPAGXIRHRGQXXECVXLCAXCSMXVFRDSGGKVCLERGAXSSIGMSHFXXSAFLFEXXNIXLYXXWXFAXXRXWNPFQISWGIXXCKKPYFXPYXXQAXLEXNLLSTPIQQXSXXGEVXCAKGXCQLEMVCPXFLK

SEQ ID NO: 61811 - protein, 75 aa, Gossypium hirsutum
  unsure (1)..(75): unsure at all Xaa locations
  Clone ID: LIB3149-001-P1-K1-E11.pep
SQQPMNRKHEQLSSLNKLTCNFIAHSDTIAXSKTAEQLLNENASQHLIPHKTFSGNRPSLSLLLPSLNAYNIGQL

SEQ ID NO: 61812 - protein, 58 aa, Gossypium hirsutum
  Clone ID: GOSHI-09MAY01-C19552_1.pep
EKDRKKEKENRKYERENKRRNKKERAFFYVNQNLTKLLDEKRIMQILRVLLLLLWWEF

SEQ ID NO: 61813 - protein, 96 aa, Gossypium hirsutum
  Clone ID: GOSHI-09MAY01-C19542_1.pep
RQGACAKEESPEILNKHLEFYIGGDDCHLIPVELMDSTAMRSQKIYKFTEEDEDVAGTGDVILDFDLQQPGTPVELGVENGCSSAEKVTPLSPHVS

SEQ ID NO: 61814 - protein, 155 aa, Gossypium hirsutum
  unsure (1)..(155): unsure at all Xaa locations
  Clone ID: GOSHI-09MAY01-C19492_1.pep
SDQITIPPAPTIRVKVKYGSIYHQININSQATFGELKKMLTGPTGLHHKDQKLIYKDKERDSNVFLDMVGVKDKSKMVLXEDPISQEKRLMEMRKNAKMEKASKSISEISFEVDRLAGQVSAYESIISKGGKSNEKDVVNLIELVMNQLLKLDGI

SEQ ID NO: 61815 - protein, 160 aa, Gossypium hirsutum
  unsure (1)..(160): unsure at all Xaa locations
  Clone ID: GOSHI-09MAY01-C19742_1.pep
MMIGGRSSSSSSTATAAGGTWVSTTSVSASGRRIQREMSELNADPPPHCSAAPKGDNLFHWVATIIGPPGTPYQGGIFFLDITFPSDYPFQPPKVVFKTRIYHCNVDAAGNLSLDILKDSWSPALTISKVLXAIRSIFSNPDPYSPLTSGVARLYLADKA

SEQ ID NO: 61816 - protein, 357 aa, Gossypium hirsutum
  unsure (1)..(357): unsure at all Xaa locations
  Clone ID: GOSHI-09MAY01-C19772_1.pep
MLQMTVFFLLQVTLGQTGLMVGRDISPFTQRERMKSDGIEEHLLGYNDAPSAADSSHIRAGLGSKLGGFDGSAKIGLPEEDSLLGVSSPVKLQNFMAGGAKSELSPSQETPIDVAEKLAALKAVFQDERPVVGGKEVPVFLPGPYDLREPDIPLHNQNVQPSSPQLNPQLNHGGPLLHSLDSHHSSIGSQVKFMGPEGLVYHDAPPNHQLSANMLRPLHHPSSGLTGFDSPIHHPMVQXMHYAWYTFPSPHLQRRIPGVAPPAPHSNNQMTGLQEMNPMHGFQLGHGQRQPQPNFAGLGMPPGHDVGSGSHHPEALQRLIEMELRSKSKQLSPFGAPSHGQSQWMYGHELDMGFQYR

SEQ ID NO: 61817 - protein, 185 aa, Gossypium hirsutum
  Clone ID: GOSHI-09MAY01-C19622_1.pep
MMVESLVQRLRLYKPTPVSDETEFYVKRAAVLVCIFQGNNGDLRVILTGRASSLSSHSGEVALPGGKQEETDIDDIQTALREAKEEIGLEPSLVNVVTVLEPVFTKHRMIVVPVVGILSDTKAFDPCPCADEVEAIFDAPLKMFLKDENRWAEEKDGREKSFTSLLRLRSGNGKFLVWGFTAGVL

SEQ ID NO: 61818 - protein, 298 aa, Gossypium hirsutum
  unsure (1)..(298): unsure at all Xaa locations
  Clone ID: GOSHI-09MAY01-C19112_1.pep
IDGNVEGMGERKSEGEVMDDLFSAYMNLDNIDALNSSEDKNNNNENHEDLDSRASGTKTNGGDSSDNEAESSANESGNSVTQGGVYSTEKREGNKRSAGGDIAPTSRXYRSVSMDSLGGKLNFGDESPKLPPSPGSRPGQLSPSNSIDGNSAAFSLELGNGEFSEAELKKIMANEKLAEIAMTDPKRAKRILANRQSAARSKERKMRYISELEHKVQTLQTEATTLSAQLTLLQRDSVGLSNQNNELKFRIQSMEQQAQLRDALNETLTAEVRRLKLATQELGGDSDPSKGMVSQQLP

SEQ ID NO: 61819 - protein, 52 aa, Gossypium hirsutum
  Clone ID: GOSHI-09MAY01-C19062_1.pep
KSYPLRKHSVIVIVSRFFALLFMNHFSKCSAQFGVCLSSKFASSRKTKMTSD

SEQ ID NO: 61820 - protein, 147 aa, Gossypium hirsutum
  Clone ID: GOSHI-09MAY01-C19012_1.pep
AEWAAHCHKKGILDQIMDPYLKGKIAPECFKKFAETAMKCVADQGIDRPSMGDVLWNLEFALQLQESAEESGKGIDAIDIEEGTYDITCKGKRGVSPGFDGTVTDSRSSGMSTSMSMSIGGRSLASEDSDGLTPSAVFSQIMNPKGR

SEQ ID NO: 61821 - protein, 166 aa, Gossypium hirsutum
  Clone ID: GOSHI-09MAY01-C19002_1.pep
MAFVAGMATTSSFAMVKLHSIPSVSAKGKTGLKLMSVKVRAGSFKTGGAGVLERPSFDQSQFDPSSQALEGGDIGRSWDKNGTGSGDSYKVLLVDDARHSEKLVAKGLPQVVPSVTPNDARKLFHVSREHGLAVVIVTVKEHAEFYSQMMVRGGLRSTIVPDSDVV

SEQ ID NO: 61822 - protein, 137 aa, Gossypium hirsutum
  unsure (1)..(137): unsure at all Xaa locations
  Clone ID: GOSHI-09MAY01-C19382_1.pep
MRDGYHQRTPSYGHSYPAAQPYTAGTYTAGAPSTPQPYGTAYAAGPYGSPAAAYSAXTSEKPPQDKRQAHGVGGAPADHSRSYAATGRYAGPFASLTPSALSPGTDPNVPPCFQMAXDQDASGLIDDQELKRALLPN

SEQ ID NO: 61823 - protein, 182 aa, Gossypium hirsutum
  Clone ID: GOSHI-09MAY01-C19312_1.pep
HLMGRELTDVHMDDKPNGVVKSNGVVNSNGALRVLEDTESKNYEVKECTEENSIVHNGTVNEDVLGVKSSNFGTDIPDEKNETIGDQKFTDHVKLSPVASKSGGAGDIRVHHNSKAGANGIASVQSTPSPIATKNFERSSPLTPSMSRKLFQPFRQEAFPMMRIIGLLHPLRLHLFLLLDPG

SEQ ID NO: 61824 - protein, 87 aa, Gossypium hirsutum
  Clone ID: LIB3543-021-Q1-K1-H4.pep
CSLMGRELTDVHMDDKPNGVVKSNGVVNSNGALRVLEDTESKNYEVKECTEENSIVHNGTVNEDVLGVKSSNFGTDIPDEKNQTIGD

SEQ ID NO: 61825 - protein, 251 aa, Gossypium hirsutum
  unsure (1)..(251): unsure at all Xaa locations
  Clone ID: GOSHI-09MAY01-C19322_1.pep
MMTEEDDLYPSSVKMRYPIFIFFKDVRHVFKLDELGSEIAQIALPAALALTADPIASLVDTAFIGQIGAVELAAVGVSIALFNQVSRIAIFPLVSVTTSFVAQEDTIGRVSSEAQGSDYVETGSCVDTESNELIPQKECIEGTYRPKTLGSSFDVVKIEPERRHIPSASSALVIGGILGLLQALFLISGAKPLLNFMGISSDSPXLNPAQQYLTLRSLGAXPARLLSLAXQGVFRGFKDTKTPLYATVAGD

SEQ ID NO: 61826 - protein, 104 aa, Gossypium hirsutum
  Clone ID: GOSHI-09MAY01-C19242_4.pep
FPRNEENRAAFEAVTKIEPEFVLFFNCPEEEMEKRLLSRNQGREDDNIETIRKRFKVFLDSSLPVIEYYKVKGKVREIEAAKPIGEVFEAVKVVFTPKAEKVVA

SEQ ID NO: 61827 - protein, 160 aa, Gossypium hirsutum
  Clone ID: GOSHI-09MAY01-C19242_3.pep
FCTNGNSYCCKQGYQCYLYLKKTPRVVFVLGGPGSGKGTQCPNIVEHFHYTHLTAGDLLRAEIKSGSENGTMIQNMIKEGKIVPSEVTIKLLEKAMLESGNDKFLIDGFPRYEENRAAFEAVTKIEPEFDLFFNCPEKEIEKPFLGYEPRENILFTSKPL

SEQ ID NO: 61828 - protein, 222 aa, Gossypium hirsutum
  Clone ID: GOSHI-09MAY01-C19242_1.pep
MGTVSVANKDINVSLAEKKPRVVFVLGGPGSGKGTQCANIVEHFHYTHLSAGDLLRAEIKSGSENGTMIQNMIKEGKIVPSEVTIKLLQKAMLESGNDKFLIDGFPRNEENRAAFEAVTKIEPEFVLFFNCPEEEMEKRLLSRNQGREDDNIETIRKRFKVFLESSLPVIEYYKGKGKVREIDAAKPVEEVFKEVKDIFNPKVPKVPKDENVEGRCMCCAIL

SEQ ID NO: 61829 - protein, 77 aa, Gossypium hirsutum
  unsure (1)..(77): unsure at all Xaa locations
  Clone ID: AI055571.1.pep
MFNTCYRLFHRTMIQNMIKEGKIVPSEVTIKLLEKAMLXSGNDKFXIXGFXRNEENRAIYTLVDXVGSVFIVFQRIY

SEQ ID NO: 61830 - protein, 49 aa, Gossypium hirsutum
  unsure (1)..(49): unsure at all Xaa locations
  Clone ID: LIB3148-007-Q1-K1-A6.pep
YLVYYXYYYYMICHDENSYIYILXMXFSDIHNKPPKSSILCDMIFLFXC

SEQ ID NO: 61831 - protein, 59 aa, Gossypium hirsutum
  Clone ID: GOSHI-09MAY01-C19212_1.pep
STCHKRVGQTGLGCRCGNLFCAAHRYSDKHECTFDYQAAARSAISKANPVDRAAKLDEI

SEQ ID NO: 61832 - protein, 70 aa, Gossypium hirsutum
  Clone ID: GOSHI-09MAY01-C19232_1.pep
VAKEPQNPEADEDDGYVVAYVHNENTGESRFLVMDAQSPNLDIVAAVKLPRRVPYGFHGLFVRESDLNKL

SEQ ID NO: 61833 - protein, 193 aa, Gossypium hirsutum
  Clone ID: GOSHI-09MAY01-C14972_1.pep
QTETRNFYKNIWLLNLPSKIKIAIWRIAWNYIPTWVNLHYRRLLSRATCSGCGRAAGATNHIFRECPGLSNRIVPICVGYFVVLFGQSGQFVKINFDVAFDENVRQSAVGIVARDSQGNALLSSTELHHQVASAFAAEAIACRTATRIGMNMQWPNIIIEGDALSIIKKCKTQANDRSRVGAYIRDIHQLLIK

SEQ ID NO: 61834 - protein, 51 aa, Gossypium hirsutum
  unsure (1)..(51): unsure at all Xaa locations
  Clone ID: LIB3189-048-P1-K1-H5.pep
LRLXHKSTNINTPTAYMVSILIRKPQDTSLKECDFVVFCLLYHXPEHVCLT

SEQ ID NO: 61835 - protein, 144 aa, Gossypium hirsutum
  Clone ID: GOSHI-09MAY01-C14852_3.pep
TNGRNRTLLTQDWEPVVIRKKAPTAAAKKDEKVVNAARRAGAEIESVKKSNAGTNRAASSWTSLNTRKLDEDTENLAHDRVPTELKKAIMHARVEKKLTHAQLAQLINEKPQIIQEYESGKAIPNQQIIGKLERALGAKLRGKK

SEQ ID NO: 61836 - protein, 142 aa, Gossypium hirsutum
  Clone ID: GOSHI-09MAY01-C14852_1.pep
MAGIGPLTQDWEPVVIRKKAPTAAAKKDEKVVNAARRAGAEIESIKKSNAGTNRAASSSTSLNTRKLDEDTENLAHDRVPTELKKAIMQARMDKKLTQAQLAQMINEKPQIIQEYESGKAIPNQQIIGKLERALGAKLRGKK

SEQ ID NO: 61837 - protein, 142 aa, Gossypium hirsutum
  Clone ID: LIB3543-063-Q6-K6-H7.pep
MAGIGPLTQDWEPVVIRKKAPTAAAKKDEKVVNAARRAGGEIESIKKSNAGTNRAASSSTSLNTRKLDEDTENLAHDRVPTELKKAIMQARMDKKLTQAQLAQMINEKPQIIQEYESGKAIPNQQIIGKLERALGAKLRGKK

SEQ ID NO: 61838 - protein, 232 aa, Gossypium hirsutum
  Clone ID: GOSHI-09MAY01-C14832_1.pep
MGSISFVNSQTLKLFPSFNSFLHSKQPCIVSIYHYSHKVALAPSLSLPKPKDGSFRLAAELITNSVPSRNGNYTVGDFMTRKEDLHVVKTTTSVDEALEALVEKRVTGFPVIDDDWNLVGVVSDYDLLALDSISGSSQNDTTLFPNVDSSWKTFNEIQKLMNKNNGNVVGDLMTPSPLVVRETTNLEDAARLLLETKYRRLPVVDIDGKLVGIITRGNVVRAALQIKHSIES

SEQ ID NO: 61839 - protein, 95 aa, Gossypium hirsutum
  Clone ID: GOSHI-09MAY01-C14822_1.pep
SSESYQGGVEMIRRDLLTGHWKPYLERAITLKPCYEGGINGGEVAAYILQETAIGKNYASHKLSGVRRLPDAISLGYQLQRVLGGDETIPEWYTH

SEQ ID NO: 61840 - protein, 71 aa, Gossypium hirsutum
  Clone ID: GOSHI-09MAY01-C14422_1.pep
CKTNSHLNHNWNCHHHFTSTTASTGHPVLLPIRLFFDELDAICHSFAMVSVSWLVISSRGATGSRGCVRMC

SEQ ID NO: 61841 - protein, 108 aa, Gossypium hirsutum
  Clone ID: GOSHI-09MAY01-C14762_1.pep
ATHGVTSVTLAFSWKGNFFYVPFLRFNAFSMACKWKVFDVEVCIVMGSFDVWFHDVVLLRTWSDSVSKQILFVDTPAYYGQCLGFACMSEAQIHFGLRSTRLRITTVF

SEQ ID NO: 61842 - protein, 333 aa, Gossypium hirsutum
  unsure (1)..(333): unsure at all Xaa locations
  Clone ID: GOSHI-09MAY01-C14712_1.pep
PRVGSRWGERRGKFRNIEQLKXHLFHKHRLVMCSLCLEGRKVFICEQKLYTRAQLHQHINTGDSEVDGTESERGGFMGHPMCEFCKTPFYGDNELYSHMSTEHYTCHICQRQHPGQYEYYKNYDDLEIHFRRDHYLCEDEACLAKKFIVFQSEAELKRHNTIEHGGRMSRAQRSAALQIPTSFRYRRSNEENRHGRGRTFRREASDNDYQLSMAIEASLGMASDPPASSTAQAVSNHRDTNDIDPLVQPFESLSTTDAESSSRYLQALGTGSRGGPLQESSFPPLPVAPSTCQQKSPHSSGLPNNTMAAHLRRQKNGNKNALSSAQAWPATSH

SEQ ID NO: 61843 - protein, 502 aa, Gossypium hirsutum
  Clone ID: GOSHI-09MAY01-C14722_1.pep
MAIPIPSRQLFINGDWAEPLLKKRIPIINPTTEEIIGDIPAATAEDVDVAVQAARSALTRNKGKDWAFASGAVRAKYLRAIAAKIKERKPVLAKLETVDCGKPLSESEADMDDVIGCFEYYADLAEGLDAKQKAPISLPMKTFKSYVIREPIGVVALIVPWNYPLLMATWKVAPALAAGCAAILKPSELASVTCLELGEVCREVDLPAGVLNILPGLGPEAGASLASHPHVDKISFTGSTVTAVKIMTAAAQRVKPVTLELGGKGPIVVFEDVDIDKAVEWTIFGCFYTNGQICSATSRLIVHESIAAEFLDRLVKWSENIKISDPLEEGCKLGPIVSRGQYEKVMNFISNAKSEGATILYGGNRPKHLKKGFFVEPTIITDVTTSMQIWREEVFGPVLCVKTFTTKEEAIELANDTHYGLGGAVVSKDRERCDRVSKLLQNGAVWVNCSQPCFCQAPFGGTKWSGFGRELGEWGLESYLSVKQVTEYVSDEQWGWYQPPKQ

SEQ ID NO: 61844 - protein, 141 aa, Gossypium hirsutum
  Clone ID: GOSHI-09MAY01-C14652_1.pep
GPNDFQIGLETLALFLLKPQRILEASGASNVMSNKRPFVSRNSRTFGERLLASCQGSTSATTFSLTSATGCRATTGAQTTPRSSPSSAHHASVLSRHRDPRAHLQTKERNRDRQRTNMERKNTIYRLNKYGKKSRISFQNM

SEQ ID NO: 61845 - protein, 164 aa, Gossypium hirsutum
  unsure (1)..(164): unsure at all Xaa locations
  Clone ID: GOSHI-09MAY01-C14612_1.pep
GNLKMYFDATIEIVTSKDVRVCGALGPCISLRKTNNLVSVNEIGDGGTYIWKLRTLTSKTCIAFFFQGNYEHKPQPGAAFLVQVITRYRDGNMGIRRRVTTAARRWVAKQSPDISXGFDQEAATSVMARLAIHRAETCQARDVIRWLDDNLICCASKFGDYIQE

SEQ ID NO: 61846 - protein, 510 aa, Gossypium hirsutum
  Clone ID: GOSHI-09MAY01-C14622_1.pep
MPSFDTILLRDLVAAACLFFITRYFIRRLLSNPKRTLPPGPKGWPVVGALPLLGSMPHVELAKLAKKYGPVMYLKMGTCNMVVASTPDTARAFLKTLDLNFSNRPSNAGATHIAYNSQDMVFAEYGPRWKLLRKLSNLHMLGGKALEDWSQVRAVELGHMLRAMWESSRKGEPVVVPEMLTYAMANMIGQVILSRRVFVTKGSESNEFKDMVVELMTSAGLFNIGDFIPSIAWMDLQGIEGEMKKLHKRWDVLLTKMMKEHEETAYERKGKPDFLDIIMENRENSAGERLSLTNVKALLLNLFTAGTDTSSSIIEWALAEILKNPKILNKAHEEMDKVIGRNRRLEESDIPKLPYLQAICKETFRKHPSTPLNLPRVSTQPCEINGYYIPKNTRLSVNIWAIGRDPDVWGNPLDFTPERFLSGRFAKIDPRGNDFELIPFGAGRRICAGTRMGIVLVEYILGTLLHSFDWMLPPGTGELNMDESFGLALQKTVPLSAMVRPRLAPTAYVS

SEQ ID NO: 61847 - protein, 168 aa, Gossypium hirsutum
  unsure (1)..(168): unsure at all Xaa locations
  Clone ID: LIB3585-033-P1-K1-H5.pep
AHASVHASVYERRGKPVFLDLIMDTRXNFAGERLSLTNVKALLLNLFTAGTDTSSSIIEWALAEILKNLKILNKAHEEMDKVIGRNRRLEESDIPKLPYLQAICKETFRKHPSTPLNLPRVSTQACEINGYYIPKNTRLSVNIWAIGRDPDVWGNPLDFTPERFLSGR

SEQ ID NO: 61848 - protein, 135 aa, Gossypium hirsutum
  Clone ID: LIB3829-032-Q6-K6-A10.pep
ILHWQNLFTAGTDTSSSIIEWALAEILKNPKILNKAHEEMDKVIGRNRRLEESDIPKLPYLQAICKETFRKHPSTPLNLPRVSTQACEINGYYIPKNTRLSVNIWAIGRDPDVWGNPLDFTPERFLSGRFAKIDP

SEQ ID NO: 61849 - protein, 80 aa, Gossypium hirsutum
  unsure (1)..(80): unsure at all Xaa locations
  Clone ID: uC-gsflnu33B099c04b1.pep
YLNFFNRPSNAXCHTNILLTSKTYYLAEYGPRWKTAFXNLQNLPILGGKALXEWLQVRAVELGHMLLAMWESSRKGEPVV

SEQ ID NO: 61850 - protein, 57 aa, Gossypium hirsutum
  Clone ID: LIB3145-022-Q1-K1-H2.pep
ILILVWRTQPCEINGYYIPKNTRLSVNIWAIGRDPDVWGNPLDFTPERFLSGRFAKI

SEQ ID NO: 61851 - protein, 209 aa, Gossypium hirsutum
  Clone ID: GOSHI-09MAY01-C14052_1.pep
YNQRLVLISGLLSNPTIALDSISICMNYLNWDMQFMLGLSAAASVRVSNELGAGHPRVAKFSVFVVNGTSILISIVFSAIVLIFRVGLSKAFTSDSEVIEAVSDLTPLLAISVFLNGIQPILSGVAIGSGWQAIVAYVNLATYYIIGLPIGCVLGFKTSLGVPGIWWGMIIGVLLQTATLVVLTATTNWNKEVEKAADRLKKSANEEQT

SEQ ID NO: 61852 - protein, 288 aa, Gossypium hirsutum
  unsure (1)..(288): unsure at all Xaa locations
  Clone ID: GOSHI-09MAY01-C14012_1.pep
MMLEETRQLNPTVLVPPWPYLGDDLAAEDNFSDNGNPFYLQEALAALQCYLPSDEPGFESDSEILGLYNPGSPVDAYSCDHFRMFEFKVRRCGRGRSHDWTECPYAHPGEKARRRDPRKFHYSGMACSDFKKGNCRKGDSCEFAHGVFECWLHPARYRTLPCKDGSGCRRRVCFFAHTPDQLRVVNFADSFDSSPPCTKAMPFSGSPRAESSPTVSPMCQFPTMNTMVASLRHLQLGKVKSLPSSGXGSPRGSLIRPILSSLPRTPTRNLTRPGIGYLDFRGGEKPVM

SEQ ID NO: 61853 - protein, 122 aa, Gossypium hirsutum
  Clone ID: GOSHI-09MAY01-C14002_7.pep
MAYAAMKPTKPGLEEPQEQIHKIRITLSSKNVKNLEKVCADLVRGAKDKRLRVKGPVRMPTKVLHITTRKSPCGEGTNTWDRFELRVHKRVIDLFSSPDVVKQITSITIEPGVEVEVTIADS

SEQ ID NO: 61854 - protein, 43 aa, Gossypium hirsutum
  Clone ID: GOSHI-09MAY01-C14002_6.pep
KGPPLFFFFFFFFFFFFFFFFFFFFFFFFFFFFFFFFFFFFFF

SEQ ID NO: 61855 - protein, 122 aa, Gossypium hirsutum
  Clone ID: GOSHI-09MAY01-C14002_5.pep
MAYAAMKPTKPGLEESQEQIHKIRITLSSKNVKNLEKVCADLVRGAKDKRLRVKGPVRMPTKVLHITTRKSPCGEGTNTWDRFELRVHKRVIDLFSSPDVVKQITSITIEPRVEVEVTIADS

SEQ ID NO: 61856 - protein, 122 aa, Gossypium hirsutum; identical to SEQ ID NO: 61853
  Clone ID: GOSHI-09MAY01-C14002_4.pep

SEQ ID NO: 61857 - protein, 122 aa, Gossypium hirsutum
  Clone ID: GOSHI-09MAY01-C14002_3.pep
MAYAAMKPTKPGLEESQEQIHKIRITLSSKNVKNLEKVCADLVRGAKDKRLRVKGPVRMPTKVLHITTRKSPCGEGTNTWDRFELRVHKRVIDLFSSPDVVKQITSITIEPGVEVEVTIADS

SEQ ID NO: 61858 - protein, 177 aa, Gossypium hirsutum
  unsure (1)..(177): unsure at all Xaa locations
  Clone ID: GOSHI-09MAY01-C14002_2.pep
KKMKNKKKKKIMKKKKKVRRREKKNEKRRKRKRQKVRKKKKKKXKKKXKKYKKRRIERRKRKNRKISKEKKKKXRKRKIKKKSKEXKRKKKINRKXKKRRRKKKKKKSEKREKKKKKKKKKKKKDSRRKKKENIKKKKKQXIKKKIKDYKRNKRNRTEREQGKERDYKQTDTISSET

SEQ ID NO: 61859 - protein, 227 aa, Gossypium hirsutum
  Clone ID: GOSHI-09MAY01-C14002_1.pep
MSRISTRLVPPPVRELITPQKSSSMAARVLVLASILIFSCFAETCYGAISFSSLQRTLVVTASHRQGLLKAGEDKITVRWGLNQSFPAGTDSSYKTIKVQLCYAPISQVDRAWRKTEDHLNKDKTCQFKIVKKPYTNVNETLEWTIERDVPTATFFIRAYALDSDDHEVAYGQNTDAEKKTNLFEIQAITGRHVSLDIASVCFSAFSVVSLMGFFFMEKRKARKSQQ

SEQ ID NO: 61860 - protein, 86 aa, Gossypium hirsutum
  Clone ID: uC-gsronu33B032b04b1.pep
VAGYRAFVGCDFPMLVLKLRFYFVLWLWIVSPFCYLKRSCLDDSAGPALLCTHQPKSTVHGGKPRTILTKTRHASSRFVKGALHLT

SEQ ID NO: 61861 - protein, 122 aa, Gossypium hirsutum
  Clone ID: LIB3582-037-P1-K1-A5.pep
MAYATMKPTKPGLEESQEQIHKIRITLSSKNVKNLEKVCADLVRGAKDKRLRVKGPVRMPTKVLHITTRKSPCGEGTNTWDRFELRVHKRVIDLFSSPDVVKQITSITIEPGVEVEVTIADS

SEQ ID NO: 61862 - protein, 77 aa, Gossypium hirsutum
  Clone ID: LIB3120-018-Q1-K1-B4.pep
MAYAAMKPTKPGLEESQEQVHKIRITLSSKNVKNLEKVCADLVRGAKDKRLRVKGPVRMPTKVLHITTRKSPCGEGI

SEQ ID NO: 61863 - protein, 64 aa, Gossypium hirsutum
  Clone ID: uC-gsronu33B129h09b1.pep
SQIVFNNKKKTLISNRQFSTLIYNKDMIIDNPNSFIHPIANKTQPFNLSHIGLKTQKKVNKTCK

SEQ ID NO: 61864 - protein, 67 aa, Gossypium hirsutum
  Clone ID: LIB3146-053-Q1-K1-F9.pep
MAYAAMKPTKPGLEEPQEQIHKIRITLSSKNVKNLEKVCADLVRGAKDKRLRVKGPVRMPTKVLHIT

SEQ ID NO: 61865 - protein, 92 aa, Gossypium hirsutum
  Clone ID: GOSHI-09MAY01-C14372_2.pep
REFREKRAVDRELDRIWSLIGSIFCGLVVDLDLDSTRFRACDRRIKRSNFVGEGAYDCQHCTEFVPFYEKNEILNEMEEKERDIMEKEGRKT

SEQ ID NO: 61866 - protein, 135 aa, Gossypium hirsutum
  Clone ID: LIB3582-011-P1-K1-E3.pep
STLSSDAFVHHLMPYCYCHVRGTTHVFHETEHILCSVDNRMPLDPTEFDLEMRRSHARNRVESKSQRAYQPTKEAPRLAPNPTQIPTYRSILAKLVENQAGPLFNRGYNRHISSLACFDGHTLFLLQRFRSSTGS

SEQ ID NO: 61867 - protein, 169 aa, Gossypium hirsutum
  unsure (1)..(169): unsure at all Xaa locations
  Clone ID: GOSHI-09MAY01-C14282_1.pep
SIPAEKDAAPNSNSSKSSNFPFYSPSPLPPLFKTSPAVPSVNATPLRFFKRPFPPPSPAKHIKSLLARRHGSIKPNEASIPEGNECEVGLNKSFGFSKHFTSHYELGEEVGRGHFGYTCSPKAKKGSLKGNDPPAKVIPXSKMTTAFALEDVRLEVKILRALTGHKNLV

SEQ ID NO: 61868 - protein, 179 aa, Gossypium hirsutum
  unsure (1)..(179): unsure at all Xaa locations
  Clone ID: GOSHI-09MAY01-C14202_1.pep
MSRRSSGTWLRLCLVIFAVVSALAVCGPALYWRFKKTLRFVDSKSSCPPCICDCPPPLSLLKIAPGLANLSVTDCGSNDPDLKKEMEKQFVDLLTEELKLQEAVAEEHTHHMNITFGEAKRVASQYQREAEKCIAAIETCEGARERAEALLIRRGKXTTIWNKSSTNGWKGKLLTVNDI

SEQ ID NO: 61869 - protein, 98 aa, Gossypium hirsutum
  Clone ID: GOSHI-09MAY01-C15972_1.pep
HCYRKRWLPVKGYNCGVAIFPTLFNLLFLRCPFHLKIIALLVWDLLRCETYGTVNLPHSCHSCFSRFHLDISLFLFRFVSVFQRQFYIFFSPSRVMII

SEQ ID NO: 61870 - protein, 487 aa, Gossypium hirsutum
  unsure (1)..(487): unsure at all Xaa locations
  Clone ID: GOSHI-09MAY01-C15872_1.pep
MSRTSSGTKPTMVLPYQTPSLTEHYSIGKKLGQGQFGTTYLCTHKPTGQHFACKSIPKRKLICQEDYDDVWREIQIMHHLSEHPHVVRIRGTYEDQLSVHLVMELCEGGELFDRIVQKGHYSEREAAKLIKTIVGVVEACHSLGVMHRDLKPENFLFDTVEEDATLKATDFGLSVFYKPGESFSDVVGSPYYVAPEVLRKHYGPEADVWSAGVILYILLSGVPPFWAETEMGIFRQILQEKIDFDSEPWPAISDXSAKDLIRYMLDRHPKRRLTAHQVLCHPWIVDDTIAPDKPLDSAVLSRLKQFSAMNKLKKMALRVIAERLSEEEIGGLKELFKMIDTDNSGTITYEELKDGLKRVGSELMESEIKDLMDAADIDNNGTIDYGEFLAATVHLNKLEREENLVGAFSFFDKDGSGYITIDELQPXPCKELGLSDVHLDEMIKEIDQDNDGQIDYGEFAAMMKKGNGSIGRRTMRRTINLGDAFGV

SEQ ID NO: 61871 - protein, 72 aa, Gossypium hirsutum
  Clone ID: GOSHI-09MAY01-C15802_1.pep
NFSVKRSLRSLSMSILSKLVPLKNLEQFDNFKIEQLRTINDNINVFLSILHKFDCYNNNFSFHNLHILSMWS

SEQ ID NO: 61872 - protein, 98 aa, Gossypium hirsutum
  Clone ID: GOSHI-09MAY01-C15502_2.pep
FQIKMIIIKKQVCKEELSGKFSVSGAYKSLQEANRVPNDYLIQSELKEIYKKLWSLQLPSKITFTVCRISWDFIPNFANLRYRRVISNDSTPPMLLGG

SEQ ID NO: 61873 - protein, 170 aa, Gossypium hirsutum
  Clone ID: GOSHI-09MAY01-C15502_1.pep
MMTGFRGSINFQEEVARKILQIPLAEFEHEDFQVWKGDLSGEFSVRSAYKLLQDASRDRNDYLIQTEVKEFYKKLWSLQMPSKITFTVWRISWDFIPNFANLRYRRVISNDRCPRCCSAVEGSIHVVRGCPGFSREVRVVSVCSSVTPYGCYGTPEPSWYTREKTQQEGS

SEQ ID NO: 61874 - protein, 108 aa, Gossypium hirsutum
  Clone ID: GOSHI-09MAY01-C15462_1.pep
MAKEYSGSPKHHHRLEAQRNPLTWILGVSFLCILFYVLGAWQRSSTPTTTQFSAYNRGGCDSHVTTSDNGNAAVGHPSSTNLDFASHHQVVLNSSKTVSQFPSCDMSF

SEQ ID NO: 61875 - protein, 50 aa, Gossypium hirsutum
  unsure (1)..(50): unsure at all Xaa locations
  Clone ID: GOSHI-09MAY01-C15762_1.pep
MEKKKVALPLVCHGHSRPVVDLFYSPITPDGYFLISAKXDSTPMVRNGET

SEQ ID NO: 61876 - protein, 70 aa, Gossypium hirsutum
  Clone ID: GOSHI-09MAY01-C15702_1.pep
MGFLVTTLIFAVIGIIASLCTRICCNRGPSANLLHLTLVITATVCCWMMWAIVYLAQMKPLIVPILSEGE

SEQ ID NO: 61877 - protein, 65 aa, Gossypium hirsutum
  Clone ID: LIB3149-040-Q1-K1-F2.pep
MGFLVTTLIFAAIGIIASLCTRICCNRGPSAYLLHLTLVITATVCCWMMSSIVYPAQMKPFFVPI

SEQ ID NO: 61878 - protein, 251 aa, Gossypium hirsutum
  Clone ID: GOSHI-09MAY01-C15692_1.pep
MSDNFSPTLRIGDLSDFIAPSQACVVSLKGLKATPKKPEPHVLAGKSQQTEPVKISLKDCLACSGCITSAETVMLEKQSLNEFLSNINKGKAVIVSLSPQSRASLAAHCGIPPLMVFKKLTTFLKSLGVKAVLDTCCIRDLTLIETCLEFIARYKQGQATDDEKSKSSLPMLSSSCPGWICYAEKQLGSYILPYISSVKSPQQSMGAAIKHHICQTMGFRPEEIYHVTVMPCYDKKLEAAREDFVFQAESN

SEQ ID NO: 61879 - protein, 106 aa, Gossypium hirsutum
  unsure (1)..(106): unsure at all Xaa locations
  Clone ID: uC-gsronu33B021h06b1.pep
MSEKFSPTLRIGDLSDFIAPSQACVDSLKGLKATPKKPEPQALAGKSQQTEPVKISLKDCLACSGCITSAETVMLEKQSLDESLSNINKGKAXIDSLAPAARGLPW

SEQ ID NO: 61880 - protein, 309 aa, Gossypium hirsutum
  Clone ID: GOSHI-09MAY01-C15622_1.pep
MERDFLGLRSKNAAITIKVEPKNHILVSAVWLRGSGMQLSFTNKVSTVPQFLSFDGARDDKPRKATHDTLLSSGFMTIPTTDSNKKPHPGLTQKQGGNHYAATTYGLQQLDVHQSRLSHEARIFPSSSQLNHTITVSMNTPLLQPHLASPGQNIIGHTINPQPFTGVPIMAAPVSVVPPSSPIIGTTDLRNAAKSSKAPAQLTIFYAGSVCVYDDVSPDKAQAIMLLAGNGPSTTQSKTAPVTQPQTHIPRPCTLSPFSGLPNHLSVTSHVSLQPVAGSSGTNELTAATRIGALASTNNQPDPPKLVNP

SEQ ID NO: 61881 - protein, 119 aa, Gossypium hirsutum
  unsure (1)..(119): unsure at all Xaa locations
  Clone ID: GOSHI-09MAY01-C15182_1.pep
MASEDVKRSESAVSTIVNLAEEAKIASEGVKAPSHALLSICKSLVAGGVAGGVSRSAVAPLERLKILLQVQNPHGIKYNGTIQGLKYIWKTEGFRGMFKGNGTNXARIMPNSAVKFFSY

SEQ ID NO: 61882 - protein, 140 aa, Gossypium hirsutum
  Clone ID: GOSHI-09MAY01-C15152_3.pep
MGIDLVAGGKSKKTKRTAPKSDDIYLKLLVKLYRFLVRRTGSKFNAVILKRLFMSKTNKPPLSLSRLIQFMKGKEDKIAVVVGAVTDDIRVYEVPALKVTALRFTETARARIEKAGGECLTFDQLALRAPLWTEHGLLRG

SEQ ID NO: 61883 - protein, 191 aa, Gossypium hirsutum
  unsure (1)..(191): unsure at all Xaa locations
  Clone ID: GOSHI-09MAY01-C15152_2.pep
MGIDLVAGGKSKKTKRTAPKSDDIYLKLLVKLYRFLVRRTGSKFNAVILKRLFMSKVNKPPLSLSRLIQYMKGKEDKIAVVVGTVTDDIRVYEVPALKVTALRFTETARARIEXADGECLTFDQLALPAPLGQNTVLLRGXPKNAREAXVKHFGPAPGCXHTAHTKPYVPSNGKEFQRATRRESAPAGFRV

SEQ ID NO: 61884 - protein, 187 aa, Gossypium hirsutum
  Clone ID: GOSHI-09MAY01-C15152_1.pep
MGIDLVAGGKSKKTKRTAPKSDDIYLKLLVKLYRFLVRRTGSKFNAVILKRLFMSKVNKPPLSLSRLIEFMKGKEDKIAVVVGTVTDDIRVYEVPALKVTALRFTETARARIDKAGGECLTFDQLALRAPLGQNTVLLRGPKNAREAVKHFGPAPGVPHSHTKPYVRSKARKFERARGRRNSKGFRV

SEQ ID NO: 61885 - protein, 152 aa, Gossypium hirsutum
  Clone ID: GOSHI-09MAY01-C15092_1.pep
GMYGGGLGGGFGGPMGGYGMGMGPYGEQDPNNPFGAPPSPPGFWMSFLRVMQGVVNCFGRISILIDQNTQAFHMFMTALLQLFDRTGLLYGELARFVLRLLGIKSKPRKINQPGPGGLPGPHNPHGNQNYIEGPKAAPSGVWDNVWGENGSA

SEQ ID NO: 61886 - protein, 171 aa, Gossypium hirsutum
  Clone ID: GOSHI-09MAY01-C15082_1.pep
MVAHKFTVDLNKPLVFQVGHLGESYQEWVHQPIVSKEGPRFFDSDFWEFLTRTAWWAIPTIWLPVVCWCISMSVRMGHTLSQTALMVAFGIFLWTFVEYVLHRFLFHIETKSYWGNTIHYLLHGCHHKHPMDGLRLVFPPAAAAILCIPFWNLIKFCATPSTTPALFGRGY

SEQ ID NO: 61887 - protein, 158 aa, Gossypium hirsutum
  Clone ID: GOSHI-09MAY01-C15352_1.pep
MGPTVGQMYPPGAPHFGQQLFYGQGPPAMISPQPGFGYQQQLVPGMMPNFFMPMLQPGQQNQRQGGRRSGGGPMQQTHQPLPFMQPQMIPKGHGYRYPPGRNMPDVPGRVLPVPYNVGGMPFRDAAFSQPMATGALASAFANATTVQQRTSLCRYSVP

SEQ ID NO: 61888 - protein, 199 aa, Gossypium hirsutum
  Clone ID: GOSHI-09MAY01-C15362_1.pep
MSALSEGLTQIVIPLASLVGIGFALLQWFLVSRVKLLSQDSSNGYKQKLIESDEEEEGINNLEISIKCTEIQHAISVGATSFLFTEYKYLGIFMCVFGAIIFLFLGSVEGFSTKSEPCTYSQGNTCKPALANAIFSTIAFLLGALTSVLSGYLGMKIATYANARTTLEARKGVGKAFITAFRSGAVMGFLLAANGLLVL

SEQ ID NO: 61889 - protein, 92 aa, Gossypium hirsutum
  unsure (1)..(92): unsure at all Xaa locations
  Clone ID: LIB3189-039-P1-K1-E12.pep
GSYPNCDPFNFLGGHWSRLALVMVVSILRAVTSGIQNPDWVKHPLMLADAVDKLTVLDFQLKKDAXIVTVEKATSLSTASIVDSSFINKLIF

SEQ ID NO: 61890 - protein, 308 aa, Gossypium hirsutum
  unsure (1)..(308): unsure at all Xaa locations
  Clone ID: GOSHI-09MAY01-C15282_1.pep
MKNIKVPEFSFYFCSVLLILLVNNGCCDWGSSIHVGHEISLAVPLEYSDGFIGRAFLMDDGNGQVEPNFRVALSAEANKGGYSCSLEVFLGXCVLELTEDGDLLLKGAEDQVGWRTGTSGQGVERLRILKTGNLVLVDVFDQIKWQSFNFPTDVMLWGQRLDLATQLTSYPRNSTSFYTFEIQHTHPALHLGADSIVXRSVQPLSVRFLALGNETGNLGLYSYSPKKQSFEASFQVLNSKCDFPLACKPYGICTFSNACSCIRLATKEKHMVSNCSEGTSSSAQFCNGTQVEMXELNGVNTVLKNAFT

SEQ ID NO: 61891 - protein, 137 aa, Gossypium hirsutum
  Clone ID: LIB3197-003-P1-M1-E4.pep
VPEFSFYFCSVLLILLVNDGCCDWGSSIHVGHEISLAVPLEYSDGFTGRAFLMDDGNGQVEPKFRVALSAEANKGGYSCSLEVFLGDVKVWNSGHHSQFYTMDTCVLELTEDGDLLLKGAEVQVGWRTGTSGQGVER

SEQ ID NO: 61892 - protein, 200 aa, Gossypium hirsutum
  Clone ID: GOSHI-09MAY01-C15262_1.pep
VFLTLHSTAPLNLFFFCVFHTEEAKQRKNTKLGTMLKELPSLSTILSAYASISAMAMLIRTILNEMLPERMTNYIFSMIYDFTSAYFSSDFTFIIENRWHAGDNQLFRAAEIYLPTIIGPSSDSLLVGFDESSDPTTPPKRSIPVDCRIKDDFDGTRPEWTLSSIEPKKYYVPTKRFFSLTRKNRDRERVEQRYFPYINR

SEQ ID NO: 61893 - protein, 162 aa, Gossypium hirsutum
  Clone ID: LIB3583-012-P1-K1-E2.pep
LSAYASISAMAMLIRTILNEMLPERMTNYIFSMIYDFTSAYFSSDFTFIIENRWHAGDNQLFRAAEIYLPTIIGPSSDSLLVGFDESSDPTTPPKRSIPVDCRIKDDFDGMRLEWTLSSIEPKKYYVPTKRFFSLTLMIQNVLCGSRPLSSTRQHLRPWQWS

SEQ ID NO: 61894 - protein, 203 aa, Gossypium hirsutum
  unsure (1)..(203): unsure at all Xaa locations
  Clone ID: GOSHI-09MAY01-C15212_2.pep
REEHGEVERRIVSQLLTLMDGLKSRAHVIVIGATNRPNSIDPALRRFGRFDREIDIGVPDEVGRLEVLRIHTKNTKLADDVDLERIAKDTHGYVGADLAALCTEAALQCIREKMDVIDLEDESIDAEILNSMAVSNEHFQTALGTSNPSALRETVVEVPNVSWEDIGGLENVKRELQETVQYPVEHPEKXEKFGMSPSKGVLF

SEQ ID NO: 61895 - protein, 491 aa, Gossypium hirsutum
  unsure (1)..(491): unsure at all Xaa locations
  Clone ID: GOSHI-09MAY01-C15212_1.pep
KNAPSIIFIDEIDSIAPKREKTNGEVERRIVSQLLTLMDGLKSRAHVIVIGATNRPNSIDPALRRFGRFDREIDIGVPDEVGRLEVLRIHTKNMKLAEDVDLEKISKETHGYVGADLAALCTEAALQCIREKMDVIGRVGGPVGAEILNSMAVTNEHFATALGTSNPSALRETVVEVPNVSWEDIGGLENVKRELQETVQYPVEHPEKFEKFGMSPSKGVLFYGPPGCGKTLLAKAIANECQANFISVKGPELLTMWFGESEANVREIFDKARQSAPCVLFFDELDSIATQRGSSVGDAGGAADRVLNQLLTEMDGMSAKKTVFIIGATNRPDIIDPALLRPGRLDQLIYIPLPDEDSRHQIFKACLRKSPLAKEVDLRALAKYTQGFSGADITEICQRACKYAIRENIEKDIERERRRRENPEAMEEDXDDQVAQIQPAHFEESLKFARRSVSDADIRKYQAFAQTLNNSRGSRSEFKLQKRFQAGHLIL

SEQ ID NO: 61896 - protein, 150 aa, Gossypium hirsutum
  unsure (1)..(150): unsure at all Xaa locations
  Clone ID: GOSHI-09MAY01-C16952_1.pep
LNPPGKATIHVENVDEFKWLNSSYSPVLRQLETAAMKEYYFKADQPTVSGSSNLKYRNPKYLSMLNHLRFYLPQVYPKLDKILFLDDDIVVQKDLTGLWSVELHGKVNGAVETCGQSFHRFDKYLNFSNHHIXKLDPNXCGWAYGMNMFD

SEQ ID NO: 61897 - protein, 161 aa, Gossypium hirsutum
  unsure (1)..(161): unsure at all Xaa locations
  Clone ID: GOSHI-09MAY01-C16972_1.pep
RICIGRYRSKVIEAGTAIGAIGAESIGEPGTQMTLKTFHFAGVASMNITQGVPRIKEXCNAAKKISTPIITAELEFDSNVNVARMVKGRIEKTVLGQVAKSIKIVMTSRLASVVISLDMERIQDAQLHIDANVVKESILQTLEAETKGAACERFGRLKSWE

SEQ ID NO: 61898 - protein, 81 aa, Gossypium hirsutum
  Clone ID: uC-gsronu33B008h10b1.pep
SGYRGDPSFGYASRYGSYAGGLSGTGIGPYGRGGGGYGSYSGSGPSGNYDSGPGAGFGGPGGLYGSRSGYGGSSRYHPYAR

SEQ ID NO: 61899 - protein, 81 aa, Gossypium hirsutum
  unsure (1)..(81): unsure at all Xaa locations
  Clone ID: LIB3197-033-Q1-M1-H6.pep
SFRPTPYRSGTQRNRSKPKHLAPAYLVVNLGGQSHYNDGYAWXXVIYGGFGPWVLIGSFGGYTIYSSWIYRHCALLQVVTI

SEQ ID NO: 61900 - protein, 134 aa, Gossypium hirsutum
  Clone ID: GOSHI-09MAY01-C16862_1.pep
MSMAGETGMEQLTSGASNRIIPILRTLRIPLIFLQSIILYLLLFLFPRRRQTAVGAADEAPQLQAKTARRRSVWRREEEDTLRRRALAEGWDMGFETADGEVRCRWGTSLFFGVRRNALFCRSWLPAVDELREF

SEQ ID NO: 61901 - protein, 151 aa, Gossypium hirsutum
  unsure (1)..(151): unsure at all Xaa locations
  Clone ID: GOSHI-09MAY01-C16562_1.pep
MGGGKRFAVLLCAEDSEYVKKRYGGYYGVFVEMLAEEGETWDVFRVANGEFPDDEQVDRFDGFVITGSCNDAHGNDAWICRLVSLLKKLDSLNKKVLGICFGHQVLSRALGGKTGRAXHGWDIGVTTIHFSSSSSKLFSSLKSQPLFPSSS

SEQ ID NO: 61902 - protein, 164 aa, Gossypium hirsutum
  Clone ID: GOSHI-09MAY01-C16452_1.pep
RHFSKIVDGRRPAPQGFLAECYLYRAYAYKASGRIAESISDCNKTLALDPTSIQALDTRASLLETIRCLPDCLHDFEHLKLLYNSILRDRKLPGPAWKRHNVRYREIPGKLCALTTKIRQLKQRIASGETGNVDYHALIGLRRGCSMSELERAHLLLWLRHKPD

SEQ ID NO: 61903 - protein, 194 aa, Gossypium hirsutum
  Clone ID: GOSHI-09MAY01-C16402_1.pep
MFFDGYGYHGTSFEQSYRCYPASFIEKPQIESGDKIIMPPSALDRLASLHIDYPMLFELRNDAAERVSHCGVLEFIAEEGMIYMPYWMMENLVLQEGDIVRVKNVTLPKGTYVKLQPHTKDFLDISNPKAILETTLRNYSCLTTGDSIMVAYNNKKYYIDIIETKPSNAISIIETDCEVDFAPPLYYKEPKRPA

SEQ ID NO: 61904 - protein, 141 aa, Gossypium hirsutum
  unsure (1)..(141): unsure at all Xaa locations
  Clone ID: uC-gsflnu33B013f12b1.pep
MFFDRYGYHGTSFEQSYRCYPASFIEKPQIESGDKIIMPPSALDRLASLHIDYPMLFELRNDAAERASHCGVLEFIAEEGMIYMPYWMMENLLLQEGDIVRVKNVTLPXGTYVKLQPHTKDFLDISNPKAILETTLRNYSC

SEQ ID NO: 61905 - protein, 141 aa, Gossypium hirsutum
  Clone ID: LIB3543-028-Q1-K6-H7.pep
MFFDGYGYHGTSLSRVRVTRSFIKPKWGGIFFLPPSALDRLASLHIDYPMLFELRNDAAERVSHCGVLEFIAEEGMIYMPYWMMENLVLQEGDIVRVKNVTLPKGTYVKLQPHTKDFLDISNPKAILETTLRNYSCLTTGD

SEQ ID NO: 61906 - protein, 143 aa, Gossypium hirsutum
  Clone ID: GOSHI-09MAY01-C16732_1.pep
MLTQFFFIAILSSLLLQVAKPDLVTDRASLLSLRSSVGGRTLLWNVSNQSPCSWAGVTCERNRVTVLRLPGVALSGQIPTGIFGNLTQLRTLSLRLNSLTGPLPSDLALCQNLRNLYLQGNHFSGEIPEFLFGLHDLVRLSLS

SEQ ID NO: 61907 - protein, 124 aa, Gossypium hirsutum
  Clone ID: GOSHI-09MAY01-C16652_3.pep
YLIQIESPTITTPLFQSYTLLASAPREIESPKKVACHPMPYLYAVHFCHFDATETKAFRLRLVGDISGDKVDALVVCHMDTSGWSTDHAAFRMLGIKQGNAVCHVFSQGNLVWIQPPVVTVSAM

SEQ ID NO: 61908 - protein, 397 aa, Gossypium hirsutum
  Clone ID: GOSHI-09MAY01-C16652_1.pep
MVFQFNFLVLLLCLMFLMCGRGNAVRDLEEKYDLESHGRDDEVESLDDKYVTAYFHQTFDSANHFDGGDEVKNLEDKYSAAYFHKSLDSGNHGRDDKAKILEDNYATAYFHKTSVFENHGEGDKLKSLEDKYSTAYFHKTISSKMMKDHNMEHHHLYHNHVESAEIGLFTIDELHTFHVGKKLPIFFPVKNHSLYPPLLPKQIADTIPFSSSQASNILRFFSVSPDSPKGKAVQDTLAKCELGAAQGETKICATSFESLHGFLSNAFGPHVDFKFISTRHPTITTPLFQSYTILESPQEIESPKKVACHPMPYLYAVYFCHFDATETKAFKLRLVGDVTGDKVDAVVLCHMDTSGWSSDHVAFRMLGIKQGNTVCHVFSQGNFVWINQPSDIAAGAI

SEQ ID NO: 61909 - protein, 54 aa, Gossypium hirsutum
  unsure (1)..(54): unsure at all Xaa locations
  Clone ID: LIB3493-023-P1-M1-A9.pep
LFFAIWILXVGALSMWLFACLVLSKETLFAMYFLKVILFGLINHLIYVPVPYKC

SEQ ID NO: 61910 - protein, 181 aa, Gossypium hirsutum
  Clone ID: GOSHI-09MAY01-C16612_1.pep
MDRRVKKEAEEIPQRTMSFAGRRLKSAGEEDFILALSTHTPTLNPSSSEKKEISKKANALTERKQKRKKCQSETIIKPAVSDCGEKKRGSMKNKDVGDGRCIAEIKSPAMICAEEIQSNLEPEFPSFAKSLVRSHVGSCFWMGLPGMFWKTHLPRKDTTFTLEDESGNQFHVKYYADKTGL

SEQ ID NO: 61911 - protein, 363 aa, Gossypium hirsutum
  unsure (1)..(363): unsure at all Xaa locations
  Clone ID: GOSHI-09MAY01-C16192_1.pep
FKLFPPCYGISLTVETNKVMATVIIQSIMKNKTRISTADRVEALFELIKGLIKDLDDAFHDEVDEDDFKEEQNSVARLIQLLHTAAPAAAWAVACAVRKHILGGGPKRLPFTVPPLVFSSLKLVRQLQGQEENPFGEEESTTPKKIFQVLNQTVETLSNIPAPELALQLFLQCAEAANDCDLEPVAYEFFTQAYILYEEEISDSRAQVTAIHLIIGTLQRMHVFGVENRDTLTHKATGYSAKLLKKPDQCRAVYACSHLFWVDDQDNVKDGERVLLCLKRALRIANAAQQMSNAARGSAGSVTLFVEILNMYLYFFEKGNPQITGAAIQSLIXLITTEMHNDXSTPDPATDAFLGSTLRYMEV

SEQ ID NO: 61912 - protein, 131 aa, Gossypium hirsutum
  unsure (1)..(131): unsure at all Xaa locations
  Clone ID: AI055393.1.pep
NAIGKVIEVQPDMPILGVITLYSSLLTFTLHVHPDRLDYADQVLGACVKKLSGKEKLEDKKATKQIVALLSAPLDKYNDIVTALKLSNYPXVMEYLDSETNKVMATVIIQALXEDKTRISTAXRVEALFEL

SEQ ID NO: 61913 - protein, 134 aa, Gossypium hirsutum
  Clone ID: LIB3197-021-Q1-M1-F7.pep
NKVMATVIIQSIMKNKTRISTADRVEALFELIKGLIKDLDDAFHDEVDEDDFKEEQNSVARLIQLLHSDDPEEMFKIICTVRKHILGGGPKRLPFTVPPLVFSSLKLVRQLQGQEENPFGEEESTTPKKIFQVL

SEQ ID NO: 61914 - protein, 120 aa, Gossypium hirsutum
  unsure (1)..(120): unsure at all Xaa locations
  Clone ID: LIB3584-028-P1-K1-A6.pep
PRVRPRVRPRVREESTTPKRVLEVLNQTVETLSNIPAPELALQLFLQCAEAANDCDLEPVAYEFFTQAYILYEEEISDSRAQVTAIHLIIGTLQRMHVXFGVENRDTLTHKATRYFCQTF

SEQ ID NO: 61915 - protein, 91 aa, Gossypium hirsutum
  Clone ID: GOSHI-09MAY01-C16142_1.pep
KPKRNSIEKENPSSLWNERDLIVMRALGGNRYISFHNGEEKKEKQISESLDTAFKVRYSFNQLMIVISCFNRYFLKLVRNLFQHNTISEMK

SEQ ID NO: 61916 - protein, 118 aa, Gossypium hirsutum
  Clone ID: LIB3197-019-Q1-M1-E11.pep
RQKKKMLLQTTISSRPLYQRHACFSATHQLPLYYSFLASASLNFTRKNLFFQAIVPCYREPALKNTGAGNGVNDTKFLNLQMFQKGMAAKSFTSSRFDESLKNHRAMADDLNVKKPLS

SEQ ID NO: 61917 - protein, 66 aa, Gossypium hirsutum
  Clone ID: LIB3197-024-Q1-M1-E10.pep
RQMFQKGMAAKSFTSSRFDESLKNHLAMVDDLNVKKPLSVVSAFLFGQALRLISAQLANASEITSG

SEQ ID NO: 61918 - protein, 98 aa, Gossypium hirsutum
  Clone ID: GOSHI-09MAY01-C16002_1.pep
SPTWCQRILRPNRRPSHRLCSPTLTLPESPHGLRRRSSLRLQKQNRKGTRGKLSSSNRGLSILSFQVGLKQGLKALICQTPTTVHGGRAVGRRWRRKS

SEQ ID NO: 61919 - protein, 99 aa, Gossypium hirsutum
  Clone ID: LIB3828-023-Q6-K6-A4.pep
IQQPPSPTWCQRILRPNRRPSHRLCSPTLTLPAKQRRSTQSRRKESEKQQTIEESRKYFLCIRLYKPREEPNVRGDFGIQKKIVLQAIFSEVKSKKIKS

SEQ ID NO: 61920 - protein, 289 aa, Gossypium hirsutum
  Clone ID: GOSHI-09MAY01-C16362_1.pep
NNGNGNDRRRVRQYVRSKLPRLRWTPDLHYSFVRAVERLGGQERATPKLVLQLMNVRGLSIAHVKSHLQMYRSKKLDEAGQVLSQSKRAIQGRGEFGSLLCQAMTTLSPHHRHQQQHFRMENGGIVLASESLDGSNTTFKANFPRHHQFPNSFISKAFGQENGFYIQNQIHGTGPIRAMASRFLEEKRWHPFERISNRWKANGNMYKDMQSQSHCFWQRPSSDEDKHEPLTKFSSCRTEFEWNQDKVLKDGERLPDLQLRLSQRNGKFDEEKNNHCKGTHEISTQLSLS

SEQ ID NO: 61921 - protein, 249 aa, Gossypium hirsutum
  Clone ID: GOSHI-09MAY01-C16252_1.pep
SESGFVSEEYMDFEKKKRWKLVVPRILKIKSASRCFFQKVKPTNFNPGCAPVFLNVYDLTPMNGYFYWAGLGIFHSGVEVHGVEYAFGAHDYPTSGVFEVEPRQCPGFQFRKSIFIGTTSLDPIKVREFMERNSTRYHGDTYHLIIKNCNHFCKDICHRLTGKHIPKWVNRLARIGSMCSCILPEALKTSVVRHDPNYQPFYSEKRRLRCAFSCLSSVSMRQKSSLLLQSPLRGCFPPWDSKKSNNVSY

SEQ ID NO: 61922 - protein, 40 aa, Gossypium hirsutum
  Clone ID: uC-gsflnu33B091b07b1.pep
HALSCLSSVSMRQKSSLLLQSPLRGCFPPWDSKKSNNVSC

SEQ ID NO: 61923 - protein, 162 aa, Gossypium hirsutum
  Clone ID: GOSHI-09MAY01-C16272_1.pep
MLPFDTIEEAATFMGRNLTAAETMWFKYSAKKSDYYLYCHNILFLFLIFSVVPLPLVFVEMMRSLGFDKYKIQPKVSLSLPEMFKCYKDVMRMFVLVVGPLQLVSYPSIKIIGIRTGLPLPSLWEIVAQLTVYFMIEDYTNYWIHRFLHGKWGYEKIHRVHH

SEQ ID NO: 61924 - protein, 91 aa, Gossypium hirsutum
  Clone ID: LIB3197-022-Q1-M1-F9.pep
MLPFDTIEEAATLLGRNLTVAETMWFKYSAKKSDYYFYCHNILFLFLIFSVVPLPLVFVEMMRSLGFDKYKIQPKVSLSLPEMFKCYKDVM

SEQ ID NO: 61925 - protein, 177 aa, Gossypium hirsutum
  Clone ID: GOSHI-09MAY01-C16202_1.pep
MSNSETAATNGSLMDPPRHQAPAANGSLAVKKPPTKDRHSKVDGRGRRIRMPIICAARVFQLTRELGHKSDGQTIEWLLRQAEPSIIAATGTGTTPASFSTVSVSLRGANSTSLSSTTSSSSLDHKPLLGPTPFILGKRVRSDDDNAGKDDSGGLTVGPGVGSIVGPNGTHPGGFWA

SEQ ID NO: 61926 - protein, 260 aa, Gossypium hirsutum
  Clone ID: GOSHI-09MAY01-C17822_1.pep
MSRRQANPMRRFVDSGSFSLAGALHSKPRSSPILPIGLVLVGAILLIGYVYSGSGKFRGEAVSRIGGDYSCSVEVQRVIPFLKKAYGDSMHKVLHVGPDTCSVVYKLLKEEETEAWGVEPYDIEDAEATCKSLVHKGIVRVADIKFPLPYRPKSFSLVIVSDALDYLSPRYLNKTLPELTRVASDGLVVFTGYPGNQRAKVAELSKFGRPAKMRGSSWWVRFFLQNSLEENEGAIKKFEQAASKGSYHPACQVFHLKPYN

SEQ ID NO: 61927 - protein, 223 aa, Gossypium hirsutum
  Clone ID: GOSHI-09MAY01-C17592_1.pep
MAFPASDIPSAEQQADDPLYRELWHACAGPLVTLPRVGERVYYFPQGHMEQLEASMHQGLEHQMPSFDLPSKILCKVASVQRKAEPDTDEVYAQITLVPEVDQSEVMSPDDPLQEPERCIVHSFCKTLTASDTSTHGGFSVLRRHADDCLPPLDMTQQPPWQELIATDLHGNEWHFRHIFRGQPRRHLLTTGWSVFVSSKKLVAGDAFIFLRGANGDLRVGVR

SEQ ID NO: 61928 - protein, 189 aa, Gossypium hirsutum
  unsure (1)..(189): unsure at all Xaa locations
  Clone ID: AI728515.1.pep
EVYAQITLVPEVDQSEVMSPDDPLQEPERCIVHSFCKTLTASDTSTHGGFSVLRRHADDCLPPLDMTQQPPWQELIATDLHGNEWHFRHIFRGQPRRHLLTTGWSVFVSSKKLVAGDAFIFLRQYLSXTNPLTVLFCYICLFHCLITIHSYLLLSRGANGELRVGVRRLMRQQANMPSSVISSHSMHLG

SEQ ID NO: 61929 - protein, 220 aa, Gossypium hirsutum
  unsure (1)..(220): unsure at all Xaa locations
  Clone ID: GOSHI-09MAY01-C17582_1.pep
LLVRPRVRFSPCEKLGIAAEHGFFMRWSXNDEWELCGQXSEFGWKQIAEPVMKLYTESTDGSSIETKESALVWHHRDADPGFGSSQAKEMLDHLESVLANEPVAAKSGQFIVEVKPQGVSKGMAAETIFTTMSEKGKQADFVLCIGDDRSDEEMFEIISNAISSGILSSSTSVFACTVGQKPSKARYYLDDPAEVLNMLEALAEASDPESFTDTESEGSL

SEQ ID NO: 61930 - protein, 188 aa, Gossypium hirsutum
  unsure (1)..(188): unsure at all Xaa locations
  Clone ID: GOSHI-09MAY01-C17552_1.pep
RLAAELGDDVPPVAVDKNPSLLIPPTPVMCGGDWPLLRVMKGIFDGGFDGGRGAVDEEEEGAEGDWGEDLDVVDGLRIGDVSAILEDGEVAAENEEXGGWDLEDLELPAEVETPKVSGNARSSIFVAPTPGMPVSQIWIQRSSLAAEHVAAGNFDAAMRLLSRQLGIRNFAPLKSMFLDLYTGSHSYL

SEQ ID NO: 61931 - protein, 203 aa, Gossypium hirsutum
  Clone ID: GOSHI-09MAY01-C17542_1.pep
MAIPSSSAYLFLLSFFTLSLFLAISTAESESELELVADLRALQSESKSGVIHLDDRTIAKFLTSPKTPRPYSILIFFDATQLHDKTELHLRELRQEFALVASSFITNHNNSNTKLFFADIEFRESQSSFHLFGVNSLPHIRLVGPTAKSVKDESQQMDQGDCSRLAESMAEFVESRTKLTVGRIHRPPILSKTQMGLIVALLL

SEQ ID NO: 61932 - protein, 202 aa, Gossypium hirsutum
  unsure (1)..(202): unsure at all Xaa locations
  Clone ID: GOSHI-09MAY01-C17482_1.pep
MATNLIRRAMNMTPRLPSSTVAPASRLVLDRPYATETEAQKVEPKASSGSGGASMKTFQIYRWNPDNPTKPQLQDFKIDLKECGPMVLDALIKIKNEMDPSLTFRRSCREGICGSCAMNINGCNGLACLTKIESGPSETTITPLPHMFVIKDLVVDMTNFYNQYKSIEPWLKRKNPPPAAGKEIPQSKXDRAKLDGMYECIL

SEQ ID NO: 61933 - protein, 63 aa, Gossypium hirsutum
  Clone ID: LIB3272-043-P1-K1-H7.pep
KVELEASSGRGGANMKTFQIYRWNPDNPTKPQLQDFKINLKECGPMVLDALIKIKNEMDPSVT

SEQ ID NO: 61934 - protein, 145 aa, Gossypium hirsutum
  Clone ID: GOSHI-09MAY01-C17402_1.pep
MANLMIMAVLLVAVSTAATVTDAQATCAAKLVSCSRYILNTTIKPQDDCCNPIKEEVTNDLSCLCNLYKDPKVFASLNISTAQALNVTRECGVTTDLTACNSNSTSTSSATSPPGGRSADQNGGADRISLTGVTIVFFFSISMAL

SEQ ID NO: 61935 - protein, 274 aa, Gossypium hirsutum
  Clone ID: GOSHI-09MAY01-C17432_3.pep
VPFLGAFDLQGLKARTKKLGEKLDKALETIIDDHEQHKQDDFVGTLLKELNQPMNNDGDIMDRNSIKAITIDMMVGALVTSAATLEWALSELLRHPRVMLKLQQELESIVGNKRMVEENDLPKLEYLDMVVKEIFRLHPVAPLLVPRESVEDIIIDGCYIPKQSRVLVNIWAMGRDPNTWSNNAEEFFPERFIDSNIDLHGHDFELIPFGAGRRLCPGKKLGLITVKLILAQLVHCFNWELPSGISPNELDMTENFGVSLPRKINLCVKPTYRM

SEQ ID NO: 61936 - protein, 351 aa, Gossypium hirsutum
  unsure (1)..(351): unsure at all Xaa locations
  Clone ID: GOSHI-09MAY01-C17432_2.pep
MALSAATLLTALAVLCSFFFILFYISSSKNGKGKGKGKAIPGPRPLPIIGNLHMLGMLPHQSLYHLAKKYGPMMSIRLGVVPTVVVSSPQAAEIFLKTHDAVFASRPRLQVLELIYNGKRGIAFTELGSYWRSVRKICNMTIFTASKIESFASTRKEVLAHFIESLKEAASAKEVVNISKKIGALNEEMTLRMVLGNVKKYEGFNLKELIDELTHIAGAFNLADVVPFLGAFDLQGLKARTKKLGEKLDKALETIIDDHEQHKQDDFVGTLLKELNQPMNNDGDIMDRNSIKAITIDMMVGALDTSAATLEWALSELLRHPRVMLKLQQELESIVGXQEMVEENDLPKLST

SEQ ID NO: 61937 - protein, 178 aa, Gossypium hirsutum
  Clone ID: GOSHI-09MAY01-C17432_1.pep
MADAQTEKPLSLSEQYALQEKEEKSDVTTKPAEAKEVENPVNAATGSGDVVTEKLEETSADPVEGSTEAPPPAAEESTEANPATGNSGEDAAEENSGDSEETPEIKLETAPADFRFPTTNQTRHCFTRYIEYHRCVAAKGEGAPECDKFARYYRALCPGEWIDRWNEQRENGTFPGPL

SEQ ID NO: 61938 - protein, 65 aa, Gossypium hirsutum
  Clone ID: LIB3048-038-Q1-L1-A1.pep
FCFHPGNSSVVQLLRFDITEGKKSQNRDFSDNNRGTISSREDLDKYHSPCAHSSDPSIFSVSMSA

SEQ ID NO: 61939 - protein, 57 aa, Gossypium hirsutum
  Clone ID: LIB3272-054-P1-K1-B6.pep
QKKFKKCYIQSQCCECKKNKPHLLVKSLILFNIKYTHSISLFIKRPNLLKNVCPSLC

SEQ ID NO: 61940 - protein, 130 aa, Gossypium hirsutum
  Clone ID: GOSHI-09MAY01-C17792_1.pep
FKEGLVQILKSELSQKEADASRFHEVSKMSRQVEFLRKPRSSSHTPVIKHCTAREGTVLGDENGGGNKCSVNMKKGSSAPHVHDSLKDNGRGSRSSKRKKDDEIRISETPNLFTSTFKVPRLRDSSPKSR

SEQ ID NO: 61941 - protein, 314 aa, Gossypium hirsutum
  Clone ID: GOSHI-09MAY01-C17672_1.pep
MASSHFDEKDGIDSATCYFSDTNLIKLFNFPLFFSLLSLSFVLSLNKMSNLSSITATAALLLSLISTVTSHYSSSSFSSSPPAPQSTVWHSARATYYAASDPRDAVGGACGYGDLVKAGYGMATVGLSEALFQRGQICGACFELRCVDDLRWCIPGTSYIVTATNFCAPNYGFTAEGGGRCNPPNKHFVLPIEAFEKIAIWKAGNMPVQYRRIKCTKDGGVRFTIDGSGIFVSVLISNVGGAGDIAAVKIKGSRTGWLPMGRNWGQNWHINSDLRNQPLSFEVTNSDGLTLTSYNVAPKNWNFGQTFEGKQFEV

SEQ ID NO: 61942 - protein, 293 aa, Gossypium hirsutum
  unsure (1)..(293): unsure at all Xaa locations
  Clone ID: GOSHI-09MAY01-C17662_1.pep
VSPRLQQKKLELDRRSRPPTPPSDPGEPRKHSNRHSSEFGSPGGXHRPKSPEMQQCDDQLSQISTESRASSHQGDDISLQSDSSIILPSKLDVEVTSHEQTVGIIDSQSPSMTAVQCSISDLMPKKSTSRMVEDSMEEPAVVGPEHPSPVSVLDTSVYRDDEPSPVKQILNASGGNGAEGLSEDHKEEQWNPADKCLANNVGSGLTSEINRKKLQNIEHLVQKLRRLNSGHDEASTDYIASLCGNTNPDHRYVSEVLLASGLLLKDLGSGLTTXQLHPSGHPINPELFFGLEQ

SEQ ID NO: 61943 - protein, 257 aa, Gossypium hirsutum
  Clone ID: GOSHI-09MAY01-C17192_1.pep
FFQDTNGLLFKAIPASLGVSATKEYHVNSLAVPRKAKEAIGGITKLTHSDGRSMVINVEYNQLDPLLRATGHPDGDVNCETGYSPFPGNINQLILELGPYIKELTKTGGAIKEFVNPKYKDASKTSFKSSTRLECMMQDYPKTLPPSARVGFTVMDTWLAYAPVKNNPEDAAKVPKGNPYHSATSGEMAIYRANSLILQKAGVQVEDPVQQVFNGQEVEVWPRVTWKPKWGITFAEIKSKVSGSCSISQRSTMALKG

SEQ ID NO: 61944 - protein, 106 aa, Gossypium hirsutum
  Clone ID: GOSHI-09MAY01-C17162_2.pep
EPYITDDVQVQFYMMSPHILKTLSNDKKGLYSASFKVPDVYGVFQFKVEYQKLGYTSLSLSKQIPVRPYRRNEYERFIPPAGPVGGAAFSTMAGFFIFSFVHLYNK

SEQ ID NO: 61945 - protein, 437 aa, Gossypium hirsutum
  Clone ID: GOSHI-09MAY01-C17162_1.pep
MGKLWLICIASISILLPFLCNAFSPETPTDRRVLVLLDDFAIKSSHSLYFNALKSRGFDLEFKLADDPKIALQRYGQYLYDALILFCPSVERFGGSIDVAAIVNFVDSGHDLIVAADVNASDLIREVATECGVDFDEDPSAMVIDHTGYAVSETEGDHTLIASDDFIKSDVIIGSKKIEAPVLFQGIGHSLNPVNSLVLKVLSASPSAYSANPLSKLSTPPSLTGSAISLVSVVQARNNARILITGSLSMFSNRFFRSGVQKAGSPTKYEKSGNEQFLTELSKWIFHERGHLKAVNVKHHKVVETDEPALYRINDELEYSVEIYEWSGTSWEPYVANDVQVQFYMMSPYVLKTLSSDKKGLYSASFKVPDVYGVFQFKVEHQKLGYTSLSLSKQIPVRPYRHNEYERFIPAAYPYYGAAFSMMAGFFIFSFVHLYSK

SEQ ID NO: 61946 - protein, 62 aa, Gossypium hirsutum
  Clone ID: LIB3147-015-Q1-K1-E3.pep
DCLYGGSYCFGSFTIRSIYFSNLLRNLLTYGIGLHFPVRPYRQNEYERFIPAAYPYYGAAFS

SEQ ID NO: 61947 - protein, 101 aa, Gossypium hirsutum
  unsure (1)..(101): unsure at all Xaa locations
  Clone ID: GOSHI-09MAY01-C17112_1.pep
MKVRASVKKMCEFCRTVKRRGRVYVLCTSNPKHKQRQGISXFASEGTLPPATAETNVKHPIIPSYRMRPGLASLIPKMQEPSSSIIGWRANLASLIFKRGN

SEQ ID NO: 61948 - protein, 59 aa, Gossypium hirsutum
  Clone ID: LIB3147-045-Q1-K1-F4.pep
MKVRASVKKMWEFCRTVKRRGRVYVLCTSNPKHKQRQGISTFAFEGTLPPAYASLIAVT

SEQ ID NO: 61949 - protein, 51 aa, Gossypium hirsutum
  Clone ID: GOSHI-09MAY01-C17102_4.pep
MPSHKTFMIKKKLAKKMRQNRPIPYWIRMRTDNTIRYNAKRRHWRRTKLGF

SEQ ID NO: 61950 - protein, 68 aa, Gossypium hirsutum
  Clone ID: GOSHI-09MAY01-C17102_3.pep
CLRTLVPHPCQQVKCQKCLAHKTFMIKKKLPRVRRQNRPFPYWIRMRTDNTVRYNAKRRHWRRTKLGF

SEQ ID NO: 61951 - protein, 51 aa, Gossypium hirsutum
  Clone ID: GOSHI-09MAY01-C17102_1.pep
MPSHKTFRIKKKLAKKMRQNRPIPYWIRMRTDNTIRYNAKRRHWRRTKLGF

SEQ ID NO: 61952 - protein, 133 aa, Gossypium hirsutum
  unsure (1)..(133): unsure at all Xaa locations
  Clone ID: uC-gsflmaxxa005d07b1.pep
VRWAYLFPVFSLSFLSLFSDLFYLGFNFGFYXRIFVLLIFLTLSLTFFLFLFSFFXLFSFSFFFSFSFIIIYLYFLIFHSFFFYFLLXFFFLSLFFFRLLFLFFYFSLSSFYFLYFNFFLFFHXSLFIIILFF

SEQ ID NO: 61953 - protein, 177 aa, Gossypium hirsutum
  Clone ID: GOSHI-09MAY01-C17052_1.pep
PSRPRTRGARLGPTFSSPRAAFPLGPSAHIAPKPTLHFIKASTSDLPKTSPSPPSTKPQLPSHRPHHNIREEARLHNAATVTTNHPRFSAKYVPFTSITDPASSDESYSLDEIVYRSQSGSLLDVQHDMSALKHFDGAYWRNLFDSRVGKTTWPFGSGVWSKKEWVLPEIDDDDIIS

SEQ ID NO: 61954 - protein, 120 aa, Gossypium hirsutum
  unsure (1)..(120): unsure at all Xaa locations
  Clone ID: LIB3197-035-Q1-M1-A5.pep
THASFHQSLHFRSPQNPSITDPASSDESYSLDEIVYRSQSGSLLDVQHDMSALKHFDGAYWRNLFDSRVGKTTWPFGSGVWSKKEWVLPEIDDDDIISAFEGXSNLFWAETYGKDFLXMN

SEQ ID NO: 61955 - protein, 339 aa, Gossypium hirsutum
  Clone ID: GOSHI-09MAY01-C17352_1.pep
MKHWGLILLLFLLFQQGNFLLRVKADDGFIKTKGLQLMLRGSPFYANGFNAYWLMYMAADSSQRSKVSSAFQQAKEHGLTIARTWAFSDGGDRPLQYSPGSYNEQMFQGLDFVVSEAKRYGIKLVLSFANNYDQFGGKKQYVSWARNEGQSIGSDDDFFTNSVVKEYYKNHIKAVLTRRNTLTGVAYKDEPTIMAWELMNEPRCLSDPSGKTMQAWITEMASHVKSIDGNHLLEAGLEGFYGPSSSQKQQYNPNFQVGTDFIANNQIPGIDFATVHSYPDQWLQSSSDESQIAFLNNWLYNHIQDAQNILQKPLLFAEFGKSLKIAGPNQRYELYNTVY

SEQ ID NO: 61956 - protein, 94 aa, Gossypium hirsutum
  Clone ID: LIB3543-066-Q6-K6-D1.pep
YHCHHTPQSIKILIRFISINTSPTSINTKHIHNTYDIYIPKSYLLATYNQNKVNRWLLIKFSDRVISKANPIDNLYPMISMASCKSSTASAFFE

SEQ ID NO: 61957 - protein, 94 aa, Gossypium hirsutum
  unsure (1)..(94): unsure at all Xaa locations
  Clone ID: LIB3825-031-Q6-K6-G11.pep
MGSVGVILSHLQGMFTRTIRLLEAGLKPVYVFDGXPPNLKKQELANRYSKKADAVEDLQEAMEIIGYKLSIGLALEITLSENLINNHLLTLFWL

SEQ ID NO: 61958 - protein, 119 aa, Gossypium hirsutum
  Clone ID: LIB3197-041-Q1-M1-D12.pep
MGIKGLTKLLADNAPKAMKEQKLESYFGRKIAIDASMSIYQFLIVVGRMGTEMLTNEAGEVTSHLQGMFTRTIRLLEAGLKPVYVFDGQPPDLKKQELAKRYSKRADATEDLQEAMETG

SEQ ID NO: 61959 - protein, 124 aa, Gossypium hirsutum
  Clone ID: GOSHI-09MAY01-C10882_1.pep
GRTGRATRPTTAFLFLLINQSQKISIMEGKTRQTLFKSKSTSLSLHIYIIASNRIPIKDTPFKISPSFLLSILPPVLLIYILNLVIYVFWSFKTALYLICYEINQIFFVPGFRSLLIYPCPNCF

SEQ ID NO: 61960 - protein, 130 aa, Gossypium hirsutum
  Clone ID: GOSHI-09MAY01-C10822_1.pep
MSTMFLRSLLLPLMALATWSHGMSRGQQRPSSLDAASNTLQYHGGPLLTKPNGINVYLIWYGGFSLKDRNSITDFFASFASPGRRQGPSVSTWWRTISTYKDKTGKPVSDTVRLVKQVGDVYSSGKTLKR

SEQ ID NO: 61961 - protein, 48 aa, Gossypium hirsutum
  Clone ID: GOSHI-09MAY01-C10582_1.pep
SSMGVEVTDICMEKQSDCAIGYSNGVSNDETFHSHHNAMQSYTDGDPK

SEQ ID NO: 61962 - protein, 102 aa, Gossypium hirsutum
  unsure (1)..(102): unsure at all Xaa locations
  Clone ID: LIB3083-111-Q1-L1-A4.pep
QNSKSCSLFFFLCFGILHQCRDSYGNADVAIEMCSSMGVEVTDICMEKQSDCAIVYSNGVSNDETFHSHHNAMQSYTDXDPKLQGTDEGTEAKEYEVKECTT

SEQ ID NO: 61963 - protein, 224 aa, Gossypium hirsutum
  unsure (1)..(224): unsure at all Xaa locations
  Clone ID: GOSHI-09MAY01-C10542_1.pep
SRVRKQDASQGPNNLGCLQSLFLLDTEGKADNESLIPEVISRSKHLRVLGLAECNLEQLPSNISYLKQLRCLSLAYNGNIKRFPNSICNLQSLRTLDFSGCGGIEELPKDIRYLISRGALTVTTKQTRLQENGISCLTSLRRLIFSECENLEKLXEDIQNLTALRELFIVDCHNLVSLPRDLKYLTALEILIIWDCEKLDVTVEELKLERKEDGSLRKLAIGGV

SEQ ID NO: 61964 - protein, 171 aa, Gossypium hirsutum
  Clone ID: GOSHI-09MAY01-C10572_1.pep
MRKGAKRKAASHEQEEKQVKASSSSQENLNNNNRKPAPKAKLAKTSKPQPEPEYFEDKRNLEDLWKAAFPVGTEWDQLDSVYQFNWNFSNLEDAFEEGGKLYGKKVYLFGCTEPQLVPYKGENKVICIPVIVAVESPFPPSDKIGINSVQREAEEIVPMKQMKMDWVPYIP

SEQ ID NO: 61965 - protein, 91 aa, Gossypium hirsutum
  Clone ID: LIB3166-027-P1-K1-F12.pep
MRKGAKRKAASHEQEEKQVKASSSSQENLNNNNRKPAPKAKRAKTFKPQPEPEYFEDKRNLEDLWKAAFPVGTEWDQLDSVYQFNWNFSNL

SEQ ID NO: 61966 - protein, 195 aa, Gossypium hirsutum
  unsure (1)..(195): unsure at all Xaa locations
  Clone ID: GOSHI-09MAY01-C10442_2.pep
MAQISPKLLIPDSFQVSRDDITGQLGLIWELIKTPLIVPLLQLGVYICLAMSLMLFMERVYMGIVIILVKLFWKKPEKRYKFELIQDDVELGSSNFPVVLIQIPMFNEKEVYKISIGAACGLSWPSDRLVIQVLDDSTDPAIKLMVEQECQRWASKGINITYQIRENRTGYKARAFEEGXKRSYVKHCEYVAIFD

SEQ ID NO: 61967 - protein, 530 aa, Gossypium hirsutum
  Clone ID: GOSHI-09MAY01-C10442_1.pep
LLIPQSFLVNRDDVTSQLGLMWELIKAPLLVPMLKLSVYICLGMALMLFMERVYMGIVIRPRGLFWKKPEERYKFVPIEDDEEHGSSNFPVVLVQIPMFNEKEVYKISIGAACGLSWPSDRLVIQVLDDSTDSAIKSMVEQECQRWASKGINITYQIRENRTGYKAGALKEGLKRSYVKHCEYVAIIDADFRPDPDFLRKSIPFLDHNPDIALVQARWRFVNADECLLTRMQEMSLDYHFTVEQEVGSATHAFFGFNGTAGIWRIAAINEAGGWKDRTTVEDMDLAVRASLRGWKFLYLGDLQVKSELPSTFKAFRFQQHRWSCGPANLFRKMVWEIIPNKKVKFWKKVYVIYSFFFVRKIIAHMVTFCFYCVVLPLTILIPEVWVPIWGAVYIPSVITILNSVGTPRSIHLLFYWILFENVMSLHRTKATFIGLLEAGRANEWVVTEKLGDAVKKAADAAKNKNNAKAPRKLKFKFTDRLNTLELGFAAFLFLCGCYDFVHGKNNYFVYLFLQTITFFITGIGYVGTII

SEQ ID NO: 61968 - protein, 67 aa, Gossypium hirsutum
  Clone ID: LIB3197-010-P1-M1-D3.pep
QQTKEEESIWSRHVLTMLHLVQGTIGISRYSNVYPGKLARTARSMSSTVVRSFHPPASLMAAILHIH

SEQ ID NO: 61969 - protein, 108 aa, Gossypium hirsutum
  unsure (1)..(108): unsure at all Xaa locations
  Clone ID: LIB3145-058-Q1-K1-F9.pep
FNVTAGLWRILAINEAWGWKEGTTVEDMDLAVRASLRGXKFLYLGDLQVKSELASTFKAFRYQQHRWSCGPAHLFRKMVVEIITNKIVRFWKKLYVIYSCFFVKKIIS

SEQ ID NO: 61970 - protein, 78 aa, Gossypium hirsutum
  unsure (1)..(78): unsure at all Xaa locations
  Clone ID: LIB3196-047-P1-M1-D3.pep
FFCMYVMMIVLMPDVXKYSMRDGHYIGSGITILNFLRTPRSIHLWFYWILFENVMSLHRTKATFIWLLEAGRANEWVV

SEQ ID NO: 61971 - protein, 139 aa, Gossypium hirsutum
  Clone ID: GOSHI-09MAY01-C10422_1.pep
MFFHIVLERNMQLHPRHFGRNLRENLVSKLVKDVEGTCSGRHGFVVAITGIENVGKGLIRDGTGFVTFPVKYQCVVFRPFKGEILEAAVTMVNKMGFFAEAGPVQIFVSNHLIPDDMEFQSGDMPNYTTSDGSVKIQKD

SEQ ID NO: 61972 - protein, 85 aa, Gossypium hirsutum
  Clone ID: GOSHI-09MAY01-C10792_5.pep
HAFADAWADPWGCFPLMGKVVSGTPYHPCSTAKKATLLTVTYGKNPGHCLNTWLLCSFALRHRGHELSEATLLSLKFFRVRINVP

SEQ ID NO: 61973 - protein, 147 aa, Gossypium hirsutum
  unsure (1)..(147): unsure at all Xaa locations
  Clone ID: GOSHI-09MAY01-C10792_4.pep
VFFCGVFFFFFFFFFFFFFFFFFFFFFFLIENTFLENIPQKILQIPLAEEEHGDFQVWGGEHSGEFTVRSAYKLLQXQLQILMLISGGWEQKISXRKLWSLRLPLKIAITIWRLSWNFIPTLKNLRLRRMASDSSCPQCRSAEEDSN

SEQ ID NO: 61974 - protein, 178 aa, Gossypium hirsutum
  Clone ID: GOSHI-09MAY01-C10792_2.pep
YGAPGTNLGDNRRQRQNTRSTTATIYVDAAFDSKYSRSASGLVVRGEMDEFLALKSVLHSAISSPFMAEAYAGLQAVKLGISLGFQSITIIGDSKTVIKKCNSTATDKSAIGAVIRDIQRKKQFFQESHFQFIHRSENRQAHELATEALRTGEETYLEDVAFTCLQRGREERWLRNPG

SEQ ID NO: 61975 - protein, 104 aa, Gossypium hirsutum
  Clone ID: GOSHI-09MAY01-C10792_1.pep
YGAPGTNLGDNIRQRQNTRSTTATIYVDAAFDNKYSRSASGMMVRGEMDEFLALKSVLHSAISSPFMAEAYAGLQAVKLGISLEDVAFTCLQRGREERWLRNPG

SEQ ID NO: 61976 - protein, 138 aa, Gossypium hirsutum
  Clone ID: LIB3829-025-Q6-K6-F7.pep
YGAPGTNLGDNIRQRQNTRSTTATIYVDAAFDNKYSRSASGMMVRGEMDEFLALKSVLHSAISSPFMAEAYAGLQAVKLGISLGFQSITIIGDSKTVIKKCNSTTIDKSAIGAVIRDIQRKKHFFKKAFPVYPDKMSV

SEQ ID NO: 61977 - protein, 98 aa, Gossypium hirsutum
  Clone ID: GOSHI-09MAY01-C10782_2.pep
MRLFPSNSSKGQSNGGSNRALLYLNVYDLTPINNYLYWFGIGIFHSGIEVHGLEYGFGAHEYPTSGAFEVEPRSCPGFIFRRSILLGSTNLSRSEFRS

SEQ ID NO: 61978 - protein, 225 aa, Gossypium hirsutum
  Clone ID: GOSHI-09MAY01-C10782_1.pep
MRLFPSNSSKGQSNGGSNRALLHLNVYDLTPINNYLYWFGIGIYHSGIEVHGLEYGFGAHEYPTSGVFEVEPRSCPGFIFRRSIVLGSTNLSRSEFRSLMEQLSQKYHGDTYHLIAKNCNHFTNEVCMQLTGKPIPGWVNRLARLGSFCNCLLPESIQVTAVRHLPDHPAYSDDERSDSAATSLTAESEEEDEEEDGVTDHHLLTIPNSNVAFLKEKTVWLTREL

SEQ ID NO: 61979 - protein, 217 aa, Gossypium hirsutum
  Clone ID: GOSHI-09MAY01-C10652_1.pep
MPGSIEPLDLCNVQVPYYFRCPISLELMRDPVTVSTGQTYDRTSIESWAATGNTTCPVTRAPLSDFTLIPNHTLRRLIQDWCVANRAFGIERIPTPKQPAEPGMVRSLLNQASTVSNPFSVRHSALVRLKGLARESEKNWNVICSHEAREILMRILFSDVSSGSSELSQEALAVLVMFQLTESECTGIGSDSNRVVYLSELLFHSSIEVRVNSASLI

SEQ ID NO: 61980 - protein, 115 aa, Gossypium hirsutum
  Clone ID: GOSHI-09MAY01-C10642_1.pep
MSGVLPLSSREDEPFIGARNSAGNGDSLAIEMEQETSTSTSSGGSSRKKNSRLKCFGVDLSPDNVAVAMVYFVQGVLGLARLAVSFYLKDDLHLDPAEAAFLFSPLTFKLFLLII

SEQ ID NO: 61981 - protein, 124 aa, Gossypium hirsutum
  Clone ID: LIB3166-028-P1-K1-E10.pep
KYTIATATLSGDRSTPKHFNLLFFFLELPPELVEVLVSCSISIANESPFPALFLAPINGSSSLEESGRTPDILFLFQIYDGLSGGERRQRELSVYGGGFDGGDREDQQKREGKMGFCDGNIEIE

SEQ ID NO: 61982 - protein, 189 aa, Gossypium hirsutum
  Clone ID: GOSHI-09MAY01-C10672_1.pep
MELTCLHNKFNLSALPHLSLPSSKNPNPRFFSRKRNNLCLASTSDTLVTGSGKEVSSKKDAELGDLKSWMHKNGFPPCKFVLKERPSYDEKHRPIHYVAACEDLRAGDVAFSVPNSLVVTLERVLGNETVAELLTTNKLSELACLALYLMYEKKQGKKSFWYPYIKELDRQRGKGHLAVESPLLWSDDE

SEQ ID NO: 61983 - protein, 292 aa, Gossypium hirsutum
  unsure (1)..(292): unsure at all Xaa locations
  Clone ID: GOSHI-09MAY01-C10612_1.pep
HASAHASAHASAHASAHASADAWVWVEGQRKEHLHWPALXFTNLRVRGAQWIANIVLGSVSFIARILPLPSNTQSGSNWKLLEPALNPLQEARLRSLQQRLGIPYDGSRLEHQEALKQLWKLAYPHRELPPLKSELWKDMGWQGPDPSTDFRGGGFISLETLIFFAKKYPQSFQRLLHKQDGNRSEWEYPFAVAGINISFMLVQMLDLQSGKPSSRAGRRFLELLAEDEMAFDDLYCVTFQMMDAQWLVKRASYMEFNEILKSTRTRVEHELSLESVXSRVKDLPAYSLVKR

SEQ ID NO: 61984 - protein, 112 aa, Gossypium hirsutum
  Clone ID: LIB3148-058-Q1-K1-A12.pep
FSLAFPANIVLGSVSFIARILPLPSNTQSGSNWKLLEPALNPLQEARLRSLQQRLGIPYDGSRLEHQEALKQLWKLAYPHRELPSLKSELWKEHGWQGPDPSTDFRGGGIIS

SEQ ID NO: 61985 - protein, 277 aa, Gossypium hirsutum
  Clone ID: GOSHI-09MAY01-C10632_1.pep
MADKVFPSSKPTATAAPGGSAAPTTTTTTTTTTTNGGTTKSHLINPTARLPYRPQPHNRRRNYRPRRNYCCCCCFWIILIVLVLALLVAITGTVLYVLYRPHRPSFTLASLRIHRLKLKTAVDSSSSHLSTLFNLTLSSKNPNSHFSFSYDPFVISCVTSNGDVLIGNGTLPAFVSDGKDESTFRGVTVASSSDLDAETVNNLRPELKTGNGVSLKVEMDTKVTAKMGGLMSKKVGIRVTCDGIKGVVPKGKLPAAANVSGAKCKVDLRIKIWKWTF

SEQ ID NO: 61986 - protein, 98 aa, Gossypium hirsutum
  Clone ID: uC-gsronu33B108b11b1.pep
CCCCFWIILIVLVLALLVAITGTVLYVFYRPHRPSFTLASLRIHRLKLKTAGDSSSSHLSTLFNLTLSSKNPNSHLSFSYDPFVISCVTSNGDVLIGN

SEQ ID NO: 61987 - protein, 114 aa, Gossypium hirsutum
  Clone ID: GOSHI-09MAY01-C10142_1.pep
TKLNPKNLLLLSSMVLLGQRLSKLYHKLENHYHHHHHQAEVDALSASLQAFRSDVSNCVNQLLHPKPGSEILSFSWIQRCFELLPVINKAFLKLVGDIDYPLSFWDVASLDEYS

SEQ ID NO: 61988 - protein, 264 aa, Gossypium hirsutum
  Clone ID: GOSHI-09MAY01-C10172_1.pep
RMDEMMRGQRGWRELAILGDKIDKFTGMIEGLIWSPKGGEGIDQVDDWAIEEGPHSDFSGPTSGSTACVAILRNNQLVVANAGDSRCVISRKGQAYNLSRDHKPDLEAEKERILKAGGFIHAGRVNGSLNLARAIGDMEFKQNKLLPAEKQTVSANPDINTVELCDDDDVLVPACDGIWDCMSSQKLRAAIPEPRLRESKLSVVCERVLDRCLAPSTATGEGCDNMTMVLVQFKKPIKCASSSEEQSSQSKSADNELEIEGTQD

SEQ ID NO: 61989 - protein, 156 aa, Gossypium hirsutum
  unsure (1)..(156): unsure at all Xaa locations
  Clone ID: GOSHI-09MAY01-C10102_1.pep
MVSSRQGFPSWISAASGTRIDFEGNADNMLKTAHDDSTTQKPIAVADVNLSFEERAFSAAGAAFISAIIVNPLDVAKTRLQAQAAGVPYKTCFETNTMFPDMRSSQSCSRLVXGSEPLCPPECHRYTGTLDVFYKVIRQXSFARLWRGTNASLALA

SEQ ID NO: 61990 - protein, 143 aa, Gossypium hirsutum
  unsure (1)..(143): unsure at all Xaa locations
  Clone ID: GOSHI-09MAY01-C10092_2.pep
MGQPLPKSWSIHTRPEISAKYQILERVGSGAYSDVYRARRLSDDLIVALKEVHDYQSAFREIEALQMLRNCPNVVLLHEYFWREDEDAVLVLEFLRTDLSAVIRDAKKRKGXGVRVGEVKRWMLQILCGVDACHRNMIVHRDL

SEQ ID NO: 61991 - protein, 163 aa, Gossypium hirsutum
  Clone ID: GOSHI-09MAY01-C10092_1.pep
MAAAAASASMSATAVLIPRVPAAVRTTHCSALPPVPPRVSTASFSSSVKLTPESRRFPFLQTKATEDTSVDTGELFDDLKEKWDKVENKTTVLLYGGGAIVAVWLSSILVGAINSVPLLPKIMELVGLGYSGWFVYRYLLFKSSRKELATDIEALKKKIAGTE

SEQ ID NO: 61992 - protein, 132 aa, Gossypium hirsutum
  Clone ID: GOSHI-09MAY01-C10072_2.pep
KETGVVVDFTHPSAVYDNVKQATAFGLRSVVHVPRITGDTISALSAFCEKASMGCLVAPTLSIGSILLQQAAISASFHYNNVEIVESRAHATHLPSPDAIQIANNLSNLGQIYNREDLSTDVSARGQVLGED

SEQ ID NO: 61993 - protein, 60 aa, Gossypium hirsutum
  Clone ID: GOSHI-09MAY01-C10072_1.pep
IYLATEPSQLIRVKSSLPKTFYCHACFVPRIRFVWVLTSLFWRVLYDSDMHVLAVSSYNS

SEQ ID NO: 61994 - protein, 64 aa, Gossypium hirsutum
  Clone ID: GOSHI-09MAY01-C10342_6.pep
LVKSSQLGCATMSPGRERARVILTNFNGISSTTRYANAMGFMVDEPEAGCAEMMKMYQEDEEDV

SEQ ID NO: 61995 - protein, 116 aa, Gossypium hirsutum
  Clone ID: GOSHI-09MAY01-C10342_5.pep
TFLLVITRGVVLEMEGYTDKPGIYQIRVSEDPLDQICDAVLVKSPQLGCAPMSPGRERARVILPNSKGISPPPRYANSMGFMVAKAEVGCAEMMKMYREDEEDAHPPGLDLFANEM

SEQ ID NO: 61996 - protein, 74 aa, Gossypium hirsutum
  Clone ID: GOSHI-09MAY01-C10342_4.pep
FIFFILLLSIFFFSFYFFIFIVFFFLFFMFFFFFFYFFFIFFFFLFFFLFYFFFFFFFFLLFIFFFLFIFYIFF

SEQ ID NO: 61997 - protein, 169 aa, Gossypium hirsutum
  Clone ID: GOSHI-09MAY01-C10342_2.pep
KKKRSKKTWPKFCCSLLLCVLPALVSATRILNNQLVVEGYVYCDTCRAGFETPKTRRLADAMVRLVCSDRKTGRVVFEKEGYTDKTGKYQIRVSEDHLDQICDAVLVKSPQLGCATMSPGRERARVILTNFNGISSTTRYAGAMGFMVDEPEAGCAEMMKMYQEDEEDV

SEQ ID NO: 61998 - protein, 161 aa, Gossypium hirsutum
  Clone ID: GOSHI-09MAY01-C10342_1.pep
MAKVLLFIALCVLPALVSATRILNNQLVVEGYVYCDTCRAGFETPKTRRLADAMVKLVCSDRKTGGVVFKKEGYTDKTGKYQIRVSEDHLDQICDAVLVKSPQLGCATMSPGRERARVILTNFNGISSTTRYANSMGFMVDEPEAGCAEMMKMYREDEEDV

SEQ ID NO: 61999 - protein, 61 aa, Gossypium hirsutum
  unsure (1)..(61): unsure at all Xaa locations
  Clone ID: uC-gsflmaxxa107h10b1.pep
KLKRKKKKKERNKEIERIKKKXIIKIYRDREKKKKKKRKKIKRRREKEEEINRIKRKIKKR

SEQ ID NO: 62000 - protein, 61 aa, Gossypium hirsutum
  Clone ID: LIB3135-058-Q1-K1-E1.pep
SPQLGCATMSPGRERARVILTNSNGISSTTRYANSMGFMVDKAEVGCAEMMKMYREDEEDV

SEQ ID NO: 62001 - protein, 112 aa, Gossypium hirsutum
  Clone ID: LIB3149-020-Q1-K1-C9.pep
EDHLDQICDAFLVKSSQLGCATMSPGRERARVILTNFNGISSTTRYANAMGFMVDEPEAGCAEMMKIIITIQISTKKKKKKKKKKKRIKKKKNKKKKKKKKKWWGLKIKAFF

SEQ ID NO: 62002 - protein, 128 aa, Gossypium hirsutum
  Clone ID: GOSHI-09MAY01-C10372_1.pep
KKKKHLQIARTRKNLKRVRRVAALLRRLFLCVCLGYGNCLKRNKTKMVAEAEVVCQQRVPVLDVPYFGKGSNIEEIDEIVAISSPVSSPKLGKVGLPADLPTPQLVGLSLSVSPPFFFNVCKDPEFKH

SEQ ID NO: 62003 - protein, 124 aa, Gossypium hirsutum
  Clone ID: LIB3166-040-P1-K1-B12.pep
SPKLGKVGLPADLPTPQLDVKSVEKITDPSIETTTVVQFVPDIRSGSFADIGPRRYMEDEHIRIDDLSSHLGPLFKFPKPSAFYGVLDGHGGPEAAAYVRKHALRFFFEDVDFPRTCEFDDVFM

SEQ ID NO: 62004 - protein, 151 aa, Gossypium hirsutum
  Clone ID: GOSHI-09MAY01-C10272_1.pep
MVDVTDKLAYFQATTGLEDPDLCTEILQAHGWDLELAISSFTSSTQPSASSTVSDSDPPDSRARTDSASASASASASASASGPITAPAPGLAWRLVTLPISVISGSLGLISGAVGLGLWAAGGVLSYSLGMIGLGSGQGGESSAGLVSVSA

SEQ ID NO: 62005 - protein, 121 aa, Gossypium hirsutum
  Clone ID: LIB3120-030-Q1-K1-A3.pep
MVDVADKLAYFQAITGLEDPDLCTEILQAHGWDLELAISSFTSSTQPSASSTVSDSDPPDSRARTDSAFASGPITAPAPGLAWRLVTLPISVISGSLGLISGAVGLGLWAAGGVLSYSLGM

SEQ ID NO: 62006 - protein, 117 aa, Gossypium hirsutum
  Clone ID: GOSHI-09MAY01-C10212_1.pep
PRVRPRVRPRVRASSPESSLDSPDIHPFRVSSSGAEESRRLTSLSSVNMAVPKGFPLSRSTSDGYEASGGEDSDRVPSRIIETSTNWSNVLFDSEQDDSIVKLKAPSSSSQANIRML

SEQ ID NO: 62007 - protein, 384 aa, Gossypium hirsutum
  unsure (1)..(384): unsure at all Xaa locations
  Clone ID: GOSHI-09MAY01-C10202_1.pep
MHSLRLASSAHSQSLFTMSAASASLALPSPLSSFRSNGPLPSRCFLRLNNPSRSRVFMSVSVGSQTVVDDALFADYKPTSAFLFPGQGAQAVGMGKEAQAVPAAAELYKKANNILGFDLLDLCINGPKEKLDSTVISQPAIYVTSLAAVELLRARDGGPQIIDSVDVTCGLSLGEYTALAFAGAFSFEXDGLKLVKLRGVAMLVAADAAKSAMVSIIRLDSEKVQQLCDAANQEVDVADKVQIANYLCPGNYAVSGGLKGVEAVEAKAKSFKARMTVRLAVAGAFHTSFMDPAVSRLEAALAATQIRTPRIPVISNVDAQPHADPETIKKILARQATSPVQWETTVKTLLTKGMKKSYELGPGKVIAGIVKRMDKSAEIENIGA

SEQ ID NO: 62008 - protein, 236 aa, Gossypium hirsutum
  unsure (1)..(236): unsure at all Xaa locations
  Clone ID: GOSHI-09MAY01-C11992_1.pep
MGFEDSDRVSKPVMIREVWSDNLESEFELISQVIDEYPFISMDTEFPGIIFRPKVDPARPYNGQFRPADHYKVLKSNVDALNLIQVGLTLTDSSGNLPGSENGTRFIWEFNFRDFDVERDPHAPDSIELLRRQGIDFDKNXKWGIDSLRFAELMMSSGLVCNDSVSWVTFHSAYDFGYLVKILTRRDLPEKLDEFLTILKVFFGDRVYDLEHMMKFCNSLYGGLDRVARTLDVNPG

SEQ ID NO: 62009 - protein, 206 aa, Gossypium hirsutum
  unsure (1)..(206): unsure at all Xaa locations
  Clone ID: GOSHI-09MAY01-C11952_1.pep
SSNSAPPASSNSNALPQEVNFSELDRVNRIGSGTGGTVYKVVHRPSSRPYALKVIYGNHEESVRRQMXEEIEILRDVDHPNVVKCHEMYDHNGEIQVLLEFMDGGSLEGILISREANLSDLARQVLSGLNYLHRRHIVHRDIKPSNLLTNSKKVVKIADFGVSRILDQTMDPCNSSVGTIAYMSPERINTDLNHGLYDGYAGDIWV

SEQ ID NO: 62010 - protein, 92 aa, Gossypium hirsutum
  unsure (1)..(92): unsure at all Xaa locations
  Clone ID: GOSHI-09MAY01-C11932_1.pep
IVQEIHKDEADDSGRADXLGSYNQLTPDEARSYALSQLPRELSKHTGFAFDSPGYESFFASQLGVYAPQKAWDVARRASMRSKPKPKPNKIN

SEQ ID NO: 62011 - protein, 191 aa, Gossypium hirsutum
  Clone ID: GOSHI-09MAY01-C11922_1.pep
MASPATIPMTTSQSTAGGGTQSQPPIATPAFRAFLSRFTSSIRQGLSQRRPWYELIDRSAMARPDNLTDAYSRIRKNLSYFKVNYITLLVVVLAFSILSHPLSLLVLLGLLAAWVFLYLFRPSDQPLVIFGRTFSDRETLGALVVVTALVVFLTSVGSLLISALLVGVAIVCIHGAFRVPKDLFLDDQEPV

SEQ ID NO: 62012 - protein, 202 aa, Gossypium hirsutum
  Clone ID: GOSHI-09MAY01-C11822_1.pep
MASFTISSPSKSSPFLSSSLSSLFTPSSLSRKSFAFNISRSPICAPNSLKCELPQPVNYENGIPTIPVLNGRILPKFVESNRMDKAVNRNGAKLKLFSGTANPALSQEIAWYMGLELGKINIKRFADGEIYVQLQESVRGCDVYLVQPTCPPANENLMELLIMIDACRRASAKNITAVIPYFGYARADRKASSIYFVINYQG

SEQ ID NO: 62013 - protein, 184 aa, Gossypium hirsutum
  unsure (1)..(184): unsure at all Xaa locations
  Clone ID: GOSHI-09MAY01-C11592_1.pep
MLNENAKNLLTRQLRVGARGSTYHGRREAFSLCEPKVLELIDNVPILQIDMVWCYFLLRDISWLSVAGIRLEKAREGLERCHGKDFSRVRLLQAGCQPELALXHMRLELLEGXVVAYHNGQLDKSKKALTSAQAKFSQLQVPDEALSHVMSMGFKERDARRALRLNNQDIRRAVDFFFEEKTKR

SEQ ID NO: 62014 - protein, 41 aa, Gossypium hirsutum
  Clone ID: LIB3166-040-P1-K1-G5.pep
QYQLQVPDEALSHVMSMGFKERDARRALRLNNQDIMRAVDF

SEQ ID NO: 62015 - protein, 149 aa, Gossypium hirsutum
  Clone ID: GOSHI-09MAY01-C11582_1.pep
KEHQHSHVQLDSQEPFFLNSLRASKTIPFLDRRLIPLLLLFPPFLLPPTHSSSQLPTARIWVGTKLRRLRSMVVDKLRLWGSETTADGRERCFIFHTFSSTGWLVRSVDLPLVMYYDSRNLLGIRICSILMTKMWSLKKFLSHFCQKHH

SEQ ID NO: 62016 - protein, 115 aa, Gossypium hirsutum
  Clone ID: uC-gsflmaxxa090b07b1.pep
KEHQHSHVQLDSQEPFFLNSLRASKTIPFFRPTANSSASSFSSVSSSSNAFIESTANGTYLGWNKAPEIEIDGGGQAKAMGNKDKVITVVLLGWLGATNKHLSRYVEWYNSRGIH

SEQ ID NO: 62017 - protein, 111 aa, Gossypium hirsutum
  unsure (1)..(111): unsure at all Xaa locations
  Clone ID: GOSHI-09MAY01-C11552_1.pep
NRKRKHVFFGWKGPSGFSASSTAEEVTXGIDGSALAAIGTGASSGMGVETTRVLALRGVHVVMAVRNADAGRNVKESILKEIPSAXKIDVMELDLSSMASVRNSYKSTLIS

SEQ ID NO: 62018 - protein, 115 aa, Gossypium hirsutum
  Clone ID: GOSHI-09MAY01-C11482_1.pep
FFIRSKMSYSKRSRYSSSPSPNKRYTRSVSRSLSSSRSRSRSKSRSAESDVENPGNSLYVTGLSPRITKRELEKHFASEGNVIDVHLVVDPRTRDSRGFGFVTMATNKEADRCIK

SEQ ID NO: 62019 - protein, 211 aa, Gossypium hirsutum
  unsure (1)..(211): unsure at all Xaa locations
  Clone ID: GOSHI-09MAY01-C11742_1.pep
DRQSKWALRVLYGYINAHRMFNDDVQGTAGVAIAGLLGAVRAQGRPMIDFPKQKIVVAGAGSAGIGVVNAARKTMARMLGNTEHAFDSAKSQFWVVDANGLITDERENIDPDALPFARNTNEAGSSRIKGGFQVWWKMVRHVRPDVLLELSGVGGFVLIICVXALKGSTFTXPAIFAMFNPSNILDVLKEAFHWWHTLFSVESFEICLDRP

SEQ ID NO: 62020 - protein, 176 aa, Gossypium hirsutum
  unsure (1)..(176): unsure at all Xaa locations
  Clone ID: GOSHI-09MAY01-C11772_1.pep
PHIREETDFINLLTGEKPEEILFRLNPNQIMXDEFLGAKILWINGYNNLELKIRTAVXRRVLHPYLQHMHSIYDDLDEKKRDLKLYVNVAGHGDDHKGRWRCVPFTHPSTFETIAMESDLKNKVKSDLESFLKAKQYYHRLGRVWKRSYLLYGPSGTGKSSFIAALANFLSYDVTT

SEQ ID NO: 62021 - protein, 145 aa, Gossypium hirsutum
  unsure (1)..(145): unsure at all Xaa locations
  Clone ID: GOSHI-09MAY01-C11762_1.pep
KRHKYFTLCLSQVGIGAVKSNAGLFIWMDLRKLLKEKTFDAEMDLWRVIINEVKLNVSPGSSFHCDEPGWFRVCFANMDDNTXEVALLRITTFYXKHNEAVRPRKLCRRASLKLSLSRRRDDFMSPNMMSPHSPIPQSPLVRART

SEQ ID NO: 62022 - protein, 97 aa, Gossypium hirsutum
  unsure (1)..(97): unsure at all Xaa locations
  Clone ID: LIB3166-043-P1-K1-D2.pep
IVILAFSGLQNQITNRFDKFSYASVSEHNSPASQSPWRSQFGHXWLQSSFFHPLDSAFHQSQTXTLKLMQVPPFKLFLCVIPPVRVSALANARKPCL

SEQ ID NO: 62023 - protein, 94 aa, Gossypium hirsutum
  Clone ID: LIB3146-034-Q1-K1-F1.pep
MRCIDVQPSNEMTVDEFKAWLRRFDADHDGRINQEELKEALHSLRVRFGWWKARQGMKEADCNHDGQIENAKEIEKLVNYAQKRLHIKIYQSDW

SEQ ID NO: 62024 - protein, 240 aa, Gossypium hirsutum
  Clone ID: GOSHI-09MAY01-C11722_1.pep
ECRSDIHRLNAPLLAIYESLIPPKEEKTKQQQLLALLEKLVWKEWPQAKLFPYGSCVNDFGVSRSDIDICLALNEDINNKSEILLKLADILQLDNLQNVQALTRARVPIVKLMDPVTGISCDICINNVLAVVNTKLLRDYAQIDARLRQLAFIVKHWAKSRGVNETYRGTLSSYAYVLMCIHFLQQRRPAILPCLQGMEKTYNVTVDNIECAYFDQIEKLLNFGSSNKETVAQLVWGFFN

SEQ ID NO: 62025 - protein, 158 aa, Gossypium hirsutum
  Clone ID: LIB3543-022-Q1-K1-C9.pep
HASDREKEYRKDNRGQRLLSQRERMLKRRTDCRSDILRLNSPLLAIYESLIPPVEEKAKQKQLLALLEKLVCKEWPEARLYLYGSCENSFGVSKSDIDICLAFNEDIHDKSEILLKLADILQSDNLQNVQALTRARVPIVKLMDPVTGISCDICINNV

SEQ ID NO: 62026 - protein, 316 aa, Gossypium hirsutum
  unsure (1)..(316): unsure at all Xaa locations
  Clone ID: GOSHI-09MAY01-C11682_1.pep
PTRPVDEYGLIRQPKYGHLKQLHKAVKMCERALVSADPVVTSLGNFQQAHTYTSESGDCAAFLSNYNTESAARVLFNNMHYNLPPWSISILPDCRNVVFNTAKVGVQTSQMQMLPTNSKMLSWETYDEDTSALDDSLMISANGLLEQINVTRDASDYLWYITSVDIGSSESFLRGGELPTLIVQSTGHAVHIFINGQLSGSAFGTRENRRFTFTGKVNLRAGTNKIALLSVAVGLPNVGGHFETWNTGILGPVALHGLDQGKRDLSWQKWTYQVGLKGEAMNLDSPNGISSLEWMEGSLAAQTQXPLKWHKAYFDA

SEQ ID NO: 62027 - protein, 101 aa, Gossypium hirsutum
  unsure (1)..(101): unsure at all Xaa locations
  Clone ID: GOSHI-09MAY01-C11652_1.pep
GEYKSDLFLKICQDCGIVRHFTVGGTPQQNGVAERMNRGRVGKVRCMLSNAGLDRKFWAEAVTYAQHLINHLPSSAINGKTPLPXWYGKPATEYDTLRIFG

SEQ ID NO: 62028 - protein, 179 aa, Gossypium hirsutum
  Clone ID: GOSHI-09MAY01-C11612_1.pep
PTRPPTRPPTRPVDSQGRQLTTKGKIDVTLQDGRTFEGTVVNSDLHSDIAIVKFKSKTPLPTAKLGSSSRLRPGDWGIAMGTPLSLQNTVTAGIVSCADRKSSDLGLGGMRREYLQTDCAINAGNSGGPLANIDGEIVGVNIMKVAAADGLSFSIPIDSVSKIIEHPKKSGYNYISLWN

SEQ ID NO: 62029 - protein, 124 aa, Gossypium hirsutum
  unsure (1)..(124): unsure at all Xaa locations
  Clone ID: GOSHI-09MAY01-C11602_2.pep
MASLLNPSTLLPPTKPFLPTRSRLTSSPTLRVNSLTPRLPSPSTRPRRVIKVAAALDGDYSSQRSCSNEQRGTNMVPGWEYYPWLIGMGVPKDPASTREPMIGTXYLNTLATGLGSMEEAKKNM

SEQ ID NO: 62030 - protein, 226 aa, Gossypium hirsutum
  Clone ID: GOSHI-09MAY01-C11602_1.pep
RVRPPVRPRVRSLVRPFLPTRVRLTSSPTLRVNSLTPRLPSPSTRPRRVIKVAAALDGDYSSKRSSSNEQRETIMLPGCDYNHWLIVMEFPKDPAPTREQMIETYLNTLATVLGSMEEAKKNMYAFSTTTYTGFQCTVSEETSEKFKGLPGVLWVLPDSYIDVKNKDYGGDKYVNGEIIPCKYPTYQPKARKESKYVSKKYERRKDGPPAGQFRPKQAASQSESSS

SEQ ID NO: 62031 - protein, 74 aa, Gossypium hirsutum
  unsure (1)..(74): unsure at all Xaa locations
  Clone ID: LIB3829-023-Q6-K6-E2.pep
SVKIGXNDKIXCWXRXFREXYFYKLMVIXXXRXXYPPPPPQGVXXLDKKKQSSAAATLITRRGRVDGDAPRASQ

SEQ ID NO: 62032 - protein, 42 aa, Gossypium hirsutum
  unsure (1)..(42): unsure at all Xaa locations
  Clone ID: uC-gsflmaxxa095b06b1.pep
SRGAFIRFLCAVSEETSXKFKGLPGVLWVLPDLYIDVKNKLY

SEQ ID NO: 62033 - protein, 54 aa, Gossypium hirsutum
  Clone ID: GOSHI-09MAY01-C11622_1.pep
LNHHLNTSFSTKLNYIATKTENMLLQHAQLLQHASKLYELNKIIIAACTLLTIT

SEQ ID NO: 62034 - protein, 156 aa, Gossypium hirsutum
  Clone ID: GOSHI-09MAY01-C11162_1.pep
MASWNSIPLEITYDTFGWLAFFSWSISFYPQVILNFRRKSVVGLNFDFVLLNLTKHSSYMIYNVCLYFSPVIQRQYFEKYGSGEMIPVAANDVAFSIHAVLLTAITLFQIVIFDRGTQKVSKISVGIVIAVWLIAAICFFIALPSQSWLWLSPSLT

SEQ ID NO: 62035 - protein, 207 aa, Gossypium hirsutum
  Clone ID: GOSHI-09MAY01-C11112_6.pep
MQTQMRPPSTPAYPPYPPTQSSNPSPPEALAHSTPMQVPFSGVGGPLSSCVDTIPYGYRVPGRTAPQPIKGTFEAQPRDGYQVPVSHPPLPPGSAYMMYDSEGGRAHHPPQQPHFSQGGYPPANVSLQTPQPGPSPNVMMRNSSHSQYVRNHPYSDLIEKLVSMGFRGDHIASVIHRMEESGQAVDFNAVLDRLNVQSSGGTQRGGW

SEQ ID NO: 62036 - protein, 174 aa, Gossypium hirsutum
  unsure (1)..(174): unsure at all Xaa locations
  Clone ID: GOSHI-09MAY01-C11112_4.pep
RAPRVAHASATRPVLGLQMEXKRREMKDNPVRQQELAAYFTHCXLQLPHLRLALLNAMTVCYKAKNMATAGNFARRLLETNPTNENQAKTARQVLQAAERNMTDASQLNYDFRNPFVTWGATYVPIYRGQKDVSCPYWTSRFVPSQEGQLGTVCDLALVGADASGLLCSASQIR

SEQ ID NO: 62037 - protein, 375 aa, Gossypium hirsutum
  Clone ID: GOSHI-09MAY01-C11112_3.pep
MVDADGLQNGDVTAIFEGAEVAEGSEEEGGWDLEDLELPPEADTPKVSGNARSIFVAPTPGMPVSQIWVQKSSLAAEHAAAGNFDTAMRLLSRQLGIRNFSPLKSLFLDLHTGSHSYLRAFSSAPVVSLAVERGWSESASPNVRCPPALVFNFSQLDEKLKAGYKATTAGKFTEALRLFLSILHTIPLIVVESRREVDEVKELIIIAKEYVLGLQMELKRRELKDNPVRQQELAAYFTHCNLQLPHLRLALLNAMTICYKAKNLATAGNFARRLLETNPTNENQAKTARQVLQAAERKMTDASQLNYDFRNPFVTCGATYVPIYRGQMDVSCPYCTARFVPSRDGQLCAVCDIAAVGADASGLLCSPSHIRNQIR

SEQ ID NO: 62038 - protein, 167 aa, Gossypium hirsutum
  unsure (1)..(167): unsure at all Xaa locations
  Clone ID: GOSHI-09MAY01-C11112_2.pep
AWGTAGQLWAGPTRPRREMKDNPVRRGELAAYFTHCNLQLPHLRLALLNPMTICYKAKNLATAGNFARRLLETNPTNENQAKTAXQVLQAAERKMTDASQLNYDFRNPFVTCGATYVPIYRGQKDVSCPYCTTRFVPTQEGQLCTICDLAVIGADASGLLCSPSQIR

SEQ ID NO: 62039 - protein, 262 aa, Gossypium hirsutum
  Clone ID: GOSHI-09MAY01-C11112_1.pep
DRSVFPVFYASIASAAPVVSLAVDSGWSESASPNVRGPPALVFNFSQLDEKLKAGYKATTDGKFTEALRLFLNILHTIPLIVVESRREVDEVKELIIIAKEYVLGLQMELKRRELKDNPVRQQELAAYFTHCNLQLPHLRLALRNAMTICYKAKNLATAANFARRLLETNPNENHAKAARQVLQASERNMTDASQLNYDFRNPFVTCGATYVPIYRGQKDVSCPYCTTRFVPTQEGQLCTICDLAVIGADASGLLCSPSQIR

SEQ ID NO: 62040 - protein, 112 aa, Gossypium hirsutum
  unsure (1)..(112): unsure at all Xaa locations
  Clone ID: uC-gsronu33B154f02b2.pep
CICWEGYEYLYDAYQAKTAGHVLHAEDWEMTDACHLSYDYLSPSWTCGATYVPIDLCQMYQFXACCTARFVPSRDGQLWAVCDFAVRGADASXLLCSPYKIALKFDDCATFV

SEQ ID NO: 62041 - protein, 49 aa, Gossypium hirsutum
  unsure (1)..(49): unsure at all Xaa locations
  Clone ID: LIB3145-052-Q1-K1-E4.pep
GFRGDHIASVIXRMEESGQAVDFNAVLDRLNVQSSGGTQRRGMEMPLLG

SEQ ID NO: 62042 - protein, 425 aa, Gossypium hirsutum
  Clone ID: GOSHI-09MAY01-C11092_1.pep
MKTHFFPLVFLLIFSLAQGLNPKCAIQDHGSNLQVFHVYSPCSPFKPSKPLSWEEDVLQTLAKDQARVQFLSSLVAKKSVVPIASGRQIVQSPTYIVKANIGTPPQPMLMAMDTSSDAAWVPCTGCIGCSSTAFDFAKSTTFKTLGCQAAQCKQVPNPTCGGSACAFNMTYGGSTIAGNLSQDTITLATDPIPNYTFGCLQKTAGSSVPPQGVLGLGRGPLSLLSQSQNLYQSTFSYCLPSIRSPNFSGSLRLGPSGQPVRIKYTPLLKNPRRPSLYYVNLIGIRVGRRIVDIPPSAIAFNPSTGAGTIIDSGTVFTRLVEPAYVAVRDAFRRRVRVANVTSLGGFDTCYSVPINAPTITFMFSGMNVTLPQENLLLHSTAGSITCLAMASAPALNVIANMQQQNHRVVFDVPNSRMGVARERCS

SEQ ID NO: 62043 - protein, 164 aa, Gossypium hirsutum
  Clone ID: LIB3829-019-Q6-K6-E7.pep
KPTFFPWFSSSFFLAQGLNPKCDIQDHGSNLQVFHVYSPCSPLKPSKPLSWEEDVLQTLAKDQARVQFLSSLVAKKSVVPIASGRQIVQSPTYIVKANIGTPPQTMLMAMDTSSDAAWVPCTGCIGCSSTAFDFAKSTTFKTLGCQAAQCKQVIKLPSFHILPA

SEQ ID NO: 62044 - protein, 98 aa, Gossypium hirsutum
  Clone ID: uC-gsflnu33B111h06b1.pep
NLKTRHNKSKGKPVTRTSLQYKVIYNYKNFTFIINQIYSAFNQHQHCFPKVRRKRPHTFYEHRSRATPILEFGTSKTTLWFCCCILAITFSAGADAIK

SEQ ID NO: 62045 - protein, 113 aa, Gossypium hirsutum
  Clone ID: uC-gsronu33B042a08b1.pep
FLKNPRRPSLYYVNLIGIRVGRRIVDIPPSAIAFNPSTGAGTIIDSGTVFTRLVEPAYVAVRDAFRRLVWVANVTSLVGFRPHVSWSLSMLPPFHFFFCSCNSTSPLVNPSAP

SEQ ID NO: 62046 - protein, 75 aa, Gossypium hirsutum
  Clone ID: LIB3493-038-P1-M1-E8.pep
TLANDQARVQLLYSPHAKKSAVPIALCRQSVQSPTYIVKANIGTPPHTMLMALDTSSDASWVPCTGCIGCSSTAF

SEQ ID NO: 62047 - protein, 43 aa, Gossypium hirsutum
  Clone ID: uC-gsronu33B039h08b1.pep
IPLLKNPRRPSLYYVNLIGIRAGRCIARLCSKCSFLASRDDLP

SEQ ID NO: 62048 - protein, 174 aa, Gossypium hirsutum
  Clone ID: GOSHI-09MAY01-C11042_1.pep
EALFYCGVAIFLLLIDRLRRPTGLDSTAETLASHLGQRISSVAILVLSLITPMVTMGLVWPWTGPAASATLAPYLVGIVVQFAFEQYARYQKSPSWPVIPIIFQVYRLHQLNRAAQLVTALSFTVKGAEMTTYNMAINSSLGTLLNVLQCLGVICIWSLSSFLMRFYPSTTRIT

SEQ ID NO: 62049 - protein, 118 aa, Gossypium hirsutum
  unsure (1)..(118): unsure at all Xaa locations
  Clone ID: GOSHI-09MAY01-C11012_6.pep
MTFKRRNGGRNKHGRGHVKFIRCSNCGKCCPKDKSIKRFLVRNIVEQAAVRDVQEAGVYDTYTLPKLYVKMQYCVSCAXIHSHVXVRVRSRTNRRDRDPPQRFIRRXDDMPKPGQPGQ

SEQ ID NO: 62050 - protein, 128 aa, Gossypium hirsutum
  Clone ID: GOSHI-09MAY01-C11012_4.pep
MTFKRGNGGRNKHGRGHVKFIRCSNCGKCCPKDKSIKRFLVRNIVEQAAVRDVQEACVYDTYTLPKLYVKMQYCVSCAIHSHVVRVRSRTDRRNRDPPQRFIRRRDDMPKPGQPGQAPRPGVAVPARP

SEQ ID NO: 62051 - protein, 128 aa, Gossypium hirsutum
  Clone ID: GOSHI-09MAY01-C11012_3.pep
MTFKRRNGGRNKHGRGHVKFIRCSNCGKCCPKDKSIKRFLVRNIVEQAAVRDVQEACVYDTYTLPKLYVKMQYCVSCAIHSHVVRVRSRTDRRKRDPPARFIRRRDDMPKPGQPGQAPRPGVAVPARA

SEQ ID NO: 62052 - protein, 128 aa, Gossypium hirsutum
  Clone ID: GOSHI-09MAY01-C11012_2.pep
MTFKRRNGGRNKHGRGHVKFIRCSNCGKCCPKDKSIKRFLVRNIVEQAAVRDVQEACVYDTYTLPKLYVKMQYCVSCAIHSHVVRVRSRTDRRKRDPPQRFIRRRDDMPKPGQPGQAPRPGVAAPARA

SEQ ID NO: 62053 - protein, 85 aa, Gossypium hirsutum
  unsure (1)..(85): unsure at all Xaa locations
  Clone ID: GOSHI-09MAY01-C11012_1.pep
MTFKRRNGGRNKHGRGHVKFIRCSNCGKCCPKDKSIKRFLVRNIVEQAAVRDVQEACVYDTYTLPKLYVKMQXCVSCAXIHSHLL

SEQ ID NO: 62054 - protein, 78 aa, Gossypium hirsutum
  unsure (1)..(78): unsure at all Xaa locations
  Clone ID: LIB3829-022-Q6-K6-C2.pep
AMNLSXRREMGGPQQGMGRGRMXXIHPAVLNPVANALPQXXKSFLLXXSXXRNNCVWGGVGVXEMSKXAPAFIEHLYI

SEQ ID NO: 62055 - protein, 312 aa, Gossypium hirsutum
  Clone ID: GOSHI-09MAY01-C11002_1.pep
SLPRPSGPNQSDMIPPTLQLPGSRLKTTLSARDMDLDMELLGLECRRRRQQQQQLIDEISGLSSPTSWTDASAVAAAGARAGELNRFGGVKPTNLDDIFGSLDPSIMPQIQGLSLDAAASQLQSPTGVHTRQNINQQLRASYPTNLPSSPVRASSSFGIDPSGPSAAAVLSSRSSAFAKRSQSFIERTAVNRHSGLSSPASSASAMPSNLSDWGSPDGKLDWGIQGEELNKLRKSASFGFRSSGSNLGNAPRSISSTTDEPDVSWVQSLVVDPPSAGQLSFEEEQCHRNPGGAELLPAWVEQIYMDQKQMVA

SEQ ID NO: 62056 - protein, 139 aa, Gossypium hirsutum
  Clone ID: uC-gsflnu33B100a08b1.pep
SIASGPNQSNIIPSTLQLPGSRLKTTLSARDMDLDMELLGLECRRRRQQQQQLIDEISGLSSPTSWNNSTAFSAAGDRTGELNRFGGVKPTNLDDIFGSLDPSIMPQIQGLSLDAAASQLQSPTGVHTRQNINQQLRAS

SEQ ID NO: 62057 - protein, 117 aa, Gossypium hirsutum
  Clone ID: LIB3189-004-P1-K1-B11.pep
MQGNFFNSMRMFLKDAEEEIAKIKAYERKALLQVKEVTEYFHGNATKEEAHPFRIFMIVKDFLSILDHVCKEVGQMQDRTMVGSARSFRISATASLPVLSRYNVGQDASSDDESLSP

SEQ ID NO: 62058 - protein, 98 aa, Gossypium hirsutum
  Clone ID: LIB3166-038-P1-K1-B3.pep
IAKIKDDERKALLLVKEVTEYFHGNATKEEAHPLRIFMIVRDFLSILDHVCKEVGLLQDRTMVGAARSFRISATASLPVLSRYNVRQDGSSDDESLAP

SEQ ID NO: 62059 - protein, 133 aa, Gossypium hirsutum
  Clone ID: GOSHI-09MAY01-C11302_1.pep
MPSSPLILLSKTMIFPDQKSNLEDLKLSVSDLPMLSCHYIQKGCLFTRPSIPINSLISLLKQSLSKTLSFFPPLAGRFYTDPNGYIYITCNDAGVEFHHAKCDTKFIRDVIGPVHVPQLVKEFFTFDKTVRYR

SEQ ID NO: 62060 - protein, 98 aa, Gossypium hirsutum
  Clone ID: GOSHI-09MAY01-C11322_6.pep
KLYWGIAADGSVVISDDLDVIKEGCAKSFAPFPTGFMFHSEGGLMSFEHPMNKIRAMPRVDSEGVICGANFKVDVYTRVNSIPRPARPTNWTDHWDSH

SEQ ID NO: 62061 - protein, 255 aa, Gossypium hirsutum
  Clone ID: GOSHI-09MAY01-C11322_3.pep
MLAIFHKAFANPPEELNSPASHKSTKKPKQPEETLNDFLSHHPHNTFSMSFGNAAVLAYVRHERAASVHQRLFCGFDDIYCLFLGSLNNLFMLNRQYGLSKGSNEAMFVIEAYRTLRDRGPYPADQVVKDLEGSFAFVIYDSKTGTVFAALGSDGGVKLYWGIAADGSVVISDDLDVIKEGCAKSFAPFPTGFMFHSEGGLMSFEHPMNKIRAMPRVDSEGVICGANFKVDVYSRVNSIPRVGSATNWTDHWDSH

SEQ ID NO: 62062 - protein, 77 aa, Gossypium hirsutum
  Clone ID: GOSHI-09MAY01-C11322_2.pep
MSDQGKPLPKFGEWDVNDPASADGFTVIFNKARDEKKTGGKPESLEKADTHGKPGADPNKPQSKKWLCCVQAPQAES

SEQ ID NO: 62063 - protein, 78 aa, Gossypium hirsutum
  Clone ID: GOSHI-09MAY01-C11322_1.pep
MSEDKGRPLPKFGEWDVNDPASAEGFTVIFNKARDEKKTGSKPESPAKADAHGKPGPDPSKPQSKKWLCCVQAPPAES

SEQ ID NO: 62064 - protein, 145 aa, Gossypium hirsutum
  unsure (1)..(145): unsure at all Xaa locations
  Clone ID: AI055094.1.pep
NSPASHKSTKKPKQPEETLNDFLSHHPHNTFSMSFGNAAVLAYVRHERAASVHQRLFCGFDDIYCLFLGSLNNLFMLNRQYXLSKGSNGLMFVIEAYRTLKEXGPYXADXGCGILERKLCLWLNLWTGKTGTPVWLHLGVWIGWK

SEQ ID NO: 62065 - protein, 179 aa, Gossypium hirsutum
  Clone ID: AI054775.1.pep
MLAIFHKAFANPPEELNSPASHKSTKKPKQPEETLNDFLSHHPHNTFFMSFGNAAVLAYVRHERAASVHQRLFCGFDDIYCLFLGSLNNLFMLNRQYGLSKGSNEAMFVIEAYRTLRDRGPYPADQVVKDLEGSSAFVIYDSKTGTVYAALGSDGGIETVCGIAADGFVVISGELDCLI

SEQ ID NO: 62066 - protein, 82 aa, Gossypium hirsutum
  Clone ID: LIB3189-024-P1-K1-F2.pep
MLAIFHKAFANPPEELKSPACHKSTKKPKQPEETLNDFLSHDPHNTLSMSFGNAAVLAYVRHERAASVHQRLCRELALIVSL

SEQ ID NO: 62067 - protein, 59 aa, Gossypium hirsutum
  Clone ID: LIB3272-021-P1-K1-E6.pep
HQQINSASNNTITHQISTYRYSMCVYLFYPHPTISKSYLCLRIHGEGLECTCESSYTCR

SEQ ID NO: 62068 - protein, 361 aa, Gossypium hirsutum
  Clone ID: GOSHI-09MAY01-C12972_1.pep
MEKWYGVSGLVLVLSLFFGVKGEPQVPCYFIFGDSLVDNGNNNELRSLARADYLPYGIDFANGPTGRFSNGRTTVDVIAELLGFDDYIPPYSTASGRQILGGVNYASAAAGIREETGQQLGARISFSGQVKNYQQTVQQVVNVLGDEDSAANYLRQCIYSIGLGSNDYLNNYFMPLYYSTSRQYSPEEYANSLIQEYTEQLQALYNYGARKFVLIGLGQIGCSPNELAQNSGDGRTCVERINAANRIFNNKLRGLVDQFNNAKSDAKFVYINAYGIFQDITSNPAAYGFKVTNAGCCGVGRNNGQITCLPFQTPCQNRDEYLFWDAFHPSEAANVIIGRRSYSAQSPTDAYPIDIRRLAQL

SEQ ID NO: 62069 - protein, 203 aa, Gossypium hirsutum
  Clone ID: GOSHI-09MAY01-C12802_1.pep
PTRPSASASEDRPDMVNMSPEEAPFEQNNEGSSLYNFLYPDKDLLPDDKEMTIFDHLEELRQRIFVSVLAVGAAILGCFAFSKELIVFLEAPVKAQGVRFLQLAPGEFFFTTLKVSGYCGLLLGSPVILYEIIASVLPGLTRAERRFLGPIVLGSSVLFYAGIAFSYLVLTPAALNFFVSYAERVVESLWFIDQYFELVLMLM

SEQ ID NO: 62070 - protein, 101 aa, Gossypium hirsutum
  Clone ID: GOSHI-09MAY01-C12822_1.pep
CDDDEFMVLACVRFWDCMSSQTLVDFIHDQLKSESKLSVVCERVLDKCLAPSTATGEGCDNMTMILVQFKKPIKSTSSAEEQSSNSESTETEPKLEGNAEK

SEQ ID NO: 62071 - protein, 89 aa, Gossypium hirsutum
  Clone ID: LIB3145-015-Q1-K1-C11.pep
NFRFHFYFIISIIIFLFVWRKDFYLRNSSQVGRRFLSICSSRSSIYSFLSRFPRPRLLFFLGRFFCLFNLFFNSKHCFFFFFNSGGFKP

SEQ ID NO: 62072 - protein, 79 aa, Gossypium hirsutum
  Clone ID: LIB3166-053-P1-K1-H4.pep
EPNKKRDLIEFSFSFLFYNFYYYFCLFGAKISIHASALKLVVVFSRSVLHVRRVIAFSHDFLALDYCFLSVKFGGGKIS

SEQ ID NO: 62073 - protein, 140 aa, Gossypium hirsutum
  unsure (1)..(140): unsure at all Xaa locations
  Clone ID: GOSHI-09MAY01-C12512_1.pep
RRRVQICMCLLHPFQVLWLDXEVTVDLDVVARMDLLDFFKEECEQRGATVVYATHIFDGLETWASHLAYIQDGQLKRSAKLTEINELKSSENLLSVVEAWLRSETKCEKKKPSNSPAQVQKSSPFGTSPFMSSRHMAYYR

SEQ ID NO: 62074 - protein, 164 aa, Gossypium hirsutum
  Clone ID: GOSHI-09MAY01-C12532_2.pep
MAAPPARARADYDYLIKLLLIGDSGVGKSCLLLRFSDGSFTTSFITTIGIDFKIRTIELDGKRIKLQIWDTAGQERFRTITTAYYRGAMGILLVYDVTDESSFNNIRNWIRNIEQHASDNVNKILVRRRKTASLSAKEKDPKSLKAPIMDIRKGLGNTHLEFLG

SEQ ID NO: 62075 - protein, 216 aa, Gossypium hirsutum
  Clone ID: GOSHI-09MAY01-C12532_1.pep
MAAPPARARADYDYLIKLLLIGDSGVGKSCLLLRFSDGSFTTSFITTIGIDFKIRTIELDGKRIKLQIWDTAGQERFRTITTAYYRGAMGILLVYDVTDESSFNNIRNWIRNIEQHASDNVNKILVGNKADMDESKRAVPTSKGQALADEYGIKFFETSAKTNLNVEEVFFSIARDIKQRLADTDSKAEPQAIKINQQDQGVGAAAAAQKSSCCGA

SEQ ID NO: 62076 - protein, 152 aa, Gossypium hirsutum
  unsure (1)..(152): unsure at all Xaa locations
  Clone ID: AI731246.1.pep
MAAPPARARADYDYLIKLLLIGDSGVGKSCLLLRFSDGSFTTSFITTIGIDFKIRTIELDGKRIKLQIWDTAGQERFRTITTAYYRGAMGILLVYDVTDESSFNNIRNWIRYIEQHASDNVNQVLVGYKVDLNKXKRXVPTPKGXLSLKNMA

SEQ ID NO: 62077 - protein, 164 aa, Gossypium hirsutum
  Clone ID: LIB3584-011-P1-K1-D7.pep
MAAPPARARADYDYLIKLLLIGDSGVGKSCLLWRVSDGSFTTSFITTIGIDFKIRTIELDGKRIKLQIWDTAGQERFRTITTAYYRGAMGILLVYDVTDESSFNNIRNWIRNIEQHASDNVNKILVGNKADMDESKRAGPTSKGQALADEYRIKFFETCAKTNL

SEQ ID NO: 62078 - protein, 101 aa, Gossypium hirsutum
  unsure (1)..(101): unsure at all Xaa locations
  Clone ID: LIB3493-020-P1-M1-H1.pep
MAAPPARARADYDYLIKLLLIGDSGVGKSCLALRFSDGSFTTSFITTIGIDFKIRTIELDGKRXKLQIWDTAWQERFXTITTAYYRGPWAYCWVCVTDESF

SEQ ID NO: 62079 - protein, 66 aa, Gossypium hirsutum
  Clone ID: GOSHI-09MAY01-C12482_2.pep
IANACNGKPARKTHNASKVIESLQPTATNKGINKCSKLNPTIPKFQSLKRHGYHSKIVKPIGLQDC

SEQ ID NO: 62080 - protein, 110 aa, Gossypium hirsutum
  Clone ID: LIB3828-034-Q6-N6-F6.pep
LQDAGTGQPMPLQPLATALANATPEQQRTMLGESLYPLVEHLECDAAAKVTGMLLEMDQTEVLHVIESPEALKAKVAEALKVLKSVAAKPQVNNPADQLASLSLNDNHAS

SEQ ID NO: 62081 - protein, 132 aa, Gossypium hirsutum
  unsure (1)..(132): unsure at all Xaa locations
  Clone ID: GOSHI-09MAY01-C12442_1.pep
MSCNGMAFFPANFMLQSPHEEDHQPSTSINQMLPSCPPQDFHGVASFLGKRSMSFSGIDVCEEANGEDDLSDDGSQAGEKKRRLNMEQVKTLEKNFELGNKLEPERKXQLARALGLQPRQIAIWFQNRRPRW

SEQ ID NO: 62082 - protein, 179 aa, Gossypium hirsutum
  Clone ID: GOSHI-09MAY01-C12402_1.pep
MGSVTVKPSLNTFCFIPESPKIRCHSPHFSFLKLRPSPVSFPFKSPSDPINSSPKCKIRSFMVNPLLVLVPVLRSIRGLAFSHSQKWASRLHDCITESEEILDQYNGNYLQSGGLGMALLSVTASAKVRISPFVATLAANPTFVSGLCAWFIAQSMKIFLNFFIERKWDFRILLPSGGC

SEQ ID NO: 62083 - protein, 150 aa, Gossypium hirsutum
  Clone ID: GOSHI-09MAY01-C12772_2.pep
IIYLGKPDGPTCHTGSETCYFTSIGDLFKEQEVEETNLALTTLYSLEATISKRELELAGKHGKPSWTKRLLLDENFLCSKIREEADELCRMLEEKKDSSCIASKMADVIYHAMVLLRRKDVKIENVLEVLRRRFSQSGIEEKQSRASTES

SEQ ID NO: 62084 - protein, 86 aa, Gossypium hirsutum
  unsure (1)..(86): unsure at all Xaa locations
  Clone ID: AI055211.1.pep
VLLQVLYLVYPLSLSIHFSLFFSFSSFLSSQNPFSVVEFTRFVEYAKNGXFSWEEADEVVPNAGGERGQFMYCLRNGRCDLPCYGL

SEQ ID NO: 62085 - protein, 75 aa, Gossypium hirsutum
  Clone ID: LIB3149-049-Q1-K1-F5.pep
LFLAFCTKYSRKFYLLELTYVSYEGLTTSAFLPLCGGLLQAQGLYPREMRYSFSCKNKWGTRITPMALWPDKSFA

SEQ ID NO: 62086 - protein, 187 aa, Gossypium hirsutum
  unsure (1)..(187): unsure at all Xaa locations
  Clone ID: LIB3831-001-Q1-K6-F12.pep
HNCNHSRDLHLKLQWRFHLSLVFNLDALATTITSRKATFFSRSRATLWTKGETSNNFINIYDIFVDCDRDSIIYLXGKPDGPTCYTGSETCYFTSIGDLFKEQEVEETNLALTTLYSLEATISKRELELAGKHGKPSWTKRLLLDENFLCSKIREEADELCRMLEEKKDSSCIASXMADVIYHAMVL

SEQ ID NO: 62087 - protein, 77 aa, Gossypium hirsutum
  unsure (1)..(77): unsure at all Xaa locations
  Clone ID: LIB3582-053-P1-K1-H8.pep
KQLAASSSKCTLKKKYIGFNVDIVGNFPQQRKNNSIYPFLIVESTTNXSRKEXTSFETTPLQVEHKGEMKSPLKLQM

SEQ ID NO: 62088 - protein, 52 aa, Gossypium hirsutum
  Clone ID: LIB3145-009-Q1-K1-G10.pep
FMYCLKNGKCDLPCYGFAKAQTCKDRKCSISSRRRFSQSAIEEKQSRASTKS

SEQ ID NO: 62089 - protein, 76 aa, Gossypium hirsutum
  unsure (1)..(76): unsure at all Xaa locations
  Clone ID: LIB3135-031-Q1-K1-D2.pep
PTRSPTRXIAQNVDTGAILMQGFVNRDALATTITSRKATFFSRSRATLWTKGETSNNFINIYDIFVDCDRDSVRSK

SEQ ID NO: 62090 - protein, 51 aa, Gossypium hirsutum
  Clone ID: LIB3146-016-Q1-K1-B9.pep
ADFKKQNASYCYTRKGQVKSKYMYFENKSKKLVIMTDIGYFEFIENNLSMG

SEQ ID NO: 62091 - protein, 411 aa, Gossypium hirsutum
  Clone ID: GOSHI-09MAY01-C12762_1.pep
MWAASCLASCCAACACDACRTVVSGISRRSARIAYCGLFALSLVVSWILREVAAPLMEKLPWINHFHKTPDREWFETDAVLRVSLGNFLFFTILAFSMVGVKNQRDPRDAVHHGGWMMKIICWFILVILMFFVPNEIISFYESASKFGAGLFLLVQVVLLLDFVHGWNDKWVGYDEQFWYVALLVVSLVCYLATFGFSGLLFHLFTPSGQDCGLNTFFIVMTLTLVLLFAIVALHPAVGGSILPASVISLYCMYLCYSGLASEPRDYECNGLHKHSKAISTGTLTLGLLTTVLSVVYSAVRAGSSTTLLSPPSSPRAGKPLLPMDKADEHEEKEKNKPVSYSYAFFHIIFSLASMYSAMLLTGWSTSVGESGKLVDVGWPSVWVRIITGWATAGLYVWSLVAPILFPEREF

SEQ ID NO: 62092 - protein, 102 aa, Gossypium hirsutum
  Clone ID: LIB3828-011-Q1-N6-F2.pep
SPPSSPRAGKPLLPMDKADEHEEKEKNKPVSYSYAFFHIIFSLASMYSAMLLTGWSTSVGESGKLVDVGWPSVWVRIITGWATAGLYVWSLVAPILFPEREF

SEQ ID NO: 62093 - protein, 91 aa, Gossypium hirsutum
  Clone ID: LIB3189-032-P1-K1-H11.pep
VICWFILVILMFFGPNEIIRVYESASKFGAGLFLLVQVVLLLDFVHGWNDKLVGSDEQFLYCSLLVFSFVGTLASFLFFVFLLSFVFLFLS

SEQ ID NO: 62094 - protein, 101 aa, Gossypium hirsutum
  unsure (1)..(101): unsure at all Xaa locations
  Clone ID: GOSHI-09MAY01-C12702_1.pep
QQLGERGNQMXNDEYRRKKFDELQSRLADTRSSIYHIELIDKVKLQVQQFHEIDMKRTIADESMRVNLDIPESVGLSTPMPVPASSRLADLDTGRRGKRKL

SEQ ID NO: 62095 - protein, 100 aa, Gossypium hirsutum
  Clone ID: LIB3829-027-Q6-N6-E5.pep
LGERGNQMENDEYRRKKFDELQSRLADTRSSIYHIELIDKVKLQVQQFHEIDMKRTIADESMRVNLDIPESVGLSTPMPVPSSSRLADLDTGRRVQGERT

SEQ ID NO: 62096 - protein, 223 aa, Gossypium hirsutum
  Clone ID: GOSHI-09MAY01-C12652_3.pep
MASKEPDHEHREDDDAPAADDEDTGAQVAPIVRLEEVAVTTGEEEEDAILDLKSKLYRFDKDGNQWKERGAGTVKLLKHNKTGKVRLVMRQSKTLKICANHYVLATMTVQEHAGNDKSCLWHASDFADDELKDELFCIRFASVDNCKSFMETVREVAESQKSTEENKEASAAAGLLEKLSVEEKEAKDKVEEKDVKAKEETETKEDTKKVDDSEKKDGEPAST

SEQ ID NO: 62097 - protein, 216 aa, Gossypium hirsutum
  Clone ID: GOSHI-09MAY01-C12652_2.pep
MASKEPDQEHREDEDAAPAEEEDTGAQIAPIIKLEEVAVSTGEENEDPILDLKSKLYRFDKEGNQWKERGAGTVKLLKHKETGKVRLVMRQSKTLKICANHLVLPTMTVQEHAGNDKSCLWHASDYADGELKDDLFCIRFASVKNCKTFMQKFQEVAESQKPKEENKDASAAAGLLEKLSVDEKKTEDKAGEEKKETEATEKADSEKKDGEAASST

SEQ ID NO: 62098 - protein, 218 aa, Gossypium hirsutum
  Clone ID: GOSHI-09MAY01-C12652_1.pep
MASKEPEHEHREDEEAPAAEDEDTGAQVAPIVKLEEVAVSTGEENEDPILDLKSKLYRFDKEGNQWKERGAGTVKLLKHKETGKVRLVMRQSKTLKICANHLVLPTMTVQEHAGNDKSCLWHASDYADGELKDELFCIRFASVENCKTFMQMFQEVAESQKPKEENKDASDAAGQLEKLSFQEKAGEKAVAKKEEKETKVDTEKADTENKDGEPASST

SEQ ID NO: 62099 - protein, 193 aa, Gossypium hirsutum
  unsure (1)..(193): unsure at all Xaa locations
  Clone ID: LIB3582-058-P1-K1-H11.pep
PSVRKKKRWGGAKNQTEHREDQEAPAAEDEDTGAQVAPIVKLEEVAVITXXENXYPMLXLGXXXYXFXKXXNQWKERGAGTVKLLKHKETGKVRLVMRQSKTXKICANHLVLXXXTVGELVGNDFFFLWEGCGCVLLLLGVLYFVDWLFVLVFVFFFFNIFFFFFFFLFVFFFFFFFLLLLCFLFFVFVFYCG

SEQ ID NO: 62100 - protein, 114 aa, Gossypium hirsutum
  Clone ID: uC-gsronu33B148e08b1.pep
LDHAGNDTSSGGHSFDFAGDEPNDELFCIRFASVDNCKSSMETVREVAESQKSTEENKEASAAAGLLEKLSVEEKEAKDKVEEKDVKAKEETETKEDTKKVDDSEKKDGEPEST

SEQ ID NO: 62101 - protein, 248 aa, Gossypium hirsutum
  unsure (1)..(248): unsure at all Xaa locations
  Clone ID: GOSHI-09MAY01-C12172_1.pep
MATNTQEQQSQAGRHQEVGHKSLLQSDALYQYILETSVYPREPEPMKELRELTAKHPWNLMTTSADEGQFLNMLLKLINAKNTMEIGVYTGYSLLATALAIPDDGKILAMDVNRENYELGLPVIQKAGVAHKIDFKEGPALPVLDQLVEDEKNHGSFDFIFVDADKDNYLNYHKRLIELVKVGGLIGYDNTLWNGSXVVAPPDAPLRKYVRYYRDFVMELNKALAVDPRIEICMLPVGDGITLCRRVK

SEQ ID NO: 62102 - protein, 56 aa, Gossypium hirsutum
  Clone ID: GOSHI-09MAY01-C12162_1.pep
SNPCYTPRKSSNDLKFTLPGKERQDSVYSGLQAVDLNSELVCIHDSARPLVRSGDV

SEQ ID NO: 62103 - protein, 63 aa, Gossypium hirsutum
  Clone ID: GOSHI-09MAY01-C12042_1.pep
RTRGEIARFYDAGMGTIIFAPVAVLSWFPFISTFQSRLLFNQAFSRGLEISLILAGNKANVET

SEQ ID NO: 62104 - protein, 296 aa, Gossypium hirsutum
  Clone ID: GOSHI-09MAY01-C12372_1.pep
MCPGTLEAATYSSKLDEVPDQQSHSGHTEPSRPGHPEINVPSSASRSNPHSPELNDEGCCMLNSEDPEIPCNDDVLLAKAFAPQECHKVGSDQASSFANQNDSKEELSLMQTEDNLAQCFTAPKMVGLVVLSESSQAAKSEFHDGQCHVISRQAQNSLVDPYRFKTSHAFPNSAANGAAKEEPSDECHTQDISTYAEASSIVDSVLEAEANKTTFDQIEYGSEDDVPSFSDLEAMILEMDLCPDESDSFIRSEVSRYQDEHTRKTLIRLEQCARSAMQRATTSRGALAVLYGRHMK

SEQ ID NO: 62105 - protein, 144 aa, Gossypium hirsutum
  Clone ID: GOSHI-09MAY01-C12282_1.pep
AITRLSQKQPFADWADPINRIHPFLKNRTKTQAREYVRFPNVVRKVREYEISPSLFSSSFSSSSSSSTASFGKLGFVGWYLGMVKSGPVLTKSVTSSAIYVAADLSSQTISKSSSEPYHLVRTSRMAGYRLVILGPSLHPWVNL

SEQ ID NO: 62106 - protein, 122 aa, Gossypium hirsutum
  Clone ID: LIB3166-050-P1-K1-F1.pep
GDGSEPTQRTAHYVLSLGFVFFFLFVPNDAVEDEEEEENEELKREGEISYSLTFRTTFGNRTYSLAWVLVRFFRNGWILLIGSAKSANGCFCDRRVMAANLRKDPLIMSFLWVSFSFPSSNG

SEQ ID NO: 62107 - protein, 186 aa, Gossypium hirsutum
  unsure (1)..(186): unsure at all Xaa locations
  Clone ID: GOSHI-09MAY01-C12212_1.pep
NKLEPERKSQLAKKLGLQPRQVAVWFQNRRARWKTXQLERDYDLLKSYFDSLQSNYDTILKENEKLKSEVAFLTEKLQAKDVATEAIAGEKDEGLAAEMASALQFSMKVEDRLSSGSVXSAVVDEDAPQLVDSGNSYFPSDEYSRGIGPFDGVQSEDEDGSDNCGSYFSDVFATTEHEALGLRAWS

SEQ ID NO: 62108 - protein, 245 aa, Gossypium hirsutum
  Clone ID: GOSHI-09MAY01-C12202_1.pep
NTSRNWLPSLKTDKDQSAKERKGWSITVHDLSGSPVAMASMVTPFVPSPGSDRVSRSNPGAWSILRPECGTWKPWGRLEAWREPGFTDALGYRFDLFHDDIVATGTTTTVASSTLSTKLGGKFTMDMTTNISTPSISPQSSCDLGSGSRPGSRPGSGSGSDFGFGLPLSPQSMYRGGFVMSSTVEGVGKCSKPEVEVGVKHVTCTEDAAAFVALAAAMDLSMDACQSFSQKLRKELRQQSQTSVD

SEQ ID NO: 62109 - protein, 170 aa, Gossypium hirsutum
  Clone ID: GOSHI-09MAY01-C12232_1.pep
VLAWIRLPGLPSYLYKKEVLWEIEGMVGMVTKFDFSIDSQTRGQYARMTVYINLEKPLIPSHQWKPSRNRVRKLTGFLLLVLTVWSLQGCCPHIQATGHNLGGNAPAIGTSRIVVDSVVGSDEYGPWMLVERRSKRNSREQNIHGKDWPQGGFFGIEISCIISQFRSDAW

SEQ ID NO: 62110 - protein, 175 aa, Gossypium hirsutum
  Clone ID: GOSHI-09MAY01-C13992_1.pep
MAPKADTQSAGAVAAADASSQFSMDPLFHILKVVPYSFLRAPRLRLKIPSVSLPSAMTVFSLVLLTYFMVVSGFVYDVIVEPPGIGSTQDPATGAVRPVVFLPGRVNGQYIIEGLSSGFMFVLGGIGIVLLDLALDKNRARSVKVSYAIAGISSVVIAYVMTTLFVRIKIPGYLR

SEQ ID NO: 62111 - protein, 145 aa, Gossypium hirsutum
  unsure (1)..(145): unsure at all Xaa locations
  Clone ID: LIB3585-061-P1-K1-E11.pep
RTAYCLFAGAGAAAGAYSEFSMDPLFHILKVVPYSFLHPSRIRLKIPSVTIAYAMTVFSLVLLTYLMEVSGFGYDDIVEPPGIGSTQDPATGAVRPVVFLAGXRVNGQYIIEXLYSGFMYELGGIGIXYLDLALDKNKTWRHKVF

SEQ ID NO: 62112 - protein, 70 aa, Gossypium hirsutum
  Clone ID: GOSHI-09MAY01-C13962_1.pep
KNEALRLYAAHVAQLRNKGLPTIPTTLKTEKACNPFLRTSRTEIRQALDIPATMNEAEALGVIRRAKDNF

SEQ ID NO: 62113 - protein, 125 aa, Gossypium hirsutum
  Clone ID: GOSHI-09MAY01-C13932_1.pep
RHASPRVRSLLLTLIMACKISSLLSHVFILSILFVIAGQAIAARDISKNDDQMKQPEYLKHDRSVLIPGLGRVLLPPVFKHHNPHTIGTGTHTGSSGRHVGSTIGGNRQLPGSDDTFLIRSKPWF

SEQ ID NO: 62114 - protein, 125 aa, Gossypium hirsutum
  unsure (1)..(125): unsure at all Xaa locations
  Clone ID: LIB3189-022-P1-K1-D8.pep
LSLLLTLIXXCKISSLLSHVFILSILGVIAGQAIAARDISKNDDQMKQPEYLKHDRSVLIPGLGRVLLPPVFKHYNPHTIGTGTHTGSSGGHFGSTIGRNRQIPGGDFTFCSKPLVFLCVQISCM

SEQ ID NO: 62115 - protein, 214 aa, Gossypium hirsutum
  unsure (1)..(214): unsure at all Xaa locations
  Clone ID: GOSHI-09MAY01-C13922_1.pep
PTHQAYQPAPFFLYSQPPQPLQGQPSMGHHPDEAAYVPSQTYPPNLRQPPSQQPSGPPSSQQYFGIPPQMHEPPSRRPGLGFSTGYVPQSGPSEQYAYGGSPPQYGSASPMKLQQLPSSTGSGYPQLPTARVLPHALPTVSGGGGESAPSGPGNRVPIDDVVDKVTGMGFPRDHVRATVRKLTENGQSVDLNVVLDKXLMNDSDIQPPRAWFGR

SEQ ID NO: 62116 - protein, 158 aa, Gossypium hirsutum
  Clone ID: GOSHI-09MAY01-C13582_1.pep
MENYLFLFSLVLLFGLLPFSSQTPNPKNPNPKPPLTQAHTELINYGFPIGLLPASVTKYTLNQTSGNFAIDLGGTCKITLPPDNYLATYSKRVTGKIENGKIAELDGIRVRALFKWWSITGIRSSGDNLVFEVGMVTAKYPAKNFDESPLCEGRHSSS

SEQ ID NO: 62117 - protein, 61 aa, Gossypium hirsutum
  Clone ID: AI729818.1.pep
STGKIAELDGIRVRALFKWWSITGIRSSGDNLVFEVGMVTAKYPAKNFDESPLCEGRHSSS

SEQ ID NO: 62118 - protein, 189 aa, Gossypium hirsutum
  Clone ID: GOSHI-09MAY01-C13542_1.pep
MRKWAIPSALVLLCLLSLLSDHGRKVQANAEEGAVDPPKVEEKIGAVPHGLQTDSDVVKRESESISSRSLRNNAEKFEFQAEVSRLMDIIINSLYSNKDIFLRELISNASDALDKIRFLSLTDKEVLGEGDTSKLDIQIKLDKEKKMLSLRDRGIGMTKEDLIKNLGTIAKSGTSAFVERMQSTGDLNL

SEQ ID NO: 62119 - protein, 121 aa, Gossypium hirsutum
  Clone ID: LIB3197-053-Q1-M1-F5.pep
MGNWTIPSALILLCLLSLLSDQGRKLQANAKEGAVDPPKVEDNIGAVPHGLQTDSDVVKRESDSISSRSLRNNAEKFEFQAEVSRLMDIIINSLYSNKDIFLPELISNASGSLDKNRFLSL

SEQ ID NO: 62120 - protein, 141 aa, Gossypium hirsutum
  unsure (1)..(141): unsure at all Xaa locations
  Clone ID: GOSHI-09MAY01-C13572_1.pep
ILKGKSIPIFVXANHGTVARDXTYIDDIGKGCLAALDTAEKSTGSGGKKKGPAQLRVYNLGNTSPVPVSDLVSILERLLKVNAKRDIMKLPRNGDVQFTHANISLAQRELGYKPSTDLQTGLKKFVRWYLGYYNGGKKAAG

SEQ ID NO: 62121 - protein, 224 aa, Gossypium hirsutum
  unsure (1)..(224): unsure at all Xaa locations
  Clone ID: GOSHI-09MAY01-C13562_1.pep
LLLFFHFQALMAAIIESGWLYLITHFSDFQLASLGSFFLHESVFFLSGLPFIYLERAGLLSKYKIQTKNNSLAAQEKCITRLLLYHIGVNLPLMIASYPFFRFMGMKSSLPFPSWXVVLSQIIFYFILEDFVFYWGHRFLHTKWLYKHVHSVHHEYATPFGLTSEYAHPAEILFLGFATIIGPAITGPHLITLWLWMTLRELKTGEAHCGYHFSWSLLNFLPLY

SEQ ID NO: 62122 - protein, 134 aa, Gossypium hirsutum
  Clone ID: LIB3585-016-P1-K1-A3.pep
MAAIIESGWLYLITHFSDFQLASLGSFFLHESVFFLSGLPFIYLERAGLLSKYKIQTKNNSLAAQEKCITRLLLYHIGVNLPLMIASYPFFRFMGMKSSLPFPSWKVVLSQIIFYFILEDFVFYWGQSFLHTKW

SEQ ID NO: 62123 - protein, 189 aa, Gossypium hirsutum
  Clone ID: GOSHI-09MAY01-C13492_1.pep
PTRPIHIASDYLLDEATNLWGHNLDLMDNRVLRYPNRVQNLYFTFLFVLRAVTKAADYLEQAEYDTGNPTEDLKTHSLMRQLLYNPKLQAACPLPFDEAKLWKGQRGPELKQKIQAQFKNISALMDCVGCEKCRLWGKLQVLGLGTALKILFSVNGEDHSHQTLELQRNEVIALINLLNRLSESIKIAI

SEQ ID NO: 62124 - protein, 111 aa, Gossypium hirsutum
  Clone ID: GOSHI-09MAY01-C13482_3.pep
PRVRVDKISVVMKPYTKEVVKAYGRFLESATTYHQQVQASVQETLKKHELTRPLATKELEWFSASALLALPIIILFRIFSAIFCKKTKKRVRHTNAAHHGRRKGKRGHTDK

SEQ ID NO: 62125 - protein, 94 aa, Gossypium hirsutum
  Clone ID: GOSHI-09MAY01-C13482_2.pep
HASAHASGFLESATTYHQQVQAAVQENLKKHELTRPLATKELEWFAASALLALPIIILFRIFSAIFCKKTKKRVRHTNATHHGRRKGKRGHTDK

SEQ ID NO: 62126 - protein, 72 aa, Gossypium hirsutum
  Clone ID: GOSHI-09MAY01-C13482_1.pep
YFPTFRDQNLNTRSLLVCVPPFALTTTMVGCVSMSNTLLCLFAAKIKVFDMVKTRLFTANYINLIRTIENAP

SEQ ID NO: 62127 - protein, 217 aa, Gossypium hirsutum
  Clone ID: GOSHI-09MAY01-C13462_1.pep
MSTPLEHDYIGLAATSSMERSSEKISSSSSSSIPSNIEDKTTNNPSLNLKETELRLGLPGSQSPERKLSLFGKDLETNDKSNGFVGSPLKNLVSGAKRGFSDAIDGSNGNWVFAINGKSDVELGKGAVLASPRGGLDNKTNPQQVRTSVPVMKEVVGVPQSPKPVQDKKNLVPPVNEHASAPAAKAQVVGWPPIRSFRKDSMASNLAKTVMKLLVSV

SEQ ID NO: 62128 - protein, 133 aa, Gossypium hirsutum
  unsure (1)..(133): unsure at all Xaa locations
  Clone ID: GOSHI-09MAY01-C13782_1.pep
MGTIHRSGVFKKTNDKARLVIATILGIVIGFFIGVSFPSVSFYKIHLPSNLRSAFDASIANDQDFMVRSPERTADNLPKIYVPTNPRGAELLPPGIVVPESDLYLRRLWGEPXEDLKKXPKYLVTFTVGFDHN

SEQ ID NO: 62129 - protein, 121 aa, Gossypium hirsutum
  Clone ID: LIB3189-016-P1-K1-G10.pep
DQDQLFFNQKGKSCGVFKKTNDKARLVIATILGIVIGFFIGVSFPSVSFYKIHLPSNLRSAFDASIANDQDFMVRSPERTADNLPKIYVPTNPRGAELLPSGIVGPESDLYLRRLWGGPSE

SEQ ID NO: 62130 - protein, 277 aa, Gossypium hirsutum
  unsure (1)..(277): unsure at all Xaa locations
  Clone ID: GOSHI-09MAY01-C13662_1.pep
MMKFEAQILSKEIVKPASPEIHLKEPXRLCVFDQLTPTTYAPIILFYAPSDTNTSNILTQLKKSLSETLNILYPFSGRIFSNMFIHDFDAGVPFLSARIGCRLSEFLRHHQIETLNNLLPCPPFYKESNHQGPLLVCQVTMFACGGVALGICASHKITDAKTGFIFTFVWRTICQGYHPEIKFPALSKASLIFPPKNPMPKNYISMMENLWFTKGNFVTRQFVFNEETIAILKDMAKGEXLDYTDTNRTVSGFIWKCSMAASRRYKNLETIHCCPSI

SEQ ID NO: 62131 - protein, 67 aa, Gossypium hirsutum
  Clone ID: LIB3083-083-Q1-L1-E3.pep
RFPLKNLYLLSVFESFPLKCIFNLRFLTISFPNRMHGGSTILSSEMRQCEGSSLKPKVHPSTLNHQT

SEQ ID NO: 62132 - protein, 57 aa, Gossypium hirsutum
  Clone ID: LIB3189-013-P1-K1-E4.pep
VRFESFPLNFIFILCFLTISFPNVVHGGSTSLSSEMRQCEGSSLKPKVHPSTLNHQT

SEQ ID NO: 62133 - protein, 149 aa, Gossypium hirsutum
  Clone ID: GOSHI-09MAY01-C13192_1.pep
QRSGYLLETRGSIIYQVETRARVIIFDISTLEGNRVLRNNSSSFNLSHRSLTREHGGLMSWPEHFFRGRQHTQNHDASDQQVNRLSARAMQLSIFGSKVNLPQRSWSLSRMNQSQPINNPSYNRFLSFPGHLLVSAGSEGASTMTKNHK

SEQ ID NO: 62134 - protein, 313 aa, Gossypium hirsutum
  Clone ID: GOSHI-09MAY01-C13112_1.pep
SNLILQTLFSLSLTLVLTFLKIPVFFLQGLHTYIHPDNVAGHHGGPASSSSGVRAAIRRPSDSGSGLDGYQSLSSRTNAELKKKNKSKDKFEFDENNAQIFRLKLDEGHLQTRLFYNDYHNSFVFSFVGISCRVLPAFSRRPQDSGVLANGDLIPIIFGFIGLIKAFSSLAKISFEISGSKRSEKQFSAIFGVLGFIWGIIICSGIGPLVFDFHFDSIEGSWRIFVSILMGFIAGSLYMPAGKNARSFWLGADQLRCNLSIISCGWFSRLILYANYILTVFTALLWINPFVEILSFVSFSESDLPDLGFSAYC

SEQ ID NO: 62135 - protein, 89 aa, Gossypium hirsutum
  Clone ID: LIB3189-004-P1-K1-C2.pep
AGPASSSSGVRAAIRRPSDSGSGLDGYQSLSSRTNAELKKKNKSKDKFEFDENNAQIFTLKPDLGQLNTRLSYREDCKPWMGGFMGQPY

SEQ ID NO: 62136 - protein, 439 aa, Gossypium hirsutum
  unsure (1)..(439): unsure at all Xaa locations
  Clone ID: GOSHI-09MAY01-C13122_1.pep
MESFSFLLIISIFYLLFKIWNWINNVRDQQCYILDYQCYKPSDDRMVGTEFCGEVIKRNKNLGLNEYKFLLKAIVSSGIGEQTYAPRIMFSGREESPKLEDGILEMEEFFHDSIEKVLSRAGISPQEIDLLFVNVSMLSAVPSLCSRIINHYKMRPDIKSFNLTGMGCSASLISLDIVRNVFKSYKNKFALLVTSESLSPNWYAGNDRSMILSNCLFRSGGCAVLLTNNKSLKHRAMFKLKCLVRTHHGAKDESYGCCIQREDDKRRMGFHLSKSLPKAATRSFVDNLRVITPKILPVRELFRFMAVSLLKKWNVVRHGSSHKGASPGPIKAXGVNFKSGVDHFCIPPGGIALIDGIGISPDLTEFDLDPPRMTRPRFGNTSANXLWYVLAYMETKKXLKKRDKVLMISFGAGFKCNSCLWEVVTDLRQWDCLEDDIYI

SEQ ID NO: 62137 - protein, 66 aa, Gossypium hirsutum
  Clone ID: LIB3189-026-P1-K1-C12.pep
YINNYRKRRFGLKELRSNKQCELVLVRLEDIANNASAIRLALHPIPVKLKDLMSGPDAWSNGNQDG

SEQ ID NO: 62138 - protein, 144 aa, Gossypium hirsutum
  Clone ID: GOSHI-09MAY01-C13052_1.pep
MPIKKDPSIPPPMISKIGPYTVFVTPPSTPSPTDPPVFHSPKKAAPPSPSPYPSAPPPVQPPPQQFDKSFRTSQSLSDGSFLGFFKNAAFKLQNAHSSLDDHLARWFGLNQSKYQWALDDYYESKGLEREGVKVKEISSKIQSV

SEQ ID NO: 62139 - protein, 28 aa, Gossypium hirsutum
  Clone ID: GOSHI-09MAY01-C13022_1.pep
FFHWESYCLIKTSTPDGACGCSHNVISA

SEQ ID NO: 62140 - protein, 91 aa, Gossypium hirsutum
  unsure (1)..(91): unsure at all Xaa locations
  Clone ID: GOSHI-09MAY01-C13332_1.pep
MKYIRTNNLKRLFSLKRRSFEEGGANQHGVFEEDTTNXVSKIASVAERSQRPSWRSFSFEESFVATNAFSSENLVGKGGFAEVYKGVLKDG

SEQ ID NO: 62141 - protein, 184 aa, Gossypium hirsutum
  Clone ID: GOSHI-09MAY01-C8961_1.pep
MASSSSENLANIESWAFRPSFADSWLSEAEALTRALQDSISTSFSNSDSHSLSPLFSLVNSNPLPTPTPTPSGSNISGSDPETTVKRQRTLLKPLPTGKVSKSKRKSRASKFSQTTFIKADPANFRQMVQQVTGVRFCNAQMSLSPILKPEPQRTGCLPTLDTSAYLLDQHQPSSGAVSGSSLF

SEQ ID NO: 62142 - protein, 300 aa, Gossypium hirsutum
  Clone ID: GOSHI-09MAY01-C8911_1.pep
MPIESSSTNGPTVCVTGAGGFIASWIVKLLLEKGYTVKGTVRNPDDPKNCHLRELEGAKERLSLHKAYLLDYQSLKEAISGCDGVFHTASPVTDDPEQMVEPAVIGTKNVIMAAAEAKVRRVVFTSSIGAVYMDPNRSPDVVVDESCWSDLEFCKNTKNWYCYGKAVAEQAAWETAKEKGVDLVAITPVLVLGPLLHPTVNASIVHILKYLTGSAKTYANSVQAYVHVRDVALAHLLVYENPSAFGRYLCAQSVLHRGEVVEILAKFFPEYPIPTKCSDEKNPRAKPYKFTNQKLRDLGL

SEQ ID NO: 62143 - protein, 176 aa, Gossypium hirsutum
  Clone ID: AI731964.1.pep
MPIESSSTNGPTVCVTGAGGFIASWIVKLLLEKGYTVKGTVRNPDDPKNCHLRELEGAKERLSLHKAYLLDYQSLKEAISGCDGVFHTASPVTDDPEQMVEPAVIGTKNVIMAAAEAKFRRVVFTSSIGAVYMDPNRSPDVVVDESCWSDLEFCKNTKVTWILPFNYCLRATLNFS

SEQ ID NO: 62144 - protein, 542 aa, Gossypium hirsutum
  unsure (1)..(542): unsure at all Xaa locations
  Clone ID: GOSHI-09MAY01-C8931_1.pep
PVELNDIPAPGINGAANTGIMEMMGLRKSSKLARQDFPALYGNRHKKIKMLFPYEEFVNFFQCEVFDLSPRGLLNCGNSCYANAVLQCLTCTKPLSIYLLHGSHSRICYRKDRCLMCELEQHVMLLRECGGPLSPSRILSHIRTINCQMGDGSQEDAHEFLKSIKFTKPISLTTLHFPSXLLVASMQSICLERLGGEHPRVPRLQXETTFIQHTFGGRLWSKVKCLRCSHESERYENIMDLTLEIYGWVESLEDALTQFTTPEDLDGENMYRCGRCAGYARARKQLRIHEAPNILTIVLKRFQEGKYGKINKCITFPDMLDMVPFMTGTGDIPPLYMLYAVVVHLDTLNASFSGHYVSYVKDLRGNWFRIDDTEVHPVSMSQVMSEDAYILFYMRSYPRPQRAVSEKIKQVPARHLTSKMEKPTRPAQSKSGSHSVGPKLYPDSRSGTAAGYINRDSNGILRQSAHSNIHRVVEMYAEPSNVEFSDATSSDWSLFTSSDEASFTTESTRDXFSTVDYTDTSNGGDPFSIFNNLYTPESSSCN

SEQ ID NO: 62145 - protein, 168 aa, Gossypium hirsutum
  Clone ID: LIB3582-030-P1-K1-E3.pep
GRVGGRVGLEIYGWVESLEDALTQFTTPEDLDGENMYRCGRCAGYARARKQLRIHEAPNILTIVLKRFQEGKYGKINKCITFPDMLDMVPFMTGTGDIPPLYMLYAVVVHLDTLNASFSGHYVSYVKDLRGNWFRIDDTEVKSASSPPPPKKKKKRILCFSERLLIVL

SEQ ID NO: 62146 - protein, 108 aa, Gossypium hirsutum
  Clone ID: LIB3582-003-P1-K1-E10.pep
GKINKCITFPDMLDMVPFMTGTGDIPPLYMLYAVVVHLDTLNASFSGHYVSYVKDLRGNWFRIDDTEVKSASPPPQKKKKEFFASVKGYRVIGLMHEHDGFTYLKFAH

SEQ ID NO: 62147 - protein, 210 aa, Gossypium hirsutum
  Clone ID: GOSHI-09MAY01-C8801_1.pep
MADSSEPQDPGKELRQSETEPQQSEQVCNFFRKPTKGKNIRKRTINEDEDEDSRNGTSLLHNQKKASKPDNKLYFSTGSSKSATATESSTESHKPVFQFESSKEIQVQNDSGATAILETETEFTKDARAIREKVLKRAEEALKGKSTSSGGEKLYTGMHGYVDHKAGFRREQTVASEKAGGSHGPLRASAHIRVSARFDYQPDICKDYKD

SEQ ID NO: 62148 - protein, 279 aa, Gossypium hirsutum
  Clone ID: GOSHI-09MAY01-C8821_1.pep
WDSRKELLDSTVITRLIEILKTSPSNLQRKVASILEFITIIEPSMETIIKVDVSSGLEAVFQQKAGKDKEADVEGQELDEYALELEEAGLAVSAASRLLTKLLDSEQFCQKIDSTHFTKLLRKILKSDIPLRNKDWVAACLVKLCSISSPNVDFENPINMEVTLYETIPRLIEQIKLSLSPETQESAAVELNRIISEGVVDSTRAVASEVGIFPLVNLIEQGSDRAVEAALSILYNLSMDSENHSAIIAAGAVPALRKIVLSQRSHWSRALRLLRNLPV

SEQ ID NO: 62149 - protein, 53 aa, Gossypium hirsutum
  Clone ID: LIB3148-019-Q1-K1-F6.pep
PTRPISLESPCFCDKSFILSSLPFIIIVNSCQILWKPLMIKKFVLEETDCCCV

SEQ ID NO: 62150 - protein, 523 aa, Gossypium hirsutum
  unsure (1)..(523): unsure at all Xaa locations
  Clone ID: GOSHI-09MAY01-C8581_1.pep
MESNLVIKVKYGNTLRRFNARIVDGERLDLNMTGLRAKIMGLFNFPFDTELTLTYIDEDGDIVTLVDDDDLCDVMRQRLKFLRINVQLNNDKLNKPYTRSSGGSTPLRSPSVQPPLPSFNTASADALNSVPVPLRDALTEVFSKLSVEVASKASSASPLLGDLLESLSKMGQSYLSPASQPGVGADSGIPVGSSESPSGPYAPTGGKSVSMDASTPFFDTTRKDYPSNECPFSGVPVANGPTVPPVSYHPFSPSNRSLGSTDGNVLFGTFHKGVQCDGCGVLPITGPRFKSKVKDNYDLCSICFSKMGNEADYIRMDKPMHYRHPWCFRASNDHVPRVGPALPHVLRNRVLKLSRPKLESHFILDVNVLDGTVMAPSTPFTKIWRMRNNGTLPWYRGMQLVWIGGDKLTNAISVDIDIPAEGVPLDGDLDIAVDFTAPELPGXRYVSYWRMASESGIKFGQRVWVLIHVDSSLKDSICPRLRGFNLNLPPESSGQKDSHIADMNADFVTELCSSGASPVPVKH

SEQ ID NO: 62151 - protein, 66 aa, Gossypium hirsutum
  Clone ID: GOSHI-09MAY01-C8561_1.pep
KKKVVTKRKKDEMNCGALFSSLEGDLYIHEGDYKRFKELVKLSREPSLDPIFTLSINGLIFELFIF

SEQ ID NO: 62152 - protein, 185 aa, Gossypium hirsutum
  Clone ID: GOSHI-09MAY01-C8481_1.pep
EGELSPNGDFEEDNFADYGEASLEIALKVKEGAANRQYQRHGEEEVCRGEAGGENDADADDEGDESAQRTSEDSENASENGEVFGSDSGEGESREEQEEDIDHDEHDNKVESEGEAEGMADAHDAEADVTLLPFSEHFLLTVKPLAKYVPSPLHENKKDSQVFYGNDSFYVLFRLHHTLYARIQS

SEQ ID NO: 62153 - protein, 138 aa, Gossypium hirsutum
  Clone ID: GOSHI-09MAY01-C8791_1.pep
LPFPSSSSSGLVLPKYMSPRATLSHPLGFKFNLNSSPKLLKSFDPEFFLHLRTRKTSSLGGILTDKTGVRDSSRTMIKTSVLKESRDRDDGIQALEQEVEGFIDGSMRVQGFESTLNRLSKWLVSALFEGVILWRPDA

SEQ ID NO: 62154 - protein, 120 aa, Gossypium hirsutum
  Clone ID: GOSHI-09MAY01-C8771_6.pep
FGKKKSNPFAPFEQAPPGDAKAGEKIFKTKCAQCHTVDKGAGHKQGPNLNGLFRRQSGTTPGYSYSAANKNMAVIWGENTLYDYLLNPKKYIPGTKMVFPGLKKPQDRADLIAYLKESTA

SEQ ID NO: 62155 - protein, 112 aa, Gossypium hirsutum
  Clone ID: GOSHI-09MAY01-C8771_3.pep
MASFEQAPPGNAKAGEKIFKTKCAQCHTVDKGAGHKQGPNLNGLFGRQSGTTAGYSYSAANKNMAVIWSENTLYDYLLNPKKYIPGTKMVFPGLKKPQDRADLIAYLKESTA

SEQ ID NO: 62156 - protein, 102 aa, Gossypium hirsutum
  Clone ID: GOSHI-09MAY01-C8771_1.pep
MAVVKAFIASLLISLLLLQLVAADQLVTSASKRKGTAPPAKIDCGGACAARCRLSSRPHLCKRACGTCCARCNCVPPGTAGNQEMCPCYASLTTHGGRRKCP

SEQ ID NO: 62157 - protein, 62 aa, Gossypium hirsutum
  Clone ID: LIB3135-046-Q1-K1-D7.pep
PTRPPTRPAARCRLSSRPHLCKRACGTCCARCNCVPPGTAGNQEMCPCYASLTTHGGRRKCP

SEQ ID NO: 62158 - protein, 102 aa, Gossypium hirsutum
  unsure (1)..(102): unsure at all Xaa locations
  Clone ID: LIB3584-009-P1-K1-B11.pep
MAIFKAFIASLLISLLLLQLVAAYQLVTSASKNKGGGSLFXFDCXGAXAARGRLSSRPHLCKRACGTCCARCNCVPPGTAGNQEMCPCYASLTTHGGRRXCP

SEQ ID NO: 62159 - protein, 95 aa, Gossypium hirsutum
  Clone ID: LIB3147-005-Q1-K1-B8.pep
HASAHASVLLLQLVAADQLVTSASKRKGTAPPAKIDCGGACAARCRLSSRPHLCKMACGTCCARCNCVPPVTAGNQEMCPCYASLTTHGGRRKCP

SEQ ID NO: 62160 - protein, 85 aa, Gossypium hirsutum
  Clone ID: LIB3272-038-P1-K1-E9.pep
MASFEQAPPGNAKAGEKIFKTKCAQCHTVDKGAGHKQGRSDLILFFIEFRPNLNGLFGRQSGTTAGYYDCGASEHCLHVFTGHSR

SEQ ID NO: 62161 - protein, 102 aa, Gossypium hirsutum
  Clone ID: LIB3166-032-P1-K1-D1.pep
MAIVSKALIASLLISLLLFQLVEADHQLVTDARKGASPPKKIDCGGACAARCRLSSRPHLCKRACGTCCARCNCVPPGTAGYQEMCPCYASLTTHGGKRKCP

SEQ ID NO: 62162 - protein, 67 aa, Gossypium hirsutum
  Clone ID: GOSHI-09MAY01-C8711_1.pep
FFPEKEEHQIEITIGIWKGTQEIREYTHKNYQNALCVVTKLIPAKIRQNNPSIQQRGKYKIFISLTK

SEQ ID NO: 62163 - protein, 43 aa, Gossypium hirsutum
  Clone ID: LIB3148-013-Q1-K1-E11.pep
IKNIPSMSSSIESQLIQLTRSKAHGASHMVFQQVLKPSQRRGL

SEQ ID NO: 62164 - protein, 309 aa, Gossypium hirsutum
  Clone ID: GOSHI-09MAY01-C8651_2.pep
MAPIKGILSLQRASLLRACGERWKLGTRSFSTQGATTADAPQAPPPPPPPEKTHFGGLKDEDRIFTNLYGLHDPFLKGAMKRGDWYRTKDLVLKGADWIVNEMKKSGLRGRGGAGFPSGLKWSFMPKVSDGRPSYLVVNADESEPGTCKDREIMRHDPHKLLEGCLIAGVGMRATAAYIYIRGEYVNERKNLERARKEAYEAGLLGKNACGSGYDFDVHVHYGAGAYICGEETALLESLEGKQGKPRLKPPFPANAGLYGCPTTVTNVETVAVSPTILRRGPEWFASFGRKNNSGTKIVCVSSHVNKPC

SEQ ID NO: 62165 - protein, 276 aa, Gossypium hirsutum
  Clone ID: GOSHI-09MAY01-C8651_1.pep
HASDDFDVHIHFGAGAYICGEETALLESLEGKQGKPRLKPPFPANAGLYGCPTTVTNVETVAVSPTILRRGPEWFASFGRKNNSGTKLFCVSGHVNKPCTVEEEMSIPLKELIERHCGGVRGGWDNLLAVIPGGSSVPLLPKHICDDVLMDYDALKAVQSGLGTAAVIVMDKSTDVVDAIARLSYFYKHESCGQCTPCREGTGWLWMIMERLKVGNAKLEEIDMLQEVTKQIEGHTICALGDAAAWPVQGLIRHFRPELERRIRERAERELLEASA

SEQ ID NO: 62166 - protein, 373 aa, Gossypium hirsutum
  Clone ID: GOSHI-09MAY01-C8641_1.pep
SGSRTRATRVRPRVRPRVRPRVRDNWAIGENASPSLDSGRQNRYGGLGTGGGGGFSKADEADNWTALKRSIPSRSSTFGSGFRDSGPEPDRWSRGGGGGGIREERPRLVLDPLRGDVNELVVKTNKSNPFGAPRPREEVLAEKGLDWKKLDSEIEAKKETSRPTSAHSSRPSSAQSSRSEGPLQQAIENVVKPRPKVNPFGDAKPREVLLEGRGQDRRKIDLELDRRRIDRPETEEEKILKEEIDNLKELEKDSTPTSESGDQHSLHEKLLHKERELEMLILDLENKARFGQKVVERPGSGAGRTGSFTDRPPPQSGSIDGSRSVEFMDRPRSRGTADAWTRPGDDRRGFQAGRDRGFVGNRDMDRPRSRERW

SEQ ID NO: 62167 - protein, 102 aa, Gossypium hirsutum
  unsure (1)..(102): unsure at all Xaa locations
  Clone ID: GOSHI-09MAY01-C8621_1.pep
MASSSYSNPPCAACKCLRRKCMPDCIFAPYFPPEEPHKFINVHKIFGASNVSKLLNDVXPHQREEAVNSLAYDIYARIKDXVYGCFGANFVSQNQFLDFKMI

SEQ ID NO: 62168 - protein, 193 aa, Gossypium hirsutum
  Clone ID: GOSHI-09MAY01-C8141_1.pep
MEGAQMEDFRIEECENDNNTHEDSQMEESEQNNKHMEVAPAVISVHPTRNSVAVAVGSDLRVFNLLEDCAVILVDEAGGASHNDSIRGIKYGANGKLFVSAGDDKLVKVWSTESWRCIATVCSEKRVSAVAISNDGLHVCFADKFGVVWVVDLPGVDETQAPLNKKAVPLLAHYCSIITSLEFSPDGHFIVSA

SEQ ID NO: 62169 - protein, 133 aa, Gossypium hirsutum
  Clone ID: GOSHI-09MAY01-C8051_1.pep
AASGFLLTPNVAANSSSTSKTTTVFFPSKNNNNSRLVVTRAADEAAAPAPATTTAPSEGGEAPKPKPPPIGPKRGTRVKILRRESYWYNSFGSVVTVDQDPKTRYPVVVRFNKVNYANGSTNNYALDEIAEVN

SEQ ID NO: 62170 - protein, 134 aa, Gossypium hirsutum
  Clone ID: GOSHI-09MAY01-C8071_2.pep
SPTRPPTRPPTRPEEQNFIAMMNEARERRAKLNADAPTLPMEIRAEKAVDAIYVCCFGRDPIEEEDESLLNIMLCAAFPTVKRSMIQRIIKDKAIKVAEGGDDADIVPEPKPLSKEAVQMQMKDLEFLKQNTET

SEQ ID NO: 62171 - protein, 202 aa, Gossypium hirsutum
  Clone ID: GOSHI-09MAY01-C8071_1.pep
MAAAKPLPSSLHTHQILSSCNQILPSLLHFRQHYSNPKCQQPQRRRKHSSSLDGAYDLAIKAYMENPNSISGFANKVIGSLPIVGLVARIFSDEGGVGGDIIDFAEFRRRVGKKCTVTDSRAFYEFQERRGRGGDPLYVLLSCWLAAVGAGLLKSEEILEGVARLRISNDIEFEEQNFIAMMNEARERRAKLNADAPTLPME

SEQ ID NO: 62172 - protein, 90 aa, Gossypium hirsutum
  Clone ID: GOSHI-09MAY01-C8061_1.pep
MTNTEVAMKGNCVNGRGGGESFSSGYSEPNDGRNTVEGQNGHSTRQAPATDPESALYNELWHACAGPLVTVPREQDRVFYFPQGHIEQVE

SEQ ID NO: 62173 - protein, 44 aa, Gossypium hirsutum
  Clone ID: GOSHI-09MAY01-C8011_1.pep
LPAQFLSRTMICIFNIIYERRTCNLHPLKSMTPSFFLYLCISLW

SEQ ID NO: 62174 - protein, 71 aa, Gossypium hirsutum
  unsure (1)..(71): unsure at all Xaa locations
  Clone ID: GOSHI-09MAY01-C8391_2.pep
MSDQSEELPLMAPPPXTDPNEIDLEAGPADQIQCRICLETDGRDFIAPCKCKGTSKYVHRECLDHWRAVKV

SEQ ID NO: 62175 - protein, 214 aa, Gossypium hirsutum
  Clone ID: GOSHI-09MAY01-C8391_1.pep
MSDQSEELPLMAPPPITEPSEIDLEAGPADQIQCRICLETDGRDFIAPCKCKGTSKYVHRECLDHWRAVKEGFAFAHCTTCKAPYHLRVHVAADTKWRTLKFRFFVTRDILSIFLAVQLVIASLAYLVYLIDGYQQSWLRLAWGFDSELIFYYICGALLFFALLGLSGCFITCYDRRVRNDLAHPCRELCLCCCQPGMCADCHLPGTLCMWTDC

SEQ ID NO: 62176 - protein, 123 aa, Gossypium hirsutum
  unsure (1)..(123): unsure at all Xaa locations
  Clone ID: GOSHI-09MAY01-C8381_1.pep
HIEKDQPFHILHKVPQGDTPHVKAKHAQLVERDPDAAIVLFWKAINAGHRVESALQDMAGVMTLLTPTDEAXIDAITSFMGRRPKHAHESLDNVLIDLYLICGKGDELIELLXRKPRLLYRGE

SEQ ID NO: 62177 - protein, 176 aa, Gossypium hirsutum
  Clone ID: GOSHI-09MAY01-C8351_1.pep
HLDENWRPRVRNAIIQSDDGPHILAGGLNSLEETDYSTERWTDIVKYYEEIGKPTPKVEVMKYLKNKQYTDAKDFSGECEPVVVIAKGQSVQGTCKYGTRVDYILASPNSSYKFVPGSYSVLSSKGTSDHHIVKVDVVKTDDNFIEMAAGSDGNTETDSPEDTGDSSPQKHMVNTS

SEQ ID NO: 62178 - protein, 99 aa, Gossypium hirsutum
  Clone ID: GOSHI-09MAY01-C8371_1.pep
QNKNENKGWCFGYLCGIFFFQLGLCFCLDFKCRRVEPRPKGGLCLNYLNSKLPKSFTNRLQSLCSHGLCLIRQTVIVLRWKVFRVHPKNCWLSSPSPAL

SEQ ID NO: 62179 - protein, 72 aa, Gossypium hirsutum
  Clone ID: uC-gsflmaxxa029h09b1.pep
FYFSIQFFIYSRGRVTFKPHFVPRVISCIWTSHHPFDFGYPLSFWVFFFLQNLSIIDSDYHKLKENRSKSLP

SEQ ID NO: 62180 - protein, 213 aa, Gossypium hirsutum
  unsure (1)..(213): unsure at all Xaa locations
  Clone ID: GOSHI-09MAY01-C8331_2.pep
EQEMDRRDKERMAKLRTLGNIRLIGELLKQKMVPEKIVHHIVQELLGHDSAACPAEENVEAICQFFNTIANQLDECPNSRRVNDTYFTRLKELTTNPLLAPRLRFMVRDVLDLRANKWVPRRDEVKAKTITEIHSEAEKNLGLRPGATASITNNRLVPVGSDTTGPGGFPITRPCTGGLIPVMPGTRIMPAMPXIDNDNMEAPMRRSMPTGDA

SEQ ID NO: 62181 - protein, 398 aa, Gossypium hirsutum
  unsure (1)..(398): unsure at all Xaa locations
  Clone ID: GOSHI-09MAY01-C8331_1.pep
MQQGDQTVLSLRPGGGRGNRLFGGPSSSSSSSSSSSSSLAFGSFSSDLPLFRSHGGGGASSLKAADSRFEGRERVRYTRDQLLQLREAVKVADEILKIKQDFEVELFGEDKSWSRGESNPPNYSQNRYSEPDNRDWFSRSAQFPPAGDERSRELLRGRDLGNRFDSRQQEANKFNRQEQFNPQISRAQNSSTQGGGSTPALVKAEVPWSARRGNLSEKERVLKTVKGILNKLTPEKYDLLKGQLIDSGITSADILKGVISLIFEKAVLEPTFCPMYALLCSDLNDKLPSFPSDEPGGKDVTFKRVLLNTCQEAFEGADKLREEVRXMTAPEQEMERRDKERMAKLRTLGNIRLIGELLKQKMVPEKIVHHIVQELLGQDSKACPARDVEAICQSSILL

SEQ ID NO: 62182 - protein, 117 aa, Gossypium hirsutum
  Clone ID: GOSHI-09MAY01-C9981_1.pep
IISLLISQFFSGFFFFIGVRNDVVYESSQALMEKGAVEAFEVAMVRTQARIVEGDAGKVICKEAERLKPAAVVMGTRGRSLSQSVFQGSVSEYCFHNCKSAPVIIVPGKEAGDESLI

SEQ ID NO: 62183 - protein, 128 aa, Gossypium hirsutum
  Clone ID: uC-gsflnu33B143b09b1.pep
METVMEDEEYNYREVNLPSLIPVVPEPALERETGERRRGRDILIAIDHGPKSKHAFDWALIHFLRLADTIHLVHAVYSVRNDVVYETSQALMEKLAVEAFEVAMVRTQARIVEGDAGKVICKGAERLK

SEQ ID NO: 62184 - protein, 238 aa, Gossypium hirsutum
  Clone ID: GOSHI-09MAY01-C9931_1.pep
LRAWDETNNTQPEKLIWNLMGMMNNCWFRVKTNVCRPHKGEIGIVFEHPTLPGNQSGGWMAKERHPENPTIKKSVSSPFMNTASKTFSMSEVNKHNSADSAWIVLPRVRYDCSWFLKDHPGGSDSILINAGTDCTEEFDAIHSDKAKKMLEDYRIGELLTSGYVSDSAGSSPNTSVHGASNMSFLAPIKEVAPTRPVALIPREKIPCKLVEKTSISHDVRRFRFALPSEDQVLGLPVG

SEQ ID NO: 62185 - protein, 125 aa, Gossypium hirsutum
  unsure (1)..(125): unsure at all Xaa locations
  Clone ID: GOSHI-09MAY01-C9881_1.pep
MDFLGIFLLSSLAMLKTIHGHGGAWSNAHATFYGSSDASGTMGGACGYGNLYSQSYGTSTAALSTALFNKGLACGACFEIKCVNDNRWCLPRSIIVTXATNFCPPNNALPNNAGGWGNPPLRHFD

SEQ ID NO: 62186 - protein, 104 aa, Gossypium hirsutum
  unsure (1)..(104): unsure at all Xaa locations
  Clone ID: GOSHI-09MAY01-C9811_1.pep
MMKYRSIDGFPLTTKDYVHRIGRTGRAGRMGGAHTFFTQQNKGLAGELVNDVNEAGQVVPPALLKFGTHVKKKESKLYGAHFXEIAADAPKAKKITFDDSDDEN

SEQ ID NO: 62187 - protein, 191 aa, Gossypium hirsutum
  unsure (1)..(191): unsure at all Xaa locations
  Clone ID: GOSHI-09MAY01-C9551_2.pep
MAEEVKKQAEAETTAAPPPAVEVPKAESEEKTVSPPPAEEKPEESKALVVVEKAPEPEPKKISGGSHDRDIALAEVEKAKRLSFIKAWEESEKTKAENKSQKKLSAIVAWENSKKASLEAKLKKIEEQLEKKKAEYAEKMKNKVALLHKXEAEEKRAMVEAKRGEEVLKAEEMAAKYRATGQTPKKVLGCF

SEQ ID NO: 62188 - protein, 197 aa, Gossypium hirsutum
  Clone ID: GOSHI-09MAY01-C9551_1.pep
MAEETKKEVAAETPVAPTPAVEAPTPVAEDLKADSKKTTVAPPPAEEKSDESKALAVVEKAPEPAPKNSSTGSHDRDVALADLEKEKKLSFIKAWEDSEKTKAENKAQKKLSAIVAWENSKKAALEAKLKKIEEQLEKKKAEYAETMKNKVASIHKEAEEKRAMVEAKRGEEVLKAEEMAAKYRATGQSPKKLLGCF

SEQ ID NO: 62189 - protein, 101 aa, Gossypium hirsutum
  unsure (1)..(101): unsure at all Xaa locations
  Clone ID: uC-gsflnu33B088c06b1.pep
AITKVHFIWIICYSMIFYFFXFFISSYLLFIFFLFFLFNYFFILLFLISYLFSIILFFFSLLFFIXIYFFFFFQILFILFFYFYFNILFSFFIILFFSFFF

SEQ ID NO: 62190 - protein, 115 aa, Gossypium hirsutum
  Clone ID: LIB3083-020-Q1-L1-F2.pep
MDSKKAPEPAPKKSSSGSHDRDVALADLEKEKKLSFIKAWEDSEKTKAENKAQKKLSAIVAWENSKKAALEAKLKKIEEQLEKKKAEYAETMKNKVASIHKEAEEKRAMVEAKRG

SEQ ID NO: 62191 - protein, 97 aa, Gossypium hirsutum
  Clone ID: GOSHI-09MAY01-C9541_2.pep
MGVTENHQHHHHPPPPQVVAPPAAPPPNFALSRGPTWTPAEQLHQLQYCIHSNPSWPQALLLAFQHFIVNLGTTVLIASTMVPRMGGNHGDKARVIQ

SEQ ID NO: 62192 - protein, 177 aa, Gossypium hirsutum
  Clone ID: LIB3582-040-P1-K1-E11.pep
MGETENHQHHHHPPPPQVVAPPAAPPPNFALSRGPTWTPAEQLHQLQYCIHSNPSWPQALLLAFQHFIVNLGTTVLIASTMVPRMGGNHGDKARVIQVLLFMSGINTLLQTLIGSRLPTVMGVSFAYTLPLLSIINDYTDETFATEHDRFIRGIRTIQGSLIVASFVNIILRYSRAW

SEQ ID NO: 62193 - protein, 105 aa, Gossypium hirsutum
  Clone ID: GOSHI-09MAY01-C9511_1.pep
MGDSKVETISRLAQWRIDNFSPCSYKKSDPFKVGLWNWHLSIEKNRYMYIRLFPEPSRVSKEQPPYAKFILRISNVGANRRLYISPVHDRPLRTCHDLYWPVDST

SEQ ID NO: 62194 - protein, 250 aa, Gossypium hirsutum
  Clone ID: GOSHI-09MAY01-C9441_1.pep
APDPVHGKRNYTYMDVVRAYLRGRKVQLCGLAQYANLLGVTIGYTITASISMVAVKRSNCFHKHGHHVKCQTSNNPFMIIFACIQIVLSQIPNFHKLSWLSILAAVMSFTYASIGLGLSIAKAASGGEHVRTSLTGVQVGVDVSGSEKVWRTFQAIGDIAFAYAYSTVLIEIQDTIKASPPENKSMKRASGVGVTTTTLFYVLCGIVGYAAFGNDAPGNFLTGFGFYEPFWLIDFANVCIAVHLIGAYPS

SEQ ID NO: 62195 - protein, 92 aa, Gossypium hirsutum
  unsure (1)..(92): unsure at all Xaa locations
  Clone ID: LIB3148-010-Q1-K1-E5.pep
NNPFMIIFACIQIVLSQIPNFHKLSWLSILAAVMCFTLALTGVGHSXIANAAWGGAHVETRYSGVQVGVGLSGSEKVWRTFQAFGDIGFAYA

SEQ ID NO: 62196 - protein, 49 aa, Gossypium hirsutum
  Clone ID: LIB3120-039-P1-K1-C6.pep
FQDTIKASPPENKSMKRASGVGVTTTTLFYVLCGIVGYAAFGNDAPGNF

SEQ ID NO: 62197 - protein, 229 aa, Gossypium hirsutum
  unsure (1)..(229): unsure at all Xaa locations
  Clone ID: GOSHI-09MAY01-C9471_1.pep
PTRPQLWRSVSLARKLEPTGTTTFRMAVNCRHRLDPKLEPYYFGNAIQSIPTFASAGELLGKDLSWAADILHKNVVAHNNDTVRKGVADWEKQPRLFPLGNADGASITMGSSPRFPMYNNDFGWGRPLAVRSGRANKFDGKISAFPGRDGNGSVDFEVXLAPDTMLGVENDPEIMQYVSEFLGVQSVGKRNINSRWQFVNGWISVNLYQILEEENTTINFNPLDFISVT

SEQ ID NO: 62198 - protein, 50 aa, Gossypium hirsutum
  Clone ID: GOSHI-09MAY01-C9761_1.pep
MEHVIGGKFKLGRKIGSGSFGELYLGVNVQSGEEVAVKLESIKTKHPQLL

SEQ ID NO: 62199 - protein, 146 aa, Gossypium hirsutum
  Clone ID: GOSHI-09MAY01-C9701_1.pep
TTLSILNEEAEAILEDINPSPVQVLGYGVGSIAAIYALLEWEKSLQLIGILGLVLTVYRRVSSYKNAEDLKKDLTLLLGPAKVGAVAYSWIAGKLETNGIGLSTSPSSLDVQNRVLQAAAKLESQPSSAEDPSIAPINEKVDLSEA

SEQ ID NO: 62200 - protein, 162 aa, Gossypium hirsutum
  unsure (1)..(162): unsure at all Xaa locations
  Clone ID: GOSHI-09MAY01-C9721_1.pep
RIFNPLIFDFHLEVNWVISYVGEGRSYLGSGKRKSHEGMIKLGFSLVKGKANHPMEDYHVGKFMQILXHELGLFSIYDGHLVDIISSYLKKHSLANILKKTYEKTDQAILSQSSDXGRGGSTVVTTTLINGIKLCVENVRDSRVVLSRGSQAIQMTTDHEPI

SEQ ID NO: 62201 - protein, 154 aa, Gossypium hirsutum
  Clone ID: GOSHI-09MAY01-C9691_2.pep
MQIFVKTLTGKTITLEVESSDTIDNVKAKIQDKEGIPPDQQRLIFAGKQLEDGRTLADYNIQKESTLHLVLRLRGGTMIKVKTLTGKEIEIDIEPTDTIDRIKERVEEKEGIPPVQQRLIYAGKQLADDKTARDYNIEGGSVLHLVLALRGGRL

SEQ ID NO: 62202 - protein, 174 aa, Gossypium hirsutum
  Clone ID: GOSHI-09MAY01-C9691_1.pep
MQIFVKTLTGKTITLEVESSDTIDNVKAKIQDKEGIPPDQQRLIFAGKQLEDGRTLADYNIQKESTLHLVLRLRGGTMIKVKTLTGKEIEIDIEPTDTIDRIKERVEEKEGIPPVQQRLIYARKQLADDKTARDYTKFVLLHCTECISGIYLIIDMLLRYSCDLKSLFIFHWLI

SEQ ID NO: 62203 - protein, 94 aa, Gossypium hirsutum
  Clone ID: LIB3829-020-Q6-N6-C9.pep
IQKESTLHLVLRLRGGTMIKVKTLTGKEIEIDIEPTDTIDRIKERVEEKEGIPPVQQRLIYAGKQLADDKTARDYNIEGGSVLHLVLALRGGCL

SEQ ID NO: 62204 - protein, 60 aa, Gossypium hirsutum
  Clone ID: AI729670.1.pep
TTDTIDRIKERVEEKERIPPVQQRLIYAGKQLADDKTARDYNIEGGSVLHLVLALRGGCL

SEQ ID NO: 62205 - protein, 142 aa, Gossypium hirsutum
  Clone ID: GOSHI-09MAY01-C9661_1.pep
GAYEIKAHPWFKDIEWGRFCHREAAFMPQVNSDLDTQNFEKFEELGAQVQSSTRSGPWRKMLSSKDANFVGYTYKNVEIVKEHHLPGIAEVKKKSIAPKRPSVKSLFDTPGPPDPPTKGSFLNLLPTQFEEPESPVSEHQSI

SEQ ID NO: 62206 - protein, 88 aa, Gossypium hirsutum
  Clone ID: uC-gsronu33b025f05b1.pep
FKFEELGAQGGSLTRSGAWRKMLSSKDANFVGYTYKNVEIVKEHHLPGIAEVKKKSNAPKRPSVKSLFDTPGPPDPPTKGSFLNLLPT

SEQ ID NO: 62207 - protein, 196 aa, Gossypium hirsutum
  Clone ID: GOSHI-09MAY01-C9191_1.pep
MASSSIIFLLLSLLCIVCEARSPTAARSGASNFIKASCSATKYPSLCIQSLAAFAPSIQRSPRQLAQTALSVSLERAKSTQAFVSKMKKFRGLKRREYEAIKDCIEEMSESVDRLSKSVQELKYMGQAKGQDFLWHVSNVETWVSAALTDENTCVDGFAGRALDGKIKASIRARVINVAQVTSNALSLVNQFASKQ

SEQ ID NO: 62208 - protein, 308 aa, Gossypium hirsutum
  unsure (1)..(308): unsure at all Xaa locations
  Clone ID: GOSHI-09MAY01-C9141_1.pep
YGCVEKEGKPSYNMNEFLPYGKIGLEAFQVFLSYLYTGKLKASPMEVSTCVDTHCAHDACRPAIDFAVELMYASSIFQIPEMVSLFQRRLLNFVDKALVEDIIPXLVVAFHCQCSQLVSQCVDGRAGARLGGRAGEKELPYEVAESIRLLRCKPPTEAEDGEAVVVPLREKQIRRIQKALDSDDVELVKLLLTESDVTLDDATALHYAAAYCDPKVVSEILALRLADVNRRNSRGYTVLHIAAMRKEPAVIMSLLAKGASASELTLDGRSAFNICQRLTRPKDYHAITEHGKETNXDRICIDVLYREI

SEQ ID NO: 62209 - protein, 140 aa, Gossypium hirsutum
  Clone ID: GOSHI-09MAY01-C9121_1.pep
AVIHGNIQRKYEIEPCFTQKCFWFIFFLLQVAKALGGLIPLPEPGPSDPRRKELIELEQHKAVIDTKADSLVRRELWLGLAYLVVQTAGFMRLTFWELSWDVMEPICFYVTSMYFMAGYAFFLRTSKEPSFEGFYQSRFN

SEQ ID NO: 62210 - protein, 75 aa, Gossypium hirsutum
  Clone ID: LIB3166-010-P1-K1-C9.pep
PFFFLILNVLLIIIGFFFFDNFFFFYIKIPLLFFFLVGCVFYYFFCFYLYLILFFFNYFISFFFISIIIFFIILF

SEQ ID NO: 62211 - protein, 130 aa, Gossypium hirsutum
  Clone ID: GOSHI-09MAY01-C9051_1.pep
MRKRLLTILLAAIISAGATAVKAQNCGCAEGLCCSRWGYCGTGDDYCGTGCQQGPCNPPPALNNVLVADIVTPEFFNGILDVAEDSCEGKNFYTRSAFLEALGPYPQFGRIGTVDDSNREIAAFFAHSHA

SEQ ID NO: 62212 - protein, 127 aa, Gossypium hirsutum
  unsure (1)..(127): unsure at all Xaa locations
  Clone ID: GOSHI-09MAY01-C9351_2.pep
MSNISSSFTLSQCQQQHLLEKLVVFNVKGRDKRGRNVLLIIGKYFPARMVSSEVLKKYLEETIYPKLGXKPFSVVYVHTDVQKSENFPGISVLRSVSDAIPMNLKNNLEVVYFLHPGLQARLFLATF

SEQ ID NO: 62213 - protein, 153 aa, Gossypium hirsutum
  Clone ID: GOSHI-09MAY01-C9351_1.pep
TKPISTYRFTPKLGAKPLSVVYVHTDVQKSENFPGISVLRSVSDAIPMNLKNNLEVVYFLHPGLQARLFLATFGRLFFDGGLYSKLKYVSRLDFLWDHVRRLEMKIPDFVHDHDEELEYHPMMDYGLESDHPRVYTEPPSMDPISMYSMRCIA

SEQ ID NO: 62214 - protein, 135 aa, Gossypium hirsutum
  unsure (1)..(135): unsure at all Xaa locations
  Clone ID: GOSHI-09MAY01-C9341_5.pep
TRAVSDTFADEEKRSKFLRWRIQFLEKSIRKLDFSPNGISTIVQVNDLKNSPGPGKRXLRQATNQALHLLQDNYPEFVAKQVFINVPWWYLAFNMMISPFLTQRTKSKFVCASPAKSSDILFRQVDSNNFYNEFF

SEQ ID NO: 62215 - protein, 341 aa, Gossypium hirsutum
  Clone ID: GOSHI-09MAY01-C9341_3.pep
EKPEEEASSSLKLEVVAQSEERPEEAEVPRPPPQEVSIWGIPLLADERSDVILLKFLRARDFKVKDAFTMIKNTVIWRKEFGVDGLLDEELGNELEKVVFMHGFDKEGHPVCYNVYGEFQNKELYQNTFADEEKRSKFLRWRIQFLEKSIRKLDFSPNGISTIVQVNDLKNSPGPGKKELRQATNQALNLLQDNYPEFVAKQVFINVPWWYLAFNRMISPFLTQRTKSKFVFASPAKSAETLFKYIAPEQVPVQYGGLSREGEQEFSVADAVTEVTIKPAAKHSVEFPITENCNLVWGPRVVGWEVNYGAEFVPDRQDGYTVIVLKTRKGSLCDETVILDA

SEQ ID NO: 62216 - protein, 231 aa, Gossypium hirsutum
  Clone ID: GOSHI-09MAY01-C9341_2.pep
PRVRPASALASGPNGISTIVQVNDLKNSPGPGKRELRQATNQALHLLQDNYPEFVAKQVFINVPWWYLAFNMMISPFLTQRTKSKFVCASPAKSSDILFRYIAPEQVPVQYGGLSRDGEQEFTVADAATEVTIKPATKHSVEFPITENCNLVWELRVVGWEVNYGAEFVPTAEDGYTVIVSKTRKVSSADETVISDSFKTGEPGKVVLTIDNQTSKKKKLLYRSKTKPYSD

SEQ ID NO: 62217 - protein, 125 aa, Gossypium hirsutum
  Clone ID: GOSHI-09MAY01-C9341_1.pep
HASAAARVREVERFSSWTVSFRKLDFNPTGINTMVQVNDLKNSPGPGKKELRQATNQALNLLQDNYPEFVAKQVFINVPWWYLAFNRMISPFLTQRTKSMFVFASPALSAETPSSSKWISFISSF

SEQ ID NO: 62218 - protein, 74 aa, Gossypium hirsutum
  Clone ID: uC-gsronu33B042c03b1.pep
QRSKSKFVFASPAKSAETLFKYIAPEQVPVQYGGLSREGEQEFSVADAVTEVTIKPAAKHSVEFPITENCNLVW

SEQ ID NO: 62219 - protein, 93 aa, Gossypium hirsutum
  Clone ID: LIB3828-004-Q1-N6-C4.pep
HLVWVLKWQKSTVVWEVRVVGWDVNYGAEFVPTAEDGYTVIVSKTRKVGPADETVISNSFKTGEPGKIVLTIDNQTTKKKKLVYRSKAKPYSE

SEQ ID NO: 62220 - protein, 181 aa, Gossypium hirsutum
  unsure (1)..(181): unsure at all Xaa locations
  Clone ID: uC-gsronu33B041f09b1.pep
AATPAGTRTVLPRPTHASLFTVTDEEKRSKFLRWRIQSLEKSIRKLDFNPTGINTMVQVNDLKNSPGPGKKELRQATNQALNLLQDNYPEFVAKQVFINVPWWYLAFNRMISPFLTQRTKSMFVFASPAKSAETLFKYIAPEQVPVQYXGLSIEGEQEFSVAEKAHCFNYPSLNPCVESPI

SEQ ID NO: 62221 - protein, 191 aa, Gossypium hirsutum
  Clone ID: GOSHI-09MAY01-C9241_1.pep
MKVVHRDLVPNGPGSVKMIPVDSEDLWFAYNLIATGDWVMARTVRKVLRETAGGRDAERVALKLEIKVEAIDYDKEGSVLRIRGKNTLENEHVKIGQFHTLELELQRPFVLRKKIWDSLALHVLRQASDPGASADLAVVLMQEGLANILLVGKSMTSTRSRIETSIPRKHGPAIAGYESALKKFFENVLQA

SEQ ID NO: 62222 - protein, 79 aa, Gossypium hirsutum
  Clone ID: LIB3543-021-Q1-K1-G12.pep
MKGLHRDLVPNGPDSVQTIPMDTEDLWFAYSMTATGECDMARTARKVLGETAGGRDAERARLNLEIKARAVDYDREGSV

SEQ ID NO: 62223 - protein, 232 aa, Gossypium hirsutum
  unsure (1)..(232): unsure at all Xaa locations
  Clone ID: GOSHI-09MAY01-C9221_1.pep
IGIPMAASIMMGCGSTSMVYGYVSAFDFLRCLGHSNVEVVPHEVFIKLPFLKYFLYTPTYHSLHHTEMGTNFCLFMPLFDAMGNTLNRNSWQLHKKISSDSAKNGRVPDFVFLAHGVDLTSSMHAPFVFRSFASVPFSTRIFLLPLLPVAFLVMLIMWAWSKTFLISFYNLRGHLHQTWVVPKFGFQYFLPFAMEGINKRIEEAILRADRIGVXVISLAALNKNEALNGGGT

SEQ ID NO: 62224 - protein, 238 aa, Gossypium hirsutum
  Clone ID: GOSHI-09MAY01-C4951_1.pep
HASGRKRAIETVLCAAQPTWVCARDSMHKRRATGGKKKAWRKKRKYELGRQPANTKLSSNKTVRRIRVRGGNVKWRALRLDTGNYSWGSEAVTRKTRILDVVYNASNNELVRTQTLVKSAIVQVDAAPFKQWYLQHYGVDIGRKKKTAAKKEATEDGEVAAEETKKSNHVLRKLEKRQKERTLDAHIEEQFGSGRLLACISSRPGQCGRADGYILEGKELEFYMKKIQRKKGKGAGAA

SEQ ID NO: 62225 - protein, 139 aa, Gossypium hirsutum
  unsure (1)..(139): unsure at all Xaa locations
  Clone ID: uC-gsronu33B055g12b1.pep
FSSFFYIIFNLLYFFLLSFLFFLIFFLFFXFLFFFIYYFSFFYLIFFFYLIILFIFISLFFFLXIFYIILLFFHLFFFSFIFFFNLILFIYSIIFLSFYHSLYYTYSISYFPLSFLFFISSYSSLYLSSHLLSLIFLPI

SEQ ID NO: 62226 - protein, 98 aa, Gossypium hirsutum
  Clone ID: GOSHI-09MAY01-C4971_4.pep
MMRMKTKATGLSPAVTNGESGFVGGGEPTAHDWELRPGGMLVQKRDLDTGRPPIPPPTIRVRVKYKSIYHEISINSQATFGELKKMLTGPTGLHHQDQ

SEQ ID NO: 62227 - protein, 150 aa, Gossypium hirsutum
  Clone ID: GOSHI-09MAY01-C4971_3.pep
KKGKTIVNLKIKNTRPYTKEDQTITKNRHKHRVRKQNHQSRQRLAIIQEQQSTNSVSHLPIQQQYQHKHQHQQASGPVVVTTNGTHSFPPPRHCRSPRHLHLHQPLITQPHRSSLGNSSIKDSMLLCPLWFSLHFLSVSTSFGLASSSCT

SEQ ID NO: 62228 - protein, 341 aa, Gossypium hirsutum
  Clone ID: GOSHI-09MAY01-C4971_2.pep
MMRMKTKATGLSPAVTNEESGFVGGGEPTAHDWELRPGGMLVQKRDLDNGRPPIPPPTIRVRVKYKSIYHEISINSQATFGELKKMLTGPTGLHHQDQKLLYKDKERDSKAFLDTAGVKDKSKLVLIEDPISQEKRLLEMRKNAKLEKASKSISEISLEVDRLGNQVSTFESIITKGGKVAEKDVLNLIEQLMNQLLKLDAITADGDVKLQRKMQVRRVQKCVETLDMLKIKNAMPSNNGGQMEIQNQHKHTNGQKLAPTQEQKPRHFNWQRLAPVQEQQSSNSIAHLPIHQHHQSASGPVVVTTNWETFDSSPASLPVPSASTSTANNSVPPKFPWDFFD

SEQ ID NO: 62229 - protein, 213 aa, Gossypium hirsutum
  Clone ID: GOSHI-09MAY01-C4971_1.pep
EDPISQEKRLLETRNGPVGEKASGSISQVSLEVDRLGSQVSTFESIITKGGKVAEKDVLNLIEQLMNQLLKLDGIMADGDVKLQRKMQVSRVQKYVETLDMLKIKNAMPSTNGAQSETQNRHKHSVRKQEQQSRQRLAPIQEQQSSNSVSHLPIHQQYQHKHQHQQASGPVVVTTKWETFDSSPATLPVTSTSTSSSTANNSAPPKFPWEFFD

SEQ ID NO: 62230 - protein, 127 aa, Gossypium hirsutum
  Clone ID: LIB3197-040-Q1-M1-D2.pep
VQKEWKKKKKMLTGPTGLHHQDQKLLYKDKERDSKAFLDMAGVKDKSKIVLVEDPISQEKRLLETRKNAKIEKASKSISQEVDRLAGQVSAFETIITKGGKVAEKDLINSIELLMNQLLKLDGITAD

SEQ ID NO: 62231 - protein, 72 aa, Gossypium hirsutum
  Clone ID: LIB3083-049-Q1-L1-C11.pep
MMRMKTKATGLSPAVTNEESGFVGGGEPTAHDWELRPGGMLVQKRDLDNGRPPIPPPTIRVRVKYKSIYHEI

SEQ ID NO: 62232 - protein, 168 aa, Gossypium hirsutum
  unsure (1)..(168): unsure at all Xaa locations
  Clone ID: GOSHI-09MAY01-C4961_9.pep
NCLGALDRTHIKIRVPTVDKPRCRTRKGDIATNMLGVCPPVREMQLEYVLPGWEGAGADGRVLRDAISRRHGLKVPHGKAYSXRTLNYSLRSNFVGRINHSFKKKXFKGCYYLVDAGYTNCEGFLAPFRGQRFHLNEWRQGYQPSSPQEFFNMKHASARNIIERCFGF

SEQ ID NO: 62233 - protein, 67 aa, Gossypium hirsutum
  Clone ID: GOSHI-09MAY01-C4961_8.pep
ANKWLSVLIDLCIHEAKKKSTHDVLQTKHVCTHIYETPFVHIKSKTCIYRSITMFFSLTFYPSSTNS

SEQ ID NO: 62234 - protein, 138 aa, Gossypium hirsutum
  Clone ID: GOSHI-09MAY01-C4961_5.pep
MVANVYNWPITANSTDPRWKWFKNCSGALDGTHIKIRVPTVDKPRYRTQKGSFLRDAISRRHGLKVPHGCYYLVDAGYTNCEGFIAPFRGQKYHLNEWRQGYQLSIPHLGFNNPKHLSITLHAEACFILNNSSGVLSW

SEQ ID NO: 62235 - protein, 91 aa, Gossypium hirsutum
  unsure (1)..(91): unsure at all Xaa locations
  Clone ID: GOSHI-09MAY01-C4961_3.pep
MLYSLNHCCYYLVDVGYANCEGFLAPFRGQIYHLNEWRQGYQPSTPEEFFNMKHASAHNVIERCFGLLKLRXGILRSPLFYPSWEKDYLVM

SEQ ID NO: 62236 - protein, 245 aa, Gossypium hirsutum
  Clone ID: GOSHI-09MAY01-C4961_2.pep
MHWPESSGFGDATDPPLKSGSEHRQFLNRLKKVWKAMEGLVDSGLVQAIGVSNFGVHQIKELIKFAKIVLAVNQVELHPFWRQDELVKFCQMKCIHVSAHTPLGVPTSSPGVSDSRSGGEYELGTPRISFWRSRSVHGPMLKLSIVGEIADRHKKTTEQVILRWGFQRGTSVLPCSLKPDRIKQNIDIFNWSLSDDEWKRLNRIEPQVCLYGDGPLNNLSDRGFMFGSGPLQAVRAMEDDAEFNA

SEQ ID NO: 62237 - protein, 258 aa, Gossypium hirsutum
  Clone ID: GOSHI-09MAY01-C4961_1.pep
VSDNVFTYHFSSYLKNRVIKHHFNRSGETASRSFHNVLNAVIRLQDVLFKKAEPITANSTDPRWKWFKNCLGALDGTHIKIRVPTADKPRYRTRKGDIATNMLGVCTPEMQFVYVLPGWEGSVADGRVLRDAISRRHGLKVPHGCYYLVDAGYTNCEGFLAPFRGQRYHLNEWRQGYQPSTPEEFFNMKHASARNVIERCFGLLKPRWGILRSPSFYPVRVHNRIIIACCLLYNFIRTYMSIDLIEAVLGDGLPSNEI

SEQ ID NO: 62238 - protein, 73 aa, Gossypium hirsutum
  Clone ID: LIB3825-028-Q6-K6-H3.pep
QAIVCYCSLFFFGLLDCLFHSQLSFLYSLNHCCYYLVDVGYANCEGFLAPFRGQIYHLNEWRQGYQPNTPEEI

SEQ ID NO: 62239 - protein, 134 aa, Gossypium hirsutum
  unsure (1)..(134): unsure at all Xaa locations
  Clone ID: LIB3583-009-P1-K1-D6.pep
RTRGQTLGGLKLSRNMLVDEQVTIFLHIISYHLKNRVIVTLKGXGETVSRSFHNVLNVVVLLQDVLFKKVGPITTNSTDPRWKWFKNYLGALDRTHIKIRVSIIDEPRYRTRKGDIATNMLGVCTLDIHFVYVL

SEQ ID NO: 62240 - protein, 114 aa, Gossypium hirsutum
  unsure (1)..(114): unsure at all Xaa locations
  Clone ID: LIB3120-031-Q1-K1-B8.pep
QIVFFIGCYYLVDAGYINCEGFLAPFRGQRYHLNEWRQGYXPSTPEEFFNIKHASARNVIERCFEILKLRWRILRSPSFYLVRVHNRIIIACCLLHNLIDDDESNIVNIHLSDA

SEQ ID NO: 62241 - protein, 59 aa, Gossypium hirsutum
  Clone ID: LIB3584-026-P1-K1-D11.pep
LTIAYGEKHLMIFYKQNTGGAHIYEILFVHIKSKTCNYRSITMFFSLTFYPSSTNSKLC

SEQ ID NO: 62242 - protein, 226 aa, Gossypium hirsutum
  unsure (1)..(226): unsure at all Xaa locations
  Clone ID: GOSHI-09MAY01-C4881_1.pep
MSMSDHDSNGAVSAVDDQNVCYSSQLTTPTDAASGEGLSTPTFDVPMSPKKALRAAMLKXSRFADTILXAHKKALLDHCDKTDPVKLQQEKERLERRQREEKAKIEAQILAAEAAAKMKAEVELKKQREREREAARIALQKMEKTAEIEQNLEILKELEMLSGCSLSNNQLHGRKSDSEQVNGASHGGNGGNPLQQLGLFIKVEYSEDEDDEAILNEDGEEGEIVS

SEQ ID NO: 62243 - protein, 160 aa, Gossypium hirsutum
  unsure (1)..(160): unsure at all Xaa locations
  Clone ID: GOSHI-09MAY01-C4861_1.pep
LLVKPHTGRKKLIRYIHYPVAYQLEFLSFFLIELCMVEYEMLKFQPSLLVAAAIYTAQCSLFRFKNWTKTSEWHTKYTEDQLLXVIIFGLLGFPSFIXPLCRTLMKDAFVMHVNRECSKLMVTYHQKAGSGKLKGVHRKYSSYKFGYAAKTEPALFLLDP

SEQ ID NO: 62244 - protein, 151 aa, Gossypium hirsutum
  unsure (1)..(151): unsure at all Xaa locations
  Clone ID: LIB3543-064-Q6-K6-F7.pep
SSVFKTFRGSVLDMEKLMVNTFNSTCLCHSYVFMRRFLXAAQSEKXLEFLSFFLIELSMVEYEMLKFQPSLLAAAAIYTAQCSLFRFKNWTKTSEWHTKYTEDQLLECSKLMVTYHQKAGSGKLKGVHRKYSSYKFGYAAKTEPALFLLDP

SEQ ID NO: 62245 - protein, 132 aa, Gossypium hirsutum
  unsure (1)..(132): unsure at all Xaa locations
  Clone ID: GOSHI-09MAY01-C4541_13.pep
SQSKHYSVGAYRINSDPTDIMAEGFXDGPVEVAFPVYEDFAHYKSGVYKHVTGSVMGGHAVKLIGWGTSDDGEDYWLLANQWNKGWGEDGYFKIRRGTNECGIEDDVVAGLPSTKNLVREVADMDILKAASF

SEQ ID NO: 62246 - protein, 91 aa, Gossypium hirsutum
  unsure (1)..(91): unsure at all Xaa locations
  Clone ID: GOSHI-09MAY01-C4541_7.pep
MKVVAAYLLAVLGGNASPSADDLKVILGSVGAEADDDRIELLLXEVKGKDITELIASGREKLASVPSGGGAVAVAAPTAGGPGAAAPAPAA

SEQ ID NO: 62247 - protein, 176 aa, Gossypium hirsutum
  Clone ID: GOSHI-09MAY01-C4541_6.pep
MAKDVEVGGEFQAKDYHDPPPAPLVDAQELTQWSFYRAIIAEFIATLLFLYITVLTVIGYKSQVDPDKGGQDCDGVGILGIAWAFGGMIFILVYCTAGISGGHINPAVTFGLFLARKVSLVRAILYMAAQCLGAICGCGLVKAFQKSYYNKYGGLRLRSSLWSTHAVRSFSRPLNL

SEQ ID NO: 62248 - protein, 285 aa, Gossypium hirsutum
  Clone ID: GOSHI-09MAY01-C4541_5.pep
MAKDVEVGGEFQAKDYHDPPPAPLVDGEELTKWSFYRAVIAEFIATLLFLYITVLTVIGYKSQVDPDKGSDQCGGVGILGIAWAFGGMIFILVYCTAGISGGHINPAVTFGLFLARKVSLDRAIFYMAAQCLGAIWGCGLVKAFQNSYYNQYGGGANSLAEGYSTGTGLAAEIIGTFVLVYTVFSATDPKRNARDSHIPVLAPLPIGFAVFMVHLATIPITGTGINPARSLGAAVIFNQDKIWDDHWIFWVGPFIGAAIAAIYHQFILRASGAKALGSFRSSSAM

SEQ ID NO: 62249 - protein, 112 aa, Gossypium hirsutum
  Clone ID: GOSHI-09MAY01-C4541_4.pep
MKVVAAYLLAVLGGNASPSAVDLKVILGSVGAEADDGGGELLLSEVKGEDITELIAGGREKLASVPSGGGAVAVAAPAAGGGGAAPAAEAKKEEKVEEKEESDDELGFSLFD

SEQ ID NO: 62250 - protein, 132 aa, Gossypium hirsutum
  Clone ID: GOSHI-09MAY01-C4541_3.pep
KQSKHYTGAAPRVRSNPADFMAVVYKNGPVEVSVSVYEDFAHYKSGVYRHLTGDVMGGHAVKLIGWGTSYDGEDYWLLANQWNRGWGDDGYFKIKRGVDECGIESDVVAGLPSTKNLVREVTDTGIVEDASF

SEQ ID NO: 62251 - protein, 112 aa, Gossypium hirsutum
  Clone ID: GOSHI-09MAY01-C4541_2.pep
MKVVAAYLLAVLGGNASPSADDLKVILGSVGAEADDDRIELLLSEVKGKDITELIASGREKLASVPSGGGAVAVAAPAGGGGGAAPAAEAKKEEKVEEKEESDDDMGFSLFD

SEQ ID NO: 62252 - protein, 285 aa, Gossypium hirsutum
  unsure (1)..(285): unsure at all Xaa locations
  Clone ID: GOSHI-09MAY01-C4541_1.pep
MAKDIEVGGEFQAKDYHDPPPAPLVDAQELXKWSFYRAVIAEFIATLLFLYITVLTVIGYKTQTDPAKGGEDCGGVGILGIAWAFGGMIFILVYCTAGISGGHINPAVTFGLFLARKVSLVRAIFYMAAQCLGAICGCGLVKAFQKSYYNKYGGGANSLADGYSTGTGLAAEIIGTFVLVYTVFSATDPKRNARDSHIPVLAPLPIGFAVFMVHLATIPITGTGINPARSFGAAVIYNQDKPWDDHWIFWVGPFIGAAIAAIYHQFILRAAAVKALGSFRSSSAM

SEQ ID NO: 62253 - protein, 51 aa, Gossypium hirsutum
  Clone ID: LIB3583-058-P1-K1-H8.pep
NILMYGFTTLGMDGDSISVCYRRSNMLFSSLKIYIIVIAIPFIFENVNSNF

SEQ ID NO: 62254 - protein, 87 aa, Gossypium hirsutum
  unsure (1)..(87): unsure at all Xaa locations
  Clone ID: LIB3543-042-Q1-K6-G12.pep
GSGGGGGDNNKIKLVLSEVKGKDITELIASGREKLASVPSGGGVFAVAAPAAGGGGGGFFPXXXAXKEEKVEEKEESDDDMGFSLFD

SEQ ID NO: 62255 - protein, 53 aa, Gossypium hirsutum
  unsure (1)..(53): unsure at all Xaa locations
  Clone ID: LIB3148-022-Q1-K1-B6.pep
LASVPSGGGVVAVAAPAPGGGGGDAAPAAEAKKXEKVEEKEESDDDMGFSLFD

SEQ ID NO: 62256 - protein, 96 aa, Gossypium hirsutum
  Clone ID: LIB3189-034-P1-K1-G3.pep
MKVVAAYLLAVLGGNASPSADDLKVILGSVGAEADDDRIELLLSEVKGKDITELIASGREKLASVPSGGGAGAVAAPTAGGCGTLLFPKPFTSLDF

SEQ ID NO: 62257 - protein, 105 aa, Gossypium hirsutum
  Clone ID: AW187339.1.pep
PSSFSSAATFPLSFPRYQSKNEGGRRLLVCRTQRKRFSFADNLKVILRSGVEPKKRGKGAGELNFIIMEAASCSLELCERQMKEYNSDVRQSSRRFYAVTNDNMF

SEQ ID NO: 62258 - protein, 86 aa, Gossypium hirsutum
  Clone ID: uC-gsronu33B136a09b1.pep
RDPSSKKTREEYSSNGDAKAAADVGTTAITDAASEELGGWGDDGYFKIKRGVDECGIESDVVAGLPSTKNLVREVTDTGIVEDASF

SEQ ID NO: 62259 - protein, 121 aa, Gossypium hirsutum
  Clone ID: LIB3166-044-P1-K1-C4.pep
AILVKDVEVGGGFQAKAYNDPPQVQLVDGEELTKWSFYRAVIAEFIATLLFLYITVLTVIGYKSQVDPDKGSDECGGVGILGIAWAFGGMIFILVYCTAGISGGHINPAVTFGLFLARKVS

SEQ ID NO: 62260 - protein, 73 aa, Gossypium hirsutum
  Clone ID: LIB3196-018-P1-M1-E1.pep
FLYKYFSVEAAAPMIIPRAIASSFLLNSSQSSRQHEAASIIIKFNSPTPFLFALVPHLQVIGGRRSVSSEYGK

SEQ ID NO: 62261 - protein, 116 aa, Gossypium hirsutum
  unsure (1)..(116): unsure at all Xaa locations
  Clone ID: LIB3272-032-P1-K1-C7.pep
IGGEGRGVHYHDPPQVPRLXARNLTKWSFYRGEARPTVPQRSLXDCVTVIGYKSQVDPDKGSDQCGGVGILGIAWAFGGMIFILVYCTAGIFGGHINPTGTFGLFLARKVSLVRAI

SEQ ID NO: 62262 - protein, 65 aa, Gossypium hirsutum
  Clone ID: LIB3272-043-P1-K1-H12.pep
DYFQDLGSHYPPPGSLVDWEVLSNRSFYRAVIAEFIATLLFLYIIVVTVIGFKSQVDPDQGRAQC

SEQ ID NO: 62263 - protein, 53 aa, Gossypium hirsutum
  Clone ID: LIB3149-036-Q1-K1-B11.pep
KRLFQTTQFVYYNGGCHAFMYVALIFNVPHHYPCFSFLFYGLSLFGLVFLSYL

SEQ ID NO: 62264 - protein, 168 aa, Gossypium hirsutum
  Clone ID: GOSHI-09MAY01-C4571_1.pep
SHAAAHARAATAALTPEPEPTHDNLAEDPLTYPEDEDVNNDAEVFDPSDKEEGSVIEDEVVEPQNITSPNETVVVVDSPPVVLEDAPKKSYASIVKVMKTNTASAPVYVPTNNVRVAPKEPHSIVSAKPAPATEVASPNSDNAPDSSNDNEVAVGHSIYVREFALHCK

SEQ ID NO: 62265 - protein, 173 aa, Gossypium hirsutum
  Clone ID: GOSHI-09MAY01-C4511_1.pep
VGPVEWLKPYTDDTIVDLGRKGVKGLLAVPISFVSEHIETLEEIDVEYKELALESGIQNWGRVPALGCEPMFISDLADAVIESLPYVGAMAVSNLEARQSLVPLGSVEELLATYDSQRRELPAPVTVWEWGWTKSAETWNGRAAMLAVLVLLLLEVTTGEGFLHQWGILPLFH

SEQ ID NO: 62266 - protein, 122 aa, Gossypium hirsutum
  Clone ID: GOSHI-09MAY01-C4501_1.pep
MNPRRDMRNSRVALFDGIEEGGIRASSSYSHEIDEHENERAMEGLQDRVNLLKRLSGDIHEEVDSHNRMLDRMGNDMDASRGILSGTMDKFKMVFETKSSRRMFTLVASFVVVFLIIYYLTK

SEQ ID NO: 62267 - protein, 494 aa, Gossypium hirsutum
  unsure (1)..(494): unsure at all Xaa locations
  Clone ID: GOSHI-09MAY01-C4521_1.pep
MAHFLTYLLLSFLIIYDSLGLSQSNQFCDAGVGYPESTCGFSSSSSSKLLIKGGTLLDAHQQEVADVYVEDGIIVAVKPNIKVDEDVTLLDATGKXVMPGGIDPHTHLAMEFMGTETIDDFFSGQAAALAGGTTMHIDFVIPVNGSLVAGFEAYKKKAMKSCMNYGFHMAITKWDESVSREMEIMVKEKGINSLACAPACQGSLMISDELLLQGLERCKSLGALAMVHAENGDAVFEGQKRMIDLGITGPDGHALSSPPVLEGEATARATRLAKFVNTPLYVVHVMSIDAMEEIARARKSGQKVIGEPVVSGLLLNESGLWHPDFVTAAKYVMSPPIRQSRHDKALHAALSTGVLLPRGPDHCTFNSTQKALGIDDFRKIPNGVNGIDERMHLVWDTMVESGQISVTDFVRITSTECARIFNIYPRKGAILVGSDADIIIFNPNSSFEISASMHHSRTDTNVYDGRKGKGKFEVTIVGGXVVWQDDQLKVGPWF

SEQ ID NO: 62268 - protein, 187 aa, Gossypium hirsutum
  Clone ID: GOSHI-09MAY01-C4491_1.pep
PTRRPRVRKHTDSYDPQDKKQRGKIVVELMYAPFRADSGKLEGTQDGYSKKESGFDRTFDSEVFGGAGLLSVLIQGAEDVEGERHNNPFAVVFFKGETKRTKMIKRARDPLWNEEFHYMLEEPPLNEKIHIEVMSKRTGFSFRSKEHLGNVDINLTDVVHNGRINQKYHLIDSKNGVIHVAIKWVTA

SEQ ID NO: 62269 - protein, 246 aa, Gossypium hirsutum
  Clone ID: GOSHI-09MAY01-C4481_1.pep
PRVRAPPSEKSSKSRTIIARQVNGIAAEQVVRPAADVEKVPSTGSTSGLTWGISSIFGSSDNRSSVKESLTNKPYTEPAQNMEHAFSMIHLKEPPSLLRPSEDRSETEAIEIAVTKLLLRSYYDIVRKNIEDSVPKAIMHFLVNHSKRELHNVFIRKLYRENLFEEMLQEPDEIAAKRKRTRETLRVLQQAFRTLDELPLEAETVERGYSLGSDPTGLPKIHGLATSSIYSSGGSDDAYTASSKNP

SEQ ID NO: 62270 - protein, 82 aa, Gossypium hirsutum
  unsure (1)..(82): unsure at all Xaa locations
  Clone ID: LIB3166-019-P1-K1-C10.pep
MNVDLLIYNIYIQVNHTKLELHNVFIKKLYIENLFEEMLQEPDEIASKRKRTRETLRVLQHAFMTLDXLPLEAETVYRGYSL

SEQ ID NO: 62271 - protein, 210 aa, Gossypium hirsutum
  Clone ID: GOSHI-09MAY01-C4471_1.pep
QRPPSVRSKLIYTNAGNAILALASNATHLLWKWPQNDLNLSGKATTDVPPQLWQPRSCSRVMTNDLTDSTPEEAVPCFALSKNDSYLLSASGGIISLFNMLTFKRMMSFMSPSPAATSLAFHPQDNNIVAIGMDDSTILIYHVRFTEVKSKLKGHSGRVTGLAFSTAMDLLVSSGEDAQIFTWNLGGWGKCKSKQLQFPDERIPISGSNT

SEQ ID NO: 62272 - protein, 251 aa, Gossypium hirsutum
  unsure (1)..(251): unsure at all Xaa locations
  Clone ID: GOSHI-09MAY01-C4431_1.pep
MYPAQLKYEPFSITEIMAMLMKRIANLTKTTAKPSPPFSLKYLLLFSLPSLSSASEKLLAGTATDVADISGESDLVYSDPPVSATIKPLLPDLLQPRVVIYDGVCHLCHRGVKSVIKADKHRKIKFCCVQSKAAEPYLRVCGVDREDVLLRFVFIEGXLGLYHQGSTAALRVLSYLPLPYSALSAFLIIPXPLKDAVYDFIAKRRYDWFGKSENCLXARDELLERFIDRENMMDRIDQICNLDSLNTIDNL

SEQ ID NO: 62273 - protein, 90 aa, Gossypium hirsutum
  Clone ID: LIB3145-026-Q1-K1-C2.pep
MYVYFLPSEIDCSAAALRVLSYLPLPYSALSAFLIIPTPLRDAVYDFIAKRRYDWFGKSEDCLVLQESELLERFIDREEMMDRNRNRSNL

SEQ ID NO: 62274 - protein, 308 aa, Gossypium hirsutum
  Clone ID: GOSHI-09MAY01-C4421_1.pep
ESRAEQSRTEKKKMERILSAVGGGGESLLGSMKIAVLPIAKVFTMCFLGFLMASKYVNILPANGRKPLNGLVFSLLLPCLIFSQLGQAITLQKMLEWWFIPVNVVLGSLVGSLIGFIVVTLVKPPYPYFKFSIVQIGIGNIGNVPLVLIAALCRDTSNPFGDTDTCTTQGTAYISFGQWVGAIILYTYVFNMLAPPVEGTFDLEDASLPLKIPQKDVSPEQAPLLVQEDASVDSDNSDTKGKIKSFLVFIYEKQILQPPIIASILAMILGAVPFLKKLIFTSDAPLYFLTDSCIILGEAMIPCILLAL

SEQ ID NO: 62275 - protein, 174 aa, Gossypium hirsutum
  unsure (1)..(174): unsure at all Xaa locations
  Clone ID: AI055684.1.pep
MERILSAVGGGGESLLGSIKIAVLPIAKVFTMCFLGFLMASKYVNILPANGRKLLNGLVFSLLLPCLIFSQLGQAITLQKMLEWWFIPVNVVLGSLVGSLIGLIVVTLVKPSLPYCRFXNRSIRNGNIGDVPLGLDAVFSIVASEPFGDSDPWSIQGTAYFNCDVVGPSSFPLV

SEQ ID NO: 62276 - protein, 175 aa, Gossypium hirsutum
  unsure (1)..(175): unsure at all Xaa locations
  Clone ID: GOSHI-09MAY01-C4781_1.pep
PTRPVRSLPLLLPAVEDGIFNDNGRIRQSSVELLGDLLFKVAGTSGKALLEGGSDDEGASTEAHGRAIIEVLGRDKRNEVLAALYMVRTDVSITVRQAALHVWKTIVANTPKTLKEIMPVLMNTLITSLASASSERRQVAGRALGELVRKLGERVLXLIIPILSQGLKDPDASRR

SEQ ID NO: 62277 - protein, 204 aa, Gossypium hirsutum
  unsure (1)..(204): unsure at all Xaa locations
  Clone ID: GOSHI-09MAY01-C4731_1.pep
AESVSKTFGEGKMFLRGEFVFXLKNAVGLGMLIEAISIGKEKRDLTTMEPVKANHIVSWHPEIPIGKACSALTSANIIKFLTGDFRLSKARSSDLFXEAVWPRLLARGWHSEXLKDQVFASLKNSFVFLIPVVKNFSKRRLVKGNHYFDSVTDILNKVASEIVFLDFEIEVPEGSRENKENKWEPIIDQALDFVVDKNKFYLKP

SEQ ID NO: 62278 - protein, 98 aa, Gossypium hirsutum
  Clone ID: GOSHI-09MAY01-C4681_1.pep
DIVWGCRYCYLFCLNMVMVESIATTSLLGHRPLCGRFSARDVSCKQKSLSNCLSPFKEFIGKTIVGPPSPRLRVERLVNSSIKALAMELTKEVYAYEG

SEQ ID NO: 62279 - protein, 208 aa, Gossypium hirsutum
  Clone ID: GOSHI-09MAY01-C4641_1.pep
MALEALKSPTMATAPYSNKYEDIDNNYVDTWKKGKRSKRQRDDESSSSPPPPPPPPPTNEEEYLALCLIMLARGGSTTENAVTDGGNDDHRLSSSSSAPAPAALKLSYKCSVCNKAFPSYQALGGHKASHRKSSTDAKPDNQSITTSSTTASGEAGGNGKAHKCSICHKSFPTGQALGGHKRCHYEGGNTTTTTTTTAPSPTTRAVAS

SEQ ID NO: 62280 - protein, 290 aa, Gossypium hirsutum
  Clone ID: GOSHI-09MAY01-C4671_1.pep
MASSLLSRTLLGHRLIRFSSSLPQNPLIFSNLFNKREFRVQAESYHTTYKASGQHSRLMASAAIETRSNFSTQSLSTNDPVVSVDWLHANLREPDLKVLDASWYMPDEQRNPIQEYQVAHIPGALFFDVDGISDRTTKLPHMLPSEEGFAAAVSALGIHNKDGLVVYDGKGIFSAARVWWMFRVFGHDRVWVLDGGLPRWRASGYDVESSASSDAILKASAASEAIEKVYRGQTAGPLTFQTKFQPHLVWTLDQVRRNIEEKTHQHIAARSKPRCYGAAPEPRKGIRSGH

SEQ ID NO: 62281 - protein, 108 aa, Gossypium hirsutum
  Clone ID: LIB3197-054-Q1-M1-C5.pep
MASSLLSRTLLGHRLIRFSSSLPQNPLIFSNLFNKREFRVQAESYHTTYKASGQHSRLMASAAIETRSNFSTQSLSTNDPVVSVDWLHANLREPDLKVLDASWYMPDE

SEQ ID NO: 62282 - protein, 151 aa, Gossypium hirsutum
  unsure (1)..(151): unsure at all Xaa locations
  Clone ID: GOSHI-09MAY01-C4661_5.pep
PPNNRVVIPPRHSGGKPPHVEGFPGDKPSKGKGKGAPHEPKPPHRHLLNVEVEDTHKPPRQGPPKPPDTRXKPPHVEGFPDGKPSMKPFPGDKPSKGKGKGAPHEPKPPHRHLLSEPHKYVIPPKGKGEKPPHEQKPHHGHHPGHLLGIEN

SEQ ID NO: 62283 - protein, 210 aa, Gossypium hirsutum
  Clone ID: GOSHI-09MAY01-C4661_4.pep
MVTKVYIVYYSMYGHVEKLAQEMKKGAESVEGVEVKLWQVAETLPEEVLGKMGAPPKTDAPIITPDELTEADGVLFGFPTRFGMMAAQFKAFMDATGGLWRTQALAGKPAGIFYSTGSQGGGQETTPLTAITQLVHHGMLFVPIGYTFGAGMFEMEKVKGGSPYGAGTFAGDGSRQPSELELGQAFHQGKYFAGSARKLKGTTAWEIWLI

SEQ ID NO: 62284 - protein, 218 aa, Gossypium hirsutum
  Clone ID: GOSHI-09MAY01-C4661_3.pep
MSKACLLLFLVGVVVFIITPSLANQHHDNELPKGKPFPGEKQPQHKPFPEHRPPIHSGPGGKGQEPPHGEKPPHRNLLSVEVEGTHKPPRHSGGKPPRHSGGKPPHVEGFPTDKAPMKPFPGEKPSKGKGKGAPHEPKPPHRHLLSVEVEGTHKPPQHSGGKPPRHSGGKPPHVEGFPGDKPFKGRGRGAPHEPKPPDRHLLSVEVEGTHKRSTTMRW

SEQ ID NO: 62285 - protein, 230 aa, Gossypium hirsutum
  Clone ID: GOSHI-09MAY01-C4661_2.pep
MAVTFNDLGSAAGLKKLDEYLLTRSYISGYQASKDDITVYAALSGAPSSSYVNVSRWYKHIDALLRISGVSEEGCGVTVEGFAPAEAVATPSVADSKAAAAEDDDDDDVDLFGEETEEEKKAAEERAAAVKASGKKKESGKSSVLLDIKPWDDETDMKKLEEAVRSVQMEGLLWGASKLVPVGYGIKKLQIMMTIVDDLVSVDTLIEEHLTVEPINEYVQSCDIVAFNKI

SEQ ID NO: 62286 - protein, 230 aa, Gossypium hirsutum
  Clone ID: GOSHI-09MAY01-C4661_1.pep
MAVTFNDLGSAAGLKKLDEYLLTRSYISGYQASKDDITVYTALSGAPSSSYLNVSRWYKHIDALLRISGVSEEGCGVTVEGFAPAEAVATPPTADSKAAAAEDDDDDDVDLFGEETEEEKKAAEERAAAVKASSKKKESGKSSVLLDIKPWDDETDMKKLEEAVRSVQMEGLLWGASKLVPVGYGIKKLQIMMTIVDDLVSVDTLIEEHLTVEPINEYVQSCDIVAFNKI

SEQ ID NO: 62287 - protein, 67 aa, Gossypium hirsutum
  unsure (1)..(67): unsure at all Xaa locations
  Clone ID: LIB3135-032-Q1-K1-B7.pep
SPNCRLMRTLGLLWGASKLVPVGYGIKKLQIMMTIVDDLVSVDTLIEEHLTVEPINEXCQRCDIVAF

SEQ ID NO: 62288 - protein, 56 aa, Gossypium hirsutum
  Clone ID: uC-gsronu33B148b08b1.pep
MVTKVYIVYYSMYGHVEKLAQEMKNGAESVEGAAAAISQWTWRLRTGATTWGKTSS

SEQ ID NO: 62289 - protein, 94 aa, Gossypium hirsutum
  Clone ID: uC-gsronu33B148b09b1.pep
LTNIMIMSYPRGSLSQVRSDHNTSHSLNTDRQYTVDLAVKDRSHHMGKNLLIETYRVWQLRAHINLHDIQVVNLQDTRGVNLHMLRGSIPIKHP

SEQ ID NO: 62290 - protein, 93 aa, Gossypium hirsutum
  Clone ID: LIB3585-044-P1-K1-D7.pep
MAVTFNDLGSAAGLKKLDEYLLTRSYISGYQASKDDITVYTALSGAPSSSYLNVTRWYKHIDALLRILGVSEEGCGVTVEGFAPAEAVATPST

SEQ ID NO: 62291 - protein, 100 aa, Gossypium hirsutum
  Clone ID: uC-gsflnu33B090d04b1.pep
MAETLNDRCPADVSRKLCEYIVTRSYISGYQASKDDITVYAALSGAPSSSYVNVSRWYKHIDALLRISGVSEEGCGVTVEGFAPAEAVATPPVADSKAAA

SEQ ID NO: 62292 - protein, 93 aa, Gossypium hirsutum
  unsure (1)..(93): unsure at all Xaa locations
  Clone ID: LIB3196-028-P1-M1-E5.pep
MAVTFNDSGSAAVLRKLDEYVLTRKYMSRDQASKDDITVYTALSGAPSSSYLNVSRWYKHIDALLRILRVYXERCGVTAEGFFSTEAVATPPI

SEQ ID NO: 62293 - protein, 80 aa, Gossypium hirsutum
  unsure (1)..(80): unsure at all Xaa locations
  Clone ID: uC-gsronu33B039b04b1.pep
MAVTFNDLGSAAGLKKLDEYXLTRSYISGYQASKDDITVYTKKKGGPLLGVPVFLPRAGNEKVFIGGPKIKFPARVLTPW

SEQ ID NO: 62294 - protein, 111 aa, Gossypium hirsutum
  Clone ID: GOSHI-09MAY01-C4631_2.pep
MLLTVEGGGFFSSSASGYSKGFALLLLGQKHEDKSMRVSPWNHYQLVDQEPDPDPDLQLASIKNRLSRGCASFVCFGRTSAGLDTPSPLKVGPVQQQDVLPGSFASNKSND

SEQ ID NO: 62295 - protein, 171 aa, Gossypium hirsutum
  Clone ID: GOSHI-09MAY01-C4631_1.pep
MLLTVEGGGFFSSSVSGYSKGLALLLLGQKHEDKPMRVSPWNHYQLVDQESEPDLNQLASIKNRLSRGCTSFVCFGRTSAGLDAPSPLKVGPVQQQDVLPGSFASDKSNDQATQLDDGNSDARKVVFKSSLKKQSHTTQVPLEDGNDREVSGEKDGDIPSHTVRRKVQWTD

SEQ ID NO: 62296 - protein, 44 aa, Gossypium hirsutum
  Clone ID: LIB3165-020-P1-K1-D11.pep
MLLTVEGGGFFSSSASGYSKGLALLLLGQKHEDKSMRVSPWNHY

SEQ ID NO: 62297 - protein, 150 aa, Gossypium hirsutum
  Clone ID: GOSHI-09MAY01-C4141_1.pep
MGKYRNGSLSENSDEETGTPSKPKPKHKPDSESEDTKPRSHSKSEKGKRPSKSRRRHDSSSGISEDDSYSDSESESESQSEYSETESGYSDSEEERRRRKRKRTEREERARKRRKKENGKERRKIEKERDEERKRKKRKEKERKAKKKKD

SEQ ID NO: 62298 - protein, 235 aa, Gossypium hirsutum
  unsure (1)..(235): unsure at all Xaa locations
  Clone ID: GOSHI-09MAY01-C4131_1.pep
MQPRVAPRLMRHPPPPPLPNTXPFIAHTPMRPFGTPMGYPELASLYMVPAAPPESLRGLPFVASMSPMFFPSPEPHDNQLHASIVNQIDYYFSNENLIKDTYLRQNMDDQGWVPIKLIAGFKKVSLLTDNIQLITDALQSSTVVEVQGDKVRKRIDWMRWIMPPSVHFPTMSGQDTLAARVQNISLDQRTANQSGASNPEDSDAGRPSYGDFSNQSQLFNNEGSTAGAHGGPASN

SEQ ID NO: 62299 - protein, 120 aa, Gossypium hirsutum
  Clone ID: LIB3583-005-P1-K1-D10.pep
FQVSLLTDNIQLITDALQRSMGVEVQGDKVRKRTDWMRWIMPPSVQFPTISGQDTLAARVQKISLEQRTANQSGTSDQEDTNASRLSGRASSGDFNNQSQQLNSEGTAVGAQAGPASNST

SEQ ID NO: 62300 - protein, 196 aa, Gossypium hirsutum
  Clone ID: GOSHI-09MAY01-C4011_1.pep
MVVMVAPLCLLYWLLISTWWLMVSTSGMVWIPLTHSLSKTQFTTPHHLLKTTSTRSATRFRHHLHHRHKQVSVPLSPGSDYTLSFTLGSPSSSTISLYLDTGSDLGWLPCSPFECILCESKTPPLSPPLNLSSSATAGPCKSFCCSDAYSSFHSSDLWAIARCPLDSIEMSECYSISCPPYYYAYGDLQFKSAWFI

SEQ ID NO: 62301 - protein, 211 aa, Gossypium hirsutum
  unsure (1)..(211): unsure at all Xaa locations
  Clone ID: GOSHI-09MAY01-C4021_1.pep
MESSNQAEFDYLFKLLMIGDSGVGKSSLLLSFTSDSFEELSPTIGVDFKVKYINAGDKKLKLAIWDTAGQERFRTLTSSYYRGAQGVIMVYDVTRRETFTNLSAVWAKEFELYSTNQDCIKMLVGNKVDKESQRVVTKKEGIDFAREYGCLFIECSAKTRVXNYSKCFDELVXLKILDTPSLXLAEGAQGVKKNMFNQKTPEANAATGACC

SEQ ID NO: 62302 - protein, 84 aa, Gossypium hirsutum
  unsure (1)..(84): unsure at all Xaa locations
  Clone ID: uC-gsflnu33B060b10b1.pep
FHLYHHRQRNNRKASDGRRKLSINDTDEQEHIMTLXTTSYYRGAQGVIMGYDVTRRETFTNFSEGWAKEIELYLTHQDCIKMLV

SEQ ID NO: 62303 - protein, 128 aa, Gossypium hirsutum
  unsure (1)..(128): unsure at all Xaa locations
  Clone ID: AI726567.1.pep
METQIDYFFKLLMIGDSGVGKSSLLLSFTAGTFDELSPTIGVDFKVKHVTVGGKKLKLAIWDTAGQERFTTLTSSYYRGAQGVVMVYDVTRKETFTNLSEVWAKEFXLYSTNQDCIKMLVGNKVDKES

SEQ ID NO: 62304 - protein, 61 aa, Gossypium hirsutum
  unsure (1)..(61): unsure at all Xaa locations
  Clone ID: LIB3493-022-P1-M1-E10.pep
FIVYLGVFCYFVIIFFFYFFKFFDFFFLFCYFILFIFCXVLIVFFFLLFVFFVFIYYFFLY

SEQ ID NO: 62305 - protein, 61 aa, Gossypium hirsutum
  Clone ID: uC-gsronu33B157a03b1.pep
TVYDVTRRETFTNLSEVWAKEIELYSTNQDCIKMLVGNKVDKESERVVTKKEGINFARENG

SEQ ID NO: 62306 - protein, 91 aa, Gossypium hirsutum
  Clone ID: LIB3828-023-Q6-K6-G10.pep
METQIDYFFKLLMIGDSGVGKSSLLLSFTAGTFDELSPTIGVDFKVKHVTVGGKKLKLAIWDTAGQERFRTLTSSYYRGAQGVVMVYDVTR

SEQ ID NO: 62307 - protein, 90 aa, Gossypium hirsutum
  Clone ID: LIB3584-045-P1-K2-G10.pep
MESSNQAEFDYLFKLLMIGDSGVGKSSLLLSFTCDSFEELSPTIGVDSKVKYINAGDKKLKLAIWDTAGQERFRTLTSFYYRGAQRVIMG

SEQ ID NO: 62308 - protein, 58 aa, Gossypium hirsutum
  Clone ID: LIB3083-048-Q1-G1-G3.pep
LFIECSAKTRVNVQQCFDELVLKILNTPTLLAEGSKGGKKNIFKQKPPELDASASGCC

SEQ ID NO: 62309 - protein, 42 aa, Gossypium hirsutum
  Clone ID: LIB3189-028-P1-K1-F1.pep
LNDSIFQINLPIELSFFQITPNFYDRISQIQPSFSFSPDQRI

SEQ ID NO: 62310 - protein, 155 aa, Gossypium hirsutum
  Clone ID: GOSHI-09MAY01-C4391_1.pep
MASSMLWASRAASYLRISVFHRGFSTVLKDLKYADSHEWVKVEGDSATIGITDHAQDHLGDVVYVELPEVGAAVKQGESFGAVESVKATSDVNSPVSGKVVEVNDELSGSPAKVNSSPYEDGWIIKVEMKDAGELRNLMDSEEYSKFCEEEDSKH

SEQ ID NO: 62311 - protein, 78 aa, Gossypium hirsutum
  Clone ID: LIB3189-049-P1-K1-G11.pep
KLSAVGKRGAPAPSTRVTFEKAYAPHAPPQTGFYTKNPCFHKSLSTVLKDLKYADSHEWVKVEGDSATIGITDHAQDH

SEQ ID NO: 62312 - protein, 145 aa, Gossypium hirsutum
  Clone ID: GOSHI-09MAY01-C4371_1.pep
SHSDSMPTSPVSPYRYQRPLNGFCSTSSTSSYPLHGNVSTGACSLPRQRGSDSEGRFPSSPSDICHSADLRRAALLRSVQMRTQPSSPSPFELPFGPGQENVPNIEVEERPCSFMKSLVDDQEYQIEECSLVCNSDPEFSQEKSC

SEQ ID NO: 62313 - protein, 325 aa, Gossypium hirsutum
  Clone ID: GOSHI-09MAY01-C4281_1.pep
MAYINTLLIMFFVFCFPSMVLSESFRSIQLPPNVTGPESIAFELATGRFYVGVTDGRILQYNGPTVGFMEFGSTGRNRTKTMCDGITDPDLGPMCGRPLGLGFHYATNQLYVCDAYLGLMVLGSGRRLATPLSTGVEGVPYRFCNGLDVHQLSGNVFFTDSTTNYDLRNASKGLESNDSTGRLLMYNPSNNRVTVLLKNLPGPAGVAVSQDGLYALVSNYNANNTIRFWLRGPRADTYEIINFQARPNNIQRTLVGDFWEAAAMVKQSTQTLVPIGQRISGLGLVLQTVNFERWYGNKLISEVQEFRDALYVASPDVDFIGIYSF

SEQ ID NO: 62314 - protein, 321 aa, Gossypium hirsutum
  Clone ID: GOSHI-09MAY01-C4211_1.pep
MMDLVTSFLNLGVPPATMMMLAFSWPALCFINACEWVYNTLYTIEDMDGKVVIITGASSGIGEQIAYEYAKRRANLVLVARREQRLRAISEKARYLGANSAIVIAADVVKEDDCRRFVNETVNFYGRVDHLVNAASLGHTFYFDEVTDSSVFPILLDINFWGNVYPTFVALPYLHQSNGRVIVNASVENWLPLPRMSLYAAAKAALVNFYETLRLEVNNDVGITIATHGWIGGEMTRGKFMLEEGAEMQWKEERELQASGGPVEEFARLIVSGACRGDAYVKYPSWHDTFLLFRVFAPNVLNWSFRLLLSTHGTRRTSMVG

SEQ ID NO: 62315 - protein, 119 aa, Gossypium hirsutum
  Clone ID: GOSHI-09MAY01-C4231_1.pep
GYNLREPSKYIEKCRKIGLTCVDTYLNLNNIMFMKPKGKNYLRAQNFIETLFNNDSTIKDNTISQSKDLLNGQSSPGSLQSEQQPSKAILQIPHVSSWAGRVGGRRGRTRGRTRGRTRG

SEQ ID NO: 62316 - protein, 53 aa, Gossypium hirsutum
  Clone ID: GOSHI-09MAY01-C5901_3.pep
VPLPKTKAFMPTFPAQHAQDRRMRRMLKSPDPLQEQRRKELQQGELGTGGLFG

SEQ ID NO: 62317 - protein, 385 aa, Gossypium hirsutum
  unsure (1)..(385): unsure at all Xaa locations
  Clone ID: GOSHI-09MAY01-C5901_1.pep
ESDRDAENESDSPVTPEPPAPPLRSVNMLQGCRSVDEFERLNKIDEGTYGVVYRARDKKTGEIVALKKVKMEKEREGFPLTSLREINILLSFHHPSVVDVKEVVVGSNLDSIFMVMEYMEHDLKALMETMRQPFSQSEVKCLMLQLLEGVKYLHDNWVLHRDLKTSNLLLNNQGELKICDFGLARQYGSPLKPYTHLVVTLWYRAXPELLLGARQYSTAIDMWSLGCIMAELLSKEPLFNGKTEFDQLDKIFRTLGTPNETIWPGFSMLPGVKINFVKHQYNLLRKKFPATSFTGTPVLSDAGFDLLNKLLTYDPEKRITAEAALNHEWFREVPLPKTKAFMPTFPAQHAQDRRMRRILKSPDPLQEQRRKELQQGELGTGGLFG

SEQ ID NO: 62318 - protein, 158 aa, Gossypium hirsutum
  Clone ID: LIB3826-002-Q1-N6-E1.pep
GTYGVVYRAKDKKTGEIVALKKVKMEKEREGFPLTSLREINILLSFHHPSIVDVKEVVVGSNLDSIFMVMEYMEHDLKGLMETMKQPFSQSEVKCLMLQLLEGVKYLHDNWVLHRDLKTSNLLLNNQGELKICDFGLARQYGSPLKPYTHLVVTLWYR

SEQ ID NO: 62319 - protein, 142 aa, Gossypium hirsutum
  Clone ID: GOSHI-09MAY01-C5931_1.pep
MGRVRTKTVKKSSRQVIERYYSRMTLDFHTNKKVIEEVAIIPSKRLRNKIAGFSTHLMKRIQKGPVRGISLKLQEEERERRMDFVPDVSAIAVDSIEVDKETIDMLSLLGMADLPGIVKVDPVAVQVPQVGFGRGGGPGRRF

SEQ ID NO: 62320 - protein, 114 aa, Gossypium hirsutum
  unsure (1)..(114): unsure at all Xaa locations
  Clone ID: LIB3165-034-P1-K1-A2.pep
MRPLVRVRADTXKKLSRQVIERYYSRMTLDFHTTKMVIKXVAIIPSKRLRNTIAGFSTHLMKRIHKGTVRGISLKLHEEERVRCMYFVPNVSAIAVDXIXVDNETIDMLSLLGM

SEQ ID NO: 62321 - protein, 167 aa, Gossypium hirsutum
  unsure (1)..(167): unsure at all Xaa locations
  Clone ID: GOSHI-09MAY01-C5891_1.pep
YLDVVVSVARKTDGXHWADLFNAAXRSTQLFEDCLQRXSYRTAACYILVIAKLEGPAVSQSCAMCLLQATLDEFLYELAGELVRFLSRSGRDYEQASADSDRRSPRCLAYSLFRSSYRRPSLDESTSFKDQRAHIAPVKNILENHASYLMSGKELSNLAAFDKGTQS

SEQ ID NO: 62322 - protein, 327 aa, Gossypium hirsutum
  Clone ID: GOSHI-09MAY01-C5871_1.pep
MLFISSATPVLGCRSCRKAHPKAKPIKKPHPVKPPIHVKPPVTVPPVTVPPVTVPPIVKPPVTVPPVTVPPVKPPVELPPIAKPPITVPPVTVPPVKPPVDLPPIAKPPITVPPVTVPPVKPPVDLPPIAKPPITVPPVTLPVPPVTVPPVTVPPVKPPVDLPPIASPPITVPPVTVPPVKPPVDLPPIAKPPITVPPVTVPVPPVTVPPVKPPINLPPVTVPPVTNPPSGKPCPPPPSTKATCPIDTLKLGACVDLLGGAVHVGVGDPVVNACCPVLKGLVELEAAVCLCTTLKLKLLNLKIYAPIALQLLISCGKTPPPGYTCSL

SEQ ID NO: 62323 - protein, 81 aa, Gossypium hirsutum
  Clone ID: LIB3120-028-Q1-K1-D5.pep
MDSTKISALLFICMLFISSATPVLGCRSCRKAHSKAKPIKKPHPVKPPIHVKPPVTVPPVTVPPVTVPSIVKPPVTSPPVT

SEQ ID NO: 62324 - protein, 185 aa, Gossypium hirsutum
  Clone ID: GOSHI-09MAY01-C5811_1.pep
AFSVSEVEALFELFKSISSSVIDGGLINKEEFQLALFQNRKKENIFANRIFDLFDAKKKGVIDFGDFVRALNVFHPNVSQEDKMNFAFRLYDMDGTGFIERNEVKQMVIALLCESEMKLADETIEAILDKTFLDADINQDGKIDISEWKNFVFRNPSLLKIMTLPYLRDITTTFPSFVFHSEVDE

SEQ ID NO: 62325 - protein, 143 aa, Gossypium hirsutum
  Clone ID: GOSHI-09MAY01-C5571_1.pep
MDGSGGRGADNVLSNYKLGKTLGIGSFGKVKIAEHSSTGYKVAIKILNRRKIKNMEMEEKVRREIKILRLFMHPHIIRLYEVIETATDIFVVMEYVKSGELFDYIVEKGRLQEDEARNFFQQIISGVEYCHRNMVVHRDLKPE

SEQ ID NO: 62326 - protein, 170 aa, Gossypium hirsutum
  unsure (1)..(170): unsure at all Xaa locations
  Clone ID: GOSHI-09MAY01-C5501_2.pep
LIYGQHRCGKSRNARGIITARHRGGGHKRRSPTIDCRPSEKDISGXTVAIEYDPNRNAYICLIHYGDGEKRYILHPRGAIIGDTIVSGTEVPIKMGNALPLTDMPLGTAIHNIEITLGRGGQXATAAGAVAKLIAKEGKSATLKFPSGEVRLKSKNCSATDGQVGNVGVN

SEQ ID NO: 62327 - protein, 133 aa, Gossypium hirsutum
  Clone ID: GOSHI-09MAY01-C5501_1.pep
MAIHLYKTSTPGTRNGAVDSQVKSNPRNNLIYGQHRCGKGRNARGIITARHRGGGHKRLYRKIDFRRNEKDIYGRIVTIEYDPNRNAYICLIHYGDGEKRYILHPRGAIIGDTIVSGTEVPIKMGNALPLSAV

SEQ ID NO: 62328 - protein, 306 aa, Gossypium hirsutum
  Clone ID: GOSHI-09MAY01-C5481_1.pep
MIFSIFKSQVFIRNGSFIRPTCAKNVSFSRAIALLLVRYESGIAENEQPFKISYLINTIGLSPQSALSVSKKLHFETSQQPDTVISFFNNHGFSRTQIRDIVQKWPASLLCNPENPRVPPRLRFYSRRISRSQLLRILAANPGAFRPSLDNSGIPNFNSFKEFTRCGDDQVFLAYKNDSSILTRKFQSVFAPNLAILKESGVPESTIIVELVLHPRIFSVKPDKFRGIVEEVKKLGFDPSKRSFLTAVQAFLQLSKSTWERKIDLLKQWGWSNEEVVSAFEKYPKTMMFSEQKISAIMSLFVDTMG

SEQ ID NO: 62329 - protein, 143 aa, Gossypium hirsutum
  Clone ID: LIB3584-047-P1-K2-E5.pep
MIYSIFKNQVFIRNGSWIPPTCAKNASFLRIISALVVRYESGIAESRHWFKTSYLINTIGLSPQSAVSVSKKLHFETSKQPDTVISFLEKHGFSKAQIRNIIQRWPESLLCNPEKNLLPKLQFFYSRRISRFQLLRILAVNPS

SEQ ID NO: 62330 - protein, 65 aa, Gossypium hirsutum
  Clone ID: GOSHI-09MAY01-C5451_2.pep
LAFPSISKSVLVLLNLQSLIADQPTKYIYEMWTAVGCYILFIANRSHILQYFVLVFRIIVLVKMS

SEQ ID NO: 62331 - protein, 160 aa, Gossypium hirsutum
  Clone ID: GOSHI-09MAY01-C5451_1.pep
MDTLTARFKLIVLPFLCICLLFLPFLQATDFDYCDNKGNYVVKVDGVDISPNPVISGKPATFTISASTGQAITGGKAEIDVYFFGFHIHQETHDLCEETSCPITVGNFVLSHNQVLPGFTPPGSYKLKMTLSGAGIKLLTCISFDFKISFGASESSVSDS

SEQ ID NO: 62332 - protein, 66 aa, Gossypium hirsutum
  Clone ID: LIB3166-055-P1-K1-D8.pep
LFPRKHLLPNNIIFAKPCTFTISSSTGQAITGGKAVIDAYFFRFHIHQETHDLCEETSCPITVGNF

SEQ ID NO: 62333 - protein, 102 aa, Gossypium hirsutum
  Clone ID: GOSHI-09MAY01-C5441_2.pep
MSSPRPVDSSILQQLFGFTSVDEAPTQFVIQQYDNPLSKKFNDVVNVVRRQRCSYLRLTLCKKGDPSGMLFFSCMVEDKNASGPSYVEFLVHIHRQIQMKMS

SEQ ID NO: 62334 - protein, 124 aa, Gossypium hirsutum
  Clone ID: AI055714.1.pep
PLSSEHVCDDGIYLLENCEDALIYFGSSVDSSILQQLFGFTSVDEVPTQFVMQQFSNPLSKNFNDVVNVIRQQRCSYLRFALCKKGDPSGMAFVSCMVEDKNANGPSYVEFLVHIHRQIQMKMS

SEQ ID NO: 62335 - protein, 127 aa, Gossypium hirsutum
  Clone ID: LIB3145-054-Q1-K1-H10.pep
GGSVGNGVRILHGRRQECKWAIVCGVSCTYSSANPNENVLISFKLPQQQVFNFDLGFCMKKKESEWPPVRSFLYIYCAATGVKVLQNVLCFLQLASQVVMALGDQKLHTNIVISYLISIIYFLEPQF

SEQ ID NO: 62336 - protein, 161 aa, Gossypium hirsutum
  Clone ID: GOSHI-09MAY01-C5471_1.pep
GRVGGRVGNRHAKSLWRRAQAYDMLGLAKESLLDAILFINECSQSNDPDLSLRQNKVPDYAERLVKKQMRAAWLFREAAIKLGGVHCEGDAGDMYGQDTDDSEWETASESDIGNDGRDEMGDEDDDDSEWKNEDERKAKFKKPSMKDIKHGFNVQLTEDEP

SEQ ID NO: 62337 - protein, 444 aa, Gossypium hirsutum
  Clone ID: GOSHI-09MAY01-C5431_1.pep
MAPPPVRQQQEITYRSKLPDIYIPKRLPLHSYCFQNLSNVASKPCLINGTSGKVYTYEEVELTARRVASGLNKLGIQQRQVIMLLLPNTPEFVLSFLGASFRGAIATAANPFFTPAEISKQAKASNARLIITLASYVDKVKEFAEDNDVKIVCIDSVPEGCLHFSELTQADENDLPEVDIVPEDVVALPYSSGTTGLPKGVMLTHKGLVTSVAQQVDGENPNLYFHSEDVILCTLPMFHIYALNSIMLCGLRVGAAILIMQKFDIGLLLELIQKYKVTIAPIVPPIVLAIAKSSETENYDLSSVRMLKSGAAPLGQELEDAVKVKFPGAKFGQGYGMTEAGPVLAMCLGFAKEPFEMKSGTCGTVVRNAEMKIVDPETGLSLPRNQAGEICIRGDQIMKGYLNDPEATARTIDKDGWLHTGDIGYIDDHDELFIVDRLKELIKF

SEQ ID NO: 62338 - protein, 137 aa, Gossypium hirsutum
  unsure (1)..(137): unsure at all Xaa locations
  Clone ID: uC-gsflnu33B008d02b1.pep
MAPQAELQQEEIIYRSKLPDIYIPNHLPLHSYCFQNIANVASRPCLINGTTGKVYTYAEVELTARRIASGLNKLGIQQRQVIMLLLPNTPEFVLSFLGASFRGAIATAANPFFTRAEVSKHAKGSNARLIITXASYV

SEQ ID NO: 62339 - protein, 88 aa, Gossypium hirsutum
  Clone ID: GOSHI-09MAY01-C5421_1.pep
EVGDRTMRETKELSLCLDATRYELFSIFYETKRSSKSPPKRWLHFTLSTYSILCFTENHAPPSSSTSKNLRSQPRKPIPPSRNPSRRC

SEQ ID NO: 62340 - protein, 139 aa, Gossypium hirsutum
  Clone ID: GOSHI-09MAY01-C5761_1.pep
MISSSSSSDNCYSCFSEGDSNTCSSNNGNLESSSSDSEEASQQSDGRDTSICVQNGFSECQVKGIDKKEDVNGSVALESEALFGHSPDGRDSSVCIQDGFSECQAKGIEIKQDVNGEVALEYQALFGHSPDCRGNKVSG

SEQ ID NO: 62341 - protein, 133 aa, Gossypium hirsutum
  Clone ID: GOSHI-09MAY01-C5611_2.pep
VESIDSNGRPISGYGTEGGIGIPLYGPLKIGKAEPVNLQFGHFGISAWPSDGGTSRAGSVDESRYDGTENSSRYQSSCCSSPRMSDGPAKELKEENSVYGSDEEVDDQPEVDTDEDFSDDGDKEVHEEVGSVD

SEQ ID NO: 62342 - protein, 308 aa, Gossypium hirsutum
  unsure (1)..(308): unsure at all Xaa locations
  Clone ID: GOSHI-09MAY01-C5611_1.pep
DAWADAWADAWALLWASTYHAGECLDPVAVTEAKAKKRAKKLAGISQSLSKSELADRTSAGKSDARPVESSSTGTELIGPRQMAVEGFKAQSEMVIDSPSXVARLITAWXEERKESVVVEGVHLSLNFVMGLMKKHPSIIPFMIYITNEDKHLERFAVRAKYMTLDPAKNKYVKYIRNIRTIQDYLCKRADKHFVPKINNTNVDKSVAAIHATVFSCLRRREAGETLYDPITNTVTVIDEEYRNQCAANSLSSKGMFQLIHRSGSSRQLMALLNKDGSVAKAWPVESIDSNGRPISGHGTEGVSWHSL

SEQ ID NO: 62343 - protein, 391 aa, Gossypium hirsutum
  Clone ID: GOSHI-09MAY01-C5171_1.pep
RDAIGEILDGDWQENLANESSLEALPNEAGEHSNLQEADEASYEHSPPNDRENLEGNPAVQIDGQESASLVELWQEEDQETAEADWQEAGVEYNESMDGNEEASDRHHEDGGLRGTAQDWMEESYNQEPVTIRRTDTFYFPDDDNVHSMELRELLSRRSVSTLLHSGFRESLDQLIQSYVERQNHAPVDWELEGTSPSPASLEQDLEQQSGDQNDGHGDAETPPLTLPSPRMPPMQPLWDQDSHHYNWASHDVHQRFGIEWEVINDLRIDMARMQQRMNNMQRMLEACMDMQLEIQRSIRQEVSAALNRSAGSQAAGVIDDDNLPKDASNWDNVRKGICCICCEGNIDSLLYRCGHMCTCSKCANELVHVGGKCPMCRAPVVEVIRAYSIL

SEQ ID NO: 62344 - protein, 349 aa, Gossypium hirsutum
  Clone ID: GOSHI-09MAY01-C5161_1.pep
PRVRPASAHASAHASGLPCGTVELVLSKPQSLQYNALNFIFLQVRELSWLQWHPFSVSSSPLDSKHHLAILIKVLGGWTARLRDSILSMSEPELSKTTITASVEGPYGHEMPYHLMYENLILVAGGIGISPFLAILSDILHRVSDGKPCLPRKILVVWAVKKSDELPLLSSIDMESICPFFSNKINLEIDIYVTRESGPSMEEGKVHVASSSSCPFSGRSMSPLVGTGNNVWSGLYVIISTVGFIVLMALLRIFYIKPYNVSTWWYLGLLFIACMVMSVVIFGGLVIGLWHLWDKKASANDKDEDIDRIKVESTPSYGPVEDKDLTQNNPESSTIIQYGTRPDFKEIFA

SEQ ID NO: 62345 - protein, 214 aa, Gossypium hirsutum
  Clone ID: GOSHI-09MAY01-C5111_1.pep
MPKSNSSNSSSDEDVKAPNMFERAKEEIEAVIHVGKIHPFGKETHGKRDDINENTPLDDVKAPNVFERVKEEFEALVETVHHKKESQTHVDERDHSDKEQAKHDKPENGVKAPNLIERAKEEIGAILHHDKSSNHHHKETHGKSNDIDETTPLNEVKAPNVFERAKEEIEAIVGTIHPKIGSNDSGSELKEGGFRHCLGMGLEKVCHPWGSKRD

SEQ ID NO: 62346 - protein, 208 aa, Gossypium hirsutum
  Clone ID: GOSHI-09MAY01-C5051_1.pep
MEGIIVRRVIPSDNSCLFNAIGYVMDHDKTKASELRQVIAATVASDPTKYSEAFLGKPNVEYCSWILDSEKWGGAIELSILADYYGREIAAYDIQTSRCDLYGQERNYSERVMLIYDGLHYDALAMSPFEDAPEEFDQTIFSVQKDRTIGPVEGLALNLVKDQQSKRRYTDTANFTLRCGVCQIGVIGQKEAAEHAQAMGHGNFQEYR

SEQ ID NO: 62347 - protein, 53 aa, Gossypium hirsutum
  Clone ID: LIB3083-012-Q1-L1-G4.pep
MEGIIVRRVIPSDNSCLFNAIEYVMDHDKTKASELRQVIAATVASDPTKYSEA

SEQ ID NO: 62348 - protein, 178 aa, Gossypium hirsutum
  unsure (1)..(178): unsure at all Xaa locations
  Clone ID: GOSHI-09MAY01-C5021_1.pep
MELCPTIKNILLLDSEGKRIAVKYYSDDWPTNAAKEAFEKAVFTKTQKTNARTEAEITMFDNYIVVYKFVQDLHFFVTGGENENEIILATVLQGFFDAVGLLLRGTEDKKEALENWDLILLCLDEIVDGGIILETDANVIAGKVDSHSMDAGAPLSEQTITQALATXAREHLTRSLLE

SEQ ID NO: 62349 - protein, 52 aa, Gossypium hirsutum
  Clone ID: GOSHI-09MAY01-C5381_3.pep
KRLKMKKMVKVLRGIVPGADEMDTVAVLDGAVRYLKSLKVEVQKLGVGNFKY

SEQ ID NO: 62350 - protein, 241 aa, Gossypium hirsutum
  unsure (1)..(241): unsure at all Xaa locations
  Clone ID: GOSHI-09MAY01-C5381_2.pep
MQSDQQFYSPKAVPRLADHVDDNYIHMPVPSAFGTVFPPCAKPLPPLHGIEFQPSEVCPKNFVIFNQNDHRNQIMFNPAVANKFNGHGLNVFATYLDGKYDIKDVNDAEKDTSSSLKEDSDDIDALLSSEEEEQEDYDEEEVSTARTSGNYESDSDSHSAXAQNPRKNSSCSSTLKSSGSGFGTDPKKRLKMKKMVKVLRGIVPGADQMGTVARLDEAVRYLKSLKVEVKKLGVENFKNGD

SEQ ID NO: 62351 - protein, 249 aa, Gossypium hirsutum
  unsure (1)..(249): unsure at all Xaa locations
  Clone ID: GOSHI-09MAY01-C5381_1.pep
MQSDQQFYPQKAVPILADQVGNNYMHIPVASAFGPVFPPCAKPLPPLHGIEFQPSEVCPKNFVIFNQTDNRNQVLFNPAITNKFHGNGLNVFANYNDGKYERKDVYDVGEETSSFLKEDSDDIDALLSSEEEEQVEYDEEEVSTAPGTSGNYECDSADSRSAHGXNQEKNSSSSSTLKSSGYSGCFFFFXGTDPKKRLKMKKMVKVLRGIVPGADQMGTVAVLDEAVRYLKSLKVEVKKLGVENFKNGD

SEQ ID NO: 62352 - protein, 110 aa, Gossypium hirsutum
  unsure (1)..(110): unsure at all Xaa locations
  Clone ID: LIB3825-001-Q1-N6-C11.pep
ILKGIRFLQLSFAIGKFWVGGVRMYISVTIKRYRAIKEVGKIKMSVGVIAYYKLVQVFFFFFFRQLLKPVSYSXKRGGVACGFLKSPVFLCXVWGXAXXTLPPVLMANLG

SEQ ID NO: 62353 - protein, 73 aa, Gossypium hirsutum
  Clone ID: GOSHI-09MAY01-C5351_4.pep
LIALVGHLTFENLKTIRPNMPLSGQLFLNKNITWLEFRQAVVEGHQNRQGQLRLRKPKQSIYTYPAPDCMCQA

SEQ ID NO: 62354 - protein, 159 aa, Gossypium hirsutum
  unsure (1)..(159): unsure at all Xaa locations
  Clone ID: GOSHI-09MAY01-C5351_2.pep
NVLPVLQSNGIAAISPFSHRLSFDNLPSAVPWLRCQVNFKALVFVPHIRALGDALVHRLRYPPTESPPLITDDLTGTTDRNVKQMPQKFVVVHLRFDKDMAAHSACVFGGGKAEKLALPKYRQGIWGGXRVLNSQLPMRSEEQGRCPLTLKNGMCYILV

SEQ ID NO: 62355 - protein, 519 aa, Gossypium hirsutum
  unsure (1)..(519): unsure at all Xaa locations
  Clone ID: GOSHI-09MAY01-C5351_1.pep
MEKMMRFQYKPVRRQEAIVGLFVLLFPVLLPCFFASFSHASPSTFLEWNVPKPRHLRLLASALQRESSNGEPTDLWAPLADQGWRPCFGGSVNPPPLPQKSEGYLQVFLDGGLNQQRMGICDAVAVAKILNATLVIPYLEVNPVWQDSSSFMDIFDVDHFINVMKDDXISIVKELPDDFSWSTREYYATAIRPTRIKRAPVHASANWYLENVLPVLQSNGIAAISPFSHRLSFDNLPSEIQKLRCKVNFKALVFVPHIRALGDALVHRLRYPPTESQPLITRARARTPGRTRGQMPQKFVVVHLRFDKDMAAHSACDFGGGKAEKLALAKYRQRIWGGRVLNSQFTDEELRSQGRCPLTPEEIGLLLAALGFDNSTRLYLASHKVYGGEARISTLRELFPKMENKKSLASSEERVLIKGKASLLAAVDYYVGMHSDIFVSASPGNMHNALVGHRTFENMKTIRPNMPLLGQLFLNKNITWSEFRQAVVEGHINRQGQLRLRKPKQSIYTYPAPDCMCQV

SEQ ID NO: 62356 - protein, 153 aa, Gossypium hirsutum
  unsure (1)..(153): unsure at all Xaa locations
  Clone ID: LIB3583-035-P1-K1-G7.pep
MNANQSQQRRKQIEESGQFGDLCFSALRGKNIMRFHYQSHYHQPLKGEAIAGLFLLLFPVLLPCLFTPFTYASPSTFSEWNVIKPRHLSLLRSALEGKSSNGEQSDLWTPLADQGWRPCLESVNTPSLPQNSEGYLQVFLDGGLNQARMXICD

SEQ ID NO: 62357 - protein, 141 aa, Gossypium hirsutum
  Clone ID: LIB3272-029-P1-K1-F8.pep
KELPDEFSWSTREYYATAIRATRIKRAPVHASANWYLENVLPVLQSYGIAAISPFSHRLSFDNLPSEIQQLRCKVNFKALVFVPHIRALGDAIVHRLRYPPGETEALSSDYLRVTTDQNDKQRPQKFVVLHLRFDKDMAAH

SEQ ID NO: 62358 - protein, 357 aa, Gossypium hirsutum
  Clone ID: GOSHI-09MAY01-C5341_1.pep
MASSIATTLTSSSKLCRNTSLFESSFHGVPIKPLSFHFKTKSSPCNASISMSAASPPPYDLNNFRFDPIKESIVSREMTRRYMMDMITYADTDVVVVGAGSAGLSCAYELSKNPSVQIAIVEQSVSPGGGAWLGGQLFSAMVVRKPAHRFLDELAIEYDEQDDYVVIKHAALFTSTIMSKLLARPNVKLFNAVAAEDLIVKEGRVGGVVTNWALVSMNHDTQSCMDPNVMEAKVVVSSCGHDGPFGATGVKRLKSIGMIDSVPGMKALDMNTAEDAIVRLTREIVPGMIVTGMEVAEIDGSPRMGPTFGAMMISGQKAAHLALKSLGLPNAIDGTHVGSIHPELILAAADSAETADA

SEQ ID NO: 62359 - protein, 100 aa, Gossypium hirsutum
  Clone ID: LIB3196-015-P1-M1-G7.pep
PTRPPTRPPTRPHGVPIKPLSFHFKTKSSHCNASISMSAASPPPYDFNNFRFDPIKESIVSREMTRRYMMDMIIYADTDVVVVGAGSAGLSCAYELSKNP

SEQ ID NO: 62360 - protein, 82 aa, Gossypium hirsutum
  Clone ID: GOSHI-09MAY01-C5371_3.pep
MASSDLKESAANNPGLHTTPDEATKDYIMQQTMYRIKDPKVSLDFYSRVLGMSLLKRVDVPELKVTLYFMGYEDVSKLQVIH

SEQ ID NO: 62361 - protein, 186 aa, Gossypium hirsutum
  Clone ID: GOSHI-09MAY01-C5371_1.pep
MASSDLKESAANNPGLHTTPDEATKDYIMQQTMFRIKDPKASLDFYSRVLGMSLLKRVDVPELKFTLYFMGYEDVSKAPSDPYGRTVWTFGRAATIELTHNWGTESDPEFKGYHTGNSEPRGFGHIGITVDDVNKACERFERLGVEFVKKLDAGKMKGIAFIKDPDGYWIEIFDLKTIGDVISRCS

SEQ ID NO: 62362 - protein, 105 aa, Gossypium hirsutum
  unsure (1)..(105): unsure at all Xaa locations
  Clone ID: AI054964.1.pep
MASSDLKESAANNPGLHTTPDEATKDYIMQQTMFRIKDPKASLDFYSRVLGMSLLKRVDVPELKFTLYFMGYEDVFKAPSDSIXVLTIWTFGWAVTIENPIFRAL

SEQ ID NO: 62363 - protein, 74 aa, Gossypium hirsutum
  Clone ID: LIB3166-027-P1-K1-G9.pep
MASSDLKESAANNPGLHTTPDEATKDYIMQQTMYRIKDPKVSLDFYSRVLGMSLLKRVDVPELKFTLYFMGYED

SEQ ID NO: 62364 - protein, 91 aa, Gossypium hirsutum
  unsure (1)..(91): unsure at all Xaa locations
  Clone ID: LIB3825-025-Q6-N6-D1.pep
SXXQXIXXIXSNXXGXXXNECXXPFHSCALHLXFLDXNSTPKAFKSLRXCLIXXSSTVMPIXDQSHEVLNSRCXISFXTQXVTFSTPNYVX

SEQ ID NO: 62365 - protein, 221 aa, Gossypium hirsutum
  Clone ID: GOSHI-09MAY01-C5361_1.pep
MGSSELIFRGHETQPVSDSYSPKPDKPWASVTRPIRYMLREQRLLFVFLGIAITTLIFTLFPASRATQHNFADSITYFPIDTQSKFSNPHRLGFGSSNPTGKIPLGLKRKGLRIVVTGGAGFVGSHLVDRLIARGDSVMVVDNFFTGRKENVMHHFGNPNFELIRHDVVEPLLLEVDQIYHLACPASPVHYKFNPVKTIKTNVVGTLNMLGLAKRVGARFL

SEQ ID NO: 62366 - protein, 141 aa, Gossypium hirsutum
  Clone ID: GOSHI-09MAY01-C5311_1.pep
MATVQQQQQEQEQQIGSTEKRKPVFVKVDHLKPGTKGHTLIAKVLSSNMVLQKGRAASQHLRQTRIAECLIGDETGTVLFTARNDQVELMKPGNTVILRNAKIDMFKGSMRLAVDKWGRIEVTEPANFIVKEDNNLSLVEY

SEQ ID NO: 62367 - protein, 188 aa, Gossypium hirsutum
  Clone ID: GOSHI-09MAY01-C5251_1.pep
LNPICGGRILVDGLNIVDIPVRELRARLAVVPQSPFLFEASLRDNLDPLWMSNDEKIWDVLEKCHVKEEVEVAGGLEAKVKEAGTSFSVGQRQLLCLARALLKSSKVLCLDECSAHAAAQTASILQKTISTECQGMTVITIAHRISTVLNMDNVFVLNQGTLVEEGNPNALLQDESSIFSSFAKASTM

SEQ ID NO: 62368 - protein, 44 aa, Gossypium hirsutum
  Clone ID: GOSHI-09MAY01-C5211_4.pep
IWPSLGSIDTTSAWSISSCNYGNIVVQPFVVKAVIFKDTSSRIS

SEQ ID NO: 62369 - protein, 134 aa, Gossypium hirsutum
  Clone ID: GOSHI-09MAY01-C5211_3.pep
LLNQLDGFDQLGKAKMIMATNRPDVLDPALLRPGRLDRKIEIPLPNEQSRMEILKIHAAGIAKHGEIDYEAVVKLAEGFNGADLRNVCTEAGMSAIRAERDYVIHEDFMKAVRKLNEAKKLESSAHYSADFGKE

SEQ ID NO: 62370 - protein, 304 aa, Gossypium hirsutum
  unsure (1)..(304): unsure at all Xaa locations
  Clone ID: GOSHI-09MAY01-C5211_1.pep
EKLTSGTRVVLDMTTLTIMRALXRGVDPVVYNMLHEDPGNVSYSAVGGLSARTRDLRESIELPLMNPELFLRVGIKPPKGVLLYGPPGTGKTLLARAIASNIDANFLKVVSSAIIDKYIGESARLIREMFGYARDHQPCIIFMDEIDAIGGRRFSEGTSADREIQRTLMELLNQLDGFDQLGKVKMIMATNRPDVLDPALLRPGRLDRKIEIPLPNEQSRMEILKIHAAGIAKHGEIDYEAVVKLAEGFNGADLRNVCTEAGMSAIRAERDYVIHEDFMKAVRKLNEAKKLESSAHYSTDFGKE

SEQ ID NO: 62371 - protein, 181 aa, Gossypium hirsutum
  Clone ID: LIB3543-062-Q6-K6-B10.pep
QNDTRKGGWARDHQPCIIFMDEIDAIGGRRFSEGTSADREIQRTLMELLNQLDGFDQLGKVKMIMATNRPDVLDPALLRPGRLDRKIEIPLPNEQSRMEILKIHAAGIAKHGEIDYEAVVKLAEGFNGADLRNVCTEAGMSAIRAERDYVIHEDFMKAVRKLNEAKKLESSAHYSANFGKD

SEQ ID NO: 62372 - protein, 131 aa, Gossypium hirsutum
  unsure (1)..(131): unsure at all Xaa locations
  Clone ID: GOSHI-09MAY01-C5201_6.pep
MKLEVYADRMSQPSRAGIIFCKVNGIDYTERKVDISKGGHLTPEFAEIHPMKQLPAIGDGNFKVXESHSILIYLAWAFPGVADHWYPADLFKRSKMHSVVYWHHSNLRRAAATYVTNTTILPTLGHPSNQQ

SEQ ID NO: 62373 - protein, 50 aa, Gossypium hirsutum
  Clone ID: GOSHI-09MAY01-C5201_5.pep
IHSVLYWHHSNLRRAAATYVTNTTILPTLGHPSNQQAAAEAEKLLFSSLS

SEQ ID NO: 62374 - protein, 103 aa, Gossypium hirsutum
  Clone ID: GOSHI-09MAY01-C5201_4.pep
ESFGLKGNGPFLRGRNHPSIVDLSLVCELMHLEVLDEKDRERFLGPYKKVQQWIKHTRNATSPHFDNVHNILMKVKEKLKNKPLMEANHGGALDIQKRLRSRI

SEQ ID NO: 62375 - protein, 99 aa, Gossypium hirsutum
  Clone ID: GOSHI-09MAY01-C5201_2.pep
CSFQHTYGVNTTIPPILGRPLNPQVAAEAEMGLSSSLSKLESFWLKGNGRFLLGRNQPSIADLSLVCELMQLEVPFCDLIFCPNFNLLLFPSLVEHNVL

SEQ ID NO: 62376 - protein, 277 aa, Gossypium hirsutum
  unsure (1)..(277): unsure at all Xaa locations
  Clone ID: GOSHI-09MAY01-C5201_1.pep
TLYKNLFAAQIFAVKSLRSGKSQSARENEARGYADRMSQPSRAVIIFCKVNGIDYTERKVDISKREHLTPEFAEIHPMKQLAAIADGKXKLFESHSILIYLACAFPGVADHWYPANLFKRSKMHSVLYWHHSNLRRAADTYVTNTTILPALGHPSNPQAAAEAEILLSSSLSKLESFWLKGNGRFLLGRNQPSIADLSLVCELMQLEVLDEKDRTRLLGPHKKVQQWIENTRNATNPHFDEVHRVIMLAKERQQHQRLKAAKNEGGSNMKKPLVFRM

SEQ ID NO: 62377 - protein, 131 aa, Gossypium hirsutum
  Clone ID: LIB3582-038-P1-K1-A9.pep
MFKKTSSRNQRSKGIRIKHVLQICLLLGVCFWLIYQVKRSHDKRKEFDAKDAKVSVKEQADDLILKFGRKDLPHVQEASKNFKHEEEEEEENVMEDENKHDEEQEEKTKRLEEEEHEGAIKHEEEERVEGI

SEQ ID NO: 62378 - protein, 75 aa, Gossypium hirsutum
  unsure (1)..(75): unsure at all Xaa locations
  Clone ID: uC-gsronu33B055d07b1.pep
MKLEVYADRMSQPSRAVIIFCKVNGIDYTERKVDISKREHLTPEFAEIHPMKQLAAIVDXKFKXLFESHSILIYL

SEQ ID NO: 62379 - protein, 57 aa, Gossypium hirsutum
  Clone ID: LIB3147-045-Q1-K1-D2.pep
RTRGRTRGRTRGRTRGLKVYADRMSQPCRAVIIFCKVNGIDYEEIKVHISKGQHSFM

SEQ ID NO: 62380 - protein, 42 aa, Gossypium hirsutum
  Clone ID: LIB3147-045-Q1-K1-D7.pep
GSNYRGLGESGWESPSSIFLNVNGIDYEEIKVHISKGQHSFM

SEQ ID NO: 62381 - protein, 228 aa, Gossypium hirsutum
  Clone ID: GOSHI-09MAY01-C5231_1.pep
MGSCVSVHKSSQEPASAMKVGLSFGSKTDNNLIIPPSPVKEKPVANGDFAFISQSPYTFKDFGSKEETFFDSRAYLDSDCEDDFFSVNGDFTPSRGNTPVHHSFSVGTTPRVSKVTVEGSPMSVLETSPMGKKKKLLELFRESVREDRNLTSKSANVTPRLRSGATSLCSSERTANGDHDNPMFKEKPLKSLQCCLPSFVTCSSFNERKKKMSPAIAVNDRPQYPSIH

SEQ ID NO: 62382 - protein, 132 aa, Gossypium hirsutum
  unsure (1)..(132): unsure at all Xaa locations
  Clone ID: LIB3148-018-Q1-K1-D9.pep
SEPGSRSFXSFFHIGRWVSRTXTLXDPFHSDPLLTRXVLVPTXXSYLIEQGGITXXDXXVKXXHXDTXXEINPLTQSXNXXDNAREXXKKGFLXXYSPHNPLXXVLGAXXEIXEXXKGHTYEQPXXAWAEXA

SEQ ID NO: 62383 - protein, 160 aa, Gossypium hirsutum
  Clone ID: GOSHI-09MAY01-C6991_1.pep
HSSGHACDQSVEQWAPWSDDPPATLIEDLKITTQNVSLIFPSRKTERKKSMFLSNIDKVLNFPVETVHFFRSHEDFPPHVAAEKLKTALSELLVPYDFLAGRLRSNPETGRLEIDCNSAGIGFAVASSDYALDDVGDLIYPNPAFGQLICKSVDSLEQDD

SEQ ID NO: 62384 - protein, 174 aa, Gossypium hirsutum
  Clone ID: GOSHI-09MAY01-C6981_1.pep
KADDAAKELETVAGPVDLLTDLDKLQGRWKLIYSSAFSSRTLGGSRPGLPTGRLLPVTLGQVFQRIDVISKDFDNIAEIELGAPWPLPPLEVTATLAHKFEIIGSSKIKITFEKTSVKTRGTFFQLPSLDVPRIPDALRPPSNPGSGDFDVTFIDADTRITIGDRGELRVFVIS

SEQ ID NO: 62385 - protein, 186 aa, Gossypium hirsutum
  Clone ID: GOSHI-09MAY01-C6971_1.pep
MSLLSSHTIPPRPLLHLPPRNHNFPIFTFKPIFLPLSPPIKPSNSVSKPPKFIPLASISPPPATPCKSPEIPALSPLDGSTRTLKTFFSLALSATIVFTKMIQNYALKTISQNPNALSTVGPLFFASLKDRPSGYLNTPLTVVAAGLAKWLDIYSGVLMVRVLLSWFPNIPWDRQPLSAIRDLCDP

SEQ ID NO: 62386 - protein, 149 aa, Gossypium hirsutum
  unsure (1)..(149): unsure at all Xaa locations
  Clone ID: GOSHI-09MAY01-C6901_1.pep
MINRGLQVLSQTSYLQTWNWLFQESKGTKWSAEENKCFENALALYDTDTPDRWFKVAAMVPGKTVEDVIKQYRELEEDVSDIEAGLIPIPGYTTDSFRLEWVNDSQGFDGIRNYYTPGGKRGSGSRPSDHXRKKRVPWTEKXHRQFLMG

SEQ ID NO: 62387 - protein, 104 aa, Gossypium hirsutum
  Clone ID: GOSHI-09MAY01-C6931_1.pep
MASSMLSGAAPTGVGFARSNFHFRSLPQKSLFSYTKNQKTRMVVTTRCSISSSRPASQPRFIQHKKEAFWFYRFLSIVYDHIINPGHWTEDMRDEALEPADLYS

SEQ ID NO: 62388 - protein, 99 aa, Gossypium hirsutum
  Clone ID: GOSHI-09MAY01-C6581_2.pep
PVLWFNSIEEGIHHGNASNFGLQGCVFTKDVNKAILISDAMETGTVQINSAPARGPDHFPFQGLKDSGIGSQGVTNSINMMTKIKSTVINLPTPSYTMG

SEQ ID NO: 62389 - protein, 333 aa, Gossypium hirsutum
  Clone ID: GOSHI-09MAY01-C6581_1.pep
AIPPFNYPVNLAVSKIAPALIAGNSLVLKPPTQGAVSALHMVHCFHLAGFPKGLISCVTGKGSEIGDFLTMHPGVNCISFTGGDTGIAISKKAGMVPLQMELGGKDACIVLEDADLDLVAANIIKGGFSYSGQRCTAVKVVLVMESVADVLVDKVKAKIAKLTVGPPEDDCDITPVVSESSANFIEGLVKDAKEKGAIFCQEYKRDGNLIWPLLLDNVRPDMRIAWEEPFGPVLPVIRIDSIEEGIHHCNASNFGLQGCVFSKDVNKAILISDAMETGTVQINSAPARGPDHFPFQGLKDSGIGSQGVTNSINMMTKIKSTVINLPTPSYTMG

SEQ ID NO: 62390 - protein, 182 aa, Gossypium hirsutum
  unsure (1)..(182): unsure at all Xaa locations
  Clone ID: GOSHI-09MAY01-C6541_1.pep
YKKTYRYDAVFALGFGAVYDQLREGYPSDEDRDAIFQAYINALKEVPQQYRADAQKLEEWARAQTSSSLVEFSSRDGEVEAILKDIAERAGSKGSFSYSRFFAIGLFRLLELANATEPTVLEKLCAALNIDKRSVDRDLDVYRNLLSKLVQAKELLKEYVDWEKKNREERSESLKXNEAVKK

SEQ ID NO: 62391 - protein, 291 aa, Gossypium hirsutum
  Clone ID: GOSHI-09MAY01-C6511_1.pep
MASLAASTAAASLGVSEMLGNPLNFSGGARSSAPTPSNSSIFKTVALFSKKKAAPPKPKAAAVAPADEELAKWYGPDRRIFLPEGLLDRSEIPEYLNGEVPGDYGYDPFGLSKKPEDFAKYQAYELIHARWAMLGAAGFIIPEAFNKFGANCGPEAVWFKTGALLLDGNTLNYFGKNIPINLVVAVVAEVVLVGGAEYYRIINGLDLEDKLHPGGPFDPLGLAKDPDQAALLKVKEIKNGRLAMFAMLGFFLQAYVTGEGPVENLSKHLSDPFGNNLLTVIAGTAERAPTL

SEQ ID NO: 62392 - protein, 83 aa, Gossypium hirsutum
  Clone ID: LIB3120-032-Q1-K1-E1.pep
RDVRHARFLSLSPSAKQPGLDPWLKVKEIKNGRLAMFAMLGFFLQAYVTGEGPVENLSKHLSDPFGNNLLTVIAGTAERAPTL

SEQ ID NO: 62393 - protein, 349 aa, Gossypium hirsutum
  Clone ID: GOSHI-09MAY01-C6491_1.pep
QLPTQKEGEEVDFRGVLHREGSVLMSVSLDHLKAPPPLYKSLAAKLVVGMPFKDLATVDSIILRELPPVDDADARLALKRLIDISMGVITPLSEQLTKPLPNAMALVNLKELSTGAYKLLPEGTRLVVSVRGDEPYEELEILKDIDATMLLHNIPFDEEKIGRVHAARRLFEYLSENSLDFPVIHHIQFPNGTHRDDLVINAGTNAGALLVDGLGDGILLEAPDQDFDFLRNTSFNLLQGCRMRNTKTEYVSCPSCGRTLFDLQEISAQIREKTSHLPGVSIAIMGCIVNGPGEMADADFGYVGGAPGKIDLYVGKTVVKRGIAMEHATDALIQLIKDHGRWVDPPAEE

SEQ ID NO: 62394 - protein, 59 aa, Gossypium hirsutum
  Clone ID: GOSHI-09MAY01-C6441_1.pep
MEALRMEVFWVMLIVLVAVFKVQNVAAAEAPAPSPTSDATIFVPTVLASLVALAFGLLF

SEQ ID NO: 62395 - protein, 214 aa, Gossypium hirsutum
  Clone ID: GOSHI-09MAY01-C6461_1.pep
MLSLRFAIPTANTLTPPKIKPKPGLVVQTAWNQTDLFPSLPKRNDYKLQAATTDLSVAGDIPAEEVVELPAELSRELMPKHVAVIMDGNGRWARQRGLATSAGHEAGVKALRELVELCCQWGIQVLTVFAFSYENWIRPKVEVDFLMSLFERALKSEVESLSRGGIRISVIGDSTKLPTSLQKLINEVEETTKHNSRLQLIVAVSYSGKYDVVQ

SEQ ID NO: 62396 - protein, 131 aa, Gossypium hirsutum
  Clone ID: GOSHI-09MAY01-C6411_1.pep
TIQKLTSVIHRLPPVSCHILTRSSATLSSSKKVADRIVKLFAIDPEGQKREVVGLAGHSLLRALTNSGLIDPASHRLEEIDACSAECEVNIAQEWLEKLPPRTYDEEYVLVRNSSGRILNKLSRLGCQVVL

SEQ ID NO: 62397 - protein, 132 aa, Gossypium hirsutum
  Clone ID: GOSHI-09MAY01-C6431_2.pep
AAMNSIVLSCNFPISGSGLNAKTPSVPSVASPVLPGGHKLPMISAQQQGKVSGSKESSGNEGRRAAMLYLAATLFTTAAASSANAGVIDDYLEKSKANKELNDKKRLATSGANFARAYTVQFGTCKFPENFP

SEQ ID NO: 62398 - protein, 173 aa, Gossypium hirsutum
  Clone ID: GOSHI-09MAY01-C6431_1.pep
MAAMNSSVLACNYAISGTGSSELNAKLASAPSVASPVMCGGHKLPVIRAQQAKFSDSKGSGASEGRRAAMLYLAAGLFTTAVASSANAGVIDEYLEKSKANKELNDKKRLATSGANFSRAYTVQFGTCKFPENFTGCQDLAKQKKVPFISDDLALECEGKDKYKCGSNVFWKW

SEQ ID NO: 62399 - protein, 190 aa, Gossypium hirsutum
  Clone ID: GOSHI-09MAY01-C6721_1.pep
MEEEKAAAYYDELTRKGEGAARFKRGLGFSSCDDQHDAVPQRGTTFVSPCSSFLSSFVRASSPTTASKLEKESQLQPIQHKLKKKPEREARVSARTNVERDGDKHSRRRSRSTSRERYWEKDRERRKRRRSRSPRRDRRSGSRDRRRRSRSPRKEGKLERKKRSRNLSPRESWRSKRHWTREGKSMKEKN

SEQ ID NO: 62400 - protein, 181 aa, Gossypium hirsutum
  unsure (1)..(181): unsure at all Xaa locations
  Clone ID: GOSHI-09MAY01-C6651_2.pep
AKPPAKAHVEDCPPVRSYRMNIMADQTNSIEXGGNSGSLLVKVSMDGAPYLKKVPRVRSXSYQELSDALAKMFSSFTMGNYGPQGMIDCMNESKLMDLLNSSDYVPCYEDKDRDWMLVGDVPWQMFVDSCKRLRIMKGSDAIGLAPRAMAICKSRAYKQDPGIEQKARRGSLLIGMCFMFF

SEQ ID NO: 62401 - protein, 250 aa, Gossypium hirsutum
  Clone ID: GOSHI-09MAY01-C6651_1.pep
MLGTEHDLNFKETELCLGLPGGSGGGGGAAAAGGGGGGKNEVESSPKTTGKRGYSETVDLKLNLQSKEGCMDLNQNLENGSKEKNHLTAKPPAKAQVLGWPPVRSYRKNIMANQKNNSDEISDRASSGSGGAAFVKVCMDGAPYLRKVDLKMYNSYQKLSDALAKMFSSFTMGSYGCEGMIDFMNESKLMDLLNSSDYVPTYEDKDGDWMLVGDVPWEMFVESCKRLRIMKGSEAIGLAPRAMEKRPPRV

SEQ ID NO: 62402 - protein, 92 aa, Gossypium hirsutum
  unsure (1)..(92): unsure at all Xaa locations
  Clone ID: LIB3148-026-Q1-K1-B7.pep
SASIKSDTILYILKKKKKTGGSIYNNGPQRMIDFMNESKLXMELLNSSYYVPSYEYKDGDWMLVGDVPWHIFVDSCKRLRIMKGSESIVHSP

SEQ ID NO: 62403 - protein, 295 aa, Gossypium hirsutum
  Clone ID: GOSHI-09MAY01-C6641_1.pep
MAAAARVIAIAGNSTAAASSCLLIKTPFALQRCSNGLRFNNVRRSSKRLFSCNAIYNPQVQIKQEGQPETLDYRVFFEDTSGKKISPWHDVPLHLGDGVFSFIVEIPKESSAKMEVATDELYTPIKQDTKKGKLRYYPYNINWNYGLLPQTWEDPSLANSEVEGAFGDNDPVDVVEIGESRRKIGDIFQVKPLAALAMIDEGELDWKMVAISLDDPRASLVNDIDDVEKHFPGTLTAVRDWFRDYKIPDGKPANKFGLGNKAANKDYALKVITETNESWAKLVKRSIPAGELSLV

SEQ ID NO: 62404 - protein, 109 aa, Gossypium hirsutum
  unsure (1)..(109): unsure at all Xaa locations
  Clone ID: GOSHI-09MAY01-C6151_1.pep
MKNNNSNTKLILLHPYIQKQGASAIXWLLAFISFFTIAFLLTLVYTRESITGKPTAAGIIAATGGGVAGAPPLSTTVYTPISIILRYLTTAASCNIPSCRRSPCAPEML

SEQ ID NO: 62405 - protein, 194 aa, Gossypium hirsutum
  Clone ID: GOSHI-09MAY01-C6171_2.pep
MKFNIANPTTGCQKKLEIDDDQKLRAFFDKRISQEVSGDALGEEFKGYVFKIMGGCDKQGFPMKQGVLTPGRVRLLLHRGTPCFRGYGRRNGERRRKSVRGCIVSQDLSVLNLVIVKKGENDLPGLTDTEKPRMRGPKRASKIRKLFNLSKEDDVRKYVNTYRRTFTTKSGKKVSKAPKIQRLVTPLTLQRKRG

SEQ ID NO: 62406 - protein, 249 aa, Gossypium hirsutum
  Clone ID: GOSHI-09MAY01-C6171_1.pep
MKFNIANPTTGCQKKLEIDDDQKLRAFFDKRISQEVSGDALGEEFKGYVFKIMGGCDKQGFPMKQGVLTPGRVRLLLHRGTPCFRGYGRRNGERRRKSVRGCIVSQDLSVLNLVIVKKGENDLPGLTDTEKPRMRGPKRASKIRKLFNLSKEDDVRKYVNTYRRTFTTKSGKKVSKAPKIQRLVTPLTLQRKRGRIAEKKKRVAKAKADAAEYQKLLAQRLKEQRERRSESLAKKRSRLSAASKPSIAA

SEQ ID NO: 62407 - protein, 183 aa, Gossypium hirsutum
  Clone ID: LIB3543-064-Q6-K6-G1.pep
ISILFWGLFILFVLLIFFLFFSQFNIANPTTGCQKKLEIDDDQKLRAFFDKRISQEVSGDALGEEFKGYVFKIMGGCDKQGFPMKQGVLTPGRVRLLLHRGTPCFRGYGRRNGERRRKSVRGCIVSQDLSVLNLVIVKKGENDLPGLTDTEKPRMRGPKRASKIRKLFNLSKEDDVSEYVNTY

SEQ ID NO: 62408 - protein, 101 aa, Gossypium hirsutum
  Clone ID: LIB3166-017-P1-K1-H2.pep
MKFNIANPTTGCQEKLEIDDDQKLRAFFDKRISQEVSGDALGEEFKGYVFKIMGGCDKQGFPMKQGVLTPGRVRLLLHRGTPCFRGYGRRNGELSQREIQA

SEQ ID NO: 62409 - protein, 110 aa, Gossypium hirsutum
  unsure (1)..(110): unsure at all Xaa locations
  Clone ID: LIB3083-102-Q1-L1-F11.pep
MKFTLQIRLLVQKKLEIDDDQKLQPFLTRGSHRKSGXALGEEFKGYVFKXMGGCDKQGFXMKQGVLTPGRVRLLLHRXTPCFXGYGRRNGERXRKSVRGCIVSQDLSVLN

SEQ ID NO: 62410 - protein, 78 aa, Gossypium hirsutum
  unsure (1)..(78): unsure at all Xaa locations
  Clone ID: LIB3584-002-P1-K1-G3.pep
PTRPASKSRAAAFLPQKTHQREVKFNIANPTTGCQKKLEIDDDQKLRXPFFDKRISQEVSGDALGEEFKGYVFKIMGG

SEQ ID NO: 62411 - protein, 39 aa, Gossypium hirsutum
  Clone ID: LIB3149-035-Q1-K1-A6.pep
AEYQKLLAQRLKEQRERRSESLAKKRSRLSAASKPSIAA

SEQ ID NO: 62412 - protein, 61 aa, Gossypium hirsutum
  unsure (1)..(61): unsure at all Xaa locations
  Clone ID: LIB3585-048-Q6-K1-C4.pep
MTSTNKKISSSKIRKLVDRSNEDDVRNYXNTYRRTFTTKSGKKVSKAPKIQRLVTPFTLHR

SEQ ID NO: 62413 - protein, 86 aa, Gossypium hirsutum
  Clone ID: GOSHI-09MAY01-C6161_1.pep
VVKKSSSRQQVKIPLCRKHRILCTRVQFRSGSLVLPNKHHLFLKNVYHGKGSRPFKALEGFNNVDPKVLSGNYNGYVGGSEDEMGR

SEQ ID NO: 62414 - protein, 232 aa, Gossypium hirsutum
  Clone ID: GOSHI-09MAY01-C6101_3.pep
FRCLIPWGANGGMYLKEVDRVLRPGGYWVLSGPPINWRNNYKAWQRPKEELEEEQQKIEDVAKLLCWEKKHEKGEIAIWQKRVNDESCRGREDDSQAKFCKAEEANDVWYKKMDVCVTPYPDVSSSSEVAGGELKPFPERLFAVPPRIASGSVPGVSVETYEEDNNIWKKHVNAYKKINRLIDSGRYRNILDMNAGLGGFAAALNSPKLWVMNVMPTIAEKDTLGVIYERGL

SEQ ID NO: 62415 - protein, 113 aa, Gossypium hirsutum
  unsure (1)..(113): unsure at all Xaa locations
  Clone ID: GOSHI-09MAY01-C6101_2.pep
AFSTYPRTYDLIHAHGLFSLYKDKCNLEDILLEMDRILRPEGAVIFRDEVDVLIKVKKITAGMRWDTKMVDHEDGPLVPEKVLVACXQYWTVWGNTTSAQYTADGDKLKPCMN

SEQ ID NO: 62416 - protein, 236 aa, Gossypium hirsutum
  Clone ID: GOSHI-09MAY01-C6101_1.pep
MLARYKKMDVCVTPYPDVSSSSEVAGGELKPFPERLFAVPPRIASGSVPGVSVETYEEDNNIWKKHVNAYKKINRLIDSGRYRNILDMNAGLGGSAAALNSPKLWVMNVMPTIAEKDTLSVIYERGLIGIYHDWCEAFSTYPRTYDLIHAHGLFSLYKDKCNLEDILLEMDRILRPEGAVIFRDEVDVLIKVKKITAGMRWDTKMVDHEDGPLVPEKVLVAVKQYWTVGGNTTSAQ

SEQ ID NO: 62417 - protein, 105 aa, Gossypium hirsutum
  unsure (1)..(105): unsure at all Xaa locations
  Clone ID: LIB3197-014-P1-M1-B10.pep
RLEIHQFMSNSYNPQTQFMPSPXGVAVCCILCRCRISPSGPILINSXQYSPRTQPQKKKSTILVSHLIXHXXXSPHHTPYFITEYNRTFWTKNSVHLHQNPSQTT

SEQ ID NO: 62418 - protein, 234 aa, Gossypium hirsutum
  Clone ID: GOSHI-09MAY01-C6131_1.pep
MQSVVITPTYCCSTHYQTLERFSSRPNPSKPSSSLFGARVSVAKGRNPSRRCSWRCLRVRLPALTRKLIVKAVATPNSAVELPLTAKNIESVLDEVRPYLIADGGNVALHEIDGNVVRLKLQGACGSCPSSVMTMKMGIEKRLMEKIPEIVAVEPITDEETGLELNEENIEKVLEEIRPYLVGAAGGSLELVAIEEPIVKVRITGPAAGVMTVRVAVTQKLREKIPTIAAVQLL

SEQ ID NO: 62419 - protein, 156 aa, Gossypium hirsutum
  unsure (1)..(156): unsure at all Xaa locations
  Clone ID: LIB3825-021-Q1-K6-C10.pep
MQAIVISPTYCCNAHQSPEPSSSRPLTTKPSSFFGIRVLLAKGRNPARRCSWRCVRVRSPALTRRKVVKAVATPDSALELPLTAENVESVLDEVRPYLIADGGNVALHEIDGNVVRLKLQGACGSCPSSVTTMKMGIEKRLMEKXPEIVAVEPITD

SEQ ID NO: 62420 - protein, 61 aa, Gossypium hirsutum
  Clone ID: LIB3585-048-Q6-K1-G1.pep
TTRPITRPQTLISNPNTFSYSLTRSISAWQSTIDKKKQTTSLNIINKRLFFSSLIRPNQFI

SEQ ID NO: 62421 - protein, 328 aa, Gossypium hirsutum
  Clone ID: GOSHI-09MAY01-C6081_2.pep
VVIDREQGGRETLEENGIKLHALFTLTEMVKVLRAKGKLEEEMGSLVMKFLEENKKVPVPKVEKVRIKCLGYQERAKISKNPTGKKLFEIMVKKESNLCLAADVATAAELLDIAEKVGPEICLLKTHVDIFPDFTPEFGSKLRAIAEKHNFMIFEDRKFADIGNTVTMQYEGGIFRILEWADIVNAHIISGPGIVDGLKLKGLPRGRGLLLLAEMSSAGNLATGDYTAAAVKIAEQHSDFVIGFISVNPASWPGAPVNPAFIQATPGVQMVKGGDALGQQYNTPYSVIFDRGSDIIIVGRGIIKAANPAEAAREYRLQGWEAYMAKCT

SEQ ID NO: 62422 - protein, 248 aa, Gossypium hirsutum
  Clone ID: GOSHI-09MAY01-C6081_1.pep
MSSTESLILQLHEISAVKFGNFKLKSGIFSPIYIDLRLIVSYPSLLHQISHSLLSSLPPQTHFNLICGVPYTALPIATSISLDTSIPMLMRRKEVKDYGTAKSIEGVYEKGQACLVVEDLVTSGASVLETAAPLRSLGINVTDAVVVIDREQGGRETLEENGIKLHALFTLTEMVKVLRAKGKLEEEMESLVMKFLEENKKVPVPKVEKVRIKCLGYLDRPKMSTNPTGKKLVEIMVKKESNLWSLIC

SEQ ID NO: 62423 - protein, 139 aa, Gossypium hirsutum
  Clone ID: uC-gsflnu33B130f12b1.pep
GLETAAPLRSLGINVTDAIVVIDREQGGRETLEENGIKLHALFTLTEMVKVLRAKGKLEEEMESLIIKLNIHILTVGVITNRPVPIARLGFEERFIIFKNLSGKKLFEIIGLKDKYSLLVGDVATASELLAIALEGLTL

SEQ ID NO: 62424 - protein, 258 aa, Gossypium hirsutum
  Clone ID: GOSHI-09MAY01-C6051_1.pep
MAKHTAVGWGHHHYHHLQNRWLLALLLMLSVSTVIAFFMRSAFDSCDRTVSGAVDGIGSSRHVIQVAEKRTAPIAAVKPSPLSFMKSTRPLLVSHELSLSGGPLLRMELAFLLRSVGAEVYWMTIMKPSETDEVTYSLEHKMLDRGVQVISAKGKEALDTALRADLVVLNTAFAGKWLDVVLKGDVHRVLPKVLWWIHEMRGHYFKLDYVKHSSLLYLVPMIDSHVTTEYWKNSTKERLKFKMSVSLCLFTFEIVSVL

SEQ ID NO: 62425 - protein, 208 aa, Gossypium hirsutum
  Clone ID: LIB3829-012-Q6-K6-G10.pep
RSGPPGRPSVCPTLAERWLLALLLMLTVSTVIAFFMRAAFDSCDRNVSVDNVISSARDSVQVADKRAPQIAAAKPSPLSFMKSKIVLLVSHELSLSGGPLLLMELAFLLRSVGAEVNWVTFMKPSETDEVIYSLEHKMLDRGVQVFSAFGKEAIDTALRADLVVLNTAVAGKWVDYVLKEDIHRVLPKVLWWIHEMRGHYFKLEYVKH

SEQ ID NO: 62426 - protein, 189 aa, Gossypium hirsutum
  unsure (1)..(189): unsure at all Xaa locations
  Clone ID: GOSHI-09MAY01-C6071_1.pep
MEDFSSSDEDYYYSSDRDSLDGFENDESDSQWVTSKSPTTKVITKESLLAAQREDLRRVMDMLSIREHHARTLLIHYRWDVEKLLAVLVENGKSYLFASAXVSVVEGEHTGASLLSLSSTPMCEICIEELPVDKMTKMECGHGFCNDCWTEHFVVKINEGQSMRIMCMAHKCNADSDESVVRNLVCKTH

SEQ ID NO: 62427 - protein, 279 aa, Gossypium hirsutum
  unsure (1)..(279): unsure at all Xaa locations
  Clone ID: GOSHI-09MAY01-C6061_1.pep
PRVRDMLAKKKMSLDNCRYLTLDEADRLVDLGFEDDIREVFDHFKAQRQTLLFSATMPTKIQNFARSALVKPVTVNVGRAGAANLDVIQEVEYVKQEAKIVYLLECLQKTPPPVLIFCENKADVDDIHEYLLLKGVEAVAIHGGKDQEEREHAISSFKAGKKDVLVATDVASKGLDFPDIQHVINYDMPAEIENYVHRIGRTGRCGKTGIATTFINKNQSETTLLDLKHLLQEAKQRIPPVLXELSDPMEDVDAITNASGVXGCAYCGGLGHRIRDCPN

SEQ ID NO: 62428 - protein, 72 aa, Gossypium hirsutum
  Clone ID: GOSHI-09MAY01-C6001_2.pep
RGRTPATRAAGRPVQPTLSCLSPIMPSFARRVGKLQRPQDVSSPLATSIIEGRSKLFFTVLMIASTLFLISR

SEQ ID NO: 62429 - protein, 429 aa, Gossypium hirsutum
  Clone ID: GOSHI-09MAY01-C6001_1.pep
IGDWSTRNHTALKKALDAGKGLGMPNGVLINGKGPYRYNDTLVPDGIEYETINVHPGKTYRLRVHNVGISTSLNFRIQSHNLLLAESEGSYTVQQNYTSLDIHVGQSYSFLLTTDQNASSDYYIVASARFVNESQWKRVTGVAILRYSNSKGKASGPLPDPPQDEFDKTFSMNQARSIRWNVSASGARPNPQGSFRYGSINVTEVYVLRNKPPETIDGKRRATLSGISFVNPATPIRLVDQYKIKGVYKLDFPNKPLTGPPKMETSVINGTYRGFMEVILQNNDTKMHTYHMSGYAFFVVGMDYGEWSENSRGTYNKWDGIARSTTQVYPGAWTAILISLDNVGVWNLRTENLDSWYLGQETYVRVVNPEATNKTELPMPDNALFCGALSKLQKPQDVSSSLATSIIEGRSKLFFTVLMIASTLFLISR

SEQ ID NO: 62430 - protein, 153 aa, Gossypium hirsutum
  Clone ID: LIB3583-060-P1-K1-C6.pep
APTRPPTRPPTRPTRPTGVAILRGSSSKGKAAGPLPDPPQDEYDKTFSMNQARSIRWNVSASGARPNPQGSFRYGSINVTEIFVLKNKPPVTIDGKRRTTLSGISFVNPATPIRLADQFKVKGVYKLDFPSRPLTGPPKMETIVINGTFMGFM

SEQ ID NO: 62431 - protein, 219 aa, Gossypium hirsutum
  Clone ID: GOSHI-09MAY01-C6391_1.pep
SISPIPMATLSSSPSPSILSSSTANPKTPYLKPPLLFFPKPLTTALTTALATTTLLLTSPPSSIASDSYNVYYGTAASAANYGGYGGNSDKKASAEYVYDVPDGWKERLVSKVEKGTNGTDSEFYNPKKRQEKEYLTFLAGFRQLAPKDVILNNLALSDVELQDLIAGADSLVSEEKKDENGQLYYVYEIDGIGKHSLIAITCAKNKPLCSFLFIAPGA

SEQ ID NO: 62432 - protein, 91 aa, Gossypium hirsutum
  Clone ID: LIB3165-004-P1-K1-A10.pep
NPLSEAAAPLLPQASYHRSNHRFSHHHLSLPPSPSPSLFIYMYEAMPFLYISKAILLFLYIYFVCCSKTKKRAKITKKKKDKKKVGLKWSK

SEQ ID NO: 62433 - protein, 203 aa, Gossypium hirsutum
  unsure (1)..(203): unsure at all Xaa locations
  Clone ID: GOSHI-09MAY01-C6351_1.pep
GPANLRGDLNWLGPRAFAKKMXLSWVRGAGSLXWMTRTLTENIPGWGTLFNARPGDGTVSVLVATFLFVIPNKKRKGEKLMDWNECKKLPWNIILLLGAGFAIADGVQSSGLADQLSKTLDFLEEAPYLAIAPAVCLICAIITEFITSNDATATLVLPLLIQMAKTMHVHPLLLMVPGAVGSQFAFILATATPSNIIGFATGI

SEQ ID NO: 62434 - protein, 187 aa, Gossypium hirsutum
  Clone ID: GOSHI-09MAY01-C6341_1.pep
MAIEAWFMDESKEDQRLPHRRNPNEPVSLEHLAELGVLYWHLNPKDYENDEELKKIREARGYNYMDLLDLCPEKVDNYEEKLRNFYTEHIHADEEIRYCLEGSGYFDVRDKDDRWIRIWIKGGDLIILPAGIYHRFTLDTSNYVKLMRLFLGEPVWTAYNRPQEDHPARKEYIKSLTEKVGVPLAAH

SEQ ID NO: 62435 - protein, 144 aa, Gossypium hirsutum
  Clone ID: GOSHI-09MAY01-C6301_1.pep
MASMIMASSKPVISIAASSSFFSKPKLKQIPQLSLPKLPTPKFLKTQQIPSLSSTTLKSISLFTVTTLSFAPPSLAAEIEKAALFDFNLTLPIMMVQFLFLMFALDKVYFTPLGKFMDERDAAIKEKLASVKDTSEEVKQLEEQ

SEQ ID NO: 62436 - protein, 146 aa, Gossypium hirsutum
  Clone ID: GOSHI-09MAY01-C6241_1.pep
MALAPTTYPSYLCSNTCSPLHRATQPLLSSTRHVGVRFNSKCSASFCSGKEQLKPWILVAKASEGESQTTEQEEQQYEEYEVEIEQPYGLKFRKGRDGGTYIDAIQPGGAADKAGVFTVGDKVLATSAVFGTEILPAAEYGRTMYT

SEQ ID NO: 62437 - protein, 161 aa, Gossypium hirsutum
  Clone ID: GOSHI-09MAY01-C6261_1.pep
VGKNRADQRVRPRVRPRVRLATLSRFVVREGNFHKHHAVCRTSSSLVPSRTLRRAHLDVRAGISLPENGKGFAIQRKPSGPLVSLAAPASITPASRGPQVICNAAANVSGDIPTPSGMSKYERIIETLTTLFPVWVILGTIIGIYKPAAVTWFETDLFTGG

SEQ ID NO: 62438 - protein, 96 aa, Gossypium hirsutum
  Clone ID: GOSHI-09MAY01-C6231_1.pep
MKRVSFVALCVVALAVVLFSGESRTAEAVTCNPVELAPCSPALTSSSPPSSACCSKLKAQQPCLCGYIKNPSLKQYVNSPNAKKVASTCGVPYPKC

SEQ ID NO: 62439 - protein, 70 aa, Gossypium hirsutum
  Clone ID: GOSHI-09MAY01-C7981_1.pep
EILSTEKMVTSEQEHDFVKWGLQLFNSDPYANCGYCGVLTQENGEYYNGNSFKEDYHYDAGECCNVENDE

SEQ ID NO: 62440 - protein, 51 aa, Gossypium hirsutum
  Clone ID: LIB3189-037-P1-K1-E10.pep
PPKSASGRRVSSRGIVLMVLLLCFRQVIVVETNSQRYVTATASSFFFTRSL

SEQ ID NO: 62441 - protein, 139 aa, Gossypium hirsutum
  Clone ID: GOSHI-09MAY01-C7881_1.pep
ILSIAMATEQCVRPVEKTLHEGKHEHHPSSGQTQVHKESKGVNQSHGHNQLSHDTPKTHAESKTVSHGVHAQQHVAQSTAMPTTCHGKKEKKMKDTKEKDTDRKEKKEKKEKKTESMMKPGTEKSKHKMSKDDSSSDSD

SEQ ID NO: 62442 - protein, 144 aa, Gossypium hirsutum
  Clone ID: GOSHI-09MAY01-C7871_1.pep
MPQGNLETLVSACAGGSCDNKIICETLATSESDSDDHLHPAEKHIEEEIPSDFPPESFWLSKDAEFDWFDRNAFYERKDSHKGNSGPNSANLNPNLNSISNSQRFSLRKPKASIIGLPKPQKSCFVETKNRKPGNTRLFPKRPG

SEQ ID NO: 62443 - protein, 113 aa, Gossypium hirsutum
  Clone ID: LIB3828-032-Q6-K6-G10.pep
MVIMDLKGITWVGHVYQKFEAMCLEAEEIMYQDTVKYVEDQVQTVGASVKRFYSDVMQDVMQDLLLPSSLEPVKAVAASDTAIEKNVGTFKKPQVGLKVAAVKDEGEQLIEDS

SEQ ID NO: 62444 - protein, 91 aa, Gossypium hirsutum
  Clone ID: LIB3165-021-P1-K1-G4.pep
EETGRGISDKTLSRLLYDTVKYVEDQVQTVCASVKRFYSDVMQDVMQDLLLPSSLEPVKAVAASDTAIEKNVGTFKKPQVGIKVAAVNDEG

SEQ ID NO: 62445 - protein, 146 aa, Gossypium hirsutum
  Clone ID: GOSHI-09MAY01-C7571_2.pep
MTLSSGGSSVVVPRNFRLLEELERGEKGIGDGTVSYGMDDGDDIYMRSWTGTIIGPLNTVHEGRIYQLKLFCDKDYPEKPPSVRFHSRINMACVNHDTGLVDSKKFGLLANWRREYTMEDILTQLKKEMAASHNRKLVQPPEGTYF

SEQ ID NO: 62446 - protein, 146 aa, Gossypium hirsutum
  Clone ID: GOSHI-09MAY01-C7571_1.pep
MTLGSGGSSVVVPRNFRLLEELERGEKGIGDGTVSYGMDDGDDIYMRSWTGTIIGPHNTVHEGRIYQLKLFCDKDYPEKPPSVRFHSRINMTCVNHETGVVEPKKFGLLANWQREYTMEDLLTQLKKEMAAPHNRKLVQPPEGTYF

SEQ ID NO: 62447 - protein, 42 aa, Gossypium hirsutum
  unsure (1)..(42): unsure at all Xaa locations
  Clone ID: LIB3147-045-Q1-K1-G9.pep
WGMPQRSFSNYFPLVSSSLSFSYQTLFKECCLINGTXSVCLI

SEQ ID NO: 62448 - protein, 61 aa, Gossypium hirsutum
  Clone ID: LIB3582-009-P1-K1-E12.pep
MTLGSGGSSVVVPRNFRLLEELERGEKGIGDGTVSYGMDDGDDIYMRSWTGTIIGPHNTVH

SEQ ID NO: 62449 - protein, 64 aa, Gossypium hirsutum
  Clone ID: LIB3189-039-P1-K1-G11.pep
LLPDSRLCLLHRSFSSIRSGETHLSKQPFTHSIHDAWLMRIQCCGAFVLSYCCVCLCLVLLYFV

SEQ ID NO: 62450 - protein, 39 aa, Gossypium hirsutum
  Clone ID: LIB3272-007-P1-K1-F12.pep
GSSVVVPRNFRLLDELERGEKGIGDGTVSYGMDDGDDIY

SEQ ID NO: 62451 - protein, 125 aa, Gossypium hirsutum
  Clone ID: GOSHI-09MAY01-C7441_1.pep
PPNQSMAISLSSVFGFNLKYVSRSCIGGASVLKANPSVSPFQMYGSGGRVHQKRRGLCLSVEDRDRLVANSSIKDSGDAEKLVSDDRVLAVNPPSLDNESRSPTSEPSNGSMVSSTPMQRPHHLQ

SEQ ID NO: 62452 - protein, 180 aa, Gossypium hirsutum
  unsure (1)..(180): unsure at all Xaa locations
  Clone ID: GOSHI-09MAY01-C7411_2.pep
GKKPYPQKKTGRVRRGSTRTPXRPGGGVIFGPKPRDWSVKINKKEKRLAISTALSSAAENTIVVEDVGDKFEKPRTKEFIEALKRWGLDPKQKSMVLMMEVPETVNKSSRNIGTLRMLTPRTLNLLDIFEXDNLVLTPDTVDYLNGRYGEDYEGDTEDDNEEYEEEDEQSGQDENVDAAQ

SEQ ID NO: 62453 - protein, 212 aa, Gossypium hirsutum
  unsure (1)..(212): unsure at all Xaa locations
  Clone ID: GOSHI-09MAY01-C7411_1.pep
MATSATTLTSLSFFSSSLFLSSPSPKLSTSLSFSFKPSSNPSLSISSQLSTLPILSFTGEKIGETYLDLKSAPPETARAVVHRAIITDLQNKRRGTASTLTRGEVRGGGKKPYPQKKTGRARRGSARTPLRPGGGVIFGPKPRDWSVXINIKEKRLAISTALSSAAENTIVVEDFGDKFEKPKTKEFIDALKRWGLDPKQKSMFLRWKCRKL

SEQ ID NO: 62454 - protein, 281 aa, Gossypium hirsutum
  Clone ID: GOSHI-09MAY01-C7751_1.pep
MEFVVEQGKQPHQECSTLLLPALSIGNVGQLAVDLLVSSMKAERIGYLDDPFVLPCVGNDAYGPIPCGDLALPLEAYESAFSRVALLQQRSPVVKGRMVEFAKNLANFAAASGAARAVPRAGAGGGKWQKIDMSSGPQIYYLSSINPDGRDDYCEQLGWKRLQEYNPAQRCWKYLSTLAEGNTMLESNLPFEDELEDEDYYPSLPFAALFSCLKAKGLKVTSLLCYCSEGDNIQDAFHLAEAACRLLGPNPNAFPGNGSGGWVIPFSWHTVYGPPPDMSIF

SEQ ID NO: 62455 - protein, 115 aa, Gossypium hirsutum
  Clone ID: GOSHI-09MAY01-C7741_1.pep
MAGLQRSAVSFRRQGSSGLVWDDKFLSELNQGKPEEQQQEGDTKQLQKEEPRQLQDSRNPEKFDDVKGVAPTNTIERNRSNGERRGYRTGGKVSPAIDPPSPKVSACGFCSALGK

SEQ ID NO: 62456 - protein, 127 aa, Gossypium hirsutum
  Clone ID: GOSHI-09MAY01-C7611_1.pep
MGLPWYRVHTVVLNDPGRLLSVHIMHTALVAGWAGSMALYELAVFDPSDPVLDPMWRQGMFVIPFMTRLGITNSWGGWSITGGTITNPGIWSYEGVAGAHIVFSGLCFLAAIWHWVYWDLEIFCDDP

SEQ ID NO: 62457 - protein, 61 aa, Gossypium hirsutum
  Clone ID: GOSHI-09MAY01-C7621_2.pep
CFCESGRSFSHMLVRYNALANARHAELESSDGFTNYDGICEGKCIARLYKYLRMKTCLLHS

SEQ ID NO: 62458 - protein, 118 aa, Gossypium hirsutum
  Clone ID: GOSHI-09MAY01-C7621_1.pep
IQAAMRRSLVYTPRQNSGWDTTSQDYQAHLSRMERSATMIPGAPQYPDVHKAFNNKVEFPEEDQCTERSPTANSRKKVQVVEHAETVDEATLDSQADSYIQQKHKAFELCKWKTFKMH

SEQ ID NO: 62459 - protein, 270 aa, Gossypium hirsutum
  Clone ID: GOSHI-09MAY01-C7161_1.pep
MEMEASSANQRLHFGKMGYGCQHYRRRCKIRAPCCNEVFSCRHCHNEAVNLLSNPFDRHELVRKDVKQVICSVCDTEQPVAQLCSNCGVNMGEYFCAICIFFDDDTEKGHFHCHDCGICRVGGRENFFHCKKCGSCYSVALRGNHTCVENSMQHHCPICYEYLFDSLKDTTVMKCGHTMHYECYHEMLKRDKYCCPICSKSVIDMSRAWKRMDEEIEATLMPEDYRYKKVWILCNDCDDTTEVYFHIIGQKCSHCRSYNTRTIAPPELPQ

SEQ ID NO: 62460 - protein, 120 aa, Gossypium hirsutum
  Clone ID: LIB3148-053-Q1-K1-H8.pep
MLHLFVLHNNHTYLHHWAGSCYAIALRDNHLCVENSMRHHCPICYEYLFDSLKDTTVMKCGHTMHCECYDEMIKRNKYCCPICSKSVIDMSRTWKRIDEEIEATVMPEDYRHMKVRAYYD

SEQ ID NO: 62461 - protein, 143 aa, Gossypium hirsutum
  Clone ID: GOSHI-09MAY01-C7101_1.pep
MGKEQSLDETSNSISNSGSERTPLLNKEASKQTNGQQAAESPLSDLEQGNAEEAVNVGFWRVFALAKPDAWKIFVATFALLIASTTNLLIPKYGGMIIDIVSRDIRTPEQQSEALEAVKNTVTYIVLIVVLGSVSAALWSWLF

SEQ ID NO: 62462 - protein, 309 aa, Gossypium hirsutum
  Clone ID: GOSHI-09MAY01-C7131_1.pep
MAGTGVVAVYGNGAIAETHKSPFSVKVGLAQMLRGGVIMDVVTPDQARIAEEAGACAVMALERVPADIRAQGGVARMSDPQLIKEIKQAVTIPVMAKARIGHFVEAQILEAIGIDYVDESEVLTLADEENHINKHNFRIPFVCGCRNLGEALRRIREGAAMIRTKGEAGTGNVIEAVRHVRSVMGDIRALRNMDDDEVFSFAKKIQSPYDLVMQTKQLGRLPVVQFAAGGVATPADAALMMQLGCDGVFVGSGVFKSGDPAKRARAIVQAVTHYSDPNMLAEVSCGLGEAMVGLNLNDKKVERFAARSD

SEQ ID NO: 62463 - protein, 211 aa, Gossypium hirsutum
  unsure (1)..(211): unsure at all Xaa locations
  Clone ID: GOSHI-09MAY01-C7021_1.pep
PLVRPRFLPRVRPRVREGGHFDLVVKIYFKGVHPKFPNGGLMSQYLDSLPLSSSLDVKGPLGHIEYTGQGNFLVHGKPNFAKKLAMLAGGTAITPIYQLIQAILKDPKDETEMYVVYANRTEDDILLKEELDDWAKKHDRLKVWYVVQESIREGWQXGTGFITESVXRDHIPEGSSDTLALACGPPPMIQFAVQPNIEKMKFYVKDFLLGF

SEQ ID NO: 62464 - protein, 122 aa, Gossypium hirsutum
  Clone ID: LIB3166-006-P1-K1-C7.pep
VLGLPVGKHIFLCATIGDKRCMRAYTPTSNIDEIGHFDLIGKIYFKRVHPKFPYGGLMSQYLDFLPLGSSLDVKGPLGHIEYTGQGNFLVHGKPKFAKKLAMLAGGTVITPIYQLIQAILKD

SEQ ID NO: 62465 - protein, 85 aa, Gossypium hirsutum
  Clone ID: LIB3165-014-P1-K1-G10.pep
IKSPLFFVLSNAPLKRGVASIYGFISDSFNLFLVEPALDDGVLLFQAFLLVPSFSSDHIFSSNLWVFFLMVGGSRSGFEGVIIKL

SEQ ID NO: 62466 - protein, 44 aa, Gossypium hirsutum
  unsure (1)..(44): unsure at all Xaa locations
  Clone ID: LIB3083-072-Q1-L1-F3.pep
LSMKTFQSWNALVKKRNAXAEALPFYGSICTSMLFIAYRTTDYQ

SEQ ID NO: 62467 - protein, 136 aa, Gossypium hirsutum
  Clone ID: GOSHI-09MAY01-C7341_2.pep
MGKDKHKPDDKGLFSHLAHGLSHGGHGHPPGAYPPPPGGYPPAGAYPPQGYPPAGYPPQGGYPPHGYPPSGYPGASHSGHGGMGALLAGGAAAAAAAMGAHHVSHGAHGAHGAYGAHGFGHGHHGKFKHHGGGMFK

SEQ ID NO: 62468 - protein, 159 aa, Gossypium hirsutum
  unsure (1)..(159): unsure at all Xaa locations
  Clone ID: GOSHI-09MAY01-C7341_1.pep
MGKDKHKPDDKGLFSHLAHGGHGHPPGGYPPAGAYPPQGYPPAGYPPQGGYPPHGYPPSGYPGASHSGHSGMGALLAGGAAAAAAAMGAHHVSHGAHGAHGAYGAHGAYGAHGFGHGHHGKFXHHGGGKVKHHGGKFKHGKHGKFKHGKHGGGKFRKWK

SEQ ID NO: 62469 - protein, 144 aa, Gossypium hirsutum
  Clone ID: uC-gsflnu33B090c08b1.pep
MGKDKHKPDDKGLFSHLAHGGHGHPPGGYPPAGAYPPQGYPPAGYPSQGGYPPHGYPPSGYPGASHSGHSGMGALLAGGAVSAAAAMGAHHVPHGAHGAHGAYCAYGAYGAHGFVMFITGRSTLTAVLCFLLFSPLSLSLSFFL

SEQ ID NO: 62470 - protein, 122 aa, Gossypium hirsutum
  unsure (1)..(122): unsure at all Xaa locations
  Clone ID: LIB3272-022-P1-K1-H6.pep
LGRGRDYLIPDHNALXSHLAHGLSHGGHGHPPGAYPSPPGGYPPAGAYPPQGYPPAGYPPXGGYPPHGYPPSGYPGASHSGHGGMGTLLACGATAAGASMGAHHVAYGAHGAHGAYGAHGFC

SEQ ID NO: 62471 - protein, 121 aa, Gossypium hirsutum
  Clone ID: LIB3585-032-P1-K1-A1.pep
MGKDKHKPDDKGLFSHLAHGLSHGGHGHPPGAYPPPPGGYPPAGAYPPQGYPPAGYPPQGGYPPHGYPPSGYPGASHSGHGGMGALLASGAAAAAAAMGAHHVSHGAHGAHGAYGAHGFGH

SEQ ID NO: 62472 - protein, 39 aa, Gossypium hirsutum
  unsure (1)..(39): unsure at all Xaa locations
  Clone ID: LIB3148-012-Q1-K1-D10.pep
NGRPFLIFFFFNNFFFFIIYFFFFXFFFFFFFFFFFFFX

SEQ ID NO: 62473 - protein, 45 aa, Gossypium hirsutum
  Clone ID: LIB3272-022-P1-K1-H5.pep
MGEDKHKPDDKGLFSHLAHGLSHGGHGHPSGAYPSPSGGYSPAGA

SEQ ID NO: 62474 - protein, 300 aa, Gossypium hirsutum
  Clone ID: GOSHI-09MAY01-C7361_1.pep
MVAAVAATASSQLLVSSSRSLSRLSPFQLCVFDSKSLVSCPSNGNGINNSIKRRHVRCLAVGTAPEAETKKSGFEIQTLTGWLLKQEQAGTIDAELTIVLSSISMACKQIASLVQRASISNLTGVQGAVNVQGEDQKKLDVVSNEVFSNCLRSSGRTGIIASEEEDVPVAVEESYSGNYIVVFDPLDGSSNIDAAVSTGSIFGIYSPNDECLAEIDDDSTLGSAEQRCVVNVCQPGSNLLAAGYCMYSSSIIFVLTLGNGVYAFTLDPMYGEFVLTQEKIQIPNAAKIYAFNEGNYQLWD

SEQ ID NO: 62475 - protein, 79 aa, Gossypium hirsutum
  Clone ID: GOSHI-09MAY01-C7221_1.pep
NRKKKGNRMSWLGNLGFTCFSSVNCSNHFITCLLIFILHYSHQLPPSLFKFEKKSTEPLLLLVNSNSKHIPPLHLKSKS

SEQ ID NO: 62476 - protein, 125 aa, Gossypium hirsutum
  Clone ID: GOSHI-09MAY01-C1951_2.pep
MAKAEVVIVLSLLLVITVVDGLGGRMRINDVKNNKEVQELGRFSVEEYNRRSQGRLRFSLANGGPSTALVFSQVVGAEKQVVAGIKYYLKIKAMQGGVTKTFESVVLVKPWVQSKDLLNFSPSTH

SEQ ID NO: 62477 - protein, 241 aa, Gossypium hirsutum
  Clone ID: GOSHI-09MAY01-C1951_1.pep
MRKLLAFAFLFFFFWDKTLAQIAPAPPLKVDNITSILEKGGQFTTFIKLLKATQVADQLNNQLSTPDPNDGITVFAPSDNAFSGLKPGTLNSLSDQEKLQLVQFHILPTLMSTSQFQTASNPLRTQAGDVKGGKFPLNVTAEGNQVNVTTGVVNATVENSVFSDRRIAVYQVDKVLLPLEIFGTAPEPAPAPVVPENGGLVSSPKTPVKGADAAGAVSLKFHALAMGFSSFAVFWAIFGGF

SEQ ID NO: 62478 - protein, 126 aa, Gossypium hirsutum
  unsure (1)..(126): unsure at all Xaa locations
  Clone ID: uC-gsronu33B014f01b1.pep
EYAPPPTMKGDNITSILEKGGQFTTFIKLLKATQVADQLNNQLSTPDPNDGIXVFAPSDNAFSGLKPGTLXNSLSVQEKLQLVXFHILPTVMSTLSIFIPFLIFFCPPSLGFYSIRYFVILIFLSF

SEQ ID NO: 62479 - protein, 108 aa, Gossypium hirsutum
  Clone ID: LIB3083-104-Q1-L1-H7.pep
TQIAPAPTIKGDNITGILKKGGQYTTFIKLLKATHVADQLNSQLSTPDPNDRLTEKAPSDSSNFGLKPWTMNSLSDKENTERVQFHILPTMMKTNQTETASHPLRTQA

SEQ ID NO: 62480 - protein, 83 aa, Gossypium hirsutum
  unsure (1)..(83): unsure at all Xaa locations
  Clone ID: uC-gsronu33B014f09b1.pep
LLVIPEILGLWRRTTFIKLLKATQVADQLNNQLSTPDPNDWITVFAPSDNAFSGLKPGSLXNSLSDQEKFQLVXQFHILLTLL

SEQ ID NO: 62481 - protein, 238 aa, Gossypium hirsutum
  Clone ID: GOSHI-09MAY01-C1971_1.pep
KSSKLITKRSTPMDGQLFLIKHLLILREQIAPFDIEFSVTHKELDFSHVLEHLRRILRGQASLFDWTRSTSLARTLSPRVLESQVDAKKELEKSLKATCEEFIMAVTKQIVDPMLSFVTKVTAVKVALSSGTQNKKVDSVMAKPLKEQAFAAPEKVAELVQKVNSAIQQELPLVIAKMKLYLQNPSTRTILFKPIKTNIVEAHIQGQSLLKTEYSPDEKSTINMVNIQELGAQLDNLL

SEQ ID NO: 62482 - protein, 65 aa, Gossypium hirsutum
  Clone ID: LIB3147-010-Q1-K1-F7.pep
GASEAYSSIFPQPKHFSVIFGDIVVQSVHKVILIDKKKGYVRWFNFPNIHFGKSISFLPAPRPRA

SEQ ID NO: 62483 - protein, 116 aa, Gossypium hirsutum
  Clone ID: GOSHI-09MAY01-C1961_5.pep
MASPSPPSSIEDGRTLADYNIQKESTLHLVLRLRGGAKKRKKKTYTKPKKMKHKKKKVKLAVLQFYKVDESGKVHRLRKECPNAECGAGTFMANHFDRHYCGKGGLTYVYHKAGGD

SEQ ID NO: 62484 - protein, 156 aa, Gossypium hirsutum
  Clone ID: GOSHI-09MAY01-C1961_4.pep
MQIFVKTLTGKTITLEVESSDTIDNVKAKIQDKEGIPPDQQRLIFAPLLREDGRTLADYNIQKESTLHLVLRLRGGAKKRKKKTYTKPKKIKHKKKKVKLAVLQFYKVDESGKVQRLRKECPNAECGAGTFMANHFDRHYCGKCGLTYVYQKAGGD

SEQ ID NO: 62485 - protein, 156 aa, Gossypium hirsutum
  Clone ID: GOSHI-09MAY01-C1961_3.pep
MQIFVKTLTGKTITLEVESSDTIDNVKAKIQDGGGVPPDQQRLIFAGKQLEDGRTLPDYNIQKESTLHLVLRLRGGAKKRKKKTYTKPKKIKHKKKKVKLAVLQFYKVDESGKVQRLRKECPNAECGAGTFMANHFDRHYCGKCGLTYVYQKAGGD

SEQ ID NO: 62486 - protein, 156 aa, Gossypium hirsutum
  Clone ID: GOSHI-09MAY01-C1961_2.pep
MQIFVKTLTGKTITLEVESSDTIDNVKAKIQDKEGIPPDQQRLIFAGKQLEDGRTLADYNIQKESTLHLVLRLRGGAKKRKKKTYTKPKKIKHKKKKVKLAVLQFYKVDESGKVQRLRKECPNAECGAGTFMANHFDRHYCGKCGLTYVYQKAGGD

SEQ ID NO: 62487 - protein, 156 aa, Gossypium hirsutum; identical to SEQ ID NO: 62486
  Clone ID: GOSHI-09MAY01-C1961_1.pep

SEQ ID NO: 62488 - protein, 65 aa, Gossypium hirsutum
  unsure (1)..(65): unsure at all Xaa locations
  Clone ID: LIB3543-043-Q6-K6-F4.pep
TQQXQVKLAVLQFYKVDESGKVQRLRKXCPNAECGAXGTFMANHFDRHYCGKCGLTYVYQKAGGD

SEQ ID NO: 62489 - protein, 126 aa, Gossypium hirsutum
  Clone ID: LIB3165-014-P1-K1-B4.pep
MQIFVKALTGKTITLEVESSDTIDNVKAKIQDKEGIRPDQQRLIFAGKQLEDGRTLADYNIQKESTLHLVLRLRGGAKKRKKKTYTKPKKIKHKKKKVKLAVLQFYKVLRRERRRPTPSPRRSSTR

SEQ ID NO: 62490 - protein, 76 aa, Gossypium hirsutum
  Clone ID: LIB3148-041-Q1-K1-B3.pep
PSSNPSEILSEPIVASRFLLRQRVCDSLYNFKTNIQDKECIPPDQQHLIFAGKHLEYSRTLSHYNIQKESTLHLIL

SEQ ID NO: 62491 - protein, 131 aa, Gossypium hirsutum
  unsure (1)..(131): unsure at all Xaa locations
  Clone ID: GOSHI-09MAY01-C1911_2.pep
RVYFGAFCSGDGLKINSKFQLSVFXRTTGTSALLKLXQPKPDDFGFIDSISIEXIGGSRVTXCENQKCNKDSTVVLRGSTDSILDDLXRAVDDRLNTYKAMCRDSRMVPGAAATEIELARRLKEFSFKETG

SEQ ID NO: 62492 - protein, 463 aa, Gossypium hirsutum
  Clone ID: GOSHI-09MAY01-C1911_1.pep
AGKAQQEEIGDGANLTISFAGELLQNAEELVRTGLHPSEIISGYTKAITKTLEILEELVEKGSETMDVRNKEQVVTRMKAAGASKQHGLEDILSSLIADACIQVCPKNPANFDVDNVRVSKLVGGGLHNCTIVRGMVLKGDAVGSIKRMEKAKVAVFASGVDSSATETKGTVLIHSAEQLENYSKTEEAKVEELIKAVADSGAKVIVSGGAVGEMALHFCERYKLMVLKISSKFELRRFCRTTGTSALLKLSQPKPDDLGFVDSISVEEIGGSRVTVVRSEEGGNKIATVVLRGSTDSILDDLERAVDDGVNTYKAMCRDSRMVPGAAATEIELARRLKEFSFKETGLDQYAIAKFAESFEMVPRTLAENAGLNPMDIISKLYEKHASGNTKVGIDLGGGDSEDGVCKDVSTLNIWDLYVTKFFALKYAADAACTVLRVDQIIMAKPAGGPGRREQPAGMDED

SEQ ID NO: 62493 - protein, 76 aa, Gossypium hirsutum
  Clone ID: LIB3583-041-P1-K1-A6.pep
LAQNGKHRTITIFKTKAKLCFKGFLASPKMPNKVRTSPDEKKRKEWHIMLQIRRLSPHPFVQAALSFQDLQLVLPL

SEQ ID NO: 62494 - protein, 333 aa, Gossypium hirsutum
  Clone ID: GOSHI-09MAY01-C1901_2.pep
KLWQLSLGHTHVAEALKVPVHIFFTMPWTPTSEFPHPLSRVKQPAGYRLSYQIVDSMIWLGIRDMINDLRKKKLKLRPVTYLSGSQGSDSDVPHGYMWSPHLVPKPKDWGPKIDVVGFCFLDLATNYEPPESLVKWLEAGAEPIYIGFGSLPVQEPERMTQIIVDALEQTGQRGIINKGWGGLGSLAESKDSVYLLDNVPHDWLFLQCMAVVHHGGAGTTAAGLKAACPTTIVPFFGDQPFWGDRVHARGVGPAPIPIDEFSLPKLIDAIKFMLNPKVKERAVELAKAMENEDGVSGAVKAFFKHLPRKKPELEPSLEPPSSLFSISRCFGCS

SEQ ID NO: 62495 - protein, 105 aa, Gossypium hirsutum
  Clone ID: GOSHI-09MAY01-C1901_1.pep
CPTTIVPFFGDQPFWGERVHARGVGPPPIPVDEFSLPKLVGAIKFMLDPKVKERANELAKAMENEDGVTGAVKAFLKHLHHKKPEREPSLVQSSLFSISRCFRCS

SEQ ID NO: 62496 - protein, 201 aa, Gossypium hirsutum
  Clone ID: AI728593.1.pep
DVVGFCFLDLATNYEPPESLVKWLEAGAEPIYIGFGSLPVQEPERMTQIIVNALEQTGQRGIINKGWGGLGNLAEPKDFVYILDNVPHDWLFLRCKAVVHHGGAGTTAAGLKAAVHARGVGPPPIPVDEFSLPKLVGAIKFMLDPKVKEKAKKLAKAMENEDGVTGAVKAFLKHLNHKKPESEPSPVQSGLFSIIKCFRCS

SEQ ID NO: 62497 - protein, 110 aa, Gossypium hirsutum
  Clone ID: LIB3165-011-P1-K1-D11.pep
TTRPPTRAGDPKVLTGYMGKNKGFLPSNPSEISIQRNQMKEIIYSLLPACKEPDPDSGIPFKADAIIANPPAYGHTHVAEALKVPVHIFFTMPWTPTSEFPHPLARVKQP

SEQ ID NO: 62498 - protein, 164 aa, Gossypium hirsutum
  Clone ID: GOSHI-09MAY01-C1921_1.pep
GRVGGRVGKIAASADIPMLVCGDFNSVPGSAPHSLLPRGRVDPLHPELLVDPLAILRPHSKLTHQLPLVSAYSPFARGVGLGLEHQRRKMDITTNEPLFTNCTRDFIGTLDYIFYTADSLTVEALLELLDEDSLRKDTALPSPEWSSDHIALLAEFRFQTRPRR

SEQ ID NO: 62499 - protein, 115 aa, Gossypium hirsutum
  Clone ID: LIB3829-014-Q6-N6-G12.pep
TAGPIIFLLKGEKIMKMKRHNNDFSMKQSCVTTYYKAADHGKDPSMRCLEKQMRRHDLPILTILPFISIHQLLFSRPIFQHLNNQQSFTTPPAISCSAHTLKVSASRPRHTPKFS

SEQ ID NO: 62500 - protein, 96 aa, Gossypium hirsutum
  Clone ID: GOSHI-09MAY01-C1881_10.pep
AEDEAIALTDSSVNLENIAARIIAEVLGPERYGRVRFQGSGVTPTQYFGSGSQQYMPSGSQAQAEVQRLRDQIAQMQASPVEQIAEVQRKYEALQQ

SEQ ID NO: 62501 - protein, 115 aa, Gossypium hirsutum
  unsure (1)..(115): unsure at all Xaa locations
  Clone ID: GOSHI-09MAY01-C1881_9.pep
RVKVSRNNHGQPVGSEARLLAGYLDIISRNANMLPINYESXHHMLDSNKNQTLYNIKEIFALEVSNDYIKKALGKNWRDHKSTLKKLYLKKDISLEEKIEKCPAGNVEVPMGRCG

SEQ ID NO: 62502 - protein, 91 aa, Gossypium hirsutum
  Clone ID: GOSHI-09MAY01-C1881_7.pep
LEEKLRDVLPGMLRYQWGDAVRFWNSKKGEDRERVGTSSRQKQKFTHTAGSRNFASVAEAEEISSGKKVGCLQLFEITHKKKDRSSMTSEA

SEQ ID NO: 62503 - protein, 387 aa, Gossypium hirsutum
  unsure (1)..(387): unsure at all Xaa locations
  Clone ID: GOSHI-09MAY01-C1881_5.pep
MPRRRLRDLSIVQNTTNSEEVSTEQQTVVGSSSVLETLDESVEFQTENGRTCRGRGRTLLTDLYNLNSVERVKVTRNSHGQPVGXEARLLAGYLGIISRNANMLPINYESXHHMLDSNKNQTLYNIKERFALEVSDAYIKKALGKKWRDHKSTLKKLYFKKDISLEEKLRNVPPGMLRYQWEDAVRFWNSKKGEDRERVGTSSRQKQKFTHTAGSRSFASVAEAEEVKSGQKLDAXQLFEITHRKKDGSPMTSEAGEIMEKLKEKKAEYEATASTDSSVNLENIDNRIITEVLGPERYGRVRFQGSGVTPTQYFGSGSQQYMPSGSQAQAEVQRLRDQIAQMQANTVEQIAEVQRKYEELQQQLRAEAAEREAEQSKKYDDLQLQLQ

SEQ ID NO: 62504 - protein, 234 aa, Gossypium hirsutum
  unsure (1)..(234): unsure at all Xaa locations
  Clone ID: GOSHI-09MAY01-C1881_4.pep
MCIAGKMRRRRVRPPRPVQNTPNSKEANSEQQTVVGSSNVLETLDGPAEFQTESGGTRRGRGRTLLKDLYDLNPVERVKVSRNSHGQPVGSEARLLAGYLGIIARNANMLPINYESWHHMPDSNKNQALDNIKERFALEVSDDYIKKALGKKWRDHKSTLKKLYFKKDISLEEKLRNVPPGMLRYQWEDAVRFWNSKKGRWTVSELEQXSKQKLKFTHTVRSRSFASVAEAEVL

SEQ ID NO: 62505 - protein, 62 aa, Gossypium hirsutum
  Clone ID: GOSHI-09MAY01-C1881_2.pep
VTEFIAAKYVLYSSNFIISISSNVVSSSFPFYFLSTALSVTTRDLRNQIQTTNTTQIHRKPR

SEQ ID NO: 62506 - protein, 212 aa, Gossypium hirsutum
  Clone ID: GOSHI-09MAY01-C1881_1.pep
GINGKMRLDFGIQRKERKSNTLPRTPGQKVGRLQLFEITHRKKDGSPMTSEAGEIMEKLKEKKAEYEAIASSDSSVNLENIDNRIITEVLGPERYGRVRFQGSGVTPTQYFGSGSQQYMPSGSQAQAEVQRLRDQIAQMQANTVEQIAEVQRKYEELQQQLRAEAAEREAAAAAREAEARAMVAEQSKKYDDLQLQLQQMMHMFQQSQKPPS

SEQ ID NO: 62507 - protein, 74 aa, Gossypium hirsutum
  Clone ID: LIB3825-012-Q1-K6-F5.pep
QKARKCRNHSKEELICEYRAYNILRKFCNQNVILARHDTFHKHNFRSPQILIIHTSNMTSMHHCLFDFRSDASR

SEQ ID NO: 62508 - protein, 135 aa, Gossypium hirsutum
  unsure (1)..(135): unsure at all Xaa locations
  Clone ID: LIB3543-066-Q6-K6-A6.pep
PKTLTFSPGGCXGVPNFFPYLLHCRCHQKSSVVPPSPSPSPSKALYYIAVESPLLHHRGRGGWTIVNSNPETATSSGEIKGKRAEYEAIALSDSSINLNKIDNRIITEVLGPERYGWVQFQGSFVNPTQYFGSSS

SEQ ID NO: 62509 - protein, 64 aa, Gossypium hirsutum
  Clone ID: LIB3543-021-Q1-K1-H8.pep
GQLNPRADVCLDLEYVLVTEFIVAKYILYSSNFIIFISSNVVSSSFPSYFLSIALSITTQDLRN

SEQ ID NO: 62510 - protein, 66 aa, Gossypium hirsutum
  Clone ID: LIB3825-014-Q1-K6-F4.pep
QHFSRGSLNQFGRCTKRLSSVGIVGLGKIGSAIAKRAEAFNCSISYHSRSKKPNTKYKYYSNTKPR

SEQ ID NO: 62511 - protein, 100 aa, Gossypium hirsutum
  Clone ID: LIB3829-015-Q1-N6-H3.pep
LKIYDIINKYSLKYSYNNVKHDKVKNILTIRKLMSKMAAFAIAETSASSAETVAGGQSTFCSALLPSLLPLPLSLVPLPPSLLPLPLSLLSLPPFLLPPL

SEQ ID NO: 62512 - protein, 81 aa, Gossypium hirsutum
  Clone ID: LIB3135-029-Q1-K1-B5.pep
LEVIILFALLCCHRCCLCLLSSCLCHVCYYRCLSRCCRCLPLCCLCSKLLLEFFIFSLNLDPLLNPNAWADAWSNAWAYAW

SEQ ID NO: 62513 - protein, 86 aa, Gossypium hirsutum
  Clone ID: GOSHI-09MAY01-C1871_1.pep
FFWIAFLVFRLPIFNVCVKNLQWQYSWLYSRNRVKTEKRKYKSIGSASLLCCCCLFLCRYGAPLERWYVALDVGRTGAVCWRLLKR

SEQ ID NO: 62514 - protein, 84 aa, Gossypium hirsutum
  Clone ID: LIB3189-041-P1-K1-G1.pep
SVSLISSVRNIINDQISWLYSRRDENDKDNKKIQYSFFVFVLLCVRHFLQVWGVCGACTRAVCWHTEAMCWRLLKCWRLYDAGG

SEQ ID NO: 62515 - protein, 241 aa, Gossypium hirsutum
  unsure (1)..(241): unsure at all Xaa locations
  Clone ID: GOSHI-09MAY01-C1831_1.pep
LRIGPIKTSYRYLNLLYLHFWICAIAIAMSLLSRLRCITVDVTGTLIAYKGELGDYYCMAAKSVGLPCPDYKRVHQGFKLAYTEMVNKYPCFGFAAKMPNIVWWKTCVRDSFVRAGYEYDEETFEKIFRRIYASFGSSAPYTVFPDSQPFLRWAREKGIKVGIISNAEYRYQDVILPALGLNQGTEWDFGVFSGLEGVEKPDPRIYEIALQRAGNIAPEETLHVGDSMRKXDYVPARSGGM

SEQ ID NO: 62516 - protein, 424 aa, Gossypium hirsutum
  unsure (1)..(424): unsure at all Xaa locations
  Clone ID: GOSHI-09MAY01-C1821_1.pep
SDDGTSAEAMAESGAIEALLELLRSHQCEETAARLLEVLLNNVKIRETKVTNTAIVPLSQYLLDPQTXQAQQARLLATLALGDLFQNEALARSADAVSACRALVNVLEDQPTEEMKVVAICALQNLVMYSRSNKRAVAEAGGVQVVLDLIGSSDPDTSIQAAMFVKLLFSNNTIQEYASSETVRAITAAIEKDLWASGTVNEEYLKALNSLFSNFPRLRATEPATLSIPHLVTSLKTGSEATQEAALDGLFLLRQAWSACPAEVSRAQSVAAADAIPLLQYLIQSGPPRFQEKAEFLLQCLPGTLVVIIKRGNNMKQSVGNPSVYCKLTLGNTPPRQTKIVSTGPNPEWGESFAWTFESPPKGQKLHISCKNKSKMGKSSFGKVTIQIDRVVMLGSVAGEYTLLPQSKSGPSRNLEIEFQWSNK

SEQ ID NO: 62517 - protein, 126 aa, Gossypium hirsutum
  Clone ID: GOSHI-09MAY01-C1581_1.pep
MASVLRFRKLCYVESAVKCTSVGYESFEIDEKLDKKEEDVLSANNFALEINKKRKQPKRQPKEWRCLDSCCWIIGYLCTTWWLLLFCYHCLPVTLLRVPELPGPGVRLKREGLTALHPVVLVPGIV

SEQ ID NO: 62518 - protein, 375 aa, Gossypium hirsutum
  Clone ID: GOSHI-09MAY01-C1571_1.pep
MALISSNSYIPSFNLQIFIFLFLTAKPISSFAHSALDNNPSFDPHISLFGDARVEDGSSDVQLTRPHAPSSGLLLLDKPLKLTMENNVGQPVSFSTEFSFSIAPGNCDGLAFVLIPNGFHTRFQGQGSFGLSGENIFLGIEFDTKKDDDKAGNFNANHVSIDIHGVESVKLSNLSSLNLVLNSGNVLKSWVDYDSSSKLLQVRLSKLDENRPLNPILAYHIDLVEMWGNHDVFLGIISTTSDESSQISSNVNVHSWRFRVNVVPSWMHSLPADPRSYMDNKDSEETREEKGKFCALPILARLIFATGCGALFAFMMLVMWVIFVSRHTVFPVKYQPSHEDFRYEKVNVVVEKEDQCNKVKPWSLIKVMNRISYSC

SEQ ID NO: 62519 - protein, 101 aa, Gossypium hirsutum
  Clone ID: uC-gsflmaxxa090f02b1.pep
GGGGVSGATHDAAHFFAKPISSFAEGAFDNNRGFDPHISLFGDARVEDGSSDVQLTRPHAPSSGLLLLDKPLKLTMENNVGQPGSYSTEFYFSIAPGDCDG

SEQ ID NO: 62520 - protein, 192 aa, Gossypium hirsutum
  unsure (1)..(192): unsure at all Xaa locations
  Clone ID: GOSHI-09MAY01-C1511_2.pep
YEYGVRYVTIYASIIENIKRSPEEXVQSLMDLMLKKIQEILKKQSIVNRYGVRVIFSGNLKLFSEPVRLPAERAMLATAKNSKAVLSICVAYTSTNEIMHAVQQSCEEKWDEITLLNSSGAGYGLISLGGYQQDEMHHLIKLTDIVKHMYMAAAXDPAIINTYXSGETRLSNFLLWQSANCYLYSPSVLWPE

SEQ ID NO: 62521 - protein, 187 aa, Gossypium hirsutum
  unsure (1)..(187): unsure at all Xaa locations
  Clone ID: GOSHI-09MAY01-C1511_1.pep
MITSSSAKDPLDSRVISPNSSHYYSPDPNTPHAPARASAERAMLATAKNSNAVLSICVAYTSTNEIMHAVQESCEEKWDEITLLNSSGAGYGLISLGGYEQDEMDHLIKLTDIEKHMYMAAAPDPDIIIRTSGETRLSNFLLWQSANCYLYSPSVLWPXEIGFRQFLWPLLNFQPIHFYLDKLKKQS

SEQ ID NO: 62522 - protein, 58 aa, Gossypium hirsutum
  Clone ID: LIB3493-032-P1-M1-H7.pep
VDKLWLISLGGYEQDEMDHLIKLTDIEKHMYMGAAPDPYIIIRTSGETTLDKFFLWQN

SEQ ID NO: 62523 - protein, 180 aa, Gossypium hirsutum
  Clone ID: GOSHI-09MAY01-C1501_1.pep
MAGGGVIGVGGGGGGDGRKPYPGNLTPYVTITCIVAAMGGLIFGYDIGISGGVTTMTPFLQKFFRKVWEKKEADKSTNQYCQYDSQTLTMFTSSLYLAALLSSLVASTVTRRLGRKLSMLFGGLLFFAGALINGFAKAVWMLIVGRMLLGFGVGFANQSVPLYLSELAPYKYRGALNIGF

SEQ ID NO: 62524 - protein, 142 aa, Gossypium hirsutum
  Clone ID: GOSHI-09MAY01-C1451_15.pep
VSRNACMALHVMRCFKLEMSGGSRNSPMMTSKTWKLFLPLMHSTLPSSMDPVLAFTNIMLSQKVPKLGLLVLVLNVVLKNGGLLDVPVMVILVGSFLPLPQITRGPMISTDPPGPSNPSNSTIYPRSPLVPHNPTNARTGGM

SEQ ID NO: 62525 - protein, 61 aa, Gossypium hirsutum
  unsure (1)..(61): unsure at all Xaa locations
  Clone ID: GOSHI-09MAY01-C1451_13.pep
CTQPYRVEWTRCWHSRRSCWPIRGCGGYPWWRALRLDTGNYSWGSEAVTSXTRILDVVYNA

SEQ ID NO: 62526 - protein, 146 aa, Gossypium hirsutum
  unsure (1)..(146): unsure at all Xaa locations
  Clone ID: GOSHI-09MAY01-C1451_12.pep
RKDYFFNPGQDMTVGTSWNXLRPETVESLFYLWRLTGNKTYQEWGWNIFQACHASARIESGYVGLKDVNTGVKDNKMQSFFLAETLKYLYLLFSPPTVIPLDEWVFNTEAHPLRIVNRNDANLAALEGQHKPCDQNTKQENWSIGW

SEQ ID NO: 62527 - protein, 79 aa, Gossypium hirsutum
  Clone ID: GOSHI-09MAY01-C1451_11.pep
SCSSGCSGNCNPGGFVLPFPQIPDIPRIPEIPQIPQIPQIPQIPLIPQIPQVPQIPQVPKIPLMPGQSGCESGEWWDLC

SEQ ID NO: 62528 - protein, 178 aa, Gossypium hirsutum
  Clone ID: GOSHI-09MAY01-C1451_10.pep
GKITLVQGLALVMVTLLWTGTMAQSDCTSVLITMAPCVDYVTGTSSTPSVPCCSQLANVVQLQPHCLCMALSGGGSSLGVEVNQTLALALPQLCHVKTPPESNCKAADGPAVISISPSGSPQGLPPHSNDTPGSNSSTSGGSRTIAATASDVIFNISLQFILFLLPIALFSSTWTTIS

SEQ ID NO: 62529 - protein, 219 aa, Gossypium hirsutum
  Clone ID: GOSHI-09MAY01-C1451_9.pep
MGISRDSMHKRRATGGKKKAWRKKRKYELGRQPANTKLSSNKTVRRIRVRGGNVKWRALRLDTGNYSWGSEAVTRKTRILDVVYNASNNELVRTQTLVKSAIVQVDAAPFKQWYLQHYGVDLGRKKKTLAAATKKDGEEGETVAEEAKKSKHVLRKLEKRQQNRKLDPHIEDQFSSGRLLACISSRPGQCGRADGYILEGKELEFYMKKIQRRKGKGAA

SEQ ID NO: 62530 - protein, 216 aa, Gossypium hirsutum
  Clone ID: GOSHI-09MAY01-C1451_8.pep
MGISRDSMHKRRATGGKKKAWRKKRKYELGRQPANTKLSSNKTVRRIRVRGGNVKWRALRLDTGNYSWGSEAMTRKTRILDVVYNASNNELVRTQTLVKSAIVQVDAAPFKQWYLQHYGVDIGRKKKTAAKKEGEEGETGTEEVKKSNHVLRKLEKRQQNRKLDPHIEDQFASGRLLACISSRPGQCGRADGYILEGKELEFYMKKIQRKKGKGAA

SEQ ID NO: 62531 - protein, 217 aa, Gossypium hirsutum
  Clone ID: GOSHI-09MAY01-C1451_7.pep
MGISRDSMHKRRATGGKKKAWRKKRKYELGRQPANTKLSSNKTVRRIRVRGGNVKWRALRLDTGNYSWGSEAVTRKTRILDVVYNASNNELVRTQTLVKSAIVQVDAAPFKQWYLQHYGIDIGRKKKSAAAKKEGEEGETATEEVKKSNHVLRKLEKRQQNRALDPHIEEQFGSGRLLACISSRPGQCGRADGYILEGKELEFYMKKIQRKKGKGAA

SEQ ID NO: 62532 - protein, 218 aa, Gossypium hirsutum
  Clone ID: GOSHI-09MAY01-C1451_5.pep
MGISRDSMHKRRATGGKKKAWRKKRKYELGRQPANTKLSSNKTVRRIRVRGGNVKWRALRLDTGNYSWGSEAVTRKTRILDVVYNASNNELVRTQTLVKSAIVQVDAAPFKQWYLQHYGVDIGRKKKAAAGAKKEGEEGETATEEVKKSNHVLRKLEKRQQSRTLDPHIEEQFGSGRLLACISSRPGQCGRADGYILEGKELEFYMKKMQRKRGKGAA

SEQ ID NO: 62533 - protein, 429 aa, Gossypium hirsutum
  Clone ID: GOSHI-09MAY01-C1451_4.pep
MSSSEEPFSQVQARLAVLAAHLAAPDCSSNNLNSSVLEPWCVSAQNGGSVGLSLTIIDERTGKKYQVPVSSEGTIRATDLKKITTGKGDKGLKVYDPGYLNTAPVRSSISYIDGDEGILRYRGYPIEELAESSTFLEVAYLLMYGNLPSESQLADWEFAVSQHSAVPQGILDIIQSMPHDAHPMGVLVSAMSALSVFHPDANPALRGQEIYKSKQVRDKQIARIIGKAPTIAAAAYLRMAGRPPVLPSSTLSYAENFLYMLDSMGNRSYKPNPRGARRLATLFILHAEHEMNCSTAAARHLASGGVDVYTALAGAVGALYGPLHGGANEAVLKMLGEIGTLENIPEFIEGVKNRKRKMSGFGHRVYKNYDPRAKVIKKLAEEVFSIGGRDPLIEVAISLEKAALSDEYFIKRKLYPNVDFYSGLIYRAM

SEQ ID NO: 62534 - protein, 140 aa, Gossypium hirsutum
  Clone ID: GOSHI-09MAY01-C1451_3.pep
RAKVIKKLAEEVFSIVGRDPLIEVAISLEKAALSDEYFIKRKLYPNVDFYSGLIYRAMGFPPEFFTVLFAIPRMAGYLAHWRESLDDPDTKIIRPQQVYTGVWLRHYMPLKERMALNDADKLTQVSISNASRRRLAGSGV

SEQ ID NO: 62535 - protein, 203 aa, Gossypium hirsutum
  Clone ID: GOSHI-09MAY01-C1451_2.pep
MASVIKSAILILSVFLSVRFSSGVRLLQEQPNDDPKNMDAIPPIDALNPTELNGPGVGIHEDHVVPKGAEIGTLGFGFEGGPDKCCSSGCSGNCNPGGFVLPFPQIPEIPRIPEIPQIPQIPQIPQIPLIPQIPQVPQIPQVPKIPLMPGQSGCESGECCRQGCGGTCAECGQPRCASGCCQAETVKSKGIEEVMDSEPSPPK

SEQ ID NO: 62536 - protein, 215 aa, Gossypium hirsutum
  Clone ID: GOSHI-09MAY01-C1451_1.pep
NTIQSNEWIATFAPFKKKKREMASVIKSAILILSVFLSVRFSSGVRLLQEQPNDDPKNMDAIPPIDALNPTELNGPGVGIHEDHVVPKGSEIGTLGFGFEGGPEKCCSSGCSGNCNPGGFVLPFPQIPEIPRIPQIPQIPQIPQIPLIPQIPQVPQIPLMPGQSGCESGECCRQGCGGTCAECGQPRCASGCCQAETVKSKGIEEVMDSEPSPPK

SEQ ID NO: 62537 - protein, 81 aa, Gossypium hirsutum
  Clone ID: LIB3146-033-Q1-K1-A5.pep
IAQKVAISLEKAALSDEYFIKRKLYPNVDFYFGLIYRAMGFPPEFFTVLFAIPRMAGYLAHWHESLDDPDTKIIRPQQQKL

SEQ ID NO: 62538 - protein, 152 aa, Gossypium hirsutum
  Clone ID: LIB3829-036-Q1-K6-F2.pep
MFKGGNVKWRALRLDTGNYSWGSEAVTCKTRILDVVYNASNNELVRTQTLVKSAIVQVDAAPFKQWYLQHYGVDIGRKKKAAAGAKKEGEEGETATEEVKKSSHVLRKLEKRQQSRTLDPHIEEQFGSGRLLACISSRPGQCGRADGYILEG

SEQ ID NO: 62539 - protein, 81 aa, Gossypium hirsutum
  Clone ID: LIB3825-029-Q6-N6-B2.pep
EGETATEEVKKSSHVLRKLEKRQQSRTLDPHIEEQFGSGRLLACISSRPGQCGRADGYILEGKELEFYMKKMQRKRGKGAA

SEQ ID NO: 62540 - protein, 124 aa, Gossypium hirsutum
  unsure (1)..(124): unsure at all Xaa locations
  Clone ID: uC-gsflmaxxa096g04b1.pep
AVLPCHLAAPDCSCNNLDACALEPWCVSAQNGGSVGLSLTIIDEXRTGKKYQVPVSSEGTITASDFKKMTTGKGDKGLKVYDPGYLNTAPVRSFISYIDCDEGILRYRGYPIEELAESSIFLEG

SEQ ID NO: 62541 - protein, 112 aa, Gossypium hirsutum
  Clone ID: LIB3166-028-P1-K1-C5.pep
TFSAVKRRISRGSMHKRRATGGKKKAWRKKRKYELGRQPANTKLSSNKTVRRIRVRGGNVKWRALRLDTGNYSWGSEAVTRKTRILDVVYNASNNELVRTQTLVKSAIVQVD

SEQ ID NO: 62542 - protein, 63 aa, Gossypium hirsutum
  unsure (1)..(63): unsure at all Xaa locations
  Clone ID: LIB3148-042-Q1-K1-F6.pep
MGISRHSMHKRRATGGKKKAWRKKRKYELGRQPANTKLSINKTVRRIRVXSGNVKWRALRLDT

SEQ ID NO: 62543 - protein, 71 aa, Gossypium hirsutum
  Clone ID: LIB3493-003-P1-M1-C12.pep
MQSFFLAETLKYLYLVFSPPTVIPLDEWVFNTEAHPLRIVNRNDANLAALEGQHKPVIKIRSRKTGRLGGN

SEQ ID NO: 62544 - protein, 104 aa, Gossypium hirsutum
  Clone ID: uC-gsronu33B149f05b1.pep
YSSAHASAHACAHSSAATKKEGEEGETVAEEAKKSNHVLRKLEKRQQNRKLDPHIEDQFSSGRLLACISSRPGQCGRADGYILEGKELEFYMKKIQRRKGKGAA

SEQ ID NO: 62545 - protein, 80 aa, Gossypium hirsutum
  Clone ID: uC-gsflmaxxa098a06b1.pep
HASAHTSTHPCGAFSPPMGVTNLILSVLLSERFTSISHVASRNNPMMTPKTWTLFLPLMHSTLPNRMDPPLAFTNIMLSQ

SEQ ID NO: 62546 - protein, 108 aa, Gossypium hirsutum
  Clone ID: LIB3146-044-Q1-K1-H2.pep
RTRGRTRGRTRGEIPRIPEIRQRPQIPQIPQIPLIPQIPQVPQIPQVPKIPLMPGQSGCESGECCRQGCGGTCAECGQPRCASGCCQAETVKSKGIEEVMDSEPSPPK

SEQ ID NO: 62547 - protein, 59 aa, Gossypium hirsutum
  Clone ID: LIB3493-049-P1-M1-A4.pep
GSACFYLESSLRVLGCSSNSPIMTSKTWTLFLPLMHSTLPTSMYPMLTFTKIILFQKKP

SEQ ID NO: 62548 - protein, 32 aa, Gossypium hirsutum
  Clone ID: LIB3145-028-Q1-K1-B6.pep
LLKNLLHEFSAFISECRPEFLPFTFPEHLKLC

SEQ ID NO: 62549 - protein, 205 aa, Gossypium hirsutum
  unsure (1)..(205): unsure at all Xaa locations
  Clone ID: GOSHI-09MAY01-C1441_1.pep
MKNTVPSASPCSSKSLPPTPPPPYQSPLFTPTQECEREEQEEGTPSVTTDKGLTPKHLPTPLHDKTTRKPNARKRSESGGGDGDGSVSCNKCRPNSREKISVVPLDNNNGVNKHSFSMPSPNGIFKSIFHSLTRKSPKSTDMSTDREEQWKIAAAELSHKLIQATRKRDEALXEASRLKYSMAEXLEKKLNKLWSLLATNLEVWF

SEQ ID NO: 62550 - protein, 105 aa, Gossypium hirsutum
  unsure (1)..(105): unsure at all Xaa locations
  Clone ID: GOSHI-09MAY01-C1471_1.pep
MSRGGSYGGGQSSLGYLFGDDEQQSAPTVTPPIQPPYGIDVTAEMPPAPSKSSSKNQEEKNFSNTNNYXRAQGQNSGNFITDRPSTKVKSVPGGDSSLGYLFGEK

SEQ ID NO: 62551 - protein, 105 aa, Gossypium hirsutum
  Clone ID: LIB3585-024-P1-K1-D6.pep
MSRGGSYGGGQSSLGYLFGDDEQQSAPTVAPPIQPSYGIDVTAEMPPAPNKSSSKNQKEKNFSNTNNYHRAQGQNSGNFITDRPSTKVKSVPGGDSSLGYLFGEK

SEQ ID NO: 62552 - protein, 176 aa, Gossypium hirsutum
  Clone ID: GOSHI-09MAY01-C1411_1.pep
ASSHGVGFVADIRRMNVALTRARRALWVMGNASALVQSDDWAALIADAKARNCYMDMDSLPKDFTKDLLPKEFSGPRGLYSPSQGKASNMRGLRSAGPRHRSLDMHMESRSGTPSEDEDKSGTTVISRNGNYRPFKSPLDTFLDDFHPSGDKSREAWQYGILKKQNSAGTMGKRES

SEQ ID NO: 62553 - protein, 145 aa, Gossypium hirsutum
  unsure (1)..(145): unsure at all Xaa locations
  Clone ID: LIB3585-023-P1-K1-G1.pep
DIYINTVDAFQGQERDVIIMSCVRASSHGVGFVADIRRMNVALTRARRAXWVMGNASALVQSDDWAALIADAKARNCYMDMDSLPKDFTKDLLPKEFSGPRGLYSPSQXSGTPSEDEDKSGTTVISRNGNYRPFKSPLDTFLDDF

SEQ ID NO: 62554 - protein, 193 aa, Gossypium hirsutum
  unsure (1)..(193): unsure at all Xaa locations
  Clone ID: GOSHI-09MAY01-C1401_4.pep
PRPRVPPPVRIVLRRKLQLMMYNXMYRIMFDRRFESEDDPLFVKLKALNGERSRLAQSFEYNYGDFIPILRPFLRGYLKLCKEVKEIRLQLFRDQFLEERKKLATTKRIDNNALKCAIDHILDAQRKGEINEDNVLYIVENINVAAIETTLWSIEWGIAELVNHPEIQQKLRNEIDTVLRPGVQVTEPDTHKL

SEQ ID NO: 62555 - protein, 311 aa, Gossypium hirsutum
  Clone ID: GOSHI-09MAY01-C1401_3.pep
MDLLFLEKVLISLFFTIIFAILVSKLRGKRFKLPPGPLPIPVFGNWLQVGDDLNHRNLTDLAKKFGDIFLLRMGQRNLVVVSSPELAKEVLHTQGVEFGSRTRNVVFDIFTGKGQDMVFTVYGEHWRKMRRIMTVPFFTNKVVQQYRHGWEAEVASVVEDVKKNPEAATNGIVLRRRLQLMMYNNMYRIMFDRRFESEDDPLFVKLKALNGERSRLAQSFEYNYGDFIPILRPFLRGYLKLCKEVKEMRLQLFRDHFLEERKKLASTKRTDNNALKCAIDHILDAQRKGEINEDNVLYMAEIMCCMKQLCQ

SEQ ID NO: 62556 - protein, 322 aa, Gossypium hirsutum
  Clone ID: GOSHI-09MAY01-C1401_1.pep
MHSQGSYSLQGCHTWVDPLFAKLKALNGERSRLAQSFEYNYGDFIPILRPFLRGYLKLCKEVKEIRLQLFRDQFLEERKKLATTKRIDNNALKCAIDHILDAQRKGEINEDNVLYIVENINVAAIETTLWSIEWGIAELVNHPEIQQKLRNEIDTVLGPGVQVTEPDTHKLPYLQAVIKETLRLRMAIPLLVPHMNLHDAKLGGYDIPAESKILVNAWWLANNPAHWKNPEEFRPERFFEEESKVEANGNDFRYLPFGVGRRSCPGIILALPILGITLGRLVQNFELLPPKGQSKLDTSEKGGQFSLHILKHSTIVAKPRMI

SEQ ID NO: 62557 - protein, 175 aa, Gossypium hirsutum
  unsure (1)..(175): unsure at all Xaa locations
  Clone ID: LIB3831-001-Q1-K6-D5.pep
LHTAIETTLWSIEWGIAELVNHPEIQQKLRNEIDTVLGPGVQVTEPDTHKLPYLQAVIKETLRLRMAIPLLVPHMNLHDAKLGGYDIPAESKILVNAWWLANNPAHWKNPEEFRPERFFEEESKVEANGNDFRYLPFGVGRRSCPGIILALPIXGITLXRLVXDXELLPXKGQSK

SEQ ID NO: 62558 - protein, 73 aa, Gossypium hirsutum
  unsure (1)..(73): unsure at all Xaa locations
  Clone ID: LIB3493-039-P1-M1-B6.pep
GTLMLYKSMLMLVPHMNLHDAKLGGYDIPAESKILVNAWWLANNPAHWKNPEEXRPERFFEEESKVEANGNDF

SEQ ID NO: 62559 - protein, 206 aa, Gossypium hirsutum
  Clone ID: GOSHI-09MAY01-C1421_1.pep
GRVGPLSKIPQRLRSPSRAATTNPTKSPSHFSFSSFKDIDAILKEEEEQQVLYPQSPKRPSIFHRVKLSTTVLRAWSSSNRRPLTLPNADQRVVVYLTSLRVVRKTFEDCKTVRSILRGLNVPIDERDVSLDSSFLDELQGTIGRNKSFTLPLVFIGGTYIGRAEEVKRLHECGELKKMIGGLPSVVGSSVCNLCEGLRFILCPQW

SEQ ID NO: 62560 - protein, 76 aa, Gossypium hirsutum
  Clone ID: GOSHI-09MAY01-C1791_1.pep
NIRAFISDAKRMRRNFISCRFQHASRQANLVAYSLAIEGLKYRENTHLNMIGPSVVVRVDANDRNGVTEGSRGVRT

SEQ ID NO: 62561 - protein, 50 aa, Gossypium hirsutum
  Clone ID: GOSHI-09MAY01-C1781_7.pep
RPPPQRKKDTYVPIQIGNLSTAIIKFLFSNNPIKELKKLNNKSYNPKLFA

SEQ ID NO: 62562 - protein, 115 aa, Gossypium hirsutum
  unsure (1)..(115): unsure at all Xaa locations
  Clone ID: GOSHI-09MAY01-C1781_6.pep
MSSAGEAACSYAALILYDDGIPITAEKIATLVKAANVSVESYWPSLFAKLFEKCNIEDLITNVGAAGAGAAVAAAAPVAAGAGGGAXAASPPAEXRKIGEPEEESDDDMGFSLFD

SEQ ID NO: 62563 - protein, 114 aa, Gossypium hirsutum
  Clone ID: GOSHI-09MAY01-C1781_4.pep
MSSVGEAACSYAASMLHDDGIPITAEKIAALVKAANVSVESYWPSLFAKPFEKCDIENLITNVGAAAGGAPVAAAAPVAAAGGGGPAAPAPAEEKKKEEPEEESDDDMGFSLFD

SEQ ID NO: 62564 - protein, 89 aa, Gossypium hirsutum
  Clone ID: GOSHI-09MAY01-C1781_3.pep
AEKISTLVKAANVSVESYWPSLFAKLFEKCNIEDLITNVGAGGGGAPVAAAAPVAAGGGAGAAAPPPAEEKKEEPEEESDDDMGFSLFD

SEQ ID NO: 62565 - protein, 114 aa, Gossypium hirsutum
  Clone ID: GOSHI-09MAY01-C1781_2.pep
MSTAGEAACSYAALILYDDGIPITAEKIATIVKAANVSVESYWPSLFAKLFEKCNIEDLITNVGAGGAGAPVAAAAPVAAGGGGGAAAPPPAEEKKKEEPEEESDDDMGFSLFD

SEQ ID NO: 62566 - protein, 113 aa, Gossypium hirsutum
  Clone ID: GOSHI-09MAY01-C1781_1.pep
MSTVGEAACSYAALILYDDGIPITAEKISTLVKAANVSVESYWPSLFAKLFEKCNIEDLITNVGAGGGGAPVAAAAPVAAGGGAGAAAPPPAEEKKEEPEEESDDDMGFSLFD

SEQ ID NO: 62567 - protein, 90 aa, Gossypium hirsutum
  unsure (1)..(90): unsure at all Xaa locations
  Clone ID: uC-gsronu33B110a03b1.pep
AEKIATLVKAANVSVESYWPSLFAKLFEKCNIEDLITNVGAAGAGAPVAAAAPVAAGLVGXAAAPPPAEETKKEEPEEESDDDMGFSLFD

SEQ ID NO: 62568 - protein, 44 aa, Gossypium hirsutum
  Clone ID: uC-gsflnu33B071a09b1.pep
FPRVRGGEFEEDLLLRKRRRKNRRKRVMTIWDSVCSIRCVLVNY

SEQ ID NO: 62569 - protein, 228 aa, Gossypium hirsutum
  Clone ID: GOSHI-09MAY01-C1751_1.pep
MEIDPKPDSENDALVLVKQGAEARVFESVFAGKRSIIKERFSKKYRHPALDSKLTLKRLNAEARCMTKARRLGVLTPVLYAVDPVIHTLTFEYVEGPSVKDVFLGIGSTGVFQERLTDIATQIGDAIGKLHDGGLVHGDLTTSNMLIRNGTNKLALIDFGLSFTSPLPGDKAGDLYVLERPLISMHSSCGNVMELILAASKKSSNQWFSPLTKLAQVRQRGPKRPMVG

SEQ ID NO: 62570 - protein, 193 aa, Gossypium hirsutum
  Clone ID: GOSHI-09MAY01-C1761_1.pep
MGCCQSSFQTETHPEKDQTQQQQEPQNLSQSSPGAVPDPAVANGVPSFSEFSLADLKAATNNFSSDNIVSESGEKAPNLVYKGRLKNRKWIAVKKFTKMAWPDPKQFAEEAWGVGKLRHKRLANLIGYCCDGDERLLVAEYMINDTLAKHLFHWENQTIEWAMRLRVASCIAEALDYWSSEGHPLYHDLNAYR

SEQ ID NO: 62571 - protein, 102 aa, Gossypium hirsutum
  Clone ID: LIB3582-050-P1-K1-A8.pep
MGCCQSSFQTEGHPEKDQTQQQQEPQNLSQSSPGAVADPAVTNGVPSFSEFSLADLKAATNNFSSDNIVSESGEKAPNLVYKGRLKNRKWIAVKKFTKSGWA

SEQ ID NO: 62572 - protein, 43 aa, Gossypium hirsutum
  Clone ID: GOSHI-09MAY01-C1711_12.pep
MFFKIFDHLIICVLKMLHKVYPLFLTLLHFIYAFHSFEFYRQK

SEQ ID NO: 62573 - protein, 103 aa, Gossypium hirsutum
  Clone ID: GOSHI-09MAY01-C1711_6.pep
GDMDQNTRDVIMREFRSGSSRVLITTDLLARGIDVQQVSLVINYDLPTQPENYLPRIGRSGRFGRKGVAINFVTVDDERMLFDIQKFYNVVIEELPSNVADLL

SEQ ID NO: 62574 - protein, 191 aa, Gossypium hirsutum
  unsure (1)..(191): unsure at all Xaa locations
  Clone ID: GOSHI-09MAY01-C1711_5.pep
LFSLALEITWKRVLKPVRVFYKRYXLTLXGIKQFYVIVEXEEWKLVTLCDLYETLAITQSVIFVNTRRMVDWLTDKMRSPHLTVSATHGDMDQNTRDVIMREFRSGSSRVLITTDLLARGIDVQQVSLVINYDLPTQPENYLHRIGRSGRFGRKGVAINFVTTDDERMLFDIQKFYNVVIEELPSNVADLL

SEQ ID NO: 62575 - protein, 131 aa, Gossypium hirsutum
  Clone ID: GOSHI-09MAY01-C1711_4.pep
MAGLAPEGSQFDARQYDQKMTELLQTDGDDFFTSYDEVYDSFDAMGLQENLLRGIYAYGFEKPSAIQQRGIVPFCKGLDVIQQAQSGTGKTATFCSGILQQLDYAMVQCQALVLAPTRELAQQIEKVMRAL

SEQ ID NO: 62576 - protein, 125 aa, Gossypium hirsutum
  Clone ID: GOSHI-09MAY01-C1711_3.pep
MAGVAPEGSQFDARQFDQKMSDLLQTDGDDVFTSYDEVYDSFDAMGLQENLLRGIYAYGFEKPSAIQQRGIVPFCKGLDVIQQAQSGTGKTATFCSGILQQLDYGIVQCQALVLAPTRELAQQIE

SEQ ID NO: 62577 - protein, 251 aa, Gossypium hirsutum
  unsure (1)..(251): unsure at all Xaa locations
  Clone ID: GOSHI-09MAY01-C1711_2.pep
AKEGIVPNFARGLGCEFNRPNPGPGKTATFCSGFSNXLDYAVVQCQALXLAPTRELHNRLXEVMRALGDYLGVKVHACVGGTSVREDQRILQSGVHVVVGTPGRVFDMLRRQSLRPDYIKMFVLDEADEMLSRGFKDQIYDIFQLLPGKIQVGVFSATMPPEALEITRKFMNKPVRILVKRDELTLEGIKQFYVNVEKEEWKLETLCDLYETLAITQXVIFVNTRRKVDWLTDKMRSRXHTVSAXHGDMAK

SEQ ID NO: 62578 - protein, 413 aa, Gossypium hirsutum
  Clone ID: GOSHI-09MAY01-C1711_1.pep
MAGLAPEGSQFDARQYDQKMTELLQTDGDDFFTSYDEVYDSFDAMGLQENLLRGIYAYGFEKPSAIQQRGIVPFCKGLDVIQQAQSGTGKTATFCSGILQQLDYAIVQCQALVLAPTRELAQQIEKVMRALGDYLGVKVHACVGGTSVREDQRILQSGVHVVVGTPGRVFDMLRRQSLRPDYIKMFVLDEADEMLSRGFKDQIYDIFQLLPAKIQVGVFSATMPPEALEITRKFMNKPVRILVKRDELTLEGIKQFYVNVEKEEWKLETLCDLYETLAITQSVIFVNTRRKVDWLTDKMRSRDHTVSATHGDMDQNTRDIIMREFRSGSSRVLITTDLLARGIDVQQVSLVINYDLPTQPENYLHRIGRSGRFGRKGVAINFVTNDDERMLYDIQKFYNVIIEELPSNVADLL

SEQ ID NO: 62579 - protein, 147 aa, Gossypium hirsutum
  unsure (1)..(147): unsure at all Xaa locations
  Clone ID: LIB3584-007-P1-K1-A11.pep
ETGGGGYETLAITQSVIFVNTRRKVDWLTDKMRSRDHTVSATHGDMDQNTREGXGGEFLSGSSRVLITTDLLARGIDVQQVSLVINYDLPTQPENYLHRIGRSGRFGRKGVAINFVTTDDERMLFDIQKFYIVVIEELPSNVADLLC

SEQ ID NO: 62580 - protein, 149 aa, Gossypium hirsutum
  Clone ID: LIB3585-067-P1-K1-H12.pep
GRVGGRVGGRVGFDMLRRQSLRPDYIKMFVLDEADEMLSRGFKDQIYDIFQLLPAKIQVGVFSATMPPEALEITRKFMNKPVRILVKRDELTLEGIKQFYVNVEKEEWKLETLCDLYETLAITQSVIFVNTRRKVDWLTDKMRSRDHTV

SEQ ID NO: 62581 - protein, 134 aa, Gossypium hirsutum
  Clone ID: uC-gsflmaxxa009f09b1.pep
LLLFILVFSLSTPRHRSEELGKTLTQILYLNLNRASLQKRLLTWHIDKIHSEASVEKNAKEIKDYIEEIYWGSKKRVLLLGHSKGGVDAAAALSIYWSDLKDKVAGLAIAQSPYGGSPIASDILREGQLGDYGN

SEQ ID NO: 62582 - protein, 58 aa, Gossypium hirsutum
  Clone ID: uC-gsflmaxxa009e01b1.pep
MAGVAPEGSQFDARQFDQKMSDLLQTDGDDVFTSYDEVYDSFDAMGLQENLLRGIYAY

SEQ ID NO: 62583 - protein, 41 aa, Gossypium hirsutum
  Clone ID: LIB3197-005-P1-M1-B10.pep
ILTNNVSKKDYPFCPFTLLIQQIRHHIPKYIRFFYILAFFI

SEQ ID NO: 62584 - protein, 301 aa, Gossypium hirsutum
  unsure (1)..(301): unsure at all Xaa locations
  Clone ID: GOSHI-09MAY01-C1691_2.pep
GSSTEKKQAAAMLPVVQKQHQLLVTLLLCXAAAMEALPIXLDKLFNQYVAIILSVTFVLAFGEVIPQAICTRYGLAVGANLAGLVWILMIICYPIAYPIGKVLDWVLGHNEALFRRAQLKALVSIHSQEAGKGGELTHDETTIISGALDLTEKTAEEAMTPIESTFSLDVNSKLDWEXMGKILARGHSRVPVYSGNPKNIIGLLLVKSLLTVRPETETPVSAVSIRRIPRVPSDMPLYDILNEFQKGSSHMAAVVRGNSKNASATVDGEKSEENNRVSNAAESQLTTPLLPKQDEKPESGT

SEQ ID NO: 62585 - protein, 352 aa, Gossypium hirsutum
  Clone ID: GOSHI-09MAY01-C1691_1.pep
MHPINAVLAARMLFNTAASVSESVGEGIPFGSPWWFIYAGISCFLVLFAGMMSGLTLGLMSLGLVELEILQRSGTFTEKKQAAAILPVVQKQHQLLVTLLPCNAAAMEVLDWVLGHNEALFRRAQLKALVSIHSQEAGKGGELTHDETTIISGALDLTEKTAEEAMTPIESTFSLDVNSKLDWEAMGKILARGHSRVPVYSGNPKNIIGLLLVKSLLTVRPETETPVSAVSIRRIPRVPADMPLYDILNEFQKGSSHMAAVVKAKGKNKNLPPTVDGLKSEENKVSSADTQLTTPLLSKLDEKPESIVVDVDKLSRPTNTSRLDAVTNGLSVTSEDIEDGEVIGIITLEDVF

SEQ ID NO: 62586 - protein, 66 aa, Gossypium hirsutum
  Clone ID: LIB3166-043-P1-K1-D8.pep
STEVIYVFQVLDWVLGHNEALFRRAQLKALVSIHSQEAGKGGELTHDETTIISGALDLTEKTAEEA

SEQ ID NO: 62587 - protein, 223 aa, Gossypium hirsutum
  Clone ID: GOSHI-09MAY01-C1641_2.pep
PRVRIVCEYVQSYVYNEPFNAEPPRSALVSSYVTPVELFFKRNHGPIPLVDDIERYCVDINGLIETPKKLYFRDIRMLPKYNVTATLQCAGNRRTAMSITRKVKGVGWDVSAIGNAVWGGAKLADILELIGVPKLTSCTQSGGKHIEFVSVDKCEEENGGPYKASIPLSQATNPEADVLLAYEMNGEVSNFSLMIIFFPTLGKTRTQTELNKYAKMVASFIKI

SEQ ID NO: 62588 - protein, 301 aa, Gossypium hirsutum
  unsure (1)..(301): unsure at all Xaa locations
  Clone ID: GOSHI-09MAY01-C1641_1.pep
MPGIKGPSDYSQEPPRHPSLQINSKVPFNAEPPRSALASSYVTPVDLFYKRNHGPIPLVDDIERYCVDICGLIGTPKKLYMRDVRMLPKYNVTATLQCAGNRRTAMSKTRKVRGVGWDVSAIGNAVWGGAKLADVLELIGIPKLTCSTQSGGKHVEFVSIDKCKEENGGPYKASIPLSQATNPEADVLLAYEMNGESLXRDHGYPLRVIVPGVIGARSVKWLDSINIXIQKNCQGFFMQKDYKMLPPSVDWGIINWNTMKPQMDFPVQSVICSLEDMHSIKPGMVRISGYAVXSGGGCGIE

SEQ ID NO: 62589 - protein, 143 aa, Gossypium hirsutum
  Clone ID: LIB3582-009-P1-K1-C11.pep
HASAHASGGPSDYSQEPSRHPCLHINAKEPFNAEPPRSALVSSYVTPVELFFKRNHGPIPLVDDIERYCVDISGLIETPKKLYFRDIRMLPKYNVTATLQCAGNRRTAMSITRKVKGVGWDVSAIGNAVWGGAKLADILELIG

SEQ ID NO: 62590 - protein, 112 aa, Gossypium hirsutum
  unsure (1)..(112): unsure at all Xaa locations
  Clone ID: LIB3583-042-Q6-K7-D5.pep
VIVPGVIGARSVKWLDSINIIAEECQGFFMQKDYKMFPPSVDWGNISWNTRKPQMDFPVQSVICSLEDAQSIKPGKVRISGYAVLGGXRGIERVDYXIDGGKNGGRGVGFRK

SEQ ID NO: 62591 - protein, 195 aa, Gossypium hirsutum
  unsure (1)..(195): unsure at all Xaa locations
  Clone ID: GOSHI-09MAY01-C1671_1.pep
MENFSYSSYPESGDSSPRSREIEXENQSWDESPSLNATNNNVNYKVKFMCSYGGKIQPRSHDNQLAYVGGDTKILVVDRNIKFSAIMAKLSSLYGGDSEVCFKYQLPGEDLDALISVTSDEDLEHMMMEYDRLHRSFAKPARLRLFLFPLNSPLVASGFEGSEPKSDRQWFIDALNSVQIQNLDASSPPTVAVLA

SEQ ID NO: 62592 - protein, 68 aa, Gossypium hirsutum
  Clone ID: GOSHI-09MAY01-C1661_2.pep
LPQQENSFDCGLFLLHYLELFLAEAPSNFNPFKITKFSNFLNLDWFPPTEASKSWCSSERVRCGFQNG

SEQ ID NO: 62593 - protein, 276 aa, Gossypium hirsutum
  Clone ID: GOSHI-09MAY01-C1661_1.pep
VIENNPIEDSVVLIEKRDTDQEQSESVENVECLKKGFMPASIEVLETSITDVPGASEDTDKIHDKTGDADLPSKAHSSVVLHQNPGAAVNELDVDPEMVENMESQDNKTVSSDQTLGTVLNQLDRDSNLIENEASCDEVQTIIDDLPSKDNSMLLSDQNPSMVAEALNQDSEVAENKEAIVNDSLAELSEQPAAKRMQQLNQDSEVAENKEAIVNDSLAELSEQPAAKRMQQLNQDSEVAENKEAIIVNDSLAELSEQPAAKRMRLSPSLEEEVDS

SEQ ID NO: 62594 - protein, 158 aa, Gossypium hirsutum
  Clone ID: LIB3543-022-Q1-K1-C8.pep
PRVRRFVSLELPQQENSFDCGLFLLHYLELFLAEAPSNFNPFKITKFSNFLNLDWFPPTEASLKRTLIQKLIFELLEIRSREMSSSDCSDEPHSSRFPEEIENGGVEFVPKSVSPEVACHGNLNSQASQGIEMTLLASSSMRNVETVNDSGLVLREFF

SEQ ID NO: 62595 - protein, 196 aa, Gossypium hirsutum
  Clone ID: GOSHI-09MAY01-C1611_1.pep
PKNHKKINRPPTEKIQLTDRLTEFGRLTEFFRFYPNYAHPYAVEPHDDLLAWSGEPSGEYAVRSAYKLLQSLDEDPRAYELQTDYKSFYKKLWLLNLPSKIKITVWKVTWNYLPLRANMQQRRLTNITICPRCGSGTQTMNHLFRECPVSVSVWGELACQIFLSEYNLEFPEWLVWVFEQSNPVQCRVFCCTLWAI

SEQ ID NO: 62596 - protein, 72 aa, Gossypium hirsutum
  Clone ID: uC-gsflnu33B146a02b1.pep
QTLQFAQGVGVGQRMMNHLFIECPVSVSVWGELACQIFLSEYNLEFPEWLVWVFEQSNTVKCRIFCCTLWSM

SEQ ID NO: 62597 - protein, 63 aa, Gossypium hirsutum
  Clone ID: LIB3196-030-P1-M1-G3.pep
RLWKKELIESTFPEEVADRILRIPLAVEPHDDLLAWSGEPSGEYTVRSAYKLLQSLDEDPRAY

SEQ ID NO: 62598 - protein, 244 aa, Gossypium hirsutum
  Clone ID: GOSHI-09MAY01-C1631_1.pep
MATNSMNLEDIPSESVMSELLRRMKCASKPDKRLILIGPPGSGKGTQSPIIKDEYCLCHLATGDMLRAAVAAKTPLGIKAKEAMDKGELVSDDLVVGIIDEAMKKPSCKKGFILDGFPRTVGQAQKLDDMLGKQGVKIDKVLDFAIDDAVLEERITGRWIHPASGRTYHTKFAPPKVPGLDDVTGEPLVQRKDDTAAVLKSRLDAFHKQTQPVIDYYSEKGIVAKLHAEKPQKEVTDEVKKVLS

SEQ ID NO: 62599 - protein, 210 aa, Gossypium hirsutum
  Clone ID: GOSHI-09MAY01-C1621_1.pep
GSYLNDDDFNDLHDHDDTDDDDDEGEYDGTDAGDVDAFDFHDHSEDGEDDNDASVELDPADFSSDEAYARALQDAEEREVAARLLALAGINDGGTVTLEDHGHGGNSQDTWEEVDPDELSYEELLALAEVVGTESRGLSADSIASLPSLIFKAGNSQTGTNDSCVICRVDYEDGDSLTALSCKHSYHPECINNWLKINKVCPVCSAQVST

SEQ ID NO: 62600 - protein, 226 aa, Gossypium hirsutum
  Clone ID: GOSHI-09MAY01-C1151_1.pep
LKRVVDKIVEFILRNGRQFEAVLVEQDVKHGRFPFLLPSNLYHPYYLEALQKAEKSKLPGKGFISEKHDSSGRGVEKKAASSRESDSASLGSDIPYNSDRKGKFKMVISKSKKDGQDPPSSKATQPQIGVNVDAAAAAAILQAATRGIKKPNLEILSKTSLNGSSQVPSSEDGHVPSSGQVANAIAKTAAIAAASEADSSEACCTKEEKLKAERIKRAKMFAALIK

SEQ ID NO: 62601 - protein, 177 aa, Gossypium hirsutum
  Clone ID: LIB3829-027-Q6-N6-B2.pep
DAAAAAAILQAATRGIKKPNLEILSKTSLNGSSQVPTSEDGHVPSSGQKGEPSVSGQVANAIAKTAAIAAASEADSSEACLTKEEKLKAERLKRAKMFAALIKSGSAPLKTESLRGLSAEPPELGVCGSGAEGGSLSVKEREGSSGAMDIDTCDKNEKMNSGIHHNERRSKRKYRSR

SEQ ID NO: 62602 - protein, 79 aa, Gossypium hirsutum
  Clone ID: GOSHI-09MAY01-C1141_1.pep
MELYGRNPTRNGSQSGYQPEWSPAGPETGLEESRWQLSVRGVESYPERLGVTDCVYYMRTVFCGYRYSCRYNHPRNRAA

SEQ ID NO: 62603 - protein, 150 aa, Gossypium hirsutum
  Clone ID: GOSHI-09MAY01-C1161_1.pep
SQIHFPQFSFAPYTTSPCFSFNFLHINLSGSPFRISDASCSRLSILRSCSPSNLSNCDQCAWECGVTKHPLKLFHDCGPTRQLPEQGCQPDVLGYLQNFFFKMGFQVEWDEAQDSYFSSCRDCKLKNGICGFNSSDPNKPFLCFQAKATI

SEQ ID NO: 62604 - protein, 146 aa, Gossypium hirsutum
  Clone ID: GOSHI-09MAY01-C1121_1.pep
MVTSNGKRIRIVNDTAEDVLSETLYGDSVRLQQVLADFLLISVNFTPNGGQLLVVANLTKDQLGQSVHLAHLELRITHAGGGVPEAMLNQMFGNEEDASEEGISLLISRKLVKLMNGDILYLREAGRATFIVTVELAAANGPDSRT

SEQ ID NO: 62605 - protein, 159 aa, Gossypium hirsutum
  Clone ID: GOSHI-09MAY01-C1091_3.pep
MSSNGTDNSAAKKPPSPSPLRFSKFFQSNMRILVTGGAGFIGSHLVDKLMENEKNEVIVVDNYFTGTKDNLKKWIGHPRFELIRHDVTEPVLIEVDQIYHLACPVSPIFYKYNPVKTIKTNVIGTLNMLGLAKRVGARILLTSTLEGYGEPLEHPQTES

SEQ ID NO: 62606 - protein, 343 aa, Gossypium hirsutum
  Clone ID: GOSHI-09MAY01-C1091_1.pep
MSANGTDNSTSKKPPSPSPLRFSKFFQSNMRILVTGGAGFIGSHLVDKLMENEKNEVIVVDNYFTGTKDNLKKWIGHPRFELIRHDVTEPLLIEVDQIYHLACPASPIFYKYNPVKTIKTNVIGTLNMLGLAKRVGARILLTSTSEVYGDPLEHPQTESYWGNVNPIGVRSCYDEGKRVAETLMFDYHRQHGIEIRIARIFNTYGPRMNIDDGRVVSNFIAQALRNEPLTVQLPGTQTRSFCYVSDMVDGLIRLMEGENTGPINIGNPGEFTMLELAESVKELINPEVKISMVENTPDDPRQRKPDITKAKEVLGWEPKVKLRDGLPLMEEDFRLRLGVPKKN

SEQ ID NO: 62607 - protein, 165 aa, Gossypium hirsutum
  unsure (1)..(165): unsure at all Xaa locations
  Clone ID: uC-gsronu33B157g01b1.pep
NSDVTLTLGKYGYKVRVGRIFITHGPRMNIDDGRVVSNFIXAQALRTERVTDESPETQTRRWXMMPTWHDGXLRLMEGETTGAINMGNRCDFTMLALAESAKELIDPEVKISMVENTPDDPRXRKTHITNAEEALGWEPQVKMRDGLTLMEDDFRKGLVVQRRTD

SEQ ID NO: 62608 - protein, 148 aa, Gossypium hirsutum
  Clone ID: LIB3585-040-P1-K1-C4.pep
HVGDYVQSNMRILVTGGAGFIGSHLVDKLMENEKNEVIVVNNYFTGTKDNLKKWIGHPRFELIRHDVTKPLLIEVDQIYHLACPASPIFYKYNPVKTIKTNVIGTLNMLGLAKRVRARILLTSTSEVYGDPLEHPQTESYCGNVNPIG

SEQ ID NO: 62609 - protein, 63 aa, Gossypium hirsutum
  Clone ID: LIB3197-031-Q1-M1-A6.pep
GIPGEFTMLELAESLKELIDPEVKISLVENTPDDPRQRRPDITKTKEVLGWDPKVKLRDGLRL

SEQ ID NO: 62610 - protein, 96 aa, Gossypium hirsutum
  Clone ID: LIB3197-040-Q1-M1-G5.pep
MSSNGTDNSTSKKPPSPSPLRFSKFFQPNMRILVTGGAGFIGSHLVDKLMENEKNEVIVVDNYFTGTKDNLKKWIGHPRFELIRHDVTEPLLIEVD

SEQ ID NO: 62611 - protein, 397 aa, Gossypium hirsutum
  Clone ID: GOSHI-09MAY01-C1081_1.pep
KILSQFNRGSSAMQHYVATRPMFIDVEIMNSDTRLVLGDQGSQASPSNVARGLSSLYKEITDTVRKEAATIMAVFPSPNDVMSILVQRVLEQRVTALLDKLLVKPSLVNPPPMEEGGLLLYLRMLAVAYEKTQELARELRAVGCGDLDVEGLTESLFSSHMDEYPEHEQASLGQLYQAKLDELRAENQNVSDSTGTIGRSKGASVASSHQQISVAVVTEFVRWNEEALTRCTLFSSQPATLAANVKAVFTCLLDQVSQYITDGLERARDSLTEAAAMRERFVLGTNLSRRVAAAAASAAEAAAAAGESSFRSFMVAVQRCGSSVAIVQQYFANSISRLLLPVDGAHAASCEEMAAAMSSAEGAAYKGLQQCIETVMAEVERLLSAEQKATEYPSPDD

SEQ ID NO: 62612 - protein, 210 aa, Gossypium hirsutum
  Clone ID: GOSHI-09MAY01-C1051_1.pep
MGNCGTREESDVVTHAQVQQLHNHILSDKKLTQSQSQTQNRTLSDLSDFEDSRKNALLYTHIIAFTLFELETITKSFRSDYILGEGGFGTVYKGYIDENVRVGLKSLPVAVKVLNKEGLQGHREWLTEVNFLGQLRHPNLVKLIGYCCEDDHRLLVYEFMFRGSLENHLFRKPPVPTSCAIPMLIPAHMCFFFPCLSISLVLQIHFLSCC

SEQ ID NO: 62613 - protein, 177 aa, Gossypium hirsutum
  unsure (1)..(177): unsure at all Xaa locations
  Clone ID: LIB3585-019-P1-K1-C11.pep
NHILSDKKLTQSQSQTQNRTLGDLSDFEDSRKNALLYTHIIAFTLFELETITKSFRSDYILGEGGFGTVYKGYIDENVRVGLKSLPVAVKVLNKEGLQGHREWLTEVNFLGQLRHPNLVKLIGYCCEDDHRLLVYEFMFRGSLENHLFRKATAPLSWAKRMMIALGAAKGLAXLHNA

SEQ ID NO: 62614 - protein, 361 aa, Gossypium hirsutum
  unsure (1)..(361): unsure at all Xaa locations
  Clone ID: GOSHI-09MAY01-C1071_1.pep
VVANSLFRPPKPILPHKHHPLQPISSHSLPKSPLNSTFLKPHFSHSDSCRFRLIAAASLGETDASSDEPLPLVGEDSAAFDLGTQNIVSWVYFTIILGVVLFVLDVIWIDNSTGFGKAFIDAVSTLSDSHEIVMLALILIFATVHXGLATFGKLGEKIWGKRAYRVLFAGVSLPLAVSTVVYFINHRYNGVQLWQLQNGPGVHQLVWLSNFISFFFLYPPTFNLLEVAAVEQPKVHLWETGIMRITRHPQMVGQVIWCLAHTIWIGNSVAVAASVGLIGHHLFGVWNGDRRLAVRHGEAFEVVKKRTSIIPFAAILDGRQKLPXDYYKEFIRLPYLAITAMTLGAYFLHPVMQAASFRLHW

SEQ ID NO: 62615 - protein, 194 aa, Gossypium hirsutum
  Clone ID: LIB3828-014-Q1-K6-A2.pep
VVANSLFRPPKPILPHKHHPLQPISSHSLPKSPLNSTFLKPHFSHSDSCRFRLIAAASLGETDASSDEPLPLVGEDSAAFDLGTQNIVSWVYFTIILGVVLFVLDVIWIDNSTGFGKAFIDAVSTLSDSHEIVMLALILIFATVHSGLASFRDMGEKILGKRAYRVLFAGVSLPLAVSTVVSSKFITLDDGTLI

SEQ ID NO: 62616 - protein, 67 aa, Gossypium hirsutum
  Clone ID: uC-gsflnu33B075a06b1.pep
FWVPKSKAAESSPTKGRGSSEEASVSPRERWGDKSHSAPIWVRPMWFELVDIQRRFRYPVAVGRLKR

SEQ ID NO: 62617 - protein, 258 aa, Gossypium hirsutum
  unsure (1)..(258): unsure at all Xaa locations
  Clone ID: GOSHI-09MAY01-C1061_1.pep
IFSHVFWGEELDTFGCLNDTSDNRGEFFLFYSYHTVSGXPVLIALVAGKAAQTFERTDPSLLLHRVLSKLRGIYXPKGVDVPDPIQTICTRWGNDPFSYGSYSHVRVQSSGGVYDILARXIGNRLFFAGEATTRQYPATMHGAYLSGLREASRILRATRGRQNYFRRSVQRNVGPSSDQLGDLFKMPDLVFGKFSFVFNPLTEDPKSLGILRITFDNCTDDMRKVLEKSCGPQSNQSLQLYAALSREQAHELQMVTGE

SEQ ID NO: 62618 - protein, 361 aa, Gossypium hirsutum
  Clone ID: GOSHI-09MAY01-C1001_1.pep
MRSICVVLVISLPFLLGIAQGFDFHDNDLASEDSLWDLYERWRSHHTVSRSLDEKHRRFNVFKQNVLHVHNTNNKDKPYKLKINKFADMTNHEFRNAYASSKIKHHKMFQGQSRGAGSFMYENVDRVPPSVDWRQKGAVTAVKDQGQCGSCWAFSTVVAVEGINQIKTNKLVSLSEQELIDCDTEENQGCNGGLMDIAFNFIKKKGGITTESNYPYQANDGSCDAAKVNSPAVAIDGHENVPANDEDALLKAVANQPVSVAIDAGSMDFQFYSEGVFTGECGTELNHGVAAVGYGTTLDGTKYWIVKNSWGAEWGEKGYIRMERGIRDKQGLCGIAMEASYPIKNSSSNPTGPSYSPKDEL

SEQ ID NO: 62619 - protein, 149 aa, Gossypium hirsutum
  Clone ID: LIB3543-038-Q1-K1-H1.pep
EGLESTKEKSELKQVSVKSTVDEAAVGLNHPTAGQRTSVKHLDDPSLKPSDFGRVEKDENKNVGNHTKGHNQPLVWAENPTRAISSVPPAASVCSSEHGDILIDINDRFPRDLLSDIFSKARMSQNLYGISPFSGDGAGLSLNMENHEL

SEQ ID NO: 62620 - protein, 207 aa, Gossypium hirsutum
  Clone ID: LIB3543-030-Q1-K6-F8.pep
RSPSVRPASGPRPPTRPPTRPPTRPVHNTNNKDKPYKLKINKFADMTNHEFRNAYASSKIKHHKMFQGQSRGAGSFMYENVDRVPPSVDWRQKGAVTAVKDQGQCGSCWAFSTVVAVEGINQIKTNKLVSLSEQELIDCDTEENQGCNGGLMDIAFDFIKKKGGITTESNYPYQANDGSCDAAKVNSPAVAIDGHENVPANDEDALL

SEQ ID NO: 62621 - protein, 62 aa, Gossypium hirsutum
  Clone ID: LIB3145-048-Q1-K1-D5.pep
MRSICVVLVISLPFLLGIAQGFDFHDNDLTSEDSLWDLYERWRSHHTVSRSLDEKHRRFNVF

SEQ ID NO: 62622 - protein, 127 aa, Gossypium hirsutum
  Clone ID: LIB3166-036-P1-K1-C4.pep
DINDRFPRDLLSDIFSKGRMSQNLYDISPFSGDGAGLSLNMENHEPKHWSYFRNLAQDEFVRKDVSLMDQDHLGFSSPLTNIEVGAPIDYSYPPLKSAGGVALAQIKPDIIFDEDIRQESVSVAATN

SEQ ID NO: 62623 - protein, 425 aa, Gossypium hirsutum
  Clone ID: GOSHI-09MAY01-C1381_1.pep
FRSSSATVLKPGRNKITFPLPPQKPGSYVLGVLTGHIGHLTFRSHRFSKAGPADSDDFMSYEKTTRPVLKVSKPRPLVDLSAAISSALLIKEAQWIGIIAQPINYSLNGAVMHIDTGPGLKIEDAHSIEMETYINAAQISTDMANSGDARKDDNENFEQLSLLDGKIEFPDWASNVTSILWIPIRAIDDKLARGSSSGAPQKQSIVDGMRTVALKLEFGISNNQIYDQTIALHFTNPFHVSTRVADQCNDGTLLLQVTLHSQVKATLTVNDAWLDLQDGFVHAGQDDGRPVSGFFPLVISPTSRAGLLFRVCLGNGTALDENKAQPESILNISYRIAGDRTIGAHPPVAAKSNEIEGTSQDLIFRSALILQRPVLDPCLAVGFLPLPSDGLRVGQLVTMKWRVERLKDIEESRFLTNDDVLYEVN

SEQ ID NO: 62624 - protein, 399 aa, Gossypium hirsutum
  unsure (1)..(399): unsure at all Xaa locations
  Clone ID: GOSHI-09MAY01-C1351_1.pep
MGIDLRQVVAGILTLTMFVMLGQMIKRDHFDSLQDKLPGEAQDVQVDNANVIEKDGLVKPSKGSKGPWMKDSQELKPCWSRTTFDGIEQSRGYVTFSLTNGPEYHVSQMADAVVVARYLAAALVLPDIRGSRPGDERNFKDIYDVEKFMKSLDGVVKVVKQLPNEISIRDLAAVKVPNRVTEDHIVENVQPIFKSKGNIRLATYFPTVNMRKTTQKSSVDSVSCLGMFGTLELQPEVSEVVDSMIEQLRTLSRKSDGLFIAVDLRVDVLENKNCHGSGTNVAKSCYNAQEIALFLRKVGFDTDTTIYLTQSKWDNSLSVLKDIFPKTYTKENIMPXKKKGVLEFESSKLEXVINFYICSKSDVFVPXLSCLFYANVAGKRIPLGKPQILVPPIYRVHLH

SEQ ID NO: 62625 - protein, 84 aa, Gossypium hirsutum
  unsure (1)..(84): unsure at all Xaa locations
  Clone ID: AI055278.1.pep
WLGLLTHLLGLPFCERAKIKKRQXKIYLKLLNLXRSQNLKTWYLDHXQLESNITLYCXIPSVSQVKAPSIKEKHLITFFTVNTQ

SEQ ID NO: 62626 - protein, 410 aa, Gossypium hirsutum
  unsure (1)..(410): unsure at all Xaa locations
  Clone ID: GOSHI-09MAY01-C1341_1.pep
MSLVRSAEPATASCRNTNLYSIQDSSDSTGMAIRMFGSDKHKPVYVMDSYSSESYEKYFLDSPTDELIHSSSSGISGSSVRLQDVSSCQIRDYSEIQSPDTLDSDSDKMKLKLQELERALLADNDVDGDDDMFGTGLSMEVDGEWSDPIRMGSHHDSPKESSSSGTYLDSVSGDKEVSHVSSQTPKXQMLIECAAILPARPIEKASAIINELRQKVSIQGDPPQRIAAYMVEGLAARMAASGKYLYKALRCKEPPSSDRLAAMQILFEVCPCFKFGFMAANGAIIEAFKGEKRVHIIDFDISQGSQYITLIQTIAKLPGKPPHLRLTGVDDPESVQRLNGGLEIVGLRLEKLAQILGVPFEFRAVPSRTSLVAPSMLDCKPAQPLIVNFAFLLHHMPDESVSTINQRDQL

SEQ ID NO: 62627 - protein, 302 aa, Gossypium hirsutum
  Clone ID: GOSHI-09MAY01-C1371_1.pep
MIRLDPRVRLRRNQSASDFRGGSYHNGGRTGGAPVRSKSTEDMYTRSQLEASAANKESFFARKMAENESRPEGLPPSQGGKYVGFGSTPMPTQRINNSSQGDVFSVVSQGIGRLSLVAASAANVVQAGTKEFTSKVKEGGYDARVNETVGVVTAKTSEIGQKTWGMMKGVMAIASQKVEEYTKDGMNWKNDGNWQRNDSEKNGYYQEFKQENKGWNSTSGGQTSSGVNYNSYNSNSWDDWDTKDNRKEHTTKVTASHSNDGWAGWDDPKDDGYDSFYNGASDKNAVGRNGKSDAAWTGGGFL

SEQ ID NO: 62628 - protein, 53 aa, Gossypium hirsutum
  Clone ID: LIB3145-018-Q1-K1-G12.pep
IKKILLFFFNYNNKIFFFFSHSQILLSNWTLSHSFTNMIKLLSNMKVAPDITL

SEQ ID NO: 62629 - protein, 231 aa, Gossypium hirsutum
  unsure (1)..(231): unsure at all Xaa locations
  Clone ID: GOSHI-09MAY01-C1241_2.pep
KVCVELKKHLVTASYVDDSMLMMDEKAKNAGITILGEMGLDPGIDHMMAMKMINQAHLKKGKIMSFTSXCGGIPSPAAANNPLAYKFSWNPAGAIKAGRNPATYKSQGETVHVNGDDLYDSAGRFRIPDLTAFALECLPNRNSLTYGDLYGIGHEASTIFRGTLRYEGFSEIMATLVRIGIFNAETHPLLKHEGRPTFRNFLCELLKIDTEDMNEVVVGEKXIAGRILELG

SEQ ID NO: 62630 - protein, 179 aa, Gossypium hirsutum
  unsure (1)..(179): unsure at all Xaa locations
  Clone ID: GOSHI-09MAY01-C1241_1.pep
NFLRELLKIGTKDMNEVVVGEKKXIAERILELGHCKEPGVAVKAAKTIVFLGLNEQTGIPVSCQSAFAVTCHRMEERLTYSNTEQDMVLLHHEVEVDFPDSKQTERHTATLLEFGKAKNGKMISAMALTVGVPVAIGALLLIVNKIKTRGVLRPIVPEVYLPALEIAQAYGIKLMEKTE

SEQ ID NO: 62631 - protein, 171 aa, Gossypium hirsutum
  Clone ID: GOSHI-09MAY01-C1261_5.pep
GFRVDGASDFGGTTTAAIGGLSSRELSVPLDQNHRELKAEIATHPLYDQLLTAHVSCLRVATTIEQLPLIDAQLAQCHNVLRSYASQHPQHGHSLSPHHRQDLDNFLAQYLIMLCRFKEELQQHVRVDAVEAVMACREIENNLHALTGVTLGESTGATMSDDEDELAMDFS

SEQ ID NO: 62632 - protein, 299 aa, Gossypium hirsutum
  Clone ID: GOSHI-09MAY01-C1261_2.pep
MQEPGGLGMMSSGGGSETIGGLSSGEVSVTGDQNRHLKAEIATHPLYEQLLAAHVSCLRVATPIDQLSLIDAQLAESHNILRSYASQQQGHSLSPHERQELDNFLAQYLIVLCTFKEQLQQHVRVHAVEAVMACREIENNLQALTGVTLGEGTGATMSDDEDELQMDFSMDQSGPEGHDLMGFGPLLPTESERSLMERVRQELKIELKQGFKSRIEDVREEILRKRRAGKLPGDTTTVLKNWWQQHSKWPYPTEDDKAKLVEETGLQLKQINNWFINQRKRNWHSNSQSVTSLKSKRKR

SEQ ID NO: 62633 - protein, 234 aa, Gossypium hirsutum
  unsure (1)..(234): unsure at all Xaa locations
  Clone ID: GOSHI-09MAY01-C1261_1.pep
GGLWFREMQEPGLGMMSSGGGSGGIGGLSSGEVSVSGEQNRQLKAEIAVHPLYEQLLAAHVSCLRVATPIDQLPLIDAQLAQSHNLLRSYASQHQHGHSLSPHERQELDNFLAQYLIVLCTFKEQLQQHVRVHAVEAVMACREIENNLQALTGVTLGEGTGATMSEDEDELQMDFFLDQSGPDGHDLMGFGPYFPQNLKGSLMDRGRQXLKIDLYRAFKSDCDFRGIYPIGLKF

SEQ ID NO: 62634 - protein, 101 aa, Gossypium hirsutum
  Clone ID: LIB3830-001-Q1-N6-E11.pep
VRQELKIELKQGFKSKIEDVREEILRKRRAGKLPGDTTTVLKNWWQQHSKWPYPTEDDKAKLVEETGLQLKQINNWFINQRKRNWHSNSQSVTSLKSKCKR

SEQ ID NO: 62635 - protein, 80 aa, Gossypium hirsutum
  Clone ID: LIB3585-036-P1-K1-F8.pep
MYYFSYFVGVTLGEGTGATMSDDEDELQMDFSMDQSGPEGHDLMGFGPLLPTESERSLMERVRQELKIELKQVLFIILSR

SEQ ID NO: 62636 - protein, 125 aa, Gossypium hirsutum
  unsure (1)..(125): unsure at all Xaa locations
  Clone ID: LIB3829-023-Q6-K6-F3.pep
MMSSGGGSETIGGLSSGEVSVTGDQIFFFFAEIATHVVGGGLLXXHXXXFXVATPIDQLSLIDAQLAESXNILRSYAXNNKVTVYDHXERQELDNFLXHYLIXLCALKEHVQQHFIFHAVGSVIV

SEQ ID NO: 62637 - protein, 212 aa, Gossypium hirsutum
  unsure (1)..(212): unsure at all Xaa locations
  Clone ID: GOSHI-09MAY01-C1211_1.pep
LRETQMEEKGKKKKQKHEHPNDKTTKPTSEFSFKPSSEVKGLRFGGLFIVKSFTIRRAKPLELLKLLDFTPPSHKPPNNKIPFPSTTAFLPTNFTILAHQAWHTLTLGLGTKKSKVLLFAFESEAMKIAVDKIWPNEIPLGEVNKKLIRGLKGCEMARFKFTKGRLTFYVYAARGNGHVGFSXADDLRIVSQSVVELNDVLDHTAMLAMPNQ

SEQ ID NO: 62638 - protein, 146 aa, Gossypium hirsutum
  Clone ID: GOSHI-09MAY01-C1221_1.pep
MGSLDLSSGSEVVTIHVNEAKNLLQSGYRYIDVRTVEEFEKGHVEAANILNIPYLFITPEGRVKNPEFLKEVSSLCKEEDRLIVGCQSGARSLAATADLLKIGFKNVHDMGGGYLAWVENGHPIKMEEPKKVQEPAIVEDKPNEEL

SEQ ID NO: 62639 - protein, 124 aa, Gossypium hirsutum
  Clone ID: LIB3147-046-Q1-K1-E3.pep
MGVSFVVFPWCFFLFSLIYFSSGSEVVTIHVNEAKNLLQSGYRYIDVRTVEEFEKGHVEAENILNIPYLFITPEGRVKNPEFLKEVSSLCKEDDRLIVGCQSGVRSLAATADLLKIGFKNVHDM

SEQ ID NO: 62640 - protein, 311 aa, Gossypium hirsutum
  unsure (1)..(311): unsure at all Xaa locations
  Clone ID: GOSHI-09MAY01-C2981_1.pep
ELLCFCVVHHPYRIKCNFLLNNAIDKVLLLTQRREKYLVAAAVRFVRTILSRHDEHLISHFVKYSLLKSIVDAFVANGXRYNVLNSAVLELFEYIRMENLKLLVKHIVDSFWNQLVRFEHLPSLQSFKVKYKQFLENCGPEMNVNAPDPRKRIDERALEKEEEDYFNEESDEEDTTSGSHPEKVQSQPVLSNGVAVSCPSSCPRSGGLVDYDDDDEDYRPPPRKQTENSEDDEGSMESLGLKRKLTPKEKEPGLAKKQRLGKSSKPRDSVFAALCSTLSQAVLPSKKTANAMHLSTQSGEENHIEKESGSP

SEQ ID NO: 62641 - protein, 666 aa, Gossypium hirsutum
  unsure (1)..(666): unsure at all Xaa locations
  Clone ID: GOSHI-09MAY01-C2971_1.pep
GLPMSMVLPGVVGFKLLGKLRDGVTATDLVLTVTQMLRKHGVVGKFVEFYGEGMSELSLADRATIANMSPEYGATMGFFPVDHVTLQYLQLTGRSEETIAMIESYLRANNMFVDYNEPQIEKVYSSYLQLKLEEVEPCISGPKRPHDRVPLKEMKADWQACLDNRVGFKGFAIPKESQDKAAKFSFHGTPAELRHGDVVIAAITSCTNTSNPSVMLGAALVAKKACELGLEVKPWIKTSLAPGSGVVTKYLQKSGLQRYLNQLGFHIGGYGCTTCIGNSGDIDESVASAISENDMVAAAVLSGNRNFEGRVHPLTRADYLASPPXLVVAYALAGTVDIDSEAAPIGTGKDGKKIFVRDIWPSSEEVANVVQSSVLPDMFKATYEAITKGNPMWNQLPVPSGSLYAWSPTSTYIHEPPYFKDMTMSPPGPHGAKDAYCLLNCGDSITTDHISPAGSSHSDSPAAKFLLEHGVNRRDFNSYGSRRGNDEIMARGTFANIRLVNKLLKGEVGPKTIHIPTGEKLSVYDAAMRYKTARQDTIILAGAEYGSGSSRDWAAKGPMLLGVKAVIAKSFERIHRSNLVGMGIIPLCFKSGEDADTLGLTGHERYTIDLPSCVSEIRPGQDVTVATDSGRSFTCTVRFDTEVELAYFNHGGILQYVIRNLIGAKQ

SEQ ID NO: 62642 - protein, 97 aa, Gossypium hirsutum
  unsure (1)..(97): unsure at all Xaa locations
  Clone ID: LIB3148-010-Q1-K1-E2.pep
GVKAVIAKFFERIHRSNLVGMGIIPLCFKSGEDADTLGLTGHERYTIDLSSCVSXIRPGQDVTLATDCCKSFTCTIRFVTQVYLSYFNHLCITFFFY

SEQ ID NO: 62643 - protein, 96 aa, Gossypium hirsutum
  Clone ID: GOSHI-09MAY01-C2931_2.pep
LRLFCGNLTVSGSRKPKPQSEEFKKDPFETSCFSLFPLLHQTTMENQGRKLPCLNNLELHCFAVRHSIRKWSIEFQKLGQNFGKILNESNNFFNHN

SEQ ID NO: 62644 - protein, 69 aa, Gossypium hirsutum
  Clone ID: AI054788.1.pep
FSAAITDETSGRRKEFHRKKTTKKSKLLKRKKKHVEFNDKKGVNFNKSETKRESLLINEKNFKRENRKP

SEQ ID NO: 62645 - protein, 83 aa, Gossypium hirsutum
  Clone ID: LIB3493-012-P1-M1-B7.pep
KQLVSNGSSLNSSDWGLGLREHETVKFPTKIASTKGKPNWQGNEERRVVDKEYDLVMVPSDGVHLSGYESDAPDWSIGWEEPH

SEQ ID NO: 62646 - protein, 126 aa, Gossypium hirsutum
  unsure (1)..(126): unsure at all Xaa locations
  Clone ID: GOSHI-09MAY01-C2921_2.pep
CEPIKVACTIKDQCVCLRSSQSVSXRAFGLEPVGARLTCSLQTDLKDLAQTCVDATKLAGFALATSALVVSGASAEGVPKRLTYDEIQSTTYMEVKGTGTANQCPTIDGGVDSFAFKPGKYYAKKF

SEQ ID NO: 62647 - protein, 332 aa, Gossypium hirsutum
  Clone ID: GOSHI-09MAY01-C2921_1.pep
MSVSLQAAATLMQPIKVAAPSRTNVLLRSSQSVSKAFGLEPVGARLTCSLQTDLKDLAQTCVDATKLAGFALATSALVVSGASAEGVPKRLTYDEIQSKTYMEVKGTGTANQCPTIDGGVDSFAFKPGKYYAKKFCLEPTSFTVKAEGVNKNAPPEFQNTKLMTRLTYTLDEIEGPFEVSTDGTVKFEEKDGIDYAAVTVQLPGGERVPFLFTIKQLVASGKPDSFGGDFLVPSYRGSSFLDPKGRGGSTGYDNAVALPAGGRGDEEELAKENNKSAASSSGKITLSVTKSKPETGEVIGVFESLQPSDTDLGAKTPKDVKITGVWYAQLDS

SEQ ID NO: 62648 - protein, 91 aa, Gossypium hirsutum
  unsure (1)..(91): unsure at all Xaa locations
  Clone ID: LIB3120-023-Q1-K1-C6.pep
KELAAPXVSKRITYAEIQNKTYMDVKGTGTDNQCPTIDGGVDYIAFKPDKYYAMKICLEPTYFTVKGEGVTKNAPSEFQNTNLMTRLTYTF

SEQ ID NO: 62649 - protein, 548 aa, Gossypium hirsutum
  unsure (1)..(548): unsure at all Xaa locations
  Clone ID: GOSHI-09MAY01-C2891_1.pep
MKRDHQEISGSGSNPAESSSIKGKLWEEDPDAGGMDDELLAVLGYKVRSSDMADVAQKLEMLEKVMGTAQEDGISQLGDTVHFNPSDLSGWVQNLLIEFNGSTTTPDPNFNDDSEYDLRAIPGVAAYPPVKSDPGLENTRKRAKTESSSSSSSTTTRPVVLIDSQEAGVRLVHTLMACAEAVQQDNLKLADALVKHIGLLASSQTGAMRKVATYFAXLLARRIYRIFPPDSLDPSYNDKLQMPFYETCPYLKFAHFTANQAILEAFSMANRVHVIDFGLKQGMQWPALMQALALRPGGPPAFRLTGIGPPQPDDTDALQQVGWKLAELAERIGIEFEFRGFVANSLADLEPEMLDIRPPEIEVVAVNAVFELHPLLARPGGIEKVVSSIKAMKPKIVTVVEQEANHNGPVFLDRFTEALHYYSTLFDSLEGSGVAPASQDLAMSELYLGRQICNVVACEGMDRVERHEPLTQWRTRMETAGFSPVHLGSNAYKQASMLLALFASGDGYRVEENNGCLMLGWHTRPLIATSAWRLAGTESGSELTQELS

SEQ ID NO: 62650 - protein, 103 aa, Gossypium hirsutum
  unsure (1)..(103): unsure at all Xaa locations
  Clone ID: uC-gsronu33B041b12b1.pep
IFFFYSFIFLFYFIFSIFLLFFFFSSFIFYYYFFFSIFLFYLLIFFPIIFFSYLFILIFLCYLFVFILYYFFFTYHFLFYIYXIVYFFFLFFYFYFLLYFLFF

SEQ ID NO: 62651 - protein, 91 aa, Gossypium hirsutum
  Clone ID: uC-gsflnu33B094h01b1.pep
KGPKTYFKKGEKISQEKTWITPWGRVFKLPPIFSFTGPFANPGKKKPPLILFNRFFTFSQLSSLVNSLPDQVQASRPARGGDKWPCMPPKH

SEQ ID NO: 62652 - protein, 54 aa, Gossypium hirsutum
  Clone ID: uC-gsronu33B086e12b1.pep
MQWPALMQALALRPGGPPAFRLTGIGPPQPDDTDALQQVGWKLAELAERIGIEF

SEQ ID NO: 62653 - protein, 210 aa, Gossypium hirsutum
  unsure (1)..(210): unsure at all Xaa locations
  Clone ID: GOSHI-09MAY01-C2851_3.pep
MAEKVTIMVLKVDLQCSKCYKKVKKVLCKFPQIRDQIYDEKANTVTITVVCCSPEKIRDKLCYKGGGSIKSIELKSPAKPKESEKKPDKPKEAEKPKEAEKKPEKPKEAEKKPEKPKEAEKXPEKPKEPEKPKAPAPGKRPREPKDGETKPDVPREVAKQQNVAAPSPLPPMTYAVGYTCSEGYYNGYGGGPSYYGGPPQQPFPYYETYG

SEQ ID NO: 62654 - protein, 280 aa, Gossypium hirsutum
  Clone ID: GOSHI-09MAY01-C2851_2.pep
MVPPRHNCLEFSNTFAFASFFFTPDLGIQAMAEKVTIMVLKVDLQCSKCYKKVKKVLCKYPQIRDQMYDEKANTVTITVVCCSPEKIRDKLCYKGGGSIKSIELKSAAKPKEPEKKPDKPKEAEKKPEKPKEAEKKPEKPKEAAEKKPEKPKEAEKKPEKPKDGEKKPEKPKEAAAEKKPDKPKEAAAAPPQKVAEPAAAAPLPPMAYAVGYTCSEGYYNGYGGGPSYYGGPPQQPFPCYETYGRPVYDSWGGGGGGYYRYGGRTGECFSEENPTGCSIM

SEQ ID NO: 62655 - protein, 211 aa, Gossypium hirsutum
  Clone ID: GOSHI-09MAY01-C2851_1.pep
SFSFVGDDNGVLKGRPFSAGKCYKKVKKVLCKFPQIRDQIYDEKTNTVTIKVVCCSPEKIRDKLCYKGGGSIKSIELKSPAKPKEPEKKPDKPKEAEKAKEAGKKPPKPKDGGETKPDIPREVASQQKVAAPAPLPPMTYAVGYNCSEGYYNGYGGGPTYYGGPPQQPFPCYETYGRPVYDSWGGGGGYYRYGGRTGDCVSEENPQGCSIM

SEQ ID NO: 62656 - protein, 167 aa, Gossypium hirsutum
  unsure (1)..(167): unsure at all Xaa locations
  Clone ID: GOSHI-09MAY01-C2861_1.pep
QIHPIWLLGYRFVAFCLALATIVLKIITNGGRIFYYYTQWTFTLVTVYFGFGTLLSIYGCYQHHKMSSCGSNGQHVKLDTEQGYYTPLTNRKDADVRRKALNLQEQCDVSQAAGVINYLFQVIFQMNAXAGMLTDLIYWCLIFPFLTIEDYALNFMTVNMHTLNGIY

SEQ ID NO: 62657 - protein, 298 aa, Gossypium hirsutum
  unsure (1)..(298): unsure at all Xaa locations
  Clone ID: GOSHI-09MAY01-C2811_2.pep
VLMDEFHHVSTAFLELEKGYQEAIEDITXRMGAGMAKLMGGGVETVGDYDEYCHYVAGLVGLGLSKLFHACGTEDLAPDTLSNSMGLFLQKTNIIRDYLEDINEIPKSRMFWPRQIWGKYVNKLEDLKYEENSVKAVQCLNDMVTNALIHVDDCLKYMSALRDPAIFRFCAIPQVMAIGTLALCYNNIEVFRGVVKMRRGLTAKVIDRTNTMADVYGAFYDFSCMLKAKVDKNDPCAQKTSSRLDSILKTCRDSGVLNERKSYIIPNQTNFTSTSGCLAFSFSWPFLWLIQDPMSQIN

SEQ ID NO: 62658 - protein, 255 aa, Gossypium hirsutum
  Clone ID: GOSHI-09MAY01-C2811_1.pep
MGSLGALVKHPDDFYPLLKLKMASRHAERQIPSEPHWAFCFSMLHKVSRSFALVIQQLDIELKNAVCIFYLVLRALDTVEDDTSVATDIKVPILKEFYRHIYDPDWHFSCGTKNYKVLMDEFHHISTAFLELEKGYQEAIEDITKRMGAGMAKFICKEVETVDDYDEYCHYVAGLVGLGLSKLFHACGTEDLAPDTLSNSMGLFLQKTHIIRDYLGDINEIPKSRMFWPRQMWGNFANYPEDLRYEENCQACSLC

SEQ ID NO: 62659 - protein, 192 aa, Gossypium hirsutum
  Clone ID: GOSHI-09MAY01-C2801_1.pep
MKELVQQQHQHWRPSATFSHLKEITIVSCPGMKTLLPHWLLPNLQSLEDIHVGACSQLVEILGAATSKVEEKGSDALIKFHLPKLRVLRLWMLPNLKSICGKSGVMVCDSLQVIIVFGDCDKLKRIPPFVPLVGNGQPFAYAPPSLTITSGTEWWESLEWDDHPNFKNVLQPLWKLLSYPTYPTYPRCWRLL

SEQ ID NO: 62660 - protein, 199 aa, Gossypium hirsutum
  Clone ID: GOSHI-09MAY01-C2831_1.pep
MMSRRVFSNLFFFLFSQILSFAFNPLQSNNPQLLQDVIEKIALKQKWEPEGLNFSKLELSKVRFGTGKRCEFRIRFGKTHLLFKFPDEVSSLKKFTKRSSNDFLDFVNEINSSAVLEPFTMEGPFELRLSPGHQASLLFPLNTSHTDLKRVLVGHGITLQVNGAQEISLFHTFNLGLPANENGVKEKSSGYWPFSHSFC

SEQ ID NO: 62661 - protein, 539 aa, Gossypium hirsutum
  Clone ID: GOSHI-09MAY01-C2581_1.pep
MALTNSSILPTNSILQSQPSTPFSKAKPLSVLRISAVHSSDSPKNPVVSDKSVKQPATAPLAATKSATAPTTAPPKNAVPGKWTVDSWKSKKALQLPEYPDQAELESVLKTLDAFPPIVFAGEARSLEEKLGEAAMGNAFLLQGGDCAESFKEFNANNIRDTFRILLQMGAVLMFGGQMPVIKVGRMAGQFAKPRSDPFEEKNGVKLPSYRGDNVNGDSFDEKSRIPDPQRMIRAYCQSAATLNLLRAFATGGYAAMQRVTQWNLDFTEHSEQGDRYRELASRVDEALGFMAAAGLTVDHPIMTTTEFWTSHECLLLPYEQSLTRLDSTSGRYYDCSAHFLWVGERTRQLDGAHVEFLRGVANPLGIKVSDKMDPNELVKLIEILNPQNKAGRITVITRMGAENMRVKLPHLIRAVRRAGQIVTWVSDPMHGNTIKAPCGLKTRPFDSIRAEVRAFFDVHEQEGSHPGGVHLEMTGQNVTECIGGSRTVTFDDLGSRYHTHCDPRLNASQSLELAFIIAERLRKRRINSQQLQPLITGL

SEQ ID NO: 62662 - protein, 142 aa, Gossypium hirsutum
  Clone ID: LIB3584-048-P1-K2-C7.pep
CNRHSFDEKSRIPDPQRMIRAYCQSAATLNLLRAFATGGYAAMQRVTQWNLDFTEHREQGDRYRELASRVDEALGFMAAAGLTVDHPIMTTTEFWTSHECLLLPYEQSLTRLDSTSGRYYDCSAHFLWVGERTRQLDGAHVE

SEQ ID NO: 62663 - protein, 192 aa, Gossypium hirsutum
  unsure (1)..(192): unsure at all Xaa locations
  Clone ID: LIB3831-001-Q1-K6-F5.pep
TKKALTNSSILPTNSILQSQPSTPFSKAKPLSVLRISAVHSSDSPKNPVVSDKSVKQPATAPLAATKSATAPTTAPPKNAVPGKWTVDSWKSKKALQLPEYPDQAELXLEEKLGEAAMGNAFLLQGGDCAESFKEFNANNIRDTFRILLQMGAVLMFGGQMPVIKVGRMAGQFAKPRSDPFEEKNGVKLPSY

SEQ ID NO: 62664 - protein, 62 aa, Gossypium hirsutum
  Clone ID: LIB3585-067-P1-K1-G7.pep
SFQICLPFPACGRYRELASRVDEALGFMAAAGLTVDHPIMTTTEFWTFHECLLLPYEQALTR

SEQ ID NO: 62665 - protein, 92 aa, Gossypium hirsutum
  unsure (1)..(92): unsure at all Xaa locations
  Clone ID: GOSHI-09MAY01-C2551_1.pep
RSWKSSPDLHMEHVKLIASAEEAHRSVEELQSKAKELEDVIERQRIMILEGXAEEKREAIRQRGVSLDHYRDGYHWLRQAFMGQKRVPVLTT

SEQ ID NO: 62666 - protein, 200 aa, Gossypium hirsutum
  Clone ID: GOSHI-09MAY01-C2541_1.pep
QAASRGSSQLAVPAAPTPTATVLKTWRENKAAEIKDFQIVVADKGEGKKQQLAPKRSSNKDRHTKVGGGGRRIRMPALCAARIFQLTRELGHKSDGETIQWLLQQAEPSIIAATGSGTIPASALAAAGGSVSQPGASLSAGLLHMMDVLGGSSLGSGSSRTCWPLVGGILGSPHLVASGFWPPLCCFGFSSFFCPSSPLF

SEQ ID NO: 62667 - protein, 92 aa, Gossypium hirsutum
  Clone ID: GOSHI-09MAY01-C2571_3.pep
DIRMSVRSMRPLVFFQQLASKHISYAEQNEKLNFAYACLSLIRYTKLTKQLVSFLPLLVCHKWLLIYICIYTSHHSTYMLQIAFYILVYLLP

SEQ ID NO: 62668 - protein, 120 aa, Gossypium hirsutum
  Clone ID: GOSHI-09MAY01-C2571_2.pep
EAALNCCLEELEAKNNETLLLGKKVKELEDKLQVAVKGGGSSAELKDGVEVKSRDIDGLTFSASSKRKSKKKLEAASVQAASSSSTPTHHEVASPLTTLKFILGIAFVSVIIGVILGKRY

SEQ ID NO: 62669 - protein, 127 aa, Gossypium hirsutum
  Clone ID: GOSHI-09MAY01-C2571_1.pep
RTVGENLETQLKQAVQIAAQSQADHARDLGDRDAIDKQKEAEREAALNCCLEELDAKNKETLLLGKKVIELEDKLQVAGKGGGSSPELKDGVEVKSRDIRWINIFISIIMAYPYIFGICLSDSYYPF

SEQ ID NO: 62670 - protein, 93 aa, Gossypium hirsutum
  Clone ID: LIB3584-035-P1-K1-F9.pep
LEDKLQVAAKGGGSSAELKDGVEVKSKDIDGLTFSAPSKRKSKKKLEAASVQAASSSSTPTNHEVASPLTTLKFIFGVAFVSVIIGVILGKRY

SEQ ID NO: 62671 - protein, 57 aa, Gossypium hirsutum
  Clone ID: LIB3145-016-Q1-K1-E4.pep
NTLISCSTLPVYTKNTSMMISRKHKVNNTYTYTCTCTYTYIPFFQVWKAAQPYAPSA

SEQ ID NO: 62672 - protein, 132 aa, Gossypium hirsutum
  Clone ID: GOSHI-09MAY01-C2511_1.pep
FVCETGNKRKKTMGVFTFVCRSKGGEWSAKQLEGEIESSAASTYELQRKLVQAATACDSSGGVTSSFSVVTPNSAVFQVVIGGAVGGAFIGGGGAAAAPAGGAAAAAEAPAAEEKKEEKEESDDDMGFSLFD

SEQ ID NO: 62673 - protein, 52 aa, Gossypium hirsutum
  Clone ID: LIB3147-004-Q1-K1-E8.pep
REGRPFRRFLRTPRVSSYTKPTDTLHSSLTIKVFFKRHTHNIVDFILKNGFS

SEQ ID NO: 62674 - protein, 230 aa, Gossypium hirsutum
  unsure (1)..(230): unsure at all Xaa locations
  Clone ID: GOSHI-09MAY01-C2531_1.pep
HATQDNTENNQNADQNEHNAAPSNTENNENAGQNENNATPSNTDNNENAXRDENNVTQSNTDNSNSNNNNENASQNENNAAQSSNNNENASQDENNASQSFTDTTNNNENASQNENNASQSYTDTTTNESNDAIQTNTNSNENSSPNENNAVQASNNENAGQNENENNATHSFNDSNGSSNYDTNTDGNTQNNPDTSSTNQEVKEGETGLGTLPGTTTSEGNKSENAAAE

SEQ ID NO: 62675 - protein, 149 aa, Gossypium hirsutum
  unsure (1)..(149): unsure at all Xaa locations
  Clone ID: LIB3189-048-P1-K1-E1.pep
NDSSSNENAAQSNTNNNENNNNGNAGQDGKNATXSNTDNNENVGQNENNAAQSNTENNENAGQNESNATQSNTENNENAGQNEKNAAPSDAENNENVGQNENNAAPSNTENNENAGQNENNAASSDTDNNENAGQNENNATQSNTGGNN

SEQ ID NO: 62676 - protein, 314 aa, Gossypium hirsutum
  unsure (1)..(314): unsure at all Xaa locations
  Clone ID: GOSHI-09MAY01-C2521_1.pep
PRPLKAGFDKGNKKREGSSAAGGGDDNDEGKGRKLENGNSNGKNFEIDEPRMTAAVNGKENTSSNFSAFDVSKLQKRTKGGKKTDTVVNKGSKVDPKKKXTKGNRVWDDAPPGTKLDFTDPVDGNGNEKMEVVPASQGESMMDVEEIISSDSGGEEDDNVQKDSKPEATKKGWFSSMFQSIAGKANLEKGDLEPALKALKDRLMTKNVAEEIAEKLCESVSASLEGKKLASFTRVSSTVQAAMEEALVRILTPRRSIDILRDVHAAKEQRKPYVVVFVGVNGVGKSTHLAKVAYWLLQHNVSVMMAACDTFRSV

SEQ ID NO: 62677 - protein, 186 aa, Gossypium hirsutum
  Clone ID: GOSHI-09MAY01-C2491_2.pep
MASEAAVEVNAISAAAPEAAATTGAEKQPHKLERKWTFWFDNQSGPKQGAAWGTSLRKVYTFDTVEEFWCLYDQIFKPSKLPGNADFHLFKAGIEPKWEDPECASGGKWSVTSNRKANLENMWLETLMALIGEQFDEADEICGVVATVRPRLDKLALWTKTATNEAAQMGIGRKWKEIIGGNDKIT

SEQ ID NO: 62678 - protein, 204 aa, Gossypium hirsutum
  Clone ID: GOSHI-09MAY01-C2491_1.pep
MASEAAEEANVPAAAAAEAPTTGTEKQPHKLERKWTFWFDNQSKPKQGAAWGSSLRKVYTFDTVEEFWCLYDQIFKPSKLPGNADFHLFKAGIEPKWEDPECANGGKWSVTSNRKANLENMWLESLMALIGEQFDEADEICGVVASVRQRQDKLALWTKTATNEAAQMGIGRKWKEIIDINDKITYSFHDDSRRERSAKGRYNV

SEQ ID NO: 62679 - protein, 104 aa, Gossypium hirsutum
  Clone ID: LIB3196-020-P1-M1-G6.pep
MASEAAVEVNAISAAAPEAATTTGAEKQPHKLERKWTFWFDNQTGHKQGADWGTSLRKVYTFDTAEECWCLHDQLFKPTTVAKNTDYQLCKAGNGPKWADPLCA

SEQ ID NO: 62680 - protein, 92 aa, Gossypium hirsutum
  unsure (1)..(92): unsure at all Xaa locations
  Clone ID: GOSHI-09MAY01-C2441_3.pep
RFFFFTMAHTXPVKSIVSRLIPLPPQEERELKETLQEIIGQGKQVKLEQKIDPSILGGLVVEFEQKVFDMSIKTRARQMERFLREPINFGSL

SEQ ID NO: 62681 - protein, 299 aa, Gossypium hirsutum
  Clone ID: GOSHI-09MAY01-C2441_1.pep
MAVAARFRSTLPLFHRLLRSDSLPSHTPRATLHRTLLCPELSRKYSTSLKKDENVKVPLALFGGSGNYASALYLAAVKGNALDKVESELLDLVQASKNSQLFSQFTKDLSVPAETRVKAINEICGQAKFSDLTKNFLVILAENGRLRHIESIAKRFVELTMAHKGEVKAIVTSVIPLPSQEEKELKETLQEIIGQGKQVKLEQKIDPSILGGLVVKFEQKVFDMSIKTRARQMERVLREPITLVPFEDIITGQWTLSFLAPLGISELQRNYGFWFALFLYFAFWRKLLSIKNFWFFLLI

SEQ ID NO: 62682 - protein, 197 aa, Gossypium hirsutum
  unsure (1)..(197): unsure at all Xaa locations
  Clone ID: LIB3829-028-Q6-K6-B11.pep
AFDYLDRFLSSQXLPQNKTWVLRLIAISCVSLAAKMNRTDFSLAEFQGDGGFMFDARTIERMEFLILGALKWRMRSITPFSFISFFIPFLKLKDPALRQALKARAVEIIFKAQTVTKLLEFKPSIIAASAFLFASHELFPLQFPCYHKAIPRAALHRTLLCPELSRKYSTSPKKDENVKVPLALFGGSGNYASALYL

SEQ ID NO: 62683 - protein, 79 aa, Gossypium hirsutum
  unsure (1)..(79): unsure at all Xaa locations
  Clone ID: LIB3145-016-Q1-K1-A10.pep
MHTAPXXLAAVKRKWLWTRVESELLXDLVQASKNSQLFSQFTKDLSVPAETRVKAINEICGQAKFSDLTKNFLVILAEN

SEQ ID NO: 62684 - protein, 149 aa, Gossypium hirsutum
  Clone ID: GOSHI-09MAY01-C2471_1.pep
EAALSAFLELLSGKLVDSVLNFVAGHRQVHQQLEQWQSILPEIKAVLNRTEEKQIKGEDDGVKNWLDDLQDLAYDVDDILDEFAYQQLHLKLQKPQSQASTSKVQKLIPTCCTGTNFSPTSFKFNTKMISKIKEITSRLNRFKHKRNHQ

SEQ ID NO: 62685 - protein, 354 aa, Gossypium hirsutum
  Clone ID: GOSHI-09MAY01-C2461_1.pep
GRVRKKLVNFEWIVLGSNFLEITEKKRLICKYTIRIIAMGFKIFVVAMMVGSIAAAQISLASTVPAFLWAPGFSSVESKESVNYQIKSPKDLANSVLSQGGWSDLLCSERKNERPVDLAVVFVGRELHSSDVAGNKHADPALLNLLKDSFTKSNFSMAFPYVATSEEETMENLLVSSFKEACAHGLGVANVAILESCSIEGGDFQKLANLHSVHDHLVKRMEKRTKGETDLVVLCHGGFQSLKELDQPFPQSEILTEVMSSVEQSGAKYAALYVSDPFKSIHYPGYRELERFLADDTAKNGSASPKVCDEVCQLKSSLLEGVLVGIVLLLILVSGLCCMMGIDTPTRFEAPQEN

SEQ ID NO: 62686 - protein, 150 aa, Gossypium hirsutum
  unsure (1)..(150): unsure at all Xaa locations
  Clone ID: LIB3829-032-Q6-N6-D3.pep
GQKPYYNLKMLGCTXKTDQFSWGASNLVGVSMPIMXQRPGAWVWSAPVSTKTPSRRDDFSWATLSPTLGNWVSPSFGGSSARRTFSSLLLPGIGGWGLRGGGGRVGGGFLWSPTASASLAGVGAGMWSLLGRGWGRGLWWGLGGRAVGGG

SEQ ID NO: 62687 - protein, 87 aa, Gossypium hirsutum
  unsure (1)..(87): unsure at all Xaa locations
  Clone ID: LIB3584-020-P1-K1-F7.pep
HASAHASAHASXSSXEQSGAGYAALYVSDPFKSIHYPGYRELERFLADDTAKNGSASPKVCDEVCKLKSSLLEGVLVVSLCLCPPHF

SEQ ID NO: 62688 - protein, 215 aa, Gossypium hirsutum
  Clone ID: GOSHI-09MAY01-C2411_1.pep
MSTAVPPVIPVSSVQSVESQPPAASPAFLSFVSRLNESLRNGLSQRRPWAELVDRSAFSKPESFSDALVRVRKNYSYFRVNYLSVIGLILAFSLLSHPFSLLLLLGLLCSWIFLYLFRPADQPLILFGRTFSDRETLGFLIIFSVFVVFLTTGGSLLISALMVGVGLVCAHGAFRAPEDLFLDEQEQVSTGFLSFLGGAATNAAVAAAPAVAARV

SEQ ID NO: 62689 - protein, 96 aa, Gossypium hirsutum
  Clone ID: LIB3196-012-P1-M1-F1.pep
MSTAVPPVIPVSSVQSVESQPPVASPAFLSFVSRLNEFLRNGLFQRRPWAELVDRSAFSKPESFSDALVRVRKNYSYFRVNYLLGIGLILAFCLFS

SEQ ID NO: 62690 - protein, 354 aa, Gossypium hirsutum
  Clone ID: GOSHI-09MAY01-C2401_1.pep
MKKKMIAIGFEGSANKIGIGVVTLDGTILSNPRHTYITPPGQGFLPRETAQHHLQHVLPLVKSALKTAEITPDEIDCICYTKGPGMGAPLQVSAIVVRILSLLWKKPVVAVNHCVAHIEMGRIVTGADDPVVLYVSGGNTQVIAYSEGRYRIFGETIDIAVGNCLDRFARVLTLSNDPSPGYNIEQLAKKGEKFIDLPYVVKGMDVSFSGILSYIEATAEEKLKNNECTPADLCYSLQETLFAMLVEITERAMAHCDSKDVLIVGGVGCNERLQEMMRIMCSERGGRLFATDDRYCIDNGAMIAYTGLLAFAHGYSTPLEESTFTQRFRTDEVHAIWREKQESGDLSGLPDGGI

SEQ ID NO: 62691 - protein, 132 aa, Gossypium hirsutum
  Clone ID: LIB3828-005-Q1-K6-E9.pep
MKKKMIAIGFEGSANKIGIGVVTLDGTILSNPRHTYITPPGQGFLPRETAQHHLQHVLPLVKSALKTAEITPDEIDCICYTKGPGMGAPLQVSAIVVRVLSLLWKKPIVAVNHCVAHIEMGRIVTGADDPVV

SEQ ID NO: 62692 - protein, 253 aa, Gossypium hirsutum
  Clone ID: GOSHI-09MAY01-C2421_3.pep
THAAATRRLPEAENQASDGAREKPRRAAGIARKVIITKDSTQLIAEAASKDEIQTRVAQLKKELVQTDSVYDSEKLAERIAKLSGGVAVIKVGAATETELEDRKLRIEDAKNATFAAIEEGIVPGGGAALVHLSSCVPAINEKLEDADERLGADIVQKALGAPASLIAQNAGMEGEVVVEKVKSSEWGVGSNAMPAKFENLLEAGVIDPPKVPRCALQNASSVAGMVLTTQAIVVEKPKPKASAAAAPSGLAV

SEQ ID NO: 62693 - protein, 192 aa, Gossypium hirsutum
  Clone ID: GOSHI-09MAY01-C2421_2.pep
MASANALSSASVLCTSKQGSLGRRGNQRQNQRVNYRQGRGRGGVRACAKEIAFDQSSRAAMQAGIDKLADAVGLTLGPRGRNVVLDEYGSPKVVNDGVTIARAIELPNAMENAGAALIREVASKTNDSAGDGTTTASILAREIIKLGLLSVTSGANPVSVKRGIDKTVQRLVEELEKKARPVKGRDDIKAVA

SEQ ID NO: 62694 - protein, 586 aa, Gossypium hirsutum
  Clone ID: GOSHI-09MAY01-C2421_1.pep
MASANALSSASILCSPNKGSLRRKGNQRQNQRVNYRQGNNRFGVKACAKEIAFDQSSRAAMQAGIDKLADAVGLTLGPRGRNVVLDEFGSPKVVNDGVTIARAIELPNAMENAGAALIREVASKTNDSAGDGTTTASVLAREIIKLGLLTVTSGANPVSVKRGIDKTVQWLIEELEKKARPVKGRDDIKAGASISAGNDDLIGTMVADAIDKVGPDGVLSIESSSSFETTVDVEEGMEIDRGYISPQFVTNPEKLICEFENARVLVTDQKITAIKDIIPLLEKTTQLRAPLLIIAEDVTGEALATLVVNKLRGILNVAAIKAPSFGERRKAVLQDIAILTGAEFQANDLGLLIENTSVEQLGIARKVIITKDSTQIIADAASKDEIQARVQQLKKELAETDSVYDTEKLAERIAKLSGGVAVIKVGAATETELEDRKLRIEDAKNATFAAIEEGIVPGGGAALVHLSTCVPAIKDKLEDSEERIGADIVQKALVAPASLIAQNAGMEGEVVVEKVKNSDWEIGYNAMTDTYENMLEAGVIDPAKVTRCALQNAASVAGMVLTTQAIVVEKAKPKAPAAAAPEGLTI

SEQ ID NO: 62695 - protein, 127 aa, Gossypium hirsutum
  Clone ID: LIB3583-008-P1-K1-F12.pep
MASANALSSASVLCTSKQGSLGRRGNQRQNQRVNYRQGNSRFGVRACAKEIAFDQSSRAAMQAGIDKLADAVGLTLGPRGRNVVLDEYGSPKVVNDGVTIARAIELPNAMENAGAALIREVASKTND

SEQ ID NO: 62696 - protein, 58 aa, Gossypium hirsutum
  unsure (1)..(58): unsure at all Xaa locations
  Clone ID: uC-gsflmaxxa014d12b1.pep
VASILCSPNKGSLRRKGNQRQNQRVNYRQGNNRFGVKAXAKEIAFDQSSRAAMNAVFV

SEQ ID NO: 62697 - protein, 131 aa, Gossypium hirsutum
  unsure (1)..(131): unsure at all Xaa locations
  Clone ID: GOSHI-09MAY01-C2711_2.pep
MFSLFYGLYKYLFSKTEFHVLILGIDKAGKTTLLEKLKSVYSNLEGLPPDRIVPTVGLNIGRVEVLNTKLVFWDLGGQPGLRSIWEKYYEEAHAVVFVIDAACPSXFEDSKSALEKVLRHEDLXGAPLLIL

SEQ ID NO: 62698 - protein, 153 aa, Gossypium hirsutum
  Clone ID: GOSHI-09MAY01-C2711_1.pep
MFSLFYGLYKYLFSKTEFHVLILGIDKAGKTTLLEKLKSVYSNLEGLPPDRIVPTVGLNIGRVEVLNTKLVFWDLGGQPGLRSIWEKYYEEAHAVVFVIDAACPSRFEDSKSALEKVLRHEDLQGAPLLFLANKQDLSEAVPLKTSPILDLKN

SEQ ID NO: 62699 - protein, 293 aa, Gossypium hirsutum
  Clone ID: GOSHI-09MAY01-C2731_1.pep
MREEDSNWFSRWEEELPSPDELMPLSQSLITPDLAMAFDIRNPNHHHAQQQQSSVQPAPPPPSAAVQPSSQPTLAEFAADSGDLGSGAAGDEPARTLKRPRLVWTPQLHKRFVDAVAHLGIKNAVPKTIMQLMSVDGLTRENVASHLQKYRLYLKRMQGLSGGSGGGANGGSGGAGLGASADPATDHLFASSPVPPHFLHPGRGNSEHFLPFVPVPALQHHHHHQQQLIVAAAVGHPHLQSQFHRPQMGHYGSSPNSQFEHPFLGWPSLLPLLRFGGTPLHYLAPCGLWEIWN

SEQ ID NO: 62700 - protein, 214 aa, Gossypium hirsutum
  Clone ID: GOSHI-09MAY01-C2721_1.pep
MAAPPARARADYDYLIKLLLIGDSGVGKSCLLLRFSDGSFTTSFITTIGIDFKIRTIELDGKRVKLQIWDTAGQERFRTITTAYYRGAMGILLVYDVTDESSFNNIRNWIRNIEQHASDNVNKILVGNKADMDESKRAVPTSKGQALADEYGIKFFETSAKTNLNVEEVFFSIATDIKQRLTESDNKAEPTGLKINKQDSAAASQAAQKSGCCG

SEQ ID NO: 62701 - protein, 159 aa, Gossypium hirsutum
  Clone ID: LIB3543-059-Q6-K6-D12.pep
MAAPPARARADYDYLIKLLLVGGGGVGKSCLLLRFSDGSFTTSFITTIGIDFKIRTIELDGKRIKLQIWDTAGQERFRTITTAYYRGAMGILLVYDVTDESSFNNIRNWIRNIEQHASDNVNKVLVGNKADMDESKRAVPTSKGQALADEYGIKFFETS

SEQ ID NO: 62702 - protein, 464 aa, Gossypium hirsutum
  Clone ID: GOSHI-09MAY01-C2681_1.pep
RNSLWFFLKLKSSAFGVDALLVSWLILKNFCVQSPFPWCFIMDSPQSVVSPFKNSVVAEPEKQKTEFFSRNSGGLLSNGSEVNKKEENSIGVLEVYVHQARDIHNICIYHKQDVYAKLCLTSDPESTVSTKIINGGGRNPVFNDNLRLNVRTVDSSLKIEIFMMSRVRNYLEDQLLGFALVPLSEVLLKNGKLEKEFSLSSTDLFHSPAGFVQLSLAYAGLSPEVMAIPAMPRDVAADETVKDSETSECELEKIEFPDPIIANENQMMVSEYIGIQCSNLDSESSESLGTSDAESQISSDMGARLMESFSTATVNSIQAPKLDSPPSSVSTNGVSSPSAGASSESFDGLAASKTSTQEHISAPKEKAVDVGDVDSHSSGAQSDSIVKPVVSVNIEPEQKLVQQDIVDMYMKSMQQFTESLAKMKLPLDIDSGPTKSENSSTTDQKIQASKNTGSRVFYGSRAFF

SEQ ID NO: 62703 - protein, 65 aa, Gossypium hirsutum
  Clone ID: GOSHI-09MAY01-C2671_1.pep
YGNVRILAESCQVLSMRSVYDVYISLFKFSLFCSLVFSNVQFVLAVKKKKKILYNFYIFIYKKKL

SEQ ID NO: 62704 - protein, 328 aa, Gossypium hirsutum
  unsure (1)..(328): unsure at all Xaa locations
  Clone ID: GOSHI-09MAY01-C2661_1.pep
EYLLKGIKTVYANVRGLANRGKMTKDKAEKALSMLKGVLDYSEFKDVDMVIEAVVENVALKQKIFSEIEKACPPHCILATNTSTIDLNLIGEKMNSQDRLIGAHFFSPAHLMPLLEIVRTQKTSPQIILDLMTVGKVIKKVPVVVGNCTGFAVNRTFFPYTQGSHLLVSLGVDAYRIDRVICNFGFPLGPFQLQDLAGYGVAFAVGQEYAKAFSDRIFESPLLELLAKDGRNGKNNGKGYYIYEKGSKPKPDPSVLSIIEESRRLTNVMPGGKPISVTDREVLEMILFPVVNEACRVLEXRVVVRASNLDVASVLGMSXPSYRGGIYF

SEQ ID NO: 62705 - protein, 165 aa, Gossypium hirsutum
  Clone ID: GOSHI-09MAY01-C2611_1.pep
MKHDTKGGGGTRHPVYRGVRKRRWGKWVSEIREPRKKSRIWLGSFPVPEMAAKAYDVAAFCLRGRKAQLNFPDEVDDLPIPLTSTARDIQAAAAKAAHLVVSSSKKIPESSEDGSDDFWGEIELPELMNNGGCQWNSCGWTFAGDSSWLDGETQTQQHFLAVFVV

SEQ ID NO: 62706 - protein, 292 aa, Gossypium hirsutum
  unsure (1)..(292): unsure at all Xaa locations
  Clone ID: GOSHI-09MAY01-C2631_1.pep
MLSINLPPXSCHSLHFGFLDVHSADIPKEFNKIRTHGSVGQHTRNTEKESMSDDEYVKETHLLLRDVHQSIFNDQVFDMLNCEAFNQSVGVNVTGMRENYLQLSIGQGTSLFISLVPSSEGDNQAVDTANTQNVDSAIVPLDSFDEVKFGEREHDTPTMKKKWGFPHRISCEIYLQQIVHEHAFLKAKDKPNLSGTPVSGQSGKDGPGLLGHFCLSLAHRIFSSRVLIELENVCRVPYLHLMTHPTWHSRKSSWTIFMKVPQSILHAESQSPRSDFQNIKDVLKSQFHTKVV

SEQ ID NO: 62707 - protein, 145 aa, Gossypium hirsutum
  Clone ID: LIB3145-011-Q1-K1-F1.pep
IFDDQVFEMLNREAFNQSIGVNVTGIRENYLQLSIGQGNTLFISLVPSSKGDDQDAANTQDSESAIVPLDSFDNVKLEEGKHGTSKRKWGFPNRTSCEIYLQQIVHEHAFVKAKDKPNLSGTRVSGQSGKDGPGLLGHFCLSLAH

SEQ ID NO: 62708 - protein, 180 aa, Gossypium hirsutum
  Clone ID: LIB3583-022-P1-K1-G10.pep
MAPPGTIRWCALVLTLFLSLYISPSIAIYCDEDDCYDLLGVSQSANASEIKKAYYKLSLKYHPDKNPDPESRKLFVKIANAYEILKDEATREQYDYAIAHPEEVFYNTARYYRAYYGHKTDTRAVLVGVLLILSVFQYFNRLTRYNQAVDMVKKTPAYKNRLRALELERSGGTTNKKKEY

SEQ ID NO: 62709 - protein, 183 aa, Gossypium hirsutum
  unsure (1)..(183): unsure at all Xaa locations
  Clone ID: AI729373.1.pep
MAPPGTIRWCALVLTLFLSLYISPSIAIYCDENNCYDLLGVSQSANASEIKKAYYKLSLKYHPDKNPDPESRKLFVKIANAYEILKDEATREQYDYAIAHPEEVCYNTARYYRAYYGHKTDTRAVLVGVLLILSVFQYFNRLXRYNQAVNMVKKNPTYKNXLRALEFDRIEEPPIRRNIYGFF

SEQ ID NO: 62710 - protein, 428 aa, Gossypium hirsutum
  Clone ID: GOSHI-09MAY01-C2171_2.pep
MSQAEVLRMKPPLVPLATLIGRELRNEKVEKPFVKHGQAALAKKGEDYFLVPPVRPRVPGNPASSFSVFAIFDGHNGISAAIFAKENLLSNVLSAIPQGISREEWLQALPRALVAGFVKTDIEFQQRGETSGTTVTFVVIDGWTVTVASVGDSRCILDTQGGIVSLLTVDHRLEENAEERERVTASGGEVGRLNVFGGNEVGPLRCWPGGLCLSRSIGDTDVGEFIVPIPHVKQVKLSNAGGRLIIASDGIWDALSSDMAAKSCRGLPADLAAKLVVKEALRSRGLKDDTTCLVVDIIPSDQPVLPSTPMKKQNALSSFLFGKRSQTSTNKTTNKLSAVGVVEELFEEGSAMLAERLGKDFPMNTNSGLFKCAVCQVDQPPAEGLTVNSGPFFSPASKPWEGPFLCTNCRKKKDAMEGKRSGRPTVLA

SEQ ID NO: 62711 - protein, 201 aa, Gossypium hirsutum
  Clone ID: GOSHI-09MAY01-C2171_1.pep
PRVRVKQVKLLYAGGRLIIAADGIWDALSSDMAAKSCRGLPADLGAKMVVKEALRSRGLKDDTTCLVVDIIPSDQPVLPSTPRKKQNMLSSILFRKKSLNFTNKTTNKLSAIGVVEELFEEGSAVLAERLGKDFPTNANSGIFRCAVCQVDQPPAEGLTMSSGPFFSHSSNRWEGPFLCTNCRKKKDAMEGKRPTRPTVVA

SEQ ID NO: 62712 - protein, 75 aa, Gossypium hirsutum
  Clone ID: GOSHI-09MAY01-C2121_1.pep
MADKGRPLPKFGEWDVNDPSSAEGFTVIFNKARNEKKTGGKIESPGANDPACKQEAVAAKPQKKWLCCVQATHAD

SEQ ID NO: 62713 - protein, 214 aa, Gossypium hirsutum
  Clone ID: GOSHI-09MAY01-C2091_1.pep
MLVESIQEEKPFLSGMVDGSTNLPVNLSCFELIKPSLDETNQHCSLDVLPILLEETSFSAREKCSLNTSQGQDVYSISVLPEEGNMNPKCTPQLTFLSLLEVPFLSKNQMCLDEQLSCQNCIDLKVDSEDAYSSCILDINIEKETPDLLKSNDETVGNSKSEGVVTHLQKVLQRQASLNKSSNERVHDAPSNRWRRYKRAASFDSKKIVLLFSI

SEQ ID NO: 62714 - protein, 119 aa, Gossypium hirsutum
  unsure (1)..(119): unsure at all Xaa locations
  Clone ID: LIB3196-022-P1-M1-B3.pep
AHASAHACADAWVPFLSKNQMCLDEQLSCQNCIDLKVDSEDAYSSCILDINIEKETPDLLKSNDETVGYSKSEGVVTHLQKVLQRQASLNXKSSNERVHDAPSNRWRRYKRAASFDSRK

SEQ ID NO: 62715 - protein, 274 aa, Gossypium hirsutum
  Clone ID: GOSHI-09MAY01-C2051_1.pep
DGDSSLGTKQKWCSSVANEDKVIDPFVEVEKKEVLGSSSVPSVEVDVDNKKNVSEGSERSSQTHQKSPVVGHSPKGTEKEALPPGFGKDTVFENVDEVKAEKDVETTAPAHTGECETVSAQKGELVEQKLEDNEGIEPCAGPSPCVSPTVRDKEQPMRPRGPNLTGEEADEAEEGTSATRDAPVTGGTDSDAKVEFDLNEGFNADEGKFGDPNNLTASGCSAPVQLISSLPFPVSSVSSGVPSTITVAAAAKGPFVPPDNLLRPKRALGWKGIS

SEQ ID NO: 62716 - protein, 230 aa, Gossypium hirsutum
  unsure (1)..(230): unsure at all Xaa locations
  Clone ID: GOSHI-09MAY01-C2071_1.pep
LPFLAQCKACDPSFPEVCPTNDRSGNFKQFNCPDGYYNDLATXLLLTTNDDAVRNIFSSNTPSEFQYTSILIFFALYCILGLITFGIAVPSGLFLPIILMGSGYGRLLSMLLGSYTNLDQGLYAVLGAASLMAGSMRMTVSVCVIFLELTNNLLLLPITMIVLLIAKTVGDRFNPSIYEVILELKGLSFLDANPEPWMRNLTVGELANAKSPAVTLSGVEKVFRIVDVLK

SEQ ID NO: 62717 - protein, 117 aa, Gossypium hirsutum
  Clone ID: GOSHI-09MAY01-C2061_1.pep
LFKPKPKPDPKPNTPDSSPIAKTSPDFYRNPKQIQKSQAPQQWDPGLRTCITATCHVSMRCVEPRHVTVRPPYTCNTQRAQAATMHKKTAAKRRKRPEDNKKKNRGISFVFPAIKAI

SEQ ID NO: 62718 - protein, 139 aa, Gossypium hirsutum
  Clone ID: GOSHI-09MAY01-C2001_5.pep
VRRGGRKRPVPKGIVYGKPTNQGVTQLKFQRSKRSVAEERAGRKLGGLRVVNSYWINEDSTYKYFEVILVDVAHNAIRNDPRINWICNPVHKHRELRGLTSAGKKNRGLHGKGHLHHKNRPSRRATWKRNNTLSLRRYR

SEQ ID NO: 62719 - protein, 119 aa, Gossypium hirsutum
  Clone ID: GOSHI-09MAY01-C2001_4.pep
NQGVTQLKFQRSKRSVAEERAGRKLGGLRVVNSYWINEDSTYKYFEVILVDTAHNAIRNDPRINWICNPVHKHRELRGLTSAGKKYRGLRGKGHLHHKARPSRRANWKRNNTLSLRRYR

SEQ ID NO: 62720 - protein, 127 aa, Gossypium hirsutum
  Clone ID: GOSHI-09MAY01-C2001_3.pep
GIVYGKPTNQGVTQLKFQRSKRSVAEERAGRKLGGLRVVNSYWINEDSTYKYFEVILVDPAHNAIRNDPRINWICNPVHKHRELRGLTSAGKKYRGLRGKGHLHHKARPSRRATWKRNNTLSLRRYR

SEQ ID NO: 62721 - protein, 157 aa, Gossypium hirsutum
  Clone ID: GOSHI-09MAY01-C2001_2.pep
ARRLGYKAKQGYVVYRVRVRRGGRKRPVPKGIVYGKPTNQGVTQLKFQRSKRSVAEERAGRKLGGLRVVNSYWINEDSTYKYFEVILVDVAHNAIRNDPRINWICNPVHKHRELRGLTSAGKKNRGLHGKGHLHHKNRPSRRATWKRNNTLSLRRYR

SEQ ID NO: 62722 - protein, 204 aa, Gossypium hirsutum
  Clone ID: GOSHI-09MAY01-C2001_1.pep
MGAYKYVSELWRKKQSDVMRFLQRVRCWEYRQHPSIVRVNHPTRPDKARRLGYKAKQGYVVYRVRVRRGGRKRPVPKGIVYGKPTNQGVTQLKFQRSKRSVAEERAGRKLGGLRVVNSYWINEDSTYKYFEVILVDAAHNAIRNDPRINWICNPVHKHRELRGLTSAGKKYRGLRGKGHLHHKARPSRRATWKRNNTLSLRRYR

SEQ ID NO: 62723 - protein, 99 aa, Gossypium hirsutum
  unsure (1)..(99): unsure at all Xaa locations
  Clone ID: uC-gsronu33B012c12b1.pep
VRIPLGGFIVEKLFWINEDIDXLYFEVILVDVAHNGIRNDPRINWICNPVHKHRELGGLTSAGKKNRGLHGKGHLHHKNRPSRRATWKRNNTLSLRRYR

SEQ ID NO: 62724 - protein, 147 aa, Gossypium hirsutum
  unsure (1)..(147): unsure at all Xaa locations
  Clone ID: LIB3828-003-Q1-K6-G10.pep
RXRGEACSQGIVYGKPTNQGVTHXXXXXXXXXXXXXXXXXXXXXXXXXXXXXXXXXXXXXXXXXXXXXXXXXXXXXXXNWKVPAQQXRSVAXRSELXSKIRXGLXMLLTFILXINEXILXLQVLXRGYXXVDXLHTXCNXXNDPXXF

SEQ ID NO: 62725 - protein, 72 aa, Gossypium hirsutum
  Clone ID: LIB3829-030-Q6-K6-D4.pep
PASTGPKIPVPTTRPKIYKMSHTQNNCLKIPINPTIVIKPTYKQHTLPSPLPLIPWTVLGDFVPAILASLLL

SEQ ID NO: 62726 - protein, 60 aa, Gossypium hirsutum
  unsure (1)..(60): unsure at all Xaa locations
  Clone ID: LIB3493-030-P1-M1-C8.pep
MGAYKYVSELWRKKQSDVMRFLQRVRCWEYRXHPXIVRVNHPTRPDKARRLGFKAKPGYV

SEQ ID NO: 62727 - protein, 305 aa, Gossypium hirsutum
  Clone ID: GOSHI-09MAY01-C2031_1.pep
YNFFIEKGRPVLQGLHAIDFLAKEVLGWAQAMPKFAAELVKFVQTFLERTFERCRTSYMEAVLEKQSYMVVGRHDTDAWVRRDPASACLPNALGQSNMGNIVSDMESMEIESELNELLLNLRPIRQDNLIRDDHKLVLLASLSDSLEFVADSIERLVQSTPLAALNNVETSNKQTSSSPARDLASFADEYRKLAIDCLKVLRVEMQLETIFHLQEMTSREYLDNQDAEEPDDFVISLTAQITRRDEEIAPFVAGVKRNYIFGGICSIAANASLKALADMKSINLFGVQQICRNSIALGQALAAIP

SEQ ID NO: 62728 - protein, 149 aa, Gossypium hirsutum
  Clone ID: GOSHI-09MAY01-C2351_2.pep
MATETVESLPPTLEANAEQPPLFDGTTRLYTSYPCPFAQRVWITRNYKGLQDEIKLVPLNLQNRPAWYKEKVYPVNKVPSLEHNGKIIGESLDLIKYVDSNFEGPSLVPDDPVKKRTTLRRCYLTWTNFQGWCMPHFKGALFKDAVAFF

SEQ ID NO: 62729 - protein, 237 aa, Gossypium hirsutum
  Clone ID: GOSHI-09MAY01-C2351_1.pep
MATPSVEYLPPPLDATAQQPAIFDGTIRLYLAYPCPYAQRVWIARNCKGLQDKIKLVPLNLQNRPAWYKEKVYPENKVPSLEHNGKVIGESLDLIKYVDSNFEGPSLLPDDADKKEYFETTLSHMDEFLGLVYATFKGDSTKDADAAFDHLETALAKYDGPFLLGNEFTLADIAFIPFVERFQIYLSEVFNYDLTAGRPKVAAWIEAADKIDAYKQTKKTDPKELVEIYKRIFSPQK

SEQ ID NO: 62730 - protein, 50 aa, Gossypium hirsutum
  Clone ID: AI054956.1.pep
TKNFGLASDAAFDHLETALAKYDGPFLLCNEFTLVSCLRRETKVYSSFIH

SEQ ID NO: 62731 - protein, 119 aa, Gossypium hirsutum
  unsure (1)..(119): unsure at all Xaa locations
  Clone ID: uC-gsflnu33B145a11b1.pep
KFDAPARAGPESQDRPRPTLTLTSAISQNAWLLQVSRLQPPPLDATAEQPAIFDGTIRMYLANSXPYAQRVWIASNCKGMQDKEKKVPLNHANITXWCKEKVNPEHTEPPLEHNGDLSY

SEQ ID NO: 62732 - protein, 59 aa, Gossypium hirsutum
  Clone ID: AA659959.1.pep
HEQQAGLKWHMELRRRTRSMPMKHTKKSDPKEIVEIYKRIFSARSEDEIDSWHHVCERE

SEQ ID NO: 62733 - protein, 41 aa, Gossypium hirsutum
  Clone ID: uC-gsronu33B156f09b1.pep
SCLMSYNNSFLFNSNLFFLYIDSFFFFIFSLCFIILSFILI

SEQ ID NO: 62734 - protein, 221 aa, Gossypium hirsutum
  Clone ID: GOSHI-09MAY01-C2341_3.pep
RPRVRYDRSFDRITPKNERRLERFKNRNFFKVTTTDDPVIRRLANEDKATVFATDTILSTLMCAPRSVYSWDIVIQRVGNKLFCDNRDGSQLDLLSVHETSQEPLPEAKDDINSAYSLSVEAAYINQNFSQQVLVRDGNKVSFDEPNPFANEGDEVASVAYRYRRWKLDNDMHLVARCEVQSVVDVNNQKSFLTLNALNEFDPKYSGVDWRQKLETQRGAC

SEQ ID NO: 62735 - protein, 344 aa, Gossypium hirsutum
  unsure (1)..(344): unsure at all Xaa locations
  Clone ID: GOSHI-09MAY01-C2341_1.pep
MVGGVEVGAVPFNPDGWGPPDSTTATAPSTTTTLPLHVPFAPFSRSEKLGRIADFTRSFANANPSNRPSSGKPGAASSESPFDFSLDLDTFPLANPEDDSSFRLVDAKPPTRPKFGPKWRFNQHRPQLPQRRDEEVEARKREAEKERARRDRLYNLNRSNQNQQRREAAIFKSSVDIQPEWNMLEQIPFSTFTKLSFSVSDPEDLLLCGALEYYDRSFDRITPKNERRLERFKNRNFFKVTTTDDPVIRRLANEDKATVFATDTILATLMCAPRSVYSWDIVGSTXVGNKLFFDKRDGSQLDLLSVHETSQEPLPEALDDIIPAYSLSGEAAYLNQNFSQQVLV

SEQ ID NO: 62736 - protein, 193 aa, Gossypium hirsutum
  unsure (1)..(193): unsure at all Xaa locations
  Clone ID: AI055695.1.pep
PDSTTATAPSTTTTLPLHVPFAPFSRSEKLGRIADFTRSFAXANPSNPPXQGARAAAFSKAPFEFLVRLHTLPFGNPEDQSSLRLIDAKPATXTKFGPKWGFNQHRAQLSQRRDEEVEARKREAEKERARRDRLYNLNRSNQNQQRREAAIIKSFGDIQPEWNMLDQTLFNIFKYPFRPELRLLLRAYKYNGL

SEQ ID NO: 62737 - protein, 295 aa, Gossypium hirsutum
  unsure (1)..(295): unsure at all Xaa locations
  Clone ID: GOSHI-09MAY01-C2371_1.pep
QRPIPTTLGQLKXLRFLRLNNNSLAGTIPRSLTTIDTLQVLDLSNNGLVGDVPVNGSFGLFTPISFANNKLNNPPPAPPPPIPPTPPAQSGISSTGAIAGGVAAGAALLFAAPAIVLALWRKRKAPDHFFDVPAEEDPEVHLGQLKRFSLRELQVATDNFSNKNILGRGGFGKVYKGRLADGSLVAVKRLKEERTQGGELQFQTEVEMISMAVHRNLLRLRGFCMTPTERLLVYPFMVNGSVASCLRERSESQPALDWAIRKRIALGAARGLAYLHDHCDPKIIHRDVKAANILL

SEQ ID NO: 62738 - protein, 168 aa, Gossypium hirsutum
  Clone ID: GOSHI-09MAY01-C2361_1.pep
SVSTRMLYALAKQPFTPKRYFSIDRVFRNESVDRTHLAEFHQIEGLVCDKGLTLGDLIGVLNDFFSRLGMSKLRFKPAYNPYTEPSMEIFSYHEGLKKWVEIGNSGMFRPEMLLPMGFPEDVRVIAWGLSLERPTMILYGVDNIRDLFGHKVDLSLMKRNPICRLGID

SEQ ID NO: 62739 - protein, 303 aa, Gossypium hirsutum
  Clone ID: GOSHI-09MAY01-C2311_1.pep
MALVVICGQPCSGKSTAAKCLAEALNESECKQTVRIIDETSFHLDRNQSYANMPSEKNLRGVLRSEVDRSVSKDNIIIVDSLNSIKGYRYELWCLARAAGIRYCVLYCDVRESQCRKWNEERREKGEAAYNDVIFEDLVRRFEKPDRRNRWDSPLFELWAHNDGVERSSIAIVDVVSYLTKKADSKSRDVKILQPTIATQNTRFSEANSLYEMDRATQEVINAIVEAQSQSIGGPLASISIGQGLPNIDISRSVGLPELRRLRRTFIKLTGQTSLSGRPPPSDSSSAKRMFVDYLNRELGTIA

SEQ ID NO: 62740 - protein, 329 aa, Gossypium hirsutum
  Clone ID: GOSHI-09MAY01-C2251_1.pep
PTRPKRANVRFSGLAAFLVSEPLSSVYASNGLHWARGLPANRSGICKFYGDRGSIPLFYVDFSAVPYSFMYMHCGMLLCSRRMQLVLVNTDEIFSACEEDKPCLTSVVDFSKRLSGSNVVKVDNFGSKGVSDRASKLKEIGRNGHYKHGLSCIIQRRRSLMRRRRARSPWLLGIHKGADSSQCSANILVTEPDRCYREEGAIVALELSASREWLLVVGKDGSTKYTYKADRAIRPSSCNRFTHAIIWTGDDNWKLEFVNQQDWVIFKDLYKECSERNAPSSTAKMIPVPGVCEVSGYEDRAFVPFKRPDFYITLDGDEVSRAWQRGPQL

SEQ ID NO: 62741 - protein, 111 aa, Gossypium hirsutum
  Clone ID: GOSHI-09MAY01-C2271_1.pep
RVINGAPWSFNNHLLILHRNGENEDTMSVPLVYSNWWIQIHDLPPGLFRDSMAGYGNFIGRFLEYDTKPLAIGNMNYMRIRVQLDVRMPLPLPAEYLGGQGITSERFGLGD

SEQ ID NO: 62742 - protein, 134 aa, Gossypium hirsutum
  Clone ID: GOSHI-09MAY01-C3961_1.pep
PRVRPRVRSDYQSGLRALVKTGPGAGVTPYVDDSIVIDFNPAKEALSPEFVRWLRERNLSSDDRVMRMKEGYIKEGSTASVMGVDHRNDNVLMIVASPEPITTGCQWAKCILPASLEGIVLRCEDTSNTDAITV

SEQ ID NO: 62743 - protein, 114 aa, Gossypium hirsutum
  Clone ID: GOSHI-09MAY01-C3901_2.pep
MEKWSKRLVFMFFCLSVCIQIPYVSSSTAPLQGNQGNKESSAARTFKLEDAHVVRCSRERSRAAWKVIEEYLMPFVEQERYKISSGCRLHPDNDLYRDQEQHKHHVDINEWRCG

SEQ ID NO: 62744 - protein, 278 aa, Gossypium hirsutum
  Clone ID: GOSHI-09MAY01-C3901_1.pep
MEKWSKRLVFLFFCLSVCIRIPYVSSSTAPLQGNQGNKKSSAARTFKLEEDVHVVRCSRERSRAAWKVIEEYLMPFVEQERYKISSGCRLHPDNDLYRDQEQHKHHLDINEWRCGYCRKNFYEEKYLDKHFDNRHFDLLNTSHSRCLADLCGALHCDLVMDSSLRKTKCNPAAAARNEHLCESLADSWFPVSKGPVTGRLHEFFLPQFWDAHTCSGGPKPFPKGQKKRTRFPYISLSILTLVLLAVFYFFIYLDQKGIKSGSQEAKRISLNGRKKKIV

SEQ ID NO: 62745 - protein, 154 aa, Gossypium hirsutum
  Clone ID: LIB3585-029-P1-K1-D12.pep
MEKWSKWVVFLFFCLSVCIRIPYVSSSTAPLQGNQGNKKSSAARTFKLEEDVHVVRCSRERSRAAWKVIEEYLMPFVEQERYKISSGCRLHPDNDLYRDQEQHKHHLDINEWRCGYCRKNFYEEKYLDKHFDNRHFDLLNTSHSRCLADLCGAL

SEQ ID NO: 62746 - protein, 202 aa, Gossypium hirsutum
  Clone ID: GOSHI-09MAY01-C3931_1.pep
MEYESNNWIWDGVYYCPRLFGGLMLTAALLGLSTTYFGGIGLFPLSYVWSDSGIFHKKKCEKKRIRVYMDGCFDLMHYGHANALRQAKALGDELVVGVVSDEEIIANKGPPVLPMEERLALVSGLKWVDQVIANAPYAITEQFMNSLFNEHKIDYIIHGDDPCLLPDGSDAYALAKKAGRYKQIKRTEGVSSTDIVGRYFVL

SEQ ID NO: 62747 - protein, 278 aa, Gossypium hirsutum
  Clone ID: GOSHI-09MAY01-C3921_2.pep
MAEKSFKYVILGGGVAAGYAAREFAKQGVQPGELAIISKEAVAPYERPALSKAYLFPEGAARLPGFHVCVGSGGERLLPEWYKEKGIQLILSTEIVKADLPAKTLVSAAGETFKYQILIIATGSTVIRLTDFGVEGADAKNIFYLREIDDADKLVEAIKAKKNGKAVIVGGGYIGLELAAALKINNLDVSMVYPEPWCMPRLFTSGIAAFYEGYYANKGIKIIKGTVAVGFTSNSNGEVKEVQLKDGRVLEADIVVVGVGGRPLTALFKGQVEEEKVE

SEQ ID NO: 62748 - protein, 185 aa, Gossypium hirsutum
  Clone ID: GOSHI-09MAY01-C3921_1.pep
MAEKSFKYVILGGGVAAGYAAREFAKQGVQPGELAIISKEAVAPYERPALSKAYLFPEGAARLPGFHVCVGSGGERLLPEWYKEKGIQLILSTEIVKADLPANTLVSAAGETFKYQILIIATGSTVIKLTDFGVQGADAKNIFYLREIDDADKLLEAINYKGNSCSWIHLDSMEGGKLNLRTAEL

SEQ ID NO: 62749 - protein, 162 aa, Gossypium hirsutum
  Clone ID: LIB3828-003-Q1-K6-G4.pep
CQKHLLPERENFKAARTKEADQMDKDERDTQDAFDREKQERLERERQQREMEEEEREQRRHELEREREEKKREQRSLEKERERVREMERERERARQAVERATREARERAAAEARARAERVAVEKAAAEARERAERAAVQRAQTEARERAAAEARERAERAAA

SEQ ID NO: 62750 - protein, 438 aa, Gossypium hirsutum
  Clone ID: GOSHI-09MAY01-C3851_1.pep
MSYQQGEDFYYMDEDFVDDMDEDNYGQAGGDVDADEYDMLTKVTDTTSAQARKGKDIQGIPWERLNITREKYRLTRLEQYKNYENMPSSGEAVDKEFKHIKKGGNYYEFFYNTRLIKPTILHFQLRNLVWATSKHDVYLMSNYSVMHWSSLSCNLSEILNFAGHVAPTEKHPGSLLEGFTQTQISTLAVKDNFMVAGGFQGELTFKHLDRKGVTFCTRTTYDDNAITNAIEIYDSLRGGINFMAANNDCSVREYDTERFQLLNHLRFPWPVNHTSVSPDRRLITVVGDSLDGLLVDLQNGKTVATVVGHLDYSFASAWHPDGRIFATGNQDKTCRVWDVRNLSRPVATLKGNLGAIRSIRFSSDGQFMVAAEPADFVHVYSTRADYEKRQEIDFFGEISGVSLSPDDESLYIGIWDRTYASLLQYNKRHTYAYLDSYL

SEQ ID NO: 62751 - protein, 178 aa, Gossypium hirsutum
  Clone ID: LIB3585-066-P1-K1-H6.pep
PRVRILHFQLRNLVWATSKHDVHLMSNYSVMHWSSLSCHLSEILNFSGHVAPTEKHPGSLLEGFTQTQISTLAVKDNFMVAGGFQGELTFKHLDRKGVAFCTRTTYDDNAITNAIEIYDSLRGGINFMAANNDCSMREYDTERFQLLNHLRFPWPVNHTSISPDRRLITVAGESLDGL

SEQ ID NO: 62752 - protein, 143 aa, Gossypium hirsutum
  unsure (1)..(143): unsure at all Xaa locations
  Clone ID: LIB3585-067-P1-K1-B8.pep
ILRLVYLYINFYPRVKVSAFAGFASHLLPTCIETLALNVINRWSFRRQWLLNLKLLGTNGSNHHFRENRPSTGSNNANRGQSTKEEVFANQAQMTWHEARRQWAGDQSEKSRRIAREPHMSWTTTYEDLLWSTEXFNSSIPLA

SEQ ID NO: 62753 - protein, 68 aa, Gossypium hirsutum
  Clone ID: LIB3135-050-Q1-K1-C9.pep
WWFRSQWLLNLKQMETNGTNHHSRENRPSTGSNNANRGQSTKEEVFVNQAQMTLHEVRRQWAGDQSQK

SEQ ID NO: 62754 - protein, 55 aa, Gossypium hirsutum
  Clone ID: LIB3145-009-Q1-K1-F4.pep
WWFRSQWLLNLKQMETNGTNHHSRENRPSTGSNNANRSQSTKEEVFVNQGLLVFI

SEQ ID NO: 62755 - protein, 75 aa, Gossypium hirsutum
  Clone ID: GOSHI-09MAY01-C3811_8.pep
IASAALKYIFFFYIWLISRQRNKYSLSEAPRQPISSFEFPSYTKFLLFSSLISVNMSSSTQKLIIFIINHQRGNI

SEQ ID NO: 62756 - protein, 162 aa, Gossypium hirsutum
  unsure (1)..(162): unsure at all Xaa locations
  Clone ID: GOSHI-09MAY01-C3811_5.pep
KSVPRARAKASMVDDLQNKNQELMKQIEICQEENKILDKMHRQKVAEVEKLTQTGGELEEAVLAGGAAANAVRDYQRKVQEMNEERKTLDRELARAKVTANRVATVVANEWKDSNDKVMPVKQWLEERRFLQGEMQQLRXDKLAISERXAKSEAQLKEKYQL

SEQ ID NO: 62757 - protein, 54 aa, Gossypium hirsutum
  Clone ID: GOSHI-09MAY01-C3811_4.pep
VSSVLCFIFLFIYFFTSTLVIDYKIITCMLMNLYSLKLICEEIWKKSKPEEENR

SEQ ID NO: 62758 - protein, 439 aa, Gossypium hirsutum
  unsure (1)..(439): unsure at all Xaa locations
  Clone ID: GOSHI-09MAY01-C3811_3.pep
AELKLARQEIAKLQDDNKALDRLTKSKEAGXLEAERTVQVALAKASMVDDLQNKNQELMKQIEICQEENKILDKMHRQKVAEVEKLTQTVRELEEAVLAGGAAANAVRDYQRKVQEMNEERKTLDRKLARAKVTANRVATVVANEWKDANDKVMPVKQWLEERRFLQGETQQLRDKLAITERTAKSEAQLKEKYQLRLKVLEESLRGSSNSLSRSTSDGRSVSNGPSRRQSLGGADNFSKLTPSGVLSKRSPSFQLRSSFSSSTVLKHAKGTSKSFDGGTRSLDVTKVLLNGTDSNSSLNQPSEGKAQAPSDEKPNNFLAVDAEDNVPGVLYDLLQKEVIALRKAGHEKDLSLKDKDEAIEMLAKKVETLTKAMEVEAKKMRREVATMEKEVAAMRVEKEHENRAKRFGNSKGSAAQLPYRKKRIPPSPPPQHSMTTRF

SEQ ID NO: 62759 - protein, 244 aa, Gossypium hirsutum
  Clone ID: GOSHI-09MAY01-C3811_1.pep
HASVESKNLEIKKINDEKKASMAAQFAAEATLRRVHAAQKDDDMPPIEAILAPLEAELKLARQEIAKLQDDNKALDRLTKSKEAALIDAERTVEFALAKASMVDDLQNKNQELMKQIEICQEENKILDKMHRQKVAEVEKLMQTVRELEEAVLAGGAAANAVRDYQRKVQEMNEERKTLDRELARAKVSANRVATVVANEWKDANDKVMPVKQWLEERRCLQGETQQLRDKLAVTERTAKCEAC

SEQ ID NO: 62760 - protein, 169 aa, Gossypium hirsutum
  Clone ID: LIB3543-002-Q1-K1-B8.pep
LLRNQGEAPSTAIPDDFRPVDKEDNVPGVLYDLLQKEVIALRKAGHEKDQSLKDKDDAIEMLAKKVETLTKAMEVEAKKMRREVAAMEKEVSAMRVEKEHENRATRFGNSKGSAAQLLSGRQNYYPIHETLVEDSVLVTLLAHAHSATCSGPNQSDSINCHLAHQINGF

SEQ ID NO: 62761 - protein, 100 aa, Gossypium hirsutum
  unsure (1)..(100): unsure at all Xaa locations
  Clone ID: LIB3196-016-P1-M1-B1.pep
SIEMNLPVNYFRYSANLILDDLLKSRPAIDGCHMLILLSLPSILLIFNVSNGQLLKFMQKCISKWVNTQHSMTKNFSCSSGKEQICISLLGPLXYFSLYI

SEQ ID NO: 62762 - protein, 151 aa, Gossypium hirsutum
  unsure (1)..(151): unsure at all Xaa locations
  Clone ID: uC-gsflnu33B094c07b1.pep
LEESLRGSCNSFIRSTSDVRSMSNGPSRRQSLGGADNFSKLTSNGFLSKKSPSSQLRSSLSSSTVLKHAKGTSKSFDGGTRSLERAKLLLNGTGSNTSFNQPSDRTKESEAQNDXKPTDFQPVDTEDKCPGVLYDLLQKEVIALRKACHEK

SEQ ID NO: 62763 - protein, 293 aa, Gossypium hirsutum
  unsure (1)..(293): unsure at all Xaa locations
  Clone ID: GOSHI-09MAY01-C3831_1.pep
MNGGPSGFNNAPVTKTFVIASALFTVFFGIQGRSFKLGLSYQDIFTKLSIWKLITSVFAFSSTPELMFGLYLLYYFRVFERQIGSNKYSVFILFSVMASFLFEVMAVAILKDPTSNLLTSGPYGLIFASFVPFFXDIPVSTWFRIFGVRFSNKSFISLAGLQLLLSSWKRSLLPGICGILAGSLYRLNVFHIRKAKFPEFITSFFSRVSWPSIGNPPTTPARNLAGNVPSYTTRQVERTYASAVASSAIEPSEDAVATLVSMGFDQNSARQALVHARNDINAATNILLEAQSH

SEQ ID NO: 62764 - protein, 162 aa, Gossypium hirsutum
  Clone ID: LIB3829-034-Q1-K6-E9.pep
MAVAILKVSTWFRIFGVRFSNKSFIYLAGLQLLLSSWKRSLLPGICGILAGSLYRLNVFHIRKAKFPEFITSFFSCVSWPSIGNPPTTPARNLAGNVPSYTTRQVERTYASAVASSAIEPSEDAVATLVSMGFDQNSARQALVHARNDINAATNILLEAQSH

SEQ ID NO: 62765 - protein, 78 aa, Gossypium hirsutum
  Clone ID: LIB3048-001-Q1-L1-A4.pep
FHRFKCLITHIGDGNRFACLLGLCGIPRFHYGVVFSSILPSRISVSSSNHTPMQLKTWEFFFFFLKCLPSCKCMHLTK

SEQ ID NO: 62766 - protein, 147 aa, Gossypium hirsutum
  unsure (1)..(147): unsure at all Xaa locations
  Clone ID: LIB3583-052-P1-K6-G2.pep
MLPCHNNISVTNERPTRLPRSRCRRWRQSRAGIAFVAVAALLISTAAWLSLVFSGTTTHRWRRLKYWEGSPHSLSGSIPWSSFPDRLPIPPLPPWFDSXQDTPRNRSLSERGNGKREISLNDLVFGIAGSSHLWKRRREKVRLWWRP

SEQ ID NO: 62767 - protein, 95 aa, Gossypium hirsutum
  Clone ID: LIB3272-022-P1-K1-C1.pep
ALRVRQLNFAMLPCHNNISVTNERPTRLPRSRCRRWRQSRAGIAFVAVAALLISTAAWLSLVFSGTTTHRWRRLKYWEGSPHSLSGSDSSSSSLV

SEQ ID NO: 62768 - protein, 129 aa, Gossypium hirsutum
  Clone ID: LIB3583-051-P1-K6-H7.pep
ELAQLSIDKVTEVDKSFLHENGKLDKDPVYNNPIEVDSHSEEPDKEEENGAFDPHFPKDVVNEWPTPKQIHSFHFIRYRFYEDPAIKAKLDQADKEIRKWNKARFKLTDELKAKRVSEKLLISVRCIAW

SEQ ID NO: 62769 - protein, 155 aa, Gossypium hirsutum
  Clone ID: LIB3582-061-P1-K1-D11.pep
KVEGSSRKAARIGSSILCLIGVEVVDSDLAQLSIDKVIEVDKSFLHENGKLDKDPVYNNPIEVDSHSEEPDKEEENGAFDPHFPKDVVNEWPAPKQIHSFHFIRYRFYEDPAIKAKLDQADKEIRKWNKARFKLTDELKAKRLSEKLLISVRCIA

SEQ ID NO: 62770 - protein, 114 aa, Gossypium hirsutum
  Clone ID: LIB3582-006-P1-K1-E4.pep
SNSTGVERCNGICTTGYWSCTQWKGSSISCLIRVEVVDSDLAQLSIDKVIEVDKSFLHENGKLDKDPVYNNPIEVDSHSEEPDKEEENGAFDPHFPKDVVNEVPAPKQIHSFHF

SEQ ID NO: 62771 - protein, 295 aa, Gossypium hirsutum
  Clone ID: GOSHI-09MAY01-C3451_1.pep
FVVSILCFVSAIMGIRLMKYQWPWLLLILISFILANRIRAISPDGEALLSFRVAIISSDGVLSQWRPEDPDPCKWKGVNCDSKTKRVTTLSLTNHKLSGPISPDLGKLEHLRLLMLHNNNFYGAIPSELGNCTELQGIYLQGNYLSGLIPSELGNLSSLQNLDISSNSLSGSIPPSIGRLDKLVTFNVSNNFLVGPIPSQGVFSNYTASSFVGNRDLCGKQINVACKDDNGGATPYSESPTSAQVGKRKYSGKLLISASATVGALLLVALMCFWGCFLYKKFGKKRNRTLCHDVG

SEQ ID NO: 62772 - protein, 95 aa, Gossypium hirsutum
  Clone ID: GOSHI-09MAY01-C3441_3.pep
MFNPSTNALSLTFPSHVVVAFGDMTSDGATSTPAPVPRRKPSCRERENNRRRERRRRAIAAKIYTGLSAQGNYNLPKHWDNNEVLKALCAVADWV

SEQ ID NO: 62773 - protein, 313 aa, Gossypium hirsutum
  Clone ID: GOSHI-09MAY01-C3441_1.pep
MTSDGATSTPAPVPRRKPSWRERENNRRRERRRRAIAAKIYTGLRAQGNYNLPKHCDNNEVLKALCAEAGWVVEDDGTTYRKGCKPPPIDIAGSSAKITPYSSQNPSPLSSAFPSPIPSCQVSPSSSSFPSPTRTDANNPSSLLPFLRSAIPSSLPPLRISNSAPVTPPLSSPTSRNPKPIPNWEALAKESMASFNYPFYAVSAPASPTHRHFHAPATIPQCDESDTSTVESGQWISFQKFAPSTSQVPTSPTFNLVKPLAPQSLPTGFIGEQGRVSEFQFESGQVKPWEGERIHEVGLDDLELTLGSGKARC

SEQ ID NO: 62774 - protein, 85 aa, Gossypium hirsutum
  Clone ID: LIB3584-038-P1-K1-H2.pep
FVDNFWFLNGFVVQGCKPPPIDIAGSSAKITPYSSQNPSPLSSAFPSPIPSCQVSPSSSSFPSPTRTDANNPSSLLPFLRSAIPS

SEQ ID NO: 62775 - protein, 82 aa, Gossypium hirsutum
  Clone ID: LIB3196-046-P1-M1-A8.pep
QWISFQKFAPSTSQVPTSPTFFKLVKPLPPQNLHNDLGVKDKGRGAEFEFESGQVKPWEGERIHDIGMDDLELTLGSGKPQC

SEQ ID NO: 62776 - protein, 214 aa, Gossypium hirsutum
  Clone ID: GOSHI-09MAY01-C3471_1.pep
MGSTNQVGTLYVQEIELGIIFLSTLGSSFFVFHMESNAGATETRSNVTVPDGGEVAALESLQFTDEIHRLISAPATDNASSFTALLELPATQVVELLHSPESVKLIVASAPNVEDFKGSFHFPSNTGLIQKDARFSVFSGEGNNKNEKSNSPEMTSKNSSANLEKAVKSEPAETVSSLPLVSDPTMENRNIKRKDREKKVKGSTKKSKTATNER

SEQ ID NO: 62777 - protein, 190 aa, Gossypium hirsutum
  Clone ID: GOSHI-09MAY01-C3461_2.pep
QTCFLIWWEPKDIDTELSTAAISCQSFGVPNIPFKTGCSNDVAINETGVLNGGLWTNQTQRMRTYTKVQKRGSVGRSIDVTRYKAHAARRPALARMFGIEGQLEEPQSSDWKLVYVDHENDILLVGDDPWEEFVSCVQSIKILSSAEVQQMSLDGNLGNVSVPNQACSGSENGNAWRGHYDDTSAVSFNR

SEQ ID NO: 62778 - protein, 346 aa, Gossypium hirsutum
  unsure (1)..(346): unsure at all Xaa locations
  Clone ID: GOSHI-09MAY01-C3461_1.pep
HAYVRTHSGLTDGDATSCSSXPCTNNRQVSPSSFLSRSXLVPSMVVTDPVVAPASALVQELQSKPDLRMKHELLAYKGPDQSTDTSTVTDQFEASSSGTSYCLDAGTIQHNFSLPTFLEGDVQSHPRNNLPFSANIDGLAPDTLLPRGYDSQKDLQNLLSNYGSNPRDIDTELSTAAISPQSFGVPNIPFKTGCSNDVAINDAGVLNGGLWANQTQRMRTYTKVQKRGSVGRSIDVTRYKGYDELRHDLARMFGIEGQMEDPQSSDWKLVYVDHENDILLVGDDPWEEFVSCVQSIKILSSLEVQQMSLDGDLGNVPVPNQACSEIDSGNAWRGHYDDTSAASFNR

SEQ ID NO: 62779 - protein, 161 aa, Gossypium hirsutum
  unsure (1)..(161): unsure at all Xaa locations
  Clone ID: LIB3829-023-Q6-K6-D2.pep
TFQGGGRGGAINNAGVLNGGLWASQTQRMRTYTKVQKRGFLWXRINFYLYXRYXKGMYEXGGDLXRMFXIEGQMEDTQSSDWKLVYVDHENDILLVGDDPWEEFVSCVQSIKILSSLEVQQMSLDGDLGNVPVPNQACSEIDSGNAWRGHYDDTSAASFNR

SEQ ID NO: 62780 - protein, 193 aa, Gossypium hirsutum
  Clone ID: LIB3585-066-P1-K1-B6.pep
RGTRRPIPHTNNNSFFHSMRISRARWFNLLRRVFHYQNGSRSDLGSNPFNSSTWMMLEFLALVIQISIIAFTLAISNEERPIWPMRIWIVGYDIGCVLSLLLLYGNYHLQITQGNRFGLSDIEQQRTSEESRSSHLMNKCRTSLELFFAIWFVMGNVWVFDSRFRSFHRAPNLHVLCISLLAWNALSYSFPFL

SEQ ID NO: 62781 - protein, 99 aa, Gossypium hirsutum
  Clone ID: uC-gsflnu33B008h06b1.pep
FTRPVGYDIGCVLSLILLYGNYHLQITQGNRFGLSDIDQQRTSDESRCSHLMNKCRTSLELFFALWFVMGNVGPFRSEHMPFCLAPTVHVLRLSLVAGN

SEQ ID NO: 62782 - protein, 249 aa, Gossypium hirsutum
  Clone ID: GOSHI-09MAY01-C3741_1.pep
MILQRRINPTCHQSSNPPAKRSTKDRHTKVDGRGRRIRMPAACAAWGFQLTRELGHKSDGETIEWLLQQAEPAIIAATGTGTIPANFSTLNVSLRSSGSTLSAPPSKSAPHSFHGALALASHHHPYEEGFAHSALFGLHHHQQQLLRAGQIAETLPAGGGGSGGGGNSSENYMRKRFREDLFKDDNQQQGETGGGGGSGDGDSGGDGSSIKAFITGLPQLHKPSNILPATAMWAVAPAPSSTTGRRSGC

SEQ ID NO: 62783 - protein, 193 aa, Gossypium hirsutum
  unsure (1)..(193): unsure at all Xaa locations
  Clone ID: GOSHI-09MAY01-C3771_1.pep
MAPPRVPNNPAFDADEDCPINPSHELAQFGAGCFWGVELAFQRVEGVIKTTVGYSQGHVHDPNYKLVCTGSTNHVEVVRVQFDPQICPYVNLLSLFWSRHDPTTLNRQGGDVGAQYRSGIYYYNENQARLARESMEAKQLELKDKKIVTEILPAKRFYKAEEYHQQYLGKXVGGXGHKQSAEKGCTDPIWCFG

SEQ ID NO: 62784 - protein, 93 aa, Gossypium hirsutum
  Clone ID: LIB3585-042-P1-K1-F12.pep
MATTVDTNNPAFDADEDWRMDPSHELAQFGAGCFWGVELAFQRVEGVIKTTVGYSQGHVHDPNYILVCTGSTNHVEVVRVSIRTFIFCLTLIL

SEQ ID NO: 62785 - protein, 316 aa, Gossypium hirsutum
  unsure (1)..(316): unsure at all Xaa locations
  Clone ID: GOSHI-09MAY01-C3761_1.pep
MGFCPCFGWTKGKKLKGDDKKELGRKCKPQLCAGVGSVGSKSIAGLRKESSATTDEPNDDKRAHTFNHQQLANATQNFRKESLIGHGGFGAVYKGQLESTGQVLAAFPRSLSPFLVCISILITCMHYGYXQVVAVKQLDKTGLQGEKEFLVEGLMLSLLRHPNLVNLIGYCAEGDQRLLVYEYMQLGSLEDHLHYLRPDQKPLDWNTRMTIAAGAAKGLEYLHTEANPPVIYRDLKSSNILLGEGFNPKLSDFGLAKFGPSGDKSHVSTRIMGTHGYCAPEYLTSGXMTMKSDIXSFGVVLLELITGRKALDDSRA

SEQ ID NO: 62786 - protein, 62 aa, Gossypium hirsutum
  Clone ID: GOSHI-09MAY01-C3711_1.pep
RIAWNYIPTFFNLKQRRVVSDARCPRCKQEEDDCPHVFHSWRIQSRDKRTESHFLLWTLDNL

SEQ ID NO: 62787 - protein, 50 aa, Gossypium hirsutum
  Clone ID: LIB3145-025-Q1-K1-E5.pep
MGGALLFFFFVLFFFFFFFSFFFFFFFFFFFFFFFFFFFFDKCYYYTDRN

SEQ ID NO: 62788 - protein, 298 aa, Gossypium hirsutum
  Clone ID: GOSHI-09MAY01-C3691_1.pep
SVIPRTTGGQVYYYYPFSAVSDPAKLYNDLRWNITRPQGFEAVMRVRCSQGIQVQDYSGNFCKRIPTDIDLPGIDCDKCILVTLKHDDKLQDGSECAFQCALLYTTVYGQRRIRVTNLSLPCTNMLSNLFRSADLDTQFACLLKRAAIEIPTSPLVQVREQVTNLCINILFSYRKFCATVSSSGQLILPEALKLLPLYTLALIKSTGLRNDGRINDRSFWFNYVSSLSTPLAVPLVYPRMFAIHNLSTQERDESVLPPIIPLSSEHVSDDGIYFLENGEDALIYFGSSVDSSLLQQLL

SEQ ID NO: 62789 - protein, 182 aa, Gossypium hirsutum
  Clone ID: LIB3585-056-P1-K1-D7.pep
HASAHASAHASGHKLILGVRANMLSNLFRSADLDTQFTCFLKQAAIEIPTCPLLQVRDHVTNLCINILLSYRKFCATVSSTGQLILPEALKLLPLYTLALIKSRGLRNDGRIDDRSFWFNYVSSLSTPLAIPLVYPRMFAIHNVDSKDGDESVLPPTIPLSSEHVCDDGIYLFENGEDALIY

SEQ ID NO: 62790 - protein, 207 aa, Gossypium hirsutum
  unsure (1)..(207): unsure at all Xaa locations
  Clone ID: GOSHI-09MAY01-C3671_1.pep
PGRFSYPHGQKSLSCFPHHRCLQASSYLPIHSGSISPPXTPPLSSPTARTSTNPILIGRDPDPARXGWSAPNNHSFLPSSTPPALVVRIVPDXEWFAGLRIPSQWAQPFSHIQPCLSSNPFGFXKEEVLAGGGSRMWTPGQSGTCXSPAIAAGSDHTADVPMSEVISDEFAFGSNATGLVKPWEGERIHEDCGSDDLELTLGSSRTR

SEQ ID NO: 62791 - protein, 294 aa, Gossypium hirsutum
  Clone ID: GOSHI-09MAY01-C3161_3.pep
MSLLKLGFYNQRFHLLRFIPPQSSNVSPSTFWVQNLTNNNTTNHSSLSCYTPRINPVIAKALRTEAAATAQPIKMVKAIRVHQLGGPQVLKWEDVELGEPKEGEIRIKNIAIGLNFIDIYFRKGVYKAATMPFTPGMEAVGEVTAGGPGLTGRKVGDIVAYAGNPMGSYAEEQILPADKVVPVPPSVDPITAASIMLKGMTAQFLVRRCFKVESGHTVLVHAAAGGVGSLLCQWANALGATVIGTVSTKEKAAQAKEDGCHHAIIYKEEDFVSRVNEITCGKGVEVVYDSVGKG

SEQ ID NO: 62792 - protein, 318 aa, Gossypium hirsutum
  Clone ID: GOSHI-09MAY01-C3161_2.pep
MVKAIRVHQFGGSQVLKWEDVELGEPKEGEIRIKNIAIGVNFIDIYFRKGVYKATTMPFTPGMEAVGEVTAVGPGLTGRKVGDIVAYAGNPMGSYAEEQILPADKVVPVPPSVDPITAASIMLKGMTAQFLVESGHTVLVHAAAGGVGSLLCQWANALGATVIGTVSTKEKAAQAKEDGCHHVIIYKEEDFVSRVNEITSGKGVEVVYDSVGKDTFEGSLACLKPRGYMVCFGQSSGTPDPVPLSALAPKSLFLTRPSMMQYTSTRDELLETAGEVFANVASGVLRVRVNHKYPLSEAAQAHADLENRRTTGSVVLIP

SEQ ID NO: 62793 - protein, 231 aa, Gossypium hirsutum
  unsure (1)..(231): unsure at all Xaa locations
  Clone ID: GOSHI-09MAY01-C3161_1.pep
MVGGGSRRDEGSMVINNTNVFAALETLRKKRRSDKDRGSSKKSSSKSQQSQPQKEPEPQVFWAPAPLNVKSWADVDDDDDYYATTAPPQSVWGSSEPSHEDKXRQRRDVAQEKKDGEGEKKENPPGESKPPDRKKKXDKSKEGKESQDQLTSTDVTNGPDEAAGTEQNEEDASAADVKERLKKMASMKKKKSSKDMDAAAKAAAQEAAARSARLAAAKKKEKNHYNQQPVR

SEQ ID NO: 62794 - protein, 140 aa, Gossypium hirsutum
  unsure (1)..(140): unsure at all Xaa locations
  Clone ID: LIB3197-053-Q1-M1-G12.pep
LAELEALLADFGVTQKESNGQDESRDVAQEKKDGEGEKKENPPGESKSAKKKKKKDKSKEGKESQDQLTSTDATNGPYEAAGTEQNEEDASXCDVKERLKKMASMKKKKSKXDMDAAAKACAQEAASRSARLAAAKKKEK

SEQ ID NO: 62795 - protein, 89 aa, Gossypium hirsutum
  Clone ID: LIB3189-046-P1-K1-C5.pep
SYAGEHIVAADYLVPVPPSDDPITAASIMLKGMTAQFLVRRCFKVESGHTVLVHAAAGGVGSLLCLCAYAHVDCVPPPEPLPVPAPKDD

SEQ ID NO: 62796 - protein, 116 aa, Gossypium hirsutum
  Clone ID: LIB3165-060-Q1-K1-E7.pep
PTRPNVFAALETLRKKKKSDKDRGSSKKSSSKSQQSQPQKESEPQVFWAPAPLNVKSWADVDDDDDDDYYATTAPPQSVWGSSEPSHEDKTVNEEDSESEEDILDESDDDIEEDHD

SEQ ID NO: 62797 - protein, 69 aa, Gossypium hirsutum
  unsure (1)..(69): unsure at all Xaa locations
  Clone ID: LIB3825-033-Q6-K6-A4.pep
HSTKGFIFCGFLECLKRRGGGVSFGQSSGTPDPDPLSALAPKSLFLSRPSMMQYTFTLXELLVXAWDVI

SEQ ID NO: 62798 - protein, 120 aa, Gossypium hirsutum
  unsure (1)..(120): unsure at all Xaa locations
  Clone ID: GOSHI-09MAY01-C3111_1.pep
DNGWGVPFLVEHIIREENGMAAQEILELSCELIAVRLPIIETQRECPLDLKEATSSVWSAAPRRADLPKVLQVQMLFAYKNGKEFASTASELTPDCXDNQQLIQLLYIRVASPEAKLKIL

SEQ ID NO: 62799 - protein, 215 aa, Gossypium hirsutum
  unsure (1)..(215): unsure at all Xaa locations
  Clone ID: GOSHI-09MAY01-C3131_1.pep
VKLAAPLMDMNINKMVHGCPWRHPQKIYLQVIYPVGKKYAYTPSAPSLKSMSTTELRALFTIDDVKLTSWLAGMCMAEYLPHLEDSLQKQVLEAVSLIDIRRHLIEALAPLSGRPLQADPAFCRKATLLASSGSYXVFLVHCHISTLFPKQQPALMLQSSQHISPQGIPQESPLLAEYPWSPRWEASQMAERIFDFLADESLNFKRFCNESQPQH

SEQ ID NO: 62800 - protein, 55 aa, Gossypium hirsutum
  Clone ID: LIB3149-003-P1-K1-B1.pep
VHFHISTLFPKQQPALMFQSSQHISPQGIPKKSPLLAEYPWSPRWEASQMAERIL

SEQ ID NO: 62801 - protein, 337 aa, Gossypium hirsutum
  Clone ID: GOSHI-09MAY01-C3041_1.pep
MANSMAKSFLQVAATEEVVSPLRVVQIEGLVILKIIKHCKEFSPALVTGQLLGLDVGIVLEVTNCFPFPIREEDEEIEADGANYQLEMMRCLREVNVDNNTVGWYQSTILGSYQTVELIETFMNYQENIRRCVCIIYDPSRSNQGVLALKALKLSDSFMELYRANSFTGEKLREKNLSWMDIFEEIPIKVSNSALISAFMTELESDTPVTQCDYDRLQLSSNPYMERNMEFLIECMDDLSVEQQKFQFYYRSLSRQQAQQQAWLQKRRADNMQRKAAGEDPLPEEDPSNPIFKPIPEPSPLESFLITNQIANYCNQINGVSGQSFNRLYLMKSVHDN

SEQ ID NO: 62802 - protein, 147 aa, Gossypium hirsutum
  unsure (1)..(147): unsure at all Xaa locations
  Clone ID: GOSHI-09MAY01-C3021_1.pep
TVLSRQISELGIYPAVDPLDSTSRMLSPHILGEEHYNTARGVQXVLQNYKNLQDIIAILGMDELSEDDKLTVARARKIQRFLSQPFHVAEVFTGAPGKYVELKESITSFQGVLDGKYDDLPEQSFYMVGGIEEVIAKADKIAKESAA

SEQ ID NO: 62803 - protein, 77 aa, Gossypium hirsutum
  Clone ID: LIB3083-002-Q1-L1-H4.pep
SRWCWQCQQQTCSFILGVLFMFNDVIQECKRALRPRYILCLNKGNRRWMCTFFFCSKTLAAKALSFLTAVYSKQLLF

SEQ ID NO: 62804 - protein, 91 aa, Gossypium hirsutum
  Clone ID: uC-gsflmaxxa091a12b1.pep
DCVDSPAKPTSTVNGLEPMIRGIEKPRNLEDVSDKTKPWELTEIVDPTQCRTVTLPDNSEIASKVARLLYTNSGVGVLALYTNGVQKLLLF

SEQ ID NO: 62805 - protein, 282 aa, Gossypium hirsutum
  unsure (1)..(282): unsure at all Xaa locations
  Clone ID: GOSHI-09MAY01-C3391_4.pep
PGSTQRSSRVRLKKKGGGGWSEEEDMGSESYEEAIAALSKLLSDKADLGSVAAAKIKQITAELEAAAEATQFDPVKRLETGFLHFKKEKFDKNPDLYGALAKGQRPKFLVFACSDSRVCPSHILNFQPGEAFIVRNIASMVPPYDKKKYSGAGAAIEYAVLHLKVENIVVIGHSCCGGIKGLMSIPDDGTTASDFIEQWVSICTPAKTKVKSEQNELSFSEQCTNCEKEAVNVSLGNLLTYPFVREQVVKKTVALKGAHYXFRDGKFDQWNLDFKISPTLAI

SEQ ID NO: 62806 - protein, 104 aa, Gossypium hirsutum
  Clone ID: GOSHI-09MAY01-C3391_3.pep
SPTLTWTVHLPKGNRPNSPGLLLPPTLGLPLPLPSPLPPSSPFATLPPICTPLLPSPPPHSLNLLSNLPLYPHPPTLSPPPIPPHPSFPLYNSPSPPSPLYPPS

SEQ ID NO: 62807 - protein, 92 aa, Gossypium hirsutum
  Clone ID: GOSHI-09MAY01-C3391_2.pep
MLFGKGLVGREEDMGSESYEEAIAALSKLLSDKADLGSVAAAKIKQITAELEAAADSTQFDPVKRLETGFLHFKKEKFDKNPDLYGALAKGQ

SEQ ID NO: 62808 - protein, 265 aa, Gossypium hirsutum
  Clone ID: GOSHI-09MAY01-C3391_1.pep
STCQKEEDMGSESYEEAIAALSKLLSDKADLGSVAAAKIKQITAELEAAAESTQFDPVKRLETGFLHFKKEKFDKNPDLYGALAKGQSPKFLVFACSDSRVCPSHILNFQPGEAFIVRNIASMVPPYDKKKYSGAGAAIEYAVLHLKVENIVVIGHSCCGGIKGLMSIPDDGTTASDFIEQWVSICTPAKTKVKSEQNELSFSEQCTNCEKEAVNVSLGNLLTYPFVREAVVKKTVALKGAHYDFVNGKFDLWNLDFKISPTLAI

SEQ ID NO: 62809 - protein, 160 aa, Gossypium hirsutum
  unsure (1)..(160): unsure at all Xaa locations
  Clone ID: GOSHI-09MAY01-C3301_6.pep
LSVESNRIPEAALMARSYLPSKVSEIVTIWRKDLNKVNPKAAESLADPGEYPNLFEDWELSLSVESKVAETRGVYPTASGYLNHADTSEMTLVEAFRNMQVEDEEPLVNGVLDHEAGRTKWAWSDFXRSQNGEDGSQEEPVVVDADSNDGAVLVNGYEPE

SEQ ID NO: 62810 - protein, 72 aa, Gossypium hirsutum
  Clone ID: GOSHI-09MAY01-C3301_5.pep
RSHMTLVETFRNMPTEEEPLENGDLDHENLEDQNGEEGSQEEAVVVDADSNDGAVLVNGNEPEEEWVLTPDH

SEQ ID NO: 62811 - protein, 100 aa, Gossypium hirsutum
  Clone ID: GOSHI-09MAY01-C3301_4.pep
PTRPQVAETRGIYPPAADYLKHADRSHMTLVETFRNMPTEEEPLENGDLDHENLEDQNGEEGSQEEAVVVDADSNDGAVLVNGNEPEEEWGTNNEGTPSA

SEQ ID NO: 62812 - protein, 490 aa, Gossypium hirsutum
  unsure (1)..(490): unsure at all Xaa locations
  Clone ID: GOSHI-09MAY01-C3301_1.pep
VERIFGGTLLAMCSNDFICFYSWAECRLIRRIDVTVKNLYWADSGDLVAIASDTSFYILKYNRDVVQSYLDSGTPVDEQGVEDAFELLHETNERVRTGIWVGDCFIYNNSSWRLNYCVGGEVTTMFHLDRPMYLLGYLASQSRVYLIDKEFNVMGYTLLLSLIEYKTLVMRGDLERANEILPSIPKEHHNSVAHFLESPGVLEDALGVATDPDYRFELAVQLGKLGIAKEIATEVQSESKWKXQLGELAMSTGKLQMAEECMKHAMDLSGLLLLYSSLGDAEGISRLASLSKEQGKNNVAFLCLFMLGKLEDCLQLLVESNRIPEAALMARSYLPSKVSEIVAIWRKDLNKVNPKAAESLSDPEEYPNLFEDWQLALTLESQVAETRGIYPPAADYLKHADRSHMTLVETFRNMPTEEEPLENGDPDHENLEDXNGEGGTQEEAVVVDADSNDGAVLVNGNEPEEEWGTICGPAPSHGRHVNRLLGYPNW

SEQ ID NO: 62813 - protein, 162 aa, Gossypium hirsutum
  unsure (1)..(162): unsure at all Xaa locations
  Clone ID: LIB3829-009-Q6-K6-B7.pep
TCFIETNERVRTGIWVGDCFIYNSTSWRLNYCVGGEVTTMFHLDRPMYLLGYLASQSRXVMGYTLLLSLIEYKTLVMRGDFERANEILPSIPKEHHNSVAHFLESRGMIEDALEVATDPDYRFDLAMQLDKLEIANEIATEAQSESKWKQLGELAMSTGKFY

SEQ ID NO: 62814 - protein, 175 aa, Gossypium hirsutum
  Clone ID: AI728607.1.pep
SNRIPEAALMARSYLPSKVSEIVAIWRKDLNKVNPKAAESLADPKEYPNLFEDWELALSVESKVAETRGVYPLAVDYLNHADRSKMTLVEAFKNMQIDDEEPLMNDEEPLVNGVLDYEAGEPNGHGLNSEEQNGEDGSQEEPVVVNADSNDGAVLVNGNEPQEEWGTNTEGTPSA

SEQ ID NO: 62815 - protein, 64 aa, Gossypium hirsutum
  Clone ID: GOSHI-09MAY01-C3271_4.pep
MGKVHGSLARAGKVRGQTPKVAKQDKKKKPRGRAYKRMQYNRRFVTAVMMVGFGKKRGPNSSEK

SEQ ID NO: 62816 - protein, 62 aa, Gossypium hirsutum
  Clone ID: GOSHI-09MAY01-C3271_2.pep
MGKVHGSLARAGKVRGQTPKVAKQDKKKKPRGRAYKRMQYNRRFVTAVVGFGKKRGPNSSEK

SEQ ID NO: 62817 - protein, 62 aa, Gossypium hirsutum; identical to SEQ ID NO: 62816
  Clone ID: GOSHI-09MAY01-C3271_1.pep

SEQ ID NO: 62818 - protein, 62 aa, Gossypium hirsutum; identical to SEQ ID NO: 62816
  Clone ID: AI732018.1.pep

SEQ ID NO: 62819 - protein, 72 aa, Gossypium hirsutum
  Clone ID: LIB3166-004-P1-K1-C6.pep
KSSRLTIIRGVGKVHGSLARAGKVRGQTPKVAKQDKKKKPRGRAYKRMQYNRRFVTAVVGFGKKRGPNSSEK

SEQ ID NO: 62820 - protein, 216 aa, Gossypium hirsutum
  Clone ID: GOSHI-09MAY01-C3201_1.pep
LADSWEYTSTDQFLHCLPLHHVHGLFNALLAPLYAGSTVEFIPKFSVRNIWQRWREAYPKNGAKADDAITVFTGVPTMYARLIQGYQAMDPEQQALSAYAAQQLRLMMSGSSALPQPVMHEWETITRHCLLERYGMTEFVMAISNPLRGARKAGTVGKPFPGVQVRIAEDRSGDGTIGEGELCVKSPSLFKEYWKLPQVTKESFTDDGFFKTGDAC

SEQ ID NO: 62821 - protein, 186 aa, Gossypium hirsutum
  Clone ID: GOSHI-09MAY01-C3221_1.pep
GKWVSEIREPRKKSRIWVGTFPTPEMAARAHDVAALSIKGNSAILNFPELANSLPRPVSLAPRDVQAAAAKAAQMGNLDSPSPSTTSSSSTSTLSSSSSLSSLVSHLDLSSASDELTEIVELPSLGTSYESVELGSEFIFANSMDGWFYPPPWLESMEDCEYVCNQLVVPESVLQNGFKQGLLWDY

SEQ ID NO: 62822 - protein, 140 aa, Gossypium hirsutum
  Clone ID: LIB3543-066-Q6-K6-D2.pep
MATAEVASVQTALHEEKTEESVKDQEATTDEVVAEAPAAEPVAEEPKEAEPAAVVVEEPEASVEVETKEVVEEPKAVTEEPVVEEAPKETMPEPVAEEIKETTEQTVETKETTESSEAAAEAPKEEVKKEEEADPAEKTE

SEQ ID NO: 62823 - protein, 56 aa, Gossypium hirsutum
  Clone ID: LIB3585-010-P1-K1-A11.pep
MATAEVASLQTALYEEKTEESVKDQEATTDEVLAAAPAAEPVAAEPNEAEPAAVVV

SEQ ID NO: 62824 - protein, 100 aa, Gossypium hirsutum
  Clone ID: LIB3165-003-P1-K1-C6.pep
PRVRKKKIGFCFRYSPQVCTYYQSTIDGKKMVDVLVEQKIVPGIKVDKGLVPLPGSNNESWCQGLDGLSSRTAAYYQQGARFAKWRTVVSIPNVPSALAV

SEQ ID NO: 62825 - protein, 102 aa, Gossypium hirsutum
  Clone ID: LIB3584-050-P1-K2-C7.pep
PRVRPRVRPRVRTALHEEKTEESVKDQEATTDEVVAEAPAAEPVAEEIKETTEQTVETKETTESSEAAAEAPKEEVKKEEEAKPAEVEEKVETEADPAEKTE

SEQ ID NO: 62826 - protein, 153 aa, Gossypium hirsutum
  Clone ID: LIB3543-011-Q1-K6-B2.pep
SSREELSGDGGSSGVDMDKDLKRMKANFDELCGEDKILVFFKRLLNEWNQELDEMGEAEKRTAKGKSMVATFKQCARYLNPLFKFCRKKVLPDDIRQALLVVVECCMKRDYLAAMDQYIKLAIGNAPWPIGVTMVGIHERSAREEIYTNSGAH

SEQ ID NO: 62827 - protein, 89 aa, Gossypium hirsutum
  Clone ID: LIB3147-007-Q1-K1-D7.pep
SIAILVFNVQCTIYASSLFKSFSSFPRGTCSLSVSRPYLALDGIYRPIRAAFPNNPTRRQRLLVRQGPGTTGLSPSPAPLSRGLGPGPS

SEQ ID NO: 62828 - protein, 73 aa, Gossypium hirsutum
  Clone ID: LIB3272-030-P1-K1-C8.pep
MKEHLVLFLIIVAIKFQDLIVGEFFVYLAATSSNPITIEQMMTTFWYAKGKTYYWYSTIVTNKAYKTLKDLKL

SEQ ID NO: 62829 - protein, 209 aa, Gossypium hirsutum
  unsure (1)..(209): unsure at all Xaa locations
  Clone ID: GOSHI-09MAY01-C1_8.pep
AGFAGDDAPRAVFPSIVGRPRHTGVMVGMGQKDAYVGDEAQSKRGILTLKYPIEHGIVNNWDDMEKIWHHTFYNELRVAPEEHPILLTEAPLNPKANREKMTQIMFETFNAXGMYVAIQAVLSLYASGRTTGIVLDSGDGVSHTVPIYEGYALPHAILRLDLAGRDLTDALMKILTERGYSFTTSXEREIVRDIKEKLAYIALNFKQNL

SEQ ID NO: 62830 - protein, 153 aa, Gossypium hirsutum
  unsure (1)..(153): unsure at all Xaa locations
  Clone ID: GOSHI-09MAY01-C1_9.pep
MASSTLTGKLEADVDIKASPEQFHEMFAHKPHHVHHKIQGCDLHEGEXGKVGIIVHWSYVHDGKAKKAKEVVEAVDPDKNLITFRVIEGDLMEEYKSFVAMILVSPKSEDSGSIVHWTLEYEKLHDGIAHPETLLQLVXDISKDIDAHLIQAN

SEQ ID NO: 62831 - protein, 109 aa, Gossypium hirsutum
  Clone ID: GOSHI-09MAY01-C1_10.pep
VSVNLLKNIKDGKGCLLLCSYWLWYFSIQLVVGTQDEEAIDEEVSQEADDVLLSSGATNLVENFKSSAGDNSQSVDGPTSGLTDEIAASPESEVEVAIESAGGMKRKMA

SEQ ID NO: 62832 - protein, 150 aa, Gossypium hirsutum
  Clone ID: GOSHI-09MAY01-C1_11.pep
MAEGEDIQPLVCDNGTGMVKAGFAGDDAPRAVFPSIVGRPRHTGVMVGMGQKDAYVGDEAQSKRGILTLKYPIEHGIVNNWDDMEKIWHYTVYNELRVAPEEHPILLTEAPLNPKANREKMTQIMFETFNAPAMYVAIQAVLSLYASGRT

SEQ ID NO: 62833 - protein, 59 aa, Gossypium hirsutum
  Clone ID: GOSHI-09MAY01-C1_12.pep
PTRPESDPSYYQLPYLVRQGEQPREGFLLLVNLLEDQMGGTVGYVDWIMQIHRQVQQNA

SEQ ID NO: 62834 - protein, 187 aa, Gossypium hirsutum
  Clone ID: GOSHI-09MAY01-C1_13.pep
VPLKGGYADAQLDERCAAGFTMMALPVKKLLKLLYPSLIRIDEYLLKPSAQADDFKNIMKRLPLLAESLDSRGLYLYDDGLRFVIWFGRMLSPDIARNLLGPEFAAELSRVTLTEHDNEMSRRLMKMLKRLRESDPSYYQLPYLVRQGEQPREGFLLLVNLLEDQMGGTVGYVDWIMQIHRQVQHNA

SEQ ID NO: 62835 - protein, 140 aa, Gossypium hirsutum
  unsure (1)..(140): unsure at all Xaa locations
  Clone ID: GOSHI-09MAY01-C1_14.pep
MMNSRISCILLDLSVYLHYPIDVTNSTAHLVLKKIYKQQETFPRGTCSLSVSRPYLALDGIYRPIRAAFPNNPTRRQRLLVRQGPGTTGLSPSPAPLSRGLGPGPSLRTXSPDYNSDADGDRFSSWAFPGFGSPLLGESW

SEQ ID NO: 62836 - protein, 183 aa, Gossypium hirsutum
  Clone ID: GOSHI-09MAY01-C1_15.pep
LFLFLKVNYYKTYFTKTMDVAFIIIFIVFIIFSCFSRLFKENLGLCCFLNIIGVHYAVLRILPPTDLVATSTYDSGETAISSAKPECGPSTDSVATSTSDSGEAAISSTKSEVGPSTLWESSPAELLKFSTSLAAPELKTASSASGDAASSKAFSSCPITNWIESTKANENTTKGTFTMFYVF

SEQ ID NO: 62837 - protein, 137 aa, Gossypium hirsutum
  unsure (1)..(137): unsure at all Xaa locations
  Clone ID: GOSHI-09MAY01-C1_16.pep
PLLPFSFPFPFPFTLFPFPFLLPSSFPLLFLLSFPIFPFPCGTCSLSVSRPYLALDGIYRPIRAAFPNNPTRRQRLLVRQGPGTTGLSPSPAPLSRGLGPGPSLRTXSPDYNSDADGDRFSSWAFPGSLAVTRGILV

SEQ ID NO: 62838 - protein, 58 aa, Gossypium hirsutum
  Clone ID: GOSHI-09MAY01-C1_17.pep
LISFFYLISFSFTFKKDLAMNNAGCIFIFRRFRRCYNSFVTVKFAIGNIRAKPRDRIF

SEQ ID NO: 62839 - protein, 79 aa, Gossypium hirsutum
  Clone ID: GOSHI-09MAY01-C1_18.pep
TSQHKKKNPQNEQVLREHISEHHIISKETIKRERKLEKDNTEGKQRKVIYFICGKINMEYNNTRLVAPSASLPTISSTL

SEQ ID NO: 62840 - protein, 124 aa, Gossypium hirsutum
  Clone ID: GOSHI-09MAY01-C1_19.pep
NMVNVPFVVFSFALVLSIQFVVGHDEKALDEAASPEAEDALLSSGVAQLVENFKSSAGDNSQSVDGPTSGLADEIAATPESDVEVATEYADGPTSGLADEIAVSPESEVEVATESTGGRKRKMA

SEQ ID NO: 62841 - protein, 153 aa, Gossypium hirsutum
  Clone ID: GOSHI-09MAY01-C1_20.pep
PSQYFGSSSQQYMPSGSRAEVEVQRLRDQMAQMQATTIEQITQLKAEATSREVEVQKRYEELQLQLKADAAAREAEVQRKYEELQQQLKVDAAVREAEAAAREVQAVVREAEAKAREAEAAAREVEQRQKFDELQQQLQSMMKMFQQSQQPPS

SEQ ID NO: 62842 - protein, 212 aa, Gossypium hirsutum
  unsure (1)..(212): unsure at all Xaa locations
  Clone ID: GOSHI-09MAY01-C1_21.pep
GPKKRGRKPKPKDEKEQQQQQQSAGKMKEGKKAQQPSVXEKYTQWKSLVPVLYDWLANHNLVWPSLSCRWGPQLEQATYKNRQRLYLSEQTDGSVPNTLVIANCEVVKPRVAAAEHISQFNEEARSPFVKKYKTLIHPGEVNRIRELPQNSKIVATHTDSPDVLIWDVEAQPNRHAVLGATHSRPDLILTGHQDNAEFALAMCPTEPYVISG

SEQ ID NO: 62843 - protein, 203 aa, Gossypium hirsutum
  unsure (1)..(203): unsure at all Xaa locations
  Clone ID: GOSHI-09MAY01-C1_22.pep
PDHQKPCYDETCWSDLEFIQAKKMTGWMYFVSKTMAEQAAWKFAKENNIDFVSIIPPLVVGPFIMQSMPPSLITALSPITGNEAHYSIIKQGQFIHLDDLCRAHIFLFENPKAEGRHIWAFXHATIIDLAKMLSEKYPEYNVPTKFKDVDENLKSVEFSSKKLLDLGFEFKYSLEDMFVGAVETCREKGLLPLSNEKKTNNID

SEQ ID NO: 62844 - protein, 112 aa, Gossypium hirsutum
  Clone ID: GOSHI-09MAY01-C1_23.pep
CFFLNIMGVYYAILRFISPADSVATSTSDSGEAAISSAKPEVGPSTLWELSPAELLKFSTRLVAPELKSTLSASRDTSSSIASSSCPTTNWIESTKANKNTTKGTFTIFYVF

SEQ ID NO: 62845 - protein, 234 aa, Gossypium hirsutum
  Clone ID: GOSHI-09MAY01-C1_24.pep
KHLPRGESSVVGPLVRLFKPFDELVVDFKDFKPEALEKFIEESSIPLVTLFNKDPSNHPFVAKFYNCPNAKAMLFADLSTEGFDSLQSKYREVAEQYKGKGISFLLGDVEASQAAFQYFGVEESQVPLIIIQSDDGKKYFKPNLKADDIAPWVKDFKEGKVAPYVKSEPIPKENNEPVKVVVADTLQDMVLKSGKNVLLEFYAPWCGHCKKLAPILDEVAVHYEKDADVLIAKL

SEQ ID NO: 62846 - protein, 240 aa, Gossypium hirsutum
  Clone ID: GOSHI-09MAY01-C1_25.pep
GRVDLGDNPRGTSYMVGYGNNFPRQVHHRGSSIVSIKVDSKFIACRQGYAAWYTRKASDPNVLTGAVVGGPDAYDNFADERDNYEQTEPATYNNAPLLGILARLGSGHSGYNQLLPEAVPVPKPVAAKPKAEPKAKSTPNPATTSSPISIRQKMTTSWNDKGRTYYRYSIVMTNKSSKTLKDLKLSISKLYGPIWGLTKSGNSYGFPTYLNSLPAGKSLEFVYIHAASPADVSVSSYNVA

SEQ ID NO: 62847 - protein, 148 aa, Gossypium hirsutum
  unsure (1)..(148): unsure at all Xaa locations
  Clone ID: GOSHI-09MAY01-C1_26.pep
MAAADVEFRCFVGGLAWATDDRALEEAFSAFGEIVESKVRLLQGSDSRSDLIRPDLGAPVIXSVILVLFFCVTCYLILLSCYYSLLKLSPIINDRETGRSRSFGFVTVRDEKTMMDAIEGMNGQNLDGRNITVNQAQSRRNGGGGGGF

SEQ ID NO: 62848 - protein, 89 aa, Gossypium hirsutum
  Clone ID: GOSHI-09MAY01-C1_27.pep
QLLLPILEEAAISSAKPEVGPSTLWELSPAELLRFSTRLVAPELKSISSASRDTSSSIASSSCPTTNWIESTKANENTTKGTLTIFYVF

SEQ ID NO: 62849 - protein, 221 aa, Gossypium hirsutum
  unsure (1)..(221): unsure at all Xaa locations
  Clone ID: GOSHI-09MAY01-C1_28.pep
AGMIFYRKGPKXSKKGQPEGAVYDFEDKINFADFPSLQGGPHNHQIGALAVALKQSMSPGFKAYAKQVKANAVAIGKYLMSKGYQLVTGGTENHLVLWDLRPFGLTGNTVEKLCDLCSITVNKNAVFGDSSALAPGGVRIGTPAMTSRGLVEKDFEQIGEVLHRAVTITLDIQKQYGKLLKDFNKSLENNKEIEKLKADVEKFASSFDMPGFKMSEMKYKN

SEQ ID NO: 62850 - protein, 112 aa, Gossypium hirsutum
  Clone ID: GOSHI-09MAY01-C1_29.pep
ADYTLKLLHRRIPPAVPGIMFLSGGQSEVEATLNLNAMNQSPNPWHVSFSYARALQNTCLKTWGGRPENVKAAQDSLLVRAKANSLAQLGKYTGEGESEEAKKGMFVKGYVY

SEQ ID NO: 62851 - protein, 136 aa, Gossypium hirsutum
  Clone ID: GOSHI-09MAY01-C1_30.pep
PRVRDGQIITIGAERFRCPEVLFQPSMIGMEAAGIHQTPYNSIMKCDVDIRKDLYGNIVLSGGTTMFPGIADRMTKEISALAPSSMKIKVAAPPERKYSAWIGGSILASLSTFQQMWIAKAEYDESGPSIVHRKCL

SEQ ID NO: 62852 - protein, 135 aa, Gossypium hirsutum
  Clone ID: GOSHI-09MAY01-C1_31.pep
HASGGYNQLLPVVVPAPNPGVAKPKPAPKPKFTPTPATSSNPITIEQKMTTSWNAKGKTYYRYSTIVTNKSYKTLKDLKLSISKLYGPLWGLSKSGNSYGFPTWLNSLPAGKSIEFVYIHSTSPADVSVSSYNLA

SEQ ID NO: 62853 - protein, 125 aa, Gossypium hirsutum
  Clone ID: GOSHI-09MAY01-C1_32.pep
MFCCFHFQIINDRETGRSRGFGFVTFRDEKAMRDAIEGMNGQNLDGRNITVNEAQSRRSGGGGGGFGGGNGGYSRGGGGGGYGGRQGGYGGGRREGGYGNGGRYGGGGYRGGRREGGYGDGGSRY

SEQ ID NO: 62854 - protein, 196 aa, Gossypium hirsutum
  Clone ID: GOSHI-09MAY01-C1_33.pep
MDPVNTWGNSSLESVDPEMHDLIEKEKRRQCRGIELIASENFTSFAVIEALGSALTNKYSEGMPGNRYYGGNEFIDEIENLCRSRALQAFHLDPTKWGVNVQPYSGSPANFAAYTAVLEPHDRIMGLDLPSGGHLTHGYYTSGGKKISATSIYFESLPYKVNPSNGYLDYDKLEEKALDFRPKLIICGGSAYPRDW

SEQ ID NO: 62855 - protein, 83 aa, Gossypium hirsutum
  Clone ID: GOSHI-09MAY01-C1_34.pep
MARSVCVWFALAAIVCSLSAISAEESSESKEFVLTLDHSNFTDTVSKHDFIVVEFYAPWCGHCKHLAPEYEKAIIMHELVVII

SEQ ID NO: 62856 - protein, 341 aa, Gossypium hirsutum
  unsure (1)..(341): unsure at all Xaa locations
  Clone ID: GOSHI-09MAY01-C1_35.pep
MEAEKKHSSAVSNVGAWAMNVISSVGLIMANKQLMSPTGHAFAFATTLTGFHFCTTALIGLVSNATGYTTXKNVPLWELLWFSVVANTSITAMNLSLMLNSVGFYQISKLSMIPVVCFLEWLLNGKHYSSKVKMAVVVVVVIGVGVCTVTDVKINSHGFLCACVAVLSTSLQQISIGSLQKKYSIGSFELLSQTAPIQALSLLLLGPFVDYFLTGKLLASYKISTAAFFFIVLSCSLAVFCNISQYLCIGRFSAVSFQVLGHMKTVCVLILGWMLFDSELTLKNILGMSIAVNGMIIYSWAVEGDKPMQYRKDATSDVKVLIKQVDGSSLLKDVELGKSQG

SEQ ID NO: 62857 - protein, 251 aa, Gossypium hirsutum
  Clone ID: GOSHI-09MAY01-C1_36.pep
MRPVFVGNFEYETRQSELERLFSKYGRIERDDMKSGFAFVYYEDERDAEDAIRELDNIPFGYDRRRLSVEWAKGERGRRVDGSRSVTNHRPTKTLFVINFDPIRTRERDILRHFEPYGKVLHVRIRRNFAFVQFATQDDATKALEATQRSTVLHRVGSVEYALRDDDERDNRFYSPKRGGYDRRRDSPYGEASSPVYHRRQSPDYGRARSPVYERYNGPAYDRRKSPDYGRHRSPEYGRYRSRSPVRRSRT

SEQ ID NO: 62858 - protein, 186 aa, Gossypium hirsutum
  unsure (1)..(186): unsure at all Xaa locations
  Clone ID: GOSHI-09MAY01-C1_37.pep
MARSVCVWFALAAIVCSLSAISAEESSESKEFVLTLDHSNFTDTVSKHDFIVVEFYAPWCGHCKHLAPEYEKAASILSKHDPPIFLAKVDADDEANKDLASQYDVKGYPTLQILRNGGKNVQEYKGPREADGIVEYLKKQSGPXSVEIKLTEDASNLIDDKKIVIVGVFPKFSGEEFESYMALAEK

SEQ ID NO: 62859 - protein, 104 aa, Gossypium hirsutum
  Clone ID: GOSHI-09MAY01-C1_38.pep
KESQRVLEIVGREADGGGGEEELSGDGGSSGVDMDMDLKRMNANFDELCGEDKILVFFKRLLNDWNQELDEMGEAEKRTAKGKSMVATFKQCARYLNPLFKFCR

SEQ ID NO: 62860 - protein, 123 aa, Gossypium hirsutum
  Clone ID: GOSHI-09MAY01-C1_39.pep
MARIKVHELRQKSKTELLAQLKDLKAELALLRVAKVTGGAPNKLSKIKVVRLSIAQVLTVISQKQKSALREAYKNKKFLPLDLRPKKTRAIRRRLTKHQASLKTEREKKKEMYFPMRKYAIKV

SEQ ID NO: 62861 - protein, 123 aa, Gossypium hirsutum
  Clone ID: GOSHI-09MAY01-C1_40.pep
MARIKVHELRQKSKTELLAQLKDLKAELALLRVAKVTGGAPNKLSKIKVVRLSIAQVLTVISQKQKAALREAYKKKKFLPLDLRPKKTRAIRRRLTKHQASLKTEREKKKEMYFPMRKYAIKV

SEQ ID NO: 62862 - protein, 489 aa, Gossypium hirsutum
  Clone ID: GOSHI-09MAY01-C1_41.pep
ARSVSVWLALSAILCSVTAISAEQSSETKDFVLTLDHSNFTDTVSKHKFIVVEFYAPWCGHCKNLAPEYEKAASILSKHDPPVILAKVDANEEANKYLANEYEVRGYPTLKILRNGGKNVQEYKGPREADGIVEYLKKQSGPASAELKSAEDASNLIDGKKIVVVGVFPKFSGEEFESYMALAEKLRSDYEFGHTLDAKHLPRGESSVTGPVVRLFKPFDELFVDFKDFNVEALKKFVAESSMPLVTHFNKDPSNHQFVIKFYNSPNAKAMLFANLSVEGIDSLTSKYREVAEQFKGQGIGFLLGDLEASQAAIQYFGVQESQVPLIIIQNNDRKKYLKPNLQANDIAPFVKDYKEGKVPPYLKSEPIPEENKEPVKVVVADTLEDMVFKSGKNVLLEFYAPWCGHCKKLAPILDEVAVHYEKDDNVVIAKLDATANDIVGENFDVRSYPTIYFKSTSGNITPYEGNKTKEDIVNFIEKNKDKTCQQES

SEQ ID NO: 62863 - protein, 291 aa, Gossypium hirsutum
  Clone ID: GOSHI-09MAY01-C1_42.pep
HSIAVNKKISAYVKHKKKQNQICWIWEKVSPDNDGGFQRLLDTVQYKANSILRYERTFGERIASTGGIETTKEFVAKLDLKPGQKVLDVGCGIGGGDFYMAKEFGVYVVGIDLSINMISFALERANGLDCSVEFEVADCTTKTYPDNSFDVIYSRDTILHIQDKPALFRYFYKWLKPGGKVLISDYCKSAGASSPEFAEYIKQRGYDLHDVKAYGQMLKDAGFDQVIAEDRTDQFIQVLQRELDKVEKDKDTFITDFSQEDYDDIVGGWKAKLIRTRFGEQRWGLFIANKN

SEQ ID NO: 62864 - protein, 377 aa, Gossypium hirsutum
  Clone ID: GOSHI-09MAY01-C1_43.pep
MAEGEDIQPLVCDNGTGMVKAGFAGDDAPRAVFPSIVGRPRHTGVMVGMGQKDAYVGDEAQSKRGILTLKYPIEHGIVNNWDDMEKIWHHTFYNELRVAPEEHPILLTEAPLNPKANREKMTQIMFETFNAPAMYVAIQAVLSLYASGRTTGIVLDSGDGVSHTVPIYEGYALPHAILRIDLAGRDLTDNLMKILTERGYSFTTTAEREIVRDVMEKLSYIALDFEQGIETSKTNSSVEKTYELPDGQIITIGAERFRCPEVLFQPSMIGMEAAGIHETTYNSIMKCDVDIRKDLYGNIVLSGGTTMFPGIADRMTKEISALAPSSMKIKVVAPPERKYSVWIGGSILASLSTFQQMWISKAEYDESGPSIVHRKCF

SEQ ID NO: 62865 - protein, 514 aa, Gossypium hirsutum
  unsure (1)..(514): unsure at all Xaa locations
  Clone ID: GOSHI-09MAY01-C1_44.pep
MESPQPQQQQQQGPKKRGRKPKPKEEKEQQQQQSASKMKEGKKAHQPSVDEKYTQWKSLVPVLYDWLANHNLVWPSLSCRWGPQLEQATYKNRQRLYLSEQTDGSVPNTLVIANCEVVKPRVAAAEHISQFNEKTRSPFVKKYKTIIHPGEVNRIKELPQSSRIVATHTDSPDVLIWDVEAQPNRHAVLGATHSRPDLILTGHQDNAEFALAMCPTEPYVLSGGKDKSVVLWSIQDHITTMATDPTKSPGSGGSIIKQNKPGEGNDKAADGPSLGPRGVFCGHEDTVEDVTFCPSSAQEFCSVGDDSCLILWDARVGTGPTVKVEKAHNADLHCVDWNPHDDNLILTGSADHTVRMFDRRNLTSNGIGSPIYKFEGHKAAVLCVQWSPDKSSVFGSSAEDGLLNIWDYDKVGKKVERASRSPSASAGLFFQHAGHRDKVVDFHWNAFDPWTVVSVFDDCETTGGGGTLQIWGMSDLIYRPEKEVLAXLEKFKSHVILWATKALKRFSSPNGMPI

SEQ ID NO: 62866 - protein, 276 aa, Gossypium hirsutum
  unsure (1)..(276): unsure at all Xaa locations
  Clone ID: GOSHI-09MAY01-C1_45.pep
IHPVLLTEAPLNPKXNREKMTQIMFETFNAPAMYVAIQAVLSLYASGRTTGIVMDSGDGVSHTVPIYEGYALPHAILRLDLAGRDLTDYLMKILTERGYSFTTTAEREIVRDVKEKLSYIALDYEQELETSKTSSSVEKSYELPDGQVITIGAERFRCPEVLFQPSLIGMEAAGIHETTYNSIMKCDVDIRKDLYGNIVLSGGTTMFPGIADRMSKELSALAPSSMKIKVVAPPERKYSVWIGGSILASLSTFQQMWIAKAEYDESGPAIVHRKCF

SEQ ID NO: 62867 - protein, 123 aa, Gossypium hirsutum
  Clone ID: GOSHI-09MAY01-C1_46.pep
MARIKVHELRQKSKTDLLAQLKDLKAELALLRVAKVTGGAPNKLSKIKVVRLSIAQVLTVISQKQKSALREAYKKKKFLPLDLRPKKTRAIRRRLTKHQASLKTEREKKKEMYFPMRKYAIKV

SEQ ID NO: 62868 - protein, 347 aa, Gossypium hirsutum
  Clone ID: GOSHI-09MAY01-C1_47.pep
MDSLKKQSSAVSDVGAWAMNVVSSVGLIMANKQLMSPAGYAFVFATTLTGFHFSMTALIGLVSNATGNSTRKKVPLWELLWFSVVANTSITGMNLSLMLNSVGFYQISKLSMIPVVCVMEWILHSKHYSDKVKISVLVVVVGVGVCTVTDVKVNAQGFICACVAVLSTSLQQISIGSLQTKYSIGSFELLSQTAPIQALSLLLFGPFVDYYLTGKLLASYKFSSAAFFFILLSCSLAVFCNISQYLCIGRFSATSFQVLGHMKTVCVLILGWLLFDSELTLKNILGMAIAILGMVVYSWAVEADKQTESKVSPLPKEASEENVELLKQQQQSDGSPLKDVELGKYQP

SEQ ID NO: 62869 - protein, 128 aa, Gossypium hirsutum
  Clone ID: GOSHI-09MAY01-C1_48.pep
TQVAPQAIRPRARLPGVAAKPIKPKKSTGKPVGRPKKTTDGAASYGDLKRKLEFFQSKVKQAVGVLKSQFSSESNISAIDAIQELEVLAAMDINKPFKDDAQPPPPPPPAPEPTQPAPMPQNMEGQVY

SEQ ID NO: 62870 - protein, 183 aa, Gossypium hirsutum
  Clone ID: GOSHI-09MAY01-C1_49.pep
MSSLNINANHSHIKQTTPTLNIVAETMAFSALTGKLEADVEIKASPEQFHEMFAHKPHHVHHTCYDKIQGCDLHEGEWGKVGTIVHWSYVHDGKAKKAKEVVEAVDPDKNLVTFRVIEGDLMEEYKSFVITIQVSPKSEGSGSLVHWTLEYEKLHDGIAHPETLLQFVQDVSKDIDAHLTQAS

SEQ ID NO: 62871 - protein, 157 aa, Gossypium hirsutum
  Clone ID: GOSHI-09MAY01-C1_50.pep
MTSSALTGKLEADVEIKASPEQFHEMFAHKPHHVHHTCYDKIQGCDLHEGEWGKVGTIVHWSYVHDGKAKKAKEVVEAVDPDKNLVTFRVIEGDLMEEYKSFVITIQVSPKSEGSGSVVHWTLEYEKLHGGIEHPETLLQFVQDVSKDIDGHLTQAS

SEQ ID NO: 62872 - protein, 95 aa, Gossypium hirsutum
  Clone ID: GOSHI-09MAY01-C1_51.pep
SGGKFRSRLNTGERPIANKYREGLVEKDFEQIGEFLHRAVTITLNIQKQYGKLLKDFNKGLDNNKEIQELKVDVEKFASSFDMPGFKMSEMKYKD

SEQ ID NO: 62873 - protein, 495 aa, Gossypium hirsutum
  Clone ID: GOSHI-09MAY01-C1_52.pep
MWRIVSVWLAFFVIACSLTAISAEESGESKEFVLTLDQSNFTDTVSKQDFIVVEFYAPWCGHCKNLAPEYEKAASILSKHDPPILLAKVDANEESNKDLANEYEVRGFPTLKILRNGGKNVQEYKGPREADGIVEYLKKQSGPASADIKSAEDASNFIDEKKIVIVGVFPKFSGQEFDNYMALAEKLRPDYEFGHTLDAKYLPRGESSVTGPVVRLFKPFDELFVDFKDFNVEALEKFVEESSIPLVTLFNNDPSNHPFIIKFYNSPLAKAMLFANLSNEGVDSLKSKFREVAEQYKGQGIGFLLGDLEASQAAFQYFGVQESQVPLIIILENDGKKYLKPNLEADHIAPWVKDYKEGKVPPYVKSEPIPVENNEPVKVVVADTLDDMVLKSGKNVLLEFYAPWCGHCQKLAPILEEVAIHYEKDASVLIAKLDATANDIVDPNFDVRGYPTVYFRSADGNISAYEGERTKEDIIDFIEKNREKTAHQEALKDEL

SEQ ID NO: 62874 - protein, 377 aa, Gossypium hirsutum
  Clone ID: GOSHI-09MAY01-C1_53.pep
MADGEDIQPLVCDNGTGMVKAGFAGDDAPRAVFPSIVGRPRHTGVMVGMGQKDAYVGDEAQSKRGILTLKYPIEHGIVNNWDDMEKIWHHTFYNELRVAPEEHPVLLTEAPLNPKANREKMTQIMFETFNSPAMYVAIQAVLSLYASGRTTGIVLDSGDGVSHTVPIYEGYALPHAILRLDLAGRDLTVNLMKILTERGYSFTTTAEREIVRDVKEKLSYIALDYEQELETSKTDSSVEKTYELPDGQIITIGAERFRCPEVLFQPSLIGMEAAGIHETTYNSIMKCDVDIRKDLYGNIVLSGGTTMFPGISDRMTKEISSLAPSSMKIKVVAPPERKYSVWIGGSILASLSTFQQMWIAKAEYDESGPSIVHRKCF

SEQ ID NO: 62875 - protein, 359 aa, Gossypium hirsutum
  unsure (1)..(359): unsure at all Xaa locations
  Clone ID: GOSHI-09MAY01-C1_54.pep
MPTDNQMKDMKPNSIMGSSVTDGEIVCVTGGSGFIGSWLIKLLLERGYVVRATVRDPGNSKKVKHLLELPKAETHLTLWKADLAEEGSFDDAIQACTGVFHVATPMDFESEDPXENEVIKPTINGVLSIMKACAKAKTVRRLVFTSSAGTIDVAEQQKPCYDETCWSDLEFIQAKKMTGWMYFVSKTMAEQAAWKFAKENNIDFVSIIPTFXWVGPFIMQSMXPPSLITALSPITGNXEAHYSIIKQGQFIHLDDLCRAHIFLFENPKAEGRHICASHHATIIDLAKMLSEKYPEYNVPTKFKDVDENLKSVEFSSKKLLDLGFEFKYSLEDMFVGAVETCREKGLLPLSNEKKIKNID

SEQ ID NO: 62876 - protein, 167 aa, Gossypium hirsutum
  unsure (1)..(167): unsure at all Xaa locations
  Clone ID: GOSHI-09MAY01-C1_55.pep
MASASATLLKSSPIIDKSEWIKGQNLRHPSVCFVRSHPTXAAFTVRASSYADELVKTAKTVASPGRGILAMDESNATCGKRLASIGLENTEANRQAYRTLLVSAPGLGDYISGAILFEETLYQSTIDGKKMVDVLVEQKIVLGIKVDKGLVPLPGSNNESWCQGLDG

SEQ ID NO: 62877 - protein, 284 aa, Gossypium hirsutum
  unsure (1)..(284): unsure at all Xaa locations
  Clone ID: GOSHI-09MAY01-C1_56.pep
AFCSVLFIDSLSSRFHRRKKKKKSQKTKISWLRKFFVGGNWXKCNGTTEEVKKIVTTLNEAEVPSHDVVEVVVSPPFVFLTLVKSLLRSDFHVAAQNCWVRKGGAFTGEVSAEMLVNLGIPXVIIGHSERRALLNESNEFVGDKVAYALSQGLKVIACIGETLEQRESGSTMAVVAAQTKAIADKVTNWDNVVLAYEPVWAIGTGKVATPAQAQEVHCELRKWLNQNVGADIAASVRIIYGGSVNGANCKELAGQPDVDGFLVGGASLKPEFVDIIKSATVKKN

SEQ ID NO: 62878 - protein, 471 aa, Gossypium hirsutum
  Clone ID: GOSHI-09MAY01-C1_57.pep
MDPVSSWGNSSLDSVDPEIHDLIEKEKRRQCRGIELIASENFTSFAVIEALGSALTNKYSEGMPGNRYYGGNEFIDEIENLCRSRAIQAFHLDPTKWGVNVQPYSGSPANFAAYTAVLQPHDRIMGLDLPSGGHLTHGYYTSGGKKISATSIYFESLPYKVNSTTGYIDYDKLEEKALDFRPKLIICGGSAYPRDWDYARFRAVADKCGALLLCDMAHISGLVAAQEANNPFEFCDIVTTTTHKSLRGPRAGMIFYRKGPKPPKKGQPEDAVYDFEDKINFAVFPSLQGGPHNHQIGALAVALKQSMTPGFKAYAKQVKANAVALGKYLMGKGYQLVTGGTENHLVLWDLRPLGLTGNKVEKLCDLCNITVNKNAVFGDSSALAPGGVRIGTPAMTSRGLVEKDFEQIGEFLHRAVTITLNIQKQYGKLLKDFNKGLDNNKEIQELKVDVEKFASSFDMPGFKMSEMKYKD

SEQ ID NO: 62879 - protein, 183 aa, Gossypium hirsutum
  Clone ID: GOSHI-09MAY01-C1_58.pep
MATAEVASVQTALHEEKTEESVKDQEATTDEVVAEAPAAEAAAEEPKEAEPAAVAVEEPEASVEVETKEVVEEPKAVTEEPVVEETPKETVPEPVAEEIKETTEQTVETKETTESSEAAAEAPKEEVEKEEEAKPAEVEKVETETDPAEKTAVNNKAFVMKMRVSMEDCFKWLQFDKFACQVN

SEQ ID NO: 62880 - protein, 168 aa, Gossypium hirsutum
  unsure (1)..(168): unsure at all Xaa locations
  Clone ID: GOSHI-09MAY01-C1_59.pep
MAAADVEFRCFVGGLAWATDDRALEEAFSAFGEIVESKIINDRETGRSRGFGFVTFXSEKAMRDAIEGMNGQNLDGRNITVNEAQSRRSGGGGGGFGGGNGGYSRGGGGGGYGGRQGGYGGGRREGGYGNGGGYGGGGYGGGRREGGYGDGGSRYSRGGGASEGNWRS

SEQ ID NO: 62881 - protein, 377 aa, Gossypium hirsutum
  Clone ID: GOSHI-09MAY01-C1_60.pep
MAEGEDIQPLVCDNGTGMVKAGFAGDDAPRAVFPSIVGRPRHTGVMVGMGQKDAYVGDEAQSKRGILTLKYPIEHGIVSNWDDMEKIWHHTFYNELRVAPEEHPVLLTEAPLNPKANREKMTQIMFETFNAPAMYVAIQAVLSLYASGRTTGIVMDSGDGVSHTVPIYEGYALPHAILRLDLAGRDLTDYLMKILTERGYSFTTTAEREIVRDVKEKLSYIALDYEQELETSKTSSSVEKSYELPDGQVITIGAERFRCPEVLFQPSLIGMEAAGIHETTYNSIMKCDVDIRKDLYGNIVLSGGTTMFPGIADRMSKELSALAPSSMKIKVVAPPERKYSVWIGGSILASLSTFQQMWIAKAEYDESGPAIVHRKCF

SEQ ID NO: 62882 - protein, 397 aa, Gossypium hirsutum
  Clone ID: GOSHI-09MAY01-C1_61.pep
MASASATLLKSSPIIDKSEWIKGQNLRHPSVCFVRSHPTSAAFTVRASSYADELVKTAKTVASPGRGILAMDESNATCGKRLASIGLENTEANRQAYRTLLVSAPGLGNYISGAILFEETLYQSTIDGKKMVDVLVEQNIVPGIKVDKGLVPLPGSNNESWCQGLDGLSSRTAAYYQQGARFAKWRTVVSIPNGPSALAVKEAAWGLARYAAISQDSGLVPIVEPEILLDGDHGIDRTFEVAQKVWAEVFFYLAENNVMFEGILLKPSMVTPGAECKDKATPQQVADYTLKLLHRRIPPAVPGIMFLSGGQSEVEATLNLNAMNQSPNPWHVSFSYARALQNTCLKTWGGRPENVKAAQDALLVRAKANSLAQLGKYTGEGESEEAKKGMFVKGYVY

SEQ ID NO: 62883 - protein, 253 aa, Gossypium hirsutum
  Clone ID: GOSHI-09MAY01-C1_62.pep
MLRNSLGGGTWNCMGPPEEVKKIVTTLNEAEVPSEDVVEVVVSPPFVFLTFVKSLLRSDFHVAAQNCWVRKGGAFTGEISAEMLVNLSIPWVIIGHSERRALLNESNEFVGDKVAYALSQGLKVIACIGETLEERESGSTMAVVAAQTKAIAGKVTNWDNVVLAYEPVWAIGTGKVATPAQAQEVHCELRKWLHENVGGDIAASTRIIYGGSVNGANCKELAAQPDVDGFLVGGASLKPEFVDIIKAATVKKN

SEQ ID NO: 62884 - protein, 143 aa, Gossypium hirsutum
  unsure (1)..(143): unsure at all Xaa locations
  Clone ID: GOSHI-09MAY01-C1_63.pep
RQSSERVADAWADAWADAWADAWAEANRQAYRTLLVSAPGLGNYISGAILFEETLYQSTIDGKKMVDVLVEQNIVPGIKVDKGLVPLPGSNNESWCQGLDGLSSRTAAYYQQGARFAKWRTVVSIPNGPSALAVKEXAWGLAR

SEQ ID NO: 62885 - protein, 179 aa, Gossypium hirsutum
  Clone ID: GOSHI-09MAY01-C1_64.pep
QQWYSPSVALSLTQAPFSVQSRTPSQKIKVGRRCTREGSRQSASLRLTAFSSPLTRTHVRLLGQCFKTGRMGSPQADARSTQVPKHAEAARAESHDRGDDVSHGRIKGPGLGRRHDPRRSTPRADRRTGSRRSTSDRGRIAGPHPLPSRQFQALFDSLFKVLFIFPLAVLVRYRSLARI

SEQ ID NO: 62886 - protein, 129 aa, Gossypium hirsutum
  Clone ID: GOSHI-09MAY01-C91_1.pep
MSDGEDAVRRHNAIAEYRKKLLQHKEYESRIRAGRENLRAAKKDFNKTEDDLKSLQSVGQIIGEVLRPLDNERLIVKASSGPRYVVGCRSKVDKEKLTSGTRVVLDMTTLTIMRALPREVDPVVYNMLH

SEQ ID NO: 62887 - protein, 96 aa, Gossypium hirsutum
  Clone ID: GOSHI-09MAY01-C81_3.pep
MGATAATSSCFPITSSPDSIDSKNKKLGNGSTNLGGIKLKPSASSGSLQVMANAQAPPKINGTTVVMTPVEGFTSEDAASSTPPRTFINQLPDWSM

SEQ ID NO: 62888 - protein, 185 aa, Gossypium hirsutum
  Clone ID: GOSHI-09MAY01-C81_2.pep
MVATAATSSFFPITSSPDSIDSKNKKLGNGSTNLGGIKLKPSASSGSLQVMANAQAPPKINGTTVVMTPVEGFTSEDAASSTPPRTFINQLPDWSMLLAAITTIFLAAEKQWMMLDWKPRRPDMLIDPFGIGRIVQEGLVFRQNFSIRSYEIGADRTASIETLMNHLQETAINHCKSAGLLGDGF

SEQ ID NO: 62889 - protein, 413 aa, Gossypium hirsutum
  Clone ID: GOSHI-09MAY01-C81_1.pep
MVATAVTSAFFPVTSSPDSSDSKNKKLGSIKSKPSVSSGSLQVKANAQAPPKINGTVASTTPVEGSKNDDGASSPPPRTFINQLPDWSMLLAAITTIFLAAEKQWMMLDWKPRRPDMVIDPFGIGKIVQDGLVFSQNFSIRSYEIGADQTASIETLMNHLQETAINHCRSAGLLGEGFGATPEMCKKNLIWVVTRMQVVVDRYPTWGDVVQVDTWVSASGKNGMRRDWLVSNSETGEILTRATSVWVMMNKLTRRLSKIPEEVRGEIEPFFMNSDPVLAEDSQKLVKLDDSTAEHVCKGLTPKWSDLDVNQHVNNVKYIGWILESAPLPILESHELSAMTLEYRRECGRDSVLQSLTTVSDSNTENAVNVGEFNCQHLLRLDDGAEIVRGRTRWRPKHAKSSANMDQITAKRA

SEQ ID NO: 62890 - protein, 54 aa, Gossypium hirsutum
  Clone ID: uC-gsronu33B132d01b1.pep
FRIKFIFNLGGFVYFFCLYFNLNLLMQKKKKKKKNEGRERKRKKKKKKKKKKIK

SEQ ID NO: 62891 - protein, 159 aa, Gossypium hirsutum
  unsure (1)..(159): unsure at all Xaa locations
  Clone ID: GOSHI-09MAY01-C51_1.pep
IIGIDLNPSRFEQAKKFGVTEFVNPKDYNKPVQEVIVEMTGGGVDRTVQCTGSIQAMISAFECVHDGWGVAVLVGVPNKDDAFKTHPVNLLNERTLKGTFFGNYKPRSDIPAVVEKYMNKELELDKFITHTVPFSEINKAFELMLAGEGLRCXCIRMDA

SEQ ID NO: 62892 - protein, 77 aa, Gossypium hirsutum
  Clone ID: U53703.pep
EFKTHPVNLLYEKTLKGTFFGNYKPRSDIPAVVEKYMNKELELDKFITHTVPFSEINKAFELMLAGEGLRCVIRMDA

SEQ ID NO: 62893 - protein, 86 aa, Gossypium hirsutum
  Clone ID: GOSHI-09MAY01-C41_33.pep
MAVNFNAIASKSQKLPCFALPPKATLRSPKFSMISTIPSGSKEVGNLKKPFTPPKEVPVQITHSMPPHKIEIFKSLEGWAENNILT

SEQ ID NO: 62894 - protein, 113 aa, Gossypium hirsutum
  Clone ID: GOSHI-09MAY01-C41_30.pep
MALSHLAASASRSSSLLKPLSSALSLRRPISGDNSPLTVETSVPFTSHQCEAPSRSVETNPKELLTFFRDMALMRRMEIAADSLYKAKLIRGFCHLYDGQEAVAVGMEAAITK

SEQ ID NO: 62895 - protein, 97 aa, Gossypium hirsutum
  Clone ID: GOSHI-09MAY01-C41_28.pep
CKKVQEKQKSKFQSTQMLNIFWKCISNVCNHTSKHLHFEPDHLTGSISLIPVTTPVYHSNQEHNPHVCSKQDSLRLSTQPSPYHQLHSCLVFSSQCL

SEQ ID NO: 62896 - protein, 161 aa, Gossypium hirsutum
  unsure (1)..(161): unsure at all Xaa locations
  Clone ID: GOSHI-09MAY01-C41_27.pep
MALNFNPIASKSQKLPCFALPRKATLRSPKFSMISTIPSGSKEVGNLKKPFTPPKEGPXVRSTHSMPPHKIEIFKSXLEGWAENNILTHLKPVEKCWQPADFLPDPNSDGFHEQVKELRERAKEIPDDYFVVLVGDMITEEALSTYQTMLNTLDGTRDETG

SEQ ID NO: 62897 - protein, 266 aa, Gossypium hirsutum
  unsure (1)..(266): unsure at all Xaa locations
  Clone ID: GOSHI-09MAY01-C41_20.pep
MFTRGDEAEEGNEERNKRKMEIVWQTPAHPAQKQDYVFHNGKRHVRPYYFEFVSHVNKRWEGKTIVDLFAQEFRGRSRDYYVSAVKCGRIQVDGENIPVSYIVKRCQKISHFLHRHEPPVMAWDVEVLQNEPDVLTVCKPASVPVHPCGQYRKNTVLGILQAEYGLAPLYPIHRLDRLVSGLLIVAKNPAKADXFRQHIEAGLVQKQYVAKVVGVFPDAEQVVDANIDYNAREGRSTAEVGISNGDTTLKGKAACTKFTRISTNGI

SEQ ID NO: 62898 - protein, 125 aa, Gossypium hirsutum
  Clone ID: GOSHI-09MAY01-C41_19.pep
TLKGSHLKVASCLLLPAIQLVVGISHPSWISLTFFIGSCVGLVDWSLTSNFLGLFRLWKALQFYAGFSIFMLYVYQLPIEFSSMLQWITDFVGLFKICSTSEWTEICSSVSLVLFYIMVCTSFIP

SEQ ID NO: 62899 - protein, 148 aa, Gossypium hirsutum
  Clone ID: GOSHI-09MAY01-C41_18.pep
MNLAQLCGSIAADEKRHETAYTKIPARPFEIDPDGSVLAFADVMRKKISMPAHLMYDGSDENLFYHYSSVAQRIGVYTARDYADIVEYLVDRWKLKELIGLSPEGREAQEFVCGLAPRIRKLEERAQLRTKESPSVPFSWVSGREVKL

SEQ ID NO: 62900 - protein, 317 aa, Gossypium hirsutum
  unsure (1)..(317): unsure at all Xaa locations
  Clone ID: GOSHI-09MAY01-C41_17.pep
MALSRLASSSSRSADLLKPLCSSISLRRPISTDTTPITVETSVPFTPHQCEPPSRSVETNPKELLTFFRDMALMRRMEIAADSLYKAKLIRGFCHLXYDGQEAVAVGMEAAITKKDCIITAYRDHCTFVXRGGTLLEVFAELMGRQAGCSKGKGGSMHFYKKDSNFYGGHGIVGAQVPLGCGLAVAQKYSXDEAVTFALYGDGAANQGQLFEALNISALWDLPAILVCENNHYGMGTAEWRAAKSPAYYKRGDYAPGLKVDGMDAFAVKQACTFAKEHALKNGPIILDMDTYRYHGHSMSDPGSTYRTRDEITGVRQ

SEQ ID NO: 62901 - protein, 111 aa, Gossypium hirsutum
  Clone ID: GOSHI-09MAY01-C41_14.pep
IRVHLQCTGHPIANDMLYLSDDVVNRSTLGTTADRAAALFGGSPETSCESHKGVRKYCSEDFSIDPMCTHCPNLAPNGYDGHEEGLWLHCVRYTGPEWVYECPYPDWASLT

SEQ ID NO: 62902 - protein, 237 aa, Gossypium hirsutum
  unsure (1)..(237): unsure at all Xaa locations
  Clone ID: GOSHI-09MAY01-C41_12.pep
AHFQVPWSTRAGTGVESRRGDLLNKYLYLSGRVDMRQIERTIQYLIGSGMDPHTENSPYRGFIYTSFQERATFISHGNTGRLAKEYGDINLAQICGSIASDEKRHETAYTKXIVEKLFEIDPDETVQAFADLMKTKIAMPAEFIYDGRDYNLFDHYSAVAQGIGVYTAKDYVDIVEHLVDRWKVKELAGLSAEGRKAQDYLCALPSRIRRLEERAQEKAKEAPSIPFSWIFDREVKL

SEQ ID NO: 62903 - protein, 205 aa, Gossypium hirsutum
  unsure (1)..(205): unsure at all Xaa locations
  Clone ID: GOSHI-09MAY01-C41_11.pep
MIKLVGVWLTAIPGYSSLEMPRTFNAPFRRSIYTSFQERATCISHGNTGRLAKEYGHINLAQICGSIASDEKRHETAYTKIVEKLFEIDPDETVLAFADMMKKKIAMPAEFIYDGRDYNLFDHYSAVAQRIGVYTAKDYVDILKFLVNKWKVTELTGLSADGRKAQDYVCGLPPRIRRLEERAQGRAKEAPXVPFXWIFDKKIQL

SEQ ID NO: 62904 - protein, 170 aa, Gossypium hirsutum
  Clone ID: GOSHI-09MAY01-C41_10.pep
FVCENNHYGMGTAEWRAAKSPASHAPAHAAPGLKVDGMDALAVKQACTFAKEHALKNGPIILEMDTYRYHGHSMSDPGSTYRTRDEISGVRQERDPIERIRKLILSHDLATEKELKDVEKEVRKEVDDAIAQAKESPMPEPSELFTNVYAKGLGVESFGADRKEVRATLP

SEQ ID NO: 62905 - protein, 179 aa, Gossypium hirsutum
  unsure (1)..(179): unsure at all Xaa locations
  Clone ID: GOSHI-09MAY01-C41_9.pep
MVTFRFHQYQVVGRAHPTESDEHPKIYRMKLWATNEVRAKSKFWYFLRKLKKVKKSNGQVLAINEIFEKNPTKIKNYGIWLRYQSRTGYHNMYKEYRDTTLNGAVEQMYTEMASRHRVRFPCIQIIKTATIPAKLCKRESTKQFHNSKIKFPLVVKKVRPPXPRKLKTTYKASKPNLFM

SEQ ID NO: 62906 - protein, 66 aa, Gossypium hirsutum
  Clone ID: GOSHI-09MAY01-C41_7.pep
VDIVEHLVDPRVRKELTGLSAEGRKAQDYVCALSSRIRRLEERAQEKAKEAPCIPFSWIFDREVKL

SEQ ID NO: 62907 - protein, 178 aa, Gossypium hirsutum
  unsure (1)..(178): unsure at all Xaa locations
  Clone ID: GOSHI-09MAY01-C41_6.pep
MVTFRFHQYQVVGRALPTENDEHPKIYRMKLWATNEVRAKSKFWYFLRKLKKVKKSNGQVLAINEIFEKNPTKIKNYGIWLRYQSRTGYHNMYKEYRDTTLNGAVEQMYTEMASRHRVRFPCIQIIKTATIPAKLCKRDSTKQFHNSKIKFPLVFKKVRPPTRXLKTTYKASKPNLFM

SEQ ID NO: 62908 - protein, 423 aa, Gossypium hirsutum
  Clone ID: GOSHI-09MAY01-C41_5.pep
VSGIPGRRRHPALFSPQAKQKKKKKGKKMAMQFNPIASQTKKLPSYALPPMASLRSPKVSMVSTLPPRSKGVEDLKRPFMAPKLVHQASHTMPPEKIEIFKSLDDWARDNILIHLKQVDKCWQPKDFLPDPSSDGFEDQVRELRERAKEIPDEYFVVLVGDMITEEALPTYQTMLNTLDGTRDETGASPTSWATWTRAWTAEENRHTDLLNKYLYLCGRVDMRQVEKTIQYLIGSGMDPGTENSPYLGFIYTTFQERATFISHGNTARLAKVHGDMNLAQLCGSIAADEKRHETAYTKILEKLFEIDPDGSVLAFADMMRKKISMPAHLMYDGRDENLFDHYSSVAQRIGVYTARDYADIVEYLVDRWKLKELIGLSPEGREAQEFVCGLAPRIRKLEERAQLRAKESPSVPFSWVSGREVTL

SEQ ID NO: 62909 - protein, 178 aa, Gossypium hirsutum
  Clone ID: GOSHI-09MAY01-C41_4.pep
MVTFRFHQYQVVGRAHPTESDEHPKIYRMKLWATNEVRAKSKFWYFLRKLKKVKKSNGQVLAINEIFEKNPTKIKNYGIWLRYQSRTGYHNMYKEYRDTTLNGAVEQMYTEMASRHRVRFPCIQIIKTATIPAKLCKRDSTKQFHNSKIKFPLVFKKVRPPTRKLKTTYKASKPNLFM

SEQ ID NO: 62910 - protein, 146 aa, Gossypium hirsutum
  unsure (1)..(146): unsure at all Xaa locations
  Clone ID: GOSHI-09MAY01-C41_3.pep
AQICVTCAWGEKRHETAXYTKIVEKLFEIDPDGTVLAFADMMRKKISMPAHLMYDGQDDNLFDNFSAVAQRLGVYTARDYADILEFLVNKWKVTELTGLSADGRKAQDYVCGLPPRIRRLEERAQGRAKEAPRVPFSWIFDREVQL

SEQ ID NO: 62911 - protein, 398 aa, Gossypium hirsutum
  unsure (1)..(398): unsure at all Xaa locations
  Clone ID: GOSHI-09MAY01-C41_2.pep
KEMALKFNPITFQSQKLPSFALPPMAGLRSPKFFMASTLRSGSKEVDLKKPFMPPSEVHVQVTHSMPPQKIEIFKSLEDWAENNILTYLKPVEKCWQPQDFLPDPASDGFHEQVKELRERAKEIPDDYFVVLVGDMITEEALPTYQTLLNXTLDGVRDETGASLTPWAIWTRAWTAEENRHGDLLNKYLYLSGRVDMRQIEKTIQYLIGSGMDPRTENNPYLGFIYTSFQERATFISHGNTARLAKEHGDTELAKICGFIAADEKRHETAYTKLTNKLFEVDPDETVRAFANMMRKKITMPAYLMYDGQDENLFDHFSAVAQRLGVYTASDYADIVEFLVDRWNVKELTGLSADGRKAQDFVCNLAPKIRKLEERFQLRAKQASSLPFSWIFNREVML

SEQ ID NO: 62912 - protein, 396 aa, Gossypium hirsutum
  Clone ID: GOSHI-09MAY01-C41_1.pep
MALNFNPIASKSQKLPCFALPPKATLRSPKFSMISTIPSGSKEVGNLKKPFTPPKEVPVQITHSMPPHKIEIFKSLEGWAENNILTHLKPVEKCWQPADFLPDPNSDGFHEQVKELRERAKEIPDDYFVVLVGDMITEEALSTYQTMLNTLDGTRDETGASLTPWAIWTRAWTAEENRHGDLLNKYLYLSGRVDMRQIERTIQYLIGSGMDPHTENSPYRGFIYTSFQERATFISHGNTGRLAKEYGDINLAQICGSIASDEKRHETAYTKIVEKLFEIDPDETVLAFADMMKKKIAMPAEFIYDGRDYNLFDHYSAVAQRIGVYTAKDYVDIVEHLVDRWKVKELAGLSAEGRKAQDYLCSLPSRIRRLEERAQEKAKEAPSVPFSWIFDREVKL

SEQ ID NO: 62913 - protein, 192 aa, Gossypium hirsutum
  unsure (1)..(192): unsure at all Xaa locations
  Clone ID: LIB3543-060-Q6-K6-H8.pep
PELSGPQIPKSKGSEFQHPLLYNLRNFLDLLFHQWLPLGLPACDGLYSSIWFQRAYLKKPFLPPSEVHVQDTHSXPLRRCEIFKCLXDCSENNILTYLKPVDKCXIPKIFLHTPIKIVFHDQAKELRVRALETTYDYFALXAVDMITXEALPTYQTMLTTLXDGVRDETCSSLTTCAIRTXAWTAEETAWRS

SEQ ID NO: 62914 - protein, 175 aa, Gossypium hirsutum
  unsure (1)..(175): unsure at all Xaa locations
  Clone ID: LIB3828-024-Q6-K6-E7.pep
ITSHKTPSFGLPAMATFSSPKLFMVSTLPSASKESENLXKSYMPRPDKHVQVTHSMPPQKIEVFKSLENWVEENLFSLLKPIDNNWQPHDFLPDPTSDGFYDQIQDIQERTNEIPDDYFVVLAGDMITEEALPTYQTLLNTMDGTSDETGASLSPCAIWTRACTAEVHRHGDLLN

SEQ ID NO: 62915 - protein, 56 aa, Gossypium hirsutum
  Clone ID: LIB3145-031-Q1-K1-H7.pep
YNKTSKTTKARHYSSYTHTSTISSEYKDKLNSASSSWFPRVHFKTFRASLLYQRSN

SEQ ID NO: 62916 - protein, 71 aa, Gossypium hirsutum
  Clone ID: AW187893.1.pep
QCPAKRHRLPESSWKELMMWRTTCPHAQKDQRICDAYVKCREKNEDEVVSAFLRRISLQASPGVACHSNWG

SEQ ID NO: 62917 - protein, 83 aa, Gossypium hirsutum
  Clone ID: LIB3120-037-P1-K1-E2.pep
RTYRLWKALQFYAGFSIFMLYVYQLPIEFSSMLQWIADFVGLFKICATSEWTEICSSVSLVLFYIMGCTTFITISLILFKDFS

SEQ ID NO: 62918 - protein, 76 aa, Gossypium hirsutum
  Clone ID: LIB3583-023-P1-K1-D6.pep
MQVGISNGDTTLKGKAACTKFTRISTNGIHSIVLCEPVTGRTHQIRVHLQCTGHPIANDMLYLSDDVVNRSTLGTT

SEQ ID NO: 62919 - protein, 131 aa, Gossypium hirsutum
  Clone ID: uC-gsronu33B110h10b1.pep
HSSYALPPMASLRSPKVSMVSTLPPSSKGVEDLKRPFMAPKLVHQASHTMPPEKIEIFKSLDDWARDNILIHLKQVDKCWQPKDFLPDPSSDGFEDQVRELRERAKEIPDEYFVVLVGDMITEEALPLYQL

SEQ ID NO: 62920 - protein, 136 aa, Gossypium hirsutum
  unsure (1)..(136): unsure at all Xaa locations
  Clone ID: LIB3145-018-Q1-K1-A2.pep
PRVRPRVRPRVRAMQFNPIASQTKKLPSYALPPMASLRSPKVSMVSTLPPRSKGVEDLKRPFMAPKLVHQASHTMPPEKIEIFKSLDDWARDNILIHLKQVDKCWQPKDFLPDPSSDGXEDQVRELRERAKEIPDE

SEQ ID NO: 62921 - protein, 128 aa, Gossypium hirsutum
  unsure (1)..(128): unsure at all Xaa locations
  Clone ID: uC-gsronu33B116h10b1.pep
MATTRQHQGQVAGRVHPTESEEQPKIYRLRLWATNEVRAKSKFWYFLRKLKKVKKSNGQVLAINEIFEKNPTGIXNYGIWLRCQSRTGYHIMYKEYRDTTLNGAVEQMYTEMASRHKVRFPCIQIIKT

SEQ ID NO: 62922 - protein, 197 aa, Gossypium hirsutum
  unsure (1)..(197): unsure at all Xaa locations
  Clone ID: LIB3825-011-Q1-K6-C11.pep
KERRTKEMEIVWQTPAHPAQKQDYVFHNGKRHVRPYYFEFVSHVNKRWEGKTIVDLFAQEFRGRSRDYYVXRHEPPVMAWDVEVLQNEPDVLTVCKPASVPVHPCGQYRKNTVLGILQAEYGLAPLYPIHRLDRLVSGLLIMAKNPAKADSFRQHIEAGLVQKQYVAKVVGVFLDAEVGISNGDTTLKGKAACTKFT

SEQ ID NO: 62923 - protein, 71 aa, Gossypium hirsutum
  Clone ID: LIB3145-042-Q1-K1-F7.pep
KKGNTCMFFITTKSQLLTSICSAQSFTLSTKGHIIHQHQMLASENIIFYLGTNLQTEGCEPSAVERRMALD

SEQ ID NO: 62924 - protein, 60 aa, Gossypium hirsutum
  Clone ID: LIB3196-032-P1-M1-A7.pep
KPNYLSPLSISCGSRERRRRRRSRGVSRGRCTRWSGRHLRWQMGWELGDENLGIKGEDRE

SEQ ID NO: 62925 - protein, 94 aa, Gossypium hirsutum
  Clone ID: LIB3083-085-Q1-L1-G6.pep
MNNSRPKSTSHLHSYLFKRKIHAIFLLKILQLRKTLVLMQLIKNMIYSDRQRAEEQRTGRGQNKEPAEGRDEGKEPAEGREQRAKKGVRVWLKK

SEQ ID NO: 62926 - protein, 104 aa, Gossypium hirsutum
  unsure (1)..(104): unsure at all Xaa locations
  Clone ID: LIB3135-004-Q1-K1-A9.pep
TRSTLSQDCGPMLISMKQCVQHFTYNPRYTRTCNPELVRWILLDGLVQNGDACWYGCRHCLYISKICSTSEWTEICSSASLVLFYIMVCTSXVTIGLILLKDFS

SEQ ID NO: 62927 - protein, 102 aa, Gossypium hirsutum
  unsure (1)..(102): unsure at all Xaa locations
  Clone ID: LIB3166-053-P1-K1-D8.pep
MTLSRLTSYSSTSHSDHLLKPPCSAIYLRRPISTDTTPITAETFVPFTSHQNDTPSRSVQTNAKELLTFXRHMALMRQMEIAADSLYKAKLIHGYCHLYDCQ

SEQ ID NO: 62928 - protein, 72 aa, Gossypium hirsutum
  Clone ID: LIB3166-025-P1-K1-H10.pep
HASAHASVPLLPLFPHLASQFYGDFIMLSYAWFRSIRKFLYFILARKLSVNMLVYGSLSNYREECCFKLYLN

SEQ ID NO: 62929 - protein, 102 aa, Gossypium hirsutum
  Clone ID: LIB3197-031-Q1-M1-F11.pep
IFIPKFPTQLPPKTLTGPPGASPSTNLSAASPSPAHPTQKRDYIFHNSKLNGKRHVRPYYFEFVSHVNKRWEGKTIVDLFAQEFRSRSRDYYIIFLETICND

SEQ ID NO: 62930 - protein, 48 aa, Gossypium hirsutum
  Clone ID: uC-gsflnu33B099g11b1.pep
VTIQYLIGSGMDPVTENSPYLGFIYTTFQEWATLTSHGNTDRFAKVHG

SEQ ID NO: 62931 - protein, 965 aa, Gossypium hirsutum
  Clone ID: GOSHI-09MAY01-C71_1.pep
MAGRKVEKMASIDAQLRLLAPGKVSEDDKLVEYDAVLLDRFLDILQDLHGEDIRETVQECYELSAEYEGKHDPKILEELGKVLTSLDPGDSIVVTKSFSHMLNLGNLAEEVQIAYRRRIKLKKGDFADESSATTESDIEETFKRLVGQLNKSPEEVFDALKNQTVDLVLTAHPTQSVRRSLLQKHGRIRNCLTQLYAKDITPDDKQELDEALQREIQAAFRTDEIRRNPPTPQDEMRAGMSYFHETIWKGVPKFLRRVDTALKNIGINERVPYNAPLIQFSSWMGGDRDGNPRVTPEVTRDVCLLARMMAANLYFSQIEDLMFELSMWRCSDELRIRADELHRSSKKDAKHYIEFWKQIPPNEPYRIILGDVRDKLYNTRERARSLLANGFSDIPEEAAFTNVEQFLEPLELCYRSLCACGDRPIADGSLLDFLRQVSTFGLSLVRLDIRQESDRHTDVLDAITKHLDIGSYREWPEERRQEWLLSELRGKRPLFGPDLPKTEEVADVLDTFPARSELPSDSFGAYIISMATAPSDVLAGELLQRECHVKQPLRVVPLFEKLADLEAAPAAVARLFSIDWYRDRINGKQEVMIGYSDSGKDAGRLSAAWQLYKAQEELVKVAKQYGVKLTMFHGRGGTVGRGGGPTHLAILSQPPDPRLRSLRVTVQGEVIEQSFGEEHLCFRTLQRFTAATLEHGMHPPVSPNPEWRALMDEMAVVATKEYRSVVFQEPRFVEYFRLATPELEYGRMNIGSRPSKRKPSGGIESLRAIPWIFAWTQTRFHLPVWLGFGAAFKHVIQKDIKNLHMLQEMHNQWPFFRVTMDLIEMVFAKGDPGIAALYDKLLVSKELWPFGENLRANYEDTKRLVLQVAGHRDLLEGDPYLKQRLRLRDAYITTLNVCQAYTLKRIRDPDYHVKVRPHLSREYMESSKAAAELVKLNPTSEYAPGLEDTLILTMKGIAAGMQNTG

SEQ ID NO: 62932 - protein, 184 aa, Gossypium hirsutum
  unsure (1)..(184): unsure at all Xaa locations
  Clone ID: uC-gsflmaxxa061g05b1.pep
ALFSLFAICLNHLPLSLKPLELCYRSLCACGDRPIADGSLLDFLRQVSTFGLSLVRLDIRQESDRHTDVLDAITKHLDIGSYREWPEERRQEWLLSELRGKRPLFGPDLPKTEEVADVLDTFHVISELPSDSFGAYIISMATAPSDVLAVELLQRECHVKQPLXVVPLFEKLADXETESKEVVK

SEQ ID NO: 62933 - protein, 1901 aa, Gossypium hirsutum
  unsure (1)..(1901): unsure at all Xaa locations
  Clone ID: GOSHI-09MAY01-C61_1.pep
MSRAEELWERLVRAALRRERFGMGSVGHPAGGIAGYVPSSLNNRDIDTILRVADEIQDEEPNVARILCEHAYSLAQNLDPNSEGRGVLQFKTGLMSVIKQKLAKREVGTIDRSQDVARLLEFYRLYREKNNVDKLREEEMMLRESGVFSGNLGELERKTLKRKRVFGTLRVLGMVLEQLTEEIPAELKRVIESDAAMTEDLIAYNIIPFPLDAPTITNAIVSFPEVRAAVSALKHYRSLPKLPSDFSIPETRSPDLMDFLHYVFGFQKDNVSNQREHVVLLLANEQSRHGIPEEPEPKLDEAAVQKVFLKSLDNYIKWCNYLCIQPVWSSLDAVSKEKKVLFVSLYFLIWGEAANIRFLPECLCYIFHHMAREMDEALRQQIAQPANSCSKDGVVSFLDQVITPLYDVVAAEAANNENGRAPHSAWRNYDDFNEYFWSLHCFDLSWPWRKTSFFQKPEPRSKNPLKLGGGQHRGKTSFVEHRTFFHLYHSFHRLWIFLVMMFQGLTIIAFNNGHLNAKTLREVLSLGPTFVVMKFTESVLDVIMMYGAYSTTRRLAVSRIFLRFIWFGVASVVVSFLYVRALQEESKPNSNSVVFRLYLIVIGIYGGIHFFISFLMRIPACHRLTELCDQFSLIRFIKWMRQEQYYVGRGMYERTTDFIKYMIFWLIILSGKFAFAYSFQIKPLVKPTRTVIAMDNIEYSWHDFVSRNNHNAVTVVCLWAPVIAMYLLDIYIFYTVLSAVWGFLLGARDRLGEIRSLDAVQKLFEEFPDAFMKRLHPVRASASSSSEVVEKSKFDAARFSPFWNEIIKNLREEDYLTNFEMELLFMPKNTGKLPLVQWPLFLLASKIFLAKDIAAESRDSQDELWERISRDEYMKYAVQECYYALRYILTAILEAEGRTWVERIYEGIEASITKKTISDDFQLNKLQLVISRVTALLGILNQAEKPEHEKGAVNAVQDLYDVVRHDVLAIYLREHSDQWQSILKARTEGRLFAKLNWPRDPELKAQVKRLYSLLTIKDSASNVPKNLEARRRLEFFTNSLFMDMPPARPVQEMLSFSVFTPYYSEIVLYSMNELLKKNEDGISILFYLQKIYPDEWKNFLARIGRDENAAETELYDSPSDILELRFWASYRGQTLARTVRGMMYYRKALMLQTYLERENARDTEAALSRLETTDTQGYELSPEARARADLKFTYVVTCQIYGRQKEEQKPEAADIALLMQRNEALRVAFIDVVETLKDGKVHTEYYSKLVKADINGKDKEIYAIKLPGDPKLGEGKPENQNHAIVFTRGNAVQTIDMNQDNYFEEALKVRNLLEEFDRDLGIRPPTILGVREHVFTGSVSSLASFMSNQESSFVTLGQRVLATPLKVRMHYGHPDVFDRVSHITRGGISKASRIXINISEDFHARLXNSTLRQGNITHHEYIQVGKGRDVGLNQIALFEGKVAGGNGEQVLSRDVYRLGQLFDFFRMMSFYFTTVGFYFCTMLTVLTIYIFLYGRAYLALSGVGETMQERARIMDNAALEAALNTQFLFQIGIFSAVPMVLGFILEQGFLRAIVSFITMQLQLCTVFFTFSLGTRTHYFGRTILHGGARYQATGRGFVVRHIKFSENYRLYSRSHFVKGLEVVLLLVVYLAYGYNDSALSYILLSISSWFMALSWLFAPYLFNPSGFEWQKIVEDFRDWTNWLFYRGGIGVKGEESWEAWWDEELAHIRTMRGRILETILSLRFFLFQYGVVYKLNVQGTNTSLTVYGFSWVVLAVLIILFKVFTFSQKMSVNFQLLLRFIQGVSFMIAIAGVAVAVALTDLSIPDIFASILAFVPTGWGILSIAAAWKPLVKKTGLWKSVRSMARLYDAGMGMIIFVPVAFFSWFPFVSTFQTRLMFNQAFSRGLEISLILAGNNPNTGL

SEQ ID NO: 62934 - protein, 195 aa, Gossypium hirsutum
  Clone ID: LIB3583-010-P1-K1-H4.pep
AVPCRTAPVRPTRTDSGYNDSALSYILLSISSWFMALSWLFAPYLFNPSGFEWQKIVEDFRDWTNWLFYRGGIGVKGEESWEAWWDEEMAHIRTMRGRIFETILSLRFFLFQYGIVYKLNVQGTNTSLTVYGFSWVVLAVLIILFKVFTFSQKMSVNFQLLLRFIQGVSFMIAIAGVAVAVALTDLSIPDIFAFI

SEQ ID NO: 62935 - protein, 113 aa, Gossypium hirsutum
  Clone ID: LIB3493-018-P1-M1-D7.pep
MNQDNYFEEALKVRNLLEEFDRDHGIRPPTILGVREHVFTGSVSSLASFMSNQESSFVTLGQRVLATPLKVRMHYGHPDVFDRVFHIIRGGFSMASCFFILILVIFSVFHITF

SEQ ID NO: 62936 - protein, 110 aa, Gossypium hirsutum
  Clone ID: GOSHI-09MAY01-C11_2.pep
MASHQERQDLVARAWQGETVIPGGTGGKSLEAQEHLAEGRSRGGQTRKEQLGREGYQELGSKGGQTRKEQIGSEGYQEMGRKGGLSTMDKSGGERAAEEGIDIDESKYRT

SEQ ID NO: 62937 - protein, 110 aa, Gossypium hirsutum
  Clone ID: M83304.pep
MASQQERQELDARARQGETVIPGGTGGKSLEAQEHLAEGRSRGGQTRKEQLGREGYQELGSKGGQTRKEQIGTEGYQEMGRKGGLSTMDKSGVERAAEEGIDIDESKYRT

SEQ ID NO: 62938 - protein, 135 aa, Gossypium hirsutum
  Clone ID: GOSHI-09MAY01-C21_1.pep
MAHFQNQYSAPEVTQTDAYGNPTRRTDEYGNPIPTQETGRGILGIGGHHHGGHHGLHRTGSSSSSSSSSEDEGTGKKKKGLKQRLKEKIPGNKEHQSQATSTTTPGQGATYHQQHHEKKGVMDKIKEKLPGHHNP

SEQ ID NO: 62939 - protein, 256 aa, Gossypium hirsutum
  unsure (1)..(256): unsure at all Xaa locations
  Clone ID: GOSHI-09MAY01-C991_1.pep
SFEENDVTYNFDFKKLSDSMEDEIGSQGNSKKARSLDELDPEIQTIVLLSDTYGAEGELGIVLSEKFTEHDAYCMFEALMSGAHGSVAMADFFSPIPAAQSQSGLPPVIEASAALYHLLSIVDSSLHSHLVELGVEPQYFALRWLRVLFGPEFSLXNLLVVWDEIFHGSIIALLXKRTLGNDENSSFKMFNSCRGALITAMAVSMILYVRSSLLATENATTCLQRLLNLPETINLRKLIAKAKPLQILALDSKISP

SEQ ID NO: 62940 - protein, 438 aa, Gossypium hirsutum
  Clone ID: GOSHI-09MAY01-C981_1.pep
MQYMDPTKKRKLDENGTVSAQSEPDPITKLTPQDGRKLIERFTVDQLLDILQDAVCRHVDVLSAVRSIADQDPSQRKLFIRGLGWDTTTDGLRSLFSVYGELEEAVVILDKTTGKSKGYGFVTFKHVDGALLALKEPSKKIDGRVTVTQLAAAGNSATNSNPVDIHMRKIYVANVPYDMPADKLLGHFSQYGEIEEGPLGFDKQTGKSRGFALFVYKTAEGAQAALAEPVKNIDGRQMNCKLAIEGKKGKQGQDGMMQSGGGVPGNAEMGMGGHGGGYGGPGGYGGFSGGMQGPPGPMGHPHPLNSSGVGVGALSGNGGVAAGGYSGLGGPYGGYGGPGSTGYGGPGSAGYGGPGSTVYGGLTGAGAGGGLGAASGGSSLYRMPPSSAGMPTGGYPETAHYSLSSSAAFPSQLHQGAGTSPAPRVPPGAMYPNGPPFY

SEQ ID NO: 62941 - protein, 149 aa, Gossypium hirsutum
  unsure (1)..(149): unsure at all Xaa locations
  Clone ID: LIB3583-053-P1-K6-F10.pep
GPASRVAQRPPTRPPTLRPASGXIRGFALFVYKTQRGSGSVSGACKELDGRQMNCKLAXXEGKKGKQGQDGMMQSGGGVPGNAEMGMGGHGGGYGGPGGYGGFSGGMQGPPGPMGHPHPLNSSGVGVGALSGNGGVAAGGYSGLGGPYG

SEQ ID NO: 62942 - protein, 180 aa, Gossypium hirsutum
  unsure (1)..(180): unsure at all Xaa locations
  Clone ID: GOSHI-09MAY01-C961_3.pep
LVCRQLPLYGMHSTTGADPFYWMRVILASNRGTVMELGITPIVTSGSAMQLLAGSKIIEVDNSVREDRALLNGAKKLTGILIAVGEAVAXYVLSGMYGSVGQLGGGNAXILLLSNFCSAGIIVICLDELRQGGYGLGSGISLFIATNICENIIWKAFSPTTINSGRGAEFEVLSLHVHLL

SEQ ID NO: 62943 - protein, 151 aa, Gossypium hirsutum
  unsure (1)..(151): unsure at all Xaa locations
  Clone ID: GOSHI-09MAY01-C961_2.pep
MGGGFRVLHLVRPFLSFLPEVQXADRKIPFREKVICTVVSLFXIFLVCSQLPLYGIHSTTGADPFYWMRVILASNRGTVMELGITPIVTSGLVMQLLAGSKIIEVDNRVLEDRALLNGAHKLLGIPIAVGVVLSVLSLVFYYFIMSNSLSN

SEQ ID NO: 62944 - protein, 297 aa, Gossypium hirsutum
  Clone ID: GOSHI-09MAY01-C961_1.pep
MGGGFRVLHLVRPFLSFLPEVQSADRKIPFREKVIYTVISLFIFLVCSQLPLYGIHSTTGADPFYWMRVILASNRGTVMELGITPIVTSGLVMQLLAGSKIIEVDNSVREDRALLNGAQKLLGILIAVGEAVAYVLSGMYGSVGQLGVGNAILIIIQLCFAGIIVICLDELLQKGYGLGSGISLFIATNICENIIWKAFSPTTINSGRGAEFEGAVIAMFHLLITRTDKVRALREAFYRQNLPNVTNLLATVLIFLIVIYFQGFRVVLPVRSKNARGQQGSDPIKLFYTSNMPIILQ

SEQ ID NO: 62945 - protein, 226 aa, Gossypium hirsutum
  Clone ID: GOSHI-09MAY01-C911_1.pep
IGRVGPPVPCCYLKLVNWEEGGYSISDKPMPRGEIVVGGHSVTHGYFNNPEKTDEVYKVDERGKRWFYTGDIGQFHPDGCLEIIDRKKDIVKLQHGEYISLGKVEAALTSSKFVDNLMVHADPFHSYCVALIVPSRPLLETWAVEAGIKYQDFPELCGKAETVSEVQKSLSKVGKDAKLDKFEIPAKIKLMAEPWTPESGLVTAALKIKREQIKSKFKDDLQKLYQ

SEQ ID NO: 62946 - protein, 220 aa, Gossypium hirsutum
  Clone ID: GOSHI-09MAY01-C931_1.pep
MPAFFMGDAANQGFLPEHQCHHGNGPYINKPLHGLMQLPDLQGNTNSTAPNSANLFNLGFFPSNSGASSISTGENGGASNSGFLSGNQFNMGDVQVGSGMASLYSSSSMQHENISPNMSATALLQKAAQMGSTTSNNTCSLLRGLGSSSSSGIKSDRQVFSPNNFESGGSLRSQMENDSNLQGLMNSLANGNSSIFGQDHSNFGGFTGNGMTVEHHSNNA

SEQ ID NO: 62947 - protein, 88 aa, Gossypium hirsutum
  Clone ID: GOSHI-09MAY01-C881_3.pep
PCIFTWLFLILVSNKYLQGDLIKEGQVIGFLNQFGCELPIRSDMAGTVLKILFEDGDAVGYGDPLFAVLPSFHGIDYLFLLPMILLQR

SEQ ID NO: 62948 - protein, 290 aa, Gossypium hirsutum
  unsure (1)..(290): unsure at all Xaa locations
  Clone ID: GOSHI-09MAY01-C881_1.pep
MESSAALRSFHYSVSAVSQACCTLERPSTFHMSSSCWPNSRKSCVPGLMFGGKNNSSTRRTVVLASSAKTPEATATAKSNVPPESTKKGSLEKKTSRNATFPNGFEALILEVCDETEVAEPKMKIGDFEMHLKRNVGATKAPMSNISPTTAPSIPTEPMNEAAAATPPPSPPKPSPEKPSPFKSSAFGQSSKLAALEASGSSNYVLVPSPVVGIFQRGSAVVGDCLPPCCKEGDLIKEGQVIGFLNQFGFELPVKSDIAGTVLKILFEDGDAVGYGDPLFAXLPSFHGID

SEQ ID NO: 62949 - protein, 139 aa, Gossypium hirsutum
  Clone ID: LIB3585-016-P1-K1-A1.pep
HFLFPHFAPSLHCRFPPSFSSLPMESSAALRSFHYSVSAVSKACCTHERPGTFHMSSSCWPNSRKSCVPGLMFGGKNNSSTRRTVVLASSAKTPEATATAKLNVPPESTKKGSLEKKPSRKATFPNGFEALILEVCDET

SEQ ID NO: 62950 - protein, 185 aa, Gossypium hirsutum
  Clone ID: GOSHI-09MAY01-C861_1.pep
KSAQRPQCFRGIARGGPASSKVTGETPSVNTRGQPGSSKPSNSDCVAGSSASSGPGLSPSSSMGALSSEKSTLNPHAKEFKLNPNAKSFTPSQTSVRPPSPVSDGSFYYQTPVSPVPHMHMPVNFGIGPSFPGHQPVVFNPQVAPMQSPQAYFHPTGPQYGQPMLLGQRQVMYYQPDMQYKGRDY

SEQ ID NO: 62951 - protein, 128 aa, Gossypium hirsutum
  Clone ID: LIB3145-014-Q1-K1-A7.pep
HASAEIPSESFSVSDSESRIQDNLLGEHGGSKDAKESTEKLSPSEDPQLSNSIDSQSLLCDKLDGSDKAVPSLNSTTHAQSSSLSKVSEKPSASGDLAEGPASSKVTGETPSVNTRGQPGSSKPSNSD

SEQ ID NO: 62952 - protein, 68 aa, Gossypium hirsutum
  Clone ID: GOSHI-09MAY01-C811_2.pep
HVLYRDATGAVKQTGDEPFSTFMKTVKRLNIRMDSRNDTDGRSWLTGIRTAKNRLEGPNKRGPLSIFA

SEQ ID NO: 62953 - protein, 132 aa, Gossypium hirsutum
  unsure (1)..(132): unsure at all Xaa locations
  Clone ID: LIB3582-049-P1-K1-E5.pep
WQQDYQAPEPGSATGHCKVFLESEDVGRTLDLTVLGSYEELYMRLANMFGRERSEMLGHVLYRDATGAVKQTGDEPFSTFMKTVKRLNIRMDSRNDTXWKITCFPRSWLTGIRTAKNRLEGPNKRGPLSIFA

SEQ ID NO: 62954 - protein, 236 aa, Gossypium hirsutum
  unsure (1)..(236): unsure at all Xaa locations
  Clone ID: GOSHI-09MAY01-C821_1.pep
MRPTIYLFGGAITESCFADGGWGAALANHFCRTLDVVLRGYSGYNTRWALKVLDRVFPTVGHDGAAAAPPVAVTVFFGANDACLPDRYAAFQHVPLDEYKQNLHSIVSSLKKRWPKTLVLLITPPPMEEDGRREXEPYVENPSGLPERTNEAAGSFAKACVETAEECGIAVVDLWTRMQQYTDWRKAYLSDGLHLTKEGNKVVFEEVMKKLEERGLSLEKLKADLPLIADIDHDDP

SEQ ID NO: 62955 - protein, 131 aa, Gossypium hirsutum
  Clone ID: LIB3582-049-P1-K1-F5.pep
MRPTIYLFGDSITESSFADGGWGAALANHFCRTLDVVLRGYSGYNTRWALKVLDRVFPTVGHDGAAAAPPVAVTVFFGANDACLPDRYAAFQHVPLDEYKQNLHSIVSSLKVHLSHLYLTFFYTQVNMVAH

SEQ ID NO: 62956 - protein, 75 aa, Gossypium hirsutum
  Clone ID: GOSHI-09MAY01-C581_5.pep
SVLRRHGGGRLNDSIGTGWVSMNMTGTMTQHQKCNVPSSKKCLRSMFCPSYFIAAATLDHYISGTCMRFCLQPAH

SEQ ID NO: 62957 - protein, 122 aa, Gossypium hirsutum
  unsure (1)..(122): unsure at all Xaa locations
  Clone ID: GOSHI-09MAY01-C581_2.pep
IKSNPGEVVKPGQYKAINDEGMPHHQRPFMKGKLVIQFHVIFPESGVFSPXKQCRKIESILPMRPSKHLTDMELDDCEETTLHDVSAEEVKRRKERQHRHREAYDEDDDDDESAPRVQCAQQ

SEQ ID NO: 62958 - protein, 422 aa, Gossypium hirsutum
  Clone ID: GOSHI-09MAY01-C581_1.pep
MFGRVPKKSDNTKFYEVLGVPKSASQDELKKAYKKAAIKNHPDKGGDPEKFKELAHAYEVLSDPEKREIYDQYGEDALKEGMGGGGSSHNPFDIFESFFGGGAFGGGGSSRGRRQKRGEDVVHALKVSLEELYNGTTKKLSLSRNAICSKCKGKGSKSGASSRCYGCQGTGMKITTRQIGLGMIQQMQHVCPECRGSGEMISDRDRCPQCKGNKVTQEKKVLEVHIEKGMRDGQKITFEGQADEAPDTITGDIVFVLEQKKHPKFDRRFGDELYVDHKLSLTEALCGFQFALTHLDGRQLLIKSNPGEVVKPGQYKAINDEGMPHHQRPFMKGKLVIQFHVIFPESGVFSPEQCRKIESILPMRPSKHLTDMELDDCEETTLHDVSAEEVKRRKERQHRHREAYDEDDDDDESAPRVQCAQQ

SEQ ID NO: 62959 - protein, 124 aa, Gossypium hirsutum
  unsure (1)..(124): unsure at all Xaa locations
  Clone ID: LIB3583-054-P1-K1-H12.pep
MFGRVPKKSDNTKFYEVLGVPKSASQDELKKAYKKAAIKNHPDKGGDPEKFKELAHAYEVLSDPEKREIYDQYGEDALKEGMGGGGSSHNPFDXIESFFRWGAFGGGGSSRGRRQKRGEDVVHA

SEQ ID NO: 62960 - protein, 103 aa, Gossypium hirsutum
  Clone ID: uC-gsflmaxxa090b06b1.pep
MCGRVPKKSDNTKFYEVLGVPKSACQDELKKAYKKAAIKNHPDKGGDPEKFKELAHAYEVLSDPEKREIYDQYGEDALKEGMGGGGSSHNPFDIFESFFGGGA

SEQ ID NO: 62961 - protein, 52 aa, Gossypium hirsutum
  Clone ID: LIB3148-011-Q1-K1-D10.pep
SLLDKIKFCGKHKVRPQISYQIWGVYFVPIQKHPLQLLYLEPHKLSPSNVIF

SEQ ID NO: 62962 - protein, 86 aa, Gossypium hirsutum
  Clone ID: GOSHI-09MAY01-C551_10.pep
FSIISITYFLFLFFFYFFFFFFFFFFFFFFFFFFFFFFFFLSALMPNRFHSFRECIQSPAKMQYNLSNHSSFPLKKKPKPKQNTAL

SEQ ID NO: 62963 - protein, 241 aa, Gossypium hirsutum
  unsure (1)..(241): unsure at all Xaa locations
  Clone ID: GOSHI-09MAY01-C551_7.pep
HASAHASGLRKSGAGNIFIKNLDKGIDQKALHDTFSAFGNILSCKLATDSSGQSKGYGFVQFDNEESAQKAIEKLNGMLLNDKQVYVGPFVRKQERDTSTSKTKFNNVYVKNLSESTTDEDLNQTFGEFGQITSAVVMRDADGKSKGFGFINFENADDAARAVESLNGKKFDGKEWFVGKAQKKXSERGAELKHRFEQTMKEAADKFQGANLYVKNLDDSISDEKLKELFSQYGTITSCKV

SEQ ID NO: 62964 - protein, 114 aa, Gossypium hirsutum
  unsure (1)..(114): unsure at all Xaa locations
  Clone ID: GOSHI-09MAY01-C551_6.pep
MAHVQVQGQSGGVNNGSGGANNQFVTSLYVGDLDPSVTETQLYEYFNHIGQLLTVRLCTDLSTRRSLGYGYVNYGNPQDAARALELLNFTPLNGKPIRIMYSNXRDPSLRKSGC

SEQ ID NO: 62965 - protein, 135 aa, Gossypium hirsutum
  Clone ID: GOSHI-09MAY01-C551_5.pep
KWVALKRERTTTGWAAGDPSGVLSPYTYTLRNTGPEDVFVKVMCCGICHTDLHQAKNDLGMSNYPMVPGHEVVGEVLEVGSDVSKFRVGDIGGVGCLVGCCRNCRPCDLYLGPFRCFQDSVLTMDVIHLTVKTNS

SEQ ID NO: 62966 - protein, 337 aa, Gossypium hirsutum
  unsure (1)..(337): unsure at all Xaa locations
  Clone ID: GOSHI-09MAY01-C551_4.pep
SFSDDSMSDEKLKEXLFSQYGSITSCNAMRDPRGISKGSGFAAFSTPEEASRALAXEMNGKMVVSKPLYGAPAHTMEDRRARLQAQWSQMXPATMSPSAAPRMPMYPPGGPGLGQQIFYGQAPTAMFPQPGFGYQQQLIPGMRPGGAPMPNFFVPMVQQGQQGQRPGGRRAGAGQQSQQPVPLMQQQMLPRGRVYRYPPGRGLPDVSMPNIAGGMLSVPYDMGGMPMRDASISQPIPIGALASALANATPDQQRTMLGENLYPLVEQLEPDAAAKVTGMLLEMDQTEVLHLLESPEALKAKVAEAMEVLRTVAQQQQTGGAAADQLASLSLSDNLVS

SEQ ID NO: 62967 - protein, 648 aa, Gossypium hirsutum
  unsure (1)..(648): unsure at all Xaa locations
  Clone ID: GOSHI-09MAY01-C551_2.pep
MAHVQVQGQSGRPASAPRPPRVRFVTSLYVGDLDPSVTETQLYEYFNHIGQLLTVRLCTDLSTRRSLGYGYVNYGNPQDAARALELLNFTPLNGKPIRIMYSNXRDPSLRKSGAGNIFIKNLDKGIDQKALHDTFSVFGNILSCKLATDSSGQSKGYGFVQFDNEESAQKAIEKLNGMLLNDKQVYVGPFVRKQERDTSASNAKFNNVYVKNLSESTSDGRVGPRVREFGRITSAVVMRDADGKSKGFGFINFENADDAARAVESLNGKKFDDKEWFVGKAQKKSEREAELKHRFEQTMKEAADKFQGANLYVKNLDDSISDEKLKELFSQYGTITSCKVMRDPSGISKGSGFVAFSTPEEASRALAEMNGKMVVNKPLYVAQAQRKEDRRARLQAQFSQMRPLTMAPSVAPRMPMYPPGGPGLGQQIFYGQAPPIFPPQPGFGYQQQLVPGMRPGSAPMPNFFVPMVQQGQQGQRPGGRRAGAVQQNQQPVPLMQQQMLPRGRVYRYPVGRGLPEVSMPNVPGGMLSVPYDMGSMPMRDAPLSQPIPIGALASALANATPEQQRTMLGENLYPLVEQLEPDAAAKVTGMLLEMDQTEVLHLLESPEALKAKVAEAMEVLRTVAQQQQQAGGAADQLASLSLNDNLVS

SEQ ID NO: 62968 - protein, 357 aa, Gossypium hirsutum
  Clone ID: GOSHI-09MAY01-C551_1.pep
MGGLETERTTTGWAARDPSGVLSPYTYTLRSTGPEDVFVKVMCCGICHTDLHQAKNDLGMSNYPMVPGHEVVGEVLEVGSDVSKFRVGDIVGVGCIVGCCRNCRPCDSDNEQYCLKKIWSYNDVYTDGKPTQGGFAGSMVVDQKFVVNIPEGMAPEQVAPLLCAGVTVYSPLNHFGLMGSGLRGGILGLGGVGHMGVKIAKAMGHHVTVISSSDKKKVEALEHLGADDYLVSSDAEGMQKAADSLDYIIDTVPVFHPLEPYLSLLKLDGKLILTGVINTPLQFVSPMVMLGRKSITGSFIGSMKETEEMLNFCKEKNLTSMIEVVKMDYINTAMERLEKNDVRYRFVVDVAGSKLDQ

SEQ ID NO: 62969 - protein, 167 aa, Gossypium hirsutum
  Clone ID: LIB3582-013-P1-K1-E8.pep
MGGLETERTTTGWAARDPSGVLSPYTYTLRSTGPEDVFVKVMCCGICHTDLHQAKNDLGMSNYPMAPGHEVVGEVLEVGSDVSKFRVGDIVGVGCIVGCCRNCRPCDSDNEQYCLKKIWSYNDVYTDGKPTQSGFAGSMVVDQKFVVNIPKRMAPEQVAPLVCAGVT

SEQ ID NO: 62970 - protein, 96 aa, Gossypium hirsutum
  Clone ID: LIB3048-008-Q1-L1-E7.pep
GICHTDLHQAKGDLGMSNYPMVPGHEVVGEVLEVGSDVSKFRVGDIVGVGCIVGCCRNCRPCDSDNEQYCLKKIWSYNDVYTDGKPTQGGFAGSMV

SEQ ID NO: 62971 - protein, 82 aa, Gossypium hirsutum
  Clone ID: LIB3166-014-P1-K1-C12.pep
MGGLETERTTTGWAARDPSGVLSPYTYTLRNTGPEDVFVKVMCCGICHTDLHQAKNDLGMSNYPMVPGHEVVGEVLEVGSDV

SEQ ID NO: 62972 - protein, 42 aa, Gossypium hirsutum
  Clone ID: uC-gsronu33B098a02b1.pep
KILTSMIEVVKMDDIYTAMERLEKNDVRYRFVVDVAGSKLDQ

SEQ ID NO: 62973 - protein, 110 aa, Gossypium hirsutum
  unsure (1)..(110): unsure at all Xaa locations
  Clone ID: LIB3830-001-Q1-K6-F1.pep
KSYVSQYGTMTSYKVMRDPSGISKGSGFVALSTTEEASRALAEMNGEMVDSKPLCGAPAQRXKEDRRARRQAQSSEMRPVTMXLKXGPLMPMYPPGGTCLVQEIFYGQAP

SEQ ID NO: 62974 - protein, 154 aa, Gossypium hirsutum
  unsure (1)..(154): unsure at all Xaa locations
  Clone ID: LIB3584-038-P1-K1-D5.pep
MCCGICHTDLHQAKNDLGMSNYPMVPGHEVVGEVLEVGSYVSRFRAVDIGGAKRAHVQVQGQRACDYNGSEGAINQIVTSLYVGAWDPRVTETXLYEHFNHIGQLLTGRLCTDLSTRRSLGYGYVNYGNPQDAAGALVLLNFTPLSGKAIRIMF

SEQ ID NO: 62975 - protein, 105 aa, Gossypium hirsutum
  unsure (1)..(105): unsure at all Xaa locations
  Clone ID: LIB3083-060-Q1-L1-F3.pep
MTRANNALIQHTQLPTHSINTTQMLPLGQVYRYPPRRGLPDVSMPNIAGGMLSVPYDMGGMPMRDASNXNPIPIXTLALTLTKSTPNQQKTNLGKKLYSLIEQLE

SEQ ID NO: 62976 - protein, 110 aa, Gossypium hirsutum
  unsure (1)..(110): unsure at all Xaa locations
  Clone ID: LIB3825-015-Q1-K6-G9.pep
KELDLKLRFEQSMKEAADKFXGANLYVKNLDDSISDEKLKELFSQYGIITSCKVMRDTSGISKGSGFVAFSTPEEASRALANMNGKMVVSKPLYGALAQRKEHRRARLQA

SEQ ID NO: 62977 - protein, 56 aa, Gossypium hirsutum
  Clone ID: LIB3828-018-Q1-N6-D9.pep
MAHVQVQGQSGGVNNGSGGANNQFVTSLYVGDLDPSVTETQLYEYFNHIGQLLTIS

SEQ ID NO: 62978 - protein, 110 aa, Gossypium hirsutum
  Clone ID: LIB3083-060-Q1-L1-F7.pep
FFVPMVQQGQQGQRPGGRRAGAGQQRQQPVPLMQHPMLPLGQVYRYTPRRGLPDVSMPNIAGGMLSVTYDMGGMPMRDALISQPIPIRALVITLTKASPEYLKTDLGEHL

SEQ ID NO: 62979 - protein, 139 aa, Gossypium hirsutum
  Clone ID: GOSHI-09MAY01-C561_1.pep
RIEKWWREEKRHEAMVLPDVGTSFADSISEEICNSAAKMANNLEVDALFVYTKTGHMASLLSRCRPDCPIFAFTTTTSVRRRLNLQWGLIPFRLGFSDDMESTLNKPFSLLKARGMIKSGDLVIAVSDMLQSIQVMNVP

SEQ ID NO: 62980 - protein, 241 aa, Gossypium hirsutum
  Clone ID: GOSHI-09MAY01-C511_1.pep
MPPPMLRLISTTSVSTVAGLPPILTKPPISNQNLSITPSEENRQKVLRLISRRDAAFLSLISLFPSLLHTPHASAFSIGISGPKDWLKEQKRKSSKFLLAPIDASRQSLRSVYLLLMDKESTISNTDLEEVQKLLKSAARDCVVQERNSFVAFQANTGVEVCTFRLIVKNASSLLENKNPVKLEAEAMLDDLISSFTSLNTLANESDIQVASSRHRVADALKDTITSLDKFEQAVKDCLEV

SEQ ID NO: 62981 - protein, 163 aa, Gossypium hirsutum
  Clone ID: GOSHI-09MAY01-C501_1.pep
MGLASSTPKAAPDITASKEKMTSAKDNKVEEVKESEEISKAFAAVAGVRKEVDKLSERVAALEVAVNSGTKVTDEEFVVPAELLMRELLKLDGIEAEGEARLQREAEVRRIQKYHEILDKLKTRNSDPFSDKHKAVSVTTNWETFDSGMVSLTAPPTMSSSTN

SEQ ID NO: 62982 - protein, 519 aa, Gossypium hirsutum
  unsure (1)..(519): unsure at all Xaa locations
  Clone ID: GOSHI-09MAY01-C531_1.pep
PGRPRVRNVASVMCSYNKVNGKPTCADPDLLAGVIRGQWKLNGYIVSDXTSVDVLFKNQHYTKTPEEAAAKVILAGLDLNCGSFLGQHTEAAVKAGLLNESAIDKAVTNNFATLMRLGFFDGDPSKQPYGKLGPKDVCTREHQELAREAARQGIVLLKNSPGSLPLSPTAIKTLAVIGPNANVTKTMIGNYEGIPCKYTTPLQGLTTSVATNYVPGCTNVACGTAQVDDAKKVAASADATVLVMGIDQSQERESFDRVSLLLPGQQPLLITEVAKAAKGPVILVIMSGGGFDISFAKNDDKITSILWVGYPGEAGGAAIADVIFGYYNPSGRLPMTWYPQSYVDKVPMTNMNMRPDPSNGYPGRTYRFYTGETIYTFGDGLSYSKITHELAKAPRLVSIPLEEDHVCRSSECKSVEAVEQSCKNLAFDIHVRVQNRGKYGGSHTVFLFSSPPSVHNSPQKHLLGFEKVSLTGKSETLVRFKVDVCKDLSVVDELGSRKVALGQHLLHVGSLKHSLTVGI

SEQ ID NO: 62983 - protein, 208 aa, Gossypium hirsutum
  Clone ID: GOSHI-09MAY01-C481_1.pep
NEVQNNEDRTSTSSGDINSCLMVSEVDFSLEGGETTVVQLTVTPRIEGILKIVGVKWKLSSAVVGLCNFEFNPVNRVVRGRRKQHSPSSDLKFLVIKSLPRLQGFIHSLPEKTYAGDLWPLVLELSNQSKSPVKNLKMKISYPRFLYAGNREELNADFPACLKKKMNVEKSGRHANVNKTLQNLFHFPEDISLHDETLFFMCIFVITL

SEQ ID NO: 62984 - protein, 178 aa, Gossypium hirsutum
  unsure (1)..(178): unsure at all Xaa locations
  Clone ID: GOSHI-09MAY01-C451_1.pep
MDLRESITSQTDVALTLTKNVLQTEAKDSNLLFSPLSIHVVLSLIAAGAKGPTLDQLLSFLKFKSNDQLSSFSSELVSVVFADGSPAGGPRLSFANGVWFDRSLPLKPSFKQVLDNVYKAASKLVDFQNKAVQAAGEVNMWAEEEXNGLIKEVLPPGSVDASTRLIFANALYFKGAWN

SEQ ID NO: 62985 - protein, 94 aa, Gossypium hirsutum
  unsure (1)..(94): unsure at all Xaa locations
  Clone ID: LIB3493-002-P1-M1-A4.pep
TGAWLLFAQGVRLVRAVRLKPSMKQVVDNVYNAACKLVDFQNTAVEARREVNMWAXEKETNGLIKEDLPPGSADALTRLIFANALYFKGAWNEA

SEQ ID NO: 62986 - protein, 174 aa, Gossypium hirsutum
  Clone ID: GOSHI-09MAY01-C441_2.pep
MAEAPTQTQQPRPVVYVVFQIGGVGAVSDNKPGPAPASKASIEAMQRIEVEESGKDCCICLEEFEVEEEAREMPCKHVFHSGCIEKWLLIHGLCPVCRFMMPPETAEIEGGEGDGGRRRMEGGEINGLEFSQSVFAFASLASMMGMMGSGRASRQPNSGRVDDDTPSHQNTDCN

SEQ ID NO: 62987 - protein, 180 aa, Gossypium hirsutum
  Clone ID: GOSHI-09MAY01-C441_1.pep
MAEAPTPTQQPRPVVYVVFQIGGVGVLSENKLRPAPASKASIEAMPRIKVKESGKDCCICLEDFEVEEEGREMPCKHVFHSGCIEKWLLIHGLCPVCRFLMLPETAEIGGGEGNGGRRRIEGGEINGLEFLQSVFAFASLASMMGSGRAFRQPDSGQVDDDVYSNCNTDDTPSNQNTDSN

SEQ ID NO: 62988 - protein, 286 aa, Gossypium hirsutum
  Clone ID: GOSHI-09MAY01-C471_1.pep
MKRLGSSDSLSALMSICPTSDERSPRNNNVYSREFQSMLEGFDEEGCFEELTVGHGGGAKKRRLSVDQVKALEKNFEVENKLEPDRKSKLAQELGLQPRQVAVWFQNRRARWKTKQLERDYGVLKTSYESLKLNYSNLRHENEDLLKQISELKAKLIEPPPGSSLGTSSEPAEVNCESFNDGGGNGSVGGGGDTVFPDLKDGSSDSDSSAILNEENNSGGDMEGGSPNNGAASSPSSMNNCFQLFKTTYQTPQFVKMEEHDFISSTADEVCNFFSDEQAPSLQWWI

SEQ ID NO: 62989 - protein, 156 aa, Gossypium hirsutum
  Clone ID: LIB3585-068-P1-K1-B9.pep
RKSKLAQELGLQPRQVAVWFQNRRARWKTKQLERDYGVLKTSYESLKLNYSNLRHENEDLLKQISELKAKLIEPPPGSSLGTSLEPAEVNCESFNDGGGNGSVGGGGDTVFPDLKDGSSDSDSSAILNEENNSGGDMEGGSPNNGAASSPSSMNNC

SEQ ID NO: 62990 - protein, 51 aa, Gossypium hirsutum
  Clone ID: LIB3585-068-P1-K1-C1.pep
TRYEFHNHDYSNLRHENEDLLKQVIINNNYSFILVRLGISLSIICKAKLKV

SEQ ID NO: 62991 - protein, 64 aa, Gossypium hirsutum
  Clone ID: GOSHI-09MAY01-C411_1.pep
GKKKIFKALLRCNPAIKLSSFPNFHQFLKTRCFILSREHFLEAKTIEDEITKECPNQKHKKILG

SEQ ID NO: 62992 - protein, 136 aa, Gossypium hirsutum
  Clone ID: GOSHI-09MAY01-C401_1.pep
MWHEARRSERRVHDMMDAARKRAQRRAIFLAKRRGDPQQSIQVVGSRCRIHRDDALYHATQDQQGWIPWNGKQDILIDRFDGRALLGFIREPGTRHFRNQEKSEEEEEVEEFVNFERYRDLIKHRPRGFTDEDGYN

SEQ ID NO: 62993 - protein, 318 aa, Gossypium hirsutum
  Clone ID: GOSHI-09MAY01-C721_1.pep
MGKPVMKLHLIIGVLAVSLVNAEDPYLYYTWTVTYGTRSILGVPQQVILINNQFPGPKLDVVTNNNIILNLINKLDQPFLLTWNGVKQRKNSWQDGVLGTNCPIPPNSNYTYKFQAKDQIGSYTYFPSTLMHRAAGGFGALNIYHRSVIPFPYANPDGDFAVLIGDWCKTSHKALQQTLDSGKSLPFPHGVLINGQTKTTFTGEQGKTYMFRISNVGLSTSLNFRIQGHSMKLVEVEGSHVIQNLYDSLDVHVGQSVTVLVTLNQPPKDYYIVASTRFTRTVLTATRCCTMQLANPSFLTATSCSCLQISIGNAAGKT

SEQ ID NO: 62994 - protein, 203 aa, Gossypium hirsutum
  Clone ID: GOSHI-09MAY01-C681_1.pep
MGLKNREEEDNCSVNEALLFATISIIGLQVDVHLKDGSVYSGIFHTASVEKEYGIVLKKAKLTKQGRCATNVANGSVVETLVILAGDLVQVFAKGVPLPLDGFAGNLACGNGEPAPEIPPSSANSLNGTKKFNKSTMDERISNTKRNSAPNENGFVDGFISMGAGKEDEGQKLLEKPMGNGEGVGYHTREETNIEQREDVSGA

SEQ ID NO: 62995 - protein, 139 aa, Gossypium hirsutum
  Clone ID: LIB3828-018-Q1-K6-B5.pep
EGICVVETLVILAGDLVQVFAKGVPLPLDGFAGNLACGNGEPAPEIPPSSANSLNGTKKFNKSTMDERISNTKRNSAPNENGFVDGFISMGAGKEDEGQKLLEKPMGNGEGVEYHKREETNIEQREDVSGATVARRQVG

SEQ ID NO: 62996 - protein, 74 aa, Gossypium hirsutum
  Clone ID: LIB3582-046-P1-K1-G8.pep
MGLKNREEEDNCSVNEAGVFATGSIIRLQVHVHLKDGSVYSGIFHTASVEKEYVIVFKKANSTQPPIPTTTHPN

SEQ ID NO: 62997 - protein, 79 aa, Gossypium hirsutum
  Clone ID: LIB3582-046-P1-K1-C9.pep
TDPVFLLWTLVDQSNRICQQHVCEARVTVYFGVAYDQQHFRSASGLLVQNEEGEILASQMVNHSDIATPFMAEAQPTRP

SEQ ID NO: 62998 - protein, 57 aa, Gossypium hirsutum
  Clone ID: LIB3829-023-Q6-N6-G10.pep
VIPSLNSCRTLAKNVVTVLFILTTSRALCIYYHFLLLDVHKGRNKILRNSLNCQCYF

SEQ ID NO: 62999 - protein, 146 aa, Gossypium hirsutum
  unsure (1)..(146): unsure at all Xaa locations
  Clone ID: GOSHI-09MAY01-C671_3.pep
QIPLAELLGVDFQVWKGELSGEFSVRSAYKLLQITSSNPNDXYYKPXLKNFYKKLWNLQLPSKITIIVWRASXNYMPTLVNLRSKQIADTAACPRCRSGEEDISHVFLYCLDFPTEHSQTRSIDLLWHMGPGGEQRGAFKSKRVLG

SEQ ID NO: 63000 - protein, 394 aa, Gossypium hirsutum
  unsure (1)..(394): unsure at all Xaa locations
  Clone ID: GOSHI-09MAY01-C671_2.pep
KSHENNNEVQLVSDLIDASNNMWKSELVLSTFPADTAQKILQILLAELQGVDFXVRSAYKLLQSTSSNPNNLLLHTDLKNFYKKLWNLQLPSKITITVXRASWNYMPTLVNLRSKRVVDTAVCSRCRSGEEDLSHVFRYCHVVIEVWKMLDLPWVNNFLVQRFWGWLTWMSQKSTPKQGRLLCCGIWVLWGSRNKLMHERKVESGREIASKVQRYVAEIDGLAEKRSTLCTATRAIQSETSSGMTIHFDAAFNRRDFKSMAGLVVQDQMGVILATKTVLNSNVSTSFAAEAYAGLHAINLGLSLGIHSVTVKGDSRTVIKKCQTSRTRGKSVIGAILSDIQKKSRVFSXIRFQFINRTENVLAHKIAEEALRRGEKTHLEGEVLHRLYVRSEGR

SEQ ID NO: 63001 - protein, 164 aa, Gossypium hirsutum
  Clone ID: GOSHI-09MAY01-C671_1.pep
MTIHFDAAFNRRDFKSMAGLVVRDQMGVILVTKTVLNSNVSTSFAAEAYAGLHAINLGLSLGIHSVTVKGDSRTVIKKCQTSMQDKLVIGEIISDIQKKSEFFQEIMFQFINRTENISAHKIAEEALRREKKHTWKERHYTAFMCVPMEDGVGSQIENDFLKEI

SEQ ID NO: 63002 - protein, 106 aa, Gossypium hirsutum
  Clone ID: LIB3146-005-Q1-K1-G7.pep
LFGSEVLGLAYLDVPKENSQKVDCYAVAYGSLCTTTRAIQRDTSSGMTIHFDATFNRRDFKSMAGLVVQDQMGVILVTKTVLNSNVSTSFPRVRPRVRPRVRPRVR

SEQ ID NO: 63003 - protein, 119 aa, Gossypium hirsutum
  Clone ID: LIB3166-050-P1-K1-A8.pep
LFGSEVLGLAYLDVPKENSQKVDCFAVAYGSLCTTTRAIQRDTSSGMTIHFDATFNRRDFKSMAGLVVQDQMGVILVTKTVLNSNVSTSFTAEAYAGLHAINLRLSLEGEALHRLYVRS

SEQ ID NO: 63004 - protein, 46 aa, Gossypium hirsutum
  Clone ID: LIB3582-046-P1-K1-F5.pep
PTRPRTRGQKGKSSFDSDFQYERRHQKAHASTPENQLLGVPPEEFA

SEQ ID NO: 63005 - protein, 259 aa, Gossypium hirsutum
  unsure (1)..(259): unsure at all Xaa locations
  Clone ID: GOSHI-09MAY01-C661_1.pep
HASVGMVRIKCAVCPDFGLCVECFSVGAEITPHKCNHPYRVMDNLSFPLICPDWNADEEMVLLEAIEMYGFGNWAEVAEHVGTKSKSQCIDHCNAIYMNSPCFPLPDLSHVMGKSREELLAMAKGNGLVKKEFTTHGELTLKQESPAGAKVKYEAPRKEDPAHQSSCSLTGEIGSHIDSRSGGNTFLVAGKKTSNMAQIKDGIKVEEPQADRSIGEKKPRVSXEEEPSMTELSGYNFKRQEIEIEYDNDAEQLLADMEI

SEQ ID NO: 63006 - protein, 126 aa, Gossypium hirsutum
  Clone ID: GOSHI-09MAY01-C191_1.pep
TPPRLPGIRSLLPLPSGDLLTGGTDLRIRRWDHFSPDRSYCICGPNFKGVGNDDFYEARSSFGAQVVQETKRRPLTTKLTAKAVLVAAATDSAGCHHDSVLSLASVKLNQRLLISSSRDGAIKVWK

SEQ ID NO: 63007 - protein, 174 aa, Gossypium hirsutum
  Clone ID: GOSHI-09MAY01-C151_2.pep
SLISSPKKKWPIFSRIPYLPATTVLSACRHFSTVVPKPSSTSLTTHKKSRAALSRLKSEQDPDCILEICRAARLTPSSHIGRIALSVAISKLCEGNHFQSIDTFLQELRSRPDLQNNRFASHSLILYGQAKMLNRAVTVFDEFYNEGFCRSTKSLNALLVAGLIAKDHVEVKRI

SEQ ID NO: 63008 - protein, 196 aa, Gossypium hirsutum
  Clone ID: GOSHI-09MAY01-C151_1.pep
MAFSKLSLFFSLLLLSFLSLNSLVSCDTDEEDNLLKGINNYRASLNLTILKKNDNAECLADELADQFKNQPCTNSTGANTVPGTEPQFANYPNLLAKCHLNVSNTRDGAVMPACVPNLVPNLVLTNFTQSQYNDNLNDTKYTGVGIGSDGDWIVVVLTTGTPEGSYSPATGAASVASKIGLIYHVLFLVMAAFYLL

SEQ ID NO: 63009 - protein, 67 aa, Gossypium hirsutum
  unsure (1)..(67): unsure at all Xaa locations
  Clone ID: LIB3145-055-Q1-K1-D10.pep
YRIRQRPSRRGLASWLDRRGLKNGRRNDYFVSRXGXXSNESAYIVVIYIVSLYDQVIEYGQFLILCK

SEQ ID NO: 63010 - protein, 220 aa, Gossypium hirsutum
  Clone ID: GOSHI-09MAY01-C141_2.pep
RVRLILSNTFLETSSFSAAMRWAPIVGWAPSFLLKRYILTGIHDGPQEPFIADSVDFVVSQVETLSRDDLASRLAFTVDNASVGPLLLSDSFITIMDTNDYSSIPQELKDQLGDRYPAARRAYLKTGADFPFLSRPDEVNLHLQLHLRRVGVEAKPDLVRTIPKDGSGGSPGKENDEKKDHDDQPTGNGGNPESTSKESQSPPAPESAPPRGLYDQLISR

SEQ ID NO: 63011 - protein, 97 aa, Gossypium hirsutum
  Clone ID: LIB3145-007-Q1-K1-H1.pep
SEAIYDNHFGGKLSQRDDLASRLAFTVDNASVGPLLLSDSLITIMDTNDYSSIPQELKDQLGERYPAARRAYLKTGGDFPFLSRPDEVNLHLQVHNV

SEQ ID NO: 63012 - protein, 179 aa, Gossypium hirsutum
  Clone ID: GOSHI-09MAY01-C171_1.pep
MATVGRNAAAPLLFLNLIMYFIVLGFASWCINRFINGQTAHPSMGGNGATGFFLTFSILAAVVGIVSKFAGGHHIRSWRSDSLAAAGSSALIAWALTALAFGFACKHINIGGWRGWRLRILEAFIIILAFTQLLYVLLIHAGVFSSRYGPGYRDSDYGMHAPGDEPGHKTGTAVTGSRV

SEQ ID NO: 63013 - protein, 136 aa, Gossypium hirsutum
  unsure (1)..(136): unsure at all Xaa locations
  Clone ID: GOSHI-09MAY01-C161_7.pep
ETIPNNRAKGGKNRTRRKNEAXDDEKRELGFNEDGHEYAHVLRMLGNGRREAVCIDETKRLCHIRGKMHKKAWIAAGDIILVRLRHYQDDKADVILKYMPXDETRLLQAYGELTENTRLNERIVDEEDDSGVDDYV

SEQ ID NO: 63014 - protein, 138 aa, Gossypium hirsutum
  Clone ID: GOSHI-09MAY01-C161_6.pep
MPKNKGKGGKNRKRGKNEADDEKRELVFKEDGQEYAQVLRMLGNGRCEALCIDGTKRLCHIRGKMHKKVWIAAGDIILVGLRDYQDDKADVILKYMPDEARLLKAYGELPENTRLNEGIVDEEDEGGADDYVEFEDED

SEQ ID NO: 63015 - protein, 101 aa, Gossypium hirsutum
  Clone ID: GOSHI-09MAY01-C161_3.pep
DASPDRTGTDGSAHATRLCVRGKMHKTVWIAVGDIILVGLRDYQDDKADVILKYMPDEARLLKAYGELPENTRLNEGIVDGEDERGVDDYVEFEDEDIDQI

SEQ ID NO: 63016 - protein, 150 aa, Gossypium hirsutum
  unsure (1)..(150): unsure at all Xaa locations
  Clone ID: GOSHI-09MAY01-C161_2.pep
MPKNKGKGGKNRKRGKNEADDEKRELVFKEDGQEYAQVLRMLGNGRCEAMCIDGTKRLCHIRGKMHKKVWIAAGDIILVGLRDYQDDKADVILKYMPDEARLLKAYGELPENTRLNEGIVDEEDEGGAXLLEFEDENFDNIRFWNWFCLN

SEQ ID NO: 63017 - protein, 142 aa, Gossypium hirsutum
  Clone ID: GOSHI-09MAY01-C161_1.pep
MPKNKGKGGKNRKRGKNEADDEKRELVFKEDGQEYAQVLRMLGNGRCEAMCIDGTKRLCHIRGKMHKKVWIAAGDIILVGLRDYQDDKADVILKYMPDEARLLKAYGELPENTRLNEGIVDEEDEGGADDYIEFEDEDIDKI

SEQ ID NO: 63018 - protein, 116 aa, Gossypium hirsutum
  Clone ID: uC-gsronu33b112e02b1.pep
PRVRPRVRPRVRPRVRGNGRCEAMCIDGTKRLCHIRGKMHKKVWIAAGDIILVGLRDYQDDKADVILKYMPDEARLLKAYGELPENTRLNEGIVDEEDEGGADDYVEFEDEDIDKI

SEQ ID NO: 63019 - protein, 85 aa, Gossypium hirsutum
  Clone ID: LIB3582-018-P1-K1-B5.pep
DAWALVTKNQIGSISFSYLQLWTLKCLSLRSRSRSQKGFLLFSLFVFYPFFFKSLYFDAYFYFNLPIISFLSFSVKEYRNLFLVK

SEQ ID NO: 63020 - protein, 173 aa, Gossypium hirsutum
  unsure (1)..(173): unsure at all Xaa locations
  Clone ID: GOSHI-09MAY01-C111_9.pep
MRECISLDIGQAGIQCXNACWELHWLERGGQPPGHMPSDKTDEGGDNAFNTFFTETGARKHVPRAVFADLEPTVIAEARTGTYRPLLHPERLINGNEDSAHNFYRGHYTIGKXIFDLCLDRIRNLADHCTGLQGYLVCNAAGGGTGSRLGYLLLERXCVDYGKKSTVGLTVYP

SEQ ID NO: 63021 - protein, 178 aa, Gossypium hirsutum
  Clone ID: GOSHI-09MAY01-C111_7.pep
MRQCISIHIGQAGIQVGNACWELYCLEHGIQPDGQMPSDKTVGGGDDAFNTFFSETGAGKHVPRAVFVDLEPTVIDEVRTGAYPQLFHPEQLISGKEDAANNFARGHYTIGKEIVDLCLDRIRKLADNCTGLQGFLVFNAVGGGTGSGLGVSLLERLSVDYGKKIKWFTATISQSHSV

SEQ ID NO: 63022 - protein, 441 aa, Gossypium hirsutum
  Clone ID: GOSHI-09MAY01-C111_5.pep
MAGDSGKKEEMSKVKIISTSHVKPGKMIGRKECQLVTFDLPYLAFHYNQKLLFYKCGEFEEKVEKLKDGLRVVLEEFYQLAGKLGKDEDGVFRVEYDDDMDGVEVVEATAMEIGIEELAAEDGTASFKDLIPYNGVLNLEGLHRPLLSVQVTKLKDGVAMGCAFNHAILDGTSTWHFMSSWAQICSGSNSVSVSPFLERTKVRNTRVKLDLSLPPNPVNGDANQGPQLREKLFRFSEAAIDKIKSKVNSTPPSDSSKPFSTFQSLAYHVWHHVTLARELKPQDYTVFTLFADCRKRVDPPMPESYFGNLIHAIFTVTAAGLLSANPPQFGASLVQKAIEAHNAKAIEERNKEWEAAPKIFEYKDAGVNCVAVGSSPRFKVYDVDFGWGKPEGVRSGSNNRFDGMVYLYQGKSGGRSIDVEIALEAGALEKLEKDKEFVLEV

SEQ ID NO: 63023 - protein, 194 aa, Gossypium hirsutum
  Clone ID: GOSHI-09MAY01-C111_4.pep
MRECISIHIGQAGIQVGNACWELYCLEHGIQPDGQMPSDKTVGGGDDAFNTFFSETGAGKHVPRAVFVDLEPTVIDEVRTGAYRQLFHPEQLISGKEDAANNFARGHYTIGKEIVDLCLDRIRKLADNCTGLQGFLVFNAVGGSTGSGLGSLLLERLSVDYGKKSKLGFTVYPSPQVSTSVVEPYNSVLSTHSL

SEQ ID NO: 63024 - protein, 225 aa, Gossypium hirsutum
  Clone ID: GOSHI-09MAY01-C111_3.pep
MLLRSASMPLLNSWVPHSKEPSPELDLLHLIGRTRSVSFRILCSSSTSSSSSISVGSGDDSSRRMTRAVSETDLREMVVPKMREVKRNNGILNTIFVEEEEEVEREEAGFQWRRTASLAVEEECEIGGADGGGRSDSGDDNEWSSWDSNNGNDSTELYYQKMIEANPGNSLLLSNYARFLKEVRGDLAAPHASELVRTLLLLRRIMKKSVLSQARVMRKVKMSTK

SEQ ID NO: 63025 - protein, 182 aa, Gossypium hirsutum
  Clone ID: GOSHI-09MAY01-C111_2.pep
RLLDRGRCGIGGGGGNPRVRPRGRGRGGADGSDGSDNEWGYWDSNNGKDSSDTYYQKMIQANPGNSLLLSNYARFLKEVRGDLVRAEEYCGRAILANPNDGNLLSMYADLIWQTHKDGPRAETYFDQAVKSAPDDCFVLASYARFLWDAEEEDDEEEKAGEKFSNGSDQSFFHGAPPLAAAS

SEQ ID NO: 63026 - protein, 450 aa, Gossypium hirsutum
  Clone ID: GOSHI-09MAY01-C111_1.pep
MRECISVHIGQAGIQVGNACWELYCLEHGIQPDGQMPSDKTVGGGDDAFNTFFSETGAGKHVPRAVFVDLEPTVIDEVRTGTYRQLFHPEQLISGKEDAANNFARGHYTIGKEIVDLCLDRIRKLADNCTGLQGFLVFNAVGGGTGSGLGSLLLERLSVDYGKKSKLGFTVYPSPQVSTSVVEPYNSVLSTHSLLEHTDVAVLLDNEAIYDICRRSLDIERPTYTNLNRLVSQVISSLTASLRFDGALNVDVTEFQTNLVPYPRIHFMLSSYAPVISAEKAYHEQLSVAEITNSAFEPSSMMAKCDPRHGKYMACCLMYRGDVVPKDVNAAVATIKTKRTIQFVDWCPTGFKCGINYQPPTVVPGGDLAKVQRAVCMISNSTSVAEVFSRIDHKFDLMYAKRAFVHWYVGEGMEEGEFSEAREDLAALEKDYEEVGAESGEGDEEDEDEY

SEQ ID NO: 63027 - protein, 115 aa, Gossypium hirsutum
  Clone ID: uC-gsflmaxxa005e08b1.pep
MRECISIHIGQAGIQVGNACWELYCLEHGIQPDGQMPSDKTVGGGDDALNTFFSETWCPGKHLPCARFPDPCTHCSCSFAPWSLPPAPLLSPPHLSSSISPHHLSPFPPPSSPPP

SEQ ID NO: 63028 - protein, 93 aa, Gossypium hirsutum
  unsure (1)..(93): unsure at all Xaa locations
  Clone ID: LIB3493-022-P1-M1-D9.pep
MACWEALLALNXXIQPDGXMPSDXTVGGGDDAFNTFFSETGAGKHVPRAVFVDLEPTVIDEVRTGTYRQLFHPEQLIIGKEDSVNNFSRGHYT

SEQ ID NO: 63029 - protein, 109 aa, Gossypium hirsutum
  Clone ID: LIB3146-014-Q1-K1-D10.pep
MMAKCDPRHGKYMACCLMYRGDVVPKDVNAAVATIKTKRTIQFVDWCPTGFKCGINYQPPTVVPGGDLAKVQRAVCMISNSTSVAEVFSRIDHKFDLMYAKRAFVQLYV

SEQ ID NO: 63030 - protein, 42 aa, Gossypium hirsutum
  unsure (1)..(42): unsure at all Xaa locations
  Clone ID: LIB3197-013-P1-M1-D9.pep
YNNFFFLFSNGTLELKPNYSSNLLQSXIVIEQXLRRSRSSLQ

SEQ ID NO: 63031 - protein, 56 aa, Gossypium hirsutum
  Clone ID: LIB3147-013-Q1-K1-E1.pep
QLVLGKQRPSCSSLWIFEPTVIDEERTGTYRQLFHAEQLISGKEDAANNFVRGHYT

SEQ ID NO: 63032 - protein, 147 aa, Gossypium hirsutum
  unsure (1)..(147): unsure at all Xaa locations
  Clone ID: LIB3585-013-P1-K1-F3.pep
RGRLAGPLGGPLVDMDQPGYTNLNRLVSQVISPLTAPLRYDGAWNVDVPEFQTNWGLYPRIHYMLTSYAPLMCAEKAYHEQISVAESTNSAFEPSSMMAKCEPRHGMYMACXPMYRGDVVPEDVNAACATIKTKRTMXFVDWCPTGF

SEQ ID NO: 63033 - protein, 117 aa, Gossypium hirsutum
  unsure (1)..(117): unsure at all Xaa locations
  Clone ID: LIB3149-063-Q1-K1-E4.pep
AAPTIKPIIPILYVDCCPAVLTCGIGYDARTACTGGAISKDHRGGRFITNRSNXCMVLYDIDHMFDLMYAKRAFVHWYVGEGMEEGKFSEAREDLAALEKDYEGAGAESGQGDYEGE

SEQ ID NO: 63034 - protein, 183 aa, Gossypium hirsutum
  unsure (1)..(183): unsure at all Xaa locations
  Clone ID: AI725677.1.pep
MAGDSGKKEEMSKVKIISTSHVKPGKMIGRKECQLVTFDLPYLAFHYNQKLLFYKCGEFEEKVEKLKDGLRVVLEEFYQLAGKLGKDEDGVFRVEYXDNMDGVEVVEATAMEIGIEELAAEDGTASFKDLIPYNGVLNLEGLHRPLLSVQVTKLKDGVAMGFFDEKLILLAGGVLWGFVRFRF

SEQ ID NO: 63035 - protein, 156 aa, Gossypium hirsutum
  unsure (1)..(156): unsure at all Xaa locations
  Clone ID: uC-gsflmaxxa090h08b1.pep
TYARGLENHLLDGGSIFKIFSELKRESAYPVHICHAGIQVRNACWGLYCLEHGIQPDGQMPSDKTVGGGDDAFNTFFSETGAGKHDPRAVFVDLEPTVIAQVRTGTYRQLFHPEQLISGKADTANNFTRSHYTIGTEIVDXRLDRIKKLADNCTGL

SEQ ID NO: 63036 - protein, 43 aa, Gossypium hirsutum
  Clone ID: uC-gsronu33B057f11b1.pep
VMFECRARILLPNDLFPFIVCFCLFYCVNFDSSKLCSRLYGLQ

SEQ ID NO: 63037 - protein, 72 aa, Gossypium hirsutum
  Clone ID: uC-gsronu33B127c06b1.pep
FSRINLDHFLIKQLGTIVSVIRIPRAPLVIITTVRSTTTISPANFTLFLHRERRRLISNFKKKKKKKKKGGT

SEQ ID NO: 63038 - protein, 56 aa, Gossypium hirsutum
  Clone ID: LIB3189-031-P1-K1-A8.pep
MRECISIHIGQAGIQVGNACWELYCLEHGIQPDGQMPSDKTVGGGDDSFYTFFRET

SEQ ID NO: 63039 - protein, 121 aa, Gossypium hirsutum
  Clone ID: GOSHI-09MAY01-C101_4.pep
RPRVRPRVRPRVRNNEYGNDINKDLKADPKDEFLALLRSTVKCLVYPEKYFEKVLRLAINRRGPDEGALTRVVCTRAEVDLKIIADEYQRRNSVPLTRAIVKDTHGDYEKLLLVLAGHVEN

SEQ ID NO: 63040 - protein, 316 aa, Gossypium hirsutum
  Clone ID: GOSHI-09MAY01-C101_1.pep
MATLTVPTTVPSVSEDCEQLRKAFSGWGTNEGLIIDILGHRNAEQRNLIRKTYAETYGEDLLKALDKELSNDFERLVLLWALDPAERDALLANEATKRWTSSNQVLMEIACTRSANQLLHARQAYHARYKKSLEEDVAHHTTGDFRKLLLPLVSSYRYEGEEVNMNLAKTEAKLLHEKISDKAYSDDDVIRVLATRSKAQINATLNHYKNEYGNDINKDLKADPKDEFLALLRSTVKCLVYPEKYFEKVLRLAINRRGTDEGALTRVVCTRAEVDLKIIADEYQRRNSVPLTRAIVKDTHGDYEKLLLVLAGHVEN

SEQ ID NO: 63041 - protein, 76 aa, Gossypium hirsutum
  Clone ID: LIB3145-043-Q1-K1-E2.pep
GGLLHDSRQAYHAPYKKTLEEDIAHHTTGDFHKLLLPLMSSYRYEGEEVNMTLAKTEAKLLHEKISNKAYSDYYVI

SEQ ID NO: 63042 - protein, 80 aa, Gossypium hirsutum
  Clone ID: LIB3048-036-Q1-L1-D2.pep
PSSYQRLVLLWALGPAERDALLANEATKRWTSSNQVLMEIACTRSANQLLHARQAYHARYKKSLEEDVAHHTTGDFRKVY

SEQ ID NO: 63043 - protein, 203 aa, Gossypium hirsutum
  unsure (1)..(203): unsure at all Xaa locations
  Clone ID: LIB3543-065-Q6-K6-A7.pep
KKKVEEAGRGLTVPTTVPSVSEDCEQLRKAFSGWGTNEGLIIDILGHRNAEQRNLIRKTYAETYGEDLLKALDKELSNDFERLVLLWALDPAERDALLANEATKRWTSSNQVXYHARYKKSLEEDVAHHTTGDFHKLLLPLVSSYRYEGEEVNMTLAKTEAKLLHEKISNKAYSDDDVIRVLATRSKAQINATLNHYKNEYGK

SEQ ID NO: 63044 - protein, 85 aa, Gossypium hirsutum
  unsure (1)..(85): unsure at all Xaa locations
  Clone ID: LIB3166-023-P1-K1-B6.pep
TGALARAARDALYNTEASKWXTSGNQVLMELACTRPANQLLHAWQAYHARYKKSLXEDVAHHTTGDYRTAPLPLVSSYTYDGEEV

SEQ ID NO: 63045 - protein, 317 aa, Gossypium hirsutum
  unsure (1)..(317): unsure at all Xaa locations
  Clone ID: GOSHI-09MAY01-C121_1.pep
MEGGGSDDHHHHHHSHHHHHQQPLHHHHHHHHRPTFPFQLLEKKEEDNQPCSSSSSLPFPSLPVSSSSADQHTSTRSISTHQISPETSKTPPPKRTSTKDRHTKVDGRGRRIRMPALCAARVFQLTRELGHKYNGETIEWLLQQAEPAVIAATGTGTIPANFTSLNISLRSSGSSMSVPSQLRSSGFSSNFSMQQRRSLFPGIGLETTPTPTTFLNFQSSSTSLGISEEAEESSLGRKRRPEQDLSSQHHQNGELLVAIKHRYNSGESPRSSSGXNFWMVTNSNNQAMSGGDPIWTFXLQLITVVCIGELCLVGCIS

SEQ ID NO: 63046 - protein, 167 aa, Gossypium hirsutum
  unsure (1)..(167): unsure at all Xaa locations
  Clone ID: AW186726.1.pep
AATGNGTIPANFTSLNISLRSSGSSMSVPSQLRSSGFSSNFSMQQRKSLFPGIGFETTPTPTTFLNFQSSSTSLGISEEAEESSLGRKRRPEQDLSSQHHXNGELLVAIKHRYNSGESPRSSSGXNFWMVTNSNNQVMSGGDPIWTFXLQLITVVCIXELCLLGCIS

SEQ ID NO: 63047 - protein, 542 aa, Gossypium hirsutum
  Clone ID: GOSHI-09MAY01-C381_1.pep
MSAKSKLSTLILTLSLVFLYAGCLAFAKQDPELKQCTHQCRVQQQYDEKQKEECVRTCEEYHREKKDRESLKEVGQDPDVEFHPGDGLSECQSRCAGLAGEVRQLCLFRCQQKWRRDYASRWEEEGKKQSKEDAEDEGEEEKHNPYVFEDKHFSTAIKTGKGRVDLLTKFTHNSDILRGIENYRLALLVASPKSFVVPNHFDANAIFVVTQGRGTLTLIHEDKRESFNIETGDIIYVRAGTPLYLINRDDDEKLFIVKLLQPINQPDHYEVFYGAGGAKPESFYETFSTEILEAALKTSRDKLEKFFDKQGKGPFLEASKEQIEAMSSHEEGSKGGGLWPFGSESKSESAFNLFRKRQPSHCNRYGQLFEVEEEEFKGLKDFDLRVSYVNITKGCMSAPFYNSRAIKIAIVVKGEGYFEMVSPPVSPKSSQEDSAGRKSGSRYQKISSRLRSDTVFVVPAGHPFVTVASRNNNLEILCFEVNIENNVRYLLAGEGNYVQQFEKEAKELAFKSKEEEVDRIFGNQDEEFFFPGPRQQRGRYYE

SEQ ID NO: 63048 - protein, 212 aa, Gossypium hirsutum
  Clone ID: LIB3582-058-P1-K1-H4.pep
PRPPSVRPRVRPRVRPASGRGTLTLIHEDKRESFNIETGDIIYVRAGTPLYLINRDDDEKLFIVKLLQPINQPDHYEVFYGAGGAKPESFYETFSTEILEAALKTSRDKLEKFFDKQGKGPFLEASKEQIEAMSSHEEGSKGGGLWPFGSESKSESAFNLFRKRQPSHCNRYGQLFEVEEEEFKGLKDFDLRVSYVNITKGCMSAPFYNSRA

SEQ ID NO: 63049 - protein, 94 aa, Gossypium hirsutum
  Clone ID: LIB3582-003-P1-K1-G6.pep
PRVRPRVRPRVRPRVRFFFFFFFGVGRLEFLFKHGPKHVKPKIIYILARRRRLLLIRVSSYLKNLQTSLITSFSHQFFPISQHSQLRHLQKLLG

SEQ ID NO: 63050 - protein, 149 aa, Gossypium hirsutum
  unsure (1)..(149): unsure at all Xaa locations
  Clone ID: LIB3582-024-P1-K1-F12.pep
MVACIFQVFDAIGNCLSAGIKAESHSNTGLSSKYDSGDGKDVSSESSNSKVSSFSAPLTPRSEGEILQSPNLKSFSFADLKMATRNFRPDSVLGEGGFGYVFKGWVDENSFTATKPGSGIXIAVKRLNQDGFQGHKEWLAEMNYLGQLY

SEQ ID NO: 63051 - protein, 94 aa, Gossypium hirsutum
  Clone ID: LIB3829-029-Q6-K6-E12.pep
VLHRKNKAFAIINWIYERRVKRRLVFFRYWMQWRNRSTAGIKAESHSNTGISLIPHYAIIYLLIAMHFEILRIPSIMLFITSLWFMESSIFISN

SEQ ID NO: 63052 - protein, 89 aa, Gossypium hirsutum
  Clone ID: GOSHI-09MAY01-C361_7.pep
PKVKAQVSEVKGVMMETIEKVLARGERIELLVDRTENLRSQAQDFRQQGTQMRRKMWLQNMKVKLIVLGILVALILIIVLSVCHGFKCS

SEQ ID NO: 63053 - protein, 219 aa, Gossypium hirsutum
  unsure (1)..(219): unsure at all Xaa locations
  Clone ID: GOSHI-09MAY01-C361_3.pep
MGQQSLIYAFVARGTVVLADYTEFXGNFTGIASQCLQKLPSSNNKFTYNCDGHTFNYLVDNGFTYCVVAIESVGRQVPMAFLERIKEDFTKRYGGGKAAAAPANSLSKEFGPKLKEHMQYCIDHPEEISKIAKVKAQVSEVKGVMMENIEKVLDRGERIELLVDRTENLRSQAQDFRQQGTRMRRKMWVRNMKVKLRVFGILIALILIIVLSICGGFHC

SEQ ID NO: 63054 - protein, 219 aa, Gossypium hirsutum
  Clone ID: GOSHI-09MAY01-C361_2.pep
MGQQSLIYAFVARGTVVLADYTEFSGNFTSIASQCLQKLPASNNKFTYNCDGHTFNYLVDNGFTYCVVAVESAGRQVPIAFLERIKEDFTKRYGGGKAAAAPANSLSKEFGPKLKEHMQYCIDHPEEVSKIAKVKAQVSEVKGVMMENIEKVLDRGEKIELLVDKSENLRSQAQDFRQQGTQMRRKMWLQNMKIKLIVLGILIALILIIVLSVCHGFNC

SEQ ID NO: 63055 - protein, 152 aa, Gossypium hirsutum
  Clone ID: GOSHI-09MAY01-C361_1.pep
MGQQSLIYAFVARGTVVLADYTEFTGNFTGIASQCLQKLPSSNNKFTYNCDGHTFNYLVDNGFTYCVVAIESVGRQVPMAFLERIKEDFTKRYGGGKAASAPANSLSKEFGPKLKEHMQYCIDHPEEISKIASEAHIIINEFVETFEGTYLL

SEQ ID NO: 63056 - protein, 144 aa, Gossypium hirsutum
  unsure (1)..(144): unsure at all Xaa locations
  Clone ID: uC-gsronu33B005b12b1.pep
MGQQSLIYAFVARGTVVLADYTEFSGNFTSIASQCLQKLPAFNNKFTYNCDGHTFNYLVDNGSTYCVAAVESPSRQVXPIAFLVRITEGFPPSLCRGLSFPFLSSIYHFFPYPHFILSFLPFTLPHCSLFYILTLLSISSPSFF

SEQ ID NO: 63057 - protein, 133 aa, Gossypium hirsutum
  Clone ID: LIB3829-007-Q6-K6-F6.pep
WWRKTAAAPANSLSKEFGPKLKEHMQYCIDHPEEISKIAKVKAQVSEVKGVMMENIEKLTNFFQVLDRGERIELLVDRTENLRSQAQDFRQQGTQMRRKMWLQNMKVKLIVLGILVALILIIVLSVCHGFKCS

SEQ ID NO: 63058 - protein, 68 aa, Gossypium hirsutum
  unsure (1)..(68): unsure at all Xaa locations
  Clone ID: LIB3585-009-P1-K1-H5.pep
MGQQSLIYAFVARGTMVLADYTEFTGNFTGIASXCLQKLPASNNKFTYNCDGHTFNYFVVYGYTYCVG

SEQ ID NO: 63059 - protein, 95 aa, Gossypium hirsutum
  Clone ID: LIB3828-008-Q1-N6-H4.pep
EEISKIAKVKAQVSEVKGVMMENIEKVLDRGERIELLVDRTENLRSQAQDFRQQGTQMRRKMWLQNMKVKLIVLGILVALILIIVLSVCPGFKCS

SEQ ID NO: 63060 - protein, 46 aa, Gossypium hirsutum
  Clone ID: LIB3584-018-P1-K1-H9.pep
KIQRLDYRNLIKINFPKMLNHISTRQQTYYYQKDPETQTYILNAVF

SEQ ID NO: 63061 - protein, 165 aa, Gossypium hirsutum
  Clone ID: GOSHI-09MAY01-C311_1.pep
MYLSEKPRSIDLYKEEGPATARDMIIDVTTNGDLPPHHHHHPPPHQQQMILGESSCEDPEVKAPKKRAETWVQDETRSLIAFRREMDGLFNTSKSNKHLWEQISAKMRDIGFDRAPTMCTDKWRNLLKEFKKAKHQDRGSGSAKMSYYKEIEEILRERTKNAYKS

SEQ ID NO: 63062 - protein, 202 aa, Gossypium hirsutum
  unsure (1)..(202): unsure at all Xaa locations
  Clone ID: GOSHI-09MAY01-C301_1.pep
MKPLLLCFAFAVIVGIGNAAAMDTGGLSRDSFPKGFVFGTATSAYQVEGMANKGGRGPCIWDVYVKQPGHIANNDTADVAVDQYHHYKEDVDLLANFNFDSYRFSISWSRIFPEGVGRVNWEGVDYYNRLINYLVKKGITPYGNLYHYDLPQALQXKYNGFLNRQIVENYADYAKFCFKTLGDKVKNWFTFNEPRIGVVFGF

SEQ ID NO: 63063 - protein, 510 aa, Gossypium hirsutum
  unsure (1)..(510): unsure at all Xaa locations
  Clone ID: GOSHI-09MAY01-C291_1.pep
MSSTLLEVTRAAHEDVERLERLIVKDLQNDPPTTKDGLYQSHRVRNNIDTIISTTEKLVEIYDDKDNARKDEIAALGGQTATGVNVFSAFYDRLKEIREYHRKHPAARLVNANEEDEALLKEEPVIEFSGEEAFGRYLDLHELFNQYINSKFGSKIEYSAYLDVFSQPHNIPWKLKSTRQFREYMENLLEYLIYFFQRTEPLQDLDRIFSKVEAEFEEQWANGRVQGWEKQGQENEDDPAQHTMIDLDYYSTVEELMEVGPEKLKEALASLGLKTGGTVQQRAERLFLTKHTPLEKLDKKHFAKGSLGPRQNGSTAVSQDINSLKHIALMEAKMKKLADLLSKTIEQTKENVVKKQALTYEEMEQEREEEETQVDTESDDEDQQIYNPLKLPMGWDGKPIPYWLYKLHGLGQEFKCEICGNYSYWGRRAFERXISKKWRHQHGMRCLGIPNTKNFNEITNIQEAQELWEKIRERQGVNKWRPDLEEEYEDKEGNIYNKKTYTDLQRQGLI

SEQ ID NO: 63064 - protein, 164 aa, Gossypium hirsutum
  Clone ID: uC-gsronu33B038f02b1.pep
PLFRLVEAKMKKLCDLLSKTIEQTKENVVKKQALTYEEMEQEREEEETQVDTESDDEDQQIYNPLKLPMGWDGKPIPYWLYKLHGLGQEFKCEICGNYSYWGRRAFERHFKEWRHQHGMRCLGIPNTKNFNEITNIQEAQELWEKIRERQGVNLDENPKKIGGL

SEQ ID NO: 63065 - protein, 84 aa, Gossypium hirsutum
  Clone ID: GOSHI-09MAY01-C281_24.pep
MAGSWRARGSLVVLAIVLLGCLFAISIAKEEATKLGTVIGIDLGTTYSCVGVHKNGHVEIIAHDQGNRCTPSLVAFTDSEKLIG

SEQ ID NO: 63066 - protein, 114 aa, Gossypium hirsutum
  unsure (1)..(114): unsure at all Xaa locations
  Clone ID: GOSHI-09MAY01-C281_23.pep
MHYQKMRRRMQQAGTIRKNGYIVIKGRPCKVVEVSTSKTGKHGHAKCHFVGIDIFTAKKLEDIVPSSHNCDVPHVNRTDYQLIDISEDGXFVSLLTESGDTKDDLRXPTDENLL

SEQ ID NO: 63067 - protein, 77 aa, Gossypium hirsutum
  Clone ID: GOSHI-09MAY01-C281_19.pep
LRVRPRVRPRVRKVETVVKEALEWLDDNQSTEKEDYEEKLKEVEAVCNPIITAVYQRSGGAPGGGSTEEDDDSHDEL

SEQ ID NO: 63068 - protein, 61 aa, Gossypium hirsutum
  Clone ID: GOSHI-09MAY01-C281_18.pep
ELPLKQKQLESLSCREMVPVLPHLLLLRMLPAHLLLLTVPSPQVKLFSKQGQRQKGSELCF

SEQ ID NO: 63069 - protein, 90 aa, Gossypium hirsutum
  Clone ID: GOSHI-09MAY01-C281_15.pep
GHRALGKLRREAERAKRALSSQHQVRVEIESLFDGVDFSEPLTRARFEELNNDLFRKTMGPVKKAMEDAGLQKSQIDEIVLVGGSTRIPK

SEQ ID NO: 63070 - protein, 111 aa, Gossypium hirsutum
  Clone ID: GOSHI-09MAY01-C281_14.pep
FAEEDKKLKEKIDARNSLETYVYNMKNQISDKDKLADKLESDEKEKVETAVKEALEWLDDNQNAEKEDFEEKLKEVEAVCNPIITAVYQRSGGGPGGAASNEEEDDSHDEL

SEQ ID NO: 63071 - protein, 159 aa, Gossypium hirsutum
  Clone ID: GOSHI-09MAY01-C281_11.pep
MSDEEHHFESKADAGASKTYPQQAGTIRKNGYIVIKNRPCRGGDVSTSKTGKHGHAKCHFVGIDIFTAKKLEDIVPSSHNCDVPHVNRTDYQLIDISEDGFVSLLTESGDTKDDLRLPTDENLLKQIKDGFAEGKDLVVSVMSAMGEEQICALKDIGPK

SEQ ID NO: 63072 - protein, 174 aa, Gossypium hirsutum
  Clone ID: GOSHI-09MAY01-C281_10.pep
LASAHAYAHACAQIEVTFEVAAWGVRAVRPVRKGTGKSEKITITNDKGRLSQEEIERMVREAEEFAEEDKKVKEKIDARNSLETYIYNMKNQINDKDKLADKLESDEKEKVETAVKEALEWLDDNQSAEKEDYEEKLKEVEAVCNPIITAVYQRSGGAPGGGSTEEDDDSHDEL

SEQ ID NO: 63073 - protein, 159 aa, Gossypium hirsutum
  Clone ID: GOSHI-09MAY01-C281_9.pep
MSDDDHHFESKADAGASKTYPQQAGTIRKNGYIVIKGRPCKVVEVSTSKTGKHGHAKCHFVGIDIFTGKKLEDIVPSSHNCDVPHVNRTDYQLIDISEDGFVSLLTDSGDTKDDLRLPTDENLLKQIKDGFGEGKDLVVSVMSAMGEEQICALKDIGPK

SEQ ID NO: 63074 - protein, 159 aa, Gossypium hirsutum
  Clone ID: GOSHI-09MAY01-C281_8.pep
MSDEEHHFESKADAGASKTYPQQAGTIRKNGYIVIKGRPCKVVEVSTSKTGKHGHAKCHFVGIDIFTAKKLEDIVPSSHNCDVPHVNRTDYQLIDISEDGFVSLLTDSGDTKDDLRLPTDENLLKQIKDGFAEGKDLVVSVMSAMGEEQICALKDIGPK

SEQ ID NO: 63075 - protein, 159 aa, Gossypium hirsutum
  Clone ID: GOSHI-09MAY01-C281_7.pep
MSDEEHHFESKADAGASKTYPQQAGTIRKNGYIVIKNRPCKVVEVSTSKTGKHGHAKCHFVGIDIFTAKKLEDIVPSSHNCDVPHVNRTDYQLIDISEDGFVSLLTDSGDTKDDLRLPTDDNLLKQIKDGFAEGKDLVVSVMSAMGEEQICALKDIGPK

SEQ ID NO: 63076 - protein, 204 aa, Gossypium hirsutum
  Clone ID: GOSHI-09MAY01-C281_6.pep
FHFFHKSPIFLLLPKTLRPITHLTMVASKFCFALSLAILSIWAVDAAQHHALAPSPSSPVDCSSLILNMADCLSFVSSGSKTSKPEGTCCSGLKTVLKAGPQCLCEAFKSSASLGVTLNVTKAMTLPAACKVSAPSATQCALSLSPTGAPGMAPSAIAGAPAAFSGGANEAAPAPSPGSSGSQVVSASMGSLILGFIIMLTSMY

SEQ ID NO: 63077 - protein, 402 aa, Gossypium hirsutum
  unsure (1)..(402): unsure at all Xaa locations
  Clone ID: GOSHI-09MAY01-C281_5.pep
MARSWRASGSLVALAIVLSGCFFAISIAKEEAAKLGTVIGIDLGTTYSCVGVYKNGHVEIIANDQGNRITPSWVAFTDSERLIGEAAKNQAAVNAERTIFDVKRLIGRKFDDKEVQKDMKLVPYKIVNKXAKPYIQVKIKDGETKVFSPEEISAMVLTKMKXTHAEAFLGKKIKDAVVTVPAYFNDAQRQATKDAGVIAGLNVARIINEPTAAAIAYGLDKKGGEKNILVFDLGGGTFDVSILTIDNGVFEVLSTNGDTHLGGEDFDHRIMDYFIKLIKKKHGKDISKDNRXALGKLRREAERAKRALSSQHQVRVEIESLFDGVDFSEPLTRARFEELNNDLFRKTMGPVKKAMEDAGLEKRQIDEIVLVGGSPRNSKFNSSSGLLRGKEPNRCYPVNIAY

SEQ ID NO: 63078 - protein, 159 aa, Gossypium hirsutum
  Clone ID: GOSHI-09MAY01-C281_4.pep
MSDEEHHFESKADAGASKTYPQQAGTIRKNGYIVIKNRPCKVVEVSTSKTGKHGHAKCHFVGIDIFTAKKLEDIVPSSHNCDVPHVNRTDYQLIDISEDGFVSLLTESGDTKDDLRLPTDENLLKQIKDGFAEGKDLVVSVMSAMGEEQICALKDIGPK

SEQ ID NO: 63079 - protein, 427 aa, Gossypium hirsutum
  unsure (1)..(427): unsure at all Xaa locations
  Clone ID: GOSHI-09MAY01-C281_3.pep
LGGGTFDVSILTIDNGVFEVLPPRGRHSRPRTREDFDQRVMDYFIKLIKKKHGKDISKDNRXALGKLRREAERAKRALSSQHQVRVEIESLFDGVDFSEPLTRARFEGLNNDXLFRKTMGPVKKAMEDAGLQKRQIDEIVLVGGSTRIPKVQQLLKDYFDGKEPNKGVNPDEAVAYGAAVQGGILSGEGGDETKDILLLDVAPLTLGIETVGGVMTKLIPRNTVIPTKKSQVFTTYQDQQTTVSIQVFEGERSLTKDCRLLGKFDLTGIPPAPRGTPQIEVTFEVDANGILNVKAEDKGTGKSEKITITNDKGRLSQEEIERMVREAEEFAEEDKKVKERIDARNSLETYIYNMKNQINDKDKLADKLESDEKEKVETAVKEALEWLDDNQSAEKEDYEEKLKEVEAVCNPIITAVYQRSGGARCRW

SEQ ID NO: 63080 - protein, 225 aa, Gossypium hirsutum
  unsure (1)..(225): unsure at all Xaa locations
  Clone ID: GOSHI-09MAY01-C281_2.pep
KLFADTEPQEPNKTKNGKQVDRSSCGSNTPSSSDVDFHVSENNMEDTEQKEDSKAADANHPQVECSNRRGRSSTNLSDSWKVVSEGGRLAFQALFSREVLPQSFSXPPHDRKNKEKQKGSVGADEQNPDQNNGETSILHFSSEACQSCSDHQGVEKKVLSKAKNIVDESLLTIGLGHEKLKARQTGFKPYKRCSVEAKESRVMNTGSQGEEKDPKRIRLEGEALT

SEQ ID NO: 63081 - protein, 198 aa, Gossypium hirsutum
  unsure (1)..(198): unsure at all Xaa locations
  Clone ID: GOSHI-09MAY01-C281_1.pep
QRPLHTPSSSEVETDALEKXEKDKEDSKGADPNHPQVECNRRSSRSNSNLSDSWKEVSEEGRLAFQALFSREVLPQSFSPPHDGKSKGQQKENIGEDKQNPAEEDEEISTLDLNSNTWGSCSDHQETVKNALSRDKNSTEEGLLTIGLGHSKLKAGRTGFKPYKRCSVEAKENRVMNTGSQGEEKCPKRVRLEGEPST

SEQ ID NO: 63082 - protein, 178 aa, Gossypium hirsutum
  unsure (1)..(178): unsure at all Xaa locations
  Clone ID: AI726397.1.pep
MSDEEHHFESKADAGASKTYPQQAGTIRKNGYIVIKNRPCKVVEVSTSKTGKHGHAKCHFVGIDIFTAKKLEDIVPSSHNCDVPHVNRTDYQLIDISEDGFVSLLTESGDTKDDLRLPTDENLLKQIKDGFAEGKDXVVSVMSAMGEEQICALKDIGPKFQIHLLQILNGTIKDFGST

SEQ ID NO: 63083 - protein, 84 aa, Gossypium hirsutum
  Clone ID: AI055724.1.pep
EGLAGRFLDPQPEYSAFREASYGHSTLEIQNRTHAFYHWNRNDDGKKVATDSFVLHNQYWSSNLRRRKLKKHHLSSVLKSIASY

SEQ ID NO: 63084 - protein, 161 aa, Gossypium hirsutum
  Clone ID: uC-gsflmaxxa076g03b1.pep
MPPLFPLPTMVASNFSLALTLAAIISVWVAADAAHHHHTASAPSPSSSSSSVDCSSLILNMADCLSFVSSGSEVLKPEGTCCSGLKTVLKTDAECLCEAYKSSASLGATLNVTKAMTLPALCKVSAPSTTNCAISLTPAGAPGMQPSTSASAPTASARRSK

SEQ ID NO: 63085 - protein, 107 aa, Gossypium hirsutum
  Clone ID: LIB3147-027-Q1-K1-E8.pep
MSDEEHHFESKADAGASKTYPQQAGTIRKNGYIVIKNRPCKVVEVSTSKTGKQQSSGWNPKTKQKQATQGSKIKGIISQIPTKIKYFWQGENKQTIGEDWHGKVYCR

SEQ ID NO: 63086 - protein, 107 aa, Gossypium hirsutum
  unsure (1)..(107): unsure at all Xaa locations
  Clone ID: AI728850.1.pep
MSDDDHHFESKADAGASXTHPQHAGSIPITGYFLFTCVLCIVVELSXSNKGNHGHANCLFLGIYIFIGKNLEHIVPSSHNCDVPYVNRTGLQLIDXSYDGFVILLDD

SEQ ID NO: 63087 - protein, 138 aa, Gossypium hirsutum
  unsure (1)..(138): unsure at all Xaa locations
  Clone ID: uC-gsflmaxxa043h08b1.pep
MVASNFSLALTLAAIISVWVAADARHHHHTAWATSPSSSSSSRDCSLLILNMADCLSLRIXAGSEVXNPERNLFXLALKPVLEXDAECLCEAYKSSASLGVTLNVTKAMTLPALCKVSAPFTTNCAISLTPAGAPGLF

SEQ ID NO: 63088 - protein, 83 aa, Gossypium hirsutum
  unsure (1)..(83): unsure at all Xaa locations
  Clone ID: LIB3135-018-Q1-K1-B3.pep
KVCVCFSSDTGEHGRAXCHFVGSDILTGSKAXDIVPSSHNCDVPHVNRTDYQLIDISEDGFVSLLTESGDAEDDLRLPTDENL

SEQ ID NO: 63089 - protein, 70 aa, Gossypium hirsutum
  Clone ID: LIB3148-011-Q1-K1-D2.pep
CDLFETYQGFFNFLGFVYCFYYLNLFFDLHPFLLLSLRFLYFQIRLYFFVFFLIFVYISCFYSYIKFYPF

SEQ ID NO: 63090 - protein, 101 aa, Gossypium hirsutum
  Clone ID: LIB3828-027-Q6-K6-G11.pep
YPLKRIHSPKNNIRTKGDIILPFLTSTMEKNSCISSSHLPMLSSFSPLFVCLFQQSKCHYQFFKVHHENHHLLQLIHHWGSTRSLPTRPPTRPPTRPPTRP

SEQ ID NO: 63091 - protein, 83 aa, Gossypium hirsutum
  Clone ID: LIB3135-041-Q1-K1-B1.pep
MVASNFSLALTLAAIISVWVAADAAHHHHTASAPSPSSSSSSVDCSSLILKQIKDGFGEGKDLVVSVMSAMGEEQICALKDIG

SEQ ID NO: 63092 - protein, 132 aa, Gossypium hirsutum
  Clone ID: GOSHI-09MAY01-C251_1.pep
ILTATFQRDSRTSIIAVLARDSRGEIRGAETYLIEDVADAFDAFIAEARACEKSLLFTRMMGFWCLVVEGDSLTVIKKLFILRSINDAAHTMAAEGQRSQRSGFGVDGVPASVMRFVERDWRSWMQTNQRLS

SEQ ID NO: 63093 - protein, 82 aa, Gossypium hirsutum
  Clone ID: uC-gsflmaxxa097g05b1.pep
EVNLCKENFGGSDGFLIKGDCRPPVLGFITINFDATFQTDSRTSTIAVLARDFIGDIIGAHTYLIQDVAHAFIAEARACVRL

SEQ ID NO: 63094 - protein, 125 aa, Gossypium hirsutum
  Clone ID: GOSHI-09MAY01-C241_4.pep
AFSHIEFVFETKVSTCLDWLSLEFEDVAVMNSATVKDLKLAIEKKVIELEQSKMGHRHISWRHVWANFCLAHHNEKLFNDGAALQDFGVRNNSQVHFLPYVVSKGSGRHSKRRKHRFFLGLSKLS

SEQ ID NO: 63095 - protein, 157 aa, Gossypium hirsutum
  Clone ID: GOSHI-09MAY01-C241_2.pep
MESGAKEEGKVLGYNSKKVKKVAILSTLAALLDDPILADVPKKPSLSDVDTLINLELGSAMCISIFKLDGTSFDVAVMNSATVKDLKLAIKKKVIELEQSKMGHRHISWRHVWANFCLSHHIGKLLDDDASLHDFGVRNNYQVHFLPYGGSKGSGRH

SEQ ID NO: 63096 - protein, 48 aa, Gossypium hirsutum
  Clone ID: AW187143.1.pep
IFLMFLIMHKTSGILLLHCLEKVKSFLFTFSHSVLLHCPFIQYLAAFS

SEQ ID NO: 63097 - protein, 99 aa, Gossypium hirsutum
  Clone ID: LIB3583-052-P1-K6-A11.pep
CIREKKKLQSNYVYYKVLFLKINFYFCGYRRYVWANFCLAHHNEKLLDDGAALQGFGVRNNSLVLYLAPSLFWKWCFFFFRSFFSHFLLMIPPWSLNIH

SEQ ID NO: 63098 - protein, 95 aa, Gossypium hirsutum
  unsure (1)..(95): unsure at all Xaa locations
  Clone ID: LIB3543-010-Q1-K6-E6.pep
XSATVKELKLAIKKKXIELEQSKMGHRHISWRHVWANFCLAHHNGKLLDDDAALHDFGVRNNSQVHFLPYVVSKGSGRHFKRRKHRFFHGLNKLS

SEQ ID NO: 63099 - protein, 55 aa, Gossypium hirsutum
  Clone ID: LIB3583-048-P1-K1-E12.pep
RGKGVGDGAALQDFGVRNNSQVLYLASSLFWKSFFFFFVMIILCLFPAYDLTLEP

SEQ ID NO: 63100 - protein, 113 aa, Gossypium hirsutum
  Clone ID: GOSHI-09MAY01-C211_8.pep
MSDLDVQIPTAFDPFADANAEDSGAGAKDYVHIRVQQRNGRKSLTTVQGLKKEFSYNKILKDLKKEFCCNGTVVQDPELGQVIQLQGDQRKNVSTFLVQAGIVKKENIKIHGF

SEQ ID NO: 63101 - protein, 113 aa, Gossypium hirsutum
  Clone ID: GOSHI-09MAY01-C211_7.pep
MSDLDVQVPTAFDPFADANAEDSGAGAKEYVHIRVQQRNGRKSLTTVQGLKKEFSYNKILKDLKKEFCCNGTVVQVPELGPVIRLRGHQRKNGSPFLGQAGFGKKDSLPSLGF

SEQ ID NO: 63102 - protein, 113 aa, Gossypium hirsutum
  Clone ID: GOSHI-09MAY01-C211_6.pep
MSDLDVQIPTAFDPFADANAEDSGAGAKEYVHIRIQQRNGRKSLTTVQGLKKEFSYNKILKDLKKEFCCNGTVVQDPELGQVIQLQGDQRKNVSTFLVQAGIVKKENIKIHGF

SEQ ID NO: 63103 - protein, 160 aa, Gossypium hirsutum
  Clone ID: GOSHI-09MAY01-C211_5.pep
MSDLDVQIPTAFDPFADANAEDSGAGAKEYVHIRIQQRNGRKSLTTVQGLKKEFSYNKILKDLKKEFCCNGTVVGTGPKPTPGQTVTVHCTGYGKNGDLSEKFWSTKDPGQQPFSFQIGKGSVIKRWDEGVMGMQVAKVARLRCSPNYCYGAGGFPAWGI

SEQ ID NO: 63104 - protein, 105 aa, Gossypium hirsutum
  Clone ID: GOSHI-09MAY01-C211_4.pep
MSDLDVQIPTAFDPFADANAEDSGAGAKEYVHIRIQQRNGRKSLTTVQGLKKEFSYNKILKDLKKEFCCNGTVVQDPELGQVIQLQGDQRKNVSTFLVQVIVSAF

SEQ ID NO: 63105 - protein, 112 aa, Gossypium hirsutum
  Clone ID: GOSHI-09MAY01-C211_2.pep
MGVEKQVIRPGTGPKPTPGQTVTVHCTGYGKNGDLSEKFWSTKDPGQQPFSFQIGKGSVIKGWDEGVMGMQVAEVARLRCSPDYAYGAGGFPAWGIQPNSVLEFEIEVLSLK

SEQ ID NO: 63106 - protein, 113 aa, Gossypium hirsutum; identical to SEQ ID NO: 63102
  Clone ID: GOSHI-09MAY01-C211_1.pep

SEQ ID NO: 63107 - protein, 111 aa, Gossypium hirsutum
  Clone ID: uC-gsronu33B130b06b1.pep
ISSRPIFYHFTSQSNQYQACDCRDTARLIPSLILISHVSPPILIAKISTKPQNIPPHIEVYHKQHSQTKLPTYHNHPLNSKHMLHNMHTLSSNQRNICPNQIVFPASTWWQ

SEQ ID NO: 63108 - protein, 118 aa, Gossypium hirsutum
  Clone ID: uC-gsronu33B106a08b2.pep
RSNSYCLWYDLILTSKYLPLFLLITCVFVVLDPFADAYAEDSGAGAKEYVHIRIQQRNGRKSLTTVQGLKKEFSYNKILKDLKKEFCCNGTVVQDPELGQVCPVTPYLTCICYWNPIV

SEQ ID NO: 63109 - protein, 48 aa, Gossypium hirsutum
  Clone ID: LIB3048-035-Q1-L1-D12.pep
MSDLDVQIPTAFDPFADANAEDSGAGAKEYVHIRIQQRNGRKSLTTVQ

SEQ ID NO: 63110 - protein, 71 aa, Gossypium hirsutum
  Clone ID: LIB3166-057-P1-K1-C6.pep
LVFLRFYVNEFLFLMIICYIKSNSMSLLLNMFGLFSGLFDKQSFMSDLDVQVPTAFDPFADANAEDSGAGA

SEQ ID NO: 63111 - protein, 144 aa, Gossypium hirsutum
  Clone ID: GOSHI-09MAY01-C221_2.pep
MYSGIRSLSLDGCVGDYQGSLDGTNLPGDACLVLTTDPKPRLRWTAELHERFVDAVTQLGGPDKATPKTIMRTMGVKGLTLYHLKSHLQKYRLGKQSAKESTDNSKDASSIAERQDTGSSTTASSRMIAQDVNDGYQVTEALRV

SEQ ID NO: 63112 - protein, 247 aa, Gossypium hirsutum
  Clone ID: GOSHI-09MAY01-C221_1.pep
RSSFVLKCIAEATPKPIMRTMGVKGLTLYHLKSHLQKYRLGKQSAKESTDNSKDASSIAERQDTGSSTTASSRMVAQDVNDGYQVTEALRVQMEVQRKLHEQLEVQRRLQLRIEAQGKYLQSILEKACTALNDEAAASTGLEAAREELSELAIKVSNDCQGMIPLDNIKLPSLSEFTAALENKTASNMPTRIGDCSIESFLTSSRSPLSQTGVGSQAVTMKSPRLPFGIGDSFSLGWHKARNRVGNA

SEQ ID NO: 63113 - protein, 219 aa, Gossypium hirsutum
  Clone ID: GOSHI-09MAY01-C38892_1.pep
KHYQAKALSDMVIVVQSEPSSWESHLQCNGKSLLWDLRRPIKPALAAVSEHLAGWLPLQLVYSHAHGTAIEDWIWSVGCNPFSITSQGWQISKFQSDTIARSYIISTLEESIKLVNSAMHLLLWERTTEKTFKHFQSQERELVNKYNYVVSLWRRISTIAGELRYTDAMKLLYTLEDATKGFVDQVNATIALLHPIHCTKDRKVQVEFDASTIPAFLIV

SEQ ID NO: 63114 - protein, 91 aa, Gossypium hirsutum
  Clone ID: GOSHI-09MAY01-C38842_1.pep
VPCPLRSQSQLIGSGGNLVRRATQVYPNSWTAILVSLDNQGMWNVRSTLWDRQYLGQQFYLRVWNPVRSLANEYDIPSNVLLCGQAVGRHP

SEQ ID NO: 63115 - protein, 136 aa, Gossypium hirsutum
  Clone ID: LIB3148-032-Q1-K1-G4.pep
RAATLDTSVMATSLHDFIEVVFQNNENTMQAWHLDGYDFWVVGFGSGQWTPDKRKSYNLVDALTRHTTQVYPNSWTAILVSLDNQSMWNVRSTLWDRQYLGQQFYLRVWNPVRSLANEYDIPSNVLLCGQAVGRHP

SEQ ID NO: 63116 - protein, 102 aa, Gossypium hirsutum
  unsure (1)..(102): unsure at all Xaa locations
  Clone ID: LIB3147-001-Q1-K2-D9.pep
NGVSYINPDTPLKLADYFNIPGGFSTNSLSELPSGRAATLATSVMATSLHDFIEVVFQDNENTMQAWHLDGYDFWVRWFGSXQWTPDKEKSYHLVDALTRHT

SEQ ID NO: 63117 - protein, 155 aa, Gossypium hirsutum
  unsure (1)..(155): unsure at all Xaa locations
  Clone ID: GOSHI-09MAY01-C38472_1.pep
MQFFGGSEISPSPPVPTATGNNAHMMYVFNRNGVCLLYREWNRPLHTLNPQQDHKLMFGLLFSLKSLTAKMDPTNAEKGNLGIPQLPGQGCAFHXFRTNTYKLTFMETPSGIKFILVTNPRTGDLRETLKYIYNLYVEYVAKNPLYTPGTLIRCD

SEQ ID NO: 63118 - protein, 121 aa, Gossypium hirsutum
  Clone ID: LIB3145-055-Q1-K1-E6.pep
PTRPPTRPPTRSPTRPPTRSAKMDPTNAEKGNLGIPQLPGQGCSFHSFRTNTYKLSFMETPSGIKFILVTNPRTGDLRETLKYIYNLYVEYVAKNPLYTPGTLIRCELFNTALDQYVRSIA

SEQ ID NO: 63119 - protein, 62 aa, Gossypium hirsutum
  Clone ID: GOSHI-09MAY01-C38402_1.pep
HASAHASVEFYDLPRPSILEEISTGVPTRLPEGVKFEMRTLPVRWVNAISILFKGDCSLGQS

SEQ ID NO: 63120 - protein, 274 aa, Gossypium hirsutum
  unsure (1)..(274): unsure at all Xaa locations
  Clone ID: GOSHI-09MAY01-C38432_1.pep
KRDKSGEPEESVHLNDTQFTRLDELLTQTQMYSEFLLEKXEDITFSVPKPEAAQTKRGRGSKRRAANQYNNRKVKRAVAAMLTRSKEGETENAEDENLTEEEKNEKEQGELVPLLTGGKLKSYQLKGVKWLISLWQNGLNGILADLRPRGRTIQTIAFLAHLKGNGMDGPYLIIAPLSTLSNWMNEIARFTPSINAIIYHGTQKERDEIRRNHMPKVIGPSFPIVVTSYEMAMSDAKKFLRHYEWKYVVVDEGHRLKNFQCKLVKELKHLRAGA

SEQ ID NO: 63121 - protein, 68 aa, Gossypium hirsutum
  Clone ID: GOSHI-09MAY01-C38762_1.pep
FGDPLDRRGLSGLKTSVPKRRPLTTLNIEKHPMNWPPLGTKVSRMESKNQEEFRHDVWQICLQRSYLQ

SEQ ID NO: 63122 - protein, 178 aa, Gossypium hirsutum
  unsure (1)..(178): unsure at all Xaa locations
  Clone ID: GOSHI-09MAY01-C38682_1.pep
LPEVYIVSWNDHFFVLKXTREAYYIIDTLGERLYEGCNQAYILKFDRNTVIHKLPNVAQSSGDKSTGDQQVNGKEGCVAGAVVTKPEKSIKSEDSEEVVCQGKKSCKEYIKSFLAAIPIRELQADIKKGLMASTPLHHRLQIEFHYTEFSQPLRETSASPMTTSVPLSVEVPLTEIAA

SEQ ID NO: 63123 - protein, 94 aa, Gossypium hirsutum
  Clone ID: LIB3145-058-Q1-K1-B8.pep
RLTHKLTILLTRFERGLMKDAIKHSLWKLTGITLFTRLPMVANAVVVIEPVDQQVIGKEGCVQGAVLTKPEKSIKTEDSEEVVCQGNKSCKEYI

SEQ ID NO: 63124 - protein, 136 aa, Gossypium hirsutum
  Clone ID: GOSHI-09MAY01-C38652_1.pep
MGDLFIWLISFFILIALLVLIVYQLMCLADLEFDYINPYDSSSRINKVVLPEFILQGILCVFYLLTGHWVMALLCGPYLYYNVRLYTQKKHLVDVTEIFNMLPRKKKQRLFKLGYLVLLLFFSLFWMIWSTLKDMD

SEQ ID NO: 63125 - protein, 190 aa, Gossypium hirsutum
  unsure (1)..(190): unsure at all Xaa locations
  Clone ID: GOSHI-09MAY01-C38182_2.pep
MGKNQAYKAMQRARLGSSSAGPEEIEDGMXWHAARLASLKTSHTVTRVECCKKHKGGALRKGELEADTDRMMREYRAQLDAERASKLAHGRNHSSSKSSHKKDRKDRGAKKRSSKKRKRSRRRSSESSSSSSSSESSSSDDEERESRRSKSKSRREKKKKHKSRNKNSSTENEEGEGPVPLSRFFGSVKS

SEQ ID NO: 63126 - protein, 97 aa, Gossypium hirsutum
  unsure (1)..(97): unsure at all Xaa locations
  Clone ID: GOSHI-09MAY01-C38182_1.pep
MGKNQAYKAMQRARLGSSSAGPEEIEDGMVDGSFHSPEWHAARLASLKTSHTVTWEEFRKKQKEDALRKGELEXDTVRMMREYRAXLDAERQASCTW

SEQ ID NO: 63127 - protein, 372 aa, Gossypium hirsutum
  Clone ID: GOSHI-09MAY01-C38162_1.pep
MLSHFDNVDLPPGVEASIPWLKGSAPLGNLPPALGVSLSTTPCLAESKKATTSNLADSELKSVSTNTSMVLRESGSDRKEGNEENGVVQNSLSFKHFDIVDDFSDHHYSNLNSSGEQPKEWAKQIQEEWKILEKDLPETIYVRVYEARMDLLRAVIIGPTGTPYHDGLFVFDCFFPPKYPKEPPMVYYYSGGLRLNPNLYNCGKVCLSLLGTWHGHQNEMWVPGQSTMLQVLVSIQALILNARPFFNEPGYETSYVGAEGDRRSRKYNEEVFILSLKTMIYTLRRPPKHFEDFVTGHFRNRAQDILVACQAYKEGAIVGSVAVKDGVPDANKIVKGSSEEFKGTIPKMINAVAKEFVKNGSTNCEQFQSCRS

SEQ ID NO: 63128 - protein, 149 aa, Gossypium hirsutum
  Clone ID: GOSHI-09MAY01-C38012_1.pep
DAWGQSLVLALLFALLFGSIEIIFLSSSFIRISKGGWVPLILSVIFMLIMFVWHYGSRKKYLYDLHNKVPMKQILTLGPSLGIVRVPGIGLIFTALVSGVPATFTRFLTNLPTFYQVAVFVCEKTVLVPYVPQKERYLIGRIGPKSFRM

SEQ ID NO: 63129 - protein, 261 aa, Gossypium hirsutum
  Clone ID: GOSHI-09MAY01-C38382_1.pep
PTRPVRRPSDYNPSLAATLGPSQPNPNLNLAAVGLTPGSAGGLEGPDRIFVGGLPYYFTEAQIRELLESFGPLRGFDLVKDRETGNSKGYAFCVYQDLSVTDIACAALNGIKMGDKTLTVRRANQGATQPKPEQESILQHAQQQIALQRLILQPQGVPTKVVCLTQALNVDDLRDDDEYEDIVEDMRQEGGKYGALVNIVIPRPNPNGEPAPGVGKVFLEYSDVEGSKKAQAAMNGRKFGGNQVIAVYYPENKFAQGEYDG

SEQ ID NO: 63130 - protein, 113 aa, Gossypium hirsutum
  Clone ID: GOSHI-09MAY01-C38332_1.pep
QASAKESLLSQTSDSGASTVVDNAEGDCDELRTEESHHLNPSIKIVSVCNTFSKSDADRIREIFKRRRCDRAANLKRTKVRDDEVDSEAWIERELEMGIELESATSRKRGRVH

SEQ ID NO: 63131 - protein, 57 aa, Gossypium hirsutum
  Clone ID: GOSHI-09MAY01-C39992_1.pep
TTVCVLCRNTFTVQVPYEETKNRESPKKPTRRVEASRRDPKIVPKNNIKCTELGNRQ

SEQ ID NO: 63132 - protein, 296 aa, Gossypium hirsutum
  Clone ID: GOSHI-09MAY01-C39892_1.pep
DISGEQHLDIKHDIIKKRISTNGDVIESKPDGIGAPKIEKPLQRHGGRLEQNETYCGSCFGAEQSDDDCCNSCEEVRDAYRRKGWAMTNADLIDQCKREGFFERIKEQEGEGCNVHGSLEVNRVAGNFHFAPGKTFHQSNIFFDDLMSVHKDSYNISHRINRLAFGEYFPGVVNPLDGGHWTHETSNGMYQYFIKVVPTIYTDIRGRTVKSNQYSVTEHFKDLEYISPNSQPGVFFYYDFSPIKVTFKEEHSSFLHFITNICAVIGGIFTVAGIIDTFVYHGQRRMKKKMEIGKFR

SEQ ID NO: 63133 - protein, 60 aa, Gossypium hirsutum
  Clone ID: GOSHI-09MAY01-C39852_2.pep
RYSLVTVPCCVDLLQHHWCHHPNHHISCPQTDYRIQNHHHSLSYTEQPICSRESDLSRHI

SEQ ID NO: 63134 - protein, 69 aa, Gossypium hirsutum
  Clone ID: GOSHI-09MAY01-C39852_1.pep
AKSNTKDIHARTNRISIMMTPQISREVHSIRQRIRNLQLSYSGLLCVYLSNIYCFYLASYKQVESIKQF

SEQ ID NO: 63135 - protein, 129 aa, Gossypium hirsutum
  Clone ID: GOSHI-09MAY01-C39802_1.pep
EQRKIINKNSKKRTEEKKEPKSVTFKKNFVLSCIFFFKFSIQKNLLTPLFTDSISLLSSPPKSFLQLATPPILLAARGSFYCRYMRVWELLRRGVCTALEVAETCDVVAREERGQFRRWAMVASRLSAG

SEQ ID NO: 63136 - protein, 145 aa, Gossypium hirsutum
  unsure (1)..(145): unsure at all Xaa locations
  Clone ID: LIB3147-017-Q1-K1-A6.pep
AYPTSQQFPYTHVPAIKXPRAASKIGGVASCKKDLGGLDKREIESVKRGVSKFFCIENLKKKIQERTKFFLKVTDFGSFFSSVLFLLFLFYFIFLLFLKTKQKTRRGRKGGLTVVGRRTASPIRRTPVGNGKGLERQRGGSETAK

SEQ ID NO: 63137 - protein, 179 aa, Gossypium hirsutum
  Clone ID: GOSHI-09MAY01-C39822_1.pep
ATHGADNIRNDISALAQRYVVIDRDEDCGVCRRKILAIGGDYRMASGYTAVGSMAPFYVFPCGHAFHSHCLIAHVTRCTNESQAEYILDLQKQLTLLGSEVRRESNGGLTNEAITSVSPADKLRSQLDDAVASECPFCGELMIREISLPFIMPEEAQQVASWEIKPQNLGNQRSFSLPV

SEQ ID NO: 63138 - protein, 112 aa, Gossypium hirsutum
  unsure (1)..(112): unsure at all Xaa locations
  Clone ID: GOSHI-09MAY01-C39512_1.pep
GKGLSDLQIEFNKRHAATGMVAQMTLARLKEMWRIIHGVMWMPDKNRLPRIVLVCCLLHNILIDMEDEVXDDMSLSHHHDTGYRQQNWEYWGPAALFMRDKLSLYINGKLLS

SEQ ID NO: 63139 - protein, 117 aa, Gossypium hirsutum
  unsure (1)..(117): unsure at all Xaa locations
  Clone ID: GOSHI-09MAY01-C39532_1.pep
MLELEPKDENSVIELFNIMQFTHVRPAFNVYLPNSXFRKSSPGDPSFVLYISRCSPPSRVEIEALERKHGAIPFKFCHVENGRVSFFSFAKTELPVLPQGLFISVGSDDTAKGLRRF

SEQ ID NO: 63140 - protein, 128 aa, Gossypium hirsutum
  Clone ID: GOSHI-09MAY01-C39402_1.pep
MGTEILRPQDCLIEQIRVSSTACSRRRYGNGSFNPTYNYNNSNSNNSNGNVRFTRKPVQRKRVGSEQRVSKRSGSSPVTGKSDVYAGSAFAASPEPSSLPLPSFSKKKHVPIDDSATRDLRRILRLDI

SEQ ID NO: 63141 - protein, 129 aa, Gossypium hirsutum
  Clone ID: GOSHI-09MAY01-C39782_1.pep
VRNLRCHHCAGPLSKEMETSGWTVAPLVRDSFSMIGSAVGGTTSAFYGFNHVMPIVRRYVKGPMWVHFLVGAPPVIVFSSACAGVAGGAVPALAQLASSSYHAAFSSSSSLPPSSQDDKMHKSRTNSTL

SEQ ID NO: 63142 - protein, 179 aa, Gossypium hirsutum
  Clone ID: GOSHI-09MAY01-C39742_1.pep
HASAHASAHASEGSHFHPDGDLFVPNERKDIITSTACWTAMVGLLAYLSFTMGPMPLLKLYGIPYAIFVMWLDLVTYLHHHGHDEKLPWYRGKEWSYLRGGLTTLDRDYGWINNIHHDIGTHVIHHLFPQIPHYHLIEATEAAKPVLGKYYREPKKSGPLPFYLLGILIKSMRKDHYVS

SEQ ID NO: 63143 - protein, 204 aa, Gossypium hirsutum
  Clone ID: GOSHI-09MAY01-C39772_1.pep
MFGEDIFGSFRGGAGEGSTTMPRKGAPIDRPLPCSLEDLYKGTTKKMKISRDVIDGSGRPTTVEEILTIDIKPGWKKGTKITFPEKGNEQRGVIPSDLVFIIDEKPHSVFKRDGNDLIVTQKISLVEALTGYTAQLTTLDGRNLTVPINNIISPTYEEVVKGEGMPIPKDPSKKGNLRIKFNIKFPTKLTAEQKTGIKRLIGSP

SEQ ID NO: 63144 - protein, 220 aa, Gossypium hirsutum
  unsure (1)..(220): unsure at all Xaa locations
  Clone ID: GOSHI-09MAY01-C39702_1.pep
GLESSTEKPVGKAKGSSLNAKRSTFWGRSNARKTPSMESVDSSGEEELAIQRLEITKNDLQHRIAKEARGNAILQASLERRKQALHERRLALEQDVSRLQEQLQAERDLRAALEVGLSMSSGQFSSSHGMDSKTRAELEEIALAEADVARLKQKVAELHHQLNQQRQHHYGSLSDACDRYQHVQNHNSQQRFLXQDFDTTLAYCNPERNKNKGEFVRPHW

SEQ ID NO: 63145 - protein, 250 aa, Gossypium hirsutum
  Clone ID: GOSHI-09MAY01-C39692_1.pep
PTRPVGLIQDQNVNVHYNGASLLGKANIATAPRKGGIGGRKPLGDLSNSVNPTLNQTSKKENSKILSFTEKETSVSKLAHDSSKKKSVSKASEKVQVGGRKALSVISNSGKPRLKETSKKNQTSKLTILAENPSEPEDIAKEGFLHNHDECIKAQKKAISTNEFLRILRLEDFSKPASAKGIRMPNEMPMSPSRYLEAKEMSELLMEDWSPPKCKLSKKLNSAPPSPEPLDHMPWDDPELVSGFVLIGSP

SEQ ID NO: 63146 - protein, 175 aa, Gossypium hirsutum
  Clone ID: GOSHI-09MAY01-C39142_1.pep
SNPLETRLPNAPDMEIYSLYGVGLPTERAYVYKLSPHAECSIPFKIDTSADDEDTCLRDGVYSVDGDETVPVLSAGFMCAKGWRGKTRFNPSGIRTYIREYNHLPPANLLEGRGTLSGAHVDIMGNFALIEDVIRIAAGASGEELGGDQVYSKIFNWSENINLQLDEEIPVHLSS

SEQ ID NO: 63147 - protein, 87 aa, Gossypium hirsutum
  Clone ID: GOSHI-09MAY01-C39052_1.pep
SSAEFEVLTYLISGTASSLASPVIFVDRRVLQLALTAHIRKNLAFCPSAARQQGSLARLRRRRIRLRRPRTTHVLLQCINIGAPSTS

SEQ ID NO: 63148 - protein, 120 aa, Gossypium hirsutum
  unsure (1)..(120): unsure at all Xaa locations
  Clone ID: AI055174.1.pep
MSGESPSSSASDVDNLNHPTAADKVAXSKGVNSPQVVGNHVISARNRPNFVRLLNFAQDINHAMEASRKSRTTFLAASSNSKGAECGKSISSVKKALDXNFXDVXGVLHLVRVAMEAISH

SEQ ID NO: 63149 - protein, 64 aa, Gossypium hirsutum
  Clone ID: LIB3147-008-Q1-K1-F9.pep
QEAVEAHIYIENPRFMFYCTYAQYVSYSRNLSQFLNISFKDYSRKSWPSHLFLLYEIIPNDKVS

SEQ ID NO: 63150 - protein, 64 aa, Gossypium hirsutum; identical to SEQ ID NO: 63149
  Clone ID: LIB3147-008-Q1-K1-F10.pep

SEQ ID NO: 63151 - protein, 183 aa, Gossypium hirsutum
  Clone ID: GOSHI-09MAY01-C39362_1.pep
GNLTGWEDKCLDSNDSVLITSLIGGIIGHYSCCNGDTWSSEIGVLSDDQPRLITTFKSVRRGTNGGVTKTGLLAALAAGSVIGLTFFLVGFLTTRCSNEMGMKQLLVIPLSAVAGLLGSIIDSLLGATLQFSGFCSVRNKVVGKPGPTVKRISGLNFLDNNAVNLVSILLTTLLTSFACAYIF

SEQ ID NO: 63152 - protein, 123 aa, Gossypium hirsutum
  Clone ID: GOSHI-09MAY01-C39332_1.pep
NDPFLGKRVEEGNFSTVLLKDEFLENARLFIFETYCRIHQRIDMGVLFEKLNLNYEEGERWIVNLIRNSKLDAKIDSKTGTVIMEPNRPNVYEQLIDHTKALQGRTYKLVGQLLEHAQAQPAR

SEQ ID NO: 63153 - protein, 294 aa, Gossypium hirsutum
  Clone ID: GOSHI-09MAY01-C39292_1.pep
QRVGSDAASPARDANTQAIADAAGSPSGSLEVRDAALNELVMEEWAATRIQTAFRGFLARRALRALKGLVRLQALVRGHAVRKQAAMTLRCMQALVRVQARVRARRVRLALESQTAQQKLQQQLADEARVKEIEEGWCDSIGSVEEIQAKLLKRQDAAAKRERAMAYALAHQWQAGSRQQSVPAGFEPDKSSWGWNWLERWMAVRPWENRFLDINLRDGVKIREDSPAEGKNDASSQIKPAIGKPAASSLHANLSNKKTGPSHFDGSDSPPGKSACVLEAVNAPSSKPKSKPNR

SEQ ID NO: 63154 - protein, 110 aa, Gossypium hirsutum
  Clone ID: GOSHI-09MAY01-C34982_1.pep
FGLQPDEESLKDHHKSLGKQYRDMRILIDQRVFSWDETRQMLTARDDVWEAYTKEYPDVVSYRHKRKPNYNDLCLIYGNSTDRKDRRSGRNAHCNGYGQIFYCQYYLHLH

SEQ ID NO: 63155 - protein, 114 aa, Gossypium hirsutum
  unsure (1)..(114): unsure at all Xaa locations
  Clone ID: GOSHI-09MAY01-C34912_5.pep
MGFAGYKLISWFLLSFFALIPTLRAHIAEYDEYWKARELEAIENLNKVYHPNPEEVVRHYNDHSVNTMLEYHNTRRVLNGKKNGPCEITYPXDCWRQCXPTWLKNRNRLADCAP

SEQ ID NO: 63156 - protein, 192 aa, Gossypium hirsutum
  Clone ID: GOSHI-09MAY01-C34912_3.pep
IWLDHLSLYDSSDGLIDVIQGSTAITISNCHFTDHNEVLLFGASDTYAADEKMQITVALNRFGKGLVDRMPRCRLGFFHVVNNDYTHWFMYAIGGSSHPTIISQGNRYIASSIYVTKQATSRGYLSPEQWKNWNWVSQGDHFMNGAYFTTSGDPNASKLFDADKIMSFQPGRLVPRLTRYAGTLHCRIGRPC

SEQ ID NO: 63157 - protein, 193 aa, Gossypium hirsutum
  Clone ID: GOSHI-09MAY01-C34912_2.pep
MAAHSYSLFLFSLSFVVLIPTLQAHIAEYDDYWKARKLEAIENLNKAYHPNPEEMVHHYNDQFAKTMIKLNNTRRVLKGTKENGPCEITNPVDSCWRCDPNWEKNRKRLADCAPGFARGTTGGKEGEFYVVTDPSDDILNPKPGTLRHAVIQRRPLWITFKRSMIITLEQELIITSNKTIDARGANVQIAKGA

SEQ ID NO: 63158 - protein, 434 aa, Gossypium hirsutum
  Clone ID: GOSHI-09MAY01-C34912_1.pep
MGISSYSFFLFLFVAIIPTLEAHIAEYDEYWTARELEAIENLDKAYHSNPEEVVRHYNDHFFRTMLEFYITKRVLAESKKGPCEVTNHVDSCWRCDPDWEKNRKKLANCAPGFARGTTGGKDGEFYVVTDPIDNAADPKPGTLRHAVTQTGPLWITFKGSMTIKLQQELIVTSDKTIDARGANVEICNGAGITIQFVKNIIIHGLQIHHIIPAKGGKIKDGENHHGLRGDSDGDGVSIFGSTNVWLDHLALHHCADGLIDVVQGSTAVTVSNCHFTDHNDVMLFGASDSYSADEKMQVTVALNHFGKGLVERMPRCRFGFIHVVNNDYNHWFLYAIGGTSNPTIISQGNRYSAPGFGAKEVTCRGLLKPGQWKNWNWVSQGDHFENGAFFTPSGNPSASKQFGADKMMPFKPGQMVPELTKYAGPLSCTIGRPC

SEQ ID NO: 63159 - protein, 165 aa, Gossypium hirsutum
  unsure (1)..(165): unsure at all Xaa locations
  Clone ID: LIB3828-005-Q1-K6-G11.pep
ADGLIDVVQGSTAVTVSNCHFSDHNDVMLFGASDSYSADKKMQVTVALNHFGKGLVERMPRCRFGFIHVVNNDYNHWFLYAIGGTSNPTIISQXGNRYSAPGFGAKEVTCRGLLKPGQWKNWNWVSQGXXFENGAFFTPSGNPSASKQFGADKMIPQTWQMVPAH

SEQ ID NO: 63160 - protein, 142 aa, Gossypium hirsutum
  unsure (1)..(142): unsure at all Xaa locations
  Clone ID: LIB3145-007-Q1-K1-H7.pep
PRVRNIWLDHLSLHHCVDGRIDVIQGSTAVTSSNCHFTDHNDVMLFGASDSYSADEKMQVTVALNHFGKGLVERMPRCRFGFIHVVNNDYNHWFLYAIGGTSHPTXISQGNRYSTPGTFTAKEVTCRGLLKPAQWKNWNWVS

SEQ ID NO: 63161 - protein, 101 aa, Gossypium hirsutum
  Clone ID: LIB3145-038-Q1-K1-E12.pep
MGISSYSYSFFLLLFVVVIPNLEAHIAEYDEYWKARELEAIENLDKAYHPNPEEVVRHYNDHFSRTMLEFYITKRVLAESKNGPCEVTNPVDSCWRCDPNW

SEQ ID NO: 63162 - protein, 101 aa, Gossypium hirsutum
  Clone ID: uC-gsflmaxxa029f01b1.pep
MGIAGYSYSWFLLSIFALIPTLRAHIAEYDEYWKARELEAIENLNKAYHPNPEEVVRNYNDPFFRTMLEYNSTRRALKGKKKGSLGDYPTPLIVGGHGEPN

SEQ ID NO: 63163 - protein, 87 aa, Gossypium hirsutum
  Clone ID: LIB3145-008-Q1-K1-A1.pep
MGISSYSYSFFILFYVVVIPTLEAHITEYDEYWKARELEAVENLDKAYHPNPEEVVRHYSDHFSRTMLEFYITKRVLAESKNGPCEV

SEQ ID NO: 63164 - protein, 137 aa, Gossypium hirsutum
  unsure (1)..(137): unsure at all Xaa locations
  Clone ID: GOSHI-09MAY01-C34902_1.pep
MKASHWLNSFIVLLVLILTMDFRHGIYYARADAGGTGFVQTTATKFVINGRPFYLNGWXSAYWMMMFASDNPTRSKVTDAFREASKYGMNIPXTWPFNDGDYKPLQNSPGSYNENFFKALDFVVXEANKYGIHLILS

SEQ ID NO: 63165 - protein, 144 aa, Gossypium hirsutum
  Clone ID: GOSHI-09MAY01-C34922_1.pep
GHNFCSERGCPEETMELRNDFYGQDAAIAVRKDLANPDESNIFTNTEMSLFWRVEDEVENSDVKAGESNDVPLDKAISECNASDFKEGNHVEDANFSVVKDGPEDNEATLEFRKDILVEGAAVADKSPLPKTSEIRRAVDGEEA

SEQ ID NO: 63166 - protein, 116 aa, Gossypium hirsutum
  Clone ID: GOSHI-09MAY01-C34842_2.pep
QAGVTLEISRLDAWFSSKDGSLEGPATYIVQGLCRRCCIPEVILRCMQVSVSLMESGNPFESHDQLIELVSSSETGFINLFSQQQLQEFLLFEREYSICKMELHEEAFLLILASWG

SEQ ID NO: 63167 - protein, 95 aa, Gossypium hirsutum
  Clone ID: GOSHI-09MAY01-C34842_1.pep
MEKKGFVRLMLLFLGFSYLLLSCAAVPTTRSLKSNKELPSSVQDLLAQDVMELSDGEEVITEGDRFNGERMLMESTDYPGTGANKNHDPKTPGRA

SEQ ID NO: 63168 - protein, 65 aa, Gossypium hirsutum
  Clone ID: LIB3148-017-Q1-K1-G5.pep
IIKMEKKGFVRLMLLFLGFSYLLLSCAAVPSTRSLKSNKELPSSVQDLLAQDVMELSYGELNVVN

SEQ ID NO: 63169 - protein, 71 aa, Gossypium hirsutum
  Clone ID: GOSHI-09MAY01-C34822_1.pep
CCSSSRKVYLLKPISSVAVNSPVMQPTRYLIVIWLVKMEPPMMMMMMRLKVVAQMKHRHFVLEKDGRLDFW

SEQ ID NO: 63170 - protein, 208 aa, Gossypium hirsutum
  Clone ID: GOSHI-09MAY01-C34762_1.pep
NFKFPFSRSRVLFLFAKMADSPRKRNSQSPSPWREQSRSRSRSRPRSRSRSRSRSWSRPRHRSRSHSRGRSRSRSRGRVDAGNPGNTLYVTGLSQRVTERDLEEHFSKEGKVASCFLVVEPRTRISRGFAFVTMDSVEDASRCVTYLIPSILEGRYITVERSRMKRPRTPTPGHYLGLKNTTNYGRGERGRLRGGGRDYYGYHPSPRA

SEQ ID NO: 63171 - protein, 156 aa, Gossypium hirsutum
  Clone ID: uC-gsflnu33B136h11b1.pep
MYSQSPSPWREQSRSRSRSRPRSRSRSRSRSWSRPRHRSRSHSRGRSRSRSRGRVDAGNPGNTLYVTGLSQRVTERDLEEHFSKEGKVASCFLVVEPRTRISRGFAFVTMDSVEDASRCIKYLNQSILEGRFITVERVIRFYPCCLDFIDLGVYHP

SEQ ID NO: 63172 - protein, 86 aa, Gossypium hirsutum
  Clone ID: GOSHI-09MAY01-C34702_1.pep
TLEIQNRKSPCSVFFLLSIASVCLQKTLQSQNERLYSRVFQKRIKINYNFFFFSLVSCCCWWFLVLRKYRVRWNLTEAVLALGVRR

SEQ ID NO: 63173 - protein, 209 aa, Gossypium hirsutum
  unsure (1)..(209): unsure at all Xaa locations
  Clone ID: AI727952.1.pep
TFVADRRVGFKKPISMIFKNSHHGYCLHRLIEGLKGDFNGSCSEEVLQVIITHFYDAARATTLDGFRQSIENIRNISPEACEWILQSGPEHWSNALFQGSRYGYFSSNVAETFYSWVTELPITSIAKLIETICCKMMKLMNTQKSDSCLWLTKLTPAVEFKLEQHILKANMLQVPVSLGSTFEVCDSLGAINVLNIDLWDCXCXEWQLK

SEQ ID NO: 63174 - protein, 60 aa, Gossypium hirsutum
  unsure (1)..(60): unsure at all Xaa locations
  Clone ID: LIB3145-005-Q1-K1-D11.pep
GGAGTFYXXXTELPITSIAXLIETICCKMMELMITQKSDSCLGLTKLTPAVGFKLEQHIL

SEQ ID NO: 63175 - protein, 135 aa, Gossypium hirsutum
  Clone ID: GOSHI-09MAY01-C34602_1.pep
MLLCVGAFGLTFAASNVWIPSLIRLTCCGVGGVLLLSGLIVLTCIDQDDARHNFGHTGGFICPFVPLLPIVCILINVYLLINLGAATWARVSVWLLIGVVVYVFYGRSHSSLLDAVYVPAAHADEIYRSSGDSLA

SEQ ID NO: 63176 - protein, 54 aa, Gossypium hirsutum
  unsure (1)..(54): unsure at all Xaa locations
  Clone ID: uC-gsronu33B098f07b1.pep
QCHNFGHTGGFICPFVPLLPIVCILINVYLLINLGAATWARVSVWLLIGVVXSE

SEQ ID NO: 63177 - protein, 73 aa, Gossypium hirsutum
  Clone ID: uC-gsflnu33B056g11b1.pep
CKEGLFVSKDDSSHPLSSLKTASYPPYAPFSRELEYISSVSPVSGLPVRKCSQKVSLIAGSLGRRVDGMNHLC

SEQ ID NO: 63178 - protein, 40 aa, Gossypium hirsutum
  Clone ID: LIB3135-014-Q1-K1-D2.pep
INRSHIEQEHSGTKFYLIKARKTNKYLRIQLVRHHPFLLM

SEQ ID NO: 63179 - protein, 141 aa, Gossypium hirsutum
  Clone ID: GOSHI-09MAY01-C34102_1.pep
YAIDELVDPRLEDRYSEHEVYCMLHAASLCVRRDPHSRPRMSQVLRILEGDVLMNTNYTSPGYDVGNRSGRFWAEQQRSYSGPLTSDSLDEFSGKLSLDGARPRNKEDFMRRSFVEGSFTRFTCAHGALYSVLYCFPSLPG

SEQ ID NO: 63180 - protein, 74 aa, Gossypium hirsutum
  Clone ID: GOSHI-09MAY01-C34042_2.pep
KKPYNLQLQTCTCMSKQAFYEHQHTAIATYLLRYHSLALKVSCPICKVQLANEKQLGDHYGSKHPKENPPAVSS

SEQ ID NO: 63181 - protein, 77 aa, Gossypium hirsutum
  Clone ID: GOSHI-09MAY01-C34042_1.pep
LPKEGARKERPRGKQKIEAQRRNAEKNQKPKGSQLEARAVALKVSCPICKVQLANEKQLGDHYGSKHPKENPPAVSS

SEQ ID NO: 63182 - protein, 56 aa, Gossypium hirsutum
  Clone ID: uC-gsronu33B138b04b1.pep
AREAANLGGLGYDISKDMLRLRCVGVRKMLVYSCKCKFEVVSYMASFNPSYPIHLF

SEQ ID NO: 63183 - protein, 63 aa, Gossypium hirsutum
  unsure (1)..(63): unsure at all Xaa locations
  Clone ID: LIB3147-037-Q1-K1-B12.pep
SLWLQTSKGKPSCCVKLIAFFPCKRRKRTNYLFLCDSRYCMLTVFLKKILNXCRTYKKKKMTF

SEQ ID NO: 63184 - protein, 75 aa, Gossypium hirsutum
  Clone ID: GOSHI-09MAY01-C34372_1.pep
GTGKAMPFFLFLLYCVFIFISASLFSIRVQIKMSIKHMKKVQICSRLIGCSKLFYVFSPQSLLNKNGWLYVCYFI

SEQ ID NO: 63185 - protein, 52 aa, Gossypium hirsutum
  Clone ID: uC-gsflnu33B035h04b1.pep
ESTCMTGSLLLTLVLITYEHRPQEECPSPVAQLKGQSQAAIRVPPSMFDVPR

SEQ ID NO: 63186 - protein, 105 aa, Gossypium hirsutum
  Clone ID: GOSHI-09MAY01-C34302_1.pep
GISTRDAALSFELGMRALDLAVGRAMNVSNDNFQNEGESCPCSPYDKGVLLARGHLVINLLESEDTKELSQICKPLFKKSTWLRPKATRSSFREIYLICQDLKSQ

SEQ ID NO: 63187 - protein, 91 aa, Gossypium hirsutum
  Clone ID: GOSHI-09MAY01-C34332_1.pep
MASIGAAARAVLRSSSARNAAARLAPQSKAAPSQFRVSSRIPLSNCICRCPVEASFCLESMLPYHSATASALMTSMLTISRQSYVWLSEGL

SEQ ID NO: 63188 - protein, 53 aa, Gossypium hirsutum
  Clone ID: GOSHI-09MAY01-C34242_1.pep
YPPKALALLAAVAALCVQYEADFRPNMSIVVKALQPLLNPTRPATTSRAYGER

SEQ ID NO: 63189 - protein, 159 aa, Gossypium hirsutum
  Clone ID: GOSHI-09MAY01-C34222_1.pep
MATTVVKSALQAIRERGLRSFLRELKDDGFTKCFFDGNLLQTKIHNIGATVVGVDKFGNKYYEKLGDTQAGRHRWVEYAKKDRYDASQVPPEWHGWLHFITDHTGDELLMLKPKRYGVEHKENLSGKGNEFIYHSKGHALNPGQRDWTRYQSWQPTKAE

SEQ ID NO: 63190 - protein, 101 aa, Gossypium hirsutum
  Clone ID: LIB3135-018-Q1-K1-B8.pep
MSPSLIYVYYRCIPFMAFIGRHRWVEYAKKDRYDASQVPPEWHGWLHFITDHTGDELLMLKPKRYGVEHKENLSGKGNEFIYHSKGHALNPGQRDWTRYQS

SEQ ID NO: 63191 - protein, 188 aa, Gossypium hirsutum
  unsure (1)..(188): unsure at all Xaa locations
  Clone ID: GOSHI-09MAY01-C35982_1.pep
MARDMIIEVTTNGGCPDHLHHYHPHSLQQQQQMILGESSGYDPXVKAPKKRAEIWVLDETRSLIGFRKEMDGRFNTFKSNKHLWEKISSMMRKKGFDRSPTMCSDKWRNLLKEFKKAKHPDRGSGSVKMCYYKQFEEILRERTKKSYKSPTSPPKLDSFMHFSDKGLCTTFDFFFALFILHLKSLNFY

SEQ ID NO: 63192 - protein, 350 aa, Gossypium hirsutum
  Clone ID: GOSHI-09MAY01-C35952_1.pep
MTRRSYSLIALTFLTISFPCLENANGCCNVYKGKWVYDSSYPLYDSSACPFIHKEFNCLKYGRPDHLYLKYRWQPSKCNLPRFDGTHLLRRLKGKKIMFIGDSISINQWQSLLCMLHAAVPATSGIITRDLHNHTVSTVTFKHYKVSVMLFRSLYLVDVDKETIGRVLKLNSVRNGNLWKEIDVLIFNTWHWWHRRGLKQQWDYVQFDGKIRKDIDRTVAFRTALRTWAKWVDSDVDTNRTKVIFQGISPSHYNGIDWNEPGVRNCSRQTTPFKGSIYPTGLPLAEYVVKEVIRNIKKPVHLLDITMLSQLRKDAHPSTYNDFNGMDCTHWCVAGLPDTWNLLLYAALIK

SEQ ID NO: 63193 - protein, 88 aa, Gossypium hirsutum
  Clone ID: LIB3828-022-Q1-K6-A1.pep
GVLRSGTFSVFPALSRCLSAGQFSCTLCWHDRRCYVLCFYVLGPLCFFFFFFFFFFFFFFFFFFFFFFFLRTANRSKTNLLYFQYIIL

SEQ ID NO: 63194 - protein, 88 aa, Gossypium hirsutum
  Clone ID: GOSHI-09MAY01-C35842_1.pep
LKLFCLETQFKGNGKLGFYYQNSLFIFLFNFPQVISLLGFSPFLFFVFPRLLLLLIGIYIFLCFASIFNYVCRELGNKRLNSCCFNSI

SEQ ID NO: 63195 - protein, 162 aa, Gossypium hirsutum
  Clone ID: GOSHI-09MAY01-C35582_1.pep
NNRPYFREYPESLISLLYTRAASFVVDFGLSREFVKINFDGAYDSNHHQSASGIVVRNEEGVVLLSCSEIHHGVTSAFAAEAIACRKAVLVGVEQEWPKVVIEGDSLTIINKCAIKSQDRSHIRAYIYDIQQKLNRPRSFIFKHVLRSANALAHILAMETKD

SEQ ID NO: 63196 - protein, 133 aa, Gossypium hirsutum
  Clone ID: GOSHI-09MAY01-C35562_1.pep
HGLIGLEYQRGCSQIGNWCFRKSTYSRILSREMSHSLQGSRDNRISWSRTWYSCRNSPPVLRPTHLGDSLGLMPPSPIFLCRYSTTAIVPLPETWCWIPDHDPYFSMLLRSLMVKELDSPRKGKKNVKELEYG

SEQ ID NO: 63197 - protein, 241 aa, Gossypium hirsutum
  Clone ID: GOSHI-09MAY01-C35502_1.pep
MDLWMDDPLTGKRFSSTDDDEEVLQQWDPGSLMYSGWAENPSGISNEIFLSQANGSTVQASQSPNTSNAPVLRKCHSTLSQAERAQRKRMTDQAYRGRVKLHKEQMKSNLETLTGENESLKKENQSLKAANASMNQTLTDQAKEIDQLRSDLLQLKNDHEKQNILLETLSGLLSDPLKLENEKLKEENAMLRKYANLNSRIPQILEENAKLKIENKVLKVQNDALCGKIIADNDRKVEQEP

SEQ ID NO: 63198 - protein, 140 aa, Gossypium hirsutum
  unsure (1)..(140): unsure at all Xaa locations
  Clone ID: GOSHI-09MAY01-C35482_1.pep
WRFTIRFPVFWPTACLPPWRLSGXVADNYKILQSKYEGSWRKMWLLRPRVRTDGLYLSPNTYIRAALAQWNITNPAHIVCYSRYSRFFPSGRFLYNNSSHKNKGCSXFMNFRASKADCVFGGHYTLSDNKVEAAVLYPGM

SEQ ID NO: 63199 - protein, 134 aa, Gossypium hirsutum
  Clone ID: GOSHI-09MAY01-C35442_1.pep
FSSSMGKLQYIPSEQRKEALRDVDTGEKIAELIPEFLKNFKEGSLESKGWPTFLSAYTISKVAMNAYTRILAKKHPNFCINCVCPGFVKPDINTNAGHSTPEEGAAIPVKLALWPNGGAPSGLFFVQGEPVPFE

SEQ ID NO: 63200 - protein, 135 aa, Gossypium hirsutum
  unsure (1)..(135): unsure at all Xaa locations
  Clone ID: LIB3828-032-Q6-K6-D8.pep
NIFSSMGKLGYRPKKQRKEALRDADTGEKIDELITEFLKNFKEGSLESKGWPTFLFAYTMGEVAMNAYTRILAXKHPNFCINCVCPGFVKTDINNNAGHSTPEEGAAIPVKLALWPNGGAPSGLFFVQGEPVPFE

SEQ ID NO: 63201 - protein, 70 aa, Gossypium hirsutum
  Clone ID: LIB3145-014-Q1-K1-F7.pep
NAYTRILAKKHPNFCINCVCPGFVKTDINNNAGHSTPEEGAAIPVKLALWPNGGAPSGLFFVHGEPVPFE

SEQ ID NO: 63202 - protein, 39 aa, Gossypium hirsutum
  unsure (1)..(39): unsure at all Xaa locations
  Clone ID: LIB3145-024-Q1-K1-H3.pep
VTDHFDGILKHHFFLVSFKWYRISTIVGKDAWAYAWVGX

SEQ ID NO: 63203 - protein, 110 aa, Gossypium hirsutum
  Clone ID: GOSHI-09MAY01-C35472_1.pep
CLQLIQRWWRRQGDLSFRLDAIEVKTVEVSAPNAPPALASFTFVLALPTLHGHYHNLIYFSAINHSDPLSLQQAFRSYNNNNSWALFLFFWYYYYFFKFSFYPTYFLFSV

SEQ ID NO: 63204 - protein, 106 aa, Gossypium hirsutum
  Clone ID: LIB3145-015-Q1-K1-A6.pep
LICLFNMIKVDVWLQIQRWWRRQGDLSFRLDAIEVKTVEVSAPNAPPALASFTFVLALPTLHGHYHNLIYFSAINHSDPLSLQQAFRSYNNNNSWALVLVFFFFFF

SEQ ID NO: 63205 - protein, 66 aa, Gossypium hirsutum
  Clone ID: GOSHI-09MAY01-C35402_1.pep
EAANYVADGHRSIFRSKSYLPGLRDLTSQRWAADMGQRPSFLDILKRLEKIKENVPSDHPWNIFST

SEQ ID NO: 63206 - protein, 297 aa, Gossypium hirsutum
  Clone ID: GOSHI-09MAY01-C35432_1.pep
PVRPSFRSYLVLSGLLGALSWSLMATFVDSKYGAACCILLGSFSVAFSDVVVDSMVVERARGESQSVSGSLQSLCWGSSAFGGIGSSYFSGSLVDAYGVRCGGGVTALLPLITSAVAVLVKEQRVIGQARGPNVPLGNSSFLKSSKENIIQLWTAVRQPNVFLPTVFIFLWQATPQSDSAMFFFTTNKLGFTPEFLGRVKLVTSVASLAGVGLYNGFLKNVPLRKIFLATTVTGTVLGMTQVFLVTGLNRQFGISDEWVAIGDFLIITVLSQASFMPVLELAAKLCPERMEATLFAT

SEQ ID NO: 63207 - protein, 362 aa, Gossypium hirsutum
  unsure (1)..(362): unsure at all Xaa locations
  Clone ID: GOSHI-09MAY01-C35422_2.pep
LVLDAVSKADLTAENLRNVSEDLSAAKKISVDSAILPSDVQKGIDDIDRKINSSASTLSHQTADNKEKIQHGLDRMRLALIILAAVMLFLAFLGFLFSILGLQCLVYTLVILGWILVTGTFILCGVFHLLHNVAGDACVPTRRWVQNPTAHTALDDILPCVDNATAQETLSRSKNVTHQLVNVVNGVINNVFNRNFPPALAPLYFNQSGPLVPVLCNPFHSNLTNRDCAFGEVTLHNATEVWKKYICXVSGSGVCSTPGRLTLQFYTQMSAAVNVSYGLYRYGPFLVNLQDCTFVRDAFTDISHDYCPDLRHYSQWIYIGLVIVSAAVMLSLIFWVIYARERRHRVYTKQYDGRSEGQYKGR

SEQ ID NO: 63208 - protein, 281 aa, Gossypium hirsutum
  Clone ID: GOSHI-09MAY01-C35422_1.pep
LLVRSILGLQFLVYILVIFPRVRPRVRFILCGVFNLLHNVAGDACVAMDQWVQNPTAHTALDDILPCVDNATAQETLLQTKNVTHQLVTVVNGIINTVANRNFPPQLAPLYYNQSGPLVPVLCNPFHSNLSERMCASGEVSLYNSSEVWKKYTCNISTPSGICTTPGRLTPQFYSQMSAAVNISYGLYRYGPFLVNLQDCTFVRDTFTDISHDHCPGLRRYSQWIYIGLVIVSAAVMLSLMFWVIYARERRHRVYTKQHDARVEGVNKSLERYKPHLFISE

SEQ ID NO: 63209 - protein, 208 aa, Gossypium hirsutum
  Clone ID: GOSHI-09MAY01-C35762_1.pep
MASSKLRSSFSFLNLLLSSLNFILFILSAASLAPIILLKMPPTSLGVAFLMVSSISLLSSFLGFYSQLTHFCFITHVSLLIASLIGQVLSVLSLFTREKASLSMLKSPRDIKEGKVLVRLECGILMAVLVMQLMVLAVSCTVHHCWVKEYEGLEAEREATAKKRSRRLARVQEEFMANAARIAEIKANELYEKTKSKYRQWVKTDFYG

SEQ ID NO: 63210 - protein, 108 aa, Gossypium hirsutum
  Clone ID: GOSHI-09MAY01-C35652_1.pep
EGELSGKYSVCSAYKLLQDANLGSETKEFYRKLWSLKLSPKIAITIWRISWDFIPNLANLRYRRVATNDRCPRCCSWTENSLHIFRDCPGYSREELMIKADFFVTPYG

SEQ ID NO: 63211 - protein, 102 aa, Gossypium hirsutum
  Clone ID: LIB3146-021-Q1-K1-D10.pep
KYSVCSAYKLLQDANLGSETKEFYRKLWSLKLSPKIAITIWRISWDFIPNLANLRYRRVATNDRCPRCCSWTENSLHIFRDCPGYSREELMIKADFFVTPYG

SEQ ID NO: 63212 - protein, 62 aa, Gossypium hirsutum
  Clone ID: GOSHI-09MAY01-C35152_1.pep
IADNFLDAGKHFLQRYLFVESSVFVNYSRTFIIVAQSGDYMYGKTVNLRKIKWKSNETFIHG

SEQ ID NO: 63213 - protein, 217 aa, Gossypium hirsutum
  unsure (1)..(217): unsure at all Xaa locations
  Clone ID: GOSHI-09MAY01-C35142_1.pep
QLGGKEANAREPTKETDLSTAPKAHPISSDPRRISIDIEQAQSLMRKLDSEKGINENILSGPDNQITRDKSHGNSTGPVIIVRGLTSVKGLEGVELLDTLITYLWRVHGLDYYGLIETGEANGRWACXEEGKGSDVTINGSEGEKNLDTHWQERLKGQDPLELMTAKEKLDAAAVEALDPFVRKIRDEKYGWKYGCGAKGCTKLFHAAEFVHKHLKL

SEQ ID NO: 63214 - protein, 140 aa, Gossypium hirsutum
  unsure (1)..(140): unsure at all Xaa locations
  Clone ID: GOSHI-09MAY01-C35162_1.pep
LFHFLLTGVFLATCCWFLTNAYLREEAPNSHVVEQRVEWLYAFDVHCNSFFPMFVMLYVIHYFVSPLLVAHGFIPELLSNLLFMVAASXFHYLTFLGYDVPPFLERTTFFLYPIGGIIGLSPILILSGFNPSRYFMNMYF

SEQ ID NO: 63215 - protein, 55 aa, Gossypium hirsutum
  Clone ID: GOSHI-09MAY01-C35112_1.pep
KKEPEKQLKGGAILYRSLKTKALVKIRIVGKPSKSRTSRESKPVADWTAGEGGVR

SEQ ID NO: 63216 - protein, 128 aa, Gossypium hirsutum
  Clone ID: LIB3146-043-Q1-K1-E8.pep
MSFMGRGRGRGRGFGGRGFGGYVPPEPFVLFPDIELPDVKTWPEKKILIVWNSRVLNYWKGFPYYLEEHVSKKSPRMDIERFSDWGKPKNTSKRDSLNQVLQLQSHNFPKELIGDSKRAQRSAKRMRW

SEQ ID NO: 63217 - protein, 83 aa, Gossypium hirsutum
  Clone ID: LIB3145-010-Q1-K1-G5.pep
EEKTLVVWNSRLLNYWKASPYYLEEHVSKKSQSMDIERFSDWGKPKNTSKRDSLNQVLQLQSHNFPKELIGGLQLKPLMEIFT

SEQ ID NO: 63218 - protein, 131 aa, Gossypium hirsutum
  Clone ID: GOSHI-09MAY01-C35042_1.pep
GSVISQPFNLSVLHISTPIVAPGFGDAILALPPPPGSSKPPAAAPKKSPSSPGPSEEEEDEDEAESPSPSESPAESPGKAKAKSRSKSPPEPDSDDDDDAEEPTPSASSRVVWLRVGVAAVIGLIASLVAL

SEQ ID NO: 63219 - protein, 61 aa, Gossypium hirsutum
  Clone ID: LIB3825-032-Q6-K6-E1.pep
WNIGNSPKNVTNKAIYSCKHLFHQKPCTLVSNIIYLSMPFPNYQLEKWHLLKFNKICYHLK

SEQ ID NO: 63220 - protein, 57 aa, Gossypium hirsutum
  Clone ID: LIB3145-013-Q1-K1-H6.pep
RPRVRPRVRWDIMGEEASRTGNKIFQLFTHVSFLLELVHTHISPYAKDTLIGLILNH

SEQ ID NO: 63221 - protein, 95 aa, Gossypium hirsutum
  Clone ID: GOSHI-09MAY01-C35352_3.pep
MVLESKLGQEESKVKLSNISFKNIHGTSARPEAVKIICSATLPCENVELADIERSHSGPTGPAVSRGSNVKPKVSGKQNPAACSAPIPAKPTPTA

SEQ ID NO: 63222 - protein, 283 aa, Gossypium hirsutum
  unsure (1)..(283): unsure at all Xaa locations
  Clone ID: GOSHI-09MAY01-C35352_2.pep
IQFNFVSSMLILVLLSISSVEGQGGGGGGVIDVVAKFGAKADEKTDLSKPLLDAWKEACAWTSPSKIVIPKGIYFLSTDTLDGPCKAPIELQVQGTVKVPADSGAFKKPKWISFNRIENFKLSGGGVFDGQGPTAYKMEGCKGHDYCGSLPIXGIHLGRSDGVNVLNSEIKTGDDCVSIGDGSKNLVINGVTCGPRHGISIGSLGLFKNEEPVDGVTVKNCTMTNTSNGVRIKTWPGAEPGXFSNIHFEDITVTNVSSPIIIDQKYCPWNKCKINVCTYLSKS

SEQ ID NO: 63223 - protein, 415 aa, Gossypium hirsutum
  Clone ID: GOSHI-09MAY01-C35352_1.pep
NIKLAIQFNFVSSMLILVLLSISSVEGQGGGGGGVIDVVAKFGAKADEKTDLSKPLLDAWKEACASTSPSKIVIPKGIYFLSTATLDGPCKAPIELQVQGTVKAPADPGAFKEPKWIAFNRIENFKLSGGGVFDGQGTTAYKREGCKGHDYCGSLPINLRFDFLTNAMIQDITTKDSKQFQANVLGCKNITFEHFTVSAPDESPNTDGIHIGRSDGVNVLNSEIKTGDDCVSIGDGSKNLVINGVTCGPGHGISIGSLGLFKNEEPVDGVTVKNCTMTNTSNGVRIKTWPGAEPGTCSNIHFEDITVTNVSSPIIIDQKYCPWNKCKINEESKVKLSNISFKNIHGTSARPEAVKIICSATLPCENVELADIEITHSGPTGPAVSQCSNVKPKVSGKQNPAACSAPIPAKPTPTA

SEQ ID NO: 63224 - protein, 76 aa, Gossypium hirsutum
  unsure (1)..(76): unsure at all Xaa locations
  Clone ID: GOSHI-09MAY01-C35332_1.pep
NSLKRSWRLLEYLDSLLAKTLKAKYYPSTDFMXAELGNYPSYTWRSIXATRKVLHDGMTCKVGNSESISIWHDARS

SEQ ID NO: 63225 - protein, 50 aa, Gossypium hirsutum
  Clone ID: GOSHI-09MAY01-C35272_1.pep
IIYSFKGGGRNYSFRTRHRCIRVQSFLKGVEIWDIFLFIKAKKKKGIYMS

SEQ ID NO: 63226 - protein, 45 aa, Gossypium hirsutum
  Clone ID: LIB3145-012-Q1-K1-E2.pep
AMIQDWNDWFDNYGLIGGTDLRKHLKSLSIPFPGTGAILIYIFST

SEQ ID NO: 63227 - protein, 298 aa, Gossypium hirsutum
  Clone ID: GOSHI-09MAY01-C36932_1.pep
PSSSNPVLRLMGKNLMVVNPRVRKSVPLGQAQSFAQSDHPTPKFPTPSGISPSNMGNQAGMPFHHAMSQSSVIFDQHPKDLVGQSFDVQFTNGYRNHANLGTPPQFPAGMFFDERVDRGLTTSMEFYKYECDYNLPAQLNRLKNKPGPAATYDMEKVATLDGRLRNGDSAVSSKQVIIIDDEPESETTKFADIAKHFEGSRESPLIPAGISMPLVPNHSIRRRNPFSRYHSEGALVGDPNMVQNKNFNAIPSGRGNTVPVRWDCSSQGSGVPQRASLMAVSPSRGHLRPAVSYSPSLS

SEQ ID NO: 63228 - protein, 90 aa, Gossypium hirsutum
  Clone ID: AI054577.1.pep
EDKSVPLGQAQSFAQSDHPTPKFPTPSGISPSNMGNQAGMPFHHAMSQSSLIFDQHPKIWWGNLLMSNLQMAIETMQILEHHHNLLGIVF

SEQ ID NO: 63229 - protein, 96 aa, Gossypium hirsutum
  Clone ID: GOSHI-09MAY01-C36862_1.pep
GKAAVNLMKLTLFRQYYIVVIGYIYFTRVVVYALVTITSYKYLWTSMGAGEVATLAFYVFTGYKFKPEPHNPYFVIDDEEEEAAAEQLKLEDEFEL

SEQ ID NO: 63230 - protein, 201 aa, Gossypium hirsutum
  Clone ID: GOSHI-09MAY01-C36412_1.pep
PTTLPPFLVQISMRNNMIEGTIPPSLKYLNLLQVLDLSHNKLTGSVPYFLFNHPSLQQLTLAFNSFDSLQAPSNLGTQSELIAVDLSNNELQGWLPPFLPLMPNLSALSMENNKFSGMIPIQYALRAALPASGIAPFARLLLGGNYLFGPIPGPLLVLKPDTANVSLADNCLIRCPSRFFFCQGADQKSLMECKSFGSVIP

SEQ ID NO: 63231 - protein, 117 aa, Gossypium hirsutum
  Clone ID: GOSHI-09MAY01-C36422_1.pep
LLEEYAIDELVDPRLEDCYSEHEVYCMLHAASLCIRQDPHSRPRMSQVLRILEGDMLMDSNYSLPRYDIGNPSGRVCADQKYYSGSLENEALEEFNGKLYLDGLRSGTRRTSCADHL

SEQ ID NO: 63232 - protein, 89 aa, Gossypium hirsutum
  Clone ID: GOSHI-09MAY01-C36742_1.pep
MSGRSYTPSPPRGYGRRGRGPSPRGPYRGRARDLPTSLLVRNLRHDCRPEDLRRPFQRFGPLKDIYLPKDYYTGEPRGCAFAQYVDPAD

SEQ ID NO: 63233 - protein, 143 aa, Gossypium hirsutum
  Clone ID: GOSHI-09MAY01-C36762_1.pep
LRFRPRVRGRVGQIKAHPWFNDVVWDKLYEMEAAFKPEVNGELDTQNFMKFDELDAPAPARTSSGPSRKMLLTPKDLNFVGYTYKNFDAVKGLRHTFDFKNPSMEQQSHGSIYGDSGVGYSTKRSAEETEMQMLASAGDPMLP

SEQ ID NO: 63234 - protein, 70 aa, Gossypium hirsutum
  Clone ID: GOSHI-09MAY01-C36092_1.pep
HASVGVSNMKTWLICLALIGIVLMEEVIQIDAAMTIHHPEVSGLVSYRRLLQEAVNPWNRGCSRLTRCRS

SEQ ID NO: 63235 - protein, 84 aa, Gossypium hirsutum
  unsure (1)..(84): unsure at all Xaa locations
  Clone ID: LIB3543-033-Q1-K1-E5.pep
SDKCSKATTYHLPLVTDQISVAEATTYHLSLVTDQISVAEAITYHLPLVTDQISVAEATTYHLSLIRNTQIRRPLNLIIYLVXR

SEQ ID NO: 63236 - protein, 56 aa, Gossypium hirsutum
  Clone ID: LIB3145-026-Q1-K1-D5.pep
IHYHLSIYFNSFGPICHLPSLIKLGNGHGKLSTSLSLCHSITMVLRMITYHLSLIR

SEQ ID NO: 63237 - protein, 78 aa, Gossypium hirsutum
  Clone ID: GOSHI-09MAY01-C36382_3.pep
MDMKKISCAVIVAAASMSAVLAAGASPAPSPASAPAAAAASASASGPGPDSSIAISTMPVIESLVGATLVSFFAYFLQ

SEQ ID NO: 63238 - protein, 86 aa, Gossypium hirsutum
  Clone ID: GOSHI-09MAY01-C36382_2.pep
PLFFNTMDMKKISCAVIVAAASMSEVLAAGAAPAPSPASAPAAAAASASASASAPGPDSSVAISTMPVIESLVGATLVSFFAYFLQ

SEQ ID NO: 63239 - protein, 78 aa, Gossypium hirsutum
  Clone ID: GOSHI-09MAY01-C36382_1.pep
MDMKKISCAVIVAAASMSAVLAAGSAPAPAPASAPGAASASASAAAPGPDSNVAISTMPVLGSLVGATLVSFFAYYLQ

SEQ ID NO: 63240 - protein, 240 aa, Gossypium hirsutum
  unsure (1)..(240): unsure at all Xaa locations
  Clone ID: GOSHI-09MAY01-C36352_1.pep
MDSSKLGSVPEEEQHREESNKPVVSAFASLPDRRPTKSSEKYSPLDWSGFFDGEEDVCIPDSNDVFHLYMAGTEGPVVFCLHGGGYSGLSFALSASKIKEKARVVAMDLRGHGKSSTENDLDLSIETMCNDVFAVLKALYGDSPPAIVLAGHSMGGSVAVHIAAKKTLRSLAGLVVVDVVEGTAMASLVHMQKILSGRMQHFSSXEKAIEWSVRGGSLRNIDSARVSIPTTLKYDDSKNC

SEQ ID NO: 63241 - protein, 212 aa, Gossypium hirsutum
  Clone ID: GOSHI-09MAY01-C36312_2.pep
KTHRDVRVPRWRSGPTGGALGGDDLSPSSPAAVISRWTFEVSRRYQHLLDKTVPHVLNRWIGCLAVVLIYAVRVYFVQGFYIVTYGLGIYLLNLLMGFLSPQVDPEMEDGPSLPVSGSDEFRPFVRRLPEFKFWYSITKAFCIAFVMTFFSVFDVPVFWPILLFYWIMLFILTMRKQILHMIKYKYVPFSFGKQRYDSKKASPTENTNLPRD

SEQ ID NO: 63242 - protein, 204 aa, Gossypium hirsutum
  unsure (1)..(204): unsure at all Xaa locations
  Clone ID: GOSHI-09MAY01-C36312_1.pep
METGPTGGGLGGDDLSQSYPATAISRWSFEVSRRYQHVLDKTVPHILYRWIACLVLVLIYAVRVYFVQGFYIITYGLGIYLLNLLMGFLSPQVDPEMQDGPSLPTRGSDEFRPFVRRLPEFKFWYSITKAFCIAFVMTFFSVFDVPVFWPILLFYWLMLFILTMKRQILHMIKXYKYVPFSLGKHRFDGQKAPSADCVPPPPGD

SEQ ID NO: 63243 - protein, 192 aa, Gossypium hirsutum
  Clone ID: LIB3543-031-Q1-K6-G6.pep
KKNTAPWGGGGWTGPTGGALGGDDLSPSSPAAVISRWTFEVSRRYQHLLDKTVPHVLNRWFLCLAVVLIYAVRVYFVQGFYIVTYGLGIYLLNLLMGFLSPQVDPEMEDGPSLPVSGSDEFRPFVRRLPEFKFWYSITKAFCIAFVMTFFSVFDVPVFWPILLFYWIMLFILTMRKQILHMIKYKYVPFSFG

SEQ ID NO: 63244 - protein, 115 aa, Gossypium hirsutum
  Clone ID: GOSHI-09MAY01-C36302_1.pep
MFKLINILTILVLLTFSSEIADAAPPCQEVIVSITPCLSFIKGQPDPAPGCCSGAKGLAKQANTKLDRQGICECLKGVLPKIGPYDPKRFPLIAQKCGINTLIPPISATTDCTKV

SEQ ID NO: 63245 - protein, 74 aa, Gossypium hirsutum
  Clone ID: uC-gsflmaxxa119c07b1.pep
KAYPYTLFVCCSGANGLAKQANTKLDRQGICECLKGVLPKIGPYDPKRFPLIAQKCGINTLIPPISATTDCTKV

SEQ ID NO: 63246 - protein, 90 aa, Gossypium hirsutum
  Clone ID: GOSHI-09MAY01-C36332_1.pep
PRVRPRVRPRVRFFKTDTSTSLAFLLCISSSFPLQSSSFLHSIWFCFSAYSGPLFLRITLPSFLAILLPLYRESVSRFWCILEYDTPRSI

SEQ ID NO: 63247 - protein, 169 aa, Gossypium hirsutum
  unsure (1)..(169): unsure at all Xaa locations
  Clone ID: GOSHI-09MAY01-C36322_1.pep
VGVPFQKEAFLDVKTIGEELLPQSVADKIETMLLDLKVPSEFHKRSFECSVDSIRAIAASHLWQLVAARADLDGHLKXALKDYFLLAKGDFFQCFLEESRQLMRLPPRQSTAEADLMVPFQLAAIKTIGEEDKHSSRVSLQMPSFGITVKSSQRDIPKTKAYTDGSSET

SEQ ID NO: 63248 - protein, 133 aa, Gossypium hirsutum
  unsure (1)..(133): unsure at all Xaa locations
  Clone ID: GOSHI-09MAY01-C36242_1.pep
KPAPVIETFCSDELVSPYVGLDGVVTLVDSKHAMKHLNEVKPRFVVNEAVEQVAYADRIIMNRIELVSEGDLEKLTDKIKHINSMAQIKRANFGVVDLDFVLGVGGYDLDSIDSXVKVDDSHGGNHHLDTHGH

SEQ ID NO: 63249 - protein, 239 aa, Gossypium hirsutum
  Clone ID: GOSHI-09MAY01-C36262_1.pep
GFPAKAIEGWWRICFWASVAPGAILALFMEFSVESPHWLFKRGRAADAEAEFEKLLGGPYVKSAMAELSKSDRGDEADTFKFSELLYGHHRKVVFIGSTLFALQQLSGINAVFYFSSTVFETAGVPSESANMCVGIANLLGSFVAMILMDRLGRKVLLIGSFSGMVVAMFLQITSATSLVSRGSGVYLSVGGMLLFVLTFAIGAGPVPSILLSEMFPGRVRANAVSVCMAFHWIVNFFV

SEQ ID NO: 63250 - protein, 215 aa, Gossypium hirsutum
  Clone ID: GOSHI-09MAY01-C36222_1.pep
MNAFYNFVKKSIHTDVTKAQMMDKIRRLKKKFENNAGKGKKGEDRTFSKAHEQNAFELSKMIWGKEGISGKVESSAAKSNGKAKGNNKAVVALKAEFSSPDKKTYDAVPIEADKVVSKSSRSLFDKRFGVSDMEEAVVKLGLDMVDGEKKAALEAKWRKLQIEHLELFVERSELVTEQANLVLEYYKSEDKYSASIISNDIFICILKKCSNFCAY

SEQ ID NO: 63251 - protein, 122 aa, Gossypium hirsutum
  Clone ID: GOSHI-09MAY01-C37992_2.pep
THASAIAPPNRLKKGVPSVDSNHVRNENAVFKKQAAVSKNAADDHSQLLGMQKQQSNGISFGVVSSLSNVKILSKSKDPTEINRANFERTSVESKASAHGRSNSNFVGKQDRATGAALTSRR

SEQ ID NO: 63252 - protein, 159 aa, Gossypium hirsutum
  Clone ID: GOSHI-09MAY01-C37992_1.pep
LYSATGGSTGEIAATAAVAKVAAAAAASSPHSTFLPSVAVTPIAPPNRLKKGVPSVDSNHVRNENAVFKKQAAVSKNAADDHSQLLGMQKQQPNGISFGVAGSLSNVKILSKSKGPTEINGANFERTSVESKASAHGRSNSNFVGKQDRATGAALTSRR

SEQ ID NO: 63253 - protein, 46 aa, Gossypium hirsutum
  Clone ID: LIB3147-052-Q1-K1-C9.pep
KIACAFTSIVSCLVCFDELILVCYYSIFDFMDVYNIIAQPKKKIKI

SEQ ID NO: 63254 - protein, 88 aa, Gossypium hirsutum
  Clone ID: GOSHI-09MAY01-C37912_1.pep
WLIYVARGWLTIPCAPVVVLEKSTAIMFFDSVLQSEIWSSLKLSWGIPIWCKILMNGLSGFLQEVPRNSAGCFAVPCSSYEAQGISFS

SEQ ID NO: 63255 - protein, 213 aa, Gossypium hirsutum
  Clone ID: GOSHI-09MAY01-C37572_1.pep
MADLFIGVSQSSLLHLQPKLASFQRLTGGPRFAVASNRQLHFRRLTVTGVVSSDSKAPTTVTSTVGSEKGGIDIEVDTGNGGGDKFDDRSGGGGDGGDNSGGGGDSESKGEGEFSDDGGKKKMALSMSQKLTLGYAALVGVGGVMGYVKSRSQKSLAAGGLSAAVLYYVYTQLPTNPVFASSVGLGISAALLGVMGSRFKRSGKVFPGGVVSL

SEQ ID NO: 63256 - protein, 74 aa, Gossypium hirsutum
  Clone ID: GOSHI-09MAY01-C37452_1.pep
VRHVIAKAEFFFGFQLFYHLTIKLIFEKGRYYLYLIAETLALLFLRTEDITNGSSILAHVFKLYVLSFLIVMNS

SEQ ID NO: 63257 - protein, 237 aa, Gossypium hirsutum
  unsure (1)..(237): unsure at all Xaa locations
  Clone ID: GOSHI-09MAY01-C37682_1.pep
PTRPFILSFKFQEDKPWMAQLTIVACLSLATKVEETQVPLLLDLQVCVXCKQHCSPSCVSELVIDLLKLGFSDLFIFLYVEEARYVFDSKTIQRMELLVLSTLHWRMNPVTPISFFDHITRRLGLRTHLHWDFLRRCEHLLLFLITDSRFVTYTPSILAAATMLHVIKEVEPCHYPEYQKQLIAVLKACEDKVNACYKLISELLESQYKGNQGHKRKYKSIPSSPNGVIDASFGCDS

SEQ ID NO: 63258 - protein, 190 aa, Gossypium hirsutum
  unsure (1)..(190): unsure at all Xaa locations
  Clone ID: GOSHI-09MAY01-C37642_1.pep
NLFKLAEEHKRDKEKXAEKSLKLEKQLDTRQGLELEIQRLRGALQVMEHMNGDGDSDTKNRMGVIQDELREKEEELEDLEDLNQALIIKERKSNDELQDARKELITAFKDVSTRAHIGVKKMGEVDIRPFLVAAKRKYSAKEADVKSAELCSLWQDYLRDPSWHPFKILKDKEGNCKEILDEEDEKLVEL

SEQ ID NO: 63259 - protein, 154 aa, Gossypium hirsutum
  Clone ID: GOSHI-09MAY01-C37162_1.pep
MEVGQMQRRLVDYTKSLFMEGFLDAQFLQLQQLQDESNPDFVVEVVSLFFDDSEKLLNDLTMALDQPNVDFKKVDAHVHQLKGSSSSIGAQRVKNACIAFRSFCEEQNIDATLRCLQQVKQEYYLVKNKLETMLRLEQQIVAAGGSIPMIELGF

SEQ ID NO: 63260 - protein, 154 aa, Gossypium hirsutum
  unsure (1)..(154): unsure at all Xaa locations
  Clone ID: AI729617.1.pep
FGFSLLLYSFFFLFFFCWEKGFLDAQFLQLQQLQDESNPDFVVEVVSLFFDDSEKLLNDLTMALDQPNVDFKKVDAHVHQLKGSSSSIGAQRVKNACIAFRSFCEEQNIDATLRCLQQVKQEYYLVKNKLETMLRLKXQIVAAGGXIPMIELGF

SEQ ID NO: 63261 - protein, 105 aa, Gossypium hirsutum
  Clone ID: LIB3147-024-Q1-K1-H12.pep
GPTHPSAHASVTMVLDLPSVDFKKVDADVHQLKGSSSSIGAQRVKNACIAFRSFCEEQNIDATLRCLQQVKQEYYLVKNKLETMLRLEQQIVAAGGSIPMIELGF

SEQ ID NO: 63262 - protein, 223 aa, Gossypium hirsutum
  Clone ID: GOSHI-09MAY01-C37342_1.pep
MDMLKDGKGSECSDSTLVDAKLNTDYDQGKVNGNTNQSDAVHQEPGMNRNSNCENEDYNNLSVSQSMFDQYDNDKPKANVRRALSKGQFPVIENLSDTLDAAWTGEIWRGPVLSKKNSFSLPDFCAVNLQGDFEQKIVPKVVRSASPALFSIGSENMEDFVSWLKMPFLSFYRSYNKDFLGSASKLDTFSAYDRFNVSSFRELELPDGARLLLPVGINDTVIP

SEQ ID NO: 63263 - protein, 114 aa, Gossypium hirsutum
  Clone ID: GOSHI-09MAY01-C37262_2.pep
VSYPLFFFKYGYTILKKYSFTVATIFTGMAAATLWGHTLTMNFILGISTVFISMHQFFSPLSKVKEEQENGMLEPVDYKENHRSKESFINIAAGAHEEASHRVGSDERQPLLPT

SEQ ID NO: 63264 - protein, 206 aa, Gossypium hirsutum
  unsure (1)..(206): unsure at all Xaa locations
  Clone ID: GOSHI-09MAY01-C37262_1.pep
VSSCLHVTTGAYIYSLIFAAAPSLASVYNEYALKSQYETSIYLQNLFLYGYGAILNFLAXLGTTVVKGPSSFDILQGHSXATMFLICYNAAQGILSSFFFKYADTILKKYSSTVATIFTGIASATLFGHTLTMNFILGISIVFISMHQFFSPLSKVKEEQENGMLEPVDYKENHRSKESFINIAAGAHEEASHRVGSDERQPLLPT

SEQ ID NO: 63265 - protein, 258 aa, Gossypium hirsutum
  unsure (1)..(258): unsure at all Xaa locations
  Clone ID: GOSHI-09MAY01-C30922_1.pep
MAPSIVLVSWMVLGLVMATSTIQVEAARAFFVFGDSLVDNGNNNFLATTARADSPPYGIDTPRRRASGRFSNGKNIPDFISDALGSEPTLPYLSPELKGDRLLVGANFASAGIGILNDTGVQFINIIRMYKQLKYFQQYQXRLADLVGFEEAQRIVNDALVLITVGGNDFVNNYYLVPFSPRSRQFSLPDYVRYLISEYRKLLMRLYDLGARKVLVTGTGPMGCVPAELAMRSPSGQCVTELQRAATLYNPHMGQMIN

SEQ ID NO: 63266 - protein, 62 aa, Gossypium hirsutum
  unsure (1)..(62): unsure at all Xaa locations
  Clone ID: LIB3120-046-P1-K1-E1.pep
DRLLVGANFASAGIGILNGAGVQFINIIRMYKQLKYFQQYPARVXALVGSEEPQGFVTVALG

SEQ ID NO: 63267 - protein, 155 aa, Gossypium hirsutum
  unsure (1)..(155): unsure at all Xaa locations
  Clone ID: GOSHI-09MAY01-C30812_1.pep
MGNEFRCIGGTRIHRTFHFRAYPNCWFSLCMAKRSIGMVLVPEYSDNKKKEKSQNXITLSMNSIEFPLLDRTTQNSVISTTLNDLSNWSRLSSLWPLLYGTSCCFIEFASLIGSRFDFDRYGLVPRSSPRQADLILTAGTVTMKMAPSLVRLYEQ

SEQ ID NO: 63268 - protein, 132 aa, Gossypium hirsutum
  Clone ID: LIB3120-007-Q1-K1-C1.pep
MTEADAVIGAADGGSHQAPLARKESSKKKKPLKVAMEAMIRGLQKFVEDESEEETASKEECNHNVAAWHNVPHPEERLKFWPDPDIELNLAKDTGISIFRMGIDWNPIMPQDPVNGIKDAVNFAALERYKWI

SEQ ID NO: 63269 - protein, 57 aa, Gossypium hirsutum
  Clone ID: LIB3120-007-Q1-K1-C2.pep
TDFKEECNHNVAVWHNVPHPEERLKYWSDPDIEMNLAKDTGISIILMKIDMDQDMPK

SEQ ID NO: 63270 - protein, 90 aa, Gossypium hirsutum
  Clone ID: LIB3120-010-Q1-K1-E5.pep
MSMDLTSERVWYVHCNFCNTILAVSVPCNSAFNIVTVRCGHCANLLSVNMGTSLQTVPSQDAQKQQITIDEDHSNKECWSSFKCNKVSAI

SEQ ID NO: 63271 - protein, 52 aa, Gossypium hirsutum
  Clone ID: LIB3145-052-Q1-K1-C10.pep
MSMDLTSERVWYVHLNFCNTILAVSVPCNSAFNIVTVRCGHCANLLSVNIGT

SEQ ID NO: 63272 - protein, 175 aa, Gossypium hirsutum
  unsure (1)..(175): unsure at all Xaa locations
  Clone ID: GOSHI-09MAY01-C30142_1.pep
MAKKKHVLKEDDEHDGSNTKKQVCRADFPPHFVFGVSTSSYQIEGGVNEGGRGKSIWDAFSHIEGKIVDGSNADVAVDHYNRYKEDIELISELGFKAYRFSISWPRIFPDGLGXTKVNEEGIAFYNNVIDALFEXGIEPFVTLYHWDSSLHLHEXNRGWINKQIGDYFAKLQILA

SEQ ID NO: 63273 - protein, 227 aa, Gossypium hirsutum
  unsure (1)..(227): unsure at all Xaa locations
  Clone ID: GOSHI-09MAY01-C30092_1.pep
GSNVGDGTENRLGSWLMLTCFQTSVISSSMFLTAMAANPLSANLAFNTIKQQIGWMDWAKAAFVPGLVSLLVVPLILYVIYPPTVKTSPDAPKLAREKLEKMGPMSKNEIIMAGTLFLTVGLSIVGGALNVDAATAAILGLSVLLVTGVVTWKEXLAESVAWYTLTGLAALIAMAESVYKCGLIXWVSHTVXKVARGFRLSWHMSSGIVLLLYSYWHYFFDCGTAHI

SEQ ID NO: 63274 - protein, 56 aa, Gossypium hirsutum
  Clone ID: GOSHI-09MAY01-C30292_1.pep
FTNLYILYILFLHYFIMDSGLDSFLIYKHLDDISSLCMSPKNMIVIYPCIYLYIFF

SEQ ID NO: 63275 - protein, 498 aa, Gossypium hirsutum
  unsure (1)..(498): unsure at all Xaa locations
  Clone ID: GOSHI-09MAY01-C30252_1.pep
GRVGSLLAIFVVVFIRTTNRRNLLVPPSPPKLPIIGNPHXIGRYPHRSLRSLPHRFGPLRSLRFGNFPILVVSSADAASEIKKTHDLTFVNRPKRSLFQKLLYDYKDVASAPYGEYWRQMKSICVVNLLSNRRDKSYQGVREEETALAVEKIEKSSSLCSPVNLSELFSATTNNVICRIALGRKYSEDTNKFGKLLNEFTELLGTPDVGDYLPWLAWLSHVNGLHGKAEKVAKELDEFLDGVLEEHMNRHDRHLNDHAGIQGEYQKXLVDILLEIQRENTVPRPREXISLKALILDIFAAGTDTTYVVLEWAMTELLRHPKIMKKLQNEVRNVSAENSSISVDDLDNMRYLKAVIKETLRLHPPIPLLLPTISTKDVKLKGYDIXQGTQVIINAWAIGRDLASWENPEEFLPDRFLDNSIDFKGQHFELIPFGSGRRICPGILFAIAINELLLANLVHKFDWSLPGGAKEKDLDMTETGGLTIRKKSPLIAVANRCSF

SEQ ID NO: 63276 - protein, 93 aa, Gossypium hirsutum
  Clone ID: GOSHI-09MAY01-C31532_1.pep
MILRSASTPLLNSLGPHSKEPSPDLEFPYQISRTRTLSFTGSRSSSISVASSDDSTRRMTRAVSETDLRDLVVPKIKTVQKNGGILNGVCVEE

SEQ ID NO: 63277 - protein, 249 aa, Gossypium hirsutum
  Clone ID: GOSHI-09MAY01-C31792_1.pep
MSWNPNMEVQYINSSYLYNSAGSFMEYFEGLTYQHVNFIFDGASHLQESAYPSMTTSFYKFGLSDFGNNTPASAHAPGYDGSNHEPCAEGYRRASVNSPSMSNEETVAMNVEWGGNANSTSRENPVDCPRRLQNAQDYQVIWQDGVDPDNMTYEELLELGETVGTQSRGLSQELISLLPVSKYKCSLFSRKKSRNERCVICQMEYKRGERQITLPCKHVYHAGCGNRWLSINKACPICYPEVFGDASKH

SEQ ID NO: 63278 - protein, 289 aa, Gossypium hirsutum
  Clone ID: GOSHI-09MAY01-C31782_1.pep
MVSKVGFASNFDLIKNKLKGKEMERDFLGLNSKQSFPLVKEEVEEIGFTKSLGIQWPISNKVSSAVPPQQMSFDFAQGDNAKRMGYDSIVSSTFMHISPPDAAELQKSFNHNRQRVGNHFPFTAASSVQHDVHHVQRPYDMKMFPVSNQSVPVSTTNPFMNSHFTTTAMKSQLLGGIPVTTPPHSVLPTLGSFGGSIEPRKSVRGLGDSRSPVQLTIFYAGTVNVYDDITPEKAQAIMLLAGNGSSLTSNVAHPNVQVQAPISKPLQFETLPRIISQMQNFVLVSQALY

SEQ ID NO: 63279 - protein, 45 aa, Gossypium hirsutum
  Clone ID: LIB3493-015-P1-M1-B4.pep
SHVFNRHKCIIMVVVNGTDGSSPKTFSCHKAVEHDVHHAEQKKQL

SEQ ID NO: 63280 - protein, 54 aa, Gossypium hirsutum
  Clone ID: GOSHI-09MAY01-C31732_1.pep
KLLKNKRDPLLNMQQESFLYPQEMKFTQLHHVNRLKKTLLSRNKLLTDVGKSNT

SEQ ID NO: 63281 - protein, 157 aa, Gossypium hirsutum
  Clone ID: GOSHI-09MAY01-C31722_1.pep
LLHLIHHHLFPHTPARPHFCSLQLYCIPKKLTTMATASVTYTPPMLAAATTNPKKKTNTNVNYITGLNSFGGLKAHNKVVSLGQRVCTEQSFANVVSSLKAPTKGKTGKSSGGALSSTCNAVGEIFRIAAIMNGLVLVGVAVGFVLLRIEASVEEAE

SEQ ID NO: 63282 - protein, 80 aa, Gossypium hirsutum
  Clone ID: GOSHI-09MAY01-C31662_1.pep
YSVEVVHYLQVWLICVLFHLILNIDHSMILDYYRCSISRSIHLGLIHLHHITNMTFSAWHYREVNSAENHPIFSFHSWNC

SEQ ID NO: 63283 - protein, 222 aa, Gossypium hirsutum
  Clone ID: GOSHI-09MAY01-C31112_2.pep
CATVEVECKDRKSSRASFRQQVKTNRHGEFKVHWPFSVSKHVKKIEGCEVKLIKSSEPYCAVASSATSSSLHLKSRKQGTHVFSAGFFTFKPFKQPTLCSQKPSVHPNQLLPPPILPPNPLLPPPILPPNPLLPPPVLPPNPFQPPPAPLVPNPLQPPPAPLVPDPLQPPPEPAAPSLPPVPGLAPPPSSPSPPPDFPFPLPPFPFLPVPPFPGVPPSKSSP

SEQ ID NO: 63284 - protein, 207 aa, Gossypium hirsutum
  Clone ID: GOSHI-09MAY01-C31112_1.pep
MPGFFFTWLLCFIIFNGYSEGSHGYQQQQSAVVVGTVYCDTCFQSDLSRPTHFISGATVEVECKDRKSSRASFRQQVKTNRHGEFKVHLPFSVSKHVKKIEGCEVKLIKSSEPYCAVASSATSSSLHLKSRKQGTHVFSAGFFTFKPVKQPTLCSQKPSVHPNQLLPPPILPPNPLLPPPILPPPPPLPPPPQPAAPSLPPVPEYLL

SEQ ID NO: 63285 - protein, 107 aa, Gossypium hirsutum
  unsure (1)..(107): unsure at all Xaa locations
  Clone ID: LIB3146-059-Q1-K1-F8.pep
MGAHLGRGVQRRKGNGGSENGKSGGGDGHDGGGASPGTGGKDGAAGSGGGCNGSGTSGAGGGSMGGSNGGGXKGFGGNRGGGKKNDSRSPRTAFSPLKSFGFVLHRF

SEQ ID NO: 63286 - protein, 94 aa, Gossypium hirsutum
  unsure (1)..(94): unsure at all Xaa locations
  Clone ID: LIB3120-019-Q1-K1-H5.pep
HASAHASAHAXAEFEIMSGLFFTLLLGFIIFNCYSEGSHGYQQQQSAVVVGTVYCDTCFQSDLSRPTHFISGFKLNPKLHLLFSHVMQVFLFFS

SEQ ID NO: 63287 - protein, 148 aa, Gossypium hirsutum
  Clone ID: GOSHI-09MAY01-C31082_1.pep
MASSLSLSSHTVASLFPSHTSKPQLSLSKSIPILTKSSQSQFHGLKFSHPSSLKIPRFSTFKTSISAKVNKGTVPPAFTLKDQDGKNVSLSKFKGKPVVVYFYPADETPGCTKQACAFRDSYEKFKKAGAEVIGISVDSAESHKVFAL

SEQ ID NO: 63288 - protein, 193 aa, Gossypium hirsutum
  Clone ID: GOSHI-09MAY01-C31062_1.pep
MSCTSVSSFTASLFVPSKSSSFSNHKRRFIQCSLGGAVVEPKALAEPLLLNAVRGQDVERPPVWLMRQAGRYMKSYQIICEKYPSFRERSENVGLVVEISLQPWNVFKPDGVILFSDILTPLSGMNIPFDIIKGKGPVIFDPIATAADVDQVREFSPEGSVPHVGEALTILKKEVDNKAAVGFVGAPFTLASY

SEQ ID NO: 63289 - protein, 73 aa, Gossypium hirsutum
  Clone ID: LIB3583-040-P1-K1-E3.pep
ILVNRFRLVEICLNLHGARAIQKLLEKLTTQQKISLFMLALSIEVVALSKDLNGHRVIQYCLKNFSDEDNKGL

SEQ ID NO: 63290 - protein, 164 aa, Gossypium hirsutum
  unsure (1)..(164): unsure at all Xaa locations
  Clone ID: GOSHI-09MAY01-C31032_1.pep
GRVGGWCLTSSSTATATSFPLWRPTLRSSSIVATLNSSPSPPTLIRNQPVFAAPVPLLSDPSHXREDMGDKSYEEAIEALKKLLSEKGELKAVAAAKVDQVTAELKTTSDDSVERLKQGFVYFKSQKYEKNPXLYAELAKGQSPKYMIVACSDSRVCPSHVLDM

SEQ ID NO: 63291 - protein, 147 aa, Gossypium hirsutum
  Clone ID: GOSHI-09MAY01-C31392_1.pep
HVKDTYERVEGKTLSPGNLRATFHNPEYDKLINYYVREKYTLRYTGGMVPDVNQIIVKEKGIFTNVASPSAKAKLRLLFEVAPLGFLIEKAGGYSSDGQKSVLDKVIENLDDRTQVAYGSKNEIIRFEETLYGSSRLNAGVPVGATA

SEQ ID NO: 63292 - protein, 98 aa, Gossypium hirsutum
  Clone ID: GOSHI-09MAY01-C31272_1.pep
MAGLRRSAVSFRRQGSSGIVWDDRFLSELTHANQEQQGDTKQEEHAQVAQDNNNPEKLDAIKDVKPTRNLPPINTIERSRSNGERRGYRTGKVSPAIE

SEQ ID NO: 63293 - protein, 57 aa, Gossypium hirsutum
  Clone ID: GOSHI-09MAY01-C31262_2.pep
MAGSCRILKDYGTPPERSDDLLEPYVESLGDNQAIEHDFGESPVSNLEIGFDGLLWA

SEQ ID NO: 63294 - protein, 176 aa, Gossypium hirsutum
  Clone ID: AI727512.1.pep
MSFSTKQNSSRAMNPCVLHLQKLGLELKCPLCLNLFKRPLLLPCDHLFCDSCVARTEFGSKCPICKVQCANRDLRPLTFMENIVGIYRSLDSAFSANLSHSIEDGVGKTENFDKCSMQRRATDVGYETPNKDGVDLLRSVSHKQIGASKESRNRQIIMSRADQASLSPPSYGDTKV

SEQ ID NO: 63295 - protein, 97 aa, Gossypium hirsutum
  Clone ID: GOSHI-09MAY01-C32932_1.pep
EDIPESIVSKEKELEMQRDDLASKPENIREKIVEGRVSKRLGELALLEQPFIKDDSLLVKDWVKQTVAALGENIKVRRFVRFTLGETTEDTKTGTEA

SEQ ID NO: 63296 - protein, 142 aa, Gossypium hirsutum
  Clone ID: GOSHI-09MAY01-C32922_1.pep
YLFVTSQAWDFFSDPTVEINSFYLGGGINGVITDFPKTSNRYRRNRCLNRGNQIPGYMSPVQPGSLYQLITAPYLPPAEAPNPFLTEADVTEPPLPPVAAKAPSTSPNGTALAPTSPNGQPKVAAAAIMQLSTVFLAISLLF

SEQ ID NO: 63297 - protein, 219 aa, Gossypium hirsutum
  Clone ID: GOSHI-09MAY01-C32822_2.pep
GRVGGRVGKLVANLITEAGANRVLACDLHSGQSMGYFDIPVDHVYAPPVPPRPLASKTICSDDLVVVSPDVGGVARARAFAKKLSDAPLAIVDKRRHGHNVAEVMNLIGDVKGKVAVMVDDMIDTAGTIAKGAALLHQEGAREVYACSTHAVFSPPAIERLSSGLFQEVIITNTIPVSEQNYFPQLTVLSVANLLGETIWRVHDDCSGGFEPYATLGID

SEQ ID NO: 63298 - protein, 254 aa, Gossypium hirsutum
  unsure (1)..(254): unsure at all Xaa locations
  Clone ID: GOSHI-09MAY01-C32822_1.pep
MASSSLLWLCSSNPLISPATLLKAHPRFPIRHRFRCSLVEPLKFENGKPHFPLLTSDPAFPTFLSPNSHFQNDINKHDTRLRIFSGTANPALAQEIACYMGLELGKIKIKRFADGEIYVQLQESVRGCDVFLVQPTCPPANENLMELLIMIDACRRASAKNITAVIPYFGYARADRKTQGRESIAAKLVANLITEAGANRVLAGDLHSGQSMGYFDIXDHVYGQLRRTFLAFVLPILFKFQGKSKRPILHQVPK

SEQ ID NO: 63299 - protein, 83 aa, Gossypium hirsutum
  unsure (1)..(83): unsure at all Xaa locations
  Clone ID: LIB3120-044-P1-K1-G6.pep
VRHASGEVYACSTHAVFSPPAMRRLSSGGFQXVIITNTIPVSEQNYFPXLTVLSVANLLGETIWRLHDDCSGGLEPYATLGID

SEQ ID NO: 63300 - protein, 165 aa, Gossypium hirsutum
  unsure (1)..(165): unsure at all Xaa locations
  Clone ID: GOSHI-09MAY01-C32582_1.pep
MRTSLRYTGDSKALRIHAKEKFPFDSKTHLQVQGELDTRTGVPNNFCAMIRHSYHDLFTSLRVGXRYDKRDKVRYTLRGKKSFLVTNDDSVNFVIKGRYDVDQEFKGRKSEGAAEFIYKIFNFQKDQDVRLKVGYEVFEQVPYLQIRENNWTLNADMNGRWNIRF

SEQ ID NO: 63301 - protein, 161 aa, Gossypium hirsutum
  Clone ID: GOSHI-09MAY01-C32502_1.pep
HGSYQGADESCQDSGTDRFAWTYTSQEFEMAQENRLQTFKLPEPILCIGGILQIELLSRVQRQEIDGLFYICVSHVQVVGRPLSPAFSIQILEPPEKFVLEVQSYSLPTLPEQMSSITSLQMGVRDLEQILNLLQGNGGEVEYGYEWEVESDEDEEEFDME

SEQ ID NO: 63302 - protein, 159 aa, Gossypium hirsutum
  Clone ID: LIB3828-016-Q1-N6-F2.pep
MGHIKDADESCQDSGTDKFAWTYTSQEFEMAQENRLQTFKLPEPILCIGGILQIELLSRVQRQEIDGLFYICVSHVQVVGRPLSPAFGIQILEPPEKFVLEVQSYSLPTLPEQMSSITSLQMRVRDLEQILNLLQGNEGEVEYGYEWEVEDEDEEEFDI

SEQ ID NO: 63303 - protein, 82 aa, Gossypium hirsutum
  Clone ID: LIB3120-036-Q1-K1-A9.pep
PFCHAPLIMQYVGHQCSVSHVQVVGRPLSPAFSIQILEPPEKFVLEVQSYSLPTLPEQMSSITSLQMRVRDLEQILNLLQGN

SEQ ID NO: 63304 - protein, 137 aa, Gossypium hirsutum
  Clone ID: GOSHI-09MAY01-C32422_1.pep
KRRVWLGTFVTAEAAARAYDQAAILMNGQNAKTNFPKAAHPGEQNARGGGGGGDDDDDDDRSPLPPKALAELLNAKLRKCCKDQSPSLTCLRLDTDNAHIGVWQKRAGNRSSSNWVMRVELGNKKVDTPASRDRRTL

SEQ ID NO: 63305 - protein, 82 aa, Gossypium hirsutum
  Clone ID: GOSHI-09MAY01-C32742_1.pep
MQRQSLGSPTSKLHSHGGEEITGAIVDDDDRRKDSKSRRLTFSASSSSSSPLLLPTSPKSEKLIHLIPVLTLLCFLILYLNS

SEQ ID NO: 63306 - protein, 143 aa, Gossypium hirsutum
  Clone ID: GOSHI-09MAY01-C32682_1.pep
MESNAVLATVQPNYNILSPSRFYSSSSSAATTFLSVFYPQRTRFSPPQYLKLDKQVLASASCRYAHEVKSPFKNAAVLSDSYSSEASELADIECDNLGFGLLPTDYMYMMKCSQGGNFSKGELQRLGNIELNPSAGILNYGQG

SEQ ID NO: 63307 - protein, 143 aa, Gossypium hirsutum
  unsure (1)..(143): unsure at all Xaa locations
  Clone ID: GOSHI-09MAY01-C32112_1.pep
RGVAGLRYALEVAKHGSGASITKAEPHERNTNYAQGGVSAVLCPSDSVESHMQDTIVAGAYLCDEESVKVVCTEGPDRIRELIAMGASLDHGDDGNLHLAREGGHSHHRIVHAADMTGRDIDRALLDALVNDPNISVXKHHFA

SEQ ID NO: 63308 - protein, 184 aa, Gossypium hirsutum
  unsure (1)..(184): unsure at all Xaa locations
  Clone ID: GOSHI-09MAY01-C32082_1.pep
MEKSMNSTTLARTQSEQLVIETQAAATPTSKSPTMQNEDAPITSENMGTLSRKSSQRMVVGASPGRSXSGGYNNNTHIRKARSAQVKMDVEELSNGAALSRASSASLGXLSFSFTGFTVPPDEITDSKPFSDDDIPEDIEAGTCKPKFQTEPTLPIYLKFSDVTYKVITKGMTTSEERDILNGI

SEQ ID NO: 63309 - protein, 98 aa, Gossypium hirsutum
  Clone ID: GOSHI-09MAY01-C32222_1.pep
AKFCYGITITLIAYNIVSARAAAEYLRVTEDVAKGTLVYKLQVIFNSCILHGWRDSIVTLHTTKAFPLWAEDLTITSRSIETIALNACTHSCKVNLSH

SEQ ID NO: 63310 - protein, 169 aa, Gossypium hirsutum
  unsure (1)..(169): unsure at all Xaa locations
  Clone ID: GOSHI-09MAY01-C33982_1.pep
MTMPPQVIPDKTLQGLYGLGRENNSSPHPRRLEGKVAIVTGGARGIGEATVRLFARHGAKVVIADVEDTLGTALANSLSPCVTFVHCDVSLEEDIENLVSSTVSRYGRLDILFNNAGVLGNQRXHKSIVDFDVDEFDNIMRVNVRGMALGIKHAARAMIPRGGGFIILF

SEQ ID NO: 63311 - protein, 61 aa, Gossypium hirsutum
  Clone ID: LIB3135-011-Q1-K1-B2.pep
NNYGRASALIQHEWRPKSLITISGEVDTGAIEKSAKVGLALALKPYAKAKLFLLCHMEGGP

SEQ ID NO: 63312 - protein, 72 aa, Gossypium hirsutum
  Clone ID: LIB3148-016-Q1-K1-D4.pep
SWAVLGTQALGSGGTVFVVSDGRWALILIGLRTLEKNNVLSWIIKIMLLAKKKKKKKKKKDKNKMKKYKKIK

SEQ ID NO: 63313 - protein, 44 aa, Gossypium hirsutum
  Clone ID: LIB3149-063-Q1-K1-C11.pep
AQKGPKPKPCLQQTLTLAATAPPAASVRASYPRHVASVPVKEDK

SEQ ID NO: 63314 - protein, 57 aa, Gossypium hirsutum
  Clone ID: LIB3135-011-Q1-K1-E2.pep
LLQLCPSFACLLLQVRRQRGGGSWRVRRLLVAQLLLGLGFAEIWLRYWAYRAIRVMG

SEQ ID NO: 63315 - protein, 128 aa, Gossypium hirsutum
  Clone ID: GOSHI-09MAY01-C33962_1.pep
LEWVVLGYAAGAEAIMVLLLTLPGLDGLRKGLIAVTRGLLKPFLSVVPFCLFLLMDIYWKYETRPSCEGDSCTPSEHLRHQKSIMKSQRNALLIAAALLFYWLLYSVTGLVVKVEQLNQRLERLKNRD

SEQ ID NO: 63316 - protein, 99 aa, Gossypium hirsutum
  Clone ID: GOSHI-09MAY01-C33572_1.pep
YTQHQPLLFQTMESIIKGRLRDVDYPYVGNHFQQGRPQEVVIFIIGGTTYEESRSVAQLNASNSGIRFIIGGTAVLNSKRFLKDLEEAQGIARSNANVV

SEQ ID NO: 63317 - protein, 222 aa, Gossypium hirsutum
  Clone ID: GOSHI-09MAY01-C33562_1.pep
PTRPEEVKLLKTWSSAFGLRVVWALKLKGIPYEAIDEDLSNKSALLLQYNPVHKKIPVLVHNGNPISESLVILEYIDETWKQNPILPQDPLHRARERFWAKFNDEKLLPSVWGAFTKEGKDREEAMAATMENLKFVEEELKGKKFFSGEKIGLVDLVFGWLANLISIFEEVSGFNIVGEGYPLLSAWMQEFSELPVIKDTWPPRDKMIIKYQALYDKYHPAE

SEQ ID NO: 63318 - protein, 125 aa, Gossypium hirsutum
  Clone ID: LIB3135-005-Q1-K1-E1.pep
TYCSNMMHKLVMSTTNDKSAGTGHYAESYMSYSAWEYMNIRTRMGEVSLIMVSSENSCIEGDINGYPSPGMMKSASSSKVGIELASQPNGRYTRANVSPLENDVFTSSIYTSNRFSVVEARDSSG

SEQ ID NO: 63319 - protein, 132 aa, Gossypium hirsutum
  Clone ID: LIB3135-023-Q1-K1-H12.pep
EEVKLLKTWSSAYGLRVVWALKLKGIPYEAIDEDLFNKSAMLLQYNPVHKKIPVLVHNGNPIYESLVILEYIDETWKQNPILPQDPLHRARERLWAKFNDEKLRIFCCCIHWRKHKRISVLVAGATTTISMG

SEQ ID NO: 63320 - protein, 99 aa, Gossypium hirsutum
  Clone ID: GOSHI-09MAY01-C33452_1.pep
SGWPSAGGFGTSVDNAATYLSNLIKHVQKGTPKRPGKAIETYLFALFDENQKSGPELERHFGLFLPNKQPKYQLRFGGGRHWDIASKEYNATFPLKYDM

SEQ ID NO: 63321 - protein, 77 aa, Gossypium hirsutum
  Clone ID: GOSHI-09MAY01-C33442_2.pep
KITFPLPTLQQSPSRRRPFATQILFQVNEDAHLHLGYLSSNCRRQMCKMRRLQAIENKKQQINLELLPETTDNNVLG

SEQ ID NO: 63322 - protein, 116 aa, Gossypium hirsutum
  Clone ID: GOSHI-09MAY01-C33442_1.pep
ARIPLYRPPHPFFFLSFFFFFLKFNYFSFEKKEIGNFLLFFSCIYSIVNFIINIKRKFATPARYCLSSLARVLGFSAVFCFLLLEVGASCTFVSYSLKKDSQGGDLHLHLPGRVFG

SEQ ID NO: 63323 - protein, 72 aa, Gossypium hirsutum
  Clone ID: LIB3148-023-Q1-K1-G2.pep
KITLTIWRISWNYIPTLVNLRHKRVTTNVRCPRYCSGEEDSHHVFRQCPAIWVFAKSTKEQCWTFCCSLWFI

SEQ ID NO: 63324 - protein, 134 aa, Gossypium hirsutum
  Clone ID: GOSHI-09MAY01-C33462_1.pep
MGKPHVVVIPYPAQGHVIPLVELSQNLAKQGIKISFVNTVFNHKRVLDAFGEKVDENGLLHLLSVPDGLEDGEDRNQLGKLTERLCQVMPTQLKELIHKVNGSDDDKISCVLADISMGLALDVAAELGIPTVGL

SEQ ID NO: 63325 - protein, 95 aa, Gossypium hirsutum
  Clone ID: GOSHI-09MAY01-C33752_1.pep
PKTQKLGQNPSSLFARQQSQPPGLGTASWRQAHAPNASTRPGTRAHNRTCKRTSQTQQQIQPKKHILYFDLFSSFFSAIKPDSNLVIGYTHLQKT

SEQ ID NO: 63326 - protein, 63 aa, Gossypium hirsutum
  Clone ID: GOSHI-09MAY01-C33712_1.pep
FIFYFFGQANLSFLKVLGLERLKSELQSRGLKCGGTLQERAARLFLLKSTPLDKLPKSLLANK

SEQ ID NO: 63327 - protein, 139 aa, Gossypium hirsutum
  unsure (1)..(139): unsure at all Xaa locations
  Clone ID: GOSHI-09MAY01-C33012_1.pep
ANTTFASAIQIGDPVSIDRAAYXALKNSNGIVEEATEEELMDAMAQADSTGMFICPHTGVALTALMKLRKSGVIGAGDRTVVVSTAHGLKFTQSKXDYHSKEIPDMACQFANPPMQVKADFGSVMDVLMKYLGDKAPKH

SEQ ID NO: 63328 - protein, 116 aa, Gossypium hirsutum
  Clone ID: GOSHI-09MAY01-C33322_1.pep
PQTLSPVVNATSESTVSELREERTEEGPSNPSIVSCENQVLPKLVCPLCRGEVKDWVVVEPARHFMNAKSRSCSSETCNSTGSYKDLRKHARLEHPAARPSEADPERQRNWRRLER

SEQ ID NO: 63329 - protein, 61 aa, Gossypium hirsutum
  Clone ID: GOSHI-09MAY01-C28912_1.pep
MSNLYGDYNQRIDYVFKVGLIGDSAVGKSQLLARFARNEFSVDSKATIGVEFQTKTLVIDN

SEQ ID NO: 63330 - protein, 79 aa, Gossypium hirsutum
  Clone ID: GOSHI-09MAY01-C28802_1.pep
FWCVTRGGCKAFRLGTWCPCVFQRDVSLQARQLMPNFCRLRFVEMDDRINSKNHSIQISFGYFLYVYLWVIWHVIGVFC

SEQ ID NO: 63331 - protein, 95 aa, Gossypium hirsutum
  Clone ID: LIB3189-005-P1-K1-H2.pep
QVPFFSVDPSPKFYCLRILSIRGGCKAFRLGTWCPCVFQRDVSLQARQLMPNFCRLRFVEMDDRINSKNHSIQISFGYFLYVYLWVIWHVIGVFC

SEQ ID NO: 63332 - protein, 86 aa, Gossypium hirsutum
  Clone ID: LIB3272-037-P1-K1-H8.pep
PLKICPMTDIIDSFTWLTIQNTPKHLNKLNQPRTYLGINCLACRLTSLWNTHGHQVPSLKALHPPLVTHQNHYNIIETVDPLSNPD

SEQ ID NO: 63333 - protein, 50 aa, Gossypium hirsutum
  Clone ID: LIB3048-039-Q1-L1-C6.pep
INCLACRLTSLWNTHGHQVPSLKALHPPLVTHQNHYNIIETVDPLSNPTK

SEQ ID NO: 63334 - protein, 224 aa, Gossypium hirsutum
  Clone ID: GOSHI-09MAY01-C28462_1.pep
DPQKSTPFASHGLGGSDLVLQPLKKLNQVKKRPGGAYASLSEGAEYHSQRPAAPLLDTINYPIHMKNLSVKELKQLSEELRSDVVFNVSKTGGHLGSSLGVVELTVALHYVFNAPRDKILWDVGHQSYPHKILTGRRHKMHTMRQTNGLAGFTKRSESEYDCFGTGHSSTTISAGLGMAVGRDLKGERNHVVAVIGDGAMTAGQAYQAMNNAGYLDSDMIGILN

SEQ ID NO: 63335 - protein, 74 aa, Gossypium hirsutum
  Clone ID: GOSHI-09MAY01-C28172_1.pep
FMKIMDESYYHAITDKPGLYIYDTCLNPKGKMQSKILMFKMEMNSPQYNLHRHTISAQTKSKQVVMMFDFSSLI

SEQ ID NO: 63336 - protein, 133 aa, Gossypium hirsutum
  Clone ID: GOSHI-09MAY01-C28032_1.pep
GARKLGQILSQSEETLGDELHKFFSNTLDRHGNGQRPDVQDPAPLSRFRGLGATQSVSGTESCQEDQNFYESESSNSSTVTGNYRSSDNEGSLCTVYNGDMSERGTHVGITFKEPQGSANASSISEIRLTGDA

SEQ ID NO: 63337 - protein, 161 aa, Gossypium hirsutum
  unsure (1)..(161): unsure at all Xaa locations
  Clone ID: GOSHI-09MAY01-C28352_1.pep
QTHDIFLSTLRSRLTKLQVVRHFWEKNNIKGAIGALQKLPDHSVQVGEISGMXEKMEILTLDLFSGLLPVLKGLLDSKTERHVNISLEMLLKLVAVFGPMIRSTVPPPRGIGVDLHAEQRRECCNQCFTQLQKILKLLPPLERRGGVIARCAQELNLVLQE

SEQ ID NO: 63338 - protein, 176 aa, Gossypium hirsutum
  unsure (1)..(176): unsure at all Xaa locations
  Clone ID: GOSHI-09MAY01-C29982_1.pep
SSTSANGVIFFGEGPYVFLPGVDASQSLTYTPLFINPVSTASAFPMGEASAEYFIGVKSIKVNENSISLNTSLLSINNXGVGGTKISTXVDPYTVLESSIFKAATGAXLSEATAMNISRVPGVAPFEVCFTPXNIAARXGPAVPSIDLVLQNERVXRMFGSNSMVEVXQDVLCLGL

SEQ ID NO: 63339 - protein, 200 aa, Gossypium hirsutum
  Clone ID: GOSHI-09MAY01-C29972_1.pep
PRVRPRVRPLVRNDTWASMSTIADINDKWASHAGPGGWNDPDMLEVGNGGMTYQEYRAHFSIWALMKAPLLIGCDVRNMTAETLEILSNKEVISVNQDSLGVQGRKVYVSGEANCLQVWAGPLSGNRLVVAFWNRCSEAATITARWDVPRLESSTHVSIRDLWQHKEVKENAVASFGAKVDSHDCHVYIFTPKTVAHSES

SEQ ID NO: 63340 - protein, 185 aa, Gossypium hirsutum
  unsure (1)..(185): unsure at all Xaa locations
  Clone ID: GOSHI-09MAY01-C29632_1.pep
MEVQNSEQGQIIEIRGDVPAAETSLGGSTICGGAACGFSDAQTISKDANERAASMRKLLTAVVLCIVFMSVEVAGGIKANSLAILTDAAHLLSDVAAFAISLFSLWASGWEATPRQTYGFFRIEILGALVSIQMIWLLAGILVYEAIARLIHDTGXEVRGFLMFAVSAFGLVVNIAMALLLGHDH

SEQ ID NO: 63341 - protein, 167 aa, Gossypium hirsutum
  Clone ID: GOSHI-09MAY01-C29002_1.pep
HSSADAWVASKSHQDADPNAIIANEGDFIFKPKAFNIVWGNDSRYWRIPRSPIPDEQEAAELIQVSWLEVTGSVKLEPLTRHEISFKLSFRRDSFGWSGAPIFLMAKVGKKGKYKWKRLKELDNLPKDPIMVPTDDSFTIEPIPSNEPDKRLYFGLYDVWSGKWKGG

SEQ ID NO: 63342 - protein, 110 aa, Gossypium hirsutum
  unsure (1)..(110): unsure at all Xaa locations
  Clone ID: AI054918.1.pep
AGSSRADLGILWGRNGFSETRALTRYEISFKLSFKGILLDGAGTYFLDXQXGRKGNXSGKAQGLDNCLRTHYGPPMIPHIEPIRLXTKLIWXMNLMGKEELKSEPLKIVT

SEQ ID NO: 63343 - protein, 281 aa, Gossypium hirsutum
  Clone ID: GOSHI-09MAY01-C29342_1.pep
LLGPYMDPTDAWYFKTYMGAGEYGFGLQAMPLDPLNDCPRNAYYMDGVFAAGDGVPYVRSNMVCMFERYTGDIGWRHAESPITGMEIKEVRPKVTLVVRMAASVANYDYIVDWEFQTDGLIRIKVGLSGILMVKGTAYENMNQVEGQENLFGTLLSENVIGVIHDHYITFYLDMDIDGSDNSFVNVNIKRQETSPGESPRKSYLKAVRNVAKTEKDAQIQLKLYDPSEFHVINPTKKTRVGNPVGYKVVPGGTAASLLDHDDPPQKRGAFTNNQIWVTSYN

SEQ ID NO: 63344 - protein, 434 aa, Gossypium hirsutum
  Clone ID: GOSHI-09MAY01-C29372_1.pep
MDGLIKGLLDVAIGHEGDNESQDERSRSSSAQAVSGDQEHQRDERSRSSWAQVVSGDQYHEKQVQSQWQGSGSRPSGRTHKTEYGGYEKNEGDERRHGYNQNKWNRKEQEEENNDGWETVGKKPRRRPQKVNMDHWQGYKRPPSEQEYSDEVGTGTSIEPSEEELADFLQACNRLWQLDLNRLEPGKDYQIDCGERKKVFQKEDMAEGSLFCYVDEDIFRTKPTFARFCSLLDNYNPNAGCKEVVTSEEKQEQAAFIEEISRTAPIQYLHKYLSRKGIVSENYQDFKRMLTSLWFDLYGRGGTSGSSSAFEHVFVGEIKQHCEQEVSGFHNWLQFYLEEAKGCVDYHGYILPRRRGETPDSETQLLTVQFEWNGVLKSVSSTLVGVSPEFEIALYTLCFFVGGEDNYVQLGPYSVNIKCYRFGNKIGSVFPIAE

SEQ ID NO: 63345 - protein, 164 aa, Gossypium hirsutum
  unsure (1)..(164): unsure at all Xaa locations
  Clone ID: GOSHI-09MAY01-C29242_1.pep
RDLHGLHNWEGLIEPLHPWLRREVVKYGEFVEATYDAFDFDPLSEFCGSCRYNPNKLFEELGLTKHGYKVPKYIYAMSHVDVPEWFERSHCAWSKESSWMGYVAVSGHAETTRIGRPDILVAXRGTVAPPEWYSDLKTSLQRLGKTNIKVQSGFLGVYCSKGKN

SEQ ID NO: 63346 - protein, 216 aa, Gossypium hirsutum
  unsure (1)..(216): unsure at all Xaa locations
  Clone ID: GOSHI-09MAY01-C24952_1.pep
ICSFKTYGGFHSPLLQKIHSKLWCCLETSGNAGDHNLDLSLGNSTSKQTNLELGGDRANCYXDQHGLPPEADWQYRGFRSKVNLHQEPCRSDGATHGRSDGYSEAASVQLLSQTLIQSPASIKSNEMQRYGQFRRPGNNNVFHIPPSSYQIHFPSSSNGGRIGSDLLLSISEQQWPSGPHQMVGNSAASSGFPSQIRPSSQTWLQKNGFHSLMRPS

SEQ ID NO: 63347 - protein, 118 aa, Gossypium hirsutum
  unsure (1)..(118): unsure at all Xaa locations
  Clone ID: GOSHI-09MAY01-C24932_1.pep
PRVRPRVRRCCXTNRSRRPDLASEVYKVLEPIRNTIGPLSTFHAGSGELRQPPDSFFCPISKEIMTDPHVAADGFTYELRQIRRWLDGGHNTSPCTNIPLAHRNLIPNHALRTAILEW

SEQ ID NO: 63348 - protein, 226 aa, Gossypium hirsutum
  Clone ID: GOSHI-09MAY01-C24892_1.pep
EEANGEDDLSDDGSQAGEKKRRLNMEQVKTLEKNFELGNKLEPERKMQLARALGLQPRQIAIWFQNRRARWKTNGLEKDYDLLKTQYEAIKADNDALQAQNQKLHAEIMALKSREPTESINLNKETEGSCSNRSENSSDVKLDISRTPAIDSPLSTHPTSRTFFPTSIRPTGGAAQLFQTSSSRPDHHHPCQKMDQMVKEESLSNMFCTIEDQTGFWPWLEQPHFN

SEQ ID NO: 63349 - protein, 120 aa, Gossypium hirsutum
  unsure (1)..(120): unsure at all Xaa locations
  Clone ID: GOSHI-09MAY01-C24582_1.pep
THVGMRGVDLTPGQKXELRIARVVLKSAPILLLDEASSSIESESSRVVQEALDTLIMGNKTTILIARRAAMMRHVDNIVVLNGGRIVEEGTHDSLVAKNGLYVRLTQPHFGKGLRQHRLV

SEQ ID NO: 63350 - protein, 74 aa, Gossypium hirsutum
  Clone ID: GOSHI-09MAY01-C24572_1.pep
VLFTPITGRISQAEIRYIQSQLFGQLFSLERFGLMYVAEHSFLVHCLQKPLQLSFFLCFLFSSSQASYFTMVPS

SEQ ID NO: 63351 - protein, 267 aa, Gossypium hirsutum
  unsure (1)..(267): unsure at all Xaa locations
  Clone ID: GOSHI-09MAY01-C24462_1.pep
AMRMWFLSNPPGXKATIQVQNIEEFTWLNSSYSPVLKQLGSPSMIDYYFRAHRASSDSNLKFRNPKYLSILNHLRFYLPEIFPKLNKVLFLDDDIVVQKDLTGLWSLDLKGNVNGAVETCGESFHRFDRYLNFSNPLISKNFDPHACGWAYGMNIFDLAEWRRQNITEVYHRWQRLNRDRQLWKLGTLPPGLITFWKRTYSLDKSWHVLGLGYNPNVNQREIDRAAVIHYNGNLKPWLEIGIPKFKIYWAKYVNYETVYLRECNINP

SEQ ID NO: 63352 - protein, 83 aa, Gossypium hirsutum
  Clone ID: LIB3083-120-Q1-L1-F10.pep
TFPFKSRDQSKLGSPSMIDYYFRAHRVSFDSNLKFRNPKYLSILNHLGFYLPEIFPKLNKVLFLDDDIVVQKDLIGFWSLQIK

SEQ ID NO: 63353 - protein, 118 aa, Gossypium hirsutum
  Clone ID: GOSHI-09MAY01-C24432_1.pep
MEGENLASTEIPVKEALKDTVHIAEPVNVRKEGNKDEEETALDGEFIKVEKEALDMKDGSNVAKPSPNQGDESTTIERSLSNPGRELLEAQEKMKELELELERVTGALKDFESENSRL

SEQ ID NO: 63354 - protein, 158 aa, Gossypium hirsutum
  Clone ID: GOSHI-09MAY01-C24722_1.pep
MEGNKKGGSSSSSAASSSVASELFGSKDPPSSSTGIFGSIFAPPSKVLGRESLRHDLITKRYDSPGGPGNTTKPGPYGNSSKGHEGENQNMGNRNIYEEQRVEPCHLSSSIFYGGQDVCFDPKSREDLELNSVFNKDIGEDDPGFASRGNWWQGSLYY

SEQ ID NO: 63355 - protein, 94 aa, Gossypium hirsutum
  Clone ID: LIB3146-004-P1-K1-C10.pep
LQSYLVQKTYLLLLLGFLALFLLLHLRYLGRESLRHDLITKRYDSPKEPWNTTNPGPYGMFISLVPFHTILFITYSIKWYCALDQNKNQVFFTE

SEQ ID NO: 63356 - protein, 86 aa, Gossypium hirsutum
  Clone ID: LIB3146-038-P1-K1-G8.pep
SLRRSSKKKKKKPPLFYFLPLFSTHKIKLLFCSLVNPYIFKKQHRLRIKRKLIVLNLYVKKPPRVVLIIFLKLKTLNLEIAKNVRV

SEQ ID NO: 63357 - protein, 260 aa, Gossypium hirsutum
  Clone ID: GOSHI-09MAY01-C24662_1.pep
NWSSITGSANKPHKGNDPRWNAILAIRARDGILGMSHFRLLKRLGCGDIGSVYLSELSGTSCYFAMKVMDKASLASRKKLTRAQTEREILQLLDHPFLPTLYTHFETDRFSCLVMEYCPGGDLHTLRQRQPGKHFLEYAARFYAAEVLLALEYLHMLGVVYRDLKPENVLVRDDGHIMLSDFDLSLRCAVFPTLIKSSAFDSDPSKRGAAGTFCVQPACIEPTSVCIQPACFIPRIFPQKNKKKTRKPRIEFGAPFHTPP

SEQ ID NO: 63358 - protein, 117 aa, Gossypium hirsutum
  Clone ID: GOSHI-09MAY01-C24632_1.pep
MEHGSFTDNSAATFSLTDEDHTIANAVRFTLNQDPRVTFCGYSIPHPSEARVNIRVQTTGDPAREVLKDACQNLMLMCRHVRSTFDKAVEDFRASNAVKAMKIDSQDSSGDDSEESE

SEQ ID NO: 63359 - protein, 80 aa, Gossypium hirsutum
  Clone ID: GOSHI-09MAY01-C24192_1.pep
KIVYFNDALYRREFDGLLLRCLSHEEAQQALQKVNALLIGHSKSGLLGWFCSLPSHRGMKTREVNWSGSQTTGPRICDRS

SEQ ID NO: 63360 - protein, 94 aa, Gossypium hirsutum
  Clone ID: GOSHI-09MAY01-C24142_1.pep
MDTQKSQPDEQKSQPDKQSSSAAAPLVSTSCRKKKNEEATFLEDLKDHIDEFINASMEEHKTCFKKTIQKMFGMSKVVAERSAAESKEAETVSK

SEQ ID NO: 63361 - protein, 157 aa, Gossypium hirsutum
  Clone ID: GOSHI-09MAY01-C24002_1.pep
PSRTPAQPLIHPFPEDAATSTGAPFWSAPKRFPHPLQVSTADPSHLQFVMAASILRAETFGIQIPDWVKHPQMLADAVDKVTVPDFQPKKDAKIVTDEKATTLSTASIDDAAVINELIFKLELCTKNLPQGFKMKPIQFEKDDDTNYHMDLIAGLAN

SEQ ID NO: 63362 - protein, 171 aa, Gossypium hirsutum
  Clone ID: GOSHI-09MAY01-C24302_1.pep
PTRAPESSDPAPIQNENSTAAEDVQMIDGSSASMTDVLEADPKEVMYAERLTKIKEILSGETSIQLILQFLHSHNTSDLLIVKTIKQSAAMRNSVCHSATIYANAIMHAGTTVDTFLRDNLDRLSRATNWAKFSATAGLGVIHRGHLQQGRSLMAPYLPQGGAGGGGSSFF

SEQ ID NO: 63363 - protein, 283 aa, Gossypium hirsutum
  Clone ID: GOSHI-09MAY01-C24292_1.pep
QIGTGELLSLSEQEWVDCDTSNNEGCSGGLMDYAFEFIIKNGGIDTEEDYPYAARDGTCDPYRKNAKVVSINDYEDVPVNDEKALKKAVANQPVSVAIEAGGRSFQLYQSGIFDGKCGTQLDHGVTAVGYGTEKGKDYWIVKNSWGSSWGEAGYLRMARNVANTVTGKCGIAMEASYPIKTGENPPNPGPSPPSPIKPPTVCDSYYSCPESNTCCCIYEYYNYCFAWGCCPLEAATCCEDRYSCCPHDYPVCNIHEGTCLMSKGNPLAVKALKRTPAKPFWAH

SEQ ID NO: 63364 - protein, 52 aa, Gossypium hirsutum
  Clone ID: LIB3083-116-Q1-L1-D12.pep
DYWIVKNSWGSSWGEACYITMARNVAITLTGKCGIAMEAFYLIKTGYYSPIS

SEQ ID NO: 63365 - protein, 161 aa, Gossypium hirsutum
  Clone ID: GOSHI-09MAY01-C24212_1.pep
LVPHWLIFDSINNLLIEGGGTGKINGNGKIWWQNSCKINKTLPCKDAPTALTFYHSKNLKVQNLNIQDAQQIHVSFEKCNGVQASGLAVAAPESSPNTDGIHVTRTQNIWITNSVIGTGDDCISIVSGSKNVQAMDITCGPGHGISIGSLGSKSSKAYVSG

SEQ ID NO: 63366 - protein, 132 aa, Gossypium hirsutum
  Clone ID: GOSHI-09MAY01-C25952_1.pep
IDDPVNKHARRVGSSVAVYGSLIVMLVFLPVKFAMKMAPSIFPLDISVSDPFTEIPADMLLFQICIPFAIEHFKLRTTFKSLLRYWFTAVGWALGLTEFLLPRPDENGGQENANVEPGQLDRPQIVQLGGQE

SEQ ID NO: 63367 - protein, 298 aa, Gossypium hirsutum
  Clone ID: GOSHI-09MAY01-C25972_1.pep
ENQLKPIPISTRPPPPRFAYLISGSAGDCRMLKRTLLALYHPLNQYVVHLDREASSEERLDLEKFVKDHPVFNKVGNVRMIVKANLVTYRGPTMVANTLHAAAILLKEGGDWDWFINLSASDYPLVTQDDLVHTFSYLPRDLNFIDHTSNIGWKEFHRAKPIIIDPGLYSLKKADVFWVTQRRSVPTAFKLFTGSAWMALSRSFIDYCIWGWDNLPRTVLMYYANFLSSPEGYFHTVICNAQEFRNTTVNSDLHFISWDNPPKQHPHYLRLNDMQRMINSNAPFARKFPRDDPAALDK

SEQ ID NO: 63368 - protein, 201 aa, Gossypium hirsutum
  Clone ID: GOSHI-09MAY01-C25962_1.pep
QVHTTLLNNMETASFCNATTHNFITSSLPIKRIVKQLPKPCQTQTHHCCHSGMPLGFSGLQGHGLNIKPKQRYGDAVAARCATWDSGLLAELERELEAKDEEEWVKVGRLREKCKERKGMVELLECLEREAIQGEDHGREASDYNRRAQIFERVPGFQLSSTHPTTYSQTLDPLSFNGMEGLYLQMKLGTPMFSPLENGYW

SEQ ID NO: 63369 - protein, 63 aa, Gossypium hirsutum
  unsure (1)..(63): unsure at all Xaa locations
  Clone ID: LIB3825-016-Q1-K6-E1.pep
ERNARKGREWWSXLECLEREAIQGEDHGREASDYNRRAQIFDKSSKVFQALKARTQPTHSQNS

SEQ ID NO: 63370 - protein, 212 aa, Gossypium hirsutum
  Clone ID: GOSHI-09MAY01-C25902_1.pep
MSDQTKAAPSSNPTVVDDPYKRLEIILNPNGSLTRNPNRFPNTSATPDPDPTVPVLSKDVTINQTTHTWARVFLPRQKPLDTNKFPLIVYYHAGGFIHCSAASTIFHVFCSNMALELQAIVVSVDYRLAPEHRLPAAYDDAIEALLWIKTTQEEWLTQYANFTTCFVMGSSSGANIAYHAGIRVAEEADCLRPWKIRGLILHQPFFGGSVKV

SEQ ID NO: 63371 - protein, 139 aa, Gossypium hirsutum
  Clone ID: GOSHI-09MAY01-C25892_1.pep
MLAIFSKGLVNPPQELQSPASLTSSMKPKLPFEILNGFVSSNPTNAFSMRFGSSASLAYVPPHNPSSTYKRLFSGVDEMHCIFMGNLNNLCSLLRQYGLSRGTNEAMFIIEAYRTLRDRGPYPPHQVLNHIEGSYGFVI

SEQ ID NO: 63372 - protein, 145 aa, Gossypium hirsutum
  Clone ID: GOSHI-09MAY01-C25862_1.pep
ICAVASVDEVYSQQGLLDTRDNNMIPLCQRFLSALIPEEDIDSGNEDLPFDSYETGFEMDGELGCNGLTCINFQSTGHASFDGYRITDKPEHDDPEIDMLGNIGTNSNFSHSRNGSFPDQQMPGMVCSELQYESMTTNEKLILEA

SEQ ID NO: 63373 - protein, 107 aa, Gossypium hirsutum
  Clone ID: GOSHI-09MAY01-C25812_1.pep
MGNIGSSGSHGWRRNGSRRNHPPTPHPPQPPAPSQPQPEITANRYVFAAATPYPAQYPNTNPPQYYQYPGYYQPQPAVPLPLSAPYDHHHRGGPDMEPGHWGRYPYV

SEQ ID NO: 63374 - protein, 109 aa, Gossypium hirsutum
  Clone ID: GOSHI-09MAY01-C25482_1.pep
LLLILMYSMVKWWQKTRFLHLFCFLFKVLFSSSFVKYFLILLEKILPSGLSMAALKIVFFVHQLCYQFNLCFTRNDCKGGSTATPRGGRGKFMHAVVMQFSALLLFLVD

SEQ ID NO: 63375 - protein, 145 aa, Gossypium hirsutum
  Clone ID: GOSHI-09MAY01-C25792_1.pep
IMESMRQDEPDFDRVIELVREVRDEICELAPRSWREEITDAIDLEILAQVLKSGNLDIHYLGRILEFALITLQKLSAPANDDEMKAANQRLLKELAEICGARENSDNSPALAMIKGLRFVLEQIQVLKAEISKARIRLMEPLLKG

SEQ ID NO: 63376 - protein, 253 aa, Gossypium hirsutum
  unsure (1)..(253): unsure at all Xaa locations
  Clone ID: GOSHI-09MAY01-C25772_1.pep
LPPHFSASLKPSKHTHIASSPVQFLYQRPRFSKPFSGFSPSNLSFPLNSKNCPQRWTFKASLSAQESARTENVKASAGEDFPSLKAMIRVYREALLNGDDRIVSEIESRISILENEKDGLEKQVLELSAEITSGKEKYIRLQADFDNYRKRSEKERLTARSDAXGEVMESLLPMVDSFERAKQQIKPETEKEKKIDTSYQGIYKQFVEIMRSLQVAVVPTVGKPFDPSLHEAIAREESQEFKEGIIIQEFCRG

SEQ ID NO: 63377 - protein, 67 aa, Gossypium hirsutum
  Clone ID: GOSHI-09MAY01-C25702_1.pep
YARKGERSYLMLLTEVRLARYHIEFGPGNLPIAFNARTKPLDTRHACVCTTLHAYMHCGDSNIGAPE

SEQ ID NO: 63378 - protein, 318 aa, Gossypium hirsutum
  unsure (1)..(318): unsure at all Xaa locations
  Clone ID: GOSHI-09MAY01-C25682_1.pep
MGAACSRKRDQLDNVDGFDRGVSGRYCRSGSSKWLATTFSRPVLEIQREKKKCPSLLELCTYKIREDIDNYVSFSTLPRDLSQQIFNELVKSQRLTDVSLEAFRDCALQDLYLGDYPGVNENWMDVISSQGSSLLSLDLSGSEFVSWIVYLKDCVNLQDLTLNYCDQISDRGRKHISGLSNLRSLTFRRNSAITAQGMXLVNLMKLDLEKCPGIHGGLIHIKGLTMLESLSIKWCNCITDADMKPLSGLTNLKSLQISCSKVTDFGITYLKGLQNLSVLNLEGCPVTASCFDTLSVLVSLVYLNLSRCHLSDDGCEKL

SEQ ID NO: 63379 - protein, 108 aa, Gossypium hirsutum
  Clone ID: GOSHI-09MAY01-C25642_1.pep
LETLILDFNELTGTRPAGLSNCTKLNWISLSNNRLTGEIPAWLGKLSILAILKLSNNSFYGPIPLELGECKSLIWLDPNTNNLNGTIPPMLLKQSGKIAVNFIGWKRF

SEQ ID NO: 63380 - protein, 209 aa, Gossypium hirsutum
  Clone ID: GOSHI-09MAY01-C25602_1.pep
SAYSLMFNRAIGFAPYGVYWRTLRRIAATHLFCPKQIRGAEEQRRQIASEMVTLFALHNQSFHVRQLLKRASLNNMMASIFGRKYNLNSSSNEVEQLRALVEEGYDLLGSLNWSDHLPWLADFDPQKIRVRCSNLVPKVNRFVARIISQHRHKTNCETQDFVDVLLSLQGADKISDSDMIAVLWEMIFRGADTVAVLMEWILARIVLHP

SEQ ID NO: 63381 - protein, 275 aa, Gossypium hirsutum
  Clone ID: GOSHI-09MAY01-C25112_1.pep
QELRRVRSGILGEKDNMVTMHDVMDAQWVYDNYRDETYLRRVIMPLEVLLTSYKRLVVKDSAVNAICYGAKLMIPGLLRFENDIEVGEEVVLMTTKGEAIALGIAEMTTAVMATCDHGVVAKIKRVVLDRDTYPRKWGLGPTASMKKKLIAEGKLDKHGKPNDSTPKEWLRNVALPTGGDSMVASLAASAEPAAVEKEKEDGEGRKRKLDDSSDSPAPVVAKKAKVEEGEAEVEKKEKKKKKHKKSEEDADAETEEKVGRKKRRRTRDKVEASSP

SEQ ID NO: 63382 - protein, 106 aa, Gossypium hirsutum
  Clone ID: GOSHI-09MAY01-C25132_2.pep
MLKMKLVRFLMKLNNETVSIELKNGTVVHGTITGVDSSMNTHLKTVKLTLKGKNPVSLDHLSVRGNNIRYYILPDSLNLETLLVEETPRVKPQEGNSWQAFVTWSE

SEQ ID NO: 63383 - protein, 114 aa, Gossypium hirsutum
  Clone ID: GOSHI-09MAY01-C25132_1.pep
MKLVRFLMKLNNETVSIELKNGTVVHGTITGVDISMNTHLKTVKLTLKGKNPVTMDHLSVRGNNIRYYILPDSLNLETLLVEETPRVKPKKPTAGKPLGRGRGRGRGRGRGRGR

SEQ ID NO: 63384 - protein, 66 aa, Gossypium hirsutum
  unsure (1)..(66): unsure at all Xaa locations
  Clone ID: LIB3148-007-Q1-K1-D5.pep
GNXGAAQGVRPRVRDVDVVEAVEYVALFPNGCDSWLCRQLCYSENLWAMLRILKELYWCFTVPCDY

SEQ ID NO: 63385 - protein, 153 aa, Gossypium hirsutum
  Clone ID: GOSHI-09MAY01-C25022_1.pep
MNNINGEVKERIYQNGTVLASDQQAEGSSGSVLEANWHNSREIGSFKDGKTGSSPNRHVLTKGLGETAVARWNDMDKVSPAQTIEANDSESKGIGYVPDEWDEEYDRGKRKKIRQNKHKFGGANLFQQIATKKTRFKKAKLDHSKSENRPFRI

SEQ ID NO: 63386 - protein, 121 aa, Gossypium hirsutum
  Clone ID: GOSHI-09MAY01-C25362_3.pep
VEKKKRENCKDSNACHSCKPPKPIPPPAACPPPPAKPASCPKDTLKLGVCADLLGLVNIVVGAPPSSKCCALLQGLADLEAALCLCTAIKANVLGANLNIPITLSLLLSACQKEIPPGFKC

SEQ ID NO: 63387 - protein, 132 aa, Gossypium hirsutum
  Clone ID: GOSHI-09MAY01-C25362_2.pep
MASNKTCAVLTVFSLLLFNLSFTNACHSCKPPKPIPPPAACPPPPAKPASCPKDTLKLGVCADLLGLVNIVVGTPPSSKCCALLQGLADLEAALCLCTAIKANVLGANLNIPITLSLLLSACQKEIPPGFKC

SEQ ID NO: 63388 - protein, 121 aa, Gossypium hirsutum
  Clone ID: GOSHI-09MAY01-C25362_1.pep
ENPGRPTRSPSPPACPSCKPPKPIPPPAACPPPPAKPASCPKDTLKLGVCADLLGLVNIVVGAPPSSKCCALLQGLADLEAALCLCTAIKANVLGANLNIPITLSLLLSACQKEIPPGFKC

SEQ ID NO: 63389 - protein, 119 aa, Gossypium hirsutum
  unsure (1)..(119): unsure at all Xaa locations
  Clone ID: uC-gsflmaxxa061d03b1.pep
MASNKTCAVLTVFSLLLFNLSFHHXAACPPPPAKPASCPKDTLKLGVCADLLGLVNIVVGTPPSSKCCALLQGLADLEAALCLCTAIKANVLGANLNIPITLSLLLSACQKEIPPGFKC

SEQ ID NO: 63390 - protein, 232 aa, Gossypium hirsutum
  Clone ID: GOSHI-09MAY01-C25292_1.pep
MLTADIPPNQTIYIKNLNEKIKKEELKRSLYALFSQYGRILDVVALKTPKLRGQAWVVFDELTSASNAFRQMQNFPFYDKPMRIQYAKTKSDCIAKNDGSFVPREKKKKQEEKAERKRRAEEAQQSAMPNGTGSQNNGGPKAPLHHGNLNAEQAAPNNILFIQNLPHETTSMMLQLLFEQYPGFREVRTVEAKPGFAFVEYEDEEQSSTAIQNLQGFKIAPQYPMAITFAKK

SEQ ID NO: 63391 - protein, 214 aa, Gossypium hirsutum
  Clone ID: GOSHI-09MAY01-C25262_1.pep
SKALHQYDCLRANKATSAWGLEARVPFLDIEFINVAMSIDPESKMIKKDQGRIEKWILRKAFDDEERPYLPKHILYRQKEQFSDGVGYSWIDGLKAHAAKNVTDKMMLNASYIFPHNTPTTKEAYYYRMIFERFFPQNSARLTVPGGASVACSTAKAVEWDVVWKNNLDPSGRAALGVHLSAYDAEAPLISNVPSKVIDSIPRMVEVPGVAIHT

SEQ ID NO: 63392 - protein, 66 aa, Gossypium hirsutum
  Clone ID: LIB3149-024-Q1-K1-G1.pep
VYHGWWKFQELPYTLSTCLPTGEGSESMKSISDSSMLWHIHQNSHLLKYFMIVWIFHSCCYKHSNI

SEQ ID NO: 63393 - protein, 74 aa, Gossypium hirsutum
  Clone ID: GOSHI-09MAY01-C25212_1.pep
RSKYSTNENTFTVGGAFAVDHLTLIKGKLSSHGRLGALLQHEVVPKSLLTISSELDTKALEKSPRFGLALALKP

SEQ ID NO: 63394 - protein, 113 aa, Gossypium hirsutum
  Clone ID: LIB3146-057-Q1-K1-A2.pep
WIWGRHASATRPKDPDKEEKLRGRPGYEHLNDPLHILIEADLPANIVDTRLRQAQEIIEELLKPVDESQDFIKRQQLRELAMLNSNFREDSPGPSGSVSPFNSSGMKRPKTGR

SEQ ID NO: 63395 - protein, 94 aa, Gossypium hirsutum
  Clone ID: LIB3149-006-Q1-K1-A4.pep
KLRGRPGYEHLNDPLHILIEADLPANIDDTRLRQAQEIIEELLKPVDESQDFIKRQQLRELAMLNSNFREDSPGPSGSVLPFNSSGMKRTKTGR

SEQ ID NO: 63396 - protein, 433 aa, Gossypium hirsutum
  Clone ID: GOSHI-09MAY01-C26902_1.pep
MASLQYLLSIPFLVCVVAPGLAQQSFRPKALVVPVSKDPSSLQYLTTINQRPPFGPIRVGVDLGGPYLWVDCERAYVSSTHRPGRCGSAHCSLAGANGCGDCFDGPRPGCNNNTCAGGPGNTVTNTAGPGEGAQHGGSLQSTGGRNPGRVVTVPRFLFACAPTSLLQGLANGVVGMAGFGRYRIGLPSQFSAAFSFRRKFAIGLSSANGVIFFGDGPYVFLPGVDASESLTFTPLFINPISTAPSFPLGEPSAEYFIGVKSIKVNEKPVSLNTTLLSINSEGVGGTKISTVNPYTALEASIFKAVTEAFINEAAARNITRVAGVAPFEVCFSSRNIVGTRLGAAVPSIDLVLQNENTFWRIFGANSMVKFSWEVTCLGFVNGGSNPQTSIVIGGYQLEDTFLQFDLATSKLGFSSTLLGRQTTCANFNFTSNA

SEQ ID NO: 63397 - protein, 246 aa, Gossypium hirsutum
  unsure (1)..(246): unsure at all Xaa locations
  Clone ID: GOSHI-09MAY01-C26852_1.pep
MRGRSDGGQKKRLIASLCAAVIFLGFLYVYYGWPSRGAADLGYGSKSLIKLGSSYLGGDDDTDGKQYESSTKFGQDEGEDIVPKTFPVCDDRHSELIPCLDRHLIYQMRLKLDLSVMEHYERHCPPPERRYNCLIPPPPGYKVPIKWPQSRDEVWKANIPHTHLAHEKSDQNWMVVQGEKIVFPGGXGTHFHYGADKFIASIANMLNFTQQLNNEGRIRQFYGWSVSKFWTYLFFDIYNVIAPWSA

SEQ ID NO: 63398 - protein, 129 aa, Gossypium hirsutum
  Clone ID: GOSHI-09MAY01-C26802_1.pep
AGPPIRKAVAKGSNKLTKLLSVLKKLNSFNSKQSRTPTSTAAVAASDIIYNEESSADLHPVYVGKSRRRYLISSDIIDNPLFRELAERSGEDDDAVINVSCEVGLFEHLLWMLENADPQPESLEELVEF

SEQ ID NO: 63399 - protein, 86 aa, Gossypium hirsutum
  Clone ID: GOSHI-09MAY01-C26592_1.pep
TFRKMKLLSFNFCKLIHLLENLVSFTVLFVLFFSINNALSLSFSRLSLFKRSSRNSSIVFFPVFLPSSFRTLSDPSLLLPSSTSAF

SEQ ID NO: 63400 - protein, 367 aa, Gossypium hirsutum
  Clone ID: GOSHI-09MAY01-C26552_1.pep
WIQTKIDGYGVAGAVERVGWWSPTIIRGDDREAVHIPNHKFTVNVVRNISQKTHWRIKNYFAISHLDVNKINNVVADMRKVLAKNPQVEQQRLHRRVFLESIDPQNQALLILVSCFVKTSHIEEYLCVKEAIMLDLLRVISHHRARLATPIRTVQKIYSEPEIEDIPFADTIFRRSGAATNRPLLLIEPDYKINSDDKAKAPTRANEEILTPTSTSDSKGNTNSGSALDFKEDKVMASSTNNSGLSSNESGNSVPVGSTTSSGRVPVPNPQSAIEESEIPLGDSQAKQDVDNKPVPVPSVARPASLEENIVLGVALEGSKLTLPIEEEMSAEIEEMGSHQSGSRSHSVGQDKKDNEKSVVHGGAPNN

SEQ ID NO: 63401 - protein, 157 aa, Gossypium hirsutum
  Clone ID: GOSHI-09MAY01-C26492_1.pep
AHAGGHAIWTTSFSSSMAVSEISRCTDHVFLSFRGEDTRKSFTDHLYTALVHLGIRTFRDDEEIERGNNIKDEIEKAILHHSKISIVVFSKNYAASTWCLNELVMILEHRKSSKHIVLPVFYDVDPSQVKNQTGSYAEAFTQHEQNFESMVQDGGML

SEQ ID NO: 63402 - protein, 68 aa, Gossypium hirsutum
  Clone ID: GOSHI-09MAY01-C26402_1.pep
SQVTAALAQAGLESSNLIVGIDFTKSNEWTGARSFNRKSLHHIGNGQNPYEQAISIIGQSLSAFDEDN

SEQ ID NO: 63403 - protein, 126 aa, Gossypium hirsutum
  Clone ID: GOSHI-09MAY01-C26782_2.pep
HDIDVDDLKNNTRYTGGYSEGSRTVKLFWEVMNDFEPKERCMLLKFVTSCSRAPLLGFKYLQPAFTIHKVASDAPLWAAIGGSDVERLPSASTCYNTLKLPTYKRSSTLKAKLRYAINSNAGFELS

SEQ ID NO: 63404 - protein, 137 aa, Gossypium hirsutum
  unsure (1)..(137): unsure at all Xaa locations
  Clone ID: LIB3543-056-Q1-K6-C3.pep
NDHGRSAINYVLYSRFLFKYLEIALTLVFLKISVFDTFTYEYEYTGGYSEGSRTVKLFXEVMNDFEPKERCMLLKFMTSCSRAPLLGFKYLQSAFTIHKGDAPLWAAIGGLDVERLPSASTCYNTLKLPTYKRSTTL

SEQ ID NO: 63405 - protein, 144 aa, Gossypium hirsutum
  Clone ID: GOSHI-09MAY01-C26772_1.pep
LFSDSASHHSSPSSPSSPPDLSQARWYTKGSKSLSSIFSYIIPSLSYAESKLDNHGGELKPVPSLPVRWKKKFETRHEVLDSVKEYTTCTTEELKKACEDNKKIWTHSNNKQIARIRLCSENNDCVSGTSTSSDEFHDPEKNRV

SEQ ID NO: 63406 - protein, 161 aa, Gossypium hirsutum
  Clone ID: GOSHI-09MAY01-C26712_1.pep
RTLVTPKKKSEELGIATSGKRSESSDVNAAVSAEHNDLPNLGLDSSKSRDKLNNRSSAPWNDNSISVTSPESTIEAKNVKKTSASDLKVDSTGTMFGNNAGSLLDCGKTQDSQMKTAHKDLPKFTGAAVSEAPCEGLLKPSSNSSGNKPALALISVTKPEQ

SEQ ID NO: 63407 - protein, 128 aa, Gossypium hirsutum
  Clone ID: GOSHI-09MAY01-C26612_2.pep
RFSQVSDEMGICGDKGFFSAPLGEKDVAASLIEPEATVEDDYSDEEIDVDELERRIWRDKMRLKRLKEQNKCKEGIDIAKQRLSQEQARRKMWGFSRQNKCKEGIDIAKQRRSQEQARRKKMWGFTRL

SEQ ID NO: 63408 - protein, 170 aa, Gossypium hirsutum
  unsure (1)..(170): unsure at all Xaa locations
  Clone ID: GOSHI-09MAY01-C26612_1.pep
MMMFDEMGICGDMDFFSAPLGEKDVAASQIEPEATVEDDYSDEEIDVDELERRMWRDKMRLTRLTEHNXVTTGLILLNXRLSHDQARRKNISMAHDGILNYMLIIIDVCXAHGFVYGIIPQKGKPFTGASDNLREWCNDLLSFDRNGSCCFLLVFPQIIPSPATNDGRYL

SEQ ID NO: 63409 - protein, 67 aa, Gossypium hirsutum
  Clone ID: GOSHI-09MAY01-C26162_2.pep
LVVATQLVEESMVKLDRICRQENVMSIFARSYGLTGLVRISVKEHTVIGSKPDHFLDDLQLNNPWPE

SEQ ID NO: 63410 - protein, 170 aa, Gossypium hirsutum
  unsure (1)..(170): unsure at all Xaa locations
  Clone ID: GOSHI-09MAY01-C26162_1.pep
RKRRSKLKLTMAEPKTKYDRQLRIWGEQGQAALEKASICLLNCGPTGSETLKNLVLGGVGSITIVDGSKVEFGDLGNNFLVDDSSLGQSKAKCVCCFLQELNDAVKAKFIEEYPEALIDTNPSFFSQFTLXVVATQLVEESMVKXDRICRQENVMLILLASTANSLVRSV

SEQ ID NO: 63411 - protein, 59 aa, Gossypium hirsutum
  Clone ID: GOSHI-09MAY01-C26132_1.pep
MSILICIIVKFSLSYLYYSDTLTSSLLLLSKCSHLISEIFFLNRNGEGAKVMNIVKVKR

SEQ ID NO: 63412 - protein, 268 aa, Gossypium hirsutum
  Clone ID: GOSHI-09MAY01-C26122_1.pep
MDAFRRQASKLREQVAKQQQAVIKQFSGTGYESSDVVVIDEIEMQRHQQLDKLYKSTRSARDFQKEVIKAAEAFTAIGYKHIETGTKFSEECCRYGTEPSRPINENILAKAAAIYGDGCKHVEKEQEDLIKLLSEQVLDPLRAMSAGAPLEDARHLAQRYSRMRQEAEALAADISRRQARIREAPIPENVAKLHAAEAKMQELKANMAVLGKEASAALAAVEAQQQRLTLQRLVAMVEGEKTYHLRVAAILYEIEAEKVSEKQRKDSA

SEQ ID NO: 63413 - protein, 274 aa, Gossypium hirsutum
  Clone ID: GOSHI-09MAY01-C26052_1.pep
CPNLEVLETRNVIGDRGLEVLARSCKRLKRLRIERGADEQEMVDEEGVVSQRGVMALAQGCLELEYLAVYVSDITNASLQYIGTYSKNLCDFRLVLLDREERITDLPLDDGVRDLLRGCEKLRRFALYLRPGGLTDVGLGYIGQYSSKVRWMLLGYVGESDSGLLEFSKGCPSLQKLEMRGWWFSERALAASVMQLTSLRYLWVQGYRASESGHDLLAMARPFWNIELIPRIVGEDPVIEHPAHILAYYSLAGPRTDFPESVIPLDPSAAGISS

SEQ ID NO: 63414 - protein, 89 aa, Gossypium hirsutum
  Clone ID: LIB3048-006-Q1-L1-E12.pep
FHFLGPSGKNRGDFRLVFLDRKERLTDLPLDDGVRDLLRGCEKLRRFALYLRPGGLTDVGLGYIGQYSSKVRWMLLGYVGESDSGLLEF

SEQ ID NO: 63415 - protein, 176 aa, Gossypium hirsutum
  Clone ID: GOSHI-09MAY01-C26062_1.pep
MSFQQKSVWMPRDGSFLSNGEMGYDDSSKSEAKRGHQWFMDAAASELFSNKKRAIESFNSQPVSGIADVSVSPWQNASCFQSVSGPFGDHLFGSESIRTVNLVDRNISSVETGNLNMGRKDFEDQYGSGSSAALSMSHTIEDASSCLSFGGLRKVKVNQVRDSNNDMRTLMGHPYC

SEQ ID NO: 63416 - protein, 100 aa, Gossypium hirsutum
  unsure (1)..(100): unsure at all Xaa locations
  Clone ID: LIB3048-006-Q1-L1-F10.pep
KLLTGRIQPLDSLTSQPVSGIADVSVSPWQNASCFQSFSGPFGDHLFGSESIRTVNLADRNIASAETGNLNMGRKDLEDHYGNGSSADLSMYHTIADAXS

SEQ ID NO: 63417 - protein, 439 aa, Gossypium hirsutum
  unsure (1)..(439): unsure at all Xaa locations
  Clone ID: GOSHI-09MAY01-C26002_1.pep
MAAAPETKTVHSPALTYFSMLSLLSLCPPFVILLWYTMVHADGSVAQTRNYLKQHGLQGFIDIWPRPTAIAWKIIFVYGAFEAALQLLLPGKRVEXGPVSPTGNRPVYKANGMAAYFVTLVTYISLWVVREFQPPVVYDHLGEIYSALIFGSLIFCVFLYIKGHVAPSSTDSXGSSGNLIIDFYWGMELYPRIGKNFDIKVFTNCRFGMKSWAVLAVTYCIKQYELNGRATDAVLENTTLMLVYVTKFFWWEAGYWNTMDIAHDRAGFYICWGCLVWVPSVYTSPGMYLVNHPVNLGMQLALYILVAGVLCIYINYDCDRQRQEFRRRKGKCKIWGKAPSKIEATYTTTCGETKTSLLLTSGWWGLARHFHYVPEILAAFFWTVPALFNHFLPYFYVVFLTILLFDRAKRDDDRCRSKYGKYWKLYCNKVPYKIVPGIY

SEQ ID NO: 63418 - protein, 182 aa, Gossypium hirsutum
  unsure (1)..(182): unsure at all Xaa locations
  Clone ID: GOSHI-09MAY01-C26372_1.pep
ELPNQNGSVVYNGDLNKSNSNPNPISNPCAASKKSRESERRRRRRKQKKNKSKNTSHQENDAADGPVSEAGDSDAAEDGKKNSDQQQVMEEVQVEYVPEKAELDDGIDEEFRKVFEKFSFWEAAGSEETDKKDESSQDADAKKGADSDSGEEEQDNPQKEXGGLSNKKKKLQRRMKIAELKQ

SEQ ID NO: 63419 - protein, 125 aa, Gossypium hirsutum
  Clone ID: GOSHI-09MAY01-C26362_2.pep
TSTSEHVKYFVVDCGSSGARGTNSYIAEIKGLMERKCTLNTGRSHSQREAIVRVTIQFDATFDKRSFNSASGLVVYGRSGKLLATTTVLHTNVPSPFAVGAFAGLQVLKLGIALDLPSVTIMGIP

SEQ ID NO: 63420 - protein, 78 aa, Gossypium hirsutum
  unsure (1)..(78): unsure at all Xaa locations
  Clone ID: LIB3048-010-Q1-L1-C5.pep
EGGSHAAISSAFIHRCSTLSKSVSICRNGXMEPXLCARISXVVARXXFPDSAHITIQTPYAELKPSFIKSCRRIESSP

SEQ ID NO: 63421 - protein, 150 aa, Gossypium hirsutum
  Clone ID: GOSHI-09MAY01-C26322_1.pep
MLRALVRKAASTSAFGSANSAPCLIANPIHHLQTKHFSIGILPDGVNRSSDNFVQNSDAMERLLSDLQSHINKVLAGGGETAVKRNRSRNKLLPRERIDRLLDPGSSFLELSQLAGHELYEDPLPSGGIITGIGPVHGRLCMFVANDPTV

SEQ ID NO: 63422 - protein, 242 aa, Gossypium hirsutum
  Clone ID: GOSHI-09MAY01-C26292_1.pep
QDLLSTEIVNRGIESSGPNAGSLTFSVRVRRRLPDFLQSVNLKYVKLGYHYLINHGIYLATIPVLVLVFSAEVGSLSREELWKKLWEDARYDLATVLSFFAVFVFTVSVYFMSRPRSIYLIDFARYRPHDDLKVTKDQFIELARASGKFDEASLEFQKKILKSSGIGDETYVPKVIMSKENCATMKEGRLEASTVMFGALDELFEKTRIRPKDVGVLVVNCSIFNPTPSLSAMIINHYKMRG

SEQ ID NO: 63423 - protein, 145 aa, Gossypium hirsutum
  Clone ID: GOSHI-09MAY01-C26272_1.pep
VVSSSLINMYVKCGQLEIARTVFDQLGSKDLISWTAIMSGYAMSGRTREARELFNMMPERNVISWNAMLAGHTRLSQWEDALEFIFLMRRMTKDFDHVTLVLILNVCAGLSDVEMGKKVHGFIYRHGFFSNIFVSNALLDMYRKC

SEQ ID NO: 63424 - protein, 111 aa, Gossypium hirsutum
  Clone ID: LIB3135-013-Q1-K1-D8.pep
NFSVFDIHEFIFLCGVSFQLDDWVPCRIYKKSNALSSTTAIGAATSDQDLEEEEAEQFIKDALLPAAIKSPSTTNALLPQKSCSFSNLLDAMDYSMLSSFLADNQCNGIRI

SEQ ID NO: 63425 - protein, 96 aa, Gossypium hirsutum
  Clone ID: LIB3048-008-Q1-L1-H2.pep
NIGVKKALVFYKRRPPKGMKTNWIMHEYRLADNPNSNFNNRPLKSKDSSMRLDDWVLCRIYKKSNALSSTTAIGAATSDQDLEEEEAEQFIKDALL

SEQ ID NO: 63426 - protein, 86 aa, Gossypium hirsutum
  Clone ID: GOSHI-09MAY01-C26232_1.pep
FLFPLNGRKNHRVTQYFPRRNMVDSLIMWKMKRNCSWNPSQATKPGSNGEVSHRDRRAFLTVSFLRFGFNVAGCWWSIVTLRRHLT

SEQ ID NO: 63427 - protein, 66 aa, Gossypium hirsutum
  Clone ID: GOSHI-09MAY01-C27942_1.pep
PSRSKHTRTRSLVQVRVCSSYSVSSFSFSLRYFISSESMVTIMLSSLLMTLWEGNYINVVVVDESL

SEQ ID NO: 63428 - protein, 114 aa, Gossypium hirsutum
  unsure (1)..(114): unsure at all Xaa locations
  Clone ID: uC-gsflmaxxa026c09b1.pep
KQAYKNEEFGTGVPNTLNVSTNFPFLIEGVLGFVLCLGGGSFFNIRLPGELWGWLLFYGGTASAAFGSAYYHLKPDDNRRLLDTLPMMIAYSSLFSXFILERLGERIGLKCLFY

SEQ ID NO: 63429 - protein, 228 aa, Gossypium hirsutum
  unsure (1)..(228): unsure at all Xaa locations
  Clone ID: GOSHI-09MAY01-C27972_1.pep
MDCEMEKNSHDGVVVNGGNEGVLGLHAKRKKLIIDTDPGIDDSMAILMAFQNPEVDILGLTTVFGNVRTEDATRNALLLCXIAGCPSVPVVEGSHEPLKGGXPRVADFDHGSDGMGNIFRPPPKTEKSDKSASEFLVEKVSQYPGEVSILALGPLTNVALAIKRDSSFPSKVKKIVVLGGSFFALGNVNPAAEANIYGDPEAADVVFTSGANIVVVGINITTQVQMTD

SEQ ID NO: 63430 - protein, 228 aa, Gossypium hirsutum
  Clone ID: GOSHI-09MAY01-C27532_1.pep
WGSAAPGKKEKFSPIVWDLEDKKEEFIQDRDVVTTTILSSPSSPSKVSNTVSNQVYKHQPFSANMIKEVEHMASKSLVSDFGAALSPSLPEQQCQDDEQEPELIGKENVRAPNIFTSRWASDSDDEDGSLTEEKIRRSSSLESGELEREELEVDRVQSDQRSSSVLSACEDGGMDCKLDSVDVMDIDDMRDENAIVDRPDLGVEEPAGGCMNILYGCRSVFGYEQLNQ

SEQ ID NO: 63431 - protein, 144 aa, Gossypium hirsutum
  Clone ID: GOSHI-09MAY01-C27762_1.pep
VANTFGSFALLVLFALGGFVLSREDIKGWWIWGYWISPMMYGQNALMANEFLGHQWSRVLPGSNVSLGVEVLNSRSFFPDSYWYWIGVRGLIGFVLLFNFVFTVALSYLAPFEKDKAVISDEPESGNLSSQWGWSWWKHSVNKP

SEQ ID NO: 63432 - protein, 40 aa, Gossypium hirsutum
  Clone ID: GOSHI-09MAY01-C27602_1.pep
IYKLEMEQKRLEEDAFVYNWLQEQLKLSPAYKKVELIPIF

SEQ ID NO: 63433 - protein, 158 aa, Gossypium hirsutum
  Clone ID: GOSHI-09MAY01-C27352_1.pep
MAAAIDMYNSSSNSSVFSDPFSAELMKALEPFMKSASSTSPLSSSSSYSQSNLYPEFCSPWRTHLCSEQGFCNYQNLMGFEQTGSIGLNQLTPSQILQIQAQIYQQQQQQQEVASKSTTASLKNQRFNFLSPKAVPMKHVSSTPPKPTKLYRGVRQRH

SEQ ID NO: 63434 - protein, 53 aa, Gossypium hirsutum
  Clone ID: LIB3048-022-Q1-L1-A1.pep
QKLFRLERQTITERDSEKRGVTEKGGIKKKSENARTVLQPLKTLNFLFYFLEW

SEQ ID NO: 63435 - protein, 174 aa, Gossypium hirsutum
  Clone ID: GOSHI-09MAY01-C27232_1.pep
PRVRARIMNAILVLPELDAGSFWHDESGFQGIYDVEHFIQTLKYDVQIVESIPEIRQNGKTKKIKGYQLRPPRDAPIEWYTTVALKKMQEHGAIYLTPFSHRLAEEIDNPEYQRLRCRVNYHALRFKPNIMQLSESIVDKLRAQGHFMSIHLRFEMDMLAVAGCGLFVILVELW

SEQ ID NO: 63436 - protein, 138 aa, Gossypium hirsutum
  unsure (1)..(138): unsure at all Xaa locations
  Clone ID: GOSHI-09MAY01-C27222_1.pep
REIRKRKYEESLRDARRNYQSMANMWASLAQDSNVATALGLVFFVIFYRTVVLSYRKQKKDYEDRLKIEKAEAEERKKMRELEREMEGIEGEDDEAEQGGGEQNPYLKMAMQFMKSGARVRRAXNKRLPQYLERGVDV

SEQ ID NO: 63437 - protein, 195 aa, Gossypium hirsutum
  unsure (1)..(195): unsure at all Xaa locations
  Clone ID: LIB3828-013-Q1-K6-H12.pep
KKSRHVFTSSTLSPTKIENLAVFSGSTRGVSLFCNRGQLWRFKPVRIAGDDPEGSLQFTIKKSKKIAETRKLVSSLKXNITDLDENEAFHEQRDKSLPDVDLTSSSSISTVEGKNGSILSSSHVTSTVKDISEIRPSDEAGDEPEVHLSSEKASSDLGSTKLLKTTDSKAFKSDMLPSFPSSSSDAVLLTSVENE

SEQ ID NO: 63438 - protein, 147 aa, Gossypium hirsutum
  Clone ID: LIB3083-055-Q1-L1-C7.pep
IELAHTTLRRTITTRSSLTRSSISTVEDRCGTILSSSHVTSTVKDVSDIRPSDEVDDEPEVHFSSEKASSDLGSTELLKTTDFKAFKSDVLTYFPSSYYDAVLLTSIENENPTKACLEMVGELHDPAVESTKPPALSGANVMNIILV

SEQ ID NO: 63439 - protein, 352 aa, Gossypium hirsutum
  Clone ID: GOSHI-09MAY01-C20922_1.pep
GGPPFGSGGRHRGGRGGHGALVGTTVKIRQGPYKGYRGRVVDIKGQSVRVELESQMKVVTVDRDSISDNVVISTPHRESSRYGMGSETPMRSARTPLHPYMTPMRDPGATPIHDGMRTPMRDRAWNPYAPMSPPRDNWEEGNPASWGTSPQYQPGSPPSRAYEAPTPGSGWASTPGGSYSEAGTPRDSGSAYGNAPSPYMPSTPSGQPMTPSSGPYIPGTPGGQPMTPGTGGLDAMSPVIGPESEGPWFVPDILVNVHKSGDETLGVIQEVLPDGSCKVALGSSGSGDTVIAMPSEMEIIPPKKSDKIKIMGGSLRGLTGKLIGVDGTDGIVRIDDSLDVKILDLVILAKLP

SEQ ID NO: 63440 - protein, 270 aa, Gossypium hirsutum
  Clone ID: GOSHI-09MAY01-C20872_1.pep
MATNENLPPNVIKQLAKELKGLDESPPEGIKVGVNDDDFSIIYADIEGPAGTPYENGVFRMKLLLSHDFPHSPPKGYFLTKIFHPNIAPNGEICVNTLKKDWNPSLGLRHVLIIVRCLLIEPYPESALNEQAGKMLLENYDEYARHARLYTGIHAKPKPKLKSGAICESTTALNVEQHNTSVLNIEQKNAASGAGLSLPSPLAPSSTKGGNNPDHQSQPQQQPIVPATETGVSGTAVVGISGTAPKKEGLSKIPADKKKMDARKKSLKRL

SEQ ID NO: 63441 - protein, 56 aa, Gossypium hirsutum
  Clone ID: LIB3083-049-Q1-L1-B5.pep
MATNENLPPNVIKQLAKELKGLDESPPEGIKVGVNDDDFSIIYADIEGPAGTPYEN

SEQ ID NO: 63442 - protein, 119 aa, Gossypium hirsutum
  Clone ID: GOSHI-09MAY01-C20562_1.pep
SRHKCAFSQRYSTCSHSYRRVTVAPVEEFLLFPNTHARSRTLARLPSFLTSSPFARPQIHQLRAPLESFDYPFYIRSPPRIPTQSPSLDTHLAPDSSEPTRSIHPCSRRIPTPVLKSGS

SEQ ID NO: 63443 - protein, 174 aa, Gossypium hirsutum
  Clone ID: GOSHI-09MAY01-C20492_1.pep
MQQLKTATFESETSDQPMKNHLSLSSELNDIEEDKVPDTPTSIDSLHLLHKKLLLLDRKESGTEDSLDGSVFSDIEGGDGVLTVDKLKSALKAERKALNALYSELEEERSASAVAANQTMAMINRLQEEKAAMQMEAVQYQRMMEEQSEYDQEALQILNELMVKREKEKAELEK

SEQ ID NO: 63444 - protein, 263 aa, Gossypium hirsutum
  unsure (1)..(263): unsure at all Xaa locations
  Clone ID: GOSHI-09MAY01-C20792_1.pep
KHEGLKPLEWTRRLTIALDVARGVEYLDGLAQQSFIHRDLKPSNILLGDDMRAKVADFGLVRLXPVDGKQSIETRLAGTFGPRAPEYAVTGRVTTKVDVFSFGVILMELISGRRALDETQPEESMHLVSWFRRMHMNKETFRKAIDETIQLDEETLASVSTVTELAGHCCAREPYQRPDMSHAVNVLSSLAELWKPAEPDSDDIYGIDLELTLPQALKKWQAFEGNSNVDDSSSFLGSTDTTQTSIPCRPPGFADSFASADAR

SEQ ID NO: 63445 - protein, 218 aa, Gossypium hirsutum
  Clone ID: GOSHI-09MAY01-C20772_1.pep
MADSTVINGEVENQMADNFYDADEAKFTEQDSKIKALESEKLDLSNENKELKEKVKKATLEIDQLRNKEEEMRQEMDNWDEDKKVLKSVATRSADLETEVARLQHDLITSMSDADEANKQSMELKRELEEKGLEIRRLGKEITELKKEKVESEKRERELERKLGVLEVRESEERSKNVRMEEELRQQLDVFKNKVKDLEAEVAKTRVELETTIGEQRE

SEQ ID NO: 63446 - protein, 153 aa, Gossypium hirsutum
  Clone ID: GOSHI-09MAY01-C20192_1.pep
CWASWNPRRERNVTSHKERPHSPNQGPGLPVEAPPSNMDNRNEQRSVSGFRKNGNQANRYGRGHESRGDWGSSGQEKQPNPPANRERQRHNSHYEYQPVGPQNNNNNSRANNPEGGREGSHGTGARYKERGQTHSRRGGGNFHGRLSGIGGYE

SEQ ID NO: 63447 - protein, 48 aa, Gossypium hirsutum
  Clone ID: LIB3083-030-Q1-L1-E2.pep
SIHIPLSVRQDLIVFYNTKMLPTREYLKICGDQTICCSRQIAVYTKTK

SEQ ID NO: 63448 - protein, 55 aa, Gossypium hirsutum
  Clone ID: GOSHI-09MAY01-C20162_1.pep
LIFQSNFILETSRMKVLQLFNLVPNFEYRTLCIEFLHEIYTQSYDHIIDLVIIIR

SEQ ID NO: 63449 - protein, 100 aa, Gossypium hirsutum
  Clone ID: LIB3083-028-Q1-L1-E9.pep
WRSLSQNQRAFWVVGTWYESRRNLLTVEKSKGGTTGGIGHSGKPTAEVSVKEGYFIPAPARELIALDFAKGKSADNPKNPGAYPPPGDTHDYESPAKVTK

SEQ ID NO: 63450 - protein, 65 aa, Gossypium hirsutum
  Clone ID: LIB3083-028-Q1-L1-F10.pep
LGVILFLRDKAATSGDGNFKVAPNYEVDTGMHITKVADDFRIVNKISPTKFLKNIHLPNESTVSR

SEQ ID NO: 63451 - protein, 169 aa, Gossypium hirsutum
  Clone ID: GOSHI-09MAY01-C20022_1.pep
MKGPIKIAIADMLISFMWVFCSSAFGLLTYFITTAAGVQTVPWAAIVIITVVFFVFLSIFNIIGGFLGGASFDPAATTAFYAAGSGADTLISMALRFPAQAAGAVGGALAIMEAIPEQYKHMIGGPSVKVDTHTGAFAEGVLTFAITFIVLLIMLRGPQSEIFKTWFLS

SEQ ID NO: 63452 - protein, 236 aa, Gossypium hirsutum
  Clone ID: GOSHI-09MAY01-C20352_1.pep
TPTRTLVLDRRHVSEIGGRFKTGISKLSNNINVSAFSNIASNFLQFGSEGEGVETYESGIAVGVTEEVVAFARDLAMHPETWLDFPVPDDDGFDDFDMSDEQQEHALAVERLAPRLAALRIELCPGYMSEGCFWKIYFVLLLPRLNKQDAELLSTSQIVEARAMLMQGIHNRSKAKMEDHSESGTSNIKADLPHEEFPSVPSPAQSKPTPFNESRNDAADTAVAVDASTHNPPRPA

SEQ ID NO: 63453 - protein, 221 aa, Gossypium hirsutum
  Clone ID: GOSHI-09MAY01-C20372_1.pep
ARGHHKNRSITLGSVKEFNFDNINGEIEEDATKSVETYEGRVGETYNERPEQAPADGEGKPQHHKNRSITLGSLKEFNFDNVNAEIEENATKSVETHECRVGETYNERPEKAEVSLQNEAARETEENSKSAETYEYRVGETCNVRPEKAPADKEAKPQHHRNRSITLGSAKEFNFDNPDGGDVHNKPIVSSDWWANEKVAGNDDGIPKNWSFFPMLQPGVS

SEQ ID NO: 63454 - protein, 84 aa, Gossypium hirsutum
  Clone ID: GOSHI-09MAY01-C20312_1.pep
MMIPLIVSTCIHLVFIFAAVSCEKDSIYDILKAHGLPMGLLPKGISRFDIDDTGRFEVHLDQACNAKFESQLHFDTNVSGTLSY

SEQ ID NO: 63455 - protein, 162 aa, Gossypium hirsutum
  Clone ID: GOSHI-09MAY01-C21962_1.pep
MAELTRAEVYTPRSMQVWRALLNWLAFFFQIFAQIIRAVGQYPLLSSSSTTETETKTTTSSSTHRFKPLPVVDSVEIECPSTVDIAAVLDSPVPIDQDRTEKLTVVLDLDETLVCAYETSSLPPALRSQATDAGLKWFELECVSSDKEFEGKPKISYVTVFE

SEQ ID NO: 63456 - protein, 225 aa, Gossypium hirsutum
  Clone ID: GOSHI-09MAY01-C21932_1.pep
MGNSIGGRNRAKVMKIDGETIKLKTPIRVWDVLKDYPTGHVLLDSQTVKHYGIRAKPLEPQESLKPKKIYFLVELPKLADDEVHKAPRRVRSGGIHMSAKDRLECLMLSRRTVSDLSMVRPSSTSMVSDGVRLGGGGGGTSGGGMMTVKMRLPKSQMAKLVEESKDGVEVAERSLIFISKWWYGGDDAGNRIHREAPWKPGLGTAGENFKPKREKRVSFIPQEES

SEQ ID NO: 63457 - protein, 320 aa, Gossypium hirsutum
  unsure (1)..(320): unsure at all Xaa locations
  Clone ID: GOSHI-09MAY01-C21892_1.pep
VGIRGPKADAATLRXQLIEFCDQKXMIKLDNESLPIEHITKGIMFLDHVLCRRVVYPTLRYTATGGKIISEKGVGTLLSVTASLKQCIKQFRKLNFLKGDREPDPQPCFRMFHATQAHTNAQMNKFLSTMVEWYRYADNRKKVVNFCSYIIRGSLAKLYAAKYKLRSRAKVYKIGARNLSRPLKERKGQSPEYQNLLRMGLAESIDGLQYTRMSLIPETDYTPFPSNWRPDHEKALIEYIRLDDPKTLEEQKGCIQEQGLVSPQDYISMLVWNYKRNAIVMDQLSLVKSAGLLSSSYRENDDPKNKEQEESEERLHASQM

SEQ ID NO: 63458 - protein, 158 aa, Gossypium hirsutum
  unsure (1)..(158): unsure at all Xaa locations
  Clone ID: GOSHI-09MAY01-C21872_1.pep
METAIRGRLSLSPNTVFNPKPGEKRSLCRGPCTNRGVLMAISTTGPSKGGGILEKPVIERTTPGRESEFDLRKSRKIAPPYRVMLHNDNYNKREYVVQVLMKVIPGMTLDNAVNXMQEAHYNGLAVVIICAQADAEEHCLQLRGNGLLSSIEPASGAC

SEQ ID NO: 63459 - protein, 221 aa, Gossypium hirsutum
  unsure (1)..(221): unsure at all Xaa locations
  Clone ID: GOSHI-09MAY01-C21862_1.pep
QNSAFRGNFNLQNLLILTAIKADPSRVMDYINRLDNFDGPAVGEVAVEAQLYEEAFAIFKKFNLNVQAVNVLLDNIRSIDRAVEFAFRVEEDAVWSQVAKAQLREGLVSDAIESFIRADDATQFLDVIRASEDADVYPDLVRYLLMVRQKVKEPKVDGELIYAYAKTDRLGEIEEFILMPNVANLQXVGDRLFDEALYEAAKIIFAFISNWAKLAGTLVRL

SEQ ID NO: 63460 - protein, 79 aa, Gossypium hirsutum
  Clone ID: GOSHI-09MAY01-C21802_1.pep
PLFMSPKKENLDYLVNLLKDGKLKTVIDSKYPLSKAEEAWAKSIDGHATGKIIVEPESMKYYFILTAVMLGGHAACVYN

SEQ ID NO: 63461 - protein, 235 aa, Gossypium hirsutum
  Clone ID: GOSHI-09MAY01-C21562_1.pep
MAAVTGSNVVALKPAARLADPTDRKFVQIRQWSPISAGFGSVQARPCIGLQCQSKRSFASPGVKAQVATVEQASIEAAQNVEAPVAIVTGASRGIGKAVALALGKAGCKVLVNYARSSKEAEEVSKEIESYGGQAVTFGGDVSKEADVEGMIKTAVDTWGTVDILINNAGITRDTLLMRMKKSQWQEVIDLNLTGVFLCTQAAAKIMMKKKKGEIINIPSLVGLVGNIGQANFIA

SEQ ID NO: 63462 - protein, 107 aa, Gossypium hirsutum
  unsure (1)..(107): unsure at all Xaa locations
  Clone ID: GOSHI-09MAY01-C21422_2.pep
RDLQEASERVEMLEAKNAXIESEAFMYRNLAGXLESDLKSLSDAYNRLEQTNFHLDIEANSLKSGGTSTSSDFDAIKADAWEEAQNESVAELYDLLVCLGQEQSMVD

SEQ ID NO: 63463 - protein, 125 aa, Gossypium hirsutum
  Clone ID: GOSHI-09MAY01-C21422_1.pep
HASAHASAHAFAHASGKLESDLKSLSDAYNSLEQTNIHLEKEAKTLKSGGTSTSPDIEAIKAEAREEAQKESEAELNDLLVCLGQEQSKVEKLSARLSELGEDVDKLLEGIGDDMALPEDEDEED

SEQ ID NO: 63464 - protein, 145 aa, Gossypium hirsutum
  Clone ID: GOSHI-09MAY01-C21792_1.pep
ELEKTKADNVKLYGKIRYVQDYNQEKVISRGSKKYAEDLESGFTSDVESKYKKIYEDDINPFAAFSKKERDQRYKELGFRDRITLSSGRFLLGNKYARTFAFFYTIGLHILVFTCLYRMSALSYLSHGSEETAVVEKNLNRPRGY

SEQ ID NO: 63465 - protein, 104 aa, Gossypium hirsutum
  Clone ID: LIB3147-008-Q1-K1-D8.pep
PTRPPTRAPTRPPTRPQDYNQEKVISRGSKKYAEDLESGFTSDVESKYKKIYEDDINPFAAFSKKERDQRYKELGFRDRITLSSGRFLLGNKCARTFAFFYTIG

SEQ ID NO: 63466 - protein, 89 aa, Gossypium hirsutum
  Clone ID: GOSHI-09MAY01-C21782_3.pep
SPPPPVKAPAPTYHYNSPPPPSPSPPPPYYYKSPPPPAHSPSPPYYYKSPPPPSPSPPPPYYYHSPPPPVKSPPPPVYIYASPPPPTPY

SEQ ID NO: 63467 - protein, 82 aa, Gossypium hirsutum
  Clone ID: GOSHI-09MAY01-C21782_2.pep
APAPTYHYNSPPPPSPSPPPRYYYKSPPPPAHSPSPPYYYKSPPPPSPSPPPPYYYHSPPPPVKSPPPPVYIYASPPPPTPY

SEQ ID NO: 63468 - protein, 76 aa, Gossypium hirsutum
  Clone ID: GOSHI-09MAY01-C21782_1.pep
KSPPPLPYYYKSPPPPVKAPAPTYHYNSPPPPSPSPPPPYYYKSPPPPVHSPPPPYYYKSPPPVYTHAFPPPPTPY

SEQ ID NO: 63469 - protein, 78 aa, Gossypium hirsutum
  Clone ID: uC-gsflnu33B079d02b1.pep
SRVRSNLCECRNVALRMIDEALSIYCGHAFAIRWIIRCTMGTISNKRIYLFHMQNESKRDKTILGNTLYMMICEIEVE

SEQ ID NO: 63470 - protein, 107 aa, Gossypium hirsutum
  Clone ID: LIB3135-004-Q1-K1-E7.pep
YITCIYPLYLHKLNNPNSLLDLIRSTTPRPYSRFASKINEGPMKEGRFGHQNSSFLSPWNKVLSITVERYNFYNSCLHVTSTSLVAMLHMLFIYCSGIRRYCVFFLF

SEQ ID NO: 63471 - protein, 61 aa, Gossypium hirsutum
  Clone ID: LIB3083-072-Q1-L1-A6.pep
STTNTLLDLKRSTTHRSYSSFASKIKEGAKKEGRFGHQNSSFSSPWNKGLSITVERYQFDN

SEQ ID NO: 63472 - protein, 88 aa, Gossypium hirsutum
  Clone ID: GOSHI-09MAY01-C21612_1.pep
MASSQHRCVFVGNIPYDATEEQLIEICREVGPVVSFRLVIDRETGKPKGYGFCEYKDEETALSARRNLQGYEINGRQLRVVFAENDRL

SEQ ID NO: 63473 - protein, 228 aa, Gossypium hirsutum
  unsure (1)..(228): unsure at all Xaa locations
  Clone ID: GOSHI-09MAY01-C21062_1.pep
WTVGFLGWGIVGXTMSMNLLKNGFKVTVWNRTLSKCNELVAHGASIGKTPAEVINKCTITIAMLSDPAAALSAVLDKDGVLEQICGGKGYIDMSTVDPETSCKINEAITSKGGRFLEAPVSGSKQPAETGQLVILAAGDKALYEAAMPAFDILGKKSFFLGQVGNGAKMKLVVNMIMGSMMNAFSEGLTLADRSGLNPRDLLDVLDLGAIANPMFKGKGPAMLQNNYS

SEQ ID NO: 63474 - protein, 107 aa, Gossypium hirsutum
  Clone ID: GOSHI-09MAY01-C21382_1.pep
SQDDRVKVLSKEKHEVGKGERRRGNCKEDNVSKRDEIIFPPKQEFAVEGYQPHHGREQASARKNDLNIPSWQKQEVSAGKVEFWNGKDDVAFKTARLSSSSHGKIME

SEQ ID NO: 63475 - protein, 257 aa, Gossypium hirsutum
  Clone ID: GOSHI-09MAY01-C21372_1.pep
LRARRPSRARTESGIFRAVLKADPSFDEAPWPSLSSEARDFVKRLLNKDPRKRLTAAQALSHPWIKKYNDVKVPLDILIFKLMKAYLRSSSLRKAALRALSKTLTVDELFYLKEQFALLEPNKNGTISLENIKAVLMKNATDAMKDARIPEFLASLNALQYRRMDFDEFCAAALTVHQLEALDRWEQHARCAYEIFEKEGNRPIVIEELASELGLSPSVPVHAVLHDWIRHTDGKLSFLGFVKLLHGVSSRTIAKAQ

SEQ ID NO: 63476 - protein, 219 aa, Gossypium hirsutum
  Clone ID: GOSHI-09MAY01-C21242_1.pep
GGDSHKLLWHQNVCGSTNKSTVLCCKCGISMAPNPANMCVTCLRSEVDITEGLRKHVTIMHCPDCDSYLQPPRTWIKAQLESKELLTFCVKRLETDLKKVRLVNAEFIWTEPHSKRIKVKLGVQKEVLNGAILEQSYVVEYVQQDNMCDSCTRFQANPDQWVASVQLRQRVSHRRTFFYLEQLILKHDAACHAIKIKQMDQGIDFFFANKNHAVKFVEI

SEQ ID NO: 63477 - protein, 193 aa, Gossypium hirsutum
  Clone ID: GOSHI-09MAY01-C22992_1.pep
KIKDEEGEGCNIYGFLEVNKVAGNFHFAPGKSFQQSNVHVHDLLAFQKDSFNLSHKINRLAFGDYFPGVVNPLDSVHWTQEQPSGMYQYFLKVVPTVYTDVSGHTIQSNQFSVTEHFKGAEVGRLQSLPGVFFFYDLSPIKVTFTEQHVSFLHFLTNVCAIVGGVFTVSGILDSFIYHGQKAIKKKMEIGKLS

SEQ ID NO: 63478 - protein, 220 aa, Gossypium hirsutum
  Clone ID: GOSHI-09MAY01-C22962_1.pep
RNVILDNKVQQLENKIKMLEGELREAAATEAALYSVVAEHGSSMSKVHAPARRLSRLYLHACKEGSQLRRGSAAKSAVSGLALVAKACGNDVPRLMFWWSNCVVLRAIISESTVGCTERNGVEKGKKLASSPLKWRESSPGRKENKSFSDWDNPLAFTSALERVETWVFSRIIESVWWQALTPHMQSEGKKEIYEGKGSGSSKSYGRIPSSSNQDQVNFS

SEQ ID NO: 63479 - protein, 63 aa, Gossypium hirsutum
  Clone ID: GOSHI-09MAY01-C22882_2.pep
PYEAPSIAIILVACLRLNRHETSPEINGNMKKKCNENVTHKLHPTNKGTVFYSLVLPEYGVYL

SEQ ID NO: 63480 - protein, 80 aa, Gossypium hirsutum
  Clone ID: GOSHI-09MAY01-C22882_1.pep
MSNEFADKGDKIIYETEAKGFNPGLIVLLVIGGLLITFLVGNYILYSYAQKTLPPRKKKPVSKKKMKRERLKQGVSAPGE

SEQ ID NO: 63481 - protein, 136 aa, Gossypium hirsutum
  Clone ID: GOSHI-09MAY01-C22832_1.pep
MASTSNRTGGGSSYGGAAPYRSRDGLSTRPVASSDEIQLRIDPMHADLDDEISGLRSQVKQLRNVAQEIGSEAKFQKDFLDQLQMTMIKAQAGVKNNIRKLNKSIIKHGSNHIVHVVLFALFCFFVVYMWSKVSRR

SEQ ID NO: 63482 - protein, 82 aa, Gossypium hirsutum
  Clone ID: GOSHI-09MAY01-C22552_1.pep
RVEHGELIASAEGANKLVEEMHGKAKELEDEIERQSRAIEEAAEEKREAIRQLCFSLEHYRDGYYKLKQAFTGNKRVPILAT

SEQ ID NO: 63483 - protein, 197 aa, Gossypium hirsutum
  unsure (1)..(197): unsure at all Xaa locations
  Clone ID: GOSHI-09MAY01-C22562_1.pep
FTRPPTRPGVPRSDXKLFGLIQKAAYTVGGYSFSAAAIEYVILKMKPPLHRPQIALLLALHKLKVSDEQRKSAIDTYEPLVTFALSSGMYSSPAVRIYTAKNVREELEEAQRDFIRASVGVSSKGKLLVPKLLHCFAKGFVDDSNLAVWISHYLPPNQAAFVEQCISQRRQSLLGSRNCGILPFDSRFRYLFLPDKN

SEQ ID NO: 63484 - protein, 63 aa, Gossypium hirsutum
  Clone ID: LIB3189-040-P1-K1-E2.pep
MFLLFQAAYTGGGYSFSAAAIEYVILKMKPPLHRPQIALLLALHKLKVSEEQRMCAIDTYEPL

SEQ ID NO: 63485 - protein, 112 aa, Gossypium hirsutum
  unsure (1)..(112): unsure at all Xaa locations
  Clone ID: GOSHI-09MAY01-C22502_2.pep
GANLKNLDLSSAXVSSVGIGILVGHVPKLENVSLSHTAIDDVALSYIGLMPSLKVIDLSNTDIKGFFLQLGTESHVDSTLTALQNLSYLESLNLEHTQVRDPDLLPLLSCKN

SEQ ID NO: 63486 - protein, 268 aa, Gossypium hirsutum
  unsure (1)..(268): unsure at all Xaa locations
  Clone ID: GOSHI-09MAY01-C22502_1.pep
GSNLKNLNLSRXESASDCMVILAPHEPDLAKSAVSHTAVDDVALXIIGLMPSLXVIDLSNTDIKGAFLQLGTESHVDSTLTALQNLSYLESLNLEHTQVRDPDLLPLLSCKNLSHLSLKCASLTDATLHLLSSLPKLTTLHVRDAVLTTNGLDTFSPPTTLRVLDLMGCWLLTEDAISQFIKKHPQVEIRHEIVQNLSTEQQTISNCLSTSQXLGGDLNGTKKQGNLPMPQFFGDQRLKYNREELLALQFSPLALQSPHDAGSVTPNI

SEQ ID NO: 63487 - protein, 130 aa, Gossypium hirsutum
  Clone ID: GOSHI-09MAY01-C22522_1.pep
HEYHQIKFLVSQGCIKPLCDLLNCPDPRIVTVCLEGLENILKVGEADKNLGTTGGVNLYAQMIDDAEGLEKIENVQSHDNTEIYEKAVKVLETYWLEEEDETMPPGDASQTGFHFGGGELPVPSGGFNFS

SEQ ID NO: 63488 - protein, 105 aa, Gossypium hirsutum
  Clone ID: LIB3083-082-Q1-L1-G9.pep
VQAKLCLHYPVMHNINLAVLLTPSQPATIHTVLWTIPDCGHNPKIRCVLWTPPPKKKKNYCPIISVRSSILDQITPGILTAFIAQKHTNGSQICSPISNDITRSH

SEQ ID NO: 63489 - protein, 60 aa, Gossypium hirsutum
  Clone ID: GOSHI-09MAY01-C22492_1.pep
LRICIWATALMSSHAMHYCCLDMSKCQFIIIYKSGSEWTGGLWMANKAQGRCLWHVMRWS

SEQ ID NO: 63490 - protein, 81 aa, Gossypium hirsutum
  Clone ID: GOSHI-09MAY01-C22482_1.pep
LKSYLRAYQIILLDGLLVDMMWDSHDWVFKQTDGRAEFMFRTRSGFDSRLWLEEKSGCLEHSDKGRGHEFSLLICACKNPR

SEQ ID NO: 63491 - protein, 117 aa, Gossypium hirsutum
  Clone ID: GOSHI-09MAY01-C22462_2.pep
MASWLKVAEDLFEVVDRRAKLVANDLSEEPPDSQTQGSSAEKTKPRAKAQKRLSTKRSPKPSDTINKQTSSEVLKSYEARIKQLQQDLSVSKSEVTRVESNMLIALAAKNSEIEALV

SEQ ID NO: 63492 - protein, 211 aa, Gossypium hirsutum
  Clone ID: GOSHI-09MAY01-C22462_1.pep
TKDIEVVSEDHLTDGGQNSDSQTSDVPSKTDQERPQHPQKESSQHVIADSHDNFEAKLKEVDVKVETPVNQKKSQEQNADTPQTVVQDQLDEAQGLLKTTNSTGQSKEARLARVCAGLSSRLQEYKSENAQLEELLIAERELSKSYEARIKQLQQDLSVSKSEVTRVESNMLDALAAKNSEIEALGNSMDALKKHAALSEGNLASLQASME

SEQ ID NO: 63493 - protein, 127 aa, Gossypium hirsutum
  Clone ID: GOSHI-09MAY01-C22402_1.pep
DTKVDVFSFALILQEMIEGYPPFSAKQDNEVPKVYAARERPPFKAPAKHYAHGLKELIEECWNEKPAKRPTFRQIITRLESIHNSFSHRKRWKVRPLKCFQNLEAMLKKDHSSPSSRSSSSRSTNSI

SEQ ID NO: 63494 - protein, 193 aa, Gossypium hirsutum
  Clone ID: GOSHI-09MAY01-C22752_2.pep
HAFVDAWADAWAKIVYKPGAEKNATNSDSADAKKKAKGDKEAVPEKKAPEKEASDKDKELSVSLLNIQVGLIRKAWKHPSADSLLVEEIDVGEAKVRQVVSGLAKYCSPEDLTNRRVVLITNVKPGKLRDVMSEGLVLCASNEDHTKVEPLLPPEGAKPGEPISFSGIDGKPEDVLNPKKKQLEKITPNLFTD

SEQ ID NO: 63495 - protein, 248 aa, Gossypium hirsutum
  Clone ID: GOSHI-09MAY01-C22752_1.pep
MATNGTSDLKRKQGIVSSLCKHFSLDPKAFSSQVPGNDIKALYINILKSSGKESPQNNDEVMKWIAFADSFPSDSKACHGGLNELNTDLAKKSVLLGNGFTPSEADVIVFSVIHSSMIALSTPEKEKLPHVMRWMDYIQNSEDLGALFEKILLEKPVFEPQMAKAAAKPEVTSRAKGTVQNTKIADKPDAEKNAKKSDSADAKKKAKGDKELFQRRKHLKKKHLIKTKTSALLISRVYRKMNTSLKYW

SEQ ID NO: 63496 - protein, 110 aa, Gossypium hirsutum
  Clone ID: GOSHI-09MAY01-C22702_2.pep
IFSEHQMAKLKQNEALTVEREREIQQVAESVNELAQIMKDLSVLVIDLRSPARSIDYNIQNVATTVEEGLRQLQKAERTQKQGGMVMCATVLVIMCFVMLVLLILKEIIF

SEQ ID NO: 63497 - protein, 226 aa, Gossypium hirsutum
  unsure (1)..(226): unsure at all Xaa locations
  Clone ID: GOSHI-09MAY01-C22702_1.pep
ATKSSGGGPVIEMVSTSLLHPNRSYTPLSTEDPGNSSKGAVTVGLPPAWVDVSEEIXANVQRARTKMAELAKAHAKALMPSFGDGKEDQRIIESLTHEITNLLRKSEKRLQKLSASGPSEDANVRKNVQRQLATALQNLSMELPKKQSTYLKRLRQQTEGQDGVDLQMNINGDRSYAENDHLDDMIFSEHQMAKLKQNDALTLEREREIQHVAESRNELAQIMKDL

SEQ ID NO: 63498 - protein, 228 aa, Gossypium hirsutum
  unsure (1)..(228): unsure at all Xaa locations
  Clone ID: GOSHI-09MAY01-C22722_2.pep
CLLNFGDSITTXHISPAGSIHKDSPAAASPLDRGVERKDFNSYGSRRGNDEVMARGTFANIRLVNKLLNGEVGPKTVHVPTGEKLYVFDAAMRYKDAGYDTIVLAGAEYGSGSSRDWAAKGPMLLGVKAVIAKSFERIHRSNLVGMGIIPLCFKSGEDADTLGLTGHERYTIDLPRKIADIRPGQDVTVTTDNGKSFTCTVRFDTEVELAYFNNGGILPYVIRNLIRQ

SEQ ID NO: 63499 - protein, 509 aa, Gossypium hirsutum
  unsure (1)..(509): unsure at all Xaa locations
  Clone ID: GOSHI-09MAY01-C22722_1.pep
AHASAHASACIGGPKRPHDRVPLREMKADWNSALAXMVGFQGGAVPKEAQGKVAKFSFHGQPAELKHGSVVIAAITSCTNTSNPSVMLGAGLVAKKACELGLQVKPWIKTSLAPGSGVVTKYLLQSGLQEYLNKQGFHIVGYGCTTCIGNSGDLDESVASAISENDIVAAAVLSGNRNFEGRVHALTRANYLASPPLVVAYALAGTVDIDFDKEPIGTGKDGKSVYFKDIWPSTEEIAEAVQSSVLPEMFKSTYEAITKGNPMWNQLSVPSSTMYSWDPNSTYIHEPPYFKNMTMEPPGAHGVKDAYCLLNFGDSITTDHISPAGSIHKDSPAAKFLLDRGVERKDFNSYGSRRGNDEVMARGTFANIRLVNKLLNGEVGPKTVHVPTGEKLYVFDAAMRYKDAGHDTIVLAGAEYGSGSSRDWAAKGPMLLGVKAVIAKSFERIHRSNVVXMGIIPLCFKAGEGADTLRFTGYQPYTLGSPNKIFCLKPGLDVPFPIAIGSLSIPLSP

SEQ ID NO: 63500 - protein, 172 aa, Gossypium hirsutum
  Clone ID: LIB3829-034-Q1-K6-H4.pep
ADRATIANMSPEYGATMGFFPVDHVTLQYLKLTGRSDETVAMIESYLRANKMFVDYNEPQQERVYSSYLELNLAEVEPCISGPKRPHDRVPLREMKSDWNSCLNNKAGFKGFAVPKEAQDKVAKFSFHGQPAELRHGSVVIAAITSCTNTSNPSVMLGAGLVAKKACELGLQ

SEQ ID NO: 63501 - protein, 98 aa, Gossypium hirsutum
  unsure (1)..(98): unsure at all Xaa locations
  Clone ID: LIB3829-034-Q1-N6-H4.pep
KSFERIHISNLGGMGIIPLCFKIGEDSPPLGLTGHERYTIDFPTKITDIRPGQDXVAVTADNGKXFKIATARLGTKVELALFDNGGILPYVFRNLFKQ

SEQ ID NO: 63502 - protein, 83 aa, Gossypium hirsutum
  Clone ID: LIB3825-027-Q6-N6-G4.pep
MGIIPLCFKFGEDPDPLGLTGHERYTIVFPSKITDIKPGQNVTVPPDNGKFFTCPVRFDTEVELAYFNNGGIFPYVFRNLIKQ

SEQ ID NO: 63503 - protein, 69 aa, Gossypium hirsutum
  Clone ID: LIB3146-051-Q1-K1-C4.pep
DTLGLTGHERYTIDLPNKICDIRPGQDVTVTTDNGKSFTCTVRFDTEVELAYFNNGGILPYVIRNLIKQ

SEQ ID NO: 63504 - protein, 167 aa, Gossypium hirsutum
  unsure (1)..(167): unsure at all Xaa locations
  Clone ID: GOSHI-09MAY01-C22192_1.pep
MSEAEQANSPKPPPYLEVLCKSSGKKTRFAAGTKAGFAVSLINRKLGIGAPVALHIESFREGEEPIIFGPDAVLVNYGNGWNLQTVNEMDFPGIGKGKHVRGFPTQLPNGKNVDLTNSRKMVSKPGISFLYIAKVLLAFXRMFMLAGVFMLALDNLPKLILLFNSSM

SEQ ID NO: 63505 - protein, 123 aa, Gossypium hirsutum
  Clone ID: LIB3083-078-Q1-L1-E12.pep
MNLARASFFLHIESIREGEEPIIFVPYSVLVNYGNGWNLQTVSEMDFPGIGKGKHVRGFPTHIPNGKNVDLTNSRKMVSKPGISFLYIAKVSLAFVLIFILPVVFMLALDNLPKLILLFNSSM

SEQ ID NO: 63506 - protein, 180 aa, Gossypium hirsutum
  Clone ID: GOSHI-09MAY01-C22142_1.pep
LSSEKIQEARGEAAANRDKYVGLSSTCITYKSSASSYRSGGFNGGGDKYGGISSRRESDSYRDSYKESDPYGEEKFDTDTYVKSHRGTACEIQGNSSKESRHHGSKDSKKKFSSELNDSNKYSQSTSTPSNNFDDDFDDFDPRGTSSSKLAAGSSNQVDPFGPNLIDDLFDGPAPVPMEK

SEQ ID NO: 63507 - protein, 147 aa, Gossypium hirsutum
  Clone ID: GOSHI-09MAY01-C22172_1.pep
TQYNTNTPPLSHSDVRMNLMLSGSNKRDGVSEAGVQGTEMNDVTITVDQDHGSLLAGEILKRNYSSWLSGLFNKDNNSVEVAHFHGLQEALDKTRYGETPDYLKGIAALIEVDRGKATKFGHKNIELLVCAAIKEMEDWRTPKEFRL

SEQ ID NO: 63508 - protein, 165 aa, Gossypium hirsutum
  Clone ID: GOSHI-09MAY01-C22162_1.pep
MNNPHHLNPTSLKSRFTTRFLRALTKIRAQKPISSSSPTEIFRRYRRIKVAADKSMAYSVRSRRIWSKAMLWKLRSRSYRRQDPCSGRRSGKTNQAIMKKSSNENTTTRREDGVGFVEEADELRQLVPGGETMNLCNLLDETAHYIKCLTTQVQVMKKIADFYSF

SEQ ID NO: 63509 - protein, 274 aa, Gossypium hirsutum
  Clone ID: GOSHI-09MAY01-C22092_1.pep
PTRPPTRPIFRENIQRKRKFRREREKMFAYDRVSHSSANKADEIDLESGETLYPGLSYGENQLRWGFIRKVYGILAAQLVLTTVVSAFVVLSAPVNELLRGNSGLLLFLCLIPFVLLWPLHVYHQKHPVNLVILSLFTVSLSLTVGVSCANTDGRIVLEALILTAAVVASLTGYTFWASKKGKDFSYLGPILFTGLIILILTGLIQMFFPLGPTSTAVYGGISALIFCGYIVYDTDNLIKRFTYDDYILASATLYLDILNLFISILRVLRSGDN

SEQ ID NO: 63510 - protein, 113 aa, Gossypium hirsutum
  unsure (1)..(113): unsure at all Xaa locations
  Clone ID: LIB3828-020-Q1-K6-E9.pep
NLIHAVLWPLHVYHQKHPVNLVILSLFTVSLSLTVGVSCANTDGRIVLEALILTAAVVASLTGYTFWASKKAXDFSYLGPILFTGLIILILTGLIQMFFPLGPTSTAVYGGIS

SEQ ID NO: 63511 - protein, 131 aa, Gossypium hirsutum
  Clone ID: LIB3083-062-Q1-L1-F2.pep
PNSNPLTHLIPTKPIKIKLGSNKTFSPELTYGKTQLRWGFIRKVYRILAPQLVLTTVVSAFVVLSAPVNELLRGNSGLLLFLCIIPFVLLWPLHVYHQKHPVNLVILGLFTVSLSLTLGVSFANTDGRIVL

SEQ ID NO: 63512 - protein, 57 aa, Gossypium hirsutum
  unsure (1)..(57): unsure at all Xaa locations
  Clone ID: LIB3149-064-Q1-K1-H4.pep
RNGXAGPTHANKASRKDFKVWLTSNGLMNRKNISLYSIIARLGNYCIRTAFGYFLLL

SEQ ID NO: 63513 - protein, 152 aa, Gossypium hirsutum
  unsure (1)..(152): unsure at all Xaa locations
  Clone ID: GOSHI-09MAY01-C22332_1.pep
IEQIRRRFPMLESXHVTYDSKVNQAENLMVVGRGPECTAIADPKYSMCQLALNGLPSEVYEMKWDLIMVDAPTGYFEDAPGRMTAIYTAGMMARNKEKGETDVFVHDVNRVVEDKFSMAFLCQGGMKMREGRLRHCRIPSHKDSLERPFCPE

SEQ ID NO: 63514 - protein, 122 aa, Gossypium hirsutum
  Clone ID: GOSHI-09MAY01-C22262_2.pep
MASKEEVFSVELPAPASWKKMFSPKKVGSPRKTEIMFIAPTGEEISSRKQLEQYLKSHPGNPPITEFDWGTGETPRRSARISEKAKATPTPEKEPPKKRGRKSLSAKKENMETEACSRKIRW

SEQ ID NO: 63515 - protein, 191 aa, Gossypium hirsutum
  Clone ID: GOSHI-09MAY01-C22262_1.pep
MVRLLVAPRTNWRDRTRPLTRPEPPKKRGRKSLSAKKENKETEAVPEKSEGEKENEKEDAPTTEKETAEAEREKDTSIETQVQDGGKTEVADQTGHADTKMEEAGTDVKVPETAEAGKKEEAAGTEETPTAMEVQEKPAEASCIDGTQTAKEEEAPTEKVPQTQAEKENGTCEKQPENPETVTLEANGGVE

SEQ ID NO: 63516 - protein, 274 aa, Gossypium hirsutum
  Clone ID: GOSHI-09MAY01-C23942_1.pep
MELMKSSDNIIQDRTQQQHKQEPEMQAQEGQQEQGHHFHVLAVDDSVIDRKLLEKLLKVSSYQVTCVDSGDKALEYLGLLNNLDSDSTASSSSPSSSSSSSSSSSNSSSCSQSSQREGLKVNLIMTDFCMPGMSGYDLLKRLKGSSWKDVPVVVMSSENVPSRISMCLEGGAEEFMLKPLQLSDLEKIEAYLLKSLHLSCTNIDKDDDDNNADHNSDNNNDKVVNNDSNIDKGNNSTSMNNNFSKRKALSSEDTESRRPKIKGLSGCDMKKGIN

SEQ ID NO: 63517 - protein, 50 aa, Gossypium hirsutum
  Clone ID: LIB3585-064-P1-K2-C11.pep
PTRPNLFTLSDTLLLMVHLNASLFLLRNQFALKDLYKYLYSIYTFTCLGM

SEQ ID NO: 63518 - protein, 147 aa, Gossypium hirsutum
  unsure (1)..(147): unsure at all Xaa locations
  Clone ID: GOSHI-09MAY01-C23802_1.pep
MKKINLLLTKCKSLSRQLGRSSSYSSLRSKSTREDHHRYIWDHLRRRTRRNQDGDNYDNDDEHQCYETVYVASTTKRYVVSSKYLKHPLLHALIERPKQKXEGEDHILVKCEVVSVDHLXWMIENSDPNLILDSLEELTDLYVSGSI

SEQ ID NO: 63519 - protein, 109 aa, Gossypium hirsutum
  Clone ID: LIB3493-038-P1-M1-E11.pep
IFLLKKCKNLFRQLARSSSYSSLRSKSAREDLRHYIWDHIRRRTRRNEHGDNDDNDDGHQCYETIYVGSTRKRYVVSSKYLKHPLLDALIERSKQKHGGEDHILVKCEV

SEQ ID NO: 63520 - protein, 79 aa, Gossypium hirsutum
  unsure (1)..(79): unsure at all Xaa locations
  Clone ID: GOSHI-09MAY01-C23822_1.pep
NLYPERETEQESCDEEVXSKVENTEAEGFDQINGSTENADDGKISPSKQQQQQQQQKKKKPLLRKFGSLLKKKGSNNPK

SEQ ID NO: 63521 - protein, 176 aa, Gossypium hirsutum
  unsure (1)..(176): unsure at all Xaa locations
  Clone ID: GOSHI-09MAY01-C23752_1.pep
MSNDDASDLGVALPAAAAALSAEERAGLVNELKNKLQNLAGEHADVLETLSPNVRKRVEVLREIQSEHDELEKKFFEERAALEAKYQKLYEPLYTKRYEIVNGIVNVEXETNETVMDEDRDKXCTTKRVPDFWQTAMKMNEILAEEISERDERALKYLKDIKWSRNDDPKGVKLKF

SEQ ID NO: 63522 - protein, 62 aa, Gossypium hirsutum
  Clone ID: GOSHI-09MAY01-C23742_1.pep
QKKIAEHVTGIKRVILSSLFSRIVFNPQALRTQNSSSADHRLFTYIFIKIYPTIIVVAKTNQ

SEQ ID NO: 63523 - protein, 51 aa, Gossypium hirsutum
  Clone ID: LIB3493-060-P1-M1-D5.pep
LNLWVIKGQNHIQLWRFRNALDYHFLPAGDAGKAFSCHLSVPSFSLEGLME

SEQ ID NO: 63524 - protein, 164 aa, Gossypium hirsutum
  Clone ID: GOSHI-09MAY01-C23772_2.pep
QNLISRDMDELLRIAAADKREELKIFSGEVVRFGNRCKDPQWHNLDRYFEKLGSELTFEKQLKEEAETIMQQLMTYVHYTAELYHELHALDRFEQDYRRKPLLVGLSCPAHGGDSLAILRAELKSQNKHVKNLKKKSLWSRILEEVLVKLYEIFFFVKSIFVYL

SEQ ID NO: 63525 - protein, 146 aa, Gossypium hirsutum
  Clone ID: GOSHI-09MAY01-C23772_1.pep
MALNMDYELKKDCHDGIVVNGGSDGLLLSHANSNKLIIDTDPGIDDSMAIFMAFQNPEYEILGLTTIFGNVQTEDATRNALLLCEIAGRPDVPVAQGSPEPLTGGRPIVADFVHGSVGLGNIFLSPPKTSKSDKAASEFLVEKVSE

SEQ ID NO: 63526 - protein, 109 aa, Gossypium hirsutum
  unsure (1)..(109): unsure at all Xaa locations
  Clone ID: AI055290.1.pep
SDFVPDLQQQKDCHDGIVVNGGSDGLLFSHANSNKLIIDTDPGIDDSMTIFMAFQNPEYEILGLTTIFXNVQTKDATHNALLLCEIARRPDVPIAQGSPEPLTETALQY

SEQ ID NO: 63527 - protein, 116 aa, Gossypium hirsutum
  Clone ID: GOSHI-09MAY01-C23762_2.pep
VLFQPSMIGMEAAGIHETTYNSIMKCDVDIRKDLYGNIVLSGGTTMFPGIADRMSKEITALAPSSMKIKVVAPPERKYSVWIGGSILASLSTFQQMWIAKAEYDESGPSIVHRKCF

SEQ ID NO: 63528 - protein, 80 aa, Gossypium hirsutum
  Clone ID: GOSHI-09MAY01-C23762_1.pep
NIVLSGGTTMFPGIADRMSKEITALAPSSMKIKVVAPPERKYSVWIGGSILASLSTFQQMWIAKAEYDESGPSIVHRKCF

SEQ ID NO: 63529 - protein, 92 aa, Gossypium hirsutum
  Clone ID: LIB3828-015-Q1-N6-C11.pep
KCDVDIRKDLYGNIVLSGGTTMFPGIADRMSKEITALAPSSMKIKVVAPPERKYSVWIGGSILASLSTFQQMWIAKAEYDESGPSIVHRKCF

SEQ ID NO: 63530 - protein, 96 aa, Gossypium hirsutum
  Clone ID: LIB3828-009-Q1-N6-F10.pep
SDRMSKVISALAPSSMKIKVVAPRERKFSVWIVGSMLASVSPFQHMCIVKAEIDESGPFIVHRKCFLILQRVQKALKIMSCLFTCRNRSSFPGSFF

SEQ ID NO: 63531 - protein, 153 aa, Gossypium hirsutum
  Clone ID: GOSHI-09MAY01-C23672_2.pep
MACSGQLHVEVELKSLAEKVWETIRDSTKIFPQALSHDYKSIEVLEGDGKAPGSIRLINYAEGSPIVKVSKERIESVDEAEKIYVYSIFDGDLMKYYKTFIAKINVIPKGESSLVKWSCEFEKASEEIPDPSVIKEFAVKNFVEIDDYLHTKA

SEQ ID NO: 63532 - protein, 153 aa, Gossypium hirsutum
  Clone ID: GOSHI-09MAY01-C23672_1.pep
MASSGQLHVDFELKSPAEKVWGTIRDSTTIFPQALSHDYKSIQVLEGDGKAPGSVRLINYAEGSPIVKVSKERIESVDEAEKKYVYSIIDGDLLKYYKTFIGKIIVVPKGESSLVKWSCEFEKASEEIPDPSVIKEFAVKNFKEIDDYLHGKA

SEQ ID NO: 63533 - protein, 97 aa, Gossypium hirsutum
  Clone ID: LIB3083-106-Q1-L1-A9.pep
QILQWFIEGSFMWVERTTLQHKKNKEPLRTPPRFYLKPSPMNTPRVHKNDLLVVKEGSHRTLPIQKITWSHPYQEGSSNQRMKLIRNMFTASLMGIS

SEQ ID NO: 63534 - protein, 221 aa, Gossypium hirsutum
  unsure (1)..(221): unsure at all Xaa locations
  Clone ID: GOSHI-09MAY01-C23602_1.pep
AFLPSGPRISEKEEAREDNEDLKSLSSMGENRKKKPSSNSNNAAISNSKLRPKEAKVKKEERGGTDDXDEKPISKRSSATKATKPKKEESDDEDEKPISKRSSATKADKEKEMKKKKKKGEEKKAAAGKEVKREKKVYDLPGQKRDPPEERDPLRIFYETMYQQIPHSEMAQFCEYTPRLIKKLEGFRVKRVAAGLLHSTCIDDPGSSRYCRNWVFVCVWG

SEQ ID NO: 63535 - protein, 131 aa, Gossypium hirsutum
  Clone ID: LIB3149-017-Q1-K1-A11.pep
RDPPEERDPLRIFYETMYQQIPHSEMAQFWMMESGLLPLAEAKKVFEKKQKKIKQQKLSSPMKPGSAVKSSTGSVTVKRTPMVSPGSSNKKKTDSKVAPKQTKKRKAEESESSDDDFENTLVSRMKKQKAN

SEQ ID NO: 63536 - protein, 102 aa, Gossypium hirsutum
  Clone ID: uC-gsronu33b025g06b1.pep
MVYITSWDEFVERTVQLFRADPESTRYCMKYRHCDGKLVLKVTDNKECLKFKTDQAQDARKMEKLNNIFFTLMARGPDVDMSEITGNEQEAQPVKKGRGRKQ

SEQ ID NO: 63537 - protein, 72 aa, Gossypium hirsutum
  Clone ID: LIB3083-099-Q1-L1-B10.pep
MVYVTSWDEFVERTVQLFRASPESTRYCMKYRHCDGKLVLKVTDNKECLKFKTDQAQEAKKMEKLNNIFFTL

SEQ ID NO: 63538 - protein, 75 aa, Gossypium hirsutum
  Clone ID: GOSHI-09MAY01-C23142_2.pep
MSGERALFKLLKPVQRLQPADVQAASMWGVDATTGALWLIQPFDRMTTTFLAKPESDSKHMGHLAPHCGFVYRVC

SEQ ID NO: 63539 - protein, 57 aa, Gossypium hirsutum
  Clone ID: GOSHI-09MAY01-C23142_1.pep
MAGERALFKFLKPGQRLQPADVQAAAMWGVAATTGALWLIQPFDWLKKTFLEKPESD

SEQ ID NO: 63540 - protein, 196 aa, Gossypium hirsutum
  Clone ID: GOSHI-09MAY01-C23132_1.pep
PRVRPRVRVDHLNEEVLHPLLQDLVKTPFFRYFKVKLWCNCPFWPDDGMCRLRDCSVCECPENEFPELFKKPYHHGLPSDDLKCQEGKPQAAVDRTLDSKAFRGWTETDNPWTYDDETDNSEMTYVNLQLNPERYTGYTGPSARRIWDAVYSENCPKYPAEELCQEEKILYKLISGLHSSISIHIASDYLLDEATN

SEQ ID NO: 63541 - protein, 125 aa, Gossypium hirsutum
  Clone ID: GOSHI-09MAY01-C23002_1.pep
MRSSRFSMFLAICAILAIHVAVTTSSPTFDFAGDHFLQIKSECSGSTAECLMQGGEDSSDFDAEFAMGSEISRRILAARRYISYGALRRNTVPCSRRGASYYNCRPGAQANPYSRGCSRITRCRR

SEQ ID NO: 63542 - protein, 208 aa, Gossypium hirsutum
  Clone ID: GOSHI-09MAY01-C23372_2.pep
IIPDDSLDCSKKAAQVQSKESSGMLHYLSGGAWDPHDMNAVATTCESSVQFWDLRTMKKTNAIERAHIRNANYDMKKSHILVTAEDESGIHIWDLRKPKSPAKELPGHTHWTWAVTCNPEYDGLILSAGTDSTVNLWQAPISAEDKATSESITEPLNQQADPLLNSYSDYEDGVYGLAWSSREPWIFASLSYDGRVVVESVKPFLSRK

SEQ ID NO: 63543 - protein, 188 aa, Gossypium hirsutum
  unsure (1)..(188): unsure at all Xaa locations
  Clone ID: GOSHI-09MAY01-C23372_1.pep
ATMQGGSSGIGYGLKYQARCVSDVKADTDHTSFITGTLSLREENAVHLIRLSSGGTELICDGLFSHPNEIWDLASCPFDQRIFSTVFSTGASYGAAIWQIPELYGQLNSPQLXERIASLVAHVXNINCVLWWPSGGHDKLLSIDDENIFLWTLDCSKKAAQVQSKESSGMLHYLSGGAWDPHDMNAVA

SEQ ID NO: 63544 - protein, 275 aa, Gossypium hirsutum
  Clone ID: GOSHI-09MAY01-C23262_1.pep
DQSRSFLVTFLEGGVGEIHVPQNYTRDVVLKEVTVVKDSDLTGNASLGLALDRPRNRLLGAVADMFGNRYSALAAYDLSTWKRLFLTKLSGSGDEKSLADDVAVDADGNAYVTDVKGSKLWKVGVVGEFLSTLTNPLFTPKEWYKSLLGLNGIVYHPDGYLIVIHTLSGNLFKIDLAKGDEVKLIEVAGGPLAFGDGLELISPTKLVVAAGNPSGRLVESTDGWETASVVAKFKGPMHRLATAATVKDGKVYLNHMFGMGYPRKTHALCEFVSLT

SEQ ID NO: 63545 - protein, 202 aa, Gossypium hirsutum
  Clone ID: GOSHI-09MAY01-C98402_1.pep
MEGKPKTPNHSQGGTGRSCGLCLFIFLLLAGASAVAVCLIYRPRKPRFAVVGAAIYQLNATSQPIISTSMQFTIVTRNPNRRVSIFYDKLQAFVSYRNQQITPAMDLPPLYQEAKSTVALTPLLGSGTVPASAEVVNGLMMDEAYGVVALRVVFLGKFRWKAGAIKPVKYGVYVKCDVWVNLKKGPVGPVPFLGAPPCKVNI

SEQ ID NO: 63546 - protein, 92 aa, Gossypium hirsutum
  Clone ID: GOSHI-09MAY01-C98172_1.pep
IIHVFYFIITLKMNFESSAAAAAESKKRPQDLLSDISFWLSLALSCVNICSLSNALPKLIMETKRGNKKFKIHPTIHNSMQLLIHNKPHKAK

SEQ ID NO: 63547 - protein, 163 aa, Gossypium hirsutum
  unsure (1)..(163): unsure at all Xaa locations
  Clone ID: GOSHI-09MAY01-C98242_1.pep
MVRKRYQEAKTGFQLLKSIDADKYXLKKIGLGKEDHYFWKQVGKALLCTYTLFGVAWLYNETSPLGWWTLKPRPKEERELAHLYERREFPYPGDAEAMEEFVAKGGMIGTTIGPKGIIETDKDSVNYQKEMQNKKFEQEAMKLWLRMRNEVISELQEKGYDVE

SEQ ID NO: 63548 - protein, 165 aa, Gossypium hirsutum
  Clone ID: GOSHI-09MAY01-C98202_1.pep
RHYKRFDVFVEAEANKAAGKYDNASIDHQVEFYKREGLTPYSEAKHPITSDVPEGCVIIREHIPISNLFTCLWFNEVDRFTSRDQISFSTVRDKIAAKTNWTVNMFLDCERRNFVIQKYHKDVLALLAQRAPPVIYSSQRKVPPRRRRDRKSGARHHRKVSKEIV

SEQ ID NO: 63549 - protein, 125 aa, Gossypium hirsutum
  Clone ID: GOSHI-09MAY01-C99952_1.pep
DSTRTTQDRCSSTTTTAAAATTTSPSSATTTAISALLEFSLMESLELKENNHRVPPPTFDIANLDSVVPPSCMKLINELQKEIRKISVERETLKLEMMSAQTMINILHSRIDFLSKENEELKRSN

SEQ ID NO: 63550 - protein, 47 aa, Gossypium hirsutum
  Clone ID: GOSHI-09MAY01-C99852_1.pep
LKGRSILFLWDPVFEKVKNDGAVKMRWNKVEIYVVSVGIALGGPSDQ

SEQ ID NO: 63551 - protein, 209 aa, Gossypium hirsutum
  unsure (1)..(209): unsure at all Xaa locations
  Clone ID: GOSHI-09MAY01-C99772_1.pep
SRRVGGRVGGRVAKLLTLQAQSLAANAGPPTPSSVMSLETPSTAQPXRKVKPRSTFLTRGGGTPESKKRGPEEAVVKELRLTVKALELEMARMKKDHATQLKQKDDIIRELSRKIEKTSEVGVKKGVTRASLRPKEPNPGELKSPSHRFRSPVPTAKKRSFWDITTANSPSVTTLNGRKTRSHVISKPVASPSMLPQPGFARQRPDVHK

SEQ ID NO: 63552 - protein, 56 aa, Gossypium hirsutum
  Clone ID: GOSHI-09MAY01-C99732_1.pep
QYKDFILCINLLVTLHFWRNPSLFSFPLLLVLSAGFLPSCSPTPEMSKWTPGSLAV

SEQ ID NO: 63553 - protein, 328 aa, Gossypium hirsutum
  Clone ID: GOSHI-09MAY01-C99612_1.pep
RSRPRGRRVGIEVINNTVAPDDNVICALSGGVDSTVAATLVHKAIGDRLHCVFVDNGLLRYKERERVMETFERDLHLPVTCVDASEQFLSKLKGVVVPEMKRKVIGKEFICIFDAFAHELEQKVGKKPAFLVQGTLYPDVIESCPPPGSGRTHSHTIKSHHNVGGLPKDMKLKLIEPLKLLFKDEVRQLGRILKVPEPFLKRHPFPGPGLAVRVLGDVTEGNALDIVRQVDEIFIQSIKDAGIYDSIWQAFAVFLPVKSGGVQGDQRTHSYVVTLRAVTSQDGMTADWYCFENSFLKEVSQKICNNVRGVNRVTLDITSKPPSTIEWE

SEQ ID NO: 63554 - protein, 256 aa, Gossypium hirsutum
  unsure (1)..(256): unsure at all Xaa locations
  Clone ID: GOSHI-09MAY01-C99202_1.pep
NKSKKNKEKDKAFSKSHTDAEELEKRAVKETELKHDFDKKCEIDFWEHLRSGSDNLKGNALETGHVIKSTPAINFSRGNGGTRYLDRMRGTFLSSSKAFTGSSFFGKNTNIPAIAKENKNXNPVDHAHTSADRRDFCPXERVAGKLSMDGDDKNAKNNHSVLSEPQLWAAPKKSWQQLFTRSPSLPPVSNANVISRPTSKNKPEAEGSQFPSHSTIQTFDNPINCGLPSAFISMYRNGVPSSSLGFSPAIGPTFPS

SEQ ID NO: 63555 - protein, 68 aa, Gossypium hirsutum
  Clone ID: GOSHI-09MAY01-C99222_1.pep
HAFHVTHHFNVFHVYLYLFILNIYRFISNSCLLYRIEYRWIPGIAHTKCANSYNCNLSIHVHICSHEL

SEQ ID NO: 63556 - protein, 223 aa, Gossypium hirsutum
  unsure (1)..(223): unsure at all Xaa locations
  Clone ID: GOSHI-09MAY01-C94612_1.pep
SLFALQSCICERGDGFESRAAYSTSLQDFAATGNANGRVFAPYTIYKGKASLSISPVLPTFVKMDSDIGGLKVNRRGSMMLTFCPAIGERKYDWEQRQKFALSPTEVGSLISMGAHDASEFFHDPSMQSSNAGQVSKXLCIKALDGGNGYLISLTVTNNVLKSNERFNVPVTTAEFAVLKTACSFALPHIMGWDRLTNQSPKGIKGSPSKVNPKQHFDLEWDR

SEQ ID NO: 63557 - protein, 73 aa, Gossypium hirsutum
  Clone ID: GOSHI-09MAY01-C94162_1.pep
ENPLTTLTSRGPFYYPLAITSTTKMLPESHHPPSISLLEHCSRNRQKDQLNDFCSLNASINTLNESRPRTTYI

SEQ ID NO: 63558 - protein, 41 aa, Gossypium hirsutum
  Clone ID: GOSHI-09MAY01-C94002_1.pep
VSSWDGELTMGWCWVAYLLRFYTISIVTCDACLLQLFFFMA

SEQ ID NO: 63559 - protein, 162 aa, Gossypium hirsutum
  Clone ID: GOSHI-09MAY01-C94252_1.pep
LTLDNIKKSKGRRSTLGDSWPKVQSALDHRAFSLITAKPKEHRRKLATPSLALPETAASVAIAATVVGAAATFLVRRTKASDATEVPLRTCEDCEGSGICSECRGEGFVLKKLSEESAERARLTAKNMATRYTAGLPKKWSYCTKCSSTRSCTTCGGSGKLS

SEQ ID NO: 63560 - protein, 83 aa, Gossypium hirsutum
  Clone ID: GOSHI-09MAY01-C95932_1.pep
RLSAKIGVSVEDLVALPSLDVAAEKKIERMALKVGENLFNFKQSFCGEDGSKLVVPMDILDRWFKKFQEKAKRECDFLKGFAL

SEQ ID NO: 63561 - protein, 88 aa, Gossypium hirsutum
  unsure (1)..(88): unsure at all Xaa locations
  Clone ID: GOSHI-09MAY01-C95532_1.pep
SYLRSQQKLLDWWTKHYKWPYPSESQKLALAESTGLXEQINNWFINXKRHWKPSEDMQFVVMEATYPHYFMDNILGNPFPMDLSHTLL

SEQ ID NO: 63562 - protein, 134 aa, Gossypium hirsutum
  unsure (1)..(134): unsure at all Xaa locations
  Clone ID: GOSHI-09MAY01-C95772_1.pep
MRSMIITRALLQSDVQFKLVRDMQTNIKKIVNLDDLAAGHNKRKIIQQAIFNELCKMLDPGKPAFTPKKGKTSVVMFVGLQGSGKTTTCTKYAYYHQKKXWKPALVCADTFRAGAFDQLKQNATKAKIPFYGSY

SEQ ID NO: 63563 - protein, 251 aa, Gossypium hirsutum
  unsure (1)..(251): unsure at all Xaa locations
  Clone ID: GOSHI-09MAY01-C95692_1.pep
YCSDPRGXLLVYDYVPNGTLADHLHGRPKPSLTWPVRLEIALQTALAIEYLHFSVVPPIVHRDVTTSNIFVEKDMRIKVGDFGLSRLLAFPENSSLKSEFVWTGPQGTPGYLDPDYHRSFRLTEKSDVYSFGVVLLELISGLKAVDQRREKREMALADLVVSKIQMGLLHQVVDPALILDGQPMDGVEAVAELAFRCVAADKDDRPDAREIVGELKRIKNRTRVLRLSYSNGSNGEVAKDDNIGMFDVTWD

SEQ ID NO: 63564 - protein, 276 aa, Gossypium hirsutum
  unsure (1)..(276): unsure at all Xaa locations
  Clone ID: GOSHI-09MAY01-C95372_1.pep
SAFVPRRLIFYNVLLAYEILHTLKHKKRKKGLMAVKLDMSKAYYRVEWNFVEGVIKKMGFDPGWVDLLMXVSTVSYSVILNGNIRETFLPSRGLRQGDPFSPFLFLFCGEGISSLMRLSKANNILHEVKASLSVPAISHLLFEDDCILFAEATKRGAHSLRQXYDKSTVFFSTNTLEGERVTVXRYLVYEDQLIQNXYLGLPNMVGRKKRPSFQNLKDRLKQRIDNXEYKISIPGRKRSFIKAILQSIPTYAISYFLLPKAPCTDLESIIAKPTRP

SEQ ID NO: 63565 - protein, 181 aa, Gossypium hirsutum
  Clone ID: GOSHI-09MAY01-C96522_1.pep
KAEIVPGVLFIDEVHMLDIECFSFLNRALENEMAPILVVATNRGITSIRGTNYKSPHGIPIDLLDRLLIITTQPYSEDEIRKILDIRCQEEDVEMSEDAKQLLTKIGHETSLRYAIHLITASALNCRKRKGMVVEVQDITRVYSLFLDVRRSTQYLMEYQKEYMFNEASIVDGGDADAKHD

SEQ ID NO: 63566 - protein, 169 aa, Gossypium hirsutum
  unsure (1)..(169): unsure at all Xaa locations
  Clone ID: GOSHI-09MAY01-C96722_1.pep
MPRYKEDPPAVRVYTVCDESRYLIVRNVPALGCGDDLLKLFANYGDVEEXKCKPMDAEDCEQFTDVYWIKFRLVSNARFAKRKLDEFVFLGNRLQVSYAPQFESLDDTKDKLECIMKEILARLNSQRSKWRTVHRILSIKKLHTSAYLSYSYQIIYHDDVGDAYLSLII

SEQ ID NO: 63567 - protein, 92 aa, Gossypium hirsutum
  unsure (1)..(92): unsure at all Xaa locations
  Clone ID: GOSHI-09MAY01-C96232_1.pep
PTRPITDLVFFLASKLLKTIPQAAATTCYVAAHPRLLNISGKYFADCNEAWTSKLGSNSNEAXKLWAASEIMVSKHAKAVFDPLSAFDYHHM

SEQ ID NO: 63568 - protein, 74 aa, Gossypium hirsutum
  Clone ID: GOSHI-09MAY01-C97912_1.pep
NYRVPFPPCAAATFVPAFTRAVASFSTSTCPLMASPRHTHLQQTNKQKSNGQQITEITARKFDFLIYFILIFQL

SEQ ID NO: 63569 - protein, 78 aa, Gossypium hirsutum
  Clone ID: GOSHI-09MAY01-C97552_1.pep
FINQVVLQVNQLEQKPTDNVFILLQRKNNYQEPKSIFIYPIDFPYLCVPTKSVCFKMQRETGRWFMLIWGVGVLSGNM

SEQ ID NO: 63570 - protein, 149 aa, Gossypium hirsutum
  unsure (1)..(149): unsure at all Xaa locations
  Clone ID: GOSHI-09MAY01-C97442_1.pep
MQETNQKKASKPMAKKETQEFQFVVYNTMTQQKEVFKPKTPGKSSHVXVCGVTAYDFSHLGHARAAVSFDVLYRYLKHLGYEVTYVRNFTDVDDKIIRRANETGEDPISLSDRYCKEYNIDMSDLQCLSPTHEPRVSDHMEQIKDMYLH

SEQ ID NO: 63571 - protein, 297 aa, Gossypium hirsutum
  unsure (1)..(297): unsure at all Xaa locations
  Clone ID: GOSHI-09MAY01-C97782_1.pep
GTLRHAVIQXEPLWIIFAHDMNIKLSQELMVQSHKTIDGRGANVHIAYGCGITLQFVHNVIIHNIHIHRVVRSSGGLIRDSEDHYGFRTVGDGDGISIFGSSKIWLDHISMSECQDGLIDAIQGSTAITISNCHFTHHDHVILLGASDTYSKDQFMQVTLAFNHFGKELIQRMPRCRWGYFHVVNNDYTHWKLYAIGGSTHPTIISQGNRFIAPDDPLTKQITNRNYASESEWRHWVWRSEGDRFMNGAFFVTSGPPSPPRLKFKKKDIIKPKPAIFVGKTXTNFSGTLKCKEGVKC

SEQ ID NO: 63572 - protein, 138 aa, Gossypium hirsutum
  Clone ID: GOSHI-09MAY01-C97772_1.pep
MPINRDPSTPPPMIGKIGPYTVFVTPPSTPTPTEPPVFQSPQKAVAPPASAPPPVRPPPQQFDKSFVASDSDGSILGFFRNAIFKVQNAHSSLDDHLARWFGLNQSKYQWALDDYYESKGLEKEGVKVKEISSKMQSV

SEQ ID NO: 63573 - protein, 266 aa, Gossypium hirsutum
  unsure (1)..(266): unsure at all Xaa locations
  Clone ID: GOSHI-09MAY01-C97692_1.pep
DGTIIAPTDSKPWGKGILXWLEFTKLKGITVQGKGIIDGRGSGWWLEAPYEDPYDGEXKIIIPLNNTVQERPPMPARNELSGKMPSIKPTALRFYGSFNVTVTGITIQNSPQCHLKFDNCIGVVVHDMSVSSPGDSPNTDGIHLQNSKDVLIHGTTLACGDDCVSIQTGCSNVYIHNVNCGPGHGISIGSLGKDNTKACVSNITVRDIMMHNTMNGVRIKTWQGGSGNVQGVLFSNIQVSEVQLPIVIDQFYCDKRTCKNQTAAVA

SEQ ID NO: 63574 - protein, 283 aa, Gossypium hirsutum
  Clone ID: GOSHI-09MAY01-C90932_1.pep
VRSIPPGGVGPTGSPPHSHSSVGRHSRESSSSRFSGSLKPGSRKVSPKEGSSKSGYRGGSSSSHHKQWKDCDVIEEEGSLESGEREKGLPRRCYFLAFVLGFFVLFSMFSLILWGASRPQKPKITMKSIKFEQFKIQAGSDFTGVSTDMITMNSTVKMIYRNTGTFFGVHVASSPLDLSYSQINIASGTMKKFYQSRKSQRSVTVMVMGNKVPLYGSGASLSSSTGTTSLPVSLKLSFVVRSRAYVLGKLVKPKFYKKIECDITFDPKKLNVPISLKKSCTYD

SEQ ID NO: 63575 - protein, 82 aa, Gossypium hirsutum
  Clone ID: GOSHI-09MAY01-C90892_1.pep
FSHPSENKLCKAKVFRHMNDPQHSSLGQNIYMMKETNIWRRNFLFIVAPVYPTTPMASPVFECLNYGPFSLWNFNPFDLRFI

SEQ ID NO: 63576 - protein, 181 aa, Gossypium hirsutum
  Clone ID: GOSHI-09MAY01-C90882_1.pep
MFLYGTSKRKIARASHSMFVAFMSSGKHFKDELVSLKEQLVFYYMQRSLEGYPDITPFEGMASGVAALVRHLPAGSPATFYCIHSLVDKANNLLSDANALKADDWKNWQGGPEPCKKILELLSRLISLVDIQVLPTLMKLLAQLIIQLPKTGQTMVLNELYAQVAESDDVTRKPTLVSWLQ

SEQ ID NO: 63577 - protein, 133 aa, Gossypium hirsutum
  unsure (1)..(133): unsure at all Xaa locations
  Clone ID: LIB3543-036-Q1-K1-A4.pep
PPRVRPASVNIIVGDERGQFVYRSSDVSRNVSTNKNTLLMLXALVFARDRNKACGIGNIEFHLALSKGVSAIGPRLKAASVRVQDSYTVTWLTARREGQQEILDGQQMLEDIDNEVCQCASVYIRKHELYRNI

SEQ ID NO: 63578 - protein, 181 aa, Gossypium hirsutum
  Clone ID: AW186889.1.pep
AIGPRLKAASVRVQDSYTVTWLTARREGQQEILDGQQMLEDIDNEMENNMDCVDLYIGVTRRRNCSVGSDKPKMMTTLALHGVEGGDSEYLYVDGVGIRTGDYFQFYHSDPKTALSSSRNVSSTLRKLKLDWDSKSSLSKSTIINAVDKKEAFGGFIFSCLGRGESFFGQLNVDSSPFLDN

SEQ ID NO: 63579 - protein, 174 aa, Gossypium hirsutum
  Clone ID: GOSHI-09MAY01-C90522_1.pep
MGKKGSWFSAIKRVFVSNSKGKLDIESDKKGGKERKKKGQANYKHGEANSFIPLFREPSSIEKILGEAERDRKLSFRPSTPPDQLRTPPFMLPRAASPRVRSQRIASPRAASPKTASSPRANSPRAASPFLPPPPRAASPRAGPPRLVRPRLEPTLRNHHASATKIQAAYRGYM

SEQ ID NO: 63580 - protein, 147 aa, Gossypium hirsutum
  unsure (1)..(147): unsure at all Xaa locations
  Clone ID: GOSHI-09MAY01-C90482_1.pep
MATQSVKVGNASLGASERDLKESFSFSGEIAYAEMNGDYEQSQVAYITFKDSKGAETAALLSGATFVDQSVTIELAPDYMPPASATLASENKGSANAESAVQKAQDVXVSDMLARGFILGKDALNKAKTFDEKHGLTSTATATVASL

SEQ ID NO: 63581 - protein, 94 aa, Gossypium hirsutum
  Clone ID: GOSHI-09MAY01-C90682_1.pep
PDWGFGILSTFLKLETGDRNRHEHHVCSVCRYPIIGSRFKEVKSHFSLCNQCYSEGKVPPNFKQDEYKFKEYGKEAEAMKDKCLCFNLQSRKDP

SEQ ID NO: 63582 - protein, 83 aa, Gossypium hirsutum
  unsure (1)..(83): unsure at all Xaa locations
  Clone ID: GOSHI-09MAY01-C90132_1.pep
MASGWGINGTKGRCYDFWVDFSECMSRCREPXDCSLLREDYLECLHHSKEFQRRNRIYKEEQRKIRAAPRKEKDGGDGVHHHA

SEQ ID NO: 63583 - protein, 166 aa, Gossypium hirsutum
  Clone ID: GOSHI-09MAY01-C90092_1.pep
MELLDLVVISKALFSVALASAVCYVFHYYTRSWLRSQRLRKKLCMQGIKGPPPGFVYGNVAEMQQIQLKAKKTRNHSEIVAHDYTSTLFPYLDHWRKEYGSIYTYSTGLRQHLYVNDLEIVKEMNQLNTLQVGKDAYMTKALQPMLGNGVIRSNGQFWAHQRKIIA

SEQ ID NO: 63584 - protein, 93 aa, Gossypium hirsutum
  Clone ID: GOSHI-09MAY01-C90052_1.pep
GDFRIIYHFNLKFILFLFSHINTKIKVEEKEILTRAASGLRRRSLFSVTGIESKSEVKGLLSRFFWREKGVALDSFGTPGRPPILCRSDHRPR

SEQ ID NO: 63585 - protein, 133 aa, Gossypium hirsutum
  Clone ID: GOSHI-09MAY01-C91982_1.pep
MAPKAEKKPAEKKPVAEKAPASVEKKISKEGGDKKKKKIKKSTETYKIYIFKVLKQVHPDIGISSKAMGIMNSFINDIFEKLAQEASRLARYNKKPTITSREIQTAVRLVLPGELAKHAVSEGTKAVTKFTSS

SEQ ID NO: 63586 - protein, 243 aa, Gossypium hirsutum
  Clone ID: GOSHI-09MAY01-C91412_1.pep
KKRRASLKPNSVVGTSLVHQLLPSFKELLNALSLKSERDSNGILSVCLAGDPVQTALALPVALHALDELISDLSKCDNFSKGSLSFPLLRLNRICSGAVLASGEELPFGIATAAFDGTRMSKWEEPNGAKGCWIMYKLSANMQELVAYELMSANDAPERDPMDWVVEGSNDGGSSWHVLDERRSEMFDKRFRRKTYNVKSAGFLSNMFRFRVLAVRDVKSTSRLQVGSIDPHAKQNLQFSLLN

SEQ ID NO: 63587 - protein, 200 aa, Gossypium hirsutum
  Clone ID: GOSHI-09MAY01-C91602_1.pep
LPSEFGMDADRIHAVEPAASIFRIKAKIRRAIEAEGIPYTYISSNAFAGHFLPNLMQENATVPPRDKVVILGDGNPKGIFVQEDDIATYTIKAAEDPRTLNKILYIRPPSNVLSFNEVVSLWERKIGKTLEKSYVPEEQLLNIIQESPVPWNFFLSFAHPMFVKGEASNFGIEAWFGVEASELYPELKYTSVDEYLHQFV

SEQ ID NO: 63588 - protein, 224 aa, Gossypium hirsutum
  Clone ID: GOSHI-09MAY01-C91622_1.pep
MSALHFTVTFLLLTLLLEVNKAKSQSFIGVNYGQVADNLPSPAATAKLLQSTSIQKVRLYGSDAAMIKALANTGIGIVIGTANGDIPALASDPNFAKSWVDTNVVAYYPASKIILINVGNEVIMSGDNNLISQLLPAMQNVKNALDAASLGDKVKVSTVHSMTLLKQSEPPSSGSFDPAYGDMLKGVLAFNNATGSPFAINPYPFFAYRSDPRPETLAFCLFQP

SEQ ID NO: 63589 - protein, 260 aa, Gossypium hirsutum
  Clone ID: GOSHI-09MAY01-C91332_1.pep
NQLECMIGSQMDQATLDNLLIPSPYGTSYLYDVNLVLRFLKAFLCEGGWRLSPTRMRKVASLMDLYIAEVAPDPFLRLSKFLALVVALPDSARDCWDELYHAIDVYLEVHAGLSEEEKVKVCCALNYEKLSSDACVHLSQNAKFPSKSSVQALVSQQLKLKNLLQGTKNSKPDMDSPCKLNETRGKAKKGEGSEQIVLYSGRLDISGDNENLRAHLQGMQWRVIELEKLCKKMQAQMAKLMKSKTPPTHSTARSLPRLCS

SEQ ID NO: 63590 - protein, 180 aa, Gossypium hirsutum
  Clone ID: GOSHI-09MAY01-C91322_1.pep
PASESCQLVSISFFVLLFSVAARPTDNDCVYTLYVKTGWMMKAGTDSRISVVLGDSFGRSVWIPELRSWGLMPYAHDYFERGNLDVFSGRGSCIGSPCRLNLTSDGSELHHGWYCDYIEVTSTGPQQPCAQTVFYVDQWLATDIPPFQLTAFRDGCYMRDEPRKRGRNVPLIVGNPERPA

SEQ ID NO: 63591 - protein, 327 aa, Gossypium hirsutum
  Clone ID: GOSHI-09MAY01-C91252_1.pep
MNNNSAKSPMIVSFGEMLIDFVPDVAGVSLAESYAFIKAPGGAPANVACAIAKLGGNAAFIGKVGDDEFGHMLANLLNKSGVNSDGICFDKDARTALAFVTLKADGQREFMFYRSPSADMLLKESELKLDLIKQAKIFHYGSISLISEPCKSAHMAAMKAAKQAGVLLSYDPNVRLPLWPSPEAARDGIKSIWDQADFVKVSDDEVEFLTKGDPKKDDVVMSLWNDNFKLLIVTDGPEGCRYFSNKFKGKVNGYKVKTVDTTGAGDAFVGAFLQAVAKDPNLFNDENKLKEALVFANACGAISTTQKGAIPSLPDKAQAENLIKEAK

SEQ ID NO: 63592 - protein, 83 aa, Gossypium hirsutum
  Clone ID: GOSHI-09MAY01-C91232_1.pep
VSFLKHNLHAYQRNTSLYINPLGSLSLPCQTTMLQGDDLPARMCPILLGRSSAGLKDPVRIVPAFLLIEMGLPNLTSFLKGKK

SEQ ID NO: 63593 - protein, 113 aa, Gossypium hirsutum
  Clone ID: GOSHI-09MAY01-C92872_1.pep
SPATEKTPATPSAVAPSPEPKKASWCVPKKDVTDSELQASLDYACAHGIDCSPIQPGGSCFEPNTLSAHAAYAMNLYYQSSGRDPSSCDFSQAAMLFSSNPSYNGCTFPGGST

SEQ ID NO: 63594 - protein, 62 aa, Gossypium hirsutum
  Clone ID: LIB3828-019-Q1-N6-D4.pep
IKKVSISFIFITLVRSANHSIPLLKVDENKEQQKLPPTALHSSARITTLLFHVLPPGKVQPL

SEQ ID NO: 63595 - protein, 211 aa, Gossypium hirsutum
  unsure (1)..(211): unsure at all Xaa locations
  Clone ID: GOSHI-09MAY01-C92542_1.pep
MNGAWVQRLYWANTFLEGDAEKILCIPLAQEPHDDFLVWSGESSGKFSVRSAYKLLQNYGYNPRAYALQIDYRNFYKXLWLENLPTKIKITIWRISWNYLPTLVNMQHRKLVNNTICPRCRGGAETSDHLFRKCLVLVEVWTALSFPNILIATNMDFIQWLTWVFDXLPHYHCRLFCCALWDIWGDRNASDIVKINFDDAHDGHQEVLWPK

SEQ ID NO: 63596 - protein, 217 aa, Gossypium hirsutum
  Clone ID: GOSHI-09MAY01-C92412_1.pep
MEDVLANLRLVDDEEEAIHEDGPAVENFSQLCLVGRCLTDSVVHFPSLRNTMADLWHPIGGICITDIGEKRYLFQFFHEVDIVRVLVGTPWFFDNHLLLLKRISYGDNPAVMELNSTEFWVQVHDLPPGLISESMVVQLGNFCGKFIEYDSNNPLLGQKSYMRIRVCLDVNAPLKRKKKIQFGKAMTTYARFKYEKLSLFCFICGKLGHGESYCPSD

SEQ ID NO: 63597 - protein, 58 aa, Gossypium hirsutum
  Clone ID: GOSHI-09MAY01-C92762_1.pep
KFRSRNWPLIIALTASAEDHVRERCLQIGMNAILQKPVLLQGMADELRRVLQRTGEGI

SEQ ID NO: 63598 - protein, 137 aa, Gossypium hirsutum
  Clone ID: GOSHI-09MAY01-C92072_1.pep
ANTLDVKLSYTETSTSTWLAHFTLGLETKATFEVGVPLIGKAGVEISAKLEAGIEWGETKTTTTVMEVNHQAHVPPMTKVTVYLSMTHGTCDVPFVFTQKDTLYNGTVVTTDVTGNTFTGANYYNIQYDTKEEPLTT

SEQ ID NO: 63599 - protein, 113 aa, Gossypium hirsutum
  Clone ID: GOSHI-09MAY01-C92012_1.pep
IPSFKHRFTSINGNQCVQALRDGFSALKPLFGFDCNEAKRKPMAYLQVYCRYSWRVASVEKPFVGVEHERTEAHVWRWAMLEASTKLLAAAQGKEILGFLFKSVLGRLGIGPL

SEQ ID NO: 63600 - protein, 106 aa, Gossypium hirsutum
  Clone ID: LIB3828-014-Q1-N6-A11.pep
ACYLSTSAGPVMGVLYVSTEKLAYCSDSPLSYKNGTQTEWSYYKVIIPLHQLKAINPSTSKVNASEKYIQVTSVDAHEFWFMGFLNYEAAVQCLQEVLQLNSLQSV

SEQ ID NO: 63601 - protein, 109 aa, Gossypium hirsutum
  Clone ID: LIB3829-004-Q6-N6-C1.pep
DCFACYLSTSAGPVMGVLYVSTEKLAYCSDSPLSYKNGTQTEWSYYKVIIPLHQLKAINPSTSKVNASEKYIQVTSVDAHEFWFMGFLNYEGAVQCLQEVLQLNSLQSV

SEQ ID NO: 63602 - protein, 84 aa, Gossypium hirsutum
  Clone ID: GOSHI-09MAY01-C93562_1.pep
VLYSVLSLQIEKLAIDVGDRYPRFQDSRTKCHSCVKCIDRFLFGSPLDCWPSNKTCICACKLIYLSQVLHSTHRLHPYIPFVSF

SEQ ID NO: 63603 - protein, 115 aa, Gossypium hirsutum
  unsure (1)..(115): unsure at all Xaa locations
  Clone ID: AI055173.1.pep
RLEPVTKHPTLACSHHHQHLVFEKKAPPALGYYXCCSMKTSTAGFGGELIDXDAAAVVDMQVKTMGGTLKVIRVLFLGYKVQPVPNLPACRTPFKDTVTAYVNMLEMWFVNSYGP

SEQ ID NO: 63604 - protein, 193 aa, Gossypium hirsutum
  Clone ID: LIB3825-008-Q1-K6-H9.pep
MSETMSTPTDWPQFYDHALSNQEIPNRVRVLTAESVFGDQGSDTAVLTTPTVSSSSAPVSLLGSGRGGGLSGGHLSPEGRVGKPVRRRSRASRRTPTTLLNTDTTNFRAMVQQFTGGPSAPFAGGAPHHGGPNFGFGFGTRHQPHNSNPNNPLMLPPTGFHLQYQQQQQQHQNQLIHHQNQPLMFSLNSNDNN

SEQ ID NO: 63605 - protein, 102 aa, Gossypium hirsutum
  Clone ID: GOSHI-09MAY01-C93692_1.pep
NHRSEKTATFRPEEQATFFRIPPTAVEKLREVFAENELPSRFVRENLSKELGLEPERVNKWFKNARYLALKSRKVERADHLQSSSPRVPKEPEVEAPKRKGY

SEQ ID NO: 63606 - protein, 154 aa, Gossypium hirsutum
  Clone ID: GOSHI-09MAY01-C93152_1.pep
PWQWSSSPTMKMAVLLFVLARCGSSITIWKMAKLGFFGVFIVLKLCTSYSHQLTAYGKFWIGRFRDAWESCTHKKAVAMVLFTLVWNLCSTLARIWAAFMLFVALRYYQQKMTDEWMEREEGLCGNGSSIGNLRQRHHRLNTSKVEPLKVKSGF

SEQ ID NO: 63607 - protein, 75 aa, Gossypium hirsutum
  Clone ID: GOSHI-09MAY01-C93072_1.pep
DISFPLKNGSFKLRRNAPSITLKTLFAHDPKVAEVYNIMAVPVVLLFKNGERKESVVGTMPKEYYIAAIERILKS

SEQ ID NO: 63608 - protein, 171 aa, Gossypium hirsutum
  Clone ID: GOSHI-09MAY01-C93362_1.pep
GRVGAYLHDVQGCGMVPMMFPGVQQYMPTMGMGIGMGMGMDIGRPTMPFTNVLAGSPLPTPAAAAHLGPRFTMRPFHMPPPALAPAPAPDPSRIQPNNQSDTMLNRLGVQNPNQPCVPNFADPYQQYNIGLHPMQLSPPLNQAMAQPSSSKPSTSKGADNLENHPSGDMTR

SEQ ID NO: 63609 - protein, 71 aa, Gossypium hirsutum
  Clone ID: GOSHI-09MAY01-C93282_1.pep
KSVNCSQQFKNLKTIHCWINTDSKDRNKKVNQKLKQNPQISLSTWISASSFGAFSSIFSYASSSTWTLMVM

SEQ ID NO: 63610 - protein, 223 aa, Gossypium hirsutum
  Clone ID: GOSHI-09MAY01-C93202_1.pep
LVVMGGWDPVSYDPVTDVFIYDFMTQQWRQGKDMPSKRSFFAIGACLGRVFIAGGHDENKNALRSAWVYDLRMDEWSQLGEMSEERDECEGVEIEEDEFWVVSGYRTESQGQFDGSADVYGLKSGQWRRVEGVWEPGRCPRSCVGMGKDGKLVNWAELSPAVRVGACGISLGRRVLVTGSGYQGGPHGYYMVEMKEGQHSKLEKLDVPDEFSGCVQSGCYAEI

SEQ ID NO: 63611 - protein, 86 aa, Gossypium hirsutum
  Clone ID: GOSHI-09MAY01-C93232_1.pep
VINNSQLKVCCFDNLGNFRPTYYELFSIIRSQSESLAFGLSLGIHNPTKPTLCLFMIDTNLVAQKFPIQNRFTFLQLEESSSQTQP

SEQ ID NO: 63612 - protein, 219 aa, Gossypium hirsutum
  unsure (1)..(219): unsure at all Xaa locations
  Clone ID: LIB3830-002-Q1-K6-D6.pep
DNKPGSSAEVDYKTKAGTAWSHSYLNQKPWHPLSYPNQRRKWIAEQTHAQRVRRADEVAREYAQYHXFFRQTALISKKEKEKVEMMKAVSFMYVRPPGYNAESAKAAEIADERKKTDHNNVSDDHSTDVPSTAMQPESLPGGGATTQEKRKSRPKDVFGRSLPTEEEFEVLKNAPRLETGVPGRVKPFAVEVRNVKCLRCGNYGHQSGDRDCPLEDAIM

SEQ ID NO: 63613 - protein, 58 aa, Gossypium hirsutum
  unsure (1)..(58): unsure at all Xaa locations
  Clone ID: LIB3829-023-Q6-K6-A4.pep
RETAGVDGQLWVLCPILFLMQGFEAYVGVLLLKTAFFWVVPEWQIIXCGILLVCMGCW

SEQ ID NO: 63614 - protein, 109 aa, Gossypium hirsutum
  Clone ID: GOSHI-09MAY01-C88752_1.pep
VRVPSFFNGYDIIAGQGRQSVRPNAGASPYFGANMPSAMGLHYWPSSLGLVGAHKPPTSSHGVGLFFRLAPMDLILGQSSRPNANFVGLENASNFLAQNHGSNVPWCTK

SEQ ID NO: 63615 - protein, 53 aa, Gossypium hirsutum
  Clone ID: GOSHI-09MAY01-C88632_1.pep
PKKGSPTTPFVHKKLKCIPITASWAALMPFHLIQKVQPLSSFSLAGEEEQIFT

SEQ ID NO: 63616 - protein, 241 aa, Gossypium hirsutum
  unsure (1)..(241): unsure at all Xaa locations
  Clone ID: GOSHI-09MAY01-C88172_1.pep
MAAFVGALKKLSICLILWLNTLPFLQGGSDYYEFKYPFIKRASSFWASSSSFSSSNTDEASYDYIIVGGGTAGCPLAATLSQNFSVLVLERGGVPFSNVNVSFLSNFHIALADTSPTSASQPFVSTDGVINARARVLGGGTCINAGFYTRANSGFIRRVGWDERLVNESYPWVEKHIIHQPKLAQWQGAFKDSLLDVGVSPYNGFTYDHIHGTKXGGTLFDRFGRRHTAAELLASANPKCL

SEQ ID NO: 63617 - protein, 87 aa, Gossypium hirsutum
  Clone ID: GOSHI-09MAY01-C88052_1.pep
KYMLDSSYAIHRCHRCSIGSADGIQGARHIHDIHMDAKTYAWLHVMLDDNAWNSAICYGVVLMLMLMIFNKKLIFLYTYINLAWGKD

SEQ ID NO: 63618 - protein, 213 aa, Gossypium hirsutum
  Clone ID: GOSHI-09MAY01-C88012_1.pep
MLRTNCHSYGGKKFEALAAHDAFVETSGALNTIAASLMKIANDIRFLGSGPRCGLGELILPENEPGSSIMPGKVNPTQCEALTMVCAQVMGNHVAITVGGSNGHFELNVFKPLMASALLHSIRLVSDASASFVKNCVKGIQANKDRISKLLHESLMLVTSLNPKIGYNNAAAVAKKAHKEGSSLKEAALNLGMLTEEEFESLVVPEKMIAPSD

SEQ ID NO: 63619 - protein, 263 aa, Gossypium hirsutum
  unsure (1)..(263): unsure at all Xaa locations
  Clone ID: GOSHI-09MAY01-C88282_1.pep
FYLQEILDLQDAKQKIAREIRFKDGAVLAFANKLKEAEQVLDVLVDDYSSYRKPKRLKLEDNGVKDAAAADGDSCTTTVASRLNLSDILSYAHRISYTTFAPPEFGAGQAPLRGALPPAPQEEQMRASQLYNFADLDVGLPKTAETKEKTVEAIIEPPPAQPADTNPLANLAALQGLLPPNFTVPAGWKPNMPVELPANLPVPPPGWKPXDPVPLPXLDSLSIPRMEGPNMRPVHLSLHKPPEPIQVRHGELDILDPEMIAVI

SEQ ID NO: 63620 - protein, 217 aa, Gossypium hirsutum
  unsure (1)..(217): unsure at all Xaa locations
  Clone ID: AW186705.1.pep
GAQVLSTQWNNISSQSFQPFLEYVDDPTSNTIDVRVEXKSEGNSQLGLSLEFSSEMEGKKKLLLASQETNQFSSKFDETIVLHQPTKSDTAPGWVIQESSISMNGYTLTEIRAICYRKQPENSEHKSEARSKTTQDPAEYFAVLGHISISTSIQNTEFPPSTSWIVKGKDVXWGGSQGSKTPLLKINWKLKNGWSTRFPRYNSYVEKLIXQAVRPPG

SEQ ID NO: 63621 - protein, 209 aa, Gossypium hirsutum
  unsure (1)..(209): unsure at all Xaa locations
  Clone ID: LIB3543-051-Q6-K6-B6.pep
TFFXISDGIFINYTWKEAYPKLSARVAGDRKFDVYLGIDVFGRGTFGGGQWTTNVALDVIKKDDVSAAVFAPGWVYETKQPPDFQTAQNRWWALVEKSWGIVQNYPKVLPFYSNFDQGRGNHISIDGAEVLSTQWNNISSQSFQPFLECVDDPTSNTIDVRVDCSEVSFSGGGNLTFKGTLEAKAYVSTXLXLGEAFMGGLPVRFTYSV

SEQ ID NO: 63622 - protein, 176 aa, Gossypium hirsutum
  Clone ID: GOSHI-09MAY01-C89762_1.pep
MSSIKTIKVSNVSLQATERDINEFFSFSGGGEYVEMQSDNERSLIAYVTFKDSQGAETAILLSGATIVNLSVSISLAPDYKLPTAAFAPPPPIQNQTPAGADSAMRKAEDAVTGMLAKGFILGKDAVNKAKSFDEKHRLTSTASSKVASFDKKIGFTEKVSAGTSAVSGKSREVDK

SEQ ID NO: 63623 - protein, 76 aa, Gossypium hirsutum
  Clone ID: uC-gsflnu33B115g05b1.pep
MSSIKTIKVSNVSLQATERDINEFFSFSGDIEYVEMQSDNERSLIAYVTFKDSQGAETAILLSVIQLHTINKCYNT

SEQ ID NO: 63624 - protein, 279 aa, Gossypium hirsutum
  unsure (1)..(279): unsure at all Xaa locations
  Clone ID: GOSHI-09MAY01-C89082_1.pep
SDLTLEMLLKSHRFRREILVSLKTGLPDYLRVDDRIPSSNLAEIFLNLRCRNLMCQTSLPAEDCECKACSKKNGFCSACMCLVCSKFDMASNTCSWVGCDVCLHWCHXDCGLRESYIRNEHTAAEVQFHCVACNHPSQMFGFVKEVFQNFAKEWTLETFSKELEYVKRIFSGSRDLRGKRLHEIANQMLVRLARKSDLSEVYSQIMSFLTDADSSKPDNTTVLSGKEQEVKGVNGMAGPCQDATRLKPVYSDKALQLESASSLLPGFHVDRTGLSEKRL

SEQ ID NO: 63625 - protein, 211 aa, Gossypium hirsutum
  unsure (1)..(211): unsure at all Xaa locations
  Clone ID: GOSHI-09MAY01-C84972_1.pep
KKREDGIRFSGRKGEVLEYVQIKGKEEEDNSEKEDLDDEAAVEETGCWVKLRFIGSCISSRSKVDSSGSGTSTNYDSKSAYDTSKDQPAAPVVSSTTTSHAESSSSTSKLEDELKVASXLRKFTFXNDLKWATRNFRPESLLGEGGFGCVFEGWIEENGTAPVKPGTGLTVAVKTLNHDGLQGHKEWLAEVNYLGDLIHPNLVKLIGYCIE

SEQ ID NO: 63626 - protein, 78 aa, Gossypium hirsutum
  Clone ID: LIB3582-032-P1-K1-C9.pep
VVVEHRGWRILSPCIGNGTDLSHQAYFPKVTVEIQHNRAKLALFEVFALFSLHDNEQRGATVIGPFCPGPLENQETKN

SEQ ID NO: 63627 - protein, 72 aa, Gossypium hirsutum
  Clone ID: uC-gsflnu33B109b04b1.pep
VVVEHRGWRILSSCIGNGTDLSHQAYFPKVTVEIQHNRAKLALFEVFALFLLHDNEQRGATVIGPFCPGPLE

SEQ ID NO: 63628 - protein, 585 aa, Gossypium hirsutum
  Clone ID: GOSHI-09MAY01-C84842_1.pep
MSNWLGFSLTPDLRIDESFGREDHGGFPSVMPLRSDGSLCVVDPFRRSSIAADEDWRYENGIGSATANEQGPKLEDFLGCYSNSPSQETKAYCGTHENQNTVPSPTRINVNVAPNYSSSGDAEAAENFTNPSSFIQTYRNYNENPQTLMAGGHSLQQCDPNPNHNQRSGVHHVPFESATSVSGFKSWLRQTPFPGGKASGNETNNNFNFQALSLTMSPTSRNGFPAIAPLEVVDNRKRPVGKNLTRESVPRKSIDTFGQRTSQYRGVTRHRWTGRYEAHLWDNSCRKEGQTRKGRQVYLGGYDKEEKAAKAYDLAALKYWGPTTHINFPLSTYEKELEEMKNMTRQEFVAHLRRKSSGFSRGASVYRGVTRHHQHGRWQARIGRVAGNKDLYLGTFSTQEEAAEAYDIAAIKFRGTSAVTNFDISRYDVKRICSSSTLIGGELAKRSPKDTASIAPEDYNSCASSASPQPLLAIPSGEASDELADMVWTANSDEQQQHQSTNTNNDASLANSSSRNSSNPQSPKGSIGLASDKFGIGGDYSHHGYFSLKGSKYEDGNSETDNSNENRLGNLGLVHKIPMFALWNE

SEQ ID NO: 63629 - protein, 175 aa, Gossypium hirsutum
  Clone ID: GOSHI-09MAY01-C84752_1.pep
ALRFLHSRCSPSVLVGDMSPERIIIDAKDEPRLQFIFPFVDNKHFLPSSYVAPEARENKIMNDKSDIYGMGLILIELLTGKTPADADCKVHYSSMAEWARYCYSDCHLDMWVDPVIKSQASINNQNQIVAAMNLALHCTAGDPTARPCAADVFETLKSAFRTSSCLPSLNFSSPV

SEQ ID NO: 63630 - protein, 86 aa, Gossypium hirsutum
  unsure (1)..(86): unsure at all Xaa locations
  Clone ID: GOSHI-09MAY01-C84612_1.pep
HRRRQARKWMRRAADRGHSKAEXEHGLAVFSEGEMMKAVMYLELATRSGETAATHVKNVILQQLSSTSRERALLLADNRRAAPSSR

SEQ ID NO: 63631 - protein, 262 aa, Gossypium hirsutum
  Clone ID: GOSHI-09MAY01-C84312_1.pep
MGKAEKEQLNRALTAHLNTIHETLQVLDQSPPSNSMEKVTWSQVIQIGEQVSKQATIAGMLWNGESPQAKEVAENVNSYFNVLQGFLLLSHGSTVGAGPTLSSSIHESVKHVVDCSFRLMKEDVSLYGSHNKEKKLSMPQIVGAVWEACSALKKVPPTNVTAIGRAMTQVAVSMKDVLREINELKPASSNPGDETCDNTPSKTESKPENDDMSDDDLGSDLSPEEMKVAQLAHGVVSETLVVIKETIRTITGMLKLETPMTM

SEQ ID NO: 63632 - protein, 163 aa, Gossypium hirsutum
  unsure (1)..(163): unsure at all Xaa locations
  Clone ID: LIB3543-060-Q6-K6-D9.pep
MDFSFEGVALDPSKCSKLSMDEKRELVYELSKRTSRASEMLQSWSRQEILQILCAEMGKERKYTGLTKLKIIENLLKIVAEKNSGDHESVMDPEMQSSPTIGQRTAKRQRKADHPCRLPVPVNDFATNNGGDDMTNAIYCKNSACKASLRQEDTXCKKCSCCI

SEQ ID NO: 63633 - protein, 113 aa, Gossypium hirsutum
  Clone ID: LIB3585-036-P1-K1-H9.pep
MDFSFEGVALDPSKCSKLSMDEKRELVYELSKRTSRASEMLQSWSRQEILQILCAEMGKERKYTGLTKLKIIENLLKIVAQKNSGDHESVMDPEMQSFPTIGQRTTKRQRKAD

SEQ ID NO: 63634 - protein, 188 aa, Gossypium hirsutum
  unsure (1)..(188): unsure at all Xaa locations
  Clone ID: GOSHI-09MAY01-C84272_1.pep
MLVSALLTSVGINSGLCVLFFTLYSILRKQPTNYGVYIPRLIAEGSSKRRSHFNLERLIPSPGWVKRAWKLSEEDLLSTSGLDAVVFMRVITFSLRVFLFAGVIGIFVLLPVNCSGDQLHDIDFADLSNNSLDVFTISNLSSGSKRLWAHFXAVYLVTAFVCYLLYYEYKCITGKKINFFHLTKPQPH

SEQ ID NO: 63635 - protein, 44 aa, Gossypium hirsutum
  Clone ID: GOSHI-09MAY01-C85822_3.pep
DAIAAEFAFGSNMTGLVKPWEGEKIHEECVANDLELTLGNSKTR

SEQ ID NO: 63636 - protein, 262 aa, Gossypium hirsutum
  unsure (1)..(262): unsure at all Xaa locations
  Clone ID: GOSHI-09MAY01-C85822_1.pep
SCFSDFVLVFPFLQGCKPVDRMDIMGGSASASPCSSYHPSPGSSSFPSPASSHYTANANGNADANSLIPWLKNLSSGSSSASSKLAHHLFIAGGSISAPVTPPLSSPTSRTPRTRSDWDEMNAGPTCTGKRFSYLPASTPPSPSRQVFPDPGWLSRLEIPQSGPTSPTFSLVSRNPFGFKDEALXGGGSRMWTPGQSGTCSPAFPXSVDQTSDVPMSDAXAVEFALGSNMTGLVKPWKEXIHEECVAHDLELHWEIKTQMSS

SEQ ID NO: 63637 - protein, 140 aa, Gossypium hirsutum
  Clone ID: LIB3829-029-Q6-K6-A11.pep
MTSGTRMPTWKERENNKRRERRRRAIAAKIFAGLRMYGNYKLPKHCDNNEVLKALCNEAGWTVEEDGTTYRKGCKPVDRMDIMGGSASASPCSSYHPSPGSSSFPSPASSHYTANANGNADANSLIPWLKNLSSGSSSAS

SEQ ID NO: 63638 - protein, 134 aa, Gossypium hirsutum
  Clone ID: uC-gsronu33B168g08b1.pep
LIKLVIKHVRIVSVLAWCACVVLTYPIQGCKPVDRMDIMGGSASASPCSSYHPSPGSSSFPSPASSHYTANANGNADANSLIPWLKNLSSGSSSASSKLAHHLFIAGGSISAPVTPPLSSPTFRTPRTRSDWDE

SEQ ID NO: 63639 - protein, 308 aa, Gossypium hirsutum
  Clone ID: GOSHI-09MAY01-C85452_1.pep
RNRELVENLSKPSSNSKELNFPSKYSQSFFEQFLTCLWKQNLSYWRNPQYTAVKFFYTVVISLMLGTICWKFGSQRESQQDLFNAMGSMYAAVLFIGITNATAVQPVVSIERFVSYRERAAGMYSGLAFAFAQVAIEFPYVFAQSVIYCSIFYSMASFEWTALKFIWYIFFMYSTLLYFTFYGMMTTAVTPNHNVAAIIAAPFYMLWNLFSGFMIPHKRIPIWWRWYYWANPIAWSLYGLVVSQYADDERAGKLSDGVHSMPTRQLLEQVFGYRHDFLVIAALMVAFFVIFFGVIFAFAIKAFNFQRR

SEQ ID NO: 63640 - protein, 93 aa, Gossypium hirsutum
  unsure (1)..(93): unsure at all Xaa locations
  Clone ID: LIB3582-055-P1-K1-A8.pep
CKVRFKHHESESRNTKSRVILISILFLFXHTYILKQVQNYNKNTKNEKKRKILPLRPPCTVAGAGASEAPVAGPWPESHRKSLCPHTPFFFSF

SEQ ID NO: 63641 - protein, 104 aa, Gossypium hirsutum
  Clone ID: uC-gsronu33B058e02b1.pep
PIPIYSTQTQKPNYRLRVSETETLTFPHAPNLPTYPHQRSHLSAATPMPWPPTLPTYPLSPDCSTSTATVYSGRRRRQRGSGGTDPWPESHRKSLCPHTLFFFI

SEQ ID NO: 63642 - protein, 201 aa, Gossypium hirsutum
  unsure (1)..(201): unsure at all Xaa locations
  Clone ID: GOSHI-09MAY01-C85172_1.pep
MISRYSQNGQLSSALDMFLTMERESRVKPNRVTIASVLPACANLGALEIGERIEAYARDNGLLDDLYASNTILQMHARCGXIELAKRVFDEIGKRTNSCSWNSMIMALALHGKSIEALEHYEQMLHEGTAPDNVTFVGVLLACTHGGLVTKGRELFESMAKNYNINPKXEHYGCMVDLLGRAGALQEAYDLIKTMPMKPDA

SEQ ID NO: 63643 - protein, 192 aa, Gossypium hirsutum
  Clone ID: GOSHI-09MAY01-C86912_1.pep
MMQFRLATASSRSYLAVFTAQKQVQFRRFASGAAIKGRTADPTIHSGELEAGPDVHRGEPQGIENHPDDHGEKELKPCSETDPVKQPKLPYKSSPRLKISPVNHPLEPNVQQRRTATSGAALDDVSCVGMDGTPLPESKEEERGKREETMDDKEYFKHHKASPLSEVEVADTRKPITRATDGTASETEHSKG

SEQ ID NO: 63644 - protein, 182 aa, Gossypium hirsutum
  Clone ID: GOSHI-09MAY01-C86862_1.pep
LNYTVDSVQGILNFTMDVDMLAHFDEWQRSGKDDDYEAQDQWPVELRLARVVSAVDYLQAQRARGKLIQEVKENFNVDAFIGNATDWERVCIGNLVGLPVIVVPTGFKNIPNPPPTGTRRRTTVNTGIYAPPNHDHIALALAMAYQSATNHHKQRPPIDDLGPNDTIPNHPTVPTPPRRLHM

SEQ ID NO: 63645 - protein, 75 aa, Gossypium hirsutum
  Clone ID: LIB3827-001-Q1-N6-A9.pep
RDLVDMLAHFDEWQRSGKDDDYEAQDQWPVELRRARVVSAVDYLQAQRARGKLIQEVKENFIVDAFIGNATDWER

SEQ ID NO: 63646 - protein, 91 aa, Gossypium hirsutum
  Clone ID: GOSHI-09MAY01-C86532_1.pep
MNVNQERKTVAVKISEEGAKSTKRPLLPVLGTEKRRRLHWTAEEEDMLKELVHKFSSQVNKNIPWRKILEHGRPVFHSTRIPVDLKDKWKN

SEQ ID NO: 63647 - protein, 64 aa, Gossypium hirsutum
  Clone ID: LIB3583-004-P1-K1-B8.pep
LAYIYIYICYMAGEERKIRRQNYSTSPACFTIWEGSWRLCEFWVMRSAIVLKTLCRRLILSGEV

SEQ ID NO: 63648 - protein, 65 aa, Gossypium hirsutum
  unsure (1)..(65): unsure at all Xaa locations
  Clone ID: uC-gsflnu33B101d08b1.pep
ETELQHFTSLFHHLGRFMETMRVLGDEICYRAKDYLSIHKLFATRADLXRTVYTHSKVKLCRLLI

SEQ ID NO: 63649 - protein, 239 aa, Gossypium hirsutum
  unsure (1)..(239): unsure at all Xaa locations
  Clone ID: GOSHI-09MAY01-C86792_2.pep
RVVALEKENSEEASTSKLEKGCMRGXGGPENALCTYKGVRQRTWGKWVAEIREPNRGARLWLGTFDTSHEAAMAYDAAARKLYGSDAKLNLPELCANNPQSQPSSAANPQMAPMVNYQPQNVSNSGMSMISSSSNNPTIRVNDMTPIPVYNNDSSVMPSFPNESIDLQGNMDAKFGQITEDGIEGFWENMNANLPLLDDSIWAETAMSLEFPMMGDPGSFASNLMEATGWDALQSPWCM

SEQ ID NO: 63650 - protein, 189 aa, Gossypium hirsutum
  unsure (1)..(189): unsure at all Xaa locations
  Clone ID: LIB3826-001-Q1-K6-H5.pep
RVVALEKENSEEASTSKLEKGCMRGXGGPENALCTYKGVRQRTWGKWVAEIREPNRGARLWLGTFDTSHEAAMAYDAAARKLYGSDAKLNLPELCANNPQSQPSSAANPQMAPMVNYQPQNVSNSVTPSFPIENIDLQGNVDAKFGQITEDGIEGFWEXLNANLPLLDDSIWAETAMSFGISNDGVIQA

SEQ ID NO: 63651 - protein, 334 aa, Gossypium hirsutum
  Clone ID: GOSHI-09MAY01-C86762_1.pep
MNSGGGGGGGGAESAGVGMVAMRSSSSSSSPFTVSQWQELEHQALIFKYMMAGLPVPPDLVLPIQKSFESISHRFFHHPTMGYCSFYGKKVDPEPGRCRRTDGKKWRCSKDAYPDSKYCERHMHRGRNRSRKPVESQTMAQSLSTVTSLTVSGSTTSGGGTGTASFQSLPLHAFGGTQVTALATGQSNYHVESIPYGIPRKDYRSQGIKPDAGGHSFISEALGSNRDTWPLMQSRVSSFPQSKSDGNPVLLNDYPQHSFFSDFNSGETVKPEGQSLRPFFDEWPKTRDTWSALEDDRSNQTSFSTTQLSISIPMASSDFSTTGSHSPHGEFQTP

SEQ ID NO: 63652 - protein, 161 aa, Gossypium hirsutum
  Clone ID: GOSHI-09MAY01-C86642_1.pep
ELQRELEQAESGLRSSRRDFPSCHSSRPRERYRERENGRSSNEGGTRTSSSLQSETASMAAMPMVLSGSRSFSGQPPTILQSRDRTDECSSSYEENLDGSKDSGDTGSVGDPELVSSFDGGQPGGFGPSQRHGSRGSKSRQVLERRDRDGRRESKWERKHS

SEQ ID NO: 63653 - protein, 224 aa, Gossypium hirsutum
  Clone ID: GOSHI-09MAY01-C86252_1.pep
GRGELKKRKLQRTKQVPRDRFDEWEEAYRLEREQQKIDEMFMREALLEAKKAADSWEVPVGAVLVQHGKIIARGRNLVEELRDSTAHAEMICIREASSILHSWRLADTTLYVTLEPCPMCAGAILQARIDTLVWGAPNKLLGADGSWVRLFPDERGGNGSEQTDKPAAPVHPFHPNMGIRRGVLASKCADMMQHFFQLRRKNKGENAEQLSSSSSSCLPITTSQ

SEQ ID NO: 63654 - protein, 138 aa, Gossypium hirsutum
  unsure (1)..(138): unsure at all Xaa locations
  Clone ID: LIB3584-008-P1-K1-H6.pep
MEQPVGARLAEASGSQGKEGELKQRKXQRYQTCFFFFFFFFFXAYRXEREQQKXDEMFMREALLEAKKAADSWEVPVGAVLVQHGKIIARGRNLVEELRDSTAHAEMICIREASSILHSWRLADTTLYVTLEPCPMCA

SEQ ID NO: 63655 - protein, 328 aa, Gossypium hirsutum
  unsure (1)..(328): unsure at all Xaa locations
  Clone ID: GOSHI-09MAY01-C86272_2.pep
LICRQHGISRWAFFKINIVNRSLTKLKHVIESVQGADEAFDLTSLATSSLPAAVGSISWTTGLNGSHQQNLTNSKPSXPEVDKNDLPTCDMPGSNTQGLADDQLLGGRTLIQEQLFPHHNGLSPSLDNGANRFKTGSGXGDESAGTPTSHGSCQGSPATESAATKDPLGFSHDQCSPKLAFHLEELNIWGGGSMPEAPVTAEPREPFGGMLVEDAGSSKDLRNLCPIVAEIGADERLPESSWTPPQCSDLGIKHTMHTFTQTTPHVTARHGMKSVTIKATYREDIIRFRISLSSGIVELKEEVAKRLKLEXGTFDIKYLDDDNEWVLI

SEQ ID NO: 63656 - protein, 90 aa, Gossypium hirsutum
  Clone ID: uC-gsronu33B038h03b1.pep
MHTFTQTTPHVTARHGMKSVTIKATYREDIIRFRISLSSGIVELKEEVAKRLKLEECLDVSRSSGSNIIRLSVHDTMANLGSSCESTGEL

SEQ ID NO: 63657 - protein, 55 aa, Gossypium hirsutum
  Clone ID: GOSHI-09MAY01-C87952_1.pep
IILGVISFLGMLFTFLVPESKGKSLEEMSGEVEQENGNQTQGGQQSSTEIRIAQA

SEQ ID NO: 63658 - protein, 69 aa, Gossypium hirsutum
  Clone ID: GOSHI-09MAY01-C87572_1.pep
PMAHLPGTGAVLTYGGTGVAARGYGGWGCCPVVAHLLLGLRFAKIWFSIWAVWANSAYWALIGYWVVLY

SEQ ID NO: 63659 - protein, 160 aa, Gossypium hirsutum
  Clone ID: GOSHI-09MAY01-C87732_1.pep
KDLGSWHGDKQKHTTQPLLCQVLAPSPTASQQLSNCSGCHCCCEYQIASIIVELSFGLSSSSRSIGFSKIAFRIQLRVLLQTLLRLDQNVLLAALTKSGLEVCSVEVNTTGACLILSFGNSTSYVHATFKKSPIATSEDEAQEAVKKACKGLHSGRMVDP

SEQ ID NO: 63660 - protein, 277 aa, Gossypium hirsutum
  Clone ID: GOSHI-09MAY01-C87722_2.pep
LKLNAHWEVCKSGEDALRGVNLNTAGSMNSEQTSFLTADEESRASVDLEETEKFPEIFQTLKESFLKAFKVMDRDLRTHASIDCFCSGTTAVTLVKQGPHIVIGNVGDSRAVLGTRDKDNSLIAVQLTVDLKPNLPAEAERIRKYKGRVFALKDEPEVARVWLPNSNAPGLAMARAFGDFCLKDFGLISVPEISCWRLSEEDEFIVLATDGIWDVLSQEVIDIIEYAPACSSAARTLVQTAVRAWRYKYLTSKVDDCAVVCLFLDSNLSNLSYASNT

SEQ ID NO: 63661 - protein, 136 aa, Gossypium hirsutum
  Clone ID: GOSHI-09MAY01-C87722_1.pep
YSRVCLLHFLTSNQTKPNQCPSFPLFLMSKPGFEPPASEHYFPGSNLGRLKRVLTRDTPSRADQSVPISEFISSSLEQSTSTSTSKSKSPFPPGTTLPLPTVPDRSTLVKTLRLLSFPIPILNWVPWGWLHFGISI

SEQ ID NO: 63662 - protein, 106 aa, Gossypium hirsutum
  Clone ID: uC-gsronu33B090a07b1.pep
YSRVCLLHFLTSNQTKPNQCPSFPLCRKMNINITIIYLSKSQSNSSSNRTFLMSKPGFEPPTSEHYFPGSNLGRFKRVLTRDTPSRAAQSVHISAFISSSLERTRK

SEQ ID NO: 63663 - protein, 81 aa, Gossypium hirsutum
  Clone ID: uC-gsflnu33B016f06b1.pep
GGALNTQLFFHLSILWLYTTSGPRRGHPFIFKYRYEKNSMLLKCWTGRLIATLLFVYRARAFAAMKLGDYCTVGCNMDFRR

SEQ ID NO: 63664 - protein, 146 aa, Gossypium hirsutum
  Clone ID: uC-gsflnu33B016f12b1.pep
FGLAMARAFGDFCLKDFGLISVPEISYWHVSEKDEFIVLATDGIWDVLSNKEVVDIVASCRARTSAARALVETAVRAWRYKYPTSKVDDCAVVCLFFDSTSNNLSTVSNANAKVQPVSMDQVENGNETDTNLIVLTSVDRSATVAS

SEQ ID NO: 63665 - protein, 122 aa, Gossypium hirsutum
  Clone ID: GOSHI-09MAY01-C87012_1.pep
VSQVYIELHKIKKKKGLTVTRQHSSLIYNFLDEELFILEWEARSMRQHLSSKYIYKKNRDGKVLQRTRGTLVASWLSSKAKNKTQNTTTKPKSISQTTQLSTARIEHAAKSTHTRYTCKTIM

SEQ ID NO: 63666 - protein, 212 aa, Gossypium hirsutum
  unsure (1)..(212): unsure at all Xaa locations
  Clone ID: GOSHI-09MAY01-C87212_1.pep
TTVVVKLLGRNIGYGVLHNCICSLWKPSQSFRLMDIENGYFLVRFQXQSRALTQGPXIMFGHYLPVQPWTIQFDPLKPFPSMIMAWIRFLGLSGFLYKKRILEEIGSLVGKVMKLDLKTDSGARGQFARMAMSVDLEKPLTSQVSINSRIQRVEFEALPTVCFYCGXYGHTKNSCSSFLVDRSIQGEKEDLSVTMDKGTDPALADDTLVCGW

SEQ ID NO: 63667 - protein, 299 aa, Gossypium hirsutum
  Clone ID: GOSHI-09MAY01-C80912_1.pep
MLKQVFVRGVKRRFHLPKPFETWRNAPKEKAECVVIGAGIVGLAVARELSLKGKEVLVLDSAPTFGTAASSRNSEVIHAGIYYPSNSPQARFCVRGRKLLYHYCSQRGIPHNQIGKLIVATGTSEIPKLNQLFNRGIQNGVENLRMLDASEAIKMEPELHCVKALLSPASGILDSHSLMLSLVGEAETNGATFSYNTAVIGGHLEGNQMVLHVCETKTLTNWDGNTPLQPDLLLMPIIVVNSSGLSALTLAKRFHGLNTAIIPPAYYARGSYFILSNANSTRHPPFKHLIYPVPEEGGL

SEQ ID NO: 63668 - protein, 148 aa, Gossypium hirsutum
  unsure (1)..(148): unsure at all Xaa locations
  Clone ID: GOSHI-09MAY01-C80882_1.pep
MSAFSSMHSPSYSHSFICSSSINEKKNQRVVFSSFPRFSVPANAKVFLQCQANSHQNAVLMQDGAVATKVSPVEKETPIEKLKSELLSVTSSNEWDEKAGFDINENESTVSITVVGASXGDLAKKKILPALFALYYESCLPKFRFFIS

SEQ ID NO: 63669 - protein, 177 aa, Gossypium hirsutum
  Clone ID: GOSHI-09MAY01-C80782_1.pep
FFTIFIVSALAGNGSSFARSMDKKVLGMKKEKLSHFRLYWHDIVGGKNATAVPVVFPSRNSTTAFGMISVIDDPLTMGRELSSKMVGRAQGFYSAASQQEIGLLMAMNFAFMEGKYNGSTITILGRNTVFSKVREMPVIGGSGLFRFARGYVEARTHRFDPATGDAVVQYDWYVMHY

SEQ ID NO: 63670 - protein, 72 aa, Gossypium hirsutum
  Clone ID: GOSHI-09MAY01-C80712_1.pep
KEVFTPHTCKPNKFKFVFHHFNFLFSPTKQQIKQKTKKKKAHKKFKNFQITLILPSISVIENLFRNYQGRVG

SEQ ID NO: 63671 - protein, 244 aa, Gossypium hirsutum
  Clone ID: GOSHI-09MAY01-C80662_1.pep
MPHLHAIFPLPSNSKPFQHSNIFSSSSSSFSSSAPIRRRLPRTFSPSKHPNLKRLTSRIVQLTRRRQLHQILEETENAKREYGKLNTIVMNAVMEACVHCGDVDLALNIFHQMTQPHSCGVDTVTYATLLKGLGRARRIDDAFQLLESVEKGTAAGKPKLSTQLIYALLHALIEAGDLRRANGLLARFGFLLREGGSSSILTYNLLMKGYINTGCPQAAINLHEEIQLLGLEPDRLTYNTLIFA

SEQ ID NO: 63672 - protein, 227 aa, Gossypium hirsutum
  Clone ID: GOSHI-09MAY01-C80142_1.pep
MISRTRNLISKLPLRCNSSSFFISPPPFNPKFITSTTFGSIQSHPSPSLSTLNQIASHFYSVRSLSSCSCSKPKALLNFNCSSIERTQSVLLGPRYLSTISSSSSPGPKSDDEKSHTSSSESHPSQNPDFKHQEIEGPTVERDLSSLANETREALEAMMKNIYGLSKAVAVLGLVHLGLGAWISYAYGSGAHPLGEVSVQSIMAFGFPFTLAFMLRQSVKPMYFFKI

SEQ ID NO: 63673 - protein, 208 aa, Gossypium hirsutum
  Clone ID: GOSHI-09MAY01-C80172_1.pep
HGCFSPRFHLFSIIFFHFLPSFSRRFPSSTGSRFGSDEPLKPGGYSSPNTVPACPAQTQAQICRLDLSAELFGGVNDACGHNLDRGRCCPVLAAWLFAAHAWYALEVTAPAPAESELPEQPMRPDDSQKCVNSLQDALLSKRVRIPQPNASCDAILCFCGIRLHQISSLSCPAAFNVSGHHRNATPTAAVKNLEKNCRNSTYAGCTKC

SEQ ID NO: 63674 - protein, 182 aa, Gossypium hirsutum
  unsure (1)..(182): unsure at all Xaa locations
  Clone ID: LIB3828-005-Q1-K6-A11.pep
LNRFPVGGGFSDEPLKPGGYSSPNTVPAFPAQTQAQICRLDLSAELFGGVNDACGHNLDRGRCCPVLAAWLFAAHARYALEVTAPAPAESELPEQPMRPDDSQKCVNSLQDSLLSKRVRIPQPNASCDAILCFCGIRLHQISSLSCPAAFNVSGHHRNATPTAAVKKFGRKIAXNSTYAGCT

SEQ ID NO: 63675 - protein, 185 aa, Gossypium hirsutum
  Clone ID: GOSHI-09MAY01-C80112_1.pep
MVCLLLVSCMVVPSLAKDYTVGDTSGWTTGVDYSTWTKDKTFKVGDSLVFNYPTSHTVDEVSSSDYSTCTVGNAITTDNSGATTVALKTAGTHYFICGVVGHCANGMKLSVKVESGSSAAPSKSPSKSPSSSSSSSPASTDKPSTGTPSTTTTTTKAPDSSSSWSLSPFMAVVTTCLALLVLVIS

SEQ ID NO: 63676 - protein, 121 aa, Gossypium hirsutum
  Clone ID: GOSHI-09MAY01-C80042_1.pep
KIAYVGKSVGEIMYLFGTTGGYRELTERINDNSFKRIQHRRFCKFLRQKKNMMISKFGEENIPANFQSEVPTTYYKRLLWILVLILYRPKQKFFTESYAIYISHKKLLSLYDVFPRTLFLL

SEQ ID NO: 63677 - protein, 283 aa, Gossypium hirsutum
  unsure (1)..(283): unsure at all Xaa locations
  Clone ID: GOSHI-09MAY01-C80062_1.pep
QSFERILFLVEYAHWFYEDNTVEKNPSLKSLNLKEFTSLLFNSCDVLRPYVAHIDDIFKDFTDYKVRVPVTGAIILDETYERCILVKGWKGTSWSFPRGKKNKDEEDHACAIREVLEETGFDVSALLNKDEYIEVIFGQQRVRLYIIAGVKDDTPFAPLTKKEISEIAWHRIDDLQPATNEVISRGITGLKLYMVAPFLASLKSWISKHPSPLPPRPVLPLKGXSIWKAKNSSIGSNSMIVESQSNKLQSDAKPPDTGPGKSFRNFRFDTAAVLRALEGSFST

SEQ ID NO: 63678 - protein, 50 aa, Gossypium hirsutum
  unsure (1)..(50): unsure at all Xaa locations
  Clone ID: LIB3585-049-P1-K1-C8.pep
PATNEVISLWITXLKLYMVAPFLASLKSWISKHPSPLPXIPDFLFKGVLY

SEQ ID NO: 63679 - protein, 192 aa, Gossypium hirsutum
  Clone ID: GOSHI-09MAY01-C80372_1.pep
MEFWGAEVKSGQNFEVELEDDGNRILHLSQVALGEGTGDNKKEKGKETICLYLKFKNEKFVVGTLSQEKCPQIALDLVLHDKFELSHTGKNGSVYVTGYYVDTSQGSDTESEEDLLEPTMNLVKSEPPASDPTTTKQVKIVEPKKDDDSSDEDEEDSSAEDEESSEEQEPRMLVNGENDTDDADSDEDDSDE

SEQ ID NO: 63680 - protein, 167 aa, Gossypium hirsutum
  unsure (1)..(167): unsure at all Xaa locations
  Clone ID: LIB3585-054-P1-K1-H6.pep
MEFWGAEVKXGHIXXVELKDDGDRILHLSQVRGKLTRNFKHLNLDFXXXXLYIHFKNEKFVVGTLVYEKCPQIALDLVLHDKFELSHTGKNGSVYVTGYYVDTSQGSDIQSEEDLLEPTMNLVKSEPPASDPTTTKQVKIVEPKKDDYCSDEDEEDSSAEDEESSEE

SEQ ID NO: 63681 - protein, 155 aa, Gossypium hirsutum
  unsure (1)..(155): unsure at all Xaa locations
  Clone ID: GOSHI-09MAY01-C80252_1.pep
MAASRRLRDLQSQPGNKTCVDCNQKNPQWASVSYGIFMCLECSGKHRGLGVHISFVRSVTMDSWSEIQIKKMESGGNERLNAFLAQYGIPKETDIVAKYNTNAASVYRDRIQALAEGRPWRDPPVVKENLNGVVVXGIRKPPLSSGRGGDRESNF

SEQ ID NO: 63682 - protein, 157 aa, Gossypium hirsutum
  unsure (1)..(157): unsure at all Xaa locations
  Clone ID: GOSHI-09MAY01-C80222_1.pep
LLLEALPDSNDTKSAKLVAQKSKGMRRISFSLTKITGAAASDAVANLSQELFKAFKGLQYLFXEQERCLQLTKVISVEKEKNEIFHSQLELNSKRQKLQKAINSLDKVDLTNGQNPPGKQAAQSPGPTKVTKRPVPTHRRAKARGIILQDSENEKDS

SEQ ID NO: 63683 - protein, 119 aa, Gossypium hirsutum
  Clone ID: GOSHI-09MAY01-C81842_1.pep
MVLLQSDPFLNELTSMFERSTETGSVWVTLKRSSLKSKAQRNKMKTAEQPIEYRCLVRATNGKKTISTSVGAKDHQRFQASYATILKAHMTALKKRERKDRKKAAEDKKEGGSKKPKRA

SEQ ID NO: 63684 - protein, 117 aa, Gossypium hirsutum
  Clone ID: AI728175.1.pep
MAPLPADQPCESHASGAVADSQRSLPTPFLSKTYQLVDNSSVDDLISWNDDGSTFIVWRPAEFARDLLPKYFKHNNFSSFVRQLNTYGFRKVVPDKWEFANDCFKRGEKGLLRDIQR

SEQ ID NO: 63685 - protein, 100 aa, Gossypium hirsutum
  unsure (1)..(100): unsure at all Xaa locations
  Clone ID: AI728806.1.pep
MAPLPADQPCESHASGAVADSQRSLPTPFLSKTYQLVYNPSVXDDLISWNDDGSTFIVWRPPEFARDLLPNYLXHNNFSSFVRLLHTYGFMKVLPDRWDF

SEQ ID NO: 63686 - protein, 89 aa, Gossypium hirsutum
  Clone ID: LIB3585-011-P1-K1-G6.pep
MAPLPADQPCESHASGAVADSQRSLPTPFLSKTYQLVDNSSVDDLISWNDDGSTFIVWRPAEFARDLLPKYFKHNNFSSFRRQLNTYGF

SEQ ID NO: 63687 - protein, 108 aa, Gossypium hirsutum
  Clone ID: GOSHI-09MAY01-C81232_1.pep
MNSSSPANSSISTTAIVGGGGASGRTNAALEDSHFPSDLISIQDRKDEAMLVLKSDLMAALNEEVKSLDEDNWKFEGPRSRIHLISRPGGFLQKQMEFTKNCSTAPKK

SEQ ID NO: 63688 - protein, 213 aa, Gossypium hirsutum
  Clone ID: LIB3543-041-Q1-K6-G11.pep
RSRFSNHSDDVVGSSWDKTVRLYDASANVLRGEFMHGGPVLDCCFHDDSSGFSASADNKVGRVMFSHGKEEILGRHDAPVRCIEYSYAAGQVITGSWDKTLKCWDPRGASGQERTLVGTYPQPERVYSLSLVGNRLVVATAGRHVNVYDLRNMSQPEQRRESSLKYQTRCVRCYPNGTGYALSSVEGRVAMEFFDLSEASQAKKYAFKCHRKS

SEQ ID NO: 63689 - protein, 185 aa, Gossypium hirsutum
  unsure (1)..(185): unsure at all Xaa locations
  Clone ID: LIB3582-060-P1-K1-B6.pep
MNTRHRYQSESSLNPTTDGISNLRXVYHSYNLLLSSWDKTARLYNASANVLRGXLMHGGHGTLHCCXHRKIHRGMQMTERKHNISIVRIXLQAMGKEEILSRHDAPVRCIEYSYAARQVITGSWDKTLKCRDPRGASGQERTLVGTYPQPERVYSLSLDGNRLIKATAGRXVNVYDLRNMSQPEQ

SEQ ID NO: 63690 - protein, 160 aa, Gossypium hirsutum
  unsure (1)..(160): unsure at all Xaa locations
  Clone ID: uC-gsflmaxxa055g08b1.pep
GDKEIGSXPATPRTGSAAPXXPISAPPSQLXSPSLTRSPLXXTDDHIQPASKTPKSSTPXLEPHVLLLLWEVQLEGLFKLTRLDPQXDAWLPITESRNGNAYYAAIYTLCSGIGIQALVLPGAFTFLGWSWGIINLTGALYGTLHPILPGHLHDFLKLDC

SEQ ID NO: 63691 - protein, 77 aa, Gossypium hirsutum
  unsure (1)..(77): unsure at all Xaa locations
  Clone ID: LIB3583-033-Q6-K7-B2.pep
KALNLPGLPSDAWLPSLSQEWKCLFAAFHTLCSGIGIQALVLPVAFTFLGWSWGIITLTVAXIWXXYTLYLLVHXHE

SEQ ID NO: 63692 - protein, 98 aa, Gossypium hirsutum
  Clone ID: GOSHI-09MAY01-C82192_1.pep
VLPRFLKTPKSKRCFLFVCLFTSSSKATMAASDPHAPLLRPRQPDGSAARPVSLAHLLGRATGRRGASMLVRETAARELEERRADWGYSKPVVALDML

SEQ ID NO: 63693 - protein, 226 aa, Gossypium hirsutum
  Clone ID: GOSHI-09MAY01-C82162_1.pep
FSSRTGKTEIKQRGEMDENGKVRPNCANAANPYHVCGAYCLEKIADGKGYKEKDKKILDNRYGIKEVVRNKRTDDGGRSQPNCPKAPNPYHECNDNCTQRSSKANIQGVRKESDNHNGIKQSELKKKKGGEGRVHQNCGKASNPYHECDENCFNRSTEAKKESGAKFIDDSRSFERKKKGSESQPKSPRALEITPALGAIYHGDPNSLQSHLYREKLEAENAESFP

SEQ ID NO: 63694 - protein, 196 aa, Gossypium hirsutum
  unsure (1)..(196): unsure at all Xaa locations
  Clone ID: GOSHI-09MAY01-C82042_1.pep
SAHTPAGGGVLIFAGAGGHRNEVLSVDFHPSDIYRIASCGMDNTVKIWSMKEFWTYXEKSFSWTDLPSKFPTKYVQFPVFLASVHSNYVDCNRWLGDFILSKSVDNEIVLWEPKMKELSPGEGTADILQKYPVPECDIWFIKFSCDFHYNAAAIGNREGKILVWVLQSSPPVLIARLSHAQSKSPIRQTATSFDGS

SEQ ID NO: 63695 - protein, 325 aa, Gossypium hirsutum
  unsure (1)..(325): unsure at all Xaa locations
  Clone ID: GOSHI-09MAY01-C83912_1.pep
ESIAWSILIIALAWLLMILLYCAHPGGPAWGKYRFKICSSLSSHANKPIPGPRGLPLFGSMNLMASSLPHHRIASAAETCKAKRLMAFSLGDTRVIVTCNSDVAREILNSSVFADRPVKEAAFGLMFNRAIGFAPYGVYWRTLRRIAATHLFCPKQIKGAEDQRRVIASEMVTLFAHTSNQSFHVRQVLKRASLNNMMASIFGRKYKLDSINTEVEQLGDLVDEGYDLLGTFNCSDHLPWLVDFDLQKLRLRCSNLVPKVNRFVSRIIAQHRXMVFRGTDTVAVLIEWILARIVLHPEVQSRVHDELDNVVGRSRAVDESDVAKM

SEQ ID NO: 63696 - protein, 195 aa, Gossypium hirsutum
  unsure (1)..(195): unsure at all Xaa locations
  Clone ID: LIB3543-037-Q1-K1-B11.pep
RPSVRRVGYWRTLEEIAATHLFCPSKXSAEDQRRVIASXMVTLFAHTSNQSFHVRQVLKRASLNNMMASIFGRKYKLDSINTEVEQLGDLVDEGYDLLGTFNCSDHLPWLVDFDLQKLRLRCSNLVPKVNRFVSRIIAQHRGRAPTNSKIRDFVDVLLSXPSTDKLSDSDMIAILWEMVFRGTDTVAVLIEWILA

SEQ ID NO: 63697 - protein, 105 aa, Gossypium hirsutum
  unsure (1)..(105): unsure at all Xaa locations
  Clone ID: GOSHI-09MAY01-C83412_1.pep
RRQPTLMNYEMQASGXVNKPLTPKFVKSVMQGXKIYTVNFASFRTPEGVCGSYREGSCHAHHSYDAFNRLCLGQNFCTPTVAPEMFAGDPCPTVMKKLSADVICS

SEQ ID NO: 63698 - protein, 242 aa, Gossypium hirsutum
  unsure (1)..(242): unsure at all Xaa locations
  Clone ID: GOSHI-09MAY01-C83662_1.pep
GRVGDHPTSWMWCLPWAGYWYNTSYQTATQMTPFXSVVWSLPSTIARYVKDDSGHPLIDAQLLERDHVLQLLKINLAQAQAWMKFYADKHHXDISFNGGDWVYVKLQPYRQSSIRVQRHSKLGHRYFGPYQVLKRVGPVAYELDLPSTARIHPVFHVSMLKKCLGHPDQQVTPLDLVDSTSSIDLYPIAILDRRQVQRGSATVRQCLIQWNGLTIDDATWEDNEKLHQLYLAFHLEDKVHPR

SEQ ID NO: 63699 - protein, 197 aa, Gossypium hirsutum
  unsure (1)..(197): unsure at all Xaa locations
  Clone ID: GOSHI-09MAY01-C83092_1.pep
PRVRPRVRPRVRENLVAWARPLLASKEGLETIIDPSLGSDVSFESVAKVAAIASMCVQPEVSHRPFMGEVVQALKLVCNECDEAKVGSRGTSQDDISIDMDGKVGTGSEQLSDPLQSHYSIPNYVSGLDTERGLSVSDLFSSSAXFRRQSSESFRRHCTSGPLRTGRGNRFWHKMQQLSRGSISEHSAMIKFWSDSH

SEQ ID NO: 63700 - protein, 188 aa, Gossypium hirsutum
  Clone ID: GOSHI-09MAY01-C83022_1.pep
FFFFFFFFFFFFFFFWLRHVNAEKRLEEWKAEEEQRKLEKIAEDFIKKKAKTGKKGVGDGEAEKYVEKYREQSARCVAVVEESVRAACQNGKRKTVPGGADPKRLKIWMGKRKVDESDSDSDYSSEDEDYEENEKSVLLNNGNHSDSSKGAEGSCRSLLGGKQDIHFSIGVSIGTGSEEKKEVVLPPT

SEQ ID NO: 63701 - protein, 87 aa, Gossypium hirsutum
  Clone ID: GOSHI-09MAY01-C83352_1.pep
AMEIPSGTIRYGLKLATTCFGIAIKYLFTLICATKDPCLGTKRVGEVVVPLLDLIQESNNGVVRFVTYQVRTTDGKAYGELNLSFKV

SEQ ID NO: 63702 - protein, 177 aa, Gossypium hirsutum
  Clone ID: GOSHI-09MAY01-C58951_1.pep
RLNSQSQLSYNTSLPPAFRLRPNKHTQKLTRRGENDCRFALLLLFLTSITLHTKAEVITLTPDTFSDKVKEKDTAWFVKFGGPWCKHCKNLGTLWDELGKAVEGEDEIEIGEVDCSVSKPVCTKVDIHSYPTFKLFYDGEEVAKYQGKRDVESLKAFALEEAEKAAEKAQLDTDKEL

SEQ ID NO: 63703 - protein, 44 aa, Gossypium hirsutum
  Clone ID: LIB3149-057-Q1-K1-B7.pep
KEKNSTRDFQDLILYLFYNILSKACTKMKLDNFKFGQGGRSKLI

SEQ ID NO: 63704 - protein, 190 aa, Gossypium hirsutum
  Clone ID: GOSHI-09MAY01-C58371_2.pep
SIKISWAKVQVCTLKSARKPETFFTRISKTNGFISPMWGGVIVWNPLGCLKDSEFKPSAKNIIPIQDLENMFEVFIGQFRQLFGFKSLNVYTNASGDWNLLPSERGFTEWELDVLSWQHTCFNLHSCATTLGSLLRLVQSLPRMIIKDEIGKQVKLSLEAAKLALSNASSGVYESLAASFSQARFFGEDA

SEQ ID NO: 63705 - protein, 164 aa, Gossypium hirsutum
  Clone ID: LIB3543-044-Q6-K6-G3.pep
FYVYLSEPFFFLFWILDLLYKDYQTDHKFTLTTSSPTGVAITSAGTKKGELFLADVNTQLKNKNVTTDIKVDTYSNLYTTITVDQPAPGLKAIFSFRVPDQRSGKVELQYLHEYAGISSSIGLTANPIVNLSGVIGTNVLALGTDLSFDTKTGNFTKCNAGLSF

SEQ ID NO: 63706 - protein, 156 aa, Gossypium hirsutum
  Clone ID: GOSHI-09MAY01-C58321_1.pep
LSFSQRPKNSSKREGKSTAELKTTTPEQIWPFLAEFCNIDKFFPSVDTCHRKEGTPGQPGLVRYCESSTSWAIEKLLTIDPINHSLSYEIVENNMGFKGYLATLNVLAVEGDGCKIEWSFISDPIEGMKLEDFVSYLDNTLLFMAKKLEDAVRAQI

SEQ ID NO: 63707 - protein, 153 aa, Gossypium hirsutum
  Clone ID: GOSHI-09MAY01-C58261_1.pep
MLVTECSAYDEIGIYPNRNPTLNGSSLSMISWKSSSDNFSCYDLSNTSSSNHGNLGSSSTSDSEDASQQSAGRDTSLYTQNGFSECQVKGKDKKQDVSGGVAPESQALFGHSPDGRGNKVSGNLLTKAAENFEDGKATALTSSQHQSMSTSMQ

SEQ ID NO: 63708 - protein, 74 aa, Gossypium hirsutum
  Clone ID: GOSHI-09MAY01-C59911_1.pep
DESPDEVMAGPAEEAGAHCPEGLWPLPPQVSPRVTYTRVSPGRAEDVTFLYHPCAQPWLKLQVCLLAYACMAKP

SEQ ID NO: 63709 - protein, 152 aa, Gossypium hirsutum
  Clone ID: GOSHI-09MAY01-C59551_1.pep
FCLSILDRSLNFRRDPATDVARRNDPKYVGRVLSAMINSNDDNGVLAGNWSGTYTGGRDPRNWNGSVEILKDWKKSGFSPVRYGQCWVFAGTLNTALRSWGIPSRVITNFSSTNDTDRNLSVDVYYDRMGNPLDKGSDSVWNFHVWNEGWFV

SEQ ID NO: 63710 - protein, 147 aa, Gossypium hirsutum
  unsure (1)..(147): unsure at all Xaa locations
  Clone ID: GOSHI-09MAY01-C59531_1.pep
MADQLTEEQITEFKEAFSLFDKDGDGCITTRELGTVMRSLGQNPTEAELRDMMSEIDRDGNGTVDFPEFLGMMARKMKDTDNEEEIREAFRVFDKDGDRFVSAAELRHVMTRLGEKLSDQEVDEMIRAADTDGDGQVNYXEFVRVLV

SEQ ID NO: 63711 - protein, 129 aa, Gossypium hirsutum
  Clone ID: GOSHI-09MAY01-C59481_1.pep
MARGPGLAPTPLRLPLLLLLLAAVTGHTAAQDNCTCPTNKMTVCSPDGPGGRCQCRALGSSVAVDCSTLTSKCLLLKARMSAPKNARTLVRPNEHPLVDNDGLYNPYCHPYGRFKARQCNQTSVFWCVN

SEQ ID NO: 63712 - protein, 127 aa, Gossypium hirsutum
  Clone ID: GOSHI-09MAY01-C59411_1.pep
CRIAFAAARRLALAPGPSSPPPSPPPRPAELALSPPADMSESKSGPEYASFFAVMGASAAMVFSALGAAYGTAKSGTGIAAMSVMRPELIMKSIIPVVMAGIIAIYGLVVAVLIANSLNDDISLYRS

SEQ ID NO: 63713 - protein, 155 aa, Gossypium hirsutum
  Clone ID: GOSHI-09MAY01-C59781_1.pep
LYVEVRYSPHLLANSKVEPIPWNQAEGDLTPDEVVALVAQGLQEGERDFGVKARSILCCMRHQPNWSLEVVELCKKYQQQTVVAIDLAGDETIPGSSLFPGHVEAYQEAVKSGIHRTVHAGEVGSAEVVKEAVDILKTERLGHGYHTLEDQALYD

SEQ ID NO: 63714 - protein, 87 aa, Gossypium hirsutum
  Clone ID: GOSHI-09MAY01-C59111_1.pep
MLLYDCPAEGCRQKVHTAQLCRGCSLCILRCLQCGRCINDSEYEETFSLEYLCSDCCKQEIAKSHDRPDRMIGSSSLPETGSCHLHG

SEQ ID NO: 63715 - protein, 110 aa, Gossypium hirsutum
  unsure (1)..(110): unsure at all Xaa locations
  Clone ID: GOSHI-09MAY01-C59071_1.pep
PASVFVNPSDLICSGYIGYFEHRRKXEIGAGKIERVATQVGSLLSGSGLQRSESEPLHLIPSAHLTINLRHSPDFKHAHGIHQWWDNGFIGLSELHEYRPFVTDEKYLLR

SEQ ID NO: 63716 - protein, 46 aa, Gossypium hirsutum
  Clone ID: LIB3149-060-Q1-K1-A5.pep
PTMVFKSIKDLMPYINITLRSCTVSSPTTFVCSMKTNGFYVFMVNG

SEQ ID NO: 63717 - protein, 356 aa, Gossypium hirsutum
  Clone ID: GOSHI-09MAY01-C59031_1.pep
HASEQERFALEHIAKCQHSSVSKLNNNSQIASWDTRFETGTRTALLQPFSPIVIAADENERIRVWNYEEATLLNGFDNHDFPEKGISKLCLLNELDDSLLLVASGDGNIRIWKDYTLRGKQKLVTAFSSIQGHKPGVRSLSTVVDWQQQSGYLYASGEISSVMIWDLDKEQLVNSIPSSSDCSVSALASSQVHAGQFAAGFVDGSVRLYDVRTPDMLVRTTRPHTQQVARVVGIGFQPGLDQGKIVSASQAGDIQFLDIRSQRDADLTIDAHRGSLTALAVHRHAPIIASGSAKQLIKVFSLKAEQLGTIRYQHTFMAQKIGSVSCLTFHPYQVLLPAGAADACVSIYADDNSHTR

SEQ ID NO: 63718 - protein, 241 aa, Gossypium hirsutum
  unsure (1)..(241): unsure at all Xaa locations
  Clone ID: GOSHI-09MAY01-C59251_1.pep
MANSMVLVSLMALGLLMAFSTTTQVEAAARAFFVFGDSLVDNGNNNYLATTARADSPPYGIDTPTRRPTGRFSNGKNIPDFISDALGSEPTLPYLSPELRGEKLLVGANFASAGVGILNDTGIQFINIIRMFRQLQYFQDYQTRLAELVGNDEAQQIVSDSLVLITVGGNDFVNNYFLIPFSARSRQFLLPDYVTYLISEYRKILMRLHDLGARRVLVTGTGXLGCVPAERAMRSPNGECA

SEQ ID NO: 63719 - protein, 167 aa, Gossypium hirsutum
  unsure (1)..(167): unsure at all Xaa locations
  Clone ID: uC-gsflmaxxa003h08b1.pep
MASSMVLVSLMALGLLMVFSTTTQVEAAARAFFVFGDSLVDNGNNNYLATTARADSPPYGIDTPTRRPTGRFSNGKHIPDFISDALGSEPTLPYLSPELRGEKLLVGANFASAGVGILNDTGIQFINIIRMFRQLQYFQDYQTRLAELVXNDEAQQIVSDSLVLITV

SEQ ID NO: 63720 - protein, 169 aa, Gossypium hirsutum
  Clone ID: GOSHI-09MAY01-C54811_1.pep
MARKKIREYDSKRLLKQHLKRLANIDLQICSAQVTQSTDFTELTNEQPWLSSTRLVVKPDMLFGKRGKSGLVALNLDLAEVAEFVKARLGTEVEMGGCKAPITTFIVEPFVPHEQEYYLSIVSERLGFTISFSECGGIDIEENWDKANTMFLTTEKPMTLETCAHVIAT

SEQ ID NO: 63721 - protein, 92 aa, Gossypium hirsutum
  Clone ID: GOSHI-09MAY01-C54451_1.pep
EADGSPNPSRYIPSSSTLPFMRLSGAIVPWKNTVWFVAFGTIKCTPSIIPLWWWIISSQVSSETLHRPTVMKNKNEKKEYVNMNTSSVRMRG

SEQ ID NO: 63722 - protein, 260 aa, Gossypium hirsutum
  unsure (1)..(260): unsure at all Xaa locations
  Clone ID: GOSHI-09MAY01-C54791_1.pep
FVIFFTSVIGITTPVLLARFFXGKPVYDKAILIIKCFAAGVILSTSLVHVLPDAFAALSDCQVASRHPWKDFPFAGLVTLIGALLALFVDLTASSHVEHGHKPSGDYLPVGTHDVTVGKKVGNTHSDLSNEELVKLKQRLVSQVLEIGIIFHSVIIGVTMGMSQNQCTIRPLVAALAFHQIFEGMGLGGCIAQAGFRMGTVAYMCLMFSATTPMGILLGMMVFSVTGYDDSSPNALIMEGILGSLSSGILIYMALVDLIA

SEQ ID NO: 63723 - protein, 138 aa, Gossypium hirsutum
  Clone ID: GOSHI-09MAY01-C54241_1.pep
TGASAHASARDGWASPIRPNNLLFDSGAIDFAGSGVVHMVGGIAGLWGALIEGPRIGRFDRAGRSVALRGHSASLVVLGTFLLWFGWYGFNPGSFLTIMKGYGGGGGYYGHWSAVGRTAVTTTLAGCTAALTTLFSKR

SEQ ID NO: 63724 - protein, 129 aa, Gossypium hirsutum
  Clone ID: LIB3165-034-P1-K3-H1.pep
HASARDGWASPIRPNNLLFDSGAIDFAGSGVVHMVGGIAGLWGALIEGPRIGRFDRAGRSVALRGHSASLVVLGTFLLWFGWYGFNPGSFLTIMKGYGGGRRLLLDNSSSVVFFYIYLLHFPFSIILIT

SEQ ID NO: 63725 - protein, 83 aa, Gossypium hirsutum
  Clone ID: GOSHI-09MAY01-C54231_1.pep
LGVIVSFMVAFSPMPAFYQIYKKKTSEGFQSLPYVISLFSAMLWIYYALLKKNEMHLIIINIFCCFIQSFYIVTYVYYGRKKE

SEQ ID NO: 63726 - protein, 156 aa, Gossypium hirsutum
  Clone ID: GOSHI-09MAY01-C55821_1.pep
MSMTPSLSRLHSPFLCCPLKHSTPSLSIKCGRNHRSPPSYPCIRAVDLDQSTIVAVSVGLVSVAVGIGIPIFYETQIDNAASRENTQPCFPCNGSGAQRCRFCMGSGTITVELGGNEKEVSKCVNCEGIGSLTCTTCQGSGIQPRYLDRREFKDDD

SEQ ID NO: 63727 - protein, 105 aa, Gossypium hirsutum
  Clone ID: LIB3165-047-Q1-K1-H5.pep
MLITDRGNVNYAEESDQANRCWDCDVKVHEANFLVAKHTRTLLCHVCQNPTPWLASGQHLSPAVSVCESCVANKNTTCEMTTEQEESSEGEYEDEEEDYDGDDDE

SEQ ID NO: 63728 - protein, 96 aa, Gossypium hirsutum
  Clone ID: uC-gsronu33B121f07b1.pep
LANFLVAKHTRTLLCHVCQNPTPWLASGQHLSPAVSVCESCVANKNTTCEMTTEQEESSEGEYEDAADALSFLFSTFFSFSSHSLSLSFFFSLIPS

SEQ ID NO: 63729 - protein, 199 aa, Gossypium hirsutum
  unsure (1)..(199): unsure at all Xaa locations
  Clone ID: GOSHI-09MAY01-C55661_1.pep
MEAAAEGLWGLADEFEKMGEIGKAVKCLEAICQSHASFLPIVEVKTRLRIATLLLRHSHNVNHAKSHLERSQLLLNSIPSCFDLKCRTYSLLSQCYHLVGAIPPQKQILYKALHLTSAAAPDVFGQLWCCNFNSQLANALIIEGDYXNSGSTLKSSYVSATPICSPEPQMFLVASILLFPSLCLWDNPTGHQVEPTPPI

SEQ ID NO: 63730 - protein, 191 aa, Gossypium hirsutum
  Clone ID: GOSHI-09MAY01-C55621_2.pep
WRKAKLALGLNMCLYVPHQKLDDSSPSSSIMHHPVTANVPSRCSSDAVPLSPSPNDCRPTTPTPSSSGLRLSKSVPKSSKKTCSICLTSMVLGQGHAIFTAECSHSFHFHCIASNVKHGNQICPVCRAKWKEIPSQRPASHLPNGKSRINPADWPRDDAWAVKRLPSPRLDSTRHVSSLFQPLSQESLMMI

SEQ ID NO: 63731 - protein, 220 aa, Gossypium hirsutum
  Clone ID: GOSHI-09MAY01-C55621_1.pep
KYFRLGRVVFSPASASSPWRTCSICLTAMKPGQGHAIFTAECSHSFHFHCITSNVKHGNQICPVCRAKWKEIPFQSPASDLPNGRSRINPADWPRDDAWTTVVRRLPSPRLDPTRQISSLFHTSEPGTFDDDEVLDLQHETTEENVFAKDAAKNNSIGAIEVKTYPEVSAVPRANSHNNFAILIHLKASHTSGGLNSRNQTIFSPSTQNSRAPVDLVTVL

SEQ ID NO: 63732 - protein, 121 aa, Gossypium hirsutum
  Clone ID: GOSHI-09MAY01-C55261_1.pep
PTRPGKGGGIGKGGGVGGGIGKGGGYGGGVGKGGGIGKGGGYGGGIGKGGGHGIGGGIGKGGGVGGGIGKGGGIGKGGGFGGGAGGGYGKGGGFGGGVKCGAGGGKGGGFGGSGGGENGHH

SEQ ID NO: 63733 - protein, 219 aa, Gossypium hirsutum
  Clone ID: GOSHI-09MAY01-C56591_1.pep
VCLCEFSEKDKLRLLPMCSHAFHINCIDTWLLSNSTCPLCRGTLFTPGFSMENPVFDFDDLREDEGCVGNGENGYTPSQKTVEMEEIVVDKGVLPVRLGKFRRINGEPDEAGGETSSSNLDARRCFSMGSYQYVLAKSDLRVTLSGGQQHHSHDIKHSSAERDAEEKKISNMSKGESFSVSKIWLWSKKGKFSTSSESQTGMTSSLNSDLPWLKKTHEQ

SEQ ID NO: 63734 - protein, 71 aa, Gossypium hirsutum
  Clone ID: LIB3543-001-Q1-K1-G8.pep
KKLQLARSITSNCQTSNAKKPHRKTKRNHRSDLSHHKRNKTSLISRKQIQIRVFSKLNFNTIFSCYNPPSI

SEQ ID NO: 63735 - protein, 42 aa, Gossypium hirsutum
  Clone ID: LIB3149-016-Q1-K1-F12.pep
KGRPLFFFFFFFFFFFFFFFFFFFFFFFFFFFFFFFFFFFFF

SEQ ID NO: 63736 - protein, 304 aa, Gossypium hirsutum
  Clone ID: GOSHI-09MAY01-C56761_1.pep
LYDPYKCPFIEGEFDCQKYGRPDNTYLKYRWQPFSCSLPRFNGLYFLRKWRGKKIMFVGDSLSLNQYQSLTCMIQAWVANSQISYIKRDGLTSVTFLGYDVNIMLYRTPYRVDIVNQKYGRVLKLDSIRGGDSWKGVDMLIFNTWHWWTHTGRTQPFDYIEDGGKTWKDMNRMVAFYKGLTTWARWVNRNVDPLKTKVFFQGISPTHYEGKDWNKPTESCSGQTQPFFGMRYPGGTPMAWVVVKKVLSRIKKPVFLLDVTGLSQYRKDAHPSAYRGMDGGTDCSHWCLPGVPDTWNSLLYAAVF

SEQ ID NO: 63737 - protein, 79 aa, Gossypium hirsutum
  unsure (1)..(79): unsure at all Xaa locations
  Clone ID: uC-gsronu33B157f06b1.pep
KTRKDMNRMVAFYKGLTTWARWVNRNVDPLKTKVFFXGLSSTHYEGRDRNMPAEYCSXQTSPFVGMRNAAGTPMACVAA

SEQ ID NO: 63738 - protein, 84 aa, Gossypium hirsutum
  unsure (1)..(84): unsure at all Xaa locations
  Clone ID: GOSHI-09MAY01-C56691_1.pep
LIANSGNDLPVIDLTRISQELAYLASDADLVILEGMGRGIETNLYAQFKCDSLKIGMVKHPEVAQFLGGRLYXDCVFKYNEVLG

SEQ ID NO: 63739 - protein, 106 aa, Gossypium hirsutum
  Clone ID: GOSHI-09MAY01-C56601_1.pep
MATLAAVAARRIATVPRTPPPCQAASLITRRGLAGAADHHGPPKVNCWQEPMNPANWKEEHFVIVSLTGWGLVFYGGYKFLTKGKGKKEENTVETAKKMRLELLIF

SEQ ID NO: 63740 - protein, 40 aa, Gossypium hirsutum
  Clone ID: GOSHI-09MAY01-C56101_1.pep
INKLIAEVSYFTTQQNTEFILLPLSYLINFTQNTSDQTHC

SEQ ID NO: 63741 - protein, 102 aa, Gossypium hirsutum
  Clone ID: GOSHI-09MAY01-C56341_1.pep
KQLCISAISLAIKGDFGVPVTPCCKFCWRVCSRFLCALLAFLSLFYIVRNCRHTKSSRLLAMPGWPMRGKLEVFKHTFSMIIMVGISYGLWNIKMETGAFGR

SEQ ID NO: 63742 - protein, 154 aa, Gossypium hirsutum
  Clone ID: LIB3829-005-Q6-N6-C4.pep
FITCVPGSEIPEWFDFKSLGSSINIQLPSEWWINFPSFVASVVVSFPERYNGRNFGIRCECHLKSYNGDSHDLTCSFSLWGVGVLNHEDRMFGWDHMFLLYDDFKVWEFVESQASNKCIYNEASFKFYPLHYGSKLRNSSLEIKQCGVHLLFAN

SEQ ID NO: 63743 - protein, 136 aa, Gossypium hirsutum
  Clone ID: LIB3149-004-P1-K1-B1.pep
RSTSVEEVSNIEKVLKQAVFCKSLGLLFTNCFLLDQKAVRNPETPKLEMPFEQMFTVLKDYHQAPPESKRRIKMRTCVPGSEIPEWFDFKSLGSSINIQLPSDWCSNNNWINFPCFVASAVASFPDSYNGMEFGIN

SEQ ID NO: 63744 - protein, 114 aa, Gossypium hirsutum
  unsure (1)..(114): unsure at all Xaa locations
  Clone ID: GOSHI-09MAY01-C57911_1.pep
MKPVFTIISALLLAVIATVNSCPPSDRXRTLLAFRAALHEPYVGIFDSWTGTDCCHNWYGVSCDSESHRVADISLRGESQDPIFERAHRTGYMAGFISPEICKLTRLSRITIAD

SEQ ID NO: 63745 - protein, 111 aa, Gossypium hirsutum
  Clone ID: GOSHI-09MAY01-C57881_1.pep
FLFGFSDAFNAFPSLSLKLFISLTIHFKDFSFLSQFLYFSTSLVLKSVLFSLLFSSYFPRFFVIFFHFCLFFSIRIVSIFFLVLNPIYWLNRQNPDYIVFDSFLPINCLTK

SEQ ID NO: 63746 - protein, 79 aa, Gossypium hirsutum
  Clone ID: LIB3272-049-P1-K1-G9.pep
MLGLKKSPLKTAKHNSVDPARVAASRSNPFDSDDEFDNKQTLKPSRRTSSEPTLSPPNFGANPLDDNEGKVNSSSSYWQ

SEQ ID NO: 63747 - protein, 150 aa, Gossypium hirsutum
  Clone ID: GOSHI-09MAY01-C57491_1.pep
MGLGLSVLIAMKATAWMLLYLFFSRFGFTVLAIPLLYASLISWLVSIASHPSIDLPMLLGKNPDGTFPILSTIMFSPYLYFNRAFSMARRFLTGDEPYSQICEGLYVGGWPASPRLLPPGNPAIIDCTSEFPRIKEFKGHSYLCVPTWDT

SEQ ID NO: 63748 - protein, 93 aa, Gossypium hirsutum
  Clone ID: AW187937.2.pep
GIWRMMQPLLVEDRRFQAQHSISLNFNGILVKLIQMLAKRIFGLIQLVFLNLIRTMISSTFMEYAHTRGRFSHQLKGTRYKGNELKDLAIHQE

SEQ ID NO: 63749 - protein, 121 aa, Gossypium hirsutum
  unsure (1)..(121): unsure at all Xaa locations
  Clone ID: LIB3149-034-Q1-K1-G4.pep
ATTTRRRSEVSSSTFNFTQFQWHLSQIDTNACQEDLWFDSVSILESDSDDDFLSIHGDGFPSVSNAIGNISSGQLLQYESSTCFMDGKCKNEEYHEGYLKTDGGKMSXDEPKGTRSMSHIS

SEQ ID NO: 63750 - protein, 131 aa, Gossypium hirsutum
  Clone ID: GOSHI-09MAY01-C57181_1.pep
EHAGIDFVRLPCKHFYCWKCMETYSNMHISDATITKLQCPEAKCGGMVPPALLKQLLGDEGYERWESLMLQKTLESMSDVAYCPRCETPCIEDEEQHAQCSKCFFSFCTLCRERRHVGIACMTPEIKLRVL

SEQ ID NO: 63751 - protein, 115 aa, Gossypium hirsutum
  unsure (1)..(115): unsure at all Xaa locations
  Clone ID: GOSHI-09MAY01-C57141_1.pep
RFVGGLDSDVSDDDLRQPFSQFGEVISVKIPPGKGCGFVQFANRTNAEEAIQSLNGMTIGQQTVRLSWGRTIGNKQQWNGGHHXGQGDGGYGYGYAAAPNQDPNTYTGAAATGSS

SEQ ID NO: 63752 - protein, 68 aa, Gossypium hirsutum
  Clone ID: GOSHI-09MAY01-C57171_1.pep
KRKPQPLLDLVLMEEKLRRYTKASTSVGFGFNGGKTLTVYQSVQVRLTRRWSYGGARGGAHEGLTALV

SEQ ID NO: 63753 - protein, 217 aa, Gossypium hirsutum
  Clone ID: GOSHI-09MAY01-C57301_1.pep
MHQKMIGCMGDNGAESGSIGAIAYGDLQSLSLSMSPGSQSSCVTGSQQISPSGTDYAAALETKKRGPEKVDQKQIAHRKSIDTFGQRTSQYRGVTRHRWTGRYEAHLWDNSCKKEGQSRKGRQVYLGGYDMEEKAARAYDLAALKYWGPSTHINFPLENYQKELEEMKNMTRQEYVAHLRRKSSGFSRGASMSRGVTRHHQHGRWQARIGRIDKESI

SEQ ID NO: 63754 - protein, 182 aa, Gossypium hirsutum
  unsure (1)..(182): unsure at all Xaa locations
  Clone ID: GOSHI-09MAY01-C57211_1.pep
DYSTKLHVILEVLLKAMARSLNLEENQFLQQYGDQATMQARFNFYPICPRPDQVLGVKPHADGSVITMLLQDKEVEGLQVLKDDQWFNVPIIPQALLINVGDQAEIMSNGIFKSPVHRVVTNSERERITLAVFCIPHPDQEIQPVEELINETHPRLYKKVXYVSLYFQYYQQGRRPMEAALI

SEQ ID NO: 63755 - protein, 241 aa, Gossypium hirsutum
  unsure (1)..(241): unsure at all Xaa locations
  Clone ID: GOSHI-09MAY01-C50931_1.pep
GGSIHRNYDLLLRHRLHIVGEVQLPVRHCXLALPGVRKEYLARVISHPQALSQCEHTLTKLGLNVTREAVDDTAGAAEYIAANNLRDTAAIASARAAELYGLQILADGIQDDSSNVTRFVMLAREPIIPRTDRPFKTSIVFAHDKGTSVLFKVLSAFAFRNISLTKIESRPHRNRPIRLVDDANVGTAKHFEYMFYVDFEASMAEVRAQNALAEVQEFTSFLRVLGSYPMDMTPWCPSSGD

SEQ ID NO: 63756 - protein, 66 aa, Gossypium hirsutum
  Clone ID: GOSHI-09MAY01-C50811_1.pep
QRPKSHSSEGSPISPCEPHTFVSPSINNNIQYMAMTREGRTVGASNPLFVWYERWKSGTIGKDLSI

SEQ ID NO: 63757 - protein, 166 aa, Gossypium hirsutum
  Clone ID: GOSHI-09MAY01-C50821_1.pep
MVNFMLKISADLENLTNLQPQGGCDDPSFPYLFKLKCGRCGELSQKETCVSLGDTVPLLQGKGTTNLVQKCKFCMREGTVTMIPGKGRPLTQEDCEGGKFAPLMLFDCRGYEPVGFVFGVGWKVESLEGTKFEGIDLSGDDFSEYDEKGECPVMISNLRSTFEPVK

SEQ ID NO: 63758 - protein, 111 aa, Gossypium hirsutum
  Clone ID: GOSHI-09MAY01-C50761_1.pep
EADSMRLQKLAAQAKAFRTNDDDDEDDSDDDFSDDEELQSPIDEVDPFIFFVDIVKAMQAADPMRLQNLTQTLDFHYQALANGVAQHAEQRRAEIEKEQMEKASVAAAPPS

SEQ ID NO: 63759 - protein, 55 aa, Gossypium hirsutum
  Clone ID: GOSHI-09MAY01-C50011_1.pep
FSSFSLFTLPIKDHFLSLNLSVLISLKFDVGTSFTKRNVRITLPLTNKLFIYGEG

SEQ ID NO: 63760 - protein, 190 aa, Gossypium hirsutum
  Clone ID: GOSHI-09MAY01-C50021_1.pep
YWDCQRVTELIGKTPLVYLNKVVDGCVARIAAKLEIMEPCSSVKDRIGYSMILDAEKKDLITPGKSVLIEPTSGNTGIGLAFMAAAKQYRLIITMPASMSLERRIILRAFGAELVLTDPAKGMKGAVQKAEEILAKTPNAYMLQQFENPANPKIHYETTGPEIWKGTGGKIDALVSGIGTGGTITGAGKY

SEQ ID NO: 63761 - protein, 163 aa, Gossypium hirsutum
  Clone ID: GOSHI-09MAY01-C50391_1.pep
ISYAAAEYNEWPFFRVTIDLVEMVFAKGDPGIAALYDNLLVSQELWSFGERLRTNYEETKSLLLQIAGHKDLLEGDPYLKQRLRLRDSYITTLNVCQAYTLKRIRDPSYDVKFRPHISKEIMESNKSADELVKLNPTSEYAPGLEDTLILTMKGIAAGLQNTG

SEQ ID NO: 63762 - protein, 188 aa, Gossypium hirsutum
  unsure (1)..(188): unsure at all Xaa locations
  Clone ID: GOSHI-09MAY01-C50361_1.pep
MFPWGLILSLAIATAYGQAYENVKPLAMVEKVTRLHFYYHDIPVGNIATTTXIAHAYTTDNFFSPSPFGSLSAMNDPLTVGPHLTSTVIGNAQGTYIALSHDPAKFTAVVHADFGFTTGRFNGSSFRLFSRYPPTDYVPSPDTIREMAIVGGRGAFRMAKGFAILRATSSNATTRNASLEFNVTLYHY

SEQ ID NO: 63763 - protein, 132 aa, Gossypium hirsutum
  Clone ID: GOSHI-09MAY01-C50281_1.pep
ADSIAKSDDEAVAPELRAFVQEHWSEAAFLDGLKQGQQHYMKLMRILKRGESPICLRDLPAPLRVVIAYMPLYRECVEVGGRLLSQRLRGQLVEAVRMLGGGSLEEVSQAGELLATLEHHLPPFLVRAPSVG

SEQ ID NO: 63764 - protein, 240 aa, Gossypium hirsutum
  Clone ID: GOSHI-09MAY01-C51961_2.pep
MAGFIMLFPKMVKAVVSFNVNIFWKAVLWTVAIASLPVRVLTALQRERMLEQHLHEIQFELETLVWDRKELEDHLQAAVRESRIMESMLIELEGEHDKAIARIELLEGELQDLKDENLRLKEVQGKAASSYRGHDATNKDQSLNTVDDNHVVPYSIASWVSNYKGSGISFQELMVNREVWEGKSKSTTEMINFLKAGPAPSGSVEVFSPRVQNLEVDTVIEQRKEVALSQTLFSAILSLL

SEQ ID NO: 63765 - protein, 288 aa, Gossypium hirsutum
  unsure (1)..(288): unsure at all Xaa locations
  Clone ID: GOSHI-09MAY01-C51961_1.pep
VKAVVSFNVNIFWKAVLWTVAIASLPVRVLTALQRERMLEQHLHEIQFELETLVWDRKELEDHLQAAVRESRIMESMLIELEGEHDKAIARIELLEXQDLKDENLRLKEVQVLHHGFPIIRGVASPSXELMVNREVWEGKSKSTTEMINFLKAGPAPSGSVEVFSPGVQNLEVDTVIEQRKEVALSQTLFSAILSLLVGMIVWEAEDPCMPLVVALFTVVGMSLQSVVQFFFSIKNKPASDAVALLSFNWFIVGTLSYPALPKVTRMLAPLTLSLVDRIASWLGISFN

SEQ ID NO: 63766 - protein, 129 aa, Gossypium hirsutum
  unsure (1)..(129): unsure at all Xaa locations
  Clone ID: LIB3146-036-P1-K1-H5.pep
EREDRKIERELRRRRAQAQAGYDKAKKHEQSYFRRKPGGMPGGFPGGMPGGFPGGMPGGMPGGMPGGMPTGMPDGMPGGMPGGIPXGCLEMLNIXKILHDPELLARLSEPETMRVIQDVMCTRARRAKH

SEQ ID NO: 63767 - protein, 129 aa, Gossypium hirsutum
  Clone ID: LIB3149-053-Q1-K1-C5.pep
IERERRRRFAQAQAEYEKAKKQEQSSSSRKPGGMPGGFPGGMPGGFPGGMPGGMPGGMPGGMPGGMPGGMPGGMPGGMPGGMPGNVDFSKILSDPELMAAFSDPEVMAALQDVMKNPANLAKHQANPKV

SEQ ID NO: 63768 - protein, 220 aa, Gossypium hirsutum
  unsure (1)..(220): unsure at all Xaa locations
  Clone ID: GOSHI-09MAY01-C51891_1.pep
TGWYKKMGERIWSPWFIKFIHSRGPRPIYTKFPDEKSLSVSHRDAGVSYGKTAGPDSQLLDENSLDSDFPEMKSLSTMKKYDFCFREVVSGRIVWSLNDLGSILPSVQKKEAVLLVSLFGVSETVTRNLLCHFERLNIWNYIFIGPATDFLFHLAQGGHPVIDADGFLEDIKSFKSLRIQESNARLIKEILLKAYVVKKXLELGYNTCVVDGTWLLLIMI

SEQ ID NO: 63769 - protein, 181 aa, Gossypium hirsutum
  Clone ID: GOSHI-09MAY01-C51811_1.pep
MLLCSFPPKQIRSVTLHPNQMADPESPTAKDSAAPTTEPHHTQTQVDDTAAKLSNLTFKIWPPTQRTRDAVLNRLVETLSSESVLSKRYGTIPKEEASAAAKLIEEEAFSVAGASFSTDEDGIEILQVYSKEISKRMLDTVKARAAAATDSTPSGSAEVDSNNVGTAVGEEDSSSSVKAED

SEQ ID NO: 63770 - protein, 155 aa, Gossypium hirsutum
  Clone ID: GOSHI-09MAY01-C51831_1.pep
TKKLVLAGLSVDGDLQGVERLYGAISAHMWPGMVLKSGDMITEPWLPEKEDSSEEEPGYQFEYEVLSAGSAEPGDDIVEEWISASPANTFLDRGKSVDVGNSGSDCVQGNITRCEKDESHTFPRGSALGEKIDRMEPNAEEPGRASASEVDDGPH

SEQ ID NO: 63771 - protein, 92 aa, Gossypium hirsutum
  Clone ID: uC-gsronu33B074e06b1.pep
QFNMKCYLQVQLNQGMTLLKNGFLQVRLTHSWIEGNQMLYSPFFFHILFFLYLSFFLSLSFSFFLTLPSFYFFFSLSLFSSPSPSSFYFILS

SEQ ID NO: 63772 - protein, 102 aa, Gossypium hirsutum
  Clone ID: GOSHI-09MAY01-C51541_1.pep
FLEGLENILKGGEADKEMGMNGGINLYAQMIDECDGLDKIENLQTHDNHEIYEKAVKILERYWAEEEEDEQNIQDGGNENQQGFNCGVNQQPSVPPGGFKFG

SEQ ID NO: 63773 - protein, 225 aa, Gossypium hirsutum
  unsure (1)..(225): unsure at all Xaa locations
  Clone ID: GOSHI-09MAY01-C51471_1.pep
SISSLSFSPSPPHLFATAYSTSVSLFSPLSLSDGDVSXASTISSFSDVVSSIAFRNDGLLLAASDLSGLIQVFDVKTRTPLRRLRSHTRPVRFVKYPVLDKLHLLSGGDDAVVKFWDVAGESLVLDLMGHKDYVRCSDCSPVSPDLFVTGSYDHTVKVWDVRVENSRSVLEVNHGKPVEDVIYLPSGGLIATAGGNSVKIWDLIGGGRMVYSMESHNKTVTSICV

SEQ ID NO: 63774 - protein, 167 aa, Gossypium hirsutum
  Clone ID: GOSHI-09MAY01-C51411_1.pep
MLRKKKNRAVNEIKLKANEVKDGGNDKHLKISQDSDSGEGTMRNSKGGKKNKKRKRNQVPRLRFEATADKLASSSKRRERKKKYFEAKKKKHKSARTEENLEFPGREHVKFGDVVEAPPKLVTVPKGSTALLDASKERLRLQAIEAYRNRKGWSSRPGGPQLPPVTA

SEQ ID NO: 63775 - protein, 61 aa, Gossypium hirsutum
  Clone ID: GOSHI-09MAY01-C51191_1.pep
IRKKIAHWHVSFKVKRMKFQTRVLLSKDRFNPNCRADPISSSDFSFHSPSWFVLIRMIQKL

SEQ ID NO: 63776 - protein, 175 aa, Gossypium hirsutum
  Clone ID: GOSHI-09MAY01-C51181_1.pep
MALPLGMISALVVFLVALTRVQLSNCQHLNAKISCFDCPHNYDFSGIQVAVKCEKVKKLATATTEENGSFKVQLPSGISNTNCLAKLLGGPNQLYSKKKNLVSKVVKVGHQPNTYTLSTPLAFSTSCPSASIDAKSCGAQKGIGSSKTVDLPLPPEWGLAPSSYYVPFFPIIGIP

SEQ ID NO: 63777 - protein, 175 aa, Gossypium hirsutum
  unsure (1)..(175): unsure at all Xaa locations
  Clone ID: GOSHI-09MAY01-C51171_1.pep
MRKPCWXKRKTQNKGAWSXLEDQKLTDYILKHGEGLLRCGKSCRLRWVNYLRPDLKRGNFGEDEEDLIIKLHALLGNRWSLIAGRLPGRTDNEVKNHWNIHLRKKLLMMGIDPNNRRSLLSPTLTKSNASNDSSSACQPFNPATASETISSTCLPDLNLDLTIAPPLSHQNLALN

SEQ ID NO: 63778 - protein, 147 aa, Gossypium hirsutum
  Clone ID: GOSHI-09MAY01-C51131_1.pep
IPSEDNIPTTNNKRGPLSADFFGSACYTFQHGQFRKLYFDLTRVDARLDLSSLSSFAKRIFQSSSANKSLSSPRLNLIRPRVRPRVRVFRVDSKLLLDSKAGKLGPHIEDVIYSLSYSLRLLRSGKVVAWYSPKRKEGMIELRLFEF

SEQ ID NO: 63779 - protein, 149 aa, Gossypium hirsutum
  unsure (1)..(149): unsure at all Xaa locations
  Clone ID: GOSHI-09MAY01-C51381_1.pep
MATSRPYSSHSTAPSAPELPPQSYDHHHQPPPPPPQHQSYYGQYPTPSPPPSSSSSYGPSGGGFPAGTSPDVIXAFQMVDRDRSGFIDEYELQQALSSGYQRFNLRTIRLLMFLFKNPYDSLRIGKLISFVFLFFNYFQHKIEEIICIN

SEQ ID NO: 63780 - protein, 138 aa, Gossypium hirsutum
  Clone ID: GOSHI-09MAY01-C51201_1.pep
RTRGLICLLHSAIAISSGAFMMFRMKEIYTFTHGIETASKLLGSTPHDQLLIRTSDSFSGLLLFTIGFLLFMVSFVEDTDFQSFFAAGCTFLHVFMAVWRFWFETRVEDLAWDCIRQTVGDILLALSWVSFLVYSWRE

SEQ ID NO: 63781 - protein, 321 aa, Gossypium hirsutum
  Clone ID: GOSHI-09MAY01-C52991_1.pep
KAGAMLKKIPLYQHIANLAGNKTLVLPVPAFNVINGGSHAGNKLAMQEFMILPVGASSFKEAMKMGVEVYHHLKAVIKKKYGQDATNVGDEGGFAPNIQENKEGLELLKTAISKAGYTGKVVIGMDVAASEFYDNKDKTYDLNFKEETHDGSQKISGDSLKNVYKSFVTDYPIVSIEDPFDQDDWEHYAKMTSEIGEQVQIVGDDLLVTNSKRVEKAIKEKTCNALLLKVNQIGSVTESIEAVKMSKSAGWGVMASHRSGETEDTFIADLSVGLATGQIKTGAPCRSERLAKYNQLLRIEEELGAAAVYAGAKIRAPVEPY

SEQ ID NO: 63782 - protein, 132 aa, Gossypium hirsutum
  Clone ID: GOSHI-09MAY01-C52971_1.pep
CKSAIKSQKNDVNGIFFLAEIYTHIYAYKSVPKRVNKRLFSSGNLKDHFSFSFCFYLFDFRYHRSKKTKIKEREDTYRDKGPRILVCFEEIEAQIGIVRLKNGKTLGFMVEQGRLGLRATPFADYGGEAMVE

SEQ ID NO: 63783 - protein, 73 aa, Gossypium hirsutum
  Clone ID: LIB3196-041-P1-M1-E1.pep
KTKMKEREDTYRDKSPRILVCFEEIEAQIGIVWIKSGKTLGVVIEHGRLGLCVMSFADYGGEMVVEGFFRSAE

SEQ ID NO: 63784 - protein, 89 aa, Gossypium hirsutum
  Clone ID: GOSHI-09MAY01-C52961_1.pep
PIQYPSIDSTPINMPSRGAENLAANAGQTKEDGGPSSCTICLDAPSEAACVPCGHVAGCMSCLTEIKAKKWGCPVCRAKIEQVIKLYRV

SEQ ID NO: 63785 - protein, 72 aa, Gossypium hirsutum
  Clone ID: LIB3827-001-Q1-N6-A12.pep
GAENLAAKAGQTKEDGGPFSGTICLDAPPKAACVPCGHVAECMSCLNEIKAKKWGCPVCRAKIEQVIKLNRV

SEQ ID NO: 63786 - protein, 88 aa, Gossypium hirsutum
  Clone ID: GOSHI-09MAY01-C52931_1.pep
MESRLLSRASTIAGWPQIRPKLSRDSLSVSFASAKPIGAVGEGGNVIWGRQLRPSLLLESSLANKREILKTVLASASSAAGGGSDSAG

SEQ ID NO: 63787 - protein, 122 aa, Gossypium hirsutum
  Clone ID: GOSHI-09MAY01-C52521_1.pep
MATLSSVNLVTPRTIANGPDAPTLKVPCLNRPWKRVSPMKLRVGPVRAAPDGISEKVEKSIKEAQEMCSDDPASGECVAAWDEVEELSAAASHARDKKKDDDPLENYCKDNPETDECRTYDN

SEQ ID NO: 63788 - protein, 219 aa, Gossypium hirsutum
  Clone ID: GOSHI-09MAY01-C52471_1.pep
MERTRGFWQLGDDLRGLAKVAEDHKWLMAASKLAEQTRTKGERMNNLDLSKGPAEMRTRDKFGFQEDSKLENLNFNVLNLDSKVGDNVSKSSFQNGMYNMNAVYQKNNSISLGNPTGNKYMSNNQSNKDVNNNSSTKNNNNGNENSNANNAVDKRFKTLPATETLPRNEVLGGYIFVCNNDTMQEDLKRQLFGLPPRYRDSVRAITPGLPLFLYNYTTH

SEQ ID NO: 63789 - protein, 199 aa, Gossypium hirsutum
  Clone ID: GOSHI-09MAY01-C52781_1.pep
VLFIFLETPVFDNPTLSLHDDNGCDGSVLLDDNSTFIGEKTAVPNNNSARGFNVVDNIKARLEKACPGVVSCADILAIAARDSVVRLGGPSWKVRLGRRDSTSASRSAANASIPPPTSNLSALISSFSAQGLSIKNLVALSGSHTIGLARCTSFRSHIYNDSNIDPSFANSLRRICPRCGNDSVLAPSTVNTNLFDNYT

SEQ ID NO: 63790 - protein, 84 aa, Gossypium hirsutum
  unsure (1)..(84): unsure at all Xaa locations
  Clone ID: uC-gsflmaxxa014c12b1.pep
LTRVLFIFLETPVFDNPTLSLHDEQGCDGSVLLDXDNSTFIGEKTAVPNNNSVRGFNVCDNIKALLEKACSGVEFCADILAIAA

SEQ ID NO: 63791 - protein, 124 aa, Gossypium hirsutum
  unsure (1)..(124): unsure at all Xaa locations
  Clone ID: LIB3493-012-P1-M1-E3.pep
MALFRSLLLIILIVAVSSCQTNAQLSPNYYSSTCPQALSIVKAEVASAIKNETRIGASLLRLHFHDCFVNGCDGSVLLDDNSTFIGEKTAVPNNNSARGFNVVDNIKARLEIACPXVVSCADIL

SEQ ID NO: 63792 - protein, 94 aa, Gossypium hirsutum
  Clone ID: GOSHI-09MAY01-C52151_1.pep
FPLSRPELYKTGMGETTFEKLAMTCSCLCTSNGEAFPGWDTLLKVGCKLGECRIILCEAGDRHRVQKLQLNFPSDDVAFALKDSKDLPWLAKYL

SEQ ID NO: 63793 - protein, 75 aa, Gossypium hirsutum
  Clone ID: GOSHI-09MAY01-C52101_1.pep
LKTQDPNTGPIGPKNYNFRPLGFSLFAPQLSAAVQPQRRSCLHVNNPCTPVQPRTQATHLYLRKETKNSSENGSQ

SEQ ID NO: 63794 - protein, 306 aa, Gossypium hirsutum
  Clone ID: GOSHI-09MAY01-C52271_1.pep
MGPPKGRGGGGGFRGRGDGGRGRGRGGGGGGRGGDRGGNGMKPRGGGRGGGRGRGGGRGGMKGGSKVVVEPHRHEGVFVAKGKEDALVTKNMVPGEAVYNEKRIAVQNEDGTKVEYRVWNPFRSKLAAAILGGVDNIWIKPGAKVLYLGAASGTTVSHVSDVVGPNGVVYAVEFSHRSGRDLVNMAKKRTNVIPIIEDARHPAKYRMLVGMVDVIFSDVAQPDQARILALNASYFLKAGGHFVISIKANCIDSTVPAEAVFQSEVKKLQQEQFKPFEQVTLEPFERDHACVVGGYRMPKKQKAGAA

SEQ ID NO: 63795 - protein, 207 aa, Gossypium hirsutum
  Clone ID: GOSHI-09MAY01-C52221_1.pep
MSSSSSFRKSSCLSRRFSGSRSLAKTAALATVSPTVNQSEISSSSSSSSQPTPLAEAEAEAEEEGQSWSTMLPELLREIMERVEASEDRWPQRQNVVTCACVCGKWREPMREIVRASSPGSRKIPFPSRLKRSAPDRFPHHCFYRAVQKELGFSLGLSLTPSFRREGRFLLAAPRFPLGVHIELFRPLDCKELGSFPVMHFVRRCFF

SEQ ID NO: 63796 - protein, 183 aa, Gossypium hirsutum
  unsure (1)..(183): unsure at all Xaa locations
  Clone ID: AI732056.1.pep
MSSSSSFRKSSCLSRRFSGSRSLAKTAALATVSPTVNQSEISSSSSSSSQPTPLAEAEAEAEEEGQSWSTMLPELLGEIMERVEASEDRWPQRQNVVTCACVCKKWREAMREIVRASSPGSGKITFPSCLKQPGPSDFPNHCIIKRCKKNSTFYLFLSLTPSXPEQGKFPLGARKYPNGVHID

SEQ ID NO: 63797 - protein, 159 aa, Gossypium hirsutum
  Clone ID: GOSHI-09MAY01-C53811_1.pep
QHKRSDYGLPEDKFIFACLNQLYKMDPEIFNTWCNILKRVPNSALWLLRFPAAGETRLRAYAAAQGVQPEQIIFTDVAMKHEHIRRSALADLCLDTPLCNAHTTGTDVLWAGLPMVTLPLEKMATRVAGSLCLATGLGEEMIVNSMKEYEERAVSLALN

SEQ ID NO: 63798 - protein, 98 aa, Gossypium hirsutum
  Clone ID: GOSHI-09MAY01-C53491_1.pep
ISIVNYHCSAMASGSNWTPKQNKLFENALAIYDKDTPDRWHKLARAVGGKTVEEVKLHYQNLVDDIKQIESGHVPLPPYKKAGGTKDTTISWTMKNQG

SEQ ID NO: 63799 - protein, 229 aa, Gossypium hirsutum
  unsure (1)..(229): unsure at all Xaa locations
  Clone ID: GOSHI-09MAY01-C53451_1.pep
LHRNYDLLLRHRLHIVREVLLVVNHCLLALPGVXKQEVKRVLSHPQALAQCEMALTKMGIVRVSADDSAGAAKIVASSGRRDMGAIASARAAALYGLDILAEKVQDEDDNVTRYLVLTREPIIPGTDRLYKTSIVFTLEEGPGMLFKALAVFSLRGINLSKIESRPQKGRPLRVVDDSNKGSAKYFDYLFYIDFEASMAEKRAQNALEHLQEYARFLRVLGCYPMDEVL

SEQ ID NO: 63800 - protein, 105 aa, Gossypium hirsutum
  unsure (1)..(105): unsure at all Xaa locations
  Clone ID: GOSHI-09MAY01-C53681_1.pep
DHSGNGIKCSEPIDSDLRIQQRELLESIVQLLPGREKLPFPIHFXCVAFLRCAIFSEKPPVLCRNEXRKRISLILEHVTVDDLFGPVFSHMNGERALRSGPRVED

SEQ ID NO: 63801 - protein, 83 aa, Gossypium hirsutum
  unsure (1)..(83): unsure at all Xaa locations
  Clone ID: GOSHI-09MAY01-C53181_1.pep
DMKTLGNGNVSVIHSPLEQLIIVSSCSTKDRRENLSRYXRNKKTKRIFGRKIKYACRKALADCQPRIRGRFAKTEESNNSKRQ

SEQ ID NO: 63802 - protein, 139 aa, Gossypium hirsutum
  Clone ID: GOSHI-09MAY01-C53111_1.pep
EVLNKCFGHDTVEEPIVAVESEASATNDAWCNSTLEGLKEASPLSLKVSLRSVREGRFQTLDQCLVREYRMSLQGISKRISNDFCEGVRARVVHKDSAPKWEPPSLEKVSDDMVDQYFAPLSESEPNLELPTKQREAFN

SEQ ID NO: 63803 - protein, 45 aa, Gossypium hirsutum
  Clone ID: GOSHI-09MAY01-C53381_1.pep
SCNIPGHRSTTDQIAIKSRHPYLCIYSLTAWSFRPSKRNVALCGK

SEQ ID NO: 63804 - protein, 202 aa, Gossypium hirsutum
  Clone ID: GOSHI-09MAY01-C53341_2.pep
VKGSSAPKPSIAFKPNDVRKTTQLPSGGKLAFSLKQKSKLVAPPVKLDADEDEEDQDAGARADAPVKKQKLGRSDSSEQASKQVDVAPTSPSDLTVKKVADKLASFVAKNGRQFEHITRQKNPGDTPFKFLFDESCSDYKYYAYRLAEEEKALLENKEEQTPQSGISASKSTSSSSRAAPQQSSYQIPASALYENEEPKSSR

SEQ ID NO: 63805 - protein, 85 aa, Gossypium hirsutum
  Clone ID: GOSHI-09MAY01-C53341_1.pep
SHLAIFSDLKVVDEEGKTFLNISCLMNAAYILITNQHWWKEMFNERFGICGTPATRVICILFFMLLVLISFISDMQHQLPQAISL

SEQ ID NO: 63806 - protein, 157 aa, Gossypium hirsutum
  Clone ID: LIB3585-016-P1-K1-A4.pep
GRVGGRVGGRVGGRVGAFSLKQKSKLVAPPVKLDADEDEEDQDAGRLDDKPVKKQKLGRSDSSEQALKQVDVAPTSPSDLTVKKVADKLASFVAKNGRQFEHITRQKNPGDTPFKFLFDESCSDYKYYAYRLAEEEKALLENKEEQTPQSGISASKS

SEQ ID NO: 63807 - protein, 156 aa, Gossypium hirsutum
  Clone ID: GOSHI-09MAY01-C53301_1.pep
AAWAWQVQEYVEAATFFKFCQTGTLLNLDEINASLLPLSDPSLEPLQINLLDYLLGLADLTGELMRLAIGRISDGEVEYSERICQFVRDIYRELTLLVPLMDDGSDMKTKMDPMLQSVVKIENACFSVRVRGSEYIPLLGSSDPSSFLVGVSDVEL

SEQ ID NO: 63808 - protein, 189 aa, Gossypium hirsutum
  unsure (1)..(189): unsure at all Xaa locations
  Clone ID: GOSHI-09MAY01-C53291_1.pep
FVWSRNYKTLTSYGIFVPHVTASNSPRNPRFKNAGKFLALSKFXTMASNASSLQGVLISIENAPFLLEQGFAVTNAVLDALSKAGYGNKTDQKVMIQSSSSSVLMKFKSQTNYDLVYKVDEDIGGAQSSTIDDIKSFASAVVISKDSVFPENSAFITSATNVVPRLKXANLSVYVQTFSNEFTSQAWDF

SEQ ID NO: 63809 - protein, 52 aa, Gossypium hirsutum
  Clone ID: GOSHI-09MAY01-C53231_1.pep
MEEQIDLVGKAFADHYYHLFDNDRPALASLYKPSSMLTFEGHKIQGVEDITA

SEQ ID NO: 63810 - protein, 249 aa, Gossypium hirsutum
  unsure (1)..(249): unsure at all Xaa locations
  Clone ID: GOSHI-09MAY01-C48911_1.pep
MYRGERAAGGSKGEVGSVDRKRINEALDKQLERSSPSTSRAINGKDKSSQSLQMGKHPPDHYRDSCSASLPKPNASGDESETDSEESDVSGSDGDDTSWISWFCNLRGNEFFCEVDDDXIQDDFNLCGLSSQVPYYDYALDLILDVESSHGDMFTEEQNELVESAAEMLYGLIHSRYILTGKGIAAMLDKYKNYDFGRCPRVYCCGQPCLPVGQSDIPRSSTVKIYCPRCEDIFYPRSKYQGNTDGAYF

SEQ ID NO: 63811 - protein, 141 aa, Gossypium hirsutum
  Clone ID: LIB3165-047-Q1-K1-F6.pep
KRRENPRFRGDRVIIVISRYESAITGAVHINGKIREEKRCTEDKSSQSLQMGKHPPDHYRDSCSASLPKPNASGDESETDSEESDVSGSDGDDTSWISWFCNLRGNEFFCEVDDDYIQDDFNLCGLSSQVPYYDYALDLIL

SEQ ID NO: 63812 - protein, 219 aa, Gossypium hirsutum
  unsure (1)..(219): unsure at all Xaa locations
  Clone ID: GOSHI-09MAY01-C48851_1.pep
RILKMLDKAQEGPLRESIRQSWFAGIGLGTSTSLTTCTWALDSWYGGKLMSHGYITAKALLETFMILVSTGRVIADAGSMTSDLAKGSDAVGSVFAILDRYTRIEPEDPDGYKPEKMTGHVELRDIDFAYPARPDIIIFKGFSLKIEAGKSTALVGQSGSGKSTIIGLIERFYDPLEGAGKIDGRXIRSSHLRSLRKHIALGRQEPTLFXAGTIRENIV

SEQ ID NO: 63813 - protein, 73 aa, Gossypium hirsutum
  Clone ID: GOSHI-09MAY01-C48421_1.pep
PTRPVEKLAKKHGCSPAQLALAWVLHQGDDVAPIPGTTKIKNLDTNSDSLKVKLTGEDLKEISNAVPINEVAG

SEQ ID NO: 63814 - protein, 172 aa, Gossypium hirsutum
  Clone ID: LIB3585-064-P1-K2-C2.pep
MMLTTLFLLACSACKHEMARGEHNNVTLGMVRDSLIRQEDTIVYSLIERARFPLNPPTYDPSYASIPGFSGSLLEFFVKQTEAVQAKAGRYDNPEEHPFFPDNLPPSLVPHYKYPEVLHPAAMSININKLIWDMYFNKLLPSFVSPGDDENYALTAARDLECLQAYFRKLLL

SEQ ID NO: 63815 - protein, 59 aa, Gossypium hirsutum
  Clone ID: LIB3135-042-Q1-K1-B1.pep
LQVKQVLHPAAMSININKLIWDMYFNKLLPSFVSPGDDENYALTAARDLECLQVFNNLL

SEQ ID NO: 63816 - protein, 285 aa, Gossypium hirsutum
  unsure (1)..(285): unsure at all Xaa locations
  Clone ID: GOSHI-09MAY01-C48021_1.pep
MNIKMGSQKHLVLLLSVLLILNSLLFSGADEDHYYEFILQETEITKLCSTKTILTVNGSFPGPQIRVRRGDTVYVNVHNQGRSAVSFDWQGVEDPVDGSNELIQPGKNFTYEIELDDEIGTLWWHARSAWAKATVHGAFVILTAGXEEYPFPTPTSDQIIIFGEWFKQELTEANETIAAGQADGYTINGRRGETYGCSNDTTYLLEVAYEGLYLLRLINAVANETMVFAIAQHSFTTVGQNATYAQRSFSTSLTLAPGQTLGVLLGANPNVGQYYITGSTFLWQA

SEQ ID NO: 63817 - protein, 191 aa, Gossypium hirsutum
  unsure (1)..(191): unsure at all Xaa locations
  Clone ID: AI054473.1.pep
MGSQKHVFLLLSVLLILNSLLFSGADEDHYYEFILQETEITKLCSTKTILTVNGSFPGPQIRVRRGDTVYVNVHNQGRSAVSFDWQGVEDPVDGSNELIQPGKNFTYEIELDDEIGTLWWHARSAWAKATVHWRLVIXPAADEEYPFPTPTSDQIIIFGEWFRQELTEVMKPCCCQADGTHQCHLENIGAL

SEQ ID NO: 63818 - protein, 92 aa, Gossypium hirsutum
  Clone ID: GOSHI-09MAY01-C48211_1.pep
MIIKGVFRRYERWNPVHPTVGAFWGMGIGIGCGVGWGPGFGPDVVGYVGAGCGIGFSVGITLAGVGIGLPANSFFQLPYHGLFYTLSFPIAY

SEQ ID NO: 63819 - protein, 101 aa, Gossypium hirsutum
  Clone ID: LIB3135-042-Q1-K1-C9.pep
SPTRSPTRPLAGVGIGLPANSFFQLPYNAFRTARTRALDFVSTKITPALASYRFAPPHLPDLQREATTRLSTMLPSQTISIWEGVERFSTRFFHPRKGLKD

SEQ ID NO: 63820 - protein, 101 aa, Gossypium hirsutum
  Clone ID: GOSHI-09MAY01-C49991_2.pep
VRLLWDASRKNNFELHVLESEAQDTEDRVEAVNLKVEKMAEVVTEEWIQIQHLEQALQLAQRRALQDQKQSCKVSSNKKCEEMNLLQPLSMMNLYSFWLRH

SEQ ID NO: 63821 - protein, 91 aa, Gossypium hirsutum
  Clone ID: GOSHI-09MAY01-C49991_1.pep
RFIRKKFLGTLKERERLLEDMENMITYLQSVISTRTHDSLLADEKLKALQEEVRLLWDASRKNNFELHVLESEAQDTEDRVEAVNLKVEKV

SEQ ID NO: 63822 - protein, 47 aa, Gossypium hirsutum
  Clone ID: LIB3146-010-Q1-K1-H2.pep
PTRPPTRAPTRPPTRPEKNNFELHVLELEAQDTEDRVEAVNLKVKKV

SEQ ID NO: 63823 - protein, 73 aa, Gossypium hirsutum
  Clone ID: LIB3146-010-Q1-K1-F5.pep
CIQKLYLIHSHSVGGSFLSIFFPDEKGVFETIDYNNNNITTSSIERLQISVSFPILYLIYFIQIPNHNQEYQA

SEQ ID NO: 63824 - protein, 54 aa, Gossypium hirsutum
  Clone ID: LIB3146-018-Q1-K1-D3.pep
YYNLKYRKAPNKCKLSYSVSNLFYPNSKSQSGVPSLKISSTSAQHACTQFMIDQ

SEQ ID NO: 63825 - protein, 112 aa, Gossypium hirsutum
  Clone ID: GOSHI-09MAY01-C49911_1.pep
KAYINFILYICFVLLYVNELCTSPKYARAQTNKQAQTKYPRKPKLNPSLTKLRSPRQQAVATSNSSHRTTRSQSLFRKNRAFTSVRTPQQPPYLVAGVVDPASSPSKSGHGG

SEQ ID NO: 63826 - protein, 137 aa, Gossypium hirsutum
  Clone ID: GOSHI-09MAY01-C49851_1.pep
PTRPKRVGANLKESEIYDLMQAADVDNSGTIDYGEFVAATLHLNKIEKEDHLFAAFSYFDKDGSGYITPDELQKACEEFGIEDVRLEEMIREVDQDNDGRIDYNEFVAMMQGGNVAGAGKKGLQNSFSIKFREALKF

SEQ ID NO: 63827 - protein, 145 aa, Gossypium hirsutum
  Clone ID: GOSHI-09MAY01-C49861_1.pep
QVMSVKALGIALKLTFSGTNQLVYPQTWAFTLVVITCVLTQMNYLNKALDTFNTAVVSPIYYVMFTSLTILASVIMFKDWDGQSPTQILTEMCGFVTILSGTFLLHKTKDMADGPGLSTSLSMRSLKHEEDDGFGEGIPLKRQDT

SEQ ID NO: 63828 - protein, 120 aa, Gossypium hirsutum
  Clone ID: LIB3146-009-Q1-K1-A3.pep
ALGIALKLTFSGMNQLVYPQTWAFTLVVVTCVVTQMNYLNKALDAFNTAVVSPIYYVMFTTLTILASVIMFKDWDRQNPTQIITEMCGFVTILSGTFLLHKTKDMGDGTSLTSMSMRQLK

SEQ ID NO: 63829 - protein, 243 aa, Gossypium hirsutum
  unsure (1)..(243): unsure at all Xaa locations
  Clone ID: GOSHI-09MAY01-C49551_1.pep
RPPKHPGALGKSLLFTQHLFRRIESMDDVAAYNXKRRLPQIDQTKPVGXHSILDNKSGGGGEFPNVATSFLNKLRLELSSAVSEINLVSQSTQSSNEDEGSPQRRVSQGEPKDDNIRPQGLLFTPKTLDISDTGTSFTFNMDSSFSQRVSMNESPALHSLQQRLSSSEEPDSHISCQLNLTLASSSLQVNKSPILTRMSQPSWEIGKVSESRSNANSKDSDSRPFHSRRYMIDGETTLSSSKD

SEQ ID NO: 63830 - protein, 148 aa, Gossypium hirsutum
  Clone ID: LIB3543-052-Q1-K1-A2.pep
YQGLPPTIKSVLRSRLQSFQLKEELTVPQIKAEMEKTLQWLVPIATNTTKAHHGFGWVGEWANTGSEMNRKPAGQTNLLRIETLHHADKEKTEVYILDLVVWLHHLVTQVRAGNGGIRSPVKSPIRSANQKTVQLSTQKQSPSSMLTV

SEQ ID NO: 63831 - protein, 109 aa, Gossypium hirsutum
  Clone ID: LIB3135-058-Q1-K1-H5.pep
KTLQWLVPIATNTTKAHHGFGWVGEWANTGSEMNRKPAGQTNLLRIETLHHADKEKTEVYILDLVVWLHHLVTQVRAGNGGITSPVKSPIRSPNQKTAQLSTQKQSPSS

SEQ ID NO: 63832 - protein, 86 aa, Gossypium hirsutum
  Clone ID: LIB3135-058-Q1-K1-H11.pep
ASVKKLVPIATKSFQKKKKKRGRGEKETKKRKQGGRDMGWPSLACFLSRHYIMRTRRKLKVYILDLVGWRYHLCPCIRAGNGGITS

SEQ ID NO: 63833 - protein, 145 aa, Gossypium hirsutum
  Clone ID: GOSHI-09MAY01-C49401_1.pep
MASLWSPWGNLFMFLMAYFSSLPLSSSSQQYLHVQYSTISAAPAFLPSAPLASSPSLPPDIEPLFPTPNGVAPSPTHSSMPTIPSSPSPPNPDNIVAPAPGFAFSPSNSPLPSSTSVYPTSARALKPTLVLGLLVFSILQKLSGV

SEQ ID NO: 63834 - protein, 72 aa, Gossypium hirsutum
  Clone ID: LIB3196-064-P1-M1-C9.pep
SSSSNPNDNFYFLNPQLQLPFFPNFTNYLVPFIQNFDPRRSRMASRTVAKDIITLRGSAAIVSEFFGYAANR

SEQ ID NO: 63835 - protein, 75 aa, Gossypium hirsutum
  Clone ID: LIB3146-007-Q1-K1-H5.pep
MASRTVAKDIITLRGSAAIVSEFFGYAANSILYNRGVYPEESFAKVKKYGLPMLLTQDEGVKSFITNLTAQLSEW

SEQ ID NO: 63836 - protein, 60 aa, Gossypium hirsutum
  Clone ID: GOSHI-09MAY01-C49691_1.pep
ILWCFYYQLYYPFSFSSNIRNSVCFVYGICIIKGSIVKKPQYPHKSSTLARLCLLSIASL

SEQ ID NO: 63837 - protein, 201 aa, Gossypium hirsutum
  unsure (1)..(201): unsure at all Xaa locations
  Clone ID: GOSHI-09MAY01-C49661_1.pep
GGSLANXRCKFLMQIIGSVSEAVGPNRIAVRISPAIDHLDATDSNPLNLGLAVIDRLNELQLKLGSKLAYLHVTQPRYHAYGQTESGRHGSENEEAHLMRTLKRSYEGTFMCSGGFTRELGMQAVAEGDADLVSYGPLFTPHPDLVFRLRINAPLNRYIRKTFYTQDPVVGYTDYPFLVVQSRLCMCNGCAVEYMLKLCVK

SEQ ID NO: 63838 - protein, 76 aa, Gossypium hirsutum
  Clone ID: GOSHI-09MAY01-C49621_1.pep
GFRNPRRRNHPERRAFSNHAVLVATISAVVPVPMPRRNRRMDHDPPPKIAPLTCVLPRITKVFSLLSHRIWRRVGA

SEQ ID NO: 63839 - protein, 190 aa, Gossypium hirsutum
  Clone ID: GOSHI-09MAY01-C49191_1.pep
VPPSAYYHSGGWRLNPNLYEEGKVCLSLLNTWTGKGNEVWDPSSSSILQVLVSLQGLVLNAKPYFNEAGYDKHVGTAEGEKNSLAYNENTFLLNCKSMMYLMRKPPKDFEQLIKEHFRQRGYYILKACDAYMKGCWIGSITKDASISDTNNADSNSFGFKLMLGKIVPKLLSALNEIGADCQEFKHLQQS

SEQ ID NO: 63840 - protein, 94 aa, Gossypium hirsutum
  Clone ID: GOSHI-09MAY01-C49171_1.pep
KAVNVSGPNADDISGVDFPATMVVVGGFDPLKDWQKRYYEWLKACGKEATLMEFPTMIHAFYIFPELQESGQLILQIKDFMNNCCSKPQLPQQN

SEQ ID NO: 63841 - protein, 43 aa, Gossypium hirsutum
  Clone ID: GOSHI-09MAY01-C49091_1.pep
ATRPTTRTPSPPPPYYYHSPCPPVKSPPPTGYIYASPAPPTDY

SEQ ID NO: 63842 - protein, 215 aa, Gossypium hirsutum
  Clone ID: GOSHI-09MAY01-C49081_1.pep
MSGGDCRSKHLRHRSERPSPPRSLQDHEAPPRPAKRKADQHHDLERDYDYDDRDHGRDRERDRHHHHHDRSESSKHSLEPATKATSSTATAGTDKKPKASVFSRISFPEEEISKKKRKISSDAPASSGHHKPSSNGYDYKTSSSAKPVSATSSGGGRKSSSSNAVDYESSDDDRHFKRKPSRYESSPPPSAEWEEERRHSRGSRERERSSYSKHR

SEQ ID NO: 63843 - protein, 96 aa, Gossypium hirsutum
  Clone ID: GOSHI-09MAY01-C49041_1.pep
MGDNKELTPSKYDMNAKWDACIDLTLRRFVYSSLAGAFGGLLFFKSPVTRWASVAFGAGIGIGSAYTDCSSLFGGYSPKLAPPKLDDAPAPKEQVE

SEQ ID NO: 63844 - protein, 157 aa, Gossypium hirsutum
  unsure (1)..(157): unsure at all Xaa locations
  Clone ID: GOSHI-09MAY01-C49021_1.pep
MGNTESGYDDSLQTDFWHQPSYEPSSLAGSSMDRNYQPRQQAPLIPDNFSSLDQVISALREAGLESSNLILGVDFTKSNEWTGRYSFNRRSLHAIGSSPNPYEQAISIIGRTLSTFDEDKLIPXFGFGDALTHDKXVISFYPDHRTCHGLDETLARY

SEQ ID NO: 63845 - protein, 86 aa, Gossypium hirsutum
  Clone ID: GOSHI-09MAY01-C49291_1.pep
EMVASERGFLQNKFRCNICSSFAAEAIACLQAVQVGHELGLKQVIIEGDSLLPGYYGSGNRSGMEMSHLDMATQQKCRNKVRKEAE

SEQ ID NO: 63846 - protein, 99 aa, Gossypium hirsutum
  Clone ID: GOSHI-09MAY01-C44921_1.pep
RLFIFTRWCSSSLEEFQPQNLSSTLISTKKGEEIHGLFARFGCTEKMTLVTWRPHAGISRGKPTLWPFQCIPEASGALRLLSFFLGPVGPRVWAICKLG

SEQ ID NO: 63847 - protein, 133 aa, Gossypium hirsutum
  unsure (1)..(133): unsure at all Xaa locations
  Clone ID: GOSHI-09MAY01-C44891_2.pep
QKSLQRALDTRLYLLLYGISNAAPSGKPVWHFXPEKVYDSEETLRKCAESALAFVLGDLSHTYFVGNAPMGHMVIQQMENVPEPFKRFFFKSQVIDTNKFNIQKCEDFVWVTKDELLEYFPEQAEFFKKLIIS

SEQ ID NO: 63848 - protein, 161 aa, Gossypium hirsutum
  Clone ID: GOSHI-09MAY01-C44891_1.pep
LGLSKLGKGDYQIDYVPAPRITEADKTNDRKSLQRALDRRLYLLLYGDSNAAPSRKPVWHFPEKVYDSEETLRKCAESALASVLGDLSHTYFVGNAPMGHMVIQQMENVPEPFKRFFFKSQVIDTNKFNIRKCEDFVWVTKDELLEYFPEEAEFFKKMIIS

SEQ ID NO: 63849 - protein, 181 aa, Gossypium hirsutum
  unsure (1)..(181): unsure at all Xaa locations
  Clone ID: AI726256.1.pep
PVSGGVVAAEAGSLTFMVGGSEDVYLAAKSLLLSMGKNAIFCGGPGNGSVAKICNNLAMAITMLGLSEALSLGQSLGITASTLTKICNSSSARCWSSDSYNPVPAVMQGVPSSRNYSGGFASKLMAKDLYLAAASAEKIGQRCPLTFLAQDIYTEXCNDGHETEDFSCVFXHYYSGKGERN

SEQ ID NO: 63850 - protein, 102 aa, Gossypium hirsutum
  Clone ID: LIB3148-028-Q1-K1-D11.pep
AWMQIHHYNSLKKALLASHQELDYNYHCHIEHILELWSIPMGNSPTVNQFSNYPNSKNNSLLIKLARPHMLLRTYIYELSFPPPSPLHQISCLTESSYALKT

SEQ ID NO: 63851 - protein, 76 aa, Gossypium hirsutum
  Clone ID: GOSHI-09MAY01-C44561_3.pep
MKLRGEKTGRKGHLAVTTEVFQVAPSLCMVELRKSGGDTLEFHKFYNNLSTGLKDIIWDTTSEGKSGENSAAAGSS

SEQ ID NO: 63852 - protein, 162 aa, Gossypium hirsutum
  Clone ID: GOSHI-09MAY01-C44561_1.pep
LFENRGFSNLVVERREEGPVLPATMNAFDLISTSQGLNLSSLFEKQMGLVKRETRFTSKRPANEIISQIERAAMPLGFDVKKNNHKMKLRGEKTGRKGHLAVTTEVFQVAPSLCMVELRKSGGDTLEFHKFYNNLSTGLKDIIWDTTSEGKSGENSAAAGSS

SEQ ID NO: 63853 - protein, 188 aa, Gossypium hirsutum
  Clone ID: LIB3543-054-Q1-K6-B7.pep
RADVSLDDVDAIFNESSDSRNLVELCEEGSFVPATMNAFELISTSQGLNLSSLFEKQMGLVKRETRFTSKCPANEIISKIEKTAMPMGFGVKKNNYKMKLLGEKTGRKGHLAVTTEIFQVAPSLFMVELRKSEGDTLEFHKFYNNLSTGLKDIVWTTTDRGKVEEKDGCAAGSSPPNDGHSQSQCAIR

SEQ ID NO: 63854 - protein, 154 aa, Gossypium hirsutum
  Clone ID: GOSHI-09MAY01-C44491_1.pep
QVLEQAWYMKPVFAILIGGILPFGAVFIELFFILTSIWLNQFYYIFGFLFIVFVILGITCAEITIVLCYFQLCSEDYHWWWRSYLTAGSSALYLFLYSIFYFFTKLEITKLVSGLLYFGYMVIGSYAFFVLTGTIGFYACFWFGRRIYSSVKID

SEQ ID NO: 63855 - protein, 46 aa, Gossypium hirsutum
  Clone ID: uC-gsflnu33B063g10b1.pep
SKLVSGILYFGYMVIVSYAFFVLTGTIGFYACFWFVRKIYSSVKID

SEQ ID NO: 63856 - protein, 139 aa, Gossypium hirsutum
  Clone ID: GOSHI-09MAY01-C44421_1.pep
VRPTRSKCVNPASMGLHLRNLCYLGLENNRLNGKVPEEFGFLEFVNEINLENNNLSGKLPFSANFTAKVGEKLRLKGNPELCVDEKLSHRESVGELKKCSMPDIPNPVLFIGVSHSGLLSSSSSFLVLLLFWGLWIPLA

SEQ ID NO: 63857 - protein, 51 aa, Gossypium hirsutum
  Clone ID: uC-gsronu33B136b10b1.pep
SLTRPLIDTLPLMGLCISFFTDRHCPLMDEQPFSRNLVNYFNRPWWGLLHV

SEQ ID NO: 63858 - protein, 55 aa, Gossypium hirsutum
  Clone ID: LIB3148-030-Q1-K1-F10.pep
FGFFKGGPPKILIVFALKSIRGCCIYMKRGLSFYYSEFPCLLLQDYSLSSTLSDS

SEQ ID NO: 63859 - protein, 150 aa, Gossypium hirsutum
  Clone ID: GOSHI-09MAY01-C44771_1.pep
SSVALNKRFITKEQPLSNYLRGIEKRCSFIPQPHTQSKQDCWLYNDGKSTSCLAFVLEMYKEARLFDPIADSIQVTEVTIKDAYTLRFFENNSSRLPKWCNDADNVKLPYCQILGKYRMELPGFNSMDPYPHMNERCPSKPPKYSRPPNC

SEQ ID NO: 63860 - protein, 93 aa, Gossypium hirsutum
  Clone ID: GOSHI-09MAY01-C44601_1.pep
KMLVLESVLKGMKTHVTYLNITRLTDFRKNGHPSIYRKHPKQTLPEDERVAPLKSQDCSHWCLPGVPNSWNELLYAELLVKENKMRQHQRRAR

SEQ ID NO: 63861 - protein, 229 aa, Gossypium hirsutum
  unsure (1)..(229): unsure at all Xaa locations
  Clone ID: GOSHI-09MAY01-C44191_1.pep
PTRPRIHQMFMMQSFQRKQLSESGHGVSDEHAISLLTAKARRPLHIDGVAHAAATQIQKKYRGWKKRKEFLLIRQRIVKIQAHVRGHQVRKQYRTIVWSVGILEKVILRWRRKGSGLRGFRRDAITKEPGPQCTPSKEDDYDFLKEGRKQTEERLQKALTRVKSMAQNPEGRGQYRRLLTLVQGIRENXACDMVLSSTEEAGEGEGDGDEDFIDIESLLDDENFMSIAF

SEQ ID NO: 63862 - protein, 65 aa, Gossypium hirsutum
  Clone ID: LIB3148-039-Q1-K1-C6.pep
ERMKATKETREIFGRFFYRFPEGESAADVFDRVSSMFFFITSFAFFLMETWHFLLRRVLWESSFH

SEQ ID NO: 63863 - protein, 83 aa, Gossypium hirsutum
  unsure (1)..(83): unsure at all Xaa locations
  Clone ID: LIB3148-022-Q1-K1-E3.pep
VREECRIREQDFGNFQVEERMKATKETREKFGRFXYRFPEGESAADVFDRVSSMFFFITSFAFSLMETWHFLLRRVLRESSFH

SEQ ID NO: 63864 - protein, 99 aa, Gossypium hirsutum
  Clone ID: GOSHI-09MAY01-C44131_1.pep
VLQPSAGVSMMAKPPFLDKTLKLSHSLKDTNSGEKDAAYEVKLNDATIREAIAKTTGLCVNSGSWTGIPGYCRFTVALEESEFELALACLDKFKSIIGN

SEQ ID NO: 63865 - protein, 153 aa, Gossypium hirsutum
  Clone ID: GOSHI-09MAY01-C44391_1.pep
FTGVRLGWTVVPKQLLFSDGFPVAKDFNRIICTCFNGASNIAQAGGLACLSPEGLEAMQEVIGFYKENTKIIVETFNSLGFKVYGGKNAPYVWVHFPGRNSWDVFSEILEKTHIVTTPGSGFGPGGEGFIRVSAFGHRENVLEACRRFEQLYN

SEQ ID NO: 63866 - protein, 169 aa, Gossypium hirsutum
  unsure (1)..(169): unsure at all Xaa locations
  Clone ID: GOSHI-09MAY01-C44341_1.pep
NYSEKRLRDAYERLKKRGIPLASNQVNYSLIYRLPEQNGVKAACDELGXTLIAYCPIAQGALTGKYKPENPPSGPRGQIYTPEFLTKLQPLLIRIKEIGGNYGKTPTQVVLNWLIAQENVVPIPGAKNAAQAEEFAGALGWRLSNEEVDELRSLASEISPVIGFPVEKL

SEQ ID NO: 63867 - protein, 278 aa, Gossypium hirsutum
  Clone ID: GOSHI-09MAY01-C44311_1.pep
AHASAQFFSSGWLGDGQWIVPITFCCGSYDKKKSFLLQTKSARYDRAGPPPPTNKSAWIKLNVDQTGFYRVRCDEELAARLRYAIENKYLTPTDRFGILDDSFALCMARQLPLTSLLTLMGAYREELDYTVLSNLISITYKVGRIAADARPELMDNINQFFINIFQYSAEKLGWDATQGESHLDSMLRGEILTALAMLGHKETLSEASRRFDAFLKDRNTPLLPPDTRKAAYVAVMQTVTSSNRAGFDSLLKVYRETDLSQEKIPILGSLPSWSRSGV

SEQ ID NO: 63868 - protein, 63 aa, Gossypium hirsutum
  Clone ID: LIB3149-021-Q1-K1-C2.pep
KSSGFNGEKRNFDCACYAWRQETLVSSRRLMLLKTNTPLSPDTEALVAASAAPLNNWLTSLKL

SEQ ID NO: 63869 - protein, 158 aa, Gossypium hirsutum
  unsure (1)..(158): unsure at all Xaa locations
  Clone ID: GOSHI-09MAY01-C44281_1.pep
MQASRARLFKEYKEVQRXEKTADPDIQLVCDDSNIFKWTALIKGPSETPYEGGVFQLAFAVPEQYPLQPPQVRFLTKIFHPNVHFKTGEICLDILKNAWSPAWTLQSVCRAIIALMAHPEPDSPLNCDSGNLLRSGDMRGFQSMARMYTRLAAMPKKG

SEQ ID NO: 63870 - protein, 131 aa, Gossypium hirsutum
  unsure (1)..(131): unsure at all Xaa locations
  Clone ID: AI725949.1.pep
MQASRARLFKEYKEVQREKAADPDIQLVCDDSNIFKWPALIKGPSETPYEGGVFQLAFAVPEQYPLQPPQVRFLTKIFHPNVLFKTGEICLDILKNAWSPAWTLQSVCRAIIXLMAHPEPDSPLNCDSGNL

SEQ ID NO: 63871 - protein, 73 aa, Gossypium hirsutum
  Clone ID: uC-gsflnu33B111f03b1.pep
PRVRPRVRPRVRPRVRAWTLQSVCRAIIALMAHPEPDSPLNCDSGNLLRSGDLRGYQSMARMYTRLAAMPRKG

SEQ ID NO: 63872 - protein, 103 aa, Gossypium hirsutum
  Clone ID: LIB3272-043-P1-K1-D5.pep
ASFSYHFRDLAQASRARLFKEYKEVQREKTADPDIQLVCDDSNIFKWTALIKGPSETPYEGGVFQLAFAVPEQYPLQPPQVRFLTKIFHPTVHFKTGEIWLDI

SEQ ID NO: 63873 - protein, 43 aa, Gossypium hirsutum
  Clone ID: GOSHI-09MAY01-C44251_1.pep
DAWVKSLKMKTKTKMKKNRVSHQRRGRSNHLQILRLFFGVQLQ

SEQ ID NO: 63874 - protein, 118 aa, Gossypium hirsutum
  unsure (1)..(118): unsure at all Xaa locations
  Clone ID: GOSHI-09MAY01-C44261_1.pep
TFQSDIAKKILEIPLAETDSEDLRVWKGKPTGEFSVRSTYKLLQEVDLISNNLLQTDFKEFXRKLWDLQLPSKTLLSVWRISWNYIPTLANLRYKRITTNVRCPRCGFGEEDNFYVFQ

SEQ ID NO: 63875 - protein, 164 aa, Gossypium hirsutum
  unsure (1)..(164): unsure at all Xaa locations
  Clone ID: GOSHI-09MAY01-C44231_1.pep
NQRTRKQEQLAAKVAAFLEPGVSLKRAREGKESNAFWLALGGKKSYTSEIESSETIRXPHLFTFSLNRXKGKFEVEEVYNFSQDDLLTEDILILDTRAEVFVWVGQCVDVKEKENVFKIGQEYIDRASSLYGLSPKVPLYKVTEGNEPCFFTTFFSWDPNRATV

SEQ ID NO: 63876 - protein, 138 aa, Gossypium hirsutum
  Clone ID: GOSHI-09MAY01-C44221_2.pep
WLETLKSRSKIRTQNSPRNLWLLLPKLPFNRKRSVEVVIEKKPNGKQLSEEKKTTNKPADEVKFSEPRPAVPPPLTLEADQTGRTSNRVILWQVYAIGGFFLLKWIWARWNERKEMGSKKEASDDDEQPPAVDDSQYV

SEQ ID NO: 63877 - protein, 113 aa, Gossypium hirsutum
  Clone ID: GOSHI-09MAY01-C44221_1.pep
MLPKVEFKFPSFDQQSEKPDASVEKEEQIEIAKPPSVFMGNRRKNPPPLEFEAEECLGRTSNPIVLWQVYAIGGFFLLKWIWARWNERKEMGSKKEASDDDEQPPAVDDSQYV

SEQ ID NO: 63878 - protein, 155 aa, Gossypium hirsutum
  Clone ID: GOSHI-09MAY01-C45971_1.pep
TLVKLKLIEEIPSFCEVFLENREIMEQADKFFTTLQLNKTKVTSLKQEYSELRQQVTSLQSEVEANTLTVQEIDNQIAQLKSHRAQLTRLIENKKKDKEELTYNQKLVANSIPKVVHEVQLANARKPEWEIKKESADKREAEILAKFAPLKGFSL

SEQ ID NO: 63879 - protein, 58 aa, Gossypium hirsutum
  Clone ID: GOSHI-09MAY01-C45961_1.pep
IHYFRNNNSNGNVLKFHGMLPTTSSIKRHNVECEDPPSIKAFLLRALISFILFRTSLS

SEQ ID NO: 63880 - protein, 195 aa, Gossypium hirsutum
  Clone ID: GOSHI-09MAY01-C45881_1.pep
ESKLDVLGGRSNDVEIVPSSGLRKRKHSRSNSAGSTPLVHSNEGSPPHPVGNEGPQASEHDRLVVDHYHPQGPSVQDGGWLARVAALLVGEDPTQSYALICGNCHRHNGLARKEDFPYITYYCPHCQALNKPKQLEEHGSRSSPIMDPLQSGVGDAAKSPSGSMAEDILRSSSPVISGSEIEKVTEKVESSDVIG

SEQ ID NO: 63881 - protein, 236 aa, Gossypium hirsutum
  unsure (1)..(236): unsure at all Xaa locations
  Clone ID: GOSHI-09MAY01-C45471_1.pep
MMRRSASKKAGQPNSTNSINFSPSDLFRTASSRASSKEMERIDNLFHSYANRSLGMIDPEGIETLCSDMEVDHTDVRILMLAWKMTPVDLASASLEEWRRGVKALRADTXSKLRKALPELEKEVKRPANFEDFYSYSFCYCLTEEKQKSIDIGSICQLLDLVLGSHFRAQVDYFIEYLKIQSDYKGINMDQWMGFFRFCNEXIQMISFPDFSSYNPDLAWPLILDNFVEWMQSKQT

SEQ ID NO: 63882 - protein, 54 aa, Gossypium hirsutum
  unsure (1)..(54): unsure at all Xaa locations
  Clone ID: LIB3148-040-Q1-K1-B1.pep
PNQIISGLLRLHPLYEIIQDQWPTKVRIITTEVKRTRGRTRGXTRARSRRSFRA

SEQ ID NO: 63883 - protein, 165 aa, Gossypium hirsutum
  Clone ID: GOSHI-09MAY01-C45191_1.pep
GFPVAYSELLLPRLLLHTLSLLAYLRKFISTLFLYLGLPDFLEPDIPWREYAPETHHASAAPVSALLIRELLPVVKFSDLVDPPESCAVCLYDFEGQDEIRRLTNCRHIFHRSCLDRWMGYDQKTCPLCRTSIVPDDMQQTFNERLWAASGIPGVFGDYSQITAL

SEQ ID NO: 63884 - protein, 287 aa, Gossypium hirsutum
  unsure (1)..(287): unsure at all Xaa locations
  Clone ID: GOSHI-09MAY01-C45131_1.pep
TKPPANPSHAIVCNFDGWELPKVLGQNSVDRVLLDAPCSGTGVITKDPSVKTSKSLDDIQKCAHLQKQLILAAIDMVDANSKTGRYIVYSTCSMMVPENEAVIDYALKKRDVKVVPCGLDFGCPGYIRFREHRFHXPSLENTRRFYPHVHNMDGFFVAKLKKMSNSKKNLVSSDGSETVEQTQRPEEIHSDEDNKKELEQQKMKKQIPKGKKKSLKAKGLSGNGKVESPPTLKNRDRSENGKVELAATSKKRKRNFPSKEEISKAREEKRKPMRGKKKHPKGAKSGI

SEQ ID NO: 63885 - protein, 153 aa, Gossypium hirsutum
  Clone ID: GOSHI-09MAY01-C45121_1.pep
HASADGGSKSAKGFSASPQFVDRSITKDKCTVQICDQMSSKLNYDDEWQGIQRSTFLVDGDALTNSSDQNATAGASSRTSSDTRRRRFDPSSFQQRAEALEGLLEFSARLLQQERYDELGVLLKPFGPGKVSPRETAIWLTKSFKENTAKQED

SEQ ID NO: 63886 - protein, 72 aa, Gossypium hirsutum
  Clone ID: GOSHI-09MAY01-C45281_1.pep
TKALLLFYMNFLHKIGLSLVITKICPSFKIENKKIINKCLFIKQSFYSPKVKTQTQNPANYPVPITPYLAQN

SEQ ID NO: 63887 - protein, 126 aa, Gossypium hirsutum
  unsure (1)..(126): unsure at all Xaa locations
  Clone ID: uC-gsronu33B156d08b1.pep
HVYFIFIFIIFFLFYFNFIYILYFLIFPYLYFFYYYNFISFISFFLYLIFFVFFSFIFLSXFLFLPPLTYLFIFIIFIXLNFFFLLSYKFLLLSYLFLFHIFFILYLQIYYLYFHIILIFLPTFYL

SEQ ID NO: 63888 - protein, 51 aa, Gossypium hirsutum
  Clone ID: LIB3148-037-Q1-K1-F10.pep
KGSRFFTKTIIYTRFTKREIYKQIQQSTVISTYNTSSQSNTKVNILTYITN

SEQ ID NO: 63889 - protein, 142 aa, Gossypium hirsutum
  Clone ID: GOSHI-09MAY01-C46921_1.pep
RPRVRSMARGAFYQVPYMLQAGRHMIAGMGGMPFSSGLPTMPAASPFSEPADLPLMSGTGTRNLGLPLLQMPFFHSQLPLPAAATPTMFPNYLTARDTYNIVSTTSIDCQQIPITIQSHDNSFLGENYLASSSPAKLPSSYQ

SEQ ID NO: 63890 - protein, 141 aa, Gossypium hirsutum
  unsure (1)..(141): unsure at all Xaa locations
  Clone ID: LIB3829-026-Q6-K6-D8.pep
SSQGSGQSSPNKPSLPKKGKGASIPETXREKKNPNINLDGTKFDFSGVPSPICSCTGVARVCYKWGASGWQSSCCTINISECPLPMSPTRPGARVAGRKMSNGAYFKLLLRLAAEGYDLSHPVDLKDHWARHGTNKFVTIK

SEQ ID NO: 63891 - protein, 54 aa, Gossypium hirsutum
  Clone ID: LIB3148-058-Q1-K1-F2.pep
PRVRCPLPMSPTRPGARVAGRKMSNGAYFKLLLFFSSFLEVFFKSIFEKLKISA

SEQ ID NO: 63892 - protein, 144 aa, Gossypium hirsutum
  Clone ID: GOSHI-09MAY01-C46561_1.pep
RNFAKTKKMMTDQHHYLKRPSLHRPILLLMLMVMIPWSTSHFALDPPEKRNSLGFFHCNGSSAECSGGKVEDDMLLEFLVESETRRMLQQGGNRPSTNTLKPNIAACGRDKYGYLCTPPSNKDVKRSENCGGDNFNRACHQLSK

SEQ ID NO: 63893 - protein, 120 aa, Gossypium hirsutum
  Clone ID: uC-gsronu33B117a08b1.pep
MMYGDPQQQQNQPHPQAGEFQRGPPPPQMMRQPSASSTTLNSEYHHPGAPPPQMPSYDAHGDNFAAKRMRKLTQRRAVDYTSTVVRYMQIQMSQRDSRDRTTLQPTPAAAIDMLPTAAYL

SEQ ID NO: 63894 - protein, 65 aa, Gossypium hirsutum
  Clone ID: LIB3148-052-Q1-K1-C4.pep
SFFIVIKLHPLRRFPSIDCRAHGDNFAAKRMRKLTQRRAVDYTSTVVRYMQIRMSQRDSRDRTTL

SEQ ID NO: 63895 - protein, 87 aa, Gossypium hirsutum
  Clone ID: GOSHI-09MAY01-C46291_2.pep
GLDWIFAYIYIYIFEFIYFNTPFSLISYYKKKKKKKKKKKKKKKKKKKKKKKKKKKKKKKKKKKKKKKKKKKKKKRGGPLFREQNFF

SEQ ID NO: 63896 - protein, 105 aa, Gossypium hirsutum
  Clone ID: GOSHI-09MAY01-C46291_1.pep
FFASAWLNLLENKTAFTTKKDYGKEEREAQWALAQRTLHGLQPPETSNLFNDKNSYRELSEIAEQAKRRAEVARLRVLHTLKGHVESVVKLKGLDIDTIQQHYTV

SEQ ID NO: 63897 - protein, 88 aa, Gossypium hirsutum
  Clone ID: uC-gsronu33B113h05b1.pep
FSKKSTGSCLWGNWPIIVMCLCSYSYLLFNRALKLGVFYHFQIGLNLGTGLDICLYIYLYIRIYIFLYALIFAKGKTQYQRVKNNHVN

SEQ ID NO: 63898 - protein, 78 aa, Gossypium hirsutum
  Clone ID: GOSHI-09MAY01-C46271_1.pep
DRCKFHHPIDRLTTNEASQEAIKLTLAGLPRREGSVHCPYYMKTGTCKYGATCKFDHPPPGEVMSVTGVQGTSTTMSG

SEQ ID NO: 63899 - protein, 76 aa, Gossypium hirsutum
  Clone ID: GOSHI-09MAY01-C46211_2.pep
NSSLKQNKHNRLQGYFYMFKNLKLSAAAITISLTTWTGSILSFTSWVCGCLQKLSKLVNEYGWFIAPDPLEQSHGF

SEQ ID NO: 63900 - protein, 70 aa, Gossypium hirsutum
  Clone ID: uC-gsflnu33B066b10b1.pep
RGSRGSDTRRRIRRSSYASSTSDEGSVHSVEFAEYRVDETDDEFVSTSGSSRGSTSYQSSQRRRSRFYDN

SEQ ID NO: 63901 - protein, 82 aa, Gossypium hirsutum
  Clone ID: GOSHI-09MAY01-C47951_1.pep
MKMEKKEKQNKIMMNNHLLKCIRLADLLLFSRVYFVFKTRPFYNEKRRLYNQNTNNFCRSRGASRRCCEIVEEECMIVQRAS

SEQ ID NO: 63902 - protein, 47 aa, Gossypium hirsutum
  Clone ID: LIB3135-039-Q1-K1-A5.pep
NRGGRVHDRATCELGIRSWVLKRGSCTVGKWNPRVCYILKKFTSLGL

SEQ ID NO: 63903 - protein, 162 aa, Gossypium hirsutum
  unsure (1)..(162): unsure at all Xaa locations
  Clone ID: GOSHI-09MAY01-C47871_1.pep
MVNHEEEEEDIVWLDGSFFINDNYQLTSFTFGSHVLQLYCLHSASTDFDLTGQLVWPGAMLLNDYLSKNAEMLQGCSVIELGSGVGITGMLCSRFCRQILLTDHNEEVLKILRRNIELNAXSENPSCCAALEAEKLEWGNSDQINRILHKYPGGFELILGAD

SEQ ID NO: 63904 - protein, 71 aa, Gossypium hirsutum
  Clone ID: GOSHI-09MAY01-C47501_1.pep
EGRLQTAYKIKNQMYTTLICLISFPQFFYKINLLVMRLVITVNKFNNRMSIIQGERQLKSSLPKKYGTNTL

SEQ ID NO: 63905 - protein, 188 aa, Gossypium hirsutum
  unsure (1)..(188): unsure at all Xaa locations
  Clone ID: GOSHI-09MAY01-C47491_2.pep
MAHHRGSDPETEPNTQLYNPYQDLNLQVPITNLXSAPTSPEFLFPEESLHQRRSWGENLTFYTGSAYLGGSVSGAAVGLFSVLKNFEQGDTLKLKINRILNSSGHTGRTWGNRIGVVGLIYAGLESGVVAVTDRDDVWSSVAAGLATGAGCRAARGVRAAAVAGALGGXLAAGAVVAGKQVLKRYVPI

SEQ ID NO: 63906 - protein, 187 aa, Gossypium hirsutum
  Clone ID: GOSHI-09MAY01-C47491_1.pep
MAHHGGSDPESEPNTRLYNPYQDLNLQVPINNLYKLPTSPEFLFAEESLHQRRSWGENLTFYTGSAYLGGSVSGAAVGLFSALRNFEQGDTLKLKINRILNSSGHTGRSWGNRIGVVGLIYAGMESGVVAVTDRDDVWSSVAAGLATGALCRAARGVRSAAVAGALGGLAAGTVVAGKQVLKRYVPI

SEQ ID NO: 63907 - protein, 212 aa, Gossypium hirsutum
  unsure (1)..(212): unsure at all Xaa locations
  Clone ID: GOSHI-09MAY01-C47401_1.pep
EKSETSSLGVGGGEEKNETEDESEEPWETRKRXEKYHLGKKESAGKAKTKKVSIPKKSTPQKRTPKTSASKSSKADDDSDKSPKVSSRKKPEKVTKEKSSTPSTSVSKEKTSKRAGKGKDKAKEQKLKPSDHELRDTICKILKEVDFNTATFTDILKLLAQHFNTDLTPRKSSIKLMIQEELTKLADEAYDEDDEGDAEKDETQSAGQEVQA

SEQ ID NO: 63908 - protein, 103 aa, Gossypium hirsutum
  Clone ID: LIB3146-038-P1-K1-G3.pep
SANPSTSVSKEKTSKRAGKGKDKAKEQKLKPSDHELRDTICKILKEVDFNTATFTDILKLLAQHFNTDLTPRKSSIKLIIQEELTKLADEADDEDDEGDAEKD

SEQ ID NO: 63909 - protein, 54 aa, Gossypium hirsutum
  unsure (1)..(54): unsure at all Xaa locations
  Clone ID: LIB3149-025-Q1-K1-F11.pep
RSTQXPGQGENPKRAGKGKDKAKEQKLKPSDHELKDTICEILKEVDFNTVRTVY

SEQ ID NO: 63910 - protein, 61 aa, Gossypium hirsutum
  Clone ID: LIB3135-031-Q1-K1-H11.pep
KVSSVKKESAGKAKTKKVSIPKKSTPQKRTPKTSASKSSKADDDSDKSPKVSSRKKPEKVT

SEQ ID NO: 63911 - protein, 157 aa, Gossypium hirsutum
  Clone ID: GOSHI-09MAY01-C47741_1.pep
SRSTAARALVDCATRAWRLKYPTSKNDDCAVVCLFLEYLPASNGTAEENDLTRIPKECREPMVAIDENKGDSHTSSLGQSDAFHGSTEIVPVTELTEEMLSSKFPGQSKRSLAECISVADDEEWSALEGITRVNSLLSLPRFLSSHKRSTSSRRKWL

SEQ ID NO: 63912 - protein, 216 aa, Gossypium hirsutum
  Clone ID: GOSHI-09MAY01-C47711_1.pep
KEFITLSIQQAYTLNTHIGKLKLPVTCMPVFPGLSIFLILCLYYSVFVPVSRRITGHPHGASQLQRVGIGLFISILSVAWGGVFERFRRGYAIKHGYEFSFLTPLPDLSAYWLLIQYCLIGIAEVFSIVGLLEFLYEEAPDAMKSIGSAYAAIAGGLGCFAASIINSIVKSVTRNPENKQRSWLSQNINNAKFDYFYWLLTVLSIINFCFFLYSAH

SEQ ID NO: 63913 - protein, 150 aa, Gossypium hirsutum
  Clone ID: GOSHI-09MAY01-C47661_1.pep
MATATGQVNAKRKPVFVKVEDLKPGTSGHTLIVKVVEMTPVKTSARPNRSRALLSRPVPPVRIAECVVGDETGTIIFTARNEQVDLMTKGATVILRNAKIVMFKRTTMRLAVDKWGRIEVTEPAKFAVKEDNNLSLVEYELVTVPDQGMN

SEQ ID NO: 63914 - protein, 258 aa, Gossypium hirsutum
  Clone ID: GOSHI-09MAY01-C47131_1.pep
MSQEQPQRPGASQEPIKYGDVFNVTGELASKPIGPKDAAAMQSAENKILGETPKGGAAAAMQSAAIANERAGVVSHNQADVAGDQGVAVIKSDADGDVMITEAVAGQIVGQYRQPDVSAVTTPAMLVDPGSITIGEALEAAAISAADKPIDQSDAAAIQAAEMRATGSSEITPGGIASEAQSAATRNARTQRFEDQPPLSDVLSDATAMLPKDKAVTREDAERVVAAEVRNNPGMSTTPGGVGAPRPAPAKRNQNSPI

SEQ ID NO: 63915 - protein, 201 aa, Gossypium hirsutum
  Clone ID: GOSHI-09MAY01-C47011_1.pep
MESTDKPAAVAATTTTPPSTTVAASICPFNYAAVDVGLRVVLFAAAVIAVVVMATSKQTEMVPVPGLPTSVRVPYSAEFTDSPAFVYFMAALSTTGLYSIITALASTLLGCKPSYTNTIWLAFALMDVVFVGIVASATGAAGGVAYIGLRGNSHVRWDKICNVYDEFCRHVGTAIAFSLFAAILLVFLTMFSTFALYKKIR

SEQ ID NO: 63916 - protein, 49 aa, Gossypium hirsutum
  Clone ID: LIB3135-025-Q1-K1-E6.pep
NHVIEPPTYEDDTDEDRSKSYYKIVSSAENYATILSKLRDEGINFETDN

SEQ ID NO: 63917 - protein, 119 aa, Gossypium hirsutum
  unsure (1)..(119): unsure at all Xaa locations
  Clone ID: LIB3135-025-Q1-K1-E2.pep
ATRTGGVSMVLEVLTDKITRSGAAVMEVVKDCGGKMADPGSVMFKFRRVXVVNIKVTDADKDQLLNIALDAGAEDVIEPPTYEDDTDEDRSESYYKIVSSAENYATILLKLRDERNNFE

SEQ ID NO: 63918 - protein, 72 aa, Gossypium hirsutum
  unsure (1)..(72): unsure at all Xaa locations
  Clone ID: LIB3135-025-Q1-K1-D8.pep
KMANPGSDKMKFKRCRIANIEITDAHKKQILNIILDATTLDVFEPATYEDXTDEDTSXSYYKNVSSAENYAT

SEQ ID NO: 63919 - protein, 160 aa, Gossypium hirsutum
  Clone ID: GOSHI-09MAY01-C47281_1.pep
ANPSAQIPPQQSSQTSEVDPNESQSSVEKIIQEMMISSQFSETGSMVSVGSMENDLNNNNGLPQVSGSCLMGNGFVNNNSGIGSGGGFGNMNGGVGLSPNPTAMRSTIGNNSMNYTGRVSMPLMPQDAMNHQQQELANRLLNGLGAVNGFSNLQFDWKSP

SEQ ID NO: 63920 - protein, 133 aa, Gossypium hirsutum
  Clone ID: GOSHI-09MAY01-C40861_1.pep
KVLKIHYLPHHLLFLFLVSINPNIKFLLKCNISYLLKESRSVRRLLCKNSVEKVSNLVSEKEGSKSWVKRKTLAAFVSGGGSNFRSINQACVEGFVNGDVVVLGTNKHACGGAQYARDKGIPVILFPKTKDEP

SEQ ID NO: 63921 - protein, 86 aa, Gossypium hirsutum
  Clone ID: GOSHI-09MAY01-C40481_2.pep
RMGLTFERVKYWLPARAQPSEPVQRILFRAGVLPPPPMVAMGRKGGPRDTRPVDPMTGRVLNEEKPIAGNQEKSGEDEAGDESNSA

SEQ ID NO: 63922 - protein, 136 aa, Gossypium hirsutum
  Clone ID: GOSHI-09MAY01-C40481_1.pep
MVVRIRLSRFGCKNKPFYRVMAANSRSPRDGKHLEVLGYYNPLPGQDGGKRMGLNFERVKYWLSVGAQPSEPVQRILFRAGVLPPPPAAALAPEGGPRVMRPVDPMTGRVLNEEKPVAGNQEKSGNDEAVDESNSA

SEQ ID NO: 63923 - protein, 185 aa, Gossypium hirsutum
  Clone ID: GOSHI-09MAY01-C40711_1.pep
MGFGALRSIVRPLCRTLLLSQASPASGTMSTLPSYLCPKPCLNSLLCGSIYRQSPWIAMSNQLHSLTDTRFPKRRPQDKARRKRASLKPPGPYAWVKYTPGEPILPNNPNEGSVKRRNEKKRMRLRRAFKLAEAKKRKAQLQEANRKEKIKQVERKMAAVARDRAWAERLVELQGLEEEKKKAMA

SEQ ID NO: 63924 - protein, 107 aa, Gossypium hirsutum
  Clone ID: LIB3493-011-P1-M1-B12.pep
MGFGALRSIVRPLCRTLLSQASPASGTMSTLPSYLCPKPCLNSLLCGSIYRQSPWISMSNQLHSLTDTRFPKRRPQDKPRRKRASLRPPGRGKEEESSIAGSLYEEE

SEQ ID NO: 63925 - protein, 141 aa, Gossypium hirsutum
  Clone ID: GOSHI-09MAY01-C40651_1.pep
QKPGPGTERYFGLLYPNGTNIYGIDLTGKTPDSCFEPLPRPDNNEPYKGKIWCVAAKGVNETALSSALSYACSQGNKTCDPIQPGKKCFKPDSLFWHASYAFSSYWSQYRKTGATCYFNGLATQTAKDPSFGHCKFPSVTL

SEQ ID NO: 63926 - protein, 124 aa, Gossypium hirsutum
  Clone ID: GOSHI-09MAY01-C40141_1.pep
ISAKQRRTRGEFAKYGVCWYVYGGVGVAYGNCAGAGRGCWTVRRPCMGGCLVAAQRKRRCPRVLSCFSVLGLLGPVDSGQGLIIGLGLIDCGFYIYLFVFGLFVMGSGTFGPLHYILCFCSFVN

SEQ ID NO: 63927 - protein, 105 aa, Gossypium hirsutum
  Clone ID: GOSHI-09MAY01-C40161_1.pep
MAAQPERGGVSLPERRSAAKPESNILARITSSPLVSRGKQAACDAAFVSKKLLRSTGKAAWIAGTTFLILAVPLIIEMDREQQLNELELQQASLLGAPPTASVSK

SEQ ID NO: 63928 - protein, 303 aa, Gossypium hirsutum
  unsure (1)..(303): unsure at all Xaa locations
  Clone ID: GOSHI-09MAY01-C41451_1.pep
MESQKSQGKLTRTQSSLLRSSPTVRSSIHSMSSITESDFSKDQEENQQRESLXKNEKKTKPPPKRTGSMSPRIIPVRFTPVFAMASISFFTLFSFIFFFGFYLKREEIPTSENLLLALIFVAITLFFASKNKALINQGIVCFKSRFYFSKPNSKPVEWFIGETQCNKSNISKEKERLLPTVREGVEFYSNGDFFEGEFHKGECNGSGVYNYFVNGRYEGDWVEGRYDGYGVRVAAEGSXYRRHYREGLXHGFGAYRIYTGDSYAREWCNDQSHADVIQTCADRSCYVGEFKSGVKHGLGYYHF

SEQ ID NO: 63929 - protein, 268 aa, Gossypium hirsutum
  unsure (1)..(268): unsure at all Xaa locations
  Clone ID: GOSHI-09MAY01-C41781_1.pep
MEGISYQRFPKVKIRELKDDYAKFELRDTDASMANALRRVMISEVPTIAIDLVEIEVNSSVLNDEFIAHRLGLIPLTSEGAMSMRFSRDCDACDGDGQCEFCSVEFHLRAKFISDQTLDVTSKDLYSSDHTVVPVDFTDNAGYDSTEPRGIIIVKLRRGQELRLRAIARKGIGKDHAKWSPAATVTFMYEPEIHINEDLMESLTLEEKLXLVRSSPTKVFDIDPNTQQVVVVDPKAYTYDDEVLKKAEAMGKPGLVEIYAKEDSFIFT

SEQ ID NO: 63930 - protein, 156 aa, Gossypium hirsutum
  unsure (1)..(156): unsure at all Xaa locations
  Clone ID: GOSHI-09MAY01-C41761_1.pep
MDALQEXLPTRKGISKFYNGKSKSFTSLADAVTASSVKEFAKPDNPYNRKRKNLLTRGSKRLGNSYGSAMAFGTTMSSSDLNLMSSSPSSCLPPLHPQYKKSTMISSSSIAAQPNLNPPCRSFSLSDLQFVVAAAAATPNMAGLAVRSCNKDNKMR

SEQ ID NO: 63931 - protein, 83 aa, Gossypium hirsutum
  Clone ID: LIB3825-013-Q1-K6-B2.pep
TKLHSLPSFAIKHCLNNCVVLKRVVVIFTHVLRVFQFLIIVCVCVFFLLISEKVYPSFIMANQSPSLVLLMLALLPLVKNLQN

SEQ ID NO: 63932 - protein, 224 aa, Gossypium hirsutum
  unsure (1)..(224): unsure at all Xaa locations
  Clone ID: GOSHI-09MAY01-C41731_1.pep
MDGNKDDALKCLKIGKDALDAGDRARALKFLTKARRLDPSLPIENLLSAAEGGKSDDRPASEPVGSAKDPSGSSPSKPSDQPSIRRRNIPNGSAASASASSPASALAPAAAWAAGGPSTVYQIVLVNHIRIKTDYYEILGLEKSRSVDDIPIAYRKLSLKVHPDKNKAPGAEEXFKAVSKAFQCLSNEESRKKYDLVGSDEPVYERRASPFRGGGNGIQRLLRY

SEQ ID NO: 63933 - protein, 94 aa, Gossypium hirsutum
  Clone ID: GOSHI-09MAY01-C41671_1.pep
LGSTNQKPNNESTSSFEIGQLELRSIKRNCKLCDQKLAYGYGTANRSLVYRPAMLSMVAVAAVCVCVALLFKSCPEVLYIFRPFRWELLDYGTS

SEQ ID NO: 63934 - protein, 63 aa, Gossypium hirsutum
  Clone ID: GOSHI-09MAY01-C41041_1.pep
KILQQTLEPYNFVTKGYNYNLAYLLRNYMPTTCKPLGCKRGAHSTLNSTLHCPPVVIRTGMTD

SEQ ID NO: 63935 - protein, 247 aa, Gossypium hirsutum
  Clone ID: GOSHI-09MAY01-C41351_1.pep
MASLQCQKTIEKGLGQGYYGGGSSWGSQATKMENKYQNGYAMSYSEHERHSQIRCPTYGMSESYTTYGQSHGTHNGNAMSKPQFHGHGNGYGSHMSNGMAHTQAYGSNHHNSPGKHQGPGYGSGFGGYPPKNHGMPHSPPHHGGKLSGQGNGFLKPQAYGPGRSMAYGMTETESCEYRSEVYFSNESHYNDGRGYHHAGKSDHPVKGLLRKIKGGISRNKSCSDSDSGSDSDDDGYGKKTVFVSKAI

SEQ ID NO: 63936 - protein, 88 aa, Gossypium hirsutum
  Clone ID: uC-gsronu33B101c08b1.pep
VRSRVRPRVREFVGVKEIIASMASLQCQKTIEKGLGQGYYGGGSSWGRQATKMYNSFHYGYATSHIYFESHSQFPLHHLWIVPYSTLL

SEQ ID NO: 63937 - protein, 66 aa, Gossypium hirsutum
  Clone ID: GOSHI-09MAY01-C41321_1.pep
GDQMVTQRCVMEDPEEIIHRRAQFLIHKVLERADCRRKPSFLRIRLCRLKVKIRRRLKKLRKSGVG

SEQ ID NO: 63938 - protein, 212 aa, Gossypium hirsutum
  Clone ID: GOSHI-09MAY01-C42541_1.pep
AIYPCCLSFLLVSLFVSFCYAKIRLTEIRHDDRPIIPFDEFGFTHTGRLELNVSNIALSNQNPDLDMSKVGFFLCTRDAWMQVLLQIEDGYINCPLNSDFVKLAFEFKQLKGKSNSFSTVYQENTADQYTLVFANCLSHVKVSMDVRSAMYNLDGKEKHRDYLSPRKTILPRGYFIFALLYFTLAGIWIYVLYLKRLTGFRIHLFMVAVNIL

SEQ ID NO: 63939 - protein, 66 aa, Gossypium hirsutum
  Clone ID: GOSHI-09MAY01-C42491_1.pep
GMTAPQAAGVIHSDFEKGFIRAETVSYDDFVVSGSLAAAREKGLLRSEGKDYVVQEGDGMLFRFNV

SEQ ID NO: 63940 - protein, 172 aa, Gossypium hirsutum
  Clone ID: GOSHI-09MAY01-C42441_1.pep
PPASQAPHRSPNSASPPPISSSYYPAAPHMLLALSGGLAGALDNNHHQNNSHLQGLGTLTPNTTNLGSHSKKRFRTKFTQFQKDKMLEFAEKVGWKIQKRDEQAIQEFCSEVGVDRGVLKVWMHNNKNTFGKKDQAINEGETGINNNTENGLIHEYHHHHININGQNLNHHF

SEQ ID NO: 63941 - protein, 159 aa, Gossypium hirsutum
  Clone ID: GOSHI-09MAY01-C42401_1.pep
GRVGLSVSTLAGTPGYVASEYYQSLRCSTKGDVYSYGVVLLELLTGKRPTDSADFGDNNLVGWVKQHAKLKISDVFDPELMEEDPMLEIELLQHLKVACACLDDRHWRRPTMVQVMAMFKEIQAGSGLDSQSTIATDDRGFNSVEMVDMTIKEVPEGKQ

SEQ ID NO: 63942 - protein, 84 aa, Gossypium hirsutum
  Clone ID: GOSHI-09MAY01-C42721_1.pep
AHFLRPRVRSAFVGVGFTMCLTSIIYEVSGAWERRHIESNQPLSSQEVPRPNQAPVTAPLQTQTDTNAHGNEPERRALESGNAN

SEQ ID NO: 63943 - protein, 141 aa, Gossypium hirsutum
  Clone ID: GOSHI-09MAY01-C42631_1.pep
KDYSNNLIDYLSITDLLSILAHLYFQGKIPGTLTYGQASILLCMGLQNRDVSYVEGQLKKALERQQILSYFKKVMIKLYKYLYGVASKEIESALPRLKERVLEPHSISVDEDLNDAAKKVEEEMKGKSDGVLNLQLLQQFA

SEQ ID NO: 63944 - protein, 205 aa, Gossypium hirsutum
  Clone ID: AI727380.1.pep
MGSGAVLGLAPAPEYTFLIYVSPVGNYFKEGVAPINLIVEHELHRATPGGTGGVKTIGNYAAVLKAQSAAKAKGYSDVLYLDCVHKKYLEEVSSCNIFVVKGDVISTPAIKGTILPGITRKSIIDVARSQGFQVEERFVPVDELLDADEVFCTGTAVVVSPVGSITYKGKRVSYGVNGFGAVAQQLYSVLTKLQMGLINDKMDWK

SEQ ID NO: 63945 - protein, 143 aa, Gossypium hirsutum
  unsure (1)..(143): unsure at all Xaa locations
  Clone ID: LIB3147-051-Q1-K1-B4.pep
GRNSGRHAATRPRVGYSDVLYLDCVHKKYLEEVSSCNIFVVKGNVISTPAIKGTILPGITRKSIIDVARSQXFQVEERFVPVDELLDADEVFCTGTAVVVSPVGSITYKGKRVPYGVNGFGACAQQLYSVLTRLQMGLIDDKM

SEQ ID NO: 63946 - protein, 183 aa, Gossypium hirsutum
  Clone ID: GOSHI-09MAY01-C42351_1.pep
GRVRPRVRPRVRGINVITFYAPILFRTIGLRESSSLLSAVVIRCFNVGCTFISMFVVDKQGRRVLFMLGGIQMLATQVTIGGFMTALLGDHGGLSKASAYVVLVLICIYISGFGLSWGPLGWLVPSEIYPLEIRSAGQSITVAVSFFFCFLIGQTFLAMLCHMKAGIFFFFGGWVALMTLFIY

SEQ ID NO: 63947 - protein, 150 aa, Gossypium hirsutum
  Clone ID: AI055202.1.pep
MPSISSVPTNEKPTAAAFTATNQSNENGNMIDPDLLVQILSNPKLIEKLVTEHGVASGAQSLPISSINLVPSFDMPPSAGHIGRTENDGAVYGKSNGVGIGASNKHGSDPGVCPISHSLAMELSQKKDVNYYMNLIQQLVCKSQVEVSIT

SEQ ID NO: 63948 - protein, 149 aa, Gossypium hirsutum
  Clone ID: LIB3147-055-Q1-K1-H2.pep
EKPTAAAFTATNQSNENGNMSDPDLLVQILSNPKLIEKLVTEHGVASGHIGRTENDGAFYGKSNGVGIGASNKHGSVPGVCPISHSLAMELPQKKDVNYYKNLIQQHGGESQVGGQKFNNRYNQQLRPNQEVINNPRSRDSKPRIMKPC

SEQ ID NO: 63949 - protein, 83 aa, Gossypium hirsutum
  unsure (1)..(83): unsure at all Xaa locations
  Clone ID: GOSHI-09MAY01-C42371_1.pep
VNLSWKEXVKPSVPSSATGTGVKRPSTAANGSNNFATKKGRGAGGMQNQLVNRALEGISYGGRGGGRGRGRGWGGRGRGRGYR

SEQ ID NO: 63950 - protein, 62 aa, Gossypium hirsutum
  Clone ID: uC-gsronu33B058c03b1.pep
HINDFSCSSGTNIFSKFIDRCCAMFHPKNTGSLLNIPRPPQPRGDPKNGRGGRPGIRNGTPG

SEQ ID NO: 63951 - protein, 74 aa, Gossypium hirsutum
  Clone ID: LIB3196-048-P1-M1-B2.pep
NETNSTVQLLCRVKRPSTAANGSNNFATKKGRGAGGMQNQLVNRALEGISYGGRGGGRGRGRGWGGRGRGRGYR

SEQ ID NO: 63952 - protein, 57 aa, Gossypium hirsutum
  Clone ID: LIB3147-056-Q1-K1-C12.pep
KTCNVSSNTLKFDRIGNSNPRCYPINFKTISRGLQCLLLVHSESRNSSASGIKQTLS

SEQ ID NO: 63953 - protein, 112 aa, Gossypium hirsutum
  Clone ID: GOSHI-09MAY01-C42361_1.pep
MVKGRQGERIRLYVRGAILGYKRSKSNQYPNTSLIQIEGVNTKEEVGWYCGKRMAYIYKAKVKKNGSHYRCIWGKVTRPHGNSGVVRAKFKSNLPPKSMGDKVRVFMYPSNI

SEQ ID NO: 63954 - protein, 130 aa, Gossypium hirsutum
  Clone ID: GOSHI-09MAY01-C42321_1.pep
AIANEALHEKHTTKWTIGHGRHDENNDELKTFNPREPNFLSVVPEADKEKVDLRHEMMEERRNAEEWMLDHALQQAVTKLGPAKKKKVALLVEAFETVLPLPITKCETHLRHHTSTGFAHSHGRTIQACN

SEQ ID NO: 63955 - protein, 183 aa, Gossypium hirsutum
  unsure (1)..(183): unsure at all Xaa locations
  Clone ID: GOSHI-09MAY01-C42211_1.pep
TLFNFIGSLCVYGTICKHLNVPFVFGGTSECWEESYIDGSDARLVAEQQIWAATRNGDGVSSNGEAFNXINGSSFSWKEIWPILGKKFGVRVPKETCMEEFWYTRAMGDKKRVWEEIVEKERLVETKMEELANWQFMDILLRFRAKLLGSRAKVDGLGFTMRCNTFDSILYWIDVMRHENFIP

SEQ ID NO: 63956 - protein, 58 aa, Gossypium hirsutum
  Clone ID: GOSHI-09MAY01-C43991_1.pep
YCYFCFFFIFFFFKESSAFHKKSFLRLTILRGKENNVILTSKVGIAWCLPFSYLVTTL

SEQ ID NO: 63957 - protein, 62 aa, Gossypium hirsutum
  Clone ID: GOSHI-09MAY01-C43981_1.pep
CNPENRASGRELFNWALEPADDEILDRLFEFGYLDAAVWGEQNPVKDIVADNSPLVGNGSAK

SEQ ID NO: 63958 - protein, 112 aa, Gossypium hirsutum
  Clone ID: uC-gsflmaxxa042f02b1.pep
RHYFFLLLINAQCKAQNLPGPTPANPPPLAHLRRCPMCATTQPRTPLLRASLHACPSPSAPHASFPATACGGRRRRRRASGGRPVTGPPGLIFLPPSLLSSFSLPSLFFFID

SEQ ID NO: 63959 - protein, 84 aa, Gossypium hirsutum
  Clone ID: LIB3148-018-Q1-K1-G6.pep
VMTQESRKFIQTSIDIGYVKPKICPGSYQQTPPLAHLCRCPMCATTQPRTPLLRASLYACPSPSAPHASVTSIVPIPCKETKQK

SEQ ID NO: 63960 - protein, 99 aa, Gossypium hirsutum
  Clone ID: GOSHI-09MAY01-C43881_1.pep
MEITEKLLKLKYPIIVILTLSLTLSALIIFAPSFLTILAYFWPLLLSTALFLVAVIFFGKTSAHTAASDSDPADKAGEVLLDYVAGQPQLAVDTSYKPE

SEQ ID NO: 63961 - protein, 90 aa, Gossypium hirsutum
  Clone ID: uC-gsronu33B160g09b1.pep
FIIIFLPNFTVRRIGNKRKGKRGEVTAAERERVRDYSKGLKVLLRLVTGVNSKLGLASNVVKEDFTGLICRIGVRRSGMSRRFPKEDDSN

SEQ ID NO: 63962 - protein, 160 aa, Gossypium hirsutum
  Clone ID: GOSHI-09MAY01-C43821_1.pep
HASAHASAHVSAHASGLLKEWDTWMMVQLQHIILAQSVESIPEWAACIRYAVTGKGKHGTRVPLLRQQILNCLVTPLPTAVTTTVVAKRYAFISAALIELSPQKMPVPEIQLHSKLLDELLGNMCHSSAQVRGAIGVALSVLCSNIRLYVSSSQDHSNER

SEQ ID NO: 63963 - protein, 55 aa, Gossypium hirsutum
  Clone ID: GOSHI-09MAY01-C43491_1.pep
LKCGLGRLLPLFRRFRVMNSSLCLFSLGEMSRLLLLHLILQLPRLGLLKQACSCI

SEQ ID NO: 63964 - protein, 131 aa, Gossypium hirsutum
  Clone ID: LIB3148-015-Q1-K1-F5.pep
PKDAKVKAAKLVCVVNVGVLGTVTAVTLFAVHKNTRLTFVGILCTALTIGMYASPLSAMSTVVKTKSVEYMPFLLSLFLFLNAGVWSVYAVLVKDIYIGVPNAVGLFLGSAQLILYVIYKNKPVSTNPSEA

SEQ ID NO: 63965 - protein, 102 aa, Gossypium hirsutum
  Clone ID: GOSHI-09MAY01-C43441_1.pep
AKKETMKAPTNDPRTGKVEVATLESGPGAEAGAAPTEAELSGAPSGEEAGAVLAAMTALIEAAANMTAQEIFFFMSMVLERPALICCRKTLVFFFFVCVYVC

SEQ ID NO: 63966 - protein, 45 aa, Gossypium hirsutum
  Clone ID: LIB3828-027-Q6-K6-H9.pep
NLVFLKRAPPFFFFFFFFFFFFFFFFFFFFFFFFFFFFFFFFFFR

SEQ ID NO: 63967 - protein, 145 aa, Gossypium hirsutum
  unsure (1)..(145): unsure at all Xaa locations
  Clone ID: GOSHI-09MAY01-C43471_1.pep
NEQAARFANGGAYPPDLSLMXKARHYGQNYVFGLLTGYRDPPAGISIREGLHYNPYFPGGAIAMPKMLNDGAIEYEDGTPATEAQMGKDVVTFLSWAAEPEMEERKLMGFKWIFVLSLALLQAAYYRRLKWSVLKSRKLVLDVVN

SEQ ID NO: 63968 - protein, 131 aa, Gossypium hirsutum
  Clone ID: GOSHI-09MAY01-C43401_1.pep
MKTNSPKKQNFKLYERRNSNLKNNLMINTFLPSNNGEGGGGGGAFYSPRNAEILSPSLLDFPKLALSPVTPLNEDPFNKSSPSLGNSSEEEKAIAEKGFYLHPSPMSTPRDTEPQLLPLFPVTSPRVSGSS

SEQ ID NO: 63969 - protein, 187 aa, Gossypium hirsutum
  Clone ID: GOSHI-09MAY01-C43761_1.pep
MRIPNLTKAFILLMAITLMSTQANSLIPYSRSLWDVMLAEDPFKILEQNPVTVPKGSEPVALARADWKETPRYHAITLDIPGMKKEDLKIEVEENRVLRISGERKEEQEIEGEKWHRAERTNGKFWRQFRLPANVDMDRIKAHMEDGVLRISVPKIVDESKKHSKVIDIVQSGGIGEDVKATSHGHH

SEQ ID NO: 63970 - protein, 264 aa, Gossypium hirsutum
  Clone ID: GOSHI-09MAY01-C43721_1.pep
WMYLWDLALRERSLGYIKYILKSSLMKLPVFGWSFQILEFIPVERKWEVDEAKMRQMLSKFKDPRDPLWLVLFPEGTDFTEQKCLRSQKYAAENGLPILKNLLLPKSKGFNACLEDLRSTLDAVYDVTIGYKHRCPSFLDNVFGVDPSEVHIHIRRVTLDDIPLSESEVTSWLMDTFQRKDQLLSNFNSEGYFPLHGAELNLSTVKCLINVMLVLVLTGAFSFLTFFSSIWFKIFVSLSCSYMVSATYLNIRPEPIFNFVKTSL

SEQ ID NO: 63971 - protein, 86 aa, Gossypium hirsutum
  Clone ID: GOSHI-09MAY01-C43191_1.pep
LSFMFGLKESDKEKQGNQRKLLPLLFGSKGKWSSDPISVVPHIYHYNLKCSKINYQSNATSYDSISVVAYHVSVFPIELNEDPPSM

SEQ ID NO: 63972 - protein, 134 aa, Gossypium hirsutum
  Clone ID: GOSHI-09MAY01-C43091_1.pep
KPLVLAVKDDKHVDQEPQSETPLLALQVTNNNSKGCQVNKGNKIHECSICGSEFSSGQALGGHMRRHRAAAATTASNQVVVSVGNGDGIKPRNILSLDLNLPAPEDDLRDSKFQFGAPQQAIVFSTPALVDCHY

SEQ ID NO: 63973 - protein, 89 aa, Gossypium hirsutum
  Clone ID: LIB3148-007-Q1-K1-E10.pep
PRVRPRVRAFGGHMRRHRAAASNQAAVSVDTTSIPIESGNGDGTKPRNILALDLNLPAPEDDLRDAKFQFGAPQQAIVFTTPALIDCHY

SEQ ID NO: 63974 - protein, 137 aa, Gossypium hirsutum
  Clone ID: GOSHI-09MAY01-C43041_1.pep
TSRNKLLYENRNTTSSDISNHINSYVSELKGLDEKILSFDSDRDLKHDEQRTRPTIYFDMAFNQKFFRSASGLIVRAMDGEILASKLILHSDVASSFVAEAGGRRLKLGSRRSGEGKVESSRLKNKKRLFLKTCGRR

SEQ ID NO: 63975 - protein, 63 aa, Gossypium hirsutum
  Clone ID: LIB3148-006-Q1-K1-G2.pep
VSGLIVRAMDGEILASKSVLHFDVASPFETQAFAGLDAIILPSPMGFNACMNLKGGVSSWVQR

SEQ ID NO: 63976 - protein, 75 aa, Gossypium hirsutum
  Clone ID: GOSHI-09MAY01-C43311_1.pep
MPSRCEILCELLIAILIPPLGVCFRHGCCSVEFWICVLLTILGYVPGIIYALYAIVFVDRDEYFDEYRRPLYYSA

SEQ ID NO: 63977 - protein, 90 aa, Gossypium hirsutum
  Clone ID: uC-gsronu33B032b12b1.pep
MPSRCEILCELLIAILIPPLGVCLRHEGRSVEPWICELATALVYKAGIKGAMYRMWQKLLVLSAPQTMLMVPVGFPAGGFQPTWVSNSRL

SEQ ID NO: 63978 - protein, 273 aa, Gossypium hirsutum
  Clone ID: GOSHI-09MAY01-C43301_1.pep
AETNIRPWINVLKEIKKGNERRKWKERVPYAYWRENPSVAPTRKDLMKCNATDKNYWNTLLYVQDWDRESKQGFKHSNVEDQCSHRYKIYTEGWAWSVSEKYILACDSMTLYVRSRFYDFFIRGMLPLQHFWPISENTKCKSLKFAVEWGNIHPKKAQAIGEAAGKFLHEDLKMDNVYDYMFHLLNEYAQLLKFEPTVPPGSVELCSETMACPRTGTWKKLMVESLVMSPSDVTPCGMPPPYEPQELRDFLETKANSTRQVEMWESQYWLSQY

SEQ ID NO: 63979 - protein, 84 aa, Gossypium hirsutum
  Clone ID: GOSHI-09MAY01-C43291_1.pep
LGFAPQLASHTKRQKTLRRNQTKSHTPSTRVRSSRSDLNQCRDSRASNHAVVYGRINTGGLLSLITCKRKKDTVANKQNKYGKK

SEQ ID NO: 63980 - protein, 116 aa, Gossypium hirsutum
  Clone ID: GOSHI-09MAY01-C43241_1.pep
FRRSSIDFSLAFIMSGRGKGGKGLGKGGAKRHRKVLRDNIQGITKPAIRRLARRGGVKRISGLIYEETRGVLKIFLENVIRDAVTYTEHARRKTVTAMDVVYALKRQGRTLYGFGG

SEQ ID NO: 63981 - protein, 68 aa, Gossypium hirsutum
  Clone ID: AI728766.1.pep
MSGRGKGGVKRISGLIYEKTRGVLKIFLENVIRDAVTYTEHARRKTVTAMDVVYALKRQGRTLYGFGG

SEQ ID NO: 63982 - protein, 111 aa, Gossypium hirsutum
  Clone ID: GOSHI-09MAY01-C78911_1.pep
GEQGAKTPEISSSLEPTLEVNEFLDNANPTKKLKLSLNNVMPTGGDNSVKSLSDELLAMDNQVNYFQTPFIDENWNVSMDDFLNGDATQDGGNEMGFWSFDDFPSIDGGIF

SEQ ID NO: 63983 - protein, 115 aa, Gossypium hirsutum
  Clone ID: GOSHI-09MAY01-C78871_1.pep
FTSKLFWFFFDLCIYWMCKKGGSFTNSQSGFYIAGNKIKIYKNFFLKKSAIFSLLFSFCHCCLLFLLVCWSFAGTWSNEGQHVRGAMCGRGVLVRRLAHTHERGLVLYYGTVTAA

SEQ ID NO: 63984 - protein, 237 aa, Gossypium hirsutum
  Clone ID: GOSHI-09MAY01-C78701_1.pep
MTRISRTFGDTMQKEAVPAVSADVIFASTSSRLPSYRIGSNNQIIDAKENPKVLSMKEVVARETALLLEQQQRLSVRDLASKFEKGLAAAAKLSEEAKLREAASLEKHVLLKKLRDALESLKGRVAGRNKDDVVEAIAMVEALAVQLTQREGELIQEKAEVKKLANFLKQASQDAKKLVDEERAFARAEIENARAAVHRVEEALQEHEKMSRATGKHDLEELMNEVQEARRIIMLHQ

SEQ ID NO: 63985 - protein, 165 aa, Gossypium hirsutum
  unsure (1)..(165): unsure at all Xaa locations
  Clone ID: GOSHI-09MAY01-C78091_1.pep
MKNGNSNTKLILLHPYIQKQGSSNRLWLLAFVSFFTIAFLLTLIYTRESITTKTTAPSTTVTGPAGSAIGGPPLPNTVVNTLLHYASKSNDSYHMAYSELKPISDVLRKCSSPCNFLVFGLTHETLLWKSLNHTGRTVFIDENPYYAAYYEXELHPEIDAYHVQY

SEQ ID NO: 63986 - protein, 135 aa, Gossypium hirsutum
  unsure (1)..(135): unsure at all Xaa locations
  Clone ID: AI729456.1.pep
MGRAKMGYYNGNDGPVLHKSWVFKRKKVKLKSGFLREKSETEESERLRSYXYVGRTGSVIXTTSLAGAEFXIRENRSATSFSGPLRASIPPPFYSLPPTPSFPRILPSSPGPFLTKLFPLPPSISRRHLFGPSFT

SEQ ID NO: 63987 - protein, 161 aa, Gossypium hirsutum
  Clone ID: LIB3582-012-P1-K1-C3.pep
ATRPVKLKSGFLREKSETEESERLRSYEYVGRTGSVIPTTSLAGAEVSIKEIRSATSFSGHYPPSIHAPFINSPEPLPNEEAILHQGPYTTDYGTYSNDFRRQLLDEVEIRELLIDHVGHRCCWGSRPARTWKIHAVEDCNVYVGTLETFLEEREVVRETE

SEQ ID NO: 63988 - protein, 93 aa, Gossypium hirsutum
  Clone ID: GOSHI-09MAY01-C78211_1.pep
TQSDRLQPSRPKKTTQQTRLKLDQPNLNQTQTDPPNTNKPEGPNSRGPNDFQIGLETLALPLLSAATRFWKLRAIPRVSSPARHAVPVASSVP

SEQ ID NO: 63989 - protein, 156 aa, Gossypium hirsutum
  Clone ID: GOSHI-09MAY01-C79931_1.pep
MASSLVPLSAPHPSWFTPKRLLVIFCVINMLNYVDRGTIASNGVNGSLGTCTSSGTCTSGSGIQGEFNLNNFEDGVLSSAFMVGLLVASPIFASLAKSVNPFRLIGVGLSVWTLATAGCGFSFNFWSITICPMLVGVGEASFISLAAPFIDDNAPI

SEQ ID NO: 63990 - protein, 177 aa, Gossypium hirsutum
  unsure (1)..(177): unsure at all Xaa locations
  Clone ID: GOSHI-09MAY01-C79881_1.pep
MRGDKGKQIVEEEEDEEEEAEEEEEEAEDWCFVCKDGGNLLLCDHKGCIKAYHPSCIGKKSKVLKSEGSWICHRHSCAECGGPPQFYCLACPDSVCRLCVGAYEFVXIKLDKGLCKTRFELPLLAEKNAEIDSEGEKLDFQDPTTDEYLFKEDFXIIMEQEELTLDDLHHAYSKREN

SEQ ID NO: 63991 - protein, 202 aa, Gossypium hirsutum
  unsure (1)..(202): unsure at all Xaa locations
  Clone ID: GOSHI-09MAY01-C79591_1.pep
FRPRVRIIVRGGGRDKLAAVRINGMVERLQLSQQIRESVYSLFQKXLNQRTSLFFNRHIDQGSVCCFYVVAKISQLRLTFKEIICNYRKQPQCKPQVFQSVFVDRSSARRNGRTGQDNVDIIAFYNEIFVPSIKPLLGELGSAGTTTRTSXVAEANNCNDGSCPGSXPKVSPFPSLPDMSPKKVSATHNVYVSPLRTSKMDA

SEQ ID NO: 63992 - protein, 163 aa, Gossypium hirsutum
  unsure (1)..(163): unsure at all Xaa locations
  Clone ID: LIB3825-034-Q6-K6-C10.pep
XVYSLFQKXLNQRTSLFFNRHIDQIILCCFYVVAKISQLRLTFKEIICNYRKQPQCKPQVFQSVFVDRSSARRNGRTGQDNVDIIAFYNEIFVPSIKPLLGELGSAGTTTRTSRVAEANNSNDGTCPGSPKVSPFPSLPDMSPKKVSATHNVYVSPLRTSKKN

SEQ ID NO: 63993 - protein, 120 aa, Gossypium hirsutum
  Clone ID: GOSHI-09MAY01-C79541_1.pep
PRVRAFGCGHCLQNRGLHPPTPTAGVLGLGKSKASISSQLSSMGVTKNVFGHCLGDNRGFLFFGADFVPKSGMTWTRMLQSSSDKHYSSGPAELLFGGKPTGIKGVNVIFDTGSTYTYLN

SEQ ID NO: 63994 - protein, 163 aa, Gossypium hirsutum
  Clone ID: GOSHI-09MAY01-C79311_1.pep
DLEFGIPSQYSYMTVCAPSCHDCSTLRAWWEEDEERRHRFSKSVIGSDDLPPSQCVPELAHWPPTRPIESPSMWAIFPLQDLLALKEEYMTRPATEETINDPTNPKHYCRYRVHVTMESLIKDKELKTTIKDLIQGTGRSYPHIGEAERQLSQETAALALGKQ

SEQ ID NO: 63995 - protein, 134 aa, Gossypium hirsutum
  Clone ID: LIB3585-059-P1-K1-B4.pep
FNSANLYKQKCFTYMYYSFFLQNAFVICRLFKKQDETIEDINSDEVDPSVLSPTEDMVSELEVPQASPTVKQEAEKACDTSETCFASFRDEVISNAVAPIFEGNSDNHDNYNEIDQVAEISPAEVREQENCILI

SEQ ID NO: 63996 - protein, 47 aa, Gossypium hirsutum
  Clone ID: LIB3829-006-Q6-K6-H9.pep
NGPPLFFFFFFFFFFFFFFFFFFFFFFFFFFFFFFFFFFLIIISWIH

SEQ ID NO: 63997 - protein, 153 aa, Gossypium hirsutum
  unsure (1)..(153): unsure at all Xaa locations
  Clone ID: GOSHI-09MAY01-C74891_1.pep
MALRLVTKNLSGRISPKLCSASLLHSHATSFGFKEVREEEKSQMVGKVFSNVASNYDLMNDFMSGGLHRLWKDRLVSKLSPFPGMKHLDVAGGTGDVAFRILESVNSIKRRAFQDPLNDDLQEETRXYVCDIXPNMLNVGKXRALKKSWRDNL

SEQ ID NO: 63998 - protein, 133 aa, Gossypium hirsutum
  Clone ID: GOSHI-09MAY01-C74411_1.pep
MGQKLSCLENHENDLLSAVQTGDLDMVKAMVEADPVTLKSTTRYGKLSILHVAAIHGQIEILSFLLDRHPNSDILNRHRQTPLMLAAMHGKTDCVKRLIQSGSYVLMFDSLQGRTCLHYAAYYGHFDCLQALL

SEQ ID NO: 63999 - protein, 211 aa, Gossypium hirsutum
  unsure (1)..(211): unsure at all Xaa locations
  Clone ID: GOSHI-09MAY01-C75911_1.pep
GRVGSCNGGLNQMRAAICDMVTIARYLNVTLIVPELDKTSFWADPSEFQDIFDVDHFITSLRDEVRILKELPPRLKRRVEMGFVYSMPPISWSDISYYHNQILPLIRKYKVVHLNRTDARLANNGQSLDVQKLRCRVNFNALRFTPQIEDLGKRVIKLLRQNGPFIVLHLRYEMDMLAFSGCTPGCNNEQXQELTRMRYAYPWWKEKIINS

SEQ ID NO: 64000 - protein, 160 aa, Gossypium hirsutum
  Clone ID: GOSHI-09MAY01-C75871_1.pep
ETSDPENGCQFPFFEELHAVFTERAKTMQRRLLEPEAGSSSTQAKKKVKRTTTERSSDEFSEGEDEDESEEEKPARGTSRKRKKSDSTVVDKSPRPNSGTRTGLQEMLREFFDQQLRMEMQWREMMEKRAQERQLFEQEWQQWMEKLERERVMVEKAWRE

SEQ ID NO: 64001 - protein, 211 aa, Gossypium hirsutum
  unsure (1)..(211): unsure at all Xaa locations
  Clone ID: GOSHI-09MAY01-C75451_1.pep
ARGLRSREGQAQDDGFQAEIETLGKIRHKNIVKLWCSCTTRDCKLLVYEYMPNGSLGDLLHSSKGGLLDWPTRYKIIVDAAEGLSYLHHDCVPPIVHRDVKSNNILLDGDFGARVADFGVAKVVDAAGKGVKSMSVIAGSCGYIAPEYAYTLRVNEKSDIYSFGVVILELVTGRLPIDPEFGEKDLVRWVCTTLDQXKGVDHVLDSKARSM

SEQ ID NO: 64002 - protein, 94 aa, Gossypium hirsutum
  Clone ID: GOSHI-09MAY01-C75461_1.pep
VGYGHLGDGNLHLNVSAPEYDDKILEQIEPYVYEWTSKHRGSISAEHGLGLMKANKIYYSKSTETVQTMASIKKLLDPNGILNPYKVLPHSLNS

SEQ ID NO: 64003 - protein, 82 aa, Gossypium hirsutum
  Clone ID: GOSHI-09MAY01-C75661_1.pep
WLKLMYLTSNTYQSARVQDALLTACKLANVFLVKYYFKDLLISIFCFLKYDYICFICSGTAVSMVMKYADNIVKVRYDPKFM

SEQ ID NO: 64004 - protein, 203 aa, Gossypium hirsutum
  Clone ID: GOSHI-09MAY01-C75061_1.pep
MEIPVINRISDFEASISTLNNPSFLSQVYALSGIDKIYQAYHFWKWGALILALLASLSTIINRLKILVIRFRRNHSLPSRPLLYDTDFDTDSETSSCSSSDNEVEYEEPSASQNWRQVDEDFRVRGSGHFIDDQWRNSGSTLRKRRSSIGDLFSWAEELTSGKSVVKLWDNLGLGFRLDLDESDNVLNVYDINKETKIRSIFG

SEQ ID NO: 64005 - protein, 94 aa, Gossypium hirsutum
  Clone ID: GOSHI-09MAY01-C76871_1.pep
MISRKNMGSASPLLLITLVLGVCFATYNLVTMVMHNRSISKLTIYNSDGGIFVDPIIEMPESVRKLKRAKMPFHVALTATDAPYSKWQWRIMYY

SEQ ID NO: 64006 - protein, 120 aa, Gossypium hirsutum
  Clone ID: GOSHI-09MAY01-C76831_1.pep
ENLHLRSTTFMATKILASSSHSFENECKEIHESRGRWNHLIRALVTRTQLECRGIRETYRDMYGEDLITLLQKSSLRNQPGVSPKTCAAVSLWMLHPHERDAIGAREALLQDNDSNYQSL

SEQ ID NO: 64007 - protein, 82 aa, Gossypium hirsutum
  Clone ID: LIB3493-023-P1-M1-E4.pep
FMRMKHPKGQGCARFGGNTRLISKARFLQQSNQIFPIHVPVSLSDSPAFELSPSDQSSNQEASFSRYRQFHGISLGRIRYLL

SEQ ID NO: 64008 - protein, 199 aa, Gossypium hirsutum
  Clone ID: GOSHI-09MAY01-C76571_1.pep
DYPILQGHRIEHSHGNWLMPPPTSSHHESNPVQSRDLMPKTSFVQGHENGKYREGNCKLFGIPLIRNSVASEPTVSRMQAASRQVLEFESAQNSEKMKALQLAEAEDLSNYNEQEIQPHTREIQSKPSSASTRSCTKVHKQGIALGRSEDLTKFNDYDELDAELDGLFESKGELMAPKMNWLAVYTDDEGDMMLVGDDP

SEQ ID NO: 64009 - protein, 310 aa, Gossypium hirsutum
  unsure (1)..(310): unsure at all Xaa locations
  Clone ID: GOSHI-09MAY01-C76471_1.pep
RKQYELRWLELTQAEVYSPRSLQVWRALLNWLAFFYQIFAQIIRAVGQYPLLSSSSSSSITSTSTHRFKPLPVADSTRTESRATVEIAAVLDSPDEDRIEKLTVVLDLDETLVCAYETSSLPPSLRNQAMDAGLKWFELECVSSDKECEGKPKINYVTVFERPGLQDFLNQLSEFAELVLFTAGLEGYARPRVDRIDAENRVSLRLYRPSTVSXTEYREHVKDLTCISKDLCPTGIVDNNPFSFLLQPVNGIPCIPFSAGRPHDTQLLGVLLPLLKHLSQEKDVRPVLYDRFRMPEWFQKQGIPSSCWAL

SEQ ID NO: 64010 - protein, 185 aa, Gossypium hirsutum
  Clone ID: GOSHI-09MAY01-C76141_1.pep
MEHPKDLCPGTSAIVFLLLTGLLYLCVWSPSNPLLPFHEPGGAPKNYTGVEFLVKDELDLALEEASMPNKTVIIAVVNRAYVEQSVNAETTMLDLFLESFWVGEDTRALLEHLLLVTVDQTAYDRCMFKRLHCYRLVTEGVDFGEEKVYMARDFVKMMWRRTLFLLDVLRRGYSFIFTDTDVMWL

SEQ ID NO: 64011 - protein, 106 aa, Gossypium hirsutum
  Clone ID: uC-gsflnu33B002h10b1.pep
NHRSMEHPKDLCPGTSAIVFLLLTGLLYLCVWTPSNPLLPFHEPNGSPKNYTGVEFLVKDELDLALEEASMPYKTVIIAVVNRAYVEQSVNAETIMLDLFLESFWV

SEQ ID NO: 64012 - protein, 243 aa, Gossypium hirsutum
  Clone ID: GOSHI-09MAY01-C76161_1.pep
REHQGLELIHLLTAGVEAIGSKNIAAINHYIAKLGDLASPRGSAISRLTAYYTEALTLRVTRLWPHIFHITTPRELDRVDDDNGTALRLLNQVSPIPKFFHFTSNEILLRAFEGKDRVHIIDFDIKQGLQWPSLFQSLASRANPPSHVRVTGIGESKQELNETGDRLSGFAEALNLPFEFHPVVDRLEDVRLWMLHVKEKETVAVNGVFQLHKTLYDGNGGALKDLLGLIRSTNPAVLSWQNK

SEQ ID NO: 64013 - protein, 132 aa, Gossypium hirsutum
  Clone ID: GOSHI-09MAY01-C76091_1.pep
MEGEKRYISAEELKEHNKSGDLWISIQGKVYDVSEWAKEHPGGEIPLLNLAGQDVTDAFLAYHPGTAWQYLDKLFTGYHLKNFEVSEVSKDYTRLVSEFAKPRMFEKIGHVPLFSLTAVALLFLVVLYGVSR

SEQ ID NO: 64014 - protein, 172 aa, Gossypium hirsutum
  Clone ID: GOSHI-09MAY01-C76071_1.pep
QNPLNILSSFEKVVPPSFLELGLVDLVSIYSELCALGKPPPVIDAADLQQNPEDTLRGLCKDLDIPFHDAMLRWEAGPKPIDGLWAPWWYKSVHNSTHFASPRKYPRPFPFSFYDLLEQSLPFYNLLKRNVRQTSSLLRSPLPVPDLPVPENAKLLAWVGDEIAPRESAKGS

SEQ ID NO: 64015 - protein, 221 aa, Gossypium hirsutum
  Clone ID: GOSHI-09MAY01-C76291_1.pep
GLLGLGRGRLSFPTQAGRRSSRKFSYCLVDRSASSNPSSMIFGDAAIPRTAVFTPLLTNPKLDTFYYVELLGISVGGTRVRGITPSLFKMDPAGNGGVIIDSGTSVTRLTRPAYIAMRDAFRIRASNLKRAPDFSLFDTCFDLSGKTSVKVPTVVLHFRGADVSLPATNYLIPVDSSGTFCFAFAGTMSGLSIIGNIQQQSFRVAFDSAGSRIGFAPRGCA

SEQ ID NO: 64016 - protein, 100 aa, Gossypium hirsutum
  unsure (1)..(100): unsure at all Xaa locations
  Clone ID: LIB3493-015-P1-M1-H10.pep
SNKLAQTAMIKQILKRCSSLGKKQSYGEEQGLPLDVPKGHXVVYVGENRSRYIVPISFLTRPEFQSSLHQAEEEFGFDHDMGLTIPCEEVLFQSLTSMLR

SEQ ID NO: 64017 - protein, 86 aa, Gossypium hirsutum
  Clone ID: uC-gsronu33B039g10b1.pep
LISYLQSQKRMAISRKSNKLAQTAMIKQILKRCSSLGKKQSYSCEQGLLLYVPNVSFFILIPLYLFPYFLLFFFFFSSFFLSFFFL

SEQ ID NO: 64018 - protein, 60 aa, Gossypium hirsutum
  Clone ID: GOSHI-09MAY01-C76261_1.pep
CRTDQCFLNKSVPRYSVMDGCMHRNMEQGHSIRRNSTCDLLCLLHHLQFLDRSQKTYIES

SEQ ID NO: 64019 - protein, 154 aa, Gossypium hirsutum
  Clone ID: AI055412.1.pep
MTITLTIVFFPPQFHHSLVPPSADLHGHWNRCKLDPAACSAYQISVLQGLRRDMLVALYPSYKNSRRDGMFINSCFAHCQSESQDTWFAVDSSRIHNKTIAEAVGDWYFGRKITKEIDCPYPCDKTCHNLIPLPQVVMLPLPTGYILPDRAAFW

SEQ ID NO: 64020 - protein, 126 aa, Gossypium hirsutum
  Clone ID: LIB3585-027-P1-K1-B11.pep
FHHSLVPPSADLHGHWNRCKLDPAACSAYQISVLQGLRRDMLVALYAFYKNSRRDGMFLNSCFAHCQSESQDTWFAVDSPRIHNKTIAEAVGDWYFSRKITKEIDCPYPCDKTCHNLIPSPQVSLR

SEQ ID NO: 64021 - protein, 180 aa, Gossypium hirsutum
  Clone ID: GOSHI-09MAY01-C77751_1.pep
TVFIDENRYYSADYEELHPGIDAYDVQYTTKISETRELITSAKEQIRNECRPVQNLLFSECKLGINDLPNHVYEVDWDLILIDGPRGDGPDGPGRMQPIFTSGVLARSKKGGNPKTHIFVHDYYRDVEKMSGDEFLCKENLGEYNDTLAHFVVERMEENSFQYCRNSNHNITSTKASSSS

SEQ ID NO: 64022 - protein, 210 aa, Gossypium hirsutum
  unsure (1)..(210): unsure at all Xaa locations
  Clone ID: GOSHI-09MAY01-C77151_1.pep
MVKGGQNLPADVIQVIDQLERHCLSPDGSLISKSAYYDLQLAREEMSRERLRYLEAMAIYCEAMAMVEEYQQAVSVANLGGIRDIRGFYPQLGLKNSPQVYEXTLEHPLVVAEPAQRLRLPLISKDGEIHEEEIEKWSIISRSSLDSTSTSLTISSSSNSLNYANSAATSGTAANNTGDSGEPGVGGVPNRFLGITPAYLWQTQLQRVPL

SEQ ID NO: 64023 - protein, 155 aa, Gossypium hirsutum
  unsure (1)..(155): unsure at all Xaa locations
  Clone ID: GOSHI-09MAY01-C77121_1.pep
ASFIPHHKKSFVTTLMEAATLRSPFKEDTYFIXSVKSSEKKSLQELKDKLTASLGPGGQCTMWGIPLLSDDEKADVILLKFLRARDFKVSDSFHMLEKCLAWRKEFKADSVTEEELGLEELEAVVAYMHGYDREGHPVCYNAYGGFRDKDMCERM

SEQ ID NO: 64024 - protein, 138 aa, Gossypium hirsutum
  Clone ID: GOSHI-09MAY01-C77331_1.pep
LTRGFIGILSEINAFTRRAKVTVICALPARAEATAVNESSRSCMSRRMHEIVYQMISAIGYHRELEPGMLVYEKSDNVGFRSCHFQLEKPPSNAKCTWDHSNSCNSIVFNIQASSLLYRARHCCCSEIDYQAVSLHKP

SEQ ID NO: 64025 - protein, 297 aa, Gossypium hirsutum
  Clone ID: GOSHI-09MAY01-C70861_1.pep
MGSASIDPVLLDDIICRLLEFKQARPGKQVQLMEGEIRQLCTVAREIFLQQPNLLELEAPIKICGDIHGQYADLLRLFEYGGFPPKANYLFLGDYVDRGKQSLETICLLLAYKIKYPENFFLLRGNHECASINRIYGFYDECKRRFNVRLWKTFTDCFNCLPVAALIDDKILCMHGGLSPDLTNLDQIRSITRPTDVPDSGLLCDLLWSDPGRDIKGWGMNDRGVSFTYGPDRVSDFLMKNDMDLVCRAHQVVEDGYEFFADRQLVTIFPAPNYCGEFDNAGAMMSVDESLMCSFQI

SEQ ID NO: 64026 - protein, 182 aa, Gossypium hirsutum
  Clone ID: GOSHI-09MAY01-C70561_1.pep
MLKLCSCNVTDQIQASVQCRFPGSPGPFAFRRRSPVSVSCSPLSRLKLTPVQAVLSSQQKEVAKVVKSGSGSLADLLRLGSLAEDGLSYNEKYIVRCYEVGINKTATIETLANLLQEIGSNHAQSLGFSTDGFATTPTMRKMHLIWVTARMHIEIYKYPAWSDVVEILTGCHSGGRIGTRRD

SEQ ID NO: 64027 - protein, 160 aa, Gossypium hirsutum
  unsure (1)..(160): unsure at all Xaa locations
  Clone ID: GOSHI-09MAY01-C70401_1.pep
TASSALNLLISSGYFPVHVNRDLLKXNILTDHSDEIIAAAESLLSDSSDSHEMNREDLTHLKGYAIDVDEADELDDALSASKLQDGRMKMWIHVADPARYVEPGSMVDREALTRGTSVFLPTGTYPMFPEKLAMEGMSLKQGELCNAVSVSVILHSDGSI

SEQ ID NO: 64028 - protein, 91 aa, Gossypium hirsutum
  Clone ID: GOSHI-09MAY01-C70701_1.pep
RTRGRTRGRTRGFLCCLVNPKTLPSTLTRHRELRSARSNSKGVVFGLEIPFRFRFQRNEGETMANSRGNLLFRFLFSVFMIDFKIKKKIEA

SEQ ID NO: 64029 - protein, 76 aa, Gossypium hirsutum
  Clone ID: GOSHI-09MAY01-C70121_1.pep
SCIFELLMIMIVRKYFMKIWHWKSLLNLRNKLGYKGHVIEVTLIWLRAMILALRCARFPSIQFLFQIVQRVYRKYE

SEQ ID NO: 64030 - protein, 86 aa, Gossypium hirsutum
  Clone ID: LIB3829-030-Q6-K6-G2.pep
GISNSFRSCFTRIQISHNMEFFFFLYFFHVKIDSLSFNPIFYSASNSFSTIFSVFSKLHYCSNSNLSRLNYSFMIIVHKINITSFV

SEQ ID NO: 64031 - protein, 299 aa, Gossypium hirsutum
  unsure (1)..(299): unsure at all Xaa locations
  Clone ID: GOSHI-09MAY01-C70091_1.pep
MVAKGRQNGTGSAKVEVGEIDTSAPFQSVKDAVTLFGEGAFSGEKPAXKKSKAYSAERIVAKETQLHVAQKELNKLKEQLENAKTTKTQALAELEKAKSMVEELTCKLKTINESKDSAIKATEAAKSQAKQIEEANSDILPGPDDARSQDLETSREQYMAVIXRLGAAKQGLRKLHQDCDASLEAKITAINLMLEAKHSAKANIEKIGELSKQISSLQGSIGQVKLASLEAQQEQAKFFAEKDTQRELYKATIEDSRKKLLALKNEFDPELTRNLEAQLLETVNQIGDLQKQMENAKAS

SEQ ID NO: 64032 - protein, 293 aa, Gossypium hirsutum
  unsure (1)..(293): unsure at all Xaa locations
  Clone ID: GOSHI-09MAY01-C70391_1.pep
PVDPASALITMMLPQNSQANDGGASVDSSNPSESAGIPGRVFSPSXVSGMQWRPGSSFQNQNDPGQFRGRTEIAPDMREKYLQRLQQVQQQGHSNLLGVPPLAGGNLKQFSAQQAPLMRQFNSQSSSLSIQSGLGLGGQASGFNSVTAASLQQQQNPIQQQSSQQALATNVPKDGDIGNAKVEEQQPRNLPDDSSSEAVPTSGLAKNLMNEDEMKTQYAIDSPAAVSGSLTEPAQVIRDVDLSPGQPLQSNQSSSVLGVIGRRSVTDFGAIGDNLSGSMNTGGMHDQLYNLQM

SEQ ID NO: 64033 - protein, 335 aa, Gossypium hirsutum
  unsure (1)..(335): unsure at all Xaa locations
  Clone ID: GOSHI-09MAY01-C71981_1.pep
MPATDAELDLPPSQSAFSIGEYTFADAGNLDHCTKYLNQTLVTFGFPASLDLFANDPVSVARTCNCIYSLLQQRQRDIEFRESANEQRQRLLSDISRLEAKVERLDAQLQAKDREIATMTRTEAKNTAAFKAQIEKLQQERDEFQRMVIGNQQVRTQQIHEMKKKEKEYIKLQERLNQVLMEKKKESRSGMEIMNLLQKEGRQRGTWNGKKADNDFYKKIVDAYEAKNQELKAENADLRALLRSMQVDMRDFFNAPNGLPKQSLPVSERHENDPSQSPLGGXTDVFDLPFHMARDQIEESLRTKMASVKERMVQLQDAQKGAEVTSEATERELEL

SEQ ID NO: 64034 - protein, 57 aa, Gossypium hirsutum
  Clone ID: GOSHI-09MAY01-C71911_1.pep
DICVKAWHDMTARNKSFDVCHEYVAEQGRELYELVAHLPDKANNYLTPALSVLEKNT

SEQ ID NO: 64035 - protein, 159 aa, Gossypium hirsutum
  Clone ID: GOSHI-09MAY01-C71851_1.pep
MSVKTHRWINPHQILSSLTIFFVITIFVYPINSLESRRLDDSTVPGDQGIKRTPSCIQSPPPPSLPPPCPPPPSPPALPPPRPKKPPTQYCPPPPILPSPSSFIYIPDSPGNVYSIDQNFGGATGMSLWGYWVWFVDFLSFSLFEVCKVLGSCAKSWIY

SEQ ID NO: 64036 - protein, 124 aa, Gossypium hirsutum
  unsure (1)..(124): unsure at all Xaa locations
  Clone ID: GOSHI-09MAY01-C71591_1.pep
MAAPKPEEISFPPMDQLQGLEYXCIDSNPSWGEXAIALGFQHYILALGTAVMIPSFLVPLMGGTDGDKVRVVQALLFVEGINTLLQTLFGTRLPTVIGGSYAFMVPIISIIHDTSLMSIEDNHV

SEQ ID NO: 64037 - protein, 191 aa, Gossypium hirsutum
  unsure (1)..(191): unsure at all Xaa locations
  Clone ID: GOSHI-09MAY01-C71481_1.pep
GYKEQYHPKCDVCNHFISTNPAGLMEYRAHAFWMQKYCPSHEHDGTPRCCSCERMEPHDTGYVALNDGRKLCLECLDSAVMDTKQCQPLYLDIQEFYESLDMKVEQQVPLLLVERQALNDAREGEKNGHYHMPETRGLCLSXEQTVSTIRRRPRLGTGNRSMDMITEPYKLTRXCDVTAILILYGLAKVID

SEQ ID NO: 64038 - protein, 167 aa, Gossypium hirsutum
  unsure (1)..(167): unsure at all Xaa locations
  Clone ID: GOSHI-09MAY01-C71751_1.pep
IELTSPSWETSYSIYLVTGSDLFSRKTFANLGCSEYMIKSLKQQLFLRPSHIQAKAFGPVIEGQSCIIADQSGSGKTLAYLAPLVQRLREEELQGVSKSSSGSPRAVIIVPTAELASQVLNSCRSLSKFGVPFRSMVVTGGFRQKTQLENLEXQSVDVLIATPGRFM

SEQ ID NO: 64039 - protein, 75 aa, Gossypium hirsutum
  Clone ID: GOSHI-09MAY01-C71651_1.pep
AWDRNMYELRFINSLRYSLQYSTCSYGLGLLLCISIWIENKVLRKDVKWGQFLKILFCFWVFSWLLILEPNLLGV

SEQ ID NO: 64040 - protein, 117 aa, Gossypium hirsutum
  Clone ID: GOSHI-09MAY01-C71391_1.pep
MNNQYGEDQDEATVIGFEVPRSPDSSYNNAYPGNEDDARDPPVVPPHLHHSLLSYPTSMNTSGNLPLPENVILNHLYIENREAPRSVVALGFTHRFRSKYVTVVLYKPVPRRGSSHT

SEQ ID NO: 64041 - protein, 220 aa, Gossypium hirsutum
  unsure (1)..(220): unsure at all Xaa locations
  Clone ID: GOSHI-09MAY01-C71311_1.pep
PRVRPRVRKQSLVNAAGKDLFGGLYASWCHSPMAIISLCLLAQTYQHACAVIQSLVEEDINAKFLVQLDKLIRLLETPVFAYLRLQLLERXQYIWLLKALYGLLMLLPQQSSAFKVLRRRLKTVPSYSFGGGNLKRAASGNPHSQILHHSGLQITEDGDIDQDXELQSGINFASLQQFKXMQQQHHMLAKSRAQSRNSSTSILRRPKVEPLQPSTLGTNK

SEQ ID NO: 64042 - protein, 247 aa, Gossypium hirsutum
  unsure (1)..(247): unsure at all Xaa locations
  Clone ID: GOSHI-09MAY01-C71281_1.pep
LIWVATAGSENGGQLGHEFRGLALRLANPGELTRLSGLVNNLISLGLGREAAFAAAVLGDNALMEKAWQDTGMLAEAVLHAHAHGRPTLKNLVEAWNKVLQKEVEHTPSAKTDATAAFLASLEEPKLTSLSEAGKKPPIEILPPGMSALSASITVKKKPAPVTQTSQPQSKPLALEAPPTGPASAAVPGTPIGAPPSDAPDATPGTPIGAAXSDAPAVAATGAAPASEASEPALVEEAPNSSTGSNP

SEQ ID NO: 64043 - protein, 185 aa, Gossypium hirsutum
  unsure (1)..(185): unsure at all Xaa locations
  Clone ID: GOSHI-09MAY01-C72591_1.pep
MSYAYLFKYIIIGDTGVGKSCLLLQFTDKRFQPVHDLTIGVEFGARLIAIDNNPIKLQIWDTAGQESFRSITRAYYRGAAGALLVYDITRRETFNHLTSWLEDARQHANANMTVMLIGNKCDLAHKRXVSTKEGEQFAKEHGLVFMEASAKTAQNVEEAFISTAAKIYKKIQDGVIDISNESYGI

SEQ ID NO: 64044 - protein, 170 aa, Gossypium hirsutum
  Clone ID: GOSHI-09MAY01-C72491_1.pep
LDETSFTIHFPAQGETSVVKAWLLRPSLMWKDGNWVEWSSCGDNDGSSHEGDTPLEKRPRICSPVIENKEDSTKCFDSKESEKPDNTRLLDLTAGEKIFNIGKSTRDESKPGSLRMKRSGLKKEGSRVIFGVPKPGKKRKFMEVSKHYVADRSSRTLGTSDSAKFTKHSM

SEQ ID NO: 64045 - protein, 234 aa, Gossypium hirsutum
  Clone ID: GOSHI-09MAY01-C72721_1.pep
VLSWNELTGELPRTVSAQLLHLDLKKNKISGPLPRLPSTVRYLSVSENWMWGPLKALESLSELAYLDVSMNQFSGPIPASLFLNPSLTSLFLQRNNLSGGLPSSIKMDPTFQSYGGKGSIVDLSHNFITGDITPFLAGVETLFLNNNHLTGSVPEEYVKSVYDGTTKTLYLQHNYLSGFPLPQGSTLPDTVSLCLSYNCMVPPVGISACPASAGSQPSRPQSQCSVFTHRGSTN

SEQ ID NO: 64046 - protein, 185 aa, Gossypium hirsutum
  Clone ID: GOSHI-09MAY01-C72161_1.pep
MSKIDNNNAPWHRLRRASTPGKATVLAIGKAFPRQLIPQEYLVEGYIRDTNCQDVSIKEKLERLCKTTTVKTRYTVMCKEILDQYPELATEGSSTIRQRLEIANPAVVEMAFEASLACIEEWGRPATDITHIIYVSSSEIRLPGGDLYLASELGLRNDVSRVMLYFLGCYGGATGLRVAKDIAEN

SEQ ID NO: 64047 - protein, 167 aa, Gossypium hirsutum
  Clone ID: GOSHI-09MAY01-C72101_1.pep
FDASIFGDVLPIGWKLLLGLKRKEGRASVYCRRYISPGGRHFISCKEVAAFLQSCFGLHDAPLTMDNDGDIAQHIYQMAPEIEGAIQKGDDQRRTERGKELNLLGMDNLAEVQIHDLFECHKCNMTFDEKDAYLQHPLSFHQRTTRRYRLGSSVGDGVILRDGKFEC

SEQ ID NO: 64048 - protein, 190 aa, Gossypium hirsutum
  Clone ID: GOSHI-09MAY01-C72251_1.pep
MSSSSVSFSSDHLSPADQLCYVHCNFCDTVLAVSVPCSSLFNNTVMVRCGHCTNLLSVDMRGLLLPTANQLHLAHSFFTPQNLLEEIRSCAPPNMVMINHPNPNDTVIRGAAELEEIAKPPVVNRPPEKRQRVPSAYNRFIKEEIQRIKAGNPDISHRDAFSAAAKNWAHFPRIHFGQMPDQAVMKMKNN

SEQ ID NO: 64049 - protein, 181 aa, Gossypium hirsutum
  Clone ID: GOSHI-09MAY01-C73981_2.pep
AVLKHFEWPEQKADVLREAAFGYCDLKKLESEAASIRDDARQPCGPALKKMQALLEKLEHGVYNLSRMRESATKRYKGFQIPMDWMLETGIVSQIKLASVKLAVEYMRRISSELEAVGTGGPEEEELIVQGVRFAFRVHQFAGGFDVETMRAFEELRDKARSCNVQCQNQQKFICRSTTTS

SEQ ID NO: 64050 - protein, 296 aa, Gossypium hirsutum
  unsure (1)..(296): unsure at all Xaa locations
  Clone ID: GOSHI-09MAY01-C73981_1.pep
PTRPAIVAKVRRVPEVVEFYHSLMRRDSKREAAGGCSAPEVLPATANARDMIGEIENRSSYLLAIKTDVETQGEFIRFLIKEVENAAFTDIEDVVPFVKWLDDELSYLVDERAVLKHFEWPEQKADVLREAAFGYCDLKKLESEAASIRDDARQPCGPALKKMQALLEKLAXEHGVYNLSRMRESATKRYKGFQIPMDWMLETGIVSQIKLASVKLAMKYMRRISSEXLEAVGTGGPEEEELIVQGVRFAFRVHQFAGGFDVETMRAFEELRDKARSCNVQCQNQQKFICRSTTTS

SEQ ID NO: 64051 - protein, 246 aa, Gossypium hirsutum
  Clone ID: GOSHI-09MAY01-C73671_1.pep
FLLINLFSIETRVSYKIPISCLQKSLEIPLGNLTSTSDGWRNPPPFFDQQTEAGSDKQPKLLCPLCRGEIYGWSVVEAAREFMNSKPRSCSSETCDFTGTYGELRKHARSAHPLVRPTEVDPERQRDWSRLERERDYEDMLSSIQPVAREESNGESISNLEDFRSWLTINLAYLTLALEFISDSRNNEHDRFRRRPRNRRFTYDRSLIMVQGRIIVPHQTEHSLATATILHQKREFQVDIVAHREF

SEQ ID NO: 64052 - protein, 133 aa, Gossypium hirsutum
  Clone ID: LIB3585-057-P1-K1-F12.pep
MPKDRRVGSFFFERSRVSPYPCSSRGRDAKQCQHEDPLELGFGLEDVKEWEDARCPICMEHPHNAVLLRCSSFEKGCRPFMCNTSYRHSNCLDQFCKSSVSSPSTAMLQEIPLGNLTSTSDGWRNPLPFFDQQ

SEQ ID NO: 64053 - protein, 198 aa, Gossypium hirsutum
  Clone ID: GOSHI-09MAY01-C73621_1.pep
KAWLYDNMGARVHIDAPGLACTTIAYSADNKRLFSCGTNKNGESFLVEWNESEGDAKRTYQGLCENSSAVVQFSPIKRVVLAAADDHVIKIWDGDKVEQSTIIDAGDLPANPHIRFNKDGTLLAAIASKNKIKILATAYGLQLLNASVTGFVNSSSDVSDGPRKHVINSSLSVANYGEADAHEPTHVINPSVAKFRRS

SEQ ID NO: 64054 - protein, 107 aa, Gossypium hirsutum
  unsure (1)..(107): unsure at all Xaa locations
  Clone ID: GOSHI-09MAY01-C73141_1.pep
MASNLSESQSFGLTSIAEEEARWRCVLVLVTLSLLNSLKETNYTITKDEDYDGKGVSRRALQRACDEIYVVAEGETLHSISDKWWDPFIVEHNPHIHDPXDDVFPRT

SEQ ID NO: 64055 - protein, 101 aa, Gossypium hirsutum
  Clone ID: GOSHI-09MAY01-C68861_2.pep
RSVTPNPQYSLSLPPFCFCYIFSSSPCLLDHDPTVHNERLSFCLFPLLLVLQILRSTFASLLSFSVFSFPFDFSSVIPQIYSLRLPHLRFSVSCVFPKTKS

SEQ ID NO: 64056 - protein, 139 aa, Gossypium hirsutum
  unsure (1)..(139): unsure at all Xaa locations
  Clone ID: AI730608.1.pep
MAVTVSYVALTCAGETLASMFLSALVNNHLVALNSFTLLVANKPGIKGDHSQNQPKLKDADGEDNDDGNDDGDDGGGEFGDGEKYXSSEGGDYGNNGNSEKNNPXTGLGGGATGAEXNGEDEDXDDGDGEDPDDDDDDD

SEQ ID NO: 64057 - protein, 80 aa, Gossypium hirsutum
  Clone ID: LIB3189-032-P1-K1-G1.pep
VIPKTDKLIFTRHNFAPARSARRSRLALDVSVVAVEYLRCTQYAGGYRKLQAASMHLLIGAYYVSAGSGYDDTAGMEHHA

SEQ ID NO: 64058 - protein, 268 aa, Gossypium hirsutum
  Clone ID: GOSHI-09MAY01-C68471_1.pep
FAKVVKGRLKEDSARKYFHQLVSSVDFCHSRGVYHRDLKPENLLLDENDNLKVSDFGLSALPEQLRNDGLLHTQCGTPSYVAPEVLRKNGYDGAKADIWSCGVVLFVLLTGFLPFQAGNVMHMYRKIFKAEYEFPPWVSNDARRLISKLLVADPDKRISVPGIFGNPWFRKGFSKTMSSLVEHENGDKNGIESNRELEMVTTKSSPPPFYNAFELISSMSSGFDLSNLFEDERKPASLFTFKCSASVTLARVVSTAKKLKFRVLATKE

SEQ ID NO: 64059 - protein, 155 aa, Gossypium hirsutum
  Clone ID: LIB3189-031-P1-K1-C10.pep
ASIDNNAPNYSNYEWGSDVNAGTTVGYNNYVNYDQSSVDQNSGNYGNNDQNIGSYANYADYSSYQSSSDPNIGGVDAATSYGSYESYGNYHVQYENNWGDGSTTASMLPETTGIADFGVKIKGKRGRNDLPVEIVEVKQDDLTKNRPREDQVKMT

SEQ ID NO: 64060 - protein, 52 aa, Gossypium hirsutum
  Clone ID: LIB3189-031-P1-K1-C4.pep
KSFYSERYSIDSYYNQHNLHNYQYFDHCLDSVVYLEKSVNEIKLVTVIQIYK

SEQ ID NO: 64061 - protein, 77 aa, Gossypium hirsutum
  Clone ID: GOSHI-09MAY01-C68761_1.pep
DRLTYLATSVNRKITAKHKQKMNDIVASHWLSQGPVEVTVQHQTSTLSLCQHLTKTLISKLAGITTVADELHLQFIN

SEQ ID NO: 64062 - protein, 49 aa, Gossypium hirsutum
  Clone ID: LIB3189-030-P1-K1-A9.pep
GVGTEVALKSYVSLLPFSALVIVQFLSSFSNISCFCSSFLIVFFLFFFI

SEQ ID NO: 64063 - protein, 83 aa, Gossypium hirsutum
  Clone ID: GOSHI-09MAY01-C68661_1.pep
AVKRTLEILVALGTFALKLFLDQKNETLDQNKRKRAAELRTIFTRLGPTFIKLGQGLSTRPDLCPPEYLEELAQLQVFLYFMA

SEQ ID NO: 64064 - protein, 153 aa, Gossypium hirsutum
  Clone ID: LIB3828-031-Q6-K6-D8.pep
HIPPFFGFIESIGWRGESSCSGSHESCCFSWGSFLLLGAGKGFPISKPKGYKFGPRAALVEATPRVNGSPSSTSIQVLATDRAEELKAEARALARAADASVYSPQLLAKKYGSRPVKAVKRTLEILVALGTFALKLFLDQKNGTLDQNKRKRA

SEQ ID NO: 64065 - protein, 186 aa, Gossypium hirsutum
  unsure (1)..(186): unsure at all Xaa locations
  Clone ID: GOSHI-09MAY01-C68191_1.pep
QGERPEAPEPEPEPTTEVLFLCSYEGCGKTFIDAGALRKHSHIHGXERQYVCHWEGCGKKFLDSSKLKRHFLIHTGERDFICPHEGCGKAFSLDFNLRSHMKTHSQENYHICPYPDCGKRYAHEYKLKNHIASHHEKNTTPEVAKYAPPLEKIVKTPKPTGGAYGSASSDRPYARPYEGCEKAYIH

SEQ ID NO: 64066 - protein, 297 aa, Gossypium hirsutum
  Clone ID: GOSHI-09MAY01-C68091_1.pep
MMETLPVGRFQFKRLVAAFLSSYRTLFILLWIVAFGSVFIWQRKIIGAGISVSVKTGLSRPMPKMRPLAFNLTDFGGVGDGKTLNTAAFERAVLAISKLGKRGGGGQLNVPPGKWLTAPFNLTSHMTLFLAEDAEILGIQDEKQWPLMPPLPSYGYGREHHGPRYGSLIHGQNLKDVVITGDNGTINGQGQSWWKKFRQKLLNHTRGPLMQIMWSSDIVIANITLRDSTYWTFHLYDCKNVTVRNVTILAPVREAPNTDGIDPDSCEDVVIEDCYISVGDDAIAIKSGWDQYGIAYA

SEQ ID NO: 64067 - protein, 119 aa, Gossypium hirsutum
  Clone ID: GOSHI-09MAY01-C69961_1.pep
IRRMKRLVVDVHSFLRILILSGTSLYDCTFSTALRNGNGLAAIELLLSALGLLRASSMLRDEAANSCIGSIKVERPHSRGHQSQIDSLPLGDLNQAVRRLKQRLLFSAFFFISTSSACG

SEQ ID NO: 64068 - protein, 199 aa, Gossypium hirsutum
  Clone ID: GOSHI-09MAY01-C69891_1.pep
TLKQNVEALLEGLLEARQELRPLLLKSTGRLKDLLFLDIALDSTVRTAIERGYEELNNARPEKIMHFITLVLENLALSSDDNEDLVYCLKGWHHSISMCKSKSAHWALYAKSVLDRTRLALASKAETYQRILQPSAEYLGSLLGVDQWAINIFTEEIIRAGSAATLSSLINRLDPVLRETAHLGSWQVISPVEVVGYVE

SEQ ID NO: 64069 - protein, 276 aa, Gossypium hirsutum
  unsure (1)..(276): unsure at all Xaa locations
  Clone ID: GOSHI-09MAY01-C69691_1.pep
SAHASATGHTVLHSLSLFLVGFSGVGLLGCFAQISGYAGIYYSSPTLATAMLNLIPGLTFILAVAFRMETLNLRSSTSQAKSLGTIVSIAGAFIVTFYKGPSLLMAPSHSSSPHLLLGQQSNWVIGGFLLAADCVFASAWLIVQASVLKKFPAELFVVFYYCFFVTLQSGIICLIMGGDLSAWSFKPDVRLGAVIYSAVFGSAFQLGVSTWCMHRTGPVFVSMFKPLGIVVSVVIGVIFLGDTSFLXSLVGAIVIVTGFYSIMWGKAKERELDVQT

SEQ ID NO: 64070 - protein, 108 aa, Gossypium hirsutum
  Clone ID: GOSHI-09MAY01-C69671_1.pep
IQKPLYYKDFEQSKAKKKNQQNKETTKNRLKKFKRCSSLFLFSFISFPFSKIVLIQTEKGGIFENKKTQSSKYKNPIEIEIKKENKKVIFIASLRAFYFIYSFIFLSF

SEQ ID NO: 64071 - protein, 122 aa, Gossypium hirsutum
  unsure (1)..(122): unsure at all Xaa locations
  Clone ID: GOSHI-09MAY01-C69151_1.pep
MSSGEKSLRNFQLHLPHLHHHCHHHHQGKKQTRDVPKGYLAIMVGSQGEERQRFVVPVMYFNHPLFMRLLKEAEEEYGFXPKGTITIPCHVEEFRNIRGLIDKEKYFHHHHHHHHHVGCFRV

SEQ ID NO: 64072 - protein, 133 aa, Gossypium hirsutum
  unsure (1)..(133): unsure at all Xaa locations
  Clone ID: LIB3189-039-P1-K1-G9.pep
AGLCTERTPAIYNADDPKKGSIXVRLHIGIGYIGGANILSGGAFDGASMNPAVSFMEVVALIRDQTHNLYWPGTFIVIFKVGLAYQVKLIFAMGGLDQTAADKTNNLRVIGLGLLTETCINSWRFKFCDHSFV

SEQ ID NO: 64073 - protein, 84 aa, Gossypium hirsutum
  Clone ID: uC-gsflnu33B060b02b1.pep
GNIGIIAPIAIGFIVGANILAGGAFDGASMNPAVSFGPAVVSWTWDNHWVYWLGPFIGSAIAAIVYEVFFIAPSTYEELPSADF

SEQ ID NO: 64074 - protein, 81 aa, Gossypium hirsutum
  unsure (1)..(81): unsure at all Xaa locations
  Clone ID: LIB3083-070-Q1-L1-B3.pep
CRFLKYFGVLSFRSLCGFQLKWVEIWVGQFGFFFSFNYCLLPAASFFNSKLFVFFRLIVAWYELLVSVXKKKKKKKLKTSS

SEQ ID NO: 64075 - protein, 130 aa, Gossypium hirsutum
  Clone ID: GOSHI-09MAY01-C69021_1.pep
TESLTRLVHECEANLELLFPLEAEVIESTPQGEPNPSSNNTAKRSQEASSSNLGEETLDIYRSTLAAMKAIRGLQKASSTCNPLSFSAFLKNQDDDSGAVTAENSASNSSPTLQKGKESDKEDAQSAQQR

SEQ ID NO: 64076 - protein, 164 aa, Gossypium hirsutum
  Clone ID: GOSHI-09MAY01-C64841_1.pep
PSRPPTRPKSAMADALLTSMWVFSMPFLKILTFEIAAFLGLRPFPLAAFFITTLLVSLMMFIFTIIGNALGGATFNPTASVAFYAAGLRKDWSALSMAVRFPFQAVGGVVGVKTVLGVLPREYKETIKGPSLKVDIQTGFLAEGLLTFGLCLALLVILIRGANN

SEQ ID NO: 64077 - protein, 182 aa, Gossypium hirsutum
  Clone ID: GOSHI-09MAY01-C64401_1.pep
GMNYLHENKPPRVHRDLEPSNILRDDSGHLKVADFGVSKLLTVKEVKPLTCPVTSCRYVAPEVFKNYDYDTKADVFSFALILQEMIEGCPPFLTKQDNDVTKAYASKERPPFRAPSKYYAHGLKELIEDWWNEKAAKRPTFRQIIKRLESIHDSFSHKKHWRGGAIFFTIRLIIVSTVHMLS

SEQ ID NO: 64078 - protein, 118 aa, Gossypium hirsutum
  Clone ID: LIB3828-034-Q6-K6-H2.pep
RPVFIYYDYDTKAGVFSFALILQEMIEGCPPFLTKQDNDVTKAYASKERPPFRAPSKYYAHGGEELIEDCCFEKAAKRPTFRQIIKRLESIHDSFSHKKHWKVFFLSSKLPFPCTHLL

SEQ ID NO: 64079 - protein, 271 aa, Gossypium hirsutum
  Clone ID: GOSHI-09MAY01-C64611_1.pep
MSHVYWILILNLWILKATSLQPGSRTVLREIGTGGSDPKDYGVELNATNFDGVLKDTPATYAIVEFFAHWCPACRNYKPHYEKVARLFNGPDAVHPGIILMTRVDCALKINTGLCDKFSVSHYPMLFWGPPTKFSTGWKPNQEKSEIREIDNWRTAELLLNWINKQIGSSYGLDDEKFENEQLPSNISDPGQTAQAIFDVEEATAIAFDIILEQKMIKSKTRASLIKFLQLLVAHHPSQRCRKGSAEVLVNFDEFCPLDMWSSDKHDGSTS

SEQ ID NO: 64080 - protein, 156 aa, Gossypium hirsutum
  Clone ID: GOSHI-09MAY01-C64291_1.pep
MGILCKVVDMLLLVAFMVMLVAGPLIDAQLVLPETTFPEVLVRLKQQYAAEYQDYLMVEKPHFFVALVWLELIFQWPLVLLNIYGILASKHWFHTTCLIYGASVITAMTALLGELMGSQKASDKLLTVYSPFMGLGVLAFLRGLVPNSGKARTIGK

SEQ ID NO: 64081 - protein, 106 aa, Gossypium hirsutum
  Clone ID: GOSHI-09MAY01-C64251_1.pep
MDRYQKVEKPKADTPINENELRITAQGRMRNYISYAITLLQEKGANEIVLKATGRAINTTVMIAELIKRGIAGLHQNTSTGSIAISASWEPLEEGLLPLETTRHVS

SEQ ID NO: 64082 - protein, 139 aa, Gossypium hirsutum
  unsure (1)..(139): unsure at all Xaa locations
  Clone ID: LIB3272-003-P1-K1-D10.pep
PVSMSRELYLSSVVPIGALYSLSLWLSNSAYIYLSVSFIQMLKALMPVAVYSIGVLFKKEGFKTDTMANMLSISLGVAIAAYGEAKFDTWGVMLQLGXAVAFEATRLVMIQILLTSKGITLNPITSLYYVAPCCFVFLV

SEQ ID NO: 64083 - protein, 107 aa, Gossypium hirsutum
  unsure (1)..(107): unsure at all Xaa locations
  Clone ID: uC-gsflmaxxa107a01b1.pep
ASSQILLWPCSRFNSREYIWSLMPVAVYSIGVLFKKEGFKTDTMANMLSISLGVAIAAYGEAKFDTWGVMLQLGAVAFEATRLVMIQILLTSKGITLNPITSLYYIX

SEQ ID NO: 64084 - protein, 107 aa, Gossypium hirsutum
  Clone ID: GOSHI-09MAY01-C65871_1.pep
CHASGIFSPLKFLSAHCNNFVIGKKKEKKEKLMENKYSCSSLRCLLPLEYSPKSQKSHLVFVLFLRFKRLKTLERNHTYLWRNSRRSRRKCGCFLFSLSFCLKKRSP

SEQ ID NO: 64085 - protein, 112 aa, Gossypium hirsutum
  unsure (1)..(112): unsure at all Xaa locations
  Clone ID: GOSHI-09MAY01-C65441_1.pep
MSHALHLVPNNIPGYGPTDCRYLSYSGISGRAVTLSPCSSHRDHKICTQVNVRSLECRSGGIISFVCRAGPGGHRRNPDFSRQRPGCRGKNXQNADRENFENLDESRMVSSK

SEQ ID NO: 64086 - protein, 126 aa, Gossypium hirsutum
  Clone ID: GOSHI-09MAY01-C65771_1.pep
MAFSPSFRPNMPLVLSPFLDRTGPPNPLLNRPQFPGFSARGQFLRGSLSVAKFGFKPGLLPDPEASEGVLRELFTRAESLLYTIADASVSSSDTIATTTSATSKQNNDWLSGIANSMETVLKVLKD

SEQ ID NO: 64087 - protein, 298 aa, Gossypium hirsutum
  Clone ID: GOSHI-09MAY01-C65031_1.pep
SPGPIPMVGLQDSSAVFPVETDDSLTTVGEEIWDPKLNSCRVSSQADQLASFTQQDPCSLNSGGVRDLSDDSNNQSGIYSSCLNIDVSFGCSTVIDPFVSSAILDEFCSLKDADFQNPSDCLVGNFGSCQDVQSQITSASLADSQAFSRQDLPDSSGGNIDFDDSGLLQNNSWKQTAPRVRTYTKVQKAGSVGRSIDVTSFKNYDELISAIECMFGLKGLLDDPRGSGWKLVYVDYENDVLLVGDDPWEEFVGCVRCIRILSPTEVQQMSEEGMKLLNSAATVQGINGSNSDGSNANA

SEQ ID NO: 64088 - protein, 222 aa, Gossypium hirsutum
  Clone ID: GOSHI-09MAY01-C65361_1.pep
MEPAWVDTTLDLNINPCFRTNKAMKREFEGDVVESAPVKYESGVLVEELNRVSAENKKLTKMLTVLCEQYYSLQHQFMEFVNKNPEIETAAAATTSSSKKRKAECEDYGANMIGFSGNTETSSSDDGSPKTPKDCIKPKVSRVQVRTNPSDNSLIVRDGYQWRKYGQKVTRDNPCPRAYFKCSFAPSCPVKKKVQRSAEDPSILVATYEGEHTTMSTPFSTR

SEQ ID NO: 64089 - protein, 89 aa, Gossypium hirsutum
  Clone ID: GOSHI-09MAY01-C65231_1.pep
AKTPPSTPLTHQNPMSPPPALQLALVALLHLTLTNAATSFPDFQLLNVEQALVGVLAQPSPLQTSEYNHHELLNVTESEDQWKWKLKLI

SEQ ID NO: 64090 - protein, 128 aa, Gossypium hirsutum
  Clone ID: LIB3272-043-P1-K1-E2.pep
MAIISTTAKFMSTGLFIILLLLQFSITKGHGGDDHDENNGGVSPYFFRWDESFLLLGTQFAGGVFLATSLIHFLSDSNETFGDLTTKTYPFAFMLASVGYLLTMLGDCIIVSVTSSSKREVRVQVQVE

SEQ ID NO: 64091 - protein, 86 aa, Gossypium hirsutum
  Clone ID: LIB3272-034-P1-K1-A1.pep
MAIISTTAKFKSTSLFIILLLLQFSITKGHGGDDHDENNGDHTNLHDKGLILVKTWCLIILLVTTFAGGVSPYFFRWDESFLLLGT

SEQ ID NO: 64092 - protein, 63 aa, Gossypium hirsutum
  unsure (1)..(63): unsure at all Xaa locations
  Clone ID: LIB3825-009-Q1-K6-D3.pep
HSFKPNXIDRHQQVNYFTNLSLPSSCHSPRKVQTLAISSYICCHKLVNVYLLVEERPLDECVL

SEQ ID NO: 64093 - protein, 143 aa, Gossypium hirsutum
  unsure (1)..(143): unsure at all Xaa locations
  Clone ID: LIB3272-035-P1-K1-E10.pep
NKSTILPTCPCRRAATLLEMDSKNGNECPKNITEASQIRHGLTLLDADFFNDIKVLEIAKGAKEFNIPIIRTNRKLVASINGGLHNPSPLVFNPEWSREQSQGRASRLNHPXASGIQRPINEEDIAFMSVLELGELIKKKQIT

SEQ ID NO: 64094 - protein, 80 aa, Gossypium hirsutum
  Clone ID: GOSHI-09MAY01-C66311_1.pep
FTLLLIFLSFEIKLLFFQFDTLFFPVFFLLFLCSGYFPGKVENFLSISVRKLISLKRPKRLKSWVFVETKKSFKFPCLRS

SEQ ID NO: 64095 - protein, 169 aa, Gossypium hirsutum
  Clone ID: uC-gsflnu33B055d01b1.pep
IYFSSTETLNAEDKFFCDKCCSLQEAQKRMKIKKPPHILVIHLKRFKYIEQLGRYKKLSYRVVFPLELKLSNTVEDADSEYSLFAVVVHVGSGPNHGHYVSLVKSHNHWLFFDDENVEMIDESAVQTFFGSAQEYSSYTDHGYILFYERLGANKNSLRRGFGFYHELLF

SEQ ID NO: 64096 - protein, 108 aa, Gossypium hirsutum
  Clone ID: LIB3272-030-P1-K1-A10.pep
YIEQLGRYKKLSYRVVFPLELKLSNTVEDADSEYSLFAVVVHVGSGPNHGHYVSLVKSHNHWLFFDDENVEMIDESAVQTFFGSAQEYSSNTDHGYILFYESLCANKS

SEQ ID NO: 64097 - protein, 207 aa, Gossypium hirsutum
  Clone ID: GOSHI-09MAY01-C67491_1.pep
IPGRGRVRVPENLFGKVCIIIDKIEKIPIDEIKRELNATGLSEEAIEELLQVLSIKSLTKLEEILGGAGEAVADLKELFSLSEKFGYSEWIQFDASVVRGLAYYTGIVFEGFDRQGKLRAICGGGRYDRLLSTFGGDDGPACGFGFGDAVIVELLKEKGLLPELNLGVDNIVCALDYDLQGVAAEVATKLREKGQKCDLVLESKPLK

SEQ ID NO: 64098 - protein, 167 aa, Gossypium hirsutum
  Clone ID: GOSHI-09MAY01-C67631_1.pep
KILMAGNGLPSLGRVKLTDLVPSEGIPSDSYKLSVSTLSQSFAQYSAAIIQFPASDGALLRSGLDSARLYFQQKAAYPPEELIHTNDSCEWCKTSGYYAGPQLWQEMYDYRPGLTPTDPINGMEFPPGGLPDIFGLLGKAARDVLDAISYYLNLRSSPFTEILDNVP

SEQ ID NO: 64099 - protein, 128 aa, Gossypium hirsutum
  Clone ID: GOSHI-09MAY01-C67071_1.pep
MLKFLSKVKIEFNALDPRIASCMEFLAQCNARKAKESNPACQLQVKRRTDDHPPQITVTFVNGVEEAFDATSTPAQTIRTMILEKGQMLETEQMFREAGEKWPVIIPEEELHQSFPGTKPRKAEEKKQ

SEQ ID NO: 64100 - protein, 162 aa, Gossypium hirsutum
  Clone ID: GOSHI-09MAY01-C60431_1.pep
MCKEKLEKEAAEKKKKEDENRSNTGERSNDKEDLCREFRSMRINGKLICTRENNPVRGPYGKMHINKCAMCQSIFDREANERKKKDEEKSSSKPSNNAKDECSEFRNYIRNNELICPRENDPVRGADGKFYTNKCYMCRAVFLTEALERAKLQEKPSHVRAS

SEQ ID NO: 64101 - protein, 167 aa, Gossypium hirsutum
  Clone ID: GOSHI-09MAY01-C60771_1.pep
RWSPRLPTTKGLVCRWCPMLPHIHAPRCRWCSRLPHIQASRLPMVAEAPTHPSHQGDGGSCCKSGGTGRIHPLLAIRILPLDWGGTGTTHSLLSTEHIMIFEFYLWYWGGTRFIVFVYSGIPHRDGLSEHRREPNRWWGALTPGHAMGVGIALDNPCSLNVSSPLKS

SEQ ID NO: 64102 - protein, 232 aa, Gossypium hirsutum
  unsure (1)..(232): unsure at all Xaa locations
  Clone ID: GOSHI-09MAY01-C60171_1.pep
QGTDVPEYQKLTSQVHEIVGRINGRFGTLTAVPIHHLDCSLDFHALCALYAVTDVALVTSLRDGMNLVSYEFVACQEAKKGXLVLSEFAGAAQSLGAGAVLVNPWNITEVAASIGQALNMPAEEREKRHCHNFHHVTEHTAQEWAETFVSELNDTVVEAQLRSSKVPPELPQNDAMECYLLSSNRLVILGFNTTLTEPVDTPGSRGDQIKEMELKLHPALREPLTALCNDPK

SEQ ID NO: 64103 - protein, 116 aa, Gossypium hirsutum
  Clone ID: GOSHI-09MAY01-C60021_1.pep
MINGGDRVKGSWSPQEDANLIKLVEQHGPRNWSMISSSIPGRSGKSCRLRWCNQLSPAVQHRPFTAAEDAATIQAHAVHGNKWATIARLLPGRTDNAIKNHWNSTLRRKRETAHAS

SEQ ID NO: 64104 - protein, 60 aa, Gossypium hirsutum
  Clone ID: LIB3196-013-P1-M1-A3.pep
SRIMLLAVFAVLLLVLPLVLPPLPPPPFVLLLIPVVMMLALLFLAFSPSKMPDLDISSSV

SEQ ID NO: 64105 - protein, 71 aa, Gossypium hirsutum
  Clone ID: LIB3196-013-P1-M1-A8.pep
ITCVLDHTEEEISKSGILDGENARKRRASIITTGIKRRRKGGLPMAPPQGPPQKKPSEPGQEHFLGFKPTP

SEQ ID NO: 64106 - protein, 162 aa, Gossypium hirsutum
  Clone ID: GOSHI-09MAY01-C61891_1.pep
MLFCRGFSRIRTTPGKSLFGFVLSRRADPSLFLLSNQYVYSTIKVRSGRETLSWSFPSLLGLGRQIHQSSSLIEEQLDPFSLVSDELSLVANRLRAMVIAEVPKLASAAEYFFKLGVEGKRFRPTVLLLMATALNVHIPEPVGGGVGDTVATELRTRQPSIA

SEQ ID NO: 64107 - protein, 90 aa, Gossypium hirsutum
  Clone ID: uC-gsflmaxxa097f10b1.pep
HASAHASERDGVRMLFCRGFSRICTTPRKSLFGFVLSRRADPSLFLLSNQYVYSTIKVRSGRETLSWSFPSLLGLGRQIHQSSSLIEVIL

SEQ ID NO: 64108 - protein, 133 aa, Gossypium hirsutum
  unsure (1)..(133): unsure at all Xaa locations
  Clone ID: GOSHI-09MAY01-C61781_1.pep
CGGVALNAVDDLSPDCLGHAGLVYEYTLGEEKFTFIEKCNNXRSVTLLIKGPNRHTLTQIKDAVRDGLRAGKNAIDDGCVVPGAGAVXEAAMAEALIKYKPSVKGRAQLGVQAFADALLIIAKDLAQNSGFDL

SEQ ID NO: 64109 - protein, 137 aa, Gossypium hirsutum
  Clone ID: uC-gsronu33B017f11b1.pep
RRNSYVYGLKEEVDEHAFFSEPSGTMRSFSGSSVDDSWQLAPLTMSSSSSKQRNCSGLQSEYSYLQLQSLTDHNPKQNKQDADEHSYIKYEMTDELEKGEPQKTVHRFFDEWPPKHRDSWLGLDDKSSNKLSVSTTR

SEQ ID NO: 64110 - protein, 120 aa, Gossypium hirsutum
  Clone ID: LIB3196-030-P1-M1-E3.pep
THHPSSFSSLSSMSLSSESQQQHQLRYHGYHSQANHPFMYPHASRPPGVGLSPQENTTHSLLGSGSYSQTNMDYRRNSYVYGLKEEVDEHAFFSEPSGTMRSFSGSSVDDSWQLAPLTMS

SEQ ID NO: 64111 - protein, 185 aa, Gossypium hirsutum
  Clone ID: GOSHI-09MAY01-C61211_1.pep
MDNAATAFFTSSLSPFTAVSSISVATFLSICSTFAVMAFAFYFLFKFLSGGNGKAKQAPLPPLLLKPWPIVGNLPEMLINKPTFRWIHELMKGITTGIACIRFGNVHVIVITCPEISCQFLKNQDAVFASRPVSMSTDVTTKGYLTTALVPFGDQWKKMKKVLMGELLSTTRHRWLHDKRVEEAD

SEQ ID NO: 64112 - protein, 201 aa, Gossypium hirsutum
  unsure (1)..(201): unsure at all Xaa locations
  Clone ID: GOSHI-09MAY01-C62901_1.pep
FTSQKRDLFVAEKSLYGLKQSPRQWYKMFDSFMTSHDFKRSSFDSCVYFKKNSDGSFVYLLLYVDDMLIAAKDKXEIIKVKAQLNGGFEMKDLGPAKKILGMEIPRDRKASKLYLSQKGYIEKVLCRFNMQSAKPVSTPFAAYFRLSLALSPQSDDEIEYMSHVPYSSAVGSLMYAMVCSRPDLSXAVSTISKYMANPGKE

SEQ ID NO: 64113 - protein, 52 aa, Gossypium hirsutum
  Clone ID: LIB3543-034-Q1-K1-B9.pep
DLYEKILKCDRSMHEDLLVHVEEKGTCMSNSPSLICSGRPCYGWKHVTNMLC

SEQ ID NO: 64114 - protein, 28 aa, Gossypium hirsutum
  Clone ID: LIB3196-047-P1-M1-A5.pep
YSYHVLFIILHKHYINVIKHLTHSMVGH

SEQ ID NO: 64115 - protein, 49 aa, Gossypium hirsutum
  Clone ID: GOSHI-09MAY01-C62141_1.pep
KRILLQILQNLEILLQLPQFKREISEKTENFKSNPKEKIHNKILKIARD

SEQ ID NO: 64116 - protein, 95 aa, Gossypium hirsutum
  Clone ID: GOSHI-09MAY01-C62061_1.pep
CKVFGAVKKVFQLALLCTKRQPFDRPPMHEVTRVLGSLMPLDPPPTKQLASIQLSKVTCSKDEYVNFKTPPLVNCPSMSPSQGSWRGHIFLSPSM

SEQ ID NO: 64117 - protein, 248 aa, Gossypium hirsutum
  unsure (1)..(248): unsure at all Xaa locations
  Clone ID: GOSHI-09MAY01-C63741_1.pep
RNSKELVEIVKEVDEYFLKAADAGSHLSLLLEASNPNLSGKGYNNYACNLTPTTWTWNWSPKIVENTIVGHTGNTSXHCSTIERLYAWEKKLYQEVKNAEAIKIEHEKKVAHMRKLEVKRAEYMKTEKTKKEVEKLESQMMVASQAIETTSAEIIKLRESELYPQLLELVKGLMCMWRSMYEIHQVHTHIVQQLKYLNFIPSNEPTSEIHRQSTLLLELEVQQWHLSFCNLVKAQRDYIQSLAGWLRL

SEQ ID NO: 64118 - protein, 246 aa, Gossypium hirsutum
  unsure (1)..(246): unsure at all Xaa locations
  Clone ID: GOSHI-09MAY01-C63601_1.pep
MAMLESIVVFTLLLLMLILIIILILFAFKPWRFFSSPFXSFPSRSRSIKVEDVERPLVSDDVNHSQDQSNDLTRNYDVEGACYQSEALLRSPRNKGLVHTQRLPPASHHLAQGDSSVLGISDPSEDLLVGQTLKRPLATEHLIEALKLGRPENQNENSIQEFVPKVISDQRSCLSLEVVSGPSRGIRCSVQSTNPSRLPLTLGRVSPSDLLLKDAEVSGKHAMITWNSNKLKWELVDMGSLNGTLL

SEQ ID NO: 64119 - protein, 130 aa, Gossypium hirsutum
  unsure (1)..(130): unsure at all Xaa locations
  Clone ID: GOSHI-09MAY01-C63291_1.pep
MSDDVSVEECLFKIVIIGXQAVGKSNLLSRFARNEFNAHSKAPIGVEFQTQSVEIDGKEVKAQIWHSAGQDRFRPVTPAYYTGAFGXLLLVYDITRRAPFHNVARWLDELSCECSFFFPACSCVGFWALE

SEQ ID NO: 64120 - protein, 288 aa, Gossypium hirsutum
  Clone ID: GOSHI-09MAY01-C18551_1.pep
PISMAGPTAADIQRSRDLEKFLVQAGLYESKEEASKREEVLGQIQEIVTNWVKQLTRLRGYTDQMVEDAKALIFTFGSYRLGVHGPGSDIDTLCVGPSYVSREEDFFFVLHNILAEREEVTELQPVPDAHVPVMRFKFNGIPIDLLYASISHLVVPHDLGISDISVLYSVDEPTVRSLNGCRVADQILKLVPNVEHFRTTLRCLKFWAKRRGVYSNVTGFLGSVNWALLVARICQLYPNAAPSMLVSRFFRVFTQWRWPNPVMLCAIDEDRLGFSVWDPRKNPRDRTH

SEQ ID NO: 64121 - protein, 108 aa, Gossypium hirsutum
  Clone ID: GOSHI-09MAY01-C18541_1.pep
MASTIPTSRSSSDDITDTTPFLSPTSNASNDDSSTRRTVRRQSLRDAARFLRRASSRRMMREPSMLVRETAAEQLEERQSDWAYSKPVVVLDIIWKLAVVVVASGILI

SEQ ID NO: 64122 - protein, 379 aa, Gossypium hirsutum
  unsure (1)..(379): unsure at all Xaa locations
  Clone ID: GOSHI-09MAY01-C18571_1.pep
ARTRGLFITLQNNRKRKQHSASGAASSTGTGNTXGPSPSSPPSTHTPGDAITSATSLQHVNSVSKSMMYGADATAGLTSSSNLLEDMDRFDPLDENMESLLSHESDSRDIYGTIKQCPPEHPKASAKGFTFAEVGCIQTRNSEVTCCHFSSDGKVLASAGHDKKVVLWNMDNLKTESTPEEHKLVITDVRFRPNSSQLATASFDKSVRLWDAANPGYCVKAYNSHPSPVMSLDFHPKKTDLFCFCDNDNEIRYFNLNTFSCTRISKGGMAQVRFQPRIGHFLAAASDKVVSIFDVETDRQTLTFQGHSEIVNYICWDANGEYLASVSHNLVKIWSLVTGECIQELGSGGNQFHSCVFHPNYSTLLVIGGISSLELWNMA

SEQ ID NO: 64123 - protein, 84 aa, Gossypium hirsutum
  Clone ID: LIB3197-059-Q1-M1-E1.pep
DNLKTESTPEEHKLVITDVRFRPNSSQLATASFDKSVRLWDAANPGYCVKAYNSHPSPVMSPDFHPKKTDLFCFCDNDNEIRYF

SEQ ID NO: 64124 - protein, 289 aa, Gossypium hirsutum
  unsure (1)..(289): unsure at all Xaa locations
  Clone ID: GOSHI-09MAY01-C18511_1.pep
KICIEVLELCVKCNTHLSEGQFFLALKTVDLIDTNYLQNIPVNTIKIMIGKNIPIIKAHIEKKVTADFNEWLLHIRSSAKDIGQTAIGHAASVRQRDEEMLERQRKAEELNVSGLXGDVVYSLDVEEVDEDSVLKFDLTPLYRASHIHSFLGIQEQFRRYYYKNGLLQLNSDLQISSSQPFVESYQAYLAQIAGYFIVEDRVLRTSGGLLSADQVETMWETTVAKVVSVLEEQFSHMDSATHLLLVKDYIALLGVTLRQYGYELSSILEVLDNXRKQYHELLFEECGRN

SEQ ID NO: 64125 - protein, 59 aa, Gossypium hirsutum
  Clone ID: GOSHI-09MAY01-C18451_1.pep
IVYAFCIRKLEFSFYFLFVSRENGETLVLIYGASVNLSVKKMDQHRKFKTCTGVLLEVL

SEQ ID NO: 64126 - protein, 393 aa, Gossypium hirsutum
  Clone ID: GOSHI-09MAY01-C18471_1.pep
MGTLLSSRGFSLFLLWTFTLYGLCLSFSPIDNYLINSGASLDSVVDNRRFISDSSNSPDSHLSSGRTFSLCAGTLLPGLPQIYHTARVFNLPSKYVFNVKDPGTHMVRLHFHRFNSSRLDLGNSRFHVLVNGLVALTNFSGGDFVNPKVIEYLLYVNSEKVEIRFVPAKKSNFAFVNAIEVISAPKDLVLETAQYVNGDKIEEFQGLNKQAFETMYRVTVGGPKVTPFNDSLWRTWIPDDEYLKSSEGSNKVYFGGRIKYQDGGASREVGPDNVYDSARLIRSKNASIPNVNLTWEFPVSEDYKYLVRMHFCDIASISLGLLYFNVYVNEHLAYKDLDLSVVTNYMLASPFYADFVVDAGRSGVITVSVGPSSKSMGYTVDAILNGVEIMKMK

SEQ ID NO: 64127 - protein, 91 aa, Gossypium hirsutum
  Clone ID: LIB3272-012-P1-K1-G6.pep
EHSQIENSVLGMKDIRYHGYPTSAIDNYLINSVAFLDSGKNNLLFIFDSSNSPDSHLFSGLTFSLFAGTLLPGLPQIYHTARVFNSPSKYV

SEQ ID NO: 64128 - protein, 156 aa, Gossypium hirsutum
  Clone ID: GOSHI-09MAY01-C18421_1.pep
NAQLYSSAVTGAVLAGSTFISIAAGDRLGRRVLLISGGIQMIICQAIVAIILGVKFGDNQELSKGYSILAVIVICLFVLAFGWSWGPLGWTGPSEIFPLEIRAAGQSITVAVNLLFTFIIAQCFLAMLCHFKFGIFLFFASWITVMTIFVYFFLPE

SEQ ID NO: 64129 - protein, 141 aa, Gossypium hirsutum
  Clone ID: GOSHI-09MAY01-C18751_2.pep
TYNIYHPYTSWIPITVYICLRNVTQSFRSYSLTLFAWLGKITLETYISQIHIWLRSGIPDGQPKLLLSLIPDYPMLNFMLTTSIYLAISYRLFDLTNILKSAFVPTKDNKRLLHNLITGVVVSSILYSLSFVFLRIPQMLV

SEQ ID NO: 64130 - protein, 92 aa, Gossypium hirsutum
  Clone ID: LIB3145-010-Q1-K1-E3.pep
NKPLFPNLVSGGGSLNLITPFFFRVPKNPSNVGVRTINIEIVGGSHHDLVHHCVVGSIFLHNGNVKLQNSIGEYVSLIRSCGISEHGRLKSV

SEQ ID NO: 64131 - protein, 151 aa, Gossypium hirsutum
  unsure (1)..(151): unsure at all Xaa locations
  Clone ID: GOSHI-09MAY01-C18771_1.pep
MFNFEAEVFAKEIIKPSSLEIHGMKPFKLNIFDQLTPTTYASFMAFYPLNEANFTTTNILPHLKASLSETLNILYPISGRIKDNIFIDHFHEGVPFLSAQAGCRLSEFLKXHEVKLLNKLLPCQPFSKEFNNEAPLLVCQVTIFACGGIAL

SEQ ID NO: 64132 - protein, 73 aa, Gossypium hirsutum
  Clone ID: GOSHI-09MAY01-C118729_1.pep
GRERKKKKRDGAVVHRAQRGYDGTCACASYRHRSLAFLRQPTSPAPPTNGCYSSFRLVNPSFCVFTPQVTRVT

SEQ ID NO: 64133 - protein, 127 aa, Gossypium hirsutum
  Clone ID: GOSHI-09MAY01-C18731_1.pep
VQVLISERAREKGKSSKKIIIKRESKGTWENPLPVSKSSLAAEILLRTTTLFMFLSLRLRNQMTNRDGVLERDLNGIGCLATLLYRKLLLDLRKARNLPVLIFNSLMHPLFLKKPPPLNTVKRNLRR

SEQ ID NO: 64134 - protein, 221 aa, Gossypium hirsutum
  Clone ID: GOSHI-09MAY01-C18611_1.pep
MGCASSKQKRCRHCRAPYSPVPRSYSMHVHHPAQHTGDSYHVVALTSTTLGTLKLEDNHHSNGGTINVAAFENGSKINGDLKEAEEESKGLNMKVIEAKIWSKMLADMFPKVVPKTPIRTPPGEPETINIWEMMAGLEDISPLRSPGHFKSFSFDVPKPKWLQIQDTDDNEADLGVTDFDPEIISSFRESLKKDKVVLYFTSLRSVRKTYYDCCDVRVILK

SEQ ID NO: 64135 - protein, 45 aa, Gossypium hirsutum
  Clone ID: GOSHI-09MAY01-C18161_1.pep
LSLLLDVKANNELALFNIAYSQFDMMHHEGVFIDSYETMINSRYY

SEQ ID NO: 64136 - protein, 209 aa, Gossypium hirsutum
  Clone ID: GOSHI-09MAY01-C118109_1.pep
QLSEMHLSNGEDQGASGTGLGVLITPMIKVLDEMYSAQDDLIKEMRSHDNANKEWKDEELKKLYETHERLLDLVSLFCYVPRAKYLPLGPISAKLIDIYRTRHNISASTGLSDPAVATGISDLVYESKPATTESDTLDDDLVNAWAVNLGDVPAVNSRNQFLAGAGTVAPDVDENIVSKPSVSYDDMWAKTLLESTEMEEDDVRSQGPL

SEQ ID NO: 64137 - protein, 261 aa, Gossypium hirsutum
  unsure (1)..(261): unsure at all Xaa locations
  Clone ID: GOSHI-09MAY01-C18121_1.pep
MDESFFDLMEFLKKPTITETFVDILLCAVPIWLAVMIGLFIGWAWRPRWTSLVFLGLRSKFRFVWTAPPGFGARRLWLAFTALSAFSVCRTVFSNFIKGRARKSTAETSNSAVPLQSPSPTVRISPEGAAGTVSPTTKAEERQQDIVTENDLAHLLHLLEGKEGEMEWQNMMERTTPNMSYQAWRHEPENAPAIYRSRTVFEDATPELVRDFFWDDEFRPKWDTMLSYVKVLEECPRTGTMIVHWXKKFPFLQDGVHNVKI

SEQ ID NO: 64138 - protein, 108 aa, Gossypium hirsutum
  unsure (1)..(108): unsure at all Xaa locations
  Clone ID: LIB3582-051-P1-K1-A8.pep
RKATGYTALDNDLTHLLHLLEGGEGDMEWQNMIGKXTPNMSYQAXRHEPENAPAIYRIKTVFEDATPQLDRDIFXDDEFRPKWDTMLSYVKVLEECPRTGTMIVHWIK

SEQ ID NO: 64139 - protein, 141 aa, Gossypium hirsutum
  Clone ID: GOSHI-09MAY01-C18241_2.pep
SHASEDAQQTMTALKSANKELKGMMKTVKIQDIDNLQDEMMDMMDMSNEIQETLGRSYNVPDDIDEDELMGELDALEADMGTEADGVPSYLQPDKEEPDLDAELNLPTAPSGNATAAAGRANAQVEDELGFPAVPRASVRS

SEQ ID NO: 64140 - protein, 231 aa, Gossypium hirsutum
  unsure (1)..(231): unsure at all Xaa locations
  Clone ID: GOSHI-09MAY01-C18241_1.pep
MKRVFGVKKDKEPPPSIQDATDRISKRGDTVDEKLKKLDAELSRYKEQIKKTRPGPAQEALKSRAMRVLKQKRMYEGQRDMLYNQTFNLDQVAFASEGLKDAQQTMSALTSANKELKGMMNTVNIPDIHNLPDEMMDMMDVSNEIQETLGRSYNVPDDIDEDELLGELXDAPEADMGTXKLDGVPSYPQPDKEEPDVDTEFLPAAPTGNTTAAQGEDEHGLPTVPRASLRS

SEQ ID NO: 64141 - protein, 96 aa, Gossypium hirsutum
  Clone ID: LIB3197-054-Q1-M1-E5.pep
MKRVFGVKKDKEPPPSIQDASDRINKRGDNVEEKLKKLDAELSRYKEQIKKTRPGPAQEAIKARAMRVLKQKRMYEGQRDMLYSQTFNLDQVAFAS

SEQ ID NO: 64142 - protein, 87 aa, Gossypium hirsutum
  Clone ID: GOSHI-09MAY01-C19981_1.pep
LLLHSSQFSQYLYNTKLLKYIRIYTILVFTYQGGIIIRFSKYCLFKYIIPCAIIKVATTPLTDLGFKGGSLSLVLHSRPTIHMQTAI

SEQ ID NO: 64143 - protein, 267 aa, Gossypium hirsutum
  unsure (1)..(267): unsure at all Xaa locations
  Clone ID: GOSHI-09MAY01-C19951_1.pep
MAELDSSCTSSSSGSTFFNRSFTMHANTAEPDAPKVHLLLNNPSSLNRAAAISKIYNSIDSVKGXVKKLCNLFESAKSSSTSTELSPKVVLRPAKSIGYSSSFSSSFNNPLIRLPGTEDRIVVYLTSLRGIRRTYEDCYAVRMIFRGFRVWVDERDVSMDSAYKKELQSVLRKKNPSLPQVFIKGKCGGGADVIKSMFEVGELAKILEDFPRIQQPGLVCDCCGDVRFVPCGNCSGSRKVFDEDEGLLKRCLECNENGLIRCPNCCS

SEQ ID NO: 64144 - protein, 67 aa, Gossypium hirsutum
  Clone ID: GOSHI-09MAY01-C19971_1.pep
FTSKVSVFVSCVHLSPETTMEWIFHEIEKRSLLSPSEQPYYLPQSPIPLLTPPQNLQSDSFNLNNKS

SEQ ID NO: 64145 - protein, 165 aa, Gossypium hirsutum
  Clone ID: GOSHI-09MAY01-C119829_1.pep
VHASDSRSCSSIDAKIKMYGSLDSIEPVKDILEKDQKGFDTSLVAAIDRTMKKHTDNLMHMLEGVGDRLTQLESRTSKLETSVDDLKMSVGNNHGSIDGKMRQLENILKEVQTEVHVVKEKQESVEALLQHAKLQETKMDQPSETYNTAHIGSMQQAASAPFQSH

SEQ ID NO: 64146 - protein, 123 aa, Gossypium hirsutum
  unsure (1)..(123): unsure at all Xaa locations
  Clone ID: GOSHI-09MAY01-C19521_1.pep
GVVETIYEDELYDDHDDDDNSSNSPSLLSSPPSPLHSSAQAWSSAMGCKTDVLIHVQGTAFHLHKDPLISRSTYLRRILTDKSELTLSPPLNITAETFALVVDFCYGTHLXVTPFNVASLLVA

SEQ ID NO: 64147 - protein, 172 aa, Gossypium hirsutum
  Clone ID: GOSHI-09MAY01-C19491_1.pep
KQFPLIKARDATDDMLSWGLKRKVDGSITMIDNVNCMTDEPSQDGNEYVNDVIIYLETLVSTAQQILPPQVLKRVLQDVLSHISDKTLGALFGDSVNRFNVNAIMGIDVDIRLLESLADNLSPVFSEGDSLQLINALAESRQLVNLLLSNHPENFLNPVIREKSYNALDYRK

SEQ ID NO: 64148 - protein, 143 aa, Gossypium hirsutum
  unsure (1)..(143): unsure at all Xaa locations
  Clone ID: GOSHI-09MAY01-C19441_3.pep
MGKTRGMGAGRKLRTHRRRQRWADKSYKKSNLGNEWKKPFAGSSHAKGIVLEKIGIEAKQPNSAIRKCARVQLIKNGKKIAAFVPNDGCLNYIEENDEVLIAXGFGRKGHAVGDIPGVRFKVVKVSGVSLLALFKEKKEKPRS

SEQ ID NO: 64149 - protein, 142 aa, Gossypium hirsutum
  Clone ID: GOSHI-09MAY01-C19441_2.pep
MGKTRGMGAGRMLRTHRRRQRWADKAYKKSNLGNEWKKPFAGSSHAKGIVLEKIGIEAKQPNSAIRKCARVQLIKNGKKIAAFVPNDGCLNYIEENDEVLIAGFGRKGHAVGDIPGVRFKVVKVSGVSLLALFKEKKEKPRS

SEQ ID NO: 64150 - protein, 142 aa, Gossypium hirsutum
  Clone ID: GOSHI-09MAY01-C19441_1.pep
MGKTRGMGAGRKLRTHRRRQRWADKAYKKSNLGNEWKKPFAGSSHAKGIVLEKIGIEAKQPNSAIRKCARVQLIKNGKKIAAFVPNDGCLNYIEENDEVLIAGFGRKGHAVGDIPGVRFKVVKVSGVSLLALFKEKKEKPRS

SEQ ID NO: 64151 - protein, 373 aa, Gossypium hirsutum
  Clone ID: GOSHI-09MAY01-C19791_1.pep
KSLDENQRFIIEDSVLIALLGQLKLEAETLAAEKNSVRQELKVQSVQPSRPPTRPEKLADMNEVLRSKVVEVNQREDALQTELISVRGQLLALQRQYQTSLEDNCKVLDEKRSLMKEVLDLGKQKHNLEDENHAVICEAISQSNISLILKDIIANNFEEIKYLNDNLGKLKCLNNDLEGKLKMMERKFEDLQMENSNLKDSMKKLENELVSVRSVGDQLNDEVARGKDLLCQREIALLEVEKMLSASQEETAQLHKVLEDLQTKFEEVKLIGEDQKRQILKLSGDYDHQIKETESISQANQKLEVELLKLNEELEENKHREEGLSFELQKERIKVEIWETQAAAWFDELQTSAIREVIFEEKAHELGKECKFL

SEQ ID NO: 64152 - protein, 379 aa, Gossypium hirsutum
  Clone ID: GOSHI-09MAY01-C19781_1.pep
MHTEFSVDDFSDSFWAAPPGMSRSQSEWAFDNFIEEFSGSGGAIPVSRSDESVIGPSLAEPRPSVSKSEEADGEGDVVEIKRPGNQNHNSPPSDLAPTFSIDSDEYRAILKDKLHQACAAVALSRASSVKAEVFSAQAEDQALQSRSQVQGSSKAQGQGELDATPSEVLAMSTTQTKSKVQMRQTTSVSSGEDSDDDELRDTETTDNMDPADAKRARRMRSNRESARRSRRRKQAHMNELETQVGQLRVEHSTLLKSLTDTNHKYDEAAVDNRIREADIEALRAKVKMAEETVKRVTGINFNSGLLSRHNVASVSMPFVSSPLETSSTAPVPLQPNTNQFFHQPVPLHHQRMENVFMGNTMVPPIVNSRTEGVKHENET

SEQ ID NO: 64153 - protein, 322 aa, Gossypium hirsutum
  Clone ID: GOSHI-09MAY01-C19741_1.pep
MRKWFWGFLFIAFGFVCSIAAERNPRTERISGSAGDVLEDDPVGRLKVYVYELPSKYNKKILQKDPRCLSHMFAAEIYMHRFLLSSPVRTLNPEEADWFYTPIYATCDLTPTGLPLPFKSPRMVRSAIQLISSSWPYWNRSEGADHFFVVPHDFGACFHYQEEKAIERGILPILQRATLVQTFGQRNHVCLNEGSITIPPYAPPQKMQARQIPLDTPRSIFVYFRGLFYDVNNDPEGGYYARGARAAVWENFKNNPLFDISTEHPTTYYEDMQRAIFCLCPLGWAPWSPRLVEAVVFGCIPVIIADDIVLPFADAIPWEEIG

SEQ ID NO: 64154 - protein, 85 aa, Gossypium hirsutum
  Clone ID: uC-gsronu33B137h07b1.pep
DSFSFEELEKGSVEKMRNMCSFENLSNLEVNKSGKHREGTPVVIENKMYFRKGKVGDWENYLTPEMAVRLDSITLQKLNGSGLTL

SEQ ID NO: 64155 - protein, 69 aa, Gossypium hirsutum
  Clone ID: uC-gsflnu33B082d12b1.pep
VNMCSFENLSNVEVNKSGDHREGTPVVIENKMYFRKGKVGDWENYLTPEMAVRLDSITLQKLNGSGLTL

SEQ ID NO: 64156 - protein, 108 aa, Gossypium hirsutum
  Clone ID: GOSHI-09MAY01-C19691_2.pep
MASSFRAFLNSPVGPKTTHFWGPVANWGFVLAGLVDMNKPPEMISGNMTSAMCVYSALFMRFAWMVQPRNYLLLACHASNETVQLYQLSRWARAQGYLSEKKDKATSQ

SEQ ID NO: 64157 - protein, 128 aa, Gossypium hirsutum
  unsure (1)..(128): unsure at all Xaa locations
  Clone ID: GOSHI-09MAY01-C19691_1.pep
NHQVRLYDISAHXKTVVSFDFRETPIKAVAEDLDGHAVYIGNGSGDLASVDIRTGKLLGCFLGKCSGSIRSIARHPELPVIASCGLDSYLRIWDIGTRQLLSSVFLKQHLTKVVFDTNFTEEGIGGHE

SEQ ID NO: 64158 - protein, 197 aa, Gossypium hirsutum
  Clone ID: AI727833.1.pep
PANSLGIFIPTWFTSATFLSKDDHRKVVAGTNNHQVRLYDISAQRRPVVSFDFRETPIKAVAEDLDGHTVYIGNGSGDLASVDIRTGKLLGCFLGKCSGSIRSIARHPELPVIASCGLDSYLRIWDIGTRQLLSSVFLKQHLTKVVFDTNFTEEIKHFAADLALHEAQSINEIETTDETEKLAMKRKKSSSENKEGK

SEQ ID NO: 64159 - protein, 110 aa, Gossypium hirsutum
  unsure (1)..(110): unsure at all Xaa locations
  Clone ID: LIB3543-008-Q1-K6-H6.pep
KQLQEDLGGHAIYIGNGSGDLASVGIRTGKLLGCFIGVSASGXSIRSIARHPELTVITFCGLDSYLRIWDIGTRQLLSSVFLKQHLTKVVFDTNFTEKVKYLLGIFIGKN

SEQ ID NO: 64160 - protein, 64 aa, Gossypium hirsutum
  Clone ID: GOSHI-09MAY01-C19181_1.pep
KEFFRQVRSRLSYEQFGALVANVKELNSHKQTREETLRKAEEIFGPDNRDLYAIFEGLINRNVH

SEQ ID NO: 64161 - protein, 284 aa, Gossypium hirsutum
  Clone ID: GOSHI-09MAY01-C19141_1.pep
MSVCSSSSSSSSSSSTGKAWIVHRILAGTAIAVAIGARAYLGRARKFRTRVVGIIPARYASSRFEGKPLVHILGKPMIQRTWERSKLATTLDHLVVATDDEKTAPPSPRPGADGIMTSESCQNGTERCNEALEKLEKKYDIVVNIQGDEPRIEPEIIDGIVKALQAAPDAVFSTAVTSLNPEGVVDPNRVKCVVDNRGYAIYFSRGLIPFNKSAKVNPQFPYMLHLGIQSYDSKFLQIYPKLQPTPLQLEEDLEQLKVLENGYKMKVIKVEHEAHGVDTPEDVE

SEQ ID NO: 64162 - protein, 116 aa, Gossypium hirsutum
  Clone ID: LIB3048-021-Q1-L1-F11.pep
MSVCSSSSSTGKAWIVHSILAGTAIAVAIGAHAYLGRARKFRTRVVGIIPARYASSRFESKPLVHILGKPMIQRTWERSKLATTLNHLVVATDDEKIAECCRGFGADVIMTSESCQ

SEQ ID NO: 64163 - protein, 147 aa, Gossypium hirsutum
  Clone ID: GOSHI-09MAY01-C19161_1.pep
TEQEQALSSELSNKVKGRQTAREIILWIEETVYTIHGQEITLSVVIQTLLDIGSKSFTHLITVLERYGQVMAKLCADQDKQVMLISEVGSYWKNNAQMTAITIDRMMGYRLISNLAIVRWVFSPENIEQFHISDRPWEVLRNAISKT

SEQ ID NO: 64164 - protein, 147 aa, Gossypium hirsutum
  Clone ID: LIB3083-011-Q1-L1-G2.pep
QSAREIILWIEENVYPIDGQEITLSVVIQTLLDIGSKSFTHLITVLERYGQVMAKLCSDQDKQVMLISEVGSYWKNNAHMSAIAIDMVMGYCLISNLAFLRWVFFSVNFVFFFIFFRPFFDILVFYFFCFFIFLFLSFLFFFYFFNF

SEQ ID NO: 64165 - protein, 201 aa, Gossypium hirsutum
  Clone ID: GOSHI-09MAY01-C19131_1.pep
PSVRRIAAGTSHGVLLFKSNGMDIVYGANRITYKVIGGIIDLYVFGGPLPHTVVQQYTELIGRPAPMPYWSFGFHQCRYGYKNVSDLEGVVAGYAKANIPLEVMWTDIDYMDGFKDFTLDPVNFPEDKMKQLVDELHRNGQKYVVIIDPGISVNSSYGSYIRGMQADIFIKRDGIPYLGEVWPGRVYFPDFVNPQTQTYWD

SEQ ID NO: 64166 - protein, 167 aa, Gossypium hirsutum
  Clone ID: GOSHI-09MAY01-C19091_1.pep
MATYLVLVVVAMLCAGATAQSGCASVLIGMSPCLSYITGSSSTPSQQCCTQLANVVRSSPRCLCQVLNGGGSSFGININQTQALALPDSCNVQTPPISSCNAASPAPADSPVGSPESGSKIPTGDGSRSVPTARENSSSDGSTTKLSLSLFTFLLLATSYSSIFTSH

SEQ ID NO: 64167 - protein, 89 aa, Gossypium hirsutum
  Clone ID: LIB3543-019-Q1-K1-H12.pep
SRHNLINIHKRADPYISLKAVPLKAHIKSAPAKCCTQIANVVRSSPRCLCQVLNGGGSSFGININQTQALALPDSCNVQTPPISSCNAA

SEQ ID NO: 64168 - protein, 119 aa, Gossypium hirsutum
  Clone ID: LIB3584-047-P1-K2-E11.pep
MATYLVLVVVAMLCAGATAQSGCTNVLIGMSPCLNFITGSSSTPSQQCCTQLANVVRSSPRCLCQILNGGGSSFGININQTQALALPDSCNVQTPPVSSCNGKDAVTYMHFNFYHQPFA

SEQ ID NO: 64169 - protein, 160 aa, Gossypium hirsutum
  Clone ID: GOSHI-09MAY01-C19041_1.pep
APPNGATNTNQNDQKPTPDQLVRVDSECLSSIVTNLDKNDPKSAKTIETHHSLHHHHHHHQQQSFATYGAMELDFSSYNHHQAAASNGGGVSLTLGLQQHGGNNGVSLAFSPTSQSSLFYPRSDQIEDCQPVQYSLLDGEGQHLPYRSSMGAQLLHDLAG

SEQ ID NO: 64170 - protein, 153 aa, Gossypium hirsutum
  unsure (1)..(153): unsure at all Xaa locations
  Clone ID: GOSHI-09MAY01-C19351_1.pep
MPLNLIATKPEHGISSGPLEALSETPEPHNSAMLAFPIQRNSQPPVRLTTLYPITMKFEEIVYKVKLEQKGSCWGGWITREKTILNGISGVVYPGEILAMLGPSGXSGKTTLLNCSWRPLTGKLSRKITYNGQPFCGAIKRKAGFVAQDECLA

SEQ ID NO: 64171 - protein, 142 aa, Gossypium hirsutum
  Clone ID: GOSHI-09MAY01-C19311_1.pep
KEMDFFSSQYQSHDHHHHHQEGNTNNNGSSSFIDSSVNIGLNLLRSSPGVSRASNEEKPKAQESALKMELEKLNEENRRLRSMLDQITKNYNELQGQLLMALQKQAHRNQQDQKDAVHGMASTIMSVQQFMDPRPSAALDVN

SEQ ID NO: 64172 - protein, 60 aa, Gossypium hirsutum
  Clone ID: GOSHI-09MAY01-C19211_1.pep
CISFALNASLKHKSSKQRQRIKLKFHLLAQNRRKIHFLFRQRIHNSINILCEIAQLKHSE

SEQ ID NO: 64173 - protein, 78 aa, Gossypium hirsutum
  Clone ID: GOSHI-09MAY01-C119239_1.pep
TWGMEAVAAALRHKSCLGFLLSKIARARHSSQSLDYCTLGQWVCNLLYFYFQVYASWARATMAYYNVIYHFINFSFLF

SEQ ID NO: 64174 - protein, 142 aa, Gossypium hirsutum
  Clone ID: GOSHI-09MAY01-C19231_1.pep
KITNQFLGFLDIFVNLIVCISLYSGAVQEDRKVYIAYLGSLPDGDYIASSHHCNMLQALSKHSSVENYLIRSYKRSFNGFAAKLTNEEAKKLSSFKGVVSVFPSKVYHLHTTRSWDFLGLNQTVKRNATESDVIVGVFDTGI

SEQ ID NO: 64175 - protein, 194 aa, Gossypium hirsutum
  Clone ID: GOSHI-09MAY01-C19221_1.pep
SSSNDPLPFGNGSSYPPPPPVPPPKPSAANSNSRRFASGSSNPVRAGSSRRAVAWPTVSIRTSPSGSRPSSPRSHGESEGYNSADEQNPCFVSSYNDAERERQFEIDIRRAKGLEVKRMLEDGNCLFRAVADQVYGDSEAYDLIRQMCIDYMERERDHFSQFITEGFTSYCKRKRRDKVYGNNVEIQALSEMYN

SEQ ID NO: 64176 - protein, 79 aa, Gossypium hirsutum
  Clone ID: GOSHI-09MAY01-C14981_1.pep
EFTHLLITNQILPKLVNLSGAVPQARKASLARFLEKRKERVSNTSPYNICKSPESGPLASDGISFPVTSAGSSPLQAIN

SEQ ID NO: 64177 - protein, 62 aa, Gossypium hirsutum
  Clone ID: GOSHI-09MAY01-C14971_1.pep
LYTAFSRRRRVCPTCLDEYTPENPKITAHCSHHFHLGCIYEWLERSESCPICGKEMECCESP

SEQ ID NO: 64178 - protein, 61 aa, Gossypium hirsutum
  Clone ID: LIB3825-011-Q1-K6-B8.pep
IPRIITFTQIIILAFYIEGNVMIIRVRVGRNYQVVLLVMDKEQTLIYTMCLFNKDQRAYTY

SEQ ID NO: 64179 - protein, 108 aa, Gossypium hirsutum
  unsure (1)..(108): unsure at all Xaa locations
  Clone ID: GOSHI-09MAY01-C14911_1.pep
LDCSPMHKDPLLVVDYXLSALKNDFQVLRVPTAIMETSSDPRALAVACFDLSQFIQHHPAGRVIVNDLKAKERVMKLMNHDSAEVTKNALLCIQRLFLGAKYASFLQA

SEQ ID NO: 64180 - protein, 88 aa, Gossypium hirsutum
  unsure (1)..(88): unsure at all Xaa locations
  Clone ID: uC-gsronu33B168g03b1.pep
AVVHGQILRDLITVMXSANDARPLAVACFDISQFIQHHPAGRVIVNDLKAKERVMKLMNHESAEVTKNALLCIQRLFLGAKYASFLQV

SEQ ID NO: 64181 - protein, 74 aa, Gossypium hirsutum
  Clone ID: LIB3189-047-P1-K1-H11.pep
AHASVHASAHAFVDAWARAAARCFFFSKVGSIQAKNKLFIVMQFILKIGQGLHTFYSTPTTTQNFKNTNFESFF

SEQ ID NO: 64182 - protein, 163 aa, Gossypium hirsutum
  unsure (1)..(163): unsure at all Xaa locations
  Clone ID: GOSHI-09MAY01-C14901_1.pep
MTCCSFLFSRKKTARSAVHTTEIDDEVSGIQNTKLSPFKELKMATGNFHYSNKIGEGGFGVVYKVIAXGTFRDGIVAAIKVLSADSRQGVREFLTEINVIANIEHENLVKLHGCCVEGNHRILVYGYLENNSLAQTLLGGSNSSMQFSWSMRRNICLGVAKGL

SEQ ID NO: 64183 - protein, 70 aa, Gossypium hirsutum
  Clone ID: LIB3189-047-P1-K1-G10.pep
SNENFQLPFSAPCKKRVKCFECLNLHHQFLLYVQLSKLSSFVKIRTSNKSSPAAVQPECLNTNGNSTKPL

SEQ ID NO: 64184 - protein, 94 aa, Gossypium hirsutum
  Clone ID: GOSHI-09MAY01-C14881_1.pep
MENGLSDTDFEHYVKVIRWLECKGHIEKNFRQKFLTWYSLRATPQEVRIVKVFVDIFISDPASLAEQLVDTFSDCISSKGSSVVPAGFCMKLWH

SEQ ID NO: 64185 - protein, 138 aa, Gossypium hirsutum
  Clone ID: GOSHI-09MAY01-C114849_1.pep
MSGEEVAVAQPDAAAVIGEPMDINTALPLVIRKSKAHSGLARGLHEAAKAIEKHSAHLCVIADDCDQPDYVKLVKALCADHNVKMLRAPSAKALGEWAGLCKIDSEGKARKVVGCSCVVVKDYGEQHEAVEVVQQHQD

SEQ ID NO: 64186 - protein, 127 aa, Gossypium hirsutum
  unsure (1)..(127): unsure at all Xaa locations
  Clone ID: GOSHI-09MAY01-C14871_6.pep
MATIKTMMRAVQYSKYGGGAADLKHVEVPVPSPKKDEVLIKVEAASINPIDWKLQDGVXRPFLPLQFPPHSWSLRCSRRNFFFELTFSFMLFYYHFFYFFLYIFRLFLFNQLNFPFFLIPFYLFYFF

SEQ ID NO: 64187 - protein, 142 aa, Gossypium hirsutum
  unsure (1)..(142): unsure at all Xaa locations
  Clone ID: GOSHI-09MAY01-C14871_5.pep
MANNLMRAVQYSKYNGGVADLKHAEVPIPSPKKAEVLIKVEAASINPIDWKIQEGVARPFLPRKFPHIPGTDVAGEIVQVGSGVQSFKVGDKGVAVLGNGGALAEYAVAKEGSTVPRPSEVSAPXAAALPIAGLAAHQSLTQ

SEQ ID NO: 64188 - protein, 284 aa, Gossypium hirsutum
  unsure (1)..(284): unsure at all Xaa locations
  Clone ID: GOSHI-09MAY01-C14871_3.pep
MFDTLDSLLLQAIQHSGHRFFFTLLFISLFYVLSSIICVLVLANILLFEYILQLQNGGALAEYAVANEGSTVSRPPEVSAREAAALPIAGLAAHQSLTQLAGIKLDGTGPEVNVLVTAASGGVGQYAVQLLKLANAHITATCGARNIDLVRSLGXDEVLDYKTPDGVALKSPSGRKYDVIIPWAHNIPWFTFEANLPSKGKVVDPPPGFGTLMSVAFKKITFAKKQLIPLFPSPKKENLEFLVKLVKEGKLKPVIDSVHPLSKAEEAWAKSIDGHATGKILVEP

SEQ ID NO: 64189 - protein, 187 aa, Gossypium hirsutum
  Clone ID: GOSHI-09MAY01-C14871_2.pep
MAKNMMRAVQYSKYNGGAADLKHVEVPVPSPKKDEVLIKVEAASINPIDWKIQEGVARPFLPRKFPHIPGTDVAGEIVQVGSGVQSFKVGDTVVAVLGNGGALAEYAVAKEGSTVPRPPKVSAPEAAALPIAGLAAHQSLTQLAGLKLDGTGPQVNVLVTAASGGVGQYAVQLLKLAIAHISPLLGS

SEQ ID NO: 64190 - protein, 329 aa, Gossypium hirsutum
  Clone ID: GOSHI-09MAY01-C14871_1.pep
MDKIKSMMRAVQYSKYGGGVADLKHVEVPVPSPKKDEVLIKVETASINPIDWKLQDGVARPFLPRKFPHIPGTDVAGEVVQVGSEVQSFKVGENVVAVLGNGGALAEYAVANEGSTVSRPPEVSAREAAALPIAGLAAHQSLTQLAGLKLDGTGPEVNVLVTAASGGVGQYAVQLLKLANAHITATCGARNIDLVRSLGADEVLDYKTPDGVALKSPSGRKYDVIIHCAHNIPWSTFSANLTPKGKVVNTTPGFGTLMSVAAKKISCSKKQLIPLFTSPKKENLDFLVKLVRDGKLKPIIDSKHPLSKAEDAWAKSIDGHATGKILVEP

SEQ ID NO: 64191 - protein, 126 aa, Gossypium hirsutum
  Clone ID: uC-gsronu33B090f06b1.pep
MANNLMRAVQYSKYGGGADDLKHVEVLIPSAKKDEVLIKLEAASINPIDWKIQEGVARPFLPRKFPHIPGTDVAGEIVQVGSGVQSFKVGDKVVAVLGNGGALAEYAVAKEGSTVPRPPEVSAPEA

SEQ ID NO: 64192 - protein, 84 aa, Gossypium hirsutum
  Clone ID: uC-gsflnu33B056g12b1.pep
MDKIKTMMRAVQYSKYGGGVADLKQVEVPVPSPKKDEVLIKVETASINPIDWKLQDGVARPFLPRKFPHIPGTLLFSGWFSSMG

SEQ ID NO: 64193 - protein, 102 aa, Gossypium hirsutum
  unsure (1)..(102): unsure at all Xaa locations
  Clone ID: LIB3149-026-Q1-K1-D9.pep
IFFFFXXSIFVYLLSIKQKTKGFKNKESSVLRIIICNLNYIKNKIKSKFHKKTQCSVTSDTTQHCLYHQQNTRKIRKLSHQHGIVQDTEYFVNLEMVSYTTQ

SEQ ID NO: 64194 - protein, 64 aa, Gossypium hirsutum
  Clone ID: LIB3145-016-Q1-K1-F12.pep
RQHTQLVHLLKFANAHITATCGARNIDLVRSLGADEVLDYKTPDRGALKSPSGRKTSAIYQVTF

SEQ ID NO: 64195 - protein, 152 aa, Gossypium hirsutum
  Clone ID: GOSHI-09MAY01-C14531_2.pep
SRSSLEIPKKEKLVMGRELTEVHMDVKPNGLVKSIVNRVNLQGTEPNNLTVKKGATENSVIEDGQEKQDVLCVKTTNFSTDIPEEKNEKAEDQKSADNMLSTAESKSTSVENTHANDTTSETGANGMETVNSTPSPTSAKDSEPNRPMTPLM

SEQ ID NO: 64196 - protein, 106 aa, Gossypium hirsutum
  Clone ID: GOSHI-09MAY01-C14531_1.pep
MTLLPKLVQMAWKLLTLHLPLLLQRIRQPNRPMTPLMSKKSSQPYERKHTDEDDTWSVASSTAIYARRSRLRVTDGSSPTFKSAERAEKRREFYQKLEEKYRALEA

SEQ ID NO: 64197 - protein, 149 aa, Gossypium hirsutum
  Clone ID: GOSHI-09MAY01-C14521_1.pep
ILEPQSYLTLLSSSLSARLSMAKTNIGSFFNKFLSLFILLLHLGCFVFTAAKDNHKATKKRKSSPLSPNSHKHRKALSSTWTFLKRIFSSKANCINTIQAAHPPTSATTPALTFARNSQHSLVSMSMINPPETHLSDSPPPLSQIQSGS

SEQ ID NO: 64198 - protein, 85 aa, Gossypium hirsutum
  Clone ID: GOSHI-09MAY01-C14461_1.pep
TMSRNKISMWSNALLANFRTPYTGSGNLKNYGNCKDLVFFFLPCHEYCPKQSAAACVCIAWAESRECNATIHDLFRSVYRLNRSH

SEQ ID NO: 64199 - protein, 119 aa, Gossypium hirsutum
  Clone ID: GOSHI-09MAY01-C14791_2.pep
MATSAMSEKRVVLLCGDYAEDYEVMVPFQALLAYGISGDAVRPGKKAGETCRTAIHQLSGHQTYTEIRGHNFTLNASFEDIDHTKYDGLVIARGRAPEYLAMDAFGLNMVRNFVNYGKP

SEQ ID NO: 64200 - protein, 392 aa, Gossypium hirsutum
  Clone ID: GOSHI-09MAY01-C14791_1.pep
MATSAMSEKRVVLLCGDYAEDYEVMVPFQALLAYGISVDAVCPGKKAGETCRTAIHQLSGHQTYTEIRGHNFTLNASFEDIDHTKYDGLVIAGGRAPEYLAMDAFVLNMVRNFVNSGKPVASICHGQLILAAAGAVGGLKCTGFPAVGPTLIAAGALWIEPDTLAACVVDGNIITAATYIGHPEFIRLFVKALGGTISKSNKRILFLRGRLMEDYEVTVPFQSLQALGCRVDAVCPKKKAGHSCPTAVHDFEGDQTYSEKPGHDFTLTANFEDIDASSYDALVIPGGRAPEYLAIDGKVIDIAKHFMESEKPVASICHGQQILAAAGVLKGKKCTAYPAVKLNVVLAGATWLEPEPIDRCFTHGNLVTGAAWPGHPEFISQLMDLLGIKVSF

SEQ ID NO: 64201 - protein, 351 aa, Gossypium hirsutum
  unsure (1)..(351): unsure at all Xaa locations
  Clone ID: GOSHI-09MAY01-C14741_1.pep
DEHFRSRSSDYDATVPQSPIVVFINSRSGGRHGPVLKERLQQLISEEQVFDLLDVKPHEFVRYGLACLEKWGNNGDICAKETRRNIRVVVAGGDGTVGWVLGCLGELHQKGRDPVPPVAVIPLGTGNDLSRSYGWGGSFPFAWKSAINGSLHRATTGPICRLDSWHVVLQMPGGEVIDPPHSLKATEDCHFDQTLEIDGGIPDKVNCYQGVFYNYFSIGMDAQVAYGFHHLRNEKPYLAQGPISNKIIYSSYSCTQGWFLTPCVSDPSLRGLKNXILRIYIKKARCSEWEQIPVPRSVRAIVALNLHNYGSXGRYPWGLLKPEYLDKRGFVEAHADDVLLEXFGLKQGWNA

SEQ ID NO: 64202 - protein, 189 aa, Gossypium hirsutum
  Clone ID: GOSHI-09MAY01-C14771_1.pep
MYTSSMRKSFKDSLKVLEADIQRANTLASDFPREYDGACLQMRMSYSPAAHLFLFLVQWTDFHLAGALGLLRILIYKVYVDGTTTMSTHERKASIREFYTVIYPSLLQLQSGVTDSEEKQQKAACVERYRRREDEEYKQLTDIDFEREEECGICMETNRKMLLPNCNHTMCLKWYRDRRSLSYFCPFVL

SEQ ID NO: 64203 - protein, 152 aa, Gossypium hirsutum
  Clone ID: LIB3147-058-Q1-K1-G6.pep
RTRGREFYTVIYPSLLQLESGVTDSEDKQQKAACVERYRRREDEEYKQLTDIDFEREEECGICMETNSKMLLPNCNHTMCLKCYREWRSISQSCPFCRDSLKRVNSGDLWVYTDSRDIIDMATVTRENLRRLFMYIDKLPLIIPDTIFDTYD

SEQ ID NO: 64204 - protein, 228 aa, Gossypium hirsutum
  Clone ID: GOSHI-09MAY01-C14661_1.pep
VKRFNQEGFQGHREWLAEVNYLGQLYHPHLVKLIGYCLEDEHRLLVYEFMPRGSLENHLFRRGTYFQPLSWSLRMKVALGAAKGLAFLHSAETKVIYRDFKTSNVLLDSNYNAKLSDFWLAGDGPTGDQSHVSTRVMGTYGYAAPEYLATGHLTAKSDVYSFGVVLLEMLSGRRAVDKNRPSGEHNLVEWAKPYLANKRKIFRVLDNRLEGQYSMEAAFKAAALALRC

SEQ ID NO: 64205 - protein, 343 aa, Gossypium hirsutum
  Clone ID: GOSHI-09MAY01-C14611_1.pep
MGVYLSTPKTEKLSEDGENDKLRFGLSSMQGWRASMEDAHAAYLDLDDSTSFFGVYDGHGGKAVAKFCAKHLHQQVLKHEAYSAGDIGTPVQKAFLRMDEMMCGQRGWRELAVLGDKMDKVSGFFEGFVWSPKGDEANDHFDDWPPEEGSHSDFHGPTSGCTACVAIIRNKQLVVANAGDSRCVISRKGQAYNLSKDHKPDLELEKDRILKAGGFIQVGRVNGSLNLARAIGDAEFKQNKSLPAERQIVTANPDINTVEICDDERPLVLACDGIWDCMSSQQLVDWVREQLNSETKLSAICERVFDRCLAPTAGGEGCDNMTMILVQFKKPVGSGTSLSSTQH

SEQ ID NO: 64206 - protein, 129 aa, Gossypium hirsutum
  Clone ID: GOSHI-09MAY01-C14621_2.pep
MENMQYAEELVREFLVFRGFTNTLQAFETERCTDIGKMFQGDEIVDLIFAVYIPKFHAEKLVGLFRFFKQCFSSWSETTMLDTFSKLEGSVLRCYIVHALQSGRKDKVVEFFGMNGNDLLLKGSDWTAW

SEQ ID NO: 64207 - protein, 135 aa, Gossypium hirsutum
  Clone ID: GOSHI-09MAY01-C14621_1.pep
GNFWSSEDLQIHYKLLRLRDGSVLKCYIDHALQSGRKDKVVEFFGMNGNDLLLKGSDWTAWFAIPYVNNPSINPQFRVYFSKEWYEALRLSVTNFFSEIFNGTLNDGILTNVLNQSTPSCPTEDQFRKDTISWLK

SEQ ID NO: 64208 - protein, 163 aa, Gossypium hirsutum
  Clone ID: GOSHI-09MAY01-C14191_1.pep
TIVSFRVVILSSKTLISPIVATVYNGDLVARQSDLKPITFPSSTTKRVPIVKCEASFSTTTTTELEPVFTSVKSFAPATVANLGPGFDFLGAAVDGLGDFVSLSIDPSGSPGHVTISEISGSSKLSPNPLFHCAGLAAIGTMKMVHVRSLGPSLQLLKGLPSG

SEQ ID NO: 64209 - protein, 110 aa, Gossypium hirsutum
  Clone ID: GOSHI-09MAY01-C14121_1.pep
KKETSLSLSFVQTYCCQLSVAQYFVLVGNYGLSPFRDPKQQTCLKLEPSITNTKNRVPLITWVMKQLTCSGSLDALNPIFSPKEEMISMKKQIYSREFQAMLDGLEDEDS

SEQ ID NO: 64210 - protein, 154 aa, Gossypium hirsutum
  Clone ID: GOSHI-09MAY01-C14091_1.pep
TFSNFSLTERYRDGSPMATQIDCNNEESFSYALQIVTSSVLPMSMHAAVQLDIFGIMAKCGPDAELSAKEIAAQLATNNSEAASMLDRILLVLASHGIVGCSVADEEKGNPRRLYSLTPVSKFFVRNEDGVSLGPLMALIQDKVFIDSWSQLKD

SEQ ID NO: 64211 - protein, 128 aa, Gossypium hirsutum
  unsure (1)..(128): unsure at all Xaa locations
  Clone ID: uC-gsflmaxxa054a02b1.pep
MQLGGLDIFGIMAKCGPDAELSAKEIAAQLATNNSEAFSMLDPILIVLASHGIVGCSMADEEKGNPSMLYSLTPVLKFFVRNEKGVSLSPXCWIVQDKGFIDSWSQLKDAIIGXGAPFDKVHGTNPFE

SEQ ID NO: 64212 - protein, 142 aa, Gossypium hirsutum
  Clone ID: GOSHI-09MAY01-C14011_2.pep
SYQVASLVGTWETRTNKKKKMRGITIFCWNPGAQYPLHVLTMPGKIKQQKKRKKKEKRYKRGFFLSDHKYENNKRLLLFYCEELRKILQGKPASSFVLLLCQRNRFSQLAVLKSIKHLQVTAALATVKVGNVLPEPIHSRQC

SEQ ID NO: 64213 - protein, 116 aa, Gossypium hirsutum
  Clone ID: GOSHI-09MAY01-C14011_1.pep
ATCKGGPAEIIVHGKSGFNIDPYHGDQAAEILVDFFDKCKKEPSHWNDISEGGLKRIQEKYTWQIYSERLLTLTGVYGFWKHVSNLDRRESRRYLEMFYALKYRKLAESVPLAEEE

SEQ ID NO: 64214 - protein, 92 aa, Gossypium hirsutum
  Clone ID: GOSHI-09MAY01-C14341_2.pep
PTRPSPSSMKQVSVVWDAYAATKDAHGICILTEWDEFKTLDYQKIYDNMQKPAFVFDGRNIVDVAKLREIGFIVYSIGKPLDEWLKDMPAVA

SEQ ID NO: 64215 - protein, 181 aa, Gossypium hirsutum
  Clone ID: GOSHI-09MAY01-C14341_1.pep
LKVVKSDMQSQLICTGCRSILLYPRGATSVCCALCNTITPPGMEMAQLICGGCRTLLMYTRGAASIRCSCCHTINVAPASNQISHITCGHCRTTLMYPYGAPSVKCAVCQYVTNVGMGNVRVPLPVNRPNGKAATGSMATPSASPSQTVVVENPMSVDESGKLVSNVVVGITTGKKMNNPV

SEQ ID NO: 64216 - protein, 60 aa, Gossypium hirsutum
  Clone ID: uC-gsflmaxxa091f04b1.pep
MQSQLICTGCRSILLYPRGATSVCCALCNTITPPGMEMAQLICGGCRTLSNSILYNIHFF

SEQ ID NO: 64217 - protein, 220 aa, Gossypium hirsutum
  Clone ID: GOSHI-09MAY01-C14371_1.pep
KKRSTASPKALRSLATRKTLTLALNSTRLAQSRALQTFSLPDLPYDYGALEPAISGEIMQLHHQKHHQTYITNYNKALEQLHDAIQKGDSSTVVKLQSAIKFNGGGHINHSIFWKNLAPIREGGGEPPHGSLGWAIDTNFGSLESLIQKMNAEGAALQGSGWVWLGLDKELKKLVVETTANQDPLVTNGPNLVPLLGIDVWELPYLRPDVDRYLRRMRHK

SEQ ID NO: 64218 - protein, 152 aa, Gossypium hirsutum
  Clone ID: LIB3582-033-P1-K1-F4.pep
KTLTLALNSTRLAQSRALQTCSLPDLPYDYGALEPAISGEIMQLHHQKHHQTYITNYNKALEQLHDAIQKGDSSTVVKLQSAIKFNGGGHINHSIFWKNLAPIREGGGEPPHGSLGWAIDTNFGSLESLIQKMNAEGAALQGSGWVVSDFVC

SEQ ID NO: 64219 - protein, 164 aa, Gossypium hirsutum
  unsure (1)..(164): unsure at all Xaa locations
  Clone ID: GOSHI-09MAY01-C14281_1.pep
MAATAASGLQLASARPCIASSRRVFKAGAASLDVNSKAVSWTKLASACHLSQSLEPFRRSFASSSVKFNKVVTKAMSESSENKPVSGLPIDLKGKRAFIAGVADDNGYGWAIAKSLAAAGAEILVGTWXPALTYLKPTATLKFDESRLLPMALIEITKLIPDAA

SEQ ID NO: 64220 - protein, 120 aa, Gossypium hirsutum
  Clone ID: LIB3189-033-P1-K1-C11.pep
GRVGGRVGGRVGKVVIKAMSEASENKPVSGLPIDLKGKRAFIAGVADDNGYGWAIAKSLAAAGAEILVGTWVPALNIFETSLRRGKFDKSRVLPDGSLMEITKVYSLDAIFDNPDDVPGD

SEQ ID NO: 64221 - protein, 110 aa, Gossypium hirsutum
  Clone ID: GOSHI-09MAY01-C14261_2.pep
MEANRGQNGIQQLLAAEQDAQHIVNAARNAKMARLKQAKEEAEKEIAEYRAQVEYEFKKKVAESSGYSGANVKRLETETDAKINHLKNEAARISHDVVQMLLKNVTTVRN

SEQ ID NO: 64222 - protein, 146 aa, Gossypium hirsutum
  Clone ID: GOSHI-09MAY01-C14261_1.pep
KDTPIASVEDPFDQDDWSSWASLQSSIDIQLVGDDLLVTNPKRISEAIQKKACNALLLKVNQIGTVTESIQAALDSKAAGWGVMVSHRSGETEDNFIADLSVGLASGQIKTGAPCRSERLAKYNQLLRIEDELGNVCYAGEAFRSP

SEQ ID NO: 64223 - protein, 165 aa, Gossypium hirsutum
  unsure (1)..(165): unsure at all Xaa locations
  Clone ID: uC-gsflnu33B062d06b1.pep
METYKLISILLSFAIIAFSTSARMLDEQPSNPVVPPVATATPIVPQPNPTGAVVGNPXVAAGAATGPIPTGTTVGNPGVGAAASGPIPTGPNVANSGAGAATADHPLIFFMHDILXGGSNPTAIAITGXVVNNPAVNGQLAFPKPNGANLPVNNGVDENSGNNGF

SEQ ID NO: 64224 - protein, 54 aa, Gossypium hirsutum
  Clone ID: uC-gsflnu33B062d11b1.pep
STCNGSSRIRLWDYLGCPVPAEWLRPGFEGCSSSILAKVENAIIAKERRIEMSL

SEQ ID NO: 64225 - protein, 112 aa, Gossypium hirsutum
  Clone ID: LIB3147-027-Q1-K1-D12.pep
MSAMLVLLSDLLRGVNLQEQDAQHIVNAARNAKMARLKQAKEEAEKEIAEYRAQVEYEFKKKVAESSGYSGANVKRLETETDAKINHLKNEAARISHDVVQMLLKNVTTVRN

SEQ ID NO: 64226 - protein, 71 aa, Gossypium hirsutum
  Clone ID: LIB3148-036-Q1-K1-G7.pep
TYRNILIIFSFHFCTIFFKIIFYFLNFEYLFTKVQQNYRESHLIKVFIQHSKYNLYQNLIIQIPQTEIYPS

SEQ ID NO: 64227 - protein, 79 aa, Gossypium hirsutum
  Clone ID: LIB3196-039-P1-M1-H11.pep
MEANRGQNGIQQLLAAEQDAQHIVNAARNAKMARLKQAKEEAEKEIAEYRAQVEYEFKKKVAEAIDLLRDPVILDYNMS

SEQ ID NO: 64228 - protein, 50 aa, Gossypium hirsutum
  Clone ID: LIB3135-012-Q1-K1-E8.pep
KKHQHPNIYLFLNTSLQGSAELQRITSNQSLHSTLQIQLIPKLDYSDPTN

SEQ ID NO: 64229 - protein, 48 aa, Gossypium hirsutum
  Clone ID: uC-gsflnu33B112c04b1.pep
FEFLMSLDLSSILLNGSILSLSSSNKPRLVINPLLQLPQLTHRARGDP

SEQ ID NO: 64230 - protein, 78 aa, Gossypium hirsutum
  Clone ID: GOSHI-09MAY01-C15991_1.pep
KKKREKKKKTLNFRFDDSTLVLSTSSASLKHKRLKSDLFILKAYLVFFELLLLIWFLRYLIEMELLDGNLELKEIQKL

SEQ ID NO: 64231 - protein, 57 aa, Gossypium hirsutum
  Clone ID: GOSHI-09MAY01-C15971_1.pep
YLKDNASVSELFYVIKMAAMNIDQAHSFSWIDVPQVCISNGPYIYIRNSFTFITHCG

SEQ ID NO: 64232 - protein, 198 aa, Gossypium hirsutum
  Clone ID: GOSHI-09MAY01-C15911_1.pep
MASTILRRATSSVIKSSLLTEASRRSYASVAVGTDILSAASQVSLQKARSWDEGVTSNFSTTSVNDIFKGKKVVIFGLPGAYTGVCSQQHVPSYKKNIDKFKAKRIDSVICVAINDPYVMNAWADKLQAKDVIEFYGDFDGSFHKSLELGKDLSAALLGPRSERWSAYVVDGKVKALNVEGAPSDFKVSGAEVILEQI

SEQ ID NO: 64233 - protein, 64 aa, Gossypium hirsutum
  Clone ID: LIB3584-002-P1-K1-C12.pep
NFSFQGKKVVIFGLPGAYTGVCSQQHVPSYKKNIDKFKAKRIDSVICVAINDPYAMNGSADKLQ

SEQ ID NO: 64234 - protein, 318 aa, Gossypium hirsutum
  Clone ID: GOSHI-09MAY01-C15851_1.pep
HASAHASDELGKECKFLESTRNSKAMEVEELERSVRSLECENGGLKAQLAAYVPAIVSLLDSVTSLESRTLMHPKLPTDYNEEDPNLGTEFHAENCQPTSEGQIGLVPNAFSDLQGIHMRIKAIEKAVLEMEKLAMLENLNLNSKLETATRQIEELRYGSSSSGESVRAKRHVSARQEEEELGNGLSNNVNMQRPTPEISEENEMMTKDIILDQVSECSSYGLSRRGTAAEVDTETLELWETADHDANADLKVSKAQKMATAPTDYRQIGTVKAGKSRTPSTESLVKELGVDKESSKRFAEPNNNGSKRKILERLDSD

SEQ ID NO: 64235 - protein, 85 aa, Gossypium hirsutum
  unsure (1)..(85): unsure at all Xaa locations
  Clone ID: GOSHI-09MAY01-C15811_2.pep
MALSRFWRWLLIHIALFLSSRYAEDPLAFYALEVTYITASPLRVPQQVIAIDNTFPGPTINSTTNNNXVVNVRNKLDERLLMHWS

SEQ ID NO: 64236 - protein, 213 aa, Gossypium hirsutum
  Clone ID: GOSHI-09MAY01-C15811_1.pep
MALSRFWGRFLIHIALLSSSCFAADPFVFYDFEVSYITASPLGVPQQVIAINNKFPGPTINSTTNNNVVINVRNKLDESLLLHWSGIQQRRSSWQDGVPGTNCPIPPKWNWTYQFQVKDQIGSFFYFPSLHFQRAAGGFGGFIINNRDIIPIPFGSPDGDITILIGDWYTRNHTALRKALDAGKDLGMPDGVLINGKGPYQYNDTLVPDGIDY

SEQ ID NO: 64237 - protein, 71 aa, Gossypium hirsutum
  Clone ID: GOSHI-09MAY01-C15801_1.pep
MGSELIYRGSETQPSSDSYSPKPVKPWASVTRPIHYLLREQRLLFVFVGIAIATLIFTVFPTSPAPYVAPH

SEQ ID NO: 64238 - protein, 213 aa, Gossypium hirsutum
  Clone ID: GOSHI-09MAY01-C15821_1.pep
MAFPLFLVKKRVNKMEMVKCFMIVLILGLCHVPMAAPLEEKKSHRKTYIVHMAKSEMPPSFQHHTHWYDSSLKSVSGSAAMLYTYDNVIHGFSTQLTDEEAEQLESQPGILAVLPEVRYELHTTRTPEFLGLSQAAALFPESESASEVVIGVLDTGVWPESKSFADTGLGPIPSSWKGACESGTNFTSANCNKKLIGARYFAKGYEAALGAID

SEQ ID NO: 64239 - protein, 100 aa, Gossypium hirsutum
  Clone ID: GOSHI-09MAY01-C115599_1.pep
FTRPVLVDKDLKNNYDRIELEEMVQVALLCTQYLPGHRPKMSEVVRMLGGDGLAERWEASHRAESTKCKPPHEFSSSDRYSDLTDDSSLLVQAMELSGPR

SEQ ID NO: 64240 - protein, 340 aa, Gossypium hirsutum
  unsure (1)..(340): unsure at all Xaa locations
  Clone ID: GOSHI-09MAY01-C15571_1.pep
LSYIVRRPIRHRRYRIDAAEYRAILKNKLHQACAAVALSRAIGLXGSKVTYCAKLKNQALPSGDPMFEAPXKTQEQGEPDAGIAAVSTTQKKPGTQMRQATSGSSREDSDDGELEGDTETTENMDPADAKRARRMRSNRESARRSRRRKQAQMNELETQVGQLRAEHSSLLKRLTDMNHKYDEAAVDNRILKADIETLRAKVKMAEETFKRVTGINPVLLSRPSVPSVTVPFVSSPLESSTGSVPLPPDTNKLFHQPVPNIAAPIHHPRLDNSFTGNNLVTPIVNPQTEIGVENVNETSALQHTPRGVQKQIGPGVSPCVPMPGWEPGLPHGAATNNKQS

SEQ ID NO: 64241 - protein, 137 aa, Gossypium hirsutum
  Clone ID: LIB3197-008-P1-M1-E6.pep
HTVTSMVKMAEETVKRVTGLNPVLLSRPSVPSVPVPFVSSPLESSTGSMPLPPNTSKLFHQPVPDIAAPIHHPRLDNSFTGNNLVTPIVNPQTEIGVENVNKTSALQHTPRGVQKQIGPCVSPCVPMPGWEPGLPHG

SEQ ID NO: 64242 - protein, 145 aa, Gossypium hirsutum
  Clone ID: GOSHI-09MAY01-C15511_1.pep
MGKKKKRVPSKVWCYYCDREFDDEKILVQHQKAKHFKCHVCHKKLSTAGGMAIHVLQVHKESVTKVPNAKPGRESTDIEIYGMQGIPPDVLAAHYGEEEEEAPSKAAKLDIPSTQLVGGLMPGPLGVGYPPQSTLGAVQPMYNAA

SEQ ID NO: 64243 - protein, 57 aa, Gossypium hirsutum
  Clone ID: GOSHI-09MAY01-C15491_5.pep
ALWRYWRHFNLVDAIPNPSKEQLVDIVQRHFMSQQMDELQVIVGFVQAAKRLKTVCK

SEQ ID NO: 64244 - protein, 51 aa, Gossypium hirsutum
  Clone ID: GOSHI-09MAY01-C15491_3.pep
FNVVHLQKGASGHCGICSGCKEIEDRLQMTLMRMFRRVLSWVVNANRNLVS

SEQ ID NO: 64245 - protein, 142 aa, Gossypium hirsutum
  Clone ID: GOSHI-09MAY01-C15491_2.pep
MIEAMESSVVNGSGFTQLQQSYGDSSEEELSVLPRHTKVVVTGNNRTKSVLVGLQGVVKKAVGLGGWHWLVLTYGIEVKLQRNALSVIEAPTGNEEDDDLEFGNMQWNGSDLASDDTQKSHRSRHKSHKSTGSSHKTTSRSL

SEQ ID NO: 64246 - protein, 224 aa, Gossypium hirsutum
  Clone ID: GOSHI-09MAY01-C15491_1.pep
MLEAMESSVNGGGFSQFQSCGDSSEEELSVLPRHTKVVVTGNNRTKSVLVGLQGVVKKAVGLGGWHWLVLTNGIEVKLQRNALSVIEAPTGNEEDDDLEFENMQWNGSDMASDDTQKSHRSRHKSHKSTGSSHKTTSRSFSCDSQSKSSVSTPQGSTKVDLSKLEMAALWRYWRHFNLVDAIPNPSKEQLVDVVQRHFVSQQMDELQVIVGFVQAAKRLKTVCK

SEQ ID NO: 64247 - protein, 79 aa, Gossypium hirsutum
  unsure (1)..(79): unsure at all Xaa locations
  Clone ID: LIB3584-009-P1-K1-H12.pep
FDSLSWRKNLIEAMESSVVNGSGFTQFQQSYGDXXEEELSVLPRHTKVVVTGNNRPKSVLVGLQGVVXHAVVLGGWPWL

SEQ ID NO: 64248 - protein, 98 aa, Gossypium hirsutum
  unsure (1)..(98): unsure at all Xaa locations
  Clone ID: GOSHI-09MAY01-C15451_1.pep
MQHAGACDEKGNPIIKDYYGSPLAASGKPYDTMLVAKSECVYTGSGDQRSSMFAFNMEQGLPVMPEWLFCNRVNSRARKXLKIGPTRLSFKGCMGHGY

SEQ ID NO: 64249 - protein, 129 aa, Gossypium hirsutum
  Clone ID: LIB3145-005-Q1-K1-F7.pep
RKTRGDATRPPTPQKLNIFLERGQIDSIRRINYTDRGIEGDDKRTSRTIIIQNSRTPGTLVHGNQHDNSSLSIGRVTAGIEFSRPLRPKWSGTAGLIFQHAGARDEKGNPIIKDFYGSPLTASGKPYDD

SEQ ID NO: 64250 - protein, 98 aa, Gossypium hirsutum
  Clone ID: LIB3197-006-P1-M1-B4.pep
VFDDSFNPLYDSSSCPFVGGGFDCRKNGRPDRNYLKYRWQPNDCAVPSMLVLVMKKEIQLSRTSMAARLPQGLYVCSLVFISSIRFIYIISLLLSLFF

SEQ ID NO: 64251 - protein, 67 aa, Gossypium hirsutum
  Clone ID: LIB3493-016-P1-M1-A2.pep
LCSPQHAGACDEKGNPIIKDFYGSPLAASGKPYDDMLVAKFECVYTGSGDQGSSMFAFNMEQGIPVM

SEQ ID NO: 64252 - protein, 49 aa, Gossypium hirsutum
  Clone ID: GOSHI-09MAY01-C15421_1.pep
TLSQNLEASEWTRGRTRPDYAFMRCSFAEYGDRSTVERCLKFGRMNKEE

SEQ ID NO: 64253 - protein, 263 aa, Gossypium hirsutum
  Clone ID: GOSHI-09MAY01-C15771_1.pep
KMTNWSCLRGHRDIVTTPTPGAPNGADGQRSADHYQVNSSSSMMTGGKKRTQRPEAKGRGIKKQCLARVTGGEESVGELTVQHSGKIFTDQINRRTCKVKEKLWDRLRNCPEVISIIKQIEEKWPLLSDLEKIKENRSEILTKFKAGRLKEDGAKQELDKLKERLNHVDGQLQELHKANNLEELNKVKNLEEMFLNEDNDLETLQKEYYSIYPRMKEVVAPDDHGSLLIPEVLSKMNELENEIYAKDDNKVNVQDFNGLQQAL

SEQ ID NO: 64254 - protein, 103 aa, Gossypium hirsutum
  Clone ID: LIB3582-014-P1-K1-D11.pep
KMTNWSSLRGHRDIVTTPTPGAPNGADGQPSAYHYQVNSSSLMLTGEKKRNQKAKGKGKCIKKQCLPRVTGGEESVGELTVEHSGKNLTDQINRRACKVNSLN

SEQ ID NO: 64255 - protein, 102 aa, Gossypium hirsutum
  Clone ID: GOSHI-09MAY01-C15761_1.pep
MEGRLANSWRLTVNDKNFIKTALLSEIRIDGRKPFEFRKISIKFGREDGSSEVQLGQTRVMGMVTAQLVQPYRDRPKEGILSIFTGFSPMADPSFEPGRPGE

SEQ ID NO: 64256 - protein, 115 aa, Gossypium hirsutum
  unsure (1)..(115): unsure at all Xaa locations
  Clone ID: GOSHI-09MAY01-C115709_1.pep
MEGEGFVAASKVNIYEGRVTAFVICTCLIAASGGLLFGYDLGISGGVTSMEPFLNKFFPSVLEQQSKASQTENQYXCKFDSQLLTLFTSSLYLAALVAFFFASXVTRIFGRIISC

SEQ ID NO: 64257 - protein, 246 aa, Gossypium hirsutum
  Clone ID: GOSHI-09MAY01-C15731_1.pep
MPKIALGTSQEAAQPDCIKALVVEFITTFLFVFVGVGAAMAADESGANALVGLFAVAVAHALVVGVMISAGHISGGHLNPAVTLGLLFGGHITVVRAILYWIDQLLASSAACILLKYLTGGLNTPVHTLASGMGFLQGVIWEIILTFALLFTVYATIVDPKKGSIDGLGPMLTGFVVGANILAGGAFSGASMNPARSFGPALVSWNWTDHWVYWVGPLIGGGLAGYIYENFFIVRTHVLLPQNEAF

SEQ ID NO: 64258 - protein, 52 aa, Gossypium hirsutum
  Clone ID: uC-gsflnu33B025a05b1.pep
MTDHWVYWVGPLIGGGLAGYIYENLFIVRTHVLLPQNEAFLEINLSHQNTAM

SEQ ID NO: 64259 - protein, 52 aa, Gossypium hirsutum
  Clone ID: LIB3135-033-Q1-K1-F8.pep
LFPLLNCVFCRPLYYCVFLIVMNCKDDLLLLRRSSFYCALYHVFHSAIKICL

SEQ ID NO: 64260 - protein, 43 aa, Gossypium hirsutum
  Clone ID: LIB3197-011-P1-M1-H9.pep
LTRGFAVHWNKKHTIRRWATKMIYYFSDGALSTVLTIMFSTVQ

SEQ ID NO: 64261 - protein, 122 aa, Gossypium hirsutum
  unsure (1)..(122): unsure at all Xaa locations
  Clone ID: GOSHI-09MAY01-C15691_1.pep
MSCFGCCEEDNIHNATDNGGQYMVKNSAGNVGGYHTSETASKSAQTVKVQPIEVPAILADELKEITDNYGNDALIGEGSYGRVYYGVLKSGEAAAIKKLDASKQPDDEFXAQVSMVSRLKHE

SEQ ID NO: 64262 - protein, 112 aa, Gossypium hirsutum
  Clone ID: GOSHI-09MAY01-C115669_1.pep
SRKPYTPETIAYIKSLDAEQDIALLKSYGLDVPLECARTLRISTMLLKKGVERGLTPLAIGSIMCRENINKESAIEQIVKEAQDSLLPGMSEAAFIQSVSEVLDSWLDKLTN

SEQ ID NO: 64263 - protein, 90 aa, Gossypium hirsutum
  Clone ID: uC-gsflmaxxa040b04b1.pep
KSNNSIIFDSVRYTDRIYQVLIDRVKGRKKKKNRIMKALGPWISHIYIPTICSPKKKWTLHYVNANKLYLVIFIFYIFFVAEKELGNFNL

SEQ ID NO: 64264 - protein, 113 aa, Gossypium hirsutum
  Clone ID: GOSHI-09MAY01-C15651_1.pep
MGESRVTGKVKWFTDQRGFGFITPDDGGEELFVHQSSIRSDGFRILADGEEVEFVIDSSEGGRTKAVDVTGPNGNPVRGTTRSGRSGGGGGFGGRGRRGGYGGGGGGCLSVGR

SEQ ID NO: 64265 - protein, 137 aa, Gossypium hirsutum
  unsure (1)..(137): unsure at all Xaa locations
  Clone ID: GOSHI-09MAY01-C15661_1.pep
TVLGESKTSPPPAVSFIFSLFLTAACLFTPLGAQQQSPIKTIVALVMENRSFDHMLGWMKHXVNPSINGVTGDECNPASTNNPNPESICFTDDAEFVDPDPGHSFEAVEQXLFGSSTIPSMSGFVEQALAMTKNLSE

SEQ ID NO: 64266 - protein, 64 aa, Gossypium hirsutum
  Clone ID: GOSHI-09MAY01-C15631_2.pep
SPETPGVKISVEPQTLSFSQANEKKSYTVTFSGSSQPTGTNVFARLEWSDMKYTVGSPIAISWT

SEQ ID NO: 64267 - protein, 547 aa, Gossypium hirsutum
  Clone ID: GOSHI-09MAY01-C15631_1.pep
FSWCAIDETKESRSPRDDDGHGTHTASTAAGSVVEGASLFGYAQGTARGMATRARVAVYKVCWIGGCFCPDILAAMEMAIDDNVNVLSMSLGGGMSDYYRDSVAIGSFAAMEKGILVSCSAGNAGPAPYSLSNLAPWITTVGAGTLDRDFPAFVSLGNGKNFSGVSLYRGSPLPGKMLPFVYAGNASNATNGNLCMMDTLIPEKVAGKIVLCDRGMNARVQKGAVVKAAGGIGMVLSNTAANGEELVADAHLLPATAVGQKSGDAIRDYLFSNPNPTVTILFEGTKVGIEPSPVVAAFSSRGPNSITSEILKPDMIAPGVNILAGWSGAVGPTGLATDTRRVDFNIISGTSMSCPHVSGLAGLLKAAHPDWSPAAIRSALMTTAYTEYKNKQKMQDVATGKPSTPFDHGAGHVDPVSALNPGLVYDLTAEDYLGFLCALNYTEFQIRSLARRNFSCDASKRYRVTDLNYPSFAVNFDSVMGGSNVVKHTRTLTNVGSPGTYKVSVSPETPGVKISVEPQTLSFSQANEKKSLRDVMVVPATGQRVAL

SEQ ID NO: 64268 - protein, 129 aa, Gossypium hirsutum
  unsure (1)..(129): unsure at all Xaa locations
  Clone ID: LIB3272-009-P1-K1-D7.pep
NIITSGILKPDMNAAGVNISAGRSDALGPTVYGTYTSQVYSNIIXGLECLXAHGRGLRRLMKAANPDWTPAAIKSAVMTTAYTEYKNAQKMQDIVTAKPSTPFDHGARHVDPVSALNPGLVYDLTAEDY

SEQ ID NO: 64269 - protein, 140 aa, Gossypium hirsutum
  unsure (1)..(140): unsure at all Xaa locations
  Clone ID: LIB3147-036-Q1-K1-A7.pep
MHRATIGARITPELSCATIQHWXHQRAVIGARTKSLRFACKKRKENHNRHAKRIRKEIRDFFPKLVVVYRGYKAFFSICRKDLHKKNLHTHREKKHQRDIPKILYTEYFCNNTPEIFTGNEGDIYIFYFCFILFITSSCI

SEQ ID NO: 64270 - protein, 100 aa, Gossypium hirsutum
  Clone ID: LIB3197-002-P1-M1-A11.pep
LLDFATMHRATIGARITPELSCATIQHWPHQRAVIGARTKSLRFAFRFVAKSEAFRIPTTVCGGVGDAHGAEHGGPMNEADRPRAGAQRSGKFQRVFFAF

SEQ ID NO: 64271 - protein, 181 aa, Gossypium hirsutum
  unsure (1)..(181): unsure at all Xaa locations
  Clone ID: GOSHI-09MAY01-C15151_1.pep
MGKKGSGWFSTVKKVFKSSHKDLPDKKRENNVEKWPNEAPDVVSFEHFPAESSPDITNNESAMSTPLNEDRNHAIAVAMATAAAAEAAVAAAQAAAKVVRLAGYGRXSKEKRACTLIQSYYRGYLARTALRALKGLVRLHALMRGXYVRKPTPMTMRCMATLIRVRGKVRARWAALTDREK

SEQ ID NO: 64272 - protein, 167 aa, Gossypium hirsutum
  Clone ID: GOSHI-09MAY01-C15141_1.pep
PFCVGQRNSEVLGLNEHSMQALSWRKLYLSRAKLKASSRTSALLSGFAMVAMVEVQLDADHDYPPGLLIAFSACTTVLVAVHLFALMISTCILPNIEAVSNVHNLNSVKESPHERMHRHIELAWAFSTVIGTLLFLAEVVLLCWVKFLPLKKQPGQPRPTSKPPASG

SEQ ID NO: 64273 - protein, 138 aa, Gossypium hirsutum
  Clone ID: GOSHI-09MAY01-C15121_1.pep
MGKVKVGVNGFGRIGRLVTRAAFNSGKVDIVAINDPFIDLNYMVYMFQYDSTHGKFHGTVKAENGKLVINGSPITIFQERDPSKIKWGDAGAEYVVESTGVFTTTEKAGAHLQGGAKWVMISATSADAHMFVMRVKHE

SEQ ID NO: 64274 - protein, 112 aa, Gossypium hirsutum
  Clone ID: GOSHI-09MAY01-C15051_3.pep
MVASKKTKKTHESINNRLALVMKSGKYTLGYKTVLKSLRSSKGKLIIISNNCPPLRKSEIEYYAMLCKVGVHHYNGNNNDLGTACGKYFRVSCLSIVDPGDSDIIKSLPGDH

SEQ ID NO: 64275 - protein, 112 aa, Gossypium hirsutum
  Clone ID: GOSHI-09MAY01-C15051_2.pep
MAAGKKTKKTHESINNRLALVMKSGKYTLGYKTVLKSLRSSKGKLIIISNNCPPLRKSEIEYYAMLCKVGVHHYNGNNNDLGTACGKYFRVSCLSIVDPGDSDIIKSLPGDS

SEQ ID NO: 64276 - protein, 112 aa, Gossypium hirsutum
  Clone ID: GOSHI-09MAY01-C15051_1.pep
MVASKKTKKTHESINNRLALVMKSGKYTLGYKTVLKSLRSSKGKLIIISNNCPPLRKSEIEYYAMLCKVGVHHYNGNNNDLGTACGKYFRASCLSIVDPGDSDIIKSLPGDH

SEQ ID NO: 64277 - protein, 116 aa, Gossypium hirsutum
  Clone ID: uC-gsflmaxxa004f01b1.pep
IFGFVFFWIEQKKTHESINNRLALVMKSGKYTLGYKTVLKSLRFYKGKLIIISNNCPPLRKSEIEHYAMLCKDGVHHYNGNNNDLGTACGKYFRVSCLSIVDPGDSDIIKSLHGDS

SEQ ID NO: 64278 - protein, 119 aa, Gossypium hirsutum
  Clone ID: GOSHI-09MAY01-C115399_1.pep
MDKPLLFGETSNGGGRRDRLYRRSEAITYGSHYHRAAALVHLAEDGVGLPEQILDKSSFGSAAQFYFMFINFDIIWTLNYFALGVLNFLEKPLWCLSSSYSCSDRDYFFLGQVPYLNAT

SEQ ID NO: 64279 - protein, 191 aa, Gossypium hirsutum
  unsure (1)..(191): unsure at all Xaa locations
  Clone ID: GOSHI-09MAY01-C15291_1.pep
GRVGGRVGLCESADNELPIRSSRSQGMNLSVWGRIGSSRSRIEAKDKIDHLPSDHLENETKKEQEPFPSSQDTSCQVKRICSEDDGSKVMDLSLKSQIYSHSRRKPTQKALRTLFVNGIPQKCNKREALLSHFRKFGEVVDIYIPQNSERAFIQFSRREEAEAALKAPDAXMGNRFINFWWANRDSIPDMA

SEQ ID NO: 64280 - protein, 403 aa, Gossypium hirsutum
  unsure (1)..(403): unsure at all Xaa locations
  Clone ID: GOSHI-09MAY01-C15271_1.pep
QALVNLYQVVDEDERYAKLVVEVGGIVNVLVGFLDSPEMEIQEEASKIVSLLSGFDLYKGVLVGAGIIGPLVRVLENGSELGKEGAARCLQRVTVNSDNAWSVSAHGGVTALLKICSSGEFGXGELIGLACALLRNLVGVDEIKRFIVEEGAISTFIKLARSSPRVRQINSMEFLQNMASGDDSVRQMVVREGGVRPLVRVLDPKSSTSSKTREVALRAIENLCFSSQSCINMLMNFGFINQLFFLLRNGEASVQELALKRTRGRSRAPARAKKAIGDAGFMPELLKLLDAKSYEVREMATEALSSLVSVPKNRKRFVQDDRNVGFLLQLLDQEDGTPASEKLLLSILMSLTNCNSGRRKIASSGYLKNIEKLAEPEVYDAKKLVRKLSTNRFRSILSGFWHS

SEQ ID NO: 64281 - protein, 146 aa, Gossypium hirsutum
  unsure (1)..(146): unsure at all Xaa locations
  Clone ID: GOSHI-09MAY01-C15201_1.pep
MAAPAVEGVAVTALRSVLLRVRQAAERAATQPERVRVVAVSKTKPVSLIRQIYDAGHHCFGENYVQEFVQKAPQLPEDIEWHFIGHLQSNKVKTLLGGXPNLAFFQGVDNEKIANHLDRAVWSLERNPLEIFGQGNTSGEPSKSGI

SEQ ID NO: 64282 - protein, 98 aa, Gossypium hirsutum
  Clone ID: LIB3197-002-P1-M1-B2.pep
MAAPAVEGVAVTALRSVLLRVRQAAERAGTQPERVRVVAVSKTKPVSLIRQIYDAGHRCFGENYVQEFVQKAPQSNKVKTLLGGVPNLASFQGVDNEK

SEQ ID NO: 64283 - protein, 240 aa, Gossypium hirsutum
  Clone ID: GOSHI-09MAY01-C16581_1.pep
MAAQISKKRKFVADGVFYAELNEVLTRELAEDGYSGVEVRVTPMRTEIIIRATRTQNVLGEKGRRIRELTSVVQKRFKFPENSVELYAEKVNNRGLCAIAQAESLRYKLLGGLAVRRACYGVLRFVMESGAKGCEVIVSGKLRAQRAKSMKFKDGYMISSGHPVKEYIDSAVRHVLLRQGVLGIKVKIMLDWDPKGKQGPMTPLPDLVTIHPPKEEEEYTEKKDFEPLAPPTNIEVPVVV

SEQ ID NO: 64284 - protein, 115 aa, Gossypium hirsutum
  Clone ID: LIB3135-021-Q1-K1-F1.pep
MGSKRFKVFLFCTLFLFLGGLAVRRACYGVLRFVMESGAKGCEVIVSGKLRAQRAKSMKFKDGYMISSGHPDKEYIDSAVRHVLLRQGVLGIKVNIMLDWDPKGKQGPMTPLPDL

SEQ ID NO: 64285 - protein, 253 aa, Gossypium hirsutum
  Clone ID: GOSHI-09MAY01-C16551_1.pep
DIQEKKKNLVPESEFVDVLFNEPLESSTVEQMFLMGMNTCEGVDILDIRPCSSTQYRLERFQKQVQIMKKYRGTANVQRAWLASSRKALPTIMMHGLADCRLSSIPDLYAAGVHLAAAEFTNGSAKYCDVDENGVQYMILCRVIMGKMELLFPESGQCFPSSEDVDSGVDDLHHPKYYITWNMNINTHIYPEFIVSFKLSSNAKGNSVGSEASHAISGVTASSKGAQGCLPASAGELGSTKHQNSDSGGIPRK

SEQ ID NO: 64286 - protein, 143 aa, Gossypium hirsutum
  Clone ID: uC-gsronu33B127c09b1.pep
MMANSPTVIRPPPPSPQPPPPFFSSSSPPPLSLPDNTTSSTIIPSPSPLPFSLSPQIDPIGQNGNISIVSINPPPPFPDSPRSVDLSPLEFILALMAVITIPAIVYAFFFAVRCPPWSSDERQDRSRDNHGSAVEVTERREPV

SEQ ID NO: 64287 - protein, 88 aa, Gossypium hirsutum
  Clone ID: uC-gsflmaxxa061h11b1.pep
GLPFSLSPQIDPISHNGNISIASINPPPPLPDSPRSVDLCPLEFILALMAVITNPAIVYAVFFTSGALLVLSTNAMTGPGTTMVVLTK

SEQ ID NO: 64288 - protein, 173 aa, Gossypium hirsutum
  unsure (1)..(173): unsure at all Xaa locations
  Clone ID: GOSHI-09MAY01-C16531_1.pep
MAGVAPDGSQYDARQYDSKMNELIADDGNDFFTTYDEVYESFDKMGLQENLLRGIYAYGFEKPSAIQQKGIVPFCKGLDVIQQAQSGTGKTATFCSGILQQLDYGLVQCQALVLAPTRELAQQIEKVMRALGDYLGVKVHACVGGTSVREDQQSLXTGVHVVVGTPGRVFDML

SEQ ID NO: 64289 - protein, 148 aa, Gossypium hirsutum
  Clone ID: GOSHI-09MAY01-C16401_1.pep
MAVQVPSRQLFIDGEWREPILKKRLPTINPATEEIIGNIPAATAEDVELAVAAARRALSRNKGKDWATAPGAVRAKYLRAIAAKVTERKTELAKLEAIDCGKPLDEAVWDIEDVAGCFEYYADLAEGLDARQKAPVSLPMETFKRFGP

SEQ ID NO: 64290 - protein, 88 aa, Gossypium hirsutum
  Clone ID: LIB3582-035-P1-K1-A2.pep
MAAQVPSRQLFIDGEWREPILKKRLPTINPATEEIIGNIPAATAEDVELAVAAARRALSRNKGKDWATAPGAVRAKYLRAIAAKVNMP

SEQ ID NO: 64291 - protein, 144 aa, Gossypium hirsutum
  Clone ID: AW187261.1.pep
SQIHHIFASQIETKYLKVYQSKNKWDTRNHNILPNLLEVKIFQTPYIKFKRSYYFLTIFLKKSKQNNENKLKVLSLSLMNLRSSNEIFLPLHFKSIHDYINSSWIDGSKRKVPWKLRERVFKKRRQNFPGKLASGTEKSTPFYL

SEQ ID NO: 64292 - protein, 111 aa, Gossypium hirsutum
  Clone ID: LIB3197-025-Q1-M1-C11.pep
FSILLFLQFSFPPLLIFLPSRHYCKCCHFSLLEALIGDGRFNSFFFLSKEKFNGIKDKKGLIFLSWRLAFPGNFASFFQILSLSQLPPLVAFFSPFSPLFSRKFIFRNFSF

SEQ ID NO: 64293 - protein, 240 aa, Gossypium hirsutum
  unsure (1)..(240): unsure at all Xaa locations
  Clone ID: GOSHI-09MAY01-C116769_1.pep
LNDVNLKKETLKFEADELNPGKFLVSFTFDATVAGRITVIFFAKEGEDCNLTAMKESILPPVIVPFEQGLGQKFRLPSGTGIDFSMFEESELLKIDEVDIYHLAVKAEALPLNQNVSDGNQESGAMNSQITQAVFEKEKGEYQTRVMKQILWVNGKRYELQEIYGIGNSVDNDVDPYDSGKECVFCLSEPRDTTVLPCRHMCMCRSCAXVLRCQTNXRCPICRQPVERLLEIKVNNGPDE

SEQ ID NO: 64294 - protein, 233 aa, Gossypium hirsutum
  unsure (1)..(233): unsure at all Xaa locations
  Clone ID: GOSHI-09MAY01-C16751_1.pep
LDVLNHVKINVELETPIATLRSVIKSSKSDLSFSKQELRTAKEKITQAFVEFYRKLRLLKSYCFLNQLAFSKIMKKYDKITLRNASKAYLQMVDKSYLGSSDEVSKLMGRVEDTYVKHFANGNRRKGLKTLRPQAKKERHRITFLYGFFSGCSIALIVAIIVSIHARNLLKSQGRDQYMVNIFPLYSLFGYIVLHMLMYAGNVFFWKRYRVNFSFIFGFKQGTXLGYREVLLL

SEQ ID NO: 64295 - protein, 129 aa, Gossypium hirsutum
  unsure (1)..(129): unsure at all Xaa locations
  Clone ID: GOSHI-09MAY01-C16741_1.pep
MGGSSSKEGSWRQGSSYHSNPPSWDSHQGYPQTSYGQENHSFPPQYSYAEPQYYPYSQPEPQQHYPPPQPEPQYHPSPQDRVGDKKKLQRKYSKIADNYNCLDQVTEALAIAGLESSNLNVXIDFTKSN

SEQ ID NO: 64296 - protein, 169 aa, Gossypium hirsutum
  Clone ID: GOSHI-09MAY01-C16711_1.pep
MEVELEASWFLQCLHAYFCFFLIFTLITILPLLSLLFSLVPRPKLWCTCEICHTYLNMSWSKQFDNLCDWYTHLLKNSPGNTIHIHVLGNTITANPDNVEYMLKTRFENLPKGKPFSLILGDSLGRGIFNVDGDSWRFQTKMASLELVKLSIKSFALEIINCEIKDRLI

SEQ ID NO: 64297 - protein, 125 aa, Gossypium hirsutum
  Clone ID: GOSHI-09MAY01-C16681_1.pep
AQFLNTNAQVRSQNTEGQNPNQLQTPKTLAAAEASCVDATHASPHVRGATFDTSYARLRLRTCRVQTLRSVPARDAQKSSKNRHQTKGAERKKVRMTEQGRFVWILFLFYSILYIDAIKRTKTML

SEQ ID NO: 64298 - protein, 170 aa, Gossypium hirsutum
  unsure (1)..(170): unsure at all Xaa locations
  Clone ID: GOSHI-09MAY01-C116679_1.pep
MARLLSSNAVLKAIATLPAALSSRNVIGSFYPSGLKYSTSVPGDPGTHEDFRPTNKIQSSDVSLKDVVEQDVKENPVMIYMKGVPDFPQCGFSSLAVRVLKHYNVPLSARNILEDPELKSAVKAFSHWPTFPQIFIKGEFIGGSDIILNMHQXGELKEKLKDIVGSPKLE

SEQ ID NO: 64299 - protein, 63 aa, Gossypium hirsutum
  Clone ID: uC-gsflnu33B078h09b1.pep
HMEPFYLYHLPEKKRGKQKYFQIKQKPTTILRFNSELSELRTAYNILELFFQFSILVHVENYI

SEQ ID NO: 64300 - protein, 201 aa, Gossypium hirsutum
  unsure (1)..(201): unsure at all Xaa locations
  Clone ID: GOSHI-09MAY01-C16191_3.pep
SFVRPRVRPRVRPRVRGSPDEGDVQPGALITLPPPREVARPEIQRNSAPAGNLDEEEWVTVYGFSPADTNXALREFEKCGVILKHVPGPRDANWMHILYLNRSDAHRALSKNGMQINGALIIGVKPVDPMQREALNERMSYQGFMTLPPPSSRTSELSNFRPSRLYYLQNGNTNARQSGSAAIANPTKSLGTKIMEYMFGY

SEQ ID NO: 64301 - protein, 328 aa, Gossypium hirsutum
  unsure (1)..(328): unsure at all Xaa locations
  Clone ID: GOSHI-09MAY01-C16191_1.pep
MSTVVHRTPKSGRQSLFYQDLASPISARRGKFSSPGQAAAVSALWQENFGGSDLPPPPMYTLEDRSDFSPESGILDYPMSPEIKSDPRTPVRSSGRDFSTPATSKSRASTSWXVLNGHRXQQSPGSSSWWSPHACGSEHDVKGKGSPVDGMAQPGALITLPPPRAVARPEIQRNSVPTANLDEEEWVTVYGFSPADTNLVLREFEKCGVILKHVPGPRDANWIHILYSKRSEAQRALGRNGMQINGVLMVGVKPVDQMQREALNERLNHQGFMTLTPASSRTSECNNFRPPRPSYLQNGNANARQSEGIMASPTKSLGNKVMEYLFGS

SEQ ID NO: 64302 - protein, 201 aa, Gossypium hirsutum
  unsure (1)..(201): unsure at all Xaa locations
  Clone ID: LIB3829-017-Q6-K6-F2.pep
RTVVHRTPKSGRQSLFYQDLASPISARRGKFSSPGQAAAVSALWQENFGGSDLPPPPMYTLEDRSDFSPESGILDYPMSPEIKSDPKSPVQSSGRDFSTPAKSKSGASTSFAILNGQQNQQSSASLSWWSPAKNSSXEQDDKGKGSPVEGVVQPGALITLPPPREVARPEIQRNSVPAGNLDEEEWVTVYGFSPADTNLVL

SEQ ID NO: 64303 - protein, 82 aa, Gossypium hirsutum
  Clone ID: GOSHI-09MAY01-C116149_1.pep
KGSRHRISRFNDLGMFCGLTLLLKHGIQHIRLLNKLSVLHQQFVEQTHLLLQSEISGPHCQKLAFQRLLIGNWRNCSSRGFE

SEQ ID NO: 64304 - protein, 110 aa, Gossypium hirsutum
  Clone ID: GOSHI-09MAY01-C16111_1.pep
MRLSALGFFCFFFAPSLCRVPSETHVKTEPEHASTPPRGWNSYDSFCWTISEEEFLQNAEIVSNRLKPHGYEYAVVDYLWYRRKVEGACTDSLGFDVIDEWGRPIPDPGR

SEQ ID NO: 64305 - protein, 234 aa, Gossypium hirsutum
  Clone ID: GOSHI-09MAY01-C16051_1.pep
DGPHISGYIAWKSPNASPSTGSLSGASSVETSAEKTKKPLFQPDLNKSIGKIIELIEGIGLTSSDSSDSCLEKNQTPKQSPAHADYFVRVFQWKSSEISTVLQHFIRACNNMLNKRAGLETFAEELSFTFGLGLGTIALTPKEASSARDKIKRHFGWNDSQSEKEVAYASHGVESDVTHISKEQTSLVDSFASLPDQSHSVIPPLEEENKRLKDDLKDMKTRLESETDKSEALM

SEQ ID NO: 64306 - protein, 103 aa, Gossypium hirsutum
  Clone ID: GOSHI-09MAY01-C16001_1.pep
FRTRGFLSLFISLITRPLNYWQKDSIVKIFSSRYLNKMAVKPTVALRAFLVGGVAVFAKVAGAMKAAGGAKLGAAAAAMTVAASAAMTGSKQEQKDGSKQPSK

SEQ ID NO: 64307 - protein, 228 aa, Gossypium hirsutum
  Clone ID: GOSHI-09MAY01-C16021_1.pep
ALKLNAWKQLALEEGKEIPPEADAQKLMLYASADHVLHKILRWETIESEVDRLKSRLSQIYYDNLPKLRKPMEGLEEWLDAVSTAHIPCAVVSSLDRRNMVDALERIGLKKYFQAIISEEDGMESIAHRFLSAAVKLDRKPSKCVVFEDDPRGITAAHNCTMMAVALIGSHPAYDLGQADLAVGSFNELSVINLRRLFANKGSTFMDRQKQIIEKTPPKRKLTVDTIF

SEQ ID NO: 64308 - protein, 58 aa, Gossypium hirsutum
  Clone ID: uC-gsflnu33B023d03b1.pep
DKYIINYYIIMILYYYFLFLLIFLFCAKRVSFSLILHKITMAIRIVQRFVCSNSYCLL

SEQ ID NO: 64309 - protein, 450 aa, Gossypium hirsutum
  unsure (1)..(450): unsure at all Xaa locations
  Clone ID: GOSHI-09MAY01-C16391_2.pep
FCLVEYVLLPRRDAEYIAEEYDMEDIDDMDEEFRARDMSGSESDVDEFDFSNNKISDTSAAEARRGKDIQGIPWDRLSITRXKYRQTRLEQYKNYENIPRSGEVSGKDCKITKKGASYYDFRLNSRSVKSTILHFQLRNLVWATSKHDVYLMSQFSVMHWSSLTHKKREILNVSGHVAPSEKHPGSLMEGFTQTLVSTLAVKDKLLVAGGFQGELICKHLDRPGISFCSRTTYDDNAITNAVEIYVTPSGAVHFTASNNDCGVRDFDMEKYQLSKHFHFLWPVNHTSLSPDGKLLIIVGDNPDIMLVDSDTGKTVMPLRGHLDFSFASAWHPDGVTFATGNQDKTCRIWDVRNLSKSIAVLKGNLGAIRSIRYTSDGKYMAMAEPADFVHVYDVKSGYENEQEIDFFGEISGLSFSPDTESLFIGVWDRTYGSLLEYGRRRNYLYLDSLM

SEQ ID NO: 64310 - protein, 238 aa, Gossypium hirsutum
  unsure (1)..(238): unsure at all Xaa locations
  Clone ID: GOSHI-09MAY01-C16391_1.pep
MSYYQDDDAEYMADEYGMEDIDDMDEEFRARDMSGSESDVDEFDFSNNKISDTSAAEARRGKDIQGIPWDRLSITREKYRQTRLEQYKNYENIPHSGEVSGKDCKITKKGASYYDFRLNSRSVESTILHFQLRNLIWATSKHDVYLMSRFSVMHWSSLTHKKREILNVSGHVAPSEVCALAVIWHFIXLKHPGSLMEGFTQTQVSTLAVKDKLLVAGGFQGELICKVRRATFFPSILH

SEQ ID NO: 64311 - protein, 104 aa, Gossypium hirsutum
  Clone ID: GOSHI-09MAY01-C16321_1.pep
MLRFTLLWLLVFFLSLGSSSARPAPFAMRISCGARQNVRTAPTYALWYKDFGYTGGIPANATTPSFITPPLKTLRYFPLSEGPENCYGINRVPKGHYTVRIFFG

SEQ ID NO: 64312 - protein, 236 aa, Gossypium hirsutum
  Clone ID: GOSHI-09MAY01-C16221_1.pep
MGDRGGGCCPPMDLFRSEAMQLVQLIIPMESAHLTVSYLGDLGLIQFKDLNSDKSPFQRTYAAQIKRCGEMARKLRFFKEQMLKAGFSSSAKSLGETDNGFDDLEVKLGELEAELVEMNANGDKLQRGYTELLEYKLVLQKAGEFFTSAQRSATAQQREMESQQMGDETLETPLLREQETATDLSKQVKLGFITGLVPREKSMAFERILFRATRGNVFLKQVPAEEPITDPVSGEK

SEQ ID NO: 64313 - protein, 327 aa, Gossypium hirsutum
  unsure (1)..(327): unsure at all Xaa locations
  Clone ID: GOSHI-09MAY01-C17911_1.pep
MELMDLFIIGLALIFIRLWWRYSSVTGGGPKNLPPGPPRWPFVGNLIQIILQRRHFVFIVGELRKLYGPIFTLRMGQRTMVIVTDSSLIHEALVQKGHTFASRPPDSPIRLVFSVGKCAINSAEYGPLWRTLRKNLVTELITPTRVKQCSWIRKWAVENHMKRSRGEAFENGFVEVMSNCRLTICSILICLCFGAKISEERIKNIESILKDVMLVTSPQLPDFLPILTPLFRRLMKEAKALRKRQLDCLAPLIKNRRAFVEKGENPNPEMVXPIGAAYIDSLFGLEPPTRGPLGEEEYVTLCSEVISAGTDTSTTTVEWAMLNLVMN

SEQ ID NO: 64314 - protein, 220 aa, Gossypium hirsutum
  Clone ID: GOSHI-09MAY01-C17931_1.pep
MTEPWCRLFKFIFPFLIKEKNIKVTSSGRLMAMLIGNPLIKARFIRVLVSAATATGDAPVIVAHKTASLNRLKSGAERVSVSANIYNQGFTAAYDVSLIDNSWPQDAFDIVSGNTSHSWQKLDAGGHLSHSFELEAKRKGMFHGAPAVIYFRIPTKAVQQEAYSTPILPLDILEERPPEKKFEWAKRLMAKYGSQISVISIVVLFIYLIITPSKASKKKR

SEQ ID NO: 64315 - protein, 53 aa, Gossypium hirsutum
  Clone ID: LIB3585-038-P1-K1-D12.pep
VHITCIVWDLGQNSISMPACDSDIVSHFAVVIVTRGMACGLNICSCTMPLLLS

SEQ ID NO: 64316 - protein, 170 aa, Gossypium hirsutum
  Clone ID: GOSHI-09MAY01-C117829_1.pep
MGLKPGLSALITGGASGIGKALSLALAGKGLFVTVVDFAEEKGKEVACLVEKENSRFHEKLEFPSAIFVKCDVTNPRDISLAFEKHVATYGGWDGCINSAGINIPVPFQNDQSDGAKTWRHTINVTLVAVMDCPRLAFKPIQALQTPGVIFNTGPWPGSSHFFLEPIYSA

SEQ ID NO: 64317 - protein, 258 aa, Gossypium hirsutum
  Clone ID: GOSHI-09MAY01-C17551_1.pep
ARAQVAAAAGHPQIAADSLAKVPDIQHMPATVATLVALKERAGDINGAAAVLDSAIKWWKTAMTEDDQLSVIMREAASFKLRHGKEEEAAHLYEELVKGNGNIEALVGLITTVAHANVEKAEAYEKQLKPLPGLKGADVDALEKTSGAKPVDGASRAGLAEAQEDGKTKEKPKKKRKRKPRYPKGFDPANPGPPPDPERWLPKRERSSYRPKRKDKRAAQVRGSQGAVVRDKNEPSAAATNSNTSNSKSNQATSSKGV

SEQ ID NO: 64318 - protein, 124 aa, Gossypium hirsutum
  Clone ID: GOSHI-09MAY01-C17501_1.pep
MAVLNSCKLVWICAVIVAAALMVAVDASGDHHYHNQQILGWIPTPTRSSCNGSIGECLGGEEEFELDSEISRRVLQTTRYISYGALQRNTVPCSRRGASYYNCQPGAQANPYNRGCSRITRCRG

SEQ ID NO: 64319 - protein, 98 aa, Gossypium hirsutum
  Clone ID: GOSHI-09MAY01-C17451_1.pep
LITIVHTEELKLNSIGTLKPSMLEMSIKSWCSNWPLEPPPSRPPAPPPKPPPKFSFSSFLRSAIPIANTNINANTPSLLELTFPAIFQENPTRPRPRG

SEQ ID NO: 64320 - protein, 135 aa, Gossypium hirsutum
  Clone ID: GOSHI-09MAY01-C17471_1.pep
MASPSLLQSTSSSFHGPSPFLAPPFSARLPYANPRNGYAGVVSVRATGEIVLVDKSEAEKPYRLKTTYLDKIIPLLKEEFKYTNIHQVPKLEKIVVNCGIGDAAQNAKGLEAAMNEMALITGQRPVKTRARNSIA

SEQ ID NO: 64321 - protein, 112 aa, Gossypium hirsutum
  Clone ID: LIB3147-005-Q1-K1-F12.pep
SSFHGASAFLATPFSARLPYSNPRNGYAGVVSVRATGEIVLVDKSEAEKPYRLKTTYLDKIIPLLKEEFKYTNIHQVPKLEKIVVNCGIGDAAQNAKGLEAAMNEMALITGQ

SEQ ID NO: 64322 - protein, 225 aa, Gossypium hirsutum
  unsure (1)..(225): unsure at all Xaa locations
  Clone ID: GOSHI-09MAY01-C17411_1.pep
YAEDAISFANVDIISPAQKLLANQLTCNVVPGKSLLVTGPNGSGKSSLFRVLRGLWPIVTGRLYKPIHYFDEEAGSSCGIFYVPQRPYTCLGTLRDQIIYPLSREEAEMRELKFYGKDAINILDARLKTILEKGRLNYLLQREDGGWDSNLNWEDTLSLGEQQRLGMARLFFHKPKFGILDECTNATSVYVEEQLYXVANDLGITGITLSQRSALMPLHALEFRL

SEQ ID NO: 64323 - protein, 178 aa, Gossypium hirsutum
  Clone ID: GOSHI-09MAY01-C17421_1.pep
MSVSGIHGHVLEVTVVGCNRLKDTEWLSRQDPYVCLEYGSTKYRTRTCTDGGKAPVFQERFTFTLIEGLREINVVVWNSNTLTYDDFIGSGKIQLQKVLSQGFDDTAWSLQTKTGRYAGEVRLIMHYGNAKPPTTTYAPTAPQYTAPPPHVPQYSAPPATYPASYPPPATTYPSPSPY

SEQ ID NO: 64324 - protein, 229 aa, Gossypium hirsutum
  Clone ID: GOSHI-09MAY01-C17791_2.pep
GRVGGRVGRYLVGRVGPAAHRSYRCIVRYGYRDPRQEIDSFETDLVARLADFIRYDWQRTRHTTPYAEDDASHSNESSRERRLAAIGTVTFSGTPGYGIEESVEPASVSIGFSTVESVTDVIEMQAVGAGAVERRVRFAIDDDDSESDGQTKMYVQLEEELRDLMTAQEAGTAFILGHTHVEAKQGSSILKRLAINFGYNFLRRNCRGPDVALKVPPVSLLEVGMVYVV

SEQ ID NO: 64325 - protein, 280 aa, Gossypium hirsutum
  Clone ID: GOSHI-09MAY01-C17791_1.pep
WLLALGPSLGIARVPGIGLVFTDLTSGIPANFSRFVTNLPAFHCVLVFVCVKSVPVPFVPPAERYLVGRVGPAAHRSYRCIVRYGYRDVHQDVDSFESELVSKLADFIHYDWHRSQHSPHSEEDVSHSNESTSECRLAVIGTVAFSGTPAYEIEESMQPASVSIGRSPVESVTHGIGMEPVHAVERRVRFAIDDDSESDVRTNMELQLREELQDLLAAQEAGTAFILGHSHVRAKQGSSVFKRLAINFGYNFLRRNCRGPDVALKVPPVSLLEVGMVYVV

SEQ ID NO: 64326 - protein, 58 aa, Gossypium hirsutum
  Clone ID: AI725751.1.pep
DGKLTPHKPCQPLIKRLAINFGYNFLRRNCRGPDVALKVPPVSLLEVGMVYEMGSLHH

SEQ ID NO: 64327 - protein, 56 aa, Gossypium hirsutum
  Clone ID: GOSHI-09MAY01-C17751_1.pep
LRTRKRRQRDANAFKGCCCLQLLMISYKAAVISGHRFLMDIKFREEPSSHFQSRVC

SEQ ID NO: 64328 - protein, 129 aa, Gossypium hirsutum
  Clone ID: uC-gsflmaxxa026e10b1.pep
SFCCKVLIFRGYFGGFYCLEMMENSEESAVDDQGSGWFQVKKKHRSSSKFSVQSWVGGYSTKNANNLVRGRPLSNKKGGAVQGKYRSLLRSSGGNSDGHTQDGFANSTAESNEDEKSLYPTFNKGFVSC

SEQ ID NO: 64329 - protein, 219 aa, Gossypium hirsutum
  Clone ID: GOSHI-09MAY01-C17771_1.pep
MMNPPSNSKTPKNFSPFKQTPPLQDLQQAFSNIQTHCSSLFRQTQNQLMDAFNSTFSHFNPPSFSPKGPVFARIADSSKTQIALSKKNGDAMPAEKLEERLAGVPVYALSNSEEEFVLVSGVSTKKSLGLLCFKKEDAEALLEQMKNMDPGMRKGGSKVAAVALNKVVQLQVAGVALRLVPESTQIKNALRSRSLVLRSQNKSYRPVFFRKEDLEQSLL

SEQ ID NO: 64330 - protein, 355 aa, Gossypium hirsutum
  Clone ID: GOSHI-09MAY01-C17691_2.pep
SLYEGIDFYSTITRARFEELNMDLFRKCMEPVEKCLRDAKMDKSSVHDVVLVGGSTRIPKVQQLLQDFFNGKELCKSINPDEAVAYGAAVQAAILSGEGNEKVQDLLLLDVTPLSLGLETAGGVMTVLIPRNTTIPTKKEQVFSTYSDNQPGVLIQVYEGERASSRDNNLLGKFELSGIPPAPRGVPQITVCFDIDANGILNVSAEDKTTGQKNKITITNDKGRLSKEEIEKMVQEAEKYKSEDEEHKKKVDAKNALENYAYNMRNTVKDEKIGAKLAAADKKKVEDAIDEAIQWLDNNQLAESDEFEDKMKELESICNPIIAKMYQGAGADMGGMDEDAPASGTGAGPKIEEVD

SEQ ID NO: 64331 - protein, 242 aa, Gossypium hirsutum
  unsure (1)..(242): unsure at all Xaa locations
  Clone ID: GOSHI-09MAY01-C17691_1.pep
LVSCSHCYPSSSSLAYRLAPPSAAASPDACVRILRCCVTRHPTVPSQLSRFPALHLLENTVLNNTMSSSFSSFAHSNRSGGRGQDMKHDRERSRGCGGGGSKDKIDALGRLLTRILRHMATELNLNMRSDGYVKVEDLLKLNMKTFANIPLRSHTVDDIKEAVRKDNKQRFSLLEENGELLIRANQGHTVTTVESERLLKQILSADEVQFCVHGTYKRNLESILESGLKRMKRLHXHFSSGL

SEQ ID NO: 64332 - protein, 89 aa, Gossypium hirsutum
  Clone ID: LIB3147-050-Q1-K1-A11.pep
HYVLLFFFFRSFKYKSEDEEHMIKVDAKNALENYAYNMRNTVKDEKIGAKLAAADKKKVEDAIDEAIQWLDNNQLAESDEFEDKIEEVD

SEQ ID NO: 64333 - protein, 67 aa, Gossypium hirsutum
  Clone ID: LIB3493-035-P1-M1-D6.pep
AWMRMPQPVEPAQAPKLRKWTKKFLSILFDPFICSFSRFMLVSFLLDFSYCFLALNMFLRVLFEANF

SEQ ID NO: 64334 - protein, 162 aa, Gossypium hirsutum
  unsure (1)..(162): unsure at all Xaa locations
  Clone ID: GOSHI-09MAY01-C117699_1.pep
MEKALTKVGSLKVGGLWISKKAKEEFSNITADLTTFSNTVEEKAKWVFNKLKGKPTKSLPDLLQEYNLPPGLFPQNVICYEFDETKAKLIVYMSSPCEVSLQXDSSVIRYATRVKGTLLRGKLTGIXGMKTKVLXWVKVTIVAVEGYKSNKVWFTAGVKNQG

SEQ ID NO: 64335 - protein, 156 aa, Gossypium hirsutum
  unsure (1)..(156): unsure at all Xaa locations
  Clone ID: GOSHI-09MAY01-C17601_1.pep
QYKPKEILHDIHDQHGVAGSYMQAWPGXERSMAALHGTFEEGYRLLPAYCEQITKTNPGSVASVVATRQENCFQCLFISYRASIYGFISACRPLLELDKVDLKGKYLGSWLCAAPVDADEXLFPLAIAIVDVENDENWMWFVSELRKLLWVNTENM

SEQ ID NO: 64336 - protein, 141 aa, Gossypium hirsutum
  unsure (1)..(141): unsure at all Xaa locations
  Clone ID: GOSHI-09MAY01-C17141_1.pep
SGEIQGTFNGSALQMLWLNNQLHGGMTGPIDVVATXMESLTGVWLHGNHFTGTIPERIGKLTLLKDLNLNSNKLVGLIPISLANMRLQNLDLNNNHLMGPIPMFKASKVTFASNKFCQATQGLLCSPEVMALNRVSWSGNY

SEQ ID NO: 64337 - protein, 333 aa, Gossypium hirsutum
  Clone ID: GOSHI-09MAY01-C17051_1.pep
ACDCFIFLFLENYGVRKLEAFFAVLIATMAVSFPGMFGETKPSGTELLLGVLIPKLSSKTIKQAVGVVGCIIMPHNVFLHSALVQSREIDHTKKGRVQEALNYYSIESAAALLISFIINLFVTTVFAKAFYGTEVASTIGLVNAGQYLQDKYGGGLFPILYIWAIGLLAAGQSSTITGTYAGQFIMGGFLNLKLKKWLRALITRSFAIVPTMIVALVFDTSEAALDVLNEWLNVLQSIQIPFALIPLLCLVSKEQIMGTFKIGSVLKTIAWLVAVLVILINGYLLFDFFSNEVTGVMFTSIVFAFTGAYIAFIFYLVSWGFASSAWRRLSPAK

SEQ ID NO: 64338 - protein, 146 aa, Gossypium hirsutum
  unsure (1)..(146): unsure at all Xaa locations
  Clone ID: LIB3543-042-Q1-K6-B9.pep
VRPASGSFAGGATMIVALVFDTSEAALDVLNEWLNVLQSIQIPFALIPLLCLVSKEQIMGAGKIGSVLKAIDLCLAISMXTIAWLVAVLVILINGYLLFDFFSNEVTGVMFTSIVFAFTGAYIAFIFYLVSRGFTSSAWRRLSPAK

SEQ ID NO: 64339 - protein, 233 aa, Gossypium hirsutum
  Clone ID: GOSHI-09MAY01-C17001_1.pep
MAGVEAGKEEEATAVRITGKSHVKPGKLIGRKECPLVTFDLPYLAFYYNQKLLFYKNDGGGEFEDKVEKLKEGLRVVLEEFYQLGGKLGKDDDGVLRVDYDDDMDGVEVVEAVAEGITVDELTGDDGTSSFKELIPFNGVLNLEGLHRPLLSIQLTKLKDGVAMGCAFNHAILDGTSTWHFMSSWAQICNGTSSSVVVPPFLDRTTARNTRVKLDLSPVVSCNGDDATKQGQP

SEQ ID NO: 64340 - protein, 150 aa, Gossypium hirsutum
  Clone ID: GOSHI-09MAY01-C17351_2.pep
MVMVPGSSPQTDPSLSKQNPRKCCLNSPFLFFGKSPLNSSKPHEPLKCRRPLSNLYVKNSMKAPVTSSSSNFGFKELLETFTVEVQKAENKPLNVPLVAPFTIATSRLDKVENVAIRIELKNGCVGWGEAPILPFVTGEDQPTAMAKATG

SEQ ID NO: 64341 - protein, 196 aa, Gossypium hirsutum
  Clone ID: LIB3543-028-Q1-K6-H11.pep
LHGYGGGGGGGKPIQVSQNKTPGKLSQFALSFFGKSPLNSSKPHEPLKFQLPLSNLCGGGGIFSPVTSSSSNFGFKELLETFTVEVQKAENKPLNVPLIAPFTIATSRLDKVENVAIRIELKNGCVGWGEAPILPFVTAEDQPTAMAKAKGACDMLKNCSFLTLEAVLGEIGDLLPGHQFASVRAGIEMALIDAGA

SEQ ID NO: 64342 - protein, 167 aa, Gossypium hirsutum
  Clone ID: GOSHI-09MAY01-C117349_1.pep
MAVEARHLNLFPPQFTGNRETMNPIQGNGNMYQTEIGYGVPLSGTTTVAEGLLPLYKYNSTATAAMKSESSLTYNNNVLPLPRKRSRDSINPILSFPSPVQQQSNNNNGNNKTCFLGHDISFHMEQQQLDIDRIISQHMEKMRVEMEEKRKRQARKIMEAIVGGVMK

SEQ ID NO: 64343 - protein, 149 aa, Gossypium hirsutum
  Clone ID: GOSHI-09MAY01-C17371_1.pep
MGKSLPGATKLQHLAKVTGAAHHLNTTGKNPKPTTLNRRIISEDNKPNSKKKMESSSASQRLPLSEVVSDCVKRWFKDTLKEAKAGDVNMQVLVGQMYYSGYGVPRDAQKGRIWMTRASRLRSSVWKVSHKHPGYNASDSDSDEIKGDS

SEQ ID NO: 64344 - protein, 235 aa, Gossypium hirsutum
  Clone ID: GOSHI-09MAY01-C117359_1.pep
LTRPRTRGPEQEFLAQVSMVSRLKDENVVQLLGYCVDGSLRFLAYEYASNGSLHDRLHGKKGVKGAQPGPVLSWTQRVKIAYGAAKGLEYLHEKAHPHIIHRDIKSSNLLLFDDDVAKIADLDLSNQAPDATARLHSTRVLGTFGYHAPEYAMTGTLSSKSDVYSFGVILLELLTGRKPVDHTLPRGQQSLVTWATPKLSEDKVKQCVDGRLNGEYPSKALAKLAAVAALCVHLS

SEQ ID NO: 64345 - protein, 233 aa, Gossypium hirsutum
  Clone ID: GOSHI-09MAY01-C17291_1.pep
MGEEYDIVNLIALGVISWTTVFLLVRKIFSDRSFELCNRIVSTIHGILAVILASLSVEDWSCPVCPLASASTPKQRQVLAVTVAYLIYDLICCLFDVKFTLDNTVHHLVSIVGLAAGLAFQLCGSEQVAALFITEISSPFLHARELLKEFGYRDTDLNLAADVLFAVIFSVARMVGGPYLTFVTLTANNPLLIKAMAVGLQLVSAFWFYKIVKMVKYKLTKRWKQVGMPGKLD

SEQ ID NO: 64346 - protein, 309 aa, Gossypium hirsutum
  Clone ID: GOSHI-09MAY01-C17241_1.pep
MAITLNNGFKMPVVGLGVWRMDGKDVRDLIINSIKLGYRHFDCAADYKNEAEVGEALSEAFKTGLVKREDLFITTKLWNSDHGHVLEACKDSLKKLQLDYLDLYLVHFPVAVKHTGVGQTDSPLDKDGVLDIDTTISLETTWHAMEDLVSKGLVRSIGISNYDIFLTRDCLAYSKVKPAVNQIETHPYFQRDCLVKFCQKHGICVTAHTPLGGAAANAEWFGTVSCLDDPVLKALAEKYKKTVAQIVLRWGIQRNTVVIPKTSKFERLKENFEVFDFELAKEDMDKIKAIDRKYRTNQPAKFWGIDLYA

SEQ ID NO: 64347 - protein, 175 aa, Gossypium hirsutum
  Clone ID: GOSHI-09MAY01-C17271_1.pep
MENKAAVRFTLGKQSSMAPERDRGEADGKENEEGEEIDEGVRLMYLANEGDLDGIRELLDSGINVNFRDIDDRTALHIAACQGQTDVVSLLLQRGADVESTDRWGSTPLADAVYYKNHDVIKLLEKHGSKPFMAPMHVNHAREVPEYEIDPKELDFTNSINITKGTFCIALWRGT

SEQ ID NO: 64348 - protein, 135 aa, Gossypium hirsutum
  Clone ID: GOSHI-09MAY01-C10951_3.pep
MVKFLKPNKAVIVLQGRYAGRKAVIVRSFDEGTRDRPYGHCLVAGTKKYPSKVIRKDSAKKTAKKSRVKCFVKLVNYQHLMPTRYTLDVDLKDVVTADALQTKDKKVAACKATKERFQERFKTGKNRWFFTKLRF

SEQ ID NO: 64349 - protein, 135 aa, Gossypium hirsutum
  Clone ID: GOSHI-09MAY01-C10951_2.pep
MVKFLKSNKAVIVLQGRYAGRKAVIVRSFDDGTRDRPYGHCLVAGIKKYPSKVIRKDSAKKTAKKSRVKCFVKLVNYQHLMPTRYTLDVDLKDVVTVDALQTKDKKVAACKATKERFEERFKTGKNRWFFTKLRF

SEQ ID NO: 64350 - protein, 135 aa, Gossypium hirsutum
  Clone ID: GOSHI-09MAY01-C10951_1.pep
MVKFLKPNKAVIVLQGRYAGRKAVIVRSFDDGTRDRPYGHCLVAGIKKYPSKVIRKDSAKKTAKKSRVKCFVKLVNYQHLMPTRYTLDVDLKDVVTVDALQTKDKKVAACKATKERFEERFKTGKNRWFFTKLRF

SEQ ID NO: 64351 - protein, 135 aa, Gossypium hirsutum
  unsure (1)..(135): unsure at all Xaa locations
  Clone ID: LIB3825-028-Q6-K6-D1.pep
MVKFLKPNKAVIVLQGRYAGRKAVIVKSFDDGTRDRPYGHCLVAGIKKXPSKVILKDSAKKTAKKSRVKCFVKLVNYQHLVPTRYTLDVDLKDTVTVDALQTKDKKVATCKTIKQRLEERFKTGKNRWFFTKLRF

SEQ ID NO: 64352 - protein, 80 aa, Gossypium hirsutum
  Clone ID: uC-gsflnu33B110c02b1.pep
MDSAKKTAKKSRVKCFIKLVNYQHLMPTRYTLDVDLKDVVTVDALQTKDKKVAACKATKERFEERFKTGKNRWFFTKLRF

SEQ ID NO: 64353 - protein, 309 aa, Gossypium hirsutum
  unsure (1)..(309): unsure at all Xaa locations
  Clone ID: GOSHI-09MAY01-C10941_1.pep
GRVGGGGSYFDDKYGGYNVSRSDLGSDLYGNRSDSYSRYGDDGGYGDGVYAYAGGKAEPYGARGTASKSSTWVQFDDFGRSINIPSGKDSSGGSGLAAGKILRAVPKDDTQQDVKSGVQKFRVKLLSESGAHGPMDVLCQIGLDGIRMLEPSSSRILRIYPLENITRCEVLDSSTFAFWSKSSVDIEPRRIRLQSNSYTTNTLLDIVTAATVQIKEMGWKSRPPESAKAAEQPAXKKRGFADWMNIIKPGAEEKDHWVPDEAVSKCTACATDFGAFCAVAXCRNCGDXFCDKCSHGRFSLSACECSFIC

SEQ ID NO: 64354 - protein, 403 aa, Gossypium hirsutum
  unsure (1)..(403): unsure at all Xaa locations
  Clone ID: GOSHI-09MAY01-C10911_1.pep
MGERKVEDMSLSALFEQARKIHLTVTESGADQDLVKKGCEVLEKCEDMITKLGLFSSNETKDDISTNNLKYLLVPFYLAELTEKLAQEVRIQILKISQAKLKEFISFCEAMELVPQEELEASVQGASNSFADRRALKIACFRRQRAAEAKLTEIKERKERRGRSTKAATLSTPVEVGEDXDLLDDDXQEEREAWPSAGAGAVCKAFDLLEMLKKEEEMLSAIKEKQLKDGEKEFSQAILDDRTKKAEAWHRDAAARARYTQPAAPITCATFAQNVIEGRANVSQAHDHKHQPMIFGPQSLIGGSLTSERERMAAQVFQPAYRMPTISIEEAGLREMEMMNKWQERNAKMFEEANSAWYKDKPKMGPSEDDEDDDAAQEKARAWDDWKDDNPRGAGNKKLTPCG

SEQ ID NO: 64355 - protein, 35 aa, Gossypium hirsutum
  Clone ID: uC-gsflmaxxa088e12b1.pep
MGERIVEDMSLSALFEQARKIHLTVTESGADQDLV

SEQ ID NO: 64356 - protein, 133 aa, Gossypium hirsutum
  Clone ID: LIB3135-044-Q1-K1-G9.pep
PRVRKQLKDGEKEFSQAILEERTKKAEAWHRDAAARARYTQPAAQVFQPAYRMPTISIEEAGLREMEMMNKWQERNAKMFEEANSAWYKDKPKMGPSEDDEDDDAAQEKARAWDDWKDDNPRGAGNKKLTPCG

SEQ ID NO: 64357 - protein, 79 aa, Gossypium hirsutum
  unsure (1)..(79): unsure at all Xaa locations
  Clone ID: LIB3166-031-P1-K1-H6.pep
SLHLFEMLFFEEEMLSAMEGKQLKXGDKQYSQAILDDRTKKAEACHLDAAPRARYTQPAXPITCATFAQTVFERRSNVS

SEQ ID NO: 64358 - protein, 75 aa, Gossypium hirsutum
  Clone ID: GOSHI-09MAY01-C10921_1.pep
DPSQLESMGDSKTVIKKSKATSTAKSVIGAIIKDIQNKKSYFQDLTFQHIHRSENTHAHGLAKKALAKEEKHVPG

SEQ ID NO: 64359 - protein, 62 aa, Gossypium hirsutum
  Clone ID: LIB3120-008-Q1-K1-B3.pep
SQSIRIMGDSKTVIKKSKATSTDKSVISAIIKDIQNKKSYFQDLTFQHIHRSDNTHAHGLAK

SEQ ID NO: 64360 - protein, 314 aa, Gossypium hirsutum
  unsure (1)..(314): unsure at all Xaa locations
  Clone ID: GOSHI-09MAY01-C110899_1.pep
PLVRGRVGRAGAGEKRKKSYDVEVQDGSSWIELLKSHRLAQVSLFQKPINKIKLADLMVATNNFDAENAVISTRTGVSYMAVLPARSAAPASGLSTCKLSEKQFRSEMNRLGQLRHPNLVPLLGYCVVGDERLLVYKHVPNGTLYSQLHGGNLIGFGNGKFEVLDWSTRLKIGVGVARGLAWLHHGCQPPYVHQYFSSNVVLLDDDFDARIADFGLARLMGSRDSNDSSFMNGDLGEFGYVAPEYSSTMVASWKGDVFSFGVVLLELVTGQKPIGVSNAKERFKGNLVDWVNQLFTLXSNKDAVDKALLGKGCD

SEQ ID NO: 64361 - protein, 74 aa, Gossypium hirsutum
  Clone ID: GOSHI-09MAY01-C10841_1.pep
VNIDKLWSLIPEDVKAKATKDAAPMIDVTQFGYFKVLGKGVLPENQPVVVKAKLVSKTAEKKIKEAGGAVVLTA

SEQ ID NO: 64362 - protein, 177 aa, Gossypium hirsutum
  unsure (1)..(177): unsure at all Xaa locations
  Clone ID: GOSHI-09MAY01-C10801_1.pep
DVKDFLDDYVERNQEDFDEFSDVDERYGSLALDKVDALEDLVAIGPLSKAAPILGLKPSLASSTSQGPVGSSLEHAEDSASQDSNSDIARTPPSKSSAITSATATPSGSHPIPAPLNLSXNSLSGASTPPIVLSGFKVLLESVLGNTGTTNPSSPVNLPNATKEEDITSFPGRRPSP

SEQ ID NO: 64363 - protein, 104 aa, Gossypium hirsutum
  Clone ID: GOSHI-09MAY01-C10591_1.pep
MAEEEETELSDDQKKGIAKWFLVNAPAGEIQYVSRDLKLVLNDDDVYNEAASEAFPVYNKSHLISLKMPGGFGDVLVTSYGELQDNEYLDPKTAQVAIVDHVKQ

SEQ ID NO: 64364 - protein, 98 aa, Gossypium hirsutum
  Clone ID: GOSHI-09MAY01-C10581_1.pep
MCGGAIISDFIAPVRSRRLTADYLWPDLRKSQSKKASSNRYSKPAIDFTDNFEADFQDFKDDKSDIEDYDVDDVLADAKPFAFSAAKKASSTVSHAQA

SEQ ID NO: 64365 - protein, 200 aa, Gossypium hirsutum
  Clone ID: GOSHI-09MAY01-C10571_1.pep
RSTQRPGSASVIFEEIRRRGLKVSVAGIPKTIDNDIPVIDRSFGFDTAVEEAQRAINAAHVEAESFENGIGLVKLMGRYSGFIAMWATLASRDVDCCLIPESPFYLEGPGGLFEYIERRLKENGHMVLVIAEGAGQELLSESLQSMTQKDASGNKLLQDVALWISQRIKDHFSKERKMTINLKYIDPTYMIRAIPSNASD

SEQ ID NO: 64366 - protein, 135 aa, Gossypium hirsutum
  Clone ID: GOSHI-09MAY01-C10491_1.pep
MANSKGSTNIRNLMFSGKHALLPPKSPFPTVASTYNDSAPNSVIGSKAIQKPREGSTYHQRTSSESLLIEEQPSWLDDLLNEPETPVRRGGHRRSSSDSFAYIDVSNGPNLDYAAQDEYGYKNMISGLSWASQGL

SEQ ID NO: 64367 - protein, 188 aa, Gossypium hirsutum
  Clone ID: GOSHI-09MAY01-C10451_1.pep
MNHHALQAQRREMKHKGRNVVWSIAMDKCLIEALAVQAKNGNKIDKCFNENAYTAACIAVNSRFNLNLNNQKVINRLKTIKKRYKVMRDMLSQDGFRWNPNTKMIEYDSEHLWKRYIVAHPDAKGFRGKHIEMYDELKIVCGNYQAPSRWAKMKDGSHPMGYQNFEKDSASFVSPSSDDLSDTDGTES

SEQ ID NO: 64368 - protein, 55 aa, Gossypium hirsutum
  Clone ID: LIB3166-026-P1-K1-B5.pep
HIISFPNARSHLPISFSISLASSFFVSPADQIRLLTGERLSLSFLYCLLSRFPGQ

SEQ ID NO: 64369 - protein, 149 aa, Gossypium hirsutum
  Clone ID: GOSHI-09MAY01-C10441_2.pep
MLPLSLLKTARPRPRLVELKNGETYNGHLVNCDTWMNIHLREVICTSKDGDRFWRMPECYIRGNTIKYLRVPDEVIDKVQEETKSRADRKPPGVGRGRGRAREDGPGGRQPKGAGRGLDDGARTTSGGRGRGGSGGKNTGGRGSGRGPG

SEQ ID NO: 64370 - protein, 161 aa, Gossypium hirsutum
  Clone ID: GOSHI-09MAY01-C10441_1.pep
MLPLSLLKTAQGHPMLVELKNGETYNGHLVNCDTWMNIHLREVICTSKDGDRFWRMPECYIRGNTIKYLRVPDEVIDKVQEETKSRADRKPPGVGRGRGRGREDGPGGRQPKGAGRGLDDGARAASGGRAGWLRWKNHGTKVVAEVKVDVMLLYIGQRCYF

SEQ ID NO: 64371 - protein, 156 aa, Gossypium hirsutum
  Clone ID: GOSHI-09MAY01-C10471_2.pep
MALEALNSPTPPATPTFHFEDTTNLHCLESFTKRKRSKRPRFDHVTTEEEYLALCLIMLARGGDANSTDTSVIPQRHRSPTPTASPPPAPAPAPTSTEQKVSYNCSVCNKSFNSYQALGGHKASHRKLSGGNDDQSTSTTTSATAGGVISSALNPS

SEQ ID NO: 64372 - protein, 192 aa, Gossypium hirsutum
  unsure (1)..(192): unsure at all Xaa locations
  Clone ID: GOSHI-09MAY01-C10471_1.pep
MALEALNSPTNAAAPFHFQDTNLHCLDAFTKRKRSKRPRFDDDHVPTEEEYLALCLVMLARGGAPRTTSTTLTHQKLGTYKCSVCNKAFNSYQALGGHKASHRKLSGANDDHSTPTTSSAVGSNPSGRSHECSICHKSFPTGQALGGHKRRHYEGGAANTGGITSEGVSSTSTNXPNRDFDLNIPALPASHG

SEQ ID NO: 64373 - protein, 230 aa, Gossypium hirsutum
  unsure (1)..(230): unsure at all Xaa locations
  Clone ID: GOSHI-09MAY01-C10401_1.pep
ETRGGVDRSDVKPLQIIQTEGPSFRINGNFIAWQKWNFRIGFTPREGLVIYSVAYIDGSRGRRPVAHRLSFVEMVVPYGDPNDPHYRKNAFDAGEDGLGKNAHSLKKGCDCLGYIKYFDAHVTNFTGGVETIENCVCLHEEDHGILWKHQDWRTGLAEVRRSRRLTVSFICTVANYEYGFFWHFYQDGKIXAEVKLTGILSLXALQPVETRKYGTTIAPGLYAPVHQHFF

SEQ ID NO: 64374 - protein, 126 aa, Gossypium hirsutum
  Clone ID: LIB3166-025-P1-K1-E5.pep
ASGKNAHSLICFAMVGDIKGRYSHLTNFTGGVETIENCVCLHEEDHGILWKHQDWRTGLAEVRRSRRLTVSFICTVANYEYGFFWHFYQDGKIEAVVKLTGILSLRALQPGETPKYGTTIAPGLYA

SEQ ID NO: 64375 - protein, 122 aa, Gossypium hirsutum
  unsure (1)..(122): unsure at all Xaa locations
  Clone ID: GOSHI-09MAY01-C10431_1.pep
MTSAVEINGEQLVNALPDLSIQDQIEVKKKGAVVEEGCENHSGICAICLDKIMLQETALVKGCEHAYCVTCILRWATYSQMPTCPQCKHPFEFLDVHRSLDGRIHDXLFEEGLLLLEPHVKP

SEQ ID NO: 64376 - protein, 227 aa, Gossypium hirsutum
  Clone ID: GOSHI-09MAY01-C10421_1.pep
MAIGRSCSLQILILNLIASNLYQSCESFLTPPSSIINPSKVKQVSWKPRAFVYEGFLTDLECDHLISLAKSELKRSAVADNVSGQSKLSEVRTSSGMFIPKGKDPIVAGIEDKISTWTFLPKENGEDIQVLRYEHGQKYDPHYDYFTDKVNIARGGHRIATVLIYLTNVTKGGETVFPQAEEPPRRRTPPKDDLSECAKKGIAVKPRRGDALLFFSLFPTAIPDQNS

SEQ ID NO: 64377 - protein, 97 aa, Gossypium hirsutum
  Clone ID: AW187571.1.pep
PVSLFSTPIAFSLSFSLSWINPPRKNEGGRGKRKRKTQRTVIFTICENFSYFLYSFPLSLVGPLLFLSFIGAILLHFFFSFNEYRDTVVGFIYLLVN

SEQ ID NO: 64378 - protein, 90 aa, Gossypium hirsutum
  Clone ID: uC-gsronu33B031c05b1.pep
HSFGYIFLSVLGQLTQKKLLKKRAKAKAKAKHKESSYLPFVRISLIFFTVFPYPRMDLYCFFPFIGAILLHFFFSFNDYRDAVVGFIYFW

SEQ ID NO: 64379 - protein, 305 aa, Gossypium hirsutum
  unsure (1)..(305): unsure at all Xaa locations
  Clone ID: GOSHI-09MAY01-C10711_1.pep
MAEEETELSDKQKKEIAKWFLLNAPAGEIQYVAKDLKSVLNNDDVYDEAASEAFPVYNKSHMICLEMPGRFGDVLVTSYGELQGNEYLDPKTAQVAIVDHVKQVCTEVRPATDEELPTPYVEEYRCALEAEMLKYVSEAYPKGSCSVYCINGKDVEGPGYDFELVAVISAARLSPQNFCTGSWRSIWNIECKDDIQVLELKGKLQVGGXAHYFEEGNVQLDAKHECRDSTMFQSPDDGAIAIASLIRHHETEYLASLEASYLNLPDATFKDLRRKLPVTRALFPWHSTSLFSLTREISKELGIGK

SEQ ID NO: 64380 - protein, 64 aa, Gossypium hirsutum
  Clone ID: LIB3166-029-P1-K1-C6.pep
ANIPMRKLVKEGGSLVIIYNGSLRFVGSVTPSPCDNKNDNWFHMVNAIFNFSVCFSPLMIVQLP

SEQ ID NO: 64381 - protein, 63 aa, Gossypium hirsutum
  Clone ID: LIB3166-028-P1-K1-E8.pep
VQIREPSTIVRRRHTPSNSLSLLLLFLYPKKLTAAPRETRDSETEVMILRTFIFSLSFTVFLP

SEQ ID NO: 64382 - protein, 58 aa, Gossypium hirsutum
  Clone ID: LIB3189-012-P1-K1-A8.pep
TSTFVHREHTPSNSLSLLLLFLYPKKLTAAPRETRDSETEVMILRTFIFSLSFTVFLP

SEQ ID NO: 64383 - protein, 242 aa, Gossypium hirsutum
  unsure (1)..(242): unsure at all Xaa locations
  Clone ID: GOSHI-09MAY01-C10621_1.pep
SNWFINARVRLWKPMVEEMYLEEIKEQEQNGSEEKTSKSHNNEDSTSPPAPPDKSSTDNKQDSEIPKXNGCSSMPASMASASPLIGNQSGFSFIGSSELEGITQGSPKKPTTTNEVTMKVDKDGYTFMGGTTNNDFMGGFGQYPIGEITRFDTEQFTPRFSGNGVSLTLGLPHCENLSLSGTPHQTFLPNQAMQMGRRVDIGEPNEFGSINPSTPHSSAAYDNINIQNRKRFAAQLLPDFVA

SEQ ID NO: 64384 - protein, 318 aa, Gossypium hirsutum
  Clone ID: GOSHI-09MAY01-C10191_1.pep
MGETDSFFSNKSAKIFVAGHRGLVGSAIVRKLQSLGFTNLLLRTHADLDLTRQSDVESFFADEKPHYVVLAAAKVGGIHANNTYPADFIAINLQIQTNVIDSSYRHGVNKILFLGSSCIYPKFAPQPIPENALLSGPLEPTNEWYAVAKIAGIKMCQAYRIQHGFDAISAMPTNLYGPNDNFHPENSHVLPALMRRFHKAKVEGAKEVVVWGTGSPLREFLHVDDLADAVVFLLGNYSGLEHVNLGSGLEVTIKELAELVKEVVGFEGELVWDSSKPDGTPRKLMDSSKLASLGWKAKISLKDGLIDTYKWYLENVKQ

SEQ ID NO: 64385 - protein, 103 aa, Gossypium hirsutum
  Clone ID: LIB3166-023-P1-K1-B4.pep
ANIFEAGHRGLVGSAIVRNLQPLGFTNVLLRTHADLDLTRQSDVESFFADEKPHYVVLAAAKVGGIHANNTYPADFIAINLQIQTNVIDSSYRHGVKKILFLG

SEQ ID NO: 64386 - protein, 74 aa, Gossypium hirsutum
  Clone ID: GOSHI-09MAY01-C10141_2.pep
VEHYYRICTKSWPAHSLFNIFGQLAKLKVQVRFRISQSKNQRKQRSIWFINHQCSSALRIDTGGSWTAPLDIRS

SEQ ID NO: 64387 - protein, 296 aa, Gossypium hirsutum
  Clone ID: GOSHI-09MAY01-C10141_1.pep
RTRGGGPEASRYVCDNLLSHFRAMTAESEGAVTAETIQRAFRQTEEGFTALVSELWSTRPNMATVGTCCLVGVIYQQTLFIANLGDSRVVLGKKVGNTGGMAAMQLSTEHNANIEAIRHELKELHPTDPQIVVLKHGVWRVKGIIQVSRSIGDVYMKHAQYNREPINARFRLPEPMNMPLLSANPTIISHPLHPSDSFLIFASDGLWEHLSNEKAVAIVHSHPRAGSAKRLVKAALQEAARKREMRYSDLRKIDKKVRRHFHDDITVIVLFFNHDLISRGAVQGPPVSIRSALEHC

SEQ ID NO: 64388 - protein, 121 aa, Gossypium hirsutum
  Clone ID: GOSHI-09MAY01-C10171_3.pep
VSIRPDAADYFCGTFLFSFQVSPVYPHEAPKVKCKTKVYHPNIDLEGNVCLNILREDWKPVLNINTIIYGLYHLFTEPNYEDPLNHEAAAVLRDNPKMFESNVRRAMSGGYVGQTFFPRCV

SEQ ID NO: 64389 - protein, 208 aa, Gossypium hirsutum
  Clone ID: GOSHI-09MAY01-C10171_2.pep
MVHFHFFFWILQSSNFSQAFHRAGAMIRLFKVKEKQRELAKNANGGSPIKKQSAGELRLHKDISELNLPKSCSISFPNGKDDLMNFEVSIRPDEGYYFGGTFLFSFQVSPIYPHEAPKVKCKTKVYHPNIDLEGNVCLNILREDWKPVLNINTVIYGLYHLFTEPNYEDPLNHDAAAVLRDNPKMFESNVKRAMYGGYVGQTYFPRCM

SEQ ID NO: 64390 - protein, 183 aa, Gossypium hirsutum
  Clone ID: GOSHI-09MAY01-C10171_1.pep
MIRLFKVKEKQRELAENANGGAPTKKQSPGELRLHKDISELNLPKSCAITFPNGKDNLMNFEVSIRPDEGYYFCGTFLFSFQVSPVYPHEAPKVKCKTKVYHPNIDLEGNVCLNILREDWKPVLNINTIIYGLYHLFTEPNYEDPLNHEAAAVLRDNPKMFESNVRRAMSGGYVGQTFFPRCV

SEQ ID NO: 64391 - protein, 121 aa, Gossypium hirsutum
  Clone ID: LIB3149-035-Q1-K1-H5.pep
CRSEPEFRARPTRTFLFSFQVSPIYPHEAPKVKCKTKVYHPNIDLEGNVCLNILREDWKPVLNINTVIYGLYHLFTEPNYEDPLNHDAAAVLRDNPKMFESNVKRAMYGGYVGQTYFPRCM

SEQ ID NO: 64392 - protein, 262 aa, Gossypium hirsutum
  Clone ID: GOSHI-09MAY01-C10101_1.pep
MTDRVYPSSKQPTNGTAPTTTSAAAAANPSFPATKSQLYGASRPLYRPQTKRHRYRRSCCCSCCLWTTILILVLILLVAIAGAILYVLYRPHRPTFTISSLKVSTLNVTSASKVITNIHLNVTAKNPNKKLVYIYDPITISLITNDEIDIGEGSLGSFVHGNKNTTLLKAAITSSNRQELDEASAGKLRSGLKSKKGLPLKIKLDTKVKAKMGALKTPKVGIRVVCEGIKATAPKGKSATIASTSNAKCKVDLRLKIWKWTL

SEQ ID NO: 64393 - protein, 85 aa, Gossypium hirsutum
  Clone ID: GOSHI-09MAY01-C10131_1.pep
PPLLGFPHSAPHRRRVFFPTARRRRLKGTRRGEEGAQLARRGTLSPSRAATGLLEAAAKNFLFSVSVVRVFGILGLGYNFVGPVF

SEQ ID NO: 64394 - protein, 198 aa, Gossypium hirsutum
  Clone ID: GOSHI-09MAY01-C10121_1.pep
MVSKLLELPFSGIFNQNAAKSSSPISHFTPRNAFKVMATSFGANVYRSLGISHSSSSNIRFSKKPRVDESENLTLNSIRQALIRQEDSIIFSLLERAQYCYNPDTYKQDSFSMDGFHGSLSLVEFMVRETERLHAQVGRYKSPDEHPFFPSYLPEPMLPPLQYPKVLHHCAASININNKVWNMYFAELLPRLVEAGDD

SEQ ID NO: 64395 - protein, 130 aa, Gossypium hirsutum
  unsure (1)..(130): unsure at all Xaa locations
  Clone ID: GOSHI-09MAY01-C10061_1.pep
SNFHLDFQPVIAEKILQIPLAETVQEDFQVWRGEPTGEFSVRSAYKLLQQTNLDPNGXNVTYRGKNFYTKLWKLHIPSKIQMTVWRISWNFIPTFSNLKIKRVVRNSQCPRCGCDEENSYHIFQKCMGLC

SEQ ID NO: 64396 - protein, 74 aa, Gossypium hirsutum
  Clone ID: LIB3166-021-P1-K1-F3.pep
WINVTYRGKNFYTKLWKLHIPSKIQMTVWRISWNFIPTFSNLKIKRVVRNSQCPRCGCDEENSYHIFQKCMGLC

SEQ ID NO: 64397 - protein, 326 aa, Gossypium hirsutum
  Clone ID: GOSHI-09MAY01-C10011_1.pep
MAPSSLPQTPPSAVVIVLFLLFSTALLCESRLSLDYYSKTCPSFTKIMQDTITNKQITSPTTAAGALRLFFHDCLPNGCDGSILISSTAFNKAERDADINLSLPGDPFDLIVRAKTALELACPNTVSCSDILAVATRDLVTMLGGPYYNVYLGRKDSRVSSASSLEGKLPKPTMSMSQLINLFSSSGFTVQEMVALSGAHTIGCSHCKEFSSNISNDTHYNPRFAQALKQACSGYPNNPTLSVFNDIMTPNKFDNLYYQNLPKGLGLLESDHGLYGDPRTKPFVELYARDQNKFFQDFAKAMQKLSVYGIKTGRRGEIRHRCDAGN

SEQ ID NO: 64398 - protein, 107 aa, Gossypium hirsutum
  unsure (1)..(107): unsure at all Xaa locations
  Clone ID: LIB3135-040-Q1-K1-G12.pep
SRLSLDYYSKTSPTFTKIIHHTISNTQITNPTTAVRTLLLFFHDCLPNXSYASILISYTAFNKSERDANINLSLPGDPFDLIVRAKTTLELACPNTVSCSDILDVIT

SEQ ID NO: 64399 - protein, 150 aa, Gossypium hirsutum
  Clone ID: GOSHI-09MAY01-C10001_1.pep
MESTKISPLFLICMLFISSATPILGCGSCGTGKAPPKPPKGPITIPPIVNPPINLPPILNPPVTVPPVTVVPPIITKPPSGKPCPSATCPIDTLKLGACVDLLGGLVHIGLGDPLVNACCPVLAGLVELEAAVCLCTTLKLKVLNLNIYV

SEQ ID NO: 64400 - protein, 65 aa, Gossypium hirsutum
  unsure (1)..(65): unsure at all Xaa locations
  Clone ID: LIB3493-052-P1-M1-B2.pep
RWFSILLSTKWNLPVATCPIDTLKLXACVDLLGGLFHXLALGDPLVNACCPVLAXLVELEAAVCL

SEQ ID NO: 64401 - protein, 396 aa, Gossypium hirsutum
  Clone ID: GOSHI-09MAY01-C10381_1.pep
VSTFLYILKAGIKAPRQPWHDLHTRIEGPAAYDVLINFEQRWRESTKWKDFCLLCAGKMPSNDDALIRIERISWILSPSLAVTDHGTTIIPEDDPKLHVLSIDDRDNWDVQIFRSIDSGSVKGFPRPMRKPENQNLLVSKNVVIEKSIQTAYIQAIRSAQHYIYIENQYFLGSSYAWPSYKDAGADHLIPMELALKVASKIRARERFAVYIVIPLWPEGDTKSLSVQEILYWQSQTMQMMYDIVARELKSMQITDSHPQDYLNFYCLGKREEVTPEMLGGKGTSVSDSAKFGRFMIYVHAKGMVIDDEYVIVGSANINQRSMAGTKDSELAMAAYQPHYTWAEKKKHPRGQVYGYRMSLWAEHLGELNKCFKEPETLECVKTVNTIAEDNWKKITD

SEQ ID NO: 64402 - protein, 382 aa, Gossypium hirsutum
  unsure (1)..(382): unsure at all Xaa locations
  Clone ID: GOSHI-09MAY01-C10341_1.pep
YFSATSAHTCTGDGNAMVARAGLPLQDLEFVQFHXGIYGAGCLITEGSPGAAGAPRNSEGERFMGRYAPTAKDLASRDVGARSMTMEIREGRGVGPLKDHIYLHLNHLPPEVLKERLPGISETAAIFAGVDVTKEPIPVLPTVHYNMGGIPTNHHGEVVTITGSDPDSVVPGLMAAGEAACASVHGANRLGANSLLDIVVFGRACANRVAEIQRPGQKQKPLEKDAGERTIAWLDKIRNSNGSLPTSNIRLNMQRVMQNNAAVFRTQETLEEGCQLIDKTWESFHDVKLKDRSLIWNSDLIESIELENLLINACITMHSAEARKESRGAHAREDFTKRDDENWMKHTLGFWENEKVRLDYRPVHMNTLDDEVESFPPKARVY

SEQ ID NO: 64403 - protein, 176 aa, Gossypium hirsutum
  Clone ID: GOSHI-09MAY01-C110309_1.pep
MAETRSCEFGISGMKRAAAADSFEVDDEIFVAKKSMLPTLAVAPAAWENDPAASLAGLRHEFGEHGGINMSIEASATFTVMEPETMRRMFTGELGPDRDFFIYSRHFNPTVLNLGRQVAALEGTRAAYCTASGMAAISSVMLQLCSSGGHVWASATLYGGTHALLTHFLPRTCNIT

SEQ ID NO: 64404 - protein, 123 aa, Gossypium hirsutum
  Clone ID: GOSHI-09MAY01-C10291_1.pep
MARIKVHELRSKSKTELLTQLKDLKAELSLLRVAKVTGGAPNKLSKIKVVRLSIAQVLTVISQKQKAALREAYTKKKFLPLDLRPKKTRAIRRRLTKHQQSLKTEREKKKEMYFPMRKYAIKV

SEQ ID NO: 64405 - protein, 42 aa, Gossypium hirsutum
  Clone ID: uC-gsflnu33B090b12b1.pep
LLTQLKDLKAELSLLRVAKVTGGAPNMLSKNKVVRLFIAQVL

SEQ ID NO: 64406 - protein, 128 aa, Gossypium hirsutum
  Clone ID: GOSHI-09MAY01-C10281_3.pep
SGAPFKKKAKKIRTKVTFHRPRTLKKDRNPKYPRISAPPRNKLDHYQILKFPLTTESAMKKIEDNNTLVFIVDIRADKKKIKDAVKKMYDIQAKKVNTLIRPDGTKKAYVRLTPDYDALDVANKIGII

SEQ ID NO: 64407 - protein, 151 aa, Gossypium hirsutum
  Clone ID: GOSHI-09MAY01-C10281_2.pep
MAPKVEKKADAKAQALKAAKAVKSGATFKKKAKKIRTKVTFHRPRTLKKDRNPKYPRISAPPRNKLDHYQILKFPLTTESAMKKIEDNNTLVFIVDIRADKKKIKDAVKKMYDIQAKKVNTLIRPDGTKKAYVRLTPEYDALDVANKIGII

SEQ ID NO: 64408 - protein, 154 aa, Gossypium hirsutum
  Clone ID: GOSHI-09MAY01-C10281_1.pep
MSPAKVDSKKKADPKAQAVKAAKAVKSGVTFKKKSKKIRTKVTFHRPRTLKKDRNPKYPRISATPRNKLDQYQILKYPLTTESAMKKIEDNNTLVFIVDIRADKKKIKDAVKKMYDIQTKKVNTLIRPDGTKKAYVRLTPDYDALDVANKIGII

SEQ ID NO: 64409 - protein, 151 aa, Gossypium hirsutum
  unsure (1)..(151): unsure at all Xaa locations
  Clone ID: uC-gsflmaxxa076d02b1.pep
MAPKVEKKADAKAQALKAAKAVKSGATFKKKAKKIRTKVTFHRPRTLKKDRNPKYPRISAPPRNKLDHYQILKFPLTTESAMKKIEDNNTLVFIVDIXRADKKKIKDAVKKMYDIQAKKVNTLIRPDGTKKAYVRLTPDYDAWMLQQNRNI

SEQ ID NO: 64410 - protein, 79 aa, Gossypium hirsutum
  Clone ID: LIB3829-018-Q6_N6-D3.pep
YAHSGKLFAGIPRMDFPYLFIIFRTHEVETGKSVPCKRLCKDGTVQVKKLTGQFLKMNAYVSDGIKLNPLNVANNIGII

SEQ ID NO: 64411 - protein, 151 aa, Gossypium hirsutum
  Clone ID: AI729531.1.pep
MAPKVEKKGDPKAQALKAAKAVKSGVTFKKKAKKIRTKVTFHRPKTLKKDRNPKYPRISAPPRNKLDHYQILKFPLTTESAMKKIEDNNTLVFIVDIRADKKKIKDAVKKMYDIHAKKVNTLIRPDGTKKAYVRLTPDYDALDVANKIGII

SEQ ID NO: 64412 - protein, 104 aa, Gossypium hirsutum
  Clone ID: LIB3147-042-Q1-K1-H11.pep
IGLRLPHPLAREGVNKSCAKAHALEAVTAVNSVTAFKKMDMKIRTNASFHRSKTFKKDRTSNYLRINAPPKNKLDHYQILKCPITTESAMKTIEDNNTLAIIVD

SEQ ID NO: 64413 - protein, 67 aa, Gossypium hirsutum
  Clone ID: LIB3135-005-Q1-K1-H4.pep
ELEVRPRPTRPIDKKGICYVDAGLRCLGWGRENRNYLSSWRLPCFECFIFCVLLQGETVIFRFSWKI

SEQ ID NO: 64414 - protein, 365 aa, Gossypium hirsutum
  Clone ID: GOSHI-09MAY01-C10251_1.pep
PRPPRVRPRGRPRVRDVLNEILARLAQLANAKGNSEQRLTECMLLALKSRLNSVESSPPGTELFSKEHAAATQLLYDLSPCFKLGFMAANQAILDATLDQPSCNKLHVIDFDIGQGGQYTTLLHALSERGRGNPAMIKITCIADNGGDERLKTVGSKLSLVAERLGVRLKFTVVPSLKLSDLSRESLGCELDEPLAVNLAFKLYRMPDESVSVENPRDELLRRVKRLAPCVVTIVEQEINTNTAPFASRVGEAVGYYGALFESIESTFGRENSERVKVEEGLLRKIANSVACEGRDRVERCEVFGKWRARMSMARFELKPLSESVAPSRPARLNCGNPGFTVKEENGGISFGWMGRTLTVASAWR

SEQ ID NO: 64415 - protein, 193 aa, Gossypium hirsutum
  unsure (1)..(193): unsure at all Xaa locations
  Clone ID: uC-gsronu33B011h10b1.pep
DFQERYAETVIDRIFYYINRSETGRLTLRELKRGNLIAAMQHVDEEEDINKVLRYFSYEHFYVIYCKFWELDTDHDFLIDKENLIRYGNHALTYRIVDRIFSQVPRKFRSRVEGKMGYEDFVYFILSEEDKSSEPGLEYWFXCIDLDGNGVLTPNEMQFFYEEQLHPMECMTQEPVPIEDILCQIFDMIGPEN

SEQ ID NO: 64416 - protein, 171 aa, Gossypium hirsutum
  Clone ID: uC-gsronu33B011h05b1.pep
GGRSQTGRLTLRELKRGNLIAAMQHVDEEEDINKVLRYFSYEHFYVIYCKFWELDTDHDFLIDKENLIRYGNHALTYRIVDRIFSQVPRKFRSRVEGKMGYEDFVYFILSEEDKSSEPGLEYWFKCIDLDGNGVLTPNEMQFFYEEQLHRMECMTQEPVLFEDILCQIFDM

SEQ ID NO: 64417 - protein, 105 aa, Gossypium hirsutum
  Clone ID: uC-gsflmaxxa012b08b1.pep
ITSKKATAANDDDERLQLNLGGGLNSVEEPVSRPNKKVRGGSPGSTSYPMCQVDNCKEDLSNAKDYHRRHKVCEIHSKATKALVEKQMQRFCQQCSRLVLLCSHS

SEQ ID NO: 64418 - protein, 128 aa, Gossypium hirsutum
  Clone ID: LIB3166-046-P1-K1-F1.pep
GSTSYPMCQVDNCKEDLSNAKDYHRRHKVCEIHSKATKALVEKQMQRFCQQCSRFHPLSEFDEGKRSCRRRLAGHNRRRRKTQPEDVTSRLLLPVNRDNAGNGSLDIVNLLTLLARTQGKTEEKSINP

SEQ ID NO: 64419 - protein, 143 aa, Gossypium hirsutum
  Clone ID: GOSHI-09MAY01-C11901_1.pep
MESTAKPAGGRKGGVKKKAVSKSVKAGLQFPVGRIARFLKKGRYAQRYGGGAPVYLAAVLEYLAAEVLELAGNAARDNKKNRINPRHVLLAVRNDEELGKLLQGVTIASGGVLPNINPVLLPKKTAAAASDSEKAKSKSPKKA

SEQ ID NO: 64420 - protein, 95 aa, Gossypium hirsutum
  unsure (1)..(95): unsure at all Xaa locations
  Clone ID: GOSHI-09MAY01-C111869_1.pep
MGVSGKPKADEGLDSQGQKWVLAVISIRAPLKPIYTSGPLETNNDEQGDDSCSTTPTGEDAKIQTSLTCPPAPRKPKPXLKCSYEEVXESFTPPI

SEQ ID NO: 64421 - protein, 92 aa, Gossypium hirsutum
  Clone ID: uC-gsronu33B081f05b1.pep
PGKNKGIKKERKRKDGILFFSFWERTKRRAKRKSVGKGKAIEGFWLAREQYRRGRPMREEKYPLQSYAKDRMKDGRRGGSSQLCRGGTWRRT

SEQ ID NO: 64422 - protein, 57 aa, Gossypium hirsutum
  Clone ID: GOSHI-09MAY01-C11851_2.pep
MEHGEFVRVRTIHLNSKPRVLTLKQVLHYGPTWELRFDPEPAIWHRQTIKALDCQNL

SEQ ID NO: 64423 - protein, 219 aa, Gossypium hirsutum
  unsure (1)..(219): unsure at all Xaa locations
  Clone ID: GOSHI-09MAY01-C11851_1.pep
ALVKKDPVRLQVLRVKGCWGGSKAENLLEQGDMVLAVNKEPVTCFRDIENACQAPARPPTRPPPRSTIFRQGRGIDLLVGTDVRDGNGTARVINWCGCIVQDPHPAVRALGYLPEEGHGVYVARWCHGSPVHRYGLYALQWIVEINGKPTPDLDAFVNVTKELGHGEFGRVRTXHLNGKPRVLTLKQDLHYWPTWELRFDPESAIWHRRMIKTLDCRNL

SEQ ID NO: 64424 - protein, 207 aa, Gossypium hirsutum
  unsure (1)..(207): unsure at all Xaa locations
  Clone ID: GOSHI-09MAY01-C11861_1.pep
MAVAGILNIPKLPLFSSLPLRKQSRPLSISIKASNSQTSTKEEENPSFSSSSSSSSSTTTTATTFAPPPNFKPPEPKPFAIRPDKTWDVVGASLALFFRLGTGVFVSGYSASLVSEKEIPPGQYSLKLGGSKVKETSKIGPRPEKPIEIYEFEGCPFCRKVRKLXILDIDVLXYPCPKNGPNFRPXAQMGGEQQFPYMVDPNTGVAM

SEQ ID NO: 64425 - protein, 91 aa, Gossypium hirsutum
  Clone ID: LIB3166-044-P1-K1-H2.pep
ISQPGPKEEETPGFPPPPPPPPPTTRPVPTLVLLPNLKPPEPKPFAIRPDRTGDVVGASLALFFRLGTGVFVSGYSASLVSEKEIPPGQYS

SEQ ID NO: 64426 - protein, 192 aa, Gossypium hirsutum
  Clone ID: GOSHI-09MAY01-C11811_1.pep
MYGPKSMVGPKITIKFLCSYGGKIVPRYPDGKLRYYGGETRVLAVDRSIPFSELLVKMGEMYGSAVTLRCQLPTEDLDAPGSITSDEDLANLIEEYDRVASPPSSIKIRAFRSPPRSTKKDVSPPSSSASSSKSSSTSTPRYSCIRQISRTPVAYPLRSEKSAGKMIPYYGSHGHHGNPSHIYLIHSGNHWQ

SEQ ID NO: 64427 - protein, 160 aa, Gossypium hirsutum
  Clone ID: GOSHI-09MAY01-C11801_1.pep
YTCKKVSGEVYFALWPGVFGIVWASNSEPLFNLFGFLVCIGSTAGRALKSVVQGILLTSEAEKLHSMNLLLYMAPMAAMILLPFTLYIEGNVARITLEKARSDSFIVFLLLGNATVAYLVNLANFLVTKHTSALTLQALGNAKAALAAFASVMIFPEYDH

SEQ ID NO: 64428 - protein, 308 aa, Gossypium hirsutum
  unsure (1)..(308): unsure at all Xaa locations
  Clone ID: GOSHI-09MAY01-C11831_1.pep
MATRSSGSSRTCVGKYELGRTLGEGTFAKVKFARHLETGENVXIKILDKEKVLKHKMIAQIKREISTMKLIIHPNVIRLYEVMASKTKIYIVLELVTGGELFDKIASKGRLKEDEARKYFQQLINAVDYCHSRGVYHRDLKPENLLLDGNGVLKVSDFGLSALPQQVREDGLLHTTCGTPNYVAPEVIDNKGYDGAKADLWSCGVILFVLMAGYLPFEDSNLVSLYKKISKADFGCPPWFSSSAKKLIKRILDPNPLTRITVADLLQNEWFKKGFIPPRFERADVSLDDVDAIFNESSDSRNLVELCE

SEQ ID NO: 64429 - protein, 193 aa, Gossypium hirsutum
  Clone ID: GOSHI-09MAY01-C11581_1.pep
MEFGIPLFHIFISFLLVLLIAIRSVRKSKARSLTQRLIPGPRKLPLIGNLHQLADSTLPHRTLRDLATKYGAVMHLQLSQVSTVVISSAEMAEEIMKTHDIVFASRPLLLAAKIITYECTDIVFSPYGKYWRNLRKICTSELLSASRVASFRSIREEEVLNLVKTIKSNDGLAVNLSQKVFSMTYGITAKAAF

SEQ ID NO: 64430 - protein, 101 aa, Gossypium hirsutum
  Clone ID: LIB3166-040-P1-K1-F5.pep
MELQISLFQVLITFFLVLFMAAITSIRKSKARNLTQGLIPGPRKLPLIGNLHQLAGPGLPHHTLRDLATKYGAIMHLQLGQISTVVVSSAEMAKEIMKTHD

SEQ ID NO: 64431 - protein, 105 aa, Gossypium hirsutum
  unsure (1)..(105): unsure at all Xaa locations
  Clone ID: GOSHI-09MAY01-C11571_1.pep
MALPTRKFSSPWVIFLILSIFLVAPSFSGTDTFVFGGCSQLKFTSGSQYEYNVNSILTSLVNSAMFTSYNNFTMSASGGFSAVYGLFQCRGDLNXPDCNRCVAKA

SEQ ID NO: 64432 - protein, 280 aa, Gossypium hirsutum
  Clone ID: GOSHI-09MAY01-C11561_2.pep
ECVNKVADLRTNAECLQAFKEDPEALRSFQNFISSADPDTLAAMSGGKVGEVSPGMFKTASSMISKMSPEELQKMVQLASSFQGENPYTGGFGTGPVPPNVTPDMLKTATDMMTKMPTEGLQRMWEMAASIKGKDSIPASTAVNGSRLDSDAEVTYPTSQTSSITSENVGFGETASSSSSRFPNSMNPQSSFPPTSTADLQEQMRNQMKDPAMRQMFASMMKNMSPEMMANMSEQFGMKLSREDAAKAQQAMSSLSPDDLDKMMRWVDNIPRGAEGAKKA

SEQ ID NO: 64433 - protein, 228 aa, Gossypium hirsutum
  Clone ID: GOSHI-09MAY01-C11561_1.pep
KNQGNELHKQGKFKNASEKYLLAKKNLKGIPSAKGKTLLLACSLNLMSCYLKTRQYDECVKEGSEVLSYDAKNVKALYRRGQAYKELGQFDDAVSDLSIAHEVSPDDETIAGGCRDAEERLAREGSHQAPRGVVIEEITEETVTTSPATLRRSSTEHSSKQPRESTGIAKSENGNKVADLRTNSECLQAFKEDPEALRSVPLSQNHLLGDIHLLSLVISYSIFHEWIM

SEQ ID NO: 64434 - protein, 148 aa, Gossypium hirsutum
  Clone ID: uC-gsronu33B153b06b2.pep
PCVRPRVRPRVRPRVRSSRLDSDAEVTYPTSQTSSITSENVGLGETASSSSSRFPNSMNAQSSFPPTSTADLQEQMRNQMKDPAMRQMFASMMKNMSPEMMANMSEQFGMKLSREDAAKAQQAMSSLSPDDLDRMMRWVDKIQRGSRG

SEQ ID NO: 64435 - protein, 158 aa, Gossypium hirsutum
  Clone ID: GOSHI-09MAY01-C11501_2.pep
PRVRPRARRRARNSKKFAVQNFAKGLLDVADNLGRASTHVKGSFSKIDESNDTAGAVPLLKTLLEGVEMTEKQLGEVFRKFGVEKFDPRNEPFDPHRHNAVFQIPDNSKPPGTVAHVLKAGYMLYDRVIRPAEVGVTQATDDGATENNTGDKVSDAGL

SEQ ID NO: 64436 - protein, 195 aa, Gossypium hirsutum
  Clone ID: GOSHI-09MAY01-C11501_1.pep
SSKRSGSESDGELSMADMVKLVQEKEGLLEVKQMEIEQMKDKVVRTLAEMENVMARTRREAENSKKFAIQNFAKGLLDVADNLGRASTHVKGSFAKLDESKDTAGAVPLLKTLLEGVEMTEKQLGEVFRKFGVEKFDPTNEPFDPHRHNAVFQVPDNAKPPVTVAHVLKAGYMLHDRVIRPAEVGVTQALNNDAN

SEQ ID NO: 64437 - protein, 217 aa, Gossypium hirsutum
  unsure (1)..(217): unsure at all Xaa locations
  Clone ID: GOSHI-09MAY01-C11521_1.pep
MAGVSLKCGDCGALLKSVEEAQEHAELTSHSNFSESTEAVLNLVCSSCGKPCRSKIESDLHTKRTGHTEFIDKTLEAVIPISLEVPKVAKESEEAIAAGSTGEPEEMVVPEVDKKLLEELEAMGFPTARATRALHFSGNTSLEAAVNWVVEHEADPDIDQMPMVPVNRHVEASKPSLTAEEMKLKAQELREKARXREEEERIMVREMDNETIPVGNV

SEQ ID NO: 64438 - protein, 83 aa, Gossypium hirsutum
  unsure (1)..(83): unsure at all Xaa locations
  Clone ID: LIB3166-039-P1-K1-H9.pep
MAGVSLKCGDCGALLKSVEEAQEHAELTSHSNFSESTEAVLNLVCSSCGKPCRSKIESDLHTKRTXHTEFIDKTLEAAKLISL

SEQ ID NO: 64439 - protein, 227 aa, Gossypium hirsutum
  Clone ID: GOSHI-09MAY01-C11491_1.pep
LAQRYEELYKEYGVKFLKGASIKNLEAGPDGQVAAVKLGDGSTVEADMVVIGIGAKPAVSPFEVVGLNNTVGGIQVDGLFRTSVPGIFAVGDVAAFPLKMYDRVARVEHVDHARRSAQHCVKSLLSAQTHTYDYLPYFYSRVFEYEGSPRKVWWQFFGDNVGETVEIGNFDPKIATFWIDSGKLKGVLLESGNAEEFKLLPELARNQPSIDKAKLEKASSVEEALEI

SEQ ID NO: 64440 - protein, 130 aa, Gossypium hirsutum
  Clone ID: GOSHI-09MAY01-C11441_3.pep
ACSSSSSMEAPPQGYRRNVGICLINSSKKGGIDDNEDPKVAALRELKEETGVSSAEILAEVPYWLTYDFPPEVRAKLKHQWGSDWKGQAQKWFLLKFTGKEEEINLLGDGSEKPEFGEWSWMTPEQIVEH

SEQ ID NO: 64441 - protein, 198 aa, Gossypium hirsutum
  Clone ID: GOSHI-09MAY01-C11441_1.pep
AGSPSRPLYSPCHPSVPPKPICSYFSPSSCTCSSSSSMEAPPQGYRRNVGICLINSSKKIFSASRLDIPSAWQMPQGGIDDNEDPKVAALRELKEETGVSSAEVLAEVPYWLTYDFPPEVREKLKHQWGSDWKGQAQKWFLLKFTGKEEEINLLGDGSEKPEFGEWSWMTPEQIVEHAVDFKKPVYNKVLEVFTPYLH

SEQ ID NO: 64442 - protein, 173 aa, Gossypium hirsutum
  unsure (1)..(173): unsure at all Xaa locations
  Clone ID: AI730352.1.pep
MAVLWRSFSLYSPFHLSVPPKPICSYFSPSSCTCSSSSSMEAPPQGYRRNIFSASRLDIPSAWQMPQGGIDDNEDPKVAALRELKEETGVRSAEVLAEVPYWLTYDFPPEVREKLKHQWGSDWXGQAQKWFLLKFTGKEEEINLLGDGSEKPEFGEWSWMTPEQIVEHAVDFK

SEQ ID NO: 64443 - protein, 175 aa, Gossypium hirsutum
  Clone ID: GOSHI-09MAY01-C11461_1.pep
MFYRSVVFPSISERKRNSNRSKTDTVMASSSSSSALKSQPLHNFQLHDLKWAMNHTSNHRLRKLSDSLHKSPQRGESGSESDNNRKVNPVCEARSKIGHSSGFSPDHRTGKSERKFIDGSDVLVDCNSDKKVDPSDARSKIYIRFPAKNDKSVDEVADVGDQSLITEDIEELVPK

SEQ ID NO: 64444 - protein, 109 aa, Gossypium hirsutum
  Clone ID: GOSHI-09MAY01-C11401_1.pep
HASAHASVHASEWIETYGGSSLLETVYKALDEVVNLSECEIYSYNPDSDADPFLEKGAIWSFSFFFYNRKLKRVVSFSFCCLSNLVGDGFLVDNLCSEEDGEIFDNMDM

SEQ ID NO: 64445 - protein, 142 aa, Gossypium hirsutum
  Clone ID: GOSHI-09MAY01-C11771_1.pep
MEHHFTQLDDGASADGKPASNFGAAVATVLLALLLQIFCRCCRSIYRNHVKKYKFSSSSAAANMDRSIIAAVEKILKYKFKDKRLLEEALTHSSCREDMSYEILEFIGDAALGLGCSYPFFMLELIMNSDQLTRIPKKSVST

SEQ ID NO: 64446 - protein, 201 aa, Gossypium hirsutum
  Clone ID: GOSHI-09MAY01-C11651_1.pep
GTLSPSLAHLRFLQNLSVADNKLTGPIPTELAVLSNLRYLNLSNNVFNGSFPTQLSQLKNLQVLDLYNNNMTGELPVSVTELPNLRHLHLGGNYFSGQIPSSYGRWEHLEYLAVSGNELSGKIPPEIGNLTKLKQLYIGYFNSFEGGLPPEVGNLSELVRFDAANCMLSGEIPPEIGKLQKLDTLFLQVNALSGSLTSELG

SEQ ID NO: 64447 - protein, 108 aa, Gossypium hirsutum
  Clone ID: LIB3166-042-P1-K1-D7.pep
MRRLLSPMYQTLLSNLRYLNLSNNVFNGSFPTQLSQLKNLQVLDLYNNNMTAVLPVSITELPNLRHLHLGGNYFSGQIPSSYSRWEHLEYLAVSGYELSGKIPPEIGN

SEQ ID NO: 64448 - protein, 330 aa, Gossypium hirsutum
  Clone ID: GOSHI-09MAY01-C11641_1.pep
MEFDLSEEMLAVIPTDPYEQLDLARKITSMAIASRVSKMETEIGRMRAKIFEKDRMVYELEEKVSRLQQANHEAESRLKLVFDENMKLAKERDSLAMTAKKLSRDLSKLETFKRQLMQSLSDDNSSQAETVDIGTCDQSVPKAYPDKDDGASDYMSLRSSNGSTDLGSTTDEASRYAGQRFSITPYITPRLTPTGTPKVISTNGSPRGYSTAGSPQRTSAATSPTKSQSDGRTSFSSWYPSSQQSSAANSPPRRGSLPARTPRIDGKEFFRQARSRLSYEQFSAFLANIKELNAQKQTRAETLRKAEEIFGTDNKDLFLSFQGLLNRNIH

SEQ ID NO: 64449 - protein, 110 aa, Gossypium hirsutum
  Clone ID: LIB3196-014-P1-M1-D1.pep
MFSFSQRSKATEEVTPSTMSQGGGAGAGGGGAGGGGMEFDLSEEILAVIPTDPYEQLDLARKITSMAIASRVSKMETEIGRMRAKIFEKDRMVYELEDKVSRLQQANHEA

SEQ ID NO: 64450 - protein, 99 aa, Gossypium hirsutum
  Clone ID: LIB3120-012-P1-K1-D6.pep
GMEFDLSEEILAVIPTDPYEQLDLARKITSMAIASRVSKMETEIGRMRAKIFEKDRMIYELEEKVSRLQQANHEAESRLKLVFDENMKLAKERDSLAMT

SEQ ID NO: 64451 - protein, 134 aa, Gossypium hirsutum
  Clone ID: GOSHI-09MAY01-C11671_2.pep
LTRPPTRPPTRPDLPPVTVPPINLPPGTVPPVTKPPSGKPCPTPPTKDTCPIDTLKLGACVDLLGGLVHIGLGDPVLNQCCPVLSGLAELEAAVCLCTTLKLKVLNLKIYVPLALQLLVTCGKTPPPGYTLRLF

SEQ ID NO: 64452 - protein, 195 aa, Gossypium hirsutum
  Clone ID: GOSHI-09MAY01-C11671_1.pep
KMESNTKMSALLLLCMLFISSVTPILGCGSCGKAPHKHRKPKGKSPKGPITLPPLVKPPIKLPPVVPPIVKPPIDLPPVTVPPINLPPGTVPPVTKPPSGKPCPTPPTKDTCPIDTLKLGACVDLLGGLVHIGLGDPVVNQCCPVLSGLAELEAAVCLCTTLKLKVLNLKIYVPLALQLLVTCGKTPPPGYTCSL

SEQ ID NO: 64453 - protein, 159 aa, Gossypium hirsutum
  unsure (1)..(159): unsure at all Xaa locations
  Clone ID: LIB3829-022-Q6-K6-D12.pep
MWKHHTSIESLRESPLKVPSLCLPLWKPGGKLPPVVPPIVKPPIDLPPVTVPPINLPPGTVPPVTKPPSGKPCPTPPTKDTCPIDTLKLGACVDLLGGLVHIGLGDPVLNQCCPVLSGLAELEAAVCLCTTLKLKVLNLKIYVPLALQLLVTCXENTPS

SEQ ID NO: 64454 - protein, 76 aa, Gossypium hirsutum
  Clone ID: LIB3493-049-P1-M1-E8.pep
TKTITNTLSKSEPKDTCPIDTLKLGACVDLLGGLVHIGLGDPVVNQCCPVLSGLAELEAAVCLCTTLKLKVLNLKI

SEQ ID NO: 64455 - protein, 110 aa, Gossypium hirsutum
  Clone ID: uC-gsronu33B148a08b1.pep
MLLGFSKTPKLGRGSCGKAHKHRKPKGKSPKGPITMPPLVKPPIKMPPVVPPIVKPPIDLPPVTDPPINLPPGTAAPVTKPPSGKPWPTPPTKDTCPIDTTENGCLGGSA

SEQ ID NO: 64456 - protein, 130 aa, Gossypium hirsutum
  Clone ID: LIB3147-023-Q1-K1-H10.pep
GKTGAGDAYAHASELIHPFTLPPVTVPPIGVSSRTVAPVTKPPSGKPCPTPPTKDTCPIDTLKLGACVDLLGGLVHIGLGDPVVNQCCPVLSRLAELEAPVCLCTTLNLRFSTLKLCPTAFQLLAQLENH

SEQ ID NO: 64457 - protein, 82 aa, Gossypium hirsutum
  unsure (1)..(82): unsure at all Xaa locations
  Clone ID: LIB3148-016-Q1-K1-A6.pep
RRKPKGKCSKGPITLPTLVKPPIKLPPVVPSIVKPPIDLPPVTVPTINLPPXTDPSVTKPPIVKPCPTPPTKDTCLIDTLKL

SEQ ID NO: 64458 - protein, 77 aa, Gossypium hirsutum
  Clone ID: LIB3146-024-Q1-K1-A11.pep
NFFRLLVLRYFQHVWLLLFDTFFCFVHDQRQISFLSAFFSFFSLWKIQKHTCKLQQSFKRKKIIGFTIKTASDFQSN

SEQ ID NO: 64459 - protein, 66 aa, Gossypium hirsutum
  Clone ID: uC-gsronu33B029g01b1.pep
HQNVSSSFALHAFHFFSDTNSWVWFMWESTTQCIFVYGNVFLCYITIYFLVKYSFMLLLFFSFIYN

SEQ ID NO: 64460 - protein, 114 aa, Gossypium hirsutum
  Clone ID: GOSHI-09MAY01-C11601_1.pep
MGIPSEIRDVWIQRKRNSFIIPSPAEDEKNLRAKQFSQEGIRAGVKAAAVAAVVSAVPTLIAVRKIPWAKANLNHTAQALIISGASIAAYFITVDKTVLESARRNSRAQFDKTV

SEQ ID NO: 64461 - protein, 170 aa, Gossypium hirsutum
  Clone ID: GOSHI-09MAY01-C11621_1.pep
DGSQNSHKRKRDTASYSECSVDGNIIKIRFSLKKPRASDASISSEEPACSSSGRTDSIQEPSCSAASVPELKRRLDDGRKEQGSSSSGTLLKAALQYKTFIEDWMPPLLEAELNNDGDEDWLLTKKQLGKPAAKRPDDNDHTCVASASLHPSAHFLPAAEIYALPYTVPF

SEQ ID NO: 64462 - protein, 152 aa, Gossypium hirsutum
  unsure (1)..(152): unsure at all Xaa locations
  Clone ID: GOSHI-09MAY01-C11191_1.pep
MTAQTDKEVEEILAAHLDQQKIHSEQPEQPVVEDDDDNDDDDDDDDDKDEDDAEGLHDVDGTGRSKQSRSEKKSRKAMLKLGMKPIPGVSRVTIKKSMNXILFVISYPDVFKSPASDTYIVFGEAKIEDLSSQLQTQAAEQFKAPDLSHVIS

SEQ ID NO: 64463 - protein, 208 aa, Gossypium hirsutum
  unsure (1)..(208): unsure at all Xaa locations
  Clone ID: GOSHI-09MAY01-C11121_1.pep
KKREENLLSPTPLSLFCALLLCLPLAVIITITSPTTTVHDGSGHNLVPDLDPPPKTQQRFSSKPLPLPLHDDDSLFRVASRVNSKLPPGSPKKIAFLFLTISPLPFAPLWELYFNQTPKDLFNVYVHADPSYPYDPPFSGVFAHRVIPSKPALRFTPTLASAARRLLAHALLHESXNYMFVLLSASCIPIHSFAFTYKTLTRSKKSFI

SEQ ID NO: 64464 - protein, 169 aa, Gossypium hirsutum
  Clone ID: AW187181.1.pep
MKKYRNGEIWDFEHEVAVATNRPVILGLDGGTTSTVCICMPIMPFSDALPDPLPVLARAVAGCSNHNSVGETAARETLKQVMADALSKSGSNRSAVRAVCLAVSGVNHPTDQQRILTWLRDIFPTQVKLYVQNDAVAALASGTMGKLHGCVLIAGTGTIAYGFTQDGRE

SEQ ID NO: 64465 - protein, 97 aa, Gossypium hirsutum
  Clone ID: uC-gsronu33B041h03b1.pep
DFEHEVAVATNLLVILGLDGGTTSTVYICMSIMSFSNALPNPLPVLAHAVTGYSNHNSVDDTMARETLDQVMADALSKSGSNRSAAYISCLLFAMAF

SEQ ID NO: 64466 - protein, 499 aa, Gossypium hirsutum
  unsure (1)..(499): unsure at all Xaa locations
  Clone ID: GOSHI-09MAY01-C11031_1.pep
MCDKRTFRAPVGYFREKYNVVLKYPALPALQSGSQARPVYLPMELCSIVEGQRFTKXLNEQQVRSLLRATCQRPNIREGNITKMVQVNNFEVEELVTKEFGMHVRKELALINARVLNPPALKYHDSGRDKFVNPSCGQWNMINKKMVNGGKVDFGSCVNFSSEYWNMSEDFCAGLVNMCNSKGMVFRQTPSIAMRSARADRIDQTLMDVYKESAGLNKPLQLLIIILPDKTGSYGKIKRICETELGIVSQCCKPVQASKFSNQYFENVALKINAKVGGRNTVLSDAVLRRIPLVTDVPTIIFGADVTHPPPGEDSSSSIAAVVASMDWPEVTKYRGIVSAQTHRVEIIQDLYKQTRDPQKGLVEGGMVRELLLAFFRSTRQKPSRIILYRDGVSEGQFSQVLLYEMDAIRQACSSLQEGXMPRVTFVVVQKRHHTRLFPTDRNITDRSGNIXQGTSKSTHYHVLFDENGFTADILQVLTNSLCYTYVFTPFSIILIWGE

SEQ ID NO: 64467 - protein, 251 aa, Gossypium hirsutum
  unsure (1)..(251): unsure at all Xaa locations
  Clone ID: GOSHI-09MAY01-C11021_1.pep
RPPWAGTLPPLCNSSDDQDASWNVSMKACITPYSARVHKERWXGLPPRPQRLTAAPPRLEEIGGGSEEFHEDTKIWHFRVIEYWKQMKSVIQKNSIRNVMDMNSNLGGFATALKDKDLWVMNVASVKMSARLKIIYDRGLIGTVHDWCEAFSTYPRTYDLLHAWAVFSEIKERGCSPEDLLIEMDRILRPDGFVIIRDKHSVINYIQKFITALRWDGWLSEVEPRTDALTGGEERVLIARKKLWTDGFMTM

SEQ ID NO: 64468 - protein, 66 aa, Gossypium hirsutum
  Clone ID: LIB3135-036-Q1-K1-H1.pep
PIKKIFPCKHGYINLGPFKRAPLFFYFLSFFLFNFIGFIFFFFYLNFFFFFVFFLLIFFFFFFFFF

SEQ ID NO: 64469 - protein, 66 aa, Gossypium hirsutum
  Clone ID: LIB3148-016-Q1-K1-A12.pep
KQEQYTKVILGTFNKYIPLSAKQMSKAELRSFFSSWIAAVCSNQQALYHSIVCTLNVIGRVGGRVG

SEQ ID NO: 64470 - protein, 127 aa, Gossypium hirsutum
  Clone ID: GOSHI-09MAY01-C11341_1.pep
FPNLFFFSFLVISLQFRHEYMKWILESTPMRARTSQKYIDVGEGRMVSRFCLNLQSLFRFLKEYHKIRGFFLNKEKKEQNYQITVVTASVGEIWPLFTPSTIEWMVVWRLHAELTLTEQVKGFFLFF

SEQ ID NO: 64471 - protein, 97 aa, Gossypium hirsutum
  Clone ID: LIB3145-024-Q1-K1-E10.pep
FPNLYFCSFLVISLQFRHEYMKWILESTPMRARTSQKYIDVGEGRMVSRFCLNLQSLFRFLKEYHKIRGSFLNKEKKQQNYPTRPRKSGRTSGRTRG

SEQ ID NO: 64472 - protein, 271 aa, Gossypium hirsutum
  Clone ID: GOSHI-09MAY01-C111349_1.pep
MTSATFSSSLLGSFPVVTSTRHCDLGKERSKFCCFNEKKEQRNVICACMAPPTKNLGRDEFHGTKFTESSKYGNFSKEVKHENDSDVLIPRRRPRVPFGEKHILRGVSFKIRHGEAVGIIGPSGTGKSTILKIIAGLLAPDKGEVYIRGKKRMGLIGDDEISGLRIGLVFQSAALFDSLTVGENVGFLLYENSCMSDEQISQLVTETLAAVGLKGVEERLPSELSGGMKKRVALARSIICDISKESIEPEVPLYDKPTAGLDPIASTVVED

SEQ ID NO: 64473 - protein, 96 aa, Gossypium hirsutum
  Clone ID: GOSHI-09MAY01-C11361_2.pep
MRVTRYKQFSSGFIAERQKRKEKKKKKMKNHFFVFLHVFAVVVCPFFWQVQVCAGVRGVLAAETLVSYGGRAWHDVVAVREGCGARTPFALGFAEA

SEQ ID NO: 64474 - protein, 75 aa, Gossypium hirsutum
  Clone ID: GOSHI-09MAY01-C11361_1.pep
GPNNWNRPKQPETQAKLRQTLGQKGSSHRSLHEQQPRRATPALRTIPASQQPARPVRQRTPVPAFEALESTLVSP

SEQ ID NO: 64475 - protein, 99 aa, Gossypium hirsutum
  Clone ID: GOSHI-09MAY01-C11291_1.pep
CTNEAGQFDPFYSSYFVLFLLKDLSERIRYQNSTPGKNQYPSKLLFCYLLILKCALKKNNEIGVAFKAGMPVVLYCFLIFLPGPLLSVLCCCLLPLFFS

SEQ ID NO: 64476 - protein, 62 aa, Gossypium hirsutum
  Clone ID: GOSHI-09MAY01-C111289_1.pep
HSFSLVILSMLCPRIRLSFKIFYMGYIILVIECLLNFKTKKHKKTNTQKNKKNTTTPKKKNK

SEQ ID NO: 64477 - protein, 79 aa, Gossypium hirsutum
  unsure (1)..(79): unsure at all Xaa locations
  Clone ID: GOSHI-09MAY01-C11241_1.pep
MGGGSAQKSKTARXRNLEKAKAGAKGSXQLESNKKAMSIQCKVCMQEFMCTTSEVKCREHAEAKHPKSDVSACFPHLKK

SEQ ID NO: 64478 - protein, 151 aa, Gossypium hirsutum
  Clone ID: GOSHI-09MAY01-C11211_1.pep
LDMLVESNLDLEDLSKDSMAMLSEIQLLTRAVKRTCRKMADLLIHYSISSNDGYSNKYIFPPNLEGAGGITPLHLAACTSGSDDMVDVLTNDPHEIGLTCWSSLLDANGQSPYAYAMMRNNHSYNKLVAGKYADRRNGQFSLTIGVEDQHS

SEQ ID NO: 64479 - protein, 85 aa, Gossypium hirsutum
  Clone ID: GOSHI-09MAY01-C12951_1.pep
NLLRGTHSMIRRLIILPWVITAIPLPVLVPSIPFNRSTVTSRQTISSRPTSLREDSDFPVDAFSCDHFPMYEFKVRRCAPGMSHY

SEQ ID NO: 64480 - protein, 307 aa, Gossypium hirsutum
  Clone ID: GOSHI-09MAY01-C12961_1.pep
LSIFFKPGERFSEIVGSPYYVAPEVLKRNYGPEIDIWSAGVILYILLCGVPPFWAESEQGVAQAILRGLIDFKRDPWPNISESAKSLVRQMLEPDPKLRLTAKQVLEHPWLQNAKKAPNVPLGDVVKSRLKQFSMMNRFKRKALRVIAEFLSVEEVEDIKVMFNKMDTDNDGIVSVEELKAGFKNYGSQLAEPEVQMLIEAVDANGKGTLDYGEFLAVSLHLQRMANDEHLRKAFSYFDKDGNGFIEPDELRDALMEDGADDCTNVANDIFQEVDTDKDGRISYDEFAAMMKTGTDWRKASRHYSRG

SEQ ID NO: 64481 - protein, 301 aa, Gossypium hirsutum
  unsure (1)..(301): unsure at all Xaa locations
  Clone ID: GOSHI-09MAY01-C12931_1.pep
MKLIIKTLKGSHFEIRVQPNDTVMAVKKNIEDIQGKDNYPCGQQLLIHNGKVLKDETTLAENKVSEDGFLVVMLSKSKSLGSTGASSAQPASSTPSTTVPASAPSSNSTPATGAPAQASQQTDTYSQAASNLVAGNNLEQTIQQLMDMGGGNWDKETVTRALRAAYNNPERAVDYLYSGIPELAEVAVPVPHFPSSQTTESGAAPVAPVSGAPNSSPLNMFPQETLSGADAGGLGSLDFLRNNQQFQALRSMVQSNPQILQPMLXELGKQNPQLLRLIQEHHAEFLQLINEPFQVLKGIYL

SEQ ID NO: 64482 - protein, 468 aa, Gossypium hirsutum
  Clone ID: GOSHI-09MAY01-C12871_1.pep
MASLPFIFFLSFFIISTTLTSAGAAAATIKLSLSPFPHPSSSHPYQILNNLVTSSVARAHHLKHPKAKADNTTSSLLRAPLFPHSYGGYTISLKFGTPPQTLPFVMDTGSSLSWFPCTSRYLCSQCAFPNVDPAKIPTFAPKLSSSSKLVGCRNPKCSWLFGPDVESRCQDCEPTSENCTQTCPPYIIQYGLGSTAGLLLVENLVFPQKTFQDFLVGCSILSNRQPAGIAGFGRSAESIPSQLGLKKFSYCLVSRRFDDTGVSSNMLLETGSGSGDAKTPGLSYTPFYRNQVASNPVFKEFYYVTLRKILVGDKHVKVPYSYLVPGSDGNGGTIVDSGSTFTFMERPVFEVVSKEFEKQMGNYRRAREIENRSGLAPCFNTSGYTSIEIPELSFQFKGGAKMALPLVNYFSFDGDDKVVCLMIVSDNVVGQGSHSGPAIILGSFQQQNYYIEFDIANNRFGWAERSCA

SEQ ID NO: 64483 - protein, 166 aa, Gossypium hirsutum
  unsure (1)..(166): unsure at all Xaa locations
  Clone ID: AI729845.1.pep
GRVVAAKXXSPTXLXSCKNPKCNWLFGPDVESRCQNCEPTSENCTQTCPPYIIQYGLGSTAGLLLVENLAFPQKTVQDFLVGCAILSNRQPAGISGFGPNAQSDASPLRLKKFSYCLVSRPFEDSGVRTNMSLETRSGAGYAMIPRLRYTPVYSKLVAANPMLPDF

SEQ ID NO: 64484 - protein, 149 aa, Gossypium hirsutum
  Clone ID: LIB3197-031-Q1-M1-E2.pep
MPVTHRRLFSSSSSSILLIIYTAVTSAGAAAATIKLSLSPFPHPSSSHPYQILNNLVTSSVARAHHLKHPKAKADNTTSSLLRASLFPHRYGGYTISLKFGTPPQTLPFIMDTGSSLSWFPCTSRYLCSQCAFPNVDPAKIPTFAPKRS

SEQ ID NO: 64485 - protein, 62 aa, Gossypium hirsutum
  Clone ID: uC-gsflmaxxa091f08b1.pep
KQKKKMTSIFKAKTQNNKVQLTNTFVQPIQTYCLPYQIRCNNSAAESSLVLLQDRRVSPPAW

SEQ ID NO: 64486 - protein, 381 aa, Gossypium hirsutum
  Clone ID: GOSHI-09MAY01-C12861_1.pep
MQIFVKTLTGKTITLEVESSDTIDNVKAKIQDKEGIPPDQQRLIFAGKQLEDGRTLADYNIQKESTLHLVLRLRGGMQIFVKTLTGKTITLEVESSDTIDNVKAKIQDKEGIPPDQQRLIFAGKQLEDGRTLADYNIQKESTLHLVLRLRGGMQIFVKTLTGKTITLEVESSDTIDNVKAKIQDKEGIPPDQQRLIFAGKQLEDGRTLADYNIQKESTLHLVLRLRGGMQIFVKTLTGKTITLEVESSDTIDNVKAKIQDKEGIPPDQQRLIFAGKQLEDGRTLADYNIQKESTLHLVLRLRGGMQIFVKTLTGKTITLEVESSDTIDNLKAKIQDKEGIPPDQQRLIFAGKQLEDGRTLADYNIQKESTLHLVLRLRGGF

SEQ ID NO: 64487 - protein, 133 aa, Gossypium hirsutum
  unsure (1)..(133): unsure at all Xaa locations
  Clone ID: LIB3826-001-Q1-K6-E8.pep
XNVKGLRIQXIREGDXPPXISXXALXLXXGXXNLXXMAXARLXPTXPTXSXKKXPPFHFXVLXTXXWXGMPQIXLSRTXXTXXXNNXTLXGVEXALXXNXXNVXXQRILRQXKXDPXPXXSRGFYXXAXESXX

SEQ ID NO: 64488 - protein, 181 aa, Gossypium hirsutum
  unsure (1)..(181): unsure at all Xaa locations
  Clone ID: LIB3828-005-Q1-K6-C11.pep
KDPPFTWFFDFVAACKSLSRLSLXNTITLXVESSDTIDNVKAKIQDKEGIPPDQQRLIFAGKQLEDGRTLADYNIQKESTLHLVLRLRGGMQIFVKTLTXKXTITLEVESSDTIDNVKAKIQDKEGIPPDQQRLIFAGKQLEDGRTLADYNIQKESTLHLVLRLRGGMQIFVKTLTXKHHF

SEQ ID NO: 64489 - protein, 61 aa, Gossypium hirsutum
  unsure (1)..(61): unsure at all Xaa locations
  Clone ID: uC-gsronu33B114a12b1.pep
IANFFSRHVSLKFIPGLNPHNFPCINVSNIVSYFHVREPNHFLFGFFLDIIHSNSFMPXRS

SEQ ID NO: 64490 - protein, 63 aa, Gossypium hirsutum
  Clone ID: uC-gsronu33B114a06b1.pep
TYRKLWYMKYCHNELNDSYLRRNKKKMICTMTCKYETIFDTLIQGKLCVLRRVINLRETWREK

SEQ ID NO: 64491 - protein, 239 aa, Gossypium hirsutum
  Clone ID: GOSHI-09MAY01-C12591_1.pep
WGATGRYQALVQCRFAGSFGPLSSRRRSPRAVVSCSRSNLTPIQAVLSCQQQVGADPVESELGSLADRLRLGGLTADGLSYKETFIIRCYEVGINKTATIETIANLLQEVGGNHAQNVGFSRDGFATSPTMRKLHLIWVTARMHIEVYKYPAWSDVIEIETWCQNEGRIGTRRDWILKDVATGEVIGRATSKWVMMNEDTRRLQKVSDDVKEEYLAFCPREPQLPFPEENIRSWKKIFK

SEQ ID NO: 64492 - protein, 78 aa, Gossypium hirsutum
  Clone ID: LIB3145-038-Q1-K1-F12.pep
PRETDRCFIFLIAMRRTVGQALGEGRFAGSFGPLSSRRRSPRAVVSCSRSNLTPIQAVLSCQQQVGSDPVESELESLR

SEQ ID NO: 64493 - protein, 78 aa, Gossypium hirsutum
  Clone ID: GOSHI-09MAY01-C12581_1.pep
MGGGNAQKSKMAREKNLEKAKNAAKGSQLETNKKAMTIQCKVCMQTFICTTSEVKCREHAEAKHPKSDVYACFPHLKK

SEQ ID NO: 64494 - protein, 113 aa, Gossypium hirsutum
  Clone ID: GOSHI-09MAY01-C12551_1.pep
IAVEGHQLWAVGWQKAVSQIGPNFVWWVVAQSVFYHLYNQVSYMSLDQISPLTFSIGNTMKRISVIVSSIIIFHTPVQPINALGAAIAILGTFLYSQAKAVRKVKEFQDFLLD

SEQ ID NO: 64495 - protein, 74 aa, Gossypium hirsutum
  Clone ID: GOSHI-09MAY01-C12561_1.pep
VFDGAWEALASSRHLLLDKFSQICRGRLRKSINLMRCGICKGVNALTSHFGMEIEGLNKDDLLIFEAIYLEEFW

SEQ ID NO: 64496 - protein, 109 aa, Gossypium hirsutum
  unsure (1)..(109): unsure at all Xaa locations
  Clone ID: GOSHI-09MAY01-C12511_1.pep
KTFNEASLTTQRRGFYSFSSPNKLASCKGSHPLRSFSTSSSSSKVGFLGWYLAKLESNPIITKSVTTSLIFAAADFTSQVTSSYDSIRTLRMAGIXIASLGAITHLWFN

SEQ ID NO: 64497 - protein, 121 aa, Gossypium hirsutum
  unsure (1)..(121): unsure at all Xaa locations
  Clone ID: LIB3166-053-P1-K1-D4.pep
CLLRLSSDTHSLFHGKTWNEASLTTQRRGFYSFSSPNKLASCKGSHPLRSFSTSSSSSKVGFLGWYLAKLESNPIITKSVTTSLIFAAADFTSQMITSASSYDSIRTLRMAXYGLLLLGPS

SEQ ID NO: 64498 - protein, 101 aa, Gossypium hirsutum
  Clone ID: GOSHI-09MAY01-C12501_1.pep
AISKFFYCCPDNAFQVAGAGTSYSLLQRLGAVMRNGAKLFAVGTTSSLVGTAVTNALINARKAVDKSSGAEVENVPILSTSVAYGVYMAVSSNLRCVKFRH

SEQ ID NO: 64499 - protein, 141 aa, Gossypium hirsutum
  Clone ID: GOSHI-09MAY01-C12531_2.pep
MARKMLVDGDLNQTNNEGAEYDFDLFVIGAGSGGVRAARFSANYGAKVGICELPFHPISSEVIGGVGGTCVIRGCVPKKILVDGAAFGGELEDARNYGWELNEKLDFNWKKLLHKKTDEIIRLNGIYKRLLSNAAFKLFEG

SEQ ID NO: 64500 - protein, 175 aa, Gossypium hirsutum
  unsure (1)..(175): unsure at all Xaa locations
  Clone ID: GOSHI-09MAY01-C12531_1.pep
MARKMLVDEEMNQTNQEEAHYDFDLFVIGAGSGGVRAARFSANYGAKVGICELPFHPISSEVIGGXVGGTCVIRGCVPKKILVYGAAFGSELEDARNYGWELNEKLDFNWKKLLHKKTDEIIRLNGIXQPFIINACFKLXEGKGKIVRPNEFEVDHLDGTXLSYSQDHLLIATGS

SEQ ID NO: 64501 - protein, 133 aa, Gossypium hirsutum
  Clone ID: GOSHI-09MAY01-C12441_1.pep
MDIKKRLLLPFVCYFLSVSQFFHVCHGDVGTAAQYSPPYLPTACFGEDQTQFPSSNLFAAAGDGIWDNGASCGRQYLVRCISASQPGTCVPDQTIQVKIVDYAPTALSPPSAQSTTIVLSETAFGGITNIPMD

SEQ ID NO: 64502 - protein, 306 aa, Gossypium hirsutum
  unsure (1)..(306): unsure at all Xaa locations
  Clone ID: GOSHI-09MAY01-C12461_1.pep
FVPSMPALTRCSSRSKVSGVFKKKEKFQKAQSRKSQVGTTNGNGSFGIPQLYCRINTLQHIRTELDVLAKRTIVHLRSSESHNNNIANGTGKAFELSAAACLEGIQQLCEATAYKVIFQDLSHVLWDGLYVGEVSSSRIEPFLQELELYLEGLSLTVHDRVRAPVATVVVKASFDGFLLVLLAGGPAPAFSXKIMKQLPEDFKLLDXDLFWSNGDGLPADLIQKFSTTVKAILPLFHTETDSLIEQFKYMTAESYGSSAKSKLPLPPTSRQWSPTEPNTLLRVLCYRSDETAAKFLKKTYNLPKKL

SEQ ID NO: 64503 - protein, 114 aa, Gossypium hirsutum
  Clone ID: GOSHI-09MAY01-C12411_3.pep
TQSGGVRPFGVSLLVAGYDDNGPHLYQVDPSGSCCSWKASAMGKNVSNAKTSLEKRYTDDMELDDAVHTAILTLKEGFEGHISRKNIGIGIIGTDRKFRVLTPADIDDYLADVE

SEQ ID NO: 64504 - protein, 155 aa, Gossypium hirsutum
  Clone ID: GOSHI-09MAY01-C12411_2.pep
PRPPPPPPRVRPASHPLPTFPNFFPSRFLLLLLVRPSGKLVQIEHALTAVGSGQTSLGIKAAYGVVIATEKKLPSILVDETSVQKIQCLAPNIGVVYRFLFILQLSGKLGYSVLLVGDILDLINMHIALNCLKIKSATISVFRQCLEQVPVHVHL

SEQ ID NO: 64505 - protein, 235 aa, Gossypium hirsutum
  Clone ID: GOSHI-09MAY01-C12411_1.pep
MGDSQYSFSLTTFSPSGKLVQIEHALTAVGSGQTSLGIKAANGVVIATEKKLPSILVDETSVQKIQCLTPNIGVVYSGMGPDFRVLVRKSRKQAEQYHRLYKEPIPVTQLVRETAAVMQEFTQSGGVRPFGVSLLVAGYDDNGPQLYQVDPSGSYFSWKASAMGKNVSNAKTFLEKRYTDDMELDDAVHTAILTLKQGFEGQISGKNIEIGIIGTDKKFRVLTPAEIDDYLAEVE

SEQ ID NO: 64506 - protein, 118 aa, Gossypium hirsutum
  unsure (1)..(118): unsure at all Xaa locations
  Clone ID: LIB3272-021-P1-K1-A10.pep
MGDSQYSFSLTTFSPSGKLVQIEHALTAVGSGQTSLGIKAANGVVIATEKKLPSILVDETSVQKIQCLTPNIGVVYSGMGPDFRVLVRKSRKQAEQYHXIDKEPIPVTQLVRETAAVM

SEQ ID NO: 64507 - protein, 47 aa, Gossypium hirsutum
  Clone ID: LIB3493-018-P1-M1-D8.pep
EKRYTDDMELDDAVHTAILTLKEGLEGQISGKNIEIGIIGTDKKFRL

SEQ ID NO: 64508 - protein, 198 aa, Gossypium hirsutum
  Clone ID: GOSHI-09MAY01-C12431_1.pep
MKASLKGTYTNDKSTAVVSLSANAGDIKLRASLTDATFIKGPSLNGLTLAVEKPGFFIIDYDVPKKDFWFQFMNSVRVAEKPLKLTYIHGRGDNRTVLDGTLTLDSANKVSANYMFGTRNCKVKYSYSHGGATTFEPCYDFGKNAWDFAISRRVYDDVFKATYQTWSRDLALEWSRNSKFNGTFKISASVNLAEETKI

SEQ ID NO: 64509 - protein, 237 aa, Gossypium hirsutum
  Clone ID: GOSHI-09MAY01-C12781_1.pep
HAYDFQANKNPQAESKKTTIPPYMKAISGSFGGIVEACCLQPIDVIKTRLQLDRMGNYKGIVHCGATVSSTEGVRALWKGLTPFATHLTLKYALRMGSNAMLQSAFKDSDTGTLSNKARFLSGFGAGVLEALVIVTPFEVVKIRLQQQRGLSRELLKYKGPIHCAHTIIRQEGLFGLWAGAAPTVMRNGTNQAAMFTAKNAFDVVLWKKHEGDGKVLQPWQSMISGFLAGTAGPVCT

SEQ ID NO: 64510 - protein, 132 aa, Gossypium hirsutum
  unsure (1)..(132): unsure at all Xaa locations
  Clone ID: GOSHI-09MAY01-C12641_1.pep
RREGLGVMDGNTTEAERWLTIAEKLLAARDLHGTRTFAIRARESAPILADQILAVTDTLITAQSNSQDWYGILQLVPLTQSMEVVASQYRKLALLLNPGRNRLSFADQAFRFVSEAWNVLXNPSKRPVYDNE

SEQ ID NO: 64511 - protein, 71 aa, Gossypium hirsutum
  Clone ID: GOSHI-09MAY01-C12611_1.pep
NSMTFYDGNSDGEGGQVAPPLKVRVEGDDDGVNGKRVTLRQRLLEECEAEERYLLVKEPAFSCVQKRSIWF

SEQ ID NO: 64512 - protein, 61 aa, Gossypium hirsutum
  Clone ID: GOSHI-09MAY01-C12151_1.pep
MVRTFETHFFSLAQFGMKRRASLANICNAGIETEKMGEVSAQACVNIPLGHWVSVEKGFSA

SEQ ID NO: 64513 - protein, 123 aa, Gossypium hirsutum
  Clone ID: GOSHI-09MAY01-C12161_1.pep
MTKISPDIDETMLKESIVAVSADVSFASDHFPKYKLGPDNQILEEPRGDNNGPSLKEVLERETTQLSEQHKRLSVRDLASKFDKNLTAAAKFADEAKLKEVASLEGHVLLKKLRDALESLRGR

SEQ ID NO: 64514 - protein, 50 aa, Gossypium hirsutum
  Clone ID: LIB3197-019-Q1-M1-C12.pep
MTKISPDIDETMLKESIVAVSADVSFASDHFPKYKLGPDNQILEEPRGDN

SEQ ID NO: 64515 - protein, 67 aa, Gossypium hirsutum
  Clone ID: GOSHI-09MAY01-C12131_2.pep
FLTYSLNIISIIISKPSLVFSDFPSFSGKIFFLPHSANLIYFLDSLFLFSSFFLCFKICMVKSIFAA

SEQ ID NO: 64516 - protein, 282 aa, Gossypium hirsutum
  unsure (1)..(282): unsure at all Xaa locations
  Clone ID: GOSHI-09MAY01-C12131_1.pep
MPALACCVDAAAVAPPGYAAFFAGDSSLPSAVPFSASTADAADSNSTHWSPAHSSALYRIDGWGAPYFSVNNAGNITVRPYGTDTLAHQEIDLLKIVKKVSDPKSVGGLGLQLPLIVRVPDVLKNRLESLQSAFESAIQAQGYESHYQGVYPVKCNQDRFVVQDIVKFGAPFRFGLEAGSKPELLLAMSCLCKGNPEALLVCNGFKHPEYIFLALLPWKLAYEHXVLVLENEEGIWLFNIFKTYCSPLIGFRSSYTKLWCFSRPLIINGYCFYYSLFYDLKF

SEQ ID NO: 64517 - protein, 163 aa, Gossypium hirsutum
  Clone ID: GOSHI-09MAY01-C12081_2.pep
MKMLRMVSKKLLGIPSPSPPLQTLPRLYHQNVIDHYNNPRNVGSFDKNDPNVGTGLVGAPACGDVMKLQIKIDEDSGKIVDACFKTFGCGSAIASSSVATEWVKGKSMDEVLTIKNTEIAKHLSLPPVKLHCSMLAEDAIKAAVKDAEAKRGKMNGNSKAADA

SEQ ID NO: 64518 - protein, 174 aa, Gossypium hirsutum
  Clone ID: GOSHI-09MAY01-C12081_1.pep
MLRLASKRLLGLTSREIPSRSVQILPRLYHENVIEHYNNPRNVGSFDKNDPNVGTGLVGAPACGDVMKLQIKIDEESGKIVDACFKTFGCGSAIASSSVATEWVKGKSMDEVLTIKNTEIAKHLSLPPVKLHCSMLAEDAIKAAVKDMELKRAKLKGNSSADAANAPIEKAADA

SEQ ID NO: 64519 - protein, 252 aa, Gossypium hirsutum
  Clone ID: GOSHI-09MAY01-C12011_1.pep
CLLGKGGAIIAEMRKSSGAHIRILGKDQVPKCASEGEEVVQINGDHETVRDAIMQITSRLRHHFFRDMFPSINHPSNPGFMDQGPPFPSFMGRREFSPPVGPFHHFDAFGGPPPHGGFHPHDPPFMRNIHRPGMPPHISERKPWGPQGYLGMPDFSGPPHRRISGFGGGSQPAVITSTTIEVVVPRSLVPIICGEDGACLKQIRQISDAKITITEPKPAATETAITISGTPEQTHAAQSLIQAFVMSETEST

SEQ ID NO: 64520 - protein, 146 aa, Gossypium hirsutum
  Clone ID: GOSHI-09MAY01-C12001_1.pep
MKYNPRVSSSRRKSRKAHFTAPSSVRRVLMSAPLSTDLRSKYNVRSMPVRKDDEVQVVRGTYKGREGKVVQVYRRKWVIHIERITREKVNGSTVNVGINPSKVVITKLRLDKDRKSLLDRKAKGRAAADKDKGTKFSAEDIMQSVD

SEQ ID NO: 64521 - protein, 125 aa, Gossypium hirsutum
  Clone ID: GOSHI-09MAY01-C112019_1.pep
SFCVLKKKQQMVRRAMLLAGAMYEYGRGNEKQALEILGPDFDAYSFKIIGASDEQLDVFNEVWYTMLLNTGQVTKAIESIEKQIPKREGAPFLWRLLEKGYKLTGRQEAATIGERARLLEAAYFN

SEQ ID NO: 64522 - protein, 49 aa, Gossypium hirsutum
  Clone ID: uC-gsflnu33B145a10b1.pep
SVPRVRALGFELISAELVQFGLQCGYLLSCGVEPSTGSHFMCLTLRSIF

SEQ ID NO: 64523 - protein, 216 aa, Gossypium hirsutum
  Clone ID: GOSHI-09MAY01-C12341_1.pep
MAAKVFAYFVALVAVFSVAKSDPDLLQDICVADTSSGVKVNGFACKKDADVTENDFFFSGLAKPAVVNNSVGSVVTGANVEKIPGLNTLGVSLSRIDYQPGGLNPPHTHPRATEIIFVLDGELDVGFITTANKLISKSLKKGDIFAFPKGLVHFQQNNGKEPASVISGFNSQLPGTQSIAVTLFGSTPAVPDHVLTKAFQIGTKEVNKIKSRLSPK

SEQ ID NO: 64524 - protein, 145 aa, Gossypium hirsutum
  Clone ID: GOSHI-09MAY01-C12311_1.pep
FVAAFSGSTDNLLDLSSTVPAILPWAQVFYNVQTTVNTEIKNIFSRGEFTVLRELLAVDNCANKLYPLLQDGFSPAREGSFKHSASDLRKTAEKLSQGLDNLSKVVDDFFKIVLSGRDALLCNLRAGCASPNSVLGRNTDKQSVR

SEQ ID NO: 64525 - protein, 110 aa, Gossypium hirsutum
  Clone ID: LIB3166-050-P1-K1-H7.pep
NCANKLYPLLQDGFSPAEEESFKHSFSNLRKTAEKLSQGLDNLSKVVDDFFKIVLSGRDALLCILRACFAFSNSVFLKKHLLCKVFLFNKNVFQPNFCVYICFLYETFCL

SEQ ID NO: 64526 - protein, 205 aa, Gossypium hirsutum
  Clone ID: GOSHI-09MAY01-C13981_1.pep
MKTKVFYCCLVLFFLGFQGYVDARLLVESKPDRDDTAAYARWLVSQNSWGILTTLSIELEGSPFGNVVSFSDGVPGKGTGVPYFYLTTLDPTARNALKDHRSSLAISEYPLGTCSNADPESPVCAKITLTGRLVLLEANSEEAEFARTALFTKHPEMKGWPKGHDFQVFKLEIEDIFMINWFGGPKPLTVDQYLKYKMNIFAIDK

SEQ ID NO: 64527 - protein, 181 aa, Gossypium hirsutum
  Clone ID: GOSHI-09MAY01-C113999_1.pep
PPVSSEVGGLRLFIDISVPRNVGSCVSDVEGARLYNVDDLKEVVAANKEDRLRKAMEAQAIIAEESKQFEAWRDSLETVPTIKKLRAYAERIRLAELEKCLSKMGEDIPKKTRKAVDDLSRGIVNKLLHGPMQHLRCDGNDGRTLNEALENMNALNRMFGLESDLSLVEQKIRAKVEQSQK

SEQ ID NO: 64528 - protein, 202 aa, Gossypium hirsutum
  Clone ID: GOSHI-09MAY01-C113979_1.pep
VASVSGSIFSRLVMGAVCDLLGPRYGCAFLVMLSAPTVFCMSFVSDAGGYIAVRFMIGFSLATFVSCQYWMSTMFNSKIIGLVNGTAAGWGNMGGGATQLLMPLVYDIIRHAGATPFTAWRIAFFIPGCLHIIMGILVLTLGQDLPDGNLSSLQKKGDVAKDKFGKVLWYAVTYYRTWIFVLLYGYSMGSELSTDNVIAEYL

SEQ ID NO: 64529 - protein, 59 aa, Gossypium hirsutum
  Clone ID: GOSHI-09MAY01-C13911_8.pep
MVSLKLQKRLAASVLKCGPGKVWLGPNEINEISMANSRQNVRPLVKDGFIIRKPTKSIS

SEQ ID NO: 64530 - protein, 206 aa, Gossypium hirsutum
  Clone ID: GOSHI-09MAY01-C13911_6.pep
MVSLKLQKRLAASVLKCGRGKVWLDPNEINEISMANSRQNVRKLVKDGFVIRKPTKIHSRSRARRMKEAKRKGRHSGYGKRKGTREARLPTKILWMWRMRVLRRLLRKYRESKKIDKHMYHDMYMKVKGNVFKNKRVLMESIHKSKAEKAREKTLSDQFEAKRAKNKASRERKMARREERLAQGPGVKAAPAAAPQQAEGVKKSKK

SEQ ID NO: 64531 - protein, 209 aa, Gossypium hirsutum
  unsure (1)..(209): unsure at all Xaa locations
  Clone ID: GOSHI-09MAY01-C13911_5.pep
MVSLKLQKRLAASVLKCGRGKVWLDPNEINEISMANSRQNVRKLVKDGFIIRKPTKIHSRSRARRMKEAKRKGRHSGYGKRKGTREARLPTKILWMRRMRVLRRLLRKYRESKKIDKHMYHDMYMEVKGNVFKNKRVLMXESFHKSKAEKAREKTLSDQFEAKRAKNKASRERKMARREERLAQGPVEKTAPAAANQQAEMVKTVKAKK

SEQ ID NO: 64532 - protein, 72 aa, Gossypium hirsutum
  Clone ID: GOSHI-09MAY01-C13911_4.pep
SQKNNMTQKENFLGHDNEIIVNKSLRSEIIHSTFNIIVHYTNKQYRKHLPSSISYNSSADARKFYNYIKLKI

SEQ ID NO: 64533 - protein, 211 aa, Gossypium hirsutum
  Clone ID: GOSHI-09MAY01-C13911_3.pep
MVSLKLQKRLSASVLKCGKGKVWLDPNEVNEISMANSRQNIRKLVKDGFIIRKPTKIHSRSRARRMKEAKRKGRHSGYGKRKGTREARLPTKILWMRRMRVLRRLLRKYRESKKIDKHMYHDMYMKVKGNVFKNKRVLMESIHKSKAEKAREKTLADQFEAKRAKNKASRERKFARREERLAQGPGGGEKPVAAQPAAAVQSAVGSKKSKK

SEQ ID NO: 64534 - protein, 211 aa, Gossypium hirsutum
  Clone ID: GOSHI-09MAY01-C13911_2.pep
MVSLKLQKRLSASVLKCGKGKVWLDPNEVNEISMANSRQNIRKLVKDGFIIRKPTKIHSRSRARRMKEAKRKGRHSGYGKRKGTREARLPTKILWMRRMRVLRRLLRKYRESKKIDKHMYHDMYMKVKGNVFKNKRVLMESIHKSKAEKAREKTLADQFEAKRAKNKASRERKHARREERLAQGPGGVEKPVAAPPAATAQPAGGSKKSKK

SEQ ID NO: 64535 - protein, 206 aa, Gossypium hirsutum
  Clone ID: GOSHI-09MAY01-C13911_1.pep
MVSLKLQKRLAASVLKCGRGKVWLDPNEINEISMANSRQNVRKLVKDGFIIRKPTKIHSRSRARRMKEAKRKGRHSGYGKRKGTREARLPTKILWMRRMRVLRRLLRKYRESKKIDKHMYHDMYMKVKGNVFKNKRVLMESIHKSKAEKAREKTLSDQFEAKRAKNKASRERKLARREERLAQGPGVKATPTAAPQQAEGVKKTKK

SEQ ID NO: 64536 - protein, 56 aa, Gossypium hirsutum
  Clone ID: LIB3149-035-Q1-K1-B7.pep
IRKMARLHMLMAFVFFIGVCLRNSGSIYVDTYNYKLGNFGSPGAVLFNQDAYVLKI

SEQ ID NO: 64537 - protein, 147 aa, Gossypium hirsutum
  unsure (1)..(147): unsure at all Xaa locations
  Clone ID: GOSHI-09MAY01-C13921_1.pep
MEQETRQKIEETVKDMLSKADMEEMTEFKVRVTASERLAIDLSDFSRRKFIRELVESFLLSTVEENVDGKQPNTKPVEEEAKEAVKVKKEIEGDXVVLFLADKTNVVVHDFRGKSYVSIREFYVKNGKELPSARGVSLVSETWSTLK

SEQ ID NO: 64538 - protein, 156 aa, Gossypium hirsutum
  Clone ID: GOSHI-09MAY01-C13841_1.pep
MGVAVAGAGKTHVIDFRWPNLYPEGMAWDPLAQHFIVGSLNHRTIHSVSDAGVVETLISDPALPENVTVLGLTVDFTKNRLLACLHSVSPLPPFNALVAYDLRTRRRLFLSLLPSDPDSPIASIRRGRDLANHVALDFKGNAYLTNSGGNFIWKGN

SEQ ID NO: 64539 - protein, 124 aa, Gossypium hirsutum
  Clone ID: GOSHI-09MAY01-C13821_1.pep
MVRPTAIGTANRSSSAMSSMTTTVTIENTSGASSSSSQPQEALVLELRPRKKKVTWKEGTVDNEFMNKKSSKICCIYHKEKPFDEDDSDDDGHDHHHHHHPSNGHDSSKDGCRPSSSSSSSSSA

SEQ ID NO: 64540 - protein, 64 aa, Gossypium hirsutum
  Clone ID: uC-gsronu33B138h01b1.pep
FLNRSHASSDFFFHLGFSFRVLFDSFFLNKRKEKEKGGELTFAGEPMTPSSPLRIGVERAEARI

SEQ ID NO: 64541 - protein, 79 aa, Gossypium hirsutum
  Clone ID: uC-gsronu33B049g12b1.pep
RPCVRPRVRESAVSHFPFYAVSDPSLRPFDSYSQRRRRRHRLTREGTDVRGRAYGVVPGVRSAPFLHRFLFRRLSSYTH

SEQ ID NO: 64542 - protein, 180 aa, Gossypium hirsutum
  Clone ID: uC-gsronu33B042e08b1.pep
SSRPPTRPPTRPEEPNILKYIKIAASLPEKTVRDVALRCRWMQIKVLFGNWQRKRRKPEEHNAGKKVNNRKDKLVESSSKMTMPSSLPPTMAAYPLMMRHLDQNGRTPSEGICGTTMHLLKQNAQTFSQITSNLSQYKLQDNIDLFCYARNNITAMLNDMREMPGLMSHMPPLPVSVMRD

SEQ ID NO: 64543 - protein, 75 aa, Gossypium hirsutum
  Clone ID: uC-gsronu33B137e02b1.pep
YIDLFCHARNNITAMLNDMREMPGLMSHMPPLPVSVNEDLANGLLPGATNVLPVNEFACAGLHGQKSGVVDTTIS

SEQ ID NO: 64544 - protein, 56 aa, Gossypium hirsutum
  unsure (1)..(56): unsure at all Xaa locations
  Clone ID: GOSHI-09MAY01-C13431_1.pep
MSTRRCFCSSAPRPWLVAGLGNPGEEYKGTXHNVGFEMIXDAFAKAQGIDLNTLYC

SEQ ID NO: 64545 - protein, 167 aa, Gossypium hirsutum
  Clone ID: GOSHI-09MAY01-C13741_1.pep
TFEAKVGKFFDAVTNFFSGSDQLPWCDADIIAGCEREAAGADNGSDESKNECLTRFSWALVHSRRTEDVERGIAMLEASIASTTDPLKMREKLYHLAVGHFRRGDYSRSRELVEQCLMVEPEWRQAQSLKKAIEDRITKDGVIGIGIAVSAAGLIAGGIAAALSRKK

SEQ ID NO: 64546 - protein, 118 aa, Gossypium hirsutum
  Clone ID: GOSHI-09MAY01-C13771_1.pep
RRKRTAFGTRNQCCNMESSQARRVLTKLMKVLTLRPHHPVSRAAPSSCVLQTRLFSDIKRPITENESIRSNEDDDGATEHISKRPLRGRRPFNPAFKETEGASFDRNRSSVQSPNCQI

SEQ ID NO: 64547 - protein, 67 aa, Gossypium hirsutum
  Clone ID: GOSHI-09MAY01-C13761_1.pep
MDNSEGNNSPSLISREKLGEVATWVSATVVSAFFSSLERFSCVNLSTNDPDDDDNPDEAKDRPLTYS

SEQ ID NO: 64548 - protein, 91 aa, Gossypium hirsutum
  Clone ID: LIB3828-023-Q6-N6-A3.pep
ATVVSAFSPLSSASPALTSPPTTLTMTTIPTRPRTALSPTPKYLSRYLPRHILSCFLLIYGLCIQNQEKSIKETLNALYLLVVLIEKGTLL

SEQ ID NO: 64549 - protein, 65 aa, Gossypium hirsutum
  Clone ID: LIB3825-030-Q6-K6-D5.pep
YSEGNNSPSLISREKLGEVATWVSATVVSAFFSSLERFSCVNLSTNDPDDDDNPDEAKDRPLTYS

SEQ ID NO: 64550 - protein, 125 aa, Gossypium hirsutum
  Clone ID: GOSHI-09MAY01-C13711_1.pep
DLDIRYMIKICKMLGLAALVEVHDEREMDRVLGIEGIELIGINNRNLETFEVDISNTKKLLEGERGQMIRKKDIIVVGESGLFTPDDVAYVQEAGVKAVLVGESIVKQSDPGKGISGLFGKDISL

SEQ ID NO: 64551 - protein, 67 aa, Gossypium hirsutum
  Clone ID: LIB3197-056-Q1-M1-B12.pep
RTRGGEHGQLIHQKDIIVVGESGLFTPDHVGYVQEAGVKAVLVGESIVKQSDPGKGITGLFGKDISL

SEQ ID NO: 64552 - protein, 374 aa, Gossypium hirsutum
  unsure (1)..(374): unsure at all Xaa locations
  Clone ID: GOSHI-09MAY01-C13721_1.pep
MAIQQYEQQQQQQENHPSFLLDALYCEEEADAGEVLEEESSCVGCNNGGNPSFFPLLLLEQDLFWEDGELLSLFAKETEQQPSCFNVGTDESLAMARREAVEWMLKVNARFGFTTLTAVLSINYLDRFLSTFQFQRDNPWMIQLLAVTCLSLAAKVEETQVPLLLDLQVEETKYVFEAKTIQRMELLVLSTLKWKMHPITPLSFLDHIIRRLGLKTHLXWEFLKRCEHLLLCVITDSRPIHYLPSVLATATMMHVIDQVELFNPIDYQNQLLSVLKISKEKVNDCYKLILDVSTRPQAQGNGGACKRKVEERVPSSPSGVIDAAFGSDSSSDSWGTVSLSPEQQPPFKKSRAQEQVMRLPSLNRVFVDIVGSPS

SEQ ID NO: 64553 - protein, 110 aa, Gossypium hirsutum
  Clone ID: LIB3189-015-P1-K1-B4.pep
KIPKKNLALTSTVEKIQGFRHCISPHKNSLPLKLPLHPLLPHSREHLARRKGDSLVVVAAVHIAVLPSSCLCLAQNTEEKIHEGKELERPISLKYWVGPVMEESVERVII

SEQ ID NO: 64554 - protein, 54 aa, Gossypium hirsutum
  Clone ID: GOSHI-09MAY01-C13191_1.pep
MADTVISLDKLKAFWNSQVHDEENWAHNMKLLRAAGLFAGSILLMRNYGDLMAI

SEQ ID NO: 64555 - protein, 68 aa, Gossypium hirsutum
  Clone ID: GOSHI-09MAY01-C113199_1.pep
KENSRRRITSLIYREEQFFLLKRVFLAKRVRHLRPSISTITTNRNATRSLHQERKKERYIRKLNNLDG

SEQ ID NO: 64556 - protein, 78 aa, Gossypium hirsutum
  Clone ID: AW187764.1.pep
RGLPVFGSFKIRVVFDKTKEEKKWRDCLLIFVLRFSVSWIIRTLLLPYKVSLLNQPTILFFFLGFRLILSQIQDERFA

SEQ ID NO: 64557 - protein, 158 aa, Gossypium hirsutum
  Clone ID: uC-gsronu33B126d11b1.pep
SCIGQIQRRKKMERLPSDICLKIFCFLDHQNLASALQVCRKWKLLGSDNKLWCNLFRERWGVDEAAFFAPEPLESTSWKHVYETQDRCDRVGLGLKIIKEGGDYFLVHQGKIQRYLGSRIKRKGVKECEFSTTSNHVEEPCRGILDKILFFLGDLEAA

SEQ ID NO: 64558 - protein, 117 aa, Gossypium hirsutum
  unsure (1)..(117): unsure at all Xaa locations
  Clone ID: GOSHI-09MAY01-C13081_1.pep
FHTINSIQNLYICICIHIRPHVYIYNSIXISIQEIIHVHLYIFKSXYKCINSYSISKQELIHIYMHNRSSYTYIMTYLNSIHNTYMYICMLIRIYIYNYNKHITNQIHEFIHIYILI

SEQ ID NO: 64559 - protein, 44 aa, Gossypium hirsutum
  Clone ID: LIB3189-003-P1-K1-G8.pep
YECYEFIYLVINKMFMNNNIQMVIYVVFAISLSIRRKLYKLFYI

SEQ ID NO: 64560 - protein, 165 aa, Gossypium hirsutum
  Clone ID: GOSHI-09MAY01-C13041_1.pep
QLGARISFSGQVRNYQRTISQVVNLLGDETSAANYLSKCIYSIGLGSNDYLNNYFMPLYYSTSRQYTPEQFADVLIQQYTEQLQALYNYGARKFALIGVGQIGCSPNELAQYSGDGKTCVERINAANRIFNVKLKGLVDQFNIDYSDAKFIYINAYGISKIITSN

SEQ ID NO: 64561 - protein, 217 aa, Gossypium hirsutum
  unsure (1)..(217): unsure at all Xaa locations
  Clone ID: GOSHI-09MAY01-C13011_1.pep
LFRSEVSDDNDSQGSTPCSPTVLGSLEDGGSGGNGQAFERQLSKLSSFNFKPNIRRSGQIPIPPEELRCPISLQLMYDPVIIASGQTYERICIEKWLGDGHDTCPKTQQRLSHLSLTSNYCXKGLIASWCEQNGVPIPNGPPESLDFNYWRLALSESETANSRSMDSVGSCNLKGAKVVPLEESANAEEVEGNEAENENESSCPQEETSELNVLESY

SEQ ID NO: 64562 - protein, 141 aa, Gossypium hirsutum
  Clone ID: GOSHI-09MAY01-C13391_1.pep
MPFPFLLFFSSMFLSFPSLSFSQQTPPKGYLINCGATRRSVIHGRVWLPDGNFISAGTSKNLTVPGLVPTLSTVRSFPLENKNLRRKFCYVVRVYRGARYLIRTTYYYGGVNGLDFDSPPVFDQIVDGTFWSVVNTTEDYG

SEQ ID NO: 64563 - protein, 69 aa, Gossypium hirsutum
  Clone ID: GOSHI-09MAY01-C13311_1.pep
FSKCRKYELKHLLCQLFVFLQQYFACWHQLCLTNNSPNALNDLPLPVAIATKATSTVAAPPLHNKRSSS

SEQ ID NO: 64564 - protein, 226 aa, Gossypium hirsutum
  unsure (1)..(226): unsure at all Xaa locations
  Clone ID: GOSHI-09MAY01-C13301_7.pep
CEGGELFDRIVARGHYTERAAAVVMRTIVEVVQMCHKHGVMHRYLKPENFLFGNKKENAPLKAIDFGLSVFFKPGERFNEIVGSPYYMAPEVLKRNYGPEVDVWSAGVILYILLCGVPPFWAETEQGVAQAIIRSVIDFKRDPWPKVSDNAKDLVKKMLNPDPEQRLTALEVLGHPWLXQNAKKAPNGPLGETVKARLKQFSCMNKLEKRALRGLLPFAPPVSSFY

SEQ ID NO: 64565 - protein, 107 aa, Gossypium hirsutum
  Clone ID: GOSHI-09MAY01-C13301_5.pep
SCLHTEIEQGVTQAIIRSAIGFKRDPWPKVSDNAKDLVKKMLNPDPEQHLTVQKVLEHPWLQNAKKAPNVLLGETVKARLKQFSIMNKLKKRALRGPGAGTSSNLPP

SEQ ID NO: 64566 - protein, 111 aa, Gossypium hirsutum
  Clone ID: GOSHI-09MAY01-C13301_4.pep
MLVMQVTQEIIRSAIDFKRDPWPKVSDNAKDLVKKMLNPDPKQHLTVQEVLEHPWLQNAKKAPNVLLGETVKARVKQFSIMYKLKKRALRVKRPDLLVGLQQILHTGGILA

SEQ ID NO: 64567 - protein, 58 aa, Gossypium hirsutum
  Clone ID: GOSHI-09MAY01-C13301_3.pep
PFLTSQFQRYPSPFLTSETSFFFSFSHFLLASSLTLPFLTLKLYRCIRPLRLCHILFF

SEQ ID NO: 64568 - protein, 159 aa, Gossypium hirsutum
  unsure (1)..(159): unsure at all Xaa locations
  Clone ID: GOSHI-09MAY01-C13301_2.pep
MGIVFTRMFSSLFGNREARILVLGLDNAGKTTILYRLQMGEVVSTIPTIGFNVETVQYNNIKFQVWDLGGQTSIRPYWRCYFPNTQAIIYVVDSGDTDRIGIAKEEFHAILEEDEPXGAIAPIFAHKQDLPGALDAAAVTEALELHKLKNRQWAIFKTC

SEQ ID NO: 64569 - protein, 205 aa, Gossypium hirsutum
  Clone ID: GOSHI-09MAY01-C13301_1.pep
RLFRDLFIREGFQFDYVFDWTILKYQQSQIANPPTRALGPGAGTSSGLPPAGAIADRQSGEETRPSGWSSADPTRRRHSGLIANSGSLAKQKSPVANDLSAAKDPMLSSSNFLRSSGSSRRAAVSSSRDAAAIAVSDSERSHFRTTDATAGPFQKISSGQRNSPVLSSENKRPSSGRNTSNINNVQSAVRGIESLHFRNEERLHY

SEQ ID NO: 64570 - protein, 64 aa, Gossypium hirsutum
  Clone ID: LIB3197-019-Q1-M1-C5.pep
SSINASPLTPSPSQRLGNIEIVQYNNIKFQVWDLGGQTSIRYLFLSYVFSRKHPNTFGTDEIFN

SEQ ID NO: 64571 - protein, 78 aa, Gossypium hirsutum
  unsure (1)..(78): unsure at all Xaa locations
  Clone ID: LIB3189-007-P1-K1-H5.pep
VGQSGNPAAVGVVLSNMTXAFDYWLLGVEEPFVFEPYHKALRKPIVYYMVGXNYIPPLIDFRNSYVGNLFFFFEIEEK

SEQ ID NO: 64572 - protein, 106 aa, Gossypium hirsutum
  unsure (1)..(106): unsure at all Xaa locations
  Clone ID: LIB3189-017-P1-K1-G1.pep
GSNREKXGTAXTRKGPPLIGNREARILVLGLDNAGKTTILYRLQMGEVDSTIPTNXFNVETVQYNNIKFQVWDLGGQTSIRPYWRCFFPNTSAIIYVDDXSDTDRI

SEQ ID NO: 64573 - protein, 49 aa, Gossypium hirsutum
  Clone ID: LIB3146-022-Q1-K1-G1.pep
MLNPDPEQHLTVQKVLGHPWLQNAKKAPNVLLGETVKARLKQFSIMKLK

SEQ ID NO: 64574 - protein, 91 aa, Gossypium hirsutum
  Clone ID: GOSHI-09MAY01-C13291_1.pep
RRGLRRSLTSRFRVGCYSENRSGSSTNRYSVRARAREAEGIDTAVDEPRRRCCVHGGIDDGNFFLERETQRILERERKIVLISESEEFRVE

SEQ ID NO: 64575 - protein, 119 aa, Gossypium hirsutum
  Clone ID: GOSHI-09MAY01-C13251_1.pep
ELREETGVESAEIIAEVPTWLTYDFPTAVKAKVNRLWGGEWHGNAQKWFLMKLTKDESEINLATGEGEPEFAEWKWATPEEVVEQAVDYKRPTYEEVMKTFQPYFSDNGKATKCKSTKW

SEQ ID NO: 64576 - protein, 186 aa, Gossypium hirsutum
  unsure (1)..(186): unsure at all Xaa locations
  Clone ID: LIB3582-031-P1-K1-D8.pep
PTRPRIXENPNQQLDRYFNSFKELAXSRPLSELRTAEEAAANVSGPVSEADGQVNEGEVHPDAAEQMQKPLTAGSTEAEELEKYVAIREELYKKAKELDSKIIGFETAIRRPYFHVRPLNVAELENWHNYLDFVEREGDFNKXVVKLYERCLIACANYPEYWIRYVLCMEASGSMDLAKNALVRAT

SEQ ID NO: 64577 - protein, 133 aa, Gossypium hirsutum
  Clone ID: LIB3166-008-P1-K1-G2.pep
PTRPPTRPPTRSDLNKVVKLCERCLIACASYPEYWIRYVLCMEASGSMDLADNALARAMQVFVKRQPEIHLFAARFKEQNGDIPCARAAYQLVHNEISPGFLEAIIKHANMERRLGKLEDAFSLYEQAIAIEK

SEQ ID NO: 64578 - protein, 187 aa, Gossypium hirsutum
  unsure (1)..(187): unsure at all Xaa locations
  Clone ID: GOSHI-09MAY01-C8942_1.pep
MGRGRVQLKRIENKINRQVTFSKRRAGLLKKAHEISVLCDAEVALIVFSHKGKLFEYSTDSCMEKILERYERYSYAERQLVATESQPQGNWSMEYNRLKAKVDLLQKNHRHYMGEDLDSLSLKELQNLEQQXDTAIKHIRSKKNHLIXESISELQRKEKGIQXNAMLAKQIKDREKTWRSTAVAVGA

SEQ ID NO: 64579 - protein, 147 aa, Gossypium hirsutum
  Clone ID: GOSHI-09MAY01-C8962_1.pep
MVLAQVSASLSLTVHDVSPIISPKTTHKLSRVPISSFSGTGSIFATGSPFLIRESFNQRKPVCKATTFTITCEQSTKGGSTNSLDVWLGRLAMVGFAVAITVEISTGKGLLENFGLTTPLPTVALAVTALVGVLTAIFIFQSTSKSS

SEQ ID NO: 64580 - protein, 184 aa, Gossypium hirsutum
  unsure (1)..(184): unsure at all Xaa locations
  Clone ID: GOSHI-09MAY01-C8912_2.pep
LAAVYLLEAPYVDRKKDSNLLGLRRTCIMLMECLSFLLRNMDMASVSALISEDVRGQAKLIAEEWKPKLDALDMDASNGNSLEAHAFLQLLATFGIASDFNEEELSRLIPRVSRRRQTADLXCRSLGLSEKMPGVIEVLVNNGRQIDAVNLAFAFDLTVQFLPVPLLKAYLKEARKASSPVKPG

SEQ ID NO: 64581 - protein, 363 aa, Gossypium hirsutum
  unsure (1)..(363): unsure at all Xaa locations
  Clone ID: GOSHI-09MAY01-C8912_1.pep
EFETKTRKAREMLQKREAAVVAKEQSSLVRLQEKRDAAVFSITNALEKHRKLSSGQPADNGDNGELSVEEKQPEDIKSSFENGNLEVKSYPQLVKLCEEMDSEGLQKFISDNRKNLAALKEEIPWALKAAASPARLVLESLEGFYPSEVDGKKDANLLGLRRTCIMLMECLSVLLSNLDMVSVLALISEDIKEQAKLIAEEWKPKLDALDMDASNGNSLEAHAFLQLIDTFGIASGFNEEELSRLIPMVSRRRQAADLCRSLGLSEKMPGVIEVLVKNGRQIDAVNLAFAFELTEQFSPVPLLKSYLKEARKASSPVKPGNASPTAQTEVSERELTALKAVIKCIEEHNLEEXQYPVDPLQKR

SEQ ID NO: 64582 - protein, 195 aa, Gossypium hirsutum
  Clone ID: GOSHI-09MAY01-C8892_2.pep
TNYHMDLIAGLANMRARNYRVPEVDKLKARSRAGRIIPASATSTAMATGLGCLELYKALDGGHKVEDYRNTFANLALPLFSMAEPVPPKVIKHGDMSWTGWDRWSPRDNPTLRELIQWLKDKGLNAYSISYGSCLLYNSMFPRHRERMDKKVVDLAREVAKAELPPNRKHLDVVVACEDDDDNDVDIPQVSIYFS

SEQ ID NO: 64583 - protein, 266 aa, Gossypium hirsutum
  Clone ID: GOSHI-09MAY01-C8892_1.pep
MAGITTSFPFRTIPTRPTKTIPLLLSSLQSKLFGIHVRNPNSFSSPLHCSATINARYGADSRFSPPGRSKKNDEDQALDLSAIRSDSVRLIDEEQSMIGIVSKSQAIQMAEDAGLDLVILSPDADPPVVRIMDYNKYRYEQQKKKKVQQKKTNRMDLKELKMGYNIDQHDYSVRLKAARKFLNDGDKVKVIVNLKGRENEFRNMAMELIRRFQNDVGELATEESKNFKDRNIFIVLVPNKAVVQKAQQDPGKKKDKPTKNEVSAGV

SEQ ID NO: 64584 - protein, 75 aa, Gossypium hirsutum
  Clone ID: LIB3135-012-Q1-K1-F2.pep
GGHKVEDYRNTFANLALPLFSMAEPVLPKVIKHGDMSWTGWDRWILRDNPTLRELIQWLKDKGLNAYSISIRQGD

SEQ ID NO: 64585 - protein, 50 aa, Gossypium hirsutum
  Clone ID: LIB3166-007-P1-K1-E5.pep
GLSCFSHLSFPAAWGCDLKAQNFYSVIKMDISFFKVNSSLLLSFQFDVLP

SEQ ID NO: 64586 - protein, 275 aa, Gossypium hirsutum
  Clone ID: GOSHI-09MAY01-C8842_1.pep
GSVGFPGSSPSHPVEIASHNIFSHVGGMDLMKNGGVHSPQQMSHLYPGRNPMISMPTSLDSPNERVRSFSHRRNELNSSNADKKQYELDIDRIIRGDDSRTTLMIKNIPNKYTSKMLLAAIDEHCRGTYDFIYLPIDFKNKCNVGYAFINMIDPQQIIPFHKAFDGKKWEKFNSEKVATLAYARIQGKAALIAHFQNSSLMNEDKRCRPILFHTDGPNAGDQEPFPMGTNIRSRPGRPRTSGTEENHRQSSSSTLANGEEYSNGAESLGSSKDSD

SEQ ID NO: 64587 - protein, 109 aa, Gossypium hirsutum
  unsure (1)..(109): unsure at all Xaa locations
  Clone ID: GOSHI-09MAY01-C8822_1.pep
EINNIDFYFSHFYELLADAPDPPSSFSGKIIECSWDPDEHVLXLSRIRADKSTPNDINTFRKVLLSIRDNITEEILLNEINEIIQLPMYADRIRIDSKARMHANAARRR

SEQ ID NO: 64588 - protein, 407 aa, Gossypium hirsutum
  Clone ID: GOSHI-09MAY01-C8592_1.pep
VNTYFTVNPYSKALENARDIEFDRADIEGNTQNGPAVRLPFASLFDTLGMCLADETAVLLLYSLVQGNSDFLEYVLLRTDLDTLLMPILETLYSASRRTSNQIYMLLIILLILSQDSSFNASIHKMILPGVPWYKEHLLHQTSLGSLMVIILIRTVQYNLSKLRDVYLHTTCLATLANMAPHVHRLSAYASQRLVSLFYMLSRKYNKLVELRDDKLQTKAISTGDGLVEDMSAELQIYTDFLRIVLEILNAILTYALPRNPEVVYAIMHRQEVFQPFKSHPRFAELLENIYNVLDFFNSRMDAQRMDGEWSVEKVLLFIINNCRSWRGEGMKMFTQLHFSYEQESHPEEFFIPYVWQLVLSRCGFSFNADAITLFPVGMHANKEIYYDEMNTNQNGELNEQRVLFDP

SEQ ID NO: 64589 - protein, 116 aa, Gossypium hirsutum
  Clone ID: GOSHI-09MAY01-C8582_2.pep
MQSNRNNILSFDGDYGTQGMATSSRALRTPRDRARTITSLPVSPCSSPLRYGPVHRSCFLSPPHPAYQFVGQSGHNLGDFSGNTSRPNPRYTHDPWFEAPQLKVQTTGTSPRTRPI

SEQ ID NO: 64590 - protein, 94 aa, Gossypium hirsutum
  Clone ID: GOSHI-09MAY01-C8582_1.pep
VAYIVFAHRDNARTITSLPVSPCSSPLCCAPVLTPCSPPPPHPAYQFVGQSGHNLGDFSGNTSRPNPRYTHDPWFEAPQLKVQTTGTSPRTRPI

SEQ ID NO: 64591 - protein, 249 aa, Gossypium hirsutum
  unsure (1)..(249): unsure at all Xaa locations
  Clone ID: GOSHI-09MAY01-C8502_1.pep
NGYLRLIFALESSNKGESDGDISRERLDRLSRMTEIEDLQGPNTLPLAPLCIKVTPXSSGFNRCFSVDTLFVCAQNQDPRDYFDSQQANALRTSGDALGGIEQIKCGLSTQEVYGSLRESISSIKAMGLKEPIVKPEVAHQVFDALTNSISNTKYHIGKNPQESVLDRLPRKTKEELLHHWTSILELLKHFWASYPITTTYLYVKVNRLKDAMSNIYPQLEALDAAIQHYEASMQKRSAQSGERPNGYV

SEQ ID NO: 64592 - protein, 156 aa, Gossypium hirsutum
  unsure (1)..(156): unsure at all Xaa locations
  Clone ID: GOSHI-09MAY01-C8482_1.pep
MVVASSNPHNKEMQIRRRISNIFNKREEDFPSLREYNDYLEEVEDMIFKLIEGIDVQAIEXKITNYQQENAEQIMINQARKAEDLAAAMAASKGIPVQADTDGNSQAGFVAGTQGQYAPTVAGGQPRPTGMAPQPVPLAGGLDMHGYALDDEEMMR

SEQ ID NO: 64593 - protein, 112 aa, Gossypium hirsutum
  Clone ID: GOSHI-09MAY01-C8462_1.pep
MNIFRLAGDMTHLFSVLALLLKIHTIKSCAGISLKTQELYAIVFATRYLDIFTNHISPYNTIMKLIFLGSSFSIGWYMRYNKIHRRSYDKDQDTFRHYILILPCLILALLIN

SEQ ID NO: 64594 - protein, 243 aa, Gossypium hirsutum
  unsure (1)..(243): unsure at all Xaa locations
  Clone ID: GOSHI-09MAY01-C8772_1.pep
MMGKENLPQPVNGGVSNDSCSNADIDDSGTYSRYSLDKEAGLPTCRVCQCSESDKRGDAALGFLGITPPLAEAVKSKGEAKPDTEGVPPDVESDESHSKSLPRESGFVEFISPEGEVFICSTELEMGSCQHQDALIELGCSCKSDLALVHYACALKWFVSHGSTVCEICGNPAKTIRTSDFKKVVVSLKDYEALRERTASGDPNPAQIHSSSGVNPDAVAAIWRQRLSEDSLWXSPHGYNNNN

SEQ ID NO: 64595 - protein, 341 aa, Gossypium hirsutum
  Clone ID: GOSHI-09MAY01-C8702_1.pep
EAARKRAAKSGKILEVQETLEQRVVEAAMPTEALRFLFATETEPTADGGKDKSNSSSVTPGEKRKHDAIESKAESGATDEQVVLWRANIDEFIRHLRHKACIENVRARFDDGAVIVFGAMLEATRSAEKKVKTENSVPVSLSSIYEEVIKSEEGRNITFDRVRASLVQLSCPPFVKAANESYSVDFKKIIELAQHEEVESIVLKRYGRDAYRMFRLLSNSGHLLETDKVADATFVEKKETPIILYKLWKDDYLQLEKLQIGVKQTPFQLWKVNKSTLKVHVLNEMFHAAFNLSQRVAFELEQEKELSNVLQDKRVNRLRKRLLLESSQIKLDDAIMLFHDF

SEQ ID NO: 64596 - protein, 230 aa, Gossypium hirsutum
  unsure (1)..(230): unsure at all Xaa locations
  Clone ID: GOSHI-09MAY01-C8732_1.pep
MKCFTFPNWYKKDEPKTPRSLSNRSLNSMCTDREIARSGSELNSQNVSGVSSESMGRSYFPSMSQRPSNLRVFTVSELKSATKNFSRSFMLGEGGFGCVYKGSLKSPEDPSEKIEVAVKQLGKRGLQGHKEWVTEVNVLGVVEHPNLVKLVGYCAEDDERGIQRLLIYEYMPNRSVENHLSVRSETTLSWAMRXLKIAQDAARGLAYLHEGMEFQIIFRDFKSSNILLDE

SEQ ID NO: 64597 - protein, 463 aa, Gossypium hirsutum
  unsure (1)..(463): unsure at all Xaa locations
  Clone ID: GOSHI-09MAY01-C8682_1.pep
MANVLQTSFLPSTSSLRRPSISGSKGKSQSLQVKAKIREIFMPALSSTMTEGKIVSWMKSEGDKLSKGESVVVVESDKADMDVESFHEGFLAAIMVEEGGVAPVGSAIALLAETEDEIAEAKAKSQSSSNSTPQVVEEKPKQIEEAAPDVPAAAAAPSVPVAKAVTLGSAVHPASEGGKRIVASPYAKKLAKELKVDLGTVVGXSGPLGRIVAKDVEAAAVAVPVAASPAKPDPVAPGIELGTVVPFTTMQGAVSRNMVESLSVPTFRVGYTITTNALDALYKKIKSKGVTMTALLAKATALALVQHPVVNSCCRDGNSFTYNSSINIAVAVAIDGGLITPVLQDADKVDIYTLSRKWKELVDKARAKQLQPHEYNTGTFTLSNLGMFGVDRFDAILPPGTGAIMAVGASQPTVVASKDGRIGMKNQMQVNVTADHRVIYGADLAAFLQTLAKIVEDPKDLTF

SEQ ID NO: 64598 - protein, 285 aa, Gossypium hirsutum
  unsure (1)..(285): unsure at all Xaa locations
  Clone ID: GOSHI-09MAY01-C8652_1.pep
LFSAKRLESYEYIRREEMRVVLKGLDESFRVPICLKDRLSDLSLNVISRMVFGKKYTEGTGENEIVTPKEFKEMLDELFLLNGVLDIGDSIPSLRVLDLQGNIKRMKALSKKFDKFLEHVLDEHNARRRDVKDYVAKDMVDVLLQLADDPNLDVKLERHGVKAFSQDLIAGGTESSAVTVEWAISEMLKKPEIFAKATEELDRVIGRERWVEERDIVNLPYIDSIAKETMRLHPVAPMLVPRMTREDCQVDGYDILKGTRXLVNVWTFGRDPTVWDNPNEFFPER

SEQ ID NO: 64599 - protein, 82 aa, Gossypium hirsutum
  Clone ID: GOSHI-09MAY01-C8642_1.pep
LMSSHKHPVNRETITIIPQHHSSSSKNYFFKSKNNPKSQSKERDMFLLGFEKEMDTSASISEIQWIEKQSNKNRNPNSASKV

SEQ ID NO: 64600 - protein, 160 aa, Gossypium hirsutum
  Clone ID: GOSHI-09MAY01-C8152_1.pep
MTTSMSRSCSHCGNSGHNSRTCGEVVAGDASNGSGGSGGGEEKGIMLFGVRVMEGSFRKSVSMNNLSQFDQPQVSNADAGYASDDVLHGSGIGRSRERKRGVPWTEEEHKLFLLGLQKVGKGDWRGISRNCVKTRTPTHVASHAQKYFLRRNNLNRGRQI

SEQ ID NO: 64601 - protein, 119 aa, Gossypium hirsutum
  Clone ID: GOSHI-09MAY01-C8162_1.pep
MAGLPVKKKRKRYRKQYPGENEGITEEMRFVAMGLRNIKGKKVSSDSVSDSETDTENTPSDQEKEDDSETVKSGENGGDGEAETWSPTMEGFLKYLVDSKFVFNTIERIIDESDDVAYA

SEQ ID NO: 64602 - protein, 71 aa, Gossypium hirsutum
  Clone ID: GOSHI-09MAY01-C8132_5.pep
SIRAFIGIDSHTKKNSEPNEKNKLKKRIHKRGQKKRLEITFANLKLLFLYSLCVCTDTVYVKICGLHHLLL

SEQ ID NO: 64603 - protein, 144 aa, Gossypium hirsutum
  Clone ID: GOSHI-09MAY01-C8132_3.pep
FKIAISLFSVRVYRYRGPPLHLTILSFIAEKRKENQKYKFSCCCVCAVLFVCLYCCCFLFCRYWSVGMRTGYGSRLEWHGGTEVVRRPRMLRSKHVLLGLQSWFSVLGLSGLVNLGQVLKLGLGLIGLFNGLRFIYLFIVYLGF

SEQ ID NO: 64604 - protein, 117 aa, Gossypium hirsutum
  Clone ID: GOSHI-09MAY01-C8132_2.pep
TKTEALAARVCTSASSASVPPLYPQQRHALIHAQTPPHNGRYKQKWQNNKWKGTGIIFGIYFPFCLSFFSSVNPFKTCSSVFNGESGCFLHADGHQNNGDSAAKKKPRKLRSQAVFF

SEQ ID NO: 64605 - protein, 97 aa, Gossypium hirsutum
  Clone ID: GOSHI-09MAY01-C8132_1.pep
NIQFFHFFLSVIFLYAFAAVVCPFLRRYRCALGYGAVCWRGHDCWAVRRPGLKLGWLRRMGKKPRVLKFLGHLGQCDFGSRVYLGIGYWLWGISYWV

SEQ ID NO: 64606 - protein, 110 aa, Gossypium hirsutum
  unsure (1)..(110): unsure at all Xaa locations
  Clone ID: LIB3828-001-Q1-K6-A5.pep
NPILINSYPKSSPNPKEPKRKRILVAAPGIHWKGTRGTVSHARSQCVASMSPGHLLRTTELIFSKHGRAPSTGRMGTVCMLIDHQNDGGSAANKKTLEIYFKVVFXAHAT

SEQ ID NO: 64607 - protein, 82 aa, Gossypium hirsutum
  Clone ID: LIB3165-025-P1-K1-H12.pep
SINMQTVPILPVEGARPCLEKISKYFLPPVFMFFKKKNFKSYIIFFKNENWFIKQRIITSCFLAFTSKFLKFSGFYCVHITY

SEQ ID NO: 64608 - protein, 64 aa, Gossypium hirsutum
  Clone ID: LIB3148-030-Q1-K1-A7.pep
GFFCCHPTTIVLVIKSIQTVPIFLVEGVRPCLEKFGTEFVGMRTGSGGMGLFLGCGALVIGSRY

SEQ ID NO: 64609 - protein, 311 aa, Gossypium hirsutum
  Clone ID: GOSHI-09MAY01-C8122_1.pep
LFSSFHPRATLSAGPNTNPNTNFLSPTDQSNHDRESIPPMQHHPSSETDSDANPNFHSPLLNPPDSVPPAVAPSSLLHLSFNQDHGCFAAGTDHGFRIYNCDPFREIFRRDFDRGGGIGVVEMLFRCNILALVGGGPDPQYPPNKVMIWDDHQSRCISELSFRSEVRSVRLRRDRIIVVLEQKIFVYNFVDLKLLHQIETIANPKGLCAVSQGAASLVLVCPGLQNGQVRVEHYASKRTKSIMAHDSRIACFALSQDGQLLATASTKGTLVRIYNTIDGSLLQEVRRGADRAEIYSLAFFSNTQWLAVSRD

SEQ ID NO: 64610 - protein, 88 aa, Gossypium hirsutum
  Clone ID: GOSHI-09MAY01-C8062_3.pep
MAGRYDKNPFDEEEEEVNPFADTTARGKAPGQSKFGGGLFSTRTASVPPASNSRLSPLPPEPAGFSYEREATVDIPLDTASGGSRNQD

SEQ ID NO: 64611 - protein, 237 aa, Gossypium hirsutum
  unsure (1)..(237): unsure at all Xaa locations
  Clone ID: GOSHI-09MAY01-C8062_2.pep
VNPFSDPGGRGKASGQSKFGGGLFSKNVPSAPLASNSRLSPLPPEPAGFNYGHEATIDIPLDTASGGSRYQDLKKKEKELQAKEAELRRREQEVRRKEEAAARAGITLEEKNWPPFFPIIHHDIANDIPVHLQRLQYVAFSTFLRVVLCXAWETWNLELQHGSKEKVXRIWFLLSSTPIVFRGKSLTGILPAVDLISDHALVGIFYFIGLDYFXVESIVSIWVSSKYTCIYPAVVSL

SEQ ID NO: 64612 - protein, 320 aa, Gossypium hirsutum
  Clone ID: GOSHI-09MAY01-C8062_1.pep
MAGRYDKNPFDEEEEEVNPFADTTARGKAPGQSKFGGGLFSTRTASVPPASNSRLSPLPPEPAGFSYEREATVDIPLDTASGGSRNQDLKKKEKELQAKEAELRRREQEVRRKEEAVARAGVVLEEKNWPPFFPIIHHDIANEIPIHLQRLQYVAFSTYLGLVLCLLWNIIAVTTAWIKGEGVRIWFLAIIFFLAGVPGAYVLWYRPLYRAFRNESALRFGWFFLFYLLHIAFCIFAAVAPPIVFRGKSLTGILPAVDLVGGNALVGIFYFIGFGLFCLESVVSIWVIQQVYMYFRGSGKAADLEREAARGAMRAAFYRH

SEQ ID NO: 64613 - protein, 48 aa, Gossypium hirsutum
  Clone ID: GOSHI-09MAY01-C8392_1.pep
MNIRAAEEESAQEIHIPADIDWEMLDKSKFFFLGAPLFSGVSATLYPV

SEQ ID NO: 64614 - protein, 48 aa, Gossypium hirsutum
  Clone ID: GOSHI-09MAY01-C8382_1.pep
HKIQIVRAFKHYLVVIQLPILHKRKRHPQHKDLSGKMIVKNRARSGKN

SEQ ID NO: 64615 - protein, 117 aa, Gossypium hirsutum
  Clone ID: GOSHI-09MAY01-C8362_7.pep
FAVFPFPTESLTSLITLIARNRALRPLSADYPFNVFPFFLFRFLPSSSTLRFFQCFPCTVGCFSFVSRHSSSSLRIDFICQMALRGVWQLKKLIVSYCDWGGSSRGIRRSLLTTMLP

SEQ ID NO: 64616 - protein, 119 aa, Gossypium hirsutum
  Clone ID: GOSHI-09MAY01-C8362_6.pep
MALRGVWQLKKLIVSYCDWGGSSRGIRAFMESELPTFKEKNPQLEVVPELIRGQHPHLKGFYKNKNERVVCVKNMTPEDILLYATRLRNALGRKVVKLKTRHVTKHPSVQGTWTTDVKF

SEQ ID NO: 64617 - protein, 79 aa, Gossypium hirsutum
  Clone ID: GOSHI-09MAY01-C8362_5.pep
NQENTTRKRSFVSYKVRINHVPTTNLNQTENQKYQDNQPISHNKTFGIVRMLQSQKPTKTIVSKYCKLQTVHMDYFQGR

SEQ ID NO: 64618 - protein, 60 aa, Gossypium hirsutum
  Clone ID: GOSHI-09MAY01-C8362_4.pep
SNFLCYYQSLEDIAEGVSGSREKLTTIYLENNPCAQSPNYNATLKQIFPNIQQIDSEVFA

SEQ ID NO: 64619 - protein, 150 aa, Gossypium hirsutum
  Clone ID: GOSHI-09MAY01-C8362_3.pep
MIMICANGCSMIDQRMVSYLSILNVSFFCACMCAFLFICVMFLTNLIGETCSACEEIKAFMESELPTFKEKNPQLEVVNELIHGQHPHLKGFYKNKNERVVCVKNMTPEDILLYATRLRNALGRKVVKLTTRHVTKHPSVQGTWTTDVKF

SEQ ID NO: 64620 - protein, 151 aa, Gossypium hirsutum
  Clone ID: LIB3825-008-Q1-K6-B3.pep
MAIRTAGKLFKDLVRQRVISTSIGPSRHCSSAAASAPKIPHSSKKGRRLLTGATIGLIIAGGAYVSTVDEATFCGWLFSATKLVNPFFALLDAEKAHTLAVAAASRGWVPREKRPDPAILGLEVWGRKFSNPVGLSAGFDKNAEAVEGLLG

SEQ ID NO: 64621 - protein, 85 aa, Gossypium hirsutum
  Clone ID: LIB3825-010-Q1-K6-C11.pep
FESLFTRSIFFLLLFIISLHAIYCLGGDFGFKLLGLKMLLFSLFPVNFRRPFICMLFKFSGFICFFFPVIESLRYCFLFPHYMLH

SEQ ID NO: 64622 - protein, 121 aa, Gossypium hirsutum
  Clone ID: LIB3825-010-Q1-N6-C11.pep
MKMALRGVWQLKKLIVSYCDWGGSSRGIRAFMESELPTFKEKNPQLEVVPELIRGQHPHLKGFYKNKNERVVCVKNMTPEDILLYATRLRNALGRKVVKLKTRHVTKHPSVQGTWTTDVKF

SEQ ID NO: 64623 - protein, 49 aa, Gossypium hirsutum
  Clone ID: LIB3048-047-Q1-L1-C7.pep
TASTCWQKQLAIKLKPRNQISIGYATPLSLHHSAITIKELSATFIFFHE

SEQ ID NO: 64624 - protein, 56 aa, Gossypium hirsutum
  unsure (1)..(56): unsure at all Xaa locations
  Clone ID: uC-gsronu33B062e06b1.pep
MIDQRMAFMESXLPTFKEKNPQLEVANELIHGQHPHLKGFYKNKNERVVCVKNMTP

SEQ ID NO: 64625 - protein, 275 aa, Gossypium hirsutum
  Clone ID: GOSHI-09MAY01-C8312_1.pep
MEIGSSQFFAAEVLAYNNTGIITGTGGGDGGNFYWFQDMEDDKKRSGNNEFMDLHSSISLFDAEMKHEQLQWFTDPDQGRGAVFESNYSETNDYFDQIQSHYTEIDEFDDSRKKRARKSSSPVSVPATEESGPSQSGATPPTRPVKDRSKDWWEKCNHPDFPDEEFKRAFRMSKSTFDMICKELESTVMKKNTTLRDAIPVRQRVAVCIWRLATGEPLRMVSKRFGLGISTCHKLVLEVCAAIKTVLMPKYVQWPDENKLTKTKSEFESVTGIPN

SEQ ID NO: 64626 - protein, 187 aa, Gossypium hirsutum
  Clone ID: GOSHI-09MAY01-C8302_2.pep
FVVGQSEDEAASPELLMCDFGEHFNKIITDPAFKSKLVEKFKSSVGDDSESVDGTTAALADELAASPESMRVFPASVMSDFIIALQDGGVQGEQLNKIITDPNFQSGVAKLVEKFKSSAGDDSKSVDGTTSTLVDEVAASPESKVEIDTEIVGSLYRKMGKDRLVDLKKMAKAVQYDESNGNTEKKN

SEQ ID NO: 64627 - protein, 321 aa, Gossypium hirsutum
  Clone ID: GOSHI-09MAY01-C8302_1.pep
MSKQGEVVCVTGASGSIGSWVVKLLLARGYTVHGTVRNLKDEKETKHLEALEGADSRLRLFQIDLLDYDSLAAAINGCAGVFHLASPCSVDRVHDPQKELLDPAIKGTLNVLTAAKELGVKRVVVTSSISSMWPCPNWPADKIRTEDCWTDIEYCKQNELWYPISKTLAEKAAWEFSKEKGLDVVVVNPGTVMGPNIPPNLNASMVMLLRLLQGCTETYQDFFIGSVHFKDVALAHILVYENTSATGRHMCVEALSHYGDFVAKVAELYPEYNIPSLPRDTQPGLLRAKNGGKKLMDLGLEFIPMEQIIRDAVESLKTSLC

SEQ ID NO: 64628 - protein, 76 aa, Gossypium hirsutum
  Clone ID: LIB3582-015-P1-K1-F4.pep
HASDPISKTLAEKAAWEFSKEKGLDVVVVNPGTVMGPNIPPNLNASMVMLLRLLQGNFLLKHFLLEFFVEMGKSLV

SEQ ID NO: 64629 - protein, 51 aa, Gossypium hirsutum
  Clone ID: uC-gsflmaxxa058b05b1.pep
IIFSLPRDTQPGLLRAKNGGKKLMDLGLEFIPMEQIIRDAVESLKSKGFIS

SEQ ID NO: 64630 - protein, 181 aa, Gossypium hirsutum
  Clone ID: uC-gsflnu33B015a03b1.pep
FHSAMSASAMGADEKAIPQVYKGHRNCETVKGVTFFGPKSEYVVSGSDCGRIFIWKKKDGQLVRVMEADKHVVNCIESHPHTMVLASSGIERDIKIWTPKAINKATLPTNIEQVPKRGLFRLLSFAAFNEDDDGYNFFLGGGVEDTDDEEDDSDDEYLDVYDDIDDGDGDCDDNDDSDNDD

SEQ ID NO: 64631 - protein, 84 aa, Gossypium hirsutum
  Clone ID: LIB3166-001-Q1-K1-C2.pep
DCGRIFIRKKKGGQLVRIMEADKHVVNRIESHTHTTDPASSGIERDFKIWTPKAIDKATLPTNIEQVCLILISCGQKILYILGY

SEQ ID NO: 64632 - protein, 223 aa, Gossypium hirsutum
  Clone ID: GOSHI-09MAY01-C8322_1.pep
MTKQQANWSPYDNNGGSCVAIAGADYCVIAADTRMSTGYNILTREYSKICKLADKCVMASSGFQADVRALQKQLAARHLIYQHQHNKQMSCPAMAQLLSNTLYYKRFFPYYSFNVLGGLDNEGKGCVFTYDAVGSYEKVGYSSQGSGSTLIMPFLDNQLKSPSPLLLPAQDAVTPLVEAEAIDLVKTVFASASERDIYTGDKLELVIINAAGIRREYMELRKD

SEQ ID NO: 64633 - protein, 193 aa, Gossypium hirsutum
  unsure (1)..(193): unsure at all Xaa locations
  Clone ID: LIB3543-031-Q1-K6-A7.pep
MPKEQANWSPYDNNGGSCVAVAGADYCVIAADTRMSTGYNILTREYSKICKLADKCVMASSGFQADVKALQKHLAARHLIYQHQHNKQMSCPAMAQLLSNTLYYKRFFPYYSFNVLGGLDNEGKGCVFTYDAVGSYEKVGYSSQGSGSTLIMPFLDNQLKSXSPLLLPAPNAVTPLAETEAIDLVKNCFLPSH

SEQ ID NO: 64634 - protein, 152 aa, Gossypium hirsutum
  Clone ID: uC-gsflmaxxa091g07b1.pep
MTKQQANWSPYDNNGGSCVAIAGADYCVIAADTRMSTGYNILTRDYSKICKLADKCVMASSGFQADVRALQKQLAARHLIYQHQHNKLTLKDTLKPILIPCYDLCSNAPFLFSRADALEMDGYDFKMKDVCYATSADPTVVGAVRMKSVDER

SEQ ID NO: 64635 - protein, 127 aa, Gossypium hirsutum
  Clone ID: LIB3048-012-Q1-L1-G5.pep
QANWSPYDNNGGSCVAVAGADYCVIAADTRMSTGYNILTRDYSKICKLADKCVMASSGFQADVKALQKHLAARHLIYQHQHNKQMSCPAMAQLLSNTLYYKRFFPYYSFNVLGGLDNEGCCYSTCRS

SEQ ID NO: 64636 - protein, 105 aa, Gossypium hirsutum
  unsure (1)..(105): unsure at all Xaa locations
  Clone ID: LIB3149-006-Q1-K1-D7.pep
ILLKRAFRGRGLRSLVRNAPFLFSRAXMHLEMDGYDFKMKDVCYATSADPTVVGAVGMKSADERTKILAVEGGVAMNNPAAAAITHVLNNKQEFPFCNGVEDLLV

SEQ ID NO: 64637 - protein, 158 aa, Gossypium hirsutum
  Clone ID: GOSHI-09MAY01-C8242_1.pep
MNPKSTFILAVLLLTASLTAAARPDSFEALSSEEKGNKGSGKPGNQNNKGSGGNTGGMGGFFGPGPGFGLPGFEKGWGHGIVGGGYGAGFGGPTGGYSKGGVIRTTVVCKEKGPCFNKKLTCPAKCFTYFSRSGKGYGEGGGGGGCTMDCKKKCSAYC

SEQ ID NO: 64638 - protein, 208 aa, Gossypium hirsutum
  Clone ID: GOSHI-09MAY01-C8202_1.pep
MKLMEEETVFEEENEIKAMKEEEEVGGEDESEVEGGEPEEEDDDDDDEDEDDEGEDDDDDDDDDDEGEEDDDVQVLHSSGPPVLIADDDEGEDVKDDDDDDEGEGDGDGDDDDDDDDDDDSDDDEEGEEEEDMGTEYLVRPVVPAEDEEDASDFEPEENGEEEEEEDDEDHEEGSVKIEASSKRKSTDRDDSDDNDDDRGDHERPSKR

SEQ ID NO: 64639 - protein, 74 aa, Gossypium hirsutum
  Clone ID: GOSHI-09MAY01-C9952_2.pep
MAHFQLCSLKILQIFSLLLILLYPATVSCDCTCDKEDIQQNKAEALRYKLGAIAAILVAGAIGVSLPLLGTRIP

SEQ ID NO: 64640 - protein, 199 aa, Gossypium hirsutum
  unsure (1)..(199): unsure at all Xaa locations
  Clone ID: GOSHI-09MAY01-C9952_1.pep
MAHFQLFSLKILQIFSLLLILLYPATVSCDCTCDKEDIQQNKAEALRYKLGAIAAILVAGAIGVSLPLLGTRIPALRPENDIFFMIKAFAAGVILATGFVHILPDAFESLTSPCLKESSPWGKFPFSGFIAMMSAIGTLMIDAFATGYYERQHXSKHKHVNAADQEHAGHVHLHTHPTHGHAHGSASPLRSWFYQSLSV

SEQ ID NO: 64641 - protein, 104 aa, Gossypium hirsutum
  Clone ID: GOSHI-09MAY01-C9942_1.pep
MEVGRKMANMLGTDHDLNFKETELCLGLPGGIAVVAAGNETESSSSPKTNGKRGFSETVDLKLNLQSKESTMDLNKNLDDNGSKEKSGSAKDPAKPPAKAQVVG

SEQ ID NO: 64642 - protein, 210 aa, Gossypium hirsutum
  Clone ID: GOSHI-09MAY01-C9972_1.pep
PTRPPTRPEKDGAYIGELIKAVQMVTDVMEVLVKRGIMAESLTALEKEKVSLGQEEIKRKAVQIENMSVKLEEMERFALGTNSILNEMRQRVEDLVEETSRQRQRAAENEQELTRVKQDFESLKSYVSSLISVRETLLSSEKQFQTIERLFERLVAKTTQLEGEKKQKETEVQKLMEENVRLTALLDKKEAQLLAMNEQCKVMALSASNI

SEQ ID NO: 64643 - protein, 203 aa, Gossypium hirsutum
  Clone ID: GOSHI-09MAY01-C9842_2.pep
MGNTEKLLNQIMELKFTSKSLQRQARKCEKDEKSEKLKVKKAIEKGNMDGARIYAENAIRKRTEQMNYLRLASRLDAVVARLDTQAKMTTINKSMANIVKSLESSLNTGNLQKMSETMDQFEKQFVNMEVQAEFMESAMAGSTSLSTPEGEVNSLMQQVADDYGLEVSVGLPQPGAHAVSTKTEEKVDEDDLSRRLAELKARG

SEQ ID NO: 64644 - protein, 203 aa, Gossypium hirsutum
  Clone ID: GOSHI-09MAY01-C9842_1.pep
MGNTEKLLNQIMDLKFTSKSLQRQAKKCEKEEKSEKLKVKKAIEKGNMDGARIYAENAIRKRTEQMNYLRLASRLDAVVARLDTQAKMTTINKSMGNIVKSLESSLATGNLQKMSETMDKFEKQFVNMEVQAEFMESAMAGSTSLSTPEGEVNSLMQQVADDYGLEVSVGLPQPAAHAVPTKTQEKVDEDDLSRRLAELKARG

SEQ ID NO: 64645 - protein, 173 aa, Gossypium hirsutum
  Clone ID: LIB3585-050-P1-K1-H6.pep
MKVLSNIKICLQTDQKNPAMGGTDKLLNQIMDLKFTSKSLQRQAKKCEKEEKSEKLKVKKAIEKGNMDGARIYAENAIRKRTEQMNYLRLASRLDAVVARLDTQAKMTTINKCMGNIVKSLESSLATGNLQKMSETMDKFEKQFVNMEVQAEFMESAMAGSTSLSTPESEVNS

SEQ ID NO: 64646 - protein, 136 aa, Gossypium hirsutum
  unsure (1)..(136): unsure at all Xaa locations
  Clone ID: LIB3829-004-Q6-N6-G2.pep
THIMDLRFTSKSLQRQARXCEKEEKSEKLKVKKAIEKGYMDGARIYAENAIRXRTEQMNYLRLAFRLDAVVARLDTQAKMTTINKCWEISASLLESCLATGNLQKMLETMDKFEKHVVNMEVQAEFMESAMGGSTS

SEQ ID NO: 64647 - protein, 123 aa, Gossypium hirsutum
  Clone ID: LIB3493-053-P1-M1-G6.pep
MVFNQTKNPAMGNTEKLLNQIMELKFTSKSLHRQSRKCEKDEKSEKLKVKKAIEKGNMDGARIYAENAIRKRNEQMNYLRLASRLDAGVARLDTQAKMTTINKSMANIVKSLESSLATGNLQK

SEQ ID NO: 64648 - protein, 271 aa, Gossypium hirsutum
  Clone ID: GOSHI-09MAY01-C9872_1.pep
HASAVKHIWFTESNSRRKTRGSAPMLTKHDGKAKEFEAEVRTLSSIRHVNVVKLYCSITSEDSSLLVYEYLPNGSLWDRLHTSKKMELDWDTRYEIAIGAAKGLEYLHHGCKKPVLHRDVKSSNILLDEYLKPKISDFGLAKIVQANSSIGNDSTHVIAGTHGYIAPEYGYTCKVDEKSDVYSFGVVLLELVTGKKPIEPEYGENKDIVSWVGSNLKGKESDLSIVDPKIPHAFKEDAMKVLKIAILCTTTLPALRPTMRRVVQMLKEAEP

SEQ ID NO: 64649 - protein, 86 aa, Gossypium hirsutum
  Clone ID: LIB3166-015-P1-K1-G6.pep
PTRPRNSAKEKPKSLWRWRVCDRLHLHHHLLQSPLPILSPPSLLPPLFYHRRLSLLLPAKMERSMSMTKSLKLLIILRKLVFSTLF

SEQ ID NO: 64650 - protein, 105 aa, Gossypium hirsutum
  Clone ID: LIB3120-014-Q1-K1-B5.pep
KLSKREAQISMAMASLPSSPPAPSPSSISASHSESFVTLATALLPPQAQVVATAENGTLNVDDQKPQIANHFAVLDNPGNNWKYKKFEADYARPVMAKYFSKNNF

SEQ ID NO: 64651 - protein, 121 aa, Gossypium hirsutum
  unsure (1)..(121): unsure at all Xaa locations
  Clone ID: LIB3083-086-Q1-L1-F8.pep
GRGPGKPSRVKNTKSSSERKDSPEKKKTPPHPKGFDVRLIDVNRTCXVTKGGQVVKYTALMACGNFHGVVGYAKAKAPAVPIALQKAHEKCLENLHYIERHEEHTIAHAIQTTYKKTKVYL

SEQ ID NO: 64652 - protein, 129 aa, Gossypium hirsutum
  Clone ID: LIB3083-086-Q1-L1-F4.pep
KKLEEKLAELDYTFGRKGKLLEEEIRDLAEERNALTEKKRTPLYRKGFDVRLIDVNRTCKVTKGGQVVKYTALMACGNFHGVVGYAKAKAPAVPIALQKAHEKCFENLHYIERHEEHTIAHAIQTTYKK

SEQ ID NO: 64653 - protein, 141 aa, Gossypium hirsutum
  Clone ID: GOSHI-09MAY01-C9742_1.pep
HCPASAMRMLGFARIREMLSAGITVSLGTDGAPSNNRMSIVDEMYLASLINEGREVYENGATDPTAFPAETLLKMVTINGAKSVLWDNEIGSLEIGKKADMGVSNPFSWPMVPIHDCISNLVYCVRTENIVSGTCNGRWIM

SEQ ID NO: 64654 - protein, 75 aa, Gossypium hirsutum
  unsure (1)..(75): unsure at all Xaa locations
  Clone ID: GOSHI-09MAY01-C9702_2.pep
KWHIMXDVPNTSLRHITLESNENKPVTNSRDTQEVNSEQGGQILRIFKDHSTETCILDDLEFYEARQKIIREKTT

SEQ ID NO: 64655 - protein, 415 aa, Gossypium hirsutum
  unsure (1)..(415): unsure at all Xaa locations
  Clone ID: GOSHI-09MAY01-C9702_1.pep
KGFSSYAKNLSSGGDENLHPCPHFMHLHNAGPSSGVAQAFGYMNHIYPNTITYGHYGNTNGGGSGXGFGSYGYSAWKKGQGCYNAGNNNKSRGLGYGKENMDGLNELNKGPRVKGSSNKDGFGTATLAAKDQNLPLTESNKENSVSLVPDLGQYNKEDFPESYSDAKFFVIKSXSEDDVHKSVKYNVWASTSTGNKKLDAAFREAKEKPDGCPVFLLFSVNTSGQFVGVAEMVGPVDFNKTVEYWQQDKWTGCFPVKWHIIKDVPNTLLRHITLENNENKPVTNSRDTQEVNFEQGIQILKIFKDHSSKTCILDDFEFYEARQKTIQEKKAKHQLLQEKVLSGEPNDAVMEKKENVAIANNALEKSVESASIKEPTVASTTEVVKANVDVKPVQENGSVTATEDGPNSVCVASAC

SEQ ID NO: 64656 - protein, 118 aa, Gossypium hirsutum
  unsure (1)..(118): unsure at all Xaa locations
  Clone ID: LIB3166-048-P1-K1-E9.pep
HASGRTVFFLFQIWYSSGIEDFPDGYSNAKIFVIKSFSEDDVHKSVKYNVWASTSNGNKKLDASFGEAXEKPDGCPCFLFVSDYTRGQXLLGVHKWVANFFFNKTLNFWLXDKWTGSF

SEQ ID NO: 64657 - protein, 70 aa, Gossypium hirsutum
  Clone ID: LIB3148-058-Q1-K1-H4.pep
PNEGSTDACVPSISNLALQKSVESAWIKEPTGASTTEVVKANVDVKPVQENGSVSATEDGPNSVCVASAC

SEQ ID NO: 64658 - protein, 184 aa, Gossypium hirsutum
  Clone ID: GOSHI-09MAY01-C9732_5.pep
MSSSNPFDLLGDDDTGELSLLIAAQKKAAATAPSSVPKKGQAQSQTKPQAKPPPPPPPPAQAVREAKSEGIRGGGRGGRGCVGGRGGSGGYRRDFANDENSFSNSAELGQGAPEDGESRRPSERRGGYGGPRPYCGGGLRRGFSNGEIGHGVRPRKVYERISGTGRGNELEREGFGQGNWGTQT

SEQ ID NO: 64659 - protein, 102 aa, Gossypium hirsutum
  Clone ID: GOSHI-09MAY01-C9732_3.pep
RKMASSNPFDLLGDDDTGELSLLIAAQKKAAATAPSGVPKKGQAQSQTKPQAKLPSKPLPPAQAGKLPLKKEVTIPALLLQCCSRRISIILYAKIESSGSLV

SEQ ID NO: 64660 - protein, 362 aa, Gossypium hirsutum
  Clone ID: GOSHI-09MAY01-C9732_1.pep
MAGLNPFDLLGDDDTGELSLLIAAQQKAVAAATATAAAPKKGPAKPQAKTLPATQAKLPSKPLPPAQAVREAKNEGARGGGRGGRGYGRGRGGSGGYRRDFANDENSFSNSAVPEDGESGKPSERRGYGGPRPYRGGRRGGFSNGEDADGERPRRLYERRSGTGRGNELKREGSGRGNWGTQTDELAQVTEEVANEGEGNLGDEKPAGEEDARDANKESASNEPEEKEPEDKEMTLEEYEKVLEEKRKALQALKIEERKVDAKEFESMQQLSNKKSNDEVFIKLGSDKDKRKEAYEKEERAKKSVSINEFLKPAEGERYYNPSGRGRGRGRGSRGFGGGNAARDVAAPSIEDPGHFPTLGGK

SEQ ID NO: 64661 - protein, 153 aa, Gossypium hirsutum
  unsure (1)..(153): unsure at all Xaa locations
  Clone ID: LIB3583-010-P1-K1-E5.pep
MASSNPFDLLGDDDTGELSLLIAAQKKAAATAPSGVPKKGQAQSQTKPQAKLPSKPLPPAQAVREAKSEGTCGGGRGGRGGGTCDXYRRDFANDENSFSNSAELSQGAPEDGESRRPSERRGGYGGPRPYRGGGRRGGFSNRETGDGEGPRRV

SEQ ID NO: 64662 - protein, 118 aa, Gossypium hirsutum
  Clone ID: LIB3166-017-P1-K1-G6.pep
FDLLGDDDTGELSLLIAAQQKAVASATATAAAPKKGPAKPQAKTLPATQAKLPSKPLPPAQAVREAKNEGARGGGRGGRGYGRGRVGSSGYRRDFANDENSFSNSAVRGDEERKKTRG

SEQ ID NO: 64663 - protein, 155 aa, Gossypium hirsutum
  Clone ID: GOSHI-09MAY01-C9672_1.pep
SNRQDLTYSFLPANGLTDEVKAVFTSAFQKWSTVTPLTFTQVDSYSSADITIGFYTGDHGDGEPFDGVLGTLAHAFSPTSGRLHLDGDENWVVSGDVTKASVSTAVDLESVAVHEIGHLLGLGHSSVEDAIMYPSITSRTKKVELADDDIQGIQL

SEQ ID NO: 64664 - protein, 59 aa, Gossypium hirsutum
  Clone ID: GOSHI-09MAY01-C9662_4.pep
LHYQYPKKKLKHSRPHHVMGNRAFFFHLQRHLVALPFQLIEATTQHNTTHFRKLCSTIK

SEQ ID NO: 64665 - protein, 129 aa, Gossypium hirsutum
  unsure (1)..(129): unsure at all Xaa locations
  Clone ID: GOSHI-09MAY01-C9662_2.pep
KPGPTDASAHASAHASAGFVWLKQKKSISRRFXKIGKLVSYATEVTAVVEKGKIKKLTGVKTKELLVWITLSDIQVDDPPTGKITFKTPSGLFRTFPVSAFEIEGEQVKGSKGLDEEKQVNGAVEVNEV

SEQ ID NO: 64666 - protein, 166 aa, Gossypium hirsutum
  Clone ID: GOSHI-09MAY01-C9662_1.pep
MSLVTEEIKASASEIYHGDEICQEKSKFLLEEVGMPRGLLPLRDIEECGYVKDTGFVWLKQKKSITHKFEKIGKLVSYATEVTAVVEKGKIKKLTGVKTKELLVWITLSDIQVDDPPTGKITFKTPSGLFRTFPVSAFEIEGEQVKGSKGKDEEKQVNGAVEVKEV

SEQ ID NO: 64667 - protein, 71 aa, Gossypium hirsutum
  Clone ID: LIB3083-072-Q1-L1-C6.pep
SASDYHGDEICQEKSKFLLEEVGMPRGRGPLRDIEECGYVKDTGFVWLKQKKSITHGSKDGSWFYATEYGA

SEQ ID NO: 64668 - protein, 97 aa, Gossypium hirsutum
  Clone ID: GOSHI-09MAY01-C9612_1.pep
KQARRQVELAYHELAKAKRVGQQAQAESAKAQALKNHAVKQINSTIFQVTCHARRHRFRATAPPEENSLVVSYISSAITEGEVENDSLTNLTKPTNI

SEQ ID NO: 64669 - protein, 118 aa, Gossypium hirsutum
  Clone ID: GOSHI-09MAY01-C9172_4.pep
DKLDVLVKKCNSFSSLTYVAVNKKGNLLSNIGLTDVNAVTWGVFPAKEIIQPTVVDPASFVVWKDEAFEIWSRSWSALYPDGDPSKNLLEEIQSSYYLVSLVDNNYMDGNIFGVFEDL

SEQ ID NO: 64670 - protein, 293 aa, Gossypium hirsutum
  unsure (1)..(293): unsure at all Xaa locations
  Clone ID: GOSHI-09MAY01-C9172_2.pep
MKVIEKIQSLQEGKVVFSFEFFPPKTEDGVDNLFERMDRMVAHNPSFCDITWGAGGSTADLTLDIANKMQNIICVETMMHLTCTNMPVEKIDHALQTIKSNGIQNVLALRGDPPHGQDKFVQVEGGFSCALDLVKHIRAKYGDFFGITVAGYPEAHPDAIGSNGVATPEAYQSDLAYLKKKVDAGADLIVTQLFYDTDIFLKFVNDCRQIGITCPIVPGIMPINNYKGFVRMTGFCKTKIPDEVTAALEPIKDNDEAVKSYGIHLGXEMCRKXLAHGIRRAPLSLTWESAYYL

SEQ ID NO: 64671 - protein, 595 aa, Gossypium hirsutum
  Clone ID: GOSHI-09MAY01-C9172_1.pep
MKVIDKIQSFSQDQGKVVFSFEFFPPKTEDGVDNLFERMDRMVAHNPSFCDITWGAGGSTADLTLDIANKMQNMICVETMMHLTCTNMPVEKIDHALETIKSNGIQNVLALRGDPPHGQDKFVQVEGGFSCALDLVKHIRAKYGDFFGITVAGYPEAHPDAIGSDGVATPEAYQSDLAYLKRKVDAGADLIVTQLFYDTDIFLKFVNDCRQIGITCPIVPGIMPINNYKGFVRMTGFCKTKIPDEVTAALEPIKDNDEAVKSYGIHLGTEMCRKILAHGIKTLHLYTLNMEKSALAILMNLGLIEESKISRSLPWRRPANVFRVKEDVRPIFWANRPKSYLSRTIGWDQYPQGRWGDSRNPSYGALSDYQFMRPRARDKKLQEEWATPLKSIDDIQEKFKNHCLGKLRSSPWSELDGLQPETKIIHEQLGKINLKGFLTINSQPAVNGERSDSPSVGWGGPGGYVYQKAYLEFFCSLDKLDALVKNCNSFSSLTYVAVNKKGNLLSNIGLTDVNAVTWGAFPAKEIIQPTVVDPASFVVWKDEAFEIWSRSWSTLYPDGDPSKNLLEEIQSSYYLVSLVDNNYMDGNIFGVFEDL

SEQ ID NO: 64672 - protein, 189 aa, Gossypium hirsutum
  unsure (1)..(189): unsure at all Xaa locations
  Clone ID: AI729106.1.pep
GEAQLFYDTDIFLKGVNDCRQIGINCPIVPGIMPINNYKGFLRMTGFCKTKIPXEITAALKRXGGNXXPXKXYXFHLXTKIFXKMLXHGVKTLHLYTLNXEKSALXILINRGWREESEISRSLPWRRPANVFRVKEDVRPIFWSNRPKSYITRTIGWDQYPYGRWGDSRNPSYGALTNHQFMRPRAGEG

SEQ ID NO: 64673 - protein, 102 aa, Gossypium hirsutum
  Clone ID: LIB3493-039-P1-M1-E9.pep
NVLALRGDAADGQDKFVQVEGGFSCALDLVKHIRAKYGDFFGITVAGYPEAHPDAIGSNGVATPEAYQRDLAYLKKNVDAGADLIATQPPYDGEVILRLTNC

SEQ ID NO: 64674 - protein, 100 aa, Gossypium hirsutum
  unsure (1)..(100): unsure at all Xaa locations
  Clone ID: GOSHI-09MAY01-C9162_3.pep
MALSFANAKLFSTFVVDGISNVISRRGYAAASQGIVSSGXEGGAGRSPAAVVKKTGEEMSGGAKEKVSWVPDPVTGCYRPENCANEIDVAELRATLLKKQ

SEQ ID NO: 64675 - protein, 107 aa, Gossypium hirsutum
  Clone ID: GOSHI-09MAY01-C9162_2.pep
MARSFSNAKLFSTFVVDGISNVISRRGYAAASQGIVSSGIRGGAGRSAAAVVKKTGEEMSGGAKEKVSWVPDPVTGCYRPENCANEIDVAELRATLFKKHFKKKKNS

SEQ ID NO: 64676 - protein, 100 aa, Gossypium hirsutum
  Clone ID: GOSHI-09MAY01-C9162_1.pep
MARSLSNAKLFSTFVVDGISNVISRRGYAAASQGIVSSGIRGGAGRSAATVAKKTGEEMSRGAKEKVSWVPDPVTGCYRPENCPNEIDVAELRSMLLKKH

SEQ ID NO: 64677 - protein, 63 aa, Gossypium hirsutum
  Clone ID: AI055632.1.pep
MACSLSNAKLFSTFVVDVISNVISRRGYAAASQGIVSSGIRGGAGRSAATVAKKTGEDMSGGA

SEQ ID NO: 64678 - protein, 78 aa, Gossypium hirsutum
  Clone ID: LIB3825-003-Q1-K6-H11.pep
CLFLFRRGYAAASQGIVSSGIRGGAGRSAATVAKKTGEEMSRGAKEKVSWVPDPVTGCYRPENCPNEIDVAELRSMLL

SEQ ID NO: 64679 - protein, 71 aa, Gossypium hirsutum
  Clone ID: LIB3135-037-Q1-K1-A7.pep
HPVTGSGTLETFSLAPRDISSPVILAGVHAILTAPPIIPLVPLPCYPLEYRRLELPLEFPSSSEVDIRLVL

SEQ ID NO: 64680 - protein, 81 aa, Gossypium hirsutum
  Clone ID: LIB3135-053-Q1-K1-A12.pep
PRVRPRVRFHVTDATLIRGCRKSIGSATLKNVLSALLQQGLPFYHYKMGIWLEQLNIKIRETARSFFNAQLRYNLVDDGIV

SEQ ID NO: 64681 - protein, 96 aa, Gossypium hirsutum
  unsure (1)..(96): unsure at all Xaa locations
  Clone ID: LIB3272-042-P1-K1-F7.pep
MKAFSAGAFKFLPIQNFNLKKKEKTEMARSFSNAKLFSTFVVDGISNVISRRGYAAASQGIVSSGIXMSGGAKEKVSWVPDPGTGCYRPENCANEI

SEQ ID NO: 64682 - protein, 144 aa, Gossypium hirsutum
  Clone ID: GOSHI-09MAY01-C9132_1.pep
MDNLISLVNKIQRACTALGDHGEASALPTLWDSLPAIAVVGGQSSGKSSVLESVVGKDFLPRGSGIVTRRPLVLQLHKSDEGTREYAEFLHLPRKRITDFAAVRKEIQDETDRETGRTKQISSVPIHLSIFSPNVVNLTLVDLP

SEQ ID NO: 64683 - protein, 168 aa, Gossypium hirsutum
  Clone ID: GOSHI-09MAY01-C109069_1.pep
HASAHASAHACDNICTYYQKGICSYGSQCRYEHVKASQTDLSASSSSTKPRQFGVSGSAPLGPSTSTYCGSVVLPATSGEFPGSNGGVLPPSTNQAWHLESGQQDLLDDGDVLQPRSANLVELPICSFAAAGNCPRGDNCPHIHGDLCPTCGKHCLHPFRAEEREEHV

SEQ ID NO: 64684 - protein, 253 aa, Gossypium hirsutum
  Clone ID: GOSHI-09MAY01-C9052_1.pep
PTLSDRNWRRQSPGIWRDGNVYKNLQLVREDGRSLQKQVARFISGPMQAHLLADVHHMRFETMERFNRLEQRLDSMKTGSGRWVEEAVKRMEVEGDSNLGGFSGIGLELGKDKVKKMMIERDDLNVVGIWGIGGSGKTTLANEICRDNQVQSYFNNRILFLTVSQSPDLEQLRAKIWGFITGNEPLNYTRKSQCEWGSGPQALVVLDDVWSLPVLEQLSFKVPTYKTLVISRFKFPRRVVNEVYEVELLEEDE

SEQ ID NO: 64685 - protein, 171 aa, Gossypium hirsutum
  unsure (1)..(171): unsure at all Xaa locations
  Clone ID: GOSHI-09MAY01-C9042_1.pep
MVKIVILRSDRKVVDERMSSKRKVLQGNTTRTRVGKYELGKTLGEGSFAKVKFAKNVETGECVAIKILDRDQVLRHRMVEQIKREISTMKLIKHPNVIKIFEVMASXTRIYIVIEFVDGGELFDKIAKNGRLIEDEARSYFHQLIXAVDYSTVERLPRDLKPEIFSDSLGS

SEQ ID NO: 64686 - protein, 239 aa, Gossypium hirsutum
  Clone ID: GOSHI-09MAY01-C9062_1.pep
SRNGGEANSLTSNLENISFAAKSRHSNDAKPGRAISRAQYKPEKWMLPEKAEHSLTQLNLAIVGHVDSGKSTLSGRLLHLLGRISQKEMHKYEKEAKVQGRGSFAYAWALDESAEERERGVTMTVAVAYLDSKRYHVVVLDSPGHKDFVPNMITGATQADAAILVIDASIGSFEAGMDGTKGQTREHAQLIRSFGVDQIIVAVNKMDAVEYSKDRFDLIKSQLGTFLRSCYFKDSSVIW

SEQ ID NO: 64687 - protein, 146 aa, Gossypium hirsutum
  Clone ID: GOSHI-09MAY01-C9002_1.pep
NPGGPTRPEGLTDDDIRTAIQNATGPRSWLFVPEVPFEVLVRGQIARLLDPSLQCARFIYDELIKISHRCMVNELQRFPVLRKHMDQVVGNFLREGLEPSETMIGHMIEMEMDYINTSHPNFIGGSKAVELANQQLRNSKVALPIS

SEQ ID NO: 64688 - protein, 130 aa, Gossypium hirsutum
  Clone ID: GOSHI-09MAY01-C9022_3.pep
MATTGNKNINAKLVLLGDVGAGKSSLVLRFVKGQFVEFQESTIGAAFFSQTVAVNDATVKFEIWDTAGQERYHSLAPMYYRGAAAAIIVYDITNQASFERAKKGVQELQSQGNSNLVTALAGNKAVYLMQ

SEQ ID NO: 64689 - protein, 201 aa, Gossypium hirsutum
  unsure (1)..(201): unsure at all Xaa locations
  Clone ID: GOSHI-09MAY01-C9022_2.pep
MATTGNKNINAKLVLLGDVGAGKSSLVLRFVKGQFVEFQESTIGAAFFSQTLAVNDATVKFEIWDTAGQERYHSLAPMYYRGAAAAIIVYDITNQASFERAKKWVQELQAQGNPGMXVMALAGNKADLLDARKVAAEEAQTYAQENGLFFMETSAKTASNVNELFYEIAKRLPRVQPAQNPAGMVLMNRPSERTATASCCS

SEQ ID NO: 64690 - protein, 200 aa, Gossypium hirsutum
  Clone ID: GOSHI-09MAY01-C9022_1.pep
MATTGNKNINAKLVLLGDVGAGKSSLVLRFVKGQFVEFQESTIGAAFFSQTLAVNDATVKFEIWDTAGQERYHSLAPMYYRGAAAAIIVYDITNQASFERAKKWVQELQAQGNPGMVMALAGNKADLLDARKVAAEEAQTYAQENGLFFKETSAKTASNVNEIFYEIAKRLPRVQPAQNPAGMVLMDRPAERSASATCCS

SEQ ID NO: 64691 - protein, 49 aa, Gossypium hirsutum
  Clone ID: LIB3584-033-P1-K1-D4.pep
PRVRTASNVNELFYEIAKRLPRVQPAQNPAGMVLMNRPSERTATASCCS

SEQ ID NO: 64692 - protein, 109 aa, Gossypium hirsutum
  unsure (1)..(109): unsure at all Xaa locations
  Clone ID: LIB3166-013-P1-K1-F7.pep
MATTGNKNINAKLVLLGDVGAGKSSLVLRFVKGQFVEFQESTIGAAFFSQTLAVNDATVKFEIWDTAGQERYHSLAPMYYRGAAAAIIXASFERAKNWVQELQAQGNPN

SEQ ID NO: 64693 - protein, 64 aa, Gossypium hirsutum
  Clone ID: LIB3197-051-Q1-M1-E5.pep
LKEDPSFYFYRLAFVSHSFLVLVRQRLQHILLNQYFLHLILIGASVWLEGISWPLLETRTSMLN

SEQ ID NO: 64694 - protein, 240 aa, Gossypium hirsutum
  unsure (1)..(240): unsure at all Xaa locations
  Clone ID: GOSHI-09MAY01-C9392_1.pep
SLLFHSNPKTVFIMGGGEGSAAREALRHKFIDEVVMCDIDEEVVNFCRRYLTVNRDAFCNKKLNLVINDAKAELEKRTEKFDIMVGDLADPVEGGPCYQLYTKSFYEKILKPKLNENGIFVTQAGPAGIFTHKEVFSSIYHTIRQVFKYVLAYTAHVPSFADTWGWVMASDQPFSIGAEEIDKRIAERVDGELLYLNGSSFLSSATMNKTGYLSLLNETQCLHXRENPRFIPGHGLGNHL

SEQ ID NO: 64695 - protein, 119 aa, Gossypium hirsutum
  Clone ID: GOSHI-09MAY01-C9382_1.pep
QSPDFNSPSLHILRYLSFLHPPVLPPHAGPSLSSIGGFHAAVLSSPPWIIVSASPSIQISWKLISLAIVMACKHALASAMIGSEIFSHGKLNEASKFTFIVPFSGGFHSELSTTCTCLN

SEQ ID NO: 64696 - protein, 84 aa, Gossypium hirsutum
  Clone ID: GOSHI-09MAY01-C109369_1.pep
FTFNIAENNLNELEHVALQHPLIPTENGDEKLIDVSNCFGCRDPLANYTRFSPFRGFNLHEICSEIPSELNHVWHRFASSCPTI

SEQ ID NO: 64697 - protein, 216 aa, Gossypium hirsutum
  Clone ID: GOSHI-09MAY01-C109299_1.pep
LSVAAPTIAASLDGGYLSGLKEERENAAEVLKEAGLKEEVGSLAKGIDKKRLIDDVRQALYASKICSYAQGMNLLRAKSVEKGWNLNFGELARIWKGGCIIRAVFLDRIKKAYQRNPNLASLVVDPEFAREMVQRQAAWRRVVGLAISAGISTPGMCASLAYFDTYRRARLPANLVQAQRDLFGAHTYERIDRPGSFHTEWKKSAQKINAGVGALN

SEQ ID NO: 64698 - protein, 57 aa, Gossypium hirsutum
  Clone ID: uC-gsronu33B072d10b1.pep
HASGLAKGIDKKRLIDDVRQALYASKICSYAQGMNLLRAISASSWLVLPSYFFSSFF

SEQ ID NO: 64699 - protein, 116 aa, Gossypium hirsutum
  Clone ID: GOSHI-09MAY01-C9242_1.pep
MEMYPSTIDSDLMMLDSIRRHLLGESSDLRFTSSNDCTNVGAAPPMFCRSSSFSRLYPCLTDTWGDLPLKENDSEDMLVFGYLRDALTVGWAPSDHSSPTFPPIKPNLKRFRPRQR

SEQ ID NO: 64700 - protein, 88 aa, Gossypium hirsutum
  unsure (1)..(88): unsure at all Xaa locations
  Clone ID: GOSHI-09MAY01-C9262_1.pep
SDQHPINRVMTFSXLDNDLMRYSAFQTLDGDIDLKLLTKVLAPEHEVREDDVAWDWDHLYTEVSSELLTQWDLLPAEKEDPVGPSRHI

SEQ ID NO: 64701 - protein, 113 aa, Gossypium hirsutum
  Clone ID: GOSHI-09MAY01-C4982_1.pep
MATVRNLKIKTSTCKRILKELHSYEKEVEREAAKTADMKEKGADPYDLKQQENVLAESRMMVPDCHKRLEASLADLKATLAELEEANEKEGPEFEDARSTIIEVEKLFQTTEA

SEQ ID NO: 64702 - protein, 180 aa, Gossypium hirsutum
  Clone ID: GOSHI-09MAY01-C104949_1.pep
FSSGHVMCVRCLYKDPATQDVVYGRDQALLVPRPNDVRSSAPKIEQLRFFFISTRAIAEARRLIECSNDLTSAYHLLGSARALLMQSNSQSAEEYARGLEVELAELHWRKQQMMEIQRRRVNERERERGRESMTVVMDENGEPLTPFSAWRAAEKLAKVAMMKKSLNRVSDLHGFENARF

SEQ ID NO: 64703 - protein, 197 aa, Gossypium hirsutum
  unsure (1)..(197): unsure at all Xaa locations
  Clone ID: GOSHI-09MAY01-C4962_2.pep
IGSLQMFVENNGSCEDMGPXGWPVEQVHKITVLDIRLANVDRHAGNILLSKDEDGQTVLVPIDHGCCLPPCFEXCTFDWLYWPQARQSYSPETLEYIKSLDAEEDISLLKSLGWDMPPECARTLRISTMLLKKGAERGFTPHAIGSIMCRENLKEESPIEQMVQEAQDSVLPGTSEAAFLETLSQIMDRHLDEITGL

SEQ ID NO: 64704 - protein, 523 aa, Gossypium hirsutum
  Clone ID: GOSHI-09MAY01-C4962_1.pep
RQPKWGHLRDVHKAIKLCEEALIATDPKISSLGPNLEAAVYKTGSGGCSAFLANIDTKSDATVNFNGNSYHLPAWSVSILPDCKNVVMNTAKVNSMSVIPSFMHESLNTNADSTDSIGSGWSWINEPIGISKASAFNKLGLLEQINTAADKSDYLWYSLSMNIKGDEPFLQDGSQTVLHVESLGHGLHAFINGKLAGSRTGNSDNAKVKVDIPITVVPGKNTIDLLSLTVGLQNYGAFFDLSGAGITGPVKLNGLSNGSSIDLSSQQWTYQVGLKGEDSGLPSGSSSEWVSQPALPKNQPLIWYKTNFDAPTGNDPVALDFMGMGKGEAWINGQSIGRYWPAYIASNSGCTDSCDYRGPYSANKCRKNCGKPSQQLYHVPRSWLKPSGNILVLFEEMGGDPTQLAFATRKMGSLCSHVSDSHPLPMDMWGLDSKTRRASNPTLSLSCPSPNQVISSIKFASFGTPLGTCGSFSHGRCSGAKAHSIVQKVCVGSTSCSIDVSPRARGDPCKGVKKSLAVEVSCA

SEQ ID NO: 64705 - protein, 56 aa, Gossypium hirsutum
  Clone ID: LIB3828-001-Q1-K6-G2.pep
LHIPSIQQNAQWSILSSPPFDAILYSLWHFTECHLVRGSQSFQLFIKMFFCWFFEI

SEQ ID NO: 64706 - protein, 105 aa, Gossypium hirsutum
  unsure (1)..(105): unsure at all Xaa locations
  Clone ID: LIB3148-020-Q1-K1-H1.pep
NCGKPSQXVYHVPRSWLKPSGNILVLFEEMGGDPTQLAFATRKMGSLCSHVSDSHPLPMDMWGLDSKTRRASNPTLSLSCPFPNQVISAIKFASFGTPLGTCGSF

SEQ ID NO: 64707 - protein, 164 aa, Gossypium hirsutum
  Clone ID: GOSHI-09MAY01-C4912_1.pep
MFMAVESTLPTPVRTPASEKDAKALQFIEEMTKNVDSVQERLLREILGRNAETEYLKRFSLNGATDRETFKSRIPVVTYEDIQPEIQRIANGDKSPIFSAHPISEFLTSSGTSAGERKLMPTIHEELDRRQLLYSLLMPVMNLYVPGLDKGKGLYFLFVKAETK

SEQ ID NO: 64708 - protein, 165 aa, Gossypium hirsutum
  Clone ID: LIB3583-058-P1-K1-G11.pep
GLSSVVGASFSEKDAKALQFIEEMTKNVDSVQERILGEILSRNADTEYLKRFQLNGATDRDTFKSKVPVVTYEDLQPEIQRIANGDKSPILSSHPISEFLTSSGTSAGERKLMPTIHEELNRRQLLYSLLMPVMNLYVPGLDKGKGLYFLFIKAETKTPGGLLAR

SEQ ID NO: 64709 - protein, 161 aa, Gossypium hirsutum
  unsure (1)..(161): unsure at all Xaa locations
  Clone ID: GOSHI-09MAY01-C4852_2.pep
MAEEEMSLSGVSGAFRQVLFISAGASHSVALLSGNIICSWGRGEDGQLGHGDAEDRLSPTRLSALDGHDIISITCGADHTIAYSLSNAEVYSWGWGDFGRLGHGNSSDLFTPQPIKALHGLRIKQIACGDSHCLAVTMEGEVQSWGRNQNGQLXLGTTEDS

SEQ ID NO: 64710 - protein, 295 aa, Gossypium hirsutum
  Clone ID: GOSHI-09MAY01-C4852_1.pep
HASAQRPGRLGHGDSSDLFTPQPIKALHGLRIKQIACGDSHCLAVTMEGEVQSWGRNQNGQLGLGTTEDSPVPQKIQAFQGISIKMVAAGAEHTAAVSEDGALYGWGWGQYGNLGLGDRNDRLVPEKVSTLNEEKMNMVACGWRHTISVSDTGRLYTYGWSKYGQLGHGDFEDHLVPHKVEALADSFIKQIAGGWRHTMALTSDGKLYGWGWNKFGQVGVGDNADLCSPVLVKFPHEQKVVQVSCGWRHTLAITEEQNIFSWGRGTNGQLGHGESTDRNFPKIIEALSVEGSSGQ

SEQ ID NO: 64711 - protein, 130 aa, Gossypium hirsutum
  Clone ID: LIB3197-023-Q1-M1-F1.pep
MNLMAQPQTYLDLDTSMAKPPPNPLPNDQKVVQVSCGWRHTLAITEEQNIFSWGRGTNGQLGHGESMDRNFPKIIEALSVEGSSGQQIESSKLDPLSGKSWVSPAERYAVVPGESGQTVNSEKGNGGDVD

SEQ ID NO: 64712 - protein, 62 aa, Gossypium hirsutum
  Clone ID: LIB3146-040-Q1-K1-D10.pep
ILLLVDSGIPYQALLLVEYTTMALSSFFYYNYCYCIFPSLLILSYFLMYYFFSFFFISIYII

SEQ ID NO: 64713 - protein, 129 aa, Gossypium hirsutum
  Clone ID: GOSHI-09MAY01-C4872_1.pep
RSRSPVKRERSFERDDRRSRSPKRHRPSTPPVRGRKHSPARDERSPQERRSPSPRDRRHANGSDYSGSPRGRSRTPDREADAGDGDYKSSAKENGNSRSPSPLPKDDRSPIYEEEDDDNHASPRRSESN

SEQ ID NO: 64714 - protein, 145 aa, Gossypium hirsutum
  Clone ID: GOSHI-09MAY01-C4592_1.pep
MATSRIFFGSKPRYIYPTMEFDDGNLINNPSFDHHHHHHLLEFDEVDVWNNSNDQATTNLEAKKPLPSYRASSKKAFKKKEFQISDNNNHRSAQMTAASASLPVNIPDWSTILKAEYREHGKTDEDAVDGDDDGVRDGRFTDDTC

SEQ ID NO: 64715 - protein, 171 aa, Gossypium hirsutum
  unsure (1)..(171): unsure at all Xaa locations
  Clone ID: uC-gsronu33B089g10b1.pep
IINPSFDHHHGHHLMEFGEVDVWNNSNDQATTNLEAKKPLPRYRASSKKAFKKKEFQISDNNNHRSAQMTAASASLPVNIPDWSTILKAEYREHGKTDEDAVDGYDYGDRDGRVPPHEYXARRRGASFSVHEGIGRTLKGRDLRRVRNAVWKKQVLKNNPQHHKTTTQVYF

SEQ ID NO: 64716 - protein, 100 aa, Gossypium hirsutum
  Clone ID: GOSHI-09MAY01-C4582_5.pep
MYTSMKKIHKDKDVEPTEFEESVAQAFFDLENTNQDLKSDLKDLYINSAVQIDVSGSRKAVVIHVPYRLRKAFRKVHVKLVRELEKKFSGKDVILIATRR

SEQ ID NO: 64717 - protein, 129 aa, Gossypium hirsutum
  Clone ID: GOSHI-09MAY01-C4582_4.pep
RFCTHFFFLFFRRLMGERGRELEKKFRGKDVILIATRRILRPPKKGSAVQRPRSRTLTAVHEAMLEDVVLPAEIVGKRTRYRIDGSKIMKVFLDPKERNNTEYKLETFSAVYRKLAGKDVVFEFPVTEA

SEQ ID NO: 64718 - protein, 191 aa, Gossypium hirsutum
  Clone ID: GOSHI-09MAY01-C4582_3.pep
MYTSMKKIHKDKDVEPTEFEESVAQAFFDLENTNKDLKSDLKDLYINSAVQIDVSGSRKAVVIHVPYRLRKAFRKVHVKLVRELEKKFSGKDVILIATRRILRPPKKGSAVQRPRSRTLTAVHEAMLEDIVLPAEIVGKRTRYAIDGSKLMKVFLDPKERNNTEYKLETFSAVYRKLAGKDVVFEFPVTEA

SEQ ID NO: 64719 - protein, 191 aa, Gossypium hirsutum
  Clone ID: GOSHI-09MAY01-C4582_2.pep
MYTSMKKIHKDKDVEPTEFEESVAQAFFDLENTNQDLKSDLKDLYINSAVQIDVSGSRKAVVIHVPYRLRKAFRKVHVKLVRELEKKFSGKDVILIATRRILRPPKKGSAVQRPRSRTLTAVHEAMLEDIVLPAEIVGKRTRYAIDGSKLMKVFLDPKERNNTEYKLETFSAVYRKLAGKDVVFEFPVTEA

SEQ ID NO: 64720 - protein, 191 aa, Gossypium hirsutum
  Clone ID: GOSHI-09MAY01-C4582_1.pep
MYTSRKKIHKDKDAEPTEFEESVAQAFFDLENTNQDLKSDLKDLYINSAVQIDVSGSRKAVVIHVPYRLRKAFRKVHVKLVRELEKKFSGKDVILIATRRILRPPKKGSAVQRPRSRTLTAVHEAMLEDVVLPAEIVGKRTRYRIDGSKIMKVYLDPKERNNTEYKLETFSAVYRKLAGKDVVFEFPVTEA

SEQ ID NO: 64721 - protein, 100 aa, Gossypium hirsutum
  Clone ID: uC-gsflmaxxa097d03b1.pep
IHGGKKIHTDKDAVPTEFEESVAQAYFDLENTNQDLKSDLKDLYINSAGQIDVSGSQKAVGDHVPYRLRKAFHKDHVKLERELEKKFSGTDVILIATPGI

SEQ ID NO: 64722 - protein, 34 aa, Gossypium hirsutum
  Clone ID: LIB3146-039-Q1-K1-D8.pep
TEFEESVAQAFFDLENTNQDLKSDLKNLYINSAL

SEQ ID NO: 64723 - protein, 64 aa, Gossypium hirsutum
  Clone ID: GOSHI-09MAY01-C4542_5.pep
KWCFYFKARPEVGDFTIFMGLDKYENEELIKYGFPEDIWFHVDKMSSAHVYVRLHKGQTIDDIS

SEQ ID NO: 64724 - protein, 215 aa, Gossypium hirsutum
  Clone ID: GOSHI-09MAY01-C4542_2.pep
MVFYFKARPEAGDYTIFMGLDKYENEELIKYGFIEDIWFHVDKMSSAHVYLRLKKGQTIDDISEGVLEDCAQLVKANSIQGNKVNNIDVVYTPWSNLKKTPSMDVGQVGFHNSKMVRTVRVEKRINEIVNRLNKTKVERKPDLKAEREAVYAAERAERKQQLREKKRREELQRLEKERQAEIRSYKGLMVSEKMTSNKQIAETSRSLQELEEDFM

SEQ ID NO: 64725 - protein, 215 aa, Gossypium hirsutum
  Clone ID: GOSHI-09MAY01-C4542_1.pep
MVFYFKARPEAGDYTIFMGLDKYENEELIKYGFPEDIWFHVDKMSSAHVYLRLQKGQTIDDISEGLLEDCAQLVKANSIQGNKVNNIDVVYTPWSNLKKTPSMDVGQVGFHNSKMVRTVRVEKRINEIVNRLNKTKVERKPDLKAEKEAVYAAEKAERKQQLREKKRREEMQRLEKERQAEIRSYKGLMVSEKMTSNKQIAATSKSFQEVEEDFM

SEQ ID NO: 64726 - protein, 133 aa, Gossypium hirsutum
  Clone ID: LIB3825-018-Q1-K6-G4.pep
MVFYFKARPEVGDYTIFMGLDKYENEELIKYGFPEDIWFHVDKMSSAHVYVRLHKGQTIDDISEGLLEDCAQLVKANSIQGNKVNNVDVVYTPWSNLKKTPSMDVGLVGFHNSKMVRTVRVEKRINEIVNRLN

SEQ ID NO: 64727 - protein, 48 aa, Gossypium hirsutum
  Clone ID: LIB3583-045-P1-K1-C10.pep
FCLSHRQGGKRVFYFKARAESGNYTIFMGLDKYENEELIKYGFVEDIL

SEQ ID NO: 64728 - protein, 54 aa, Gossypium hirsutum
  Clone ID: LIB3146-006-Q1-K1-H2.pep
KDDIKQTNCSDEQVFPGSRRGFYVKLAVRQRRVVSFYFFFIASLSYLPRLSRLT

SEQ ID NO: 64729 - protein, 173 aa, Gossypium hirsutum
  Clone ID: GOSHI-09MAY01-C4532_1.pep
VVVQKDLTGLWKIDLAGKVNGAVETCFGSFHRFSQYLNFTHPLIKERFNPKACAWAYGMNIFDLDAWRREKCTETYEEWQNLNEDRTLWKLDALPPGLITFYSLTKSLDKSWHVLGLGYNPSISMDEINNAAVIHYNGNMKPWLDIAMNQYKNLWTKYVDNDMEFVQMCNFGV

SEQ ID NO: 64730 - protein, 181 aa, Gossypium hirsutum
  unsure (1)..(181): unsure at all Xaa locations
  Clone ID: GOSHI-09MAY01-C4472_1.pep
PTRPALVERWRPETHTFHFLRGECTVTLEDVALQLGLPIDGSPVTGLSAFTDPDALCYXLLGDSPGDGESYFSGVQFTWLKAKYRQLSATATEGELMCAARAYIMHIIGGEIMPDASNDKVHLMYLPLLADLSSVSSYSWGSTVLAILYRELCRATDPKVRDIGGCLSLLQSWALDRMPFL

SEQ ID NO: 64731 - protein, 116 aa, Gossypium hirsutum
  Clone ID: GOSHI-09MAY01-C4402_1.pep
MPFSLLLSLFFSYANILVFSFLPPVNGGNYSIRIRTVEDVFSDFKSRRAALIKALTTEKDNLCLFGYPNRRWEVNQPVAYLPPEIPEPTLGISFCRNGMQRKDWFLLVAVQSDAWL

SEQ ID NO: 64732 - protein, 93 aa, Gossypium hirsutum
  Clone ID: GOSHI-09MAY01-C4752_1.pep
MASGSSWTPKQNKLFENALVIYDKDTPDRWHNLARAVGGKTVEEVKLHYQNLVEDIQQIESGQVPLPPYKKAGGNKGYNFTDGEQRMRNLRLQ

SEQ ID NO: 64733 - protein, 194 aa, Gossypium hirsutum
  Clone ID: GOSHI-09MAY01-C4742_1.pep
LLKFSNKLQSSKRLAAMKVHGYPLSTVTQRVLACLYEKDVEFQFVNVDMVAGEHKSPNFLPLNPFGQVPAFEEGDLKLFESRATTHYIAHEYADKGTQLLLPGSNKTMAVFQLWKEVEAHQFDPPSTKLVFELRYKPHFGMTTDTAVVEEYEAKFAKVLDVYEARLAESKYFACDHFHLADLHHLPTGQYLWGA

SEQ ID NO: 64734 - protein, 56 aa, Gossypium hirsutum
  Clone ID: uC-gsronu33B156d05b1.pep
SPNFLPLNPFGQVTAYEECYLKLFESRATTHYIVHEYSYNMTLLFLPAFNKTMAVF

SEQ ID NO: 64735 - protein, 111 aa, Gossypium hirsutum
  Clone ID: GOSHI-09MAY01-C4772_4.pep
PIFKLWDCFLAGATVRLTCKDAKNELTVQFKTDKNGYFFLQAPITIYNFDLHNCSVSLVSSPLKACSKPSNLNGGLKGAPLKPEKPSTSKKLPYVLYSVGPFAFEPTCHKN

SEQ ID NO: 64736 - protein, 289 aa, Gossypium hirsutum
  unsure (1)..(289): unsure at all Xaa locations
  Clone ID: GOSHI-09MAY01-C4772_2.pep
MGFAVVVLVVKAALLVQLSLLLLSTFTVSAPIWPQASPPHYHAVSPVVPPTHPPTXPPSPPPSPSPSPPXHPPTKPPTPTPPPVHPPPKAPVQPPTKPPVHPPPKPPVQPPTKPPTKPPTQPPTKPPTQPPTKPPTKPPTQPPTKPPTHPPSHPPAKPPKSSQVAVQGVVYCKSCKYAGVDTLLGAKPILSATVRLTCKDAKNELTVQFKTDKNGYFFXAPITIYNFDLHNCSVSLVSSPLKACSKPSNLNGGLKGAPLKPEKPSTSKKLPYVLYSVGPFAFEPTCHKN

SEQ ID NO: 64737 - protein, 139 aa, Gossypium hirsutum
  Clone ID: GOSHI-09MAY01-C4772_1.pep
MANAASGMAVHDDCKLKFLELKAKRTYRFIVFKIEEKQKQVVVEKVGEPTDSYEAFTASLPADECRYAVYDFDFVTDENCQKSRIFFIAWSPDTSKVRSKMIYASSKDRFKRELDGIQVELQATDPSEMDLDVIRSRAN

SEQ ID NO: 64738 - protein, 136 aa, Gossypium hirsutum
  unsure (1)..(136): unsure at all Xaa locations
  Clone ID: LIB3189-046-P1-K1-A2.pep
MANAASGMAVHDDCKLKFLELKAKRTYRFIVFKIEEKQKQVVVEKVGEPTDSYEAFTASLPADECRYAVYDFDFVTDENCQKSRIFFIAWSPDTSKVRSKMIYASSKDRFKREWDGIQVELQATDPSEMDXDVIRS

SEQ ID NO: 64739 - protein, 72 aa, Gossypium hirsutum
  Clone ID: uC-gsflnu33B076e06b1.pep
TATNPPTKPPTQSPTKPPTHPPSHPPAKPPKSSQVAVQGVVYCKSCKFAGVDTLLGAKPILSAPVRLTCKDA

SEQ ID NO: 64740 - protein, 110 aa, Gossypium hirsutum
  unsure (1)..(110): unsure at all Xaa locations
  Clone ID: LIB3583-057-P1-K1-B6.pep
APNPNSSSVHXPPKAPKPPTQPPTKPPTKPSTQSPTKPPTHPPSHPPAKPPTSSHVAVQGVVYCKSCKYAGVDTLLGAKPIPRATVRLTCKDAXNELTVQFKTDKNGYFF

SEQ ID NO: 64741 - protein, 82 aa, Gossypium hirsutum
  Clone ID: LIB3166-024-P1-K1-D9.pep
MLFHPHPHPPTKPPTPTPPPVHPPPKAPVQPPTKPPTSAPPKPPVQPPTKPPTKPPTQPPPKPPTQPPTKPPTKPPTQSPTK

SEQ ID NO: 64742 - protein, 74 aa, Gossypium hirsutum
  unsure (1)..(74): unsure at all Xaa locations
  Clone ID: LIB3583-009-P1-K1-B11.pep
TTTSNPVHSPPNAPAQPPTKLSSSAAPRPPGQPTTKPPTKPPSXQQSKPPTQPPTKPPTKPTTQFPTKPPTHLP

SEQ ID NO: 64743 - protein, 114 aa, Gossypium hirsutum
  Clone ID: LIB3147-035-Q1-K1-C2.pep
DPGVRVRQRLPHTAFIVPVQPPTKPPGYPPPKPPAQPSTKPPTKPSTQPPTKPPTQPPTKPPTMPASQPPTMPPTHPPSNTSAKPPKSSQVAVHGVVYCMSCILAGVDTLLGAK

SEQ ID NO: 64744 - protein, 46 aa, Gossypium hirsutum
  Clone ID: LIB3148-053-Q1-K1-G12.pep
LFITNLFPYITITYCNPKLTTPNKIPSDAWADAWADAWADAWADAW

SEQ ID NO: 64745 - protein, 329 aa, Gossypium hirsutum
  Clone ID: GOSHI-09MAY01-C4732_1.pep
MAPLLYFNFRKVFLLYLAFFMLISLLVCTSIVDSHELRTTRFGGGGRRLLELEEEDEQLVLKKKSSNFSNKKNQTKLVKPSNVSTKNQTKLVKSVNVSTKNQTKLVKSLDVSTKTSNLSAKNQTKVKKLNSTTPKASDLLKLSSPKNKTTTKTPVPSSKPEKKPTTAQIQKQQKKQPSWVDDDDESDLVSEFRDLPAKFQQTLIPDLERISTTSKVYINKYNKEFTKQFKPYVGNKHAPTIATVISCAFLLIPLLLVSLIFNRIKAYFSLQKILIFIQIYLSIYFSILCLTSLVTGLEPLKFFYATSPSTYVCLQVLQTPGDVLYLWLL

SEQ ID NO: 64746 - protein, 155 aa, Gossypium hirsutum
  unsure (1)..(155): unsure at all Xaa locations
  Clone ID: uC-gsronu33B107b03b1.pep
SDLVSELRDLPAHCLFTVIPGLEKVSTPWHANMRIYNRECTKQFTPYVRNKHAPTIATVISCAFLLIPLLLVSLIFNRIKAYFXLQKILIFIQVYLSIYFSILCLTSLVTGLEPLKFFYATSPWTYVGLQVLQTLVDVLYLLLLLMYMILVFSTE

SEQ ID NO: 64747 - protein, 186 aa, Gossypium hirsutum
  unsure (1)..(186): unsure at all Xaa locations
  Clone ID: GOSHI-09MAY01-C104719_1.pep
MDVEASSSFSSISPPVFDGDNYQVWAVHMEGGGEALDIWEVVEDDYEIPTLXTNPTMAQIKLQKKKTKKSKAKAYLFTAISSTIFTRIMTLKSAYEIXNYLKSEYEGDKRIKGMRVLNLIREFELQKMKETESIKEYSDRLLDIANRIRLLGSXFKDSRIVEKILVTVPEKFEASISTLENTKDLT

SEQ ID NO: 64748 - protein, 370 aa, Gossypium hirsutum
  Clone ID: GOSHI-09MAY01-C4722_1.pep
MDRFSLLFLLLSSVVASAVVSDVNSDGDPLIRQVVSDGGVEEDSDDHLLNAEHHFTLFKSKYGKTYASQEEHDYRLGVFKANLRRAKRHQLLDPSAVHGVTKFSDLTPSEFRRQYLGLKPLKLPADAQKAPILPTDNLPDDFDWRDHGAVTGVKDQGSCGSCWSFSATGALEGAHYLATGELVSLSEQQLVDCDHECDPQQYGACDSGCNGGLMTSAFEYTLKVGGLEREKDYPYTGNDRGPCKFDKTKIAASVSNFSVISVDEDQIAANLVKHGPLAVGINAVFMQTYMGGVSCPYICFRTLDHGVLLVGYGAAGYSPIRFKDKPFWIIKNSWGANWGEDGYYKICRGRNVCGVDSMVSSVAALHTKSQ

SEQ ID NO: 64749 - protein, 178 aa, Gossypium hirsutum
  unsure (1)..(178): unsure at all Xaa locations
  Clone ID: LIB3829-031-Q6-K6-F11.pep
IRQVVSDGVAEENLLTNYSLXHHFTLFKSKFRKTYATNEEHDYRLRVFKVNMRRAKRYQLLDPTAVHGVTKFYDLTPSEFRRQFLVLKPIKLPVDAQNAPILPTDDLPDDFDWRDQGAVTGVKDQGSRGSCWSFSTTGALEGAHYLATGELVSLSEQXLGDCDHECDPHEYGACDSWC

SEQ ID NO: 64750 - protein, 39 aa, Gossypium hirsutum
  Clone ID: uC-gsflnu33B113g01b1.pep
SVILKFSFIWFLAANSVLTFGYWLKTRINYQSNKQQSFN

SEQ ID NO: 64751 - protein, 130 aa, Gossypium hirsutum
  unsure (1)..(130): unsure at all Xaa locations
  Clone ID: LIB3493-024-P1-M1-B9.pep
GRVGGRVGGRVGGRVGGRVGHDYRLGVFKANLRRAKRHQLLDPSAVHGVTKFSDLTPSEFRRQYLGLKPLKLPADAQKAPILPTDNLPDDXDWRDHGAVTGVKDQGSCGSCWSXNATGALEGAHYLATGE

SEQ ID NO: 64752 - protein, 103 aa, Gossypium hirsutum
  unsure (1)..(103): unsure at all Xaa locations
  Clone ID: LIB3120-009-Q1-K1-D8.pep
AVDWDFNSDGDPLILQVVFDGVDKEDFDDHLHNSEHQLTLIKSKSGKTYAYXEEHDYRLGVFKANLREAXRYQLLDPMVEHCVTXVFRVTSSEIXRQYICLKP

SEQ ID NO: 64753 - protein, 213 aa, Gossypium hirsutum
  Clone ID: GOSHI-09MAY01-C104689_1.pep
IEVDEALAKEIREFRSPTDGETRMFYEIVVAPKYTEKGLEILRGKSKTLRILEAKKNEKGKLSLRQVGGGWLAQDSDDLTPEDIQFNVVSEKKPQDNELCDAEFAWLCVKHVKSNAIVIAKDNRMLGMGSGQPNRLESLRIALRKAGDEVKGAALAIDAFFPFAWKDAVEEACESGIGVIAEPGGSIRDGDAVDCCNKYGVSLLLTNVRHFKH

SEQ ID NO: 64754 - protein, 72 aa, Gossypium hirsutum
  Clone ID: GOSHI-09MAY01-C104649_1.pep
HLNFWFISLSWFLKLGFEVISIPGDNPPIRSTYRDHIRKRLVDRAIGCNSIFPSNSIPIFWGERAVANVGKI

SEQ ID NO: 64755 - protein, 252 aa, Gossypium hirsutum
  Clone ID: GOSHI-09MAY01-C4662_1.pep
HLYAWGGLQAEGIFRINAENSQEEYVREQLNRGVIPDGIDVHCLAGLIKAWFRELPSGVLDSLPPEQVMQAESEEECARLVRLLPPTEAALLDWAINLMADVVQVEHLNKMNARNVAMVFAPNMTQMSDPLTALMYAVQVMNFLKTLIIRTLKGREDSMVDSAPVSRLEPSDKNGQQSSSQLLKDASEEVKNESKGEKAFVAQEPALESPTHSAEENLTTETGPQSFLTSIENICAGNRSLANNCPWTLVFK

SEQ ID NO: 64756 - protein, 179 aa, Gossypium hirsutum
  unsure (1)..(179): unsure at all Xaa locations
  Clone ID: uC-gsronu33B080c06b1.pep
AERDILTKGGHFLIVQLRYSFQTKSKLYLILDFINGGHLFFHLYRQGIFSEDQARFYTAEIVSAVSHLHYCGIVHRDLKPENILVDADGHVMLTDFGLAKEIDESSRSNSMCGTTEYMAPEILQSKGHNKDADWWSVGILLYEMLTGQPPYTHANRQKLQXRIIPEKLXLPPFLTTEAH

SEQ ID NO: 64757 - protein, 72 aa, Gossypium hirsutum
  Clone ID: LIB3584-054-P1-K2-B4.pep
MLPQVMLTDFGLAKEIDESSRSNSMCGTTEYMAPEILQSKGHNKDADWWSVGILLYEMLTGQVIIYRDFQYV

SEQ ID NO: 64758 - protein, 79 aa, Gossypium hirsutum
  Clone ID: LIB3197-046-Q1-M1-F12.pep
MIWQPPYTHANRQKLQQRIIQEKLKLPPFLTTEAHSLLKGLLQKEPPRRLGSGPGGGDEIKKHKWFRSINWKKLEAREI

SEQ ID NO: 64759 - protein, 285 aa, Gossypium hirsutum
  Clone ID: GOSHI-09MAY01-C4632_1.pep
MKKGDWVQMDLLPTDRSAQSGTKLGDFISASANESAVITCGKEEDWFAGNHHVKPENQHSANDHMLFNGDRVLSVESDHLYSQKSVKDVIDDDSFMVAARPASDDLDDSQWKTDISMVADLTSHSKPDGTIDVSQDKHKMVDAEPIDLCMVLERNPGYESSRDSWTMDYQIELCFTETNKSAASKCDDDVEKVPSNHKNTIAKQNEAKKPAKEARSKALNGPIGKIKAENVSRSKKPSIVSRSAIQKSKLEKEEEMRRKMEELQIERQKRIAAGTAASGYASPVS

SEQ ID NO: 64760 - protein, 473 aa, Gossypium hirsutum
  Clone ID: GOSHI-09MAY01-C4622_1.pep
PNWSQPSISGASSSSYREDSGAAVASSSQVREEEEDRDQDYPPQHHFQFHSPELENHHIGGFLSYRDNSPAFNDNSSSVIRDDTWSCIIVVFTFWFFVSMTLILGVYGPMNLQLGPNCSLLIQPNPLFVQSVTVEEKDGTKPGLNLYGLYKSPSLDEVTTWSETYTPTIQADSHMEWIRYPNRGSQVNISYNVNSVSSSVFLIIAEGSEGLARWLEDPTYPNTTLSWNIVHGSGMIQQDIYRSSSYYIALGNMNTEDIKVQLNFTFKAYIYNTTEAYYRCTFANGVCSLNILFPEGNSVVLTSPGPEQRRSAHDWSFRLSYGPRWITYIVGIGGMTGIMLVAFNFLNKCQYTPEDEVRFHNGELASARAPLLSRKADDLSSRGSSYDSVSSDEADLEDFLAGSLEGTSIGDGENSNNTRRLCAICFDAPRDCFFLPCAPAGACFACGTRIAEADGTCPICRRSMKKVRKIFTV

SEQ ID NO: 64761 - protein, 54 aa, Gossypium hirsutum
  Clone ID: uC-gsflmaxxa091b08b1.pep
MNCQQQTMLTTDCFFLPCGHCVACFACGTRIAEADGTCPICRRSMKKGRKIFTV

SEQ ID NO: 64762 - protein, 160 aa, Gossypium hirsutum
  Clone ID: GOSHI-09MAY01-C4192_1.pep
MTKKRKSDATRLDEVDRTMYTSFCSAANSLSQLYTQAMNHQRLSFQAGERHALEKLYQWILRQQEEGSRATTVDIVAYLQNELEYGGDEPPVSPRLPLQHPHSQAPTQSNNLGAPVLSNPLSSVNVGQGVRPGDNQGKNSVFSNALSSPRRRSLQPYHLA

SEQ ID NO: 64763 - protein, 160 aa, Gossypium hirsutum
  Clone ID: LIB3543-029-Q1-K6-H12.pep
QFYLFTCNLFSIKGGGGKKRKSDASRLDEVDRTMYTSFCSAANSLSQLYTQAMNHQRLSFQAGERHALEKLYQWILRQQEEGSRATTVDIVAYLQNELEYGGDEPPMSPRLPLQHPHSQAPMQSNNLGAPVLSNPLSSVNVGQGVRPGDNQVKNSVFSNA

SEQ ID NO: 64764 - protein, 95 aa, Gossypium hirsutum
  Clone ID: GOSHI-09MAY01-C4162_1.pep
VQSSLLATQMWVVIADSGKASDEGAPQKYVSVPKAEGLAEEKIDRAKVKSSATKVATSSKSNSAETTLLPRKKVFKRVKNPRGRAVTGVSSNDGE

SEQ ID NO: 64765 - protein, 97 aa, Gossypium hirsutum
  Clone ID: LIB3583-005-P1-K1-F8.pep
ILDSCTGTFHHNWRPTLVKCDSEASLARIFLCKMVKAGKAATSWISSSVADKRNNILMVGKLLIFCSASPLGFYFLVGPLICIGSWVWQIHIYAFEE

SEQ ID NO: 64766 - protein, 122 aa, Gossypium hirsutum
  Clone ID: GOSHI-09MAY01-C4112_1.pep
PTQKIRIFRGGKDRCKQVRWIAPTVGYWIVSCDGAFNLLSKEVGIGVIIRDSMAALVAKKGRSFLASSTLEVEALAMHEGFLLADNKRRQQSCRLGCISIQEEDVPFQLGGFIPSSLVPILS

SEQ ID NO: 64767 - protein, 197 aa, Gossypium hirsutum
  Clone ID: GOSHI-09MAY01-C4132_4.pep
GNFKLILIFFCLQSKVFHYGSICLIVEPCRSAHLKAMEVAKGAGALLSYDPNLRLALWPSARVPRKQILSIWAQADIVKVSDVELEFLTGSNKGDDQTAMELWRPNFTLLLVTLGEKGSRYYTKNFRGAVDAFHVNTVDTTGAGDSFVGALLCKIVENPTILEDEAKLREVLKFANACGALLLPYNINFSTKLHSLG

SEQ ID NO: 64768 - protein, 132 aa, Gossypium hirsutum
  Clone ID: GOSHI-09MAY01-C4132_3.pep
MAAHGVVSDTSLIVSFGEMLIDFVPTVSGVSLAEAPGFLKAPGGAPANVAIAVARLGGKASFVGKLGDDELGHMLADILKQNGVSGDGILFDQGARTALAFVTLRADREREFMFYRNPSADMLLKPEELNLD

SEQ ID NO: 64769 - protein, 179 aa, Gossypium hirsutum
  unsure (1)..(179): unsure at all Xaa locations
  Clone ID: GOSHI-09MAY01-C4132_2.pep
RGRYPTRSSIVSFGEMLIDFVPTRLRSFLLAEAPGFLKAPGGAPANVAIAVSRLGGKASFVGKLGDDEFGHMLADILKQNGVSGDGILFDQGARTALAFVTLRADGEREFMFYRNPSADMLLTPEELNLDLIRSAKVFHYGSISLIEGPCXTAHLQAMEVAKESGALLSYDPNLRLPLW

SEQ ID NO: 64770 - protein, 328 aa, Gossypium hirsutum
  Clone ID: GOSHI-09MAY01-C4132_1.pep
MAANGVVSDKSLIVSFGEMLIDFVPTVSGVSLAEAPGFLKAPGGAPANVAIAVARLGGKASFVGKLGDDEFGHMLADILKQNSVSGDGILFDQGARTALAFVTLRADGEREFMFYRNPSADMLLKPEELNLDLIRSSKVFHYGSISLIVEPCRSAHLKAMEVAKGAGALLSYDPNLRLPLWPSADEARKQILSIWDKADIVKVSDVELEFLTGSNKVDDETAMKLWRPNFTLLLVTLGEKGSRYYTKNFRGAVDAFHVNTVDTTGAGDSFVGALLCKIVENPTILEDEAKLREVLKFANACGAITTTKKGAIPALPTVADALALINGA

SEQ ID NO: 64771 - protein, 150 aa, Gossypium hirsutum
  Clone ID: uC-gsflnu33B078d11b1.pep
MAPNGVVSDKSSIVSFGEMLIDFVPTVSGVSLAEAPGFLKAPGGAPANVAIAVSRLGSKASFIGKLGDDEFGHMLADILKQNGVSGDGILFDQGARTALAFVTLRADGEREFMFYRNPSADMLLTPEELNLDLIRSAKVFHYGSISLIVE

SEQ ID NO: 64772 - protein, 91 aa, Gossypium hirsutum
  Clone ID: LIB3149-023-Q1-K1-B7.pep
MAPNGVVSDKSLIVSFGEMLIDFVPTVSGVSLAEAPGFLKAPGGAPANVAIAVSRLGGKASFGGKLRDDEFRHMLADILKRNCFFCARNLF

SEQ ID NO: 64773 - protein, 58 aa, Gossypium hirsutum
  Clone ID: uC-gsronu33B099a06b1.pep
MRDVTFKNFRGAVDAFHVTAEDTTGAGDSFVGALLCKIVENPTILEDEAKLREAGTKF

SEQ ID NO: 64774 - protein, 237 aa, Gossypium hirsutum
  unsure (1)..(237): unsure at all Xaa locations
  Clone ID: LIB3583-003-P1-K1-H4.pep
MSSDSLPPLPQNRIVLGCGQVAVDFLATVASFPNPDDKIRSTSLKVQGGGNAGNASTCAARLGLNPRLISKVSNDSHGKGILEELEADGVDTSFFIVSEKGNSSFTYVIVDSQTKTRTCIHTPGYPPLIPEELSQSSLLSALDGVNMVYFDGRHHETALVVAKEAARKNIPILVEAEREREGLDDLLDFATYAICSAKFPQAWTEAPSFSSALISMLLRLPKLXIVIVTLGEEGCIM

SEQ ID NO: 64775 - protein, 92 aa, Gossypium hirsutum
  Clone ID: LIB3829-009-Q6-K6-E10.pep
FIKPINLNWNDTRRENEREMQVSPKLCIFQKLHSISFHFQHYQAMNGKKITFLLIFSSFLPSTAMETEYIFFLFFYSKFSTFRFSFPYQVKP

SEQ ID NO: 64776 - protein, 214 aa, Gossypium hirsutum
  Clone ID: GOSHI-09MAY01-C4042_1.pep
MRASSEFLATLVLVLVSVSSVAHGDPLVPALIIFGDSVVDVGNNNNLNTLIKSNFPPYGRDFVNHRPTGRFCNGKLATDFTAEYLGFTSYPPAYLSRDAIGNALLTGANFASAASGLYDSTANLYRAITLTQQLNYYREYQTKLVNMAGNNGANNIISGAIHLLSAGSSDYIQNYYINPLVSRIYTPDQFSDILIRSYTTFIQNLYGLGAREDW

SEQ ID NO: 64777 - protein, 222 aa, Gossypium hirsutum
  unsure (1)..(222): unsure at all Xaa locations
  Clone ID: GOSHI-09MAY01-C4032_1.pep
MGNTSCIFCACVDQASIGVVERWGRFEKLAEPGLHLFNPCAGQWLAGVLSTRISSLDVRIETKTKDNVFVQLLCSIQYRVVKPHADDAFYELQNPDEQIRAFVFDVVRALVPRMDLDDLFEQKGEVAKAVLEELGKVMGEYGYSIEHILMVDIIPDPAVRTAMNEINAAQRLQLASVYKGEAEKILQVKRAEAEAEAKYLGGVGVXTRQRQAITDGLRENIL

SEQ ID NO: 64778 - protein, 153 aa, Gossypium hirsutum
  unsure (1)..(153): unsure at all Xaa locations
  Clone ID: LIB3543-063-Q6-K6-A10.pep
MGNTSCVFCTCVKQXNIGVVERFGRFEKLAEPGXHIFNXFAGQYGGGVVLTRIXFLDVXXETKTKDNVFVQLLCSIQYRVVKGHADDAFYEVENSDEQIRAYVFDVVRALVARMNLDDLFEQKGEVVKDVVEEVGKGIGEYGYRIENIVMVEI

SEQ ID NO: 64779 - protein, 335 aa, Gossypium hirsutum
  unsure (1)..(335): unsure at all Xaa locations
  Clone ID: GOSHI-09MAY01-C4392_1.pep
GKAKLVNDDGVGAEKGILEVKPSPXKGLKSTLIDWLEQLIVKVMYDSSQPQHYLSGNFGPVPTETPPTHNLPVKGHLPECLNGEFVRVGPNPKFPPVAAYHWFDGDGMIHGLRIKDGKATYVSRFVKTSRLKQEEFFGGSKFMKVGDLKGLFGLLMVNIYKLREKAKVLDLSYGNGTANTNLIYHHGKLLALQEADKPYVLKVLEDGDLQTLGMIDYDKRLAHSFTAHPKVDPVTGEMFTFGYGHEGPPYITYRVISKDGFMHDPVPITISEPIMMHDFAITENYAIFLDLPLYFRPKDMVKDKKLIYSFDASKKARFGVLPRYAKDDLLIRWFE

SEQ ID NO: 64780 - protein, 227 aa, Gossypium hirsutum
  Clone ID: GOSHI-09MAY01-C104299_1.pep
STRSPGNQFNDPNSSDMKLTLSSKDGISVLMNVHRQILVAHSRFFAVKLSDRSQETNGPTGPYSVEIADCDDVEVYIEVLRLMHGTDLRKMLLREDVSKVLGILKVSAAIGFDAGVLSCLEYLEAAPWTEDEEEKVASLLAELRLENVGAGEVLKRVSIEASNGIDGGDNEEVLLKLLHVVLQGKDEKARREMKELVLKMLRENPFQNDLREESLYSACDGCLELLN

SEQ ID NO: 64781 - protein, 87 aa, Gossypium hirsutum
  Clone ID: GOSHI-09MAY01-C4272_3.pep
PRVRDDIFIKLGSEKDKRKDADKEERVKKSVSINEFLKPAEGERYYGPGRGRGRGRGPKGGYGGNTASSVLAPSIEDPGHFPSLGGK

SEQ ID NO: 64782 - protein, 263 aa, Gossypium hirsutum
  unsure (1)..(263): unsure at all Xaa locations
  Clone ID: GOSHI-09MAY01-C4272_2.pep
MATTNPFDLLDDDTEDPNLVIAAAEQQKLEKPKKAPASAPAQAQPAKPAKFPSKPSPPAQAVREARNDPGRGGRGAGRGGGRGYGGRGFNRDSNVNDNSNAFLGGYRPSEEGEERKQTERRGGYGGPRGSFRGGRRGGFNDGESGEGERPRRMYDRRSGTGRGNEFKRDGSGRGNWGSPTDGIAPEAEENVPENEKNVGIEKQSGEEDAMDAGKENAANEAEEKEPENKEMTLEEYEKIGEEKRKXALLALKTGERKGGTQRG

SEQ ID NO: 64783 - protein, 355 aa, Gossypium hirsutum
  Clone ID: GOSHI-09MAY01-C4272_1.pep
MATKNPFDLLDDDTEDPSLLIAAVEQQKLEKPKKAPASTPAAAQPAKSAKLPTKPLPPSQAVREAKNELGRGGGRGTGRGRGRGGSGFNRDSRVSDNSNGYSGGYRPSEEGDGKQYERRGGYDGPRGSFRGGRRGGFNNGDSGEGERPRRQYDRHSGTGRGNEFKRDGSGRGNWGSSTDEIAPETEENVPENEKKVGTEKQSGEEDAMDAGKENAANEAEEKEPENKEMTLEEYEKIVEEKRKALLALKTEERKVDTKEFESMQQLSSKKSNDDIFIKLGSEKDKRKDADKEEKVKKSVSINEFLKPAEGERYYGPGRGRGRGRGPRGGYGGNTASNVQAPSIADPGHFPSLGGK

SEQ ID NO: 64784 - protein, 125 aa, Gossypium hirsutum
  Clone ID: LIB3585-052-P1-K1-A10.pep
HASAHASAHASGKALLALGSEERKVDTKEFESMQQLSSKKSNDDIFIKLGSEKDKRKDADKEERVKKSVSINEFLKPAEGERYYGPGRGRGRGRGPRGGYGGNTASSVLAPSIEDPGHFPSLGGK

SEQ ID NO: 64785 - protein, 81 aa, Gossypium hirsutum
  Clone ID: LIB3120-054-P1-K1-A3.pep
PRVTTQTERRGGYGGPRGSFRGGHRGGFNDGESGEGERPRRMYDRRSGTGRGNEFKPDGSGCGNWGSPTYGIASEAQKNVP

SEQ ID NO: 64786 - protein, 77 aa, Gossypium hirsutum
  Clone ID: uC-gsronu33b112f12b1.pep
KNFRGPPEGPFPREALGGSPGLFKSAAPNFFFGIKIYMVITKFLYFFHKFSLVHSESAQILIWFFCFHYFFYTRNRQ

SEQ ID NO: 64787 - protein, 189 aa, Gossypium hirsutum
  Clone ID: GOSHI-09MAY01-C4232_1.pep
FLNISENSFNVALPSNIWGAPSLQIFSISSAKLTGKIPDFIGCKNVYKIELQGNSLNRSIPWDIDHCEKLLSLNLSRNLFTGIIPWEISTLPSIIAVDLSDNMLTGTIPSNFENCSTLENFNVSYKLLTGPIPSSGPIFPNLQLSSFFGNDGLCGRILPNPFPFTLIGLQLWTSISNRTGFKERERERE

SEQ ID NO: 64788 - protein, 65 aa, Gossypium hirsutum
  Clone ID: GOSHI-09MAY01-C4222_4.pep
FDELFQPGWAMDHFIYEGELLKLKLDNYSGAGFASKSKYLFGKVTMQIKLVEGDSAGTVTAYYMS

SEQ ID NO: 64789 - protein, 170 aa, Gossypium hirsutum
  Clone ID: GOSHI-09MAY01-C4222_2.pep
MAVSFKMCASFGLFVGLMMLGLVSSAKFDELFQPGWAMDHFIYEGELLKLKLDNYSGAGFASKSKYLFGKVTMQIKLVEGDSAGTVTAYYMSSDGPNHNEFDFEFLGNTTGEPYLVQTNVYVNGVGNREQRMNLWFDPTKDFHSYSILWNQRQVVFLVDETPIRVHTNME

SEQ ID NO: 64790 - protein, 294 aa, Gossypium hirsutum
  Clone ID: GOSHI-09MAY01-C4222_1.pep
MAVLFKMPVVLGFFVGLMMLGLVSSAEFHELFQPGWANDHFIYEGELLKLKLDNFSGAGFASKSRYLFGKVSMQIKLVEGDSAGTVTAYYMSSEGPYHNEFDFEFLGNTTGEPYLLQTNVYVNGVGNREQRMNLWFDPTKDFHSYTLLWNQRQVVFLVDETPIRVHTNMEHKGIPFPKDQAMGVYSSIWNADDWATQGGLVKTDWSHAPFVASYKGFEIDACECPVSVTADEIAKKCSSSAEKRFWWDEPTMSELSLHQSHQLVWVRANHLVYDYCTDTARFPIKPVECEHHRH

SEQ ID NO: 64791 - protein, 127 aa, Gossypium hirsutum
  Clone ID: LIB3829-004-Q6-N6-H4.pep
NMEHKGIPFPKDQAMGVYSSIWNADDWATQGGLVKTDWSHAPFIASYKGFEIDACECPVSVAANEIADKCRSSGEKRFWWDEPTMSELSVHQSHQLVWVRANHLVYDYCTDIARFPVMPVECEHHHH

SEQ ID NO: 64792 - protein, 93 aa, Gossypium hirsutum
  Clone ID: LIB3583-040-P1-K1-F4.pep
MTVLFKMPVVLGFFVGLMMLGLVSSAEFHELFQPGWANDHFIYEGELLKLKLDNFSGAGFASKSRYLFGKVSMQIKLVEGDSAGTVTAYYVSV

SEQ ID NO: 64793 - protein, 174 aa, Gossypium hirsutum
  unsure (1)..(174): unsure at all Xaa locations
  Clone ID: GOSHI-09MAY01-C5952_1.pep
MSGNSEAKSLFDELRFDKGDFFDLGHPLLNWSAQSFVKTAGIGALQAIAREACHIAFEGTGPIKSTDITGVKNKKQGFPGLRGETSRNSLEAMVXMKHTGKESLQWGLAAGLYSGLTFGLKEARGSHDWTNSAVAGAITGMAVALTCDNTTHEQVLHCAISGAALSTAANLLDF

SEQ ID NO: 64794 - protein, 93 aa, Gossypium hirsutum
  unsure (1)..(93): unsure at all Xaa locations
  Clone ID: LIB3583-059-P1-K1-F3.pep
VVTPRLWCDELRFDKGDIFDLXHPLLNWTAQSFVKTAGIGALQAIAREACHIAFEGTGPIKSTDITGVKNKKQGFPVLRGMHQCMPFMNPFSF

SEQ ID NO: 64795 - protein, 100 aa, Gossypium hirsutum
  Clone ID: LIB3583-037-P1-K1-C4.pep
MSGNSEAKSLFDELRFDKGDFFDLGHPLLNWSAQSFVKTAGIGALQAIAREACHIAFEGTGPIKSTDITGVKNKKQGFPGLRGETSRNSLEAMVSPFTST

SEQ ID NO: 64796 - protein, 195 aa, Gossypium hirsutum
  unsure (1)..(195): unsure at all Xaa locations
  Clone ID: AI729804.1.pep
MGFRFQNLNPMFRSYLSRLSSSPRNLHPNPIIIQSLNPHFQIYPRVFSDNPIYNIPRRWHLGHSHGHHDHHHNLTKEGEKIFRLGLGADIGLXTIKALTGYLSGSTAIIADAAHSISDVVLSGIALWSFKAANAPKDKEHPYGHGKFETLGALGISCMLLATAIGIAWHALKLLIGLLSTAPEXVNGHSLVHHHH

SEQ ID NO: 64797 - protein, 145 aa, Gossypium hirsutum
  Clone ID: LIB3583-059-P1-K1-H8.pep
MGFRFQNLNPMFRSYLCRLSSSPRNLHPNPIIIQSLNPHFQIYPRVFSDNPIYNIPRRWHLGHSHGHHDHHHNLTKEGEKIFRLGLGADIGLATSKALTGYLSGSTAIIADAAHSISDVVLSGIALWSFKAANAPKDKEHPYGYL

SEQ ID NO: 64798 - protein, 100 aa, Gossypium hirsutum
  Clone ID: GOSHI-09MAY01-C5962_3.pep
MLVLFETPAGFALFKVLDEGKLNKVEDLSKEFLAADSARKVVSLQAFSKFENTAEALEAATKLLESTPSKGLRKFLRAHCDGETLGVADSKLGNAIKEKL

SEQ ID NO: 64799 - protein, 392 aa, Gossypium hirsutum
  Clone ID: GOSHI-09MAY01-C5962_1.pep
MLVLFEIPAGFALFKVLDEGKLNNVVVLSKEFLAADAAGKVVSLQAFSKFENTAEALEAATKLLESTPSKGLRKFLRAHCDGETLGVADSKLGNAIKEKLKIDCVHNNAVMELLRGVRTQLTQLISGLGAQDLAPMSLGLSHSLSRYKLKFSADKVDTMIVQAIGLLDDLDKELNTYAMRVREWYGWHFPELTKIIQDNIMYAKAVKLMGDRANAAKLDFSEVLPEEFETELKEAAVISMGTEISDLDLTNIKDLCDQVLNLSEYRAQLYDYLKSRMNTVAPNLTALVGELVGARLIAHGGSLINLAKQPGSTVQILGAEKALFRALKTKHSTPKYGLIYHASLVGQAAPKHKGKISRSLAAKAALAIRCDALGDDQDNSMGLENRAKLEAR

SEQ ID NO: 64800 - protein, 145 aa, Gossypium hirsutum
  unsure (1)..(145): unsure at all Xaa locations
  Clone ID: LIB3543-058-Q6-K6-E4.pep
MLVLFEIPAGFALFKVLDEGKLNNVVDLSKEFLAADSARKVVSLKAFSKFENTAEALEAATKLLESTPSKGLRKFLRAHCDGETLGVADSKLGNAIKEKLKIDCVHNTYVMELLRGVRTQLTELIXXLGAQDLAPMELGLSHSLS

SEQ ID NO: 64801 - protein, 237 aa, Gossypium hirsutum
  Clone ID: GOSHI-09MAY01-C5932_1.pep
MSSQIFRSASRAARSLLSASKASRFYSEGRAVAAAAAVSLGGKVPLLASAYGSTASANASRAWLSGVFALPVAAYMLQEQEVHAAEMERTFIAIKPDGVQRGLISEIISRFERKGFKLVAIKLVVPSKEFAQKHYDDLKERPFFNGLCEFLSSGPVLAMVWEGEGVIKYGRKLIGATDPQKSEPGTIRGDLAVVVGRNIIHGSDGPETAKHEINLWFKPQELVNYTSNAEKWVYGNN

SEQ ID NO: 64802 - protein, 322 aa, Gossypium hirsutum
  Clone ID: GOSHI-09MAY01-C5882_1.pep
PRVRPASDHGKPFLAMILMQSSYAVMSIIAKYALNQGMSPHVLVAYRLAVAAVIITPFAIVLERKTRPKMTFNIFIKIMLISLLEPVLDHNFFYTGMKYTTATFTTAMCNILPALTFALACIVKLERVEIGKVRSQAKVAGTGVAVGGAMIMTLIKGPILELPWTKGRNHYLGQHGASGAHKQDMVMGALLLLAGCCCWACFVISQARILRSYPAKLSLTALICIMGTFEGTILAFAVEWRNPSVWHIGFDSKLIASLYGGLVTAFALYAMGSVMKRRGPVFVSAFNPLSMVIVAILGSFFLAEDMFLGRGLVINSFFNFWY

SEQ ID NO: 64803 - protein, 254 aa, Gossypium hirsutum
  unsure (1)..(254): unsure at all Xaa locations
  Clone ID: GOSHI-09MAY01-C5842_1.pep
MPCEFLSSSSSSLVXKPFFSLLSQASPSPSXPPSLPFPQTRRSISLHTRPMNILKNLGFGANNKPAPSMEGSSIAQGPDDDVPAPGQQFAQFGAGCFWGVELAFQRVPGVTKTEVGYSQGFMHNPSYEDVCSGSTNHNEVVRVQYDPKECSFDTLLDVFWARHDPTTLNRQGNDVGTQYRSGIYYYTPEQENAARESMEKQQKLLNRKIVTELLPAKKFYRAEKYHQQYLAKGGRFGFKQSAEKGCNDPIRCYG

SEQ ID NO: 64804 - protein, 109 aa, Gossypium hirsutum
  unsure (1)..(109): unsure at all Xaa locations
  Clone ID: LIB3583-030-Q6-K1-C10.pep
DPKECSFDTLLDVFWARHDPTTLNRQGNDVGTQYRSGIYFYTPEQEMAARESMEKQQKLLNRKIVSEILPAKKFYRAEEYHQQYLAKGGRFGFKQSAEKGCNDPIRCYX

SEQ ID NO: 64805 - protein, 132 aa, Gossypium hirsutum
  Clone ID: LIB3165-037-P1-K1-F1.pep
PRVRFPSNLLIHFPIHTRRMEGSSIAQGPDDDVPAPGQQFAQFGAGCFWGVELAFQRVPGVTKTEVGYSQGFMHNPSYEDVCTGSTNHNEVVRVQYDPKECSFDTLLDVFWARHDPTTLNRQGNDVGTQYRS

SEQ ID NO: 64806 - protein, 246 aa, Gossypium hirsutum
  Clone ID: GOSHI-09MAY01-C5862_1.pep
PPSCKIWFICGGQLVHRRPLVENGQSNLSSSAAASADASGSNKVASSSDPSVSGTLGESPDWLEFNEGSGDDKVFENLEQALFTAEKSNQEAFEKLDRLLKAEKDALNAVVSQANEMKSSYIGELRRRKEIEAMLRKQNEELEQVTQQRDQARKIARTHKLLLESRGAKSDHVKVLEAKLSSAMEQLQICQRERDDLRTKLERTCNSIEDHSTKQEEGSSNVHMQQFFSEFSVAEIHDATEDFDPS

SEQ ID NO: 64807 - protein, 145 aa, Gossypium hirsutum
  Clone ID: LIB3583-030-Q6-K1-D9.pep
FIWIMDDYLLICGQKSVEAAKLNIEMDDAGKGIVELIRDQGIKKLVMGAAANKHFSEGMTDLKSEKAQYVELHAPPSCKIWFICGGQLVHRKSLVENGQSNLSSSASSSSYWTVSNKLASSSDSSVSETLGESPDWLEFNESGDE

SEQ ID NO: 64808 - protein, 71 aa, Gossypium hirsutum
  Clone ID: LIB3493-030-P1-M1-B11.pep
PMIYCRSLVENGQSNLSSSASSSSYWTVSNKVASSSDSSVSETLGESPDWLEFNVLFDFREDLYYLSMPEI

SEQ ID NO: 64809 - protein, 182 aa, Gossypium hirsutum
  unsure (1)..(182): unsure at all Xaa locations
  Clone ID: GOSHI-09MAY01-C5812_1.pep
RTRGLESALSNCKNMHTLSGLWXDAKGIYLPALYPVCTHLTFLNLSYAALRSDELAKLLAHCPRLKRLWVLDTVEDKGLEAVGMNCPLLEELRVFPADLFDEEIIHGVTEAGFVAVSLGCPRLHYVLYFCCQMTNAAVATIVQNCPDFTHFRLCIMNPGQPDHITNEPMDEAFGAVVKTCTK

SEQ ID NO: 64810 - protein, 133 aa, Gossypium hirsutum
  Clone ID: GOSHI-09MAY01-C5592_1.pep
MLSMRNGLSLYPMCLPGVPQPMQMPPTGLGYDEGHGFFSPNIGAGTFSSNEERSMNTPFNPSNPCTISNLPVAAPSVANVSNLEASIGFESPAGAHYGSFTHSTSSKEICKEGRSQIELEMNHGGNSSSSGVS

SEQ ID NO: 64811 - protein, 104 aa, Gossypium hirsutum
  unsure (1)..(104): unsure at all Xaa locations
  Clone ID: GOSHI-09MAY01-C5542_6.pep
STYSSSNTPSISTRFSHSGDGLLFASLXLNGTIDPTSLHGSCPVIKGEKWVATKWIRDQDRGDCLFCVSVKKIAHYRCLFLLLPPHHINSVLESIILYEFTPIF

SEQ ID NO: 64812 - protein, 94 aa, Gossypium hirsutum
  unsure (1)..(94): unsure at all Xaa locations
  Clone ID: GOSHI-09MAY01-C5542_4.pep
LSSEYGPQSSRGVXLNLVGLSHAHAAGETMFPFENDMRVKGYDYRQCVGLKIKPRKGDGLLFYSLFLNGTIDPTSLHGSCPGIIGEKWVATPWA

SEQ ID NO: 64813 - protein, 287 aa, Gossypium hirsutum
  Clone ID: GOSHI-09MAY01-C5542_3.pep
MKGKSKSSKRNLGLATTLFLCSLAFLAGLFTSTFFSQDVPIIKPKLRKLEVVHVEGDKSRGLMPIGETGESSIDSIPFQVLSWKPRAYYFPDFATAEQCEHIIGMAKLNLKPSTLALRKGETEESTKGTRTSSGTFISASEDESRTLDLIEKKIAKVTSIPQSHGEAFNVLRYEIGQKYDSHYDAFNPSEYGPQSSQRVASFLLYLSDVEEGGETMFPFENGMSVEGYDYRQCVGLKVKPRRGDGLLFYSLFLNRTIDPTSLHGSCPVIKGEKWVATKWIRDQQQFD

SEQ ID NO: 64814 - protein, 97 aa, Gossypium hirsutum
  Clone ID: GOSHI-09MAY01-C5542_2.pep
MATLAAVAARRAATLARTPLPSQPASLIPRRGLAGAADHHGPPKVNFWQDPMSPSKWKEEHFVIVSLTGWGLLFFSGYKFFTKGKGKKEENAVEATH

SEQ ID NO: 64815 - protein, 97 aa, Gossypium hirsutum
  Clone ID: GOSHI-09MAY01-C5542_1.pep
MATLLAATGRRATTLSRSPALSQAASLIPRRGLAGAADHHGPPKVNCWQDPMNPSKWKEEHFVIVSLSGWGLLFFSGYKFFTKGKGKKEENMVETTH

SEQ ID NO: 64816 - protein, 87 aa, Gossypium hirsutum
  Clone ID: LIB3147-059-Q1-K1-C1.pep
PTRPPTRPRRQKAAIKMATLLAAAGRRATTLSRSPALSQAASLIPRRGLAGAAGILRFPFFYCYNLQVFVDSNICKVCLNIFESRLP

SEQ ID NO: 64817 - protein, 147 aa, Gossypium hirsutum
  unsure (1)..(147): unsure at all Xaa locations
  Clone ID: GOSHI-09MAY01-C5532_1.pep
RSTPRNDFCQIAAKNGILLRLINTLYRXSEATRLAAKSVGGRFSSDGSARQQRSGPLDSSHPLFSQNEIPLSPTDHLLDRHGMTEHSFPTVTQESSRASTSHSQRSDINLPDPRCLSIDGDRPRSSNGASDISVGSKLAYSTFIEKG

SEQ ID NO: 64818 - protein, 138 aa, Gossypium hirsutum
  Clone ID: GOSHI-09MAY01-C5452_5.pep
MSGMEPLHRMFAGAGGALGHPPPDSPTLDSSEQVYISSLALLKMLKHGRAGVPMEVMGLMLGEFVDEYTVPVVDVFAMPQSATGVSVEAVDHVFQTNMLDMLKHTGRPEMVVGCYHSHPGFGCWLSGVDINTQQSFEA

SEQ ID NO: 64819 - protein, 129 aa, Gossypium hirsutum
  Clone ID: GOSHI-09MAY01-C5452_3.pep
MSGMERLHRMFAGAGGALGHPPPDSPTLDSSEQVYISSLALLKMLKHGRAGVPMEVMGLMLGEFVDEYTVRVVDVFAMPQSGTGVSVEAVDHVFQTNMLDMLKQTGGPHMVGRWYHSHSIFADGITGVS

SEQ ID NO: 64820 - protein, 155 aa, Gossypium hirsutum
  unsure (1)..(155): unsure at all Xaa locations
  Clone ID: GOSHI-09MAY01-C5452_2.pep
VIDAFRLXQPTNQMLGLRPPRATSNLGHLNKPSIQALIHGLNRHYYSIXAINYRKNELEEKMLLNLHKKKWTDGLTLRRFDTHSKTNEQTIQEMLNLAIKYNKAVQEEGELPPEKLAIANVGRQDAKKHLEEHVSNLMSSNIVQTLGTMLDTVVF

SEQ ID NO: 64821 - protein, 241 aa, Gossypium hirsutum
  unsure (1)..(241): unsure at all Xaa locations
  Clone ID: GOSHI-09MAY01-C5452_1.pep
MSGLDRLQRMFAGAGGALGHPPPDSPTLDSSEQVYISSLALLKMLKHGRAGVPMEVMGLMLGEFVDEYTVRVVDVFAMPQSGTGVSVEAVDHVFQTNMLDMLKQTGRPEMVVGWYHSHPGFGCWLSGVDINTQQSFEALNQRAVAVVVDPIQSVKGKVVIDAFRLINPQTMMLGQEPRQTTSNLGHLNKPSIQALIHGLNRHYYSIXAINYRKNELEEKMLLNLLKKXWTDGLTPRRLDLI

SEQ ID NO: 64822 - protein, 140 aa, Gossypium hirsutum
  unsure (1)..(140): unsure at all Xaa locations
  Clone ID: AI055012.1.pep
MSGLDRLQKMFAGAGGALGHPPPDSPTLDSSEQVYISSLALLKMLKHGRAGVPXKYGXXCGEVVDETLCVXXCLCNAQMDPGKCELVIMFSNNMLXMLNNWKPKVVGWYHYIKIRCGSGVDITTXKLSFDQGTWWGTHRM

SEQ ID NO: 64823 - protein, 61 aa, Gossypium hirsutum
  Clone ID: LIB3135-036-Q1-K1-D1.pep
ATRWCSKTLLAPVYSFFIFRNYHSLLVKNCHCIVKFERDYHVVSLISLISSLMCKWDCEDV

SEQ ID NO: 64824 - protein, 77 aa, Gossypium hirsutum
  Clone ID: uC-gsronu33B100g09b1.pep
QQEHKHNKEGQRKEENQLQKNQKTADTAAGETTHHQRRRTSCAIVPYRTSSIGVFGNFSLVARQVRISLIFFRTRGR

SEQ ID NO: 64825 - protein, 436 aa, Gossypium hirsutum
  Clone ID: GOSHI-09MAY01-C5442_1.pep
MADGHETDKNIEIWKIKKLIKALESARGNGTSMISLIMPPRDQISRVTKMLGDEFGTASNIKSRVNRQSVLAAITSAQQRLKLYNKVPPNGLVLYTGTIVTEDGKEKKVTIDFEPFKPINASLYLCDNKFHTEALNELLESDDKFGFIVMDGNGTLFGTLSGNTREVLHKFTVDLPKKHGRGGQSALRFARLRMEKRHNYVRKTAELATQFFINPATSQPNVAGLILAGSADFKTELSQSDMFDPRLQAKILNVVDVSYGGENGFNQAIELSAEILSNVKFIQEKRLIGKYFEEISQDTGKYVFGIDDTLKALEMGAVETLIVWENLEINRYVLKHSATGEIIIKHLNKEQEADQSNFRDPETSAELEVQEKMPLLEWFANEYKRFGCSLEFVTNKSQEGSQFCRGFGGIGGILRYQLDIRSFDELSDGEVYEDSD

SEQ ID NO: 64826 - protein, 150 aa, Gossypium hirsutum
  unsure (1)..(150): unsure at all Xaa locations
  Clone ID: GOSHI-09MAY01-C5472_1.pep
MVGFGCTXGGESHAGQIFCCVGALALTGSLHYVDKDLFMWCVSNRQVKSXGLNGTPEKLPDVCYSWGVLSSLIMIDRVHWIDKEKLVKFILDCQDVENGGISDRPDDAVDVYHTYFGVAGLSLLNYPGLKAIDPAYALPVDVVNRIFFSG

SEQ ID NO: 64827 - protein, 116 aa, Gossypium hirsutum
  unsure (1)..(116): unsure at all Xaa locations
  Clone ID: GOSHI-09MAY01-C5412_1.pep
MSGRRDGPKLELKLNLSPPRRNPRMEPSPSRSATVSPTSPPSSCVSSEMNHDVDMMMMSSPETTSTATLNGSGXGCPRWLMYVMLSEDEPKCPKCKSTVLLDFLHDTATTTKARKS

SEQ ID NO: 64828 - protein, 119 aa, Gossypium hirsutum
  unsure (1)..(119): unsure at all Xaa locations
  Clone ID: GOSHI-09MAY01-C5402_1.pep
MNNGGAEAAVAPVGGPQPLEWKFSQVFGERTAGEEIQDVDIISAIEFNRTGDHLATGDRGGRVVLFERTDTLDHVGQRRDLEKMDYPINRHPLFRYKTEFQSPXPEFDYLKSLEIGEKN

SEQ ID NO: 64829 - protein, 145 aa, Gossypium hirsutum
  Clone ID: GOSHI-09MAY01-C5742_1.pep
MEDSSSKSFLRKQWDEYKEFWADRFPFTNVYSRYIGREQSLPSWSESDVNEFIASDPVHGPILKTAREAANIALYGSAIGAITTAGFAWKYSKSLHGAGLSFVGGAVFGWTFGQEIANHAYQLYRLDTMAAQAKFMDWWENKCRR

SEQ ID NO: 64830 - protein, 40 aa, Gossypium hirsutum
  Clone ID: LIB3583-029-Q6-K1-B11.pep
TISQRRYQDCRQHCLQEERRLHSQCEQSCHEHYERLLHLH

SEQ ID NO: 64831 - protein, 52 aa, Gossypium hirsutum
  Clone ID: LIB3135-008-Q1-K1-A6.pep
RIWSLLFFPFWKQLDGTSCLHYSALNKFDAVLSLTKTTTDTEPGTSSPTTGT

SEQ ID NO: 64832 - protein, 100 aa, Gossypium hirsutum
  Clone ID: LIB3829-026-Q6-N6-G11.pep
KKLKEAGVIGSTMDALDGAASLVGSGVGMVGTGIGAGVGLVGSGVGAGVGIVGSGLGAVGSGLSKAGKFMGRTFTGHSSKRSGSSTPVNSIHENGGAKPL

SEQ ID NO: 64833 - protein, 89 aa, Gossypium hirsutum
  Clone ID: AI726134.1.pep
RPGVIGSTMDALDGAASLVGSGVGMVGTGIGAGVGAGVGIVGSGLGAVGSGLSKAGKFMGRTFTGHSSKRSGSSTPVNSIHENGGAKPL

SEQ ID NO: 64834 - protein, 178 aa, Gossypium hirsutum
  unsure (1)..(178): unsure at all Xaa locations
  Clone ID: GOSHI-09MAY01-C5672_1.pep
LAVHIWRHVSQARNLKPEDXYTVFTXVADCRKRVDPPMPDSYFGNLIQAIFTATAAGLLLENPPSFGASVIQKAIESHDAKAIDERNKAWEAAPKIFQFKDAGVNCVAVGSSPRFKVYEVDFGWGKPVGVRSGSNNRFDGMVYLYQGKSGGRSIDVEITMEAQAMEKLEKDKEFLMEV

SEQ ID NO: 64835 - protein, 59 aa, Gossypium hirsutum
  Clone ID: GOSHI-09MAY01-C5662_1.pep
FAELDWPKKAQPTSAFTPVIDTRRVPLHLSYLSILCFAVASLVANGAMVACGSTALCWR

SEQ ID NO: 64836 - protein, 81 aa, Gossypium hirsutum
  unsure (1)..(81): unsure at all Xaa locations
  Clone ID: LIB3583-028-Q6-K1-B6.pep
XIPPTESSAPQAPLPICSKEAPQSYNKIRNLISPPHPPMNILQELQKGRNYLQLLDNPEPKISTLILSPFLFPPMHHCKSS

SEQ ID NO: 64837 - protein, 72 aa, Gossypium hirsutum
  Clone ID: LIB3166-010-P1-K1-B4.pep
GGLFYFFILLLFFFSFFVLICYVLCFFFIFFFMIRALGCIFISFFLSIFYHCFFFFCIYFLLISSFSFTVIS

SEQ ID NO: 64838 - protein, 185 aa, Gossypium hirsutum
  Clone ID: GOSHI-09MAY01-C5192_3.pep
SRVRPRVRVNGIKPTVLIGTSGVGRTFTKEVVEAMAALNEKPIIFSLSNPTSQSECTAEDAYTWSQGRAIFASGSPFDPVEYKANNAYIFPGLGLGLIMSGAIRVHDDMLLAASEALAAQVTQENFDKGLIYPPFRNIRQISAHIAASVAAKAYELGLATRQPRPKDLVKYAESCMYNPAYRSYR

SEQ ID NO: 64839 - protein, 532 aa, Gossypium hirsutum
  Clone ID: GOSHI-09MAY01-C5192_2.pep
SRHAALPFTEKERDAHYLRGLLPPTVIAQDLQVKKMMCSIRQYQVPLQKYMAMMDLQESNERLFYKLLIDNVEELLPVVYTPTVGEACQKYGSIFRRPQGLFISLKEKGKIHEVLRNWPQRDIQVIVVTDGERILGLGDLGCQGMGIPIGKLSLYTALGGVRPSACLPVTIDVGTNNEQLLNDEFYIGLRRRRATGLEYAELMHEFMTAVKQNYGEKVLIQFEDFANHNAFDLLAKYGTTHLVFNDDIQGTASVVLAGLVAALKVVGGTLADHRFLFLGAGEAGTGIAELIALEISKQTNMPLEEARKKISLVDSKGLIVKSRIDSLQHFKKPWAHDHEPIKKLVDAVNGIKPTVLIGTSGVGRTFTKEVVEAMAALNEKPIIFSLSNPTSQSECTAEDAYTWSQGRAIFASGSPFDPVEYKGRVFVPGQANNAYIFPGLGLGLIMSGAIRVHDDMLLAASEALAAQVTQENFDKGLIYPPFRNIRKISAHIAASVAAKAYELGLATRQPQPKDLVKYAEHCMYNPAYQSYR

SEQ ID NO: 64840 - protein, 299 aa, Gossypium hirsutum
  Clone ID: GOSHI-09MAY01-C5192_1.pep
MAEEKKAQSAGVWPTVKPFVNGGASGMLATCVIQPIDMVKVRIQLGQGSAATVTKNMLREEGVGAFYKGLSAGLLRQATYTTARLGSFKMLTNKAIEANDGKPLPLYQKALCGLTAGAIGACFGSPADLALIRMQADATLPVAQRRNYTNAFHALYRIVADEGVLALWKGAGPTVFRAMALNMGMLASYDQSVEFCKDSLGLGEAATVLGASTVSGFFAAACSLPFDYVKTQIQKMQPDASGKYPYSGSLDCAMKTLKAGGPFKFYTGFPVYCVRIAPHVMMTWIFLNQIQKAEKKIGL

SEQ ID NO: 64841 - protein, 157 aa, Gossypium hirsutum
  unsure (1)..(157): unsure at all Xaa locations
  Clone ID: LIB3828-023-Q6-K6-A2.pep
GGGCAQNVGEACQKSGAWXRPQGLFISLKEXGKIDEFLFFFFQKDIQXLGGGDGERILGLGYLGGGGMAIPMGKLSLYTALGGVCPSACLPVTIDVGTNNEQLLNDEFYIGLRRRRATXLEFAXLMXEFMTAGKQNFGEKVLIQFEDFAXHNAFDLL

SEQ ID NO: 64842 - protein, 56 aa, Gossypium hirsutum
  Clone ID: LIB3149-016-Q1-K1-E9.pep
IRPKSIARQEMRRNGLGRGVCFQKTSFNTTLPVASIGRVVHAALRILHKILRPRLA

SEQ ID NO: 64843 - protein, 103 aa, Gossypium hirsutum
  Clone ID: LIB3828-030-Q6-N6-B7.pep
ACLNFVNGFLIKKNFFPSKKKKKKKGGPPFFFFFWLGTGVGPHFFLIGSLSNQILPLGCKGFSYLPLKYLIKKIKHHCLERYLKICMISPNQQKSRILFDAIN

SEQ ID NO: 64844 - protein, 96 aa, Gossypium hirsutum
  Clone ID: LIB3166-024-P1-K1-G2.pep
MAEEKKAQSAGVWPTVKPFVNGGASGMLATCVIQPIDMIKVRIQLGQGSAATVTKNMLREEGVGAFYKGLSAGLLRQATYTTARLGSFKMLTNKAI

SEQ ID NO: 64845 - protein, 110 aa, Gossypium hirsutum
  unsure (1)..(110): unsure at all Xaa locations
  Clone ID: LIB3149-031-Q1-K1-C2.pep
AALKVVGGTLADHRFLFLGAGXAGTGIAELIALEISKQTNMPLEEARKKISLVDSKGLIVKSRIDSLQHFKKPWAHDHEPIKKLVDAVNGIKPTVLIGTSGVGRTFTKEV

SEQ ID NO: 64846 - protein, 118 aa, Gossypium hirsutum
  unsure (1)..(118): unsure at all Xaa locations
  Clone ID: LIB3149-044-Q1-K1-A2.pep
QEYSXLIFSPFNAVKHNCGWGVFIRVGESSNHNAFDLLAKYGTTHLGFNDDIQGTASVVLARLAAALKIICGTFADHKILIPCAXKACTCISKLIALEISKQTNMPLXEARKKISLVD

SEQ ID NO: 64847 - protein, 130 aa, Gossypium hirsutum
  Clone ID: LIB3584-034-P1-K1-E12.pep
DLAKVLLAACREELKGVSLKWSPGSAMVVVMASKGYPGSYEKETVIRNLEEAECVAPAVKVFHAGTAFDSDGNFIATGGRVLGITAKGRDLEEARDKAYLAVEEINWPGGFYRQDIGWRAFPQKQFSRNA

SEQ ID NO: 64848 - protein, 87 aa, Gossypium hirsutum
  unsure (1)..(87): unsure at all Xaa locations
  Clone ID: LIB3148-008-Q1-K1-G10.pep
APAVKVFHALTGIXANGNFVVFGGPFFGFHLKEKIFKKXKDKTYLSVEEINWPGGFYRQDIVWRAFSQKQFSRNAYVNIKILRTTFD

SEQ ID NO: 64849 - protein, 424 aa, Gossypium hirsutum
  unsure (1)..(424): unsure at all Xaa locations
  Clone ID: GOSHI-09MAY01-C5152_1.pep
MEERHILFGKYEMGRLLGKGTFAKVYYAKELKSGESVAIKVINKAEVKKEGMMEQIKREISVTRLVRHPNVVELKEVMATKTKIFFVMEYVRGGELFAKVFKGKLREEAARKYFQQLISALDFCHSRGVSHRDLKPENLLLDENEDLKISDFGLSALPEQLRNDGLLXTQCGTPAYVAPEVLRNKGYDGSKADIWSCGVILYVLLAGFLPFQDENIMKMYRKVFKAEFEFPLWFSTHASRLISKLLVADPERRIAIPAIMRVPWFRKGLRRPLAFSIEEPISDNTEDDDSVSKTTKPSSPKFFNAFEFISSMSSGFDLSSLFENKRKPRTMFTSRCSPTTIMAKIEVVVKGLNFRVGKVKDFKMKLQGSSEGRKGKLLVTAEVSEVAPEVAIVEFSKSSGDTLEYAQFCEESVRPALKDIVWTW

SEQ ID NO: 64850 - protein, 153 aa, Gossypium hirsutum
  unsure (1)..(153): unsure at all Xaa locations
  Clone ID: GOSHI-09MAY01-C5142_2.pep
NFWFKRLGSRRRWNLQLPTGLVLVPRGTDDSVVVGPHIRGRRLRASSAGDEEVDLLLPGTARLQIQLGVNMPARAELIPGKEENMFHEAYDVVLYLGMIDILQEYNMSKKIEHAYKSLQFDSVSISAVDPTFSSQRFLEFIXKKVFPQNSIKG

SEQ ID NO: 64851 - protein, 283 aa, Gossypium hirsutum
  unsure (1)..(283): unsure at all Xaa locations
  Clone ID: GOSHI-09MAY01-C5142_1.pep
PTRPLSSPGKSGSIFFLSQDDRWVIKTLRKSEVKVLLRMLPNYHHHVRSYENTLITKFFGLHRIKPSSGQKFRFVVMGNMFCTELRIHRRFDLKGSSLGRSADNIEIDENTTLKDLDLNYCFYFPPARREALLRQIETDSKFLESQHVMDYSLLLGVHYRAPQHLRSHMSYNRVDGLRSVAEEEEDGISNYPQGLVLVPRGTDDSVVVGPHIRGRRLRASSAGDEEVDLLLPGTARLQIQLGVNMPTRAELIPGKEENMFHEAYDVXLYLGMIDILQEYNMSK

SEQ ID NO: 64852 - protein, 137 aa, Gossypium hirsutum
  unsure (1)..(137): unsure at all Xaa locations
  Clone ID: LIB3584-034-P1-K1-A10.pep
SEPPRRTRTPTPLSSSSYNFRIPQLSQHDGVDFKTLLXSQANALLRMLPNYHHHLRSYNNTLITKFFGLHRIKPSIGQKFLFLVIINIFCTELTIHKIFDFKRSSIGPSAHTIXIDENTTLKNIYLNYCIYLKPSKP

SEQ ID NO: 64853 - protein, 209 aa, Gossypium hirsutum
  unsure (1)..(209): unsure at all Xaa locations
  Clone ID: GOSHI-09MAY01-C105159_1.pep
LSRPVTMKNLEXTDVEVLVTESGWPSKGDSKEPYATKDNADTYNSNLIKHVLDRSGTPLHPEITSSVYIYELFNEDSRSPTESRANWGSLYSNSTPEYLLHVSGSGTFLANDTTNQTFRVAMDGIDSKTLQTALDWARGPGRANCSEIQPGESCYQPNNVKNHASCAFDSYYQMEGKASGSCDFKGVAMITTPDPSKCYYIHSIKQHLL

SEQ ID NO: 64854 - protein, 265 aa, Gossypium hirsutum
  Clone ID: GOSHI-09MAY01-C5162_1.pep
SRVRVIDSVQGAEGAIQMGSFYSSFPELSSPNLSGNDRSSSLKISGHSKPSEPQLENCMFSQGAAAPKSPSSSPRLRSGSSTCCSIGVKQHSTSISALCSADGLMVEDPGGALKRARSDAELHSLKQEEPKLLARSQSHKTLGELPPLETQLPGPKTGGQNLRTGGAFRVKATFGEVKIRFSLQPSWGFRDVQQEIAKRFNIEDVSRMCLKYLDDDNEWVLLTCDADLEECRDIYKSSQSHTIKISLHQASHPNLRSSFGSSAPL

SEQ ID NO: 64855 - protein, 119 aa, Gossypium hirsutum
  unsure (1)..(119): unsure at all Xaa locations
  Clone ID: LIB3166-021-P1-K1-E11.pep
MSGLYGIISWPSGKIKRVGHSLRNLQLVMDSVQGAKGAIKIGWFYXGFPDLSXPTLSGNGLSSSLKIRGHSKPSEPQLENCMFSQGAAALKSPSSSCSRSSGSSTXGDTTRAENWCQNL

SEQ ID NO: 64856 - protein, 180 aa, Gossypium hirsutum
  unsure (1)..(180): unsure at all Xaa locations
  Clone ID: GOSHI-09MAY01-C5112_1.pep
MLKGEKMLSYVSVLLYGVGWIVVAGMALLVASQEKRVGVPVLPGLTKSYPITPARLRLVYEDVWLRSSDGIRLHSWFIKLFPECRGPTILFFQENAGXNIAHRLEMVRXIMLQRLQCNDFMLSYRGYGASDGYPFQHGIINDAHAALDXHLLQRTDFDTDXILFFVRSLGDALGXVLTKN

SEQ ID NO: 64857 - protein, 128 aa, Gossypium hirsutum
  Clone ID: GOSHI-09MAY01-C5102_4.pep
MPPKAAKSKEAPAERPILGRFSSHIKIGIVGLPNAGKSTLFNTLRKLSIPAENFPFCTIEPNEARVNVPDERFELLVAFRALGFVRLQIGSKIMHLNLENHNILSKKFLLISKMMYFRALQSSFIICY

SEQ ID NO: 64858 - protein, 195 aa, Gossypium hirsutum
  Clone ID: GOSHI-09MAY01-C5102_3.pep
MPPKAAKSKEAPAERPILGRFSSHLKIGIVGLPNVGKSTLFNTLTKLSIPAENFPFCTIEPNEARVNVPDERFEWLCQLFKPKSEVSAFLEIHDIAGLVRGAHEGQGLGNNFLSHIRAVDGIFHVLRAFEDSDIIHVDDSVDPVRDLVTISAELRLKDIEFMEREDRDIEKSMKRSNDMQLKIEHEMGERVKAWL

SEQ ID NO: 64859 - protein, 406 aa, Gossypium hirsutum
  Clone ID: GOSHI-09MAY01-C5102_2.pep
PTRPRTRGLQSQVFRFRWHSSIKPAERPILGRFSSRLKIGIVGLPNVGKSTLFNTLTKLSIPAENFPFCTIEPNEARVNVPDERFEWLCQLFKPKSEVSAFLEIHDIAGLVRGAHEGQGLGNNFLSHIRAVDGIFHVLRAFEDSDIIHVDDSVDPVRDLETISAELRLKDIEFMERKIEDIEKSMKRSNDKQLKIEHELCERVKAWLADEKDVRLGDWKAADIEILNTFQLLSAKPVVYLVNMTEKDYQRKKNKFLPKIHAWVQEHGGEPIIPFSGVFERNLADMEPADAAKYCEENKVQSALPKIIKTGFSTINLIYFFTAGPDDVKCWQIRRQSKAPQAAGAIHTDFERGFICAEVMKFEDLKELGSESAVKAAGKYRQEGKTYVVQDGDIIFFKFNVSGGGKK

SEQ ID NO: 64860 - protein, 236 aa, Gossypium hirsutum
  Clone ID: GOSHI-09MAY01-C5102_1.pep
RTRGRTRGRTRGRTPQPSLPFHRPPSLSAFLSLVWPLRGEKEREEGKKNTQSLRSACLSILSKMQSSSTNAPDLNSKQQQQPPAQQTRQQQQQHPQWVPNQWMGAMQYPAAAMVMMQQQMMMYPHHHYMAYNNHHYHYQQYQQQQQQQQKQQQGCNSDEVKTIWVGDLVHWMDETYLHGCFSHTGEVSSVKIIRNKQTGQSEGYGFVEFYSRATAEKVLQSYNGSLMPNTEQPFRL

SEQ ID NO: 64861 - protein, 78 aa, Gossypium hirsutum
  unsure (1)..(78): unsure at all Xaa locations
  Clone ID: LIB3829-021-Q6-K6-F12.pep
CWQXRRGARVGETKRAIHTDFERGFICAEVMKFEDLKELGSESAVKASGKYRQEGKTGGGQDGDIIFFKFNVSGGGKK

SEQ ID NO: 64862 - protein, 67 aa, Gossypium hirsutum
  Clone ID: LIB3196-005-P1-M1-D6.pep
ATPSIKNKYLIWACCEEIYEINSRETRFGDLWKSTVTKRNTQHHTYTTQIYISDKTSGHRRISDHET

SEQ ID NO: 64863 - protein, 120 aa, Gossypium hirsutum
  unsure (1)..(120): unsure at all Xaa locations
  Clone ID: LIB3493-019-P1-M1-B3.pep
RNDVFPCTAEQFYNLLLSDDSSFTNEYRAVRKDTNLLMGQWHPADEYDGLVREITFRTICNSPMCPPDTAMTEYQHSILSPDKKKLVFETVQQAHDVPFGSYFQVQXKMGVRPMAKIRHS

SEQ ID NO: 64864 - protein, 91 aa, Gossypium hirsutum
  Clone ID: LIB3120-020-Q1-K1-C12.pep
PLVRFTAGPDEVKCWQIRLLCKAAQAAGAIHTDFDRGFICADVMKLEDLKELGSESAVKAAGKYKHEGKTYVVQDGHIIFFKFNDSGSRKN

SEQ ID NO: 64865 - protein, 68 aa, Gossypium hirsutum
  Clone ID: uC-gsflnu33B055g08b1.pep
LIALPKIIKTGFSAINLIYFFTAGPDEVKCWQIRRQSKAPQAAGAIHTDFERGFICAENSFECSYSTI

SEQ ID NO: 64866 - protein, 64 aa, Gossypium hirsutum
  unsure (1)..(64): unsure at all Xaa locations
  Clone ID: GOSHI-09MAY01-C5132_2.pep
AFLSLGRPEYLQEGDIVSSRFQRRDVYGAWEQSLASEHSDNRPKRAYAINQXRHTFERPVKIYN

SEQ ID NO: 64867 - protein, 376 aa, Gossypium hirsutum
  Clone ID: GOSHI-09MAY01-C5132_1.pep
EEIKFEPSVMCEPIDKKITFRASQLEDGDIVCFQKPLPVESTDQFRYPDVPSFLEYVHNRQVVHFRSLEKPKEDDFCLEMSRLYTYDDVVERVAQQLGLDNPSKIRLTSNNCYSQQPKPQPIKYRGVDHLSDMLFHYNQTSDILYFEVLDIPLPELQGLKTLKVAFHHAAKDEVVIHTIRLPKQSTVGDVINDLKTKVELSHPDAELRLLEVFYHKIYKIFPPSEKIENINDQYWTLRAEEIPEEEKNLGPNDRLIHVYHFTKETAQNQMQILNFGEPFFLVIHEGETLAEIKVRIQKKLQVPDEDFAKWKFAFLSLGRPEYLQDSDIVSSRFQRRDVYGAWEQYLGLEHSDNAPKRAYAANQNRHTFEKPVKIYN

SEQ ID NO: 64868 - protein, 131 aa, Gossypium hirsutum
  Clone ID: LIB3829-016-Q1-K6-E3.pep
MSESLNLKMGIVPQHFHNAKQLSFQFQDQDSSSTQSTGQSYPEAASVGDSNLYGQSSISASSGGNETPGKLVEHHAKLASSMGTQEYVFSPSQVDYSKSIQTHIPLHCAEPYFGGAVTAVCPPPAMSHHPC

SEQ ID NO: 64869 - protein, 47 aa, Gossypium hirsutum
  Clone ID: uC-gsflnu33B073b02b1.pep
TEREITLMKNFLLSLDLCMSLPSLSNKIFTKEKGKGKTLFLFVPQKH

SEQ ID NO: 64870 - protein, 253 aa, Gossypium hirsutum
  unsure (1)..(253): unsure at all Xaa locations
  Clone ID: GOSHI-09MAY01-C5392_1.pep
VNCPLDWDTRMKIALDAARGLAYLHEDSQPCVIHRDFKASNILLENNFHAKAADFGLAXKQAPEGRTNYLSTRVMGTFGYVAPEYAMTGHLLVKSDVYSYGVVLLELLTGRTPVDMSQPSGQENLVTWARPILRDKDRLEELADPRLGGKYPKEDFIRVCTIAAACVAPEASQRPTMGEVVQSLKMVQRVTEYQDSMLTNSNNRPNQRQSSTTFESDETSSMFSSGPFSGLSVFDNDNISRTAVPSEDLHEGR

SEQ ID NO: 64871 - protein, 175 aa, Gossypium hirsutum
  unsure (1)..(175): unsure at all Xaa locations
  Clone ID: GOSHI-09MAY01-C5352_1.pep
DNSLSLAHTLVQIVCQDHKGGXYDITRTLKDYNIQISYGRFYIKQGRKCEIDLFIMQSDGKKIVDPSKQTALSSRLKMELLQPLRVTVVSRGPDTELLVANPVELSSKGRPFVFYDITLALKMLNTCIFSAEIGRHMIGDREWEVYRILLDEGASSSILRRKVEEEVWKRLMGWE

SEQ ID NO: 64872 - protein, 395 aa, Gossypium hirsutum
  unsure (1)..(395): unsure at all Xaa locations
  Clone ID: GOSHI-09MAY01-C5372_1.pep
FASGEFKKVPFTGKKPLGISETGLKVNKGSESKKNENARNMLSERESSSSEDLSSNTNRNESRIRKNEVKNEDLEAHPPVPEFSGHIYADGKRWGYYPGLDSRLSFTDFVDAFSKKGKCDMRVFMIWNSPPWMYSVRHQRGLESLLAQHRVACVLVFSETIELDGFKDSFLKDGYKLAVAMPNLDELLKDTPTHVFASVWLKWRKTKFYTIHYSELVRLAALYKYGGIYLDSDIIVLKPLLTLNNFCGPLKIKGSSLYXEALMAFRKESPFVXGGLNEFYLTYDDTRLRWNGADLLSRVAKRFSNEKNISIKRPELNVQPSAVFFPISSQHIIRYFVSPTTESEKLQQDALFNRILTESVTFHFWNSLTSALIPEPKSLVARLINHPCIHCSELL

SEQ ID NO: 64873 - protein, 106 aa, Gossypium hirsutum
  Clone ID: GOSHI-09MAY01-C5292_3.pep
MATTLQLCRFCIRTGSDNFGGRSGAIPSRRKPISVRCSGDSDSSSSGAGDPDNFDAKAFRRNLTRSKNYNRKGFGHKEETLELMNREYTSDIIKKLKENGNEYTWG

SEQ ID NO: 64874 - protein, 423 aa, Gossypium hirsutum
  unsure (1)..(423): unsure at all Xaa locations
  Clone ID: GOSHI-09MAY01-C5292_1.pep
RALLFPPYSLPKWRFLSLCRFSIRIGSDNFGGRSVALPCRKPISVRCSTDSTSVVVDPDNFDAKSFRRNLTRSKNYNRKGFGRKEETLELMNREYTSDILKKLKENGNEYTWGNVTVKLAEAYAPTRPPTRPVQIAYEARKQFPDERIWITNEIIHNPTVNKRLEEMEVKNIPIEEGKKRFDVVDKKDVVVLPAFGAAVDEMLVLNDKNVQIVDTTCPWVTKVWNVVEKHKKGDFTSIIHGKYAHEETIATASFAGTYIIVKDMTEAMYVCDYILGGELNGSSSTKEAFMEKFKNATSEGFDPDRDLVKVGIANQTTMLKGETEEIGRLVERTMMQKYGVQNVTDHFLSFNTICDATQERQDAMYKLVDEDLDLMLVVGGWNSSNTSHLQEISEDRGIPSYWIDSEKRIXPGNRIAHKLKHGE

SEQ ID NO: 64875 - protein, 127 aa, Gossypium hirsutum
  unsure (1)..(127): unsure at all Xaa locations
  Clone ID: LIB3048-013-Q1-L1-G7.pep
MAISLQLCRFSIRIGSDNFGGRSEALPFRKPISVRCSTDSTSVVVDPDNFDAKSFRHNLTRSKNYNRKGFGRKEETLELMNREYTSDILKKLKENGNEYTWXNVTVKLAEAYGFCXGVERAVQIAYE

SEQ ID NO: 64876 - protein, 106 aa, Gossypium hirsutum
  Clone ID: GOSHI-09MAY01-C5262_1.pep
MRILCDACESAPAIVFCAADEAALCHSCDEKVHMCNKLASRHVRVGLANPSAVPRCDICENAPASFFYCEIDGSSLCLQCDMIVHIGGKKTHGRYLLLRQRVEFPG

SEQ ID NO: 64877 - protein, 148 aa, Gossypium hirsutum
  Clone ID: GOSHI-09MAY01-C5222_3.pep
MVVNRLITSLPPLMATQALSRALLSKPKAPSSFLFPSSRSFSYFSSSSCGACSTKTLITPSPPPSLSFLRRLRAPPCYSLLRDSLSPAVKSFSTRAARSSLNDPNPNYSNRPPKETILLDGCDFEHWLVVMEPPKEDATMDDIYDSYI

SEQ ID NO: 64878 - protein, 194 aa, Gossypium hirsutum
  Clone ID: GOSHI-09MAY01-C5222_2.pep
HASAHASAHASAYDPKYHEEWVSYYARANERNRRNDRPRNYDRSRNYERRRENMNTRDSQMPPQNQGMQNVAPKTAGMPPNNMGGMPPRNMGGMPPQNMGGMPPNNMGRMPPNNMGGMTPNQGWSGNMPGNAPNFQTGPNYGNAPGNAQNFQPGPGPNYGNTPYQGATPNAQYHQNNYPPNVGGGNMPGGNYQS

SEQ ID NO: 64879 - protein, 381 aa, Gossypium hirsutum
  unsure (1)..(381): unsure at all Xaa locations
  Clone ID: GOSHI-09MAY01-C5222_1.pep
MATQSLSRYLLSKPKSLTSFLFPSCRPFSSFSPAAAASPVKTLITSSPSPSLFFLRRLRAPLCYSLLLRDSLSPTVKSFSTRAARSSLNDPSPNYSNRPPKETILLDGCDFEHWLVVVEPPKEDATRDEIIDSYIKTLAQVVGSEDEARMKIYSVSTRHYYAFGALVSEELSYKIKELPGVRWVLPDSYLDVKNKDYGGEPFINGQAVPYDPKYHEEWVRNNARANERNRRNDRPRNYDRSRNYERRRENMNTRDSQMPPQNQGMQNVAPKTAGMPPNNMGGMPPPTRPPTRPPXGRPPNNMGGMTPNQGWSGNMPGNAPNFQTGPNYGNAPGNAQNFQPGPGPNYGNTPYQGATPNAQYHQNNYPPNVGGGNMPGGHYQS

SEQ ID NO: 64880 - protein, 151 aa, Gossypium hirsutum
  Clone ID: GOSHI-09MAY01-C6952_1.pep
MAQQQAQVKFTAVKPQLMVKTPKAVDAVNFYKSAFGAVEAGRSACCPPPTAEQNLPNILCAQLELAGCSFVVYNDDSAPQKIEGIGNQLCLETDDVEAAISKAVSAGAVVEGEVTEGGGACCGGRVGKVKDPYGYVWLICSPSNKCAPVEA

SEQ ID NO: 64881 - protein, 110 aa, Gossypium hirsutum
  Clone ID: GOSHI-09MAY01-C6582_3.pep
QVTKFKCGGVCLGLGFQHTLGDGTSAIHFINSWADTARGVPPAIAPFIDRTLLRARVPPMPKFHHLEYEPSAPLKAVESDLKPCTVSTFKLTVDQLNALKAKAAANSSGT

SEQ ID NO: 64882 - protein, 157 aa, Gossypium hirsutum
  Clone ID: GOSHI-09MAY01-C6582_2.pep
AHASAEFKHINKRRKRNLPGYFGNVIFTTALIAEAGDLETESFTDTIKRIHERLNQINDEYLRSAIDYIEKVPDLNTLVRGPHTFRCPNLVVVPWNWLPIYEADFGWGRPIYMGPGNVVQEGKIYMLPSPANDGSLTLAARLEIPHMKVFEKLIYEI

SEQ ID NO: 64883 - protein, 360 aa, Gossypium hirsutum
  unsure (1)..(360): unsure at all Xaa locations
  Clone ID: GOSHI-09MAY01-C6582_1.pep
MEITIKESAIVRPAEDTPKRSLWNSNLDIVMIRYHIPTVYYYKPNGSSDFFDTGRLKEALSKILVPFYPVAGRLGYDENGRLEIICNGEGVLFVEAETTAVMEHLIGAFAENHQVLRLVPKVDYSEGISSYPLILLQVTKFKCGGVCLGVGIQHTLGDGAAALHFINSWADTSRGLTPAIAPFIDRTLLRARDPPTPKLHHVEYDPSPALKSALKSQSDDHKPSIVSTFKLTADQLNTLKAKANVANANGGIKYSSFNXLAAHIWRWVSKARGLPADQDTKLYFPVDGRYRLDPPLPPGYFGNVIFTTALIAQAGNLETESFTDTIKRIHEGLNQINDEYLRSAIDYIEKVPDLNTLVRG

SEQ ID NO: 64884 - protein, 189 aa, Gossypium hirsutum
  Clone ID: GOSHI-09MAY01-C6552_1.pep
MSLLQSSVYPPSTLRSSPSLSCTAAHPIASSHRVPSTSNSFVALESSSLKTVNSISSAKNNRRKGVVGKVRSSLETAGATVGQVTEVTKDTFWPIVNAAGDKTVVLDMYTQWCGPCKVIAPKFQQLSEKYLDVVFLKLDCNQENKPLAKELGIRVVPTFKILKHNKIVKEVTGAKYDDLVAAIDTVRAT

SEQ ID NO: 64885 - protein, 119 aa, Gossypium hirsutum
  Clone ID: GOSHI-09MAY01-C6542_1.pep
MGSNSLKNPLLFSDEVEPGYVKNSSFLKSSVKWGLKIVMWVIFIAWVGVIFLYPGEIGSQLVEKIINATNGSVFGTSGSLFLVFSAPILLIAILAVAHLIISGEHVFEKSKSSKKPGFS

SEQ ID NO: 64886 - protein, 269 aa, Gossypium hirsutum
  Clone ID: GOSHI-09MAY01-C6492_1.pep
MEKAINRQQVLLNHLQPSSQSHQSPAAILFPSNCAAGDSAAYHRTAAFGDDVVIVAACRTAICKAKRGGFKDTLADDLLAPVLKAVIDRTKLNPSEVGDIVVGTVLAPGSQRASECRMAAFYAGFPDTVPIRTVNRQCSSGLQAVADVAACIKAGFYDIGIGAGLESMTTDGGAPGVPKVNPKVESFAQARDCLLPMGITSENVAEHYGVTRQEQDQAAVESHRRAAAATASGKFKDEIVPVLTKDWDPKTGEEKAATIIVDDGIRPNT

SEQ ID NO: 64887 - protein, 180 aa, Gossypium hirsutum
  Clone ID: LIB3585-034-P1-K1-F12.pep
MEKALNRQRVLLHHLRPSSSSSSHESAAALFPSNCAAGDSAAYHRTAAFGDDVVIVAACRTAICKAKRGGFKDTLADDLLAPVLKALIDRTKLDPSEVSDIVVGTVLAPGSQRGIECRMAAFYAGFPDTVPIRTVNRQCSSGLQAVADVAASIKAGFYDIGIGAGLESMTTDKVVPGVPK

SEQ ID NO: 64888 - protein, 86 aa, Gossypium hirsutum
  Clone ID: GOSHI-09MAY01-C6482_1.pep
MAFYVDEEEVWKCPSHPSKRRRTGICPVCLRDKLASLCPDCAHARPCSCITTSSSSSSSSSFSRFSTAAAGGNTGVGSVGRVSNLI

SEQ ID NO: 64889 - protein, 126 aa, Gossypium hirsutum
  unsure (1)..(126): unsure at all Xaa locations
  Clone ID: LIB3189-043-P1-K1-F8.pep
VRLALVAXTRAISPIPTISSRLVTFPGVGFCSGFSMEGRCEVLWGHRFVPAYVWGSTTIFLSLPFTFLNLFHKPKRKSNYFISQNEEPLRKYPNNDKKMKKGTYWSEKRGLMRWRRRFRGRSRTRR

SEQ ID NO: 64890 - protein, 92 aa, Gossypium hirsutum
  Clone ID: LIB3165-004-P1-K1-D2.pep
RNHEDLLPGVRPALVARNRAIFTITTISSRLVTFPGVGFCSGLSMEGRCKVLWGHRFVPAYVWGSTTIFLSLPFTFLNWSEKKGTDEVEEQI

SEQ ID NO: 64891 - protein, 139 aa, Gossypium hirsutum
  Clone ID: GOSHI-09MAY01-C6402_1.pep
HASVTVSIAVATAAMKTTTLSSLPFNQSVFGLKSQRKGRFTMASHKVTLITPSGTKQFDCSDGDYILDRAEEVGMDLPYSCRAGACSSCAGLIKQGTVDQSDNSFLDDELIDAGFVLTCVAIPKSDVIIETHKEEDLVS

SEQ ID NO: 64892 - protein, 111 aa, Gossypium hirsutum
  Clone ID: GOSHI-09MAY01-C6432_1.pep
SYPVSLQAFLPLSGPSLHFTMDWQGQKLAEQIMQIMLLVFAVTAFVAGYVLGSFQMMVLVYAGSVTLTGLITIPNWPFFNRHPLNWLDPSEAEKHPKPQVTVISKKKGSKK

SEQ ID NO: 64893 - protein, 431 aa, Gossypium hirsutum
  Clone ID: GOSHI-09MAY01-C6662_1.pep
MAQLLAPSTQWQMTLPKTSTYGSPIATKMWSSLVLKQNKKGAAKSSGKFKVVALSENSTVNRLENLLNMDVTPYTDKIIAEYIWIGGSGLDMRSKSRTISKPVKHPSELPKWNYDGSSTGQAPGEDSEVILYPQAIFKDPFRGGNNILVICDSYTPAGEPIPTNKRHRAAEIFSNKKVVDEVPWFGIEQEYTLLQQNVKWPLGWPVGGYPGPQGPYYCAAGADKSFGRDISDAHYKACLYAGINISGTNGEVMPGQWEYQVGPSVGIEAGDHIWCSRYILERITEQAGVVLSLDPKPIKGAARPPASPPNYSTISMREDGGFEVIKKAILNLSLRHKEHISAYGEGNERRLTGKHETASINTFSWGVANRGCSIRVGRDTEKNGKGYLEDRRPASNMDPYVVTALLAETTLLYEPTLEAEALAAQKIALNV

SEQ ID NO: 64894 - protein, 103 aa, Gossypium hirsutum
  unsure (1)..(103): unsure at all Xaa locations
  Clone ID: LIB3120-048-P1-K1-D7.pep
TVRIPGRPTACAHAVLMPGHERVLTVGASVGIEXGDHIWCDRYILERITEHAGVVLXLDPKPIEGDWNGAGCHTNYSTKSMREDGGFEGIKKAILNLSFRHKE

SEQ ID NO: 64895 - protein, 78 aa, Gossypium hirsutum
  unsure (1)..(78): unsure at all Xaa locations
  Clone ID: LIB3146-048-Q1-K1-B11.pep
GADQRVRPNYSTNILRFYLGLKTIKKARVNLSLHHKEHINAYGEGYQRRLSGXHETASINTXIMGVANRGCSIRVGRD

SEQ ID NO: 64896 - protein, 200 aa, Gossypium hirsutum
  Clone ID: GOSHI-09MAY01-C6632_1.pep
PRVRWVQAAAALSNMGMFLAEMSSDSFQLEGMASRGMLPELFAKRSRYGTPLVGILFSASGVILLSWLSFQEIIAAENFLYCFGMIMEFIAFVKLRVDRPAESRPYKIPVGTAGAILMCIPPTLLILVVLAIASFKVMVVSTVAVMIGLALEPCLRYSERKRWLKFTMNPDLYDLRSPYQECNKKHMLLCFFYVSSSCFS

SEQ ID NO: 64897 - protein, 67 aa, Gossypium hirsutum
  Clone ID: GOSHI-09MAY01-C106619_1.pep
MTTKRAYKLQEFVAHSSSVNCLKIGRKSSRVLVTGGEDHKVNLWAIGKPNAILSLSGHTSGIDSVSF

SEQ ID NO: 64898 - protein, 292 aa, Gossypium hirsutum
  Clone ID: GOSHI-09MAY01-C6622_1.pep
MASAANCVVYFSSNTNYLTVSELKNHSLPATFVSRPPNNYTLGKRSHYSVRLLSSTTGINPRAAAPSATAVENDGSFPDTDMVPTPKVIIDQDSDPDATVVEITFGDRLGALLDTMNALKSLGLNVTKANVYLDSSGKHNKFCITKASTGRKVEEPELLEAIRLTIINNLLEFHPESSSQLAMGATFGAEPPKETVDVDIATRIRVHDDGPDRSLLYVETAVHPGLLVELVKTITDINVAVESGEFDPEGLLAKAKFHVSYKGKALIKPLQQVLANSLRYYLRRPTTEEASF

SEQ ID NO: 64899 - protein, 66 aa, Gossypium hirsutum
  Clone ID: LIB3165-046-Q1-K1-D4.pep
KLCISVSMAVAAIAVYDWPESWPDLLPFLLKLIGDQTRMNGVKKYGICALINTIAFCFLILNIFSS

SEQ ID NO: 64900 - protein, 306 aa, Gossypium hirsutum
  unsure (1)..(306): unsure at all Xaa locations
  Clone ID: GOSHI-09MAY01-C6192_1.pep
GIDQAFVQEPEQRPKSSTIEVDGIPVIDMSVSGTGGIEKRAPVRPRARPRGRFFQVINHGVPLELRQRVVKVAKAFFDLPIEEKRKAKRDDLNFTGYHDEEHTKNVRDWKEVFDMLIEDPTFLPASPDPDDEEIRTYSNKWPENPPEFRETCQEYCREVEKLAFKLLELISLSLGLPANRLSDFFKHQTGMLRLNYYPPCPSPELALGVGRHRDGGALTVLAQDDVGGLQIRRHSDGEWIPIKPIPNAYIINIADALQDWSNDLYVSAEHRVVVKFEQERFSIPLFSFPSHYGKVXPLDELVNEQN

SEQ ID NO: 64901 - protein, 63 aa, Gossypium hirsutum
  Clone ID: LIB3585-048-Q6-K1-D5.pep
MPKVRRDRSLSSDRCRRSPFSCHQSSPKFPSETEENLKEWEDARCPVCMEHPHNAILLVCSSH

SEQ ID NO: 64902 - protein, 69 aa, Gossypium hirsutum
  unsure (1)..(69): unsure at all Xaa locations
  Clone ID: LIB3145-047-Q1-K1-H6.pep
SFGFPFSYIVSLLGIFFIYFYLLAFSQFFFLLNLILFNALTSDGVMFCILISQFLPSQRSSNLALVXAR

SEQ ID NO: 64903 - protein, 156 aa, Gossypium hirsutum
  unsure (1)..(156): unsure at all Xaa locations
  Clone ID: GOSHI-09MAY01-C6152_1.pep
FTYDHIYGTKVXGTIFDRFGXRRHTAAELLASANPKMLTVLVYAPVQKVLFDKSAGKRPKAMGVMFKDENGNQHQAFLTNNRRSEVILSCGAIGTPQLLMLSGIGPKAELQRLNISMGLHNEFVGKGMADNPMNSVFVPMTRSVEQSMIQTGGITN

SEQ ID NO: 64904 - protein, 214 aa, Gossypium hirsutum
  Clone ID: GOSHI-09MAY01-C6102_1.pep
VRTTYNEVADELVAEFADPGNRVASPDQQQFDERNIRRRVYDALNVLMAMDIISKDKKEIQGKGRPRTGLSDIEDLKTERLGLRNRIDKKAAYLHELEEQFVGLQNLIQRNEQLYSSGNASGGGVALPFILVQTRPHATVEVEISEDMQLVHFDFNSTPFELHDDNYVLKAMKFCERPQTDEMAHNFSADGEGSSMSAMYQQQILAPPRTITPG

SEQ ID NO: 64905 - protein, 229 aa, Gossypium hirsutum
  unsure (1)..(229): unsure at all Xaa locations
  Clone ID: GOSHI-09MAY01-C6082_1.pep
MAEKSFPLLQHGYKDVVFSDSGVKIVECSFSLKRVSLKANGFFASVNQAGMGFAISPNPQIPLQSTAKFHFASLVSISEPGYLVLDDELEIAERLVEKKKKKKSGFKFRIKIGNASLRKLMSGAVAGAVSRTAVAPLETIKTHLMVGSCGNSMAEVFDNITMSEGWKGLFRGNLVNVIRVASSKAIGLFAYKTVKKQLTAXHGLHSKIILPALFIVGAVAGSYVRHCFT

SEQ ID NO: 64906 - protein, 92 aa, Gossypium hirsutum
  Clone ID: LIB3543-028-Q1-K6-H3.pep
MAEKSFPLLQHGYKDVVFSDSGVKIVECSFSLKRVSLKANGFFASVNQAGMGFAISPNPQIPLQSTAKFHFASLVSISEPGYLVLDDELEIA

SEQ ID NO: 64907 - protein, 179 aa, Gossypium hirsutum
  Clone ID: LIB3543-038-Q1-K1-H8.pep
KSFPLLQHGYKDVVFSDSGVKIVECSFSLKRVSLKANGFFASVNQAGMGFAISPNPQIPLQSTAKFHFASLVSISEPGYLVLDDELEIAERLVEKKKKKKSGFKFRIKIGNASLRKLMSGAVAGAVSRTAVAPLETIKTHLMVGSCGNSMAEVFDNITMSEGWKGLFRGNLVNVIRVAP

SEQ ID NO: 64908 - protein, 84 aa, Gossypium hirsutum
  Clone ID: LIB3585-047-Q6-K1-B7.pep
PILYFLYVLEQRPNESKGTHLPNGDISVSNSKFHNKNEPSSAKKYFHYNGQLVHQHNMLQNYVRTRTSYAAVIENPVDFTTLCC

SEQ ID NO: 64909 - protein, 95 aa, Gossypium hirsutum
  Clone ID: GOSHI-09MAY01-C6052_2.pep
SVVKGIFDAAYNSYMMTSVTGIIFRDCEGHILATCTYPNTFVVDATTAEARACLQKVVVVEDLGFRNLEVERDSCQFTGRSMNHAAHIMTEEGKR

SEQ ID NO: 64910 - protein, 66 aa, Gossypium hirsutum
  Clone ID: LIB3543-066-Q6-K6-H6.pep
ECTYIKCVPNTFVVDATTAEARACLQKVVVVEDLGFRNLEVERDSCQFTGRSMNHAAHIMTEEGKR

SEQ ID NO: 64911 - protein, 47 aa, Gossypium hirsutum
  Clone ID: LIB3582-016-P1-K1-F5.pep
ARKIKIIFWRIANNFLPTFNNLKNRNLQVVNLCPLCRTMEQSVSHVF

SEQ ID NO: 64912 - protein, 161 aa, Gossypium hirsutum
  Clone ID: GOSHI-09MAY01-C106019_1.pep
NSACKQYKRAAQYICFENGKSLLEVLRACRRGPLHTLEATIQNIIRAVPEQKCFTCRRCKGSFPVIHVGQVGPLCNSCVELKKSQCITMSSPSVGTRSQEPVSMLQSFGSAPLSVSPQNRSQRKKASKSSELDLTSNSPQCSSSSISSQNRRPWKTTGKLT

SEQ ID NO: 64913 - protein, 128 aa, Gossypium hirsutum
  Clone ID: GOSHI-09MAY01-C6392_1.pep
MKATLPTPHLRSFPSPTPLSFKLSFAFPETRRKSLSISSTPKGTPSPSLAYVPLRVSASSQAAAAPTVNLTAIPTEMKAWVYGEYGGVDVLKLDDKVSVPEVKEDEVLIKVAAGALNPVDAKRRQGKF

SEQ ID NO: 64914 - protein, 262 aa, Gossypium hirsutum
  unsure (1)..(262): unsure at all Xaa locations
  Clone ID: GOSHI-09MAY01-C6382_2.pep
MASAACFLHHHALTTNGRSSSLSPSLRQVSNMKPTQQVVCKAQKQEDDGSLVSRRLALTVLIGAAAVGSKVSPADAAYGEAANVFGKPKTDTDFMPYSGDGFKLSIPSKWNPSKEVEFPGQVLRYEDNFDTTSNLSVMITPTDKKSSAVYCSPEEFLSSVXYLLGKHAVFGKTDSEGGFDSGAVATANILESSSSTVGGKPYYFLSVLTRTADXDEGGKHQLITATVYNGKLYICKAQSVDKRWFKGARKFVESAASSFSGA

SEQ ID NO: 64915 - protein, 268 aa, Gossypium hirsutum
  Clone ID: GOSHI-09MAY01-C6382_1.pep
TACFLHHHALTSAPRSSSTPPFTSQRQVAIVKSNQLLACTSQKQAVQENDDSGSLAVISRTLALTVLIGAAAVGSKVSPADAAYREAANVFGKPKTNTEFIPYNGEGFKLSIPSKWNPSKEVEYPGQVLRYEDNFDSTTNVAVLVTPTDKKSITDFGSPENFLSKVDYLLGKQAYSGLTDAEGGFDSNAVATANILETSTPVIGGKQYYFLSVLTRTADGDEGGKHQLITATVNNGKLYICKAQAGDKRWFKGARKFVESAANSFKCA

SEQ ID NO: 64916 - protein, 72 aa, Gossypium hirsutum
  unsure (1)..(72): unsure at all Xaa locations
  Clone ID: LIB3120-039-P1-K1-F6.pep
RIPGRGRVRPHLSSVDYLILKHAYFGKTDGEGGFDXGAVATANILESSSSTVGGKPYYFLSVLTRTADGDEG

SEQ ID NO: 64917 - protein, 136 aa, Gossypium hirsutum
  Clone ID: GOSHI-09MAY01-C6352_1.pep
MEFSSEANQRIARLAAHLQPQMEESSILRRADCRAKGGSPGFKVAILGAAGGIGQPLAMLMKMNPLVSVLHLYDVVNSPGVTADLSHMDTGAVVRGFLGQPQLESALTGMDLVIIPAGVPRKPGMTRDDLFNINAG

SEQ ID NO: 64918 - protein, 244 aa, Gossypium hirsutum
  unsure (1)..(244): unsure at all Xaa locations
  Clone ID: GOSHI-09MAY01-C6342_1.pep
MVQTNQSGSGNDFKLVGFSNFVRSNPKSDRFTVKRFHHIEFWCTDATNVARRFSWGLGMQFVAKSDLSTGNLTHASYLLRSGDLNFLFTAPYSPSIAVAQNLSPQSTASIPSFDHSLCRSFAATHGLGVRAIAIEVDDAETAFTTSVTHGALPFSPPTPLGDVATIAEVKLYGDVGLRYVSYTTTINSDHDFSPGFEKIEDALSYPLDYGLRRLDHXAVGNVPELGPAVSYVKSFTGFHEFAEF

SEQ ID NO: 64919 - protein, 64 aa, Gossypium hirsutum
  unsure (1)..(64): unsure at all Xaa locations
  Clone ID: LIB3189-011-P1-K1-H4.pep
MVQTNQSGSGNDFKLVGFXMCVRSNPKSDRFTVKRFHHIEFWCTDATNVARRFSWRLRLHNRGL

SEQ ID NO: 64920 - protein, 56 aa, Gossypium hirsutum
  Clone ID: GOSHI-09MAY01-C6312_5.pep
MGHSNGWNSHPKTYGPGSRACRVCGNPHAIIRKYGLMCCRQCFRSNAKEIGFIKYR

SEQ ID NO: 64921 - protein, 56 aa, Gossypium hirsutum
  Clone ID: GOSHI-09MAY01-C6312_3.pep
MGHSNVWNSHPKTYGPGSRACRVCGNPHAIIRKYGLMCCRQCFRSNAKEIGFIKYR

SEQ ID NO: 64922 - protein, 56 aa, Gossypium hirsutum; identical to SEQ ID NO: 64921
  Clone ID: GOSHI-09MAY01-C6312_1.pep

SEQ ID NO: 64923 - protein, 52 aa, Gossypium hirsutum
  unsure (1)..(52): unsure at all Xaa locations
  Clone ID: LIB3189-007-P1-K1-A5.pep
MSGTQTPKPSTLAVTASRECGNPHLIIRKYXLICCRQCFRSNAKEIGFIKYR

SEQ ID NO: 64924 - protein, 58 aa, Gossypium hirsutum
  Clone ID: LIB3148-033-Q1-K1-H3.pep
FPSAKPPLGVFFASIAPRLQPRYYSISSSPRMAPSRIHVTCALVYEKTPTGRIHKGVF

SEQ ID NO: 64925 - protein, 50 aa, Gossypium hirsutum
  Clone ID: uC-gsronu33B171c05b1.pep
PTRPPTRPPTRPRACRVCGNPHAIIRKYGLMCCRQCFRSNAKEIGFIKYR

SEQ ID NO: 64926 - protein, 66 aa, Gossypium hirsutum
  Clone ID: LIB3148-006-Q1-K1-G6.pep
PYKHSSAVLNESNFLGIARKHCLQHMSLVFLDYGMRVFHTFVFVLHPGFFVFFVIVKYVFYFFFFI

SEQ ID NO: 64927 - protein, 55 aa, Gossypium hirsutum
  unsure (1)..(55): unsure at all Xaa locations
  Clone ID: LIB3543-013-Q1-K6-C6.pep
PTPSANSHPKXYGPGFSRLSRVXXNPHAIIRKYGLMCCRQCFRSNAKEIGFIKYR

SEQ ID NO: 64928 - protein, 118 aa, Gossypium hirsutum
  unsure (1)..(118): unsure at all Xaa locations
  Clone ID: LIB3145-039-Q1-K1-G5.pep
IHQIYFXKKENTKLNQYDYFIEEPQSILSSTITLVIHQNKTASCSFKFKKIKIITYYRRLIEGQSPSYFTPYKILQRYLMNPISLALLRKHCLQHMTPYFLMMAWGYDGLNICNIFFR

SEQ ID NO: 64929 - protein, 54 aa, Gossypium hirsutum
  unsure (1)..(54): unsure at all Xaa locations
  Clone ID: LIB3543-041-Q1-K6-G10.pep
AFAQRPPTRGGEGGASSRCRVCGNPHAIIRKYGLMCCRQCFRSNAKXIGFIKYR

SEQ ID NO: 64930 - protein, 139 aa, Gossypium hirsutum
  Clone ID: GOSHI-09MAY01-C6302_1.pep
MSKLVVLQPTKQPPISLLSSSLSHFNGTKLCQIQYKRKVYQPKGALHVAASSTKKILIMGGTRFIGVFLSRLLVKEGHQVTLFTRGKAPVTQQLPGESDSDYAEFKSKILHLKGDRMDFDFVKSSLSAEGYDVVYDING

SEQ ID NO: 64931 - protein, 140 aa, Gossypium hirsutum
  Clone ID: GOSHI-09MAY01-C6332_1.pep
MNASLRGRHANCKSTAADYAAVNAGDVKLRASMTDARIVNGPSLNGLTFAIKKPGFYRYVPQKLMNTFRFAKNPLKLSYGRKREDKRTVVDGALVFDSGSQVSASYMIGTRNCKLKYSYLHGGVTTLEPCYDLGKNVWGF

SEQ ID NO: 64932 - protein, 147 aa, Gossypium hirsutum
  Clone ID: GOSHI-09MAY01-C6252_1.pep
MGMMASVSSMEFWCILNLRATLITLLLILFFHLSKKLYSKFFPPPSVLHLPSPSSSTSLPESQSRIPEIVSDSDLKFLIDNLDEKLDEDEKWETVIDKKTNSLSYKAKCCRPKNKPLKYLSTTVFEGCSPELLRDFYMDNNYRKQWD
